(19) United States
(12) Patent Application Publication
(10) Pub. No.: US 2020/0040061 A1
(43) Pub. Date: Feb. 6, 2020

(54) MATERIALS AND METHODS FOR TREATMENT OF EARLY ONSET PARKINSON'S DISEASE (PARK1) AND OTHER SYNUCLEIN, ALPHA (SNCA) GENE RELATED CONDITIONS OR DISORDERS

(71) Applicant: CRISPR THERAPEUTICS AG, Zug (CH)

(72) Inventors: Ante Sven LUNDBERG, Cambridge, MA (US); Samarth KULKARNI, Cambridge, MA (US); Lawrence KLEIN, Cambridge, MA (US); Hari Kumar PADMANABHAN, Cambridge, MA (US)

(73) Assignee: CRISPR THERAPEUTICS AG, Zug (CH)

(21) Appl. No.: 16/487,659

(22) PCT Filed: Feb. 16, 2018
(86) PCT No.: PCT/IB2018/050974

§ 371 Date: Aug. 21, 2019

Related U.S. Application Data
(60) Provisional application No. 62/461,860, filed on Feb. 22, 2017.

(51) Int. Cl. C07K 14/715; C12N 15/90; C12N 9/22; C12N 15/86; A61K 48/00

(52) U.S. Cl. CPC C07K 14/7155; C12N 15/907; C12N 9/22; B82Y 5/00; A61K 48/0066; A61K 48/0075; A61K 48/0083; C12N 15/86

(57) ABSTRACT

The present disclosure provides materials and methods for treating a patient with one or more conditions or disorders associated with SNCA whether ex vivo or in vivo. For example, the present disclosure provides materials and methods for treating a patient with Early Onset Parkinson's Disease (PARK1). Also provided are materials and methods for editing a SNCA gene in a cell by genome editing. The present disclosure also provides materials and methods for altering the contiguous genomic sequence of a SNCA gene in a cell. In addition, the present disclosure provides one or more gRNAs for editing a SNCA gene. Also provided are therapeutics comprising at least one or more gRNAs for editing a SNCA gene. In addition, the present disclosure provides therapeutics for treating patients with a SNCA related condition or disorder.

### RELATED APPLICATIONS

[0001] This application claims the benefit of U.S. Provisional Application No. 62/461,860 filed Feb. 22, 2017, which is incorporated herein in its entirety by reference.

### FIELD

[0002] The present disclosure provides materials and methods for treating a patient with Early Onset Parkinson's Disease (PARK1) and other Synuclein, Alpha (SNCA) gene related conditions or disorders, both ex vivo and in vivo.

### INCORPORATION BY REFERENCE OF SEQUENCE LISTING

[0003] This application contains a Sequence Listing in computer readable form [filename: 170148PCT_Sequence_Listing_Part_1: 18,901,904 bytes—ASCII text file; created Feb. 15, 2018; and 170148PCT_Sequence_Listing_Part_2: 17,014,111 bytes—ASCII text file; created Feb. 15, 2018], which is incorporated herein by reference in its entirety and forms part of the disclosure.

### BACKGROUND

[0004] Genome engineering refers to the strategies and techniques for the targeted, specific modification of the genetic information (genome) of living organisms. Genome engineering is a very active field of research because of the wide range of possible applications, particularly in the areas of human health. For example, genome engineering can be used to alter (e.g., correct or knock-out) a gene carrying a harmful mutation or to explore the function of a gene. Early technologies developed to insert a transgene into a living cell were often limited by the random nature of the insertion of the new sequence into the genome. Random insertions into the genome may result in disrupting normal regulation of neighboring genes leading to severe unwanted effects. Furthermore, random integration technologies offer little reproducibility, as there is no guarantee that the sequence would be inserted at the same place in two different cells. Recent genome engineering strategies, such as zinc finger nucleases (ZFNs), transcription activator like effector nucleases (TALENs), homing endonucleases (HEs) and MegaTALs, enable a specific area of the DNA to be modified, thereby increasing the precision of the alteration compared to early technologies. These newer platforms offer a much larger degree of reproducibility, but still have their limitations.

[0005] Despite efforts from researchers and medical professionals worldwide who have been trying to address genetic disorders, there still remains a critical need for developing safe and effective treatments for SNCA related disorders and conditions.

### SUMMARY

[0006] The present disclosure presents an approach to address the genetic basis of diseases related to the Synuclein, Alpha (SNCA) gene. Provided herein are cellular, ex vivo and in vivo methods for creating permanent changes to the genome of human cells that can result in insertions, deletions or mutations of at least one nucleotide, or otherwise correcting one or more mutations or replacing one or more exons and/or introns within or near the Synuclein, Alpha (SNCA) gene or other DNA sequences that encode regulatory elements of the SNCA gene by genome editing. Such methods can reduce or eliminate the expression or function of aberrant SNCA gene products, which can be used to treat a SNCA related condition or disorder, such as Early Onset Parkinson's disease (PARK1), with as few as a single treatment.

[0007] Provided herein is a method for editing a SNCA gene in a cell by genome editing. The method can comprise: introducing into the cell one or more deoxyribonucleic acid (DNA) endonucleases to effect one or more single-strand breaks (SSBs) or double-strand breaks (DSBs) within or near the SNCA gene or SNCA regulatory elements that results in one or more permanent insertions, deletions or mutations of at least one nucleotide, correction of one or more mutations or replacement of one or more exons and/or introns within or near the SNCA gene, thereby reducing or eliminating the expression or function of aberrant SNCA gene products.

[0008] Also provided herein is a method for editing a SNCA gene in a cell by genome editing. The method can comprise: introducing into the cell one or more DNA endonucleases to effect one or more SSBs or DSBs within or near the SNCA gene or SNCA regulatory elements that results in one or more permanent insertions, deletions or mutations of at least one nucleotide or replacement of one or more exons and/or introns within or near the SNCA gene, thereby reducing or eliminating the expression of the SNCA gene.

[0009] Also provided herein is an ex vivo method for treating a patient having a SNCA related condition or disorder. The method can comprise: editing a patient specific induced pluripotent stem cell (iPSC) within or near a SNCA gene or other DNA sequences that encode regulatory elements of the SNCA gene; differentiating the edited iPSC into a neuron or glial cell of the Central Nervous System (CNS), or a neuron of the Peripheral Nervous System (PNS); and implanting the neuron or glial cell of the CNS, or neuron of the PNS into the patient.

[0010] The editing step can comprise introducing into the iPSC one or more DNA endonucleases to effect one or more SSBs or DSBs within or near the SNCA gene or SNCA regulatory elements that results in one or more permanent insertions, deletions or mutations of at least one nucleotide, correction of one or more mutations or replacement of one or more exons and/or introns within or near the SNCA gene, thereby reducing or eliminating the expression or function of aberrant SNCA gene products.

[0011] The editing step can comprise introducing into the iPSC one or more DNA endonucleases to effect one or more SSBs or DSBs within or near the SNCA gene or SNCA regulatory elements that results in one or more permanent insertions, deletions or mutations of at least one nucleotide or replacement of one or more exons and/or introns within or near the SNCA gene, thereby reducing or eliminating the expression of the SNCA gene.

[0012] The method can further comprise: creating the iPSC. The creating step can comprise: isolating a somatic cell from the patient; and introducing a set of pluripotency-associated genes into the somatic cell to induce the somatic cell to become the iPSC. The somatic cell can be a fibroblast. The set of pluripotency-associated genes can be one or more of the genes selected from the group consisting of: OCT4, SOX2, KLF4, Lin28, NANOG and cMYC.

[0013] Also provided herein is an ex vivo method for treating a patient having a SNCA related condition or disorder. The method can comprise: editing a mesenchymal stem cell within or near a SNCA gene or other DNA sequences that encode regulatory elements of the SNCA gene; differentiating the edited mesenchymal stem cell into a neuron or glial cell of the CNS, or a neuron of the PNS; and implanting the neuron or glial cell of the CNS, or neuron of the PNS into the patient.

[0014] The editing step can comprise: introducing into the mesenchymal stem cell one or more DNA endonucleases to effect one or more SSBs or DSBs within or near the SNCA gene or SNCA regulatory elements that results in one or more permanent insertions, deletions or mutations of at least one nucleotide, correction of one or more mutations or replacement of one or more exons and/or introns within or near the SNCA gene, thereby reducing or eliminating the expression or function of aberrant SNCA gene products.

[0015] The editing step can comprise: introducing into the mesenchymal stem cell one or more DNA endonucleases to effect one or more SSBs or DSBs within or near the SNCA gene or SNCA regulatory elements that results in one or more permanent insertions, deletions or mutations of at least one nucleotide or replacement of one or more exons and/or introns within or near the SNCA gene, thereby reducing or eliminating the expression of the SNCA gene.

[0016] The method can further comprise: isolating the mesenchymal stem cell from the patient, wherein the mesenchymal stem cell is isolated from the patient's bone marrow or peripheral blood. The isolating step can comprise: aspiration of bone marrow and isolation of mesenchymal stem cells using density gradient centrifugation media.

[0017] Also provided herein is an in vivo method for treating a patient with a SNCA related condition or disorder. The method can comprise: editing the SNCA gene in a cell of the patient.

[0018] The editing step can comprise introducing into the cell one or more DNA endonucleases to effect one or more SSBs or DSBs within or near the SNCA gene or SNCA regulatory elements that results in one or more permanent insertions, deletions or mutations of at least one nucleotide, correction of one or more mutations or replacement of one or more exons and/or introns within or near the SNCA gene, thereby reducing or eliminating the expression or function of aberrant SNCA gene products.

[0019] The editing step can comprise introducing into the cell one or more DNA endonucleases to effect one or more SSBs or DSBs within or near the SNCA gene or SNCA regulatory elements that results in one or more permanent insertions, deletions or mutations of at least one nucleotide or replacement of one or more exons and/or introns within or near the SNCA gene, thereby reducing or eliminating the expression of the SNCA gene.

[0020] The cell can be a cell of the CNS. The cell of the CNS can be a glial cell. The cell of the CNS can be a neuron. The one or more DNA endonuclease can be delivered to the cell of the CNS via any administration route selected from the group consisting of intraparenchymal, intravenous, intra-arterial, intracerebroventricular, intracisternal, intrathecal, intracranial or intraperitoneal routes. The SNCA related condition or disorder can be PARK1.

[0021] Also provided herein is a method of altering the contiguous genomic sequence of a SNCA gene in a cell. The method can comprise: contacting the cell with one or more DNA endonuclease to effect one or more SSBs or DSBs.

[0022] The alteration of the contiguous genomic sequence can occur in one or more exons of the SNCA gene. The alteration of the contiguous genomic sequence can occur in intron 1, exon 2, intron 2, exon 3, or intron 3 of the SNCA gene. The alteration of the contiguous genomic sequence can occur in the 5′UTR and/or the genomic sequence 3′ of the SNCA gene. The alteration of the contiguous genomic sequence can occur in an enhancer region. The alteration can result in one or more permanent insertions, deletions or mutations of at least one nucleotide, correction of one or more mutations or replacement of one or more exons and/or introns within or near the SNCA gene, thereby reducing or eliminating the expression or function of aberrant SNCA gene products. The alteration can result in one or more permanent insertions, deletions or mutations of at least one nucleotide or replacement of one or more exons and/or introns within or near the SNCA gene, thereby reducing or eliminating the expression of the SNCA gene. The one or more permanent insertion can occur in intron 1, exon 2, intron 2, exon 3, or intron 3 of the SNCA gene.

[0023] The one or more DNA endonuclease can be selected from any of those sequences in SEQ ID NOs: 1-620 and variants having at least 90% homology to any of those sequences disclosed in SEQ ID NOs: 1-620. The one or more DNA endonuclease can be one or more protein or polypeptide. The one or more protein or polypeptide can be flanked at the N-terminus, the C-terminus, or both the N-terminus and C-terminus by one or more nuclear localization signals (NLSs). The one or more protein or polypeptide can be flanked by two NLSs, one NLS located at the N-terminus and the second NLS located at the C-terminus. The one or more NLSs can be a SV40 NLS. The one or more DNA endonuclease can be one or more polynucleotide encoding the one or more DNA endonuclease. The one or more DNA endonuclease can be one or more ribonucleic acid (RNA) encoding the one or more DNA endonuclease. The one or more RNA can be one or more chemically modified RNA. The one or more polynucleotide or one or more RNA can be codon optimized.

[0024] The method can further comprise introducing into the cell one or more gRNA or one or more sgRNA.

[0025] The one or more gRNA or one or more sgRNA can comprise a spacer sequence that is complementary to a DNA sequence within or near intron 1, exon 2, intron 2, exon 3, or intron 3 of the SNCA gene. The one or more gRNA or one or more sgRNA can comprise a spacer sequence that is complementary to a segment of the coding sequence of the SNCA gene. The one or more gRNA or one or more sgRNA can comprise a spacer sequence that is complementary to a sequence flanking the SNCA gene or other sequence that encodes a regulatory element of the SNCA gene. The one or more gRNA or one or more sgRNA can be chemically modified. The one or more modified sgRNAs can comprise three 2′-O-methyl-phosphorothioate residues at or near each of its 5′ and 3′ ends. The one or more gRNA or one or more sgRNA can comprise a RNA sequence corresponding to a sequence selected from the group consisting of SEQ ID NOs: 39264, 39391, 26402, 83978, 83976, 39436, 83974, 83979, 26183, 83980, 26206, 26348, 26180, 39292, 83971, 26247, 83975, 39446, 83973, 26269, 26385, 26401, 83972, 39260, 26188, 39389, 83977, 39332, 26285, 39293, 39341, 39364, 26322, 26347, 39334, and 39304.

[0026] The one or more gRNA or one or more sgRNA can be pre-complexed with the one or more DNA endonuclease to form one or more ribonucleoproteins (RNPs). The pre-complexing can involve a covalent attachment of the one or more gRNA or one or more sgRNA to the one or more DNA endonuclease. The weight ratio of sgRNA to DNA endonuclease in the RNP can be 1:1. The one or more DNA endonuclease can be formulated in a liposome or lipid nanoparticle. The one or more DNA endonuclease can be formulated in a liposome or lipid nanoparticle which also comprises the one or more gRNA or one or more sgRNA. The one or more DNA endonuclease can be encoded in an AAV vector particle. The one or more gRNA or one or more sgRNA can be encoded in an AAV vector particle. The one or more DNA endonuclease can be encoded in an AAV vector particle which also encodes the one or more gRNA or one or more sgRNA. The AAV vector particle can be selected from the group consisting of any of those sequences disclosed in SEQ ID NOs: 4734-5302 and Table 2.

[0027] The method can further comprise introducing into the cell a donor template comprising at least a portion of the wild-type SNCA gene. The at least a portion of the wild-type SNCA gene can comprise one or more sequences selected from the group consisting of: a SNCA exon, a SNCA intron, and a sequence comprising an exon:intron junction of SNCA. The donor template can comprise homologous arms to the genomic locus of the SNCA gene. The donor template can be either a single or double stranded polynucleotide. The donor template can be encoded in an AAV vector particle, where the AAV vector particle is selected from the group consisting of any of those sequence disclosed in SEQ ID NOs: 4734-5302 and Table 2.

[0028] The one or more polynucleotide encoding one or more DNA endonuclease can be formulated into a lipid nanoparticle, and the one or more gRNA or one or more sgRNA can be delivered to the cell ex vivo by electroporation and the donor template can be delivered to the cell by an AAV vector. The one or more polynucleotide encoding one or more DNA endonuclease can be formulated into a liposome or lipid nanoparticle which also comprises the one or more gRNA or one or more sgRNA and the donor template.

[0029] The SNCA gene can be located on Chromosome 4: 89,724,099-89,838,315 (Genome Reference Consortium—GRCh38).

[0030] Also provided herein is a single-molecule guide RNA comprising at least a spacer sequence that is an RNA sequence corresponding to any one of SEQ ID NOs: 5305-83,935.

[0031] The single-molecule guide RNA can further comprise a spacer extension region. The single-molecule guide RNA can further comprise a tracrRNA extension region. The single-molecule guide RNA can be chemically modified. The single-molecule guide RNA can be pre-complexed with a DNA endonuclease. The DNA endonuclease can be a Cas9 or Cpf1 endonuclease. The Cas9 or Cpf1 endonuclease can be selected from the group consisting of: S. pyogenes Cas9, S. aureus Cas9, N. meningitidis Cas9, S. thermophilus CRISPR1 Cas9, S. thermophilus CRISPR 3 Cas9, T. denticola Cas9, L. bacterium ND2006 Cpf1 and Acidaminococcus sp. BV3L6 Cpf1, and variants having at least 90% homology to the endonucleases. The Cas9 or Cpf1 endonuclease can comprise one or more nuclear localization signals (NLSs). At least one NLS can be at or within 50 amino acids of the amino-terminus of the Cas9 or Cpf1 endonuclease and/or at least one NLS can be at or within 50 amino acids of the carboxy-terminus of the Cas9 or Cpf1 endonuclease.

[0032] Also provided herein is a DNA encoding the single-molecule guide RNA.

[0033] Also provided herein is a therapeutic comprising at least one or more gRNAs for editing a SNCA gene in a cell from a patient with a SNCA related condition or disorder, the one or more gRNAs comprising a spacer sequence selected from the group consisting of nucleic acid sequences in any one of SEQ ID NOs: 5305-83,935 of the Sequence Listing.

[0034] Also provided herein is a therapeutic for treating a patient with an SNCA related condition or disorder formed by the method comprising: introducing one or more DNA endonucleases; introducing one or more gRNA or one or more sgRNA for editing a SNCA gene; wherein the one or more gRNAs or sgRNAs comprise a spacer sequence selected from the group consisting of nucleic acid sequences in SEQ ID NOs: 5305-83,935 of the Sequence Listing.

[0035] The SNCA related condition or disorder can be PARK1.

[0036] It is understood that the inventions described in this specification are not limited to the examples summarized in this Summary. Various other aspects are described and exemplified herein.

### BRIEF DESCRIPTION OF THE DRAWINGS

[0037] Various aspects of materials and methods disclosed and described in this specification can be better understood by reference to the accompanying figures, in which:

[0038] FIGS. 1A-B depict the type II CRISPR/Cas system;

[0039] FIG. 1A is a depiction of the type II CRISPR/Cas system including gRNA;

[0040] FIG. 1B is another depiction of the type II CRISPR/Cas system including sgRNA;

[0041] FIGS. 2A-B describe the cutting efficiencies in the range of 0.7-99.5% of S. pyogenes gRNAs selected via an in-vitro transcribed (IVT) gRNA screen in HEK293T cells;

[0042] FIG. 2A describe the cutting efficiencies in the range of 60.3-99.5% of S. pyogenes gRNAs selected via an in-vitro transcribed (IVT) gRNA screen in HEK293T cells;

[0043] FIG. 2B describe the cutting efficiencies in the range of 0.7-53.8% of S. pyogenes gRNAs selected via an in-vitro transcribed (IVT) gRNA screen in HEK293T cells; and

[0044] FIG. 3 is a graph describing the cutting efficiencies in the range of 0.7-99.5% of S. pyogenes gRNAs in HEK293T cells.

### BRIEF DESCRIPTION OF SEQUENCE LISTING

[0045] SEQ ID NOs: 1-620 are Cas endonuclease ortholog sequences.

[0046] SEQ ID NOs: 621-631 do not include sequences.

[0047] SEQ ID NOs: 632-4715 are microRNA sequences.

[0048] SEQ ID NOs: 4716-4733 do not include sequences.

[0049] SEQ ID NOs: 4734-5302 are AAV serotype sequences.

[0050] SEQ ID NO: 5303 is a SNCA nucleotide sequence.

[0051] SEQ ID NO: 5304 is a gene sequence including 1-5 kilobase pairs upstream and/or downstream of the SNCA gene.

[0052] SEQ ID NOs: 5305-5892 are 20 bp spacer sequences for targeting within or near a SNCA gene or other DNA sequence that encodes a regulatory element of the SNCA gene with a T. denticola Cas9 endonuclease.

[0053] SEQ ID NOs: 5893-7296 are 20 bp spacer sequences for targeting within or near a SNCA gene or other DNA sequence that encodes a regulatory element of the SNCA gene with a S. thermophilus Cas9 endonuclease.

[0054] SEQ ID NOs: 7293-10,603 are 20 bp spacer sequences for targeting within or near a SNCA gene or other DNA sequence that encodes a regulatory element of the SNCA gene with a S. aureus Cas9 endonuclease.

[0055] SEQ ID NOs: 10,604-14,084 are 20 bp spacer sequences for targeting within or near a SNCA gene or other DNA sequence that encodes a regulatory element of the SNCA gene with a N. meningitidis Cas9 endonuclease.

[0056] SEQ ID NOs: 14,085-39,976 and 83,971-83,980 are 20 bp spacer sequences for targeting within or near a SNCA gene or other DNA sequence that encodes a regulatory element of the SNCA gene with a S. pyogenes Cas9 endonuclease.

[0057] SEQ ID NOs: 39,977-83,935 are 20 bp spacer sequences for targeting within or near a SNCA gene or other DNA sequence that encodes a regulatory element of the SNCA gene with an Acidaminococcus, a Lachnospiraceae, and a Franciscella novicida Cpf1 endonuclease.

[0058] SEQ ID NOs: 83,936-83,965 do not include sequences.

[0059] SEQ ID NO: 83,966 is a sample spacer sequence, including the PAM, for a guide RNA (gRNA) for a S. pyogenes Cas9 endonuclease.

[0060] SEQ ID NOs: 83,967-83,969 show sample sgRNA sequences.

[0061] SEQ ID NO: 83,970 shows a known family of homing endonuclease, as classified by its structure.

### DETAILED DESCRIPTION

### I. Introduction

### Genome Editing

[0062] The present disclosure provides strategies and techniques for the targeted, specific alteration of the genetic information (genome) of living organisms. As used herein, the term “alteration” or “alteration of genetic information” refers to any change in the genome of a cell. In the context of treating genetic disorders, alterations may include, but are not limited to, insertion, deletion and correction. As used herein, the term “insertion” refers to an addition of one or more nucleotides in a DNA sequence. Insertions can range from small insertions of a few nucleotides to insertions of large segments such as a cDNA or a gene. The term “deletion” refers to a loss or removal of one or more nucleotides in a DNA sequence or a loss or removal of the function of a gene. In some cases, a deletion can include, for example, a loss of a few nucleotides, an exon, an intron, a gene segment, or the entire sequence of a gene. In some cases, deletion of a gene refers to the elimination or reduction of the function or expression of a gene or its gene product. This can result from not only a deletion of sequences within or near the gene, but also other events (e.g., insertion, nonsense mutation) that disrupt the expression of the gene. The term “correction” or “corrected” as used herein, refers to a change of one or more nucleotides of a genome in a cell, whether by insertion, deletion or substitution. Such correction may result in a more favorable genotypic or phenotypic outcome, whether in structure or function, to the genomic site which was corrected. One non-limiting example of a “correction” includes the correction of a mutant or defective sequence to a wild-type sequence which restores structure or function to a gene or its gene product(s). Depending on the nature of the mutation, correction may be achieved via various strategies disclosed herein. In one non-limiting example, a missense mutation may be corrected by replacing the region containing the mutation with its wild-type counterpart. As another example, duplication mutations (e.g., repeat expansions) in a gene may be corrected by removing the extra sequences.

[0063] In some aspects, alterations may also include a gene knock-in, knock-out or knock-down. As used herein, the term “knock-in” refers to an addition of a DNA sequence, or fragment thereof into a genome. Such DNA sequences to be knocked-in may include an entire gene or genes, may include regulatory sequences associated with a gene or any portion or fragment of the foregoing. For example, a cDNA encoding the wild-type protein may be inserted into the genome of a cell carrying a mutant gene. Knock-in strategies need not replace the defective gene, in whole or in part. In some cases, a knock-in strategy may further involve substitution of an existing sequence with the provided sequence, e.g., substitution of a mutant allele with a wild-type copy. On the other hand, the term “knock-out” refers to the elimination of a gene or the expression of a gene. For example, a gene can be knocked out by either a deletion or an addition of a nucleotide sequence that leads to a disruption of the reading frame. As another example, a gene may be knocked out by replacing a part of the gene with an irrelevant sequence. Finally, the term “knock-down” as used herein refers to reduction in the expression of a gene or its gene product(s). As a result of a gene knock-down, the protein activity or function may be attenuated or the protein levels may be reduced or eliminated.

[0064] Genome editing generally refers to the process of modifying the nucleotide sequence of a genome, preferably in a precise or pre-determined manner. Examples of methods of genome editing described herein include methods of using site-directed nucleases to cut deoxyribonucleic acid (DNA) at precise target locations in the genome, thereby creating single-strand or double-strand DNA breaks at particular locations within the genome. Such breaks can be and regularly are repaired by natural, endogenous cellular processes, such as homology-directed repair (HDR) and non-homologous end joining (NHEJ), as reviewed in Cox et al., Nature Medicine 21(2), 121-31 (2015). These two main DNA repair processes consist of a family of alternative pathways. NHEJ directly joins the DNA ends resulting from a double-strand break, sometimes with the loss or addition of nucleotide sequence, which may disrupt or enhance gene expression. HDR utilizes a homologous sequence, or donor sequence, as a template for inserting a defined DNA sequence at the break point. The homologous sequence can be in the endogenous genome, such as a sister chromatid. Alternatively, the donor can be an exogenous nucleic acid, such as a plasmid, a single-strand oligonucleotide, a double-stranded oligonucleotide, a duplex oligonucleotide or a virus, that has regions of high homology with the nuclease-cleaved locus, but which can also contain additional sequence or sequence changes including deletions that can be incorporated into the cleaved target locus. A third repair mechanism can be microhomology-mediated end joining (MMEJ), also referred to as “Alternative NHEJ,” in which the genetic outcome is similar to NHEJ in that small deletions and insertions can occur at the cleavage site. MMEJ can make use of homologous sequences of a few base pairs flanking the DNA break site to drive a more favored DNA end joining repair outcome, and recent reports have further elucidated the molecular mechanism of this process; see, e.g., Cho and Greenberg, Nature 518, 174-76 (2015); Kent et al., Nature Structural and Molecular Biology, Adv. Online doi:10.1038/nsmb.2961(2015); Mateos-Gomez et al., Nature 518, 254-57 (2015); Ceccaldi et al., Nature 528, 258-62 (2015). In some instances, it may be possible to predict likely repair outcomes based on analysis of potential microhomologies at the site of the DNA break.

[0065] Each of these genome editing mechanisms can be used to create desired genomic alterations. A step in the genome editing process can be to create one or two DNA breaks, the latter as double-strand breaks or as two single-stranded breaks, in the target locus as near the site of intended mutation. This can be achieved via the use of site-directed polypeptides, as described and illustrated herein.

### CRISPR Endonuclease System

[0066] A CRISPR (Clustered Regularly Interspaced Short Palindromic Repeats) genomic locus can be found in the genomes of many prokaryotes (e.g., bacteria and archaea). In prokaryotes, the CRISPR locus encodes products that function as a type of immune system to help defend the prokaryotes against foreign invaders, such as virus and phage. There are three stages of CRISPR locus function: integration of new sequences into the CRISPR locus, expression of CRISPR RNA (crRNA), and silencing of foreign invader nucleic acid. Five types of CRISPR systems (e.g., Type I, Type II, Type III, Type U, and Type V) have been identified.

[0067] A CRISPR locus includes a number of short repeating sequences referred to as “repeats.” When expressed, the repeats can form secondary structures (e.g., hairpins) and/or comprise unstructured single-stranded sequences. The repeats usually occur in clusters and frequently diverge between species. The repeats are regularly interspaced with unique intervening sequences referred to as “spacers,” resulting in a repeat-spacer-repeat locus architecture. The spacers are identical to or have high homology with known foreign invader sequences. A spacer-repeat unit encodes a crisprRNA (crRNA), which is processed into a mature form of the spacer-repeat unit. A crRNA comprises a “seed” or spacer sequence that is involved in targeting a target nucleic acid (in the naturally occurring form in prokaryotes, the spacer sequence targets the foreign invader nucleic acid). A spacer sequence is located at the 5′ or 3′ end of the crRNA.

[0068] A CRISPR locus also comprises polynucleotide sequences encoding CRISPR Associated (Cas) genes. Cas genes encode endonucleases involved in the biogenesis and the interference stages of crRNA function in prokaryotes. Some Cas genes comprise homologous secondary and/or tertiary structures.

### Type II CRISPR Systems

[0069] crRNA biogenesis in a Type II CRISPR system in nature requires a trans-activating CRISPR RNA (tracrRNA). Non-limiting examples of Type II CRISPR systems are shown in FIGS. 1A and 1B. The tracrRNA can be modified by endogenous RNaseIII, and then hybridizes to a crRNA repeat in the pre-crRNA array. Endogenous RNaseIII can be recruited to cleave the pre-crRNA. Cleaved crRNAs can be subjected to exoribonuclease trimming to produce the mature crRNA form (e.g., 5′ trimming). The tracrRNA can remain hybridized to the crRNA, and the tracrRNA and the crRNA associate with a site-directed polypeptide (e.g., Cas9). The crRNA of the crRNA-tracrRNA-Cas9 complex can guide the complex to a target nucleic acid to which the crRNA can hybridize. Hybridization of the crRNA to the target nucleic acid can activate Cas9 for targeted nucleic acid cleavage. The target nucleic acid in a Type II CRISPR system is referred to as a protospacer adjacent motif (PAM). In nature, the PAM is essential to facilitate binding of a site-directed polypeptide (e.g., Cas9) to the target nucleic acid. Type II systems (also referred to as Nmeni or CASS4) are further subdivided into Type II-A (CASS4) and II-B (CASS4a). Jinek et al., Science, 337(6096):816-821 (2012) showed that the CRISPR/Cas9 system is useful for RNA-programmable genome editing, and international patent application publication number WO2013/176772 provides numerous examples and applications of the CRISPR/Cas endonuclease system for site-specific gene editing.

### Type V CRISPR Systems

[0070] Type V CRISPR systems have several important differences from Type II systems. For example, Cpf1 is a single RNA-guided endonuclease that, in contrast to Type II systems, lacks tracrRNA. In fact, Cpf1-associated CRISPR arrays can be processed into mature crRNAs without the requirement of an additional trans-activating tracrRNA. The Type V CRISPR array can be processed into short mature crRNAs of 42-44 nucleotides in length, with each mature crRNA beginning with 19 nucleotides of direct repeat followed by 23-25 nucleotides of spacer sequence. In contrast, mature crRNAs in Type II systems can start with 20-24 nucleotides of spacer sequence followed by about 22 nucleotides of direct repeat. Also, Cpf1 can utilize a T-rich protospacer-adjacent motif such that Cpf1-crRNA complexes efficiently cleave target DNA preceded by a short T-rich PAM, which is in contrast to the G-rich PAM following the target DNA for Type II systems. Thus, Type V systems cleave at a point that is distant from the PAM, while Type II systems cleave at a point that is adjacent to the PAM. In addition, in contrast to Type II systems, Cpf1 cleaves DNA via a staggered DNA double-stranded break with a 4 or 5 nucleotide 5′ overhang. Type II systems cleave via a blunt double-stranded break. Similar to Type II systems, Cpf1 contains a predicted RuvC-like endonuclease domain, but lacks a second HNH endonuclease domain, which is in contrast to Type II systems.

### Cas Genes/Polypeptides and Protospacer Adjacent Motifs

[0071] Exemplary CRISPR/Cas polypeptides include the Cas9 polypeptides as published in Fonfara et al., Nucleic Acids Research, 42: 2577-2590 (2014). The CRISPR/Cas gene naming system has undergone extensive rewriting since the Cas genes were discovered. Fonfara et al. also provides PAM sequences for the Cas9 polypeptides from various species (see also Table 1 infra).

### II. Compositions and Methods of the Disclosure

### Editing Strategy

[0072] Provided herein are cellular, ex vivo and in vivo methods for using genome engineering tools to create permanent changes to the genome by: 1) reducing or eliminating the expression of the mutant SNCA gene by deleting or mutating the SNCA gene or other DNA sequences that encode regulatory elements of the SNCA gene, 2) correcting one or more mutations within or near the SNCA gene or other DNA sequences that encode regulatory elements of the SNCA gene, by HDR, or 3) deleting the mutant gene and inserting a wild-type SNCA gene, a cDNA or a minigene (comprised of one or more exons and optionally one or more introns, including natural or synthetic introns) into the SNCA gene locus or a safe harbor locus. Such methods use endonucleases, such as CRISPR-associated (Cas9, Cpf1 and the like) nucleases, to permanently edit within or near the genomic locus of the SNCA gene or other DNA sequences that encode regulatory elements of the SNCA gene. In this way, examples set forth in the present disclosure can help to reduce or eliminate the expression of the mutant SNCA gene or otherwise correct the SNCA gene with as few as a single treatment (rather than deliver potential therapies for the lifetime of the patient).

[0073] More specifically, the methods provided above, regardless of whether a cellular or ex vivo or in vivo method, can involve one or a combination of the following: 1) reducing (knock-down) or eliminating (knock-out) the expression of the mutant SNCA gene by introducing one or more insertions, deletions or mutations within or near the SNCA gene or other DNA sequences that encode regulatory elements of the SNCA gene, 2) correcting one or more mutations within or near the SNCA gene or other DNA sequences that encode regulatory elements of the SNCA gene, and 3) deleting the mutant gene and inserting a wild-type SNCA gene, cDNA or a minigene (comprised of one or more exons and optionally one or more introns, including natural or synthetic introns) into the SNCA gene locus or a safe harbor locus. Both the mutational correction and whole gene correction strategies may utilize a donor DNA template in Homology-Directed Repair (HDR). HDR in either strategy may be accomplished by making one or more single-stranded breaks (SSBs) or double-stranded breaks (DSBs) at specific sites in the genome by using one or more endonucleases.

[0074] For example, the knock-down or knock-out strategy can involve disrupting the reading frame in the SNCA gene by introducing random insertions or deletions (indels) that arise due to the imprecise NHEJ repair pathway within or near the SNCA gene or other DNA sequences that encode regulatory elements of the SNCA gene. This can be achieved by inducing one single stranded break or double stranded break in the SNCA gene with one or more CRISPR endonucleases and a gRNA (e.g., crRNA+tracrRNA, or sgRNA), or two or more single stranded breaks or double stranded breaks in the SNCA gene with two or more CRISPR endonucleases and two or more sgRNAs. This approach can require development and optimization of sgRNAs for the SNCA gene.

[0075] Alternatively, the knock-down or knock-out strategy can also involve deletion of one or more segments within or near the SNCA gene or other DNA sequences that encode regulatory elements of the SNCA gene. This deletion strategy requires at least a pair of gRNAs (e.g., crRNA+tracrRNA, or sgRNA) capable of binding to two different sites within or near the SNCA gene and one or more CRISPR endonucleases. The CRISPR endonucleases, configured with the two gRNAs, induce two double stranded breaks at the desired locations. After cleavage, the two ends, regardless of whether blunt or with overhangs, can be joined by NHEJ, leading to the deletion of the intervening fragment. NHEJ repair pathways can lead to insertions, deletions or mutations at the joints.

[0076] For example, the mutational correction strategy can involve replacing one or more mutated sequences in the SNCA gene with wild-type sequences by inducing one single stranded break or double stranded break in the SNCA gene with one or more CRISPR endonucleases and a gRNA (e.g., crRNA+tracrRNA, or sgRNA), or two or more single stranded breaks or double stranded breaks in the SNCA gene with one or more CRISPR endonucleases and two or more gRNAs, in the presence of a donor DNA template introduced exogenously to direct the cellular DSB response to Homology-Directed Repair. This strategy can be used to correct one or more mutations in one or more exons, introns, intron:exon junctions, or other DNA sequences encoding regulatory elements of the SNCA gene, or combination thereof. This strategy may be employed to correct mutational hotspots within or near the SNCA gene. The term “mutational hotspot” used herein refers to a region in a genome that exhibits higher frequency of mutations or has higher propensity to mutate compared to the average mutation frequency or mutation rate in said genome. The donor DNA template can be a short single stranded oligonucleotide, a short double stranded oligonucleotide, a long single or double stranded DNA molecule. The donor template may contain a part of wild-type SNCA gene sequence corresponding to the mutated sequence and homologous arms to the neighboring sequences of the targeted region. This approach can require development and optimization of gRNAs and donor DNA molecules for the SNCA gene.

[0077] For example, the whole gene correction strategy involves disruption/deletion of the endogenous, mutated SNCA gene and insertion of a wild-type SNCA gene, a cDNA or a minigene (comprised of one or more exons and introns or natural or synthetic introns) into the locus of the SNCA gene or in a safe harbor locus. It can be achieved by delivering into the cell one or more CRISPR endonucleases, one or more gRNAs (e.g., crRNA+tracrRNA, or sgRNA) targeting the SNCA gene, or one or more gRNAs targeting upstream and downstream of or in the first and last exon and/or intron of the SNCA gene, and a donor DNA that contains the desired sequence and homology arms to the flanking regions of the target locus. In certain aspects, the whole gene correction strategy can be achieved by delivering into the cell one or more CRISPR endonucleases, one or more gRNAs (e.g., crRNA+tracrRNA, or sgRNA) targeting the SNCA gene, or a pair of gRNAs targeting the 5′ end of the gene and a donor DNA that contains the desired sequence and homology arms to the flanking regions of the target locus. The cytogenetic location of the SNCA gene is 4q21. A “safe harbor locus” refers to a region of the genome where the integrated material can be adequately expressed without perturbing endogenous genome structure or function. The safe harbor loci include, but are not limited to, AAVS1 (intron 1 of PPP1R12C), HPRT, H11, hRosa26 and/or F-A region. The safe harbor loci can be selected from the group consisting of exon 1, intron 1, or exon 2 of PPP1R12C, exon 1, intron 1, or exon 2 of HPRT, and exon 1, intron 1, or exon 2 of hRosa26. The safe harbor loci may be exons or introns of ubiquitously expressed genes and/or genes with tissue specific expression (e.g.: nervous system). A safe harbor loci may also include regions of the genome devoid of endogeneous genes and with open chromatin that allows expression of the inserted transgene without perturbing the genome structure or function.

[0078] The donor DNA can be single or double stranded DNA. The donor template can have homologous arms to the 4q21 region. The donor template can have homologous arms to a safe harbor locus. For example, the donor template can have homologous arms to an AAVS1 safe harbor locus, such as, intron 1 of the PPP1R12C gene. For example, the donor template can have homologous arms to a hRosa26 safe harbor locus.

[0079] The advantages for the above strategies (knock-down/knock-out or correction) are similar, including in principle both short and long term beneficial clinical and laboratory effects. The whole gene correction approach does provide one advantage over the mutational correction approach—the ability to treat all patients versus only a subset of patients.

[0080] In addition to the above genome editing strategies, another strategy involves modulating expression, function, or activity of SNCA by editing in the regulatory sequence.

[0081] In addition to the editing options listed above, Cas9 or similar proteins can be used to target effector domains to the same target sites that can be identified for editing, or additional target sites within range of the effector domain. A range of chromatin modifying enzymes, methylases or demethylases can be used to alter expression of the target gene. One possibility is reducing the expression of the SNCA protein if the mutation leads to undesirable activity. These types of epigenetic regulation have some advantages, particularly as they are limited in possible off-target effects.

[0082] A number of types of genomic target sites can be present in addition to the coding and splicing sequences.

[0083] The regulation of transcription and translation implicates a number of different classes of sites that interact with cellular proteins or nucleotides. Often the DNA binding sites of transcription factors or other proteins can be targeted for mutation or deletion to study the role of the site, though they can also be targeted to change gene expression. Sites can be added through non-homologous end joining NHEJ or direct genome editing by homology directed repair (HDR). Increased use of genome sequencing, RNA expression and genome-wide studies of transcription factor binding have increased our ability to identify how the sites lead to developmental or temporal gene regulation. These control systems can be direct or can involve extensive cooperative regulation that can require the integration of activities from multiple enhancers. Transcription factors typically bind 6-12 bp-long degenerate DNA sequences. The low level of specificity provided by individual sites suggests that complex interactions and rules are involved in binding and the functional outcome. Binding sites with less degeneracy can provide simpler means of regulation. Artificial transcription factors can be designed to specify longer sequences that have less similar sequences in the genome and have lower potential for off-target cleavage. Any of these types of binding sites can be mutated, deleted or even created to enable changes in gene regulation or expression (Canver, M. C. et al., Nature (2015)).

### Site-Directed Polypeptides (Endonucleases, Enzymes)

[0084] A site-directed polypeptide is a nuclease used in genome editing to cleave DNA. The site-directed polypeptide can be administered to a cell or a patient as either: one or more polypeptides, or one or more mRNAs encoding the polypeptide. Any of the enzymes or orthologs listed in SEQ ID NOs: 1-620, or disclosed herein, may be utilized in the methods herein. Single molecule guide RNA can be pre-complexed with a site-directed polypeptide. The site-directed polypeptide can be any of the DNA endonuclease disclosed herein.

[0085] In the context of a CRISPR/Cas9 or CRISPR/Cpf1 system, the site-directed polypeptide can bind to a guide RNA that, in turn, specifies the site in the target DNA to which the polypeptide is directed. In the CRISPR/Cas9 or CRISPR/Cpf1 systems disclosed herein, the site-directed polypeptide can be an endonuclease, such as a DNA endonuclease.

[0086] A site-directed polypeptide can comprise a plurality of nucleic acid-cleaving (i.e., nuclease) domains. Two or more nucleic acid-cleaving domains can be linked together via a linker. For example, the linker can comprise a flexible linker. Linkers can comprise 1, 2, 3, 4, 5, 6, 7, 8, 9, 10, 11, 12, 13, 14, 15, 16, 17, 18, 19, 20, 21, 22, 23, 24, 25, 30, 35, 40 or more amino acids in length.

[0087] Naturally-occurring wild-type Cas9 enzymes comprise two nuclease domains, a HNH nuclease domain and a RuvC domain. Herein, the term “Cas9” refers to both a naturally-occurring and a recombinant Cas9. Cas9 enzymes contemplated herein can comprise a HNH or HNH-like nuclease domain, and/or a RuvC or RuvC-like nuclease domain.

[0088] HNH or HNH-like domains comprise a McrA-like fold. HNH or HNH-like domains comprises two antiparallel 3-strands and an α-helix. HNH or HNH-like domains comprises a metal binding site (e.g., a divalent cation binding site). HNH or HNH-like domains can cleave one strand of a target nucleic acid (e.g., the complementary strand of the crRNA targeted strand).

[0089] RuvC or RuvC-like domains comprise an RNaseH or RNaseH-like fold. RuvC/RNaseH domains are involved in a diverse set of nucleic acid-based functions including acting on both RNA and DNA. The RNaseH domain comprises 5 β-strands surrounded by a plurality of α-helices. RuvC/RNaseH or RuvC/RNaseH-like domains comprise a metal binding site (e.g., a divalent cation binding site). RuvC/RNaseH or RuvC/RNaseH-like domains can cleave one strand of a target nucleic acid (e.g., the non-complementary strand of a double-stranded target DNA).

[0090] Site-directed polypeptides can introduce double-strand breaks or single-strand breaks in nucleic acids, e.g., genomic DNA. The double-strand break can stimulate a cell's endogenous DNA-repair pathways (e.g., homology-dependent repair (HDR) or NHEJ or alternative non-homologous end joining (A-NHEJ) or microhomology-mediated end joining (MMEJ)). NHEJ can repair cleaved target nucleic acid without the need for a homologous template. This can sometimes result in small deletions or insertions (indels) in the target nucleic acid at the site of cleavage, and can lead to disruption or alteration of gene expression. HDR can occur when a homologous repair template, or donor, is available. The homologous donor template can comprise sequences that are homologous to sequences flanking the target nucleic acid cleavage site. The sister chromatid can be used by the cell as the repair template. However, for the purposes of genome editing, the repair template can be supplied as an exogenous nucleic acid, such as a plasmid, duplex oligonucleotide, single-strand oligonucleotide or viral nucleic acid. With exogenous donor templates, an additional nucleic acid sequence (such as a transgene) or modification (such as a single or multiple base changes or a deletion) can be introduced between the flanking regions of homology so that the additional or altered nucleic acid sequence also becomes incorporated into the target locus. MMEJ can result in a genetic outcome that is similar to NHEJ in that small deletions and insertions can occur at the cleavage site. MMEJ can make use of homologous sequences of a few base pairs flanking the cleavage site to drive a favored end-joining DNA repair outcome. In some instances, it may be possible to predict likely repair outcomes based on analysis of potential microhomologies in the nuclease target regions.

[0091] Thus, in some cases, homologous recombination can be used to insert an exogenous polynucleotide sequence into the target nucleic acid cleavage site. An exogenous polynucleotide sequence is termed a “donor polynucleotide” (or donor or donor sequence) herein. The donor polynucleotide, a portion of the donor polynucleotide, a copy of the donor polynucleotide, or a portion of a copy of the donor polynucleotide can be inserted into the target nucleic acid cleavage site. The donor polynucleotide can be an exogenous polynucleotide sequence, i.e., a sequence that does not naturally occur at the target nucleic acid cleavage site.

[0092] The modifications of the target DNA due to NHEJ and/or HDR can lead to, for example, mutations, deletions, alterations, integrations, gene correction, gene replacement, gene tagging, transgene insertion, nucleotide deletion, gene disruption, translocations and/or gene mutation. The processes of deleting genomic DNA and integrating non-native nucleic acid into genomic DNA are examples of genome editing.

[0093] The site-directed polypeptide can comprise an amino acid sequence having at least 10%, at least 15%, at least 20%, at least 30%, at least 40%, at least 50%, at least 60%, at least 70%, at least 75%, at least 80%, at least 85%, at least 90%, at least 95%, at least 99%, or 100% amino acid sequence identity to a wild-type exemplary site-directed polypeptide [e.g., Cas9 from S. pyogenes, US2014/0068797 Sequence ID No. 8 or Sapranauskas et al., Nucleic Acids Res, 39(21): 9275-9282 (2011)], and various other site-directed polypeptides. The site-directed polypeptide can comprise at least 70, 75, 80, 85, 90, 95, 97, 99, or 100% identity to a wild-type site-directed polypeptide (e.g., Cas9 from S. pyogenes, supra) over 10 contiguous amino acids. The site-directed polypeptide can comprise at most: 70, 75, 80, 85, 90, 95, 97, 99, or 100% identity to a wild-type site-directed polypeptide (e.g., Cas9 from S. pyogenes, supra) over 10 contiguous amino acids. The site-directed polypeptide can comprise at least: 70, 75, 80, 85, 90, 95, 97, 99, or 100% identity to a wild-type site-directed polypeptide (e.g., Cas9 from S. pyogenes, supra) over 10 contiguous amino acids in a HNH nuclease domain of the site-directed polypeptide. The site-directed polypeptide can comprise at most: 70, 75, 80, 85, 90, 95, 97, 99, or 100% identity to a wild-type site-directed polypeptide (e.g., Cas9 from S. pyogenes, supra) over 10 contiguous amino acids in a HNH nuclease domain of the site-directed polypeptide. The site-directed polypeptide can comprise at least: 70, 75, 80, 85, 90, 95, 97, 99, or 100% identity to a wild-type site-directed polypeptide (e.g., Cas9 from S. pyogenes, supra) over 10 contiguous amino acids in a RuvC nuclease domain of the site-directed polypeptide. The site-directed polypeptide can comprise at most: 70, 75, 80, 85, 90, 95, 97, 99, or 100% identity to a wild-type site-directed polypeptide (e.g., Cas9 from S. pyogenes, supra) over 10 contiguous amino acids in a RuvC nuclease domain of the site-directed polypeptide.

[0094] The site-directed polypeptide can comprise a modified form of a wild-type exemplary site-directed polypeptide. The modified form of the wild-type exemplary site-directed polypeptide can comprise a mutation that reduces the nucleic acid-cleaving activity of the site-directed polypeptide. The modified form of the wild-type exemplary site-directed polypeptide can have less than 90%, less than 80%, less than 70%, less than 60%, less than 50%, less than 40%, less than 30%, less than 20%, less than 10%, less than 5%, or less than 1% of the nucleic acid-cleaving activity of the wild-type exemplary site-directed polypeptide (e.g., Cas9 from S. pyogenes, supra). The modified form of the site-directed polypeptide can have no substantial nucleic acid-cleaving activity. When a site-directed polypeptide is a modified form that has no substantial nucleic acid-cleaving activity, it is referred to herein as “enzymatically inactive.”

[0095] The modified form of the site-directed polypeptide can comprise a mutation such that it can induce a single-strand break (SSB) on a target nucleic acid (e.g., by cutting only one of the sugar-phosphate backbones of a double-strand target nucleic acid). In some aspects, the mutation can result in less than 90%, less than 80%, less than 70%, less than 60%, less than 50%, less than 40%, less than 30%, less than 20%, less than 10%, less than 5%, or less than 1% of the nucleic acid-cleaving activity in one or more of the plurality of nucleic acid-cleaving domains of the wild-type site directed polypeptide (e.g., Cas9 from S. pyogenes, supra). In some aspects, the mutation can result in one or more of the plurality of nucleic acid-cleaving domains retaining the ability to cleave the complementary strand of the target nucleic acid, but reducing its ability to cleave the non-complementary strand of the target nucleic acid. The mutation can result in one or more of the plurality of nucleic acid-cleaving domains retaining the ability to cleave the non-complementary strand of the target nucleic acid, but reducing its ability to cleave the complementary strand of the target nucleic acid. For example, residues in the wild-type exemplary S. pyogenes Cas9 polypeptide, such as Asp10, His840, Asn854 and Asn856, are mutated to inactivate one or more of the plurality of nucleic acid-cleaving domains (e.g., nuclease domains). The residues to be mutated can correspond to residues Asp10, His840, Asn854 and Asn856 in the wild-type exemplary S. pyogenes Cas9 polypeptide (e.g., as determined by sequence and/or structural alignment). Non-limiting examples of mutations include D10A, H840A, N854A or N856A. One skilled in the art will recognize that mutations other than alanine substitutions can be suitable.

[0096] In some aspects, a D10A mutation can be combined with one or more of H840A, N854A, or N856A mutations to produce a site-directed polypeptide substantially lacking DNA cleavage activity. A H840A mutation can be combined with one or more of D10A, N854A, or N856A mutations to produce a site-directed polypeptide substantially lacking DNA cleavage activity. A N854A mutation can be combined with one or more of H840A, D10A, or N856A mutations to produce a site-directed polypeptide substantially lacking DNA cleavage activity. A N856A mutation can be combined with one or more of H840A, N854A, or D10A mutations to produce a site-directed polypeptide substantially lacking DNA cleavage activity. Site-directed polypeptides that comprise one substantially inactive nuclease domain are referred to as “nickases.”

[0097] Nickase variants of RNA-guided endonucleases, for example Cas9, can be used to increase the specificity of CRISPR-mediated genome editing. Wild type Cas9 is typically guided by a single guide RNA designed to hybridize with a specified ˜20 nucleotide sequence in the target sequence (such as an endogenous genomic locus). However, several mismatches can be tolerated between the guide RNA and the target locus, effectively reducing the length of required homology in the target site to, for example, as little as 13 nt of homology, and thereby resulting in elevated potential for binding and double-strand nucleic acid cleavage by the CRISPR/Cas9 complex elsewhere in the target genome—also known as off-target cleavage. Because nickase variants of Cas9 each only cut one strand, in order to create a double-strand break it is necessary for a pair of nickases to bind in close proximity and on opposite strands of the target nucleic acid, thereby creating a pair of nicks, which is the equivalent of a double-strand break. This requires that two separate guide RNAs—one for each nickase—must bind in close proximity and on opposite strands of the target nucleic acid. This requirement essentially doubles the minimum length of homology needed for the double-strand break to occur, thereby reducing the likelihood that a double-strand cleavage event will occur elsewhere in the genome, where the two guide RNA sites—if they exist—are unlikely to be sufficiently close to each other to enable the double-strand break to form. As described in the art, nickases can also be used to promote HDR versus NHEJ. HDR can be used to introduce selected changes into target sites in the genome through the use of specific donor sequences that effectively mediate the desired changes.

[0098] Mutations contemplated can include substitutions, additions, and deletions, or any combination thereof. The mutation converts the mutated amino acid to alanine. The mutation converts the mutated amino acid to another amino acid (e.g., glycine, serine, threonine, cysteine, valine, leucine, isoleucine, methionine, proline, phenylalanine, tyrosine, tryptophan, aspartic acid, glutamic acid, asparagine, glutamine, histidine, lysine, or arginine). The mutation converts the mutated amino acid to a non-natural amino acid (e.g., selenomethionine). The mutation converts the mutated amino acid to amino acid mimics (e.g., phosphomimics). The mutation can be a conservative mutation. For example, the mutation converts the mutated amino acid to amino acids that resemble the size, shape, charge, polarity, conformation, and/or rotamers of the mutated amino acids (e.g., cysteine/serine mutation, lysine/asparagine mutation, histidine/phenylalanine mutation). The mutation can cause a shift in reading frame and/or the creation of a premature stop codon. Mutations can cause changes to regulatory regions of genes or loci that affect expression of one or more genes.

[0099] The site-directed polypeptide (e.g., variant, mutated, enzymatically inactive and/or conditionally enzymatically inactive site-directed polypeptide) can target nucleic acid. The site-directed polypeptide (e.g., variant, mutated, enzymatically inactive and/or conditionally enzymatically inactive endoribonuclease) can target DNA. The site-directed polypeptide (e.g., variant, mutated, enzymatically inactive and/or conditionally enzymatically inactive endoribonuclease) can target RNA.

[0100] The site-directed polypeptide can comprise one or more non-native sequences (e.g., the site-directed polypeptide is a fusion protein).

[0101] The site-directed polypeptide can comprise an amino acid sequence comprising at least 15% amino acid identity to a Cas9 from a bacterium (e.g., S. pyogenes), a nucleic acid binding domain, and two nucleic acid cleaving domains (i.e., a HNH domain and a RuvC domain).

[0102] The site-directed polypeptide can comprise an amino acid sequence comprising at least 15% amino acid identity to a Cas9 from a bacterium (e.g., S. pyogenes), and two nucleic acid cleaving domains (i.e., a HNH domain and a RuvC domain).

[0103] The site-directed polypeptide can comprise an amino acid sequence comprising at least 15% amino acid identity to a Cas9 from a bacterium (e.g., S. pyogenes), and two nucleic acid cleaving domains, wherein one or both of the nucleic acid cleaving domains comprise at least 50% amino acid identity to a nuclease domain from Cas9 from a bacterium (e.g., S. pyogenes).

[0104] The site-directed polypeptide can comprise an amino acid sequence comprising at least 15% amino acid identity to a Cas9 from a bacterium (e.g., S. pyogenes), two nucleic acid cleaving domains (i.e., a HNH domain and a RuvC domain), and a non-native sequence (for example, a nuclear localization signal) or a linker linking the site-directed polypeptide to a non-native sequence.

[0105] The site-directed polypeptide can comprise an amino acid sequence comprising at least 15% amino acid identity to a Cas9 from a bacterium (e.g., S. pyogenes), two nucleic acid cleaving domains (i.e., a HNH domain and a RuvC domain), wherein the site-directed polypeptide comprises a mutation in one or both of the nucleic acid cleaving domains that reduces the cleaving activity of the nuclease domains by at least 50%.

[0106] The site-directed polypeptide can comprise an amino acid sequence comprising at least 15% amino acid identity to a Cas9 from a bacterium (e.g., S. pyogenes), and two nucleic acid cleaving domains (i.e., a HNH domain and a RuvC domain), wherein one of the nuclease domains comprises mutation of aspartic acid 10, and/or wherein one of the nuclease domains can comprise a mutation of histidine 840, and wherein the mutation reduces the cleaving activity of the nuclease domain(s) by at least 50%.

[0107] The one or more site-directed polypeptides, e.g. DNA endonucleases, can comprise two nickases that together effect one double-strand break at a specific locus in the genome, or four nickases that together effect or cause two double-strand breaks at specific loci in the genome. Alternatively, one site-directed polypeptide, e.g. DNA endonuclease, can effect or cause one double-strand break at a specific locus in the genome.

[0108] Non-limiting examples of Cas9 orthologs from other bacterial strains include but are not limited to, Cas proteins identified in Acaryochloris marina MBIC 11017; Acetohalobium arabaticum DSM 5501; Acidithiobacillus caldus; Acidithiobacillus ferrooxidans ATCC 23270; Alicyclobacillus acidocaldarius LAA1; Alicyclobacillus acidocaldarius subsp. acidocaldarius DSM 446; Allochromatium vinosum DSM 180; Ammonifex degensii KC4; Anabaena variabilis ATCC 29413; Arthrospira maxima CS-328; Arthrospira platensis str. Paraca; Arthrospira sp. PCC 8005; Bacillus pseudomycoides DSM 12442; Bacillus selenitireducens MLS 10; Burkholderiales bacterium 1_1_47; Caldicelulosiruptor becscii DSM 6725; Candidatus desulforudis audaxviator MP104C; Caldicellulosiruptor hydrothermalis_108; Clostridium phage c-st; Clostridium botulinum A3 str. Loch Maree; Clostridium botulinum Ba4 str. 657; Clostridium difficile QCD-63q42; Crocosphaera watsonii WH 8501; Cyanothece sp. ATCC 51142; Cyanothece sp. CCY0110; Cyanothece sp. PCC 7424; Cyanothece sp. PCC 7822; Exiguobacterium sibiricum 255-15; Finegoldia magna ATCC 29328; Ktedonobacter racemifer DSM 44963; Lactobacillus delbrueckii subsp. bulgaricus PB2003/044-T3-4; Lactobacillus salivarius ATCC 11741; Listeria innocua; Lyngbya sp. PCC 8106; Marinobacter sp. ELB 17; Methanohalobium evestigatum Z-7303; Microcystis phage Ma-LMMO1; Microcystis aeruginosa NIES-843; Microscilla marina ATCC 23134; Microcoleus chthonoplastes PCC 7420; Neisseria meningitidis; Nitrosococcus halophilus Nc4; Nocardiopsis dassonvillei subsp. dassonvillei DSM 43111; Nodularia spumigena CCY9414; Nostoc sp. PCC 7120; Oscillatoria sp. PCC 6506; Pelotomaculum thermopropionicum SI; Petrotoga mobilis SJ95; Polaromonas naphthalenivorans CJ2; Polaromonas sp. JS666; Pseudoalteromonas haloplanktis TAC125; Streptomyces pristinaespiralis ATCC 25486; Streptomyces pristinaespiralis ATCC 25486; Streptococcus thermophilus; Streptomyces viridochromogenes DSM 40736; Streptosporangium roseum DSM 43021; Synechococcus sp. PCC 7335; and Thermosipho africanus TCF52B (Chylinski et al., RNA Biol., 2013; 10(5): 726-737).

[0109] In addition to Cas9 orthologs, other Cas9 variants such as fusion proteins of inactive dCas9 and effector domains with different functions may be served as a platform for genetic modulation. Any of the foregoing enzymes may be useful in the present disclosure.

[0110] Further examples of endonucleases that may be utilized in the present disclosure are provided in SEQ ID NOs: 1-620. These proteins may be modified before use or may be encoded in a nucleic acid sequence such as a DNA, RNA or mRNA or within a vector construct such as the plasmids or AAV vectors taught herein. Further, they may be codon optimized.

[0111] SEQ ID NOs: 1-620 disclose a non-exhaustive listing of endonuclease sequences.

### Genome-Targeting Nucleic Acid

[0112] The present disclosure provides a genome-targeting nucleic acid that can direct the activities of an associated polypeptide (e.g., a site-directed polypeptide) to a specific target sequence within a target nucleic acid. The genome-targeting nucleic acid can be an RNA. A genome-targeting RNA is referred to as a “guide RNA” or “gRNA” herein. A guide RNA can comprise at least a spacer sequence that hybridizes to a target nucleic acid sequence of interest, and a CRISPR repeat sequence. In Type II systems, the gRNA also comprises a second RNA called the tracrRNA sequence. In the Type II guide RNA (gRNA), the CRISPR repeat sequence and tracrRNA sequence hybridize to each other to form a duplex. In the Type V guide RNA (gRNA), the crRNA forms a duplex. In both systems, the duplex can bind a site-directed polypeptide, such that the guide RNA and site-direct polypeptide form a complex. The genome-targeting nucleic acid can provide target specificity to the complex by virtue of its association with the site-directed polypeptide. The genome-targeting nucleic acid thus can direct the activity of the site-directed polypeptide.

[0113] Exemplary guide RNAs include the spacer sequences in SEQ ID NOs: 5305-83,935 of the Sequence Listing. Each guide RNA can be designed to include a spacer sequence complementary to its genomic target sequence. For example, each of the spacer sequences in SEQ ID NOs: 5305-83,935 of the Sequence Listing can be put into a single RNA chimera or a crRNA (along with a corresponding tracrRNA). See Jinek et al., Science, 337, 816-821 (2012) and Deltcheva et al., Nature, 471, 602-607 (2011).

[0114] The genome-targeting nucleic acid can be a double-molecule guide RNA. The genome-targeting nucleic acid can be a single-molecule guide RNA.

[0115] A double-molecule guide RNA can comprise two strands of RNA. The first strand comprises in the 5′ to 3′ direction, an optional spacer extension sequence, a spacer sequence and a minimum CRISPR repeat sequence. The second strand can comprise a minimum tracrRNA sequence (complementary to the minimum CRISPR repeat sequence), a 3′ tracrRNA sequence and an optional tracrRNA extension sequence.

[0116] A single-molecule guide RNA (sgRNA) in a Type II system can comprise, in the 5′ to 3′ direction, an optional spacer extension sequence, a spacer sequence, a minimum CRISPR repeat sequence, a single-molecule guide linker, a minimum tracrRNA sequence, a 3′ tracrRNA sequence and an optional tracrRNA extension sequence. The optional tracrRNA extension can comprise elements that contribute additional functionality (e.g., stability) to the guide RNA. The single-molecule guide linker can link the minimum CRISPR repeat and the minimum tracrRNA sequence to form a hairpin structure. The optional tracrRNA extension can comprise one or more hairpins.

[0117] The sgRNA can comprise a 20 nucleotide spacer sequence at the 5′ end of the sgRNA sequence. The sgRNA can comprise a less than a 20 nucleotide spacer sequence at the 5′ end of the sgRNA sequence. The sgRNA can comprise a more than 20 nucleotide spacer sequence at the 5′ end of the sgRNA sequence. The sgRNA can comprise a variable length spacer sequence with 17-30 nucleotides at the 5′ end of the sgRNA sequence (see Table 1).

[0118] The sgRNA can comprise no uracil at the 3′end of the sgRNA sequence, such as in SEQ ID NO: 83,968 of Table 1. The sgRNA can comprise one or more uracil at the 3′end of the sgRNA sequence, such as in SEQ ID NO: 83,969 in Table 1. For example, the sgRNA can comprise 1 uracil (U) at the 3′ end of the sgRNA sequence. The sgRNA can comprise 2 uracil (UU) at the 3′ end of the sgRNA sequence. The sgRNA can comprise 3 uracil (UUU) at the 3′ end of the sgRNA sequence. The sgRNA can comprise 4 uracil (UUUU) at the 3′ end of the sgRNA sequence. The sgRNA can comprise 5 uracil (UUUUU) at the 3′ end of the sgRNA sequence. The sgRNA can comprise 6 uracil (UUUUUU) at the 3′ end of the sgRNA sequence. The sgRNA can comprise 7 uracil (UUUUUUU) at the 3′ end of the sgRNA sequence. The sgRNA can comprise 8 uracil (UUUUUUUU) at the 3′ end of the sgRNA sequence.

[0119] The sgRNA can be unmodified or modified. For example, modified sgRNAs can comprise one or more 2′-O-methyl phosphorothioate nucleotides.

TABLE 1

| SEQ ID | |
|---|---|
| NO. | sgRNA sequence |
| 83,967 | nnnnnnnnnnnnnnnnnnnnguuuuagagcuagaaauagcaag |
| | uuaaaauaaggcuaguccguuaucaacuugaaaaaguggcacc |
| | gagucggugcuuuu |
| 83,968 | nnnnnnnnnnnnnnnnnnnnguuuuagagcuagaaauagcaag |
| | uuaaaauaaggcuaguccguuaucaacuugaaaaaguggcacc |
| | gagucggugc |
| 83,969 | n(₁₇₋₃₀₎guuuuagagcuagaaauagcaaguuaaaauaaggc |
| | uaguccguuaucaacuugaaaaaguggcaccgagucggugc |
| | u₍₁₋₈₎ |

[0120] A single-molecule guide RNA (sgRNA) in a Type V system can comprise, in the 3′ to 3′ direction, a minimum CRISPR repeat sequence and a spacer sequence.

[0121] By way of illustration, guide RNAs used in the CRISPR/Cas or CRISPR/Cpf1 system, or other smaller RNAs can be readily synthesized by chemical means, as illustrated below and described in the art. While chemical synthetic procedures are continually expanding, purifications of such RNAs by procedures such as high performance liquid chromatography (HPLC, which avoids the use of gels such as PAGE) tends to become more challenging as polynucleotide lengths increase significantly beyond a hundred or so nucleotides. One approach used for generating RNAs of greater length is to produce two or more molecules that are ligated together. Much longer RNAs, such as those encoding a Cas9 or Cpf1 endonuclease, are more readily generated enzymatically. Various types of RNA modifications can be introduced during or after chemical synthesis and/or enzymatic generation of RNAs, e.g., modifications that enhance stability, reduce the likelihood or degree of innate immune response, and/or enhance other attributes, as described in the art.

### Spacer Extension Sequence

[0122] In some examples of genome-targeting nucleic acids, a spacer extension sequence can modify activity, provide stability and/or provide a location for modifications of a genome-targeting nucleic acid. A spacer extension sequence can modify on- or off-target activity or specificity. In some examples, a spacer extension sequence can be provided. The spacer extension sequence can have a length of more than 1, 5, 10, 15, 20, 25, 30, 35, 40, 45, 50, 60, 70, 80, 90, 100, 120, 140, 160, 180, 200, 220, 240, 260, 280, 300, 320, 340, 360, 380, 400, 1000, 2000, 3000, 4000, 5000, 6000, or 7000 or more nucleotides. The spacer extension sequence can have a length of less than 1, 5, 10, 15, 20, 25, 30, 35, 40, 45, 50, 60, 70, 80, 90, 100, 120, 140, 160, 180, 200, 220, 240, 260, 280, 300, 320, 340, 360, 380, 400, 1000, 2000, 3000, 4000, 5000, 6000, 7000 or more nucleotides. The spacer extension sequence can be less than 10 nucleotides in length. The spacer extension sequence can be between 10-30 nucleotides in length. The spacer extension sequence can be between 30-70 nucleotides in length.

[0123] The spacer extension sequence can comprise another moiety (e.g., a stability control sequence, an endoribonuclease binding sequence, a ribozyme). The moiety can decrease or increase the stability of a nucleic acid targeting nucleic acid. The moiety can be a transcriptional terminator segment (i.e., a transcription termination sequence). The moiety can function in a eukaryotic cell. The moiety can function in a prokaryotic cell. The moiety can function in both eukaryotic and prokaryotic cells. Non-limiting examples of suitable moieties include: a 5′ cap (e.g., a 7-methylguanylate cap (m7 G)), a riboswitch sequence (e.g., to allow for regulated stability and/or regulated accessibility by proteins and protein complexes), a sequence that forms a dsRNA duplex (i.e., a hairpin), a sequence that targets the RNA to a subcellular location (e.g., nucleus, mitochondria, chloroplasts, and the like), a modification or sequence that provides for tracking (e.g., direct conjugation to a fluorescent molecule, conjugation to a moiety that facilitates fluorescent detection, a sequence that allows for fluorescent detection, etc.), and/or a modification or sequence that provides a binding site for proteins (e.g., proteins that act on DNA, including transcriptional activators, transcriptional repressors, DNA methyltransferases, DNA demethylases, histone acetyltransferases, histone deacetylases, and the like).

### Spacer Sequence

[0124] The spacer sequence hybridizes to a sequence in a target nucleic acid of interest. The spacer of a genome-targeting nucleic acid can interact with a target nucleic acid in a sequence-specific manner via hybridization (i.e., base pairing). The nucleotide sequence of the spacer can vary depending on the sequence of the target nucleic acid of interest.

[0125] In a CRISPR/Cas system herein, the spacer sequence can be designed to hybridize to a target nucleic acid that is located 5′ of a PAM of the Cas9 enzyme used in the system. The spacer may perfectly match the target sequence or may have mismatches. Each Cas9 enzyme has a particular PAM sequence that it recognizes in a target DNA. For example, S. pyogenes recognizes in a target nucleic acid a PAM that comprises the sequence 5′-NRG-3′, where R comprises either A or G, where N is any nucleotide and N is immediately 3′ of the target nucleic acid sequence targeted by the spacer sequence.

[0126] The target nucleic acid sequence can comprise 20 nucleotides. The target nucleic acid can comprise less than 20 nucleotides. The target nucleic acid can comprise more than 20 nucleotides. The target nucleic acid can comprise at least: 5, 10, 15, 16, 17, 18, 19, 20, 21, 22, 23, 24, 25, 30 or more nucleotides. The target nucleic acid can comprise at most: 5, 10, 15, 16, 17, 18, 19, 20, 21, 22, 23, 24, 25, 30 or more nucleotides. The target nucleic acid sequence can comprise 20 bases immediately 5′ of the first nucleotide of the PAM. For example, in a sequence comprising 5′-NN G-3′ (SEQ ID NO: 83,966), the target nucleic acid can comprise the sequence that corresponds to the Ns, wherein N is any nucleotide, and the underlined NRG sequence is the S. pyogenes PAM. This target nucleic acid sequence is often referred to as the PAM strand, and the complementary nucleic acid sequence is often referred to the non-PAM strand. One of skill in the art would recognize that the spacer sequence hybridizes to the non-PAM strand of the target nucleic acid (FIGS. 1A and 1B).

[0127] The spacer sequence that hybridizes to the target nucleic acid can have a length of at least about 6 nucleotides (nt). The spacer sequence can be at least about 6 nt, at least about 10 nt, at least about 15 nt, at least about 18 nt, at least about 19 nt, at least about 20 nt, at least about 25 nt, at least about 30 nt, at least about 35 nt or at least about 40 nt, from about 6 nt to about 80 nt, from about 6 nt to about 50 nt, from about 6 nt to about 45 nt, from about 6 nt to about 40 nt, from about 6 nt to about 35 nt, from about 6 nt to about 30 nt, from about 6 nt to about 25 nt, from about 6 nt to about 20 nt, from about 6 nt to about 19 nt, from about 10 nt to about 50 nt, from about 10 nt to about 45 nt, from about 10 nt to about 40 nt, from about 10 nt to about 35 nt, from about 10 nt to about 30 nt, from about 10 nt to about 25 nt, from about 10 nt to about 20 nt, from about 10 nt to about 19 nt, from about 19 nt to about 25 nt, from about 19 nt to about 30 nt, from about 19 nt to about 35 nt, from about 19 nt to about 40 nt, from about 19 nt to about 45 nt, from about 19 nt to about 50 nt, from about 19 nt to about 60 nt, from about 20 nt to about 25 nt, from about 20 nt to about 30 nt, from about 20 nt to about 35 nt, from about 20 nt to about 40 nt, from about 20 nt to about 45 nt, from about 20 nt to about 50 nt, or from about 20 nt to about 60 nt. In some examples, the spacer sequence can comprise 20 nucleotides. In some examples, the spacer sequence can comprise 19 nucleotides. In some examples, the spacer sequence can comprise 18 nucleotides. In some examples, the spacer sequence can comprise 21 nucleotides. In some examples, the spacer sequence can comprise 22 nucleotides.

[0128] In some examples, the percent complementarity between the spacer sequence and the target nucleic acid is at least about 30%, at least about 40%, at least about 50%, at least about 60%, at least about 65%, at least about 70%, at least about 75%, at least about 80%, at least about 85%, at least about 90%, at least about 95%, at least about 97%, at least about 98%, at least about 99%, or 100%. In some examples, the percent complementarity between the spacer sequence and the target nucleic acid is at most about 30%, at most about 40%, at most about 50%, at most about 60%, at most about 65%, at most about 70%, at most about 75%, at most about 80%, at most about 85%, at most about 90%, at most about 95%, at most about 97%, at most about 98%, at most about 99%, or 100%. In some examples, the percent complementarity between the spacer sequence and the target nucleic acid is 100% over the six contiguous 5′-most nucleotides of the target sequence of the complementary strand of the target nucleic acid. The percent complementarity between the spacer sequence and the target nucleic acid can be at least 60% over about 20 contiguous nucleotides. The length of the spacer sequence and the target nucleic acid can differ by 1 to 6 nucleotides, which may be thought of as a bulge or bulges.

[0129] The spacer sequence can be designed or chosen using a computer program. The computer program can use variables, such as predicted melting temperature, secondary structure formation, predicted annealing temperature, sequence identity, genomic context, chromatin accessibility, % GC, frequency of genomic occurrence (e.g., of sequences that are identical or are similar but vary in one or more spots as a result of mismatch, insertion or deletion), methylation status, presence of SNPs, and the like.

### Minimum CRISPR Repeat Sequence

[0130] In some aspects, a minimum CRISPR repeat sequence is a sequence with at least about 30%, about 40%, about 50%, about 60%, about 65%, about 70%, about 75%, about 80%, about 85%, about 90%, about 95%, or 100% sequence identity to a reference CRISPR repeat sequence (e.g., crRNA from S. pyogenes).

[0131] In some aspects, a minimum CRISPR repeat sequence comprises nucleotides that can hybridize to a minimum tracrRNA sequence in a cell. The minimum CRISPR repeat sequence and a minimum tracrRNA sequence can form a duplex, i.e. a base-paired double-stranded structure. Together, the minimum CRISPR repeat sequence and the minimum tracrRNA sequence can bind to the site-directed polypeptide. At least a part of the minimum CRISPR repeat sequence can hybridize to the minimum tracrRNA sequence. At least a part of the minimum CRISPR repeat sequence can comprise at least about 30%, about 40%, about 50%, about 60%, about 65%, about 70%, about 75%, about 80%, about 85%, about 90%, about 95%, or 100% complementary to the minimum tracrRNA sequence. In some aspects, at least a part of the minimum CRISPR repeat sequence comprises at most about 30%, about 40%, about 50%, about 60%, about 65%, about 70%, about 75%, about 80%, about 85%, about 90%, about 95%, or 100% complementary to the minimum tracrRNA sequence.

[0132] The minimum CRISPR repeat sequence can have a length from about 7 nucleotides to about 100 nucleotides. For example, the length of the minimum CRISPR repeat sequence is from about 7 nucleotides (nt) to about 50 nt, from about 7 nt to about 40 nt, from about 7 nt to about 30 nt, from about 7 nt to about 25 nt, from about 7 nt to about 20 nt, from about 7 nt to about 15 nt, from about 8 nt to about 40 nt, from about 8 nt to about 30 nt, from about 8 nt to about 25 nt, from about 8 nt to about 20 nt, from about 8 nt to about 15 nt, from about 15 nt to about 100 nt, from about 15 nt to about 80 nt, from about 15 nt to about 50 nt, from about 15 nt to about 40 nt, from about 15 nt to about 30 nt, or from about 15 nt to about 25 nt. In some aspects, the minimum CRISPR repeat sequence is approximately 9 nucleotides in length. In some aspects, the minimum CRISPR repeat sequence is approximately 12 nucleotides in length.

[0133] The minimum CRISPR repeat sequence can be at least about 60% identical to a reference minimum CRISPR repeat sequence (e.g., wild-type crRNA from S. pyogenes) over a stretch of at least 6, 7, or 8 contiguous nucleotides. For example, the minimum CRISPR repeat sequence can be at least about 65% identical, at least about 70% identical, at least about 75% identical, at least about 80% identical, at least about 85% identical, at least about 90% identical, at least about 95% identical, at least about 98% identical, at least about 99% identical or 100% identical to a reference minimum CRISPR repeat sequence over a stretch of at least 6, 7, or 8 contiguous nucleotides.

Minimum tracrRNA Sequence

[0134] A minimum tracrRNA sequence can be a sequence with at least about 30%, about 40%, about 50%, about 60%, about 65%, about 70%, about 75%, about 80%, about 85%, about 90%, about 95%, or 100% sequence identity to a reference tracrRNA sequence (e.g., wild type tracrRNA from S. pyogenes).

[0135] A minimum tracrRNA sequence can comprise nucleotides that hybridize to a minimum CRISPR repeat sequence in a cell. A minimum tracrRNA sequence and a minimum CRISPR repeat sequence form a duplex, i.e. a base-paired double-stranded structure. Together, the minimum tracrRNA sequence and the minimum CRISPR repeat can bind to a site-directed polypeptide. At least a part of the minimum tracrRNA sequence can hybridize to the minimum CRISPR repeat sequence. The minimum tracrRNA sequence can be at least about 30%, about 40%, about 50%, about 60%, about 65%, about 70%, about 75%, about 80%, about 85%, about 90%, about 95%, or 100% complementary to the minimum CRISPR repeat sequence.

[0136] The minimum tracrRNA sequence can have a length from about 7 nucleotides to about 100 nucleotides. For example, the minimum tracrRNA sequence can be from about 7 nucleotides (nt) to about 50 nt, from about 7 nt to about 40 nt, from about 7 nt to about 30 nt, from about 7 nt to about 25 nt, from about 7 nt to about 20 nt, from about 7 nt to about 15 nt, from about 8 nt to about 40 nt, from about 8 nt to about 30 nt, from about 8 nt to about 25 nt, from about 8 nt to about 20 nt, from about 8 nt to about 15 nt, from about 15 nt to about 100 nt, from about 15 nt to about 80 nt, from about 15 nt to about 50 nt, from about 15 nt to about 40 nt, from about 15 nt to about 30 nt or from about 15 nt to about 25 nt long. The minimum tracrRNA sequence can be approximately 9 nucleotides in length. The minimum tracrRNA sequence can be approximately 12 nucleotides. The minimum tracrRNA can consist of tracrRNA nt 23-48 described in Jinek et al., supra.

[0137] The minimum tracrRNA sequence can be at least about 60% identical to a reference minimum tracrRNA (e.g., wild type, tracrRNA from S. pyogenes) sequence over a stretch of at least 6, 7, or 8 contiguous nucleotides. For example, the minimum tracrRNA sequence can be at least about 65% identical, about 70% identical, about 75% identical, about 80% identical, about 85% identical, about 90% identical, about 95% identical, about 98% identical, about 99% identical or 100% identical to a reference minimum tracrRNA sequence over a stretch of at least 6, 7, or 8 contiguous nucleotides.

[0138] The duplex between the minimum CRISPR RNA and the minimum tracrRNA can comprise a double helix. The duplex between the minimum CRISPR RNA and the minimum tracrRNA can comprise at least about 1, 2, 3, 4, 5, 6, 7, 8, 9, or 10 or more nucleotides. The duplex between the minimum CRISPR RNA and the minimum tracrRNA can comprise at most about 1, 2, 3, 4, 5, 6, 7, 8, 9, or 10 or more nucleotides.

[0139] The duplex can comprise a mismatch (i.e., the two strands of the duplex are not 100% complementary). The duplex can comprise at least about 1, 2, 3, 4, or 5 or mismatches. The duplex can comprise at most about 1, 2, 3, 4, or 5 or mismatches. The duplex can comprise no more than 2 mismatches.

### Bulges

[0140] In some cases, there can be a “bulge” in the duplex between the minimum CRISPR RNA and the minimum tracrRNA. A bulge is an unpaired region of nucleotides within the duplex. A bulge can contribute to the binding of the duplex to the site-directed polypeptide. The bulge can comprise, on one side of the duplex, an unpaired 5′-XXXY-3′ where X is any purine and Y comprises a nucleotide that can form a wobble pair with a nucleotide on the opposite strand, and an unpaired nucleotide region on the other side of the duplex. The number of unpaired nucleotides on the two sides of the duplex can be different.

[0141] In one example, the bulge can comprise an unpaired purine (e.g., adenine) on the minimum CRISPR repeat strand of the bulge. In some examples, the bulge can comprise an unpaired 5′-AAGY-3′ of the minimum tracrRNA sequence strand of the bulge, where Y comprises a nucleotide that can form a wobble pairing with a nucleotide on the minimum CRISPR repeat strand.

[0142] A bulge on the minimum CRISPR repeat side of the duplex can comprise at least 1, 2, 3, 4, or 5 or more unpaired nucleotides. A bulge on the minimum CRISPR repeat side of the duplex can comprise at most 1, 2, 3, 4, or 5 or more unpaired nucleotides. A bulge on the minimum CRISPR repeat side of the duplex can comprise 1 unpaired nucleotide.

[0143] A bulge on the minimum tracrRNA sequence side of the duplex can comprise at least 1, 2, 3, 4, 5, 6, 7, 8, 9, or 10 or more unpaired nucleotides. A bulge on the minimum tracrRNA sequence side of the duplex can comprise at most 1, 2, 3, 4, 5, 6, 7, 8, 9, or 10 or more unpaired nucleotides. A bulge on a second side of the duplex (e.g., the minimum tracrRNA sequence side of the duplex) can comprise 4 unpaired nucleotides.

[0144] A bulge can comprise at least one wobble pairing. In some examples, a bulge can comprise at most one wobble pairing. A bulge can comprise at least one purine nucleotide. A bulge can comprise at least 3 purine nucleotides. A bulge sequence can comprise at least 5 purine nucleotides. A bulge sequence can comprise at least one guanine nucleotide. In some examples, a bulge sequence can comprise at least one adenine nucleotide.

### Hairpins

[0145] In various examples, one or more hairpins can be located 3′ to the minimum tracrRNA in the 3′ tracrRNA sequence.

[0146] The hairpin can start at least about 1, 2, 3, 4, 5, 6, 7, 8, 9, 10, 15, or 20 or more nucleotides 3′ from the last paired nucleotide in the minimum CRISPR repeat and minimum tracrRNA sequence duplex. The hairpin can start at most about 1, 2, 3, 4, 5, 6, 7, 8, 9 or 10 or more nucleotides 3′ of the last paired nucleotide in the minimum CRISPR repeat and minimum tracrRNA sequence duplex.

[0147] The hairpin can comprise at least about 1, 2, 3, 4, 5, 6, 7, 8, 9, 10, 15, or 20 or more consecutive nucleotides. The hairpin can comprise at most about 1, 2, 3, 4, 5, 6, 7, 8, 9, 10, 15, or more consecutive nucleotides.

[0148] The hairpin can comprise a CC dinucleotide (i.e., two consecutive cytosine nucleotides).

[0149] The hairpin can comprise duplexed nucleotides (e.g., nucleotides in a hairpin, hybridized together). For example, a hairpin can comprise a CC dinucleotide that is hybridized to a GG dinucleotide in a hairpin duplex of the 3′ tracrRNA sequence.

[0150] One or more of the hairpins can interact with guide RNA-interacting regions of a site-directed polypeptide.

[0151] In some examples, there are two or more hairpins, and in other examples there are three or more hairpins. 3′ tracrRNA sequence

[0152] A 3′ tracrRNA sequence can comprise a sequence with at least about 30%, about 40%, about 50%, about 60%, about 65%, about 70%, about 75%, about 80%, about 85%, about 90%, about 95%, or 100% sequence identity to a reference tracrRNA sequence (e.g., a tracrRNA from S. pyogenes).

[0153] The 3′ tracrRNA sequence can have a length from about 6 nucleotides to about 100 nucleotides. For example, the 3′ tracrRNA sequence can have a length from about 6 nucleotides (nt) to about 50 nt, from about 6 nt to about 40 nt, from about 6 nt to about 30 nt, from about 6 nt to about 25 nt, from about 6 nt to about 20 nt, from about 6 nt to about 15 nt, from about 8 nt to about 40 nt, from about 8 nt to about 30 nt, from about 8 nt to about 25 nt, from about 8 nt to about 20 nt, from about 8 nt to about 15 nt, from about 15 nt to about 100 nt, from about 15 nt to about 80 nt, from about 15 nt to about 50 nt, from about 15 nt to about 40 nt, from about 15 nt to about 30 nt, or from about 15 nt to about 25 nt. The 3′ tracrRNA sequence can have a length of approximately 14 nucleotides.

[0154] The 3′ tracrRNA sequence can be at least about 60% identical to a reference 3′ tracrRNA sequence (e.g., wild type 3′ tracrRNA sequence from S. pyogenes) over a stretch of at least 6, 7, or 8 contiguous nucleotides. For example, the 3′ tracrRNA sequence can be at least about 60% identical, about 65% identical, about 70% identical, about 75% identical, about 80% identical, about 85% identical, about 90% identical, about 95% identical, about 98% identical, about 99% identical, or 100% identical, to a reference 3′ tracrRNA sequence (e.g., wild type 3′ tracrRNA sequence from S. pyogenes) over a stretch of at least 6, 7, or 8 contiguous nucleotides.

[0155] The 3′ tracrRNA sequence can comprise more than one duplexed region (e.g., hairpin, hybridized region). The 3′ tracrRNA sequence can comprise two duplexed regions.

[0156] The 3′ tracrRNA sequence can comprise a stem loop structure. The stem loop structure in the 3′ tracrRNA can comprise at least 1, 2, 3, 4, 5, 6, 7, 8, 9, 10, 15 or 20 or more nucleotides. The stem loop structure in the 3′ tracrRNA can comprise at most 1, 2, 3, 4, 5, 6, 7, 8, 9 or 10 or more nucleotides. The stem loop structure can comprise a functional moiety. For example, the stem loop structure can comprise an aptamer, a ribozyme, a protein-interacting hairpin, a CRISPR array, an intron, or an exon. The stem loop structure can comprise at least about 1, 2, 3, 4, or 5 or more functional moieties. The stem loop structure can comprise at most about 1, 2, 3, 4, or 5 or more functional moieties.

[0157] The hairpin in the 3′ tracrRNA sequence can comprise a P-domain. In some examples, the P-domain can comprise a double-stranded region in the hairpin.

tracrRNA Extension Sequence

[0158] A tracrRNA extension sequence may be provided whether the tracrRNA is in the context of single-molecule guides or double-molecule guides. The tracrRNA extension sequence can have a length from about 1 nucleotide to about 400 nucleotides. The tracrRNA extension sequence can have a length of more than 1, 5, 10, 15, 20, 25, 30, 35, 40, 45, 50, 60, 70, 80, 90, 100, 120, 140, 160, 180, 200, 220, 240, 260, 280, 300, 320, 340, 360, 380, or 400 nucleotides. The tracrRNA extension sequence can have a length from about 20 to about 5000 or more nucleotides. The tracrRNA extension sequence can have a length of more than 1000 nucleotides. The tracrRNA extension sequence can have a length of less than 1, 5, 10, 15, 20, 25, 30, 35, 40, 45, 50, 60, 70, 80, 90, 100, 120, 140, 160, 180, 200, 220, 240, 260, 280, 300, 320, 340, 360, 380, 400 or more nucleotides. The tracrRNA extension sequence can have a length of less than 1000 nucleotides. The tracrRNA extension sequence can comprise less than 10 nucleotides in length. The tracrRNA extension sequence can be 10-30 nucleotides in length. The tracrRNA extension sequence can be 30-70 nucleotides in length.

[0159] The tracrRNA extension sequence can comprise a functional moiety (e.g., a stability control sequence, ribozyme, endoribonuclease binding sequence). The functional moiety can comprise a transcriptional terminator segment (i.e., a transcription termination sequence). The functional moiety can have a total length from about 10 nucleotides (nt) to about 100 nucleotides, from about 10 nt to about 20 nt, from about 20 nt to about 30 nt, from about 30 nt to about 40 nt, from about 40 nt to about 50 nt, from about 50 nt to about 60 nt, from about 60 nt to about 70 nt, from about 70 nt to about 80 nt, from about 80 nt to about 90 nt, or from about 90 nt to about 100 nt, from about 15 nt to about 80 nt, from about 15 nt to about 50 nt, from about 15 nt to about 40 nt, from about 15 nt to about 30 nt, or from about 15 nt to about 25 nt. The functional moiety can function in a eukaryotic cell. The functional moiety can function in a prokaryotic cell. The functional moiety can function in both eukaryotic and prokaryotic cells.

[0160] Non-limiting examples of suitable tracrRNA extension functional moieties include a 3′ poly-adenylated tail, a riboswitch sequence (e.g., to allow for regulated stability and/or regulated accessibility by proteins and protein complexes), a sequence that forms a dsRNA duplex (i.e., a hairpin), a sequence that targets the RNA to a subcellular location (e.g., nucleus, mitochondria, chloroplasts, and the like), a modification or sequence that provides for tracking (e.g., direct conjugation to a fluorescent molecule, conjugation to a moiety that facilitates fluorescent detection, a sequence that allows for fluorescent detection, etc.), and/or a modification or sequence that provides a binding site for proteins (e.g., proteins that act on DNA, including transcriptional activators, transcriptional repressors, DNA methyltransferases, DNA demethylases, histone acetyltransferases, histone deacetylases, and the like). The tracrRNA extension sequence can comprise a primer binding site or a molecular index (e.g., barcode sequence). The tracrRNA extension sequence can comprise one or more affinity tags.

### Single-Molecule Guide Linker Sequence

[0161] The linker sequence of a single-molecule guide nucleic acid can have a length from about 3 nucleotides to about 100 nucleotides. In Jinek et al., supra, for example, a simple 4 nucleotide “tetraloop” (-GAAA-) was used, Science, 337(6096):816-821 (2012). An illustrative linker has a length from about 3 nucleotides (nt) to about 90 nt, from about 3 nt to about 80 nt, from about 3 nt to about 70 nt, from about 3 nt to about 60 nt, from about 3 nt to about 50 nt, from about 3 nt to about 40 nt, from about 3 nt to about 30 nt, from about 3 nt to about 20 nt, from about 3 nt to about 10 nt. For example, the linker can have a length from about 3 nt to about 5 nt, from about 5 nt to about 10 nt, from about 10 nt to about 15 nt, from about 15 nt to about 20 nt, from about 20 nt to about 25 nt, from about 25 nt to about 30 nt, from about 30 nt to about 35 nt, from about 35 nt to about 40 nt, from about 40 nt to about 50 nt, from about 50 nt to about 60 nt, from about 60 nt to about 70 nt, from about 70 nt to about 80 nt, from about 80 nt to about 90 nt, or from about 90 nt to about 100 nt. The linker of a single-molecule guide nucleic acid can be between 4 and 40 nucleotides. The linker can be at least about 100, 500, 1000, 1500, 2000, 2500, 3000, 3500, 4000, 4500, 5000, 5500, 6000, 6500, or 7000 or more nucleotides. The linker can be at most about 100, 500, 1000, 1500, 2000, 2500, 3000, 3500, 4000, 4500, 5000, 5500, 6000, 6500, or 7000 or more nucleotides.

[0162] Linkers can comprise any of a variety of sequences, although in some examples the linker will not comprise sequences that have extensive regions of homology with other portions of the guide RNA, which might cause intramolecular binding that could interfere with other functional regions of the guide. In Jinek et al., supra, a simple 4 nucleotide sequence -GAAA- was used, Science, 337(6096):816-821 (2012), but numerous other sequences, including longer sequences can likewise be used.

[0163] The linker sequence can comprise a functional moiety. For example, the linker sequence can comprise one or more features, including an aptamer, a ribozyme, a protein-interacting hairpin, a protein binding site, a CRISPR array, an intron, or an exon. The linker sequence can comprise at least about 1, 2, 3, 4, or 5 or more functional moieties. In some examples, the linker sequence can comprise at most about 1, 2, 3, 4, or 5 or more functional moieties.

### Nucleic Acid Modifications (Chemical and Structural Modifications)

[0164] In some aspects, polynucleotides introduced into cells can comprise one or more modifications that can be used individually or in combination, for example, to enhance activity, stability or specificity, alter delivery, reduce innate immune responses in host cells, or for other enhancements, as further described herein and known in the art.

[0165] In certain examples, modified polynucleotides can be used in the CRISPR/Cas9 or CRISPR/Cpf1 system, in which case the guide RNAs (either single-molecule guides or double-molecule guides) and/or a DNA or an RNA encoding a Cas9 or Cpf1 endonuclease introduced into a cell can be modified, as described and illustrated below. Such modified polynucleotides can be used in the CRISPR/Cas9 or CRISPR/Cpf1 system to edit any one or more genomic loci.

[0166] Using the CRISPR/Cas9 or CRISPR/Cpf1 system for purposes of non-limiting illustrations of such uses, modifications of guide RNAs can be used to enhance the formation or stability of the CRISPR/Cas9 or CRISPR/Cpf1 genome editing complex comprising guide RNAs, which can be single-molecule guides or double-molecule, and a Cas9 or Cpf1 endonuclease. Modifications of guide RNAs can also or alternatively be used to enhance the initiation, stability or kinetics of interactions between the genome editing complex with the target sequence in the genome, which can be used, for example, to enhance on-target activity. Modifications of guide RNAs can also or alternatively be used to enhance specificity, e.g., the relative rates of genome editing at the on-target site as compared to effects at other (off-target) sites.

[0167] Modifications can also or alternatively be used to increase the stability of a guide RNA, e.g., by increasing its resistance to degradation by ribonucleases (RNases) present in a cell, thereby causing its half-life in the cell to be increased. Modifications enhancing guide RNA half-life can be particularly useful in aspects in which a Cas9 or Cpf1 endonuclease is introduced into the cell to be edited via an RNA that needs to be translated in order to generate endonuclease, because increasing the half-life of guide RNAs introduced at the same time as the RNA encoding the endonuclease can be used to increase the time that the guide RNAs and the encoded Cas9 or Cpf1 endonuclease co-exist in the cell.

[0168] Modifications can also or alternatively be used to decrease the likelihood or degree to which RNAs introduced into cells elicit innate immune responses. Such responses, which have been well characterized in the context of RNA interference (RNAi), including small-interfering RNAs (siRNAs), as described below and in the art, tend to be associated with reduced half-life of the RNA and/or the elicitation of cytokines or other factors associated with immune responses.

[0169] One or more types of modifications can also be made to RNAs encoding an endonuclease that are introduced into a cell, including, without limitation, modifications that enhance the stability of the RNA (such as by increasing its degradation by RNases present in the cell), modifications that enhance translation of the resulting product (i.e. the endonuclease), and/or modifications that decrease the likelihood or degree to which the RNAs introduced into cells elicit innate immune responses.

[0170] Combinations of modifications, such as the foregoing and others, can likewise be used. In the case of CRISPR/Cas9 or CRISPR/Cpf1, for example, one or more types of modifications can be made to guide RNAs (including those exemplified above), and/or one or more types of modifications can be made to RNAs encoding Cas endonuclease (including those exemplified above).

[0171] By way of illustration, guide RNAs used in the CRISPR/Cas9 or CRISPR/Cpf1 system, or other smaller RNAs can be readily synthesized by chemical means, enabling a number of modifications to be readily incorporated, as illustrated below and described in the art. While chemical synthetic procedures are continually expanding, purifications of such RNAs by procedures such as high-performance liquid chromatography (HPLC, which avoids the use of gels such as PAGE) tends to become more challenging as polynucleotide lengths increase significantly beyond a hundred or so nucleotides. One approach that can be used for generating chemically-modified RNAs of greater length is to produce two or more molecules that are ligated together. Much longer RNAs, such as those encoding a Cas9 endonuclease, are more readily generated enzymatically. While fewer types of modifications are available for use in enzymatically produced RNAs, there are still modifications that can be used to, e.g., enhance stability, reduce the likelihood or degree of innate immune response, and/or enhance other attributes, as described further below and in the art; and new types of modifications are regularly being developed.

[0172] By way of illustration of various types of modifications, especially those used frequently with smaller chemically synthesized RNAs, modifications can comprise one or more nucleotides modified at the 2′ position of the sugar, in some aspects a 2′-O-alkyl, 2′-O-alkyl-O-alkyl, or 2′-fluoro-modified nucleotide. In some examples, RNA modifications include 2′-fluoro, 2′-amino or 2′-O-methyl modifications on the ribose of pyrimidines, abasic residues, or an inverted base at the 3′ end of the RNA. Such modifications are routinely incorporated into oligonucleotides and these oligonucleotides have been shown to have a higher Tm (i.e., higher target binding affinity) than 2′-deoxyoligonucleotides against a given target.

[0173] A number of nucleotide and nucleoside modifications have been shown to make the oligonucleotide into which they are incorporated more resistant to nuclease digestion than the native oligonucleotide; these modified oligos survive intact for a longer time than unmodified oligonucleotides. Specific examples of modified oligonucleotides include those comprising modified backbones, for example, phosphorothioates, phosphotriesters, methyl phosphonates, short chain alkyl or cycloalkyl intersugar linkages or short chain heteroatomic or heterocyclic intersugar linkages. Some oligonucleotides are oligonucleotides with phosphorothioate backbones and those with heteroatom backbones, particularly CH₂—NH—O—CH₂, CH, ˜N(CH₃)—O—CH₂ (known as a methylene(methylimino) or MMI backbone), CH₂—O—N(CH₃)—CH₂, CH₂—N(CH₃)—N(CH₃)—CH₂ and O—N(CH₃)—CH₂—CH₂ backbones, wherein the native phosphodiester backbone is represented as O—P—O—CH); amide backbones [see De Mesmaeker et al., Ace. Chem. Res., 28:366-374 (1995)]; morpholino backbone structures (see Summerton and Weller, U.S. Pat. No. 5,034,506); peptide nucleic acid (PNA) backbone (wherein the phosphodiester backbone of the oligonucleotide is replaced with a polyamide backbone, the nucleotides being bound directly or indirectly to the aza nitrogen atoms of the polyamide backbone, see Nielsen et al., Science 1991, 254, 1497). Phosphorus-containing linkages include, but are not limited to, phosphorothioates, chiral phosphorothioates, phosphorodithioates, phosphotriesters, aminoalkylphosphotriesters, methyl and other alkyl phosphonates comprising 3′alkylene phosphonates and chiral phosphonates, phosphinates, phosphoramidates comprising 3′-amino phosphoramidate and aminoalkylphosphoramidates, thionophosphoramidates, thionoalkylphosphonates, thionoalkylphosphotriesters, and boranophosphates having normal 3′-5′ linkages, 2′-5′ linked analogs of these, and those having inverted polarity wherein the adjacent pairs of nucleoside units are linked 3′-5′ to 5′-3′ or 2′-5′ to 5′-2′; see U.S. Pat. Nos. 3,687,808; 4,469,863; 4,476,301; 5,023,243; 5,177,196; 5,188,897; 5,264,423; 5,276,019; 5,278,302; 5,286,717; 5,321,131; 5,399,676; 5,405,939; 5,453,496; 5,455,233; 5,466,677; 5,476,925; 5,519,126; 5,536,821; 5,541,306; 5,550,111; 5,563,253; 5,571,799; 5,587,361; and 5,625,050.

[0174] Morpholino-based oligomeric compounds are described in Braasch and David Corey, Biochemistry, 41(14): 4503-4510 (2002); Genesis, Volume 30, Issue 3, (2001); Heasman, Dev. Biol., 243: 209-214 (2002); Nasevicius et al., Nat. Genet., 26:216-220 (2000); Lacerra et al., Proc. Natl. Acad. Sci., 97: 9591-9596 (2000); and U.S. Pat. No. 5,034,506, issued Jul. 23, 1991.

[0175] Cyclohexenyl nucleic acid oligonucleotide mimetics are described in Wang et al., J. Am. Chem. Soc., 122: 8595-8602 (2000).

[0176] Modified oligonucleotide backbones that do not include a phosphorus atom therein have backbones that are formed by short chain alkyl or cycloalkyl internucleoside linkages, mixed heteroatom and alkyl or cycloalkyl internucleoside linkages, or one or more short chain heteroatomic or heterocyclic internucleoside linkages. These comprise those having morpholino linkages (formed in part from the sugar portion of a nucleoside); siloxane backbones; sulfide, sulfoxide and sulfone backbones; formacetyl and thioformacetyl backbones; methylene formacetyl and thioformacetyl backbones; alkene containing backbones; sulfamate backbones; methyleneimino and methylenehydrazino backbones; sulfonate and sulfonamide backbones; amide backbones; and others having mixed N, O, S, and CH₂ component parts; see U.S. Pat. Nos. 5,034,506; 5,166,315; 5,185,444; 5,214,134; 5,216,141; 5,235,033; 5,264,562; 5,264,564; 5,405,938; 5,434,257; 5,466,677; 5,470,967; 5,489,677; 5,541,307; 5,561,225; 5,596,086; 5,602,240; 5,610,289; 5,602,240; 5,608,046; 5,610,289; 5,618,704; 5,623,070; 5,663,312; 5,633,360; 5,677,437; and 5,677,439.

[0177] One or more substituted sugar moieties can also be included, e.g., one of the following at the 2′ position: OH, SH, SCH₃, F, OCN, OCH₃ OCH₃, OCH₃ O(CH₂)n CH₃, O(CH₂)n NH₂, or O(CH₂)n CH₃, where n is from 1 to about 10; C1 to C10 lower alkyl, alkoxyalkoxy, substituted lower alkyl, alkaryl or aralkyl; Cl; Br; CN; CF₃; OCF₃; O-, S-, or N-alkyl; O-, S-, or N-alkenyl; SOCH₃; SO₂ CH₃; ONO₂; NO₂; NO₂; NH₂; heterocycloalkyl; heterocycloalkaryl; aminoalkylamino; polyalkylamino; substituted silyl; an RNA cleaving group; a reporter group; an intercalator; a group for improving the pharmacokinetic properties of an oligonucleotide; or a group for improving the pharmacodynamic properties of an oligonucleotide and other substituents having similar properties. In some aspects, a modification includes 2′-methoxyethoxy (2′-O—CH₂CH₂OCH₃, also known as 2′-O-(2-methoxyethyl)) (Martin et al, HeIv. Chim. Acta, 1995, 78, 486). Other modifications include 2′-methoxy (2′-O—CH₃), 2′-propoxy (2′-OCH₂ CH₂CH₃) and 2′-fluoro (2′-F). Similar modifications may also be made at other positions on the oligonucleotide, particularly the 3′ position of the sugar on the 3′ terminal nucleotide and the 5′ position of 5′ terminal nucleotide. Oligonucleotides may also have sugar mimetics, such as cyclobutyls in place of the pentofuranosyl group.

[0178] In some examples, both a sugar and an internucleoside linkage, i.e., the backbone, of the nucleotide units can be replaced with novel groups. The base units can be maintained for hybridization with an appropriate nucleic acid target compound. One such oligomeric compound, an oligonucleotide mimetic that has been shown to have excellent hybridization properties, is referred to as a peptide nucleic acid (PNA). In PNA compounds, the sugar-backbone of an oligonucleotide can be replaced with an amide containing backbone, for example, an aminoethylglycine backbone. The nucleobases can be retained and bound directly or indirectly to aza nitrogen atoms of the amide portion of the backbone. Representative U.S. patents that teach the preparation of PNA compounds comprise, but are not limited to, U.S. Pat. Nos. 5,539,082; 5,714,331; and 5,719,262. Further teaching of PNA compounds can be found in Nielsen et al, Science, 254: 1497-1500 (1991).

[0179] Guide RNAs can also include, additionally or alternatively, nucleobase (often referred to in the art simply as “base”) modifications or substitutions. As used herein, “unmodified” or “natural” nucleobases include adenine (A), guanine (G), thymine (T), cytosine (C), and uracil (U). Modified nucleobases include nucleobases found only infrequently or transiently in natural nucleic acids, e.g., hypoxanthine, 6-methyladenine, 5-Me pyrimidines, particularly 5-methylcytosine (also referred to as 5-methyl-2′ deoxycytosine and often referred to in the art as 5-Me-C), 5-hydroxymethylcytosine (HMC), glycosyl HMC and gentobiosyl HMC, as well as synthetic nucleobases, e.g., 2-aminoadenine, 2-(methylamino) adenine, 2-(imidazolylalkyl)adenine, 2-(aminoalklyamino) adenine or other heterosubstituted alkyladenines, 2-thiouracil, 2-thiothymine, 5-bromouracil, 5-hydroxymethyluracil, 8-azaguanine, 7-deazaguanine, N6 (6-aminohexyl) adenine, and 2,6-diaminopurine. Kornberg, A., DNA Replication, W. H. Freeman & Co., San Francisco, pp. 75-77 (1980); Gebeyehu et al., Nucl. Acids Res. 15:4513 (1997). A “universal” base known in the art, e.g., inosine, can also be included. 5-Me-C substitutions have been shown to increase nucleic acid duplex stability by 0.6-1.2° C. (Sanghvi, Y. S., in Crooke, S. T. and Lebleu, B., eds., Antisense Research and Applications, CRC Press, Boca Raton, 1993, pp. 276-278) and are aspects of base substitutions.

[0180] Modified nucleobases can comprise other synthetic and natural nucleobases, such as 5-methylcytosine (5-me-C), 5-hydroxymethyl cytosine, xanthine, hypoxanthine, 2-aminoadenine, 6-methyl and other alkyl derivatives of adenine and guanine, 2-propyl and other alkyl derivatives of adenine and guanine, 2-thiouracil, 2-thiothymine and 2-thiocytosine, 5-halouracil and cytosine, 5-propynyl uracil and cytosine, 6-azo uracil, cytosine and thymine, 5-uracil (pseudo-uracil), 4-thiouracil, 8-halo, 8-amino, 8-thiol, 8-thioalkyl, 8-hydroxyl and other 8-substituted adenines and guanines, 5-halo particularly 5-bromo, 5-trifluoromethyl and other 5-substituted uracils and cytosines, 7-methylquanine and 7-methyladenine, 8-azaguanine and 8-azaadenine, 7-deazaguanine and 7-deazaadenine, and 3-deazaguanine and 3-deazaadenine.

[0181] Further, nucleobases can comprise those disclosed in U.S. Pat. No. 3,687,808, those disclosed in ‘The Concise Encyclopedia of Polymer Science And Engineering’, pages 858-859, Kroschwitz, J. I., ed. John Wiley & Sons, 1990, those disclosed by Englisch et al., Angewandle Chemie, International Edition’, 1991, 30, page 613, and those disclosed by Sanghvi, Y. S., Chapter 15, Antisense Research and Applications’, pages 289-302, Crooke, S. T. and Lebleu, B. ea., CRC Press, 1993. Certain of these nucleobases are particularly useful for increasing the binding affinity of the oligomeric compounds of the present disclosure. These include 5-substituted pyrimidines, 6-azapyrimidines and N-2, N-6 and 0-6 substituted purines, comprising 2-aminopropyladenine, 5-propynyluracil and 5-propynylcytosine. 5-methylcytosine substitutions have been shown to increase nucleic acid duplex stability by 0.6-1.2° C. (Sanghvi, Y. S., Crooke, S. T. and Lebleu, B., eds, ‘Antisense Research and Applications’, CRC Press, Boca Raton, 1993, pp. 276-278) and are aspects of base substitutions, even more particularly when combined with 2′-O-methoxyethyl sugar modifications. Modified nucleobases are described in U.S. Pat. No. 3,687,808, as well as U.S. Pat. Nos. 4,845,205; 5,130,302; 5,134,066; 5,175,273; 5,367,066; 5,432,272; 5,457,187; 5,459,255; 5,484,908; 5,502,177; 5,525,711; 5,552,540; 5,587,469; 5,596,091; 5,614,617; 5,681,941; 5,750,692; 5,763,588; 5,830,653; 6,005,096; and U.S. Patent Application Publication 2003/0158403.

[0182] Thus, the term “modified” refers to a non-natural sugar, phosphate, or base that is incorporated into a guide RNA, an endonuclease, or both a guide RNA and an endonuclease. It is not necessary for all positions in a given oligonucleotide to be uniformly modified, and in fact more than one of the aforementioned modifications can be incorporated in a single oligonucleotide, or even in a single nucleoside within an oligonucleotide.

[0183] The guide RNAs and/or mRNA (or DNA) encoding an endonuclease can be chemically linked to one or more moieties or conjugates that enhance the activity, cellular distribution, or cellular uptake of the oligonucleotide. Such moieties comprise, but are not limited to, lipid moieties such as a cholesterol moiety [Letsinger et al., Proc. Natl. Acad. Sci. USA, 86: 6553-6556 (1989)]; cholic acid [Manoharan et al., Bioorg. Med. Chem. Let., 4: 1053-1060 (1994)]; a thioether, e.g., hexyl-S-tritylthiol [Manoharan et al, Ann. N. Y. Acad. Sci., 660: 306-309 (1992) and Manoharan et al., Bioorg. Med. Chem. Let., 3: 2765-2770 (1993)]; a thiocholesterol [Oberhauser et al., Nucl. Acids Res., 20: 533-538 (1992)]; an aliphatic chain, e.g., dodecandiol or undecyl residues [Kabanov et al., FEBS Lett., 259: 327-330 (1990) and Svinarchuk et al., Biochimie, 75: 49-54 (1993)]; a phospholipid, e.g., di-hexadecyl-rac-glycerol or triethylammonium 1,2-di-O-hexadecyl-rac-glycero-3-H-phosphonate [Manoharan et al., Tetrahedron Lett., 36: 3651-3654 (1995) and Shea et al., Nucl. Acids Res., 18: 3777-3783 (1990)]; a polyamine or a polyethylene glycol chain [Mancharan et al., Nucleosides & Nucleotides, 14: 969-973 (1995)]; adamantane acetic acid [Manoharan et al., Tetrahedron Lett., 36: 3651-3654 (1995)]; a palmityl moiety [(Mishra et al., Biochim. Biophys. Acta, 1264: 229-237 (1995)]; or an octadecylamine or hexylamino-carbonyl-t oxycholesterol moiety [Crooke et al., J. Pharmacol. Exp. Ther., 277: 923-937 (1996)]. See also U.S. Pat. Nos. 4,828,979; 4,948,882; 5,218,105; 5,525,465; 5,541,313; 5,545,730; 5,552,538; 5,578,717; 5,580,731; 5,591,584; 5,109,124; 5,118,802; 5,138,045; 5,414,077; 5,486,603; 5,512,439; 5,578,718; 5,608,046; 4,587,044; 4,605,735; 4,667,025; 4,762,779; 4,789,737; 4,824,941; 4,835,263; 4,876,335; 4,904,582; 4,958,013; 5,082,830; 5,112,963; 5,214,136; 5,082,830; 5,112,963; 5,214,136; 5,245,022; 5,254,469; 5,258,506; 5,262,536; 5,272,250; 5,292,873; 5,317,098; 5,371,241; 5,391,723; 5,416,203; 5,451,463; 5,510,475; 5,512,667; 5,514,785; 5,565,552; 5,567,810; 5,574,142; 5,585,481; 5,587,371; 5,595,726; 5,597,696; 5,599,923; 5,599, 928 and 5,688,941.

[0184] Sugars and other moieties can be used to target proteins and complexes comprising nucleotides, such as cationic polysomes and liposomes, to particular sites. For example, hepatic cell directed transfer can be mediated via asialoglycoprotein receptors (ASGPRs); see, e.g., Hu, et al., Protein Pept Lett. 21(10): 1025-30 (2014). Other systems known in the art and regularly developed can be used to target biomolecules of use in the present case and/or complexes thereof to particular target cells of interest.

[0185] These targeting moieties or conjugates can include conjugate groups covalently bound to functional groups, such as primary or secondary hydroxyl groups. Conjugate groups of the present disclosure include intercalators, reporter molecules, polyamines, polyamides, polyethylene glycols, polyethers, groups that enhance the pharmacodynamic properties of oligomers, and groups that enhance the pharmacokinetic properties of oligomers. Typical conjugate groups include cholesterols, lipids, phospholipids, biotin, phenazine, folate, phenanthridine, anthraquinone, acridine, fluoresceins, rhodamines, coumarins, and dyes. Groups that enhance the pharmacodynamic properties, in the context of this present disclosure, include groups that improve uptake, enhance resistance to degradation, and/or strengthen sequence-specific hybridization with the target nucleic acid. Groups that enhance the pharmacokinetic properties, in the context of this present disclosure, include groups that improve uptake, distribution, metabolism or excretion of the compounds of the present disclosure. Representative conjugate groups are disclosed in International Patent Application No. PCT/US92/09196, filed Oct. 23, 1992 (published as WO1993007883), and U.S. Pat. No. 6,287,860. Conjugate moieties include, but are not limited to, lipid moieties such as a cholesterol moiety, cholic acid, a thioether, e.g., hexyl-5-tritylthiol, a thiocholesterol, an aliphatic chain, e.g., dodecandiol or undecyl residues, a phospholipid, e.g., di-hexadecyl-rac-glycerol or triethylammonium 1,2-di-O-hexadecyl-rac-glycero-3-H-phosphonate, a polyamine or a polyethylene glycol chain, or adamantane acetic acid, a palmityl moiety, or an octadecylamine or hexylamino-carbonyl-oxy cholesterol moiety. See, e.g., U.S. Pat. Nos. 4,828,979; 4,948,882; 5,218,105; 5,525,465; 5,541,313; 5,545,730; 5,552,538; 5,578,717, 5,580,731; 5,580,731; 5,591,584; 5,109,124; 5,118,802; 5,138,045; 5,414,077; 5,486,603; 5,512,439; 5,578,718; 5,608,046; 4,587,044; 4,605,735; 4,667,025; 4,762,779; 4,789,737; 4,824,941; 4,835,263; 4,876,335; 4,904,582; 4,958,013; 5,082,830; 5,112,963; 5,214,136; 5,082,830; 5,112,963; 5,214,136; 5,245,022; 5,254,469; 5,258,506; 5,262,536; 5,272,250; 5,292,873; 5,317,098; 5,371,241; 5,391,723; 5,416,203, 5,451,463; 5,510,475; 5,512,667; 5,514,785; 5,565,552; 5,567,810; 5,574,142; 5,585,481; 5,587,371; 5,595,726; 5,597,696; 5,599,923; 5,599,928 and 5,688,941.

[0186] Longer polynucleotides that are less amenable to chemical synthesis and are typically produced by enzymatic synthesis can also be modified by various means. Such modifications can include, for example, the introduction of certain nucleotide analogs, the incorporation of particular sequences or other moieties at the 5′ or 3′ ends of molecules, and other modifications. By way of illustration, the mRNA encoding Cas9 is approximately 4 kb in length and can be synthesized by in vitro transcription. Modifications to the mRNA can be applied to, e.g., increase its translation or stability (such as by increasing its resistance to degradation with a cell), or to reduce the tendency of the RNA to elicit an innate immune response that is often observed in cells following introduction of exogenous RNAs, particularly longer RNAs such as that encoding Cas9.

[0187] Numerous such modifications have been described in the art, such as polyA tails, 5′ cap analogs (e.g., Anti Reverse Cap Analog (ARCA) or m7G(5′)ppp(5′)G (mCAP)), modified 5′ or 3′ untranslated regions (UTRs), use of modified bases (such as Pseudo-UTP, 2-Thio-UTP, 5-Methylcytidine-5′-Triphosphate (5-Methyl-CTP) or N6-Methyl-ATP), or treatment with phosphatase to remove 5′ terminal phosphates. These and other modifications are known in the art, and new modifications of RNAs are regularly being developed.

[0188] There are numerous commercial suppliers of modified RNAs, including for example, TriLink Biotech, AxoLabs, Bio-Synthesis Inc., Dharmacon and many others. As described by TriLink, for example, 5-Methyl-CTP can be used to impart desirable characteristics, such as increased nuclease stability, increased translation or reduced interaction of innate immune receptors with in vitro transcribed RNA. 5-Methylcytidine-5′-Triphosphate (5-Methyl-CTP), N6-Methyl-ATP, as well as Pseudo-UTP and 2-Thio-UTP, have also been shown to reduce innate immune stimulation in culture and in vivo while enhancing translation, as illustrated in publications by Kormann et al. and Warren et al. referred to below.

[0189] It has been shown that chemically modified mRNA delivered in vivo can be used to achieve improved therapeutic effects; see, e.g., Kormann et al., Nature Biotechnology 29, 154-157 (2011). Such modifications can be used, for example, to increase the stability of the RNA molecule and/or reduce its immunogenicity. Using chemical modifications such as Pseudo-U, N6-Methyl-A, 2-Thio-U and 5-Methyl-C, it was found that substituting just one quarter of the uridine and cytidine residues with 2-Thio-U and 5-Methyl-C respectively resulted in a significant decrease in toll-like receptor (TLR) mediated recognition of the mRNA in mice. By reducing the activation of the innate immune system, these modifications can be used to effectively increase the stability and longevity of the mRNA in vivo; see, e.g., Kormann et al., supra.

[0190] It has also been shown that repeated administration of synthetic messenger RNAs incorporating modifications designed to bypass innate anti-viral responses can reprogram differentiated human cells to pluripotency. See, e.g., Warren, et al., Cell Stem Cell, 7(5):618-30 (2010). Such modified mRNAs that act as primary reprogramming proteins can be an efficient means of reprogramming multiple human cell types. Such cells are referred to as induced pluripotency stem cells (iPSCs), and it was found that enzymatically synthesized RNA incorporating 5-Methyl-CTP, Pseudo-UTP and an Anti Reverse Cap Analog (ARCA) could be used to effectively evade the cell's antiviral response; see, e.g., Warren et al., supra.

[0191] Other modifications of polynucleotides described in the art include, for example, the use of polyA tails, the addition of 5′ cap analogs (such as m7G(5′)ppp(5′)G (mCAP)), modifications of 5′ or 3′ untranslated regions (UTRs), or treatment with phosphatase to remove 5′ terminal phosphates—and new approaches are regularly being developed.

[0192] A number of compositions and techniques applicable to the generation of modified RNAs for use herein have been developed in connection with the modification of RNA interference (RNAi), including small-interfering RNAs (siRNAs). siRNAs present particular challenges in vivo because their effects on gene silencing via mRNA interference are generally transient, which can require repeat administration. In addition, siRNAs are double-stranded RNAs (dsRNA) and mammalian cells have immune responses that have evolved to detect and neutralize dsRNA, which is often a by-product of viral infection. Thus, there are mammalian enzymes such as PKR (dsRNA-responsive kinase), and potentially retinoic acid-inducible gene I (RIG-I), that can mediate cellular responses to dsRNA, as well as Toll-like receptors (such as TLR3, TLR7 and TLR8) that can trigger the induction of cytokines in response to such molecules; see, e.g., the reviews by Angart et al., Pharmaceuticals (Basel) 6(4): 440-468 (2013); Kanasty et al., Molecular Therapy 20(3): 513-524 (2012); Burnett et al., Biotechnol J. 6(9): 1130-46 (2011); Judge and MacLachlan, Hum Gene Ther 19(2): 111-24 (2008); and references cited therein.

[0193] A large variety of modifications have been developed and applied to enhance RNA stability, reduce innate immune responses, and/or achieve other benefits that can be useful in connection with the introduction of polynucleotides into human cells, as described herein; see, e.g., the reviews by Whitehead K A et al., Annual Review of Chemical and Biomolecular Engineering, 2: 77-96 (2011); Gaglione and Messere, Mini Rev Med Chem, 10(7):578-95 (2010); Chernolovskaya et al, Curr Opin Mol Ther., 12(2):158-67 (2010); Deleavey et al., Curr Protoc Nucleic Acid Chem Chapter 16:Unit 16.3 (2009); Behlke, Oligonucleotides 18(4):305-19 (2008); Fucini et al., Nucleic Acid Ther 22(3): 205-210 (2012); Bremsen et al., Front Genet 3:154 (2012).

[0194] As noted above, there are a number of commercial suppliers of modified RNAs, many of which have specialized in modifications designed to improve the effectiveness of siRNAs. A variety of approaches are offered based on various findings reported in the literature. For example, Dharmacon notes that replacement of a non-bridging oxygen with sulfur (phosphorothioate, PS) has been extensively used to improve nuclease resistance of siRNAs, as reported by Kole, Nature Reviews Drug Discovery 11:125-140 (2012). Modifications of the 2′-position of the ribose have been reported to improve nuclease resistance of the internucleotide phosphate bond while increasing duplex stability (Tm), which has also been shown to provide protection from immune activation. A combination of moderate PS backbone modifications with small, well-tolerated 2′-substitutions (2′-O-Methyl, 2′-Fluoro, 2′-Hydro) have been associated with highly stable siRNAs for applications in vivo, as reported by Soutschek et al. Nature 432:173-178 (2004); and 2′-O-Methyl modifications have been reported to be effective in improving stability as reported by Volkov, Oligonucleotides 19:191-202 (2009). With respect to decreasing the induction of innate immune responses, modifying specific sequences with 2′-O-Methyl, 2′-Fluoro, 2′-Hydro have been reported to reduce TLR7/TLR8 interaction while generally preserving silencing activity; see, e.g., Judge et al., Mol. Ther. 13:494-505 (2006); and Cekaite et al., J. Mol. Biol. 365:90-108 (2007). Additional modifications, such as 2-thiouracil, pseudouracil, 5-methylcytosine, 5-methyluracil, and N6-methyladenosine have also been shown to minimize the immune effects mediated by TLR3, TLR7, and TLR8; see, e.g., Kariko, K. et al., Immunity 23:165-175 (2005).

[0195] As is also known in the art, and commercially available, a number of conjugates can be applied to polynucleotides, such as RNAs, for use herein that can enhance their delivery and/or uptake by cells, including for example, cholesterol, tocopherol and folic acid, lipids, peptides, polymers, linkers and aptamers; see, e.g., the review by Winkler, Ther. Deliv. 4:791-809 (2013), and references cited therein.

### Codon-Optimization

[0196] A polynucleotide encoding a site-directed polypeptide can be codon-optimized according to methods standard in the art for expression in the cell containing the target DNA of interest. For example, if the intended target nucleic acid is in a human cell, a human codon-optimized polynucleotide encoding Cas9 is contemplated for use for producing the Cas9 polypeptide.

### Complexes of a Genome-Targeting Nucleic Acid and a Site-Directed Polypeptide

[0197] A genome-targeting nucleic acid interacts with a site-directed polypeptide (e.g., a nucleic acid-guided nuclease such as Cas9), thereby forming a complex. The genome-targeting nucleic acid guides the site-directed polypeptide to a target nucleic acid.

### Ribonucleoprotein Complexes (RNPs)

[0198] The site-directed polypeptide and genome-targeting nucleic acid can each be administered separately to a cell or a patient. On the other hand, the site-directed polypeptide can be pre-complexed with one or more guide RNAs, or one or more crRNA together with a tracrRNA. The pre-complexed material can then be administered to a cell or a patient. Such pre-complexed material is known as a ribonucleoprotein particle (RNP). The site-directed polypeptide in the RNP can be, for example, a Cas9 endonuclease or a Cpf1 endonuclease. The site-directed polypeptide can be flanked at the N-terminus, the C-terminus, or both the N-terminus and C-terminus by one or more nuclear localization signals (NLSs). For example, a Cas9 endonuclease can be flanked by two NLSs, one NLS located at the N-terminus and the second NLS located at the C-terminus. The NLS can be any NLS known in the art, such as a SV40 NLS. The weight ratio of genome-targeting nucleic acid to site-directed polypeptide in the RNP can be 1:1. For example, the weight ratio of sgRNA to Cas9 endonuclease in the RNP can be 1:1.

### Nucleic Acids Encoding System Components

[0199] The present disclosure provides a nucleic acid comprising a nucleotide sequence encoding a genome-targeting nucleic acid of the disclosure, a site-directed polypeptide of the disclosure, and/or any nucleic acid or proteinaceous molecule necessary to carry out the aspects of the methods of the disclosure.

[0200] The nucleic acid encoding a genome-targeting nucleic acid of the disclosure, a site-directed polypeptide of the disclosure, and/or any nucleic acid or proteinaceous molecule necessary to carry out the aspects of the methods of the disclosure can comprise a vector (e.g., a recombinant expression vector).

[0201] The term “vector” refers to a nucleic acid molecule capable of transporting another nucleic acid to which it has been linked. One type of vector is a “plasmid”, which refers to a circular double-stranded DNA loop into which additional nucleic acid segments can be ligated. Another type of vector is a viral vector, wherein additional nucleic acid segments can be ligated into the viral genome. Certain vectors are capable of autonomous replication in a host cell into which they are introduced (e.g., bacterial vectors having a bacterial origin of replication and episomal mammalian vectors). Other vectors (e.g., non-episomal mammalian vectors) are integrated into the genome of a host cell upon introduction into the host cell, and thereby are replicated along with the host genome.

[0202] In some examples, vectors can be capable of directing the expression of nucleic acids to which they are operatively linked. Such vectors are referred to herein as “recombinant expression vectors”, or more simply “expression vectors”, which serve equivalent functions.

[0203] The term “operably linked” means that the nucleotide sequence of interest is linked to regulatory sequence(s) in a manner that allows for expression of the nucleotide sequence. The term “regulatory sequence” is intended to include, for example, promoters, enhancers and other expression control elements (e.g., polyadenylation signals). Such regulatory sequences are well known in the art and are described, for example, in Goeddel; Gene Expression Technology: Methods in Enzymology 185, Academic Press, San Diego, Calif. (1990). Regulatory sequences include those that direct constitutive expression of a nucleotide sequence in many types of host cells, and those that direct expression of the nucleotide sequence only in certain host cells (e.g., tissue-specific regulatory sequences). It will be appreciated by those skilled in the art that the design of the expression vector can depend on such factors as the choice of the target cell, the level of expression desired, and the like.

[0204] Expression vectors contemplated include, but are not limited to, viral vectors based on vaccinia virus, poliovirus, adenovirus, adeno-associated virus, SV40, herpes simplex virus, human immunodeficiency virus, retrovirus (e.g., Murine Leukemia Virus, spleen necrosis virus, and vectors derived from retroviruses such as Rous Sarcoma Virus, Harvey Sarcoma Virus, avian leukosis virus, a lentivirus, human immunodeficiency virus, myeloproliferative sarcoma virus, and mammary tumor virus) and other recombinant vectors. Other vectors contemplated for eukaryotic target cells include, but are not limited to, the vectors pXT1, pSG5, pSVK3, pBPV, pMSG, and pSVLSV40 (Pharmacia). Other vectors can be used so long as they are compatible with the host cell.

[0205] In some examples, a vector can comprise one or more transcription and/or translation control elements. Depending on the host/vector system utilized, any of a number of suitable transcription and translation control elements, including constitutive and inducible promoters, transcription enhancer elements, transcription terminators, etc. can be used in the expression vector. The vector can be a self-inactivating vector that either inactivates the viral sequences or the components of the CRISPR machinery or other elements.

[0206] Non-limiting examples of suitable eukaryotic promoters (i.e., promoters functional in a eukaryotic cell) include those from cytomegalovirus (CMV) immediate early, herpes simplex virus (HSV) thymidine kinase, early and late SV40, long terminal repeats (LTRs) from retrovirus, human elongation factor-1 promoter (EF 1), a hybrid construct comprising the cytomegalovirus (CMV) enhancer fused to the chicken beta-actin promoter (CAG), murine stem cell virus promoter (MSCV), phosphoglycerate kinase-1 locus promoter (PGK), and mouse metallothionein-I.

[0207] For expressing small RNAs, including guide RNAs used in connection with Cas endonuclease, various promoters such as RNA polymerase III promoters, including for example U6 and H1, can be advantageous. Descriptions of and parameters for enhancing the use of such promoters are known in art, and additional information and approaches are regularly being described; see, e.g., Ma, H. et al., Molecular Therapy—Nucleic Acids 3, e161 (2014) doi: 10.1038/mtna.2014.12.

[0208] The expression vector can also contain a ribosome binding site for translation initiation and a transcription terminator. The expression vector can also comprise appropriate sequences for amplifying expression. The expression vector can also include nucleotide sequences encoding non-native tags (e.g., histidine tag, hemagglutinin tag, green fluorescent protein, etc.) that are fused to the site-directed polypeptide, thus resulting in a fusion protein.

[0209] A promoter can be an inducible promoter (e.g., a heat shock promoter, tetracycline-regulated promoter, steroid-regulated promoter, metal-regulated promoter, estrogen receptor-regulated promoter, etc.). The promoter can be a constitutive promoter (e.g., CMV promoter, UBC promoter). In some cases, the promoter can be a spatially restricted and/or temporally restricted promoter (e.g., a tissue specific promoter, a cell type specific promoter, etc.).

[0210] The nucleic acid encoding a genome-targeting nucleic acid of the disclosure and/or a site-directed polypeptide can be packaged into or on the surface of delivery vehicles for delivery to cells. Delivery vehicles contemplated include, but are not limited to, nanospheres, liposomes, quantum dots, nanoparticles, polyethylene glycol particles, hydrogels, and micelles. As described in the art, a variety of targeting moieties can be used to enhance the preferential interaction of such vehicles with desired cell types or locations.

[0211] Introduction of the complexes, polypeptides, and nucleic acids of the disclosure into cells can occur by viral or bacteriophage infection, transfection, conjugation, protoplast fusion, lipofection, electroporation, nucleofection, calcium phosphate precipitation, polyethyleneimine (PEI)-mediated transfection, DEAE-dextran mediated transfection, liposome-mediated transfection, particle gun technology, calcium phosphate precipitation, direct micro-injection, nanoparticle-mediated nucleic acid delivery, and the like.

### Ex Vivo Based Therapy

[0212] Provided herein are methods for treating a patient with Early Onset Parkinson's disease (PARK1). An aspect of such method is an ex vivo cell-based therapy. For example, a biopsy of the patient's brain is performed. Then, a cell of the central nervous system (e.g., a neuron or a glial cell) is isolated from the biopsied material. Then, the chromosomal DNA of the cell of the central nervous system (e.g., a neuron or a glial cell) can be edited using the materials and methods described herein. Finally, the edited cell of the central nervous system (e.g., a neuron or a glial cell) is implanted into the patient. Any source or type of cell may be used as the progenitor cell.

[0213] Another aspect of such method is an ex vivo cell-based therapy. For example, a biopsy of the patient's peripheral nerves is performed. The nerve tissue can be isolated from the patient's skin or leg. Then, a cell of the peripheral nervous system (e.g., a neuron or a glial cell such as Schwann cell in nerves or satellite glial cell in ganglia) is isolated from the biopsied material. Then, the chromosomal DNA of the cell of the peripheral nervous system (e.g., a neuron, or a glial cell such as Schwann cell in nerves or satellite glial cell in ganglia) can be edited using the materials and methods described herein. Finally, the edited cell of the peripheral nervous system (e.g., a neuron or a glial cell such as Schwann cell in nerves or satellite glial cell in ganglia) is implanted into the patient. Any source or type of cell may be used as the progenitor cell.

[0214] Another aspect of such method is an ex vivo cell-based therapy. For example, a patient specific induced pluripotent stem cell (iPSC) can be created. Then, the chromosomal DNA of these iPS cells can be edited using the materials and methods described herein. Next, the genome-edited iPSCs can be differentiated into cells of the central nervous system (e.g., a neuron or a glial cell) or cells of the peripheral nervous system (e.g., a neuron or a glial cell such as Schwann cell in nerves or satellite glial cell in ganglia). Finally, the differentiated cells of the central nervous system (e.g., a neuron or a glial cell) or cells of the peripheral nervous system (e.g., a neuron or a glial cell such as Schwann cell in nerves or satellite glial cell in ganglia) are implanted into the patient.

[0215] Yet another aspect of such method is an ex vivo cell-based therapy. For example, a mesenchymal stem cell can be isolated from the patient, which can be isolated from the patient's bone marrow or peripheral blood. Next, the chromosomal DNA of these mesenchymal stem cells can be edited using the materials and methods described herein. Next, the genome-edited mesenchymal stem cells can be differentiated into cells of the central nervous system (e.g., a neuron or a glial cell) or cells of the peripheral nervous system (e.g., a neuron or a glial cell such as Schwann cell in nerves or satellite glial cell in ganglia). Finally, the differentiated cells of the central nervous system (e.g., a neuron or a glial cell) or cells of the peripheral nervous system (e.g., a neuron or a glial cell such as Schwann cell in nerves or satellite glial cell in ganglia) are implanted into the patient.

[0216] One advantage of an ex vivo cell therapy approach is the ability to conduct a comprehensive analysis of the therapeutic prior to administration. Nuclease-based therapeutics can have some level of off-target effects. Performing gene editing ex vivo allows one to characterize the edited cell population prior to implantation. The present disclosure includes sequencing the entire genome of the edited cells to ensure that the off-target effects, if any, can be in genomic locations associated with minimal risk to the patient. Furthermore, populations of specific cells, including clonal populations, can be isolated prior to implantation.

[0217] Another advantage of ex vivo cell therapy relates to genetic modification in iPSCs compared to other primary cell sources. iPSCs are prolific, making it easy to obtain the large number of cells that will be required for a cell-based therapy. Furthermore, iPSCs are an ideal cell type for performing clonal isolations. This allows screening for the correct genomic modification, without risking a decrease in viability. In contrast, other primary cells, such as neurons, are viable for only a few passages and difficult to clonally expand. Thus, manipulation of iPSCs for the treatment of Early Onset Parkinson's disease (PARK1) can be much easier, and can shorten the amount of time needed to make the desired genetic modification.

### In Vivo Based Therapy

[0218] Methods can also include an in vivo based therapy. Chromosomal DNA of the cells in the patient is edited using the materials and methods described herein.

[0219] Although certain cells present an attractive target for ex vivo treatment and therapy, increased efficacy in delivery may permit direct in vivo delivery to such cells. Ideally the targeting and editing would be directed to the relevant cells. Cleavage in other cells can also be prevented by the use of promoters only active in certain cells and or developmental stages. Additional promoters are inducible, and therefore can be temporally controlled if the nuclease is delivered as a plasmid. The amount of time that delivered RNA and protein remain in the cell can also be adjusted using treatments or domains added to change the half-life. In vivo treatment would eliminate a number of treatment steps, but a lower rate of delivery can require higher rates of editing. In vivo treatment can eliminate problems and losses from ex vivo treatment and engraftment.

[0220] An advantage of in vivo gene therapy can be the ease of therapeutic production and administration. The same therapeutic approach and therapy will have the potential to be used to treat more than one patient, for example a number of patients who share the same or similar genotype or allele. In contrast, ex vivo cell therapy typically requires using a patient's own cells, which are isolated, manipulated and returned to the same patient.

[0221] Also provided herein is a cellular method for editing the SNCA gene in a cell by genome editing. For example, a cell can be isolated from a patient or animal. Then, the chromosomal DNA of the cell can be edited using the materials and methods described herein.

microRNAs (miRNAs)

[0222] Another class of gene regulatory regions having these features is microRNA (miRNA) binding sites. miRNAs are non-coding RNAs that play key roles in posttranscriptional gene regulation. miRNA can regulate the expression of 30% of all mammalian protein-encoding genes. Specific and potent gene silencing by double stranded RNA (RNAi) was discovered, plus additional small non-coding RNA (Canver, M. C. et al., Nature (2015)). The largest class of non-coding RNAs important for gene silencing is miRNAs. In mammals, miRNAs are first transcribed as a long RNA transcript, which can be separate transcriptional units, part of protein introns, or other transcripts. The long transcripts are called primary miRNA (pri-miRNA) that include imperfectly base-paired hairpin structures. These pri-miRNA can be cleaved into one or more shorter precursor miRNAs (pre-miRNAs) by Microprocessor, a protein complex in the nucleus, involving Drosha.

[0223] Pre-miRNAs are short stem loops ˜70 nucleotides in length with a 2-nucleotide 3′-overhang that are exported, into the mature 19-25 nucleotide miRNA:miRNA* duplexes. The miRNA strand with lower base pairing stability (the guide strand) can be loaded onto the RNA-induced silencing complex (RISC). The passenger strand (marked with *), can be functional, but is usually degraded. The mature miRNA tethers RISC to partly complementary sequence motifs in target mRNAs predominantly found within the 3′ untranslated regions (UTRs) and induces posttranscriptional gene silencing (Bartel, D. P. Cell 136, 215-233 (2009); Saj, A. & Lai, E. C. Curr Opin Genet Dev 21, 504-510 (2011)).

[0224] miRNAs can be important in development, differentiation, cell cycle and growth control, and in virtually all biological pathways in mammals and other multicellular organisms. miRNAs can also be involved in cell cycle control, apoptosis and stem cell differentiation, hematopoiesis, hypoxia, muscle development, neurogenesis, insulin secretion, cholesterol metabolism, aging, viral replication and immune responses.

[0225] A single miRNA can target hundreds of different mRNA transcripts, while an individual miRNA transcript can be targeted by many different miRNAs. More than 28645 microRNAs have been annotated in the latest release of miRBase (v.21). Some miRNAs can be encoded by multiple loci, some of which can be expressed from tandemly co-transcribed clusters. The features allow for complex regulatory networks with multiple pathways and feedback controls. miRNAs can be integral parts of these feedback and regulatory circuits and can help regulate gene expression by keeping protein production within limits (Herranz, H. & Cohen, S. M. Genes Dev 24, 1339-1344 (2010); Posadas, D. M. & Carthew, R. W. Curr Opin Genet Dev 27, 1-6 (2014)).

[0226] miRNA can also be important in a large number of human diseases that are associated with abnormal miRNA expression. This association underscores the importance of the miRNA regulatory pathway. Recent miRNA deletion studies have linked miRNA with regulation of the immune responses (Stern-Ginossar, N. et al., Science 317, 376-381 (2007)).

[0227] miRNA also has a strong link to cancer and can play a role in different types of cancer. miRNAs have been found to be downregulated in a number of tumors. miRNA can be important in the regulation of key cancer-related pathways, such as cell cycle control and the DNA damage response, and can therefore be used in diagnosis and can be targeted clinically. MicroRNAs can delicately regulate the balance of angiogenesis, such that experiments depleting all microRNAs suppress tumor angiogenesis (Chen, S. et al., Genes Dev 28, 1054-1067 (2014)).

[0228] As has been shown for protein coding genes, miRNA genes can also be subject to epigenetic changes occurring with cancer. Many miRNA loci can be associated with CpG islands increasing their opportunity for regulation by DNA methylation (Weber, B., Stresemann, C., Brueckner, B. & Lyko, F. Cell Cycle 6, 1001-1005 (2007)). The majority of studies have used treatment with chromatin remodeling drugs to reveal epigenetically silenced miRNAs.

[0229] In addition to their role in RNA silencing, miRNA can also activate translation (Posadas, D. M. & Carthew, R. W. Curr Opin Genet Dev 27, 1-6 (2014)). Knocking out miRNA sites may lead to decreased expression of the targeted gene, while introducing these sites may increase expression.

[0230] Individual miRNA can be knocked out most effectively by mutating the seed sequence (bases 2-8 of the microRNA), which can be important for binding specificity. Cleavage in this region, followed by mis-repair by NHEJ can effectively abolish miRNA function by blocking binding to target sites. miRNA could also be inhibited by specific targeting of the special loop region adjacent to the palindromic sequence. Catalytically inactive Cas9 can also be used to inhibit shRNA expression (Zhao, Y. et al., Sci Rep 4, 3943 (2014)). In addition to targeting the miRNA, the binding sites can also be targeted and mutated to prevent the silencing by miRNA.

[0231] According to the present disclosure, any of the microRNA (miRNA) or their binding sites may be incorporated into the compositions of the present disclosure.

[0232] The compositions may have a region such as, but not limited to, a region comprising the sequence of any of the microRNAs disclosed in SEQ ID NOs: 632-4715, the reverse complement of the microRNAs disclosed in SEQ ID NOs: 632-4715, or the microRNA anti-seed region of any of the microRNAs disclosed in SEQ ID NOs: 632-4715.

[0233] The compositions of the present disclosure may comprise one or more microRNA target sequences, microRNA sequences, or microRNA seeds. Such sequences may correspond to any known microRNA such as those taught in U.S. Publication 2005/0261218 and U.S. Publication 2005/0059005. As a non-limiting example, known microRNAs, their sequences and their binding site sequences in the human genome are disclosed in SEQ ID NOs: 632-4715.

[0234] A microRNA sequence comprises a “seed” sequence, i.e., a sequence in the region of positions 2-8 of the mature microRNA, which sequence has perfect Watson-Crick complementarity to the miRNA target sequence. A microRNA seed may comprise positions 2-8 or 2-7 of the mature microRNA. In some aspects, a microRNA seed may comprise 7 nucleotides (e.g., nucleotides 2-8 of the mature microRNA), wherein the seed-complementary site in the corresponding miRNA target is flanked by an adenine (A) opposed to microRNA position 1. In some aspects, a microRNA seed may comprise 6 nucleotides (e.g., nucleotides 2-7 of the mature microRNA), wherein the seed-complementary site in the corresponding miRNA target is flanked by an adenine (A) opposed to microRNA position 1. See for example, Grimson A, Farh K K, Johnston W K, Garrett-Engele P, Lim L P, Bartel D P; Mol Cell. 2007 Jul. 6; 27(1):91-105. The bases of the microRNA seed have complete complementarity with the target sequence.

[0235] Identification of microRNA, microRNA target regions, and their expression patterns and role in biology have been reported (Bonauer et al., Curr Drug Targets 2010 11:943-949; Anand and Cheresh Curr Opin Hematol 2011 18:171-176; Contreras and Rao Leukemia 2012 26:404-413 (2011 Dec. 20. doi: 10.1038/leu.2011.356); Bartel Cell 2009 136:215-233; Landgraf et al, Cell, 2007 129:1401-1414; Gentner and Naldini, Tissue Antigens. 2012 80:393-403).

[0236] For example, if the composition is not intended to be delivered to the liver but ends up there, then miR-122, a microRNA abundant in liver, can inhibit the expression of the sequence delivered if one or multiple target sites of miR-122 are engineered into the polynucleotide encoding that target sequence. Introduction of one or multiple binding sites for different microRNA can be engineered to further decrease the longevity, stability, and protein translation hence providing an additional layer of tenability.

[0237] As used herein, the term “microRNA site” refers to a microRNA target site or a microRNA recognition site, or any nucleotide sequence to which a microRNA binds or associates. It should be understood that “binding” may follow traditional Watson-Crick hybridization rules or may reflect any stable association of the microRNA with the target sequence at or adjacent to the microRNA site.

[0238] Conversely, for the purposes of the compositions of the present disclosure, microRNA binding sites can be engineered out of (i.e. removed from) sequences in which they naturally occur in order to increase protein expression in specific tissues. For example, miR-137 binding sites may be removed to improve protein expression in the brain.

[0239] Specifically, microRNAs are known to be differentially expressed in immune cells (also called hematopoietic cells), such as antigen presenting cells (APCs) (e.g. dendritic cells and macrophages), macrophages, monocytes, B lymphocytes, T lymphocytes, granulocytes, natural killer cells, etc. Immune cell specific microRNAs are involved in immunogenicity, autoimmunity, the immune-response to infection, inflammation, as well as unwanted immune response after gene therapy and tissue/organ transplantation. Immune cells specific microRNAs also regulate many aspects of development, proliferation, differentiation and apoptosis of hematopoietic cells (immune cells). For example, miR-142 and miR-146 are exclusively expressed in the immune cells, particularly abundant in myeloid dendritic cells. Introducing the miR-142 binding site into the 3′-UTR of a polypeptide of the present disclosure can selectively suppress the gene expression in the antigen presenting cells through miR-142 mediated mRNA degradation, limiting antigen presentation in professional APCs (e.g. dendritic cells) and thereby preventing antigen-mediated immune response after gene delivery (see, Annoni A et al., blood, 2009, 114, 5152-5161).

[0240] In one example, microRNAs binding sites that are known to be expressed in immune cells, in particular, the antigen presenting cells, can be engineered into the polynucleotides to suppress the expression of the polynucleotide in APCs through microRNA mediated RNA degradation, subduing the antigen-mediated immune response, while the expression of the polynucleotide is maintained in non-immune cells where the immune cell specific microRNAs are not expressed.

[0241] Many microRNA expression studies have been conducted, and are described in the art, to profile the differential expression of microRNAs in various cancer cells/tissues and other diseases. Some microRNAs are abnormally over-expressed in certain cancer cells and others are under-expressed. For example, microRNAs are differentially expressed in cancer cells (WO2008/154098, US2013/0059015, US2013/0042333, WO2011/157294); cancer stem cells (US2012/0053224); pancreatic cancers and diseases (US2009/0131348, US2011/0171646, US2010/0286232, U.S. Pat. No. 8,389,210); asthma and inflammation (U.S. Pat. No. 8,415,096); prostate cancer (US2013/0053264); hepatocellular carcinoma (WO2012/151212, US2012/0329672, WO2008/054828, U.S. Pat. No. 8,252,538); lung cancer cells (WO2011/076143, WO2013/033640, WO2009/070653, US2010/0323357); cutaneous T-cell lymphoma (WO2013/011378); colorectal cancer cells (WO2011/0281756, WO2011/076142); cancer positive lymph nodes (WO2009/100430, US2009/0263803); nasopharyngeal carcinoma (EP2112235); chronic obstructive pulmonary disease (US2012/0264626, US2013/0053263); thyroid cancer (WO2013/066678); ovarian cancer cells (US2012/0309645, WO2011/095623); breast cancer cells (WO2008/154098, WO2007/081740, US2012/0214699), leukemia and lymphoma (WO2008/073915, US2009/0092974, US2012/0316081, US2012/0283310, WO2010/018563).

[0242] Non-limiting examples of microRNA sequences and the targeted tissues and/or cells are disclosed in SEQ ID NOs: 632-4715.

### Genome Engineering Strategies

[0243] The methods of the present disclosure can involve editing one or both of the mutant alleles. Gene editing to knock-out the mutant alleles or correct the mutation has the advantage of alteration of expression levels and temporal control. Sequencing the patient's SNCA alleles allows for design of the gene editing strategy to best correct the identified mutation(s).

[0244] A step of the ex vivo methods of the present disclosure can comprise editing/correcting the patient specific iPSC cells or mesenchymal stem cells. Likewise, a step of the in vivo methods of the present disclosure involves editing/correcting the cells in an Early Onset Parkinson's disease (PARK1) patient using genome engineering. Similarly, a step in the cellular methods of the present disclosure can comprise editing/correcting the SNCA gene in a human cell by genome engineering.

[0245] As one example, the mutant SNCA gene expression may be disrupted or eliminated by introducing random insertions or deletions (indels) that arise due to the imprecise NHEJ repair pathway. The target region may be the coding sequences of the SNCA gene (i.e., exons). Inserting or deleting nucleotides into the coding sequence of a gene may cause a “frame shift” where the normal 3-letter codon pattern is disturbed. In this way, gene expression and therefore mutant protein production can be reduced or eliminated. This approach may also be used to target any intron, intron:exon junction, or regulatory DNA element of the SNCA gene where sequence alteration may interfere with the expression of the SNCA gene. This approach can require development and optimization of sgRNAs for the SNCA gene.

[0246] As another example, NHEJ can also be used to delete segments of the gene, either directly or by altering splice donor or acceptor sites through cleavage by one gRNA targeting several locations, or several gRNAs. Pairs of guide strands have been used for this type of deletions.

[0247] In some aspects, Early Onset Parkinson's disease (PARK1) patients may exhibit a wide range of other mutations in the SNCA gene. Therefore, different patients may require different correction strategies. Any CRISPR endonuclease may be used in the methods of the present disclosure, each CRISPR endonuclease having its own associated PAM, which may or may not be disease specific.

[0248] For example, the mutation can be corrected by the insertions or deletions that arise due to the imprecise NHEJ repair pathway. If the patient's SNCA gene has an inserted or deleted base, a targeted cleavage can result in a NHEJ-mediated insertion or deletion that restores the frame. Missense mutations can also be corrected through NHEJ-mediated correction using one or more guide RNA. The ability or likelihood of the cut(s) to correct the mutation can be designed or evaluated based on the local sequence and micro-homologies.

[0249] Alternatively, the donor for correction by HDR contains the corrected sequence with small or large flanking homology arms to allow for annealing. HDR is essentially an error-free mechanism that uses a supplied homologous DNA sequence as a template during DSB repair. The rate of homology directed repair (HDR) is a function of the distance between the mutation and the cut site so choosing overlapping or nearest target sites is important. Templates can include extra sequences flanked by the homologous regions or can contain a sequence that differs from the genomic sequence, thus allowing sequence editing.

[0250] In addition to correcting mutations by NHEJ or HDR, a range of other options are possible. If there are small or large deletions or multiple mutations, a cDNA can be knocked in that contains the exons affected. A full length cDNA can be knocked into any safe harbor locus, but must use a supplied or other promoter. If this construct is knocked into the correct location, it will have physiological control, similar to the normal gene. Pairs of nucleases can be used to delete mutated gene regions, though a donor would usually have to be provided to restore function. In this case two gRNA would be supplied and one donor sequence.

[0251] Some genome engineering strategies involve correction of one or more mutations in or near the SNCA gene, or inserting a wild-type SNCA gene, cDNA or a minigene (comprised of one or more exons and introns or natural or synthetic introns) into the locus of the SNCA gene to replace the mutant gene by homology directed repair (HDR), which is also known as homologous recombination (HR). Homology directed repair can be one strategy for treating patients that have one or more mutations in or near the SNCA gene. These strategies can restore the SNCA gene and reverse, treat, and/or mitigate the diseased state. These strategies can require a more custom approach based on the location of the patient's mutation(s). Donor nucleotides for correcting mutations often are small (<300 bp). This is advantageous, as HDR efficiencies may be inversely related to the size of the donor molecule. Also, it is expected that the donor templates can fit into size constrained adeno-associated virus (AAV) molecules, which have been shown to be an effective means of donor template delivery.

[0252] Homology directed repair is a cellular mechanism for repairing double-stranded breaks (DSBs). The most common form is homologous recombination. There are additional pathways for HDR, including single-strand annealing and alternative-HDR. Genome engineering tools allow researchers to manipulate the cellular homologous recombination pathways to create site-specific modifications to the genome. It has been found that cells can repair a double-stranded break using a synthetic donor molecule provided in trans. Therefore, by introducing a double-stranded break near a specific mutation and providing a suitable donor, targeted changes can be made in the genome. Specific cleavage increases the rate of HDR more than 1,000 fold above the rate of 1 in 10⁶ cells receiving a homologous donor alone. The rate of homology directed repair (HDR) at a particular nucleotide is a function of the distance to the cut site, so choosing overlapping or nearest target sites is important. Gene editing offers the advantage over gene addition, as correcting in situ leaves the rest of the genome unperturbed.

[0253] Supplied donors for editing by HDR vary markedly but can contain the intended sequence with small or large flanking homology arms to allow annealing to the genomic DNA. The homology regions flanking the introduced genetic changes can be 30 bp or smaller, or as large as a multi-kilobase cassette that can contain promoters, cDNAs, etc. Both single-stranded and double-stranded oligonucleotide donors have been used. These oligonucleotides range in size from less than 100 nt to over many kb, though longer ssDNA can also be generated and used. Double-stranded donors can be used, including PCR amplicons, plasmids, and mini-circles. In general, it has been found that an AAV vector can be a very effective means of delivery of a donor template, though the packaging limits for individual donors is <5 kb. Active transcription of the donor increased HDR three-fold, indicating the inclusion of promoter may increase conversion. Conversely, CpG methylation of the donor decreased gene expression and HDR.

[0254] In addition to wild-type endonucleases, such as Cas9, nickase variants exist that have one or the other nuclease domain inactivated resulting in cutting of only one DNA strand. HDR can be directed from individual Cas nickases or using pairs of nickases that flank the target area. Donors can be single-stranded, nicked, or dsDNA.

[0255] The donor DNA can be supplied with the nuclease or independently by a variety of different methods, for example by transfection, nano-particle, micro-injection, or viral transduction. A range of tethering options have been proposed to increase the availability of the donors for HDR. Examples include attaching the donor to the nuclease, attaching to DNA binding proteins that bind nearby, or attaching to proteins that are involved in DNA end binding or repair.

[0256] The repair pathway choice can be guided by a number of culture conditions, such as those that influence cell cycling, or by targeting of DNA repair and associated proteins. For example, to increase HDR, key NHEJ molecules can be suppressed, such as KU70, KU80 or DNA ligase IV.

[0257] Without a donor present, the ends from a DNA break or ends from different breaks can be joined using the several non-homologous repair pathways in which the DNA ends are joined with little or no base-pairing at the junction. In addition to canonical NHEJ, there are similar repair mechanisms, such as alt-NHEJ. If there are two breaks, the intervening segment can be deleted or inverted. NHEJ repair pathways can lead to insertions, deletions or mutations at the joints.

[0258] NHEJ was used to insert a 15-kb inducible gene expression cassette into a defined locus in human cell lines after nuclease cleavage. (See e.g., Maresca, M., Lin, V.G., Guo, N. & Yang, Y., Genome Res 23, 539-546 (2013); Cristea et al. Biotechnology and Bioengineering, 110 (3):871-80 (2013); Suzuki et al. Nature, 540, 144-149 (2016)).

[0259] In addition to genome editing by NHEJ or HDR, site-specific gene insertions have been conducted that use both the NHEJ pathway and HDR. A combination approach may be applicable in certain settings, possibly including intron/exon borders. NHEJ may prove effective for ligation in the intron, while the error-free HDR may be better suited in the coding region.

[0260] The SNCA gene contains a number of exons as shown in Table 3. Any one or more of these exons or nearby introns can be targeted in order to create one or more insertions or deletions that disrupt the reading frame and eventually eliminate undesirable SNCA protein activity. Alternatively, the mutations can be repaired in order to restore the inactive SNCA. As a further alternative, a wild-type SNCA gene or cDNA can be knocked-in to the locus of the corresponding gene to replace the mutant gene or knocked-in to a safe harbor locus, such as AAVS1. In some examples, the methods can provide one gRNA or a pair of gRNAs that can be used to facilitate incorporation of a new sequence from a polynucleotide donor template to correct one or more mutations or to knock-in a part of or the entire SNCA gene or cDNA.

[0261] The methods can provide gRNA pairs that make a deletion by cutting the gene twice, one gRNA cutting at the 5′ end of one or more mutations and the other gRNA cutting at the 3′ end of one or more mutations that facilitates insertion of a new sequence from a polynucleotide donor template to replace the one or more mutations. The cutting can be accomplished by a pair of DNA endonucleases that each makes a DSB in the genome, or by multiple nickases that together make a DSB in the genome.

[0262] Alternatively, the methods can provide one gRNA to make one double-strand cut around one or more mutations that facilitates insertion of a new sequence from a polynucleotide donor template to replace the one or more mutations. The double-strand cut can be made by a single DNA endonuclease or multiple nickases that together make a DSB in the genome.

[0263] Illustrative modifications within the SNCA gene include replacements within or near (proximal) to the mutations referred to above, such as within the region of less than 3 kb, less than 2 kb, less than 1 kb, less than 0.5 kb upstream or downstream of the specific mutation. Given the relatively wide variations of mutations in the SNCA gene, it will be appreciated that numerous variations of the replacements referenced above (including without limitation larger as well as smaller deletions), would be expected to result in restoration of the SNCA gene expression.

[0264] Such variants can include replacements that are larger in the 5′ and/or 3′ direction than the specific mutation in question, or smaller in either direction. Accordingly, by “near” or “proximal” with respect to specific replacements, it is intended that the SSB or DSB locus associated with a desired replacement boundary (also referred to herein as an endpoint) can be within a region that is less than about 3 kb from the reference locus noted. The SSB or DSB locus can be more proximal and within 2 kb, within 1 kb, within 0.5 kb, or within 0.1 kb. In the case of small replacement, the desired endpoint can be at or “adjacent to” the reference locus, by which it is intended that the endpoint can be within 100 bp, within 50 bp, within 25 bp, or less than about 10 bp to 5 bp from the reference locus.

[0265] Examples comprising larger or smaller replacements can be expected to provide the same benefit, as long as the SNCA protein activity is restored. It is thus expected that many variations of the replacements described and illustrated herein can be effective for ameliorating Early Onset Parkinson's disease (PARK1).

[0266] In order to ensure that the pre-mRNA is properly processed following deletion, the surrounding splicing signals can be deleted. Splicing donor and acceptors are generally within 100 base pairs of the neighboring intron. Therefore, in some examples, methods can provide all gRNAs that cut approximately +/−100-3100 bp with respect to each exon/intron junction of interest.

[0267] For any of the genome editing strategies, gene editing can be confirmed by sequencing or PCR analysis.

### Target Sequence Selection

[0268] Shifts in the location of the 5′ boundary and/or the 3′ boundary relative to particular reference loci can be used to facilitate or enhance particular applications of gene editing, which depend in part on the endonuclease system selected for the editing, as further described and illustrated herein.

[0269] In a first non-limiting example of such target sequence selection, many endonuclease systems have rules or criteria that can guide the initial selection of potential target sites for cleavage, such as the requirement of a PAM sequence motif in a particular position adjacent to the DNA cleavage sites in the case of CRISPR Type II or Type V endonucleases.

[0270] In another non-limiting example of target sequence selection or optimization, the frequency of off-target activity for a particular combination of target sequence and gene editing endonuclease (i.e. the frequency of DSBs occurring at sites other than the selected target sequence) can be assessed relative to the frequency of on-target activity. In some cases, cells that have been correctly edited at the desired locus can have a selective advantage relative to other cells. Illustrative, but non-limiting, examples of a selective advantage include the acquisition of attributes such as enhanced rates of replication, persistence, resistance to certain conditions, enhanced rates of successful engraftment or persistence in vivo following introduction into a patient, and other attributes associated with the maintenance or increased numbers or viability of such cells. In other cases, cells that have been correctly edited at the desired locus can be positively selected for by one or more screening methods used to identify, sort or otherwise select for cells that have been correctly edited. Both selective advantage and directed selection methods can take advantage of the phenotype associated with the alteration. In some cases, cells can be edited two or more times in order to create a second modification that creates a new phenotype that is used to select or purify the intended population of cells. Such a second modification could be created by adding a second gRNA enabling expression of a selectable or screenable marker. In some cases, cells can be correctly edited at the desired locus using a DNA fragment that contains the cDNA and also a selectable marker.

[0271] Whether any selective advantage is applicable or any directed selection is to be applied in a particular case, target sequence selection can also be guided by consideration of off-target frequencies in order to enhance the effectiveness of the application and/or reduce the potential for undesired alterations at sites other than the desired target. As described further and illustrated herein and in the art, the occurrence of off-target activity can be influenced by a number of factors including similarities and dissimilarities between the target site and various off-target sites, as well as the particular endonuclease used. Bioinformatics tools are available that assist in the prediction of off-target activity, and frequently such tools can also be used to identify the most likely sites of off-target activity, which can then be assessed in experimental settings to evaluate relative frequencies of off-target to on-target activity, thereby allowing the selection of sequences that have higher relative on-target activities. Illustrative examples of such techniques are provided herein, and others are known in the art.

[0272] Another aspect of target sequence selection relates to homologous recombination events. Sequences sharing regions of homology can serve as focal points for homologous recombination events that result in deletion of intervening sequences. Such recombination events occur during the normal course of replication of chromosomes and other DNA sequences, and also at other times when DNA sequences are being synthesized, such as in the case of repairs of double-strand breaks (DSBs), which occur on a regular basis during the normal cell replication cycle but can also be enhanced by the occurrence of various events (such as UV light and other inducers of DNA breakage) or the presence of certain agents (such as various chemical inducers). Many such inducers cause DSBs to occur indiscriminately in the genome, and DSBs can be regularly induced and repaired in normal cells. During repair, the original sequence can be reconstructed with complete fidelity, however, in some cases, small insertions or deletions (referred to as “indels”) are introduced at the DSB site.

[0273] DSBs can also be specifically induced at particular locations, as in the case of the endonucleases systems described herein, which can be used to cause directed or preferential gene modification events at selected chromosomal locations. The tendency for homologous sequences to be subject to recombination in the context of DNA repair (as well as replication) can be taken advantage of in a number of circumstances, and is the basis for one application of gene editing systems, such as CRISPR, in which homology directed repair is used to insert a sequence of interest, provided through use of a “donor” polynucleotide, into a desired chromosomal location.

[0274] Regions of homology between particular sequences, which can be small regions of “microhomology” that can comprise as few as ten base pairs or less, can also be used to bring about desired deletions. For example, a single DSB can be introduced at a site that exhibits microhomology with a nearby sequence. During the normal course of repair of such DSB, a result that occurs with high frequency is the deletion of the intervening sequence as a result of recombination being facilitated by the DSB and concomitant cellular repair process.

[0275] In some circumstances, however, selecting target sequences within regions of homology can also give rise to much larger deletions, including gene fusions (when the deletions are in coding regions), which may or may not be desired given the particular circumstances.

[0276] The examples provided herein further illustrate the selection of various target regions for the creation of DSBs designed to induce insertions, deletions or replacements that result in the desired alteration of SNCA protein activity, as well as the selection of specific target sequences within such regions that are designed to minimize off-target events relative to on-target events.

### Human Cells

[0277] For ameliorating Early Onset Parkinson's disease (PARK1) or any disorder associated with SNCA, as described and illustrated herein, the principal targets for gene editing are human cells. For example, in the ex vivo methods, the human cells can be somatic cells, which after being modified using the techniques as described, can give rise to differentiated cells, e.g., cells of central nervous system or cells of the peripheral nervous system or progenitor cells. For example, in the in vivo methods, the human cells may be cells of central nervous system, cells of the peripheral nervous system, or cells from other affected organs.

[0278] By performing gene editing in autologous cells that are derived from and therefore already completely matched with the patient in need, it is possible to generate cells that can be safely re-introduced into the patient, and effectively give rise to a population of cells that will be effective in ameliorating one or more clinical conditions associated with the patient's disease.

[0279] Stem cells are capable of both proliferation and giving rise to more progenitor cells, these in turn having the ability to generate a large number of mother cells that can in turn give rise to differentiated or differentiable daughter cells. The daughter cells themselves can be induced to proliferate and produce progeny that subsequently differentiate into one or more mature cell types, while also retaining one or more cells with parental developmental potential. The term “stem cell” refers then, to a cell with the capacity or potential, under particular circumstances, to differentiate to a more specialized or differentiated phenotype, and which retains the capacity, under certain circumstances, to proliferate without substantially differentiating. In one aspect, the term progenitor or stem cell refers to a generalized mother cell whose descendants (progeny) specialize, often in different directions, by differentiation, e.g., by acquiring completely individual characters, as occurs in progressive diversification of embryonic cells and tissues. Cellular differentiation is a complex process typically occurring through many cell divisions. A differentiated cell may derive from a multipotent cell that itself is derived from a multipotent cell, and so on. While each of these multipotent cells may be considered stem cells, the range of cell types that each can give rise to may vary considerably. Some differentiated cells also have the capacity to give rise to cells of greater developmental potential. Such capacity may be natural or may be induced artificially upon treatment with various factors. In many biological instances, stem cells can also be “multipotent” because they can produce progeny of more than one distinct cell type, but this is not required for “stem-ness.”

[0280] Self-renewal can be another important aspect of the stem cell. In theory, self-renewal can occur by either of two major mechanisms. Stem cells can divide asymmetrically, with one daughter retaining the stem state and the other daughter expressing some distinct other specific function and phenotype. Alternatively, some of the stem cells in a population can divide symmetrically into two stems, thus maintaining some stem cells in the population as a whole, while other cells in the population give rise to differentiated progeny only. Generally, “progenitor cells” have a cellular phenotype that is more primitive (i.e., is at an earlier step along a developmental pathway or progression than is a fully differentiated cell). Often, progenitor cells also have significant or very high-proliferative potential. Progenitor cells can give rise to multiple distinct differentiated cell types or to a single differentiated cell type, depending on the developmental pathway and on the environment in which the cells develop and differentiate.

[0281] In the context of cell ontogeny, the adjective “differentiated,” or “differentiating” is a relative term. A “differentiated cell” is a cell that has progressed further down the developmental pathway than the cell to which it is being compared. Thus, stem cells can differentiate into lineage-restricted precursor cells (such as a neural progenitor cell), which in turn can differentiate into other types of precursor cells further down the pathway (such as a neural precursor), and then to an end-stage differentiated cell, such as a neuron, which plays a characteristic role in a certain tissue type, and may or may not retain the capacity to proliferate further.

### Induced Pluripotent Stem Cells

[0282] The genetically engineered human cells described herein can be induced pluripotent stem cells (iPSCs). An advantage of using iPSCs is that the cells can be derived from the same subject to which the progenitor cells are to be administered. That is, a somatic cell can be obtained from a subject, reprogrammed to an induced pluripotent stem cell, and then re-differentiated into a progenitor cell to be administered to the subject (e.g., autologous cells). Because the progenitors are essentially derived from an autologous source, the risk of engraftment rejection or allergic response can be reduced compared to the use of cells from another subject or group of subjects. In addition, the use of iPSCs negates the need for cells obtained from an embryonic source. Thus, in one aspect, the stem cells used in the disclosed methods are not embryonic stem cells.

[0283] Although differentiation is generally irreversible under physiological contexts, several methods have been recently developed to reprogram somatic cells to iPSCs. Exemplary methods are known to those of skill in the art and are described briefly herein below.

[0284] The term “reprogramming” refers to a process that alters or reverses the differentiation state of a differentiated cell (e.g., a somatic cell). Stated another way, reprogramming refers to a process of driving the differentiation of a cell backwards to a more undifferentiated or more primitive type of cell. It should be noted that placing many primary cells in culture can lead to some loss of fully differentiated characteristics. Thus, simply culturing such cells included in the term differentiated cells does not render these cells non-differentiated cells (e.g., undifferentiated cells) or pluripotent cells. The transition of a differentiated cell to pluripotency requires a reprogramming stimulus beyond the stimuli that lead to partial loss of differentiated character in culture. Reprogrammed cells also have the characteristic of the capacity of extended passaging without loss of growth potential, relative to primary cell parents, which generally have capacity for only a limited number of divisions in culture.

[0285] The cell to be reprogrammed can be either partially or terminally differentiated prior to reprogramming. Reprogramming can encompass complete reversion of the differentiation state of a differentiated cell (e.g., a somatic cell) to a pluripotent state or a multipotent state. Reprogramming can encompass complete or partial reversion of the differentiation state of a differentiated cell (e.g., a somatic cell) to an undifferentiated cell (e.g., an embryonic-like cell). Reprogramming can result in expression of particular genes by the cells, the expression of which further contributes to reprogramming. In certain examples described herein, reprogramming of a differentiated cell (e.g., a somatic cell) can cause the differentiated cell to assume an undifferentiated state (e.g., is an undifferentiated cell). The resulting cells are referred to as “reprogrammed cells,” or “induced pluripotent stem cells (iPSCs or iPS cells).”

[0286] Reprogramming can involve alteration, e.g., reversal, of at least some of the heritable patterns of nucleic acid modification (e.g., methylation), chromatin condensation, epigenetic changes, genomic imprinting, etc., that occur during cellular differentiation. Reprogramming is distinct from simply maintaining the existing undifferentiated state of a cell that is already pluripotent or maintaining the existing less than fully differentiated state of a cell that is already a multipotent cell (e.g., a myogenic stem cell). Reprogramming is also distinct from promoting the self-renewal or proliferation of cells that are already pluripotent or multipotent, although the compositions and methods described herein can also be of use for such purposes, in some examples.

[0287] Many methods are known in the art that can be used to generate pluripotent stem cells from somatic cells. Any such method that reprograms a somatic cell to the pluripotent phenotype would be appropriate for use in the methods described herein.

[0288] Reprogramming methodologies for generating pluripotent cells using defined combinations of transcription factors have been described. Mouse somatic cells can be converted to ES cell-like cells with expanded developmental potential by the direct transduction of Oct4, Sox2, Klf4, and c-Myc; see, e.g., Takahashi and Yamanaka, Cell 126(4): 663-76 (2006). iPSCs resemble ES cells, as they restore the pluripotency-associated transcriptional circuitry and much of the epigenetic landscape. In addition, mouse iPSCs satisfy all the standard assays for pluripotency: specifically, in vitro differentiation into cell types of the three germ layers, teratoma formation, contribution to chimeras, germline transmission [see, e.g., Maherali and Hochedlinger, Cell Stem Cell. 3(6):595-605 (2008)], and tetraploid complementation.

[0289] Human iPSCs can be obtained using similar transduction methods, and the transcription factor trio, OCT4, SOX2, and NANOG, has been established as the core set of transcription factors that govern pluripotency; see, e.g., Budniatzky and Gepstein, Stem Cells Transl Med. 3(4):448-57 (2014); Barrett et al., Stem Cells Trans Med 3:1-6 sctm.2014-0121 (2014); Focosi et al., Blood Cancer Journal 4: e211 (2014); and references cited therein. The production of iPSCs can be achieved by the introduction of nucleic acid sequences encoding stem cell-associated genes into an adult, somatic cell, historically using viral vectors.

[0290] iPSCs can be generated or derived from terminally differentiated somatic cells, as well as from adult stem cells, or somatic stem cells. That is, a non-pluripotent progenitor cell can be rendered pluripotent or multipotent by reprogramming. In such instances, it may not be necessary to include as many reprogramming factors as required to reprogram a terminally differentiated cell. Further, reprogramming can be induced by the non-viral introduction of reprogramming factors, e.g., by introducing the proteins themselves, or by introducing nucleic acids that encode the reprogramming factors, or by introducing messenger RNAs that upon translation produce the reprogramming factors (see e.g., Warren et al., Cell Stem Cell, 7(5):618-30 (2010). Reprogramming can be achieved by introducing a combination of nucleic acids encoding stem cell-associated genes, including, for example, Oct-4 (also known as Oct-3/4 or Pouf51), Sox1, Sox2, Sox3, Sox 15, Sox 18, NANOG, Klf1, Klf2, Klf4, Klf5, NR5A2, c-Myc, 1-Myc, n-Myc, Rem2, Tert, and LIN28. Reprogramming using the methods and compositions described herein can further comprise introducing one or more of Oct-3/4, a member of the Sox family, a member of the Klf family, and a member of the Myc family to a somatic cell. The methods and compositions described herein can further comprise introducing one or more of each of Oct-4, Sox2, Nanog, c-MYC and Klf4 for reprogramming. As noted above, the exact method used for reprogramming is not necessarily critical to the methods and compositions described herein. However, where cells differentiated from the reprogrammed cells are to be used in, e.g., human therapy, in one aspect the reprogramming is not effected by a method that alters the genome. Thus, in such examples, reprogramming can be achieved, e.g., without the use of viral or plasmid vectors.

[0291] The efficiency of reprogramming (i.e., the number of reprogrammed cells) derived from a population of starting cells can be enhanced by the addition of various agents, e.g., small molecules, as shown by Shi et al., Cell-Stem Cell 2:525-528 (2008); Huangfu et al., Nature Biotechnology 26(7):795-797 (2008) and Marson et al., Cell-Stem Cell 3: 132-135 (2008). Thus, an agent or combination of agents that enhance the efficiency or rate of induced pluripotent stem cell production can be used in the production of patient-specific or disease-specific iPSCs. Some non-limiting examples of agents that enhance reprogramming efficiency include soluble Wnt, Wnt conditioned media, BIX-01294 (a G9a histone methyltransferase), PD0325901 (a MEK inhibitor), DNA methyltransferase inhibitors, histone deacetylase (HDAC) inhibitors, valproic acid, 5′-azacytidine, dexamethasone, suberoylanilide, hydroxamic acid (SAHA), vitamin C, and trichostatin (TSA), among others.

[0292] Other non-limiting examples of reprogramming enhancing agents include: Suberoylanilide Hydroxamic Acid (SAHA (e.g., MK0683, vorinostat) and other hydroxamic acids), BML-210, Depudecin (e.g., (−)-Depudecin), HC Toxin, Nullscript (4-(1,3-Dioxo-1H,3H-benzo[de]isoquinolin-2-yl)-N-hydroxybutanamide), Phenylbutyrate (e.g., sodium phenylbutyrate) and Valproic Acid ((VP A) and other short chain fatty acids), Scriptaid, Suramin Sodium, Trichostatin A (TSA), APHA Compound 8, Apicidin, Sodium Butyrate, pivaloyloxymethyl butyrate (Pivanex, AN-9), Trapoxin B, Chlamydocin, Depsipeptide (also known as FR901228 or FK228), benzamides (e.g., CI-994 (e.g., N-acetyl dinaline) and MS-27-275), MGCD0103, NVP-LAQ-824, CBHA (m-carboxycinnaminic acid bishydroxamic acid), JNJ16241199, Tubacin, A-161906, proxamide, oxamflatin, 3-Cl-UCHA (e.g., 6-(3-chlorophenylureido) caproic hydroxamic acid), AOE (2-amino-8-oxo-9, 10-epoxydecanoic acid), CHAP31 and CHAP 50. Other reprogramming enhancing agents include, for example, dominant negative forms of the HDACs (e.g., catalytically inactive forms), siRNA inhibitors of the HDACs, and antibodies that specifically bind to the HDACs. Such inhibitors are available, e.g., from BIOMOL International, Fukasawa, Merck Biosciences, Novartis, Gloucester Pharmaceuticals, Titan Pharmaceuticals, MethylGene, and Sigma Aldrich.

[0293] To confirm the induction of pluripotent stem cells for use with the methods described herein, isolated clones can be tested for the expression of a stem cell marker. Such expression in a cell derived from a somatic cell identifies the cells as induced pluripotent stem cells. Stem cell markers can be selected from the non-limiting group including SSEA3, SSEA4, CD9, Nanog, Fbxl5, Ecatl, Esgl, Eras, Gdf3, Fgf4, Cripto, Daxl, Zpf296, Slc2a3, Rexl, Utfl, and Natl. In one case, for example, a cell that expresses Oct4 or Nanog is identified as pluripotent. Methods for detecting the expression of such markers can include, for example, RT-PCR and immunological methods that detect the presence of the encoded polypeptides, such as Western blots or flow cytometric analyses. Detection can involve not only RT-PCR, but can also include detection of protein markers. Intracellular markers may be best identified via RT-PCR, or protein detection methods such as immunocytochemistry, while cell surface markers are readily identified, e.g., by immunocytochemistry.

[0294] The pluripotent stem cell character of isolated cells can be confirmed by tests evaluating the ability of the iPSCs to differentiate into cells of each of the three germ layers. As one example, teratoma formation in nude mice can be used to evaluate the pluripotent character of the isolated clones. The cells can be introduced into nude mice and histology and/or immunohistochemistry can be performed on a tumor arising from the cells. The growth of a tumor comprising cells from all three germ layers, for example, further indicates that the cells are pluripotent stem cells.

### Cells of the Central Nervous System

[0295] In some aspects, the genetically engineered human cells described herein are cells of the central nervous system. Neurons, which process information, and glial cells (or neuroglia), which provide mechanical and metabolic support to the nervous system and modulate information processed by neurons, are the two main classes of cells of the central nervous system. Non-limiting examples of neurons include sensory neurons (also referred to as afferent neurons) that transfer information from the external environment to the central nervous system, motor neurons (also referred to as efferent neurons) that transfer information from the central nervous system to the external environment, and interneurons (also referred to as association neurons) that process information in the central nervous system and transfer the information from one neuron to the other within the central nervous system. Non-limiting examples of glial cells include astrocytes, oligodendrocytes, microglia and Schwann cells. CNS progenitor cells can be neural progenitor cells or glial progenitor cells.

[0296] The typical neuron transmits electrical signals from one cell to another. Neurons contain a cell body, dendrite, axon hillock, axon, nerve endings, neuronal synapses, and neuromuscular junction. Neurons may be named according to shape or the nature of the dendritic tree.

[0297] Neuroglia differ from neurons in several general ways in that they: do not form synapses, have essentially only one type of process, retain the ability to divide, and are less electrically excitable than neurons. Neuroglia are classified based on size and shape of their nucleus and distinguished from neurons, at the light microscopic level. Neuroglia are divided into two major categories based on size, the macroglia and the microglia. The macroglia are of ectodermal origin and consist of astrocytes, oligodendrocytes and ependymal cells. Microglia cells are probably of mesodermal origin.

### Cells of the Peripheral Nervous System

[0298] In some aspects, the genetically engineered human cells described herein are neurons and nerves outside of the brain and spinal cord. Neurons, which process information, and glial cells, which provide mechanical and metabolic support to the nervous system, are the two main classes of cells of the peripheral nervous system. Non-limiting examples of neurons include sensory neurons (collect impulses from the sensory receptors in areas such as skin, muscles, and organs and carries those impulses through the nerves to the CNS) and motor neurons (collect outgoing messages from the CNS and delivers them to the appropriate body organs, instructing them what action needs to be taken). Non-limiting examples of glial cells include Schwann cells in nerves or satellite cells in ganglia.

[0299] Creating Patient Specific iPSCs

[0300] One step of the ex vivo methods of the present disclosure can involve creating a patient specific iPS cell, patient specific iPS cells, or a patient specific iPS cell line. There are many established methods in the art for creating patient specific iPS cells, as described in Takahashi and Yamanaka 2006; Takahashi, Tanabe et al. 2007. For example, the creating step can comprise: a) isolating a somatic cell, such as a skin cell or fibroblast, from the patient; and b) introducing a set of pluripotency-associated genes into the somatic cell in order to induce the cell to become a pluripotent stem cell. The set of pluripotency-associated genes can be one or more of the genes selected from the group consisting of OCT4, SOX1, SOX2, SOX3, SOX15, SOX18, NANOG, KLF1, KLF2, KLF4, KLF5, c-MYC, n-MYC, REM2, TERT and LIN28.

### Performing a Biopsy or Aspirate of the Patient's Tissue

[0301] A biopsy or aspirate is a sample of tissue or fluid taken from the body. There are many different kinds of biopsies or aspirates. Nearly all of them involve using a sharp tool to remove a small amount of tissue. If the biopsy will be on the skin or other sensitive area, numbing medicine can be applied first. A biopsy or aspirate may be performed according to any of the known methods in the art. For example, in the case of brain, a needle biopsy is performed to isolate a piece of the brain. A small hole is drilled into the skull and a narrow, hollow needle is placed into the hole to extract a tiny portion of the tissue. For example, in a bone marrow aspirate, a large needle is used to enter the pelvis bone to collect bone marrow. In the case of a nerve biopsy from skin or leg to isolate peripheral neurons, the nerve segment is excised inflicting minimal mechanical injury. Squeezing or stretching the nerve is avoided and excessive removal of fat or connective tissue is not attempted.

### Isolating a Neuron

[0302] Neurons may be isolated according to any known method in the art. For example, the biopsied tissue from the brain is disassociated by trituration and trypsinization (0.25% trypsin in PBS at 37° C. for 15 min). The trypsin is inactivated with 10% heat-inactivated FBS (fetal bovine serum). The disassociated cells are filtered through 380 and 140 μm meshes and pelleted by centrifugation. The cell pellet is then washed once with PBS and once with Neurobasal media. The neurons are enriched and cultured on poly-D-lysine-coated plates. The adherent cells receive Neurobasal media used previously and are further treated with 10 μM cytosine arabonoside (AraC) for 10 days to prevent proliferation of dividing cells. Cells are cultured and characterized for neuron-specific markers such as MAP-2 (Zhang et al., Journal of Cell Biology, 2002, 156(3):519-29).

[0303] PNS neurons may be isolated according to any known method in the art. For example, the nerve segment is excised inflicting minimal mechanical injury under aseptic conditions. Squeezing or stretching the nerve is strictly avoided and excessive removal of fat or connective tissue is not attempted. Since, nerve fibers are very sensitive to mechanical injury, the proximal nerve cut is performed first. Following the isolation, the outermost connective tissue layer, the epineurium, is removed and collected for enzymatic digestion. The fibers are teased with the help of fine forceps until all fascicles are separated into individual fibers. The epineurium and teased fibers are then subjected to enzymatic digestion overnight with dispase II and type I collagenase. The digested products are filtered and collected by centrifugation. The resulting cell suspensions are plated onto adhesive PLL/laminin substrate. The adherent cells are cultured for analysis (Andersen et al., Scientific Reports-Nature, 2016, 6:31781).

### Isolating a Mesenchymal Stem Cell

[0304] Mesenchymal stem cells can be isolated according to any method known in the art, such as from a patient's bone marrow or peripheral blood. For example, marrow aspirate can be collected into a syringe with heparin. Cells can be washed and centrifuged on a Percoll. The cells can be cultured in Dulbecco's modified Eagle's medium (DMEM) (low glucose) containing 10% fetal bovine serum (FBS) (Pittinger M F, Mackay A M, Beck S C et al., Science 1999; 284:143-147).

### Genetically Modified Cells

[0305] The term “genetically modified cell” refers to a cell that comprises at least one genetic modification introduced by genome editing (e.g., using the CRISPR/Cas9 or CRISPR/Cpf1 system). In some ex vivo examples herein, the genetically modified cell can be genetically modified progenitor cell. In some in vivo examples herein, the genetically modified cell can be a genetically modified cell of the central nervous system (e.g., a neuron or a glial cell) or a genetically modified cell of the peripheral nervous system (e.g., a neuron or a glial cell such as Schwann cell in nerves or satellite glial cell in ganglia). A genetically modified cell comprising an exogenous genome-targeting nucleic acid and/or an exogenous nucleic acid encoding a genome-targeting nucleic acid is contemplated herein.

[0306] The term “control treated population” describes a population of cells that has been treated with identical media, viral induction, nucleic acid sequences, temperature, confluency, flask size, pH, etc., with the exception of the addition of the genome editing components. Any method known in the art can be used to measure transcription of SNCA gene or protein expression or activity, for example Western Blot analysis of the SNCA protein or real time PCR for quantifying SNCA mRNA.

[0307] The term “isolated cell” refers to a cell that has been removed from an organism in which it was originally found, or a descendant of such a cell. Optionally, the cell can be cultured in vitro, e.g., under defined conditions or in the presence of other cells. Optionally, the cell can be later introduced into a second organism or re-introduced into the organism from which it (or the cell from which it is descended) was isolated.

[0308] The term “isolated population” with respect to an isolated population of cells refers to a population of cells that has been removed and separated from a mixed or heterogeneous population of cells. In some cases, the isolated population can be a substantially pure population of cells, as compared to the heterogeneous population from which the cells were isolated or enriched. In some cases, the isolated population can be an isolated population of human progenitor cells, e.g., a substantially pure population of human progenitor cells, as compared to a heterogeneous population of cells comprising human progenitor cells and cells from which the human progenitor cells were derived.

[0309] The term “substantially enhanced,” with respect to a particular cell population, refers to a population of cells in which the occurrence of a particular type of cell is increased relative to pre-existing or reference levels, by at least 2-fold, at least 3-, at least 4-, at least 5-, at least 6-, at least 7-, at least 8-, at least 9, at least 10-, at least 20-, at least 50-, at least 100-, at least 400-, at least 1000-, at least 5000-, at least 20000-, at least 100000- or more fold depending, e.g., on the desired levels of such cells for ameliorating Early Onset Parkinson's disease (PARK1).

[0310] The term “substantially enriched” with respect to a particular cell population, refers to a population of cells that is at least about 10%, about 20%, about 30%, about 40%, about 50%, about 60%, about 70% or more with respect to the cells making up a total cell population.

[0311] The term “substantially pure” with respect to a particular cell population, refers to a population of cells that is at least about 75%, at least about 85%, at least about 90%, or at least about 95% pure, with respect to the cells making up a total cell population. That is, the terms “substantially pure” or “essentially purified,” with regard to a population of progenitor cells, refers to a population of cells that contain fewer than about 20%, about 15%, about 10%, about 9%, about 8%, about 7%, about 6%, about 5%, about 4%, about 3%, about 2%, about 1%, or less than 1%, of cells that are not progenitor cells as defined by the terms herein.

Differentiation of Genome-Edited iPSCs into Cells of the Central Nervous System (CNS) or the Peripheral Nervous System (PNS)

[0312] Another step of the ex vivo methods of the present disclosure can comprise differentiating the genome-edited iPSC into a cell of the central nervous system (e.g., a neuron or a glial cell) or a cell of the peripheral nervous system (e.g., a neuron or a glial cell such as Schwann cell in nerves or satellite glial cell in ganglia). The differentiating step may be performed according to any method known in the art.

Differentiation of Genome-Edited Mesenchymal Stem Cells into Cells of the Central Nervous System (CNS) or the Peripheral Nervous System (PNS)

[0313] Another step of the ex vivo methods of the present disclosure can comprise differentiating the genome-edited mesenchymal stem cells into cells of the central nervous system (e.g., a neuron or a glial cell) or the peripheral nervous system (e.g., a neuron or a glial cell such as Schwann cell in nerves or satellite glial cell in ganglia). The differentiating step may be performed according to any method known in the art.

Implanting Cells into Patients

[0314] Another step of the ex vivo methods of the present disclosure involves implanting the cells of the central nervous system (e.g., a neuron or a glial cell) or the peripheral nervous system (e.g., a neuron or a glial cell such as Schwann cell in nerves or satellite glial cell in ganglia) into patients. This implanting step may be accomplished using any method of implantation known in the art. For example, the genetically modified neurons of the central nervous system may be administered to the patient via intraparenchymal, vascular (e.g., intravenous, intra-arterial), or ventricular (e.g., intracerebroventricular, intracisternal, intrathecal) routes or other routes such as intracranial or intraperitoneal injection.

### III. Formulations and Delivery

### Pharmaceutically Acceptable Carriers

[0315] The ex vivo methods of administering progenitor cells to a subject contemplated herein involve the use of therapeutic compositions comprising progenitor cells.

[0316] Therapeutic compositions can contain a physiologically tolerable carrier together with the cell composition, and optionally at least one additional bioactive agent as described herein, dissolved or dispersed therein as an active ingredient. In some cases, the therapeutic composition is not substantially immunogenic when administered to a mammal or human patient for therapeutic purposes, unless so desired.

[0317] In general, the progenitor cells described herein can be administered as a suspension with a pharmaceutically acceptable carrier. One of skill in the art will recognize that a pharmaceutically acceptable carrier to be used in a cell composition will not include buffers, compounds, cryopreservation agents, preservatives, or other agents in amounts that substantially interfere with the viability of the cells to be delivered to the subject. A formulation comprising cells can include e.g., osmotic buffers that permit cell membrane integrity to be maintained, and optionally, nutrients to maintain cell viability or enhance engraftment upon administration. Such formulations and suspensions are known to those of skill in the art and/or can be adapted for use with the progenitor cells, as described herein, using routine experimentation.

[0318] A cell composition can also be emulsified or presented as a liposome composition, provided that the emulsification procedure does not adversely affect cell viability. The cells and any other active ingredient can be mixed with excipients that are pharmaceutically acceptable and compatible with the active ingredient, and in amounts suitable for use in the therapeutic methods described herein.

[0319] Additional agents included in a cell composition can include pharmaceutically acceptable salts of the components therein. Pharmaceutically acceptable salts include the acid addition salts (formed with the free amino groups of the polypeptide) that are formed with inorganic acids, such as, for example, hydrochloric or phosphoric acids, or such organic acids as acetic, tartaric, mandelic and the like. Salts formed with the free carboxyl groups can also be derived from inorganic bases, such as, for example, sodium, potassium, ammonium, calcium or ferric hydroxides, and such organic bases as isopropylamine, trimethylamine, 2-ethylamino ethanol, histidine, procaine and the like.

[0320] Physiologically tolerable carriers are well known in the art. Exemplary liquid carriers are sterile aqueous solutions that contain no materials in addition to the active ingredients and water, or contain a buffer such as sodium phosphate at physiological pH value, physiological saline or both, such as phosphate-buffered saline. Still further, aqueous carriers can contain more than one buffer salt, as well as salts such as sodium and potassium chlorides, dextrose, polyethylene glycol and other solutes. Liquid compositions can also contain liquid phases in addition to and to the exclusion of water. Exemplary of such additional liquid phases are glycerin, vegetable oils such as cottonseed oil, and water-oil emulsions. The amount of an active compound used in the cell compositions that is effective in the treatment of a particular disorder or condition can depend on the nature of the disorder or condition, and can be determined by standard clinical techniques.

### Guide RNA Formulation

[0321] Guide RNAs of the present disclosure can be formulated with pharmaceutically acceptable excipients such as carriers, solvents, stabilizers, adjuvants, diluents, etc., depending upon the particular mode of administration and dosage form. Guide RNA compositions can be formulated to achieve a physiologically compatible pH, and range from a pH of about 3 to a pH of about 11, about pH 3 to about pH 7, depending on the formulation and route of administration. In some cases, the pH can be adjusted to a range from about pH 5.0 to about pH 8. In some cases, the compositions can comprise a therapeutically effective amount of at least one compound as described herein, together with one or more pharmaceutically acceptable excipients. Optionally, the compositions can comprise a combination of the compounds described herein, or can include a second active ingredient useful in the treatment or prevention of bacterial growth (for example and without limitation, anti-bacterial or anti-microbial agents), or can include a combination of reagents of the present disclosure.

[0322] Suitable excipients include, for example, carrier molecules that include large, slowly metabolized macromolecules such as proteins, polysaccharides, polylactic acids, polyglycolic acids, polymeric amino acids, amino acid copolymers, and inactive virus particles. Other exemplary excipients can include antioxidants (for example and without limitation, ascorbic acid), chelating agents (for example and without limitation, EDTA), carbohydrates (for example and without limitation, dextrin, hydroxyalkylcellulose, and hydroxyalkylmethylcellulose), stearic acid, liquids (for example and without limitation, oils, water, saline, glycerol and ethanol), wetting or emulsifying agents, pH buffering substances, and the like.

### Delivery

[0323] Guide RNA polynucleotides (RNA or DNA) and/or endonuclease polynucleotide(s) (RNA or DNA) can be delivered by viral or non-viral delivery vehicles known in the art. Alternatively, endonuclease polypeptide(s) can be delivered by viral or non-viral delivery vehicles known in the art, such as electroporation or lipid nanoparticles. In further alternative aspects, the DNA endonuclease can be delivered as one or more polypeptides, either alone or pre-complexed with one or more guide RNAs, or one or more crRNA together with a tracrRNA.

[0324] Polynucleotides can be delivered by non-viral delivery vehicles including, but not limited to, nanoparticles, liposomes, ribonucleoproteins, positively charged peptides, small molecule RNA-conjugates, aptamer-RNA chimeras, and RNA-fusion protein complexes. Some exemplary non-viral delivery vehicles are described in Peer and Lieberman, Gene Therapy, 18: 1127-1133 (2011) (which focuses on non-viral delivery vehicles for siRNA that are also useful for delivery of other polynucleotides).

[0325] For polynucleotides of the present disclosure, the formulation may be selected from any of those taught, for example, in International Application PCT/US2012/069610.

[0326] Polynucleotides, such as guide RNA, sgRNA, and mRNA encoding an endonuclease, may be delivered to a cell or a patient by a lipid nanoparticle (LNP).

[0327] A LNP refers to any particle having a diameter of less than 1000 nm, 500 nm, 250 nm, 200 nm, 150 nm, 100 nm, 75 nm, 50 nm, or 25 nm. Alternatively, a nanoparticle may range in size from 1-1000 nm, 1-500 nm, 1-250 nm, 25-200 nm, 25-100 nm, 35-75 nm, or 25-60 nm.

[0328] LNPs may be made from cationic, anionic, or neutral lipids. Neutral lipids, such as the fusogenic phospholipid DOPE or the membrane component cholesterol, may be included in LNPs as ‘helper lipids’ to enhance transfection activity and nanoparticle stability. Limitations of cationic lipids include low efficacy owing to poor stability and rapid clearance, as well as the generation of inflammatory or anti-inflammatory responses.

[0329] LNPs may also be comprised of hydrophobic lipids, hydrophilic lipids, or both hydrophobic and hydrophilic lipids.

[0330] Any lipid or combination of lipids that are known in the art can be used to produce a LNP. Examples of lipids used to produce LNPs are: DOTMA, DOSPA, DOTAP, DMRIE, DC-cholesterol, DOTAP-cholesterol, GAP-DMORIE-DPyPE, and GL67A-DOPE-DMPE-polyethylene glycol (PEG). Examples of cationic lipids are: 98N12-5, C12-200, DLin-KC2-DMA (KC2), DLin-MC3-DMA (MC3), XTC, MD1, and 7C1. Examples of neutral lipids are: DPSC, DPPC, POPC, DOPE, and SM. Examples of PEG-modified lipids are: PEG-DMG, PEG-CerC14, and PEG-CerC20.

[0331] The lipids can be combined in any number of molar ratios to produce a LNP. In addition, the polynucleotide(s) can be combined with lipid(s) in a wide range of molar ratios to produce a LNP.

[0332] As stated previously, the site-directed polypeptide and genome-targeting nucleic acid can each be administered separately to a cell or a patient. On the other hand, the site-directed polypeptide can be pre-complexed with one or more guide RNAs, or one or more crRNA together with a tracrRNA. The pre-complexed material can then be administered to a cell or a patient. Such pre-complexed material is known as a ribonucleoprotein particle (RNP).

[0333] RNA is capable of forming specific interactions with RNA or DNA. While this property is exploited in many biological processes, it also comes with the risk of promiscuous interactions in a nucleic acid-rich cellular environment. One solution to this problem is the formation of ribonucleoprotein particles (RNPs), in which the RNA is pre-complexed with an endonuclease. Another benefit of the RNP is protection of the RNA from degradation.

[0334] The endonuclease in the RNP can be modified or unmodified. Likewise, the gRNA, crRNA, tracrRNA, or sgRNA can be modified or unmodified. Numerous modifications are known in the art and can be used.

[0335] The endonuclease and sgRNA can be generally combined in a 1:1 molar ratio. Alternatively, the endonuclease, crRNA and tracrRNA can be generally combined in a 1:1:1 molar ratio. However, a wide range of molar ratios can be used to produce a RNP.

### AAV (Adeno Associated Virus)

[0336] A recombinant adeno-associated virus (AAV) vector can be used for delivery. Techniques to produce rAAV particles, in which an AAV genome to be packaged that includes the polynucleotide to be delivered, rep and cap genes, and helper virus functions are provided to a cell are standard in the art. Production of rAAV typically requires that the following components are present within a single cell (denoted herein as a packaging cell): a rAAV genome, AAV rep and cap genes separate from (i.e., not in) the rAAV genome, and helper virus functions. The AAV rep and cap genes may be from any AAV serotype for which recombinant virus can be derived, and may be from a different AAV serotype than the rAAV genome ITRs, including, but not limited to, AAV serotypes described herein. Production of pseudotyped rAAV is disclosed in, for example, international patent application publication number WO 01/83692.

### AAV Serotypes

[0337] AAV particles packaging polynucleotides encoding compositions of the present disclosure, e.g., endonucleases, donor sequences, or RNA guide molecules, of the present disclosure may comprise or be derived from any natural or recombinant AAV serotype. According to the present disclosure, the AAV particles may utilize or be based on a serotype selected from any of the following serotypes, and variants thereof including but not limited to AAV1, AAV10, AAV106.1/hu.37, AAV11, AAV114.3/hu.40, AAV12, AAV127.2/hu.41, AAV127.5/hu.42, AAV128.1/hu.43, AAV128.3/hu.44, AAV130.4/hu.48, AAV145.1/hu.53, AAV145.5/hu.54, AAV145.6/hu.55, AAV16.12/hu. 11, AAV16.3, AAV16.8/hu. 10, AAV161.10/hu.60, AAV161.6/hu.61, AAV1-7/rh.48, AAV1-8/rh.49, AAV2, AAV2.5T, AAV2-15/rh.62, AAV223.1, AAV223.2, AAV223.4, AAV223.5, AAV223.6, AAV223.7, AAV2-3/rh.61, AAV24.1, AAV2-4/rh.50, AAV2-5/rh.51, AAV27.3, AAV29.3/bb.1, AAV29.5/bb.2, AAV2G9, AAV-2-pre-miRNA-101, AAV3, AAV3.1/hu.6, AAV3.1/hu.9, AAV3-11/rh.53, AAV3-3, AAV33.12/hu. 17, AAV33.4/hu. 15, AAV33.8/hu. 16, AAV3-9/rh.52, AAV3a, AAV3b, AAV4, AAV4-19/rh.55, AAV42.12, AAV42-10, AAV42-11, AAV42-12, AAV42-13, AAV42-15, AAV42-1b, AAV42-2, AAV42-3a, AAV42-3b, AAV42-4, AAV42-5a, AAV42-5b, AAV42-6b, AAV42-8, AAV42-aa, AAV43-1, AAV43-12, AAV43-20, AAV43-21, AAV43-23, AAV43-25, AAV43-5, AAV4-4, AAV44.1, AAV44.2, AAV44.5, AAV46.2/hu.28, AAV46.6/hu.29, AAV4-8/r11.64, AAV4-8/rh.64, AAV4-9/rh.54, AAV5, AAV52.1/hu.20, AAV52/hu. 19, AAV5-22/rh.58, AAV5-3/rh.57, AAV54.1/hu.21, AAV54.2/hu.22, AAV54.4R/hu.27, AAV54.5/hu.23, AAV54.7/hu.24, AAV58.2/hu.25, AAV6, AAV6.1, AAV6.1.2, AAV6.2, AAV7, AAV7.2, AAV7.3/hu.7, AAV8, AAV-8b, AAV-8h, AAV9, AAV9.11, AAV9.13, AAV9.16, AAV9.24, AAV9.45, AAV9.47, AAV9.61, AAV9.68, AAV9.84, AAV9.9, AAVA3.3, AAVA3.4, AAVA3.5, AAVA3.7, AAV-b, AAVC1, AAVC2, AAVC5, AAVCh.5, AAVCh.5R1, AAVcy.2, AAVcy.3, AAVcy.4, AAVcy.5, AAVCy.5R1, AAVCy.5R2, AAVCy.5R3, AAVCy.5R4, AAVcy.6, AAV-DJ, AAV-DJ8, AAVF3, AAVF5, AAV-h, AAVH-1/hu.1, AAVH2, AAVH-5/hu.3, AAVH6, AAVhE1.1, AAVhER1.14, AAVhEr1.16, AAVhEr1.18, AAVhER1.23, AAVhEr1.35, AAVhEr1.36, AAVhEr1.5, AAVhEr1.7, AAVhEr1.8, AAVhEr2.16, AAVhEr2.29, AAVhEr2.30, AAVhEr2.31, AAVhEr2.36, AAVhEr2.4, AAVhEr3.1, AAVhu.1, AAVhu.10, AAVhu.11, AAVhu.11, AAVhu.12, AAVhu.13, AAVhu.14/9, AAVhu.15, AAVhu.16, AAVhu.17, AAVhu.18, AAVhu.19, AAVhu.2, AAVhu.20, AAVhu.21, AAVhu.22, AAVhu.23.2, AAVhu.24, AAVhu.25, AAVhu.27, AAVhu.28, AAVhu.29, AAVhu.29R, AAVhu.3, AAVhu.31, AAVhu.32, AAVhu.34, AAVhu.35, AAVhu.37, AAVhu.39, AAVhu.4, AAVhu.40, AAVhu.41, AAVhu.42, AAVhu.43, AAVhu.44, AAVhu.44R1, AAVhu.44R2, AAVhu.44R3, AAVhu.45, AAVhu.46, AAVhu.47, AAVhu.48, AAVhu.48R1, AAVhu.48R2, AAVhu.48R3, AAVhu.49, AAVhu.5, AAVhu.51, AAVhu.52, AAVhu.53, AAVhu.54, AAVhu.55, AAVhu.56, AAVhu.57, AAVhu.58, AAVhu.6, AAVhu.60, AAVhu.61, AAVhu.63, AAVhu.64, AAVhu.66, AAVhu.67, AAVhu.7, AAVhu.8, AAVhu.9, AAVhu.t 19, AAVLG-10/rh.40, AAVLG-4/rh.38, AAVLG-9/hu.39, AAVLG-9/hu.39, AAV-LKO1, AAV-LK02, AAVLK03, AAV-LK03, AAV-LK04, AAV-LK05, AAV-LKO6, AAV-LK07, AAV-LK08, AAV-LK09, AAV-LK10, AAV-LK11, AAV-LK12, AAV-LK13, AAV-LK14, AAV-LK15, AAV-LK17, AAV-LK18, AAV-LK19, AAVN721-8/rh.43, AAV-PAEC, AAV-PAEC11, AAV-PAEC12, AAV-PAEC2, AAV-PAEC4, AAV-PAEC6, AAV-PAEC7, AAV-PAEC8, AAVpi.1, AAVpi.2, AAVpi.3, AAVrh.10, AAVrh.12, AAVrh.13, AAVrh.13R, AAVrh.14, AAVrh.17, AAVrh.18, AAVrh.19, AAVrh.2, AAVrh.20, AAVrh.21, AAVrh.22, AAVrh.23, AAVrh.24, AAVrh.25, AAVrh.2R, AAVrh.31, AAVrh.32, AAVrh.33, AAVrh.34, AAVrh.35, AAVrh.36, AAVrh.37, AAVrh.37R2, AAVrh.38, AAVrh.39, AAVrh.40, AAVrh.43, AAVrh.44, AAVrh.45, AAVrh.46, AAVrh.47, AAVrh.48, AAVrh.48, AAVrh.48.1, AAVrh.48.1.2, AAVrh.48.2, AAVrh.49, AAVrh.50, AAVrh.51, AAVrh.52, AAVrh.53, AAVrh.54, AAVrh.55, AAVrh.56, AAVrh.57, AAVrh.58, AAVrh.59, AAVrh.60, AAVrh.61, AAVrh.62, AAVrh.64, AAVrh.64R1, AAVrh.64R2, AAVrh.65, AAVrh.67, AAVrh.68, AAVrh.69, AAVrh.70, AAVrh.72, AAVrh.73, AAVrh.74, AAVrh.8, AAVrh.8R, AAVrh8R, AAVrh8R A586R mutant, AAVrh8R R533A mutant, BAAV, BNP61 AAV, BNP62 AAV, BNP63 AAV, bovine AAV, caprine AAV, Japanese AAV 10, true type AAV (ttAAV), UPENN AAV 10, AAV-LK16, AAAV, AAV Shuffle 100-1, AAV Shuffle 100-2, AAV Shuffle 100-3, AAV Shuffle 100-7, AAV Shuffle 10-2, AAV Shuffle 10-6, AAV Shuffle 10-8, AAV SM 100-10, AAV SM 100-3, AAV SM 10-1, AAV SM 10-2, and/or AAV SM 10-8.

[0338] In some aspects, the AAV serotype may be, or have, a mutation in the AAV9 sequence as described by N Pulicherla et al. (Molecular Therapy 19(6): 1070-1078 (2011)), such as but not limited to, AAV9.9, AAV9.11, AAV9.13, AAV9.16, AAV9.24, AAV9.45, AAV9.47, AAV9.61, AAV9.68, AAV9.84.

[0339] In some aspects, the AAV serotype may be, or have, a sequence as described in U.S. Pat. No. 6,156,303, such as, but not limited to, AAV3B (SEQ ID NO: 1 and 10 of U.S. Pat. No. 6,156,303), AAV6 (SEQ ID NO: 2, 7 and 11 of U.S. Pat. No. 6,156,303), AAV2 (SEQ ID NO: 3 and 8 of U.S. Pat. No. 6,156,303), AAV3A (SEQ ID NO: 4 and 9, of U.S. Pat. No. 6,156,303), or derivatives thereof.

[0340] In some aspects, the serotype may be AAVDJ or a variant thereof, such as AAVDJ8 (or AAV-DJ8), as described by Grimm et al. (Journal of Virology 82(12): 5887-5911 (2008)). The amino acid sequence of AAVDJ8 may comprise two or more mutations in order to remove the heparin binding domain (HBD). As a non-limiting example, the AAV-DJ sequence described as SEQ ID NO: 1 in U.S. Pat. No. 7,588,772, may comprise two mutations: (1) R587Q where arginine (R; Arg) at amino acid 587 is changed to glutamine (Q; Gln) and (2) R590T where arginine (R; Arg) at amino acid 590 is changed to threonine (T; Thr). As another non-limiting example, may comprise three mutations: (1) K406R where lysine (K; Lys) at amino acid 406 is changed to arginine (R; Arg), (2) R587Q where arginine (R; Arg) at amino acid 587 is changed to glutamine (Q; Gln) and (3) R590T where arginine (R; Arg) at amino acid 590 is changed to threonine (T; Thr).

[0341] In some aspects, the AAV serotype may be, or have, a sequence as described in International Publication No. WO2015121501, such as, but not limited to, true type AAV (ttAAV) (SEQ ID NO: 2 of WO2015121501), “UPenn AAV10” (SEQ ID NO: 8 of WO2015121501), “Japanese AAV10” (SEQ ID NO: 9 of WO2015121501), or variants thereof.

[0342] According to the present disclosure, AAV capsid serotype selection or use may be from a variety of species. In one example, the AAV may be an avian AAV (AAAV). The AAAV serotype may be, or have, a sequence as described in U.S. Pat. No. 9,238,800, such as, but not limited to, AAAV (SEQ ID NO: 1, 2, 4, 6, 8, 10, 12, and 14 of U.S. Pat. No. 9,238,800), or variants thereof.

[0343] In one example, the AAV may be a bovine AAV (BAAV). The BAAV serotype may be, or have, a sequence as described in U.S. Pat. No. 9,193,769, such as, but not limited to, BAAV (SEQ ID NO: 1 and 6 of U.S. Pat. No. 9,193,769), or variants thereof. The BAAV serotype may be or have a sequence as described in U.S. Pat. No. 7,427,396, such as, but not limited to, BAAV (SEQ ID NO: 5 and 6 of U.S. Pat. No. 7,427,396), or variants thereof.

[0344] In one example, the AAV may be a caprine AAV. The caprine AAV serotype may be, or have, a sequence as described in U.S. Pat. No. 7,427,396, such as, but not limited to, caprine AAV (SEQ ID NO: 3 of U.S. Pat. No. 7,427,396), or variants thereof.

[0345] In other examples, the AAV may be engineered as a hybrid AAV from two or more parental serotypes. In one example, the AAV may be AAV2G9 which comprises sequences from AAV2 and AAV9. The AAV2G9 AAV serotype may be, or have, a sequence as described in U.S. Patent Publication No. 20160017005.

[0346] In one example, the AAV may be a serotype generated by the AAV9 capsid library with mutations in amino acids 390-627 (VP1 numbering) as described by Pulicherla et al. (Molecular Therapy 19(6):1070-1078 (2011). The serotype and corresponding nucleotide and amino acid substitutions may be, but is not limited to, AAV9.1 (G1594C; D532H), AAV6.2 (T1418A and T1436X; V473D and 1479K), AAV9.3 (T1238A; F413Y), AAV9.4 (T1250C and A1617T; F417S), AAV9.5 (A1235G, A1314T, A1642G, C1760T; Q412R, T548A, A587V), AAV9.6 (T1231A; F411I), AAV9.9 (G1203A, G1785T; W595C), AAV9.10 (A1500G, T1676C; M559T), AAV9.11 (A1425T, A1702C, A1769T; T568P, Q590L), AAV9.13 (A1369C, A1720T; N457H, T574S), AAV9.14 (T1340A, T1362C, T1560C, G1713A; L447H), AAV9.16 (A1775T; Q592L), AAV9.24 (T1507C, T1521G; W503R), AAV9.26 (A1337G, A1769C; Y446C, Q590P), AAV9.33 (A1667C; D556A), AAV9.34 (A1534G, C1794T; N512D), AAV9.35 (A1289T, T1450A, C1494T, A1515T, C1794A, G1816A; Q430L, Y484N, N98K, V6061), AAV9.40 (A1694T, E565V), AAV9.41 (A1348T, T1362C; T450S), AAV9.44 (A1684C, A1701T, A1737G; N562H, K567N), AAV9.45 (A1492T, C1804T; N498Y, L602F), AAV9.46 (G1441C, T1525C, T1549G; G481R, W509R, L517V), 9.47 (G1241A, G1358A, A1669G, C1745T; S414N, G453D, K557E, T582I), AAV9.48 (C1445T, A1736T; P482L, Q579L), AAV9.50 (A1638T, C1683T, T1805A; Q546H, L602H), AAV9.53 (G1301A, A1405C, C1664T, G1811T; R134Q, S469R, A555V, G604V), AAV9.54 (C1531A, T1609A; L511I, L537M), AAV9.55 (T1605A; F535L), AAV9.58 (C1475T, C1579A; T492I, H527N), AAV.59 (T1336C; Y446H), AAV9.61 (A1493T; N498I), AAV9.64 (C1531A, A1617T; L511I), AAV9.65 (C1335T, T1530C, C1568A; A523D), AAV9.68 (C1510A; P504T), AAV9.80 (G1441A; G481R), AAV9.83 (C1402A, A1500T; P468T, E500D), AAV9.87 (T1464C, T1468C; S490P), AAV9.90 (A1196T; Y399F), AAV9.91 (T1316G, A1583T, C1782G, T1806C; L439R, K528I), AAV9.93 (A1273G, A1421G, A1638C, C1712T, G1732A, A1744T, A1832T; S425G, Q474R, Q546H, P571L, G578R, T582S, D611V), AAV9.94 (A1675T; M559L) and AAV9.95 (T1605A; F535L).

[0347] In one example, the AAV may be a serotype comprising at least one AAV capsid CD8+ T-cell epitope. As a non-limiting example, the serotype may be AAV1, AAV2 or AAV8.

[0348] In one example, the AAV may be a variant, such as PHP.A or PHP.B as described in Deverman. 2016. Nature Biotechnology. 34(2): 204-209.

[0349] In one example, the AAV may be a serotype selected from any of those sequences found in SEQ ID NOs: 4734-5302 and Table 2.

[0350] In one example, the AAV may be encoded by a sequence, fragment or variant as described in SEQ ID NOs: 4734-5302 and Table 2.

[0351] General principles of rAAV production are reviewed in, for example, Carter, 1992, Current Opinions in Biotechnology, 1533-539; and Muzyczka, 1992, Curr. Topics in Microbial. and Immunol., 158:97-129). Various approaches are described in Ratschin et al., Mol. Cell. Biol. 4:2072 (1984); Hermonat et al., Proc. Natl. Acad. Sci. USA, 81:6466 (1984); Tratschin et al., Mol. Cell. Biol. 5:3251 (1985); McLaughlin et al., J. Virol., 62:1963 (1988); and Lebkowski et al., 1988 Mol. Cell. Biol., 7:349 (1988). Samulski et al. (1989, J. Virol., 63:3822-3828); U.S. Pat. No. 5,173,414; WO 95/13365 and corresponding U.S. Pat. No. 5,658,776; WO 95/13392; WO 96/17947; PCT/US98/18600; WO 97/09441 (PCT/US96/14423); WO 97/08298 (PCT/US96/13872); WO 97/21825 (PCT/US96/20777); WO 97/06243 (PCT/FR96/01064); WO 99/11764; Perrin et al. (1995) Vaccine 13:1244-1250; Paul et al. (1993) Human Gene Therapy 4:609-615; Clark et al. (1996) Gene Therapy 3:1124-1132; U.S. Pat. Nos. 5,786,211; 5,871,982; and 6,258,595.

[0352] AAV vector serotypes can be matched to target cell types. For example, the following exemplary cell types can be transduced by the indicated AAV serotypes among others.

TABLE 2
Tissue/Cell Types and Serotypes

| Tissue/Cell Type | Serotype |
|---|---|
| Liver | AAV3, AAV5, AAV8, AAV9 |
| Skeletal muscle | AAV1, AAV7, AAV6, AAV8, AAV9 |
| Central nervous system | AAV1, AAV4, AAV5, AAV8, AAV9 |
| RPE | AAV5, AAV4, AAV2, AAV8, AAV9, |
| | AAVrh8R |
| Photoreceptor cells | AAV5, AAV8, AAV9, AAVrh8R |
| Lung | AAV9, AAV5 |
| Heart | AAV8 |
| Pancreas | AAV8 |
| Kidney | AAV2, AAV8 |
| Hematopoietic stem cells | AAV6 |

[0353] In addition to adeno-associated viral vectors, other viral vectors can be used. Such viral vectors include, but are not limited to, lentivirus, alphavirus, enterovirus, pestivirus, baculovirus, herpesvirus, Epstein Barr virus, papovavirus, poxvirus, vaccinia virus, and herpes simplex virus.

[0354] In some aspects, Cas9 mRNA, sgRNA targeting one or two sites in SNCA gene, and donor DNA can each be separately formulated into lipid nanoparticles, or are all co-formulated into one lipid nanoparticle.

[0355] In some aspects, Cas9 mRNA can be formulated in a lipid nanoparticle, while sgRNA and donor DNA can be delivered in an AAV vector.

[0356] Options are available to deliver the Cas9 nuclease as a DNA plasmid, as mRNA or as a protein. The guide RNA can be expressed from the same DNA, or can also be delivered as an RNA. The RNA can be chemically modified to alter or improve its half-life, or decrease the likelihood or degree of immune response. The endonuclease protein can be complexed with the gRNA prior to delivery. Viral vectors allow efficient delivery; split versions of Cas9 and smaller orthologs of Cas9 can be packaged in AAV, as can donors for HDR. A range of non-viral delivery methods also exist that can deliver each of these components, or non-viral and viral methods can be employed in tandem. For example, nano-particles can be used to deliver the protein and guide RNA, while AAV can be used to deliver a donor DNA.

### IV. Dosing and Administration

[0357] The terms “administering,” “introducing” and “transplanting” are used interchangeably in the context of the placement of cells, e.g., progenitor cells, into a subject, by a method or route that results in at least partial localization of the introduced cells at a desired site, such as a site of injury or repair, such that a desired effect(s) is produced. The cells e.g., progenitor cells, or their differentiated progeny can be administered by any appropriate route that results in delivery to a desired location in the subject where at least a portion of the implanted cells or components of the cells remain viable. The period of viability of the cells after administration to a subject can be as short as a few hours, e.g., twenty-four hours, to a few days, to as long as several years, or even the life time of the patient, i.e., long-term engraftment. For example, in some aspects described herein, an effective amount of neural progenitor cells is administered via a systemic route of administration, such as an intraperitoneal or intravenous route.

[0358] The terms “individual,” “subject,” “host” and “patient” are used interchangeably herein and refer to any subject for whom diagnosis, treatment or therapy is desired. In some aspects, the subject is a mammal. In some aspects, the subject is a human being.

[0359] When provided prophylactically, progenitor cells described herein can be administered to a subject in advance of any symptom of Early Onset Parkinson's disease (PARK1). Accordingly, the prophylactic administration of a progenitor cell population serves to prevent Early Onset Parkinson's disease (PARK1).

[0360] A progenitor cell population being administered according to the methods described herein can comprise allogeneic progenitor cells obtained from one or more donors. Such progenitors may be of any cellular or tissue origin, e.g., liver, muscle, cardiac, brain, etc. “Allogeneic” refers to a progenitor cell or biological samples comprising progenitor cells obtained from one or more different donors of the same species, where the genes at one or more loci are not identical. For example, a liver progenitor cell population being administered to a subject can be derived from one more unrelated donor subjects, or from one or more non-identical siblings. In some cases, syngeneic progenitor cell populations can be used, such as those obtained from genetically identical animals, or from identical twins. The progenitor cells can be autologous cells; that is, the progenitor cells are obtained or isolated from a subject and administered to the same subject, i.e., the donor and recipient are the same.

[0361] The term “effective amount” refers to the amount of a population of progenitor cells or their progeny needed to prevent or alleviate at least one or more signs or symptoms of Early Onset Parkinson's disease (PARK1), and relates to a sufficient amount of a composition to provide the desired effect, e.g., to treat a subject having Early Onset Parkinson's disease (PARK1). The term “therapeutically effective amount” therefore refers to an amount of progenitor cells or a composition comprising progenitor cells that is sufficient to promote a particular effect when administered to a typical subject, such as one who has or is at risk for Early Onset Parkinson's disease (PARK1). An effective amount would also include an amount sufficient to prevent or delay the development of a symptom of the disease, alter the course of a symptom of the disease (for example but not limited to, slow the progression of a symptom of the disease), or reverse a symptom of the disease. It is understood that for any given case, an appropriate “effective amount” can be determined by one of ordinary skill in the art using routine experimentation.

[0362] For use in the various aspects described herein, an effective amount of progenitor cells comprises at least 10² progenitor cells, at least 5×10² progenitor cells, at least 10³ progenitor cells, at least 5×10³ progenitor cells, at least 10⁴ progenitor cells, at least 5×10⁴ progenitor cells, at least 10⁵ progenitor cells, at least 2×10⁵ progenitor cells, at least 3×10⁵ progenitor cells, at least 4×10⁵ progenitor cells, at least 5×10⁵ progenitor cells, at least 6×10⁵ progenitor cells, at least 7×10⁵ progenitor cells, at least 8×10⁵ progenitor cells, at least 9×10⁵ progenitor cells, at least 1×10⁶ progenitor cells, at least 2×10⁶ progenitor cells, at least 3×10⁶ progenitor cells, at least 4×10⁶ progenitor cells, at least 5×10⁶ progenitor cells, at least 6×10⁶ progenitor cells, at least 7×10⁶ progenitor cells, at least 8×10⁶ progenitor cells, at least 9×10⁶ progenitor cells, or multiples thereof. The progenitor cells can be derived from one or more donors, or can be obtained from an autologous source. In some examples described herein, the progenitor cells can be expanded in culture prior to administration to a subject in need thereof.

[0363] In some aspects, modest and incremental decreases in the levels of mutant SNCA expressed in cells of patients having a SNCA related disorder can be beneficial for ameliorating one or more symptoms of the disease, for increasing long-term survival, and/or for reducing side effects associated with other treatments. Upon administration of such cells to human patients, the presence of progenitors that are producing decreased levels of mutant SNCA is beneficial. In some cases, effective treatment of a subject gives rise to at least about 3%, 5% or 7% reduction in SNCA relative to total SNCA in the treated subject. In some examples, the reduction in SNCA will be at least about 10% of total SNCA. In some examples, the reduction in SNCA will be at least about 20% to 30% of total SNCA. Similarly, the introduction of even relatively limited subpopulations of cells having significantly reduced levels of mutant SNCA can be beneficial in various patients because in some situations normalized cells will have a selective advantage relative to diseased cells. However, even modest levels of progenitors with reduced levels of mutant SNCA can be beneficial for ameliorating one or more aspects of Early Onset Parkinson's disease (PARK1) in patients. In some examples, about 10%, about 20%, about 30%, about 40%, about 50%, about 60%, about 70%, about 80%, about 90% or more of the neural progenitors in patients to whom such cells are administered are producing decreased levels of mutant SNCA.

[0364] In some aspects, modest and incremental increases in the levels of functional SNCA expressed in cells of patients having a SNCA related disorder can be beneficial for ameliorating one or more symptoms of the disease, for increasing long-term survival, and/or for reducing side effects associated with other treatments. Upon administration of such cells to human patients, the presence of progenitors that are producing increased levels of functional SNCA is beneficial. In some cases, effective treatment of a subject gives rise to at least about 3%, 5% or 7% functional SNCA relative to total SNCA in the treated subject. In some examples, functional SNCA will be at least about 10% of total SNCA. In some examples, functional SNCA will be at least about 20% to 30% of total SNCA. Similarly, the introduction of even relatively limited subpopulations of cells having significantly elevated levels of functional SNCA can be beneficial in various patients because in some situations normalized cells will have a selective advantage relative to diseased cells. However, even modest levels of progenitors with elevated levels of functional SNCA can be beneficial for ameliorating one or more aspects of Early Onset Parkinson's disease (PARK1) in patients. In some examples, about 10%, about 20%, about 30%, about 40%, about 50%, about 60%, about 70%, about 80%, about 90% or more of the neural progenitors in patients to whom such cells are administered are producing increased levels of functional SNCA.

[0365] “Administered” refers to the delivery of a progenitor cell composition into a subject by a method or route that results in at least partial localization of the cell composition at a desired site. A cell composition can be administered by any appropriate route that results in effective treatment in the subject, i.e. administration results in delivery to a desired location in the subject where at least a portion of the composition delivered, i.e. at least 1×10⁴ cells are delivered to the desired site for a period of time.

[0366] In one aspect of the method, the pharmaceutical composition may be administered via a route such as, but not limited to, enteral (into the intestine), gastroenteral, epidural (into the dura matter), oral (by way of the mouth), transdermal, peridural, intracerebral (into the cerebrum), intracerebroventricular (into the cerebral ventricles), epicutaneous (application onto the skin), intradermal, (into the skin itself), subcutaneous (under the skin), nasal administration (through the nose), intravenous (into a vein), intravenous bolus, intravenous drip, intraarterial (into an artery), intramuscular (into a muscle), intracardiac (into the heart), intraosseous infusion (into the bone marrow), intrathecal (into the spinal canal), intraperitoneal, (infusion or injection into the peritoneum), intravesical infusion, intravitreal, (through the eye), intracavernous injection (into a pathologic cavity) intracavitary (into the base of the penis), intravaginal administration, intrauterine, extra-amniotic administration, transdermal (diffusion through the intact skin for systemic distribution), transmucosal (diffusion through a mucous membrane), transvaginal, insufflation (snorting), sublingual, sublabial, enema, eye drops (onto the conjunctiva), in ear drops, auricular (in or by way of the ear), buccal (directed toward the cheek), conjunctival, cutaneous, dental (to a tooth or teeth), electro-osmosis, endocervical, endosinusial, endotracheal, extracorporeal, hemodialysis, infiltration, interstitial, intra-abdominal, intra-amniotic, intra-articular, intrabiliary, intrabronchial, intrabursal, intracartilaginous (within a cartilage), intracaudal (within the cauda equine), intracisternal (within the cisterna magna cerebellomedularis), intracomeal (within the cornea), dental intracomal, intracoronary (within the coronary arteries), intracorporus cavernosum (within the dilatable spaces of the corporus cavernosa of the penis), intradiscal (within a disc), intraductal (within a duct of a gland), intraduodenal (within the duodenum), intradural (within or beneath the dura), intraepidermal (to the epidermis), intraesophageal (to the esophagus), intragastric (within the stomach), intragingival (within the gingivae), intraileal (within the distal portion of the small intestine), intralesional (within or introduced directly to a localized lesion), intraluminal (within a lumen of a tube), intralymphatic (within the lymph), intramedullary (within the marrow cavity of a bone), intrameningeal (within the meninges), intramyocardial (within the myocardium), intraocular (within the eye), intraovarian (within the ovary), intrapericardial (within the pericardium), intrapleural (within the pleura), intraprostatic (within the prostate gland), intrapulmonary (within the lungs or its bronchi), intrasinal (within the nasal or periorbital sinuses), intraspinal (within the vertebral column), intrasynovial (within the synovial cavity of a joint), intratendinous (within a tendon), intratesticular (within the testicle), intrathecal (within the cerebrospinal fluid at any level of the cerebrospinal axis), intrathoracic (within the thorax), intratubular (within the tubules of an organ), intratumor (within a tumor), intratympanic (within the aurus media), intravascular (within a vessel or vessels), intraventricular (within a ventricle), iontophoresis (by means of electric current where ions of soluble salts migrate into the tissues of the body), irrigation (to bathe or flush open wounds or body cavities), laryngeal (directly upon the larynx), nasogastric (through the nose and into the stomach), occlusive dressing technique (topical route administration, which is then covered by a dressing that occludes the area), ophthalmic (to the external eye), oropharyngeal (directly to the mouth and pharynx), parenteral, percutaneous, periarticular, peridural, perineural, periodontal, rectal, respiratory (within the respiratory tract by inhaling orally or nasally for local or systemic effect), retrobulbar (behind the pons or behind the eyeball), intramyocardial (entering the myocardium), soft tissue, subarachnoid, subconjunctival, submucosal, topical, transplacental (through or across the placenta), transtracheal (through the wall of the trachea), transtympanic (across or through the tympanic cavity), ureteral (to the ureter), urethral (to the urethra), vaginal, caudal block, diagnostic, nerve block, biliary perfusion, cardiac perfusion, photopheresis and spinal.

[0367] Modes of administration include injection, infusion, instillation, and/or ingestion. “Injection” includes, without limitation, intravenous, intramuscular, intra-arterial, intrathecal, intraventricular, intracapsular, intraorbital, intracardiac, intradermal, intraperitoneal, transtracheal, subcutaneous, subcuticular, intraarticular, sub capsular, subarachnoid, intraspinal, intracerebro spinal, and intrasternal injection and infusion. In some examples, the route is intravenous. For the delivery of cells, administration by injection or infusion can be made.

[0368] The cells can be administered systemically. The phrases “systemic administration,” “administered systemically”, “peripheral administration” and “administered peripherally” refer to the administration of a population of progenitor cells other than directly into a target site, tissue, or organ, such that it enters, instead, the subject's circulatory system and, thus, is subject to metabolism and other like processes.

[0369] The efficacy of a treatment comprising a composition for the treatment of Early Onset Parkinson's disease (PARK1) can be determined by the skilled clinician. However, a treatment is considered “effective treatment,” if any one or all of the signs or symptoms of, as but one example, levels of functional SNCA are altered in a beneficial manner (e.g., increased by at least 10%), or other clinically accepted symptoms or markers of disease are improved or ameliorated. Efficacy can also be measured by failure of an individual to worsen as assessed by hospitalization or need for medical interventions (e.g., progression of the disease is halted or at least slowed). Methods of measuring these indicators are known to those of skill in the art and/or described herein. Treatment includes any treatment of a disease in an individual or an animal (some non-limiting examples include a human, or a mammal) and includes: (1) inhibiting the disease, e.g., arresting, or slowing the progression of symptoms; or (2) relieving the disease, e.g., causing regression of symptoms; and (3) preventing or reducing the likelihood of the development of symptoms.

[0370] The treatment according to the present disclosure can ameliorate one or more symptoms associated with Early Onset Parkinson's disease (PARK1) by increasing, decreasing or altering the amount of SNCA protein in the individual.

### V. Features and Properties of the Synuclein, Alpha (SNCA) Gene

[0371] SNCA has been associated with diseases and disorders such as, but not limited to, Adenoma, alcohol use disorder, Chronic Alcoholic Intoxication, Alzheimer's Disease, Amyloidosis, Amyotrophic Lateral Sclerosis, Rheumatoid Arthritis, Astrocytoma, Malignant neoplasm of breast, Cocaine Abuse, Colorectal Carcinoma, Connective Tissue Diseases, Cytomegalovirus Infections, Cessation of life, Presenile dementia, Vascular Dementia, Depressive disorder, Insulin-Dependent Diabetes Mellitus, Dyskinetic syndrome, Gaucher Disease, Hepatitis C, Hepatolenticular Degeneration, HIV Infections, Animal Lameness, T-Cell Leukemia, Adult T-Cell Lymphoma/Leukemia, Systemic Lupus Erythematosus, Medulloblastoma, melanoma, Movement Disorders, Muscle Rigidity, Nerve Degeneration, nervous system disorder, Neurilemmoma, Neuroblastoma, Parkinson's Disease, Substance-Induced Psychoses, Psychotic Disorders, Restless Legs Syndrome, Shy-Drager Syndrome, Post-Traumatic Stress Disorder, Subacute Sclerosing Panencephalitis, Substance Dependence, Tobacco Use Disorder, Tremor, Tuberculosis, Vasculitis, Virus Diseases, Lysosomal Storage Diseases, Neurofibrillary degeneration (morphologic abnormality), Alcohol abuse, Small cell carcinoma of lung, Adrenoleukodystrophy, Pick Disease of the Brain, Cocaine delirium, Amphetamine-Related Disorders, Cocaine-Related Disorders, Personality change, Parkinsonian Disorders, brain dysfunction, Small Cell Carcinoma, Essential Tremor, Familial Alzheimer Disease (FAD), Senile Plaques, Frontotemporal dementia, Impaired cognition, Nonorganic psychosis, Malignant neoplasm of prostate, Multiple System Atrophy, Pallidoluysian degeneration, Motor symptoms, Dementia, Opiate Addiction, Neurodegenerative Disorders, Prostate carcinoma, Manganese Poisoning, Breast Carcinoma, Central neuroblastoma, Early Onset Alzheimer Disease, Frontotemporal Lobar Degeneration, Autosomal Dominant Parkinsonism, Spinocerebellar Ataxia Type 2, Lewy Body Disease, Tauopathies, Drug Dependence, Colorectal Cancer, Methamphetamine dependence, Parkinson's Disease 15 Autosomal Recessive (Disorder), Parkinson's Disease 4 Autosomal Dominant Lewy Body (Disorder), Parkinson's Disease 1 Autosomal Dominant (disorder), Amyloid Plaque, Early Onset Parkinson's disease, Late-Onset Parkinson's Disease, and Parkinson's Disease Familial Type 1. Editing the SNCA gene using any of the methods described herein may be used to treat, prevent and/or mitigate the symptoms of the diseases and disorders described herein.

[0372] The Synuclein, Alpha protein encoded by the SNCA gene is abundant in the brain, especially at neuronal pre-synaptic terminals, where it is thought to play a role in tethering synaptic vesicles. Proper function of Synuclein, Alpha appears to be critical for neurotransmitter release and neuronal signaling. Synuclein, Alpha has a pathobiological tendency to aggregate, with these aggregates serving as a hallmark for a group of diseases called synucleinopathies. Three such diseases, in which alterations of SNCA are known to occur, are Parkinson's disease, dementia with Lewy bodies and multiple system atrophy. SNCA is also associated with other disorders such as Huntington disease, Alzheimer disease, Amyotrophic lateral sclerosis, Frontotemporal dementia, leukemia, REM sleep behavior disorder, striatonigral degeneration, autonomic dysfunction, pure autonomic failure, supranuclear palsy, progressive, dysautonomia, neurodegeneration with brain iron accumulation, ethmoid sinus adenocarcinoma, tauopathy, ethmoid sinus cancer, miliaria rubra, corneal staphyloma, von Economo's disease, Perry syndrome, olivopontocerebellar atrophy, neuroaxonal dystrophy, scotoma, blue color blindness, Machado-Joseph disease, infiltrating lipoma, cocaine abuse, aphasia, optic atrophy plus syndrome, Niemann-Pick disease, Rapp-Hodgkin syndrome, Krabbe disease, hemidystonia, prion disease, mucopolysaccharidoses, 3-methylcrotonyl-coa carboxylase deficiency, subvalvular aortic stenosis, Gaucher's disease, multifocal dystonia, basal ganglia disease, and aortic valve disease.

[0373] Parkinson's disease is a progressive neurodegenerative movement disorder characterized by tremor, stiffness, slowness of movement and impaired balance. Parkinson's disease has also been linked to cognitive deficits, psychiatric conditions and an increased risk for development of dementia. Ultimately, a person with Parkinson's disease may have difficulty completing simple tasks such as walking or talking. Symptoms tend to appear gradually and worsen over time. Parkinson's disease is the second most common neurodegenerative disorder (following Alzheimer's disease), affecting approximately 1% of the population over the age of 50, with risk of developing the condition increasing with age. Currently more than 4 million people worldwide have been diagnosed with Parkinson's disease, with approximately 60,000 new cases identified every year. No cure for Parkinson's disease has been identified, but symptomatic treatments are available, including dopamine replacement therapies, dopamine agonists, monoaminoxidase (MAO) inhibitors, and catechol o-methyltransferase (COMT) inhibitors, surgical approaches such as deep brain stimulation, exercise and physical therapy. Other pharmacological agents may be used in combination to address problems with fatigue, tremor or slowness of movement.

[0374] In one example, the target tissue for the compositions and methods described herein is central nervous system tissue or peripheral nervous system tissue.

[0375] In one example, the gene is Synuclein, Alpha (SNCA) which may also be referred to as Non A4 component of amyloid precursor or Non A-beta component of AD amyloid, PARK1, NACP, Parkinson's disease 4, synuclein alpha-140, PARK 4 or PD1. SNCA has a cytogenetic location of 4q21 and the genomic coordinates are on Chromosome 4 on the reverse strand at position 89,724,099-89,838,315. The nucleotide sequence of SNCA is shown as SEQ ID NO: 5303. TMSB4XP8 is the gene upstream of SNCA on the reverse strand and GPRIN3 is the gene downstream of SNCA on the reverse strand. SNCA-AS1, RP11-115D19.4, RP11-115D19.2, RP11-115D19.3, RP11-115D19.1 are the genes located on the forward strand opposite of SNCA. SNCA has a NCBI gene ID of 6622, Uniprot ID of P37840 and Ensembl Gene ID of ENSG00000145335. SNCA has 5 SNPs, 28 introns and 27 exons. The exon identifier from Ensembl and the start/stop sites of the introns and exons are shown in Table 3.

TABLE 3
Exons and Introns for SNCA

| Exon No. | Exon ID | Start/Stop | Intron No. | Intron based on Exon ID | Start/Stop |
|---|---|---|---|---|---|
| EX1 | ENSE00000970012 | 89,828,184- | INT1 | Intron ENSE00000970012- | 89,828,142- |
| | | 89,828,143 | | ENSE00000970013 | 89,822,389 |
| EX2 | ENSE00000970013 | 89,822,388- | INT2 | Intron ENSE00000970012- | 89,828,142- |
| | | 89,822,246 | | ENSE00002066687 | 89,822,389 |
| EX3 | ENSE00000970014 | 89,729,277- | INT3 | Intron ENSE00000970012- | 89,828,142- |
| | | 89,729,194 | | ENSE00002081810 | 89,822,389 |
| EX4 | ENSE00001351104 | 89,726,660- | INT4 | Intron ENSE00000970013- | 89,822,245- |
| | | 89,726,053 | | ENSE00000970014 | 89,729,278 |
| EX5 | ENSE00001407446 | 89,835,692- | INT5 | Intron ENSE00000970013- | 89,822,245- |
| | | 89,835,547 | | ENSE00001520233 | 89,726,661 |
| EX6 | ENSE00001484185 | 89,838,315- | INT6 | Intron ENSE00000970013- | 89,822,245- |
| | | 89,838,252 | | ENSE00001520237 | 89,726,661 |
| EX7 | ENSE00001520232 | 89,837,139- | INT7 | Intron ENSE00000970013- | 89,822,245- |
| | | 89,836,743 | | ENSE00003747567 | 89,726,661 |
| EX8 | ENSE00001520233 | 89,726,660- | INT8 | Intron ENSE00000970014- | 89,729,193- |
| | | 89,725,884 | | ENSE00001351104 | 89,726,661 |
| EX9 | ENSE00001520234 | 89,835,680- | INT9 | Intron ENSE00000970014- | 89,729,193- |
| | | 89,835,547 | | ENSE00001520237 | 89,726,661 |
| EX10 | ENSE00001520237 | 89,726,660- | INT10 | Intron ENSE00000970014- | 89,729,193- |
| | | 89,724,099 | | ENSE00002030612 | 89,726,661 |
| EX11 | ENSE00001520261 | 89,837,199- | INT11 | Intron ENSE00000970014- | 89,729,193- |
| | | 89,836,962 | | ENSE00002068225 | 89,726,661 |
| EX12 | ENSE00001946342 | 89,837,228- | INT12 | Intron ENSE00000970014- | 89,729,193- |
| | | 89,836,962 | | ENSE00002085840 | 89,726,661 |
| EX13 | ENSE00002019279 | 89,836,213- | INT13 | Intron ENSE00000970014- | 89,729,193- |
| | | 89,836,127 | | ENSE00003732932 | 89,726,661 |
| EX14 | ENSE00002030612 | 89,726,660- | INT14 | Intron ENSE00001407446- | 89,835,546- |
| | | 89,726,577 | | ENSE00000970012 | 89,828,185 |
| EX15 | ENSE00002042282 | 89,835,695- | INT15 | Intron ENSE00001407446- | 89,835,546- |
| | | 89,835,547 | | ENSE00000970013 | 89,822,389 |
| EX16 | ENSE00002066687 | 89,822,388- | INT16 | Intron ENSE00001484185- | 89,838,251- |
| | | 89,821,849 | | ENSE00001407446 | 89,835,693 |
| EX17 | ENSE00002068225 | 89,726,660- | INT17 | Intron ENSE00001520232- | 89,836,742- |
| | | 89,726,616 | | ENSE00001407446 | 89,835,693 |
| EX18 | ENSE00002070330 | 89,835,685- | INT18 | Intron ENSE00001520234- | 89,835,546- |
| | | 89,835,547 | | ENSE00000970012 | 89,828,185 |
| EX19 | ENSE00002070642 | 89,836,789- | INT19 | Intron ENSE00001520261- | 89,836,961- |
| | | 89,836,743 | | ENSE00001407446 | 89,835,693 |
| EX20 | ENSE00002075617 | 89,837,168- | INT20 | Intron ENSE00001946342- | 89,836,961- |
| | | 89,837,098 | | ENSE00001407446 | 89,835,693 |
| EX21 | ENSE00002081810 | 89,822,388- | INT21 | Intron ENSE00002019279- | 89,836,126- |
| | | 89,822,352 | | ENSE00001407446 | 89,835,693 |
| EX22 | ENSE00002082885 | 89,837,076- | INT22 | Intron ENSE00002042282- | 89,835,546- |
| | | 89,836,962 | | ENSE00000970012 | 89,828,185 |
| EX23 | ENSE00002085840 | 89,726,660- | INT23 | Intron ENSE00002070330- | 89,835,546- |
| | | 89,726,258 | | ENSE00000970013 | 89,822,389 |
| EX24 | ENSE00002227224 | 89,836,976- | INT24 | Intron ENSE00002070642- | 89,836,742- |
| | | 89,836,743 | | ENSE00001407446 | 89,835,693 |
| EX25 | ENSE00003722191 | 89,835,667- | INT25 | Intron ENSE00002075617- | 89,837,097- |
| | | 89,835,547 | | ENSE00001407446 | 89,835,693 |
| EX26 | ENSE00003732932 | 89,726,660- | INT26 | Intron ENSE00002082885- | 89,836,961- |
| | | 89,724,105 | | ENSE00002070642 | 89,836,790 |
| EX27 | ENSE00003747567 | 89,726,660- | INT27 | Intron ENSE00002227224- | 89,836,742- |
| | | 89,726,628 | | ENSE00001407446 | 89,835,693 |
| | | | INT28 | Intron ENSE00003722191- | 89,835,546- |
| | | | | ENSE00000970013 | 89,822,389 |

[0376] Table 4 provides information on all of the transcripts for the SNCA gene based on the Ensembl database. Provided in Table 4 are the transcript ID from Ensembl and corresponding NCBI RefSeq ID for the transcript, the translation ID from Ensembl and the corresponding NCBI RefSeq ID for the protein, the biotype of the transcript sequence as classified by Ensembl and the exons and introns in the transcript based on the information in Table 3.

TABLE 4
Transcript Information for SNCA

| | | | Protein | | | |
|---|---|---|---|---|---|---|
| | Transcript | | NCBI | | | |
| Transcript | NCBI | Translation | RefSeq | Sequence | Exon ID from | Intron ID from |
| ID | RefSeq ID | ID | ID | Biotype | Table 3 | Table 3 |
| ENST00000420646.6 | NM_007308 | ENSP00000396241 | NP_009292 | Protein | EX1, EX2, EX5, | INT1, INT6, INT14, |
| | | | | coding | EX10, EX24 | INT27 |
| ENST00000336904.7 | NM_001146055 | ENSP00000338345 | NP_001139527 | Protein | EX1, EX2, EX3, | INT1, INT4, INT9, |
| | | | | coding | EX5, EX6, EX10 | INT14, INT16 |
| ENST00000394986.5 | NM_001146054 | ENSP00000378437 | NP_001139526 | Protein | EX1, EX2, EX3, | INT1, INT4, INT8, |
| | | | | coding | EX4, EX5, EX7 | INT14, INT17 |
| ENST00000394991.7 | NM_000345 | ENSP00000378442 | NP_000336 | Protein | EX1, EX2, EX3, | INT1, INT4, INT8, |
| | | | | coding | EX4, EX5, EX12 | INT14, INT20 |
| ENST00000345009.8 | — | ENSP00000343683 | — | Protein | EX1, EX2, EX8, | INT1, INT5, INT18 |
| | | | | coding | EX9 | |
| ENST00000508895.5 | — | ENSP00000426955 | — | Protein | EX1, EX2, EX3, | INT1, INT4, INT12, |
| | | | | coding | EX5, EX13, | INT14, INT21 |
| | | | | | EX23 | |
| ENST00000506244.5 | — | ENSP00000422238 | — | Protein | EX1, EX2, EX3, | INT1, INT4, INT10, |
| | | | | coding | EX5, EX14, | INT14, INT25 |
| | | | | | EX20 | |
| ENST00000394989.6 | — | ENSP00000378440 | — | Protein | EX2, EX3, EX5, | INT4, INT13, |
| | | | | coding | EX11, EX26 | INT15, INT19 |
| ENST00000618500.4 | — | ENSP00000484044 | — | Protein | EX2, EX3, EX5, | INT4, INT9, INT15, |
| | | | | coding | EX10, EX13 | INT21 |
| ENST00000502987.5 | — | ENSP00000426034 | — | Protein | EX1, EX15, | INT2, INT22 |
| | | | | coding | EX16 | |
| ENST00000505199.5 | — | ENSP00000421485 | — | Protein | EX2, EX3, EX17, | INT4, INT11, |
| | | | | coding | EX18 | INT23 |
| ENST00000506691.1 | — | ENSP00000423445 | — | Protein | EX1, EX5, EX19, | INT3, INT14, |
| | | | | coding | EX21, EX22 | INT24, INT26 |
| ENST00000611107.1 | — | ENSP00000479604 | — | Protein | EX2, EX25, | INT7, INT28 |
| | | | | coding | EX27 | |

[0377] SNCA has 5 SNPs and the UniProt VAR number for the SNPs of the SNCA gene are VAR_007454, VAR_007957, VAR_022703, VAR_022703, and VAR_070171.

[0378] In one example, the guide RNA used in the present disclosure may comprise at least one 20 nucleotide (nt) target nucleic acid sequence listed in Table 5. Provided in Table 5 are the gene symbol and the sequence identifier of the gene (Gene SEQ ID NO), the gene sequence including 1-5 kilobase pairs upstream and/or downstream of the target gene (Extended Gene SEQ ID NO), and the 20 nt target nucleic acid sequence (20 nt Target Sequence SEQ ID NO). In the sequence listing the respective target gene, the strand for targeting the gene (noted by a (+) strand or (−) strand in the sequence listing), the associated PAM type and the PAM sequence are described for each of the 20 nt target nucleic acid sequences (SEQ ID NO: 5305-83,935). It is understood in the art that the spacer sequence, where “T” is “U,” may be an RNA sequence corresponding to the 20 nt sequences listed in Table 5.

TABLE 5
Nucleic Acid Sequences

| Gene | Gene | Extended Gene | 20 nt Target Sequence |
|---|---|---|---|
| Symbol | SEQ ID NO | SEQ ID NO | SEQ ID NO |
| SNCA | 5303 | 5304 | 5305-83,935 |

[0379] In one example, the guide RNA used in the present disclosure may comprise at least one spacer sequence that, where “T” is “U”, may be an RNA sequence corresponding to a 20 nucleotide (nt) target sequence such as, but not limited to, any of SEQ ID NO: 5305-83,935.

[0380] In one example, the guide RNA used in the present disclosure may comprise at least one spacer sequence which, where “T” is “U,” is an RNA sequence corresponding to the 20 nt sequences such as, but not limited to, any of SEQ ID NO: 5305-83,935.

[0381] In one example, a guide RNA may comprise a 20 nucleotide (nt) target nucleic acid sequence associated with the PAM type such as, but not limited to, NAAAAC, NNAGAAW, NNGRRT, NNNNGHTT, NRG, or YTN. As a non-limiting example, the 20 nt target nucleic acid sequence for a specific target gene and a specific PAM type may be, where “T” is “U,” the RNA sequence corresponding to any one of the 20 nt nucleic acid sequences in Table 6.

TABLE 6
Nucleic Acid Sequences by PAM Type

| | PAM: | | PAM: | | | |
|---|---|---|---|---|---|---|
| | NAAAAC | PAM: | NNGRRT | PAM: | | |
| | 20 nt Target | NNAGAAW | 20 nt Target | NNNNGHTT | PAM: NRG | PAM: YTN |
| | Nucleic | 20 nt Target | Nucleic | 20 nt Target | 20 nt Target | 20 nt Target |
| Gene | Acid SEQ | Nucleic Acid | Acid SEQ | Nucleic Acid | Nucleic Acid | Nucleic Acid |
| Symbol | ID NO | SEQ ID NO | ID NO | SEQ ID NO | SEQ ID NO | SEQ ID NO |
| SNCA | 5305-5892 | 5893-7296 | 7293-10,603 | 10,604-14,084 | 14,085-39,976 | 39,977-83,935 |
| | | | | | and | |
| | | | | | 83,971-83,980 | |

[0382] In one example, a guide RNA may comprise a 20 nucleotide (nt) target nucleic acid sequence associated with the YTN PAM type. As a non-limiting example, the 20 nt target nucleic acid sequence for a specific target gene may comprise a 20 nt core sequence where the 20 nt core sequence, where “T” is “U,” may be the RNA sequence corresponding to SEQ ID NO: 39,977-83,935. As another non-limiting example, the 20 nt target nucleic acid sequence for a specific target gene may comprise a core sequence where the core sequence, where “T” is “U,” may be a fragment, segment or region of the RNA sequence corresponding to any of SEQ ID NO: 39,977-83,935.

### VI. Other Therapeutic Approaches

[0383] Gene editing can be conducted using nucleases engineered to target specific sequences. To date there are four major types of nucleases: meganucleases and their derivatives, zinc finger nucleases (ZFNs), transcription activator like effector nucleases (TALENs), and CRISPR-Cas9 nuclease systems. The nuclease platforms vary in difficulty of design, targeting density and mode of action, particularly as the specificity of ZFNs and TALENs is through protein-DNA interactions, while RNA-DNA interactions primarily guide Cas9.

[0384] CRISPR endonucleases, such as Cas9, can be used in the methods of the present disclosure. However, the teachings described herein, such as therapeutic target sites, could be applied to other forms of endonucleases, such as ZFNs, TALENs, HEs, or MegaTALs, or using combinations of nucleases. However, in order to apply the teachings of the present disclosure to such endonucleases, one would need to, among other things, engineer proteins directed to the specific target sites.

[0385] Additional binding domains can be fused to the Cas9 protein to increase specificity. The target sites of these constructs would map to the identified gRNA specified site, but would require additional binding motifs, such as for a zinc finger domain. In the case of Mega-TAL, a meganuclease can be fused to a TALE DNA-binding domain. The meganuclease domain can increase specificity and provide the cleavage. Similarly, inactivated or dead Cas9 (dCas9) can be fused to a cleavage domain and require the sgRNA/Cas9 target site and adjacent binding site for the fused DNA-binding domain. This likely would require some protein engineering of the dCas9, in addition to the catalytic inactivation, to decrease binding without the additional binding site.

### Zinc Finger Nucleases

[0386] Zinc finger nucleases (ZFNs) are modular proteins comprised of an engineered zinc finger DNA binding domain linked to the catalytic domain of the type II endonuclease FokI. Because FokI functions only as a dimer, a pair of ZFNs must be engineered to bind to cognate target “half-site” sequences on opposite DNA strands and with precise spacing between them to enable the catalytically active FokI dimer to form. Upon dimerization of the FokI domain, which itself has no sequence specificity per se, a DNA double-strand break is generated between the ZFN half-sites as the initiating step in genome editing.

[0387] The DNA binding domain of each ZFN is typically comprised of 3-6 zinc fingers of the abundant Cys2-His2 architecture, with each finger primarily recognizing a triplet of nucleotides on one strand of the target DNA sequence, although cross-strand interaction with a fourth nucleotide also can be important. Alteration of the amino acids of a finger in positions that make key contacts with the DNA alters the sequence specificity of a given finger. Thus, a four-finger zinc finger protein will selectively recognize a 12 bp target sequence, where the target sequence is a composite of the triplet preferences contributed by each finger, although triplet preference can be influenced to varying degrees by neighboring fingers. An important aspect of ZFNs is that they can be readily re-targeted to almost any genomic address simply by modifying individual fingers, although considerable expertise is required to do this well. In most applications of ZFNs, proteins of 4-6 fingers are used, recognizing 12-18 bp respectively. Hence, a pair of ZFNs will typically recognize a combined target sequence of 24-36 bp, not including the typical 5-7 bp spacer between half-sites. The binding sites can be separated further with larger spacers, including 15-17 bp. A target sequence of this length is likely to be unique in the human genome, assuming repetitive sequences or gene homologs are excluded during the design process. Nevertheless, the ZFN protein-DNA interactions are not absolute in their specificity so off-target binding and cleavage events do occur, either as a heterodimer between the two ZFNs, or as a homodimer of one or the other of the ZFNs. The latter possibility has been effectively eliminated by engineering the dimerization interface of the FokI domain to create “plus” and “minus” variants, also known as obligate heterodimer variants, which can only dimerize with each other, and not with themselves. Forcing the obligate heterodimer prevents formation of the homodimer. This has greatly enhanced specificity of ZFNs, as well as any other nuclease that adopts these FokI variants.

[0388] A variety of ZFN-based systems have been described in the art, modifications thereof are regularly reported, and numerous references describe rules and parameters that are used to guide the design of ZFNs; see, e.g., Segal et al., Proc Natl Acad Sci USA 96(6):2758-63 (1999); Dreier B et al., J Mol Biol. 303(4):489-502 (2000); Liu Q et al., J Biol Chem. 277(6):3850-6 (2002); Dreier et al., J Biol Chem 280(42):35588-97 (2005); and Dreier et al., J Biol Chem. 276(31):29466-78 (2001).

### Transcription Activator-Like Effector Nucleases (TALENs)

[0389] TALENs represent another format of modular nucleases whereby, as with ZFNs, an engineered DNA binding domain is linked to the FokI nuclease domain, and a pair of TALENs operate in tandem to achieve targeted DNA cleavage. The major difference from ZFNs is the nature of the DNA binding domain and the associated target DNA sequence recognition properties. The TALEN DNA binding domain derives from TALE proteins, which were originally described in the plant bacterial pathogen Xanthomonas sp. TALEs are comprised of tandem arrays of 33-35 amino acid repeats, with each repeat recognizing a single base pair in the target DNA sequence that is typically up to 20 bp in length, giving a total target sequence length of up to 40 bp. Nucleotide specificity of each repeat is determined by the repeat variable diresidue (RVD), which includes just two amino acids at positions 12 and 13. The bases guanine, adenine, cytosine and thymine are predominantly recognized by the four RVDs: Asn-Asn, Asn-Ile, His-Asp and Asn-Gly, respectively. This constitutes a much simpler recognition code than for zinc fingers, and thus represents an advantage over the latter for nuclease design. Nevertheless, as with ZFNs, the protein-DNA interactions of TALENs are not absolute in their specificity, and TALENs have also benefited from the use of obligate heterodimer variants of the FokI domain to reduce off-target activity.

[0390] Additional variants of the FokI domain have been created that are deactivated in their catalytic function. If one half of either a TALEN or a ZFN pair contains an inactive FokI domain, then only single-strand DNA cleavage (nicking) will occur at the target site, rather than a DSB. The outcome is comparable to the use of CRISPR/Cas9 or CRISPR/Cpf1 “nickase” mutants in which one of the Cas9 cleavage domains has been deactivated. DNA nicks can be used to drive genome editing by HDR, but at lower efficiency than with a DSB. The main benefit is that off-target nicks are quickly and accurately repaired, unlike the DSB, which is prone to NHEJ-mediated mis-repair.

[0391] A variety of TALEN-based systems have been described in the art, and modifications thereof are regularly reported; see, e.g., Boch, Science 326(5959):1509-12 (2009); Mak et al., Science 335(6069):716-9 (2012); and Moscou et al., Science 326(5959):1501 (2009). The use of TALENs based on the “Golden Gate” platform, or cloning scheme, has been described by multiple groups; see, e.g., Cermak et al., Nucleic Acids Res. 39(12):e82 (2011); Li et al., Nucleic Acids Res. 39(14):6315-25(2011); Weber et al., PLoS One. 6(2):e16765 (2011); Wang et al., J Genet Genomics 41(6):339-47, Epub 2014 May 17 (2014); and Cermak T et al., Methods Mol Biol. 1239:133-59 (2015).

### Homing Endonucleases

[0392] Homing endonucleases (HEs) are sequence-specific endonucleases that have long recognition sequences (14-44 base pairs) and cleave DNA with high specificity—often at sites unique in the genome. There are at least six known families of HEs as classified by their structure, including LAGLIDADG (SEQ ID NO. 83,970), GIY-YIG, His-Cis box, H-N-H, PD-(D/E)xK, and Vsr-like that are derived from a broad range of hosts, including eukarya, protists, bacteria, archaea, cyanobacteria and phage. As with ZFNs and TALENs, HEs can be used to create a DSB at a target locus as the initial step in genome editing. In addition, some natural and engineered HEs cut only a single strand of DNA, thereby functioning as site-specific nickases. The large target sequence of HEs and the specificity that they offer have made them attractive candidates to create site-specific DSBs.

[0393] A variety of HE-based systems have been described in the art, and modifications thereof are regularly reported; see, e.g., the reviews by Steentoft et al., Glycobiology 24(8):663-80 (2014); Belfort and Bonocora, Methods Mol Biol. 1123:1-26 (2014); Hafez and Hausner, Genome 55(8):553-69 (2012); and references cited therein.

### MegaTAL/Tev-mTALEN/MegaTev

[0394] As further examples of hybrid nucleases, the MegaTAL platform and Tev-mTALEN platform use a fusion of TALE DNA binding domains and catalytically active HEs, taking advantage of both the tunable DNA binding and specificity of the TALE, as well as the cleavage sequence specificity of the HE; see, e.g., Boissel et al., NAR 42: 2591-2601 (2014); Kleinstiver et al., G3 4:1155-65 (2014); and Boissel and Scharenberg, Methods Mol. Biol. 1239: 171-96 (2015).

[0395] In a further variation, the MegaTev architecture is the fusion of a meganuclease (Mega) with the nuclease domain derived from the GIY-YIG homing endonuclease I-TevI (Tev). The two active sites are positioned ˜30 bp apart on a DNA substrate and generate two DSBs with non-compatible cohesive ends; see, e.g., Wolfs et al., NAR 42, 8816-29 (2014). It is anticipated that other combinations of existing nuclease-based approaches will evolve and be useful in achieving the targeted genome modifications described herein.

dCas9-FokI or dCpf1-Fok1 and Other Nucleases

[0396] Combining the structural and functional properties of the nuclease platforms described above offers a further approach to genome editing that can potentially overcome some of the inherent deficiencies. As an example, the CRISPR genome editing system typically uses a single Cas9 endonuclease to create a DSB. The specificity of targeting is driven by a 20 or 24 nucleotide sequence in the guide RNA that undergoes Watson-Crick base-pairing with the target DNA (plus an additional 2 bases in the adjacent NAG or NGG PAM sequence in the case of Cas9 from S. pyogenes). Such a sequence is long enough to be unique in the human genome, however, the specificity of the RNA/DNA interaction is not absolute, with significant promiscuity sometimes tolerated, particularly in the 5′ half of the target sequence, effectively reducing the number of bases that drive specificity. One solution to this has been to completely deactivate the Cas9 or Cpf1 catalytic function—retaining only the RNA-guided DNA binding function—and instead fusing a FokI domain to the deactivated Cas9; see, e.g., Tsai et al., Nature Biotech 32: 569-76 (2014); and Guilinger et al., Nature Biotech. 32: 577-82 (2014). Because FokI must dimerize to become catalytically active, two guide RNAs are required to tether two FokI fusions in close proximity to form the dimer and cleave DNA. This essentially doubles the number of bases in the combined target sites, thereby increasing the stringency of targeting by CRISPR-based systems.

[0397] As further example, fusion of the TALE DNA binding domain to a catalytically active HE, such as I-TevI, takes advantage of both the tunable DNA binding and specificity of the TALE, as well as the cleavage sequence specificity of I-TevI, with the expectation that off-target cleavage can be further reduced.

### VII. Kits

[0398] The present disclosure provides kits for carrying out the methods described herein. A kit can include one or more of a genome-targeting nucleic acid, a polynucleotide encoding a genome-targeting nucleic acid, a site-directed polypeptide, a polynucleotide encoding a site-directed polypeptide, and/or any nucleic acid or proteinaceous molecule necessary to carry out the aspects of the methods described herein, or any combination thereof.

[0399] A kit can comprise: (1) a vector comprising a nucleotide sequence encoding a genome-targeting nucleic acid, (2) the site-directed polypeptide or a vector comprising a nucleotide sequence encoding the site-directed polypeptide, and (3) a reagent for reconstitution and/or dilution of the vector(s) and or polypeptide.

[0400] A kit can comprise: (1) a vector comprising (i) a nucleotide sequence encoding a genome-targeting nucleic acid, and (ii) a nucleotide sequence encoding the site-directed polypeptide; and (2) a reagent for reconstitution and/or dilution of the vector.

[0401] In any of the above kits, the kit can comprise a single-molecule guide genome-targeting nucleic acid. In any of the above kits, the kit can comprise a double-molecule genome-targeting nucleic acid. In any of the above kits, the kit can comprise two or more double-molecule guides or single-molecule guides. The kits can comprise a vector that encodes the nucleic acid targeting nucleic acid.

[0402] In any of the above kits, the kit can further comprise a polynucleotide to be inserted to effect the desired genetic modification.

[0403] Components of a kit can be in separate containers, or combined in a single container.

[0404] Any kit described above can further comprise one or more additional reagents, where such additional reagents are selected from a buffer, a buffer for introducing a polypeptide or polynucleotide into a cell, a wash buffer, a control reagent, a control vector, a control RNA polynucleotide, a reagent for in vitro production of the polypeptide from DNA, adaptors for sequencing and the like. A buffer can be a stabilization buffer, a reconstituting buffer, a diluting buffer, or the like. A kit can also comprise one or more components that can be used to facilitate or enhance the on-target binding or the cleavage of DNA by the endonuclease, or improve the specificity of targeting.

[0405] In addition to the above-mentioned components, a kit can further comprise instructions for using the components of the kit to practice the methods. The instructions for practicing the methods can be recorded on a suitable recording medium. For example, the instructions can be printed on a substrate, such as paper or plastic, etc. The instructions can be present in the kits as a package insert, in the labeling of the container of the kit or components thereof (i.e., associated with the packaging or subpackaging), etc. The instructions can be present as an electronic storage data file present on a suitable computer readable storage medium, e.g. CD-ROM, diskette, flash drive, etc. In some instances, the actual instructions are not present in the kit, but means for obtaining the instructions from a remote source (e.g. via the Internet), can be provided. An example of this case is a kit that comprises a web address where the instructions can be viewed and/or from which the instructions can be downloaded. As with the instructions, this means for obtaining the instructions can be recorded on a suitable substrate.

### VIII. Methods, Compositions, and Therapeutics of the Invention

[0406] Accordingly, the present disclosure relates in particular to the following non-limiting methods, compositions, and therapeutics according to the present disclosure:

[0407] In a first method, Method 1, the present disclosure provides a method for editing a SNCA gene in a cell by genome editing comprising: introducing into the cell one or more DNA endonucleases to effect one or more SSBs or DSBs within or near the SNCA gene or SNCA regulatory elements that results in one or more permanent insertions, deletions or mutations of at least one nucleotide, correction of one or more mutations or replacement of one or more exons and/or introns within or near the SNCA gene, thereby reducing or eliminating the expression or function of aberrant SNCA gene products.

[0408] In another method, Method 2, the present disclosure provides a method for editing a SNCA gene in a cell by genome editing comprising: introducing into the cell one or more DNA endonucleases to effect one or more SSBs or DSBs within or near the SNCA gene or SNCA regulatory elements that results in one or more permanent insertions, deletions or mutations of at least one nucleotide or replacement of one or more exons and/or introns within or near the SNCA gene, thereby reducing or eliminating the expression of the SNCA gene.

[0409] In another method, Method 3, the present disclosure provides an ex vivo method for treating a patient having a SNCA related condition or disorder comprising: editing a patient specific iPSC within or near a SNCA gene or other DNA sequences that encode regulatory elements of the SNCA gene; differentiating the edited iPSC into a neuron or glial cell of the CNS, or a neuron of the PNS; and implanting the neuron or glial cell of the CNS, or neuron of the PNS into the patient.

[0410] In another method, Method 4, the present disclosure provides an ex vivo method for treating a patient having a SNCA related condition or disorder, as provided in Method 3, wherein the editing step comprises introducing into the iPSC one or more DNA endonucleases to effect one or more SSBs or DSBs within or near the SNCA gene or SNCA regulatory elements that results in one or more permanent insertions, deletions or mutations of at least one nucleotide, correction of one or more mutations or replacement of one or more exons and/or introns within or near the SNCA gene, thereby reducing or eliminating the expression or function of aberrant SNCA gene products.

[0411] In another method, Method 5, the present disclosure provides an ex vivo method for treating a patient having a SNCA related condition or disorder, as provided in Method 3, wherein the editing step comprises introducing into the iPSC one or more DNA endonucleases to effect one or more SSBs or DSBs within or near the SNCA gene or SNCA regulatory elements that results in one or more permanent insertions, deletions or mutations of at least one nucleotide or replacement of one or more exons and/or introns within or near the SNCA gene, thereby reducing or eliminating the expression of the SNCA gene.

[0412] In another method, Method 6, the present disclosure provides an ex vivo method for treating a patient having a SNCA related condition or disorder, as provided in any one of Methods 3-5, further comprising: creating the iPSC, wherein the creating step comprises: isolating a somatic cell from the patient; and introducing a set of pluripotency-associated genes into the somatic cell to induce the somatic cell to become the iPSC.

[0413] In another method, Method 7, the present disclosure provides an ex vivo method for treating a patient having a SNCA related condition or disorder, as provided in Method 6, wherein the somatic cell is a fibroblast.

[0414] In another method, Method 8, the present disclosure provides an ex vivo method for treating a patient having a SNCA related condition or disorder, as provided in Method 6, wherein the set of pluripotency-associated genes is one or more of the genes selected from the group consisting of: OCT4, SOX2, KLF4, Lin28, NANOG and cMYC.

[0415] In another method, Method 9, the present disclosure provides an ex vivo method for treating a patient having a SNCA related condition or disorder comprising: editing a mesenchymal stem cell within or near a SNCA gene or other DNA sequences that encode regulatory elements of the SNCA gene; differentiating the edited mesenchymal stem cell into a neuron or glial cell of the CNS, or a neuron of the PNS; and implanting the neuron or glial cell of the CNS, or neuron of the PNS into the patient.

[0416] In another method, Method 10, the present disclosure provides an ex vivo method for treating a patient having a SNCA related condition or disorder, as provided in Method 9, wherein the editing step comprises: introducing into the mesenchymal stem cell one or more DNA endonucleases to effect one or more SSBs or DSBs within or near the SNCA gene or SNCA regulatory elements that results in one or more permanent insertions, deletions or mutations of at least one nucleotide, correction of one or more mutations or replacement of one or more exons and/or introns within or near the SNCA gene, thereby reducing or eliminating the expression or function of aberrant SNCA gene products.

[0417] In another method, Method 11, the present disclosure provides an ex vivo method for treating a patient having a SNCA related condition or disorder, as provided in Method 9, wherein the editing step comprises: introducing into the mesenchymal stem cell one or more DNA endonucleases to effect one or more SSBs or DSBs within or near the SNCA gene or SNCA regulatory elements that results in one or more permanent insertions, deletions or mutations of at least one nucleotide or replacement of one or more exons and/or introns within or near the SNCA gene, thereby reducing or eliminating the expression of the SNCA gene.

[0418] In another method, Method 12, the present disclosure provides an ex vivo method for treating a patient having a SNCA related condition or disorder, as provided in any one of Methods 9-11, further comprising: isolating the mesenchymal stem cell from the patient, wherein the mesenchymal stem cell is isolated from the patient's bone marrow or peripheral blood.

[0419] In another method, Method 13, the present disclosure provides an ex vivo method for treating a patient having a SNCA related condition or disorder, as provided in Method 12, wherein the isolating step comprises: aspiration of bone marrow and isolation of mesenchymal stem cells using density gradient centrifugation media.

[0420] In another method, Method 14, the present disclosure provides an in vivo method for treating a patient with a SNCA related condition or disorder comprising: editing the SNCA gene in a cell of the patient.

[0421] In another method, Method 15, the present disclosure provides an in vivo method for treating a patient with a SNCA related condition or disorder, as provided in Method 14, wherein the editing step comprises introducing into the cell one or more DNA endonucleases to effect one or more SSBs or DSBs within or near the SNCA gene or SNCA regulatory elements that results in one or more permanent insertions, deletions or mutations of at least one nucleotide, correction of one or more mutations or replacement of one or more exons and/or introns within or near the SNCA gene, thereby reducing or eliminating the expression or function of aberrant SNCA gene products.

[0422] In another method, Method 16, the present disclosure provides an in vivo method for treating a patient with a SNCA related condition or disorder, as provided in Method 14, wherein the editing step comprises introducing into the cell one or more DNA endonucleases to effect one or more SSBs or DSBs within or near the SNCA gene or SNCA regulatory elements that results in one or more permanent insertions, deletions or mutations of at least one nucleotide or replacement of one or more exons and/or introns within or near the SNCA gene, thereby reducing or eliminating the expression of the SNCA gene.

[0423] In another method, Method 17, the present disclosure provides an in vivo method for treating a patient with a SNCA related condition or disorder, as provided in any one of Methods 14-16, wherein the cell is a cell of the CNS.

[0424] In another method, Method 18, the present disclosure provides an in vivo method for treating a patient with a SNCA related condition or disorder, as provided in Method 17, wherein the cell of the CNS is a neuron.

[0425] In another method, Method 19, the present disclosure provides an in vivo method for treating a patient with a SNCA related condition or disorder, as provided in Method 17, wherein the cell of the CNS is a glial cell.

[0426] In another method, Method 20, the present disclosure provides an in vivo method for treating a patient with a SNCA related condition or disorder, as provided in any one of Methods 17-19, wherein the one or more DNA endonuclease is delivered to the cell of the CNS via any administration route selected from the group consisting of intraparenchymal, intravenous, intra-arterial, intracerebroventricular, intracisternal, intrathecal, intracranial or intraperitoneal routes.

[0427] In another method, Method 21, the present disclosure provides a method for treating a patient with a SNCA related condition or disorder, as provided in any one of Methods 3, 9, or 14, wherein the SNCA related condition or disorder is PARK1.

[0428] In another method, Method 22, the present disclosure provides a method of altering the contiguous genomic sequence of a SNCA gene in a cell comprising: contacting the cell with one or more DNA endonuclease to effect one or more SSBs or DSBs.

[0429] In another method, Method 23, the present disclosure provides a method of altering the contiguous genomic sequence of a SNCA gene in a cell, as provided in Method 22, wherein the alteration of the contiguous genomic sequence occurs in one or more exons of the SNCA gene.

[0430] In another method, Method 24, the present disclosure provides a method of altering the contiguous genomic sequence of a SNCA gene in a cell, as provided in Method 22, wherein the alteration of the contiguous genomic sequence occurs in intron 1, exon 2, intron 2, exon 3, or intron 3 of the SNCA gene.

[0431] In another method, Method 25, the present disclosure provides a method of altering the contiguous genomic sequence of a SNCA gene in a cell, as provided in Method 22, wherein the alteration of the contiguous genomic sequence occurs in the 5′UTR and/or the genomic sequence 3′ of the SNCA gene.

[0432] In another method, Method 26, the present disclosure provides a method of altering the contiguous genomic sequence of a SNCA gene in a cell, as provided in Method 22, wherein the alteration of the contiguous genomic sequence occurs in an enhancer region.

[0433] In another method, Method 27, the present disclosure provides a method of altering the contiguous genomic sequence of a SNCA gene in a cell, as provided in Method 22, wherein the alteration results in one or more permanent insertions, deletions or mutations of at least one nucleotide, correction of one or more mutations or replacement of one or more exons and/or introns within or near the SNCA gene, thereby reducing or eliminating the expression or function of aberrant SNCA gene products.

[0434] In another method, Method 28, the present disclosure provides a method of altering the contiguous genomic sequence of a SNCA gene in a cell, as provided in Method 22, wherein the alteration results in one or more permanent insertions, deletions or mutations of at least one nucleotide or replacement of one or more exons and/or introns within or near the SNCA gene, thereby reducing or eliminating the expression of the SNCA gene.

[0435] In another method, Method 29, the present disclosure provides a method of altering the contiguous genomic sequence of a SNCA gene in a cell, as provided in Method 28, wherein the one or more permanent insertion occurs in intron 1, exon 2, intron 2, exon 3, or intron 3 of the SNCA gene.

[0436] In another method, Method 30, the present disclosure provides a method, as provided in any one of Methods 1-29, wherein the one or more DNA endonuclease is selected from any of those sequences in SEQ ID NOs: 1-620 and variants having at least 90% homology to any of those sequences disclosed in SEQ ID NOs: 1-620.

[0437] In another method, Method 31, the present disclosure provides a method, as provided in Method 30, wherein the one or more DNA endonuclease is one or more protein or polypeptide.

[0438] In another method, Method 32, the present disclosure provides a method, as provided in Method 31, wherein the one or more protein or polypeptide is flanked at the N-terminus, the C-terminus, or both the N-terminus and C-terminus by one or more NLSs.

[0439] In another method, Method 33, the present disclosure provides a method, as provided in Method 32, wherein the one or more protein or polypeptide is flanked by two NLSs, one NLS located at the N-terminus and the second NLS located at the C-terminus.

[0440] In another method, Method 34, the present disclosure provides a method, as provided in any one of Methods 32 or 33, wherein the one or more NLSs is a SV40 NLS.

[0441] In another method, Method 35, the present disclosure provides a method, as provided in Method 30, wherein the one or more DNA endonuclease is one or more polynucleotide encoding the one or more DNA endonuclease.

[0442] In another method, Method 36, the present disclosure provides a method, as provided in Method 35, wherein the one or more DNA endonuclease is one or more RNA encoding the one or more DNA endonuclease.

[0443] In another method, Method 37, the present disclosure provides a method, as provided in Method 36, wherein the one or more RNA is one or more chemically modified RNA.

[0444] In another method, Method 38, the present disclosure provides a method, as provided in any one of Methods 35-37, wherein the one or more polynucleotide or one or more RNA is codon optimized.

[0445] In another method, Method 39, the present disclosure provides a method, as provided in any one of Methods 1-38, wherein the method further comprises introducing into the cell one or more gRNA or one or more sgRNA.

[0446] In another method, Method 40, the present disclosure provides a method, as provided in Method 39, wherein the one or more gRNA or one or more sgRNA comprises a spacer sequence that is complementary to a DNA sequence within or near intron 1, exon 2, intron 2, exon 3, or intron 3 of the SNCA gene.

[0447] In another method, Method 41, the present disclosure provides a method, as provided in Method 39, wherein the one or more gRNA or one or more sgRNA comprises a spacer sequence that is complementary to a segment of the coding sequence of the SNCA gene.

[0448] In another method, Method 42, the present disclosure provides a method, as provided in Method 39, wherein the one or more gRNA or one or more sgRNA comprises a spacer sequence that is complementary to a sequence flanking the SNCA gene or other sequence that encodes a regulatory element of the SNCA gene.

[0449] In another method, Method 43, the present disclosure provides a method, as provided in any one of Methods 39-42, wherein the one or more gRNA or one or more sgRNA is chemically modified.

[0450] In another method, Method 44, the present disclosure provides a method, as provided in Method 43, wherein the one or more modified sgRNAs comprises three 2′-O-methyl-phosphorothioate residues at or near each of its 5′ and 3′ ends.

[0451] In another method, Method 45, the present disclosure provides a method, as provided in any one of Methods 39-44, wherein the one or more gRNA or one or more sgRNA comprises a RNA sequence corresponding to a sequence selected from the group consisting of SEQ ID NOs: 39264, 39391, 26402, 83978, 83976, 39436, 83974, 83979, 26183, 83980, 26206, 26348, 26180, 39292, 83971, 26247, 83975, 39446, 83973, 26269, 26385, 26401, 83972, 39260, 26188, 39389, 83977, 39332, 26285, 39293, 39341, 39364, 26322, 26347, 39334, and 39304.

[0452] In another method, Method 46, the present disclosure provides a method, as provided in any one of Methods 39-44 wherein the one or more gRNA or one or more sgRNA is pre-complexed with the one or more DNA endonuclease to form one or more RNPs.

[0453] In another method, Method 47, the present disclosure provides a method, as provided in Method 46, wherein the pre-complexing involves a covalent attachment of the one or more gRNA or one or more sgRNA to the one or more DNA endonuclease.

[0454] In another method, Method 48, the present disclosure provides a method, as provided in Method 46 or 47, wherein the weight ratio of sgRNA to DNA endonuclease in the RNP is 1:1.

[0455] In another method, Method 49, the present disclosure provides a method, as provided in any one of Methods 39-48, wherein the one or more DNA endonuclease is formulated in a liposome or lipid nanoparticle.

[0456] In another method, Method 50, the present disclosure provides a method, as provided in any one of Methods 30-48, wherein the one or more DNA endonuclease is formulated in a liposome or lipid nanoparticle which also comprises the one or more gRNA or one or more sgRNA.

[0457] In another method, Method 51, the present disclosure provides a method, as provided in any one of Methods 30 or 39-45, wherein the one or more DNA endonuclease is encoded in an AAV vector particle.

[0458] In another method, Method 52, the present disclosure provides a method, as provided in any one of Methods 39-45, wherein the one or more gRNA or one or more sgRNA is encoded in an AAV vector particle.

[0459] In another method, Method 53, the present disclosure provides a method, as provided in Method 52, wherein the one or more DNA endonuclease is encoded in an AAV vector particle which also encodes the one or more gRNA or one or more sgRNA.

[0460] In another method, Method 54, the present disclosure provides a method, as provided in any one of Methods 52 or 53, wherein the AAV vector particle is selected from the group consisting of any of those sequences disclosed in SEQ ID NOs: 4734-5302 and Table 2.

[0461] In another method, Method 55, the present disclosure provides a method, as provided in any one of Methods 1-54, wherein the method further comprises introducing into the cell a donor template comprising at least a portion of the wild-type SNCA gene.

[0462] In another method, Method 56, the present disclosure provides a method, as provided in Method 55, wherein the at least a portion of the wild-type SNCA gene comprises one or more sequences selected from the group consisting of: a SNCA exon, a SNCA intron, and a sequence comprising an exon:intron junction of SNCA.

[0463] In another method, Method 57, the present disclosure provides a method, as provided in any one of Methods 55 or 56, wherein the donor template comprises homologous arms to the genomic locus of the SNCA gene.

[0464] In another method, Method 58, the present disclosure provides a method, as provided in any one of Methods 55-57, wherein the donor template is either a single or double stranded polynucleotide.

[0465] In another method, Method 59, the present disclosure provides a method, as provided in any one of Methods 55-58, wherein the donor template is encoded in an AAV vector particle, where the AAV vector particle is selected from the group consisting of any of those sequence disclosed in SEQ ID NOs: 4734-5302 and Table 2.

[0466] In another method, Method 60, the present disclosure provides a method, as provided in any one of Methods 55-58, wherein the one or more polynucleotide encoding one or more DNA endonuclease is formulated into a lipid nanoparticle, and the one or more gRNA or one or more sgRNA is delivered to the cell ex vivo by electroporation and the donor template is delivered to the cell by an AAV vector.

[0467] In another method, Method 61, the present disclosure provides a method, as provided in any one of Methods 55-58, wherein the one or more polynucleotide encoding one or more DNA endonuclease is formulated into a liposome or lipid nanoparticle which also comprises the one or more gRNA or one or more sgRNA and the donor template.

[0468] In another method, Method 62, the present disclosure provides a method, as provided in any one of Methods 1-61, wherein the SNCA gene is located on Chromosome 4: 89,724,099-89,838,315 (Genome Reference Consortium—GRCh38).

[0469] The present disclosure also provides a composition, Composition 1, comprising a single-molecule guide RNA comprising at least a spacer sequence that is an RNA sequence corresponding to any one of SEQ ID NOs: 5305-83,935.

[0470] In another composition, Composition 2, the present disclosure provides the single-molecule guide RNA of Composition 1, wherein the single-molecule guide RNA further comprises a spacer extension region.

[0471] In another composition, Composition 3, the present disclosure provides the single-molecule guide RNA of Composition 1, wherein the single-molecule guide RNA further comprises a tracrRNA extension region.

[0472] In another composition, Composition 4, the present disclosure provides the single-molecule guide RNA of any one of Compositions 1-3, wherein the single-molecule guide RNA is chemically modified.

[0473] In another composition, Composition 5, the present disclosure provides the single-molecule guide RNA of any one of Compositions 1-4, wherein the single-molecule guide RNA is pre-complexed with a DNA endonuclease.

[0474] In another composition, Composition 6, the present disclosure provides the single-molecule guide RNA of Composition 5, wherein the DNA endonuclease is a Cas9 or Cpf1 endonuclease.

[0475] In another composition, Composition 7, the present disclosure provides the single-molecule guide RNA of Composition 6, wherein the Cas9 or Cpf1 endonuclease is selected from the group consisting of: S. pyogenes Cas9, S. aureus Cas9, N. meningitidis Cas9, S. thermophilus CRISPR1 Cas9, S. thermophilus CRISPR 3 Cas9, T. denticola Cas9, L. bacterium ND2006 Cpf1 and Acidaminococcus sp. BV3L6 Cpf1, and variants having at least 90% homology to the endonucleases.

[0476] In another composition, Composition 8, the present disclosure provides the single-molecule guide RNA of Composition 7, wherein the Cas9 or Cpf1 endonuclease comprises one or more NLSs.

[0477] In another composition, Composition 9, the present disclosure provides the single-molecule guide RNA of Composition 8, wherein at least one NLS is at or within 50 amino acids of the amino-terminus of the Cas9 or Cpf1 endonuclease and/or at least one NLS is at or within 50 amino acids of the carboxy-terminus of the Cas9 or Cpf1 endonuclease.

[0478] In another composition, Composition 10, the present disclosure provides a DNA encoding the single-molecule guide RNA of any one of Compositions 1-4.

[0479] The present disclosure also provides a therapeutic, Therapeutic 1, comprising at least one or more gRNAs for editing a SNCA gene in a cell from a patient with a SNCA related condition or disorder, the one or more gRNAs comprising a spacer sequence selected from the group consisting of nucleic acid sequences in any one of SEQ ID NOs: 5305-83,935 of the Sequence Listing.

[0480] In another therapeutic, Therapeutic 2, the present disclosure provides a therapeutic for treating a patient with an SNCA related condition or disorder formed by the method comprising: introducing one or more DNA endonucleases; introducing one or more gRNA or one or more sgRNA for editing a SNCA gene; wherein the one or more gRNAs or sgRNAs comprise a spacer sequence selected from the group consisting of nucleic acid sequences in SEQ ID NOs: 5305-83,935 of the Sequence Listing.

[0481] In another therapeutic, Therapeutic 3, the present disclosure provides the therapeutic of any one of Therapeutics 1 or 2, wherein the SNCA related condition or disorder is PARK1.

### IX. Definitions

[0482] In addition to the definitions previously set forth herein, the following definitions are relevant to the present disclosure:

[0483] The term “comprising” or “comprises” is used in reference to compositions, methods, therapeutics, and respective component(s) thereof, that are essential to the present disclosure, yet open to the inclusion of unspecified elements, whether essential or not.

[0484] The term “consisting essentially of” refers to those elements required for a given aspect. The term permits the presence of additional elements that do not materially affect the basic and novel or functional characteristic(s) of that aspect of the present disclosure.

[0485] The term “consisting of” refers to compositions, methods, therapeutics, and respective components thereof as described herein, which are exclusive of any element not recited in that description of the aspect.

[0486] The singular forms “a,” “an,” and “the” include plural references, unless the context clearly dictates otherwise.

[0487] Any numerical range recited in this specification describes all sub-ranges of the same numerical precision (i.e., having the same number of specified digits) subsumed within the recited range. For example, a recited range of “1.0 to 10.0” describes all sub-ranges between (and including) the recited minimum value of 1.0 and the recited maximum value of 10.0, such as, for example, “2.4 to 7.6,” even if the range of “2.4 to 7.6” is not expressly recited in the text of the specification. Accordingly, the Applicant reserves the right to amend this specification, including the claims, to expressly recite any sub-range of the same numerical precision subsumed within the ranges expressly recited in this specification. All such ranges are inherently described in this specification such that amending to expressly recite any such sub-ranges will comply with written description, sufficiency of description, and added matter requirements, including the requirements under 35 U.S.C. § 112(a) and Article 123(2) EPC. Also, unless expressly specified or otherwise required by context, all numerical parameters described in this specification (such as those expressing values, ranges, amounts, percentages, and the like) may be read as if prefaced by the word “about,” even if the word “about” does not expressly appear before a number. Additionally, numerical parameters described in this specification should be construed in light of the number of reported significant digits, numerical precision, and by applying ordinary rounding techniques. It is also understood that numerical parameters described in this specification will necessarily possess the inherent variability characteristic of the underlying measurement techniques used to determine the numerical value of the parameter.

[0488] The details of one or more aspects of the present disclosure are set forth in the accompanying description below. Although any materials and methods similar or equivalent to those described herein can be used in the practice or testing of the present disclosure, the preferred materials and methods are now described. Other features, objects and advantages of the present disclosure will be apparent from the description. In the description, the singular forms also include the plural unless the context clearly dictates otherwise. Unless defined otherwise, all technical and scientific terms used herein have the same meaning as commonly understood by one of ordinary skill in the art to which this present disclosure belongs. In the case of conflict, the present description will control.

[0489] The present disclosure is further illustrated by the following non-limiting examples.

### X. Examples

[0490] The present disclosure will be more fully understood by reference to the following examples, which provide illustrative non-limiting aspects of the present disclosure.

[0491] The examples describe the use of the CRISPR system as an illustrative genome editing technique to create defined therapeutic genomic deletions, insertions, or replacements, termed “genomic modifications” herein, in the SNCA gene that lead to permanent correction of mutations in the genomic locus, or knock-out of the mutant SNCA gene, that restore functional SNCA protein activity and/or reduce or eliminate the undesirable SNCA protein activity. Introduction of the defined therapeutic modifications represents a novel therapeutic strategy for the potential amelioration of Early Onset Parkinson's disease (PARK1), as described and illustrated herein.

### Example 1—CRISPR/S. pyogenes(Sp)Cas9 Target Sites for the SNCA Gene

[0492] Regions of the SNCA gene were scanned for target sites. Each area was scanned for a protospacer adjacent motif (PAM) having the sequence NRG. gRNA 20 bp spacer sequences corresponding to the PAM were then identified, as shown in SEQ ID NOs: 14,085-39,976 and 83,971-83,980 of the Sequence Listing.

### Example 2—CRISPR/S. aureus(Sa)Cas9 Target Sites for the SNCA Gene

[0493] Regions of the SNCA gene were scanned for target sites. Each area was scanned for a protospacer adjacent motif (PAM) having the sequence NNGRRT. gRNA 20 bp spacer sequences corresponding to the PAM were then identified, as shown in SEQ ID NOs: 7293-10,603 of the Sequence Listing.

### Example 3—CRISPR/S. thermophilus(St)Cas9 Target Sites for the SNCA Gene

[0494] Regions of the SNCA gene were scanned for target sites. Each area was scanned for a protospacer adjacent motif (PAM) having the sequence NNAGAAW. gRNA 20 bp spacer sequences corresponding to the PAM were then identified, as shown in SEQ ID NOs: 5893-7296 of the Sequence Listing.

### Example 4—CRISPR/T. denticola(Td)Cas9 Target Sites for the SNCA Gene

[0495] Regions of the SNCA gene were scanned for target sites. Each area was scanned for a protospacer adjacent motif (PAM) having the sequence NAAAAC. gRNA 20 bp spacer sequences corresponding to the PAM were then identified, as shown in SEQ ID NOs: 5305-5892 of the Sequence Listing.

### Example 5—CRISPR/N. meningitidis(Nm)Cas9 Target Sites for the SNCA Gene

[0496] Regions of the SNCA gene were scanned for target sites. Each area was scanned for a protospacer adjacent motif (PAM) having the sequence NNNNGHTT. gRNA 20 bp spacer sequences corresponding to the PAM were then identified, as shown in SEQ ID NOs: 10,604-14,084 of the Sequence Listing.

### Example 6—CRISPR/Cpf1 Target Sites for the SNCA Gene

[0497] Regions of the SNCA gene were scanned for target sites. Each area was scanned for a protospacer adjacent motif (PAM) having the sequence TTN or YTN. gRNA 20 bp spacer sequences corresponding to the PAM were then identified, as shown in SEQ ID NOs: 39,977-83,935 of the Sequence Listing.

### Example 7—Bioinformatics Analysis of the Guide Strands

[0498] Candidate guides were then screened and selected in a single process or multi-step process that involves both theoretical binding and experimentally assessed activity at both on-target and off-target sites. By way of illustration, candidate guides having sequences that match a particular on-target site, such as a site within the SNCA gene, with adjacent PAM can be assessed for their potential to cleave at off-target sites having similar sequences, using one or more of a variety of bioinformatics tools available for assessing off-target binding, as described and illustrated in more detail below, in order to assess the likelihood of effects at chromosomal positions other than those intended.

[0499] Candidates predicted to have relatively lower potential for off-target activity can then be assessed experimentally to measure their on-target activity, and then off-target activities at various sites. Preferred guides have sufficiently high on-target activity to achieve desired levels of gene editing at the selected locus, and relatively lower off-target activity to reduce the likelihood of alterations at other chromosomal loci. The ratio of on-target to off-target activity is often referred to as the “specificity” of a guide.

[0500] For initial screening of predicted off-target activities, there are a number of bioinformatics tools known and publicly available that can be used to predict the most likely off-target sites; and since binding to target sites in the CRISPR/Cas9 or CRISPR/Cpf1 nuclease system is driven by Watson-Crick base pairing between complementary sequences, the degree of dissimilarity (and therefore reduced potential for off-target binding) is essentially related to primary sequence differences: mismatches and bulges, i.e. bases that are changed to a non-complementary base, and insertions or deletions of bases in the potential off-target site relative to the target site. An exemplary bioinformatics tool called COSMID (CRISPR Off-target Sites with Mismatches, Insertions and Deletions) (available on the web at crispr.bme.gatech.edu) compiles such similarities. Other bioinformatics tools include, but are not limited to, autoCOSMID, and CCtop.

[0501] Bioinformatics was used to minimize off-target cleavage in order to reduce the detrimental effects of mutations and chromosomal rearrangements. Studies on CRISPR/Cas9 systems suggested the possibility of off-target activity due to non-specific hybridization of the guide strand to DNA sequences with base pair mismatches and/or bulges, particularly at positions distal from the PAM region. Therefore, it is important to have a bioinformatics tool that can identify potential off-target sites that have insertions and/or deletions between the RNA guide strand and genomic sequences, in addition to base-pair mismatches. Bioinformatics tools based upon the off-target algorithm CCTop were used to search genomes for potential CRISPR off-target sites (CCTop is available on the web at crispr.cos.uni-heidelberg.de/). The output ranked lists of the potential off-target sites based on the number and location of mismatches, allowing more informed choice of target sites, and avoiding the use of sites with more likely off-target cleavage.

[0502] Additional bioinformatics pipelines were employed that weigh the estimated on- and/or off-target activity of gRNA targeting sites in a region. Other features that may be used to predict activity include information about the cell type in question, DNA accessibility, chromatin state, transcription factor binding sites, transcription factor binding data, and other CHIP-seq data. Additional factors are weighed that predict editing efficiency, such as relative positions and directions of pairs of gRNAs, local sequence features and micro-homologies.

[0503] Initial evaluation and screening of CRISPR/Cas9 target sites focused on the enhancer regions of the SNCA gene; sites that show DNAse hypersensitivity signals and H3K27Ac signals within or near the SNCA gene; or within or near intron 1, exon 2, intron 2, exon 3, or intron 3 of the SNCA gene. gRNAs targeting the enhancer regions of the SNCA gene; sites that show DNAse hypersensitivity signals and H3K27Ac signals within or near the SNCA gene; or within or near intron 1, exon 2, intron 2, exon 3, or intron 3 of the SNCA gene can be used to insert one or more exons and introns within or near the SNCA gene and reduce SNCA protein expression.

[0504] Initial bioinformatics analysis identified 26,062 gRNAs targeting the SNCA gene. From the initial set of SpCas9 guides, further analysis identified 516 gRNAs in the 5′ region of SNCA gene (SNCA 5′chr4:89835500-89838500 in hg38 assembly; overlaps with Exon1, Introni, Exon2) and 170 gRNAs in a putative 3′ enhancer region of SNCA gene (chr4:89708000-89710000 in hg38 assembly). The 5′ region and 3′ enhancer regions exhibit DNAse hypersensitivity and H3K27Ac signals. Disruption of these regions may reduce or eliminate SNCA expression. gRNAs or pairs of gRNAs near the 5′ region of the SNCA region can be used to disrupt transcriptional start site(s) and/or translational start of SNCA gene. Similarly, gRNAs or pairs of gRNAs within the putative 3′ enhancer region can be used to disrupt the transcriptional activity of this enhancer. Disruption of one or both of these regions may lead to a reduction or loss of SNCA expression. This targeted subset of 686 gRNAs was further analyzed for predicted off-target sites (having <3 base mismatches) or overlap with an SNP (>0.01 frequency) and these were eliminated. The evaluation resulted in a pool of 179 gRNAs, of which 36 gRNAs were selected for screening based on their off-target scoring. The prioritized list of 36 single gRNAs targeting the SNCA gene were tested for cutting efficiencies using SpCas9 (Table 7).

TABLE 7

| SEQ | | |
|---|---|---|
| ID | | |
| NO. | Name | Sequence |
| 39264 | SNCA 5 CRE_T24 | TCCCAGTTCTCCGCTCACGA |
| 39391 | SNCA 5 CRE_T39 | GTCACAGGTTACAACGTTAG |
| 26402 | SNCA 5 CRE_T21 | ATTGGATATGATGGTCCGGT |
| 83978 | SNCA-3 | CAATTCCTTTCAAGGCAGCG |
| | enhancer_T14 | |
| 83976 | SNCA-3 | GAGCTGTGGTAACATAAGTG |
| | enhancer_T18 | |
| 39436 | SNCA 5 CRE_T10 | GTCTAAAACAAGCGGTCCTA |
| 83974 | SNCA-3 | CACCTCATTATGCCACTATA |
| | enhancer_T10 | |
| 83979 | SNCA-3 | GCGTGGCATGCTATCACAGA |
| | enhancer_T4 | |
| 26183 | SNCA 5 CRE_T2 | GGGAGTGGCCATTCGACGAC |
| 83980 | SNCA-3 | AGCGTGGCATGCTATCACAG |
| | enhancer_T1 | |
| 26206 | SNCA 5 CRE_T14 | AGCGACCGAGCGCCGCGACG |
| 26348 | SNCA 5 CRE_T37 | CGAGGGCAAAGCGCTCTCGG |
| 26180 | SNCA 5 CRE_T6 | CCATTCGACGACAGGTTAGC |
| 39292 | SNCA 5 CRE_T35 | CGCACCTCACTTCCGCGTCG |
| 83971 | SNCA-3 | TCATTATGCCACTATAGGGT |
| | enhancer_T7 | |
| 26247 | SNCA 5 CRE_T36 | AGCGCTGACAAATCAGCGGT |
| 83975 | SNCA-3 | CACCCTATAGTGGCATAATG |
| | enhancer_T12 | |
| 39446 | SNCA 5 CRE_T41 | TCCAGCGTGATTTAGCCTAC |
| 83973 | SNCA-3 | CTCTTCTGCCCACCCTATAG |
| | enhancer_T16 | |
| 26269 | SNCA 5 CRE_T13 | CCCCATCCGAGATAGGGACG |
| 26385 | SNCA 5 CRE_T1 | GACCGCTTGTTTTAGACGGC |
| 26401 | SNCA 5 CRE_T4 | TCCGGTAGGCTAAATCACGC |
| 83972 | SNCA-3 | CTCATTATGCCACTATAGGG |
| | enhancer_T3 | |
| 39260 | SNCA 5 CRE_T3 | CCCGCTAACCTGTCGTCGAA |
| 26188 | SNCA 5 CRE_T29 | CACCCTCGTGAGCGGAGAAC |
| 39389 | SNCA 5 CRE_T34 | CGGTCACAGGTTACAACGTT |
| 83977 | SNCA-3 | TCCTGTCTTACATGCACTGC |
| | enhancer_T17 | |
| 39332 | SNCA 5 CRE_T20 | TGCGCCTCACGTTAAGTTTA |
| 26285 | SNCA 5 CRE_T31 | GTGACCCTAAACTTAACGTG |
| 39293 | SNCA 5 CRE_T16 | CACTTCCGCGTCGCGGCGCT |
| 39341 | SNCA 5 CRE_T50 | TGTGGAGATCGGGAGCGGTT |
| 39364 | SNCA 5 CRE_T44 | GCCTGAGGGTCGACCACCAA |
| 26322 | SNCA 5 CRE_T54 | GCGACTCTGACGAGGGGTAG |
| 26347 | SNCA 5 CRE_T49 | GCAAAGCGCTCTCGGCGGTG |
| 39334 | SNCA 5 CRE_T53 | TAGGGTCACGAGCACTCTTG |
| 39304 | SNCA 5 CRE_T18 | TCCTCGTCCCTATCTCGGAT |

[0505] Note that the SEQ ID NOs represent the DNA sequence of the genomic target, while the gRNA or sgRNA spacer sequence will be the RNA version of the DNA sequence.

### Example 8—Testing of Preferred Guides in In Vitro Transcribed (IVT) gRNA Screen

[0506] To identify a large spectrum of pairs of gRNAs able to edit the cognate DNA target region, an in vitro transcribed (IVT) gRNA screen was conducted. The relevant genomic sequence was submitted for analysis using a gRNA design software. The resulting list of gRNAs was narrowed to a select list of gRNAs as described above based on uniqueness of sequence (only gRNAs without a perfect match somewhere else in the genome were screened) and minimal predicted off targets. This set of gRNAs was in vitro transcribed, and transfected using Lipofectamine MessengerMAX into HEK293T cells that constitutively express Cas9. Cells were harvested 48 hours post transfection, the genomic DNA was isolated, and cutting efficiency was evaluated using TIDE analysis. (FIGS. 2-3).

[0507] The gRNA or pairs of gRNA with significant activity can then be followed up in cultured cells to measure correction of the SNCA mutation. Off-target events can be followed again. A variety of cells can be transfected and the level of gene correction and possible off-target events measured. These experiments allow optimization of nuclease and donor design and delivery.

### Example 9—Testing of Preferred Guides in Cells for Off-Target Activity

[0508] The gRNAs having the best on-target activity from the IVT screen in the above example are tested for off-target activity using Hybrid capture assays, GUIDE Seq. and whole genome sequencing in addition to other methods.

### Example 10—Testing Different Approaches for HDR Gene Editing

[0509] After testing the gRNAs for both on-target activity and off-target activity, mutational correction and whole gene correction strategies will be tested for HDR gene editing.

[0510] For the mutational correction approach, donor DNA template will be provided as a short single-stranded oligonucleotide, a short double-stranded oligonucleotide (PAM sequence intact/PAM sequence mutated), a long single-stranded DNA molecule (PAM sequence intact/PAM sequence mutated) or a long double-stranded DNA molecule (PAM sequence intact/PAM sequence mutated). In addition, the donor DNA template will be delivered by AAV, or other viral or non-viral vectors.

[0511] For the whole gene correction approach, a single-stranded or double-stranded DNA having homologous arms to the SNCA chromosomal region may include more than 40 nt of the first exon of the SNCA gene, the complete CDS of the SNCA gene and 3′ UTR of the SNCA gene, and at least 40 nt of the following intron. The single-stranded or double-stranded DNA having homologous arms to the SNCA chromosomal region may include more than 80 nt of the first exon of the SNCA gene, the complete CDS of the SNCA gene and 3′ UTR of the SNCA gene, and at least 80 nt of the following intron. The single-stranded or double-stranded DNA having homologous arms to the SNCA chromosomal region may include more than 100 nt of the first exon of the SNCA gene, the complete CDS of the SNCA gene and 3′ UTR of the SNCA gene, and at least 100 nt of the following intron. The single-stranded or double-stranded DNA having homologous arms to the SNCA chromosomal region may include more than 150 nt of the first exon of the SNCA gene, the complete CDS of the SNCA gene and 3′ UTR of the SNCA gene, and at least 150 nt of the following intron. The single-stranded or double-stranded DNA having homologous arms to the SNCA chromosomal region may include more than 300 nt of the first exon of the SNCA gene, the complete CDS of the SNCA gene and 3′ UTR of the SNCA gene, and at least 300 nt of the following intron. The single-stranded or double-stranded DNA having homologous arms to the SNCA chromosomal region may include more than 400 nt of the first exon of the SNCA gene, the complete CDS of the SNCA gene and 3′ UTR of the SNCA gene, and at least 400 nt of the following intron.

[0512] Alternatively, the DNA template will be delivered by a recombinant AAV particle, or other viral (or non-viral) delivery vectors, such as those taught herein.

[0513] A knock-in of SNCA cDNA can be performed into any selected chromosomal location including the SNCA gene locus or safe harbor locus, e.g., AAVS1 (intron 1 of PPP1R12C), HPRT, H11, hRosa26 and/or F-A region. Assessment of efficiency of HDR mediated knock-in of cDNA into the first exon can utilize cDNA knock-in into safe harbor locus such as: single-stranded or double-stranded DNA having homologous arms to one of the following regions, for example: exon 1, intron 1 or exon 2 of PPP1R12C; exon 1, intron 1 or exon 2 of HPRT; and/or exon 1, intron 1 or exon 2 of hRosa26; 5′UTR correspondent to SNCA or alternative 5′ UTR, complete CDS of SNCA and 3′ UTR of SNCA or modified 3′ UTR and at least 80 nt of the first intron, alternatively same DNA template sequence will be delivered by AAV, or other viral (or non-viral) delivery vector.

### Example 11—Re-Assessment of Lead CRISPR-Cas9/DNA Donor Combinations

[0514] After testing the different strategies for gene editing, the lead CRISPR-Cas9/DNA donor combinations will be re-assessed in cells for efficiency of deletion, recombination, and off-target specificity. Cas9 mRNA or RNP will be formulated into lipid nanoparticles for delivery, sgRNAs will be formulated into nanoparticles or delivered as a recombinant AAV particle, and donor DNA will be formulated into nanoparticles or delivered as recombinant AAV particle.

### Example 12—In Vivo Testing in Relevant Animal Model

[0515] After the CRISPR-Cas9/DNA donor combinations have been re-assessed, the lead formulations will be tested in vivo in an animal model.

[0516] Culture in human cells allows direct testing on the human target and the background human genome, as described above.

[0517] Preclinical efficacy and safety evaluations can be observed through engraftment of modified mouse or human neurons in a mouse model. The modified cells can be observed in the months after engraftment.

### XI. Equivalents and Scope

[0518] Those skilled in the art will recognize, or be able to ascertain using no more than routine experimentation, many equivalents to the specific examples in accordance with the invention described herein. The scope of the present disclosure is not intended to be limited to the above Description, but rather is as set forth in the appended claims.

[0519] Claims or descriptions that include “or” between one or more members of a group are considered satisfied if one, more than one, or all of the group members are present in, employed in, or otherwise relevant to a given product or process unless indicated to the contrary or otherwise evident from the context. The present disclosure includes examples in which exactly one member of the group is present in, employed in, or otherwise relevant to a given product or process. The present disclosure includes examples in which more than one, or the entire group members are present in, employed in, or otherwise relevant to a given product or process.

[0520] In addition, it is to be understood that any particular example of the present disclosure that falls within the prior art may be explicitly excluded from any one or more of the claims. Since such examples are deemed to be known to one of ordinary skill in the art, they may be excluded even if the exclusion is not set forth explicitly herein. Any particular example of the compositions of the present disclosure (e.g., any antibiotic, therapeutic or active ingredient; any method of production; any method of use; etc.) can be excluded from any one or more claims, for any reason, whether or not related to the existence of prior art.

[0521] It is to be understood that the words which have been used are words of description rather than limitation, and that changes may be made within the purview of the appended claims without departing from the true scope and spirit of the present disclosure in its broader aspects.

[0522] While the present invention has been described at some length and with some particularity with respect to the several described examples, it is not intended that it should be limited to any such particulars or examples or any particular example, but it is to be construed with references to the appended claims so as to provide the broadest possible interpretation of such claims in view of the prior art and, therefore, to effectively encompass the intended scope of the invention.

### Note Regarding Illustrative Examples

[0523] While the present disclosure provides descriptions of various specific aspects for the purpose of illustrating various aspects of the present disclosure and/or its potential applications, it is understood that variations and modifications will occur to those skilled in the art. Accordingly, the invention or inventions described herein should be understood to be at least as broad as they are claimed, and not as more narrowly defined by particular illustrative aspects provided herein.

[0524] Any patent, publication, or other disclosure material identified herein is incorporated by reference into this specification in its entirety unless otherwise indicated, but only to the extent that the incorporated material does not conflict with existing descriptions, definitions, statements, or other disclosure material expressly set forth in this specification. As such, and to the extent necessary, the express disclosure as set forth in this specification supersedes any conflicting material incorporated by reference. Any material, or portion thereof, that is said to be incorporated by reference into this specification, but which conflicts with existing definitions, statements, or other disclosure material set forth herein, is only incorporated to the extent that no conflict arises between that incorporated material and the existing disclosure material. Applicants reserve the right to amend this specification to expressly recite any subject matter, or portion thereof, incorporated by reference herein.

1. A method for editing a Synuclein, Alpha (SNCA) gene in a cell by genome editing comprising: introducing into the cell one or more deoxyribonucleic acid (DNA) endonucleases to effect one or more single-strand breaks (SSBs) or double-strand breaks (DSBs) within or near the SNCA gene or SNCA regulatory elements that results in one or more permanent insertions, deletions or mutations of at least one nucleotide, correction of one or more mutations or replacement of one or more exons and/or introns within or near the SNCA gene, thereby reducing or eliminating the expression or function of aberrant SNCA gene products.

2. A method for editing a Synuclein, Alpha (SNCA) gene in a cell by genome editing comprising: introducing into the cell one or more deoxyribonucleic acid (DNA) endonucleases to effect one or more single-strand breaks (SSBs) or double-strand breaks (DSBs) within or near the SNCA gene or SNCA regulatory elements that results in one or more permanent insertions, deletions or mutations of at least one nucleotide or replacement of one or more exons and/or introns within or near the SNCA gene, thereby reducing or eliminating the expression of the SNCA gene.

3. An ex vivo method for treating a patient having a SNCA related condition or disorder comprising:
editing a patient specific induced pluripotent stem cell (iPSC) within or near a Synuclein, Alpha (SNCA) gene or other DNA sequences that encode regulatory elements of the SNCA gene;
differentiating the edited iPSC into a neuron or glial cell of the Central Nervous System (CNS), or a neuron of the Peripheral Nervous System (PNS); and
implanting the neuron or glial cell of the Central Nervous System (CNS), or neuron of the Peripheral Nervous System (PNS) into the patient.

4. The method of claim 3, wherein the editing step comprises introducing into the iPSC one or more deoxyribonucleic acid (DNA) endonucleases to effect one or more single-strand breaks (SSBs) or double-strand breaks (DSBs) within or near the SNCA gene or SNCA regulatory elements that results in one or more permanent insertions, deletions or mutations of at least one nucleotide, correction of one or more mutations or replacement of one or more exons and/or introns within or near the SNCA gene, thereby reducing or eliminating the expression or function of aberrant SNCA gene products.

5. The method of claim 3, wherein the editing step comprises introducing into the iPSC one or more deoxyribonucleic acid (DNA) endonucleases to effect one or more single-strand breaks (SSBs) or double-strand breaks (DSBs) within or near the SNCA gene or SNCA regulatory elements that results in one or more permanent insertions, deletions or mutations of at least one nucleotide or replacement of one or more exons and/or introns within or near the SNCA gene, thereby reducing or eliminating the expression of the SNCA gene.

6. The method of claims 3-5, further comprising:
creating the iPSC, wherein the creating step comprises:
isolating a somatic cell from the patient; and
introducing a set of pluripotency-associated genes into the somatic cell to induce the somatic cell to become the iPSC.

7. The method of claim 6, wherein the somatic cell is a fibroblast.

8. The method of claim 6, wherein the set of pluripotency-associated genes is one or more of the genes selected from the group consisting of: OCT4, SOX2, KLF4, Lin28, NANOG and cMYC.

9. An ex vivo method for treating a patient having a SNCA related condition or disorder comprising:
editing a mesenchymal stem cell within or near a Synuclein, Alpha (SNCA) gene or other DNA sequences that encode regulatory elements of the SNCA gene;
differentiating the edited mesenchymal stem cell into a neuron or glial cell of the Central Nervous System (CNS), or a neuron of the Peripheral Nervous System (PNS); and
implanting the neuron or glial cell of the Central Nervous System (CNS), or neuron of the Peripheral Nervous System (PNS) into the patient.

10. The method of claim 9, wherein the editing step comprises: introducing into the mesenchymal stem cell one or more deoxyribonucleic acid (DNA) endonucleases to effect one or more single-strand breaks (SSBs) or double-strand breaks (DSBs) within or near the SNCA gene or SNCA regulatory elements that results in one or more permanent insertions, deletions or mutations of at least one nucleotide, correction of one or more mutations or replacement of one or more exons and/or introns within or near the SNCA gene, thereby reducing or eliminating the expression or function of aberrant SNCA gene products.

11. The method of claim 9, wherein the editing step comprises: introducing into the mesenchymal stem cell one or more deoxyribonucleic acid (DNA) endonucleases to effect one or more single-strand breaks (SSBs) or double-strand breaks (DSBs) within or near the SNCA gene or SNCA regulatory elements that results in one or more permanent insertions, deletions or mutations of at least one nucleotide or replacement of one or more exons and/or introns within or near the SNCA gene, thereby reducing or eliminating the expression of the SNCA gene.

12. The method of claims 9-11, further comprising: isolating the mesenchymal stem cell from the patient, wherein the mesenchymal stem cell is isolated from the patient's bone marrow or peripheral blood.

13. The method of claim 12, wherein the isolating step comprises: aspiration of bone marrow and isolation of mesenchymal stem cells using density gradient centrifugation media.

14. An in vivo method for treating a patient with a SNCA related condition or disorder comprising: editing the Synuclein, Alpha (SNCA) gene in a cell of the patient.

15. The method of claim 14, wherein the editing step comprises introducing into the cell one or more deoxyribonucleic acid (DNA) endonucleases to effect one or more single-strand breaks (SSBs) or double-strand breaks (DSBs) within or near the SNCA gene or SNCA regulatory elements that results in one or more permanent insertions, deletions or mutations of at least one nucleotide, correction of one or more mutations or replacement of one or more exons and/or introns within or near the SNCA gene, thereby reducing or eliminating the expression or function of aberrant SNCA gene products.

16. The method of claim 14, wherein the editing step comprises introducing into the cell one or more deoxyribonucleic acid (DNA) endonucleases to effect one or more single-strand breaks (SSBs) or double-strand breaks (DSBs) within or near the SNCA gene or SNCA regulatory elements that results in one or more permanent insertions, deletions or mutations of at least one nucleotide or replacement of one or more exons and/or introns within or near the SNCA gene, thereby reducing or eliminating the expression of the SNCA gene.

17. The method of any one of claims 14-16, wherein the cell is a cell of the Central Nervous System (CNS).

18. The method of claim 17, wherein the cell of the Central Nervous System (CNS) is a neuron.

19. The method of claim 17, wherein the cell of the Central Nervous System (CNS) is a glial cell.

20. The method of any one of claims 17-19, wherein the one or more deoxyribonucleic acid (DNA) endonuclease is delivered to the cell of the Central Nervous System (CNS) via any administration route selected from the group consisting of intraparenchymal, intravenous, intra-arterial, intracerebroventricular, intracisternal, intrathecal, intracranial or intraperitoneal routes.

21. The method of any one of claims 3, 9, or 14, wherein the SNCA related condition or disorder is Early Onset Parkinson's Disease (PARK1).

22. A method of altering the contiguous genomic sequence of a SNCA gene in a cell comprising: contacting the cell with one or more deoxyribonucleic acid (DNA) endonuclease to effect one or more single-strand breaks (SSBs) or double-strand breaks (DSBs).

23. The method of claim 22, wherein the alteration of the contiguous genomic sequence occurs in one or more exons of the SNCA gene.

24. The method of claim 22, wherein the alteration of the contiguous genomic sequence occurs in intron 1, exon 2, intron 2, exon 3, or intron 3 of the SNCA gene.

25. The method of claim 22, wherein the alteration of the contiguous genomic sequence occurs in the 5′UTR and/or the genomic sequence 3′ of the SNCA gene.

26. The method of claim 22, wherein the alteration of the contiguous genomic sequence occurs in an enhancer region.

27. The method of claim 22, wherein the alteration results in one or more permanent insertions, deletions or mutations of at least one nucleotide, correction of one or more mutations or replacement of one or more exons and/or introns within or near the SNCA gene, thereby reducing or eliminating the expression or function of aberrant SNCA gene products.

28. The method of claim 22, wherein the alteration results in one or more permanent insertions, deletions or mutations of at least one nucleotide or replacement of one or more exons and/or introns within or near the SNCA gene, thereby reducing or eliminating the expression of the SNCA gene.

29. The method of claim 28, wherein the one or more permanent insertion occurs in intron 1, exon 2, intron 2, exon 3, or intron 3 of the SNCA gene.

30. The method of any one of claims 1-29, wherein the one or more deoxyribonucleic acid (DNA) endonuclease is selected from any of those sequences in SEQ ID NOs: 1-620 and variants having at least 90% homology to any of those sequences disclosed in SEQ ID NOs: 1-620.

31. The method of claim 30, wherein the one or more deoxyribonucleic acid (DNA) endonuclease is one or more protein or polypeptide.

32. The method of claim 31, wherein the one or more protein or polypeptide is flanked at the N-terminus, the C-terminus, or both the N-terminus and C-terminus by one or more nuclear localization signals (NLSs).

33. The method of claim 32, wherein the one or more protein or polypeptide is flanked by two NLSs, one NLS located at the N-terminus and the second NLS located at the C-terminus.

34. The method of any one of claims 32-33, wherein the one or more NLSs is a SV40 NLS.

35. The method of claim 30, wherein the one or more deoxyribonucleic acid (DNA) endonuclease is one or more polynucleotide encoding the one or more DNA endonuclease.

36. The method of claim 35, wherein the one or more deoxyribonucleic acid (DNA) endonuclease is one or more ribonucleic acid (RNA) encoding the one or more DNA endonuclease.

37. The method of claim 36, wherein the one or more ribonucleic acid (RNA) is one or more chemically modified RNA.

38. The method of any one of claims 35-37, wherein the one or more polynucleotide or one or more ribonucleic acid (RNA) is codon optimized.

39. The method of any one of claims 1-38, wherein the method further comprises:
introducing into the cell one or more gRNA or one or more sgRNA.

40. The method of claim 39, wherein the one or more gRNA or one or more sgRNA comprises a spacer sequence that is complementary to a DNA sequence within or near intron 1, exon 2, intron 2, exon 3, or intron 3 of the SNCA gene.

41. The method of claim 39, wherein the one or more gRNA or one or more sgRNA comprises a spacer sequence that is complementary to a segment of the coding sequence of the SNCA gene.

42. The method of claim 39, wherein the one or more gRNA or one or more sgRNA comprises a spacer sequence that is complementary to a sequence flanking the SNCA gene or other sequence that encodes a regulatory element of the SNCA gene.

43. The method of any of claims 39-42, wherein the one or more gRNA or one or more sgRNA is chemically modified.

44. The method of claim 43, wherein the one or more modified sgRNAs comprises three 2′-O-methyl-phosphorothioate residues at or near each of its 5′ and 3′ ends.

45. The method of any one of claims 39-44, wherein the one or more gRNA or one or more sgRNA comprises a RNA sequence corresponding to a sequence selected from the group consisting of SEQ ID NOs: 39264, 39391, 26402, 83978, 83976, 39436, 83974, 83979, 26183, 83980, 26206, 26348, 26180, 39292, 83971, 26247, 83975, 39446, 83973, 26269, 26385, 26401, 83972, 39260, 26188, 39389, 83977, 39332, 26285, 39293, 39341, 39364, 26322, 26347, 39334, and 39304.

46. The method of any one of claims 39-44, wherein the one or more gRNA or one or more sgRNA is pre-complexed with the one or more deoxyribonucleic acid (DNA) endonuclease to form one or more ribonucleoproteins (RNPs).

47. The method of claim 46, wherein the pre-complexing involves a covalent attachment of the one or more gRNA or one or more sgRNA to the one or more deoxyribonucleic acid (DNA) endonuclease.

48. The method of claims 46-47, wherein the weight ratio of sgRNA to DNA endonuclease in the RNP is 1:1.

49. The method of any one of claims 30-48, wherein the one or more deoxyribonucleic acid (DNA) endonuclease is formulated in a liposome or lipid nanoparticle.

50. The method of any one of claims 39-48, wherein the one or more deoxyribonucleic acid (DNA) endonuclease is formulated in a liposome or lipid nanoparticle which also comprises the one or more gRNA or one or more sgRNA.

51. The method of any one of claim 30 or 39-45, wherein the one or more deoxyribonucleic acid (DNA) endonuclease is encoded in an AAV vector particle.

52. The method of any of the claims 39-45, wherein the one or more gRNA or one or more sgRNA is encoded in an AAV vector particle.

53. The method of claim 52, wherein the one or more deoxyribonucleic acid (DNA) endonuclease is encoded in an AAV vector particle which also encodes the one or more gRNA or one or more sgRNA.

54. The method of any one of claims 52-53, wherein the AAV vector particle is selected from the group consisting of any of those sequences disclosed in SEQ ID NOs: 4734-5302 and Table 2.

55. The method of any of claims 1-54, wherein the method further comprises: introducing into the cell a donor template comprising at least a portion of the wild-type SNCA gene.

56. The method of claim 55, wherein the at least a portion of the wild-type SNCA gene comprises one or more sequences selected from the group consisting of: a SNCA exon, a SNCA intron, and a sequence comprising an exon:intron junction of SNCA.

57. The method of any one of claims 55-56, wherein the donor template comprises homologous arms to the genomic locus of the SNCA gene.

58. The method of any one of claims 55-57, wherein the donor template is either a single or double stranded polynucleotide.

59. The method of any one of claims 55-58, wherein the donor template is encoded in an AAV vector particle, where the AAV vector particle is selected from the group consisting of any of those sequence disclosed in SEQ ID NOs: 4734-5302 and Table 2.

60. The method of any one of claims 55-58, wherein the one or more polynucleotide encoding one or more deoxyribonucleic acid (DNA) endonuclease is formulated into a lipid nanoparticle, and the one or more gRNA or one or more sgRNA is delivered to the cell ex vivo by electroporation and the donor template is delivered to the cell by an adeno-associated virus (AAV) vector.

61. The method of any one of claims 55-58, wherein the one or more polynucleotide encoding one or more deoxyribonucleic acid (DNA) endonuclease is formulated into a liposome or lipid nanoparticle which also comprises the one or more gRNA or one or more sgRNA and the donor template.

62. The method of any one of the preceding claims, wherein the SNCA gene is located on Chromosome 4: 89,724,099-89,838,315 (Genome Reference Consortium—GRCh38).

63. A single-molecule guide RNA comprising at least a spacer sequence that is an RNA sequence corresponding to any one of SEQ ID NOs: 5305-83,935.

64. The single-molecule guide RNA of claim 63, wherein the single-molecule guide RNA further comprises a spacer extension region.

65. The single-molecule guide RNA of claim 63, wherein the single-molecule guide RNA further comprises a tracrRNA extension region.

66. The single-molecule guide RNA of claims 63-65, wherein the single-molecule guide RNA is chemically modified.

67. The single-molecule guide RNA of any one of claims 63-66 pre-complexed with a DNA endonuclease.

68. The single-molecule guide RNA of claim 67, wherein the DNA endonuclease is a Cas9 or Cpf1 endonuclease.

69. The single-molecule guide RNA of claim 68, wherein the Cas9 or Cpf1 endonuclease is selected from the group consisting of: S. pyogenes Cas9, S. aureus Cas9, N. meningitidis Cas9, S. thermophilus CRISPR1 Cas9, S. thermophilus CRISPR 3 Cas9, T. denticola Cas9, L. bacterium ND2006 Cpf1 and Acidaminococcus sp. BV3L6 Cpf1, and variants having at least 90% homology to the endonucleases.

70. The single-molecule guide RNA of claim 69, wherein the Cas9 or Cpf1 endonuclease comprises one or more nuclear localization signals (NLSs).

71. The single-molecule guide RNA of claim 70, wherein at least one NLS is at or within 50 amino acids of the amino-terminus of the Cas9 or Cpf1 endonuclease and/or at least one NLS is at or within 50 amino acids of the carboxy-terminus of the Cas9 or Cpf1 endonuclease.

72. A DNA encoding the single-molecule guide RNA of any one of claims 63-66.

73. A therapeutic comprising at least one or more gRNAs for editing a SNCA gene in a cell from a patient with a SNCA related condition or disorder, the one or more gRNAs comprising a spacer sequence selected from the group consisting of nucleic acid sequences in any one of SEQ ID NOs: 5305-83,935 of the Sequence Listing.

74. A therapeutic for treating a patient with an SNCA related condition or disorder formed by the method comprising:
introducing one or more DNA endonucleases;
introducing one or more gRNA or one or more sgRNA for editing a SNCA gene;
wherein the one or more gRNAs or sgRNAs comprise a spacer sequence selected from the group consisting of nucleic acid sequences in SEQ ID NOs: 5305-83,935 of the Sequence Listing.

75. The method of any one of claim 73 or 74, wherein the SNCA related condition or disorder is Early Onset Parkinson's Disease (PARK1).

The application's sequence listing, which the Patent Office published only in electronic form, follows.

SEQUENCE LISTING (83980 sequences)

SEQ ID NO: 1 - protein, 1368 aa, Streptococcus pyogenes [sequence omitted]

SEQ ID NO: 2 - DNA, 4107 bp, Streptococcus pyogenes
atggataagaaatactcaataggcttagatatcggcacaaatagcgtcggatgggcggtgatcactgatgaatataaggttccgtctaaaaagttcaaggttctgggaaatacagaccgccacagtatcaaaaaaaatcttataggggctcttttatttgacagtggagagacagcggaagcgactcgtctcaaacggacagctcgtagaaggtatacacgtcggaagaatcgtatttgttatctacaggagattttttcaaatgagatggcgaaagtagatgatagtttctttcatcgacttgaagagtcttttttggtggaagaagacaagaagcatgaacgtcatcctatttttggaaatatagtagatgaagttgcttatcatgagaaatatccaactatctatcatctgcgaaaaaaattggtagattctactgataaagcggatttgcgcttaatctatttggccttagcgcatatgattaagtttcgtggtcattttttgattgagggagatttaaatcctgataatagtgatgtggacaaactatttatccagttggtacaaacctacaatcaattatttgaagaaaaccctattaacgcaagtggagtagatgctaaagcgattctttctgcacgattgagtaaatcaagacgattagaaaatctcattgctcagctccccggtgagaagaaaaatggcttatttgggaatctcattgctttgtcattgggtttgacccctaattttaaatcaaattttgatttggcagaagatgctaaattacagctttcaaaagatacttacgatgatgatttagataatttattggcgcaaattggagatcaatatgctgatttgtttttggcagctaagaatttatcagatgctattttactttcagatatcctaagagtaaatactgaaataactaaggctcccctatcagcttcaatgattaaacgctacgatgaacatcatcaagacttgactcttttaaaagctttagttcgacaacaacttccagaaaagtataaagaaatcttttttgatcaatcaaaaaacggatatgcaggttatattgatgggggagctagccaagaagaattttataaatttatcaaaccaattttagaaaaaatggatggtactgaggaattattggtgaaactaaatcgtgaagatttgctgcgcaagcaacggacctttgacaacggctctattccccatcaaattcacttgggtgagctgcatgctattttgagaagacaagaagacttttatccatttttaaaagacaatcgtgagaagattgaaaaaatcttgacttttcgaattccttattatgttggtccattggcgcgtggcaatagtcgttttgcatggatgactcggaagtctgaagaaacaattaccccatggaattttgaagaagttgtcgataaaggtgcttcagctcaatcatttattgaacgcatgacaaactttgataaaaatcttccaaatgaaaaagtactaccaaaacatagtttgctttatgagtattttacggtttataacgaattgacaaaggtcaaatatgttactgaaggaatgcgaaaaccagcatttctttcaggtgaacagaagaaagccattgttgatttactcttcaaaacaaatcgaaaagtaaccgttaagcaattaaaagaagattatttcaaaaaaatagaatgttttgatagtgttgaaatttcaggagttgaagatagatttaatgcttcattaggtacctaccatgatttgctaaaaattattaaagataaagattttttggataatgaagaaaatgaagatatcttagaggatattgttttaacattgaccttatttgaagatagggagatgattgaggaaagacttaaaacatatgctcacctctttgatgataaggtgatgaaacagcttaaacgtcgccgttatactggttggggacgtttgtctcgaaaattgattaatggtattagggataagcaatctggcaaaacaatattagattttttgaaatcagatggttttgccaatcgcaattttatgcagctgatccatgatgatagtttgacatttaaagaagacattcaaaaagcacaagtgtctggacaaggcgatagtttacatgaacatattgcaaatttagctggtagccctgctattaaaaaaggtattttacagactgtaaaagttgttgatgaattggtcaaagtaatggggcggcataagccagaaaatatcgttattgaaatggcacgtgaaaatcagacaactcaaaagggccagaaaaattcgcgagagcgtatgaaacgaatcgaagaaggtatcaaagaattaggaagtcagattcttaaagagcatcctgttgaaaatactcaattgcaaaatgaaaagctctatctctattatctccaaaatggaagagacatgtatgtggaccaagaattagatattaatcgtttaagtgattatgatgtcgatcacattgttccacaaagtttccttaaagacgattcaatagacaataaggtcttaacgcgttctgataaaaatcgtggtaaatcggataacgttccaagtgaagaagtagtcaaaaagatgaaaaactattggagacaacttctaaacgccaagttaatcactcaacgtaagtttgataatttaacgaaagctgaacgtggaggtttgagtgaacttgataaagctggttttatcaaacgccaattggttgaaactcgccaaatcactaagcatgtggcacaaattttggatagtcgcatgaatactaaatacgatgaaaatgataaacttattcgagaggttaaagtgattaccttaaaatctaaattagtttctgacttccgaaaagatttccaattctataaagtacgtgagattaacaattaccatcatgcccatgatgcgtatctaaatgccgtcgttggaactgctttgattaagaaatatccaaaacttgaatcggagtttgtctatggtgattataaagtttatgatgttcgtaaaatgattgctaagtctgagcaagaaataggcaaagcaaccgcaaaatatttcttttactctaatatcatgaacttcttcaaaacagaaattacacttgcaaatggagagattcgcaaacgccctctaatcgaaactaatggggaaactggagaaattgtctgggataaagggcgagattttgccacagtgcgcaaagtattgtccatgccccaagtcaatattgtcaagaaaacagaagtacagacaggcggattctccaaggagtcaattttaccaaaaagaaattcggacaagcttattgctcgtaaaaaagactgggatccaaaaaaatatggtggttttgatagtccaacggtagcttattcagtcctagtggttgctaaggtggaaaaagggaaatcgaagaagttaaaatccgttaaagagttactagggatcacaattatggaaagaagttcctttgaaaaaaatccgattgactttttagaagctaaaggatataaggaagttaaaaaagacttaatcattaaactacctaaatatagtctttttgagttagaaaacggtcgtaaacggatgctggctagtgccggagaattacaaaaaggaaatgagctggctctgccaagcaaatatgtgaattttttatatttagctagtcattatgaaaagttgaagggtagtccagaagataacgaacaaaaacaattgtttgtggagcagcataagcattatttagatgagattattgagcaaatcagtgaattttctaagcgtgttattttagcagatgccaatttagataaagttcttagtgcatataacaaacatagagacaaaccaatacgtgaacaagcagaaaatattattcatttatttacgttgacgaatcttggagctcccgctgcttttaaatattttgatacaacaattgatcgtaaacgatatacgtctacaaaagaagttttagatgccactcttatccatcaatccatcactggtctttatgaaacacgcattgatttgagtcagctaggaggtgactga

SEQ ID NO: 3 - DNA, 4107 bp, Streptococcus pyogenes
atggacaagaagtactccattgggctcgctatcggcacaaacagcgtcggctgggccgtcattacggacgagtacaaggtgccgagcaaaaaattcaaagttctgggcaataccgatcgccacagcataaagaagaacctcattggcgccctcctgttcgactccggggagacggccgaagccacgcggctcaaaagaacagcacggcgcagatatacccgcagaaagaatcggatctgctacctgcaggagatctttagtaatgagatggctaaggtggatgactctttcttccataggctggaggagtcctttttggtggaggaggataaaaagcacgagcgccacccaatctttggcaatatcgtggacgaggtggcgtaccatgaaaagtacccaaccatatatcatctgaggaagaagcttgtagacagtactgataaggctgacttgcggttgatctatctcgcgctggcgcatatgatcaaatttcggggacacttcctcatcgagggggacctgaacccagacaacagcgatgtcgacaaactctttatccaactggttcagacttacaatcagcttttcgaagagaacccgatcaacgcatccggagttgacgccaaagcaatcctgagcgctaggctgtccaaatcccggcggctcgaaaacctcatcgcacagctccctggggagaagaagaacggcctgtttggtaatcttatcgccctgtcactcgggctgacccccaactttaaatctaacttcgacctggccgaagatgccaagcttcaactgagcaaagacacctacgatgatgatctcgacaatctgctggcccagatcggcgaccagtacgcagacctttttttggcggcaaagaacctgtcagacgccattctgctgagtgatattctgcgagtgaacacggagatcaccaaagctccgctgagcgctagtatgatcaagcgctatgatgagcaccaccaagacttgactttgctgaaggcccttgtcagacagcaactgcctgagaagtacaaggaaattttcttcgatcagtctaaaaatggctacgccggatacattgacggcggagcaagccaggaggaattttacaaatttattaagcccatcttggaaaaaatggacggcaccgaggagctgctggtaaagcttaacagagaagatctgttgcgcaaacagcgcactttcgacaatggaagcatcccccaccagattcacctgggcgaactgcacgctatcctcaggcggcaagaggatttctacccctttttgaaagataacagggaaaagattgagaaaatcctcacatttcggataccctactatgtaggccccctcgcccggggaaattccagattcgcgtggatgactcgcaaatcagaagagaccatcactccctggaacttcgaggaagtcgtggataagggggcctctgcccagtccttcatcgaaaggatgactaactttgataaaaatctgcctaacgaaaaggtgcttcctaaacactctctgctgtacgagtacttcacagtttataacgagctcaccaaggtcaaatacgtcacagaagggatgagaaagccagcattcctgtctggagagcagaagaaagctatcgtggacctcctcttcaagacgaaccggaaagttaccgtgaaacagctcaaagaagactatttcaaaaagattgaatgtttcgactctgttgaaatcagcggagtggaggatcgcttcaacgcatccctgggaacgtatcacgatctcctgaaaatcattaaagacaaggacttcctggacaatgaggagaacgaggacattcttgaggacattgtcctcacccttacgttgtttgaagatagggagatgattgaagaacgcttgaaaacttacgctcatctcttcgacgacaaagtcatgaaacagctcaagaggcgccgatatacaggatgggggcggctgtcaagaaaactgatcaatgggatccgagacaagcagagtggaaagacaatcctggattttcttaagtccgatggatttgccaaccggaacttcatgcagttgatccatgatgactctctcacctttaaggaggacatccagaaagcacaagtttctggccagggggacagtcttcacgagcacatcgctaatcttgcaggtagcccagctatcaaaaagggaatactgcagaccgttaaggtcgtggatgaactcgtcaaagtaatgggaaggcataagcccgagaatatcgttatcgagatggcccgagagaaccaaactacccagaagggacagaagaacagtagggaaaggatgaagaggattgaagagggtataaaagaactggggtcccaaatccttaaggaacacccagttgaaaacacccagcttcagaatgagaagctctacctgtactacctgcagaacggcagggacatgtacgtggatcaggaactggacatcaatcggctctccgactacgacgtggctgctatcgtgccccagtcttttctcaaagatgattctattgataataaagtgttgacaagatccgataaagctagagggaagagtgataacgtcccctcagaagaagttgtcaagaaaatgaaaaattattggcggcagctgctgaacgccaaactgatcacacaacggaagttcgataatctgactaaggctgaacgaggtggcctgtctgagttggataaagccggcttcatcaaaaggcagcttgttgagacacgccagatcaccaagcacgtggcccaaattctcgattcacgcatgaacaccaagtacgatgaaaatgacaaactgattcgagaggtgaaagttattactctgaagtctaagctggtctcagatttcagaaaggactttcagttttataaggtgagagagatcaacaattaccaccatgcgcatgatgcctacctgaatgcagtggtaggcactgcacttatcaaaaaatatcccaagcttgaatctgaatttgtttacggagactataaagtgtacgatgttaggaaaatgatcgcaaagtctgagcaggaaataggcaaggccaccgctaagtacttcttttacagcaatattatgaattttttcaagaccgagattacactggccaatggagagattcggaagcgaccacttatcgaaacaaacggagaaacaggagaaatcgtgtgggacaagggtagggatttcgcgacagtccggaaggtcctgtccatgccgcaggtgaacatcgttaaaaagaccgaagtacagaccggaggcttctccaaggaaagtatcctcccgaaaaggaacagcgacaagctgatcgcacgcaaaaaagattgggaccccaagaaatacggcggattcgattctcctacagtcgcttacagtgtactggttgtggccaaagtggagaaagggaagtctaaaaaactcaaaagcgtcaaggaactgctgggcatcacaatcatggagcgatcaagcttcgaaaaaaaccccatcgactttctcgaggcgaaaggatataaagaggtcaaaaaagacctcatcattaagcttcccaagtactctctctttgagcttgaaaacggccggaaacgaatgctcgctagtgcgggcgagctgcagaaaggtaacgagctggcactgccctctaaatacgttaatttcttgtatctggccagccactatgaaaagctcaaagggtctcccgaagataatgagcagaagcagctgttcgtggaacaacacaaacactaccttgatgagatcatcgagcaaataagcgaattctccaaaagagtgatcctcgccgacgctaacctcgataaggtgctttctgcttacaataagcacagggataagcccatcagggagcaggcagaaaacattatccacttgtttactctgaccaacttgggcgcgcctgcagccttcaagtacttcgacaccaccatagacagaaagcggtacacctctacaaaggaggtcctggacgccacactgattcatcagtcaattacggggctctatgaaacaagaatcgacctctctcagctcggtggagactaa

SEQ ID NO: 4 - DNA, 4140 bp, Streptococcus pyogenes
atggacaagaagtactccattgggctcgatatcggcacaaacagcgtcggctgggccgtcattacggacgagtacaaggtgccgagcaaaaaattcaaagttctgggcaataccgatcgccacagcataaagaagaacctcattggcgccctcctgttcgactccggggagacggccgaagccacgcggctcaaaagaacagcacggcgcagatatacccgcagaaagaatcggatctgctacctgcaggagatctttagtaatgagatggctaaggtggatgactctttcttccataggctggaggagtcctttttggtggaggaggataaaaagcacgagcgccacccaatctttggcaatatcgtggacgaggtggcgtaccatgaaaagtacccaaccatatatcatctgaggaagaagcttgtagacagtactgataaggctgacttgcggttgatctatctcgcgctggcgcatatgatcaaatttcggggacacttcctcatcgagggggacctgaacccagacaacagcgatgtcgacaaactctttatccaactggttcagacttacaatcagcttttcgaagagaacccgatcaacgcatccggagttgacgccaaagcaatcctgagcgctaggctgtccaaatcccggcggctcgaaaacctcatcgcacagctccctggggagaagaagaacggcctgtttggtaatcttatcgccctgtcactcgggctgacccccaactttaaatctaacttcgacctggccgaagatgccaagcttcaactgagcaaagacacctacgatgatgatctcgacaatctgctggcccagatcggcgaccagtacgcagacctttttttggcggcaaagaacctgtcagacgccattctgctgagtgatattctgcgagtgaacacggagatcaccaaagctccgctgagcgctagtatgatcaagcgctatgatgagcaccaccaagacttgactttgctgaaggcccttgtcagacagcaactgcctgagaagtacaaggaaattttcttcgatcagtctaaaaatggctacgccggatacattgacggcggagcaagccaggaggaattttacaaatttattaagcccatcttggaaaaaatggacggcaccgaggagctgctggtaaagcttaacagagaagatctgttgcgcaaacagcgcactttcgacaatggaagcatcccccaccagattcacctgggcgaactgcacgctatcctcaggcggcaagaggatttctacccctttttgaaagataacagggaaaagattgagaaaatcctcacatttcggataccctactatgtaggccccctcgcccggggaaattccagattcgcgtggatgactcgcaaatcagaagagaccatcactccctggaacttcgaggaagtcgtggataagggggcctctgcccagtccttcatcgaaaggatgactaactttgataaaaatctgcctaacgaaaaggtgcttcctaaacactctctgctgtacgagtacttcacagtttataacgagctcaccaaggtcaaatacgtcacagaagggatgagaaagccagcattcctgtctggagagcagaagaaagctatcgtggacctcctcttcaagacgaaccggaaagttaccgtgaaacagctcaaagaagactatttcaaaaagattgaatgtttcgactctgttgaaatcagcggagtggaggatcgcttcaacgcatccctgggaacgtatcacgatctcctgaaaatcattaaagacaaggacttcctggacaatgaggagaacgaggacattcttgaggacattgtcctcacccttacgttgtttgaagatagggagatgattgaagaacgcttgaaaacttacgctcatctcttcgacgacaaagtcatgaaacagctcaagaggcgccgatatacaggatgggggcggctgtcaagaaaactgatcaatgggatccgagacaagcagagtggaaagacaatcctggattttcttaagtccgatggatttgccaaccggaacttcatgcagttgatccatgatgactctctcacctttaaggaggacatccagaaagcacaagtttctggccagggggacagtcttcacgagcacatcgctaatcttgcaggtagcccagctatcaaaaagggaatactgcagaccgttaaggtcgtggatgaactcgtcaaagtaatgggaaggcataagcccgagaatatcgttatcgagatggcccgagagaaccaaactacccagaagggacagaagaacagtagggaaaggatgaagaggattgaagagggtataaaagaactggggtcccaaatccttaaggaacacccagttgaaaacacccagcttcagaatgagaagctctacctgtactacctgcagaacggcagggacatgtacgtggatcaggaactggacatcaatcggctctccgactacgacgtggatcatatcgtgccccagtcttttctcaaagatgattctattgataataaagtgttgacaagatccgataaaaatagagggaagagtgataacgtcccctcagaagaagttgtcaagaaaatgaaaaattattggcggcagctgctgaacgccaaactgatcacacaacggaagttcgataatctgactaaggctgaacgaggtggcctgtctgagttggataaagccggcttcatcaaaaggcagcttgttgagacacgccagatcaccaagcacgtggcccaaattctcgattcacgcatgaacaccaagtacgatgaaaatgacaaactgattcgagaggtgaaagttattactctgaagtctaagctggtctcagatttcagaaaggactttcagttttataaggtgagagagatcaacaattaccaccatgcgcatgatgcctacctgaatgcagtggtaggcactgcacttatcaaaaaatatcccaagcttgaatctgaatttgtttacggagactataaagtgtacgatgttaggaaaatgatcgcaaagtctgagcaggaaataggcaaggccaccgctaagtacttcttttacagcaatattatgaattttttcaagaccgagattacactggccaatggagagattcggaagcgaccacttatcgaaacaaacggagaaacaggagaaatcgtgtgggacaagggtagggatttcgcgacagtccggaaggtcctgtccatgccgcaggtgaacatcgttaaaaagaccgaagtacagaccggaggcttctccaaggaaagtatcctcccgaaaaggaacagcgacaagctgatcgcacgcaaaaaagattgggaccccaagaaatacggcggattcgattctcctacagtcgcttacagtgtactggttgtggccaaagtggagaaagggaagtctaaaaaactcaaaagcgtcaaggaactgctgggcatcacaatcatggagcgatcaagcttcgaaaaaaaccccatcgactttctcgaggcgaaaggatataaagaggtcaaaaaagacctcatcattaagcttcccaagtactctctctttgagcttgaaaacggccggaaacgaatgctcgctagtgcgggcgagctgcagaaaggtaacgagctggcactgccctctaaatacgttaatttcttgtatctggccagccactatgaaaagctcaaagggtctcccgaagataatgagcagaagcagctgttcgtggaacaacacaaacactaccttgatgagatcatcgagcaaataagcgaattctccaaaagagtgatcctcgccgacgctaacctcgataaggtgctttctgcttacaataagcacagggataagcccatcagggagcaggcagaaaacattatccacttgtttactctgaccaacttgggcgcgcctgcagccttcaagtacttcgacaccaccatagacagaaagcggtacacctctacaaaggaggtcctggacgccacactgattcatcagtcaattacggggctctatgaaacaagaatcgacctctctcagctcggtggagacagcagggctgaccccaagaagaagaggaaggtgtga

SEQ ID NO: 5 - DNA, 4200 bp, Streptococcus pyogenes
atggacaagaagtactccattgggctcgatatcggcacaaacagcgtcggctgggccgtcattacggacgagtacaaggtgccgagcaaaaaattcaaagttctgggcaataccgatcgccacagcataaagaagaacctcattggcgccctcctgttcgactccggggagacggccgaagccacgcggctcaaaagaacagcacggcgcagatatacccgcagaaagaatcggatctgctacctgcaggagatctttagtaatgagatggctaaggtggatgactctttcttccataggctggaggagtcctttttggtggaggaggataaaaagcacgagcgccacccaatctttggcaatatcgtggacgaggtggcgtaccatgaaaagtacccaaccatatatcatctgaggaagaagcttgtagacagtactgataaggctgacttgcggttgatctatctcgcgctggcgcatatgatcaaatttcggggacacttcctcatcgagggggacctgaacccagacaacagcgatgtcgacaaactctttatccaactggttcagacttacaatcagcttttcgaagagaacccgatcaacgcatccggagttgacgccaaagcaatcctgagcgctaggctgtccaaatcccggcggctcgaaaacctcatcgcacagctccctggggagaagaagaacggcctgtttggtaatcttatcgccctgtcactcgggctgacccccaactttaaatctaacttcgacctggccgaagatgccaagcttcaactgagcaaagacacctacgatgatgatctcgacaatctgctggcccagatcggcgaccagtacgcagacctttttttggcggcaaagaacctgtcagacgccattctgctgagtgatattctgcgagtgaacacggagatcaccaaagctccgctgagcgctagtatgatcaagcgctatgatgagcaccaccaagacttgactttgctgaaggcccttgtcagacagcaactgcctgagaagtacaaggaaattttcttcgatcagtctaaaaatggctacgccggatacattgacggcggagcaagccaggaggaattttacaaatttattaagcccatcttggaaaaaatggacggcaccgaggagctgctggtaaagcttaacagagaagatctgttgcgcaaacagcgcactttcgacaatggaagcatcccccaccagattcacctgggcgaactgcacgctatcctcaggcggcaagaggatttctacccctttttgaaagataacagggaaaagattgagaaaatcctcacatttcggataccctactatgtaggccccctcgcccggggaaattccagattcgcgtggatgactcgcaaatcagaagagaccatcactccctggaacttcgaggaagtcgtggataagggggcctctgcccagtccttcatcgaaaggatgactaactttgataaaaatctgcctaacgaaaaggtgcttcctaaacactctctgctgtacgagtacttcacagtttataacgagctcaccaaggtcaaatacgtcacagaagggatgagaaagccagcattcctgtctggagagcagaagaaagctatcgtggacctcctcttcaagacgaaccggaaagttaccgtgaaacagctcaaagaagactatttcaaaaagattgaatgtttcgactctgttgaaatcagcggagtggaggatcgcttcaacgcatccctgggaacgtatcacgatctcctgaaaatcattaaagacaaggacttcctggacaatgaggagaacgaggacattcttgaggacattgtcctcacccttacgttgtttgaagatagggagatgattgaagaacgcttgaaaacttacgctcatctcttcgacgacaaagtcatgaaacagctcaagaggcgccgatatacaggatgggggcggctgtcaagaaaactgatcaatgggatccgagacaagcagagtggaaagacaatcctggattttcttaagtccgatggatttgccaaccggaacttcatgcagttgatccatgatgactctctcacctttaaggaggacatccagaaagcacaagtttctggccagggggacagtcttcacgagcacatcgctaatcttgcaggtagcccagctatcaaaaagggaatactgcagaccgttaaggtcgtggatgaactcgtcaaagtaatgggaaggcataagcccgagaatatcgttatcgagatggcccgagagaaccaaactacccagaagggacagaagaacagtagggaaaggatgaagaggattgaagagggtataaaagaactggggtcccaaatccttaaggaacacccagttgaaaacacccagcttcagaatgagaagctctacctgtactacctgcagaacggcagggacatgtacgtggatcaggaactggacatcaatcggctctccgactacgacgtggatcatatcgtgccccagtcttttctcaaagatgattctattgataataaagtgttgacaagatccgataaaaatagagggaagagtgataacgtcccctcagaagaagttgtcaagaaaatgaaaaattattggcggcagctgctgaacgccaaactgatcacacaacggaagttcgataatctgactaaggctgaacgaggtggcctgtctgagttggataaagccggcttcatcaaaaggcagcttgttgagacacgccagatcaccaagcacgtggcccaaattctcgattcacgcatgaacaccaagtacgatgaaaatgacaaactgattcgagaggtgaaagttattactctgaagtctaagctggtctcagatttcagaaaggactttcagttttataaggtgagagagatcaacaattaccaccatgcgcatgatgcctacctgaatgcagtggtaggcactgcacttatcaaaaaatatcccaagcttgaatctgaatttgtttacggagactataaagtgtacgatgttaggaaaatgatcgcaaagtctgagcaggaaataggcaaggccaccgctaagtacttcttttacagcaatattatgaattttttcaagaccgagattacactggccaatggagagattcggaagcgaccacttatcgaaacaaacggagaaacaggagaaatcgtgtgggacaagggtagggatttcgcgacagtccggaaggtcctgtccatgccgcaggtgaacatcgttaaaaagaccgaagtacagaccggaggcttctccaaggaaagtatcctcccgaaaaggaacagcgacaagctgatcgcacgcaaaaaagattgggaccccaagaaatacggcggattcgattctcctacagtcgcttacagtgtactggttgtggccaaagtggagaaagggaagtctaaaaaactcaaaagcgtcaaggaactgctgggcatcacaatcatggagcgatcaagcttcgaaaaaaaccccatcgactttctcgaggcgaaaggatataaagaggtcaaaaaagacctcatcattaagcttcccaagtactctctctttgagcttgaaaacggccggaaacgaatgctcgctagtgcgggcgagctgcagaaaggtaacgagctggcactgccctctaaatacgttaatttcttgtatctggccagccactatgaaaagctcaaagggtctcccgaagataatgagcagaagcagctgttcgtggaacaacacaaacactaccttgatgagatcatcgagcaaataagcgaattctccaaaagagtgatcctcgccgacgctaacctcgataaggtgctttctgcttacaataagcacagggataagcccatcagggagcaggcagaaaacattatccacttgtttactctgaccaacttgggcgcgcctgcagccttcaagtacttcgacaccaccatagacagaaagcggtacacctctacaaaggaggtcctggacgccacactgattcatcagtcaattacggggctctatgaaacaagaatcgacctctctcagctcggtggagacgcggccgcagatccaaaaaagaagagaaaggtagatccaaaaaagaagagaaaggtagatccaaaaaagaagagaaaggtagatacggccgcatag

SEQ ID NO: 6 - DNA, 4326 bp, Streptococcus pyogenes
atggacaagaagtactccattgggctcgctatcggcacaaacagcgtcggctgggccgtcattacggacgagtacaaggtgccgagcaaaaaattcaaagttctgggcaataccgatcgccacagcataaagaagaacctcattggcgccctcctgttcgactccggggagacggccgaagccacgcggctcaaaagaacagcacggcgcagatatacccgcagaaagaatcggatctgctacctgcaggagatctttagtaatgagatggctaaggtggatgactctttcttccataggctggaggagtcctttttggtggaggaggataaaaagcacgagcgccacccaatctttggcaatatcgtggacgaggtggcgtaccatgaaaagtacccaaccatatatcatctgaggaagaagcttgtagacagtactgataaggctgacttgcggttgatctatctcgcgctggcgcatatgatcaaatttcggggacacttcctcatcgagggggacctgaacccagacaacagcgatgtcgacaaactctttatccaactggttcagacttacaatcagcttttcgaagagaacccgatcaacgcatccggagttgacgccaaagcaatcctgagcgctaggctgtccaaatcccggcggctcgaaaacctcatcgcacagctccctggggagaagaagaacggcctgtttggtaatcttatcgccctgtcactcgggctgacccccaactttaaatctaacttcgacctggccgaagatgccaagcttcaactgagcaaagacacctacgatgatgatctcgacaatctgctggcccagatcggcgaccagtacgcagacctttttttggcggcaaagaacctgtcagacgccattctgctgagtgatattctgcgagtgaacacggagatcaccaaagctccgctgagcgctagtatgatcaagcgctatgatgagcaccaccaagacttgactttgctgaaggcccttgtcagacagcaactgcctgagaagtacaaggaaattttcttcgatcagtctaaaaatggctacgccggatacattgacggcggagcaagccaggaggaattttacaaatttattaagcccatcttggaaaaaatggacggcaccgaggagctgctggtaaagcttaacagagaagatctgttgcgcaaacagcgcactttcgacaatggaagcatcccccaccagattcacctgggcgaactgcacgctatcctcaggcggcaagaggatttctacccctttttgaaagataacagggaaaagattgagaaaatcctcacatttcggataccctactatgtaggccccctcgcccggggaaattccagattcgcgtggatgactcgcaaatcagaagagaccatcactccctggaacttcgaggaagtcgtggataagggggcctctgcccagtccttcatcgaaaggatgactaactttgataaaaatctgcctaacgaaaaggtgcttcctaaacactctctgctgtacgagtacttcacagtttataacgagctcaccaaggtcaaatacgtcacagaagggatgagaaagccagcattcctgtctggagagcagaagaaagctatcgtggacctcctcttcaagacgaaccggaaagttaccgtgaaacagctcaaagaagactatttcaaaaagattgaatgtttcgactctgttgaaatcagcggagtggaggatcgcttcaacgcatccctgggaacgtatcacgatctcctgaaaatcattaaagacaaggacttcctggacaatgaggagaacgaggacattcttgaggacattgtcctcacccttacgttgtttgaagatagggagatgattgaagaacgcttgaaaacttacgctcatctcttcgacgacaaagtcatgaaacagctcaagaggcgccgatatacaggatgggggcggctgtcaagaaaactgatcaatgggatccgagacaagcagagtggaaagacaatcctggattttcttaagtccgatggatttgccaaccggaacttcatgcagttgatccatgatgactctctcacctttaaggaggacatccagaaagcacaagtttctggccagggggacagtcttcacgagcacatcgctaatcttgcaggtagcccagctatcaaaaagggaatactgcagaccgttaaggtcgtggatgaactcgtcaaagtaatgggaaggcataagcccgagaatatcgttatcgagatggcccgagagaaccaaactacccagaagggacagaagaacagtagggaaaggatgaagaggattgaagagggtataaaagaactggggtcccaaatccttaaggaacacccagttgaaaacacccagcttcagaatgagaagctctacctgtactacctgcagaacggcagggacatgtacgtggatcaggaactggacatcaatcggctctccgactacgacgtggctgctatcgtgccccagtcttttctcaaagatgattctattgataataaagtgttgacaagatccgataaagctagagggaagagtgataacgtcccctcagaagaagttgtcaagaaaatgaaaaattattggcggcagctgctgaacgccaaactgatcacacaacggaagttcgataatctgactaaggctgaacgaggtggcctgtctgagttggataaagccggcttcatcaaaaggcagcttgttgagacacgccagatcaccaagcacgtggcccaaattctcgattcacgcatgaacaccaagtacgatgaaaatgacaaactgattcgagaggtgaaagttattactctgaagtctaagctggtctcagatttcagaaaggactttcagttttataaggtgagagagatcaacaattaccaccatgcgcatgatgcctacctgaatgcagtggtaggcactgcacttatcaaaaaatatcccaagcttgaatctgaatttgtttacggagactataaagtgtacgatgttaggaaaatgatcgcaaagtctgagcaggaaataggcaaggccaccgctaagtacttcttttacagcaatattatgaattttttcaagaccgagattacactggccaatggagagattcggaagcgaccacttatcgaaacaaacggagaaacaggagaaatcgtgtgggacaagggtagggatttcgcgacagtccggaaggtcctgtccatgccgcaggtgaacatcgttaaaaagaccgaagtacagaccggaggcttctccaaggaaagtatcctcccgaaaaggaacagcgacaagctgatcgcacgcaaaaaagattgggaccccaagaaatacggcggattcgattctcctacagtcgcttacagtgtactggttgtggccaaagtggagaaagggaagtctaaaaaactcaaaagcgtcaaggaactgctgggcatcacaatcatggagcgatcaagcttcgaaaaaaaccccatcgactttctcgaggcgaaaggatataaagaggtcaaaaaagacctcatcattaagcttcccaagtactctctctttgagcttgaaaacggccggaaacgaatgctcgctagtgcgggcgagctgcagaaaggtaacgagctggcactgccctctaaatacgttaatttcttgtatctggccagccactatgaaaagctcaaagggtctcccgaagataatgagcagaagcagctgttcgtggaacaacacaaacactaccttgatgagatcatcgagcaaataagcgaattctccaaaagagtgatcctcgccgacgctaacctcgataaggtgctttctgcttacaataagcacagggataagcccatcagggagcaggcagaaaacattatccacttgtttactctgaccaacttgggcgcgcctgcagccttcaagtacttcgacaccaccatagacagaaagcggtacacctctacaaaggaggtcctggacgccacactgattcatcagtcaattacggggctctatgaaacaagaatcgacctctctcagctcggtggagacagcagggctgaccccaagaagaagaggaaggtggaggccagcggttccggacgggctgacgcattggacgattttgatctggatatgctgggaagtgacgccctcgatgattttgaccttgacatgcttggttcggatgcccttgatgactttgacctcgacatgctcggcagtgacgcccttgatgatttcgacctggacatgctgattaactctagatga

SEQ ID NO: 7 - DNA, 4359 bp, Streptococcus pyogenes
atgcccaagaagaagaggaaggtgggaagggggatggacaagaagtactccattgggctcgctatcggcacaaacagcgtcggctgggccgtcattacggacgagtacaaggtgccgagcaaaaaattcaaagttctgggcaataccgatcgccacagcataaagaagaacctcattggcgccctcctgttcgactccggggagacggccgaagccacgcggctcaaaagaacagcacggcgcagatatacccgcagaaagaatcggatctgctacctgcaggagatctttagtaatgagatggctaaggtggatgactctttcttccataggctggaggagtcctttttggtggaggaggataaaaagcacgagcgccacccaatctttggcaatatcgtggacgaggtggcgtaccatgaaaagtacccaaccatatatcatctgaggaagaagcttgtagacagtactgataaggctgacttgcggttgatctatctcgcgctggcgcatatgatcaaatttcggggacacttcctcatcgagggggacctgaacccagacaacagcgatgtcgacaaactctttatccaactggttcagacttacaatcagcttttcgaagagaacccgatcaacgcatccggagttgacgccaaagcaatcctgagcgctaggctgtccaaatcccggcggctcgaaaacctcatcgcacagctccctggggagaagaagaacggcctgtttggtaatcttatcgccctgtcactcgggctgacccccaactttaaatctaacttcgacctggccgaagatgccaagcttcaactgagcaaagacacctacgatgatgatctcgacaatctgctggcccagatcggcgaccagtacgcagacctttttttggcggcaaagaacctgtcagacgccattctgctgagtgatattctgcgagtgaacacggagatcaccaaagctccgctgagcgctagtatgatcaagcgctatgatgagcaccaccaagacttgactttgctgaaggcccttgtcagacagcaactgcctgagaagtacaaggaaattttcttcgatcagtctaaaaatggctacgccggatacattgacggcggagcaagccaggaggaattttacaaatttattaagcccatcttggaaaaaatggacggcaccgaggagctgctggtaaagcttaacagagaagatctgttgcgcaaacagcgcactttcgacaatggaagcatcccccaccagattcacctgggcgaactgcacgctatcctcaggcggcaagaggatttctacccctttttgaaagataacagggaaaagattgagaaaatcctcacatttcggataccctactatgtaggccccctcgcccggggaaattccagattcgcgtggatgactcgcaaatcagaagagaccatcactccctggaacttcgaggaagtcgtggataagggggcctctgcccagtccttcatcgaaaggatgactaactttgataaaaatctgcctaacgaaaaggtgcttcctaaacactctctgctgtacgagtacttcacagtttataacgagctcaccaaggtcaaatacgtcacagaagggatgagaaagccagcattcctgtctggagagcagaagaaagctatcgtggacctcctcttcaagacgaaccggaaagttaccgtgaaacagctcaaagaagactatttcaaaaagattgaatgtttcgactctgttgaaatcagcggagtggaggatcgcttcaacgcatccctgggaacgtatcacgatctcctgaaaatcattaaagacaaggacttcctggacaatgaggagaacgaggacattcttgaggacattgtcctcacccttacgttgtttgaagatagggagatgattgaagaacgcttgaaaacttacgctcatctcttcgacgacaaagtcatgaaacagctcaagaggcgccgatatacaggatgggggcggctgtcaagaaaactgatcaatgggatccgagacaagcagagtggaaagacaatcctggattttcttaagtccgatggatttgccaaccggaacttcatgcagttgatccatgatgactctctcacctttaaggaggacatccagaaagcacaagtttctggccagggggacagtcttcacgagcacatcgctaatcttgcaggtagcccagctatcaaaaagggaatactgcagaccgttaaggtcgtggatgaactcgtcaaagtaatgggaaggcataagcccgagaatatcgttatcgagatggcccgagagaaccaaactacccagaagggacagaagaacagtagggaaaggatgaagaggattgaagagggtataaaagaactggggtcccaaatccttaaggaacacccagttgaaaacacccagcttcagaatgagaagctctacctgtactacctgcagaacggcagggacatgtacgtggatcaggaactggacatcaatcggctctccgactacgacgtggctgctatcgtgccccagtcttttctcaaagatgattctattgataataaagtgttgacaagatccgataaagctagagggaagagtgataacgtcccctcagaagaagttgtcaagaaaatgaaaaattattggcggcagctgctgaacgccaaactgatcacacaacggaagttcgataatctgactaaggctgaacgaggtggcctgtctgagttggataaagccggcttcatcaaaaggcagcttgttgagacacgccagatcaccaagcacgtggcccaaattctcgattcacgcatgaacaccaagtacgatgaaaatgacaaactgattcgagaggtgaaagttattactctgaagtctaagctggtctcagatttcagaaaggactttcagttttataaggtgagagagatcaacaattaccaccatgcgcatgatgcctacctgaatgcagtggtaggcactgcacttatcaaaaaatatcccaagcttgaatctgaatttgtttacggagactataaagtgtacgatgttaggaaaatgatcgcaaagtctgagcaggaaataggcaaggccaccgctaagtacttcttttacagcaatattatgaattttttcaagaccgagattacactggccaatggagagattcggaagcgaccacttatcgaaacaaacggagaaacaggagaaatcgtgtgggacaagggtagggatttcgcgacagtccggaaggtcctgtccatgccgcaggtgaacatcgttaaaaagaccgaagtacagaccggaggcttctccaaggaaagtatcctcccgaaaaggaacagcgacaagctgatcgcacgcaaaaaagattgggaccccaagaaatacggcggattcgattctcctacagtcgcttacagtgtactggttgtggccaaagtggagaaagggaagtctaaaaaactcaaaagcgtcaaggaactgctgggcatcacaatcatggagcgatcaagcttcgaaaaaaaccccatcgactttctcgaggcgaaaggatataaagaggtcaaaaaagacctcatcattaagcttcccaagtactctctctttgagcttgaaaacggccggaaacgaatgctcgctagtgcgggcgagctgcagaaaggtaacgagctggcactgccctctaaatacgttaatttcttgtatctggccagccactatgaaaagctcaaagggtctcccgaagataatgagcagaagcagctgttcgtggaacaacacaaacactaccttgatgagatcatcgagcaaataagcgaattctccaaaagagtgatcctcgccgacgctaacctcgataaggtgctttctgcttacaataagcacagggataagcccatcagggagcaggcagaaaacattatccacttgtttactctgaccaacttgggcgcgcctgcagccttcaagtacttcgacaccaccatagacagaaagcggtacacctctacaaaggaggtcctggacgccacactgattcatcagtcaattacggggctctatgaaacaagaatcgacctctctcagctcggtggagacagcagggctgaccccaagaagaagaggaaggtggaggccagcggttccggacgggctgacgcattggacgattttgatctggatatgctgggaagtgacgccctcgatgattttgaccttgacatgcttggttcggatgcccttgatgactttgacctcgacatgctcggcagtgacgcccttgatgatttcgacctggacatgctgattaactctagatga

SEQ ID NO: 8 - protein, 1409 aa, Streptococcus thermophiles
MLFNKCIIISINLDFSNKEKCMTKPYSIGLDIGTNSVGWAVITDNYKVPSKKMKVLGNTSKKYIKKNLLGVLLFDSGITAEGRRLKRTARRRYTRRRNRILYLQEIFSTEMATLDDAFFQRLDDSFLVPDDKRDSKYPIFGNLVEEKVYHDEFPTIYHLRKYLADSTKKADLRLVYLALAHMIKYRGHFLIEGEFNSKNNDIQKNFQDFLDTYNAIFESDLSLENSKQLEEIVKDKISKLEKKDRILKLFPGEKNSGIFSEFLKLIVGNQADFRKCFNLDEKASLHFSKESYDEDLETLLGYIGDDYSDVFLKAKKLYDAILLSGFLTVTDNETEAPLSSAMIKRYNEHKEDLALLKEYIRNISLKTYNEVFKDDTKNGYAGYIDGKTNQEDFYVYLKNLLAEFEGADYFLEKIDREDFLRKQRTFDNGSIPYQIHLQEMRAILDKQAKFYPFLAKNKERIEKILTFRIPYYVGPLARGNSDFAWSIRKRNEKITPWNFEDVIDKESSAEAFINRMTSFDLYLPEEKVLPKHSLLYETFNVYNELTKVRFIAESMRDYQFLDSKQKKDIVRLYFKDKRKVTDKDIIEYLHAIYGYDGIELKGIEKQFNSSLSTYHDLLNIINDKEFLDDSSNEAIIEEIIHTLTIFEDREMIKQRLSKFENIFDKSVLKKLSRRHYTGWGKLSAKLINGIRDEKSGNTILDYLIDDGISNRNFMQLIHDDALSFKKKIQKAQIIGDEDKGNIKEVVKSLPGSPAIKKGILQSIKIVDELVKVMGGRKPESIVVEMARENQYTNQGKSNSQQRLKRLEKSLKELGSKILKENIPAKLSKIDNNALQNDRLYLYYLQNGKDMYTGDDLDIDRLSNYDIDHIIPQAFLKDNSIDNKVLVSSASNRGKSDDFPSLEVVKKRKTFWYQLLKSKLISQRKFDNLTKAERGGLLPEDKAGFIQRQLVETRQITKHVARLLDEKFNNKKDENNRAVRTVKIITLKSTLVSQFRKDFELYKVREINDFHHAHDAYLNAVIASALLKKYPKLEPEFVYGDYPKYNSFRERKSATEKVYFYSNIMNIFKKSISLADGRVIERPLIEVNEETGESVWNKESDLATVRRVLSYPQVNVVKKVEEQNHGLDRGKPKGLFNANLSSKPKPNSNENLVGAKEYLDPKKYGGYAGISNSFAVLVKGTIEKGAKKKITNVLEFQGISILDRINYRKDKLNFLLEKGYKDIELIIELPKYSLFELSDGSRRMLASILSTNNKRGEIHKGNQIFLSQKFVKLLYHAKRISNTINENHRKYVENHKKEFEELFYYILEFNENYVGAKKNGKLLNSAFQSWQNHSIDELCSSFIGPTGSERKGLFELTSRGSAADFEFLGVKIPRYRDYTPSSLLKDATLIHQSVTGLYETRIDLAKLGEG

SEQ ID NO: 9 - DNA, 4167 bp, Streptococcus thermophiles
atgactaagccatactcaattggacttgatattggaacgaatagtgttggatgggctgtaataactgataattacaaggttccgtctaaaaaaatgaaagtcttaggaaatacgagtaaaaagtatatcaaaaagaacctgttaggtgtattactctttgactctggaatcacagcagaaggaagaagattgaagcgtactgcaagaagacgttatactagacgccgtaatcgtatcctttatttgcaggaaatttttagcacggagatggctacattagatgatgctttctttcaaagacttgacgattcgtttttagttcctgatgataaacgtgatagtaagtatccgatatttggaaacttagtagaagaaaaagtctatcatgatgaatttccaactatctatcatttaaggaaatatttagcagatagtactaaaaaagcagatttgcgtctagtttatcttgcattggctcatatgattaaatatagaggtcacttcttaattgaaggagagtttaattcaaaaaataatgatattcagaagaattttcaagactttttggacacttataatgctatttttgaatcggatttatcacttgagaatagtaaacaacttgaggaaattgttaaagataagattagtaaattagaaaagaaagatcgtattttaaaactcttccctggggagaagaattcggggattttttcagagtttctaaagttgattgtaggaaatcaagctgattttaggaaatgttttaatttagacgaaaaagcctccttacatttttccaaagaaagctatgatgaagatttagagactttgttaggttatattggagatgattacagtgatgtctttctcaaagcaaagaaactttatgatgctattcttttatcgggttttctgactgtaactgataatgagacagaagcacctctctcttctgctatgataaagcgatataatgaacacaaagaagatttagcgttactaaaggaatatataagaaatatttcactaaaaacgtataatgaagtatttaaagatgacaccaaaaatggttatgctggttatattgatggaaaaacaaatcaggaagatttctacgtatatctaaaaaacctattggctgaatttgaaggtgcggattattttcttgaaaaaattgatcgagaagattttttgagaaagcaacgtacatttgacaatggttcgataccatatcagattcatcttcaagaaatgagagcaattcttgataagcaagctaaattttatcctttcttggctaaaaataaagaaagaatcgagaagattttaaccttccgaattccttattatgtaggtccacttgcgagagggaatagtgattttgcctggtcaataagaaaacgaaatgaaaaaattacaccttggaattttgaggacgttattgacaaagaatcttcggcagaggctttcattaatcgaatgactagttttgatttgtatttgccagaagagaaggtacttccaaagcatagtctcttatacgaaacttttaatgtatataatgaattaacaaaagttagatttattgccgaaagtatgagagattatcaatttttagatagtaagcagaagaaagatattgttagactttattttaaagataaaaggaaagttactgataaggatattattgaatatttacatgcaatttatgggtatgatggaattgaattaaaaggcatagagaaacagtttaattctagtttatctacttatcacgatcttttaaatattattaatgataaagagtttttggatgatagttcaaatgaagcgattatcgaagaaattatccatactttgacaatttttgaagatagagagatgataaaacaacgtctttcaaaatttgagaatatattcgataaatccgttttgaaaaagttatctcgtagacattacactggctggggtaagttatctgctaagcttattaatggtattcgagatgaaaaatctggtaatactattcttgattacttaattgatgatggtatttctaaccgtaatttcatgcaacttattcacgatgatgctctttcttttaaaaagaagatacagaaagcacaaattattggtgacgaagataaaggtaatattaaagaggtcgttaagtctttgccaggtagtcctgcgattaaaaaaggtattttacaaagcataaaaattgtagatgaattggtcaaagtaatgggaggaagaaaacccgagtcaattgttgttgagatggctcgtgaaaatcaatataccaatcaaggtaagtctaattcccaacaacgcttgaaacgtttagaaaaatctctcaaagagttaggtagtaagatacttaaggaaaatattcctgcaaaactttctaaaatagacaataacgcacttcaaaatgatcgactttacttatactatcttcaaaatggaaaagatatgtataccggagatgatttagatattgatagattaagtaattatgatattgatcatattattcctcaagcttttttgaaagataattctattgacaataaagtacttgtttcatctgctagtaaccgtggtaaatcagatgattttccaagtttagaggttgtcaaaaaaagaaagacattttggtatcaattattgaaatcaaaattaatttctcaacgaaaatttgataatctgacaaaagctgaacggggaggattgttacctgaggacaaagctggttttattcaacgccagttggttgaaacacgtcaaataacaaaacatgtagctcgtttacttgatgagaaatttaataataaaaaagatgaaaataatagagcggtacgaacagtaaaaattattaccttgaaatctaccttagtttctcaatttcgtaaggattttgaactttataaagttcgtgaaatcaatgattttcatcatgctcatgatgcttacttgaatgccgttatagcaagtgctttacttaagaaataccctaaactagagccagaatttgtgtacggtgattatccaaaatacaatagttttagagaaagaaagtccgctacagaaaaggtatatttctattcaaatatcatgaatatctttaaaaaatctatttctttagctgatggtagagttattgaaagaccacttattgaggtaaatgaggagaccggcgaatccgtttggaataaagaatctgatttagcaactgtaaggagagtactctcttatccgcaagtaaatgttgtgaaaaaagttgaggaacagaatcacggattggatagaggaaaaccaaagggattgtttaatgcaaatctttcctcaaagccaaaaccaaatagtaatgaaaatttagtaggtgctaaagagtatcttgaccccaaaaagtatggggggtatgctggaatttctaattcttttgctgttcttgttaaagggacaattgaaaaaggtgctaagaaaaaaataacaaatgtactagaatttcaaggtatttctattttagataggattaattatagaaaagataaacttaattttttacttgaaaaaggttataaagatattgagttaattattgaactacctaaatatagtttatttgaactttcagatggttcacgtcgtatgttggctagtattttgtcaacgaataataagaggggagagattcacaaaggaaatcagatttttctttcacagaagtttgtgaaattactttatcatgctaagagaataagtaacacaattaatgagaatcatagaaaatatgttgagaaccataaaaaagagtttgaagaattattttactacattcttgagtttaatgagaattatgttggagctaaaaagaatggtaaacttttaaactctgcctttcaatcttggcaaaatcatagtatagatgaactctgtagtagttttataggacctaccggaagtgaaagaaaggggctatttgaattaacctctcgtggaagtgctgctgattttgaatttttaggtgttaaaattccaaggtatagagactataccccatcatccctattaaaagatgccacacttattcatcaatctgttacaggcctctatgaaacacgaatagaccttgccaaactaggagagggttaa

SEQ ID NO: 10 - DNA, 3366 bp, Streptococcus thermophilus
atgagcgacctggtgctgggcctggacatcggcatcggcagcgtgggcgtgggcatcctgaacaaggtgaccggcgagatcatccacaagaacagtcgcatcttccctgctgctcaggctgagaacaacctggtgcgccgcaccaaccgccagggtcgccggcttgctcgccgcaagaagcaccggcgcgtgcgcctgaaccgcctgttcgaggagagcggcctgatcaccgacttcaccaagatcagcatcaacctgaacccctaccagctgcgcgtgaagggcctgaccgacgagctgagcaacgaggagctgttcatcgccctgaagaacatggtgaagcaccgcggcatcagctacctggacgacgccagcgacgacggcaacagcagcgtgggcgactacgcccagatcgtgaaggagaacagcaagcagctggagaccaagacccccggccagatccagctggagcgctaccagacctacggccagctgcgcggcgacttcaccgtggagaaggacggcaagaagcaccgcctgatcaacgtgttccccaccagcgcctaccgcagcgaggccctgcgcatcctgcagacccagcaggagttcaacccccagatcaccgacgagttcatcaaccgctacctggagatcctgaccggcaagcgcaagtactaccacggccccggcaacgagaagagccgcaccgactacggccgctaccgcaccagcggcgagaccctggacaacatcttcggcatcctgatcggcaagtgcaccttctaccccgacgagttccgcgccgccaaggccagctacaccgcccaggagttcaacctgctgaacgacctgaacaacctgaccgtgcccaccgagaccaagaagctgagcaaggagcagaagaaccagatcatcaactacgtgaagaacgagaaggccatgggccccgccaagctgttcaagtacatcgccaagctgctgagctgcgacgtggccgacatcaagggctaccgcatcgacaagagcggcaaggccgagatccacaccttcgaggcctaccgcaagatgaagaccctggagaccctggacatcgagcagatggaccgcgagaccctggacaagctggcctacgtgctgaccctgaacaccgagcgcgagggcatccaggaggccctggagcacgagttcgccgacggcagcttcagccagaagcaggtggacgagctggtgcagttccgcaaggccaacagcagcatcttcggcaagggctggcacaacttcagcgtgaagctgatgatggagctgatccccgagctgtacgagaccagcgaggagcagatgaccatcctgacccgcctgggcaagcagaagaccaccagcagcagcaacaagaccaagtacatcgacgagaagctgctgaccgaggagatctacaaccccgtggtggccaagagcgtgcgccaggccatcaagatcgtgaacgccgccatcaaggagtacggcgacttcgacaacatcgtgatcgagatggcccgcgagaccaacgaggacgacgagaagaaggccatccagaagatccagaaggccaacaaggacgagaaggacgccgccatgctgaaggccgccaaccagtacaacggcaaggccgagctgccccacagcgtgttccacggccacaagcagctggccaccaagatccgcctgtggcaccagcagggcgagcgctgcctgtacaccggcaagaccatcagcatccacgacctgatcaacaacagcaaccagttcgaggtggaccacatcctgcccctgagcatcaccttcgacgacagcctggccaacaaggtgctggtgtacgccaccgccaaccaggagaagggccagcgcaccccctaccaggccctggacagcatggacgacgcctggagcttccgcgagctgaaggccttcgtgcgcgagagcaagaccctgagcaacaagaagaaggagtacctgctgaccgaggaggacatcagcaagttcgacgtgcgcaagaagttcatcgagcgcaacctggtggacacccgctacgccagccgcgtggtgctgaacgccctgcaggagcacttccgcgcccacaagatcgacaccaaggtgagcgtggtgcgcggccagttcaccagccagctgcgccgccactggggcatcgagaagacccgcgacacctaccaccaccacgccgtggacgccctgatcattgcggcttctagccagctgaacctgtggaagaagcagaagaacaccctggtgagctacagcgaggaccagctgctggacatcgagaccggcgagctgatcagcgacgacgagtacaaggagagcgtgttcaaggccccctaccagcacttcgtggacaccctgaagagcaaggagttcgaggacagcatcctgttcagctaccaggtggacagcaagttcaaccgcaagatcagcgacgccaccatctacgccacccgccaggccaaggtgggcaaggacaaggccgacgagacctacgtgctgggcaagatcaaggacatctacacccaggacggctacgacgccttcatgaagatctacaagaaggacaagagcaagttcctgatgtaccgccacgacccccagaccttcgagaaggtgatcgagcccatcctggagaactaccccaacaagcagatcaacgataaaggcaaggaggtgccctgcaaccccttcctgaagtacaaggaggagcacggctacatccgcaagtacagcaagaagggcaacggccccgagatcaagagcctgaagtactacgacagcaagctgggcaaccacatcgacatcacccccaaggacagcaacaacaaggtggtgctgcagagcgtgagcccctggcgcgccgacgtgtacttcaacaagaccaccggcaagtacgagatcctgggcctgaagtacgccgacctgcagtttgataagggcaccggcacctacaagatcagccaggagaagtacaacgacatcaagaagaaggagggcgtggacagcgacagcgagttcaagttcaccctgtacaagaacgaccttctgctggtgaaggacaccgagaccaaggagcaacagctgttccgcttcctgagccgcaccatgcccaagcagaagcactacgtggagctgaagccctacgacaagcagaagttcgagggcggcgaggccctgatcaaggtgctgggcaacgtggccaacagcggccagtgcaagaagggcctgggcaagagcaacatcagcatctacaaggtgcgcaccgacgtgctgggcaaccagcacatcatcaagaacgagggcgacaagcccaagctggacttctaa

SEQ ID NO: 11 - DNA, 3366 bp, Streptococcus thermophilus
atgagcgacctggtgctgggcctggccatcggcatcggcagcgtgggcgtgggcatcctgaacaaggtgaccggcgagatcatccacaagaacagtcgcatcttccctgctgctcaggctgagaacaacctggtgcgccgcaccaaccgccagggtcgccggcttgctcgccgcaagaagcaccggcgcgtgcgcctgaaccgcctgttcgaggagagcggcctgatcaccgacttcaccaagatcagcatcaacctgaacccctaccagctgcgcgtgaagggcctgaccgacgagctgagcaacgaggagctgttcatcgccctgaagaacatggtgaagcaccgcggcatcagctacctggacgacgccagcgacgacggcaacagcagcgtgggcgactacgcccagatcgtgaaggagaacagcaagcagctggagaccaagacccccggccagatccagctggagcgctaccagacctacggccagctgcgcggcgacttcaccgtggagaaggacggcaagaagcaccgcctgatcaacgtgttccccaccagcgcctaccgcagcgaggccctgcgcatcctgcagacccagcaggagttcaacccccagatcaccgacgagttcatcaaccgctacctggagatcctgaccggcaagcgcaagtactaccacggccccggcaacgagaagagccgcaccgactacggccgctaccgcaccagcggcgagaccctggacaacatcttcggcatcctgatcggcaagtgcaccttctaccccgacgagttccgcgccgccaaggccagctacaccgcccaggagttcaacctgctgaacgacctgaacaacctgaccgtgcccaccgagaccaagaagctgagcaaggagcagaagaaccagatcatcaactacgtgaagaacgagaaggccatgggccccgccaagctgttcaagtacatcgccaagctgctgagctgcgacgtggccgacatcaagggctaccgcatcgacaagagcggcaaggccgagatccacaccttcgaggcctaccgcaagatgaagaccctggagaccctggacatcgagcagatggaccgcgagaccctggacaagctggcctacgtgctgaccctgaacaccgagcgcgagggcatccaggaggccctggagcacgagttcgccgacggcagcttcagccagaagcaggtggacgagctggtgcagttccgcaaggccaacagcagcatcttcggcaagggctggcacaacttcagcgtgaagctgatgatggagctgatccccgagctgtacgagaccagcgaggagcagatgaccatcctgacccgcctgggcaagcagaagaccaccagcagcagcaacaagaccaagtacatcgacgagaagctgctgaccgaggagatctacaaccccgtggtggccaagagcgtgcgccaggccatcaagatcgtgaacgccgccatcaaggagtacggcgacttcgacaacatcgtgatcgagatggcccgcgagaccaacgaggacgacgagaagaaggccatccagaagatccagaaggccaacaaggacgagaaggacgccgccatgctgaaggccgccaaccagtacaacggcaaggccgagctgccccacagcgtgttccacggccacaagcagctggccaccaagatccgcctgtggcaccagcagggcgagcgctgcctgtacaccggcaagaccatcagcatccacgacctgatcaacaacagcaaccagttcgaggtggctgccatcctgcccctgagcatcaccttcgacgacagcctggccaacaaggtgctggtgtacgccaccgccgctcaggagaagggccagcgcaccccctaccaggccctggacagcatggacgacgcctggagcttccgcgagctgaaggccttcgtgcgcgagagcaagaccctgagcaacaagaagaaggagtacctgctgaccgaggaggacatcagcaagttcgacgtgcgcaagaagttcatcgagcgcaacctggtggacacccgctacgccagccgcgtggtgctgaacgccctgcaggagcacttccgcgcccacaagatcgacaccaaggtgagcgtggtgcgcggccagttcaccagccagctgcgccgccactggggcatcgagaagacccgcgacacctaccaccaccacgccgtggacgccctgatcattgcggcttctagccagctgaacctgtggaagaagcagaagaacaccctggtgagctacagcgaggaccagctgctggacatcgagaccggcgagctgatcagcgacgacgagtacaaggagagcgtgttcaaggccccctaccagcacttcgtggacaccctgaagagcaaggagttcgaggacagcatcctgttcagctaccaggtggacagcaagttcaaccgcaagatcagcgacgccaccatctacgccacccgccaggccaaggtgggcaaggacaaggccgacgagacctacgtgctgggcaagatcaaggacatctacacccaggacggctacgacgccttcatgaagatctacaagaaggacaagagcaagttcctgatgtaccgccacgacccccagaccttcgagaaggtgatcgagcccatcctggagaactaccccaacaagcagatcaacgataaaggcaaggaggtgccctgcaaccccttcctgaagtacaaggaggagcacggctacatccgcaagtacagcaagaagggcaacggccccgagatcaagagcctgaagtactacgacagcaagctgggcaaccacatcgacatcacccccaaggacagcaacaacaaggtggtgctgcagagcgtgagcccctggcgcgccgacgtgtacttcaacaagaccaccggcaagtacgagatcctgggcctgaagtacgccgacctgcagtttgataagggcaccggcacctacaagatcagccaggagaagtacaacgacatcaagaagaaggagggcgtggacagcgacagcgagttcaagttcaccctgtacaagaacgaccttctgctggtgaaggacaccgagaccaaggagcaacagctgttccgcttcctgagccgcaccatgcccaagcagaagcactacgtggagctgaagccctacgacaagcagaagttcgagggcggcgaggccctgatcaaggtgctgggcaacgtggccaacagcggccagtgcaagaagggcctgggcaagagcaacatcagcatctacaaggtgcgcaccgacgtgctgggcaaccagcacatcatcaagaacgagggcgacaagcccaagctggacttctaa

SEQ ID NO: 12 - DNA, 3399 bp, Streptococcus thermophilus
atgagcgacctggtgctgggcctggacatcggcatcggcagcgtgggcgtgggcatcctgaacaaggtgaccggcgagatcatccacaagaacagtcgcatcttccctgctgctcaggctgagaacaacctggtgcgccgcaccaaccgccagggtcgccggcttgctcgccgcaagaagcaccggcgcgtgcgcctgaaccgcctgttcgaggagagcggcctgatcaccgacttcaccaagatcagcatcaacctgaacccctaccagctgcgcgtgaagggcctgaccgacgagctgagcaacgaggagctgttcatcgccctgaagaacatggtgaagcaccgcggcatcagctacctggacgacgccagcgacgacggcaacagcagcgtgggcgactacgcccagatcgtgaaggagaacagcaagcagctggagaccaagacccccggccagatccagctggagcgctaccagacctacggccagctgcgcggcgacttcaccgtggagaaggacggcaagaagcaccgcctgatcaacgtgttccccaccagcgcctaccgcagcgaggccctgcgcatcctgcagacccagcaggagttcaacccccagatcaccgacgagttcatcaaccgctacctggagatcctgaccggcaagcgcaagtactaccacggccccggcaacgagaagagccgcaccgactacggccgctaccgcaccagcggcgagaccctggacaacatcttcggcatcctgatcggcaagtgcaccttctaccccgacgagttccgcgccgccaaggccagctacaccgcccaggagttcaacctgctgaacgacctgaacaacctgaccgtgcccaccgagaccaagaagctgagcaaggagcagaagaaccagatcatcaactacgtgaagaacgagaaggccatgggccccgccaagctgttcaagtacatcgccaagctgctgagctgcgacgtggccgacatcaagggctaccgcatcgacaagagcggcaaggccgagatccacaccttcgaggcctaccgcaagatgaagaccctggagaccctggacatcgagcagatggaccgcgagaccctggacaagctggcctacgtgctgaccctgaacaccgagcgcgagggcatccaggaggccctggagcacgagttcgccgacggcagcttcagccagaagcaggtggacgagctggtgcagttccgcaaggccaacagcagcatcttcggcaagggctggcacaacttcagcgtgaagctgatgatggagctgatccccgagctgtacgagaccagcgaggagcagatgaccatcctgacccgcctgggcaagcagaagaccaccagcagcagcaacaagaccaagtacatcgacgagaagctgctgaccgaggagatctacaaccccgtggtggccaagagcgtgcgccaggccatcaagatcgtgaacgccgccatcaaggagtacggcgacttcgacaacatcgtgatcgagatggcccgcgagaccaacgaggacgacgagaagaaggccatccagaagatccagaaggccaacaaggacgagaaggacgccgccatgctgaaggccgccaaccagtacaacggcaaggccgagctgccccacagcgtgttccacggccacaagcagctggccaccaagatccgcctgtggcaccagcagggcgagcgctgcctgtacaccggcaagaccatcagcatccacgacctgatcaacaacagcaaccagttcgaggtggaccacatcctgcccctgagcatcaccttcgacgacagcctggccaacaaggtgctggtgtacgccaccgccaaccaggagaagggccagcgcaccccctaccaggccctggacagcatggacgacgcctggagcttccgcgagctgaaggccttcgtgcgcgagagcaagaccctgagcaacaagaagaaggagtacctgctgaccgaggaggacatcagcaagttcgacgtgcgcaagaagttcatcgagcgcaacctggtggacacccgctacgccagccgcgtggtgctgaacgccctgcaggagcacttccgcgcccacaagatcgacaccaaggtgagcgtggtgcgcggccagttcaccagccagctgcgccgccactggggcatcgagaagacccgcgacacctaccaccaccacgccgtggacgccctgatcattgcggcttctagccagctgaacctgtggaagaagcagaagaacaccctggtgagctacagcgaggaccagctgctggacatcgagaccggcgagctgatcagcgacgacgagtacaaggagagcgtgttcaaggccccctaccagcacttcgtggacaccctgaagagcaaggagttcgaggacagcatcctgttcagctaccaggtggacagcaagttcaaccgcaagatcagcgacgccaccatctacgccacccgccaggccaaggtgggcaaggacaaggccgacgagacctacgtgctgggcaagatcaaggacatctacacccaggacggctacgacgccttcatgaagatctacaagaaggacaagagcaagttcctgatgtaccgccacgacccccagaccttcgagaaggtgatcgagcccatcctggagaactaccccaacaagcagatcaacgataaaggcaaggaggtgccctgcaaccccttcctgaagtacaaggaggagcacggctacatccgcaagtacagcaagaagggcaacggccccgagatcaagagcctgaagtactacgacagcaagctgggcaaccacatcgacatcacccccaaggacagcaacaacaaggtggtgctgcagagcgtgagcccctggcgcgccgacgtgtacttcaacaagaccaccggcaagtacgagatcctgggcctgaagtacgccgacctgcagtttgataagggcaccggcacctacaagatcagccaggagaagtacaacgacatcaagaagaaggagggcgtggacagcgacagcgagttcaagttcaccctgtacaagaacgaccttctgctggtgaaggacaccgagaccaaggagcaacagctgttccgcttcctgagccgcaccatgcccaagcagaagcactacgtggagctgaagccctacgacaagcagaagttcgagggcggcgaggccctgatcaaggtgctgggcaacgtggccaacagcggccagtgcaagaagggcctgggcaagagcaacatcagcatctacaaggtgcgcaccgacgtgctgggcaaccagcacatcatcaagaacgagggcgacaagcccaagctggacttcagcagggctgaccccaagaagaagaggaaggtgtga

SEQ ID NO: 13 - DNA, 3459 bp, Streptococcus thermophilus
atgagcgacctggtgctgggcctggacatcggcatcggcagcgtgggcgtgggcatcctgaacaaggtgaccggcgagatcatccacaagaacagtcgcatcttccctgctgctcaggctgagaacaacctggtgcgccgcaccaaccgccagggtcgccggcttgctcgccgcaagaagcaccggcgcgtgcgcctgaaccgcctgttcgaggagagcggcctgatcaccgacttcaccaagatcagcatcaacctgaacccctaccagctgcgcgtgaagggcctgaccgacgagctgagcaacgaggagctgttcatcgccctgaagaacatggtgaagcaccgcggcatcagctacctggacgacgccagcgacgacggcaacagcagcgtgggcgactacgcccagatcgtgaaggagaacagcaagcagctggagaccaagacccccggccagatccagctggagcgctaccagacctacggccagctgcgcggcgacttcaccgtggagaaggacggcaagaagcaccgcctgatcaacgtgttccccaccagcgcctaccgcagcgaggccctgcgcatcctgcagacccagcaggagttcaacccccagatcaccgacgagttcatcaaccgctacctggagatcctgaccggcaagcgcaagtactaccacggccccggcaacgagaagagccgcaccgactacggccgctaccgcaccagcggcgagaccctggacaacatcttcggcatcctgatcggcaagtgcaccttctaccccgacgagttccgcgccgccaaggccagctacaccgcccaggagttcaacctgctgaacgacctgaacaacctgaccgtgcccaccgagaccaagaagctgagcaaggagcagaagaaccagatcatcaactacgtgaagaacgagaaggccatgggccccgccaagctgttcaagtacatcgccaagctgctgagctgcgacgtggccgacatcaagggctaccgcatcgacaagagcggcaaggccgagatccacaccttcgaggcctaccgcaagatgaagaccctggagaccctggacatcgagcagatggaccgcgagaccctggacaagctggcctacgtgctgaccctgaacaccgagcgcgagggcatccaggaggccctggagcacgagttcgccgacggcagcttcagccagaagcaggtggacgagctggtgcagttccgcaaggccaacagcagcatcttcggcaagggctggcacaacttcagcgtgaagctgatgatggagctgatccccgagctgtacgagaccagcgaggagcagatgaccatcctgacccgcctgggcaagcagaagaccaccagcagcagcaacaagaccaagtacatcgacgagaagctgctgaccgaggagatctacaaccccgtggtggccaagagcgtgcgccaggccatcaagatcgtgaacgccgccatcaaggagtacggcgacttcgacaacatcgtgatcgagatggcccgcgagaccaacgaggacgacgagaagaaggccatccagaagatccagaaggccaacaaggacgagaaggacgccgccatgctgaaggccgccaaccagtacaacggcaaggccgagctgccccacagcgtgttccacggccacaagcagctggccaccaagatccgcctgtggcaccagcagggcgagcgctgcctgtacaccggcaagaccatcagcatccacgacctgatcaacaacagcaaccagttcgaggtggaccacatcctgcccctgagcatcaccttcgacgacagcctggccaacaaggtgctggtgtacgccaccgccaaccaggagaagggccagcgcaccccctaccaggccctggacagcatggacgacgcctggagcttccgcgagctgaaggccttcgtgcgcgagagcaagaccctgagcaacaagaagaaggagtacctgctgaccgaggaggacatcagcaagttcgacgtgcgcaagaagttcatcgagcgcaacctggtggacacccgctacgccagccgcgtggtgctgaacgccctgcaggagcacttccgcgcccacaagatcgacaccaaggtgagcgtggtgcgcggccagttcaccagccagctgcgccgccactggggcatcgagaagacccgcgacacctaccaccaccacgccgtggacgccctgatcattgcggcttctagccagctgaacctgtggaagaagcagaagaacaccctggtgagctacagcgaggaccagctgctggacatcgagaccggcgagctgatcagcgacgacgagtacaaggagagcgtgttcaaggccccctaccagcacttcgtggacaccctgaagagcaaggagttcgaggacagcatcctgttcagctaccaggtggacagcaagttcaaccgcaagatcagcgacgccaccatctacgccacccgccaggccaaggtgggcaaggacaaggccgacgagacctacgtgctgggcaagatcaaggacatctacacccaggacggctacgacgccttcatgaagatctacaagaaggacaagagcaagttcctgatgtaccgccacgacccccagaccttcgagaaggtgatcgagcccatcctggagaactaccccaacaagcagatcaacgataaaggcaaggaggtgccctgcaaccccttcctgaagtacaaggaggagcacggctacatccgcaagtacagcaagaagggcaacggccccgagatcaagagcctgaagtactacgacagcaagctgggcaaccacatcgacatcacccccaaggacagcaacaacaaggtggtgctgcagagcgtgagcccctggcgcgccgacgtgtacttcaacaagaccaccggcaagtacgagatcctgggcctgaagtacgccgacctgcagtttgataagggcaccggcacctacaagatcagccaggagaagtacaacgacatcaagaagaaggagggcgtggacagcgacagcgagttcaagttcaccctgtacaagaacgaccttctgctggtgaaggacaccgagaccaaggagcaacagctgttccgcttcctgagccgcaccatgcccaagcagaagcactacgtggagctgaagccctacgacaagcagaagttcgagggcggcgaggccctgatcaaggtgctgggcaacgtggccaacagcggccagtgcaagaagggcctgggcaagagcaacatcagcatctacaaggtgcgcaccgacgtgctgggcaaccagcacatcatcaagaacgagggcgacaagcccaagctggacttcgcggccgcagatccaaaaaagaagagaaaggtagatccaaaaaagaagagaaaggtagatccaaaaaagaagagaaaggtagatacggccgcatag

SEQ ID NO: 14 - DNA, 3585 bp, Streptococcus thermophilus
atgagcgacctggtgctgggcctggccatcggcatcggcagcgtgggcgtgggcatcctgaacaaggtgaccggcgagatcatccacaagaacagtcgcatcttccctgctgctcaggctgagaacaacctggtgcgccgcaccaaccgccagggtcgccggcttgctcgccgcaagaagcaccggcgcgtgcgcctgaaccgcctgttcgaggagagcggcctgatcaccgacttcaccaagatcagcatcaacctgaacccctaccagctgcgcgtgaagggcctgaccgacgagctgagcaacgaggagctgttcatcgccctgaagaacatggtgaagcaccgcggcatcagctacctggacgacgccagcgacgacggcaacagcagcgtgggcgactacgcccagatcgtgaaggagaacagcaagcagctggagaccaagacccccggccagatccagctggagcgctaccagacctacggccagctgcgcggcgacttcaccgtggagaaggacggcaagaagcaccgcctgatcaacgtgttccccaccagcgcctaccgcagcgaggccctgcgcatcctgcagacccagcaggagttcaacccccagatcaccgacgagttcatcaaccgctacctggagatcctgaccggcaagcgcaagtactaccacggccccggcaacgagaagagccgcaccgactacggccgctaccgcaccagcggcgagaccctggacaacatcttcggcatcctgatcggcaagtgcaccttctaccccgacgagttccgcgccgccaaggccagctacaccgcccaggagttcaacctgctgaacgacctgaacaacctgaccgtgcccaccgagaccaagaagctgagcaaggagcagaagaaccagatcatcaactacgtgaagaacgagaaggccatgggccccgccaagctgttcaagtacatcgccaagctgctgagctgcgacgtggccgacatcaagggctaccgcatcgacaagagcggcaaggccgagatccacaccttcgaggcctaccgcaagatgaagaccctggagaccctggacatcgagcagatggaccgcgagaccctggacaagctggcctacgtgctgaccctgaacaccgagcgcgagggcatccaggaggccctggagcacgagttcgccgacggcagcttcagccagaagcaggtggacgagctggtgcagttccgcaaggccaacagcagcatcttcggcaagggctggcacaacttcagcgtgaagctgatgatggagctgatccccgagctgtacgagaccagcgaggagcagatgaccatcctgacccgcctgggcaagcagaagaccaccagcagcagcaacaagaccaagtacatcgacgagaagctgctgaccgaggagatctacaaccccgtggtggccaagagcgtgcgccaggccatcaagatcgtgaacgccgccatcaaggagtacggcgacttcgacaacatcgtgatcgagatggcccgcgagaccaacgaggacgacgagaagaaggccatccagaagatccagaaggccaacaaggacgagaaggacgccgccatgctgaaggccgccaaccagtacaacggcaaggccgagctgccccacagcgtgttccacggccacaagcagctggccaccaagatccgcctgtggcaccagcagggcgagcgctgcctgtacaccggcaagaccatcagcatccacgacctgatcaacaacagcaaccagttcgaggtggctgccatcctgcccctgagcatcaccttcgacgacagcctggccaacaaggtgctggtgtacgccaccgccgctcaggagaagggccagcgcaccccctaccaggccctggacagcatggacgacgcctggagcttccgcgagctgaaggccttcgtgcgcgagagcaagaccctgagcaacaagaagaaggagtacctgctgaccgaggaggacatcagcaagttcgacgtgcgcaagaagttcatcgagcgcaacctggtggacacccgctacgccagccgcgtggtgctgaacgccctgcaggagcacttccgcgcccacaagatcgacaccaaggtgagcgtggtgcgcggccagttcaccagccagctgcgccgccactggggcatcgagaagacccgcgacacctaccaccaccacgccgtggacgccctgatcattgcggcttctagccagctgaacctgtggaagaagcagaagaacaccctggtgagctacagcgaggaccagctgctggacatcgagaccggcgagctgatcagcgacgacgagtacaaggagagcgtgttcaaggccccctaccagcacttcgtggacaccctgaagagcaaggagttcgaggacagcatcctgttcagctaccaggtggacagcaagttcaaccgcaagatcagcgacgccaccatctacgccacccgccaggccaaggtgggcaaggacaaggccgacgagacctacgtgctgggcaagatcaaggacatctacacccaggacggctacgacgccttcatgaagatctacaagaaggacaagagcaagttcctgatgtaccgccacgacccccagaccttcgagaaggtgatcgagcccatcctggagaactaccccaacaagcagatcaacgataaaggcaaggaggtgccctgcaaccccttcctgaagtacaaggaggagcacggctacatccgcaagtacagcaagaagggcaacggccccgagatcaagagcctgaagtactacgacagcaagctgggcaaccacatcgacatcacccccaaggacagcaacaacaaggtggtgctgcagagcgtgagcccctggcgcgccgacgtgtacttcaacaagaccaccggcaagtacgagatcctgggcctgaagtacgccgacctgcagtttgataagggcaccggcacctacaagatcagccaggagaagtacaacgacatcaagaagaaggagggcgtggacagcgacagcgagttcaagttcaccctgtacaagaacgaccttctgctggtgaaggacaccgagaccaaggagcaacagctgttccgcttcctgagccgcaccatgcccaagcagaagcactacgtggagctgaagccctacgacaagcagaagttcgagggcggcgaggccctgatcaaggtgctgggcaacgtggccaacagcggccagtgcaagaagggcctgggcaagagcaacatcagcatctacaaggtgcgcaccgacgtgctgggcaaccagcacatcatcaagaacgagggcgacaagcccaagctggacttcagcagggctgaccccaagaagaagaggaaggtggaggccagcggttccggacgggctgacgcattggacgattttgatctggatatgctgggaagtgacgccctcgatgattttgaccttgacatgcttggttcggatgcccttgatgactttgacctcgacatgctcggcagtgacgcccttgatgatttcgacctggacatgctgattaactctagatga

SEQ ID NO: 15 - DNA, 3606 bp, Streptococcus thermophilus
atgcccaagaagaagaggaaggtgagcgacctggtgctgggcctggccatcggcatcggcagcgtgggcgtgggcatcctgaacaaggtgaccggcgagatcatccacaagaacagtcgcatcttccctgctgctcaggctgagaacaacctggtgcgccgcaccaaccgccagggtcgccggcttgctcgccgcaagaagcaccggcgcgtgcgcctgaaccgcctgttcgaggagagcggcctgatcaccgacttcaccaagatcagcatcaacctgaacccctaccagctgcgcgtgaagggcctgaccgacgagctgagcaacgaggagctgttcatcgccctgaagaacatggtgaagcaccgcggcatcagctacctggacgacgccagcgacgacggcaacagcagcgtgggcgactacgcccagatcgtgaaggagaacagcaagcagctggagaccaagacccccggccagatccagctggagcgctaccagacctacggccagctgcgcggcgacttcaccgtggagaaggacggcaagaagcaccgcctgatcaacgtgttccccaccagcgcctaccgcagcgaggccctgcgcatcctgcagacccagcaggagttcaacccccagatcaccgacgagttcatcaaccgctacctggagatcctgaccggcaagcgcaagtactaccacggccccggcaacgagaagagccgcaccgactacggccgctaccgcaccagcggcgagaccctggacaacatcttcggcatcctgatcggcaagtgcaccttctaccccgacgagttccgcgccgccaaggccagctacaccgcccaggagttcaacctgctgaacgacctgaacaacctgaccgtgcccaccgagaccaagaagctgagcaaggagcagaagaaccagatcatcaactacgtgaagaacgagaaggccatgggccccgccaagctgttcaagtacatcgccaagctgctgagctgcgacgtggccgacatcaagggctaccgcatcgacaagagcggcaaggccgagatccacaccttcgaggcctaccgcaagatgaagaccctggagaccctggacatcgagcagatggaccgcgagaccctggacaagctggcctacgtgctgaccctgaacaccgagcgcgagggcatccaggaggccctggagcacgagttcgccgacggcagcttcagccagaagcaggtggacgagctggtgcagttccgcaaggccaacagcagcatcttcggcaagggctggcacaacttcagcgtgaagctgatgatggagctgatccccgagctgtacgagaccagcgaggagcagatgaccatcctgacccgcctgggcaagcagaagaccaccagcagcagcaacaagaccaagtacatcgacgagaagctgctgaccgaggagatctacaaccccgtggtggccaagagcgtgcgccaggccatcaagatcgtgaacgccgccatcaaggagtacggcgacttcgacaacatcgtgatcgagatggcccgcgagaccaacgaggacgacgagaagaaggccatccagaagatccagaaggccaacaaggacgagaaggacgccgccatgctgaaggccgccaaccagtacaacggcaaggccgagctgccccacagcgtgttccacggccacaagcagctggccaccaagatccgcctgtggcaccagcagggcgagcgctgcctgtacaccggcaagaccatcagcatccacgacctgatcaacaacagcaaccagttcgaggtggctgccatcctgcccctgagcatcaccttcgacgacagcctggccaacaaggtgctggtgtacgccaccgccgctcaggagaagggccagcgcaccccctaccaggccctggacagcatggacgacgcctggagcttccgcgagctgaaggccttcgtgcgcgagagcaagaccctgagcaacaagaagaaggagtacctgctgaccgaggaggacatcagcaagttcgacgtgcgcaagaagttcatcgagcgcaacctggtggacacccgctacgccagccgcgtggtgctgaacgccctgcaggagcacttccgcgcccacaagatcgacaccaaggtgagcgtggtgcgcggccagttcaccagccagctgcgccgccactggggcatcgagaagacccgcgacacctaccaccaccacgccgtggacgccctgatcattgcggcttctagccagctgaacctgtggaagaagcagaagaacaccctggtgagctacagcgaggaccagctgctggacatcgagaccggcgagctgatcagcgacgacgagtacaaggagagcgtgttcaaggccccctaccagcacttcgtggacaccctgaagagcaaggagttcgaggacagcatcctgttcagctaccaggtggacagcaagttcaaccgcaagatcagcgacgccaccatctacgccacccgccaggccaaggtgggcaaggacaaggccgacgagacctacgtgctgggcaagatcaaggacatctacacccaggacggctacgacgccttcatgaagatctacaagaaggacaagagcaagttcctgatgtaccgccacgacccccagaccttcgagaaggtgatcgagcccatcctggagaactaccccaacaagcagatcaacgataaaggcaaggaggtgccctgcaaccccttcctgaagtacaaggaggagcacggctacatccgcaagtacagcaagaagggcaacggccccgagatcaagagcctgaagtactacgacagcaagctgggcaaccacatcgacatcacccccaaggacagcaacaacaaggtggtgctgcagagcgtgagcccctggcgcgccgacgtgtacttcaacaagaccaccggcaagtacgagatcctgggcctgaagtacgccgacctgcagtttgataagggcaccggcacctacaagatcagccaggagaagtacaacgacatcaagaagaaggagggcgtggacagcgacagcgagttcaagttcaccctgtacaagaacgaccttctgctggtgaaggacaccgagaccaaggagcaacagctgttccgcttcctgagccgcaccatgcccaagcagaagcactacgtggagctgaagccctacgacaagcagaagttcgagggcggcgaggccctgatcaaggtgctgggcaacgtggccaacagcggccagtgcaagaagggcctgggcaagagcaacatcagcatctacaaggtgcgcaccgacgtgctgggcaaccagcacatcatcaagaacgagggcgacaagcccaagctggacttcagcagggctgaccccaagaagaagaggaaggtggaggccagcggttccggacgggctgacgcattggacgattttgatctggatatgctgggaagtgacgccctcgatgattttgaccttgacatgcttggttcggatgcccttgatgactttgacctcgacatgctcggcagtgacgcccttgatgatttcgacctggacatgctgattaactctagatga

SEQ ID NO: 16 - DNA, 3366 bp, Streptococcus thermophilus
atgagtgacttagttttaggacttgatatcggtataggttctgttggtgtaggtatccttaacaaagtgacaggagaaattatccataaaaactcacgcatcttcccagcagctcaagcggaaaataacctagtacgtagaacgaatcgtcaaggaagacgcttgacacgacgtaaaaaacatcgtagagttcgtttaaatcgtctatttgaggaaagtggattaatcaccgattttacgaagatttcaattaatcttaacccatatcaattacgagttaagggcttgaccgatgaattgtctaatgaagaactgtttatcgctcttaaaaatatggtgaaacaccgtgggattagttacctcgatgatgctagtgatgacggaaattcatcaataggagactatgcacaaattgttaaggaaaatagtaaacaattagaaactaagacaccgggacagatacagttggaacgctaccaaacatatggtcaattacgtggtgattttactgttgagaaagatggcaaaaaacatcgcttgattaatgtctttccaacatcagcttatcgttcagaagccttaaggatactgcaaactcaacaagaatttaatccacagattacagatgaatttattaatcgttatctcgaaattttaactggaaaacggaaatattatcatggacccggaaatgaaaagtcacggactgattatggtcgttacagaacgagtggagaaactttagacaatatttttggaattctaattgggaaatgtacattttatccagacgagtttagagcagcaaaagcttcctacacggctcaagaattcaatttgctaaatgatttgaacaatctaacagttcctactgaaaccaaaaagttgagcaaagaacagaagaatcaaatcattaattatgtcaaaaatgaaaaggcaatggggccagcgaaactttttaaatatatcgctaagttactttcttgtgatgttgcagatatcaagggataccgtatcgacaaatcaggtaaggctgagattcatactttcgaagcctatcgaaaaatgaaaacgcttgaaaccttagatattgagcaaatggatagagaaacgcttgataaattagcctatgtcttaacattaaacactgagagggaaggtattcaagaagccttagaacatgaatttgctgatggtagctttagccagaagcaagttgacgaattggttcaattccgcaaagcaaatagttccatttttggaaaaggatggcataatttttctgtcaaactgatgatggagttaattccagaattgtatgagacgtcagaagagcaaatgactatcctaacacgacttggaaaacaaaaaacgacttcgtcttcaaataaaacaaaatatatagatgaaaaactattaactgaagaaatctataatcctgttgttgctaagtctgttcgccaggctataaaaatcgtaaatgcggcgattaaagaatacggagactttgacaatattgtcatcgaaatggctcgtgaaacaaatgaagatgatgaaaagaaagctattcaaaagattcaaaaagccaacaaagatgaaaaagatgcagcaatgcttaaggctgctaaccaatataatggaaaggctgaattaccacatagtgttttccacggtcataagcaattagcgactaaaatccgcctttggcatcagcaaggagaacgttgcctttatactggtaagacaatctcaatccatgatttgataaataattctaatcagtttgaagtagatcatattttacctctttctatcacattcgatgatagccttgcaaataaggttttggtttatgcaactgctaaccaagaaaaaggacaacgaacaccttatcaggctttagatagtatggatgatgcgtggtctttccgtgaattaaaagcttttgtacgtgagtcaaaaacactttcgaacaagaaaaaagaatacctccttacagaagaagatatttcaaagtttgatgttcgaaagaaatttattgaacgaaatcttgtagatacaagatacgcttcaagagttgtcctcaatgcccttcaagaacactttagagctcacaagattgatacaaaagtttccgtggttcgtggccaatttacatctcaattgagacgccattggggaattgagaagactcgtgatacttatcatcaccatgctgtcgatgcattgattattgccgcctcaagtcagttgaatttgtggaaaaaacaaaagaatacccttgtaagttattcagaagaccaactccttgatattgaaacaggtgaacttattagtgatgatgagtacaaggaatctgtgttcaaagccccttatcaacattttgttgatacattgaagagtaaagaatttgaagacagtatcttattctcttatcaagtggattctaagtttaatcgtaaaatatcagatgccactatttatgcgacaagacaggctaaagtaggaaaagataaggcggatgaaacttatgtcttagggaaaatcaaagatatttatactcaggatggttatgatgcctttatgaagatttataagaaggataagtcaaaattcctcatgtatcgtcacgacccacaaacctttgagaaagttatcgagccaattttagagaactatcctaataagcaaataaatgaaaaagggaaagaggtaccatgtaatcctttcctaaaatataaagaagaacatggctatattcgtaaatatagtaaaaaaggcaatggtcctgaaatcaagagtcttaaatactatgatagtaagctaggcaatcatattgatattactccgaaggatagtaacaataaagttgtcttacagtcagtttctccatggagagcggatgtctatttcaataagactactggaaaatacgaaatcctcggattgaaatatgctgatttacaatttgaaaaagggacaggaacatataagatttcccaggaaaaatacaatgacattaagaaaaaagagggtgtagattctgattcagaattcaagtttacactttataaaaatgatttgttactcgttaaagatacagaaacaaaagaacaacagcttttccgttttctttctcgaactatgcctaaacaaaagcattatgttgaattaaaaccttatgataaacagaaatttgaaggaggtgaggcgttaattaaagtgttgggtaacgttgctaatagtggtcaatgcaaaaaagggctaggaaaatcaaatatttctatttataaggtaagaacagatgtcctaggaaatcagcatatcatcaaaaatgagggtgataagcctaagctagatttttaa

SEQ ID NO: 17 - DNA, 4167 bp, Streptococcus thermophilus; identical to SEQ ID NO: 9

SEQ ID NO: 18 - DNA, 3249 bp, Neisseria meningitidis
atggccgccttcaagcccaaccccatcaactacatcctgggcctggacatcggcatcgccagcgtgggctgggccatggtggagatcgacgaggacgagaaccccatctgcctgatcgacctgggtgtgcgcgtgttcgagcgcgctgaggtgcccaagactggtgacagtctggctatggctcgccggcttgctcgctctgttcggcgccttactcgccggcgcgctcaccgccttctgcgcgctcgccgcctgctgaagcgcgagggtgtgctgcaggctgccgacttcgacgagaacggcctgatcaagagcctgcccaacactccttggcagctgcgcgctgccgctctggaccgcaagctgactcctctggagtggagcgccgtgctgctgcacctgatcaagcaccgcggctacctgagccagcgcaagaacgagggcgagaccgccgacaaggagctgggtgctctgctgaagggcgtggccgacaacgcccacgccctgcagactggtgacttccgcactcctgctgagctggccctgaacaagttcgagaaggagagcggccacatccgcaaccagcgcggcgactacagccacaccttcagccgcaaggacctgcaggccgagctgatcctgctgttcgagaagcagaaggagttcggcaacccccacgtgagcggcggcctgaaggagggcatcgagaccctgctgatgacccagcgccccgccctgagcggcgacgccgtgcagaagatgctgggccactgcaccttcgagccagccgagcccaaggccgccaagaacacctacaccgccgagcgcttcatctggctgaccaagctgaacaacctgcgcatcctggagcagggcagcgagcgccccctgaccgacaccgagcgcgccaccctgatggacgagccctaccgcaagagcaagctgacctacgcccaggcccgcaagctgctgggtctggaggacaccgccttcttcaagggcctgcgctacggcaaggacaacgccgaggccagcaccctgatggagatgaaggcctaccacgccatcagccgcgccctggagaaggagggcctgaaggacaagaagagtcctctgaacctgagccccgagctgcaggacgagatcggcaccgccttcagcctgttcaagaccgacgaggacatcaccggccgcctgaaggaccgcatccagcccgagatcctggaggccctgctgaagcacatcagcttcgacaagttcgtgcagatcagcctgaaggccctgcgccgcatcgtgcccctgatggagcagggcaagcgctacgacgaggcctgcgccgagatctacggcgaccactacggcaagaagaacaccgaggagaagatctacctgcctcctatccccgccgacgagatccgcaaccccgtggtgctgcgcgccctgagccaggcccgcaaggtgatcaacggcgtggtgcgccgctacggcagccccgcccgcatccacatcgagaccgcccgcgaggtgggcaagagcttcaaggaccgcaaggagatcgagaagcgccaggaggagaaccgcaaggaccgcgagaaggccgccgccaagttccgcgagtacttccccaacttcgtgggcgagcccaagagcaaggacatcctgaagctgcgcctgtacgagcagcagcacggcaagtgcctgtacagcggcaaggagatcaacctgggccgcctgaacgagaagggctacgtggagatcgaccacgccctgcccttcagccgcacctgggacgacagcttcaacaacaaggtgctggtgctgggcagcgagaaccagaacaagggcaaccagaccccctacgagtacttcaacggcaaggacaacagccgcgagtggcaggagttcaaggcccgcgtggagaccagccgcttcccccgcagcaagaagcagcgcatcctgctgcagaagttcgacgaggacggcttcaaggagcgcaacctgaacgacacccgctacgtgaaccgcttcctgtgccagttcgtggccgaccgcatgcgcctgaccggcaagggcaagaagcgcgtgttcgccagcaacggccagatcaccaacctgctgcgcggcttctggggcctgcgcaaggtgcgcgccgagaacgaccgccaccacgccctggacgccgtggtggtggcctgcagcaccgtggccatgcagcagaagatcacccgcttcgtgcgctacaaggagatgaacgccttcgacggtaaaaccatcgacaaggagaccggcgaggtgctgcaccagaagacccacttcccccagccctgggagttcttcgcccaggaggtgatgatccgcgtgttcggcaagcccgacggcaagcccgagttcgaggaggccgacacccccgagaagctgcgcaccctgctggccgagaagctgagcagccgccctgaggccgtgcacgagtacgtgactcctctgttcgtgagccgcgcccccaaccgcaagatgagcggtcagggtcacatggagaccgtgaagagcgccaagcgcctggacgagggcgtgagcgtgctgcgcgtgcccctgacccagctgaagctgaaggacctggagaagatggtgaaccgcgagcgcgagcccaagctgtacgaggccctgaaggcccgcctggaggcccacaaggacgaccccgccaaggccttcgccgagcccttctacaagtacgacaaggccggcaaccgcacccagcaggtgaaggccgtgcgcgtggagcaggtgcagaagaccggcgtgtgggtgcgcaaccacaacggcatcgccgacaacgccaccatggtgcgcgtggacgtgttcgagaagggcgacaagtactacctggtgcccatctacagctggcaggtggccaagggcatcctgcccgaccgcgccgtggtgcagggcaaggacgaggaggactggcagctgatcgacgacagcttcaacttcaagttcagcctgcaccccaacgacctggtggaggtgatcaccaagaaggcccgcatgttcggctacttcgccagctgccaccgcggcaccggcaacatcaacatccgcatccacgacctggaccacaagatcggcaagaacggcatcctggagggcatcggcgtgaagaccgccctgagcttccagaagtaccagatcgacgagctgggcaaggagatccgcccctgccgcctgaagaagcgccctcctgtgcgctaa

SEQ ID NO: 19 - DNA, 3249 bp, Neisseria meningitidis
atggccgccttcaagcccaaccccatcaactacatcctgggcctggccatcggcatcgccagcgtgggctgggccatggtggagatcgacgaggacgagaaccccatctgcctgatcgacctgggtgtgcgcgtgttcgagcgcgctgaggtgcccaagactggtgacagtctggctatggctcgccggcttgctcgctctgttcggcgccttactcgccggcgcgctcaccgccttctgcgcgctcgccgcctgctgaagcgcgagggtgtgctgcaggctgccgacttcgacgagaacggcctgatcaagagcctgcccaacactccttggcagctgcgcgctgccgctctggaccgcaagctgactcctctggagtggagcgccgtgctgctgcacctgatcaagcaccgcggctacctgagccagcgcaagaacgagggcgagaccgccgacaaggagctgggtgctctgctgaagggcgtggccgacaacgcccacgccctgcagactggtgacttccgcactcctgctgagctggccctgaacaagttcgagaaggagagcggccacatccgcaaccagcgcggcgactacagccacaccttcagccgcaaggacctgcaggccgagctgatcctgctgttcgagaagcagaaggagttcggcaacccccacgtgagcggcggcctgaaggagggcatcgagaccctgctgatgacccagcgccccgccctgagcggcgacgccgtgcagaagatgctgggccactgcaccttcgagccagccgagcccaaggccgccaagaacacctacaccgccgagcgcttcatctggctgaccaagctgaacaacctgcgcatcctggagcagggcagcgagcgccccctgaccgacaccgagcgcgccaccctgatggacgagccctaccgcaagagcaagctgacctacgcccaggcccgcaagctgctgggtctggaggacaccgccttcttcaagggcctgcgctacggcaaggacaacgccgaggccagcaccctgatggagatgaaggcctaccacgccatcagccgcgccctggagaaggagggcctgaaggacaagaagagtcctctgaacctgagccccgagctgcaggacgagatcggcaccgccttcagcctgttcaagaccgacgaggacatcaccggccgcctgaaggaccgcatccagcccgagatcctggaggccctgctgaagcacatcagcttcgacaagttcgtgcagatcagcctgaaggccctgcgccgcatcgtgcccctgatggagcagggcaagcgctacgacgaggcctgcgccgagatctacggcgaccactacggcaagaagaacaccgaggagaagatctacctgcctcctatccccgccgacgagatccgcaaccccgtggtgctgcgcgccctgagccaggcccgcaaggtgatcaacggcgtggtgcgccgctacggcagccccgcccgcatccacatcgagaccgcccgcgaggtgggcaagagcttcaaggaccgcaaggagatcgagaagcgccaggaggagaaccgcaaggaccgcgagaaggccgccgccaagttccgcgagtacttccccaacttcgtgggcgagcccaagagcaaggacatcctgaagctgcgcctgtacgagcagcagcacggcaagtgcctgtacagcggcaaggagatcaacctgggccgcctgaacgagaagggctacgtggagatcgccgctgccctgcccttcagccgcacctgggacgacagcttcaacaacaaggtgctggtgctgggcagcgaggctcagaacaagggcaaccagaccccctacgagtacttcaacggcaaggacaacagccgcgagtggcaggagttcaaggcccgcgtggagaccagccgcttcccccgcagcaagaagcagcgcatcctgctgcagaagttcgacgaggacggcttcaaggagcgcaacctgaacgacacccgctacgtgaaccgcttcctgtgccagttcgtggccgaccgcatgcgcctgaccggcaagggcaagaagcgcgtgttcgccagcaacggccagatcaccaacctgctgcgcggcttctggggcctgcgcaaggtgcgcgccgagaacgaccgccaccacgccctggacgccgtggtggtggcctgcagcaccgtggccatgcagcagaagatcacccgcttcgtgcgctacaaggagatgaacgccttcgacggtaaaaccatcgacaaggagaccggcgaggtgctgcaccagaagacccacttcccccagccctgggagttcttcgcccaggaggtgatgatccgcgtgttcggcaagcccgacggcaagcccgagttcgaggaggccgacacccccgagaagctgcgcaccctgctggccgagaagctgagcagccgccctgaggccgtgcacgagtacgtgactcctctgttcgtgagccgcgcccccaaccgcaagatgagcggtcagggtcacatggagaccgtgaagagcgccaagcgcctggacgagggcgtgagcgtgctgcgcgtgcccctgacccagctgaagctgaaggacctggagaagatggtgaaccgcgagcgcgagcccaagctgtacgaggccctgaaggcccgcctggaggcccacaaggacgaccccgccaaggccttcgccgagcccttctacaagtacgacaaggccggcaaccgcacccagcaggtgaaggccgtgcgcgtggagcaggtgcagaagaccggcgtgtgggtgcgcaaccacaacggcatcgccgacaacgccaccatggtgcgcgtggacgtgttcgagaagggcgacaagtactacctggtgcccatctacagctggcaggtggccaagggcatcctgcccgaccgcgccgtggtgcagggcaaggacgaggaggactggcagctgatcgacgacagcttcaacttcaagttcagcctgcaccccaacgacctggtggaggtgatcaccaagaaggcccgcatgttcggctacttcgccagctgccaccgcggcaccggcaacatcaacatccgcatccacgacctggaccacaagatcggcaagaacggcatcctggagggcatcggcgtgaagaccgccctgagcttccagaagtaccagatcgacgagctgggcaaggagatccgcccctgccgcctgaagaagcgccctcctgtgcgctaa

SEQ ID NO: 20 - DNA, 3282 bp, Neisseria meningitidis
atggccgccttcaagcccaaccccatcaactacatcctgggcctggacatcggcatcgccagcgtgggctgggccatggtggagatcgacgaggacgagaaccccatctgcctgatcgacctgggtgtgcgcgtgttcgagcgcgctgaggtgcccaagactggtgacagtctggctatggctcgccggcttgctcgctctgttcggcgccttactcgccggcgcgctcaccgccttctgcgcgctcgccgcctgctgaagcgcgagggtgtgctgcaggctgccgacttcgacgagaacggcctgatcaagagcctgcccaacactccttggcagctgcgcgctgccgctctggaccgcaagctgactcctctggagtggagcgccgtgctgctgcacctgatcaagcaccgcggctacctgagccagcgcaagaacgagggcgagaccgccgacaaggagctgggtgctctgctgaagggcgtggccgacaacgcccacgccctgcagactggtgacttccgcactcctgctgagctggccctgaacaagttcgagaaggagagcggccacatccgcaaccagcgcggcgactacagccacaccttcagccgcaaggacctgcaggccgagctgatcctgctgttcgagaagcagaaggagttcggcaacccccacgtgagcggcggcctgaaggagggcatcgagaccctgctgatgacccagcgccccgccctgagcggcgacgccgtgcagaagatgctgggccactgcaccttcgagccagccgagcccaaggccgccaagaacacctacaccgccgagcgcttcatctggctgaccaagctgaacaacctgcgcatcctggagcagggcagcgagcgccccctgaccgacaccgagcgcgccaccctgatggacgagccctaccgcaagagcaagctgacctacgcccaggcccgcaagctgctgggtctggaggacaccgccttcttcaagggcctgcgctacggcaaggacaacgccgaggccagcaccctgatggagatgaaggcctaccacgccatcagccgcgccctggagaaggagggcctgaaggacaagaagagtcctctgaacctgagccccgagctgcaggacgagatcggcaccgccttcagcctgttcaagaccgacgaggacatcaccggccgcctgaaggaccgcatccagcccgagatcctggaggccctgctgaagcacatcagcttcgacaagttcgtgcagatcagcctgaaggccctgcgccgcatcgtgcccctgatggagcagggcaagcgctacgacgaggcctgcgccgagatctacggcgaccactacggcaagaagaacaccgaggagaagatctacctgcctcctatccccgccgacgagatccgcaaccccgtggtgctgcgcgccctgagccaggcccgcaaggtgatcaacggcgtggtgcgccgctacggcagccccgcccgcatccacatcgagaccgcccgcgaggtgggcaagagcttcaaggaccgcaaggagatcgagaagcgccaggaggagaaccgcaaggaccgcgagaaggccgccgccaagttccgcgagtacttccccaacttcgtgggcgagcccaagagcaaggacatcctgaagctgcgcctgtacgagcagcagcacggcaagtgcctgtacagcggcaaggagatcaacctgggccgcctgaacgagaagggctacgtggagatcgaccacgccctgcccttcagccgcacctgggacgacagcttcaacaacaaggtgctggtgctgggcagcgagaaccagaacaagggcaaccagaccccctacgagtacttcaacggcaaggacaacagccgcgagtggcaggagttcaaggcccgcgtggagaccagccgcttcccccgcagcaagaagcagcgcatcctgctgcagaagttcgacgaggacggcttcaaggagcgcaacctgaacgacacccgctacgtgaaccgcttcctgtgccagttcgtggccgaccgcatgcgcctgaccggcaagggcaagaagcgcgtgttcgccagcaacggccagatcaccaacctgctgcgcggcttctggggcctgcgcaaggtgcgcgccgagaacgaccgccaccacgccctggacgccgtggtggtggcctgcagcaccgtggccatgcagcagaagatcacccgcttcgtgcgctacaaggagatgaacgccttcgacggtaaaaccatcgacaaggagaccggcgaggtgctgcaccagaagacccacttcccccagccctgggagttcttcgcccaggaggtgatgatccgcgtgttcggcaagcccgacggcaagcccgagttcgaggaggccgacacccccgagaagctgcgcaccctgctggccgagaagctgagcagccgccctgaggccgtgcacgagtacgtgactcctctgttcgtgagccgcgcccccaaccgcaagatgagcggtcagggtcacatggagaccgtgaagagcgccaagcgcctggacgagggcgtgagcgtgctgcgcgtgcccctgacccagctgaagctgaaggacctggagaagatggtgaaccgcgagcgcgagcccaagctgtacgaggccctgaaggcccgcctggaggcccacaaggacgaccccgccaaggccttcgccgagcccttctacaagtacgacaaggccggcaaccgcacccagcaggtgaaggccgtgcgcgtggagcaggtgcagaagaccggcgtgtgggtgcgcaaccacaacggcatcgccgacaacgccaccatggtgcgcgtggacgtgttcgagaagggcgacaagtactacctggtgcccatctacagctggcaggtggccaagggcatcctgcccgaccgcgccgtggtgcagggcaaggacgaggaggactggcagctgatcgacgacagcttcaacttcaagttcagcctgcaccccaacgacctggtggaggtgatcaccaagaaggcccgcatgttcggctacttcgccagctgccaccgcggcaccggcaacatcaacatccgcatccacgacctggaccacaagatcggcaagaacggcatcctggagggcatcggcgtgaagaccgccctgagcttccagaagtaccagatcgacgagctgggcaaggagatccgcccctgccgcctgaagaagcgccctcctgtgcgcagcagggctgaccccaagaagaagaggaaggtgtga

SEQ ID NO: 21 - DNA, 3342 bp, Neisseria meningitidis
atggccgccttcaagcccaaccccatcaactacatcctgggcctggacatcggcatcgccagcgtgggctgggccatggtggagatcgacgaggacgagaaccccatctgcctgatcgacctgggtgtgcgcgtgttcgagcgcgctgaggtgcccaagactggtgacagtctggctatggctcgccggcttgctcgctctgttcggcgccttactcgccggcgcgctcaccgccttctgcgcgctcgccgcctgctgaagcgcgagggtgtgctgcaggctgccgacttcgacgagaacggcctgatcaagagcctgcccaacactccttggcagctgcgcgctgccgctctggaccgcaagctgactcctctggagtggagcgccgtgctgctgcacctgatcaagcaccgcggctacctgagccagcgcaagaacgagggcgagaccgccgacaaggagctgggtgctctgctgaagggcgtggccgacaacgcccacgccctgcagactggtgacttccgcactcctgctgagctggccctgaacaagttcgagaaggagagcggccacatccgcaaccagcgcggcgactacagccacaccttcagccgcaaggacctgcaggccgagctgatcctgctgttcgagaagcagaaggagttcggcaacccccacgtgagcggcggcctgaaggagggcatcgagaccctgctgatgacccagcgccccgccctgagcggcgacgccgtgcagaagatgctgggccactgcaccttcgagccagccgagcccaaggccgccaagaacacctacaccgccgagcgcttcatctggctgaccaagctgaacaacctgcgcatcctggagcagggcagcgagcgccccctgaccgacaccgagcgcgccaccctgatggacgagccctaccgcaagagcaagctgacctacgcccaggcccgcaagctgctgggtctggaggacaccgccttcttcaagggcctgcgctacggcaaggacaacgccgaggccagcaccctgatggagatgaaggcctaccacgccatcagccgcgccctggagaaggagggcctgaaggacaagaagagtcctctgaacctgagccccgagctgcaggacgagatcggcaccgccttcagcctgttcaagaccgacgaggacatcaccggccgcctgaaggaccgcatccagcccgagatcctggaggccctgctgaagcacatcagcttcgacaagttcgtgcagatcagcctgaaggccctgcgccgcatcgtgcccctgatggagcagggcaagcgctacgacgaggcctgcgccgagatctacggcgaccactacggcaagaagaacaccgaggagaagatctacctgcctcctatccccgccgacgagatccgcaaccccgtggtgctgcgcgccctgagccaggcccgcaaggtgatcaacggcgtggtgcgccgctacggcagccccgcccgcatccacatcgagaccgcccgcgaggtgggcaagagcttcaaggaccgcaaggagatcgagaagcgccaggaggagaaccgcaaggaccgcgagaaggccgccgccaagttccgcgagtacttccccaacttcgtgggcgagcccaagagcaaggacatcctgaagctgcgcctgtacgagcagcagcacggcaagtgcctgtacagcggcaaggagatcaacctgggccgcctgaacgagaagggctacgtggagatcgaccacgccctgcccttcagccgcacctgggacgacagcttcaacaacaaggtgctggtgctgggcagcgagaaccagaacaagggcaaccagaccccctacgagtacttcaacggcaaggacaacagccgcgagtggcaggagttcaaggcccgcgtggagaccagccgcttcccccgcagcaagaagcagcgcatcctgctgcagaagttcgacgaggacggcttcaaggagcgcaacctgaacgacacccgctacgtgaaccgcttcctgtgccagttcgtggccgaccgcatgcgcctgaccggcaagggcaagaagcgcgtgttcgccagcaacggccagatcaccaacctgctgcgcggcttctggggcctgcgcaaggtgcgcgccgagaacgaccgccaccacgccctggacgccgtggtggtggcctgcagcaccgtggccatgcagcagaagatcacccgcttcgtgcgctacaaggagatgaacgccttcgacggtaaaaccatcgacaaggagaccggcgaggtgctgcaccagaagacccacttcccccagccctgggagttcttcgcccaggaggtgatgatccgcgtgttcggcaagcccgacggcaagcccgagttcgaggaggccgacacccccgagaagctgcgcaccctgctggccgagaagctgagcagccgccctgaggccgtgcacgagtacgtgactcctctgttcgtgagccgcgcccccaaccgcaagatgagcggtcagggtcacatggagaccgtgaagagcgccaagcgcctggacgagggcgtgagcgtgctgcgcgtgcccctgacccagctgaagctgaaggacctggagaagatggtgaaccgcgagcgcgagcccaagctgtacgaggccctgaaggcccgcctggaggcccacaaggacgaccccgccaaggccttcgccgagcccttctacaagtacgacaaggccggcaaccgcacccagcaggtgaaggccgtgcgcgtggagcaggtgcagaagaccggcgtgtgggtgcgcaaccacaacggcatcgccgacaacgccaccatggtgcgcgtggacgtgttcgagaagggcgacaagtactacctggtgcccatctacagctggcaggtggccaagggcatcctgcccgaccgcgccgtggtgcagggcaaggacgaggaggactggcagctgatcgacgacagcttcaacttcaagttcagcctgcaccccaacgacctggtggaggtgatcaccaagaaggcccgcatgttcggctacttcgccagctgccaccgcggcaccggcaacatcaacatccgcatccacgacctggaccacaagatcggcaagaacggcatcctggagggcatcggcgtgaagaccgccctgagcttccagaagtaccagatcgacgagctgggcaaggagatccgcccctgccgcctgaagaagcgccctcctgtgcgcgcggccgcagatccaaaaaagaagagaaaggtagatccaaaaaagaagagaaaggtagatccaaaaaagaagagaaaggtagatacggccgcatag

SEQ ID NO: 22 - DNA, 3468 bp, Neisseria meningitidis
atggccgccttcaagcccaaccccatcaactacatcctgggcctggccatcggcatcgccagcgtgggctgggccatggtggagatcgacgaggacgagaaccccatctgcctgatcgacctgggtgtgcgcgtgttcgagcgcgctgaggtgcccaagactggtgacagtctggctatggctcgccggcttgctcgctctgttcggcgccttactcgccggcgcgctcaccgccttctgcgcgctcgccgcctgctgaagcgcgagggtgtgctgcaggctgccgacttcgacgagaacggcctgatcaagagcctgcccaacactccttggcagctgcgcgctgccgctctggaccgcaagctgactcctctggagtggagcgccgtgctgctgcacctgatcaagcaccgcggctacctgagccagcgcaagaacgagggcgagaccgccgacaaggagctgggtgctctgctgaagggcgtggccgacaacgcccacgccctgcagactggtgacttccgcactcctgctgagctggccctgaacaagttcgagaaggagagcggccacatccgcaaccagcgcggcgactacagccacaccttcagccgcaaggacctgcaggccgagctgatcctgctgttcgagaagcagaaggagttcggcaacccccacgtgagcggcggcctgaaggagggcatcgagaccctgctgatgacccagcgccccgccctgagcggcgacgccgtgcagaagatgctgggccactgcaccttcgagccagccgagcccaaggccgccaagaacacctacaccgccgagcgcttcatctggctgaccaagctgaacaacctgcgcatcctggagcagggcagcgagcgccccctgaccgacaccgagcgcgccaccctgatggacgagccctaccgcaagagcaagctgacctacgcccaggcccgcaagctgctgggtctggaggacaccgccttcttcaagggcctgcgctacggcaaggacaacgccgaggccagcaccctgatggagatgaaggcctaccacgccatcagccgcgccctggagaaggagggcctgaaggacaagaagagtcctctgaacctgagccccgagctgcaggacgagatcggcaccgccttcagcctgttcaagaccgacgaggacatcaccggccgcctgaaggaccgcatccagcccgagatcctggaggccctgctgaagcacatcagcttcgacaagttcgtgcagatcagcctgaaggccctgcgccgcatcgtgcccctgatggagcagggcaagcgctacgacgaggcctgcgccgagatctacggcgaccactacggcaagaagaacaccgaggagaagatctacctgcctcctatccccgccgacgagatccgcaaccccgtggtgctgcgcgccctgagccaggcccgcaaggtgatcaacggcgtggtgcgccgctacggcagccccgcccgcatccacatcgagaccgcccgcgaggtgggcaagagcttcaaggaccgcaaggagatcgagaagcgccaggaggagaaccgcaaggaccgcgagaaggccgccgccaagttccgcgagtacttccccaacttcgtgggcgagcccaagagcaaggacatcctgaagctgcgcctgtacgagcagcagcacggcaagtgcctgtacagcggcaaggagatcaacctgggccgcctgaacgagaagggctacgtggagatcgccgctgccctgcccttcagccgcacctgggacgacagcttcaacaacaaggtgctggtgctgggcagcgaggctcagaacaagggcaaccagaccccctacgagtacttcaacggcaaggacaacagccgcgagtggcaggagttcaaggcccgcgtggagaccagccgcttcccccgcagcaagaagcagcgcatcctgctgcagaagttcgacgaggacggcttcaaggagcgcaacctgaacgacacccgctacgtgaaccgcttcctgtgccagttcgtggccgaccgcatgcgcctgaccggcaagggcaagaagcgcgtgttcgccagcaacggccagatcaccaacctgctgcgcggcttctggggcctgcgcaaggtgcgcgccgagaacgaccgccaccacgccctggacgccgtggtggtggcctgcagcaccgtggccatgcagcagaagatcacccgcttcgtgcgctacaaggagatgaacgccttcgacggtaaaaccatcgacaaggagaccggcgaggtgctgcaccagaagacccacttcccccagccctgggagttcttcgcccaggaggtgatgatccgcgtgttcggcaagcccgacggcaagcccgagttcgaggaggccgacacccccgagaagctgcgcaccctgctggccgagaagctgagcagccgccctgaggccgtgcacgagtacgtgactcctctgttcgtgagccgcgcccccaaccgcaagatgagcggtcagggtcacatggagaccgtgaagagcgccaagcgcctggacgagggcgtgagcgtgctgcgcgtgcccctgacccagctgaagctgaaggacctggagaagatggtgaaccgcgagcgcgagcccaagctgtacgaggccctgaaggcccgcctggaggcccacaaggacgaccccgccaaggccttcgccgagcccttctacaagtacgacaaggccggcaaccgcacccagcaggtgaaggccgtgcgcgtggagcaggtgcagaagaccggcgtgtgggtgcgcaaccacaacggcatcgccgacaacgccaccatggtgcgcgtggacgtgttcgagaagggcgacaagtactacctggtgcccatctacagctggcaggtggccaagggcatcctgcccgaccgcgccgtggtgcagggcaaggacgaggaggactggcagctgatcgacgacagcttcaacttcaagttcagcctgcaccccaacgacctggtggaggtgatcaccaagaaggcccgcatgttcggctacttcgccagctgccaccgcggcaccggcaacatcaacatccgcatccacgacctggaccacaagatcggcaagaacggcatcctggagggcatcggcgtgaagaccgccctgagcttccagaagtaccagatcgacgagctgggcaaggagatccgcccctgccgcctgaagaagcgccctcctgtgcgcagcagggctgaccccaagaagaagaggaaggtggaggccagcggttccggacgggctgacgcattggacgattttgatctggatatgctgggaagtgacgccctcgatgattttgaccttgacatgcttggttcggatgcccttgatgactttgacctcgacatgctcggcagtgacgcccttgatgatttcgacctggacatgctgattaactctagatga

SEQ ID NO: 23 - DNA, 3489 bp, Neisseria meningitidis
atgcccaagaagaagaggaaggtggccgccttcaagcccaaccccatcaactacatcctgggcctggccatcggcatcgccagcgtgggctgggccatggtggagatcgacgaggacgagaaccccatctgcctgatcgacctgggtgtgcgcgtgttcgagcgcgctgaggtgcccaagactggtgacagtctggctatggctcgccggcttgctcgctctgttcggcgccttactcgccggcgcgctcaccgccttctgcgcgctcgccgcctgctgaagcgcgagggtgtgctgcaggctgccgacttcgacgagaacggcctgatcaagagcctgcccaacactccttggcagctgcgcgctgccgctctggaccgcaagctgactcctctggagtggagcgccgtgctgctgcacctgatcaagcaccgcggctacctgagccagcgcaagaacgagggcgagaccgccgacaaggagctgggtgctctgctgaagggcgtggccgacaacgcccacgccctgcagactggtgacttccgcactcctgctgagctggccctgaacaagttcgagaaggagagcggccacatccgcaaccagcgcggcgactacagccacaccttcagccgcaaggacctgcaggccgagctgatcctgctgttcgagaagcagaaggagttcggcaacccccacgtgagcggcggcctgaaggagggcatcgagaccctgctgatgacccagcgccccgccctgagcggcgacgccgtgcagaagatgctgggccactgcaccttcgagccagccgagcccaaggccgccaagaacacctacaccgccgagcgcttcatctggctgaccaagctgaacaacctgcgcatcctggagcagggcagcgagcgccccctgaccgacaccgagcgcgccaccctgatggacgagccctaccgcaagagcaagctgacctacgcccaggcccgcaagctgctgggtctggaggacaccgccttcttcaagggcctgcgctacggcaaggacaacgccgaggccagcaccctgatggagatgaaggcctaccacgccatcagccgcgccctggagaaggagggcctgaaggacaagaagagtcctctgaacctgagccccgagctgcaggacgagatcggcaccgccttcagcctgttcaagaccgacgaggacatcaccggccgcctgaaggaccgcatccagcccgagatcctggaggccctgctgaagcacatcagcttcgacaagttcgtgcagatcagcctgaaggccctgcgccgcatcgtgcccctgatggagcagggcaagcgctacgacgaggcctgcgccgagatctacggcgaccactacggcaagaagaacaccgaggagaagatctacctgcctcctatccccgccgacgagatccgcaaccccgtggtgctgcgcgccctgagccaggcccgcaaggtgatcaacggcgtggtgcgccgctacggcagccccgcccgcatccacatcgagaccgcccgcgaggtgggcaagagcttcaaggaccgcaaggagatcgagaagcgccaggaggagaaccgcaaggaccgcgagaaggccgccgccaagttccgcgagtacttccccaacttcgtgggcgagcccaagagcaaggacatcctgaagctgcgcctgtacgagcagcagcacggcaagtgcctgtacagcggcaaggagatcaacctgggccgcctgaacgagaagggctacgtggagatcgccgctgccctgcccttcagccgcacctgggacgacagcttcaacaacaaggtgctggtgctgggcagcgaggctcagaacaagggcaaccagaccccctacgagtacttcaacggcaaggacaacagccgcgagtggcaggagttcaaggcccgcgtggagaccagccgcttcccccgcagcaagaagcagcgcatcctgctgcagaagttcgacgaggacggcttcaaggagcgcaacctgaacgacacccgctacgtgaaccgcttcctgtgccagttcgtggccgaccgcatgcgcctgaccggcaagggcaagaagcgcgtgttcgccagcaacggccagatcaccaacctgctgcgcggcttctggggcctgcgcaaggtgcgcgccgagaacgaccgccaccacgccctggacgccgtggtggtggcctgcagcaccgtggccatgcagcagaagatcacccgcttcgtgcgctacaaggagatgaacgccttcgacggtaaaaccatcgacaaggagaccggcgaggtgctgcaccagaagacccacttcccccagccctgggagttcttcgcccaggaggtgatgatccgcgtgttcggcaagcccgacggcaagcccgagttcgaggaggccgacacccccgagaagctgcgcaccctgctggccgagaagctgagcagccgccctgaggccgtgcacgagtacgtgactcctctgttcgtgagccgcgcccccaaccgcaagatgagcggtcagggtcacatggagaccgtgaagagcgccaagcgcctggacgagggcgtgagcgtgctgcgcgtgcccctgacccagctgaagctgaaggacctggagaagatggtgaaccgcgagcgcgagcccaagctgtacgaggccctgaaggcccgcctggaggcccacaaggacgaccccgccaaggccttcgccgagcccttctacaagtacgacaaggccggcaaccgcacccagcaggtgaaggccgtgcgcgtggagcaggtgcagaagaccggcgtgtgggtgcgcaaccacaacggcatcgccgacaacgccaccatggtgcgcgtggacgtgttcgagaagggcgacaagtactacctggtgcccatctacagctggcaggtggccaagggcatcctgcccgaccgcgccgtggtgcagggcaaggacgaggaggactggcagctgatcgacgacagcttcaacttcaagttcagcctgcaccccaacgacctggtggaggtgatcaccaagaaggcccgcatgttcggctacttcgccagctgccaccgcggcaccggcaacatcaacatccgcatccacgacctggaccacaagatcggcaagaacggcatcctggagggcatcggcgtgaagaccgccctgagcttccagaagtaccagatcgacgagctgggcaaggagatccgcccctgccgcctgaagaagcgccctcctgtgcgcagcagggctgaccccaagaagaagaggaaggtggaggccagcggttccggacgggctgacgcattggacgattttgatctggatatgctgggaagtgacgccctcgatgattttgaccttgacatgcttggttcggatgcccttgatgactttgacctcgacatgctcggcagtgacgcccttgatgatttcgacctggacatgctgattaactctagatga

SEQ ID NO: 24 - DNA, 3249 bp, Neisseria meningitidis
atggctgccttcaaacctaattcaatcaactacatcctcggcctcgatatcggcatcgcatccgtcggctgggcgatggtagaaattgacgaagaagaaaaccccatccgcctgattgatttgggcgtgcgcgtatttgagcgtgccgaagtaccgaaaacaggcgactcccttgccatggcaaggcgtttggcgcgcagtgttcgccgcctgacccgccgtcgcgcccaccgcctgcttcggacccgccgcctattgaaacgcgaaggcgtattacaagccgccaattttgacgaaaacggcttgattaaatccttaccgaatacaccatggcaacttcgcgcagccgcattagaccgcaaactgacgcctttagagtggtcggcagtcttgttgcatttaatcaaacatcgcggctatttatcgcaacggaaaaacgagggcgaaactgccgataaggagcttggcgctttgcttaaaggcgtagccggcaatgcccatgccttacagacaggcgatttccgcacaccggccgaattggctttaaataaatttgagaaagaaagcggccatatccgcaatcagcgcagcgattattcgcatacgttcagccgcaaagatttacaggcggagctgattttgctgtttgaaaaacaaaaagaatttggcaatccgcatgtttcaggcggccttaaagaaggtattgaaaccctactgatgacgcaacgccctgccctgtccggcgatgccgttcaaaaaatgttggggcattgcaccttcgaaccggcagagccgaaagccgctaaaaacacctacacagccgaacgtttcatctggctgaccaagctgaacaacctgcgtattttagagcaaggcagcgagcggccattgaccgataccgaacgcgccacgcttatggacgagccatacagaaaatccaaactgacttacgcacaagcccgtaagctgctgggtttagaagataccgcctttttcaaaggcttgcgctatggtaaagacaatgccgaagcctcaacattgatggaaatgaaggcctaccatgccatcagccgtgcactggaaaaagaaggattgaaagacaaaaaatccccattaaacctttctcccgaattacaagacgaaatcggcacggcattctccctgttcaaaaccgatgaagacattacaggccgtctgaaagaccgtatacagcccgaaatcttagaagcgctgttgaaacacatcagcttcgataagttcgtccaaatttccttgaaagcattgcgccgaattgtgcctctaatggaacaaggcaaacgttacgatgaagcctgcgccgaaatctacggagaccattacggcaagaagaatacggaagaaaagatttatctgccgccgattcccgccgacgaaatccgcaaccccgtcgtcttgcgcgccttatctcaagcacgtaaggtcattaacggcgtggtacgccgttacggctccccagctcgtatccatattgaaactgcaagggaagtaggtaaatcgtttaaagaccgcaaagaaattgagaaacgccaagaagaaaaccgcaaagaccgggaaaaagccgccgccaaattccgagagtatttccccaattttgtcggagaacccaaatccaaagatattctgaaactgcgcctgtacgagcaacaacacggcaaatgcctgtattcgggcaaagaaatcaacttaggccgtctgaacgaaaaaggctatgtcgaaatcgaccatgccctgccgttctcgcgcacatgggacgacagtttcaacaataaagtactggtattgggcagcgaaaaccaaaacaaaggcaatcaaaccccttacgaatacttcaacggcaaagacaacagccgcgaatggcaggaatttaaagcgcgtgtcgaaaccagccgtttcccgcgcagtaaaaaacaacggattctgctgcaaaaattcgatgaagacggctttaaagaacgcaatctgaacgacacgcgctacgtcaaccgtttcctgtgtcaatttgttgccgaccgtatgcggctgacaggtaaaggcaagaaacgtgtctttgcatccaacggacaaattaccaatctgttgcgcggcttttggggattgcgcaaagtgcgtgcggaaaacgaccgccatcacgccttggacgccgtcgtcgttgcctgctcgaccgttgccatgcagcagaaaattacccgttttgtacgctataaagagatgaacgcgtttgacggtaaaaccatagacaaagaaacaggagaagtgctgcatcaaaaaacacacttcccacaaccttgggaatttttcgcacaagaagtcatgattcgcgtcttcggcaaaccggacggcaaacccgaattcgaagaagccgataccctagaaaaactgcgcacgttgcttgccgaaaaattatcatctcgccccgaagccgtacacgaatacgttacgccactgtttgtttcacgcgcgcccaatcggaagatgagcgggcaagggcatatggagaccgtcaaatccgccaaacgactggacgaaggcgtcagcgtgttgcgcgtaccgctgacacagttaaaactgaaagacttggaaaaaatggtcaatcgggagcgcgaacctaagctatacgaagcactgaaagcacggctggaagcacataaagacgatcctgccaaagcctttgccgagccgttttacaaatacgataaagcaggcaaccgcacccaacaggtaaaagccgtacgcgtagagcaagtacagaaaaccggcgtatgggtgcgcaaccataacggtattgccgacaacgcaaccatggtgcgcgtagatgtgtttgagaaaggcgacaagtattatctggtaccgatttacagttggcaggtagcgaaagggattttgccggatagggctgttgtacaaggaaaagatgaagaagattggcaacttattgatgatagtttcaactttaaattctcattacaccctaatgatttagtcgaggttataacaaaaaaagctagaatgtttggttactttgccagctgccatcgaggcacaggtaatatcaatatacgcattcatgatcttgatcataaaattggcaaaaatggaatactggaaggtatcggcgtcaaaaccgccctttcattccaaaaataccaaattgacgaactgggcaaagaaatcagaccatgccgtctgaaaaaacgcccgcctgtccgttaa

SEQ ID NO: 25 - DNA, 4188 bp, Treponema denticola
atgaaaaaggaaattaaggattattttctcggattggatgtaggaaccggatcggttggttgggcagttactgatactgactataaactcttaaaggctaatcgtaaagacctttggggaatgaggtgttttgagacggcggaaactgcggaagtgagaaggcttcacaggggggctaggcgccgtattgagagaagaaaaaaaagaataaagctgcttcaagagcttttttcccaagaaattgcaaaaacagatgagggatttttccaaagaatgaaggaaagccctttctatgcagaagacaagactatattacaggaaaacactctttttaatgataaagattttgccgataagacctaccataaagcctatcctaccataaaccatctgataaaggcttggattgaaaacaaggtaaagccggatccaaggttattatacttagcctgtcataatattataaaaaaaagaggtcattttttattcgagggcgatttcgattcagaaaatcagtttgatacttctatacaagccctttttgaatatctgcgtgaagatatggaagtcgatattgatgccgatagccaaaaagtaaaagagattttaaaggatagctctttaaaaaattccgaaaaacaaagccgcctaaataagattttaggactgaaaccctccgacaaacaaaaaaaagctattactaatttaatatcaggcaacaaaataaactttgccgatctttatgataatccggatttaaaggatgcggagaaaaatagtatatctttttcgaaagatgattttgatgctttgagtgatgatcttgcttccattctaggagattcttttgagcttttattaaaagcaaaggctgtatataactgctcggttctttccaaggtaataggcgatgaacagtatctttcttttgcaaaggtaaaaatatatgaaaagcataaaaccgatttgactaaattaaaaaatgttataaaaaagcatttcccaaaagattataaaaaagtattcggatacaataaaaacgaaaaaaataacaacaattactccggatatgtaggcgtatgtaaaaccaagagtaaaaaactaattataaacaattctgtaaatcaagaagatttttacaaatttttaaaaactatcctttcagcaaaatccgagataaaggaagtaaatgatatattgaccgaaattgaaacagggacttttttacctaaacagatatctaaaagcaatgcggagattccttatcaattacgcaagatggagctggaaaaaatattatcaaacgcagaaaaacatttttcctttttaaaacaaaaagatgaaaaaggtttatctcacagtgaaaagattataatgcttttaacatttaagattccttattatattggacctataaacgataaccataaaaaattttttcccgatagatgctgggtagtaaaaaaagaaaaatcgccttccggtaaaactactccatggaacttttttgatcatatcgataaagaaaaaacagctgaagcatttattacaagcagaaccaatttttgcacatatttagtaggggaatccgttttaccaaaaagttctcttttatattccgagtataccgttttaaatgaaatcaacaatttacagattatcattgacggaaaaaatatctgcgatattaaactaaaacaaaaaatatacgaagatttatttaaaaaatataaaaagattacacaaaaacaaatttcaacttttatcaaacacgaaggtatttgcaataaaactgatgaagtaattattctaggtatcgataaagaatgtacatcttcgttaaaatcatatatagaacttaaaaacatattcggaaagcaagtagatgaaatttctacaaagaatatgcttgaagaaattatacgatgggctactatctatgatgaaggagaaggcaaaacaatacttaaaacaaaaataaaagccgaatatggaaaatattgttctgatgaacagatcaaaaaaattctaaatcttaaattttcaggttggggccgcttgtcacgcaaattccttgaaaccgtcacatcagaaatgccgggttttagcgaaccggtaaatataataactgcaatgcgggaaactcaaaataatttaatggagttgcttagcagtgaatttacatttactgaaaatattaaaaagataaattcgggatttgaagatgctgaaaagcaattttcatatgacggtttggttaagcctctgtttttatcaccatcggtaaaaaaaatgttgtggcagactctaaagcttgtaaaagaaatatcgcatattacccaagcccctcctaaaaaaatatttatagaaatggcaaagggtgcagagcttgaacctgcgaggactaagacaagattaaaaattttacaagacttatacaataactgtaaaaatgatgcggatgcttttagttccgagataaaagacctttcaggtaaaatagaaaatgaagataatttaaggcttcgaagcgacaaactttatctttattacacgcagcttggaaagtgcatgtattgcggtaaaccgattgaaataggccatgtatttgatacaagcaactatgatatagatcatatttatccccaatccaagattaaagatgacagtataagtaatcgggttttagtatgcagcagctgcaataaaaataaggaagataaatatcctttgaagtctgaaattcaatcaaagcaaaggggcttttggaattttttacaacgaaataactttataagccttgaaaaattgaataggttaacaagggccactccaatctcggatgacgaaacggcaaaattcattgccagacagcttgtagaaacaagacaggcgacaaaagtagctgcaaaagtattagaaaaaatgtttcccgaaactaagattgtttattctaaagctgaaaccgtatcaatgtttagaaataaattcgatattgtaaaatgcagagaaataaacgattttcatcatgctcatgatgcatatttaaatattgttgtcggaaatgtatataatacaaaatttacaaataatccttggaactttataaaggagaaacgggataatccaaagattgccgatacttacaattattataaagtttttgattatgatgtaaaaagaaataatattacggcatgggaaaaaggaaaaacaattatcactgtgaaggatatgcttaaaagaaatacccctatttatacacgccaagccgcctgcaaaaaaggagaactctttaaccaaaccattatgaaaaaaggattgggccagcatcctctaaaaaaagaaggtcctttttctaatatttcaaaatatgggggctataataaagtctctgctgcatattatactcttatagaatacgaagaaaaagggaataaaatacgaagcttagaaaccatccctctatatttggtaaaagacattcaaaaagatcaagatgtattaaagagttacttaacagatctgctagggaaaaaagaatttaagattttggttcctaaaataaaaatcaactccctcttaaaaattaacggtttcccttgtcatataacagggaaaaccaatgattctttcttactgcgtccggctgttcagttttgctgttcaaataatgaagttctttattttaaaaaaattataagattcagtgaaataagaagtcaaagagaaaagataggaaaaacaatttctccttatgaagacttatcctttagatcttatatcaaagaaaatttatggaaaaagacaaaaaatgatgaaataggagaaaaggagttttatgaccttcttcaaaagaagaatttggaaatctatgatatgcttttaacaaaacataaggatactatttataaaaaaagacctaactctgcaactattgatatcttagtcaaaggaaaagaaaagtttaaatctttaataatcgaaaatcagtttgaagttattttagagattttaaaactgttttctgccactagaaatgtatcagacttacaacatataggcggaagcaaatattcaggagttgcaaagataggaaataaaatatctagtcttgataactgtattttaatttaccaatcaataacaggtatttttgaaaaaaggattgatttgttaaaggtatga

SEQ ID NO: 26 - DNA, 4188 bp, Treponema denticola
atgaagaaggagatcaaggactacttcctgggcctggacgtgggcaccggcagcgtgggctgggccgtgaccgacaccgactacaagctgctgaaggccaaccgcaaggacctgtggggcatgcgctgcttcgagactgctgagaccgccgaggtgcgccggctgcaccgcggtgctcgccggcgcatcgagcgccgcaagaagcgcatcaagctgctgcaggagctgttcagccaggagatcgccaagaccgacgagggcttcttccagcgcatgaaggagagccccttctacgccgaggacaagaccatcctgcaggagaacaccctgttcaacgacaaggacttcgccgacaagacctaccacaaggcctaccccaccatcaaccacctgatcaaggcctggatcgagaacaaggtgaagcccgaccctcgcctgctgtacctggcctgccacaacatcatcaagaagcgcggccacttcctgttcgagggcgacttcgacagcgagaaccagttcgacaccagcatccaggccctgttcgagtacctgcgcgaggacatggaggtggacatcgacgccgacagccagaaggtgaaggagatcctgaaggacagcagcctgaagaacagcgagaagcagagccgcctgaacaagatcctgggcctgaagcccagcgacaagcagaagaaggccatcaccaacctgatcagcggcaacaagatcaacttcgccgacctgtacgacaaccccgacctgaaggacgccgagaagaacagcatcagcttcagcaaggacgacttcgacgccctgagcgacgacctggccagcatcctgggcgacagcttcgagctgctgctgaaggccaaggccgtgtacaactgcagcgtgctgagcaaggtgatcggcgacgagcagtacctgagcttcgccaaggtgaagatctacgagaagcacaagaccgaccttaccaagctgaagaacgtgatcaagaagcacttccccaaggactacaagaaggtgttcggctacaacaagaacgagaagaacaacaacaactacagcggctacgtgggcgtgtgcaagaccaagagcaagaagctgatcatcaacaacagcgtgaaccaggaggacttctacaagttcctgaagaccatcctgagcgccaagagcgagatcaaggaggtgaacgacatcctgaccgagatcgagaccggcaccttcctgcccaagcagatcagcaagagcaacgccgagatcccctaccagctgcgcaagatggagctggagaagatcctgagcaacgccgagaagcacttcagcttcctgaagcagaaggacgagaagggcctgagccacagcgagaagatcatcatgctgctgaccttcaagatcccctactacatcggccccatcaacgacaaccacaagaagttcttccccgaccgctgctgggtggtgaagaaggagaagagccccagcggcaagaccaccccctggaacttcttcgaccacatcgacaaggagaagaccgccgaggccttcatcaccagccgcaccaacttctgcacatacctggtgggcgagagcgtgctgcccaagagcagcctgctgtacagcgagtacaccgtgctgaacgagatcaacaacctgcagatcatcatcgacggcaagaacatctgcgacatcaagctgaagcagaagatctacgaggacctgttcaagaagtacaagaagatcacccagaagcagatcagcaccttcatcaagcacgagggcatctgcaacaagaccgacgaggtgatcatcctgggcatcgacaaggagtgcaccagcagcctgaagagctacatcgagctgaagaacatcttcggcaagcaggtggacgagatcagcaccaagaacatgctggaggagatcatccgctgggccaccatctacgacgagggcgagggcaagaccatcctgaagaccaagatcaaggccgagtacggcaagtactgcagcgacgagcagatcaagaagatcctgaacctgaagttcagcggctggggccgcctgagccgcaagttcctggagaccgtgaccagcgagatgcccggcttcagcgagcccgtgaacatcatcaccgccatgcgcgagacccagaacaacctgatggagctgctgagcagcgagttcaccttcaccgagaacatcaagaagatcaacagcggcttcgaggacgccgagaagcagttcagctacgacggcctggtgaagcccctgttcctgagccccagcgtgaagaagatgctgtggcagaccctgaagctggtgaaggagatcagccacatcacccaggctcctcctaagaagatcttcatcgagatggccaagggcgccgagctggagcctgctcgcaccaagacccgcctgaagatcctgcaggacctgtacaacaactgcaagaacgacgccgacgcattcagcagcgagatcaaggacctgagcggcaagatcgagaacgaggacaacctgcgcctgcgcagcgacaagctgtacctgtactacacccagctgggcaagtgcatgtactgcggcaagcccatcgagatcggccacgtgttcgacaccagcaactacgacatcgaccacatctacccccagagcaagatcaaggacgacagcatcagcaaccgcgtgctggtgtgcagcagctgcaacaagaacaaggaggacaagtaccctctgaagagcgagatccagagcaagcagcgcggcttctggaacttcctgcagcgcaacaacttcatcagcctggagaagctgaaccgcctgacccgcgccacccccatcagcgacgacgagaccgccaagttcatcgcccgccagctggtggagactcgccaagctaccaaggtggccgccaaggtgctggagaagatgttccccgagaccaagatcgtgtacagcaaggccgagaccgtgagcatgttccgcaacaagttcgacatcgtgaagtgccgcgagatcaacgacttccaccacgcccacgacgcctacctgaacatcgtggtgggcaacgtgtacaacaccaagttcaccaacaacccctggaatttcattaaggagaagcgcgacaaccccaagatcgccgacacctacaactactacaaggtgttcgactacgacgtgaagcgcaacaacatcaccgcctgggagaagggcaagaccatcatcaccgtgaaggacatgctgaagcgcaacacccccatctacacccgccaggccgcctgcaagaagggcgagctgttcaaccagaccatcatgaagaagggcctgggccagcaccccctgaagaaggagggccccttcagcaacatcagcaagtacggcggctacaacaaggtgagcgccgcctactacaccctgatcgagtacgaggagaagggcaacaagatccgcagcctggagaccatccccctgtacctggtgaaggacatccagaaggaccaggacgtgctgaagagctacctgaccgacctgctgggcaagaaggagttcaagatcctggtgcccaagatcaagatcaacagcctgctgaagatcaacggcttcccctgccacatcaccggcaagaccaacgacagcttcctgctgcgccccgccgtgcagttctgctgcagcaacaacgaggtgctgtacttcaagaagatcatccgcttcagcgagatccgcagccagcgcgagaagatcggcaagaccatcagcccctacgaggacctgagcttccgcagctacatcaaggagaacctgtggaagaagaccaagaacgacgagatcggcgagaaggagttctacgacctgctgcagaagaagaacctggagatctacgacatgctgctgaccaagcacaaggacaccatctacaagaagcgccccaacagcgccaccatcgacatcctggtgaagggcaaggagaagttcaagagcctgatcatcgagaaccagttcgaggtgatcctggagatcctgaagctgttcagcgccacccgcaacgtgagcgacctgcagcacatcggcggcagcaagtacagcggcgtggccaagatcggcaacaagatcagcagcctggacaactgcatcctgatctaccagagcatcaccggcatcttcgagaagcgcatcgacctgctgaaggtgtaa

SEQ ID NO: 27 - DNA, 4188 bp, Treponema denticola
atgaagaaggagatcaaggactacttcctgggcctggccgtgggcaccggcagcgtgggctgggccgtgaccgacaccgactacaagctgctgaaggccaaccgcaaggacctgtggggcatgcgctgcttcgagactgctgagaccgccgaggtgcgccggctgcaccgcggtgctcgccggcgcatcgagcgccgcaagaagcgcatcaagctgctgcaggagctgttcagccaggagatcgccaagaccgacgagggcttcttccagcgcatgaaggagagccccttctacgccgaggacaagaccatcctgcaggagaacaccctgttcaacgacaaggacttcgccgacaagacctaccacaaggcctaccccaccatcaaccacctgatcaaggcctggatcgagaacaaggtgaagcccgaccctcgcctgctgtacctggcctgccacaacatcatcaagaagcgcggccacttcctgttcgagggcgacttcgacagcgagaaccagttcgacaccagcatccaggccctgttcgagtacctgcgcgaggacatggaggtggacatcgacgccgacagccagaaggtgaaggagatcctgaaggacagcagcctgaagaacagcgagaagcagagccgcctgaacaagatcctgggcctgaagcccagcgacaagcagaagaaggccatcaccaacctgatcagcggcaacaagatcaacttcgccgacctgtacgacaaccccgacctgaaggacgccgagaagaacagcatcagcttcagcaaggacgacttcgacgccctgagcgacgacctggccagcatcctgggcgacagcttcgagctgctgctgaaggccaaggccgtgtacaactgcagcgtgctgagcaaggtgatcggcgacgagcagtacctgagcttcgccaaggtgaagatctacgagaagcacaagaccgaccttaccaagctgaagaacgtgatcaagaagcacttccccaaggactacaagaaggtgttcggctacaacaagaacgagaagaacaacaacaactacagcggctacgtgggcgtgtgcaagaccaagagcaagaagctgatcatcaacaacagcgtgaaccaggaggacttctacaagttcctgaagaccatcctgagcgccaagagcgagatcaaggaggtgaacgacatcctgaccgagatcgagaccggcaccttcctgcccaagcagatcagcaagagcaacgccgagatcccctaccagctgcgcaagatggagctggagaagatcctgagcaacgccgagaagcacttcagcttcctgaagcagaaggacgagaagggcctgagccacagcgagaagatcatcatgctgctgaccttcaagatcccctactacatcggccccatcaacgacaaccacaagaagttcttccccgaccgctgctgggtggtgaagaaggagaagagccccagcggcaagaccaccccctggaacttcttcgaccacatcgacaaggagaagaccgccgaggccttcatcaccagccgcaccaacttctgcacatacctggtgggcgagagcgtgctgcccaagagcagcctgctgtacagcgagtacaccgtgctgaacgagatcaacaacctgcagatcatcatcgacggcaagaacatctgcgacatcaagctgaagcagaagatctacgaggacctgttcaagaagtacaagaagatcacccagaagcagatcagcaccttcatcaagcacgagggcatctgcaacaagaccgacgaggtgatcatcctgggcatcgacaaggagtgcaccagcagcctgaagagctacatcgagctgaagaacatcttcggcaagcaggtggacgagatcagcaccaagaacatgctggaggagatcatccgctgggccaccatctacgacgagggcgagggcaagaccatcctgaagaccaagatcaaggccgagtacggcaagtactgcagcgacgagcagatcaagaagatcctgaacctgaagttcagcggctggggccgcctgagccgcaagttcctggagaccgtgaccagcgagatgcccggcttcagcgagcccgtgaacatcatcaccgccatgcgcgagacccagaacaacctgatggagctgctgagcagcgagttcaccttcaccgagaacatcaagaagatcaacagcggcttcgaggacgccgagaagcagttcagctacgacggcctggtgaagcccctgttcctgagccccagcgtgaagaagatgctgtggcagaccctgaagctggtgaaggagatcagccacatcacccaggctcctcctaagaagatcttcatcgagatggccaagggcgccgagctggagcctgctcgcaccaagacccgcctgaagatcctgcaggacctgtacaacaactgcaagaacgacgccgacgcattcagcagcgagatcaaggacctgagcggcaagatcgagaacgaggacaacctgcgcctgcgcagcgacaagctgtacctgtactacacccagctgggcaagtgcatgtactgcggcaagcccatcgagatcggccacgtgttcgacaccagcaactacgacatcgctgctatctacccccagagcaagatcaaggacgacagcatcagcaaccgcgtgctggtgtgcagcagctgcgccaagaacaaggaggacaagtaccctctgaagagcgagatccagagcaagcagcgcggcttctggaacttcctgcagcgcaacaacttcatcagcctggagaagctgaaccgcctgacccgcgccacccccatcagcgacgacgagaccgccaagttcatcgcccgccagctggtggagactcgccaagctaccaaggtggccgccaaggtgctggagaagatgttccccgagaccaagatcgtgtacagcaaggccgagaccgtgagcatgttccgcaacaagttcgacatcgtgaagtgccgcgagatcaacgacttccaccacgcccacgacgcctacctgaacatcgtggtgggcaacgtgtacaacaccaagttcaccaacaacccctggaatttcattaaggagaagcgcgacaaccccaagatcgccgacacctacaactactacaaggtgttcgactacgacgtgaagcgcaacaacatcaccgcctgggagaagggcaagaccatcatcaccgtgaaggacatgctgaagcgcaacacccccatctacacccgccaggccgcctgcaagaagggcgagctgttcaaccagaccatcatgaagaagggcctgggccagcaccccctgaagaaggagggccccttcagcaacatcagcaagtacggcggctacaacaaggtgagcgccgcctactacaccctgatcgagtacgaggagaagggcaacaagatccgcagcctggagaccatccccctgtacctggtgaaggacatccagaaggaccaggacgtgctgaagagctacctgaccgacctgctgggcaagaaggagttcaagatcctggtgcccaagatcaagatcaacagcctgctgaagatcaacggcttcccctgccacatcaccggcaagaccaacgacagcttcctgctgcgccccgccgtgcagttctgctgcagcaacaacgaggtgctgtacttcaagaagatcatccgcttcagcgagatccgcagccagcgcgagaagatcggcaagaccatcagcccctacgaggacctgagcttccgcagctacatcaaggagaacctgtggaagaagaccaagaacgacgagatcggcgagaaggagttctacgacctgctgcagaagaagaacctggagatctacgacatgctgctgaccaagcacaaggacaccatctacaagaagcgccccaacagcgccaccatcgacatcctggtgaagggcaaggagaagttcaagagcctgatcatcgagaaccagttcgaggtgatcctggagatcctgaagctgttcagcgccacccgcaacgtgagcgacctgcagcacatcggcggcagcaagtacagcggcgtggccaagatcggcaacaagatcagcagcctggacaactgcatcctgatctaccagagcatcaccggcatcttcgagaagcgcatcgacctgctgaaggtgtaa

SEQ ID NO: 28 - protein, 1053 aa, Streptococcus aureas
MKRNYILGLDIGITSVGYGIIDYETRDVIDAGVRLFKEANVENNEGRRSKRGARRLKRRRRHRIQRVKKLLFDYNLLTDHSELSGINPYEARVKGLSQKLSEEEFSAALLHLAKRRGVHNVNEVEEDTGNELSTKEQISRNSKALEEKYVAELQLERLKKDGEVRGSINRFKTSDYVKEAKQLLKVQKAYHQLDQSFIDTYIDLLETRRTYYEGPGEGSPFGWKDIKEWYEMLMGHCTYFPEELRSVKYAYNADLYNALNDLNNLVITRDENEKLEYYEKFQIIENVFKQKKKPTLKQIAKEILVNEEDIKGYRVTSTGKPEFTNLKVYHDIKDITARKEIIENAELLDQIAKILTIYQSSEDIQEELTNLNSELTQEEIEQISNLKGYTGTHNLSLKAINLILDELWHTNDNQIAIFNRLKLVPKKVDLSQQKEIPTTLVDDFILSPVVKRSFIQSIKVINAIIKKYGLPNDIIIELAREKNSKDAQKMINEMQKRNRQTNERIEEIIRTTGKENAKYLIEKIKLHDMQEGKCLYSLEAIPLEDLLNNPFNYEVDHIIPRSVSFDNSFNNKVLVKQEENSKKGNRTPFQYLSSSDSKISYETFKKHILNLAKGKGRISKTKKEYLLEERDINRFSVQKDFINRNLVDTRYATRGLMNLLRSYFRVNNLDVKVKSINGGFTSFLRRKWKFKKERNKGYKHHAEDALIIANADFIFKEWKKLDKAKKVMENQMFEEKQAESMPEIETEQEYKEIFITPHQIKHIKDFKDYKYSHRVDKKPNRELINDTLYSTRKDDKGNTLIVNNLNGLYDKDNDKLKKLINKSPEKLLMYHHDPQTYQKLKLIMEQYGDEKNPLYKYYEETGNYLTKYSKKDNGPVIKKIKYYGNKLNAHLDITDDYPNSRNKVVKLSLKPYRFDVYLDNGVYKFVTVKNLDVIKKENYYEVNSKCYEEAKKLKKISNQAEFIASFYNNDLIKINGELYRVIGVNNDLLNRIEVNMIDITYREYLENMNDKRPPRIIKTIASKTQSIKKYSTDILGNLYEVKSKKHPQIIKKG

SEQ ID NO: 29 - DNA, 3162 bp, Streptococcus aureas
atgaaaaggaattatatcttaggattagatatcggaattacatcagtgggttatggaattattgattatgaaactagagatgtcatagatgcgggcgtacgtttatttaaagaggctaatgttgaaaataatgaaggacgacgatcaaaaagaggtgccagaaggcttaagaggcgtcgtagacatagaatacaaagagtaaagaaacttttatttgattacaatttgttgacagatcatagtgagctaagtggaatcaatccttacgaggcgcgcgtaaagggattaagtcaaaaattaagtgaagaggaattttctgcggcattgctacatttagcaaagcgtagaggtgtacataatgttaatgaagtggaagaagatacaggtaatgaattatccactaaagaacaaatttcaagaaatagtaaagcgttagaagagaagtatgttgcagaattacagttggaacgtttgaaaaaagacggtgaagtgagaggttcgattaaccgtttcaaaacatctgactatgtaaaagaagcaaagcagttattaaaagtacaaaaagcatatcatcaacttgatcaatcatttatagacacttatattgatttattggaaacaagaagaacatattatgagggaccaggtgaaggtagcccatttggatggaaagatattaaagaatggtatgaaatgttaatgggacattgtacgtatttcccagaagaattacgtagtgtgaaatatgcctataatgctgatttatataatgcgctgaatgatttgaacaacttggttattacacgagatgagaatgagaagctagagtattatgaaaaattccaaattatcgagaatgtctttaaacaaaagaaaaagccgacgcttaaacaaattgcgaaggaaatcttggtgaatgaagaagacatcaaaggctatcgtgtcacaagtacaggtaaaccagaatttacaaacttgaaagtttatcacgatatcaaagatattacagcaagaaaagaaattatcgagaatgcagagctactcgatcaaatagctaaaatattaactatttaccagtcatcagaagatatacaagaagaattaacaaacctaaattcagaattgacacaagaagagattgaacaaatttcaaacttgaaaggttatacaggaactcataacctttcactaaaggcaataaatttaatattagacgaattgtggcatacgaacgataatcaaatagctattttcaatcgtttgaaacttgtacctaaaaaggtagatttaagccaacaaaaagaaattcctactactttagttgatgattttatactgtctccagtagtgaaacgttcatttatacaatctattaaagttattaacgctattattaaaaaatacggtttgccaaatgatattattattgaacttgcgagagaaaagaattctaaagatgcacaaaaaatgattaatgaaatgcagaagagaaatcgtcaaacgaatgaacgtattgaggaaattataagaacgacaggtaaagaaaatgctaaatatttaattgaaaaaattaagctgcacgatatgcaagaagggaaatgtttatactcgttagaagcaatccctctagaagatttacttaataatccattcaattacgaagtagaccatatcattccacgttctgtttctttcgataactctttcaataataaagtgttggtgaaacaagaagaaaatagtaaaaaaggtaatagaacgccatttcaatatttaagttcttcagattctaaaataagttatgagacattcaaaaagcatattttaaatcttgctaaaggcaaaggtagaatctctaagacgaaaaaagaatatttgttagaagaacgagatatcaatcgcttcagtgtccaaaaagattttattaaccgtaacttagtagatacacgctatgcgacaagagggttaatgaacttattaagatcttattttagagtgaataacttagatgtcaaagtgaaatcgattaatggcggattcacaagtttcttaagaaggaaatggaagttcaaaaaagaaagaaataagggctacaaacaccatgctgaagatgcactgattattgcgaacgctgattttattttcaaagaatggaaaaaactagataaagctaaaaaagtgatggaaaatcaaatgtttgaagaaaagcaagctgaaagtatgcctgaaattgagactgagcaagagtataaagaaatttttataacgcctcatcaaattaaacatattaaggattttaaagattataaatattcacatagagttgataaaaagccgaatagagagttaataaatgatacattatattctacgagaaaagatgacaagggtaatacattaatcgttaataacttaaatggtttatacgataaagataatgataaattgaaaaaattaattaataaatcacctgaaaaattattgatgtatcatcatgatccacaaacatatcaaaaattaaaattgatcatggaacaatatggcgatgagaaaaatccgctttataaatattatgaagaaacaggcaattacttaacaaaatatagtaaaaaagataacggaccagtcatcaaaaaaattaaatattatggtaacaagctaaatgcgcatttagatattacggatgattatccaaatagcagaaataaagtagtaaaactttcattaaaaccatatcgctttgatgtttatttagataatggggtatataaatttgtgacagttaaaaatttagatgttatcaaaaaagaaaactactatgaagttaattcaaagtgttatgaagaagcaaaaaaactgaagaaaattagtaatcaagcagaatttatcgcaagtttttacaataatgacttgattaagattaacggagaattatatagagtcataggtgtaaataatgatctacttaacagaattgaagtaaatatgatagacatcacatatagagaatatttagagaacatgaatgataaaagaccacctagaataattaaaacaatagcaagcaaaacacaatctattaaaaagtattctacagatattctaggcaatctttatgaagtgaagagtaaaaagcatcctcaaatcataaagaaaggatga

SEQ ID NO: 30 - protein, 1629 aa, Francisella tularensis
MNFKILPIAIDLGVKNTGVFSAFYQKGTSLERLDNKNGKVYELSKDSYTLLMNNRTARRHQRRGIDRKQLVKRLFKLIWTEQLNLEWDKDTQQAISFLFNRRGFSFITDGYSPEYLNIVPEQVKAILMDIFDDYNGEDDLDSYLKLATEQESKISEIYNKLMQKILEFKLMKLCTDIKDDKVSTKTLKEITSYEFELLADYLANYSESLKTQKFSYTDKQGNLKELSYYHHDKYNIQEFLKRHATINDRILDTLLTDDLDIWNFNFEKFDFDKNEEKLQNQEDKDHIQAHLHHFVFAVNKIKSEMASGGRHRSQYFQEITNVLDENNHQEGYLKNFCENLHNKKYSNLSVKNLVNLIGNLSNLELKPLRKYFNDKIHAKADHWDEQKFTETYCHWILGEWRVGVKDQDKKDGAKYSYKDLCNELKQKVTKAGLVDFLLELDPCRTIPPYLDNNNRKPPKCQSLILNPKFLDNQYPNWQQYLQELKKLQSIQNYLDSFETDLKVLKSSKDQPYFVEYKSSNQQIASGQRDYKDLDARILQFIFDRVKASDELLLNEIYFQAKKLKQKASSELEKLESSKKLDEVIANSQLSQILKSQHTNGIFEQGTFLHLVCKYYKQRQRARDSRLYIMPEYRYDKKLHKYNNTGRFDDDNQLLTYCNHKPRQKRYQLLNDLAGVLQVSPNFLKDKIGSDDDLFISKWLVEHIRGFKKACEDSLKIQKDNRGLLNHKINIARNTKGKCEKEIFNLICKIEGSEDKKGNYKHGLAYELGVLLFGEPNEASKPEFDRKIKKFNSIYSFAQIQQIAFAERKGNANTCAVCSADNAHRMQQIKITEPVEDNKDKIILSAKAQRLPAIPTRIVDGAVKKMATILAKNIVDDNWQNIKQVLSAKHQLHIPIITESNAFEFEPALADVKGKSLKDRRKKALERISPENIFKDKNNRIKEFAKGISAYSGANLTDGDFDGAKEELDHIIPRSHKKYGTLNDEANLICVTRGDNKNKGNRIFCLRDLADNYKLKQFETTDDLEIEKKIADTIWDANKKDFKFGNYRSFINLTPQEQKAFRHALFLADENPIKQAVIRAINNRNRTFVNGTQRYFAEVLANNIYLRAKKENLNTDKISFDYFGIPTIGNGRGIAEIRQLYEKVDSDIQAYAKGDKPQASYSHLIDAMLAFCIAADEHRNDGSIGLEIDKNYSLYPLDKNTGEVFTKDIFSQIKITDNEFSDKKLVRKKAIEGFNTHRQMTRDGIYAENYLPILIHKELNEVRKGYTWKNSEEIKIFKGKKYDIQQLNNLVYCLKFVDKPISIDIQISTLEELRNILTTNNIAATAEYYYINLKTQKLHEYYIENYNTALGYKKYSKEMEFLRSLAYRSERVKIKSIDDVKQVLDKDSNFIIGKITLPFKKEWQRLYREWQNTTIKDDYEFLKSFFNVKSITKLHKKVRKDFSLPISTNEGKFLVKRKTWDNNFIYQILNDSDSRADGTKPFIPAFDISKNEIVEAIIDSFTSKNIFWLPKNIELQKVDNKNIFAIDTSKWFEVETPSDLRDIGIATIQYKIDNNSRPKVRVKLDYVIDDDSKINYFMNHSLLKSRYPDKVLEILKQSTIIEFESSGFNKTIKEMLGMKLAGIYNETSNN

SEQ ID NO: 31 - DNA, 4890 bp, Francisella tularensis
atgaatttcaaaatattgccaatagcaatagatttaggtgttaaaaatactggtgtctttagcgcattttatcaaaaaggaacttctcttgagagattggataataaaaatggcaaagtatatgaactatcaaaagattcttatactttattgatgaataatagaacagcaagaagacatcaaagaagagggatagatagaaagcagctagtcaaaaggctctttaagcttatttggacagagcagctaaatttagagtgggataaagacactcaacaagcaattagctttttatttaatcgtagaggttttagttttattactgatggttattcgcctgaatatttaaatattgttccagagcaagtaaaagcgatacttatggatatatttgatgattacaacggtgaagatgatttagacagttatttaaaattagctactgagcaagaaagcaaaatttctgaaatttataacaagctaatgcaaaaaatattagagtttaaattaatgaaattatgtactgatattaaggatgataaagtaagtactaaaacgcttaaagaaatcacaagctatgaatttgagttattagctgattatttagcaaactatagcgagagtttaaaaacacaaaaatttagttatacagataaacaaggtaatttaaaagagctaagctactatcatcatgataaatataatattcaagaatttctaaagcgacatgctactataaatgatcgaattttagatactcttttaactgatgatttagatatttggaattttaattttgagaaatttgattttgataagaatgaagaaaagcttcagaatcaggaagataaagatcatatacaagcgcatttacatcattttgtttttgcagtaaataaaataaaaagtgaaatggcaagtggtggtcgtcatcgtagccaatattttcaagagataacaaatgtgctagatgaaaataatcatcaagagggatatctcaagaatttctgtgaaaatttgcataataaaaaatattcaaatttaagtgttaaaaatttagttaatctaattggtaacctaagtaatttagagctaaaaccgctaagaaaatattttaatgacaaaattcacgcaaaagctgatcattgggatgagcaaaagtttacagaaacttattgccactggatattaggagagtggcgagtaggtgtcaaagatcaagataagaaagatggcgctaaatatagttataaagatctgtgtaatgaattaaaacaaaaagttactaaggctggtttggtagattttttattagagttagatccatgtagaactataccaccatatctggataacaataaccgtaaaccaccaaaatgtcaaagtttgattttaaatccgaagtttttagataatcaatatccaaactggcaacaatatttacaagaattaaagaaactacaaagtattcaaaattatttagacagttttgaaactgatttaaaagtcttaaagtcaagtaaagatcaaccatattttgttgaatacaagagttcaaatcagcaaatagcaagtggtcaaagagattataaagatttagatgctcgaatattacagtttatatttgatagggtaaaagctagtgatgagttgcttttgaatgagatttattttcaggctaaaaaacttaaacaaaaagctagctctgagttagaaaaactcgagtcgagcaaaaagctagatgaagttatagcaaatagtcaactatcacagatactaaagtctcaacatacaaatggtatttttgaacagggtacttttttgcatttggtttgtaaatattataaacaaagacaaagagcgagagactctaggctatatattatgcctgaatatcgttatgataaaaaactacataaatataacaatacaggcaggtttgatgatgataatcagctgctaacatattgtaatcataagccaagacaaaaaagataccaattgttaaatgatttagctggggtgttgcaggtatcacctaattttttgaaagataaaattggttctgatgatgatctatttattagcaaatggttggtagagcatattagaggatttaaaaaagcttgtgaagatagtttaaaaatacaaaaagacaatagaggattattaaatcataaaataaatatagctaggaatacaaaaggcaaatgtgaaaaagaaatatttaatttaatatgtaaaatagaaggttcagaagataaaaaaggtaattacaagcatggtttagcttacgaattaggagtacttttatttggtgaacctaatgaagctagtaaacctgagttcgatagaaaaattaaaaaatttaactcaatatacagttttgcacagattcaacaaattgcttttgcagagcgtaaaggcaatgctaacacttgtgcagtttgtagtgctgataatgctcatagaatgcaacaaattaagatcactgagcctgtagaggacaataaagataagataatcttaagtgccaaagctcagagactaccagcgattccaactagaatagttgacggtgcggttaagaaaatggcaactatattagctaaaaatatagttgatgataattggcagaatatcaaacaagttttatcagcaaaacatcagttacatatacctattatcacagaatcaaatgcttttgagtttgaaccagcattagctgatgtaaaaggtaagagcctaaaagataggagaaaaaaagcattagagagaataagtcctgaaaatatattcaaggataaaaacaatagaataaaagaatttgctaaaggtatatcagcatatagtggtgctaatttaactgatggcgattttgatggtgcaaaagaagaattagatcatataatacctcgttcacataaaaaatacggtactctaaatgatgaagcaaatctaatttgtgtaactcgtggtgataataaaaataaaggtaatagaattttctgcctacgtgatcttgcagataactataaactaaaacagtttgagacaactgatgatttagaaattgaaaagaagatagctgatacaatctgggatgctaacaagaaagattttaaatttggtaattatcgtagttttattaacctaacaccacaagagcagaaagcatttcgtcacgcgctatttctggctgatgaaaatcctatcaaacaagcagtcataagagcgataaataatcgtaatcgtacatttgtaaatggcactcaacgctattttgcagaagtactggcaaacaatatctatctaagggctaaaaaagaaaatctaaatacagataaaatttcatttgattattttggtattccaactataggtaatggtagaggtattgctgaaatccgtcaactttatgaaaaagttgatagtgatatacaagcttatgcaaaaggtgataaacctcaagctagctactctcacctaatagatgcgatgctggctttttgtattgctgctgatgaacacagaaatgatggaagtataggtctagaaatcgataaaaattatagtttatatccattagataaaaatacaggagaagtctttaccaaagatatttttagtcaaattaaaattactgataatgagtttagcgataaaaaattagtaagaaaaaaagctatagagggctttaacacgcatagacaaatgactagagatggcatttatgcagaaaattacctaccaatactaatccataaagaactaaatgaagttagaaaaggctatacttggaaaaatagtgaagaaataaaaatattcaaaggtaaaaagtacgatatacaacaattgaataaccttgtgtattgtctaaaatttgtagataaacctatatctatagatatacaaattagtaccttagaagagttaagaaatatattaacaacaaataatatagctgctacagcagaatactattatataaatctaaaaacccaaaaattacatgagtattatatcgaaaactataatactgccttaggttataaaaaatacagtaaagaaatggagtttttgagaagcttagcttatcgtagcgaaagggtaaaaattaaatcaatagatgatgtaaagcaggttttggataaggatagtaactttatcatcggtaagattactttaccatttaaaaaagagtggcaaagactatatcgtgagtggcaaaatacaactatcaaagatgattatgagtttttaaaatcattctttaatgttaaaagtattactaagttgcataaaaaagttagaaaagatttctctttacctatttctacaaatgaaggtaaattcctggtcaaaagaaaaacatgggataacaattttatctatcagatattaaatgattctgattctagagcagacggaacaaagccatttattccagcttttgacatttctaaaaatgaaatagtcgaagccataattgattcatttacatcaaaaaatattttttggctgcctaaaaatatagaattacaaaaggtggataataaaaacatttttgctatagatactagtaaatggttcgaagtagaaacacctagtgatcttagagacattggaatagcaacaattcaatacaagatagataataattctcgccctaaagtcagagttaaacttgattatgttatcgatgatgatagtaagataaattattttatgaatcattctttattaaaatcaagatatcctgacaaagttttagaaattttaaaacaatcaactattatagaatttgaaagttcaggttttaataaaactatcaaagaaatgcttggtatgaaattagcaggtatttataatgaaacatctaataattag

SEQ ID NO: 32 - DNA, 3903 bp, Francisella tularensis
  Francisella tularensis subsp. novicida (strain U112)
atgtcaatttatcaagaatttgttaataaatatagtttaagtaaaactctaagatttgagttaatcccacagggtaaaacacttgaaaacataaaagcaagaggtttgattttagatgatgagaaaagagctaaagactacaaaaaggctaaacaaataattgataaatatcatcagttttttatagaggagatattaagttcggtttgtattagcgaagatttattacaaaactattctgatgtttattttaaacttaaaaagagtgatgatgataatctacaaaaagattttaaaagtgcaaaagatacgataaagaaacaaatatctgaatatataaaggactcagagaaatttaagaatttgtttaatcaaaaccttatcgatgctaaaaaagggcaagagtcagatttaattctatggctaaagcaatctaaggataatggtatagaactatttaaagccaatagtgatatcacagatatagatgaggcgttagaaataatcaaatcttttaaaggttggacaacttattttaagggttttcatgaaaatagaaaaaatgtttatagtagcaatgatattcctacatctattatttataggatagtagatgataatttgcctaaatttctagaaaataaagctaagtatgagagtttaaaagacaaagctccagaagctataaactatgaacaaattaaaaaagatttggcagaagagctaacctttgatattgactacaaaacatctgaagttaatcaaagagttttttcacttgatgaagtttttgagatagcaaactttaataattatctaaatcaaagtggtattactaaatttaatactattattggtggtaaatttgtaaatggtgaaaatacaaagagaaaaggtataaatgaatatataaatctatactcacagcaaataaatgataaaacactcaaaaaatataaaatgagtgttttatttaagcaaattttaagtgatacagaatctaaatcttttgtaattgataagttagaagatgatagtgatgtagttacaacgatgcaaagtttttatgagcaaatagcagcttttaaaacagtagaagaaaaatctattaaagaaacactatctttattatttgatgatttaaaagctcaaaaacttgatttgagtaaaatttattttaaaaatgataaatctcttactgatctatcacaacaagtttttgatgattatagtgttattggtacagcggtactagaatatataactcaacaaatagcacctaaaaatcttgataaccctagtaagaaagagcaagaattaatagccaaaaaaactgaaaaagcaaaatacttatctctagaaactataaagcttgccttagaagaatttaataagcatagagatatagataaacagtgtaggtttgaagaaatacttgcaaactttgcggctattccgatgatatttgatgaaatagctcaaaacaaagacaatttggcacagatatctatcaaatatcaaaatcaaggtaaaaaagacctacttcaagctagtgcggaagatgatgttaaagctatcaaggatcttttagatcaaactaataatctcttacataaactaaaaatatttcatattagtcagtcagaagataaggcaaatattttagacaaggatgagcatttttatctagtatttgaggagtgctactttgagctagcgaatatagtgcctctttataacaaaattagaaactatataactcaaaagccatatagtgatgagaaatttaagctcaattttgagaactcgactttggctaatggttgggataaaaataaagagcctgacaatacggcaattttatttatcaaagatgataaatattatctgggtgtgatgaataagaaaaataacaaaatatttgatgataaagctatcaaagaaaataaaggcgagggttataaaaaaattgtttataaacttttacctggcgcaaataaaatgttacctaaggttttcttttctgctaaatctataaaattttataatcctagtgaagatatacttagaataagaaatcattccacacatacaaaaaatggtagtcctcaaaaaggatatgaaaaatttgagtttaatattgaagattgccgaaaatttatagatttttataaacagtctataagtaagcatccggagtggaaagattttggatttagattttctgatactcaaagatataattctatagatgaattttatagagaagttgaaaatcaaggctacaaactaacttttgaaaatatatcagagagctatattgatagcgtagttaatcagggtaaattgtacctattccaaatctataataaagatttttcagcttatagcaaagggcgaccaaatctacatactttatattggaaagcgctgtttgatgagagaaatcttcaagatgtggtttataagctaaatggtgaggcagagcttttttatcgtaaacaatcaatacctaaaaaaatcactcacccagctaaagaggcaatagctaataaaaacaaagataatcctaaaaaagagagtgtttttgaatatgatttaatcaaagataaacgctttactgaagataagtttttctttcactgtcctattacaatcaattttaaatctagtggagctaataagtttaatgatgaaatcaatttattgctaaaagaaaaagcaaatgatgttcatatattaagtatagatagaggtgaaagacatttagcttactatactttggtagatggtaaaggcaatatcatcaaacaagatactttcaacatcattggtaatgatagaatgaaaacaaactaccatgataagcttgctgcaatagagaaagatagggattcagctaggaaagactggaaaaagataaataacatcaaagagatgaaagagggctatctatctcaggtagttcatgaaatagctaagctagttatagagtataatgctattgtggtttttgaggatttaaattttggatttaaaagagggcgtttcaaggtagagaagcaggtctatcaaaagttagaaaaaatgctaattgagaaactaaactatctagttttcaaagataatgagtttgataaaactgggggagtgcttagagcttatcagctaacagcaccttttgagacttttaaaaagatgggtaaacaaacaggtattatctactatgtaccagctggttttacttcaaaaatttgtcctgtaactggttttgtaaatcagttatatcctaagtatgaaagtgtcagcaaatctcaagagttctttagtaagtttgacaagatttgttataaccttgataagggctattttgagtttagttttgattataaaaactttggtgacaaggctgccaaaggcaagtggactatagctagctttgggagtagattgattaactttagaaattcagataaaaatcataattgggatactcgagaagtttatccaactaaagagttggagaaattgctaaaagattattctatcgaatatgggcatggcgaatgtatcaaagcagctatttgcggtgagagcgacaaaaagttttttgctaagctaactagtgtcctaaatactatcttacaaatgcgtaactcaaaaacaggtactgagttagattatctaatttcaccagtagcagatgtaaatggcaatttctttgattcgcgacaggcgccaaaaaatatgcctcaagatgctgatgccaatggtgcttatcatattgggctaaaaggtctgatgctactaggtaggatcaaaaataatcaagagggcaaaaaactcaatttggttatcaaaaatgaagagtattttgagttcgtgcagaataggaataactaa

SEQ ID NO: 33 - protein, 1300 aa, Francisella tularensis
  Francisella tularensis subsp. novicida (strain U112)
MSIYQEFVNKYSLSKTLRFELIPQGKTLENIKARGLILDDEKRAKDYKKAKQIIDKYHQFFIEEILSSVCISEDLLQNYSDVYFKLKKSDDDNLQKDFKSAKDTIKKQISEYIKDSEKFKNLFNQNLIDAKKGQESDLILWLKQSKDNGIELFKANSDITDIDEALEIIKSFKGWTTYFKGFHENRKNVYSSNDIPTSIIYRIVDDNLPKFLENKAKYESLKDKAPEAINYEQIKKDLAEELTFDIDYKTSEVNQRVFSLDEVFEIANFNNYLNQSGITKFNTIIGGKFVNGENTKRKGINEYINLYSQQINDKTLKKYKMSVLFKQILSDTESKSFVIDKLEDDSDVVTTMQSFYEQIAAFKTVEEKSIKETLSLLFDDLKAQKLDLSKIYFKNDKSLTDLSQQVFDDYSVIGTAVLEYITQQIAPKNLDNPSKKEQELIAKKTEKAKYLSLETIKLALEEFNKHRDIDKQCRFEEILANFAAIPMIFDEIAQNKDNLAQISIKYQNQGKKDLLQASAEDDVKAIKDLLDQTNNLLHKLKIFHISQSEDKANILDKDEHFYLVFEECYFELANIVPLYNKIRNYITQKPYSDEKFKLNFENSTLANGWDKNKEPDNTAILFIKDDKYYLGVMNKKNNKIFDDKAIKENKGEGYKKIVYKLLPGANKMLPKVFFSAKSIKFYNPSEDILRIRNHSTHTKNGSPQKGYEKFEFNIEDCRKFIDFYKQSISKHPEWKDFGFRFSDTQRYNSIDEFYREVENQGYKLTFENISESYIDSVVNQGKLYLFQIYNKDFSAYSKGRPNLHTLYWKALFDERNLQDVVYKLNGEAELFYRKQSIPKKITHPAKEAIANKNKDNPKKESVFEYDLIKDKRFTEDKFFFHCPITINFKSSGANKFNDEINLLLKEKANDVHILSIDRGERHLAYYTLVDGKGNIIKQDTFNIIGNDRMKTNYHDKLAAIEKDRDSARKDWKKINNIKEMKEGYLSQVVHEIAKLVIEYNAIVVFEDLNFGFKRGRFKVEKQVYQKLEKMLIEKLNYLVFKDNEFDKTGGVLRAYQLTAPFETFKKMGKQTGIIYYVPAGFTSKICPVTGFVNQLYPKYESVSKSQEFFSKFDKICYNLDKGYFEFSFDYKNFGDKAAKGKWTIASFGSRLINFRNSDKNHNWDTREVYPTKELEKLLKDYSIEYGHGECIKAAICGESDKKFFAKLTSVLNTILQMRNSKTGTELDYLISPVADVNGNFFDSRQAPKNMPQDADANGAYHIGLKGLMLLGRIKNNQEGKKLNLVIKNEEYFEFVQNRNN

SEQ ID NO: 34 - DNA, 3924 bp, Acidaminococcus sp.
  Acidaminococcus sp. (strain BV3L6)
atgacccaatttgaaggttttaccaatttataccaagtttcgaagacccttcgttttgaactgattccccaaggaaaaacactcaaacatatccaggagcaagggttcattgaggaggataaagctcgcaatgaccattacaaagagttaaaaccaatcattgaccgcatctataagacttatgctgatcaatgtctccaactggtacagcttgactgggagaatctatctgcagccatagactcctatcgtaaggaaaaaaccgaagaaacacgaaatgcgctgattgaggagcaagcaacatatagaaatgcgattcatgactactttataggtcggacggataatctgacagatgccataaataagcgccatgctgaaatctataaaggactttttaaagctgaacttttcaatggaaaagttttaaagcaattagggaccgtaaccacgacagaacatgaaaatgctctactccgttcgtttgacaaatttacgacctatttttccggcttttatgaaaaccgaaaaaatgtctttagcgctgaagatatcagcacggcaattccccatcgaatcgtccaggacaatttccctaaatttaaggaaaactgccatatttttacaagattgataaccgcagttccttctttgcgggagcattttgaaaatgtcaaaaaggccattggaatctttgttagtacgtctattgaagaagtcttttcctttcccttttataatcaacttctaacccaaacgcaaattgatctttataatcaacttctcggcggcatatctagggaagcaggcacagaaaaaatcaagggacttaatgaagttctcaatctggctatccaaaaaaatgatgaaacagcccatataatcgcgtccctgccgcatcgttttattcctctttttaaacaaattctttccgatcgaaatacgttatcctttattttggaagaattcaaaagcgatgaggaagtcatccaatccttctgcaaatataaaaccctcttgagaaacgaaaatgtactggagactgcagaagcccttttcaatgaattaaattccattgatttgactcatatctttatttcccataaaaagttagaaaccatctcttcagcgctttgtgaccattgggataccttgcgcaatgcactttacgaaagacggatttctgaactcactggcaaaataacaaaaagtgccaaagaaaaagttcaaaggtcattaaaacatgaggatataaatctccaagaaattatttctgctgcaggaaaagaactatcagaagcattcaaacaaaaaacaagtgaaattctttcccatgcccatgctgcacttgaccagcctcttcccacaacattaaaaaaacaggaagaaaaagaaatcctcaaatcacagctcgattcgcttttaggcctttatcatcttcttgattggtttgctgtcgatgaaagcaatgaagtcgacccagaattctcagcacggctgacaggcattaaactagaaatggaaccaagcctttcgttttataataaagcaagaaattatgcgacaaaaaagccctattcggtggaaaaatttaaattgaattttcaaatgccaacccttgcctctggttgggatgtcaataaagaaaaaaataatggagctattttattcgtaaaaaatggtctctattaccttggtatcatgcctaaacagaaggggcgctataaagccctgtcttttgagccgacagaaaaaacatcagaaggattcgataagatgtactatgactacttcccagatgccgcaaaaatgattcctaagtgttccactcagctaaaggctgtaaccgctcattttcaaactcataccacccccattcttctctcaaataatttcattgaacctcttgaaatcacaaaagaaatttatgacctgaacaatcctgaaaaggagcctaaaaagtttcaaacggcttatgcaaagaagacaggcgatcaaaaaggctatagagaagcgctttgcaaatggattgactttacgcgggattttctctctaaatatacgaaaacaacttcaatcgatttatcttcactccgcccttcttcgcaatataaagatttaggggaatattacgccgaactgaatccgcttctctatcatatctccttccaacgaattgctgaaaaggaaatcatggatgctgtagaaacgggaaaattgtatctgttccaaatctacaataaggattttgcgaagggccatcacgggaaaccaaatctccacaccctgtattggacaggtctcttcagtcctgaaaaccttgcgaaaaccagcatcaaacttaatggtcaagcagaattgttctatcgacctaaaagccgcatgaagcggatggcccatcgtcttggggaaaaaatgctgaacaaaaaactaaaggaccagaagacaccgattccagataccctctaccaagaactgtacgattatgtcaaccaccggctaagccatgatctttccgatgaagcaagggccctgcttccaaatgttatcaccaaagaagtctcccatgaaattataaaggatcggcggtttacttccgataaatttttcttccatgttcccattacactgaattatcaagcagccaatagtcccagtaaattcaaccagcgtgtcaatgcctaccttaaggagcatccggaaacgcccatcattggtatcgatcgtggagaacgcaatctaatctatattaccgtcattgacagtactgggaaaattttggagcagcgttccctgaataccatccagcaatttgactaccaaaaaaaattggacaacagggaaaaagagcgtgttgccgcccgtcaagcctggtccgtcgtcggaacgatcaaagaccttaaacaaggctacttgtcacaggtcatccatgaaattgtagacctgatgattcattaccaagctgttgtcgtccttgaaaacctcaacttcggatttaaatcaaaacggacaggcattgccgaaaaagcagtctaccaacaatttgaaaagatgctaatagataaactcaactgtttggttctcaaagattatcctgctgagaaagtgggaggcgtcttaaacccgtatcaacttacagatcagttcacgagctttgcaaaaatgggcacgcaaagcggcttccttttctatgtaccggccccttatacctcaaagattgatcccctgactggttttgtcgatccctttgtatggaagaccattaaaaatcatgaaagtcggaagcatttcctagaaggatttgatttcctgcattatgatgtcaaaacaggtgattttatcctccattttaaaatgaatcggaatctctctttccagagagggcttcctggcttcatgccagcttgggatattgttttcgaaaagaatgaaacccaatttgatgcaaaagggacgcccttcattgcaggaaaacgaattgttcctgtaatcgaaaatcatcgttttacgggtcgttacagagacctctatcccgctaatgaactcattgcccttctggaagaaaaaggcattgtctttagagacggaagtaatatattacccaaacttttagaaaatgatgattctcatgcaattgatacgatggtcgccttgattcgcagtgtactccaaatgagaaacagcaatgccgcaacgggggaagactacatcaactctcccgttagggatctgaacggggtgtgtttcgacagtcgattccaaaatccagaatggccaatggatgcggatgccaacggagcttatcatattgccttaaaagggcagcttcttctgaaccacctcaaagaaagcaaagatctgaaattacaaaacggcatcagcaaccaagattggctggcctacattcaggaactgagaaactga

SEQ ID NO: 35 - protein, 1307 aa, Acidaminococcus sp.
  Acidaminococcus sp. (strain BV3L6)
MTQFEGFTNLYQVSKTLRFELIPQGKTLKHIQEQGFIEEDKARNDHYKELKPIIDRIYKTYADQCLQLVQLDWENLSAAIDSYRKEKTEETRNALIEEQATYRNAIHDYFIGRTDNLTDAINKRHAEIYKGLFKAELFNGKVLKQLGTVTTTEHENALLRSFDKFTTYFSGFYENRKNVFSAEDISTAIPHRIVQDNFPKFKENCHIFTRLITAVPSLREHFENVKKAIGIFVSTSIEEVFSFPFYNQLLTQTQIDLYNQLLGGISREAGTEKIKGLNEVLNLAIQKNDETAHIIASLPHRFIPLFKQILSDRNTLSFILEEFKSDEEVIQSFCKYKTLLRNENVLETAEALFNELNSIDLTHIFISHKKLETISSALCDHWDTLRNALYERRISELTGKITKSAKEKVQRSLKHEDINLQEIISAAGKELSEAFKQKTSEILSHAHAALDQPLPTTLKKQEEKEILKSQLDSLLGLYHLLDWFAVDESNEVDPEFSARLTGIKLEMEPSLSFYNKARNYATKKPYSVEKFKLNFQMPTLASGWDVNKEKNNGAILFVKNGLYYLGIMPKQKGRYKALSFEPTEKTSEGFDKMYYDYFPDAAKMIPKCSTQLKAVTAHFQTHTTPILLSNNFIEPLEITKEIYDLNNPEKEPKKFQTAYAKKTGDQKGYREALCKWIDFTRDFLSKYTKTTSIDLSSLRPSSQYKDLGEYYAELNPLLYHISFQRIAEKEIMDAVETGKLYLFQIYNKDFAKGHHGKPNLHTLYWTGLFSPENLAKTSIKLNGQAELFYRPKSRMKRMAHRLGEKMLNKKLKDQKTPIPDTLYQELYDYVNHRLSHDLSDEARALLPNVITKEVSHEIIKDRRFTSDKFFFHVPITLNYQAANSPSKFNQRVNAYLKEHPETPIIGIDRGERNLIYITVIDSTGKILEQRSLNTIQQFDYQKKLDNREKERVAARQAWSVVGTIKDLKQGYLSQVIHEIVDLMIHYQAVVVLENLNFGFKSKRTGIAEKAVYQQFEKMLIDKLNCLVLKDYPAEKVGGVLNPYQLTDQFTSFAKMGTQSGFLFYVPAPYTSKIDPLTGFVDPFVWKTIKNHESRKHFLEGFDFLHYDVKTGDFILHFKMNRNLSFQRGLPGFMPAWDIVFEKNETQFDAKGTPFIAGKRIVPVIENHRFTGRYRDLYPANELIALLEEKGIVFRDGSNILPKLLENDDSHAIDTMVALIRSVLQMRNSNAATGEDYINSPVRDLNGVCFDSRFQNPEWPMDADANGAYHIALKGQLLLNHLKESKDLKLQNGISNQDWLAYIQELRN

SEQ ID NO: 36 - DNA, 3741 bp, Lachnospiraceae bacterium
  Lachnospiraceae bacterium (strain ND2006)
atgcttaagaatgttggaattgataggttagatgttgaaaaagggagaaaaaatatgtctaaattagagaagtttacaaattgttactctttgtcaaaaacacttcgttttaaggcgattcctgttggaaaaacccaagaaaatattgataataaaagattgcttgtcgaggatgaaaaacgtgcagaagattataagggggttaaaaaattacttgataggtattatttatcatttattaatgatgttcttcattccattaaactaaagaatttaaataattatatttcgttgtttagaaagaaaactcggacggaaaaagaaaacaaagaattagaaaatttagagataaatttacgtaaagaaatcgctaaggcttttaagggtaatgaaggttataaatctttatttaagaaggatattatcgagacgatattgcctgaatttcttgatgataaagatgaaattgctttggttaattcatttaatggatttacaacggcatttaccggtttttttgataatagggaaaatatgttttcggaagaagctaaatcaacctcaattgcttttcgttgtattaatgagaatttaacaagatatatatcaaatatggatatatttgaaaaagttgatgcaattttcgataagcatgaagtacaggaaataaaagaaaaaattctaaacagtgattatgatgttgaagatttcttcgaaggagaattttttaattttgttcttacgcaagaaggtatcgatgtttataacgctataattggtggctttgtgacagaatccggagaaaaaataaaaggattaaatgaatatattaatttatataatcagaaaactaagcaaaaattaccgaagtttaagcctttatataaacaggttttatcagatagagagtcactttctttttatggcgaaggttatacatctgatgaggaagttttagaagtatttagaaatactcttaataagaattcagaaatattttcttcaattaagaaattggaaaagttatttaaaaacttcgatgaatattcaagtgcaggaattttcgtaaaaaatggaccggctatttctacaatttctaaggatatatttggagagtggaatgtaattagagacaaatggaatgcggagtacgatgatatacatttaaaaaagaaggctgtagtaacagaaaaatatgaagatgacaggcgtaaatcattcaaaaaaataggaagtttttcattggagcagttgcaagaatacgctgatgctgatctatctgtggtagagaagttaaaagaaatcattatccaaaaagtggatgagatatataaagtttatggctcgtcagaaaaattgttcgatgctgattttgtactagaaaaatcgttaaaaaagaatgatgcagttgtagcaataatgaaagatttactagattctgtgaagtcttttgaaaattatataaaagccttttttggagagggaaaagaaacaaatcgagatgaatcattttatggtgattttgttttggcatatgacattcttttgaaagtggatcatatttatgatgcaatacgaaattatgtgacacaaaaaccgtattcgaaagataagtttaaattatattttcaaaacccgcaatttatggggggctgggataaggataaagagacagactatagggcaactatacttagatatggctcaaagtattacttggcgattatggataaaaaatatgctaagtgcttgcaaaaaatagataaggatgatgtaaatggaaactatgaaaaaataaattataagttgcttccaggacctaataagatgcttccaaaggtgttttttagtaagaagtggatggcttattataatccgtcggaagatattcaaaaaatatataaaaatggaacatttaaaaaaggagatatgtttaatttaaatgattgtcataaattaattgatttctttaaggattcaatcagtcggtatccgaaatggagtaacgcatatgattttaacttttctgagaccgagaaatataaggatatagcaggtttttacagagaggttgaagaacaaggatataaagtatcatttgaaagtgcgtctaaaaaagaagttgataaattggtagaagaaggaaaattatacatgttccaaatttataataaagacttttcggataaaagtcatggaacgccaaatcttcatacaatgtattttaagttgctgtttgatgaaaataatcatggtcaaattaggctttctggtggtgctgagctattcatgcgacgtgcaagtttgaaaaaggaagaattagttgtgcatcctgccaatagcccgatagcgaataaaaacccggataatccaaagaaaacgactacgttgtcatatgatgtatacaaggacaaaagattttcggaagatcagtatgagttgcatatacctattgcaataaataaatgccctaaaaatatatttaagataaatacagaggttagagtgctgctgaagcatgatgataatccttatgttataggaattgataggggggagagaaatttactttacattgtggtggttgatggtaagggtaatattgtggagcaatattcgctgaatgaaataattaataattttaatggaattagaattaagacggattaccattcacttttggataaaaaggagaaggaaagatttgaagctcgtcaaaattggacgtctatagaaaacattaaagaactaaaagccggatatattagtcaggttgttcataagatatgtgagttggtagaaaaatatgatgcggtaattgcacttgaagatttgaattctggttttaagaatagtcgagttaaagttgaaaagcaagtatatcagaaatttgaaaaaatgctgattgataaacttaactatatggtagataagaaatctaatccttgcgctacgggtggtgctctgaaaggctatcaaattactaacaagtttgagagttttaagtcgatgagtacacaaaatggttttattttttatattccggcgtggttgactagcaaaattgatccgtcaacaggatttgtaaatttgttgaaaacaaagtatacgagcattgcagattcaaagaaatttataagttcttttgacagaattatgtatgtacctgaagaagatttattcgagtttgcattagattataagaatttttctcggacagacgcggattatataaaaaaatggaaactctatagctatggtaacaggattagaatatttagaaatcctaaaaaaaataatgtatttgattgggaagaggtatgtcttacatcagcctataaggaactttttaataaatatgggattaattatcagcaaggagatatacgagctctcttatgtgaacagagtgataaggcattctatagctcttttatggcattaatgtcactcatgctgcaaatgagaaatagtataacaggtaggacggatgtagattttttgatttcaccagtaaaaaattctgacggtattttttatgattccagaaattatgaagctcaggaaaatgcaatattaccgaaaaatgcagatgctaatggggcttataatatcgcaagaaaagttttgtgggctataggtcagtttaaaaaggctgaagatgaaaaacttgataaggttaaaattgcaatatcaaataaggaatggctcgaatatgcgcaaacaagtgttaagcattga

SEQ ID NO: 37 - protein, 1228 aa, Lachnospiraceae bacterium
  Lachnospiraceae bacterium (strain ND2006)
MSKLEKFTNCYSLSKTLRFKAIPVGKTQENIDNKRLLVEDEKRAEDYKGVKKLLDRYYLSFINDVLHSIKLKNLNNYISLFRKKTRTEKENKELENLEINLRKEIAKAFKGNEGYKSLFKKDIIETILPEFLDDKDEIALVNSFNGFTTAFTGFFDNRENMFSEEAKSTSIAFRCINENLTRYISNMDIFEKVDAIFDKHEVQEIKEKILNSDYDVEDFFEGEFFNFVLTQEGIDVYNAIIGGFVTESGEKIKGLNEYINLYNQKTKQKLPKFKPLYKQVLSDRESLSFYGEGYTSDEEVLEVFRNTLNKNSEIFSSIKKLEKLFKNFDEYSSAGIFVKNGPAISTISKDIFGEWNVIRDKWNAEYDDIHLKKKAVVTEKYEDDRRKSFKKIGSFSLEQLQEYADADLSVVEKLKEIIIQKVDEIYKVYGSSEKLFDADFVLEKSLKKNDAVVAIMKDLLDSVKSFENYIKAFFGEGKETNRDESFYGDFVLAYDILLKVDHIYDAIRNYVTQKPYSKDKFKLYFQNPQFMGGWDKDKETDYRATILRYGSKYYLAIMDKKYAKCLQKIDKDDVNGNYEKINYKLLPGPNKMLPKVFFSKKWMAYYNPSEDIQKIYKNGTFKKGDMFNLNDCHKLIDFFKDSISRYPKWSNAYDFNFSETEKYKDIAGFYREVEEQGYKVSFESASKKEVDKLVEEGKLYMFQIYNKDFSDKSHGTPNLHTMYFKLLFDENNHGQIRLSGGAELFMRRASLKKEELVVHPANSPIANKNPDNPKKTTTLSYDVYKDKRFSEDQYELHIPIAINKCPKNIFKINTEVRVLLKHDDNPYVIGIDRGERNLLYIVVVDGKGNIVEQYSLNEIINNFNGIRIKTDYHSLLDKKEKERFEARQNWTSIENIKELKAGYISQVVHKICELVEKYDAVIALEDLNSGFKNSRVKVEKQVYQKFEKMLIDKLNYMVDKKSNPCATGGALKGYQITNKFESFKSMSTQNGFIFYIPAWLTSKIDPSTGFVNLLKTKYTSIADSKKFISSFDRIMYVPEEDLFEFALDYKNFSRTDADYIKKWKLYSYGNRIRIFRNPKKNNVFDWEEVCLTSAYKELFNKYGINYQQGDIRALLCEQSDKAFYSSFMALMSLMLQMRNSITGRTDVDFLISPVKNSDGIFYDSRNYEAQENAILPKNADANGAYNIARKVLWAIGQFKKAEDEKLDKVKIAISNKEWLEYAQTSVKH

SEQ ID NO: 38 - protein, 1064 aa, Bradyrhizobium sp.
  Bradyrhizobium sp. BTAi1
MKRTSLRAYRLGVDLGANSLGWFVVWLDDHGQPEGLGPGGVRIFPDGRNPQSKQSNAAGRRLARSARRRRDRYLQRRGKLMGLLVKHGLMPADEPARKRLECLDPYGLRAKALDEVLPLHHVGRALFHLNQRRGLFANRAIEQGDKDASAIKAAAGRLQTSMQACGARTLGEFLNRRHQLRATVRARSPVGGDVQARYEFYPTRAMVDAEFEAIWAAQAPHHPTMTAEAHDTIREAIFSQRAMKRPSIGKCSLDPATSQDDVDGFRCAWSHPLAQRFRIWQDVRNLAVVETGPTSSRLGKEDQDKVARALLQTDQLSFDEIRGLLGLPSDARFNLESDRRDHLKGDATGAILSARRHFGPAWHDRSLDRQIDIVALLESALDEAAIIASLGTTHSLDEAAAQRALSALLPDGYCRLGLRAIKRVLPLMEAGRTYAEAASAAGYDHALLPGGKLSPTGYLPYYGQWLQNDVVGSDDERDTNERRWGRLPNPTVHIGIGQLRRVVNELIRWHGPPAEITVELTRDLKLSPRRLAELEREQAENQRKNDKRTSLLRKLGLPASTHNLLKLRLWDEQGDVASECPYTGEAIGLERLVSDDVDIDHLIPFSISWDDSAANKVVCMRYANREKGNRTPFEAFGHRQGRPYDWADIAERAARLPRGKRWRFGPGARAQFEELGDFQARLLNETSWLARVAKQYLAAVTHPHRIHVLPGRLTALLRATWELNDLLPGSDDRAAKSRKDHRHHAIDALVAALTDQALLRRMANAHDDTRRKIEVLLPWPTFRIDLETRLKAMLVSHKPDHGLQARLHEDTAYGTVEHPETEDGANLVYRKTFVDISEKEIDRIRDRRLRDLVRAHVAGERQQGKTLKAAVLSFAQRRDIAGHPNGIRHVRLTKSIKPDYLVPIRDKAGRIYKSYNAGENAFVDILQAESGRWIARATTVFQANQANESHDAPAAQPIMRVFKGDMLRIDHAGAEKFVKIVRLSPSNNLLYLVEHHQAGVFQTRHDDPEDSFRWLFASFDKLREWNAELVRIDTLGQPWRRKRGLETGSEDATRIGWTRPKKWP

SEQ ID NO: 39 - protein, 1035 aa, Candidatus Puniceispirillum marinum
MRRLGLDLGTNSIGWCLLDLGDDGEPVSIFRTGARIFSDGRDPKSLGSLKATRREARLTRRRRDRFIQRQKNLINALVKYGLMPADEIQRQALAYKDPYPIRKKALDEAIDPYEMGRAIFHINQRRGFKSNRKSADNEAGVVKQSIADLEMKLGEAGARTIGEFLADRQATNDTVRARRLSGTNALYEFYPDRYMLEQEFDTLWAKQAAFNPSLYIEAARERLKEIVFFQRKLKPQEVGRCIFLSDEDRISKALPSFQRFRIYQELSNLAWIDHDGVAHRITASLALRDHLFDELEHKKKLTFKAMRAILRKQGVVDYPVGFNLESDNRDHLIGNLTSCIMRDAKKMIGSAWDRLDEEEQDSFILMLQDDQKGDDEVRSILTQQYGLSDDVAEDCLDVRLPDGHGSLSKKAIDRILPVLRDQGLIYYDAVKEAGLGEANLYDPYAALSDKLDYYGKALAGHVMGASGKFEDSDEKRYGTISNPTVHIALNQVRAVVNELIRLHGKPDEVVIEIGRDLPMGADGKRELERFQKEGRAKNERARDELKKLGHIDSRESRQKFQLWEQLAKEPVDRCCPFTGKMMSISDLFSDKVEIEHLLPFSLTLDDSMANKTVCFRQANRDKGNRAPFDAFGNSPAGYDWQEILGRSQNLPYAKRWRFLPDAMKRFEADGGFLERQLNDTRYISRYTTEYISTIIPKNKIWVVTGRLTSLLRGFWGLNSILRGHNTDDGTPAKKSRDDHRHHAIDAIVVGMTSRGLLQKVSKAARRSEDLDLTRLFEGRIDPWDGFRDEVKKHIDAIIVSHRPRKKSQGALHNDTAYGIVEHAENGASTVVHRVPITSLGKQSDIEKVRDPLIKSALLNETAGLSGKSFENAVQKWCADNSIKSLRIVETVSIIPITDKEGVAYKGYKGDGNAYMDIYQDPTSSKWKGEIVSRFDANQKGFIPSWQSQFPTARLIMRLRINDLLKLQDGEIEEIYRVQRLSGSKILMAPHTEANVDARDRDKNDTFKLTSKSPGKLQSASARKVHISPTGLIREG

SEQ ID NO: 40 - protein, 1358 aa, Acidaminococcus sp.
MGKMYYLGLDIGTNSVGYAVTDPSYHLLKFKGEPMWGAHVFAAGNQSAERRSFRTSRRRLDRRQQRVKLVQEIFAPVISPIDPRFFIRLHESALWRDDVAETDKHIFFNDPTYTDKEYYSDYPTIHHLIVDLMESSEKHDPRLVYLAVAWLVAHRGHFLNEVDKDNIGDVLSFDAFYPEFLAFLSDNGVSPWVCESKALQATLLSRNSVNDKYKALKSLIFGSQKPEDNFDANISEDGLIQLLAGKKVKVNKLFPQESNDASFTLNDKEDAIEEILGTLTPDECEWIAHIRRLFDWAIMKHALKDGRTISESKVKLYEQHHHDLTQLKYFVKTYLAKEYDDIFRNVDSETTKNYVAYSYHVKEVKGTLPKNKATQEEFCKYVLGKVKNIECSEADKVDFDEMIQRLTDNSFMPKQVSGENRVIPYQLYYYELKTILNKAASYLPFLTQCGKDAISNQDKLLSIMTFRIPYFVGPLRKDNSEHAWLERKAGKIYPWNFNDKVDLDKSEEAFIRRMTNTCTYYPGEDVLPLDSLIYEKFMILNEINNIRIDGYPISVDVKQQVFGLFEKKRRVTVKDIQNLLLSLGALDKHGKLTGIDTTIHSNYNTYHHFKSLMERGVLTRDDVERIVERMTYSDDTKRVRLWLNNNYGTLTADDVKHISRLRKHDFGRLSKMFLTGLKGVHKETGERASILDFMWNTNDNLMQLLSECYTFSDEITKLQEAYYAKAQLSLNDFLDSMYISNAVKRPIYRTLAVVNDIRKACGTAPKRIFIEMARDGESKKKRSVTRREQIKNLYRSIRKDFQQEVDFLEKILENKSDGQLQSDALYLYFAQLGRDMYTGDPIKLEHIKDQSFYNIDHIYPQSMVKDDSLDNKVLVQSEINGEKSSRYPLDAAIRNKMKPLWDAYYNHGLISLKKYQRLTRSTPFTDDEKWDFINRQLVETRQSTKALAILLKRKFPDTEIVYSKAGLSSDFRHEFGLVKSRNINDLHHAKDAFLAIVTGNVYHERFNRRWFMVNQPYSVKTKTLFTHSIKNGNFVAWNGEEDLGRIVKMLKQNKNTIHFTRFSFDRKEGLFDIQPLKASTGLVPRKAGLDVVKYGGYDKSTAAYYLLVRFTLEDKKTQHKLMMIPVEGLYKARIDHDKEFLTDYAQTTISEILQKDKQKVINIMFPMGTRHIKLNSMISIDGFYLSIGGKSSKGKSVLCHAMVPLIVPHKIECYIKAMESFARKFKENNKLRIVEKFDKITVEDNLNLYELFLQKLQHNPYNKFFSTQFDVLTNGRSTFTKLSPEEQVQTLLNILSIFKTCRSSGCDLKSINGSAQAARIMISADLTGLSKKYSDIRLVEQSASGLFVSKSQNLLEYL

SEQ ID NO: 41 - protein, 1358 aa, Acidaminococcus sp.; identical to SEQ ID NO: 40
  Acidaminococcus sp. D21

SEQ ID NO: 42 - protein, 1138 aa, Acidothermus cellulolyticus
MGGSEVGTVPVTWRLGVDVGERSIGLAAVSYEEDKPKEILAAVSWIHDGGVGDERSGASRLALRGMARRARRLRRFRRARLRDLDMLLSELGWTPLPDKNVSPVDAWLARKRLAEEYVVDETERRRLLGYAVSHMARHRGWRNPWTTIKDLKNLPQPSDSWERTRESLEARYSVSLEPGTVGQWAGYLLQRAPGIRLNPTQQSAGRRAELSNATAFETRLRQEDVLWELRCIADVQGLPEDVVSNVIDAVFCQKRPSVPAERIGRDPLDPSQLRASRACLEFQEYRIVAAVANLRIRDGSGSRPLSLEERNAVIEALLAQTERSLTWSDIALEILKLPNESDLTSVPEEDGPSSLAYSQFAPFDETSARIAEFIAKNRRKIPTFAQWWQEQDRTSRSDLVAALADNSIAGEEEQELLVHLPDAELEALEGLALPSGRVAYSRLTLSGLTRVMRDDGVDVHNARKTCFGVDDNWRPPLPALHEATGHPVVDRNLAILRKFLSSATMRWGPPQSIVVELARGASESRERQAEEEAARRAHRKANDRIRAELRASGLSDPSPADLVRARLLELYDCHCMYCGAPISWENSELDHIVPRTDGGSNRHENLAITCGACNKEKGRRPFASWAETSNRVQLRDVIDRVQKLKYSGNMYWTRDEFSRYKKSVVARLKRRTSDPEVIQSIESTGYAAVALRDRLLSYGEKNGVAQVAVFRGGVTAEARRWLDISIERLFSRVAIFAQSTSTKRLDRRHHAVDAVVLTTLTPGVAKTLADARSRRVSAEFWRRPSDVNRHSTEEPQSPAYRQWKESCSGLGDLLISTAARDSIAVAAPLRLRPTGALHEETLRAFSEHTVGAAWKGAELRRIVEPEVYAAFLALTDPGGRFLKVSPSEDVLPADENRHIVLSDRVLGPRDRVKLFPDDRGSIRVRGGAAYIASFHHARVFRWGSSHSPSFALLRVSLADLAVAGLLRDGVDVFTAELPPWTPAWRYASIALVKAVESGDAKQVGWLVPGDELDFGPEGVTTAAGDLSMFLKYFPERHWVVTGFEDDKRINLKPAFLSAEQAEVLRTERSDRPDTLTEAGEILAQFFPRCWRATVAKVLCHPGLTVIRRTALGQPRWRRGHLPYSWRPWSADPWSGGTP

SEQ ID NO: 43 - protein, 1045 aa, Acidovorax avenae
MQKEKPLAYRLALDLGSTSLGWAVLRLSAPGEPSAVIRAGSRIFSDGRNPKDGSSLAVTRRAARAMRRRRDRLLKRKARMLAALERHGFFPQDEAARKALEKLNPYGLRARGLESALKPEEFGRALFHLNQRRGFQSNRKTDRKDSDSGALKQAIGTLRAQMHESGCRTVGEWFWKVRMERKPEGVKGQGVRARYRETPFTTDEGKKRIDKRYDLYVDRAMVAQEFDALWAAQATFAPALFNEAARAELRDILLHQRKLRPVQPGRCTLVPEEPRALLALPSTQRFRIYQEVNHLRVLHDELREEALTLAQRDQIVALLERQAKVTFTAMRKALGFSALFNLEDAKRDGLKGNATTAALGKKDLFGPLWAGFDTALQDEIVTQLMTEESEPRLIAWLQEHTGVDEARAQAIANAGLPEGYGSLGRTALARIVPELQRDVITYDKAVQAAGFAHHSDLGFSFEHDADEVERIGERTIASTGEIKPVFAFKQLPYYGRALQRHVAFAKENPRNDEERYGKIANPTVHIGLNQVRVVVNALMCRYGRPTEVVIELARDLKQSREQKLEAQQRQADNQKRNARIRRSIAEVLGISEERVRTLDIQKWILWEELSHDAADRRCPYSGVQISASMLLGERVEIEHILPFSMTLDDSLNNRTVALREANRIKRNRTPWDARTDFEAHGWSYDGILQRAERMPQRKRHRFAPDGYERWLGEDKDFLARALNDTRYLSRVAAEYLRLVCPGSATRVIPGQMTALLRGKFGLNDVLGLDGEKNRNDHRHHAVDACVIGVTDQRMMQRFAQANAQAREDGLTRLVEDMPLPWPTYRAHVERAVRHIWVSHKPDHGFEGAMMEETSYGILRDGTIKQRRKADGSAGREISRLIRITEPSQPQRHGVDAEGRPLPYKGYVGGSNYCLEITVNDKGKWEGQVISTFDAYRIVREGGLRQLRHSTQGQNGQALAMRLVIGDSVRLEVDEQERVMRIVKINGNNGQVFMAPVHEANVDARNSDKNEAFAYTSKIAGSFQKTKARQVTISPIGELRDPGFKG

SEQ ID NO: 44 - protein, 1131 aa, Acidovorax ebreus
MAQHVFGLDIGIASVGWAILGEQRIIDLGVRCFDKAETAKEGDPLNLTRRQARLLRRRLYRRAWRLTQLSRLLKRKGLIADAKLFAKAPSYGDSAWELRRQGLDRLLTPLEWARVIYHQCKHRGFHWTSKAEEAKADSDAEGGRVKQGLAHTKALMQAKNYRSAAEMVLAEFPDAQRNKRGQYDKALSRVLLGEELALLFATQRRLGNPHASDFFEKLILGDGDRKSGLFWQQKPALSGADLLKMLGKCTFEKGEYRAPKASFSVERHVWLTRLNNLRIVVDGRSRPLNEAERQAALLLPYQTETSKYKTLKNAFIKAGLWGDGVRFGGLAYPSQAQIDAEKTKDPEDQFLVKLPAWHELRKAFKAAGHEALWQQISTPALDGDPTLLDQIATVLSVYKDGAEVVQQLRQLALPEPAASIAVLEKISFDKFSSLSLKALRRIVPLMQSGLRYDEAVAQIPEYGHHSQRIEPGAAKHLYLPPFYEAQRKYAGKGDHIGSMQFRDDADIPRNPVVLRALNQARKVVNALIREYGSPIAVNIEMARDLSRPLDERNKVKRAQEEFRDRNDRARSEFERDFGYKPKAAAFEKWMLYREQLGQCAYSQQPLDIQRVLDDHNYAQVDHALPYSRSYDDSKNNKVLVLTHENQNKGNRTAFEYLTSFPDGEDGERWRTFVAWVQGNKAYRMAKRNRLLRKNYGVDESKGFIDRNLNDTRYICKFFKNYVEEHLQLAARADGDTARRCVVVNGQLTAFLRARWGLTKVRGDSDRHHALDAAVVAACTHGMVKALADYSRRKEISFLQEGFPDPETGEILNPAAFDRARQHFPEPWTHFAHELKARLFTDDLAALREDMQRLGSYTTEDLGRLRTLFVSRAPQRRSGGAVHKETIYAQPESLKQQGGVIEKILLTSLKLQDFDKLLNPESNDHFVEPHRNERLYAAIRQRLEQFGGRADKAFGPDNLFHKPDKNNQPTGPVVRSIKLVRGKQTGIPIRGGLAKNDSMLRVDIFTKAGKFHLVPVYVHHRVTGLPNRAIVAFKDEDEWTLIDESFAFLFSVYPNDYVKVTLKKEQQSGYYSGADRSTGAMNLWAHDRAASVGKDGLIRGIGVKTALSVEKFNVDVLGRIYLAPPETRSGLA

SEQ ID NO: 45 - protein, 1056 aa, Actinobacillus minor
  Actinobacillus minor NM305
MKALNYILGLDLGIASVGWAVVEIDQNELPIRLIDLGVRTFERAEVPKTGDSLALARRLARSSRRLVRRRAVRLLKAKRLLKQEGILQADDFHSSHLKPLPNNPWELRVKGLNHLLDRKEWAAVLLHLLKHRGYLSQRKNESKTDNKELGALLKGVSENRQLLQAQAFSTPAEIAIKKFQQEEGHIRNQRGAYSHTFDRNDLLAELRLLFQKQREFNNPYTSQSLEQAIAELLMWQKPALSGEAILKMLGKCTFEPSEYKAPKNSYSAEYFVWLTKLNNLRILENGADRGLTAEERQLLINQPFEKAKFTYAQARKLLELSDLAIFKGVRYGKDNAESATLMEMKAWHAIRKALESNGLKTEWNGLKTKPELLDKIGTAFSIYKTDEDISQYLNGELSPAVLNALLENLSFDKFIRLSLQSLAKILPLMEQGLRYDEACKQVYGDHYGKKEQLELRFLPKIPVEDIRNPVVLRTLSQARKVINGVVRLYGSPARIHIETGREVGKSFSERRDISKRQEENRNERQRAVEKFKEFFPHFVGEPKAKDILKMRLYEQQHGKCLYSGKELDLNRLLEKGYVEIDHALPFSRTWDDSFNNKVLVLASENQNKGNQTPYEWLNGKENAERWKLFQALVNGSRFPYSKKQRILTKYLDEDGFRERNLNDTRYVARFLCNFIEDNMQLVGQGKKRVFASNGQITALLRRSWGIQKVREDNDRHHAVDAVVVACSTRALQKKITDYVRYKEMNVFTGEKIDQETGEIIKFHFPEPWKFFRQEVEIRVFSETPAEDVVIALPDRPQANHEFIQPLFVSRAPTRKMTGQGHMETIKSAKRLAEGLSVSRVPLTQLKLKDLENMVNREREKALYEALKVRLEKFNNDPAKAFADPFYKKGGQQVKAVRVEQVQKSGVLVRQENGVADNASMVRVDVFIKGGKYFLVPIYTWQVAKGILPNRAATQGKEEEYWDIMDETAIFQFSLYQNDLIKLVTKKKTIFGYFNGLNRATSNINIKEHDLDKSKGKDGIYLEVGVKLALSLEKYQVDELGKNIQPCRSMKKRPPVR

SEQ ID NO: 46 - protein, 1054 aa, Actinobacillus pleuropneumoniae
  Actinobacillus pleuropneumoniae serovar 10 str. D13039
MKLTPLNYILGLDLGIASVGWAVVEIDEQENPLGLIDVGVRTFDRAEVAKTGESLALARRLARSSRRLVKRRADRIKKVKRLLKSENILLSADEQLPNDVWQLRVKGLDQKLERQEWAAVLLHLLKHRGYLSQRKNESKSENKELGALRSGVAANHQILQSAEYRTPAEIAVKKFHVEEGHIRNQRGAYTHTFSRLDLLAEIELLFTRQTELGNPHTSAKLLENLTALLMWQKPALAGEAILKMLGKCTFEPTEYKAAKNSYSAERFVWLTKLNNLRILEQGAERALTDNERFALLDQPYEKAKFTYAQARTMLALPDEAIFKGVRYQGEDKKAVETKTILMEMKAYHQIRKALENADLKAEWNELKNNSELLDDIGTAFSLHKTDEDICRYLDGKLSESILNALLENLNFDKFIQLSLKALQQILPLMLQGQRYDEAVSAIYGDHYGKKSAEINRLLPTIPADEIRNPVVLRTLTQARKVINAVVRLYGSPARIHIETGREVGKSYQDRKKLEKQQEDNRKHRESAVQKFKEYFPNFVGEPKGKDILKMRLYELQQAKCLYSGKSLELHRLLEKGYVEVDHALPFSRTWDDSFNNKVLVLANENQNKGNLTPYEWLDGKNNSEPWQNFVARVQTSGFSHTKKQRILSHKLDEKGFIERNLNDTRYVVRFLCNFIADNMLLTGKGKRKVFASNGQITALLRGRWGLQKVRDDNDRHHALDAVVVACSTVAMQQKITRFVRYEEGNVFSGERIDRETGEIIPLHFPSPWAFFRENVEIRIFSENPKLELENRLPDYPQYNHEFVQPLFVSRMPTRKMTGQGHMETVKSAKRLDEGLSVLKVPLTQLKLNDLERMVNREREMALYESLKVRLEQFDNDPAKAFAEPFYKKGGALVKAVRVEQTQKSGVLVRDGNGVADNASMVRVDVFTKAGKYFLVPIYTWQVAKGILPNKAVTANVDEIDWLEMDESYQFIFTMYPNDLVKVKLKKEEFFGYYGGLDRATGAIVIKEHDLEKSKGRQGIYRIGVKLALSFEKYQVDELGKNIRPCRPTKRQHVR

SEQ ID NO: 47 - protein, 1062 aa, Actinobacillus succinogenes
MNLNYILGLDLGIASVGWAVVEIDEQENPQRLIDVGVRTFDRAEVLKTGESLALARRLARSSRRLVKRRAERIKKAKRLLKAENLLLSADEILPNEAWQLRVKGLDQKLERQEWAAVLLHLLKHRGYLSQRKNESKSENKELGALLSGVAINHQILQSAEYRTPAEIAVNKFQAEEGHIRNQRGAYTHTFSRLDLLAEMELLFQRQATLGNPHTSTKLLENLTALLMWQKPALAGEAILKMLGKCTFEPTEYKAAKNSYSAERFVWLTKLNNLRILEQGAERALTDNERFALLDQPYEKAKLTYAQVRTLLGLSDEAIFKGLRYQGEDKKAVETKTTLMEVKAYHQIRKALEGLDLKAEWNELKNNPALLDEIGTAFSLYKTDDDIHRYLDGKLSESVLNALLENLNFDKFIQLSLKALQQILPLMLQGQRYDEAVSAIYGDHYGKKSDEIDRLLPNIPTDEIRNPVVLRTLTQARKVINAVVRLYGSPARIHIETGREVGKSYQDRKKLEKQQEENRKQRENAVKKFKEYFPNFVGEPKGKDILKMRLYELQQAKCLYSGKSLELYRLLEKGYVEVDHALPFSRTWDDSFNNKVLVLANENQNKGNATPYEWLDGKNNSEGWQHFVARVQTSGFSYAKKQRVLIQELDEKSFIERNLNDTRYVARFLCNHIADNMLLTGKGKRKVFASNGQITALLRGCWGLQKVRENNDRHHALDAVVVACSTKSMQDKITKFVKYKEGRLFKDKKDGVYKGERINRETGEIISLHFPTPWKFFKENVEIRIFSENPKLELENRLPDYPQYNHEFVQPLFVSRMPTRKMTGQGHMETVKSAKRLDKGLSVLKVPLTQLKLSDLERMVNREREMALYEALKECLEQFGNDPAKAFAEPFYKKGGALVKAVRVEQTQKSGVLVRNGNGVADNATGSIVRVDVFTKGGKYFLVPIYTWQVAKGILPNKAVIQGKDESEWEEMDENAVFQFSMHKNDLIKVKTKKGEIFGYFNGLDRATGSIEIEEHDLEKSKGKNGSHRGLGVKTAFFLEKYQVDELGKNIRPCRPTKRQHVR

SEQ ID NO: 48 - protein, 1054 aa, Actinobacillus suis
MKLTPLNYILGLDLGIASVGWAVVEIDEQENPLGLIDVGVRTFDRAEVPKTGESLALARRLARSARRLVKRRADRIKKAKRLLKAENILLSADEHLPNDVWQLRVKGLDQKLERQEWAAVLLHLLKHRGYLSQRKNESKSENKELGALLSGVETNHQILQSAEYRTPAEIAVKKFHVEDGHIRNQRGAYTHTFSRLDLLAEMELLFQRQTDLGNPHTSAKLLENLTALLMWQKPALAGEAILKMLGKCTFEPTEYKAAKNSYSAERFVWLTKLNNLRILEQGAERALTDNERFALLDQPYEKAKFTYAQARTMLALPDEAIFKGVRYQGEDKKAVETKTILMEMKAYHQIRKALENADLKAEWNELKNNSELLDDIGTAFSLHKTDEDICRYLDGKLSESILNALLENLNFDKFIQLSLKALQQILPLMLQGQRYDEAVSAIYGDHYGKKSAEINRLLPTIPADEIRNPVVLRTLTQARKVINAVVRLYGSPARIHIETGREVGKSYQDRKKLEKQQEDNRKQRESAVKKFKEYFPNFVGEPKGKDILKMRLYELQQAKCLYSGKSLELHRLLEKGYVEVDHALPFSRTWDDSFNNKVLVLANENQNKGNLTPYEWLDGKNNSEHWQNFVARVQTSGFSHTKKQRILSHKLDEKGFIERNLNDTRYVARFLCNFIADNMLLTGKGKRKVFASNGQITALLRGRWGLQKVRDDNDRHHALDAVVVACSTVVMQQKITRFVRYEEGNVFSGERIDRETGEIIPLHFPSPWAFFRENVEIRIFSENPKLELENRLPDYPQYNHEFVQPLFVSRMPTRKMTGQGHMETVKSAKRLDEGLSVLKVPLTQLKLSDLERMVNREREVTLYESLKARLEQFGNDPAKAFAEPFHKKGGAVVKAVRVEQTQKSGVLVRDGNGVADNASMVRVDVFTKGGKYFLVPIYTWQVAKGILPNKAVTANVDEIDWLEMDESYQFIFTMYPNDLVKVKLKKEEFFGYYGGLDRATGAIVIKEHDLEKSKGKQGIYRIGVKLALSFEKYQVDELGKNIRPCRPTKRQHVR

SEQ ID NO: 49 - protein, 1105 aa, Actinomyces coleocanis
  Actinomyces coleocanis DSM 15436
MDNKNYRIGIDVGLNSIGFCAVEVDQHDTPLGFLNLSVYRHDAGIDPNGKKTNTTRLAMSGVARRTRRLFRKRKRRLAALDRFIEAQGWTLPDHADYKDPYTPWLVRAELAQTPIRDENDLHEKLAIAVRHIARHRGWRSPWVPVRSLHVEQPPSDQYLALKERVEAKTLLQMPEGATPAEMVVALDLSVDVNLRPKNREKTDTRPENKKPGFLGGKLMQSDNANELRKIAKIQGLDDALLRELIELVFAADSPKGASGELVGYDVLPGQHGKRRAEKAHPAFQRYRIASIVSNLRIRHLGSGADERLDVETQKRVFEYLLNAKPTADITWSDVAEEIGVERNLLMGTATQTADGERASAKPPVDVTNVAFATCKIKPLKEWWLNADYEARCVMVSALSHAEKLTEGTAAEVEVAEFLQNLSDEDNEKLDSFSLPIGRAAYSVDSLERLTKRMIENGEDLFEARVNEFGVSEDWRPPAEPIGARVGNPAVDRVLKAVNRYLMAAEAEWGAPLSVNIEHVREGFISKRQAVEIDRENQKRYQRNQAVRSQIADHINATSGVRGSDVTRYLAIQRQNGECLYCGTAITFVNSEMDHIVPRAGLGSTNTRDNLVATCERCNKSKSNKPFAVWAAECGIPGVSVAEALKRVDFWIADGFASSKEHRELQKGVKDRLKRKVSDPEIDNRSMESVAWMARELAHRVQYYFDEKHTGTKVRVFRGSLTSAARKASGFESRVNFIGGNGKTRLDRRHHAMDAATVAMLRNSVAKTLVLRGNIRASERAIGAAETWKSFRGENVADRQIFESWSENMRVLVEKFNLALYNDEVSIFSSLRLQLGNGKAHDDTITKLQMHKVGDAWSLTEIDRASTPALWCALTRQPDFTWKDGLPANEDRTIIVNGTHYGPLDKVGIFGKAAASLLVRGGSVDIGSAIHHARIYRIAGKKPTYGMVRVFAPDLLRYRNEDLFNVELPPQSVSMRYAEPKVREAIREGKAEYLGWLVVGDELLLDLSSETSGQIAELQQDFPGTTHWTVAGFFSPSRLRLRPVYLAQEGLGEDVSEGSKSIIAGQGWRPAVNKVFGSAMPEVIRRDGLGRKRRFSYSGLPVSWQG

SEQ ID NO: 50 - protein, 1113 aa, Actinomyces georgiae
  Actinomyces georgiae F0490
MSASSQNVERIRYKVGIDVGLRSIGFCAVQVDADDRPVKLLNTVVHVHDAGVSPADAKKADTRKLVSGVARRTRRLYRTRKRRLVDLDRQLDGLGWPLVDPARFADPREPWFAREKLVSGRVDDADERKELLSVALRHIAHHRGWRNPYSTVESLQADAPPSEFLQGLNQRVSEKLGTELDPGLTQGQLVAKLLHRFPNAKIRGPEGILRGKLHQSDNAGELRLICRTQGLDCHITEELVRLVFQAKSPKANKEMRKRIGRDQLPGQGAHIRAEKAHPVFQRFRIVAVLANLRIREAHVDRRLTAEEMRTLTDFLLGLAGSEQPTWEELADNLNIERHQLRGTAKASVDGAPALRFPPIDATTDRIYASKLKWLAEWWRQADEERRGYMVDALSNSGGSEDEPYLDDEIAEMLEQASEEDQAKLDSLHLPGGRASYCLDTLRRLTDAMLGGGLDLFEARKAVFHVDDDWAPPTDPIGAPVGNPPVDRVLKHVARWLEAATGRWGAPQTINIEHVREGLGSEKAARELTRMNDRRRRNNQKLVEEMGEKLGMSGRIRRSDRMRYEAIRRQNCECLYCGQPITYQTMEMDHIVPRAGAASTNSRSNLAAVCRRCNHQKGKLPFAVWAESQDSPAEVRLQDAVQRVRHWLRDAGMGQKELQALRVQVIARLKSKRPDEEFDGRSMESIAWMANELRARVEAQYRGSGTTVRVYRGALTAEARKASGFEGRVNLIGGRGKDRFDRRHHAMDALVIALMNQSVAQTLALRLNMRDSQWLTQSEQTWRQFHGAPGEAARKWEAWDRDMRDASDLFNLALDGGRIPITENVRLRVGNGRVHEDGVIRFKPEYEVKGKTIKGGEARLLGDSLPSEQIDRAETPALWTALTRLPEYDRKSGLPENPDRVIRVNGAVVQATDRIRFFGTPASVAVRGGYAKLGESIHHARIYRINGKTPKYAMIRVYTIDLMRLNHEDIFTAVLKPSTISMRCAEKKLKYAIAEGNAEQIGWLVEGDQLELDAAAYAKGVGADLMREYPMATCWRVAGFPDEAKLRLRPVLLAAEGMGEDAPKFMREVLENQGWRPAVNALLSPGSVRVVRRNVLGEPRFKSSGHLPTTVDLV

SEQ ID NO: 51 - protein, 1101 aa, Actinomyces naeslundii
  Actinomyces naeslundii str. Howell 279
MWYASLMSAHHLRVGIDVGTHSVGLATLRVDDHGTPIELLSALSHIHDSGVGKEGKKDHDTRKKLSGIARRARRLLHHRRTQLQQLDEVLRDLGFPIPTPGEFLDLNEQTDPYRVWRVRARLVEEKLPEELRGPAISMAVRHIARHRGWRNPYSKVESLLSPAEESPFMKALRERILATTGEVLDDGITPGQAMAQVALTHNISMRGPEGILGKLHQSDNANEIRKICARQGVSPDVCKQLLRAVFKADSPRGSAVSRVAPDPLPGQGSFRRAPKCDPEFQRFRIISIVANLRISETKGENRPLTADERRHVVTFLTEDSQADLTWVDVAEKLGVHRRDLRGTAVHTDDGERSAARPPIDATDRIMRQTKISSLKTWWEEADSEQRGAMIRYLYEDPTDSECAEIIAELPEEDQAKLDSLHLPAGRAAYSRESLTALSDHMLATTDDLHEARKRLFGVDDSWAPPAEAINAPVGNPSVDRTLKIVGRYLSAVESMWGTPEVIHVEHVRDGFTSERMADERDKANRRRYNDNQEAMKKIQRDYGKEGYISRGDIVRLDALELQGCACLYCGTTIGYHTCQLDHIVPQAGPGSNNRRGNLVAVCERCNRSKSNTPFAVWAQKCGIPHVGVKEAIGRVRGWRKQTPNTSSEDLTRLKKEVIARLRRTQEDPEIDERSMESVAWMANELHHRIAAAYPETTVMVYRGSITAAARKAAGIDSRINLIGEKGRKDRIDRRHHAVDASVVALMEASVAKTLAERSSLRGEQRLTGKEQTWKQYTGSTVGAREHFEMWRGHMLHLTELFNERLAEDKVYVTQNIRLRLSDGNAHTVNPSKLVSHRLGDGLTVQQIDRACTPALWCALTREKDFDEKNGLPAREDRAIRVHGHEIKSSDYIQVFSKRKKTDSDRDETPFGAIAVRGGFVEIGPSIHHARIYRVEGKKPVYAMLRVFTHDLLSQRHGDLFSAVIPPQSISMRCAEPKLRKAITTGNATYLGWVVVGDELEINVDSFTKYAIGRFLEDFPNTTRWRICGYDTNSKLTLKPIVLAAEGLENPSSAVNEIVELKGWRVAINVLTKVHPTVVRRDALGRPRYSSRSNLPTSWTIE

SEQ ID NO: 52 - protein, 1144 aa, Actinomyces sp.
  Actinomyces sp. ICM47
MSMIDSSENVPGIRYRVGIDVGLKSIGFCAVEVDRNDQPVRMLNSMVFIHDAGVDPNENKAAKSRKLTAGVARRTRRLYRTRHQRLVNLDRVLSKEFGWPLPDLTSFKDPREPWHVRAGLLEGYIADDEKRKEALSIALRHIARHRGWRNPYAKVETLLQPSEPSDFLKGLNDRISEELGRAFPADATPGQLVDTYLAHPDYVGRAGTPKLRGPQGILAGKLHQSDNAQEIRGICDVQRIEPAERDRLIRVVFEAKSPKGSAKERGLVGYDELPGQGRHVRAEKAHPAFQLFRMVSVLANLRIREGREERPLTPDELEDLVDFINQVSLKQEVTWQDLADKLRIERADLRGTAKASFDGSPVLRNPPTDVTTEKIMACKVKWLKEWWKEADDEQRGYMVDAFSNSGGSEDGTDVNDEVAELLEQATEDDQLEFEKISLPQGRAAYSLDSLRRLTDRMLRDGVDLHTARRLEFNVGDDWKPAVEPIGAPTGNPAVDRVLKQVSRWLHAATERWGEPTVINIEHARDGLGSERVARELMRENEKRRKANASAVAEMAAKLKLSGKVHRSDQIRYFALQRQNCQCLYCGAPITYTTAEMDHIVPRADGSSTNDRSNLAAVCRTCNHMKGKIPFAVWASSDKANQGVSLTGALERVNMWQRDSGMSPRQLKQLQREVCARLKSKKPDQEFDGRSMESVAWMAVELRTRIEGFYRSRDEESVPSVGVYRGQLTAEARRASGFESRVNLIGGRGKTRFDRRHHAMDALVIALMNPSVSRTLALRLNMRDAQRLTGVEETWKHFYGKPGEASKRFESWRESMLRGVELFNIALSDNAIPFVENIRLRVGSSVIHDATVHSFCPPKTPDGKQIITKGYGEQHSLGSAMPVELIDRAETPALWTALTRCPDFDPKKGLPENPQRTISVNGTRVGPTELVNFFEFSKSGPKACLKVRGGYVDLSGAIHHARIYRIAGKKTAYAMIRVFQVDLLRLKDHDVFTTPLKPSTISMRTAEPKIREALANGTATQIGWLVEGDELVIDTSKYSGGFIGEVLARYPEATSWRVAGFMTPAKLRIKPILLSKEGFVDETQAALLGVEVTSEAIQKTVDRPGWLPAVNVLFGAGGVRVIRRNCLGEERYHSSASLPVSMTLE

SEQ ID NO: 53 - protein, 1095 aa, Actinomyces sp.
  Actinomyces sp. oral taxon 175 str. F0384
MPAHHLRVGIDVGTHSVGLATLRVDDQGTPIELLSALSHIHDSGIGKEGQKDHDTRKKLSGVARRTRHLLRNRRERLQQLDKVLVDLGFPIPKPEEYPDLSERTDPYRVWRVRARLVEETLPEELRGPAISMAVRHIARHRGWRNPYSKVESLLSPAEESSFMKALRKRIMTKTGEVLDDDITPGQAMAQVALTHKIYMRGPEGILGKLHQSDNANEIRKICARQGISSDVCKQLLRAVFKAESPRGSAVSRVAPDPLPGQGSFRRAPKCDPEFQRFRIISIVANLRISETKGENRPLTVDERRQVVAFLMEDSQADLTWVDVAEKLRVSRQALRGTAMLTADGERSAAQPPIDVTDQIMRKTKISALKTWWDKADAERRGAMVRYLYEGLEDSECAEVIAKLPEKDHAKLDSLHLPAGRAAYSRESLTALSDHMLETTNDLHEARKRLFGVDDSWAPPAEPVGAPVGNPSVDRTLKIVARYLSAVESIWGTPEVIHVEHVRDGFTSERTAEERDKANRSRHNDNQKAIEKIQHDYGKEGYISRGDIVRFHALKLQGSACLYCGTTIGYHTCQLDHIVPQAGPGSNNRRGNLVAVCERCNHSKSNTPFAVWAQKCGIPHVGVKEAISRVNGWVEHNHSTSSGDLTRLKKEVIARLRRTQKDPEIDERSMESVAWMANELHHRIAAAYPETTVMVYRGSITAAARKAASIESRINLIGEKGRKDRLDRRHHAVDASVVALMEPSVAKTLAERSSLRGEQRLTGQEQTWKQYTGLTVGARERFEAWRGHMHRLTELFNESLAADEVYVTQNIRLRLSDGSAHTVKASKLVSHRLGDGLTVQQIDRACTPALWCALTREIDFDEKNGLPAREDRVIRVHGQEISSADCIQVFSKRKKTKSDRDEAPFGAIAVRGGFVEIGSSIHHARIYRIEGEKPAYAMLRVFTHDLLSQRHGDLFSAVIPPQSISMRCAATELRQAISEGRATYLGWIVSGDELHIPVETFTTHKIGSFLKDYPNTTRWRICGYDSETMLILKPRILSAEGLNNSSDIAEYVIKNKGWRVAINKLAKVHPTVVRRDALGRPRHSSRSNLPVTWSIE

SEQ ID NO: 54 - protein, 1181 aa, Actinomyces sp.
  Actinomyces sp. oral taxon 180 str. F0310
MLHCIAVIRVPPSEEPGFFETHADSCALCHHGCMTYAANDKAIRYRVGIDVGLRSIGFCAVEVDDEDHPIRILNSVVHVHDAGTGGPGETESLRKRSGVAARARRRGRAEKQRLKKLDVLLEELGWGVSSNELLDSHAPWHIRKRLVSEYIEDETERRQCLSVAMAHIARHRGWRNSFSKVDTLLLEQAPSDRMQGLKERVEDRTGLQFSEEVTQGELVATLLEHDGDVTIRGFVRKGGKATKVHGVLEGKYMQSDLVAELRQICRTQRVSETTFEKLVLSIFHSKEPAPSAARQRERVGLDELQLALDPAAKQPRAERAHPAFQKFKVVATLANMRIREQSAGERSLTSEELNRVARYLLNHTESESPTWDDVARKLEVPRHRLRGSSRASLETGGGLTYPPVDDTTVRVMSAEVDWLADWWDCANDESRGHMIDAISNGCGSEPDDVEDEEVNELISSATAEDMLKLELLAKKLPSGRVAYSLKTLREVTAAILETGDDLSQAITRLYGVDPGWVPTPAPIEAPVGNPSVDRVLKQVARWLKFASKRWGVPQTVNIEHTREGLKSASLLEEERERWERFEARREIRQKEMYKRLGISGPFRRSDQVRYEILDLQDCACLYCGNEINFQTFEVDHIIPRVDASSDSRRTNLAAVCHSCNSAKGGLAFGQWVKRGDCPSGVSLENAIKRVRSWSKDRLGLTEKAMGKRKSEVISRLKTEMPYEEFDGRSMESVAWMAIELKKRIEGYFNSDRPEGCAAVQVNAYSGRLTACARRAAHVDKRVRLIRLKGDDGHHKNRFDRRNHAMDALVIALMTPAIARTIAVREDRREAQQLTRAFESWKNFLGSEERMQDRWESWIGDVEYACDRLNELIDADKIPVTENLRLRNSGKLHADQPESLKKARRGSKRPRPQRYVLGDALPADVINRVTDPGLWTALVRAPGFDSQLGLPADLNRGLKLRGKRISADFPIDYFPTDSPALAVQGGYVGLEFHHARLYRIIGPKEKVKYALLRVCAIDLCGIDCDDLFEVELKPSSISMRTADAKLKEAMGNGSAKQIGWLVLGDEIQIDPTKFPKQSIGKFLKECGPVSSWRVSALDTPSKITLKPRLLSNEPLLKTSRVGGHESDLVVAECVEKIMKKTGWVVEINALCQSGLIRVIRRNALGEVRTSPKSGLPISLNLR

SEQ ID NO: 55 - protein, 1103 aa, Actinomyces sp.
  Actinomyces sp. oral taxon 181 str. F0379
MTKINDDLRYRVGIDVGLKSIGFCAVEVDENDQPLRLLNSMVFVHDAGVDPNENKAAKSRKLTAGVARRTQRGTAQNRRRLAELDRALSEELNWPLPNLEDFEDSYEPWHTRAELVEHYIKDDAERAEALAIAIRHIARHRGWRNPYLSVDSLLTPQEPSKFLRGLNERVTQALGREFPADATPGQLICAYIDSPKYAETQGIRGDSGILSGKLHQFDNVGEIRKICEVQRLDHDVFKLLVRKVFFAKSPRGSAAGLVGHDQIPGQGKYIRAEKAHPDFQLFRIVAVLTNLRIREGKAERCLTPDELRGLVDYILEVQLKQQVTWADLADNLGIERTDLRGTARASFDGSPALRFPPTDVTAEKIMASKVKWLKDWWDKADSERRGFMVDALSNSGGSTGDNDIDDEVAALLEAATEDEQAELEKIQLPQGRAAYSLDSLRRLTKRMLEEGVDLHTARKEEFNVDDDWRPEPEPIEAPVGNPAVDRVLKQVARWLNMATDRWGVPDVINIEHTRDGLGSEKVARELLRESQKRQDLNQKDMDKMIRELGISGKARRSSLIKYQAIQRQNSMCLYCGTEIGFETAEMDHIVPRALSGSTNDRSNLAAVCRACNHQKGAVPFAVWATSGEAHAGVSLEDAIKRVRLWQKGPGMSPKQHKAFQNEVISRLKSRKPDEEFDGRSMESVAWMAVELRTRIDGYYRKVNSDSVPKVGIYRGQLTAEARKASGFENRVNLIGGKGKTRFDRRHHAMDALVIAMMNQSVSQTLALRVNMRESQRITGQEETWKNFYGKPGQASERFEKWREGMLRAVELFNIELAKNAIPFHENVRLRVGSSKVHDDTVRKFIHAKLGEALSVAMIDCAETPALWTALTRLPDFDPKDGLPEDLSREIYIHSRKITADEQLNFFNSPSACLKVRGGYVEIGSSIHHARVYRIDGKKTTYSMVRVFATDLVKMTHEDVFTTPLKPSTISMRTADPKIRKALADGTATQIGWLVEGDELQLETDKYSGGLIGEVLAEYPQLTSWRVAGFYGVTQLRLRPYMLAAEGIPSDASESLRKVIEGKGWLPAINALLSSGCVKVVRRNCLGEPRFNAKSSLPVSQLLR

SEQ ID NO: 56 - protein, 1120 aa, Actinomyces sp.
  Actinomyces sp. oral taxon 848 str. F0332
MNAMKQYNAGIDVGINSVGFAAIEVDSKGLPLNILNNMVVLHDSGVDPGTAKTGATRLANSGTARRTRKLIARRRKRLQKLDRYIEVQGWPLVDFSSLPDPYTPWKIRAKLTQDRLEGEEQGRGLSIALRHMARHRGWRNPYEGVESLHSPKEASKQFKDLKDRVTKVSGVIFDEDATPAEVVCDIGLSPKQRLRSAPSAKYKEGATLADEPVGGKSKEGLLGGKLMQSDNANELRKIGIVQGLSNEKVNEIIDQVFASESPKGQAGKRAKKDELPGQEQYVRALRAHLAFQRFRIVAAVANLRILEAEPKHERLLSQSEKDKVIEFLMSADGDDGVTWSDVAEELGIERECLSGTAKRGADGERPSSFPPTNSTNISIVRSKVKPLIEWWRKASDDEQATLVTALSNADELTDDQPSAETVRQFLSSPDEQSQEKIDKISLPKGRAAYSVNSLERLTRRMLKDSVDLFEARKREFGVDNNWTPTPDSIGEPVGNPAVDRVLKIVNRWLLAVTRKWGPPKVVNIEHVRVGFTSAAQTRKYEEENKTNRERNLAILEELRDKFGTSGKIRREDITRFAALRRQNCQCAYCGEAITFFDCEMDHIVPRKGPGSTNTRNNLVAICERCNKSKSNMPFSLWAQNCDIPGVSVEAVIDRVRTWIKDPELNPKQYNNFKKDVIERLRKTVDDDAIDNRSIESVAWMATELADRIGSHFRTAGANTKVRVYRGWLTSEARKASGFEGKINLIGGRGKTRLDRRHHAMDAATIALMRQSVAQTLVERASIRESDRLRRVVSSSWKDYRGADRDKQFSYGSWLNSMNALAELFNRAIDADGIPVTQNLRLRLGNGEAHDATIRSLEKKRVGASWTIGEIDRASTPQLWLALTRQEDFDQNDGLPANASRELRVKNHWFHAEENVTLFPTKSAAIAVRGGYAEIGNTIHHARLYKLPGKKLTYGMIRVFAIDLLCAWHTDLFSSPLLPESISLRTAETKVRRAVEDGAAMYIGWLVDGDEIVLDPETKAFKSNKIGEYLCEFPGTKRWKVDGFPDKEKLRLRPLQLAGEGLPEDVSAGTEEILGPKGNGWRVAINALFKSSQLVVVRRTALGMVRKLSRRHLPLTTRLRG

SEQ ID NO: 57 - protein, 1114 aa, Actinomyces turicensis
  Actinomyces turicensis ACS-279-V-Col4
MQFHFYMVYVTMKGMNDKDASQQLRYRVGIDVGTHSIGFCAVEVDESGMPIQLLNSMVHKHDSGIDPGGNDTATTRLAEAGVARRTRRLIRRRKKRLQELDAFIEECGWPLVDLATITDARSPWRIRAHLATEHIDDEAEQGKLLSIALRHMARHRGWRSPYARISSLHIQADPSEQLKALAQRVSEKTGISLTADQTPAQLISVYLDVFETGKLRGPEGILGGKLMQSDNANELRRIATVQGLDNDLLKKIIGFVFAAESPKGSAAKRVGKDVLPGAHGLRAEKAHPAFQQFRIVSIVQNLRIKEGTGLRALTSEETEIVVDFLNQAGLTEAPTWEEVADNLEIPRSHLKGTATEGFDGIAPSTRPPFDVTSQKILNGKLKKLSAWWKDADYDHRCAMVNALSNVGSDDEGSLADDDVREFLSDFTDEELEALDKVELPGGRAAYSVDSLEKLTNTMLSEGCDLHSARKIAFGVDDSWTPPAEPIGQPVGNPAVDRVLKQVARWISAATNQWGTPESVNIEHVRDALGSEKASREYQRSLQTRRIRNEKLFAEMRERLDIGGKPRRSELTRYLALQRQNCQCLYCGMPITYTDAEMDHIVPRKGAASTNTRENFAAVCRACNHQKSNLPFAVWAEKTERPGVSVKEAYKRVSDMRIEPGMNGRQMNEFRKAIRLRLTTKHADAEIDGRSLESVAWMANELRHRIEGFYRSAENDVTVRVFRGAVTAEGRRASGFESRVNLIGGKGKTRLDRRHHAMDALTIALMEPGIAQTIALRMNMRESQRVLGEQETWKSFTGGSDTARKRWEHWCEEMLRASELFNVFLAEDRIPICQNKRLRLGSSAVHKAIVQPFEASDKRIVSDAMPVELIDRASTPALWTALTRDPDFDPKEGLPANPSRTIRLHDKRLGPNETVEFFPTAAACLAIRGGYCEIGAGIHHARIFRISGKKTTYAMLRVYQCDLVRFQKENLLTVELPANTISVRTAVPKLREALAHGTAEQIGWLVVGDELKIDLSGFTTGQIETFNETYPQATRWEVTGFPTKTQLRLKPLLIASEGLADDVPDDIVKIVKGPGWWPAIDKLLKIGNVVLYRRDTHGKPRVVSHRSLPLSSKLQ

SEQ ID NO: 58 - protein, 1101 aa, Akkermansia muciniphila
MSRSLTFSFDIGYASIGWAVIASASHDDADPSVCGCGTVLFPKDDCQAFKRREYRRLRRNIRSRRVRIERIGRLLVQAQIITPEMKETSGHPAPFYLASEALKGHRTLAPIELWHVLRWYAHNRGYDNNASWSNSLSEDGGNGEDTERVKHAQDLMDKHGTATMAETICRELKLEEGKADAPMEVSTPAYKNLNTAFPRLIVEKEVRRILELSAPLIPGLTAEIIELIAQHHPLTTEQRGVLLQHGIKLARRYRGSLLFGQLIPRFDNRIISRCPVTWAQVYEAELKKGNSEQSARERAEKLSKVPTANCPEFYEYRMARILCNIRADGEPLSAEIRRELMNQARQEGKLTKASLEKAISSRLGKETETNVSNYFTLHPDSEEALYLNPAVEVLQRSGIGQILSPSVYRIAANRLRRGKSVTPNYLLNLLKSRGESGEALEKKIEKESKKKEADYADTPLKPKYATGRAPYARTVLKKVVEEILDGEDPTRPARGEAHPDGELKAHDGCLYCLLDTDSSVNQHQKERRLDTMTNNHLVRHRMLILDRLLKDLIQDFADGQKDRISRVCVEVGKELTTFSAMDSKKIQRELTLRQKSHTDAVNRLKRKLPGKALSANLIRKCRIAMDMNWTCPFTGATYGDHELENLELEHIVPHSFRQSNALSSLVLTWPGVNRMKGQRTGYDFVEQEQENPVPDKPNLHICSLNNYRELVEKLDDKKGHEDDRRRKKKRKALLMVRGLSHKHQSQNHEAMKEIGMTEGMMTQSSHLMKLACKSIKTSLPDAHIDMIPGAVTAEVRKAWDVFGVFKELCPEAADPDSGKILKENLRSLTHLHHALDACVLGLIPYIIPAHHNGLLRRVLAMRRIPEKLIPQVRPVANQRHYVLNDDGRMMLRDLSASLKENIREQLMEQRVIQHVPADMGGALLKETMQRVLSVDGSGEDAMVSLSKKKDGKKEKNQVKASKLVGVFPEGPSKLKALKAAIEIDGNYGVALDPKPVVIRHIKVFKRIMALKEQNGGKPVRILKKGMLIHLTSSKDPKHAGVWRIESIQDSKGGVKLDLQRAHCAVPKNKTHECNWREVDLISLLKKYQMKRYPTSYTGTPR

SEQ ID NO: 59 - protein, 1113 aa, Alcanivorax pacificus
  Alcanivorax pacificus W11-5
MRYRVGLDLGTASVGAAVFSMDEQGNPMELIWHYERLFSEPLVPDMGQLKPKKAARRLARQQRRQIDRRASRLRRIAIVSRRLGIAPGRNDSGVHGNDVPTLRAMAVNERIELGQLRAVLLRMGKKRGYGGTFKAVRKVGEAGEVASGASRLEEEMVALASVQNKDSVTVGEYLAARVEHGLPSKLKVAANNEYYAPEYALFRQYLGLPAIKGRPDCLPNMYALRHQIEHEFERIWATQSQFHDVMKDHGVKEEIRNAIFFQRPLKSPADKVGRCSLQTNLPRAPRAQIAAQNFRIEKQMADLRWGMGRRAEMLNDHQKAVIRELLNQQKELSFRKIYKELERAGCPGPEGKGLNMDRAALGGRDDLSGNTTLAAWRKLGLEDRWQELDEVTQIQVINFLADLGSPEQLDTDDWSCRFMGKNGRPRNFSDEFVAFMNELRMTDGFDRLSKMGFEGGRSSYSIKALKALTEWMIAPHWRETPETHRVDEEAAIRECYPESLATPAQGGRQSKLEPPPLTGNEVVDVALRQVRHTINMMIDDLGSVPAQIVVEMAREMKGGVTRRNDIEKQNKRFASERKKAAQSIEENGKTPTPARILRYQLWIEQGHQCPYCESNISLEQALSGAYTNFEHILPRTLTQIGRKRSELVLAHRECNDEKGNRTPYQAFGHDDRRWRIVEQRANALPKKSSRKTRLLLLKDFEGEALTDESIDEFADRQLHESSWLAKVTTQWLSSLGSDVYVSRGSLTAELRRRWGLDTVIPQVRFESGMPVVDEEGAEITPEEFEKFRLQWEGHRVTREMRTDRRPDKRIDHRHHLVDAIVTALTSRSLYQQYAKAWKVADEKQRHGRVDVKVELPMPILTIRDIALEAVRSVRISHKPDRYPDGRFFEATAYGIAQRLDERSGEKVDWLVSRKSLTDLAPEKKSIDVDKVRANISRIVGEAIRLHISNIFEKRVSKGMTPQQALREPIEFQGNILRKVRCFYSKADDCVRIEHSSRRGHHYKMLLNDGFAYMEVPCKEGILYGVPNLVRPSEAVGIKRAPESGDFIRFYKGDTVKNIKTGRVYTIKQILGDGGGKLILTPVTETKPADLLSAKWGRLKVGGRNIHLLRLCAE

SEQ ID NO: 60 - protein, 1029 aa, Alicycliphilus denitrificans
  Alicycliphilus denitrificans BC
MRSLRYRLALDLGSTSLGWALFRLDACNRPTAVIKAGVRIFSDGRNPKDGSSLAVTRRAARAMRRRRDRLLKRKTRMQAKLVEHGFFPADAGKRKALEQLNPYALRAKGLQEALLPGEFARALFHINQRRGFKSNRKTDKKDNDSGVLKKAIGQLRQQMAEQGSRTVGEYLWTRLQQGQGVRARYREKPYTTEEGKKRIDKSYDLYIDRAMIEQEFDALWAAQAAFNPTLFHEAARADLKDTLLHQRPLRPVKPGRCTLLPEEERAPLALPSTQRFRIHQEVNHLRLLDENLREVALTLAQRDAVVTALETKAKLSFEQIRKLLKLSGSVQFNLEDAKRTELKGNATSAALARKELFGAAWSGFDEALQDEIVWQLVTEEGEGALIAWLQTHTGVDEARAQAIVDVSLPEGYGNLSRKALARIVPALRAAVITYDKAVQAAGFDHHSQLGFEYDASEVEDLVHPETGEIRSVFKQLPYYGKALQRHVAFGSGKPEDPDEKRYGKIANPTVHIGLNQVRMVVNALIRRYGRPTEVVIELARDLKQSREQKVEAQRRQADNQRRNARIRRSIAEVLGIGEERVRGSDIQKWICWEELSFDAADRRCPYSGVQISAAMLLSDEVEVEHILPFSKTLDDSLNNRTVAMRQANRIKRNRTPWDARAEFEAQGWSYEDILQRAERMPLRKRYRFAPDGYERWLGDDKDFLARALNDTRYLSRVAAEYLRLVCPGTRVIPGQLTALLRGKFGLNDVLGLDGEKNRNDHRHHAVDACVIGVTDQGLMQRFATASAQARGDGLTRLVDGMPMPWPTYRDHVERAVRHIWVSHRPDHGFEGAMMEETSYGIRKDGSIKQRRKADGSAGREISNLIRIHEATQPLRHGVSADGQPLAYKGYVGGSNYCIEITVNDKGKWEGEVISTFRAYGVVRAGGMGRLRNPHEGQNGRKLIMRLVIGDSVRLEVDGAERTMRIVKISGSNGQIFMAPIHEANVDARNTDKQDAFTYTSKYAGSLQKAKTRRVTISPIGEVRDPGFKG

SEQ ID NO: 61 - protein, 1029 aa, Alicycliphilus sp.; identical to SEQ ID NO: 60

SEQ ID NO: 62 - protein, 1146 aa, Alicyclobacillus hesperidum
  Alicyclobacillus hesperidum URH17-3-68
MAYRLGLDIGITSVGWAVVALEKDESGLKPVRIQDLGVRIFDKAEDSKTGASLALPRREARSARRRTRRRRHRLWRVKRLLEQHGILSMEQIEALYAQRTSSPDVYALRVAGLDRCLIAEEIARVLIHIAHRRGFQSNRKSEIKDSDAGKLLKAVQENENLMQSKGYRTVAEMLVSEATKTDAEGKLVHGKKHGYVSNVRNKAGEYRHTVSRQAIVDEVRKIFAAQRALGNDVMSEELEDSYLKILCSQRNFDDGPGGDSPYGHGSVSPDGVRQSIYERMVGSCTFETGEKRAPRSSYSFERFQLLTKVVNLRIYRQQEDGGRYPCELTQTERARVIDCAYEQTKITYGKLRKLLDMKDTESFAGLTYGLNRSRNKTEDTVFVEMKFYHEVRKALQRAGVFIQDLSIETLDQIGWILSVWKSDDNRRKKLSTLGLSDNVIEELLPLNGSKFGHLSLKAIRKILPFLEDGYSYDVACELAGYQFQGKTEYVKQRLLPPLGEGEVTNPVVRRALSQAIKVVNAVIRKHGSPESIHIELARELSKNLDERRKIEKAQKENQKNNEQIKDEIREILGSAHVTGRDIVKYKLFKQQQEFCMYSGEKLDVTRLFEPGYAEVDHIIPYGISFDDSYDNKVLVKTEQNRQKGNRTPLEYLRDKPEQKAKFIALVESIPLSQKKKNHLLMDKRAIDLEQEGFRERNLSDTRYITRALMNHIQAWLLFDETASTRSKRVVCVNGAVTAYMRARWGLTKDRDAGDKHHAADAVVVACIGDSLIQRVTKYDKFKRNALADRNRYVQQVSKSEGITQYVDKETGEVFTWESFDERKFLPNEPLEPWPFFRDELLARLSDDPSKNIRAIGLLTYSETEQIDPIFVSRMPTRKVTGAAHKETIRSPRIVKVDDNKGTEIQVVVSKVALTELKLTKDGEIKDYFRPEDDPRLYNTLRERLVQFGGDAKAAFKEPVYKISKDGSVRTPVRKVKIQEKLTLGVPVHGGRGIAENGGMVRIDVFAKGGKYYFVPIYVADVLKRELPNRLATAHKPYSEWRVVDDSYQFKFSLYPNDAVMIKPSREVDITYKDRKEPVGCRIMYFVSANIASASISLRTHDNSGELEGLGIQGLEVFEKYVVGPLGDTHPVYKERRMPFRVERKMN

SEQ ID NO: 63 - protein, 1052 aa, Aminomonas paucivorans
  Aminomonas paucivorans DSM 12260
MIGEHVRGGCLFDDHWTPNWGAFRLPNTVRTFTKAENPKDGSSLAEPRRQARGLRRRLRRKTQRLEDLRRLLAKEGVLSLSDLETLFRETPAKDPYQLRAEGLDRPLSFPEWVRVLYHITKHRGFQSNRRNPVEDGQERSRQEEEGKLLSGVGENERLLREGGYRTAGEMLARDPKFQDHRRNRAGDYSHTLSRSLLLEEARRLFQSQRTLGNPHASSNLEEAFLHLVAFQNPFASGEDIRNKAGHCSLEPDQIRAPRRSASAETFMLLQKTGNLRLIHRRTGEERPLTDKEREQIHLLAWKQEKVTHKTLRRHLEIPEEWLFTGLPYHRSGDKAEEKLFVHLAGIHEIRKALDKGPDPAVWDTLRSRRDLLDSIADTLTFYKNEDEILPRLESLGLSPENARALAPLSFSGTAHLSLSALGKLLPHLEEGKSYTQARADAGYAAPPPDRHPKLPPLEEADWRNPVVFRALTQTRKVVNALVRRYGPPWCIHLETARELSQPAKVRRRIETEQQANEKKKQQAEREFLDIVGTAPGPGDLLKMRLWREQGGFCPYCEEYLNPTRLAEPGYAEMDHILPYSRSLDNGWHNRVLVHGKDNRDKGNRTPFEAFGGDTARWDRLVAWVQASHLSAPKKRNLLREDFGEEAERELKDRNLTDTRFITKTAATLLRDRLTFHPEAPKDPVMTLNGRLTAFLRKQWGLHKNRKNGDLHHALDAAVLAVASRSFVYRLSSHNAAWGELPRGREAENGFSLPYPAFRSEVLARLCPTREEILLRLDQGGVGYDEAFRNGLRPVFVSRAPSRRLRGKAHMETLRSPKWKDHPEGPRTASRIPLKDLNLEKLERMVGKDRDRKLYEALRERLAAFGGNGKKAFVAPFRKPCRSGEGPLVRSLRIFDSGYSGVELRDGGEVYAVADHESMVRVDVYAKKNRFYLVPVYVADVARGIVKNRAIVAHKSEEEWDLVDGSFDFRFSLFPGDLVEIEKKDGAYLGYYKSCHRGDGRLLLDRHDRMPRESDCGTFYVSTRKDVLSMSKYQVDPLGEIRLVGSEKPPFVL

SEQ ID NO: 64 - protein, 1361 aa, Anaerococcus tetradius
  Anaerococcus tetradius ATCC 35098
MGNYYLGLDIGTNSVGWAVTDENYNIERFKKKNMWGIRLFDEAKTAESRRIHRQARRMRQRKIQRLNLLMELFDVEISKVDESFFIRKKESDLHYEDKSQDSRYALFNDKEFNDKDYHNKYPTIFHLIMDLIENDEKKDIRLLYLACHYLIKNRGHFIFEGQKFDVNSSLNNNINKLKSHLDQFYNICLDFDNDKLIEILVNQNLNISEKSKKIKELLRKTNLEVGIANLIAGGSIKLSNMFDDDELKNLDYNSLSFKNSNFDEGRELFEEVLEDRFELVEILKDIHDASVLETMLSSASISPDGGKYISSSMINSYNKHKRDLKLLKKIIKKYKKSEYDNIFRDENIKNNYLSYTRTGINKNKKVQAEDNTDSDGFYKYIVKILKDIKENDSDEDIKYILSEIDKKNFVPKQRTKENSVIPYQLREIELRKIIDNQSKYHKFLNEVDEKGISVKEKIISLLTFRIPYYIGPLNPSYNEEKNFTTSWVKRLAKGKVTPWNFEDMVDIDASREAFIENKLNKCSFLLDETVLPKDSLLYQEYMVLNELNNLKINGQSINTDLKKSIYEELFKKYKKVTRKRLISYIKEKENMSGDIVITGIDGDFKQGLKSYIAFKDIIGEKIDDDIYRKEVEKIIRDISLYGDDKSFIQKKIKNENKLDLSDDQISKIAKLKFKDWGRFSKKLLVGIKASDKNTGEIDNIIGFMRNYNYNIMQLMANVFTFKDEIEKLNSKYYTDEKINIDYLDDLYLSSPAKRMLWQSFQIVDEIKNIKNSDPKKIFIEMARSKEDKPTRKMSRKSRLEKLYTDSKKQFIKLFGPDEYDKLNNEIKNKSESDFRWDNLYLYYTQFGRCMYSLDPIDLEELSNKNLYDQDHIYPKSKIYDDSIENRVLVKKQLNLDKSNEYPIPDRVLNKDKNKLLAFWKMLNEKELIGDKKYARLIRKSPFTDEELGDFIARQLVETRQATKETANMLKRLCPDSKIVYVKAKNVSDFRRKFDILKCRSINDLHHAHDAYLNIVVGNVFDTKFTSNPLNFIKNNSKNRSYNLEKIYDYDVIRNEKIAWLAERKEENQDGSIATVLKNLSKNDIRVTRRTYIKCEDLFDENIVRKGNGKFPIKENNNKSDTNKYGGYSGIKNAYFVLLEDEKHNRILEAIPSFIYKKEKNGEKGSVINYLQNILGIKSAKILRDKIKIGSLLKIDKFPYNLAGKSGNGILISGGVQLILDKNTSKYIKKIENYKYKLDENKDYQINIFDKLSKEENIKLFDLFVDKFENSIYKNRVNIKLKEIKLARPKFEHLSIEEQIKTLTQMLILFGRENNAVNLEYIGLPKNTGKTKINKKINNKDIKIINQSITGLYETEEDLANI

SEQ ID NO: 65 - protein, 1552 aa, Anaerophaga sp.
  Anaerophaga sp. HS1
MFSQRNNPYCELLQNVKQLYKEKFGKTNQVDNSIIYGFMKRILGLDLGTNSIGWALVENDENDRKGKIIGMGSRIIPMDMSELDNFNKGASISKTAERTRLRMTRRLRERHLLRRARLHRILNIMGFLPEHYRNSIDFIDKKGCFFEGQEPKIAYKPDKNSEQFCFLFTSSFHEMLEDFRKFQPELIQNRKKVPYDWTIYYLRKKALTQKISKEELAWIILNFNTKRGYYHLRGEDEDNQDNKKIKEFRALKVVNVTEREGANSSGKKWYDMELENGWVYSRQSNLPPNLEGKTIELIVSYTLDNNGNIKKDKNGKEKYSLSMPGEEDWNLVKIKTENDLKTSKKSVGEYIYDHLLKNPDQKIRGKLISTIERKFYKEELSRILKTQMNFYEELKNRELYQKCVEELYPNNKSHQQTLLQKDFIHLIVEDIIFYQRPLKSKRAFVNNCPLEYRVYVDKKSGELIKSGVKCIPKSHPLFQEFRLWQYVRNLRIYERERMVNGRLMVNVDVTNELLPDEEHIVRLFDLLNDRKSFKQDDVLRFVGIKSPKDRKRYSWNYPEDKELPGNETRHLILAWLKKVDGVPEDWLDPEKLKALWHLLYSVTDREEIIKGLHSFAKKYELPDTFVEHFKKIPRLEREYGSFSEKAIKKLLPLMRMGKYWKAEEIPADLLEKAQKIIDAEADDRISDEVREKLLHLKDISQLKGLPLWQASYLVYGRHSETGEVVKWRTSEDLEKYILQFKQHSLRNPVVEQVILEALRVVKDIWEHYGEGKEGFFNEIHVEIGRELKNPADKRKKITSQIQENENTNLRIKALLEELFNDPSVKNVRPYSPAQQEILRIYEDGVLNGQKEIPDDILKISKMARPSKSQLVKYKLWLEQKYRSPYTGEIIPLSQLFTSAYEIEHIIPQARYFDDSFSNKVICEAEVNREKGHQLAFEFITKRGGDEIELNFGKKVTILNVEEYQKFVKDHYGRSLRSLSKMRKLLMEDIPDDFIDRQLNDSRYISKVVRNLLSNIVRAEDENSLVSKHLITCTGGVTTRLKHEWGLNDVWNELITPRFVRLNKMGKEKFGEWINKKGKQVFQIQMPLELQKGFNKKRIDHRHHALDALVVACASRSHVNYLNNDSARANASETRYDLRNKLCYKDKTDSNGNYRWKFYKPWESFTEEAKNRLAGTVVSFKSNRRIMTRSSNRYFKWVDTSEGKKKKLVRQIKGDNQAIRKPLHKDTVLGKVSLRKEKKVSLSKAIDLWESIVDKPLKKRIQSLREQGYDKKLLLKYFKDRNNQFNGQDISRVNIYFFDNNLAARRVTLDASFNSEKRIDGITDSGIKKILYAHLQNEKYHGKKDEKGNEISPYELAFSPEGLEEMNANIKKLNGGKPHCPIYKVRLAETIGEKFKLGEKGNKNKKYVEAAKGTNLFFAVYVDEKGVRSFETIPFSVALERRKQKLAVVPEENENKEKLLFYLSPNDLVYVPDEDEKLIDYRQLSINPTRIYKMVSSSGTQCFFIPHFVASPIVQTMELGPNNKSERAWDGQMIKNVCYKLSVDRLGNVKIEK

SEQ ID NO: 66 - protein, 1515 aa, Anaerophaga thermohalophila
  Anaerophaga thermohalophila DSM 12881
MKRILGLDLGTNSIGWALVESDEEQKSGKIQGIGSRIIPMDQNELDNFNKGNTVSQTAERTRLRMVRRLRERHLLRRERLHRVLKEIGFLPEHYLEQIDFTEKPGGFLPGKEPKIAYKPDNFKDKYDFLFQDSYHEMLSDFQDKNPEFIQKRKKVPQDWTIYYLRKKALTAKITKEELAWIILNFNQKRGYYQLRGEDEDVAKNTKKEEFHALKVVKVKEREDSEGASGKWYDIELENGWVYPRQSNIRPDWEGKILELIVTYNLDKDGNIKTDKEGNEKRSFRMPNKDDWTLRKKRTENEIEKSGKTVGEYIYDNLLDAPDLKIRGKLVSTIERKYYRSELEQILTAQKKYHPELSNSELFNKCISNLYPNNDIHRKALLSKDFVHLIINDIIFYQRPLKSKRSTVSNCPLEYRVYVDKVTGEKKKVPLKCIPKSHPLYQEFRLWQYVKNLRLFEKERFENGRLLTNVDVTEQFLPDEDKYVELFEFLNGRKTFKQDDILKFAGIKSAKDRVKYYWNYPQEKEYPGNETRYLIESRLKKIENVPDEWLNYEKIEELWHLLYSVTDKVEIEKGLQSFAAKYQLPDLFVEVFKGFPRMEREYGAFSKKAIKKLLPLMRMGKYWKLENINPDLIEKVQKIIDGEADDNINDGIRERFSEINEMSDLRGMPLWKASYLVYGRHSEAAEVIRWRTSADLDQYIKDFKQHALRNPIVEQVVLEALRVVKDVWNYFGEGREKFFDEIHVEIGRDLKNPADKRQKIANQIQENENTNLRIKALLVELFNDPEVQNVRPYSPVQQQLLKIYEDGVLNAERDIPDDIQKISRMANPTRNQLIRYKLWLEQKYRSPYTGEIIPLNKLFTSEYEVEHIIPRARYFDDSFSNKIISEAEVNRKKDRMLAFEFIKKLGGSTIDLNYGKKVSVLTVEEYQQFVKDHYGINPHSRLKMQKLLMDEIPESFIERQLNDSRYISKMVRNLLSNIVREENENSPVAKQLITCSGSITNTLKQEWGLNDVWNTIITPRFERLNKMGEQKYGEWVNKEGKPVFQIQMPLELQKGFNKKRIDHRHHALDALIVASATRSHVNYLSNEAAKTNAKDTRFDLRNRLCYKEKRGQNRNFTWRFYKPWNTFTEDAKNALNDIVVSFKSNHRVINKSTNRYFKWENLPGGMKKKRLVRQEKGDNWAIRQSLHKDTVLGKVSLRKVKPVSLSVALDSWNNIVDKALKKKIRSLKDQGYDKKLMLKYFKDRRNEYNGENISRVNVYYFDEEMAARRVDLDTSFNSEKRIEGITDSGIKKIIYAHLKNEKYHGQKDDKGKDISPYELAFSPEGIAEMNANIKQLNGGKPHCPIYKVRLAEPVGEKFQLGETGNKTEKLVEVAKGTNLFFGVYANDEGVRSFATVPFYLAVEREKQGLPAVPQENENGDQLLFWLSPNDLVYVPSEEDAHFANPKQIELDNSRIYKMVSSTGTQCFFIPHFVATPIVQTIELGPNNKSERAWDGQMIKKVCYKLSVDRLGNVEIE

SEQ ID NO: 67 - protein, 1168 aa, Azospirillum lipoferum
MARPAFRAPRREHVNGWTPDPHRISKPFFILVSWHLLSRVVIDSSSGCFPGTSRDHTDKFAEWECAVQPYRLSFDLGTNSIGWGLLNLDRQGKPREIRALGSRIFSDGRDPQDKASLAVARRLARQMRRRRDRYLTRRTRLMGALVRFGLMPADPAARKRLEVAVDPYLARERATRERLEPFEIGRALFHLNQRRGYKPVRTATKPDEEAGKVKEAVERLEAAIAAAGAPTLGAWFAWRKTRGETLRARLAGKGKEAAYPFYPARRMLEAEFDTLWAEQARHHPDLLTAEAREILRHRIFHQRPLKPPPVGRCTLYPDDGRAPRALPSAQRLRLFQELASLRVIHLDLSERPLTPAERDRIVAFVQGRPPKAGRKPGKVQKSVPFEKLRGLLELPPGTGFSLESDKRPELLGDETGARIAPAFGPGWTALPLEEQDALVELLLTEAEPERAIAALTARWALDEATAAKLAGATLPDFHGRYGRRAVAELLPVLERETRGDPDGRVRPIRLDEAVKLLRGGKDHSDFSREGALLDALPYYGAVLERHVAFGTGNPADPEEKRVGRVANPTVHIALNQLRHLVNAILARHGRPEEIVIELARDLKRSAEDRRREDKRQADNQKRNEERKRLILSLGERPTPRNLLKLRLWEEQGPVENRRCPYSGETISMRMLLSEQVDIDHILPFSVSLDDSAANKVVCLREANRIKRNRSPWEAFGHDSERWAGILARAEALPKNKRWRFAPDALEKLEGEGGLRARHLNDTRHLSRLAVEYLRCVCPKVRVSPGRLTALLRRRWGIDAILAEADGPPPEVPAETLDPSPAEKNRADHRHHALDAVVIGCIDRSMVQRVQLAAASAEREAAAREDNIRRVLEGFKEEPWDGFRAELERRARTIVVSHRPEHGIGGALHKETAYGPVDPPEEGFNLVVRKPIDGLSKDEINSVRDPRLRRALIDRLAIRRRDANDPATALAKAAEDLAAQPASRGIRRVRVLKKESNPIRVEHGGNPSGPRSGGPFHKLLLAGEVHHVDVALRADGRRWVGHWVTLFEAHGGRGADGAAAPPRLGDGERFLMRLHKGDCLKLEHKGRVRVMQVVKLEPSSNSVVVVEPHQVKTDRSKHVKISCDQLRARGARRVTVDPLGRVRVHAPGARVGIGGDAGRTAMEPAEDIS

SEQ ID NO: 68 - protein, 1068 aa, Bacillus cereus
  Bacillus cereus BAG4X12-1
MRYVLGLDIGIASCGWAVINQEKERIEDLGVRIFDKAENPKDGKSLAAPRRDARSTRRTLRRKKHRMQRIKILLVKQGLLFKTELNHLYESATEFDVWNLRLDALERKLHPKEFARVLIHLAKRRGFKSNRKETTLSENGQILESISENQQIMEQQNYRTVGEMILKDKKFENHKRNKDGTYIGTVTRQQLQDEIQMIFHTQRLYKNDYATEEFESSYLEIWASQRPYASKDQIEKMIGYCTLEPKEKRTPKASWSFQYFVALQTINNLRLISKDKIEELSFEEKKQIMNLALEKPIVKYIDIRKLLSIPNDFQFNSLSYSADTVDTTLENKRCIELKEYHSINKVYKQVYGKNTPNLLPIDYDTIAYGLTIFKDDKDILEYLQNKYVNAKGKPIKNLAKKTYDDTFIQALLNLNFTKMGHLSFKALKNIIPFLEEGLSYDKACEKAGYNFKGTSYTERTKYLPVIPQNTNPVVHRALSQTRKVINAIIKKYGSPNAIHIETARELSKTFQERKEIDSRYQDNSKKNEHAIHKLKELGNINPSGINIVKFKLWSEQDGRCMYSGKYIEPHRLFEEGYTEVDHILPYSRSLDDSYNNKILTLGTENQRKGNKTPYEYMGNTSIWDEFETRVQSNKKINFKKQQKLLLQNFSYAREQEFIERNLNDTRYATIYLTSLIQQHLIFSESSSKKKVRTVSGIITSHLRSRWGFNKDRKEGHIHHALDAVIVAVTSNHMIQRVTKYYKLKELNKNLQAKQLPFPEPWEGFRLELEARISPNTQQYLKGIHFKNYADVNLSDIKPIFVSRMPKRSITGELHQETIRKFLGYNEKGKVLTAIKTKLEDIPFDANGDFPMYGKETDLYTYNAIKERYLSHEKDKRKSFQEPLYKPTKSGEIGPLIKSIKIMDTRTIVNPVNQGKGVVYNSKIARTDVFKKEDKYYLIPIYTIDLLKNILPHKAITAGKGYEDWTTIDSSFTFLFSLFPNDLIQIVPSKNKTIKARTTVSKKEILLPSLTGYFKGVHSGTAGITVETHDGSVIANVGSKQLLLFEKYQVDVLGHYTKIKEEKRMGMAI

SEQ ID NO: 69 - protein, 1078 aa, Bacillus cereus
  Bacillus cereus BAG4X2-1
MRYVLGLDIGIASCGWAVINQEKERIEDLGVRIFDKAENPKDGKSLAAPRRDARSTRRTLRRKKHRMQRIKVLLVKHGLLSKTELDHLYESATEVDVWNLRLDALERKLYPKEFARILIHLAKRRGFKSNRKETTLSENGQILESISENQQIMEKQNYRTVGEMILKDKKFENHKRNKNGTYVGTVTRQQLQDEIQMIFHAQRLYKNDYATEEFESSYLEIWASQRPYASKDQIEKMIGYCTLEPKEKRAPKASWSFQYFVALQTINNLRLISKDRIEELSFEEKKQIMNLALEKSIVKYIDIRKLLSVPNEFQFNSLSYSADTVDTAVESRKCIELKEYHSINKVYKQIYGENALNLLPKYYDTIAYGLTIFKDDKDILEYLQNKYVNAKGKPISNFANKTYDDTFIQALLNLNFTKMGHLSFKALKNIIPFLEEGLSYDKACEKAGYNFKGTSYTEQTKYLPVIPQNTNPVVHRALSQTRKVINAIIKKYGSPNAIHIETARELSKTFQERKEIDSMYQDNSKKNEHAIHKLKELGNINPSGINIVKFKLWNEQDGRCMYSGKYIEPHRLFEEGYTEVDHILPYSRSLDDSYNNKTLTLGTENQRKGNKIPYEYMGNTSIWNDFETRVQSNKKINKKKQQKLLLQHFSYAREQEFIERNLNDTRYATIYLSSLIQQHLIFSESSRKKKVHTVSGIITSHLRSRWGFNKDRKEGHIHHALDAVIVAVTSDHMIQRVTKYYKLKELNRNLQAKRMPFPEPWEGFRLELEARISPNTQQYLKGLRFKNYADVNLSEIKSIFVSRMPKHSITGELHQETIRKFIGYNEKGKVLTAIKTKLEDIPFDANGDFPMYGKESDLYTYNAIKERYLSHKKDKRKSFQEPLYKPTKSGGIGPLIKSIKIMDTRTIVNPVNQGKGVVYNSKIARTDVFKKEEKYYLIPIYTIDLMKNILPQKAITAGKGYEDWTTIDPSFTFLFSLFPNDLIQIVPSKNKTIKARTTVSKKEVLLPSLTGYFKGVHSGTAGITVETHDGSVIANVGSKQLLLIEKYQVDVLGNYTKIKEEKRIGLTTYNDNKKIAAC

SEQ ID NO: 70 - protein, 1069 aa, Bacillus cereus
  Bacillus cereus Rock1-15
MNYDIGLRIGITSCGWSIINKDLERIEDLGVRVFEKAENPDGTASAAPRREARKSRRKHRRKKHRIERIKRLIVQHDLLSKKELDSLYLSPFNIDVWNLQVEALERKLDNREFARVLIHLVQRRGFQTIRKSVEIQEEGKLLENVSENERIMKVNGYKTVGEMFSKHEKFTHHKRNKDGSYTSVVTRSLLLKEIKTIFNSQRILGNVFSTQKLESDYLYIWGSQRPTLTYEQLMSMVGNCIYEKKEKRAPKTSWAFQYFSLLQKINKLKVSDDNTLRKLSKEERDIVIELAFKKKNVSFVDIRKALKLNDNTKFNHLTYSHVVETKKVEKATFIELKGYHLIKKQLKDRNVELTQELQPKDYDAIAAASTFFKNDIEFRDYLRNQYLDSNGKRKSNIANKVFEDKVIAAVFELNFSKVCHLSFKSLYKLIPHLEKGLDYKEAILCAGYNFRDENKRDKKLFLPVIQQETNPVVHRALTQARKVINAIIREYGSPNTIRFVVANDLAKTYKQRKELESTLKKNRAENEKIKTKLLSMGIINPTGMDIVKYKLWYEQSGICLYTGRQMELSSLFKPGYSIVNHIIPYNRSFDDTYHNRVLTLTETKYEKGNKIPFEYFGAEETCWNEYEKRVSTSKKIHDKKREKLLIRNFDIEYENEMISNNVFDTHYIGSYFEKYIDEHLQFKKSTKKQKVFSIHGNMVAHLHSRWGFNKNSREIYLNHAVDAAIVAVLTDQLIRNIADYYRRDNILEQKGSLKFPEPWKSFSIELEARISPQVRDLIKKLNLDSYLDVDILHIKPVFISKKPRRKVNGEAHKSTIRSLIGINEIGKTVTCIKTRLEDIPFDENGDFPMYGKDTDKYTYTAIKERYLEFNKDKEKAFSTPLYKLKRNGEPGNQIKSVKIIDTRNIVNKVNQGKGIAYNSNIIRVDVFSRDQKYYVVPIYLRDFIKGSLPNKIITAAKGFMQWPETDNSYTFLFSIFPNDLIKVVPKEGKFIKAKNENKENINLTEILGYFKGLDSSTGAFTLESHDGSLLARGIGTKNLLLIEKYQVDVLGRYNKVGNEERQDIKIQQN

SEQ ID NO: 71 - protein, 1088 aa, Bacillus smithii
  Bacillus smithii 7_3_47FAA
MNYKMGLDIGIASVGWAVINLDLKRIEDLGVRIFDKAEHPQNGESLALPRRIARSARRRLRRRKHRLERIRRLLVSENVLTKEEMNLLFKQKKQIDVWQLRVDALERKLNNDELARVLLHLAKRRGFKSNRKSERNSKESSEFLKNIEENQSILAQYRSVGEMIVKDSKFAYHKRNKLDSYSNMIARDDLEREIKLIFEKQREFNNPVCTERLEEKYLNIWSSQRPFASKEDIEKKVGFCTFEPKEKRAPKATYTFQSFIVWEHINKLRLVSPDETRALTEIERNLLYKQAFSKNKMTYYDIRKLLNLSDDIHFKGLLYDPKSSLKQIENIRFLELDSYHKIRKCIENVYGKDGIRMFNETDIDTFGYALTIFKDDEDIVAYLQNEYITKNGKRVSNLANKVYDKSLIDELLNLSFSKFAHLSMKAIRNILPYMEQGEIYSKACELAGYNFTGPKKKEKALLLPVIPNIANPVVMRALTQSRKVVNAIIKKYGSPVSIHIELARDLSHSFDERKKIQKDQTENRKKNETAIKQLIEYELTKNPTGLDIVKFKLWSEQQGRCMYSLKPIELERLLEPGYVEVDHILPYSRSLDDSYANKVLVLTKENREKGNHTPVEYLGLGSERWKKFEKFVLANKQFSKKKKQNLLRLRYEETEEKEFKERNLNDTRYISKFFANFIKEHLKFADGDGGQKVYTINGKITAHLRSRWDFNKNREESDLHHAVDAVIVACATQGMIKKITEFYKAREQNKESAKKKEPIFPQPWPHFADELKARLSKFPQESIEAFALGNYDRKKLESLRPVFVSRMPKRSVTGAAHQETLRRCVGIDEQSGKIQTAVKTKLSDIKLDKDGHFPMYQKESDPRTYEAIRQRLLEHNNDPKKAFQEPLYKPKKNGEPGPVIRTVKIIDTKNKVVHLDGSKTVAYNSNIVRTDVFEKDGKYYCVPVYTMDIMKGTLPNKAIEANKPYSEWKEMTEEYTFQFSLFPNDLVRIVLPREKTIKTSTNEEIIIKDIFAYYKTIDSATGGLELISHDRNFSLRGVGSKTLKRFEKYQVDVLGNIHKVKGEKRVGLAAPTNQKKGKTVDSLQSVSD

SEQ ID NO: 72 - protein, 1069 aa, Bacillus thuringiensis
MNYDIGLRIGITSCGWSIINKDLERIEDLGVRVFEKAENPDGTASAAPRREARKSRRKHRRKKHRIERIKRLIVQHDLLSKKELDSLYLSPFNIDVWNLRVEALERKLDNREFARVLIHLVQRRGFQTIRKSVEIQEEGKLLENVSENERIMKVNGYKTVGEMFSKHEKFTHHKRNKDGSYTSVVTRSLLLKEIKTIFNSQRILGNVFSTQKLESDYLYIWGSQRPTLTYEQLMSMVGNCIYEKKEKRAPKTSWAFQYFSLLQKINKLKVSDDNTLRKLSKEERDIVIELAFKKKNVSFVDIRKALKLNDNTKFNHLTYSHVVETKKVEKATFIELKGYHLIKKQLKDRNVELTQELQPKDYDAIAAASTFFKNDIEFRDYLRNQYLDSNGKRKSNIANKVFEDKVIAAVFELNFSKVCHLSFKSLYKLIPHLEKGLDYKEAILCAGYNFRDENKRDKKLFLPVIQQETNPVVHRALTQARKVINAIIREYGSPNTIRFVVANDLAKTYKQRKELESTLKKNRAENEKIKTKLLSMGIINPTGMDIVKYKLWYEQSGICLYTGRQMELSSLFKPGYSIVNHIIPYNRSFDDTYHNRVLTLTETKYEKGNKIPFEYFGAEETCWNEYEKRVSTSKKIHDKKREKLLIRNFDIEYENEMISNNVFDTHYIGSYFEKYIDEHLQFKKSTKKQKVFSIHGNMVAHLHSRWGFNKNSREIYLNHAVDAAIVAVLTDQLIRNIADYYRRDNILEQKGSLKFPEPWKSFSIELEARISPQVRDLIKKLNLDSYLDVDILHIKPVFISKKPRRKVNGEAHKSTIRSLIGINEIGKTVTCIKTRLEDIPFDENGDFPMYGKDTDKYTYTAIKERYLEFNKDKEKAFSTPLYKLKRNGEPGNQIKSVKIIDTRNIVNKVNQGKGIAYNSNIIRVDVFSRDQKYYVVPIYLRDFIKGSLPNKIITAAKGFMQWPETDNSYTFLFSIFPNDLIKVVPKEGKFIKAKNENKENINLTEILGYFKGLDSSTGAFTLESHDGSLLARGIGTKNLLLIEKYQVDVLGRYNKVGNEERQDIKIQQN

SEQ ID NO: 73 - protein, 1509 aa, Bacteroides coprophilus
  Bacteroides coprophilus DSM 18228
MKKTLGLDLGTNSIGWAVINSNIDSEGKEKLVGISSCGSRIIPMDATTLGDFGKGNTKSPVAERTRLRGIRRLLERSLLRRERLHRVLSVMGFLPEHYASQLDRYGKFLPETEPKLAWYKDDSGRYQFLFQKSFHEMLEDFRQHQPELVAGEKKIPYDWTIYYLRKKALSQEITKEELAWILLNFNQKRGYYQLRGEEEQEENNKSVEYHALKVVSVEDSGERKGKDIWYNVTLENGWVYRRASNIPLDWTGKVKEFVVTTELDDAGNPKKDKEGNVKRSFRAPKEDDWGLLKTRTQAQIDESGKTVGTYIYESLLCMPNQKIRGKLVRTIERKYYKDELRQILVKQSEFHAALQDHNLLLSCIEELYPNNEAHRRLLSASSFIYFLIEDILFYQRPLKSQKGLIDNCPYESHIYKDKKDGSLHHVPLKCVSKSHPLFQEFRLWQFLSNLRIYQRERMMDGSLKLDVDVTREFLPSEEDYVKLFDWLNERKEISQKFLLAYKPFGLKKNEQANYRWNYVEDKSYPCNETRAEIKSRLSKAGVPEEFLTEEKEEALWHILYSISDKKELTKALGTFAAKNCLNESFVEVFAKIPPFESNYAAYSLKAIRKLLALMRMGKYWNEQAIDRQTRDRIEKILTGEYDETIRSRVREKAMLLTDISSFRGLPLWLACYIVYDRHSESKELVKWETPADIDHFLSKFKQNSLRNPIVEQVITESLRTVRDIWKQEGKIDEIHVELGREMKNPAKERARITAQVQENENTNLRIKALLAEFMNPEFEIENVHPYSPGQQEILRIYEDGVLSGIAEKDLPDDITAILKKFRENDVKKRPTTSEVLRYKLWLEQRYRSPYTGRVIPLGKLFTPAYEIEHVIPQSRYFDDSISNKVICESAVNKLKDNCLGYEFIKKHSGEMVELGNGETVPVFSVEEYERFVKESYFGNSKKMKKLLLEDIPDSFIERQLNDSRYISRVVTSLLSNLVCEEGEQDGLSKNVIVCTGGITDRLKKDWGVQEVWNRIILPRFLRLNEITGRTDFTSTSVNGHLLPALPLYLQKGFNKKRIDHRHHAMDAIVIACANRNIVNYLNNSSARKNSEISRYDLQRLLCEKVKTDANGNYKWILRKPWETFTQDVYAALTNIVVSFKQNLRVINRTTNYYQHYNEAGEKRMIPQTKGDRWAIRKPMHKDTVYGEVNLRKEKTLPLRDVVKNPSIVVDKSLKNKLYELLKSQYDLKAIAKYFETHQDVWADVNLKKIKVYYFTKETNERFFATRKSLDPSFDQKKIEEEVTDTGVQKILLHHLQQNNNDPDMAFSPDGIDRMNQNMTILNDGKWHQPIYKVRTYEKADKFAVGESGNKAKKFVEAAKGTNLFFAVYESVQEDEAIGKQVCKRTFATIPLNEVIKRKKQGLPAAPEDLNGNLPKFVLSPNDLVYLPTEEERNSSRIIQPLDRERIYKMVSSSGSQCFFIKVFVANSIWDKNEYSSLNKMERAITNEMIKEICVPIKIDRLGNVSLIQI

SEQ ID NO: 74 - protein, 1504 aa, Bacteroides coprosuis
  Bacteroides coprosuis DSM 18011
MKKVLGLDIGTNSVGWAVVNQNDKGEFLSIEKIGSRIIPMSQDVMDKFGAGQTESSTAQRTQYRGVRRLRERSLLRRERLHRVLHILHFLPQHYDAAIGWNKKENKTYGKFLPGVEVNIPWVATDQGHQFIFMDSYAEMLKDLKQHQPHLFEKSSTPVPLDWTIYYLRKKALTQAISKEELAWILLNFNQKRGYYQLRGEEVEDNTKREEFYALKVVKVELDKDNTSAKTWYKVHLENGFIYPCPSDTPIDSWVGMVKDFIVTTTLEKDGSEKRTADGEIKRSFRAPKEDDWTLLKKKTESELEKSGKQVGAFIYDTLLSNPDQKIIGGLIKTIERKYYKKELEQILETQQKFIAELSDKKLFQACAEELYPLNDSHRENLLERDFKHLFVQDIIFYHRPLKTKKSLISNCTYEYRTFYKNGEKQISPIKCIAKSNPLFQEFRVWQFVQNLRILQRQRSEGDSIKYNVDVTAEFLKDENDIANLFTWLNERKVIKQDQLLKSYFKLKVNKETKELDYRWNYVDDKNKEYPCNATRTHILSFLEKCKEEKRIEDDRFVYSLWHLLYSVVEPIELRGALAKFAEREHLHPSFVDVFAQFPPLEKEYGSYSEKAIKRLLPLMRMGDYWHEDKIDVKTKQRIQRIIDGEADDDITHRSREKVENLRSITDFKGLPLWKAGYVVYNRHSESGELTKWKTPHELSNYIQNEFKQYSLRNPIVEQIVLETLRVVHDLWVKHGDFSEIHLELGRDIKNSSDKRKRMAERQQENENSRQRVLEMLIDLKKEAAFADLNPYSPSQQEKLRIVEDGVLRSNIEIPKDIEKITKSAKPTSRELTKYRLWLDQKYRSPYTGQPISLAQLFTSKYEIEHVIPQAKYFDDSFTNKVICESEVNKEKGSMLAHEFILKNGGSTVNVGGRQVQVLKNDAYVELINRLYGKNNPVKAKKLLAEDIDEVVGDFSERQLNDTRYISRVVQKLLSNIVREEDEQESTSKHVIGCSGQVTTALKKDWGLNDIWNKIIQPRFERLNEMTATEDYGVWQSPNHFQIRVPEEIQKGFTKKRIDHRHHAMDALVIACATRSHINYISNRSGQDRNAKFETTRTDLRSKLCYKENSSGNNYNYIFNKPWDTFTQDAHRALENIVVSHKQNLRVLTKTNNYTQFINKDGKKDLQKQVKGDHFAVRKPMHQETIYGRVSIRSIKEVALKKALENWKQIVDRTLKDKIRELIGAYGKYDAQTILKYFKDRDYKFNNLKINRVEVYEYDHNCAAVRKSIGDDLTIKQIERITDESIRKILMNHLSNYDDNLKEAFSPEGLMEMNKNIKELNGGKNHQPIYKVRLFEDLGSKFPLGVSHNNPDKYAIAAKGTNLFFGIYEDQEGKRMFDSIPLNIVIDRLKEKKSPVPETYNESKLKFHLSPNDLVYVPTDEEQKQPELVDVDHLSDEQKGRVYKAVSFTGNRAFFVNHRVSKVIHDYVEFGTKNKIENDDDKRSLKHICWKLKVNRLGEITDVKR

SEQ ID NO: 75 - protein, 1504 aa, Bacteroides dorei
  Bacteroides dorei DSM 17855
MKNIVGLDLGTNSIGWAVVNGSVNDDGSEQLVKIQASGSRIIPMDAAMIGDFNKGNSISQTAERTRLRGVRRLSERYLLRRERLHRILDILGFLPFHFAQDLDRHGKIVKGKEPKLAWRKNEAGQFEFIFQDSFKEMLEDFKLNYPNLITDDKKVPYDWTIYYLRKKGLTSKISKEELAWILLNFNQKRGYYQLRGEEEEENKDKLVEFYALKVVAVEDSGEKKGKDIWYNVHLENGWVYRRTSNMSLDWVGKTKEFIVTTDLEKDGTPKKDKEGNVKRSFRAPKEDDWSLVKKKTEADIDQTHKTVGAYIYDTLLGNPSQKIRGRLVRTIERKYYKEELKLILEKQKEFHLELQDRALYAACIEELYPINEAHRNNVGNRDFTYLFLEDILFYQRPLKSKKSLIDNCPYEENQGLDKETGEIKSFPVKCIAKSHPLFQEFRLWQFIINLRIYRKDLAQDVDVTNELLKTEEDYVALFDWLNGKKEIDQKAFLKYPVFGLKKEIENYRWNYVQDKPYPCNETRSLMLARLEKCDISIEFLTKENEEALWHILYSVEDKNEIVKALQKFADKHDLNASFVDVFQKFPPFKKEYGSYSAKAIKKLLPLMRMGKYWSENSIDKGTRERIDKIITGEYDEKIENRVREKAIHLADVSDFKGLPLWLVCYIVYGRHSEAKEIIQWKSPADIDSYLRSFKQHSLRNPIVEQIIIETLRVVRDIWKQVGNIDEIHVELGREMKNPADKRKKMTQQMSENENTNLRIKYLLTEFLNPEYEVENVRPYSPSQQDILRIYEEGVLNSVSDLPEEISDILKKFTETDLKKRPSRSEVLRYKLWLEQKYRSPYTGEVIPLGKLFTPAYEIEHVIPQSYYFDDSFSNKVICEAEVNKLKSNLLGHEFIVKHHGEIVELPFGKKVRIFTVDEYEQFVKDNYSRTRSKMKKLLMDDIPEEFVTRQLNDSRYISKVVKSLLSNIVREKGEEEAISKNVIPCTGGVTDRLKKDWGINEVWNKIILPRFQRLNELTGTNKFTTKNVGIQEIPTMPLELQKGFNKKRIDHRHHAMDAIIIACANRNIINYLNNKSATAKAELSRYDLQKMLCDKAKTDNNGNYKWVIRKPWASFTQDTYLALENIIVSFKQNLRVINKATNRFLHYNEEGKKIFVKQGKGDNWAIRKSMHKDTVFGEVNLRRIKTVALNEAMKNPQSIVVKDFKRKLLELWNLGFDAKRIKKYFEDNRETWSDINLSKIEVYYFSKDTKDRFFATRKPLDTSFDRKKIENNITDTGIQKILLRHLELKDNNPDIAFSPDGIDEMNRNIIQLNNGKYHQPIIKIRWYEQADKFAVGQTGNKSSKFVEAAKGTNLFFAVYESNILDKKTNTIIKKRNYATIPLNVAIERQKQGLPVAPEDENGNDPIFVLSPNDLVYLPTDDELANGIIAQPLDRGRIYKMVSSSGEQCFFIKHIVANVLVDKFEFSPLNKMERALTGEMIKMICIPIKVDRLGNVLESSSSYKK

SEQ ID NO: 76 - protein, 1509 aa, Bacteroides eggerthii
  Bacteroides eggerthii 1_2_48FAA
MKTILGLDLGTNSVGWAVINSVIKEQAERIWIEMAGSRIIPMDAAVLGDFDKGNSISQTSERTRLRGARRLRERQLLRRERLHKVLNILGFLPNHYLEYIDFEKHPGKFLADAEPKLAWVKDEQGKYTFLFQAAFDEMLADFAIHQPSLVSGDKKIPYDWTIYYLRKKALTEMISKEELAWILLNFNQKRGYYQLRGEEEEDNAGKSVEFYALKVLTVEATDEKKGRDVWYNVHLENGWIYRRSSSVPLDWEGQVKEFIVTTDLNPDGTPKLDKYGEVKRSFRAPKEDDWMLIKKRTEADIANTHKTVGAYIYDTLLQKPQQKIIGKLVKTVERKLYRDELSLILQKQCAFHAELQDRALYARCVEALYPSNEVRRKNIANRDFVYLLMDDILFYQRPLKTKKSLIANCPYEENEYVDRETGEIKKTPLKCIAKSHPLFQEFRLWNFLSNIRIYQKEKEINGTLHLDVDVTAEFLKTEDDYVALFDWLNSRKEIEQKTFLKYPKFGLKKEISNYRWNYVEDKQYPCNETRHAILSSLEKANVCIDFLSNEKEVALWHILYSVSDKQEIEKALRTFAAKNGLDESFVEAFKKFPPFKSEYGAYSAKAIKKMLPLMRCGKYWDVSSIDDTTKERIKKIVTGEYDERISVKVRDKVMNLSDISCFRRLPLWLACYIVYNRHSEDKEAVKWESPADIDAYLASFKQHSLRNPIVEQVITETLRVVRDIWKQVGRIDEIHIELGREMKNPADKRKRMTAQILENENANLRIKALLAEFMNPEYEIENVRPYSPSQQEILRIYEDTVLHAEDQLPEEIDAILKKFNSSKVPTKSEFLRYKLWLEQKYRSPYTGELIPLGKLFTAAYEIEHVIPQSRYFDDSFSNKVICESAVNKLKDNQLGYEFIKNHHGQKVEVGFGKSVEIFSVDSYERFVKEQYAKSAVKMKKLLMDDIPEQFIERQLNDSRYISKVIKGLLSNIVREKNDSGEYEPEAVSKNIVVCTGSVTDRLKRDWGMNDVWNSIVYPRFERLNSLTDTQSFGHWENKSGKKVFQTELPLEYQKGFSKKRIDHRHHAMDAIVIACATRNHVNYLSNESASRNAKISRYDLQRLLCDKNRTDDNGNYKWVIKKPWDTFTQDAREVLSKIVVSLKQNLRIINKTTNVYRHLDATGNRVYEKQKTGDSWAIRKPMHKDTVFGAVNLRKVKVVRLSVALDTPAMIVDKRVKNKVFELLSYKYDKKRIEKYFKENAFLWKELDLAKVAVYYFTEATTEPLVAVRKPLDSTFNEKKIKESVTDTGIQKILLNHLCTKEGKPDLAFSAEGIEEMNRNLLQLNNGKSHQPIYKVRVYEPRGNKFSVGVLGNKGTKWVEAAKGTNLFFAIYITEDGKRTYETIPLNVVIEREKQGLVPVPDRNKKGDKLLFWLSPNDLVYLPTEEEREFGRINEPIDRGRIYKMVSCTGNEGHFIPANVANPIVPVIELGSNNKAQRAWTNEMIKDICIPIKVDRLGHIIEVKYRIDE

SEQ ID NO: 77 - protein, 1526 aa, Bacteroides faecis
  Bacteroides faecis MAJ27
MKKILGLDLGTNSIGWAVLNAADDNSLKYIEAAGSRIIPMDAAILGDFDRGNSISQTAERTRIRGMRHLRERYLLRRARLHRILNLLGFLPFHYAQDIDRYGNFSADMEPKIAWCKNLEGELEFIFIESFNEMLEDFRKNQPELVADNKKVPYDWVIYYLRKKALEKKISKEELAWILLNFNQKRGYYQLRGEDDDESMKTAKTRQYFDKQIIKNIIDTNQTYKGQRILIVELQNGDKGKIFKKEIPDWIGQEKNIIVTVDIDKDGNDKYEESGSLSCRFKIPTDAEWESEWKLIKMKTQKDLDESNKTVGTYIYDSILQNPTQKVRGKLVRTIERKYYKAELKQILEKQTEFHSELQDKDLYIECLNELYSNNDTHRNAITDRDFVYLFMNDILFYQRPLKSKKSLIDNCPYERNIYIDKETGEIKYSPIKCIAKSHPLFQEFRLWKFISSIRIYQRESVVEVVDKQLDLFSSQSTSVQKLVTDVDVTDKFLTCENDYVALFEWLNKKKIIDQKEFLKYRPFGLKGDIDNYRWNYVEDKSYPCNETHAMILTYFAKAGISEDILTKEMEEALWHILYSVEDRQEITKALRTFASKYHLSDSFVKVFSNIPPFKKEYGSYSAKAIKKLLSLMRMGKYWSEDAIDVNTRERIDKIVTGEYDEKIRDRVREKTIRLNDIRHFRALPDWLACYVVYDRHSETREITEWKSPEEIDEYIRNFKQHSLRNPIVEQVITETLRTVRDIWKQVGCIDEIHVELGREMKNPADKRKRITSQIIENENANLRVKALLTEFVNSEFEIENVRPYSLSQQDILRIYEDGVLNSVAEVPGDIAGILKKFNENDAKKRPTTSEILRYKLWLEQKYRSPYTGEMIPLSKLFTSAYEIEHVIPQSRYFDDSFSNKVICEAEVNKLKDNALGYEFIKKHHGEKVELGFGKIVEIFSVSVYEQFVKDNYSRNRGKMKKLLMDEIPEQFIERQLNDSRYISKVVKTLLSNVVREKAEQEAVSKNVIVCTGGVTDRLKKDWGINDVWNKIVLPRFLRLNELTNSTNFTAKNAAGNEIPAMPLELQKGFNKKRIDHRHHAMDAIVIACANRNIVNYLNNESASRKAKISRHDLQAILCDKVRTDDKGNYQWRVKKPWDTFTQDVYVALENIIVSFKQNLRVINKTSNYYWHYENGKKVLVKQVKGDSWAIRKPMHKDTVFGEVNLRKVKSVSLNEALKNPQFIVEKDLKRQLLSLLQQNFDIKKIKKYFEEHKDIWSDISLSKMNIYYFTKETKDRYFATRKPLDASFDKKKIESCITDTGIQQILLRHLELKENDPERAFSPDGIDEMNRNIIQLNKGKGHHPIAKVRVYEKADKFEVGQRGNKSSKFVEAAKGTNLFFAVYETEYPDEKTNSIVRKRNYATIPLNIAIERQKRGLSTAPEDEKGNVPSFVLSPNDLVYLPTSEDIVNGHITQPIDKSRIYKMVSSSGSQCFFIKHNIANIIVDKYEFSPLNKMERAISNEMIKEICIPVKVDRLGNIVKLGKSE

SEQ ID NO: 78 - protein, 1509 aa, Bacteroides fluxus
  Bacteroides fluxus YIT 12057
MKTILGLDLGTNSVGWAVINSVIKEQAERIWIEMAGSRIIPMDAAVLGDFDKGNSISQTSERTRLRGVRRLRERQLLRRERLHKVLNILGFLPNHYLEYIDFEKHPGKFLSDAEPKLPWVKDEQGKYTFLFQAAFDEMLADFAIHQPSLVSGDKKIPYDWTIYYLRKKALTEMISKEELAWILLNFNQKRGYYQLRGEEEEDNAGKSVEFYALKVLTVEATDEKKGRDVWYNVHLENGWIYRRSSSVPLDWEGQIKEFIVTTDLNPDSTPKLDKYGEVKRSFRAPKEDDWMLIKKRTEADIANTHKTVGAYIYDTLLQKPQQKIIGKLVKTVERKLYRDELSLILQKQCAFHAELQDRTLYARCVEALYPNNEVQRRNIANRDFVYLLMDDVLFYQRPLKTKKSLIANCPYEENEYVDRETGEIKKAPLKCIAKSHPLFQEFRLWNFLSNIRIYQKEKEINGTLHLDVDVTAEFLKTEDDYVALFDWLNSRKEIEQKTFLKYPKFGLKKEISNYRWNYVEDKQYPCNETRHAILSRLEKANVCIDFLSNEKEVALWHILYSVSDKQEIEKALRTFAAKNGLDESFVEAFKKFPPFKSEYGAYSAKAIKKLLPLMRCGKYWDVSSIDDTTKERIKKIVAGEYDERIAVKVRDKVMNLSDISCFKRLPLWLACYIVYNRHSEDKEAVKWESPADIDAYLASFKQHSLRNPIVEQVITETLRVVRDIWKQVGRIDEIHIELGREMKNPADKRKRMTAQILENENANLRIKALLAEFMNPEYEIENVRPYSPSQQEILRIYEDMVLHAEDQLPEEIDAILKKFNSSKVPTKSEFLRYKLWLEQKYRSPYTGELIPLGKLFTAAYEIEHVIPQSRYFDDSFSNKVICESAVNKLKDNQLGYEFIKNHHGQKVEVGFGKSVEIFSVDSYERFVKEQYAKSAVKMKKMLMDDIPEQFIERQLNDSRYISKVIKGLLSNIVREKNDSGEYEPEAVSKNIVVCTGSVTDRLKRDWGMNDVWNSIVYPRFERLNSLTDTQSFGHWENKSGKKVFQTELPLEYQKGFSKKRIDHRHHAMDAIVIACATRNHVNYLSNESASRNAKISRYDLQRLLCDKSRTDDNGNYKWVIKKPWDTFTQDAREVLSKIVVSLKQNLRIINKTTNVYRHLDATGNRVYEKQKTGDSWAIRKPMHKDTVFGAVNLRKVKVVRLSVALDAPTMIVDKRVKNKVFELLSYKYDKKRIEKYFKENAVLWKELDLARVAVYYFTEATTEPLVAVRKPLDSTFNEKKIKESVTDTGIQKILLNHLCTKEGKPDLAFSAEGIEEMNRNLLQLNNGKRHQPIYKVRVYEPRGNKFSVGVLGNKGTKWVEAAKGTNLFFAIYITEDGKRTYETIPLNMVIEREKQGLAPVPDKNEKGDKLLFWLSPNDLVYLPTEEELEFGRINEPIDRGRIYKMVSSSGNQCFFIPQSISNAIIPTKELGANNKAERSWDGAMIKNICIPVKVDRLGRIIEVKYRINE

SEQ ID NO: 79 - protein, 1436 aa, Bacteroides fragilis
MKRILGLDLGTNSIGWALVNEAENKDERSSIVKLGVRVNPLTVDELTNFEKGKSITTNADRTLKRGMRRNLQRYKLRRETLTEVLKEHKLITEDTILSENGNRTTFETYRLRAKAVTEEISLEEFARVLLMINKKRGYKSSRKAKGVEEGTLIDGMDIARELYNNNLTPGELCLQLLDAGKKFLPDFYRSDLQNELDRIWEKQKEYYPEILTDVLKEELRGKKRDAVWAICAKYFVWKENYTEWNKEKGKTEQQEREHKLEGIYSKRKRDEAKRENLQWRVNGLKEKLSLEQLVIVFQEMNTQINNSSGYLGAISDRSKELYFNKQTVGQYQMEMLDKNPNASLRNMVFYRQDYLDEFNMLWEKQAVYHKELTEELKKEIRDIIIFYQRRLKSQKGLIGFCEFESRQIEVDIDGKKKIKTVGNRVISRSSPLFQEFKIWQILNNIEVTVVGKKRKRRKLKENYSALFEELNDAEQLELNGSRRLCQEEKELLAQELFIRDKMTKSEVLKLLFDNPQELDLNFKTIDGNKTGYALFQAYSKMIEMSGHEPVDFKKPVEKVVEYIKAVFDLLNWNTDILGFNSNEELDNQSYYKLWHLLYSFEGDNTPTGNGRLIQKMTELYGFEKEYATILANVSFQDDYGSLSAKAIHKILPHLKEGNRYDVACVYAGYRHSESSLTREEIANKVLKDRLMLLPKNSLHNPVVEKILNQMVNVINVIIDIYGKPDEIRVELARELKKNAKEREELTKSIAQTTKAHEEYKTLLQTEFGLTNVSRTDILRYKLYKELESCGYKTLYSNTYISREKLFSKEFDIEHIIPQARLFDDSFSNKTLEARSVNIEKGNKTAYDFVKEKFGESGADNSLEHYLNNIEDLFKSGKISKTKYNKLKMAEQDIPDGFIERDLRNTQYIAKKALSMLNEISHRVVATSGSVTDKLREDWQLIDVMKELNWEKYKALGLVEYFEDRDGRQIGRIKDWTKRNDHRHHAMDALTVAFTKDVFIQYFNNKNASLDPNANEHAIKNKYFQNGRAIAPMPLREFRAEAKKHLENTLISIKAKNKVITGNINKTRKKGGVNKNMQQTPRGQLHLETIYGSGKQYLTKEEKVNASFDMRKIGTVSKLAYRDALLKRLYENDNDPKKAFAGKNSLDKQPIWLDKEQMRKVPEKVKIVTLEAIYTIRKEISPDLKVDKVIDVGVRKILIDRLNEYGNDAKKAFSNLDENPIWLNKEKGISIKRVTISGISNAQSLHVKKDKDGKPILDENGRNIPVDFVNTGNNHHVAVYYRPVIDKRGQLVVDEAGNPKYELEEVVVSFFEAVTRANLGQPIIDKDYKTTEGWQFLFSMKQNEYFVFPNEKTGFNPKEIDLLDVENYGLISPNLFRVQKFSLKNYVFRHHLETTIKDTSSILRGITWIDFRSSKGLDTIVKVRVNHIGQIVSVGEY

SEQ ID NO: 80 - protein, 1436 aa, Bacteroides sp.
MKRILGLDLGTNSIGWALVNEAENKDERSSIVKLGVRVNPLTVDELTNFEKGKSITTNADRTLKRGMRRNLQRYKLRRETLTEVLKEHKLITEDTILSENGNRTTFETYRLRAKAVTEEISLEEFARVLLMINKKRGYKSSRKAKGVEEGTLIDGMDIARELYNNNLTPGELCLQLLDAGKKFLPDFYRSDLQNELDRIWEKQKEYYPEILTDVLKEELRGKKRDAVWAICAKYFVWKENYTEWNKEKGKTEQQEREHKLEGIYSKRKRDEAKRENLQWRVNGLKEKLSLEQLVIVFQEMNTQINNSSGYLGAISDRSKELYFNKQTVGQYQMEMLDKNPNASLRNMVFYRQDYLDEFNMLWEKQAVYHKELTEELKKEIRDIIIFYQRRLKSQKGLIGFCEFESRQIEVDIDGKKKIKTVGNRVISRSSPLFQEFKIWQILNNIEVTVVGKKRKRRKLKENYSALFEELNDAEQLELNGSRRLCQEEKELLAQELFIRDKMTKSEVLKLLFDNPQELDLNFKTIDGNKTGYALFQAYSKMIEMSGHEPVDFKKPVEKVVEYIKAVFDLLNWNTDILGFNSNEELDNQPYYKLWHLLYSFEGDNTPTGNGRLIQKMTELYGFEKEYATILANVSFQDDYGSLSAKAIHKILPHLKEGNRYDVACVYAGYRHSESSLTREEIANKVLKDRLMLLPKNSLHNPVVEKILNQMVNVINVIIDIYGKPDEIRVELARELKKNAKEREELTKSIAQTTKAHEEYKTLLQTEFGLTNVSRTDILRYKLYKELESCGYKTLYSNTYISREKLFSKEFDIEHIIPQARLFDDSFSNKTLEARSVNIEKGNKTAYDFVKEKFGESGADNSLEHYLNNIEDLFKSGKISKTKYNKLKMAEQDIPDGFIERDLRNTQYIAKKALSMLNEISHRVVATSGSVTDKLREDWQLIDVMKELNWEKYKALGLVEYFEDRDGRQIGRIKDWTKRNDHRHHAMDALTVAFTKDVFIQYFNNKNASLDPNANEHAIKNKYFQNGRAIAPMPLREFRAEAKKHLENTLISIKAKNKVITGNINKTRKKGGVNKNMQQTPRGQLHLETIYGSGKQYLTKEEKVNASFDMRKIGTVSKSAYRDALLKRLYENDNDPKKAFAGKNSLDKQPIWLDKEQMRKVPEKVKIVTLEAIYTIRKEISPDLKVDKVIDVGVRKILIDRLNEYGNDAKKAFSNLDKNPIWLNKEKGISIKRVTISGISNAQSLHVKKDKDGKPILDENGRNIPVDFVNTGNNHHVAVYYRPVIDKRGQLVVDEAGNPKYELEEVVVSFFEAVTRANLGLPIIDKDYKTTEGWQFLFSMKQNEYFVFPNEKTGFNPKEIDLLDVENYGLISPNLFRVQKFSLKNYVFRHHLETTIKDTSSILRGITWIDFRSSKGLDTIVKVRVNHIGQIVSVGEY

SEQ ID NO: 81 - protein, 1512 aa, Bacteroides nordii
  Bacteroides nordii CL02T12C05
MKNILGLDLGTNSIGWAVINSEEDGPIVKKRIELAGSRIIPMDAAVLGNFDSGVTKSQTAERTSFRSIRRLRERQLLRRERLHKVLQILGFLPEHYVNDIDFENHPGKIKRNTEPKLPWRKNSMGQFEFIFQDSFEAMLTDFATHQPVFVSEGKKVPYDWTLYYLRKKALTEGISKEELAWLILNFNQKRGYYQLRGEEEEEQSNKLVEFYALRVVKVEATDDKKGKDTWYNVHLENGWIYRRTSNIPLDWEGKVKEFIVTTDLNEDGTPKLDKYGEVKRSFRAPKEDDWTLIKKKTESDIANSHKTVGCYIYDALLQNPHQKIKGRLVRTVERKFYKEELRLILEKQLSFHPELQDRDLYRACIDALYVSNEAHKNNISGRDFVYLFIDDIIFYQRPLKTKKSLIDNCPYEENQYMDRETGEVKQAPIKCIAKSHPLFQEFRLWQFISNIRIYQRERVLDDGKLETDVDVTPDFLKTEDDYTTLFEWFNDRKEVDQKAFLKNPQFGLKKTFTEYRWNYVEDKSYPCNETRNAILNGLQKAGVSADFLSREVEEALWHILYSVEDKIEIESALRKFASKHDLDDRFADVFKKLPPFKKEYGAYSAKAIKKLLPLMRIGKYWELSNIDDKTKERIDKIITGEWDENIHDRVREKAIKLSDITDFKGLPLWLSCYVVYNRHSEARAIAKWESPEDIDSYLRLFRQHSLRNPIVEQVITETLRTVRDIWKRVGQIDEIHVELGREIKNPADKRAKMTAQIVENENTNLRIKALLAEFINSEYEIENVRPYSSNQQEKLKIYEDTVLNGVKEIPEDINTILKKFRESDLKKRPTKSDFLHYKLWLEQKYCSPYTGRIIPLGKLFTSAYEIEHIIPQAHYFDDSFSNKVICEAEVNGLKDKKLGYEFIKHNPGKMVEIGFGKPPVRIFSVEEYERFVKENYSGIKNKMNKLLMDDIPETFIERQLNDSRYISKVVKSLLSNIVREKDSNGEYEPEAISKNVIVCTGSVTDRLKRDWGVNDVWNSIIYPRFERLNELTGSQQFGCWENKEGKRVFQTAVPLEMQKGFSKKRIDHRHHAMDAIVIACATRNHINYLSNESASKKAKISRTDLQRLLCTKCRTDDNGNYKWIVKKPWPAFTQDIRKALENITVSFKQNLRVINKTTNYYVHFDESGKKVLEKQINGDSWAIRKPMHKDTVFGKVNLQKVKEVRLSLALDTPKMIVDKKLKEKVLQLYSYKYDKKRIDKYFKENASLWKDLNLSKVAVYYFTNDSTEPLVAVRKPLDTSFNAKKIKESVTDTGIQKILLNHLSNNQDDPNLAFSPDGIDKMNKNLTALNDGKYHQPIYKVRVCEPQGNKFSVGTSGNKTSKYVEAAKGTNLFFAVYQTEDGKRSYETIPLNVVIEREKLGWTPVPENNNNGDKLLFWLSPNDLVYVPTADELNNGMRLDNMDKGRIYKMISCSGPQCFFIPQNVSNAIIPVIELGANNKAEKSWNNEMIKVVCVPIRVDRLGCITQINNQK

SEQ ID NO: 82 - protein, 1436 aa, Bacteroides sp.
  Bacteroides sp. 2_1_16
MKRILGLDLGTNSIGWALVNEAENKDERSSIVKLGVRVNPLTVDELTNFEKGKSITTNADRTLKRGMRRNLQRYKLRRETLTEVLKEHKLITEDTILSENGNRTTFETYRLRAKAVTEEISLEEFARVLLMINKKRGYKSSRKAKGVEEGTLIDGMDIARELYNNNLTPGELCLQLLDAGKKFLPDFYRSDLQNELDRIWEKQKEYYPEILTDVLKEELRGKKRDAVWAICAKYFVWKETYTEWNKEKGKTEQQEREHKLEGIYSKRKRDEAKRENLQWRVNGLKEKLSLEQLVIVFQEMNTQINNSSGYLGAISDRSKELYFNKQTVGQYQMEMLDKNPNASLRNMVFYRQDYLDEFNMLWEKQAVYHKELTEELKKEIRDIIIFYQRRLKSQKGLIGFCEFESRQIEVDIDGKKKIKTVGNRVISRSSPLFQEFKIWQILNNIEVTVVGKKRKRRKLKENYSAIFEELNDAEQLELNGSRRLCQEEKELLAQELFVRDKMTKSEVLKLLFDNPQELDLNFKTIDGNKTGYALFQAYSKMIEMSGHEPVDFKKPVEKVVEYIKAVFDLLNWNTDILGFNSNEELDNQSYYKLWHLLYSFEGDNTPTGNGRLIQKMTELYGFEKEYATILANVSFQDDYGSLSAKAIHKILPHLKEGNRYDVACVYAGYRHSESSLTREEIANKVLKDRLMLLPKNSLHNPVVEKILNQMVNVINVIIDIYGKPDEIRVELARELKKNAKEREELTKSIAQTTKANEEYKTLLQTEFGLTNVSRTDILRYKLYKELESCGYKTLYSNTYISREKLFSKEFDIEHIIPQARLFDDSFSNKTLEARSVNIEKGNKTAYDFVKEKFGESGADNSLEHYLNNIEDLFKSGKISKTKYNKLKMAEQDIPDGFIERDLRNTQYIAKKALSMLNEISHRVVATSGSVTDKLREDWQLIDVMKELNWEKYKALGLVEYFEDRDGRQIGRIKDWTKRNDHRHHAMDALTVAFTKDVFIQYFNNKNASLDPNANEHAIKNKYFQNGRAIAPMPLREFRAEAKKHLENTLISIKAKNKVITGNINKTRKKGGVNKNMQQTPRGQLHLETIYGSGKQYLTKEEKVNASFDMRKIETVSKSAYRDALLKRLYENDNDPKKAFAGKNSLDKQPIWLDKEQMRKVPEKVKIVTLEAIYTIRKEISPDLKVDKVIDVGVRKILIDRLNEYGNDAKKAFSNLDKNPIWLNKEKGISIKRVTISGISNAQSLHVKKDKDGKPILDENGRNIPVDFVNTGNNHHVAVYYRPVIDKRGQLVVDEAGNPKYELEEVVVSFFEAVTRANLGLPIIDKDYKTTEGWQFLFSMKQNEYFVFPNEKIGFNPKEIDLLDVENYGLISPNLFRVQKFSLKNYVFRHHLETTIKDTSSILRGITWIDFRSSKGLDTIVKVRVNHIGQIVSVGEY

SEQ ID NO: 83 - protein, 1517 aa, Bacteroides sp.
  Bacteroides sp. 20_3
MKKIVGLDLGTNSIGWALINAYINKEHLYGIEACGSRIIPMDAAILGNFDKGNSISQTADRTSYRGIRRLRERHLLRRERLHRILDLLGFLPKHYSDSLNRYGKFLNDIECKLPWVKDETGSYKFIFQESFKEMLANFTEHHPILIANNKKVPYDWTIYYLRKKALTQKISKEELAWILLNFNQKRGYYQLRGEEEETPNKLVEYYSLKVEKVEDSGERKGKDTWYNVHLENGMIYRRTSNIPLDWEGKTKEFIVTTDLEADGSPKKDKEGNIKRSFRAPKDDDWTLIKKKTEADIDKIKMTVGAYIYDTLLQKPDQKIRGKLVRTIERKYYKNELYQILKTQSEFHEELRDKQLYIACLNELYPNNEPRRNSISTRDFCHLFIEDIIFYQRPLKSKKSLIDNCPYEENRYIDKESGEIKHASIKCIAKSHPLYQEFRLWQFIVNLRIYRKETDVDVTQELLPTEADYVTLFEWLNEKKEIDQKAFFKYPPFGFKKTTSNYRWNYVEDKPYPCNETHAQIIARLGKAHIPKAFLSKEKEETLWHILYSIEDKQEIEKALHSFANKNNLSEEFIEQFKNFPPFKKEYGSYSAKAIKKLLPLMRMGKYWSIENIDNGTRIRINKIIDGEYDENIRERVRQKAINLTDITHFRALPLWLACYLVYDRHSEVKDIVKWKTPKDIDLYLKSFKQHSLRNPIVEQVITETLRTVRDIWQQVGHIDEIHIELGREMKNPADKRARMSQQMIKNENTNLRIKALLTEFLNPEFGIENVRPYSPSQQDLLRIYEEGVLNSILELPEDIGIILGKFNQTDTLKRPTRSEILRYKLWLEQKYRSPYTGEMIPLSKLFTPAYEIEHIIPQSRYFDDSLSNKVICESEINKLKDRSLGYEFIKNHHGEKVELAFDKPVEVLSVEAYEKLVHESYSHNRSKMKKLLMEDIPDQFIERQLNDSRYISKVVKSLLSNIVREENEQEAISKNVIPCTGGITDRLKKDWGINDVWNKIVLPRFIRLNELTESTRFTSINTNNTMIPSMPLELQKGFNKKRIDHRHHAMDAIIIACANRNIVNYLNNVSASKNTKITRRDLQTLLCHKDKTDNNGNYKWVIDKPWETFTQDTLTALQKITVSFKQNLRVINKTTNHYQHYENGKKIVSNQSKGDSWAIRKSMHKETVHGEVNLRMIKTVSFNEALKKPQAIVEMDLKKKILAMLELGYDTKRIKNYFEENKDTWQDINPSKIKVYYFTKETKDRYFAVRKPIDTSFDKKKIKESITDTGIQQIMLRHLETKDNDPTLAFSPDGIDEMNRNILILNKGKKHQPIYKVRVYEKAEKFTVGQKGNKRTKFVEAAKGTNLFFAIYETEEIDKDTKKVIRKRSYSTIPLNVVIERQKQGLSSAPEDENGNLPKYILSPNDLVYVPTQEEINKGEVVMPIDRDRIYKMVDSSGITANFIPASTANLIFALPKATAEIYCNGENCIQNEYGIGSPQSKNQKAITGEMVKEICFPIKVDRLGNIIQVGSCILTN

SEQ ID NO: 84 - protein, 1424 aa, Bacteroides sp.
  Bacteroides sp. 3_1_19
MKRILGLDLGTNSIGWALVNEAETDEEVSSIIRLGVRVNPLTVDETQNFEKGKSITTNAERTLKRSMRRNLQRYKLRRDALVEFLKELGFITDETILSEQGNRTTFETCRLRAKAAEEEISLEELSRVLLMINKKRGYKSSRKVKKEEDGVLIDGMEIAKKLYEEDLTPGQLCSQLLESGKKVLPDFYHSDLQEELDRIWSVQKQFHPDVFCDAAKEEIKGKNRSQTWAILANYFVWKEEVVGWNDREAKNETIEKECKLVGLKRTTKGYELKKENYRWRAQALTEQLGLEEIAVVLQEINGQINASSGYLGAISDRSKVLYFNHQTVGQYQMAELDKNPHASLRNMVFYRQDYLDEFDRIWEKQAEFHKELTAELKKEIRDMIIFYQRRLKSQKGLISFCEFERLEIVVEKDGKKQTKVIGCKVIPRSHPLFQEFKVWQTLNDIKVLGREKKRNALSASESRALYPEEKEILARELAIKENMKKADVLKLLFENPQELDLNFKQIDGNRTGFSLFSAYSKMIEKYGYEPLDFKKPADEIIGQLRTIFTDLGWNTNLFTIDLTKEGKELEMQPYFRLWHLLYSFEGDNTSTGNGKLIEKIMQLCGVEKEYAVELASLSFQDDYGSLSAKAIKRILPYLKEGNLYDVACEYAGYRHSKSSLTKEEIENKVLKGKLEVLPKNSLRNPVVEKILSQMVNVINTIIDTYGKPDEIRVELARELKKSAKEREELTKAIAKSTREHEEIRKLLQDEFGMMNVSRNDIIRYKLYEELKDNGYKTLYSNQYIPKEKIFSKEIDIEHIIPQSRLFDDSLSNKTLEYKAINIEKGNKTAYDFVKEKYGEEGLQQYINRCESLFNDKKAKLRKLKMEQKDIPDGFIDRDLRNTQYIAKKALAMLNEICRRVVATTGSITDQLREDWQLVDVMKELNLPKYEALGFVETYEDKDGRKIKRIKDWTKRNDHRHHAMDALTVAFTKDAFIQYFNNKNAAQDSGNRNHTNIIGIKTRYFDKGRALPPIPLEQFRIEAKQHLEKLLVSIKAKNKVVTVNVNRTKKRKGENTKIQQTPRGQLHLETVYGSHKQYVTKIEKVNASFDAAKIATVSKRAYRNALLKRLETFGNDPKKAFTGKNALEKNPLYADKYQTIRVPEKVQTVEFETIYTIRKPVDPALNVDKVVDVKVRAILERRLKEYGGDPKKAFVNFWENPIWLNKEKGISIKRVSIRGINNAQSIHVKKDKNGNPIWDENGKQIPVDFVNTGNNHHVAIYRKPVLDKKGQVTFDEDGNLMYELDEVVVPFFEAVTRANLGLPIIDKDYRKSEGWQFLFSMKQNEYFVFPNEKTGFNPKEVDLLNPDNYAMISPNLFRVQTMSKVMYGNNVVRDYKFRHHLETTVKDMKELKDIAYKQYKTLSFGNSVVKIRINHIGQIVSVGEY

SEQ ID NO: 85 - protein, 1510 aa, Bacteroides sp.
  Bacteroides sp. D2
MKRILGLDLGTNSIGWALVDSEEQRILGMGSRIIPMDQGVLDTFSGGNPVETQTAARTAYRGTRRLRERALLRRERLIRVLNMMKFLPEHYASQIDFEKRLGQFFDEKEPKLAWKQNDEGRFEFIFQQSFNEMIEEFKNKGVVREDKKIPYDWTIYYLRKKALSQEIEKEELAWILLNFNQKRGYYQLRGEEEEENPNKLVEYYSLKIVDVIADEKPNSKGDIWYSLHLENGWIYRRSSKIPLFGWKDKTRDFIVTTDLNDDGTVKKDKEGIEKRSFRAPSENDWVLLKKKTESDIEKSHKTVGAYVYETLLQNPMQKVRGKLVRTIERKFYKDELKQILEKQREFHPELRDEDLYNDCVRELYRSNETYQFILSKRDFVHLFLDDILFYQRPLRSQKSAIGDCILEFKTYKDKDGNNIKEYLKVISKSNPLYQEFRIWQWLYNLKIYRKEDDEDVTLQFIANIEDKEQLFDFLSNRKSIEQKPLLEYLIKAKGLKKQVKTEAYRWNYVEDKIYPCSETKTMISTRLAKVENIPDNFFTKEIEQKLWHIIYSVTDKNEFEKALRTFAKKYDLDIASFVDNFKKIPPFKNEYGSFSEKAIKKLLPLMRLGKYWKWNDIDNNTQNRISKIITGEYDEEIKDIVREKSIALTNENDFQGLQLWLAQYLVYGRHSEADIAGKWHSVADLEKYLNEFKQHSLRNPIVEQIITETLRVVRDIWRKYGQGAENFFSEIHVELGRDMKNTADERKKIVNVVTENENTNLRIKALLMELKNNSDGKLEVENVRPYSPTQQDILKIYEEYAISTGLDNEKDEKVKEDIKKISRVAQPTTTELQRYKLWLEQKYCSPYTGKVIPLGKLFTEEYQIEHIIPKSRYYDDSFSNKVICEAAVNKLKDKCLGLEFIKNYHGQIVETGFGQKVTIFDEEAYQNFVKQHYAYNRSKRTKLLLEEIPEKMIERQMNDTRYISKFVLPLLSNLVRAEENDNGVNSKNVLPVNGKITTMLKQDWGLNDVWNDLILPRFVRMNELAKTIAFTSWNEQHQKYLPTVPLELSKGFQKKRIDHRHHAMDALVIACATRDHVNLLNNKHANTDTIRYDLQRKLRLFERVTYIDPQTKNNVTKDIPKEFKKPWDNFTVDARNELEKIIVSFKQNLRIINKATNIYTKYENGKKIKVGQKGLNWAIRKPLHKETVFAKVSLRKRKTVRLSEALKDWKKIVDKKLKQEIKRLTCQYGKFDVDTILRYFKDRKYQFGEVDVSKVKMYYFDEENAAVRKNVDTSFTEKFIQGSVTDTGIQKILLNHLEAKGNKVEIAFSPEGIEEMNKNIIQLNEGKLHLPIFKVRVYETIGNKFSVGVKGNKKDKYVEAAKGTNLFFAIYVDENGIRSYETIPLNIVIERLKQGLSVVPEKNRKEHSLLFYLSPNDLVYVPIEDERENIHAVNLDQLNNEQRKRIYKMVSCTGSECHFVPYYVASPIVNKVEYSSLNKIGRSLTGEMIKDVCIKLKVDRLGNVKGISGL

SEQ ID NO: 86 - protein, 1436 aa, Bacteroides sp.
  Bacteroides sp. D2
MKRILGLDLGTNSIGWALVDEAENKDERSSIVKLGVRVNPLTVDELTNFEKGKSITTNADRTLKRGMRRNLQRYKLRRETLMEVLKEHKLITEDTILSENGNRTTFETYRLRAKAATEKISLEEFARVLLMINKKRGYKSCRKAKGAEEGTLIDGMDIARELYNNNLTPGELCLQLLDAGKKYLPDFYRSDLQNELDRIWEKQKEYYPEILTEVLKEELRGKKRDAVWAICAKSFVWEEYYTEWNKEKGKTEQQEREHKLEGIYSKRKRDEAKRENLQWRVNGLKEKLSLEQLVIVLQEMNIQINNSSGYLGAISDRSKELYFNKQTVGQYQMEMLDKNPNASLRNMVFYRQDYLDEFNTLWEKQAEYHKELTGELKKEIRDIVIFYQRRLKSQKGLVGFCEFESRQIEVEIDGKKKIKTVGNRVIPRSSPLFQEFKIWQILNNIEVTVVGKKGKRRKQKDNSPTLFDGLDDTEQLELNGSRYLYQEEKELLAQELFVRDKMTKSDVLKLLFDNPQELDLNFKTIDGNKTGYTLFQAYSKMIEMSGHEPVDFKKTVEKVVEHVKAVFDLLNWNTDILGFNSNEELDNQSYYKLWHLLYSFEGDNTPTGNARLVQKITELYGFEKEYAIILANVTFQDDYGSLSAKAIHKILPHLKEGNRYDVACAYAGYKHSESSLTKEEIANKALKDRLTLLPKNNLRNPVVEKILNQMVNVINAIIDTYGKPDEIRVELARELKKNAKEREELTKFIAETTRKHEEFKILLQSEFGLTNVSRTDILRYKLYKELESCGYKTLYSNTYIPREKLFSKEFDIEHIIPQARLFDDSFSNKTLEARSINLEKGNKTAYDFVKEKFGESGADNSLDHYLNNIEDLFKSGKISKTKYNKLKMAEQDIPDGFINRDLRNTQYIAKKALSMLNEISRRVVATSGTITDKLRQDWQLVDVMKELNWEKYKALGLVEYFEDKDGRQIGRIKDWTKRNDHRHHAMDALTVAFTKDIFIQYFNNKNASLNSNTNEYAIKNKYFQNGRAIAPIPLREFRVEAKKHLENTLISIKAKNKVVTGNINKTKKRGGVNKYLQQTPRGQLHLETIYGSGKQYLTKEEKVNASFDMKKIATVSKSAYRDVLLKRLHENDNDPKKAFTGKNSLDKQPIWLDKEQTRKVPEKVKTVTLETIYTVRKEISPDLKVDKVIDAGVRKILTGRLNEYGNDAKKAFSNLDENPIWLNKEKGISIKRVTISGISNAQSLHVKKDKDGKPILDEDSRNIPVDFVNTGNNHHVAVYRRPVIDKRGQLVIDEAGNPKYELEEVVVSFFEAVTRANLGQPIIDKDYKTSEGWQFLFSMKQNEYFVFPNEKTGFNPKEIDLLDAENYGVISPNLFRVQKFAHKNYVFRHHLETTIKDTSSILKGITWIDFRSSKGLDAIVKVRVNHIGQIVSVGEY

SEQ ID NO: 87 - protein, 1508 aa, Bacteroides uniformis
  Bacteroides uniformis CL03T00C23
MRTILGLDLGTNSIGWAVINSVIKEQTERIWIEMAGSRIIPMDAAILGDFDKGNSISQTAERTRFRGVRRLRERQLLRRERLHKVLKILGFLPEHYLKGIDFEKHTGKFLSGSEPKLPWVKDRWGKYSFLFQTAFNEMLADFAKHQPSLVFDGKKIPYDWTVYYLRKKALTEMISKEELAWILLNFNQKRGYYQLRGEEEEDNAGKSVEFYALKVLSVEATDEKKGRDIWYNVHLENGWVYRRSSNVPLDWEGRVKEFIVTTDLNPDGTPKLDKYGEVKRSFRAPKEDDWMLIKKRTEADITGTHKTIGSYIYDALLQEPQQKIIGKLVKTVERKFYKEELNFILQKQCAFHAELQDRDLYMRCIEALYPGNEVQRRNIANRDFIYLLIDDVLFYQRPLKTKKSLIANCPYEENEYVNRKTGEIKTAPLKCIAKSHPLFQEFRLWYFLSNIRVYQKEREVNGTLHLDVDVTTEFLKTEDDYVALFDWLNSRKEIDQKAFLRYPAFGLKKEINNYRWNYVEDKFYPCNETRHAILSRLEKAGIGIDFLSDEKETALWHILYSVSDKQEIEKALATFAVKNGLNESFVEVFKKFPPFKSEYGAYSAKAIKKLLPLMRCGKYWDMSLIDGTTKERIERIIAGECDESIGAKVREKAMNLSDISCFKRLPLWLACYVVYNRHSEDKEITKWETPADIDAYLAAFKQHSLRNPIVEQVITETLRVVRDIWKQVGKIDEIRIELGREMKNPADKRKRMTTQILENENANLRIKALLAEFVNPEYGVENVRPYSPSQQEILRIYEDAVLKGEEQIPEDIDVILKKFNTSKLPTKSEFLRYKLWLEQKYRSPYTGELIPLAKLFTAAYEIEHVIPQSRYFDDSFSNKVICESAVNKLKDNQLGYEFIKNHHGQKVEVGFGKTVEIFSVDSYERFVKEQYAKSGIKMKKLLMDDIPEQFIERQLNDSRYISKVVKGLLSNIVREKNDSGEYEPEAVSKNILVCTGSVTDRLKKDWGMNDVWNSIVSPRFERLNALTETQCFGHWENKDGKKVFQTAVPLEYQKGFSKKRIDHRHHAMDAIVIACATRNHVNYLNNESASRNAKISRYDLQRLLCDKSRGDGNGNYRWIIKKPWTTFTQDAREALSGIIVSLKQNLRIINKTTNIYQHFDANGTRVYEKQKIGDSWAIRKPMHKDTVFGAVNLRKVKVVRLSVALDTPSMIVNKRVKNKVLELLSYKYDKKKIEKYFKENAFLWKELDIAKVAVYYFTENTTEPLVAVRKSLDSTFNEKKIASVTDTGIQKILLNHLKSKEGKAELAFSAEGIEEMNRNLLQLNDGKGHQPIYKVRVYEPRGNKFKVGVLGNKGAKWVEAAKGTNLFFAIYITEDGNRTYETIPLNWVIEREKQGLVPVPDRNEKGDKLLFWLSPNDLVYLPTEEERDFGRINEPIDRGRIYKMVSSSGNQCFFIPQSISNAIISTKELGSNNKAEKSWDGEMIKNICIPVKVDRLGRIIEVKYRVNE

SEQ ID NO: 88 - protein, 1504 aa, Bacteroides vulgatus
  Bacteroides vulgatus CL09T03C04
MKNIVGLDLGTNSIGWAVVNGSVNDDGSEQLVKIQASGSRIIPMDAAMIGDFNKGNSISQTAERTRLRGVRRLSERYLLRRERLHRILDILGFLPFHFAQDLDRHGKIVKGKEPKLAWRKNEAGQFEFIFQDSFKEMLEDFKLNHPNLITDDKKVPYDWTIYYLRKKGLTSKISKEELAWILLNFNQKRGYYQLRGEEEEENKNKLVEFYALKVVAVEDSGEKKGKDIWYNVHLENGWVYRRTSNMPLDWVGKTKEFIVTTDLEKDGTPKKDKEGNVKRSFRAPKEDDWSLLKKKTEADIDQTHKTVGVYIYDTLLGNPSQKIRGRLVRTIERKYYKEELKQILEKQKEFHLELQDRALYAACIEELYPINEAHRNNVGNRDFTYLFLEDILFYQRPLKSKKSLIDNCPYEENQGLDKETGEIKSFPVKCIAKSHPLFQEFRLWQFIVNLRIYRKDLAQDVDVTNELLKTEEDYVALFDWLNGKKEIDQKAFLKYPVFGLKKEIENYRWNYVQDKPYPCNETRSLMLARLEKCDISIEFLTKENEEALWHILYSVEDKNEIVKALQKFADKHDLNASFVDVFQKFPPFKKEYGSYSAKAIKKLLPLMRMGKYWSENSIDKGTRERIDKIITGEYDEKIENRVREKAIHLADVSDFKGLPLWLVCYIVYGRHSEAKEITQWKSPADIDSYLRSFKQHSLRNPIVEQIIIETLRVVRDIWKQVGNIDEIHVELGREMKNPADKRKKMTQQMSENENTNLRIKYLLTEFLNPEYEVENVRPYSPSQQDILRIYEEGVLNSVSDLPEEISDILKKFTETDLKKRPSRSEILRYKLWLEQKYRSPYTGEVIPLGKLFTPAYEIEHVIPQSCYFDDSFSNKVICEAEVNKLKSNLLGHEFIVKHHGEIVELPFGKKVRIFTVDEYEQFVKDNYSRTRSKMKKLLMDDIPEEFVTRQLNDSRYISKVVKSLLSNIVREKGEEEAISKNVIPCTGGVTDRLKKDWGINEVWNKIILPRFQRLNELTGTNKFTTKNVGIQEIPTMPLELQKGFNKKRIDHRHHAMDAIIIACANRNIINYLNNESATAKAELSRYDLQKMLCDKAKTDNNGNYKWVIRKPWASFTQDTYLALENIIVSFKQNLRVINKATNRFLHYNEEGKKIFVKQGKGDNWAIRKSMHKDTVFGEVNLRRIKTVALNEAMKNPQSIVVKDFKRKLLELWNLGFDAKRIKKYFEDNRETWSDINLSKIEVYYFSKDTKDRFFATRKPLDTSFDRKKIENNITDTGIQKILLRHLELKDNNPDIAFSPDGIDEMNRNIIQLNNGKYHQPIIKIRWYEQADKFAVGQTGNKFSKFVEAAKGTNLFFAVYESNILDKKTNTIIKKRNYATIPLNVAIERQKQGLPVAPEDENGNDPIFVLSPNDLVYLPTDDELANGIIAQPLDRGRIYKMVSCTGNEGHFIPARIANPILQTIELGSNNKAQKAWTDEMIKEICMPIKVDRLGNVLESSSSYKK

SEQ ID NO: 89 - protein, 1434 aa, Unknown
  Description of Unknown: Bacteroidetes oral taxon 274 str. F0058 polypeptide
MKNILGLDLGTNSIGWAYVKQAQNDSEKSEIAELGVRVNPLTVDEKTNFEKGKPISTNADRTLKRGARRNLQRYKLRRQELIELLKDYQVISDKTILAEDGKETTFETLRLRVKSAKEQVSLEELARILLMINKKRGYKSSRKAKNEDEGQLIDGMEIARRLYDENLTTGQLSLQLLKEGKKSLPDYYRSDLQHELDKVWNFQKQFHPDILTDEFYTSIQGKGQKATRESFSSKYGIDTAENKGSREEKKLQAYQWRADATHKELTKEELAFVITEINNNINNSSGYLGAISDRSKELIFANETVGEYLWKQIQNDPHTSLKNQVFYRQDYFDEFERIWETQSGFYPQILTESLKNELRDILIFYQRKLKSQKALVSICEFESKEIPLKDKQGNPISKNGIPVTKLVGPKVAPKSSPLFQEFKIWQNLNNVLVRPKGSRKRKVTTNQQSTLLEGQEPVFELNLEQKELLFEELNLKGNLKTDYCLELIGYSAKEWEMNYPTLEGNKTNKALYEAYLKIIDSEGYDAKKLLKVKTDKDDINLDDIKVSASEIKTMISDIFNELGINTKILDFDAELERKQFEAQASYRLWHLLYSYEGDDSKSGNELLYRLLEDKFGFKREHSKTLANVSLLSDYGNLSTKAIRTIYPYIKENKFSTACELAGYRHSKLSISKEENENRTLKDTLDVLKKNSLRQPVVEKILNQMINLINELIEKHSEKDEKGNIVKYFKFDEIHIELARELKKNAEERRELDSKVREGKDRNEKIITILKSEFGLPYPTKNDITRYRLYEELKDNGYKDLYTNTYIPREKLFSKEIDIEHIIPKSRLFNDSFSNKTICYRQDNLNKGERTAYDYIEGLGKTQLDEYLNRVENLYTNKFITKAKYRNLLKKESEIGDGFIERDLRETQYIAKKAKEMLLQITRHVVSTTGSITDRLRDDWELVNVMRELNLPKYKVLGLTEIQERKNGQTVEVITDWTKRNDHRHHAMDALTVAFTKHSHIQYLNFLNARKDEKHKEYSNIMGIQQLETEKTTDKDGKDRRVFKTPIPNFRQVAKEHLESILISHKTKNKVVTRATNKIAGSKKQQETLSPRGQLHKETVYGKYRRYVQKEEKIGSKFDLQTIERVANPLYKRLLTKRLEENGGDPKKAFTGKNALAKSPIYLDETQTQQLPEKVKLVWLETDFSIRKDITPDNFKDEKSIDKVLDEGIKRILKDRLKSFDGDAKRAFTDLEQNPIWLNKEKGIAIKRVTISGVSNAEPLHTKKDHLGNEIFDDTGKPIPVDYVSTGNNHHIAIYRDENGNLQEKAVSFFEAVTRANQGLPTVDKTYNQHLGWQFLFTMKQNEMFVFPNKETGFDPQEIDLLDPKNKKLISPNLFRVQKISTKNYFFRHHLETSVETHNALNGVTYKSQLGLNGITDIIKVRINHLGDIVHIGEY

SEQ ID NO: 90 - protein, 1153 aa, Barnesiella intestinihominis
  Barnesiella intestinihominis YIT 11860
MKNILGLDLGLSSIGWSVIRENSEEQELVAMGSRVVSLTAAELSSFTQGNGVSINSQRTQKRTQRKGYDRYQLRRTLLRNKLDTLGMLPDDSLSYLPKLQLWGLRAKAVTQRIELNELGRVLLHLNQKRGYKSIKSDFSGDKKITDYVKTVKTRYDELKEMRLTIGELFFRRLTENAFFRCKEQVYPRQAYVEEFDCIMNCQRKFYPDILTDETIRCIRDEIIYYQRPLKSCKYLVSRCEFEKRFYLNAAGKKTEAGPKVSPRTSPLFQVCRLWESINNIVVKDRRNEIVFISAEQRAALFDFLNTHEKLKGSDLLKLLGLSKTYGYRLGEQFKTGIQGNKTRVEIERALGNYPDKKRLLQFNLQEESSSMVNTETGEIIPMISLSFEQEPLYRLWHVLYSIDDREQLQSVLRQKFGIDDDEVLERLSAIDLVKAGFGNKSSKAIRRILPFLQLGMNYAEACEAAGYNHSNNYTKAENEARALLDRLPAIKKNELRQPVVEKILNQMVNVVNALMEKYGRFDEIRVELARELKQSKEERSNTYKSINKNQRENEQIAKRIVEYGVPTRSRIQKYKMWEESKHCCIYCGQPVDVGDFLRGFDVEVEHIIPKSLYFDDSFANKVCSCRSCNKEKNNRTAYDYMKSKGEKALSDYVERVNTMYTNNQISKTKWQNLLTPVDKISIDFIDRQLRESQYIARKAKEILTSICYNVTATSGSVTSFLRHVWGWDTVLHDLNFDRYKKVGLTEVIEVNHRGSVIRREQIKDWSKRFDHRHHAIDALTIACTKQAYIQRLNNLRAEEGPDFNKMSLERYIQSQPHFSVAQVREAVDRILVSFRAGKRAVTPGKRYIRKNRKRISVQSVLIPRGALSEESVYGVIHVWEKDEQGHVIQKQRAVMKYPITSINREMLDKEKVVDKRIHRILSGRLAQYNDNPKEAFAKPVYIDKECRIPIRTVRCFAKPAINTLVPLKKDDKGNPVAWVNPGNNHHVAIYRDEDGKYKERTVTFWEAVDRCRVGIPAIVTQPDTIWDNILQRNDISENVLESLPDVKWQFVLSLQQNEMFILGMNEEDYRYAMDQQDYALLNKYLYRVQKLSKSDYSFRYHTETSVEDKYDGKPNLKLSMQMGKLKRVSIKSLLGLNPHKVHISVLGEIKEIS

SEQ ID NO: 91 - protein, 1352 aa, Belliella baltica
MKKILGLDLGTTSIGWAFIKEPEKDVVGSEIVDMGVRIVPLSSDEENDFAKGNTISINADRTLKRGARRNLQRFKQRRNALLEIFKEKKLISTNFKYAEDGPSSTFSTLNLRAKAAKEKIELQDLVKVLLQINKKRGYKSSRKAKSEEDDGSAIDSMGIAKELYENDLTPGQWVYEALQKGRKNVPDFYRSDLQEEFKKIVNYQSEFFPDIFNASFVEDWMGKASTPTKQYFNKKGVQLAENKGKREERRLQEYKWRAEAVNFKIDLSEIALILSQINSQISNSSGYLGAISDRSKELYFKNLTVGQYLYQQIKKNPHTRLKGQVFYRQDYLDEFERIWSVQSSFYPQLNDALKREVRDITIFFQRRLKSQKHLISNCEFEDHHKVVPKSHPVFQEFRIWQNLNNLLLIKKDNLNEKFDLELESKIALANELAFKRELNVKDALKILGLKPNEWEFNFTKIEGNRTNQAFFDAFAKIIELEDGEPIDLGDLKADDILDQFSEAFLRIGIDTELLQVNSDIEGAEYEKQSYIQFWHLLYSSEDDQKLKLNLIRKFGFKPEHAKILASISLQDDHASLSSRAIKKILPHLQSGLIYDKACTYAGYNHSSSFTKDENEKRELRAELELLKKNSLRNPVVEKILNQMINVVNAILKDPELGRPDEIRVEMARELKANAEQRKNMTSNIASATRDHDKYREILKSEFGLKRVTKNDLLRYKLWLETDGISLYTGKPIEASKLFSKEYDIEHIIPKARLFDDSFSNKTICERQLNIDKANVTAFSFLQNKLSADEFEQYQSRVKSLYGKLSKAKIQKLLMANDKIPEDFIARQLQETRYISKKAKEILFEISRRVSVTTGTITDKLREDWGLVEIMKELNWEKYDKLGLTYTIEGKHGERLNKIKDWSKRNDHRHHAMDALTVALTKPAYIQYLNNLNAKGLNNKKGTEVFAIEQKYLKRENGKLCFIPPIENIRSEAKKHLSRILVSYKAKNKVVTINKNKTKSKAGLNEQIALTPRGQLHKETVYGKSFHYSTKFEKIGASFNVQKINTVAKKEEREALLKRLAENGNDPKKAFTGKNTLNKMPIYLDLGKNIKLSEKVKTVVLEQNYTIRKNIDPDLKVDKVIDVGIKRILESRLEEFGGNAKLAFSNLEENPIWLNKEKGISIKRVKISGVSNVESLHVKKDHFGEPILDQEGNEIPVDFVSTGNNHHVAIYEDENGNLQEEVVSFFEAVVRQNQGLPIIKKNHTLGWKFLFTLKQNEYFVFPSDDFVPADVDLMDEQNYHLISPNLFRVQKIARKNYVFNNHLETKAVDNDLLKSKKELSKITYHFYQTPEHLRGIIKIRINHLGKIIQIGEY

SEQ ID NO: 92 - protein, 1415 aa, Bergeyella zoohelcum
  Bergeyella zoohelcum ATCC 43767
MKHILGLDLGTNSIGWALIERNIEEKYGKIIGMGSRIVPMGAELSKFEQGQAQTKNADRRTNRGARRLNKRYKQRRNKLIYILQKLDMLPSQIKLKEDFSDPNKIDKITILPISKKQEQLTAFDLVSLRVKALTEKVGLEDLGKIIYKYNQLRGYAGGSLEPEKEDIFDEEQSKDKKNKSFIAFSKIVFLGEPQEEIFKNKKLNRRAIIVETEEGNFEGSTFLENIKVGDSLELLINISASKSGDTITIKLPNKTNWRKKMENIENQLKEKSKEMGREFYISEFLLELLKENRWAKIRNNTILRARYESEFEAIWNEQVKHYPFLENLDKKTLIEIVSFIFPGEKESQKKYRELGLEKGLKYIIKNQVVFYQRELKDQSHLISDCRYEPNEKAIAKSHPVFQEYKVWEQINKLIVNTKIEAGTNRKGEKKYKYIDRPIPTALKEWIFEELQNKKEITFSAIFKKLKAEFDLREGIDFLNGMSPKDKLKGNETKLQLQKSLGELWDVLGLDSINRQIELWNILYNEKGNEYDLTSDRTSKVLEFINKYGNNIVDDNAEETAIRISKIKFARAYSSLSLKAVERILPLVRAGKYFNNDFSQQLQSKILKLLNENVEDPFAKAAQTYLDNNQSVLSEGGVGNSIATILVYDKHTAKEYSHDELYKSYKEINLLKQGDLRNPLVEQIINEALVLIRDIWKNYGIKPNEIRVELARDLKNSAKERATIHKRNKDNQTINNKIKETLVKNKKELSLANIEKVKLWEAQRHLSPYTGQPIPLSDLFDKEKYDVDHIIPISRYFDDSFTNKVISEKSVNQEKANRTAMEYFEVGSLKYSIFTKEQFIAHVNEYFSGVKRKNLLATSIPEDPVQRQIKDTQYIAIRVKEELNKIVGNENVKTTTGSITDYLRNHWGLTDKFKLLLKERYEALLESEKFLEAEYDNYKKDFDSRKKEYEEKEVLFEEQELTREEFIKEYKENYIRYKKNKLIIKGWSKRIDHRHHAIDALIVACTEPAHIKRLNDLNKVLQDWLVEHKSEFMPNFEGSNSELLEEILSLPENERTEIFTQIEKFRAIEMPWKGFPEQVEQKLKEIIISHKPKDKLLLQYNKAGDRQIKLRGQLHEGTLYGISQGKEAYRIPLTKFGGSKFATEKNIQKIVSPFLSGFIANHLKEYNNKKEEAFSAEGIMDLNNKLAQYRNEKGELKPHTPISTVKIYYKDPSKNKKKKDEEDLSLQKLDREKAFNEKLYVKTGDNYLFAVLEGEIKTKKTSQIKRLYDIISFFDATNFLKEEFRNAPDKKTFDKDLLFRQYFEERNKAKLLFTLKQGDFVYLPNENEEVILDKESPLYNQYWGDLKERGKNIYVVQKFSKKQIYFIKHTIADIIKKDVEFGSQNCYETVEGRSIKENCFKLEIDRLGNIVKVIKR

SEQ ID NO: 93 - protein, 1430 aa, Bergeyella zoohelcum
  Bergeyella zoohelcum CCUG 30536
MKHILGLDLGTNSIGWAVVKEAQNDNEQSEIVDVGVRVNPLTTDEKTNFEKGKPISTNADRTLKRSARRNLQRYKLRRKELIELLKEHQLISTDTILTENGKGTTFQTLELRAKSAKEKISLEELARVFLTINKKRGYKSSRKAKNEDEGQLIDGMEIAKRLYEENLTTGQLSLQLLKEGKKSLPDYYRSDLQFELDKVWNFQKQFHSDILTDEFYAQLKGKGQRATSALFLAKYQIYTAENKGSREDKKLQAYQWRVDALSKELTREQLAFVITEINNNLNNSSGYLGAISDRSKELYFNNETVGEYLWKQIAANPHTSLKNQVFYRQDYLDEFEQIWKTQSAFYPEILTDELKKELRDVVIFYQRKLKSQKSLVSFCEFENKEIEIKKEDGTSTKKVIGLKVAPKSSPLFQEFKIWQNLNNVLIRKKGSKTKKVAKNQQAVLFEEEKTISELDLEAKQALFNELNLKGNLKADYCLEILGYSPKEWEMNYSVLEGNRTNKALYEAYLKITDLEGYDAKNHLKVKLNKDEVELDDLKVPASEIKDMVQAIFKEAGINTDILHFNAELDGKDFENQASYQLWHLLYSYEGDDSKSGNELLYKLLETKFGFKKEYAQILANVSLSDDYGSLSTKAMRKIHPYIKENKFSTACELAGYRHSKHSLTKEENDNRVLKDSLEVLKKNSLRQPVVEKILNQMINLVNALLKKYRTENPNFKFDEIRIELARELKKNAEERANMTANINKAKTEHEKIIKILKNEFGLPNPTRNDIIRYRLYEELKANGYKDLYTNIKIPQEKLFTKEIDIEHIIPKSRVFDDSFSNKTLSFRKTNLDKGERTAFDYMESKFGADKLEEYVARVEDLYKNNIISKAKYQKLLKKESEIGDGFVERDLRETQYIAKKAKEILLQITPNVLSTSGGITDRLREDWDLINVMKELNLPKYRALGLTQMEDRKYGQQVEVITDWTKRNDHRHHAMDALTVAFTKHNHIQYLNYLNARKNEKHKEHSNIMGIQQLETIKVTDKNGNEKRVFKAPMPNFRQVTKAFLENILISHKAKNKVVTKNKNKVAGSNKVQEVLTPRGQLHKETVYGKYQYYVQKEEKIGAKFDLETIKKVANPLYQSLLKKRLEENGGDPKKAFTGKNSLAKNPIYLDDTQTEQLPEKVKLVWLENSFSIRKDITPENFKDEKLIDKILDEGVKRILKERLQSFGNDAKKAFSDLDKNPIWLNKEKGITIKRVTISGVANAEPLHTKKDHLGKEILDKEGKPIPVDFISTGSNHHVAVYRDEKGNLQEKVVSVFEAVVRANQGLPIIDKTYNQHLGWEFLFTMKQNEMFVFPNESTGFNPNDIDLLDPKNKRIISPNLFRVQKFSKLQYGNSFVREFVFRHHLETTVEDRKELQGITYKQMKNSTFFNDIIKVRINHLGDIVSIGEY

SEQ ID NO: 94 - protein, 1420 aa, Bifidobacterium bifidum
MSRKNYVDDYAISLDIGNASVGWSAFTPNYRLVRAKGHELIGVRLFDPADTAESRRMARTTRRRYSRRRWRLRLLDALFDQALSEIDPSFLARRKYSWVHPDDENNADCWYGSVLFDSNEQDKRFYEKYPTIYHLRKALMEDDSQHDIREIYLAIHHMVKYRGNFLVEGTLESSNAFKEDELLKLLGRITRYEMSEGEQNSDIEQDDENKLVAPANGQLADALCATRGSRSMRVDNALEALSAVNDLSREQRAIVKAIFAGLEGNKLDLAKIFVSKEFSSENKKILGIYFNKSDYEEKCVQIVDSGLLDDEEREFLDRMQGQYNAIALKQLLGRSTSVSDSKCASYDAHRANWNLIKLQLRTKENEKDINENYGILVGWKIDSGQRKSVRGESAYENMRKKANVFFKKMIETSDLSETDKNRLIHDIEEDKLFPIQRDSDNGVIPHQLHQNELKQIIKKQGKYYPFLLDAFEKDGKQINKIEGLLTFRVPYFVGPLVVPEDLQKSDNSENHWMVRKKKGEITPWNFDEMVDKDASGRKFIERLVGTDSYLLGEPTLPKNSLLYQEYEVLNELNNVRLSVRTGNHWNDKRRMRLGREEKTLLCQRLFMKGQTVTKRTAENLLRKEYGRTYELSGLSDESKFTSSLSTYGKMCRIFGEKYVNEHRDLMEKIVELQTVFEDKETLLHQLRQLEGISEADCALLVNTHYTGWGRLSRKLLTTKAGECKISDDFAPRKHSIIEIMRAEDRNLMEIITDKQLGFSDWIEQENLGAENGSSLMEVVDDLRVSPKVKRGIIQSIRLIDDISKAVGKRPSRIFLELADDIQPSGRTISRKSRLQDLYRNANLGKEFKGIADELNACSDKDLQDDRLFLYYTQLGKDMYTGEELDLDRLSSAYDIDHIIPQAVTQNDSIDNRVLVARAENARKTDSFTYMPQIADRMRNFWQILLDNGLISRVKFERLTRQNEFSEREKERFVQRSLVETRQIMKNVATLMRQRYGNSAAVIGLNAELTKEMHRYLGFSHKNRDINDYHHAQDALCVGIAGQFAANRGFFADGEVSDGAQNSYNQYLRDYLRGYREKLSAEDRKQGRAFGFIVGSMRSQDEQKRVNPRTGEVVWSEEDKDYLRKVMNYRKMLVTQKVGDDFGALYDETRYAATDPKGIKGIPFDGAKQDTSLYGGFSSAKPAYAVLIESKGKTRLVNVTMQEYSLLGDRPSDDELRKVLAKKKSEYAKANILLRHVPKMQLIRYGGGLMVIKSAGELNNAQQLWLPYEEYCYFDDLSQGKGSLEKDDLKKLLDSILGSVQCLYPWHRFTEEELADLHVAFDKLPEDEKKNVITGIVSALHADAKTANLSIVGMTGSWRRMNNKSGYTFSDEDEFIFQSPSGLFEKRVTVGELKRKAKKEVNSKYRTNEKRLPTLSGASQP

SEQ ID NO: 95 - protein, 1138 aa, Bifidobacterium dentium
MLCRCHRRYRIGIDVGLMSVGLAAIEVDETGFPIRILNIQSVIHDGGIDPQLGKKKSISRKAISGVARRTRRMRRRKVVRLRQLDATLESLGFPIVEPDSLDTWEIWLTRAKLASSYIQDDETRKEDVSIALRHIARHRGWRNPYSNVESLFVDVAPSEQYEELRRKAEEKLGTSLSGNPTSAEIVECILKRQVGEVQLRTRSRKGVNGNAVEKEGLLPTKLMQSDNAAEIRRIFKVQRIDDETGRKLLRAVFKACSPKGSVERRVGRDALAPGLPRALKASLAFQEYRIANVLTNLVISEDGTKRKLTIAEKQRVFGFLSSNETDDITWIDVAEKLGLERRQIQGVGCLTADGEERISSTPPRNITALHIHSAKPVIREKLVAWWKAASPTVRETMVELLSNTVDIDRVREDMDYSSAVAFIDSLGDEELTALDSVDLLSGRAAYSRQTLKQLTERMLNTDDDLHEARKAVFGVDDNWKPPVDAISTSVGNPAVDRVLKIVNRYLLACQKRWRNPQSVQIEHVRESFSSVAKAKETERVQGERARYRNDLRRELCEQEGLNKIRESDIRRWESVQRQNGTCLYCGSPITFRTCEMDHIVPRKGVGSTNTRVNLAAACAACNKLKSNTAFSVWARTEGAANRKVSQRDAIERVKTFIFNKSVPPREQRAFKQAVISRLRQAESDPAIDNRSIESVAWMADELHRRIEAYFNQDADVSGNTPATQVWVFQGRVTALARKASGIEGRIHFAGEWKKTRLDRRHHAVDAAVIAMMNHSAAQTLVERDSLRLSQWITRKPETWKNYPFSEGQKKTRFKEWLDCMNALLDLLNDALDSDRVPVTRCQRMSLGNSQAHAATIRKMKRVELFSPMDADLIRRASTPALYCALTRLPEYSPEKGLPENRGREIVLNGRHIRSTETVDFFASGAAQLMVRNGSAEIGDSIHHMRIYRYRKTGAKSQEYVYGMIRVFQIDLLHASSENLFAVQLPSQSVSVRYGDKNVVQAIQEGRAEYLGHIVPNDEILISYEGVRMKDSEKIGAYANDFSGTASELAQRRHWVVVGSDVSKLALRPSYLSEEGLENSGSESERLSKQTRKVIEGKGWVVAVNILAKYHPVVIRRNALGEPRFRTNSGMPVSWRWDR

SEQ ID NO: 96 - protein, 1187 aa, Bifidobacterium longum
MLSRQLLGASHLARPVSYSYNVQDNDVHCSYGERCFMRGKRYRIGIDVGLNSVGLAAVEVSDENSPVRLLNAQSVIHDGGVDPQKNKEAITRKNMSGVARRTRRMRRRKRERLHKLDMLLGKFGYPVIEPESLDKPFEEWHVRAELATRYIEDDELRRESISIALRHMARHRGWRNPYRQVDSLISDNPYSKQYGELKEKAKAYNDDATAAEEESTPAQLVVAMLDAGYAEAPRLRWRTGSKKPDAEGYLPVRLMQEDNANELKQIFRVQRVPADEWKPLFRSVFYAVSPKGSAEQRVGQDPLAPEQARALKASLAFQEYRIANVITNLRIKDASAELRKLTVDEKQSIYDQLVSPSSEDITWSDLCDFLGFKRSQLKGVGSLTEDGEERISSRPPRLTSVQRIYESDNKIRKPLVAWWKSASDNEHEAMIRLLSNTVDIDKVREDVAYASAIEFIDGLDDDALTKLDSVDLPSGRAAYSVETLQKLTRQMLTTDDDLHEARKTLFNVTDSWRPPADPIGEPLGNPSVDRVLKNVNRYLMNCQQRWGNPVSVNIEHVRSSFSSVAFARKDKREYEKNNEKRSIFRSSLSEQLRADEQMEKVRESDLRRLEAIQRQNGQCLYCGRTITFRTCEMDHIVPRKGVGSTNTRTNFAAVCAECNRMKSNTPFAIWARSEDAQTRGVSLAEAKKRVTMFTFNPKSYAPREVKAFKQAVIARLQQTEDDAAIDNRSIESVAWMADELHRRIDWYFNAKQYVNSASIDDAEAETMKTTVSVFQGRVTASARRAAGIEGKIHFIGQQSKTRLDRRHHAVDASVIAMMNTAAAQTLMERESLRESQRLIGLMPGERSWKEYPYEGTSRYESFHLWLDNMDVLLELLNDALDNDRIAVMQSQRYVLGNSIAHDATIHPLEKVPLGSAMSADLIRRASTPALWCALTRLPDYDEKEGLPEDSHREIRVHDTRYSADDEMGFFASQAAQIAVQEGSADIGSAIHHARVYRCWKTNAKGVRKYFYGMIRVFQTDLLRACHDDLFTVPLPPQSISMRYGEPRVVQALQSGNAQYLGSLVVGDEIEMDFSSLDVDGQIGEYLQFFSQFSGGNLAWKHWVVDGFFNQTQLRIRPRYLAAEGLAKAFSDDVVPDGVQKIVTKQGWLPPVNTASKTAVRIVRRNAFGEPRLSSAHHMPCSWQWRHE

SEQ ID NO: 97 - protein, 1124 aa, Bifidobacterium longum
  Bifidobacterium longum subsp. longum 2-2B
LTGHSGHTFWPTSSSPPIQLEQEKRPLPQRNTSQNGHTFWPITRERCFMRGKRYRIGIDVGLNSVGLAAVEVSDENSPVRLLNAQSVIHDGGVDPQKNKEAITRKNMSGVARRTRRMRRRKRERLHKLDMLLGKFGYPVIEPESLDKPFEEWHVRAELATRYIEDDELRRESISIALRHMARHRGWRNPYRQVDSLISDNPYSKQYGELKEKAKAYNDDATAAEEESTPAQLVVAMLDAGYAEAPRLRWRTGSKKPDAEGYLPVRLMQEDNANELKQIFRVQRVPADEWKPLFRSVFYAVSPKGSAEQRVGQDPLAPEQARALKASLAFQEYRIANVITNLRIKDASAELRKLTVDEKQSIYDQLVSPSSEDITWSDLCDFLGFKRSQLKGVGSLTEDGEERISSRPPRLTSVQRIYESDNKIRKPLVAWWKSASDNEHEAMIRLLSNTVDIDKVREDVAYASAIEFIDGLDDDALTKLDSVDLPSGRAAYSVETLQKLTRQMLTTDDDLHEARKTLFNVTDSWRPPADPIGEPLGNPSVDRVLKNVNRYLMNCQQRWGNPVSVNIEHVRSSFSSVAFARKDKREYEKNNEKRSIFRSSLSEQLRADEQMEKVRESDLRRLEAIQRQNGQCLYCGRTITFRTCEMDHIVPRKGVGSTNTRTNFAAVCAECNRMKSNTPFAIWARSEDAQTRGVSLAEAKKRVTMFTFNPKSYAPREVKAFKQAVIARLQQTEDDAAIDNRSIESVAWMADELHRRIDWYFNAKQYVNSASIDDAEAETMKTTVSVFQGRVTASARRAAGIEGKIHFIGQQSKTRLDRRHHAVDASVIAMMNTAAAQTLMERESLRESQRLIGLMPGERSWKEYPYEGTSRYESFHLWLDNMDVLLELLNDALDNDRIAVMQSQRYVLGNSIAHDATIHPLEKVPLGSAMSADLIRRASTPALWCALTRLPDYDEKEGLPEDSHREIRVHDTRYSADDEMGFFASQAAQIAVQEGSADIGSAIHHARVYRCWKTNAKGVRKYFYGMIRVFQTDLLRACHDDLFTVPLPPQSISMRYGEPRVVQALQSGNAQYLGSLVVGDEIEMDFPVSMLMVRLASIYNSSRSLVEGTLHGNIGLLMDSLTRRS

SEQ ID NO: 98 - protein, 1138 aa, Bifidobacterium sp.
MNSVGLAAVEVSDENSPVRLLNAQSVIHDGGVDPQKNKEAITRKNMSGVARRTRRMRRRKRERLHKLDMLLGKFGYPVIEPESLDKPFEEWHVRAELATRYIEDDELRRESISIALRHMARHRGWRNPYRQVDSLISDNPYSKQYGELKEKAKAYNDDATAAEEESTPAQLVVAMLDAGYAEAPRLRWRTGSKKPDAEGYLPVRLMQEDNANELKQIFRVQRVPADEWKPLFRSVFYAVSPKGSAEQRVGQDPLAPEQARALKASLAFQEYRIANVITNLRIKDASAELRKLTVDEKQSIYDQLVSPSSEDITWSDLCDFLGFKRSQLKGVGSLTEDGEERISSRPPRLTSVQRIYESDNKIRKPLVAWWKSASDNEHEAMIRLLSNTVDIDKVREDVAYASAIEFIDGLDDDALTKLDSVDLPSGRAAYSVETLQKLTRQMLTTDDDLHEARKTLFNVTDSWRPPADPIGEPLGNPSVDRVLKNVNRYLMNCQQRWGNPVSVNIEHVRSSFSSVAFARKDKREYEKNNEKRSIFRSSLSEQLRADEQMEKVRESDLRRLEAIQRQNGQCLYCGRTITFRTCEMDHIVPRKGVGSTNTRTNFAAVCAECNRMKSNTPFAIWARSEDAQTRGVSLAEAKKRVTMFTFNPKSYAPREVKAFKQAVIARLQQTEDDAAIDNRSIESVAWMADELHRRIDWYFNAKQYVNSASIDDAEAETMKTTVSVFQGRVTASARRAAGIEGKIHFIGQQSKTRLDRRHHAVDASVIAMMNTAAAQTLMERESLRESQRLIGLMPGERSWKEYPYEGTSRYESFHLWLDNMDVLLELLNDALDNDRIAVMQSQRYVLGNSIAHDATIHPLEKVPLGSAMSADLIRRASTPALWCALTRLPDYDEKEGLPEDSHREIRVHDTRYSADDEMGFFASQAAQIAVQEGSADIGSAIHHARVYRCWKTNAKGVRKYFYGMIRVFQTDLLRACHDDLFTVPLPPQSISMRYGEPRVVQALQSGNAQYLGSLVVGDEIEMDFSSLDVDGQIGEYLQFFSQFSGGNLAWKHWVVDGFFNQTQLRIRPRYLAAEGLAKAFSDDVVPDGVQKIVTKQGWLPPVNTASKTAVRIVRRNAFGEPRLSSAHHMPCSWQWRHE

SEQ ID NO: 99 - protein, 1151 aa, Bifidobacterium sp.
  Bifidobacterium sp. 12_1_47BFAA
MRGKRYRIGIDVGLNSVGLAAVEVSDENSPVRLLNAQSVIHDGGVDPQKNKEAITRKNMSGVARRTRRMRRRKRERLHKLDMLLGKFGYPVIEPESLDKPFEEWHVRAELATRYIEDDELRRESISIALRHMARHRGWRNPYRQVDSLISDNPYSKQYGELKEKAKAYNDDATAAEEESTPAQLVVAMLDAGYAEAPRLRWRTGSKKPDAEGYLPVRLMQEDNANELKQIFRVQRVPADEWKPLFRSVFYAVSPKGSAEQRVGQDPLAPEQARALKASLAFQEYRIANVITNLRIKDASAELRKLTVDEKQSIYDQLVSPSSEDITWSDLCDFLGFKRSQLKGVGSLTEDGEERISSRPPRLTSVQRIYESDNKIRKPLVAWWKSASDNEHEAMIRLLSNTVDIDKVREDVAYASAIEFIDGLDDDALTKLDSVDLPSGRAAYSVETLQKLTRQMLTTDDDLHEARKTLFNVTDSWRPPADPIGEPLGNPSVDRVLKNVNRYLMNCQQRWGNPVSVNIEHVRSSFSSVAFARKDKREYEKNNEKRSIFRSSLSEQLRADEQMEKVRESDLRRLEAIQRQNGQCLYCGRTITFRTCEMDHIVPRKGVGSTNTRTNFAAVCAECNRMKSNTPFAIWARSEDAQTRGVSLAEAKKRVTMFTFNPKSYAPREVKAFKQAVIARLQQTEDDAAIDNRSIESVAWMADELHRRIDWYFNAKQYVNSASIDDAEAETMKTTVSVFQGRVTASARRAAGIEGKIHFIGQQSKTRLDRRHHAVDASVIAMMNTAAAQTLMERESLRESQRLIGLMPGERSWKEYPYEGTSRYESFHLWLDNMDVLLELLNDALDNDRIAVMQSQRYVLGNSIAHDATIHPLEKVPLGSAMSADLIRRASTPALWCALTRLPDYDEKEGLPEDSHREIRVHDTRYSADDEMGFFASQAAQIAVQEGSADIGSAIHHARVYRCWKTNAKGVRKYFYGMIRVFQTDLLRACHDDLFTVPLPPQSISMRYGEPRVVQALQSGNAQYLGSLVVGDEIEMDFSSLDVDGQIGEYLQFFSQFSGGNLAWKHWVVDGFFNQTQLRIRPRYLAAEGLAKAFSDDVVPDGVQKIVTKQGWLPPVNTASKTAVRIVRRNAFGEPRLSSAHHMPCSWQWRHE

SEQ ID NO: 100 - protein, 1092 aa, Brevibacillus laterosporus
  Brevibacillus laterosporus GI-9
MAYTMGIDVGIASCGWAIVDLERQRIIDIGVRTFEKAENPKNGEALAVPRREARSSRRRLRRKKHRIERLKYMFVRNGLAVDIQHLEQTLRSQNEIDVWQLRVDGLDRMLTQKEWLRVLIHLAQRRGFQSNRKTDGSSEDGQVLVNVTENDRLMEEKDYRTVAEMMVKDEKFSDHKRNKNGNYHGVVSRASLLVEIHTLFESQRQHHNFLASKDFELEYINIWSSQRPVATKDQIEKMIGTCTFLPKEKRAPKASWHFQYFMLLQTINHIRITNAQGTRPLNKEEIEQVVNMALTKSKVSYHDIRKVLDLSEEYQFVGLDYGKEDEKKKVESKETIIKLDDYHKLNKIFNEVELAKGETWEAVDYDTVAYALTFFKDDEDIRDYLQNKYKDSKNRLVKNVANKEYTNELIEKVSTLSFRKVGHLSLKALRKIIPFLEQGMTYDKACQAAGFNFQGISKKKRSVVLPVIDQISNPVVNRALTQTRKVINALIKKYGSPETIHIETARELSKRFDERKNITKDYKENRDKNERAKKHLSELGIINPTGLDIVKYKLWCEQQGRCMYSNQPISFERLRESGYTEVDHIIPYSRSMNDSYNNRVLVMTRENREKSNQTPYEYMGNDTQRWDEFEQRVTTNPQIKKEKRQNLLLKGFTNRRELEMLERNLNDTRHITKYLSHFISTNLEFSPSDKKKKVVNTSGRITSHLRSRWGLEKNREQNDLHHAMDAVVIAVTSDSFIQQVTNYYKRKERRELNGDDKFPLPWKFFREEVIARLSPNPKEQIEALPNHFYSEDELADLQPIFVSRMPKRSITGEAHQAQFRRVVGKTKEGKNITAKKTALVDISYDKNGDFNMYGRETDPATYEAIKERYLEFGGNAKKAFSTDLHKPKKDGTKGPLIKSVRIMENKTLVHPVNKGKGVVYNSSIVRTDVFQRKEKYYLLPVYVTDVTKGKLPNKVIAAKKGYDDWIEVDDSFTFLYSLYPNDLIFIRQNPKKKISLKKRIESHSISDSKEVQEILTYYKGVDSSTAAIEFITHDGSYYAKGVGVQNLDCFEKYQVDILGNYSKVKGEKRLELETSDNNHKGKDVNSIKSTSR

SEQ ID NO: 101 - protein, 1428 aa, Burkholderiales bacterium
  Burkholderiales bacterium 1_1_47
MGKTHIIGVGLDLGGTYTGTFITSHPSDEAEHRDHSSAFTVVNSEKLSFSSKSRTAVRHRVRSYKGFDLRRRLLLLVAEYQLLQKKQTLAPEERENLRIALSGYLKRKGYARTEAETDTSVLESLDPSVFSSAPSFTNFFNDSEPLNIQWEAIANSPETTKALNKELSGQKEADFKKYIKTSFPEYSAKEILANYVEGRRAILDASKYIANLQSLGHKHRSKYLSDILQDMKRDSRITRLSEAFGSTDNLWRIIGNISNLQERAVRWYFNDAKFEQGQEQLDAVKLKNVLVRALKYLRSDDKEWSASQKQIIQSLEQSGDVLDVLAGLDPDRTIPPYEDQNNRRPPEDQTLYLNPKALSSEYGEKWKSWANKFAGAYPLLTEDLTEILKNTDRKSRIKIRSDVLPDSDYRLAYILQRAFDRSIALDECSIRRTAEDFENGVVIKNEKLEDVLSGHQLEEFLEFANRYYQETAKAKNGLWFPENALLERADLHPPMKNKILNVIVGQALGVSPAEGTDFIEEIWNSKVKGRSTVHSICNAIENERKTYGPYFSEDYKFVKTALKEGKTEKELSKKFAAVIKVLKMVSEVVPFIGKELRLSDEAQSKFDNPYSLAQLYNLIETERNGFSKVSLAAHLENAWRMTMTDGSAQCCRLPADCVRPFDGFIRKAIDRNSWEVAKRIAEEVKKSVDFTNGTVKIPVAIEANSFNFTASLTDLKYIQLKEQKLKKKLEDIQRNEENQEKRWLSKEERIRADSHGICAYTGRPLDDVGEIDHIIPRSLTLKKSESIYNSEVNLIFVSAQGNQEKKNNIYLLSNLAKNYLAAVFGASDLSQITNEIESTVLQLKAAGRLGYFDLLSEKERACARHALFLNSDSEARRAVIDVLGSRRKASVNGTQAWFVRSIFSKVRQALAAWTQETGNELIFDAISVPAADSSEMRKRFAEYRPEFRKPKVQPVASHSIDAMCIYLAACSDPFKTKRMGSQLAIYEPINFDNLFTGSCQVIQNTPRNFSDKTNIANSPIFKETIYAERFLDIIVSRGEIFIGYPSNMPFEEKPNRISIGGKDPFSILSVLGAYLDKAPSSEKEKLTIYRVVKNKAFELFSKVAGSKFTAEEDKAAKILEALHFVTVKQDVAATVSDLIKSKKELSKDSIENLAKQKGCLKKVEYSSKEFKFKGSLIIPAAVEWGKVLWNVFKENTAEELKDENALRKALEAAWPSSFGTRNLHSKAKRVFSLPVVATQSGAVRIRRKTAFGDFVYQSQDTNNLYSSFPVKNGKLDWSSPIIHPALQNRNLTAYGYRFVDHDRSISMSEFREVYNKDDLMRIELAQGTSSRRYLRVEMPGEKFLAWFGENSISLGSSFKFSVSEVFDNKIYTENAEFTKFLPKPREDNKHNGTIFFELVGPRVIFNYIVGGAASSLKEIFSEAGKERS

SEQ ID NO: 102 - protein, 1442 aa, Caenispirillum salinarum
  Caenispirillum salinarum AK4
MPVLSPLSPNAAQGRRRWSLALDIGEGSIGWAVAEVDAEGRVLQLTGTGVTLFPSAWSNENGTYVAHGAADRAVRGQQQRHDSRRRRLAGLARLCAPVLERSPEDLKDLTRTPPKADPRAIFFLRADAARRPLDGPELFRVLHHMAAHRGIRLAELQEVDPPPESDADDAAPAATEDEDGTRRAAADERAFRRLMAEHMHRHGTQPTCGEIMAGRLRETPAGAQPVTRARDGLRVGGGVAVPTRALIEQEFDAIRAIQAPRHPDLPWDSLRRLVLDQAPIAVPPATPCLFLEELRRRGETFQGRTITREAIDRGLTVDPLIQALRIRETVGNLRLHERITEPDGRQRYVPRAMPELGLSHGELTAPERDTLVRALMHDPDGLAAKDGRIPYTRLRKLIGYDNSPVCFAQERDTSGGGITVNPTDPLMARWIDGWVDLPLKARSLYVRDVVARGADSAALARLLAEGAHGVPPVAAAAVPAATAAILESDIMQPGRYSVCPWAAEAILDAWANAPTEGFYDVTRGLFGFAPGEIVLEDLRRARGALLAHLPRTMAAARTPNRAAQQRGPLPAYESVIPSQLITSLRRAHKGRAADWSAADPEERNPFLRTWTGNAATDHILNQVRKTANEVITKYGNRRGWDPLPSRITVELAREAKHGVIRRNEIAKENRENEGRRKKESAALDTFCQDNTVSWQAGGLPKERAALRLRLAQRQEFFCPYCAERPKLRATDLFSPAETEIDHVIERRMGGDGPDNLVLAHKDCNNAKGKKTPHEHAGDLLDSPALAALWQGWRKENADRLKGKGHKARTPREDKDFMDRVGWRFEEDARAKAEENQERRGRRMLHDTARATRLARLYLAAAVMPEDPAEIGAPPVETPPSPEDPTGYTAIYRTISRVQPVNGSVTHMLRQRLLQRDKNRDYQTHHAEDACLLLLAGPAVVQAFNTEAAQHGADAPDDRPVDLMPTSDAYHQQRRARALGRVPLATVDAALADIVMPESDRQDPETGRVHWRLTRAGRGLKRRIDDLTRNCVILSRPRRPSETGTPGALHNATHYGRREITVDGRTDTVVTQRMNARDLVALLDNAKIVPAARLDAAAPGDTILKEICTEIADRHDRVVDPEGTHARRWISARLAALVPAHAEAVARDIAELADLDALADADRTPEQEARRSALRQSPYLGRAISAKKADGRARAREQEILTRALLDPHWGPRGLRHLIMREARAPSLVRIRANKTDAFGRPVPDAAVWVKTDGNAVSQLWRLTSVVTDDGRRIPLPKPIEKRIEISNLEYARLNGLDEGAGVTGNNAPPRPLRQDIDRLTPLWRDHGTAPGGYLGTAVGELEDKARSALRGKAMRQTLTDAGITAEAGWRLDSEGAVCDLEVAKGDTVKKDGKTYKVGVITQGIFGMPVDAAGSAPRTPEDCEKFEEQYGIKPWKAKGIPLA

SEQ ID NO: 103 - protein, 984 aa, Campylobacter coli
  Campylobacter coli 1098
MARILAFDIGISSIGWAFSENDELKDCGVRIFTKAENPKTGESLALPRRLARSARKRLARRKARLNHLKHLIANEFKLNYEDYQSFDESLAKAYKGSLISPYELRFRALNELLSKQDFARVILHIAKRRGYDDIKNNGDEEKSEILKAIKQNEEKLVNYQSVGEYLYKEYFQKFKENSKEFINVRNKKESYERCIAQSFLKDELKLIFQKQREFGFSFSKKFEEEVLSVAFYKRALKDFSHLVGNCSFFTDEKRAPKNSPLAFMFVALTRIINLLNNLKNTEGILYTKDDLNALLNEVLKNGTLTYKQTKKLLGLSDDYEFKGEKGTYFIEFKKYKEFIKALGEHNLSQDDLNEIAKDITLIKDEIKLKKALAKYDLNQNQIDSLSKLEFKDHLNISFKALKLITPLMLEGKKYDEACNELNLKVAINEDKKDFLPAFNETYYKDEVTNPVVLRAIKEYRKVLNALLKKYGKVHKINIELAREVGKNYSQRAKIEKEQNENYKAKKDAELECEKLGLKINSKNILKLRLFKEQKEFCAYSGEKIKISDLQDEKMLEIDHIYPYSRSFDDSYMNKVLVFTKQNQEKLNQTPFEAFGNDSAKWQKIEVLAKNLPTKKQKRILDKNYKDKEQKNFKDRNLNDTRYIARLVLNYTKDYLDFLPLSDDENTKLNDTQKGSKVHVEAKSGMLTSALRHTWGFSAKDRNNHLHHAIDAVIIAYANNSIVKAFSDFKKEQESNSAELYAKKISELDYKNKRKFFEPFSGFRQKVLDKIDEIFVSKPERKKPSGALHEETFRKEEEFYQSYGGKEGVLKALELGKIRKVNGKIVKNGDMFRVDIFKHKKTNKFYAVPIYTMDFALKVLPNKAVARSKKGEIKDWILMDENYEFCFSLYKDSLILIQTKDMQEPEFVYYNAFTSSTVSLIVSKHDNKFETLSKNQKILFKNANEKEVIAKSIGIQNLKVFEKYIVSALGEVTKAEFRQREDFKK

SEQ ID NO: 104 - protein, 984 aa, Campylobacter coli
  Campylobacter coli 111-3
MARILAFDIGISSIGWAFSENDELKDCGVRIFTKAENPKTGESLALPRRLARSARKRLARRKARLNHLKHLIANEFKLNYEDYQSFDESLAKAYKGSLISPYELRFRALNELLSKQDFARVILHIAKRRGYDDIKNNGDEEKSEILKAIKQNEEKLVNYQSVGEYLYKEYFQKFKENSKEFINVRNKKESYERCIAQSFLKDELKLIFQKQREFGFSFSKKFEEEVLSVAFYKRALKDFSHLVGNCSFFTDEKRAPKNSPLAFMFVALTRIINLLNNLKNTEGILYTKDDLNTLLNEVLKNGTLTYKQTKKLLGLSDDYEFKGEKGTYFIEFKKYKEFIKALGEHNLSQDNLNEIAKDITLIKDEIKLKKALAKYDLNQNQIDSLSKLEFKDHLNISFKALKLITPLMLEGKKYDEAYNELNLKVAINEDKKDFLPAFNETYYKDEVTNPVVLRAIKEYRKVLNALLKKYGKVHKINIELAREVGKNHSQRAKIEKEQNENYKAKKDAELECEKLGLKINSKNILKLRLFKEQKEFCAYSGEKIKISDLQDEKMLEIDHIYPYSRSFDDSYMNKVLVFTKQNQEKLNQTPFEAFGNDSAKWQKIEVLAKNLPTKKQKRILDKNYKDKEQKDFKDRNLNDTRYIARLVLNYTKDYLDFLPLSDDENTKLNDTQKGSKVHVEAKSGMLTSALRHTWGFSAKDRNNHLHHAIDAVIIAYANNSIVKAFSDFKKEQESNSAELYAKKISELDYKNKRKFFEPFSGFRQKVLDKIDEIFVSKPERKKPSGALHEETFRKEEEFYQSYGGKEGVLKALELGKIRKVNGKIVKNGDMFRVDIFKHKKTNKFYAVPIYTMDFALKVLPNKAVARSKKGEIKDWILMDENYEFCFSLYKDSLILIQTKDMQEPELVYFNAFTSSTVSLIVSKHDNKFETLSKNQKILFKNANEKEVIAKSIGIQNLKVFEKYIVSALGEVTKAEFRQREDFKK

SEQ ID NO: 105 - protein, 987 aa, Campylobacter coli
  Campylobacter coli 132-6
MARILAFDIGISSIGWAFSENDELKDCGVRIFTKAENPKTGESLALPRRLARSARKRLARRKARLNHLKHLIANEFKLNYEDYQSFDESLAKAYKGSLISPYELRFRALNELLSKQDFARVILHIAKRRGYDDIKNNGDEEKSEILKAIKQNEEKLVNYQSVGEYLYKEYFQKFKENSKEFINVRNKKESYERCIAQSFLKDELKLIFQKQREFGFSFSKKFEEEVLSVAFYKRALKDFSHLVGNCSFFTDEKRAPKNSPLAFMFVALTRIINLLNNLKNTEGILYTKDDLNTLLNEVLKNGTLTYKQTKKLLGLSDDYEFKGEKGTYFIEFKKYKEFIKALGEHNLSQDNLNEIAKDITLIKDEIKLKKALAKYDLNQNQIDSLSKLEFKDHLNISFKALKLITPLMLEGKKYDEAYNELNLKVAINEDKKDFLPAFNETYYKDEVTNPVVLRAIKEYRKVLNALLKKYGKVHKINIELAREVGKNHSQRAKIEKEQNENYKAKKDAELECEKLGLKINSKNILKLRLFKEQKEFCAYSGEKIKISDLQDEKMLEIDHIYPYSRSFDDSYMNKVLVFTKQNQEKLNQTPFEAFGNDSAKWQKIEVLAKNLPTKKQKRILDKNYKDKEQKDFKDRNLNDTRYIARLVLNYTKDYLDFLPLSDDENTKLNDTQKGSKVHVEAKSGMLTSALRHTWGFSAKDRNNHLHHAIDAVIIAYANNSIVKAFSDFKKEQESNSAELYAKKISELDYKNKRKFFEPFSGFRQKVLDKIDEIFVSKPERKKPSGALHEETFRKEEEFYQSYGGKEGVLKALELGKIRKVNGKIVKNGDMFRVDIFKHKKTNKFYAVPIYTMDFALKVLPNKAVARSKKGEIKDWILMDENYEFCFSLYKDSLILIQTKDMQEPELVYFNAFTSSTVSLIVSKHDNKFETLSKNQKILFKNANEKEVIAKSIGIQNLKVFEKYIVSALGEVTKAEFRQREDFKNELR

SEQ ID NO: 106 - protein, 984 aa, Campylobacter coli
  Campylobacter coli 151-9
MARILAFDIGISSIGWAFSENDELKDCGVRIFTKAENPKTGESLALPRRLARSARKRLARRKARLNHLKHLIANEFKLNYEDYQSFDESLAKAYKGSLISPYELRFRALNELLSKQDFARVILHIAKRRGYDDIKNNGDEEKSEILKAIKQNEEKLVNYQSVGEYLYKEYFQKFKENSKEFINVRNKKESYERCIAQSFLKDELKLIFQKQREFGFSFSKKFEEEVLSVAFYKRALKDFSHLVGNCSFFTDEKRAPKNSPLAFMFVALTRIINLLNNLKNTEGILYTKDDLNTLLNEVLKNGTLTYKQTKKLLGLSDDYEFKGEKGTYFIEFKKYKEFIKALGEHNLSQDNLNEIAKDITLIKDEIKLKKALAKYDLNQNQIDSLSKLEFKDHLNISFKALKLITPLMLEGKKYDEAYNELNLKVAINEDKKDFLPAFNETYYKDEVTNPVVLRAIKEYRKVLNALLKKYGKVHKINIELAREVGKNHSQRAKIEKEQNENYKAKKDAELECEKLGLKINSKNILKLRLFKEQKEFCAYSGEKIKISDLQDEKMLEIDHIYPYSRSFDDSYMNKVLVFTKQNQEKLNQTPFEAFGNDSAKWQKIEVLAKNLPTKKQKRILDKNYKDKEQKDFKDRNLNDTRYIARLVLNYTKDYLDFLPLSNDENTKLNDTQKGSKVHVEAKSGMLTSALRHTWGFSAKDRNNHLHHAIDAVIIAYANNSIVKAFSDFKKEQESNSAELYAKKISELDYKNKRKFFEPFSGFRQKVLDKIDEIFVSKPERKKPSGALHEETFRKEEEFYQSYGGKEGVLKALELGKIRKVNGKIVKNGDMFRVDIFKHKKTNKFYAVPIYTMDFALKVLPNKAVARSKKGEIKDWILMDENYEFCFSLYKDSLILIQTKDMQEPELVYFNAFTSSTVSLIVSKHDNKFETLSKNQKILFKNANEKEVIAKSIGIQNLKVFEKYIVSALGEVTKAEFRQREDFKK

SEQ ID NO: 107 - protein, 984 aa, Campylobacter coli
  Campylobacter coli 1909
MARILAFDIGISSIGWAFSENDELKDCGVRIFTKAENPKTGESLALPRRLARSARKCLARRKARLNHLKHLIANEFKLNYEDYQSFDESLAKAYKGSLISPYELRFRALNELLSKQDFARVILHIAKRRGYDDIKNNGDEEKSEILKAIKQNEEKLVNYQSVGEYLYKEYFQKFKENSKEFINVRNKKESYERCIAQSFLKDELKLIFQKQREFGFSFSKKFEEEVLSVAFYKRALKDFSHLVGNCSFFTDEKRAPKNSPLAFMFVALTRIINLLNNLKNTEGILYTKDDLNALLNEVLKNGTLTYKQTKKLLGLSDDYEFKGEKGTYFIEFKKYKEFIKALGEHNLSQDDLNEIAKDITLIKDEIKLKKALAKYDLNQNQIDSLSKLEFKDHLNISFKALKLITPLMLEGKKYDEACNELNLKVAINEDKKDFLPAFNETYYKDEVTNPVVLRAIKEYRKVLNALLKKYGKVHKINIELAREVGKNHSQRAKIEKEQNENYKAKKDAELECEKLGLKINSKNILKLRLFKEQKEFCAYSGEKIKISDLQDEKMLEIDHIYPYSRSFDDSYMNKVLVFTKQNQEKLNQTPFEAFGNDSAKWQKIEVLAKNLPTKKQKRILDKNYKDKEQKNFKDRNLNDTRYIARLVLNYTKDYLDFLPLSDDENTKLNDTQKGSKVHVEAKSGMLTSALRHTWGFSAKDRNNHLHHAIDAVIIAYANNSIVKAFSDFKKEQESNSAELYAKKISELDYKNKRKFFEPFSGFRQKVLDKIDEIFVSKPERKKPSGALHEETFRKEEEFYQSYGGKEGVLKALELGKIRKVNGKIVKNGDMFRVDIFKHKKTNKFYAVPIYTMDFALKVLPNKAVARSKKGEIKDWILMDENYEFCFSLYKDSLILIQTKDMQEPEFVYYNAFTSSTVSLIVSKHDNKFETLSKNQKILFKNANEKEVIAKSIGIQNLKVFEKYIVSALGEVTKAEFRQREDFKK

SEQ ID NO: 108 - protein, 965 aa, Campylobacter coli
  Campylobacter coli 1957
MKIIGFNLGIANIGWALRENDEIIDCGVRVFDIPENPKNGNSLALERRENKARMKIVKRKKARMLATKTFLKKELNVDLSKLFLIGSTQSIYELRTKALSSLISKEELSAIILHIAKHRGYDDSALKNENGTIIEALNKNKEAMLKFKSVGEYFYKNFVQNKEVKKIRNTTEDYSNSVPRSLLKQELDLILDKQKELGLIKNADFKEKLFEIIFFKRPLKDFSNKIGNCIFFENEKRAAKNTISACEFVALGKVVNLLKSIEKDIGIVYEKDSINEIMSIILDKTSISYKKIRDILNLPQDINFKGLDYSKNNAENSKLVDLKKLNEFKKALGDGFANLDKDILDSIATDITLTKDTATLKEKLKNYNVLNAEQIEKLSELVFNDHINLSLKALKQIIPLMYEGKRYDEACELCNFTIAKNQEKNEYLPLFEKTRFAKDISSPVVIRAICEFRKLLNDIIRRYGSVHKIHLELTRDFGISFNDRKKIIKEIEQNEQSRIKALETIKELKLEETSKNIQIVRLFEDQKGICPYSGLKMDLKCLDELVIDYIRPYNRSLDDSYSNKILTFKKLNDLKQGKTPFEAFGEDEKLWAEINERIKEYNGKKRFKIFDKFFKDKKPFDFTEQTLQDTRWLTKLVASYLNEYLLFLPINEDENTALGYGEKGSKQHVVLSSGMITQMLRNFWYLGFKNHKDYKNNAMDAIIVAFTTNSIIFAFNNFKKELDLAKAEFYANKISESDYLLKRKFLPPFSGFKEQALEKVKNIFVSHSLKIKNKGTLHELTPLKIKELKNTYGDLDLAVKLGKIRKYNDKYYANAKGSLVRTDLFADKENKFHAVSIYKADFSTKKLPNKTPATTSNGETKEGIEMNENYNFCMSLYKNTPISVKIKGMKEPIICYYHGFNTSGSKITYKKHDNNYHNLSEDEMVVFRKNDKESIVVGKILEIKKYSISPSGELSLIENEERKWF

SEQ ID NO: 109 - protein, 984 aa, Campylobacter coli
  Campylobacter coli 2692
MARILAFDIGISSIGWAFSENDELKDCGVRIFTKAENPKTGESLALPRRLARSARKRLARRKARLNHLKHLIANEFKLNYEDYQSFDESLAKAYKGSLISPYELRFRALNELLSKQDFARVILHIAKRRGYDDIKNSDDKEKGAILKAIKQNEEKLTNYQSVGEYLYKEYFQKFKENSKEFTNVRNKKESYERCIAQSFLKDELKLIFKKQREFGFSFSKKFEEEVLSVAFYKRALKDFSHLVGNCSFFTDEKRAPKNSPLAFMFVALTRIINLLNNLKNTEGILYTKDDLNALLNEVLKNGTLTYKQTKKLLGLSDDYEFKGEKGTYFIEFKKYKEFIKALGDHSLSQDDLNEIAKDITLIKDEIKLKKALAKYDLNQNQIDSLSKLEFKDHLNISFKALKLITPLMLEGKKYDEACNELNLKVAINEDKKDFLPAFNETYYKDEVTNPVVLRAIKEYRKVLNALLKKYGKVHKINIELAREVGKNYSQRAKIEKEQNENYKAKKDAELECEKLGLKINSKNILKLRLFKEQKEFCAYSGEKIKISDLQDEKMLEIDHIYPYSRSFDDSYMNKVLVFTKQNQEKLNQTPFEAFGNDSAKWQKIEVLAKNLPTKKQKRILDKNYKDKEQKDFKDRNLNDTRYIARLVLNYTKDYLDFLPLSDDENTKLNDTQKGSKVHVEAKSGMLTSALRHTWGFSAKDRNNHLHHAIDAVIIAYANNSIVKAFSDFKKEQESNSAELYAKKISELDYKNKRKFFEPFSGFRQKVLDKIDEIFVSKPERKKPSGALHEETFRKEEEFYQSYGGKEGVLKALELGKIRKVNGKIVKNGDMFRVDIFKHKKTNKFYAVPIYTMDFALKVLPNKAVARSKKGEIKDWILMDENYEFCFSLYKDSLILIQTKDMQEPEFVYYNAFTSSTVSLIVSKHDNKFETLSKNQKILFKNANEKEVIAKSIGIQNLKVFEKYIVSALGEVTKAEFRQREDFKK

SEQ ID NO: 110 - protein, 984 aa, Campylobacter coli
  Campylobacter coli 59-2
MARILAFDIGISSIGWAFSENDELKDCGVRIFTKAENPKTGESLALPRRLARSARKRLARRKARLNHLKHLIANEFKLNYEDYQSFDESLAKAYKGSLISPYELRFRALNELLSKQDFARVILHIAKRRGYDDIKNNGDEEKGKILKAIKQNEEKLVNYQSVGEYLYKEYFQKFKENSKEFINVRNKKESYERCITQSFLKYELKLIFQKQREFGFSFSKKFEEEVLSVAFYKRALKDFSHLVGNCSFFSDEKRAPKNSPLAFMFVALTRIINLLNNLKNTEGILYTKDDLNALLNEVLKNGTLTYKQTKKLLGLSDDYEFKGEKGTYFIEFKKYKEFIKALGEHNLSQDDLNEIAKDITLIKDEIKLKKALAKYDLNQNQIDSLSKLEFKDHLNISFKALKLITPLMLEGKKYDEACNELNLKVAINEDKKDFLPAFNETYYKDEVTNPVVLRAIKEYRKVLNALLKKYGKVHKINIELAREVGKNYSQRAKIEKEQNENYKAKKDAELECEKLGLKINSKNILKLRLFKEQKEFCAYSGEKIKISDLQDEKMLEIDHIYPYSRSFDDSYMNKVLVFTKQNQEKLNQTPFEAFGNDSAKWQKIEVLAKNLPTKKQKRILDKNYKDKEQKNFKDRNLNDTRYIARLVLNYTKDYLDFLPLSDDENTKLNDTQKGSKVHVEAKSGMLTSALRHTWGFSAKDRNNHLHHAIDAVIIAYANNSIVKAFSDFKKEQESNSAELYAKKISELDYKNKRKFFEPFSGFRQKVLDKIDEIFVSKPERKKPSGALHEETFRKEEEFYQSYGGKEGVLKALELGKIRKVNGKIVKNGDMFRVDIFKHKKTNKFYAVPIYTMDFALKVLPNKAVARSKKGEIKDWILMDENYEFCFSLYKDSLILIQTKDMQEPEFVYYNAFTSSTVSLIVSKHDNKFETLSKNQKILFKNANEKEVIAKSIGIQNLKVFEKYIVSALGEVTKAEFRQREDFKK

SEQ ID NO: 111 - protein, 965 aa, Campylobacter coli
  Campylobacter coli 67-8
MKIIGFNLGIANIGWALRENDEIIDCGVRVFDIPENPKNGNSLALERRENKARMKIVKRKKARMLATKTFLKKELNVDLSKLFLIGSTQSIYELRTKALSSLISKEELSAIILHIAKHRGYDDSALKNENGTIIEALNKNKEAMLKFKSVGEYFYKNFVQNKEVKKIRNTTEDYSNSVPRSLLKQELDLILDKQKELGLIKNADFKAKLFEIIFFKRPLKDFSNKIGNCIFFENEKRAAKNTISACEFVALGKVVNLLKSIEKDIGIVYEKDSINEIMSIILDKTSISYKKIRDILNLPQDINFKGLDYSKNNAENSKLVDLKKLNEFKKALGDGFANLDKDILDSIATDITLTKDTATLKEKLKNYNVLNAEQIEKLSELVFNDHINLSLKALKQIIPLMYEGKRYDEACELCNFTIAKNQEKNEYLPLFEKTRFAKDISSPVVIRAICEFRKLLNDIIRRYGSVHKIHLELTRDFGISFNDRKKIIKEIEQNEQSRIKALETIKELKLEETSKNIQIVRLFEDQKGICPYSGLKMDLKCLDELVIDYIRPYNRSLDDSYSNKVLTFKKLNDLKQGKTPFEAFGEDEKLWAEINERIKEYNGKKRFKIFDKFFKDKKPFDFTEQTLQDTRWLTKLVASYLNEYLSFLPISEDENTALGYGEKGSKQHVVLSSGMITQMLRNFWYLGFKNHKNYKNNAMDAIIVAFTTNSIIFAFNNFKKELDLAKAEFYANKISESDYLLKRKFLPPFSGFKEQALEKVKNIFVSHSLKIKNKGTLHELTPLKIKELKNTYGDLDLAVKLGKIRKYNDKYYANTKGSLVRTDLFVDKENKFHAVSIYKADFSTKKLPNKTPATTSNGETKEGIEMNENYNFCMSLYKNTPVSVKIKGMKEPIICYYHGFNTSGSKITYKKHDNNYHNLSEDEMVVFRKNDKESIVVGKILEIKKYSISPSGELSLIENEKRKWF

SEQ ID NO: 112 - protein, 965 aa, Campylobacter coli
  Campylobacter coli 80352
MKIIGFNLGIANIGWALRENDEIIDCGVRVFDIPENPKNGNSLALERRENKARMKIVKRKKARMLATKTFLKKELNVDLSKLFLIGSTQSIYELRTKALSSLISKEELSAIILHIAKHRGYDDSALKNENGTIIEALNKNKEAMLKFKSVGEYFYKNFVQNKEVKKIRNTTEDYSNSVPRSLLKQELDLILDKQKELGLIKNADFKAKLFEIIFFKRPLKDFSNKIGNCIFFENEKRAAKNTISACEFVALGKVVNLLKSIEKDIGIVYEKDSINEIMSIILDKTSISYKKIRDILNLPQDINFKGLDYSKNNVENSKLVDLKKLNEFKKALGDGFTNLDKDILDSIATDITLTKDTATLKEKLKNYNVLNAEQIEKLSELVFNDHINLSLKALKQIIPLMYEGKRYDEACELCNFTIAKNQEKNEYLPLFEKTRFAKDISSPVVIRAICEFRKLLNDIIRRYGSVHKIHLELTRDFGISFNDRKKIIKEIEQNEQSRIKALETIKELKLEETSKNIQIVRLFEDQKGICPYSGLKMDLKCLDELVIDYIRPYNRSLDDSYSNKVLTFKKLNDLKQGKTPFEAFGEDEKLWAEINERIKEYNGKKRFKIFDKFFKDKKPFDFTEQTLQDTRWLTKLVASYLNEYLSFLPISEDENTALGYGEKGSKQHVILSSGMITQMLRNFWYLGFKNHKDYKNNAMDAIIVAFTTNSIIFTFNNFKKELDLAKAEFYANKISESDYLLKRKFLPPFSGFKEQALEKVKNIFVSHSLKIKNKGTLHELTPLKIKELKNTYGDLDLAVKLGKIRKYNDKYYANAKGSLVRTDLFADKENKFHAVSIYKADFSTKKLPNKTPATTSNGETKEGIEMNENYNFCMSLYKNTPISVKIKGMKEPIICYYHGFNTSGSKITYKKHDNNYHNLSEDEMVVFRKNDKESIVVGKILEIKKYSISPSGELSLIENEERKWF

SEQ ID NO: 113 - protein, 987 aa, Campylobacter coli
  Campylobacter coli 80352
MARILAFDIGISSIGWAFSENDELKDCGVRIFTKAENPKTGESLALPRRLARSARKRLARRKARLNHLKHLIANEFKLNYEDYQSFDESLAKAYKGSLISPYELRFRALNELLSKQDFARVILHIAKRRGYDDIKNSDDKEKGAILKAIKQNEEKLANYQSVGEYLYKEYFQKFKENSKEFTNVRNKKESYERCIAQSFLKDELKLIFKKQREFGFSFSKKFEEEVLSVAFYKRALKDFSHLVGNCSFFTDEKRAPKNSPLAFMFVALTRIINLLNNLKNTEGILYTKDDLNALLNEVLKNGTLTYKQTKKLLGLSDDYEFKGEKGTYFIEFKKYKEFIKALGDHSLSQDDLNEIAKDITLIKDEIKLKKALAKYDLNQNQIDSLSKLEFKDHLNISFKALKLITPLMLEGKKYDEACNELNLKVAINEDKKDFLPAFNETYYKDEVTNPVVLRAIKEYRKVLNALLKKYGKVHKINIELAREVGKNYSQRAKIEKEQNENYKAKKDAELECEKLGLKINSKNILKLRLFKEQKEFCAYSGEKIKISDLQDEKMLEIDHIYPYSRSFDDSYMNKVLVFTKQNQEKLNKTPFEAFGNDSTKWQKIEVLAKNLPEKKQKRILDKNYKDKEQKDFKDRNLNDTRYIARLVLNYTKDYLDFLPLSDDENTKLNDTQKGSKVHVEAKSGMLTSALRHTWGFSTKDRNNHLHHAIDAVIIAYANNSIVKAFSDFKKEQESNSAELYAKKISELDYKNKRKFFEPFSGFRQKVLDKIDEIFVSKPERKKPSGALHEETFRKEEEFYQSYGGKEGVLKALELGKIRKVNGKIVKNGDMFRVDIFKHKKTNKFYAVPIYTMDFALKVLPNKAVARSKKGEIKDWILMDENYEFCFSLYKDSLILIQTKDMQEPEFVYYNAFTSSTVSLIVSKHDNKFETLSKNQKILFKNANEKEVIAKSIGIQNLKVFEKYIVSALGEVTKAEFRQREDFKNELR

SEQ ID NO: 114 - protein, 984 aa, Campylobacter jejuni
MAKILAFDIGISSIGWAFSENDELKDCGVRIFTKAENPKTGESLALPRRIARSARKRLARRKARLNHLKHLIANEFKLNYEDYQSFDEILAKAYKGSLISPYELRFRALNELLSKQDFARVILHIAKRRGYDDIKNNGDEEKGKILKAIKQNEEKLANYQSVGEYLYKEYFQKFKENSKEFINVRNKKESYERCIAQSFLKDELKLIFKKQREFGFSFSKKFEEEVLSVAFYKRALKDFSHLVGNCSFFTDEKRAPKNSPLAFMFVALTRIINLLNNLKNTLYTKDDLNALLNEVLKNGTLTYKQTKKLLGLSDDYEFKGEKGNYFIEFKKYKEFIKALGEHSLSQDDLNEIAKDITLIKDEIKLKKALAKYDLNENQIDNLSKLEFKDHLNISFKALKLITPLMLEGKKYDEACNELTLKVAINEDKKDFLPAFNETYYKDEVTNPVVLRAIKEYRKVLNALLKKYGKVHKINIELAREVGKNHSQRAKIEKEQNENYKAKKDAELECEKLGLKINSKNILKLRLFKEQKEFCVYSGEKIKLSDLQDEKMLEIDHIYPYSRSFDDSYMNKVLVFTKQNQEKLNQTPFEAFGNDSAKWQKIEVLAKNLPTKKQKRILDKNYKDKEQKDFKDRNLNDTRYIARLVLNYTKDYLDFLPLSDDENTKLNDTQKGSKVHVEAKSGMLTSALRHTWGFSTKDRNNHLHHAIDAVIIAYANNSIVKAFSDFKKEQESNTAELYAKKISELDYKNKRKFFEPFSGFRQKVLDKIDEIFVSKPERKKPSGALHEETFRKEEEFYQSYGGKEGVLKALELGKIRKVNGKIVKNGDMFRVDIFKHKKTNKFYAVPIYTMDFALKVLPNKAVARSKKGEIKDWILMDENYEFCFSLYKDSLILIQTKDMQEPEFVYYNAFTSSTVSLIVSKHDNKFETLSKNQKILFKNANEKEVIAKSIGIQNLKVFEKYIVSALGEVTKAEFRQREEFKNELR

SEQ ID NO: 115 - protein, 987 aa, Campylobacter jejuni
  Campylobacter jejuni subsp. jejuni 110-21
MARILAFDIGISSIGWAFSENDELKDCGVRIFTKAENPKTGESLALPRRLARSARKRLARRKARLNHLKHLIANEFKLNYEDYQSFDESLAKAYKGSLISPYELRFRALNELLSKQDFARVILHIAKRRGYDNIKNSDNEEKSEILKAIKQNEEKLVNYQSVGEYLYKEYFQKFKENSKEFINVRNKKESYERCIAQSFLKDELKLIFQKQREFGLSFSKKFEEEVLSVAFYKRALKDFSHLVGNCSFFTDEKRAPKNSPLAFMFVALTRIINLLNNLKNTEGILYTKDDLNTLLNEVLKNGTLTYKQTKKLLGLSDDYEFKGEKGTYFIEFKKYKEFIKALGDHSLSQDDLNEIAKDITLIKDEIKLKKALAKYDLNQNQIDSLSKLEFKDHLNISFKALKLITPLMLEGKKYDEACNELNLKVVINEDKKDFLPAFNETYYKDEVTNPVVLRAIKEYRKVLNALLKKYGKVHKINIELAREVGKNHSQRAKIEKEQNENYKAKKDAELECEKLGLKINNKNILKLRLFKEQKEFCAYSGEKIKLSDLQDEKMLEIDHIYPYSRSFDDSYMNKVLVFTKQNQEKLNKTPFEAFGNDSTKWQKIEVLAKNLPTKKQKRILDKNYKDKEQKDFKDRNLNDTRYIARLVLNYTKDYLDFLPLSDDENTKLNDIQKGSKVHVEAKSGMLTSALRHTWGFSTKDRNNHLHHAIDAVIIAYANNSIVKAFSDFKKEQESNSAELYAKKISELDYKNKRKFFEPFSGFRQKVLDKIDEIFVSKPERKKPSGALHEETFRKEEEFYQSYGGKEGVLKALELGKIRKVNGKIVKNGDMFRVDIFKHKKTNKFYAVPIYTMDFALKVLPNKAVVQGKDKKSGLIKDWILMDENYEFCFSLYKDSLILIQTKDMQEPEFVYYNAFTSSTVSLIVSKHDNKFETLSKNQKILFKNANEKEVIAKSIGIQNLKVFEKYIVSALGEVTKAEFRQREDFKK

SEQ ID NO: 116 - protein, 987 aa, Campylobacter jejuni
  Campylobacter jejuni subsp. jejuni 129-258
MARILAFDIGISSIGWAFSENDELKDCGVRIFTKAENPKTGESLALPRRLARSARKRLARRKARLNHLKHLIANEFKLNYEDYQSFNESLAKAYKGSLISPYELRFRALNELLSKQDFARVILHIAKRRGYDDIKNSDDKEKGAILKVIKQNEEKLANYQSVGEYLYKEYFQKFKENSKEFTNVRNKKESYERCIAQSFLKDELKLIFQKQREFGFSFSKKFEEEVLSVAFYKRALKDFSHLVGNCSFFTDEKRAPKNSPLAFMFVALTRIINLLNNLKNTEGILYTKDDLNALLNEVLKNGTLTYKQTKKLLGLSDDYEFKGEKGTYFIEFKKYKEFIKALGDHSLSQDDLNEIAKDITLIKDEIKLKKALAKYDLNQNQIDSLSKLEFKDHLNISFKALKLITPLMLEGKKYDEACNELNLKVAINEDKKDFLPAFNETYYKDEVTNPVVLRAIKEYRKVLNALLKKYGKVHKINIELAREVGKNYSQRAKIEKEQNENYKAKKDAELECEKLGLKINSKNILKLRLFKEQKEFCAYSGEKIKISDLQDEKMLEIDHIYPYSRSFDDSYMNKVLVFTKQNQEKLNQTPFEAFGNDSAKWQKIEVLAKNLPTKKQKRILDKNYKDKEQKDFKDRNLNDTRYIARLVLNYTKDYLDFLPLSDDENTKLNDTQKGSKVHVEAKSGMLTSALRHTWGFSAKDRNNHLHHAIDAVIIAYANNSIVKAFSDFKKEQESNSAELYAKKISELDYKNKRKFFEPFSGFRQKVLDKIDEIFVSKPERKKPSGALHEETFRKEEEFYQSYGGKEGVLKALELGKIRKVNGKIVKNGDMFRVDIFKHKKTNKFYAVPIYTMDFALKVLPNKAVARSKKGEIKDWILMDENYEFCFSLYKDSLILIQTKDMQEPELVYFNAFTSSTVSLIVSKHDNKFETLSKNQKILFKNANEKEVIAKSIGIQNLKVFEKYIVSALGEVTKAEFRQREDFKNELR

SEQ ID NO: 117 - protein, 987 aa, Campylobacter jejuni
  Campylobacter jejuni subsp. jejuni 1336
MARILAFDIGISSIGWAFSENDELKDCGVRIFTKAENPKTGESLALPRRLARSARKRLARRKARLNHLKHLIANEFKLNYEDYQSFDESLAKAYKGSLISPYELRFRALNELLSKQDFARVILHIAKRRGYDDIKNNGDEEKGKILKAIKQNEEKLVSYQSVGEYLYKEYFQKFKENSKEFINVRNKKESYERCIAQSFLKDELKLIFQKQREFGFSFSKKFEEEVLSVAFYKRALKDFSHLVGNCSFLLMKKERQKNSPLAFMFVALTRIINLLNNLKNTEGILYTKDDLNTLLNEALKNGTLTYKQTKKLLGLSNDYEFKGEKGTYFIEFQKYKEFVKALGEHNLSQDDLNEIAKDITLIKDEIKLKKALAKYDLNQNQIDSLSKLEFKDHLNISFKALKLITPLMLEGKKYDEACNELNLKVAINEDKKDFLPAFNETYYKDEVTNPVVLRAIKEYRKVLNALLKKYGKVHKINIELAREVGKNHSQRAKIEKEQNENYKAKKDAELECEKLGLKINSKNILKLRLFKEQKEFCVYSGEKIKISDLQDEKMLEIDHIYPYSRSFDDSYMNKVLVFTKQNQEKLNKTPFETFGNDRVKWQKIEVLAKNLPTKKQKRILDKNYKDKEQKDFKDRNLNDTRYIARLVLNYTKDYLDFLPLSDDENTKLNDTQKGSKVHVEAKSGMLTSTLRHTWGFSTKDRNNHLHHAIDAAIIAYANNSIVKAFSDFKKEQESNTAELYAKKISELDYKNKRKFFEPFSGFRQKLLDKIDEIFVSKPERKKPSGALHEETFRKEEEFYQSYGGKEGVLKALELGKIRKVNGKMVKNGDMFRVDIFKHKKTNKFYAVPIYTMDFALKVLPNKAVVQGKDKKSGLIKDWILMDENYEFCFSLYKDSLILIQTKDMQEPELVYYERLDSSNASLTVSKHDNKFETLSKNQKILFKNANEKEVIAKSIGIQNLKVFEKYIVSALGEVTKAEFRQREDFKK

SEQ ID NO: 118 - protein, 984 aa, Campylobacter jejuni
  Campylobacter jejuni subsp. jejuni 140-16
MARILAFDIGISSIGWAFSENDELKDCGVRIFTKVENPKTGESLALPRRLARSARKRLARRKARLNHLKHLIANEFKLNYEDYQSFDESLAKAYKGSLISPYELRFRALNELLSKQDFARVILHIAKRRGYDDIKNSDDKEKGAILKAIKQNEEKLANYQSVGEYLYKEYFQKFKENSKEFTNVRNKKESYERCIAQSFLKDELKLIFKKQREFGFSFSKKFEEEVLSVAFYKRALKDFSHLVGNCSFFTDEKRAPKNSPLAFMFVALTRIINLLNNLKNTEGILYTKDDLNALLNEVLKNGTLTYKQTKKLLGLSDDYEFKGEKGTYFIEFKKYKEFIKALGEHNLSQDDLNEIAKDITLIKDEIKLKKALAKYDLNQNQIDSLSKLEFKDHLNISFKALKLITPLMLEGKKYDEACNELNLKVAINEDKKDFLPAFNETYYKDEVTNPVVLRAIKEYRKVLNALLKKYGKVHKINIELAREVGKNHSQRAKIEKEQNENYKAKKDAELECEKLGLKINSKNILKLRLFKEQKEFCAYSGEKIKISDLQDEKMLEIDHIYPYSRSFDDSYMNKVLVFTKQNQEKLNKTPFEAFGNDSAKWQKIEVLAKNLPTKKQKRILDKNYKDKEQKDFKDRNLNDTRYIARLVLNYTKDYLDFLPLSDDENTKLNDTQKGSKVHVEAKSGMLTSALRHTWGFSTKDRNNHLHHAIDAVIIAYANNSIVKAFSDFKKEQESNSAELYAKKISELDYKNKRKFFEPFSGFRQKVLDKIDEIFVSKPERKKPSGALHEETFRKEEEFYQSYGGKEGVLKALELGKIRKVNGKIVKNGDMFRVDIFKHKKTNKFYAVPIYTMDFALKVLPNKAVARSKKGEIKDWILMDENYEFCFSLYKDSLILIQTKDMQEPEFVYYNAFTSSTVSLIVSKHDNKFETLSKNQKILFKNANEKEVIAKSIGIQNLKVFEKYIVSALGEVTKAEFIQREDFKK

SEQ ID NO: 119 - protein, 984 aa, Campylobacter jejuni
  Campylobacter jejuni subsp. jejuni 1577
MARILAFDIGISSIGWAFSENDELKDCGVRIFTKVENPKTGESLALPRRLARSARKRLARRKVRLNHLKHLIANEFKLNYEDYQSFDESLAKAYKGSLISPYELRFRALNELLSKQDFARVILHIAKRRGYDDIKNSDDKEKGAILKAIKQNEEKLANYQSVGEYLYKEYFQKFKENSKEFTNVRNKKESYERCIAQSFLKDELKLIFKKQREFGFSFSKKFEEEVLSVAFYKRALKDFSHLVGNCSFFTDEKRAPKNSPLAFMFVALTRIINLLNNLKNTEGILYTKDDLNALLNEVLKNGTLTYKQTKKLLGLSDDYEFKGEKGTYFIEFKKYKEFIKALGEHNLSQDDLNEIAKDITLIKDEIKLKKALAKYDLNQNQIDSLSKLEFKDHLNISFKALKLITPLMLEGKKYDEACNELNLKVAINEDKKDFLPAFNETYYKDEVTNPVVLRAIKEYRKVLNALLKKYGKVHKINIELAREVGKNHSQRAKIEKEQNENYKAKKDAELECEKLGLKINSKNILKLRLFKEQKEFCAYSGEKIKISDLQDEKMLEIDHIYPYSRSFDDSYMNKVLVFTKQNQEKLNKTPFEAFGNDSAKWQKIEVLAKNLPTKKQKRILDKNYKDKEQKDFKDRNLNDTRYIARLVLNYTKDYLDFLPLSDDENTKLNDTQKGSKVHVEAKSGMLTSALRHTWGFSTKDRNNHLHHAIDAVIIAYANNSIVKAFSDFKKEQESNSAELYAKKISELDYKNKRKFFEPFSGFRQKVLDKIDEIFVSKPERKKPSGALHEETFRKEEEFYQSYGGKEGVLKALELGKIRKVNGKIVKNGDMFRVDIFKHKKTNKFYAVPIYTMDFALKVLPNKAVARSKKGEIKDWILMDENYEFCFSLYKDSLILIQTKDMQEPEFVYYNAFTSSTVSLIVSKHDNKFETLSKNQKILFKNANEKEVIAKSIGIQNLKVFEKYIVSALGEVTKAEFRQREDFKK

SEQ ID NO: 120 - protein, 987 aa, Campylobacter jejuni
  Campylobacter jejuni subsp. jejuni 1854
MARILAFDIGISSIGWAFSENDELKDCGVRIFTKAENPKTGESLALPRRLARSARKRLARRKARLNHLKHLIANEFKLNYEDYQSFDESLAKAYKGSLISPYELRFRALNELLSKQDFARVILHIAKRRGYDDIKNSDDKEKGAILKAIKQNEEKLANYQSVGEYLYKEYFQKFKENSKEFTNVRNKKESYERCIAQSFLKDELKLIFKKQREFGFSFSKKFEEEVLSVAFYKRALKDFSHLVGNCSFFTDEKRAPKNSPLAFMFVALTRIINLLNNLKNTEGILYTKDDLNTLLNEVLKNGTLTYKQTKKLLGLSDDYEFKGEKGTYFIEFKKYKEFIKSLGDHSLSQDDLNEIAKDITLIKDEIKLKKALAKYDLNQNQIDSLSKLEFKDHLNISFKALKLITPLMLEGKKYDEACNELNLKVAINEDKKDFLPAFNETYYKDEVTNPVVLRAIKEYRKVLNALLKKYGKVHKINIELAREVGKNHSQRAKIEKEQNENYKAKKDAELECEKLGLKINSKNILKLRLFKEQKEFCAYSGEKIKISDLQDEKMLEIDHIYPYSRSFDDSYMNKVLVFTKQNQEKLNQTPFEAFGNDSAKWQKIEVLAKNLPTKKQKRILDKNYKDKEQKNFKDRNLNDTRYIARLVLNYTKDYLDFLPLSDDENTKLNDTQKGSKVHVEAKSGMLTSALRHTWGFSAKDRNNHLHHAIDAVIIAYANNSIVKAFSDFKKEQESNSAELYAKKISELDYKNKRKFFEPFSGFRQKVLDKIDEIFVSKPERKKPSGALHEETFRKEEEFYQSYGGKEGVLKALELGKIRKVNGKIVKNGDMFRVDIFKHKKTNKFYAVPIYTMDFALKVLPNKAVARSKKGEIKDWILMDENYEFCFSLYKDSLILIQTKDMQEPEFVYYNAFTSSTVSLIVSKHDNKFETLSKNQKILFKNANEKEVIAKSIGIQNLKVFEKYIVSALGEVTKAEFRQREDFKNELR

SEQ ID NO: 121 - protein, 984 aa, Campylobacter jejuni
  Campylobacter jejuni subsp. jejuni 1997-10
MARILAFDIGISSIGWAFSENDELKDCGVRIFTKAENPKTGESLALPRRLARSARKRLARRKARLNRLKHLIANEFKLNYEDYQSFDESLAKAYKGSLISPYELRFRALNELLSKQDFARVILHIAKRRGYDDIKNSDDKEKGAILKAIKQNEEKLANYQSVGEYLYKEYFQKFKENSKEFTNVRNKKESYERCIAQSFLKDELKLIFKKQREFGFSFSKKFEEEVLSVAFYKRALKDFSHLVGNCSFFTDEKRAPKNSPLAFMFVALTRIINLLNNLKNTEGILYTKDDLNALLNEVLKNGTLTYKQTKKLLGLSDDYEFKGEKGTYFIEFKKYKEFIKALGDHSLNQDDLNEIAKDITLIKDEIKLKKALAKYDLNQNQIDSLSKLEFKDHLNISFKALKLITPLMLEGKKYDEACNELNLKVAINEDKKDFLPAFNETYYKDEVTNPVVLRAIKEYRKVLNALLKKYGKVHKINIELAREVGKNYSQRAKIEKEQNENYKAKKDAELECEKLGLKINSKNILKLRLFKEQKEFCVYSGEKIKISDLQDEKMLEIDHIYPYSRSFDDSYMNKVLVFTKQNQEKLNQTPFEAFGNDSAKWQKIEVLAKNLPTKKQKRILDKNYKDKEQKDFKDRNLNDTRYIARLVLNYTKDYLDFLPLSDDENTKLNDTQKGSKVYVEAKSGMLTSALRHTWGFSTKDRNNHLHHAIDAVIIAYANNSIVKAFSDFKKEQESNSAELYAKKISELDYKNKRKFFEPFSGFRQKVLDKIDEIFVSKPERKKPSGALHEETFRKEEEFYQSYGGKEGVLKALELGKIRKVNGKIVKNGDMFRVDIFKHKKTNKFYAVPIYTMDFALKVLPNKAVARSKKGEIKDWILMDENYEFCFSLYKDSLILIQTKDMQEPEFVYYNAFTSSTVSLIVSKHDNKFETLSKNQKILFKNANEKEVIAKSIGIQNLKVFEKYIVSALGEVTKAEFRQREDFKK

SEQ ID NO: 122 - protein, 987 aa, Campylobacter jejuni
  Campylobacter jejuni subsp. jejuni 2008-1025
MARILAFDIGISSIGWAFSENDELKDCGVRIFTKAENPKTGESLALPRRLARSARKRLARRKARLNHLKHLIANEFKLNYEDYQSFDESLAKAYKGSLISPYELRFRALNELLSKQDFARVILHIAKRRGYDDIKNNGDEEKSEILKAIKQNEEKLVNYQSVGEYLYKEYFQKFKENSKEFINVRNKKESYERCIAQSFLKDELKLIFQKQREFGFSFSKKFEEEVLSVAFYKRALKDFSHLVGNCSFFTDEKRAPKNSPLAFMFVALTRIINLLNNLKNTEGILYTKDDLNTLLNEVLKNGTLTYKQTKKLLGLSDDYEFKGEKGTYFIEFKKYKEFIKALGEHNLSQDNLNEIAKDITLIKDEIKLKKALAKYDLNQNQIDSLSKLEFKDHLNISFKALKLITPLMLEGKKYDEAYNELNLKVAINEDKKDFLPAFNETYYKDEVTNPVVLRAIKEYRKVLNALLKKYGKVHKINIELAREVGKNHSQRAKIEKEQNENYKAKKDAELECEKLGLKINSKNILKLRLFKEQKEFCAYSGEKIKISDLQDEKMLEIDHIYPYSRSFDDSYMNKVLVFTKQNQEKLNQTPFEAFGNDSAKWQKIEVLAKNLPTKKQKRILDKNYKDKEQKDFKDRNLNDTRYIARLVLNYTKDYLDFLPLSDDENTKLNDTQKGSKVHVEAKSGMLTSALRHTWGFSAKDRNNHLHHAIDAVIIAYANNSIVKAFSDFKKEQESNSAELYAKKISELDYKNKRKFFEPFSGFRQKVLDKIDEIFVSKPERKKPSGALHEETFRKEEEFYQSYGGKEGVLKALELGKIRKVNGKIVKNGDMFRVDIFKHKKTNKFYAVPIYTMDFALKVLPNKAVVQGKDKKSGLIKDWILMDENYEFCFSLYKDSLILIQTKDMQEPELVYFNAFTSSTVSLIVSKHDNKFETLSKNQKILFKNANEKEVIAKSIGIQNLKVFEKYIVSALGEVTKAEFRQREDFKK

SEQ ID NO: 123 - protein, 984 aa, Campylobacter jejuni
  Campylobacter jejuni subsp. jejuni 2008-872
MARILAFDIGISSIGWAFSENDELKDCGVRIFTKVENPKTGESLALPRRLARSARKRLARRKARLNHLKHLIANEFKLNYEDYQSFDESLAKAYKGSLISPYELRFRALNELLSKQDFARVILHIAKRRGYDDIKNSDDKEKGAILKAIKQNEEKLANYQSVGEYLYKEYFQKFKENSKEFTNVRNKKESYERCIAQSFLKDELKLIFKKQREFGFSFSKKFEEEVLSVAFYKRALKDFSHLVGNCSFFTDEKRAPKNSPLAFMFVALTRIINLLNNLKNTEGILYTKDDLNALLNEVLKNGTLTYKQTKKLLGLSDDYEFKGEKGTYFIEFKKYKEFIKALGEHNLSQDDLNEIAKDITLIKDEIKLKKALAKYDLNQNQIDSLSKLEFKDHLNISFKALKLITPLMLEGKKYDEACNELNLKVAINEDKKDFLPAFNETYYKDEVTNPVVLRAIKEYRKVLNALLKKYGKVHKINIELAREVGKNHSQRAKIEKEQNENYKAKKDAELECEKLGLKINSKNILKLRLFKEQKEFCAYSGEKIKISDLQDEKMLEIDHIYPYSRSFDDSYMNKVLVFTKQNQEKLNKTPFEAFGNDSAKWQKIEVLAKNLPTKKQKRILDKNYKDKEQKDFKDRNLNDTRYIARLVLNYTKDYLDFLPLSDDENTKLNDTQKGSKVHVEAKSGMLTSALRHTWGFSTKDRNNHLHHAIDAVIIAYANNSIVKAFSDFKKEQESNSAELYAKKISELDYKNKRKFFEPFSGFRQKVLDKIDEIFVSKPERKKPSGALHEETFRKEEEFYQSYGGKEGVLKALELGKIRKVNGKIVKNGDMFRVDIFKHKKTNKFYAVPIYTMDFALKVLPNKAVARSKKGEIKDWILMDENYEFCFSLYKDSLILIQTKDMQEPEFVYYNAFTSSTVSLIVSKHDNKFETLSKNQKILFKNANEKEVIAKSIGIQNLKVFEKYIVSALGEVTKAEFRQREDFKK

SEQ ID NO: 124 - protein, 987 aa, Campylobacter jejuni
  Campylobacter jejuni subsp. jejuni 2008-979
MARILAFDIGISSIGWAFSENDELKDCGVRIFTKAENPKTGESLALPRRLARSARKRLARRKARLNHLKHLIANEFKLNYEDYQSFDESLAKAYKGSLISPYELRFRALNELLSKQDFARVILHIAKRRGYDDIKNSDDKEKGAILKAIKQNEEKLVNYQSVGEYLYKEYFQKFKENSKEFTNVRNKKESYERCIAQSFLKDELKLIFKKQREFGFSFSKKFEEEVLSVAFYKRALKDFSHLVGNCSFFTDEKRAPKNSPLAFMFVALTRIINLLNNLKNTEGILYTKDDLNALLNEVLKNGTLTYKQTKKLLGLSDDYEFKGEKGTYFIEFKKYKEFIKALGDHSLSQDDLNEIAKDITLIKDEIKLKKALAKYDLNQNQIDSLSKLEFKDHLNISFKALKLITPLMLEGKKYDEACNELNLKVAINEDKKDFLPAFNETYYKDEVTNPVVLRAIKEYRKVLNALLKKYGKVHKINIELAREVGKNYSQRAKIEKEQNENYKAKKDAELECEKLGLKINSKNILKLRLFKEQKEFCAYSGEKIKISDLQDEKMLEIDHIYPYSRSFDDSYMNKVLVFTKQNQEKLNQTPFEAFGNDSAKWQKIEVLAKNLPTKKQKRILDKNYKDKEQKDFKDRNLNDTRYIARLVLNYTKDYLDFLPLSDDENTKLNDTQKGSKVHVEAKSGMLTSALRHTWGFSAKDRNNHLHHAIDAVIIAYANNSIVKAFSDFKKEQESNSAELYAKKISELDYKNKRKFFEPFSGFRQKVLDKIDEIFVSKPERKKPSGALHEETFRKEEEFYQSYGGKEGVLKALELGKIRKVNGKIVKNGDMFRVDIFKHKKTNKFYAVPIYTMDFALKVLPNKAVARSEKGEIKDWILMDENYEFCFSLYKDSLILIQTKDMQEPELVYFNAFTSSTVSLIVSKHDNKFETLSKNQKILFKNANEKEVIAKSIGIQNLKVFEKYIVSALGEVTKAEFRQREDFKNELR

SEQ ID NO: 125 - protein, 965 aa, Campylobacter jejuni
  Campylobacter jejuni subsp. jejuni 2008-988
MKIIGFNLGIANIGWALRENDEIIDCGVRVFDIPENPKNGNSLALERRENKARMKIVKRKKARMLATKTFLKKELNVDLSKLFLIGSTQSIYELRAKALSSLISKEELSAIILHIAKHRGYDDSALKNENGTIIEALNKNKETMLKFKSVGEYFYKNFVQNKEVKKIRNTTEDYSNSVPRSLLKQELDLILDKQKELGLIKNADFKEKLFEIIFFKRPLKDFSNKIGNCIFFENEKRAAKNTISACEFVALGKVVNLLKSIEKDIGIVYEKDSINEIMSIILDKTSISYKKIRDILNLPQEINFKGLDYSKNNVENSKLVDLKKLNEFKKALGDGFANLDKDILDSIATDITLTKDTATLKEKLKNYNVLNAEQIEKLSELVFNDHINLSLKALKQIIPLMYEGKRYDEACELCNFTIAKNQEKSEYLPLFEKTRFAKDISSPVVIRAICEFRKLLNDIIRRYGSVHKIHLELTRDFGISFSDRKKIIKEIEQNEQSRIKALETIKELKLEETSKNIQIVRLFEDQKGICPYSGLKMDLNRLDELVIDYIRPYNRSLDDSYSNKVLTFKKLSDLKQGKTPFEAFGEDEKLWAEINERIKEYNGKKRFKIFDKFFKDKKPFDFTEQTLQDTRWLTKLVASYLNEYLSFLPISEDENTALGYGEKGSKQHVILSSGMITQMLRNFWYLGFKNHKDYKNNAMDAIIVAFTTNSIIFAFNNFKKELDLAKAEFYANKISESDYLLKRKFLPPFSGFKEQALEKVKNIFVSHSLKIKNKGTLHDLTPLKIKELKNTYGDLDLAVKLGKIRKYNDKYYANANGSLVRADLFVDKKNKFHAVSIYKADFSTKKLPNKTPATTSNGETKEGIEMNENYNFCMSLYKNTPISVKIKGMKEPIICYYHGFNTSGSKITYKKHDNNYHNLSEDEMVVFRKNDKESIAVGKILEIKKYSISPSGELSLIENEERKWF

SEQ ID NO: 126 - protein, 984 aa, Campylobacter jejuni
  Campylobacter jejuni subsp. jejuni 2008-988
MARILAFDIGISSIGWAFSENDELKDCGVRIFTKVENPKTGESLALPRRLARSARKRLARRKARLNHLKHLIANEFKLNYEDYQSFDESLAKAYKGSLISPYELRFRALNELLSKQDFARVILHIAKRRGYDDIKNSDDKEKGAILKAIKQNEEKLANYQSVGEYLYKEYFQKFKENSKEFTNVRNKKESYERCIAQSFLKDELKLIFKKQREFGFSFSKKFEEEVLSVAFYKRALKDFSHLVGNCSFFTDEKRAPKNSPLAFMFVTLTRIINLLNNLKNTEGILYTKDDLNALLNEVLKNGTLTYKQTKKLLGLSDDYEFKGEKGTYFIEFKKYKEFIKALGEHNLSQDDLNEIAKDITLIKDEIKLKKALAKYDLNQNQIDSLSKLEFKDHLNISFKALKLITPLMLEGKKYDEACNELNLKVAINEDKKDFLPAFNETYYKDEVTNPVVLRAIKEYRKVLNALLKKYGKVHKINIELAREVGKNHSQRAKIEKEQNENYKAKKDAELECEKLGLKINSKNILKLRLFKEQKEFCAYSGEKIKISDLQDEKMLEIDHIYPYSRSFDDSYMNKVLVFTKQNQEKLNKTPFEAFGNDSAKWQKIEVLAKNLPTKKQKRILDKNYKDKEQKDFKDRNLNDTRYIARLVLNYTKDYLDFLPLSDDENTKLNDTQKGSKVHVEAKSGMLTSALRHTWGFSTKDRNNHLHHAIDAVIIAYANNSIVKAFSDFKKEQESNSAELYAKKISELDYKNKRKFFEPFSGFRQKVLDKIDEIFVSKPERKKPSGALHEETFRKEEEFYQSYGGKEGVLKALELGKIRKVNGKIVKNGDMFRVDIFKHKKTNKFYAVPIYTMDFALKVLPNKAVARSKKGEIKDWILMDENYEFCFSLYKDSLILIQTKDMQEPEFVYYNAFTSSTVSLIVSKHDNKFETLSKNQKILFKNANEKEVIAKSIGIQNLKVFEKYIVSALGEVTKAEFRQREDFKK

SEQ ID NO: 127 - protein, 961 aa, Campylobacter jejuni
  Campylobacter jejuni subsp. jejuni 260.94
MARILAFDIGISSIGWAFSENDELKDCGVRIFTKAENPKTGESLALPRRLARSARKRLARRKARLNHLKHLIANEFKLNYEDYQSFDESLAKAYKGSLISPYELRFRALNELLSKQDFARVILHIAKRRGYDDIKNNGDEEKGKILKAIKQNEEKLVNYQSVGEYLYKEYFQKFKENSKEFINVRNKKESYERCITQSFLKYELKLIFQKQREFGFSFSKKFEEEVLSVAFYKRALKDFSHLVGNCSFFSDEKRAPKNSPLAFMFVALTRIINLLNNLKNTEGILYTKDDLNALLNEVLKNGTLTYKQTKKLLGLSDDYEFKGEKGTYFIEFKKYKEFIKALGEHNLSQDDLNEIAKDITLIKDEIKLKKALAKYDLNQNQIDSLSKLEFKDHLNIGFKALKLITPLMLEGKKYDEACNELNLKVAINEDKKDFLPAFNETYYKDEVTNPVVLRAIKEYRKVLNALLKKYGKVHKINIELAREVGKNHSQRAKIEKEQNENYKAKKDAELECEKLGLKINSKNILKLRLFKEQKEFCAYSGEKIKLSDLQDEKMLEIDHIYPYSRSFDDSYMNKVLVFTKQNQEKLNKTPFEAFGNDNVKWQKIEVLAKNLPEKKQKRILDKNYKDKEQKDFKDRNLNDTRYIARLVLNYTKDYLDFLPLSDDENTKLKGSKVHVEAKSGMLTSALRHTWGFSTKDRNNHLHHAIDAAIIAYANNSIVKDFSDFKKEQESNSAELYAKKISELDYKNKRKFFEPFSGFRQKVLDKIDEIFVSKPERKKPSGALHEETFRKEEEFYQSYGGKEGVLKALELGKIRKVNGKIVKNGDMFRVDIFKHKKTNKFYAVPIYTMDFALKVLPNKAVARSKKGEIKDWILMDENYEFCFSLYKDSLILIQTKDMQEPELVYFNAFTSSTVSLIVSKHDNKFETLSKNLKVFEKYIVSALGEVTKAEFRQREDFKNELR

SEQ ID NO: 128 - protein, 985 aa, Campylobacter jejuni
  Campylobacter jejuni subsp. jejuni 414
MAKILAFDIGISSIGWAFVENDELKDCGVRIFTKAENPKTGESLALPRRLARSARKRLARRKARLNHLKHLIANEFKLNYEDYQSFDESLAKAYKGTLISPYELRFKALNELLSKQDLARVILHIAKRRGYDNIKNSDDKEKGAILKAVKENEEKLANYKSVGEYLYKEYFQKFKENSKEFINVRNKKESYERCIAQSFLKDELKLIFQKQREFGFNFSKKFEEEVLSVAFYKRALKDFSHLVGNCSFFVDEKRAPKNSPLAFEFVALTRIVNLLNNLNKNNSYIKDDLNALLSEVLKNGTLTYKQTKKILGLSDDYEFKGQKGNYFIEFKKYKEFIKALCEHNLNQDDLNEIAKDITLVKDETKLKKALAKYDLNQNQIENLSKIEFKDHLNISFKALKLIVPLMREGKKYDEVCNELNLKTAINEDKKEFLPAFNETYYKDEVNNPVVLRAIKEYRKVLNSLLKKYGKVHKINIELAREVGKNHRERSKIEKEQNENFKAKKDAELECEKLGLKINSKNILKLRLFKEQKEFCVYSGEKIKISDLQDEKMLEIDHIYPYSRSFDDSYMNKVLVFTKQNQEKLNKTPFEAFGKDDVKWQKIETLAKNLPAKKQKRILDKNYKDKEQKDFKDRNLNDTRYIARLVLNYTKDYLEFLPLSDDENIKLNDTQKGSKVHVEAKSGMLTSVLRHTWGFSTKDRNNHLHHAIDAVIIAYANASVVKAFSDFKKEQENYTAELYAKKINELDFKNKRKFFEPFSNFRQKVLEKIDEIFVSKPERKKPSGALHEETFYKEEEFYKEYGGKEGVLKALELGKIRKVNGKIVSNANMFRVDIFKYKKTNKFYAVPIYTMDFALGILPNKAVVGGKDKQGIIKDWLLMDENYEFCFSLYKDSLILLQTKDMQEPELVYFKSFKSSTAGLVVSKHDNKFENLNENQKKLFKSANEKKVVAEGIGIQNLKVFEKYIVSALGEITKAEIKERENFKKK

SEQ ID NO: 129 - protein, 984 aa, Campylobacter jejuni
  Campylobacter jejuni subsp. jejuni 51037
MARILAFDIGISSIGWAFSENDELKDCGVRIFTKAENPKTGESLALPRRLARSARKRLARRKARLNHLKHLIANEFKLNYEDYQSFDESLAKAYKGSLISPYELRFRALNELLSKQDFARVILHIVKRRGYDDIKNSDDKEKGTILKAIKQNEEKLANYQSVGEYLYKEYFQKFKENSKEFTNVRNKKESYERCIAQSFLKDELKLIFKKQREFGFSFSKKFEEEVLSVAFYKRALKDFSHLVGNCSFFTDEKRAPKNSPLAFMFVALTRIINLLNNLKNTEGILYTKDDLNTLLNEVLKNGTLTYKQTKKLLGLSDDYEFKGEKGTYFIEFKKYKEFIKALGEHNLSQDDLNEIAKDITLIKDEIKLKKALAKYDLNQNQIDSLSKLEFKDHLNISFKALKLITPLMLEGKKYDEACNELNLKVAINEDKKDFLPAFNETYYKDEVTNPVVLRAIKEYRKVLNALLKKYGKVHKINIELAREVGKNYSQRAKIEKEQNENYKAKKDAELECEKLGLKINSKNILKLRLFKEQKEFCAYSGEKIKISDLQDEKMLEIDHIYPYSRSFDDSYMNKVLVFTKQNQEKLNQTPFEAFGNDSAKWQKIEVLAKNLPTKKQKRILDKNYKDKEQKDFKDRNLNDTRYIARLVLNYTKDYLDFLPLSDDENTKLNDTQKGSKVHVEAKSGMLTSALRHTWGFSAKDRNNHLHHAIDAVIIAYANNSIVKAFSDFKKEQESNSAELYAKKISELDYKNKRKFFEPFSGFRQKVLDKIDEIFVSKPERKKPSGALHEETFRKEEEFYQSYGGKEGVLKALELGKIRKVNGKIVKNGDMFRVDIFKHKKTNKFYAVPIYTMDFALKVLPNKAVARSKKGEIKDWILMDENYEFCFSLYKDSLILIQTKDMQEPEFVYYNAFTSSTVSLIVSKHDNKFETLSKNQKILFKNANEKEVIAKSIGIQNLKVFEKYIVSALGEVTKAEFRQREDFKK

SEQ ID NO: 130 - protein, 984 aa, Campylobacter jejuni
  Campylobacter jejuni subsp. jejuni 51494
MARILAFDIGISSIGWAFSENDELKDCGVRIFTKAENPKTGESLALPRRLARSARKRLARRKARLNHLKHLIANEFKLNYEDYQSFDESLAKAYKGSLISPYELRFRALNELLSKQDFARVILHIAKRRGYDDIKNSDDKEKGAILKAIKQNEEKLANYQSVGEYLYKEYFQKFKENSKEFTNVRNKKESYERCIAQSFLKDELKLIFKKQREFGFSFSKKFEEEVLSVAFYKRALKDFSHLVGNCSFFTDEKRAPKNSPLAFMFVALTRIINLLNNLKNTEGILYTKDDLNTLLNEVLKNGTLTYKQTKKLLGLSDDYEFKGEKGTYFIEFKKYKEFIKALGEHNLSQDDLNEIAKDITLIKDEIKLKKALAKYDLNQNQIDSLSKLEFKDHLNISFKALKLITPLMLEGKKYDEACNELNLKVAINEDKKDFLPAFNETYYKDEVTNPVVLRAIKEYRKVLNALLKKYGKVHKINIELAREVGKNYSQRAKIEKEQNENYKAKKDAELECEKLGLKINSKNILKLRLFKEQKEFCAYSGEKIKISDLQDEKMLEIDHIYPYSRSFDDSYMNKVLVFTKQNQEKLNKTPFEAFGNDSTKWQKIEVLAKNLPEKKQKRILDKNYKDKEQKDFKDRNLNDTRYIARLVLNYTKDYLDFLPLSDDENTKLNDTQKGLKVHVEAKSGMLTSALRHTWGFSAKDRNNHLHHAIDAVIIAYANNSIVKAFSDFKKEQESNSAELYAKKISELDYKNKRKFFEPFSGFRQKVLDKIDEIFVSKPERKKPSGALHEETFRKEEEFYQSYGGKEGVLKALELGKIRKVNGKIVKNGDMFRVDIFKHKKTNKFYAVPIYTMDFALKVLPNKAVARSKKGEIKDWILMDENYEFCFSLYKDSLILIQTKDMQEPEFVYYNAFTSSTVSLIVSKHDNKFETLSKNQKILFKNANEKEVIAKSIGIQNLKVFEKYIVSALGEVTKAEFRQREDFKK

SEQ ID NO: 131 - protein, 987 aa, Campylobacter jejuni
  Campylobacter jejuni subsp. jejuni 53161
MARILAFDIGISSIGWAFSENDELKDCGVRIFTKAENPKTGESLALPRRLARSARKRLARRKARLNHLKHLIANEFKLNYEDYQSFDEGLAKAYKGSLISPYELRFRALNELLSKQDFARVILHIAKRRGYDDIKNNGDEEKSEILKAIKQNEEKLVNYQSVGEYLYKEYFQKFKENSKEFINVRNKKESYERCIAQSFLKDELKLIFQKQREFGFSFSKKFEEEVLSVAFYKRALKDFSHLVGNCSFFTDEKRAPKNSPLAFMFVALTRIINLLNNLKNTEGILYTKDDLNTLLNEVLKNGTLTYKQTKKLLGLSDDYEFKGEKGTYFIEFKKYKEFIKALGEHNLSQDNLNEIAKDITLIKDEIKLKKALAKYDLNQNQIDSLSKLEFKDHLNISFKALKLITPLMLEGKKYDEAYNELNLKVAINEDKKDFLPAFNETYYKDEVTNPVVLRAIKEYRKVLNALLKKYGKVHKINIELAREVGKNHSQRAKIEKEQNENYKAKKDAELECEKLGLKINSKNILKLRLFKEQKEFCAYSGEKIKISDLQDEKMLEIDHIYPYSRSFDDSYMNKVLVFTKQNQEKLNQTPFEAFGNDSAKWQKIEVLAKNLPTKKQKRILDKNYKDKEQKDFKDRNLNDTRYIARLVLNYTKDYLDFLPLSDDENTKLNDTQKGSKVHVEAKSGMLTSALRHTWGFSAKDRNNHLHHAIDAVIIAYANNSIVKAFSDFKKEQESNSAELYAKKISELDYKNKRKFFEPFSGFRQKVLDKIDEIFVSKPERKKPSGALHEETFRKEEEFYQSYGGKEGVLKALELGKIRKVNGKIVKNGDMFRVDIFKHKKTNKFYAVPIYTMDFALKVLPNKAVVQGKDKKSGLIKDWILMDENYEFCFSLYKDSLILIQTKDMQEPELVYFNAFTSSTVSLIVSKHDNKFETLSKNQKILFKNANEKEVIAKSIGIQNLKVFEKYIVSALGEVTKAEFRQREDFKK

SEQ ID NO: 132 - protein, 984 aa, Campylobacter jejuni
  Campylobacter jejuni subsp. jejuni 60004
MARILAFDIGISSIGWAFSENDELKDCGVRIFTKAENPKTGESLALPRRLARSARKRLARRKARLNHLKHLIANEFKLNYEDYQSFDESLAKAYKGSLISPYELRFRALNELLSKQDFARVILHIAKRRGYDDIKNNGDEEKGKILKAIKQNEEKLVNYQSVGEYLYKEYFQKFKENSKEFINVRNKKESYERCITQSFLKYELKLIFQKQREFGFSFSKKFEEEVLSVAFYKRALKDFSHLVGNCSFFTDEKRAPKNSPLAFMFVALTRIINILNNLKNTEGILYTKDDLNALLNEVLKNGTLTYKQTKKLLGLSDDYEFKGEKGTYFIEFKKYKEFIKALGEHNLSQDDLNEIAKDITLIKDEIKLKKALAKYDLNQNQIDSLSKLEFKDHLNISFKALKLITPLMLEGKKYDEACNELNLKVAINEDKKDFLPAFNETYYKDEVTNPVVLRAIKEYRKILNALLKKYGKVHKINIELAREVGKNHSQRAKIEKEQNENYKAKKDAEIECEKLGLKINSKNILKLRLFKEQKEFCAYSGEKIKISDLQDEKMLEIDHIYPYSRSFDDSYMNKVLVFTKQNQEKLNQTPFEAFGNDSAKWQKIEVLAKNLPTKKQKRILDKNYKDKEQKDFKDRNLNDTRYIARLVLNYTKDYLDFLPLSDDENTKLNDTQKGSKVHVEAKSGMLTSALRHTWGFSAKDRNNHLHHAIDAVIIAYANNSIVKAFSDFKKEQESNSAELYAKKISELDYKNKRKFFEPFSGFRQKVLDKIDEIFVSKPERKKPSGALHEETFRKEEEFYQSYGGKEGVLKALELGKIRKVNGKIVKNGDMFRVDIFKHKKTNKFYAVPIYTMDFALKVLPNKAVARSKKGEIKDWILMDENYEFCFSLYKDSLILIQTKDMQEPEFVYYNAFTSSTVSLIVSKHDNKFETLSKNQKILFKNANEKEVIAKSIGIQNLKVFEKYIVSALGEVTKAEFRQREDFKK

SEQ ID NO: 133 - protein, 984 aa, Campylobacter jejuni
MARILAFDIGISSIGWAFSENDELKDCGVRIFTKAENPKTGESLALPRRLARSARKRLARRKARLNHLKHLIANEFKLNYEDYQSFDESLAKAYKGSLISPYELRFRALNELLSKQDFARVILHIAKRRGYDDIKNNGDEEKSEILKAIKQNEEKLVNYQSVGEYLYKEYFQKFKENSKEFINVRNKKESYERCITQSFLKDELKLIFQKQREFGFSFSKKFEEEVLSVAFYKRALKDFSHLVGNCSFFTDEKRAPKNSPLAFMFVALTRIINILNNLKNTEGILYTKDDLNALLNEVLKNGTLTYKQTKKLLGLSDDYEFKGEKGTYFIEFKKYKEFIKALGEHNLSQDDLNEIAKDITLIKDEIKLKKALAKYDLNQNQIDSLSKLEFKDHLNISFKALKLITPLMLEGKKYDEACNELNLKVAINEDKKDFLPAFNETYYKDEVTNPVVLRAIKEYRKILNALLKKYGKVHKINIELAREVGKNHSQRAKIEKEQNENYKAKKDAEIECEKLGLKINSKNILKLRLFKEQKEFCAYSGEKIKLSDLQDEKMLEIDHIYPYSRSFDDSYMNKVLVFTKQNQEKLNKTPFEAFGNDSTKWQKIEVLAKNLPEKKQKRILDKNYKDKEQKDFKDRNLNDTRYIARLVLNYTKDYLDFLPLSDDENTKLNDTQKGSKVHVEAKSGMLTSALRHTWGFSAKDRNNHLHHAIDAAIIAYANNSIVKAFSDFKKEQESNSVELYAKKISELDYKNKRKFFEPFSGFRQKVLDKIDEIFVSKPERKKPSGALHEETFRKEEEFYQSYGGKEGVLKALELGKIRKVNGKIVKNGDMFRVDIFKHKKTNKFYAVPIYTMDFALKVLPNKAVARSKKGEIKDWILMDENYEFCFSLYKDSLILIQTKDMQEPELVYFNAFTSSTVSLIVSKHDNKFETLSKNQKILFKNANEKEVIAKSIGIQNLKVFEKYIVSALGEVTKAEFRQREDFKK

SEQ ID NO: 134 - protein, 984 aa, Campylobacter jejuni
  Campylobacter jejuni subsp. jejuni 84-25
MVRILAFDIGISSIGWAFSENDELKDCGVRIFTKVENPKTGESLALPRRLARSARKRLARRKARLNHLKHLIANEFKLNYEDYQSFDESLAKAYKGSLISPYELRFRALNELLSKQDFARVILHIAKRRGYDDIKNSDDKEKGAILKAIKQNEEKLANYQSVGEYLYKEYFQKFKENSKEFTNVRNKKESYERCIAQSFLKDELKLIFKKQREFGFSFSKKFEEEVLSVAFYKRALKDFSHLVGNCSFFTDEKRAPKNSPLAFMFVALTRIINLLNNLKNTEGILYTKDDLNALLNEVLKNGTLTYKQTKKLLGLSDDYEFKGEKGTYFIEFKKYKEFIKALGEHNLSQDDLNEIAKDITLIKDEIKLKKALAKYDLNQNQIDSLSKLEFKDHLNISFKALKLITPLMLEGKKYDEACNELNLKVAINEDKKDFLPAFNETYYKDEVTNPVVLRAIKEYRKVLNALLKKYGKVHKINIELAREVGKNHSQRAKIEKEQNENYKAKKDAELECEKLGLKINSKNILKLRLFKEQKEFCAYSGEKIKISDLQDEKMLEIDHIYPYSRSFDDSYMNKVLVFTKQNQEKLNKTPFEAFGNDSAKWQKIEVLAKNLPTKKQKRILDKNYKDKEQKDFKDRNLNDTRYIARLVLNYTKDYLDFLPLSDDENTKLNDTQKGSKVHVEAKSGMLTSALRHTWGFSTKDRNNHLHHAIDAVIIAYANNSIVKAFSDFKKEQESNSAELYAKKISELDYKNKRKFFEPFSGFRQKVLDKIDEIFVSKPERKKPSGALHEETFRKEEEFYQSYGGKEGVLKALELGKIRKVNGKIVKNGDMFRVDIFKHKKTNKFYAVPIYTMDFALKVLPNKAVARSKKGEIKDWILMDENYEFCFSLYKDSLILIQTKDMQEPEFVYYNAFTSSTVSLIVSKHDNKFETLSKNQKILFKNANEKEVIAKSIGIQNLKVFEKYIVSALGEVTKAEFRQREDFKK

SEQ ID NO: 135 - protein, 984 aa, Campylobacter jejuni
  Campylobacter jejuni subsp. jejuni 87459
MARILAFDIGISSIGWAFSENDELKDCGVRIFTKAENPKTGESLALPRRLARSARKRLARRKARLNHLKHLIANEFKLNYEDYQSFDESLAKAYKGSLISPYELRFRALNELLSKQDFARVILHIAKRRGYDDIKNSDDKEKGAILKAIKQNEEKLANYQSVGEYLYKEYFQKFKENSKEFTNVRNKKESYERCIAQSFLKDELKLIFKKQREFGFSFSKKFEEEVLSVAFYKRALKDFSHLVGNCSFFTDEKRAPKNSPLAFMFVALTRIINLLNNLKNTEGILYTKDDLNTFLNEVLKNGTLTYKQTKKLLGLSDDYEFKGEKGTYFIEFKKYKEFIKALGDHNLSQDDLNEIAKDITLIKDEIKLKKALAKYDLNQNQIDSLSKLEFKDHLNISFKALKLITPLMLEGKKYDEACNELNLKVAINEDKKDFLPAFNETYYKDEVTNPVVLRAIKEYRKVLNALLKKYGKVHKINIELAREVGKNHSQRAKIEKEQNENYKAKKDAELECEKLGLKINSKNILKLRLFKEQKEFCAYSGEKIKISDLQDEKMLEIDHIYPYSRSFDDSYMNKVLVFTKQNQEKLNKTPFEAFGNDSAKWQKIEVLAKNLPTKKQKRILDKNYKDKEQKDFKDRNLNDTRYIARLVLNYTKDYLDFLPLSDDENTKLNDTQKGSKVHVEAKSGMLTSALRHTWGFSTKDRNNHLHHAIDAVIIAYANNSIVKAFSDFKKEQESNSAELYAKKISELDYKNKRKFFEPFSGFRQKVLDKIDEIFVSKPERKKPSGALHEETFRKEEEFYQSYGGKEGVLKALELGKIRKVNGKIVKNGDMFRVDIFKHKKTNKFYAVPIYTMDFALKVLPNKAVARSKKGEIKDWILMDENYEFCFSLYKDSLILIQTKDMQEPEFVYYNAFTSSTVSLIVSKHDNKFETLSKNQKILFKNANEKEVIAKSIGIQNLKVFEKYIVSALGEVTKAEFRQREDFKK

SEQ ID NO: 136 - protein, 984 aa, Campylobacter jejuni
  Campylobacter jejuni subsp. jejuni ATCC 33560
MARILAFDIGISSIGWAFSENDELKDCGVRIFTKAENPKTGESLALPRRLARSARKRLARRKARLNHLKHLIANEFKLNYEDYQSFDESLAKAYKGSLISPYELRFRALNELLSKQDFARVILHIAKRRGYDDIKNSDDKEKGAILKAIKQNEEKLANYQSVGEYLYKEYFQKFKENSKEFTNVRNKKESYERCIAQSFLKDELKLIFKKQREFGFSFSKKFEEEVLSVAFYKRALKDFSHLVGNCSFFTDEKRAPKNSPLAFMFVALTRIINLLNNLKNTEGILYTKDDLNALLNEVLKNGTLTYKQTKKLLGLSDDYEFKGEKGTYFIEFKKYKEFIKALGDHSLSQDDLNEIAKDITLIKDEIKLKKALAKYDLNQNQIDSLSKLEFKDHLNISFKALKLITPLMLEGKKYDEACNELNLKVAINEDKKDFLPAFNETYYKDEVTNPVVLRAIKEYRKVLNALLKKYGKVHKINIELAREVGKNYSQRAKIEKEQNENYKAKKDAELECEKLGLKINSKNILKLRLFKEQKEFCAYSGEKIKISDLQDEKMLEIDHIYPYSRSFDDSYMNKVLVFTKQNQEKLNQTPFEAFGNDSAKWQKIEVLAKNLPTKKQKRILDKNYKDKEQKNFKDRNLNDTRYIARLVLNYTKDYLDFLPLSDDENTKLNDTQKGSKVHVEAKSGMLTSALRHTWGFSAKDRNNHLHHTIDAVIIAYANNSIVKAFSDFKKEQESNSAELYAKKISELDYKNKRKFFEPFSGFRQKVLDKIDEIFVSKPERKKPSGALHEETFRKEEEFYQSYGGKEGVLKALELGKIRKVNGKIVKNGDMFRVDIFKHKKTNKFYAVPIYTMDFALKVLPNKAVARSKKGEIKDWILMDENYEFCFSLYKDSLILIQTKDMQEPEFVYYNAFTSSTVSLIVSKHDNKFETLSKNQKILFKNANEKEVIAKSIGIQNLKVFEKYIVSALGEVTKAEFRQREDFKK

SEQ ID NO: 137 - protein, 987 aa, Campylobacter jejuni
  Campylobacter jejuni subsp. jejuni CF93-6
MARILAFDIGISSIGWAFSENDELKDCGVRIFTKVENPKTGESLALPRRLARSARKRLARRKARLNHLKHLIANEFKLNYEDYQSFDESLAKAYKGSLISPYELRFRALNELLSKQDFARVILHIAKRRGYDDIKNSDDKEKGAILKAIKQNEEKLANYQSVGEYLYKEYFQKFKENSKEFTNVRNKKESYERCIAQSFLKDELKLIFKKQREFGFSFSKKFEEEVLSVAFYKRALKDFSHLVGNCSFFTDEKRVPKNSPLAFMFVALTRIINLLNNLKNTEGILYTKDDLNALLNEVLKNGTLTYKQTKKLLGLSDDYEFKGEKGTYFIEFKKYKEFIKALGEHNLSQDDLNEIAKDITLIKDEIKLKKALAKYDLNQNQIDSLSKLEFKDHLNISFKALKLITPLMLEGKKYDEACNELNLKVAINEDKKDFLPAFNETYYKDEVTNPVVLRAIKEYRKVLNALLKKYGKVHKINIELAREVGKNHSQRAKIEKEQNENYKAKKDAELECEKLGLKINSKNILKLRLFKEQKEFCAYSGEKIKISDLQDEKMLEIDHIYPYSRSFDDSYMNKVLVFTKQNQEKLNQTPFEAFGNDSAKWQKIEVLAKNLPTKKQKRILDKNYKDKEQKNFKDRNLNDTRYIARLVLNYTKDYLDFLPLSDDENTKLNDTQKGSKVHVEAKSGMLTSALRHTWGFSAKDRNNHLHHAIDAVIIAYANNSIVKAFSDFKKEQESNSAELYAKKISELDYKNKRKFFEPFSGFRQKVLDKIDEIFVSKPERKKPSGALHEETFRKEEEFYQSYGGKEGVLKALELGKIRKVNGKIVKNGDMFRVDIFKHKKTNKFYGVPIYTMDFALKVLPNKAVARSKKGEIKDWILMDENYEFCFSLYKDSLILIQTKDMQEPEFVYYNAFTSSTVSLIVSKHDNKFETLSKNQKILFKNANEKEVIAKSIGIQNLKVFEKYIVSALGEVTKAEFRQREDFKNELR

SEQ ID NO: 138 - protein, 984 aa, Campylobacter jejuni
  Campylobacter jejuni subsp. jejuni CG8486
MARILAFDIGISSIGWAFSENDELKDCGVRIFTKAENPKTGESLALPRRLARSARKRLARRKARLNHLKHLIANEFKLNYEDYQSFDESLAKAYKGSLISPYELRFRALNELLSKQDFARVILHIAKRRGYDDIKNSDDKEKGAILKAIKQNEEKLANYQSVGEYLYKEYFQKFKENSKEFTNVRNKKESYERCIAQSFLKDELKLIFKKQREFGFSFSKKFEEEVLSVAFYKRALKDFSHLVGNCSFFTDEKRAPKNSPLAFMFVALTRIINLLNNLKNTEGILYTKDDLNALLNEVLKNGTLTYKQTKKLLGLSDDYEFKGEKGTYFIEFKKYKEFIKALGDHSLSQDDLNEIAKDITLIKDEIKLKKALAKYDLNQNQIDSLSKLEFKDHLNISFKALKLITPLMLEGKKYDEACNELNLKVAINEDKKDFLPAFNETYYKDEVTNPVVLRAIKEYRKVLNALLKKYGKVHKINIELAREVGKNYSQRAKIEKEQNENYKAKKDAELECEKLGLKINSKNILKLRLFKEQKEFCAYSGEKIKISDLQDEKMLEIDHIYPYSRSFDDSYMNKVLVFTKQNQEKLNQTPFEAFGNDSAKWQKIEVLAKNLPTKKQKRILDKNYKDKEQKDFKDRNLNDTRYIARLVLNYTKDYLDFLPLSDDENTKLNDTQKGSKVHVEAKSGMLTSALRHTWGFSAKDRNNHLHHAIDAVIIAYANNSIVKAFSDFKKEQESNSAELYAKKISELDYKNKRKFFEPFSGFRQKVLDKIDEIFVSKPERKKPSGALHEETFRKEEEFYQSYGGKEGVLKALELGKIRKVNGKIVKNGDMFRVDIFKHKKTNKFYAVPIYTMDFALKVLPNKAVARSKKGEIKDWILMDENYEFCFSLYKDSLILIQTKDMQEPEFVYYNAFTSSTVSLIVSKHDNKFETLSKNQKILFKNANEKEVIAKSIGIQNLKVFEKYIVSALGEVTKAEFRQREDFKK

SEQ ID NO: 139 - protein, 984 aa, Campylobacter jejuni
  Campylobacter jejuni subsp. jejuni HB93-13
MARILAFDIGISSIGWAFSENDELKDCGVRIFTKVENPKTGESLALPRRLARSARKRLARRKARLNHLKHLIANEFKLNYEDYQSFDESLAKAYKGSLISPYELRFRALNELLSKQDFARVILHIAKRRGYDDIKNSDDKEKGAILKAIKQNEEKLANYQSVGEYLYKEYFQKFKENSKEFTNVRNKKESYERCIAQSFLKDELKLIFKKQREFGFSFLKKFEEEVLSVAFYKRALKDFSHLVGNCSFFTDEKRAPKNSPLAFMFVALTRIINLLNNLKNTEGILYTKDDLNALLNEVLKNGTLTYKQTKKLLGLSDDYEFKGEKGTYFIEFKKYKEFIKALGEHNLSQDDLNEIAKDITLIKDEIKLKKALAKYDLNQNQIDSLSKLEFKDHLNISFKALKLITPLMLEGKKYDEAYNELNLKVAINEDKKDFLPAFNETYYKDEVTNPVVLRAIKEYRKVLNALLKKYGKVHKINIELAREVGKNHSQRAKIEKEQNENYKAKKDAELECEKLGLKINSKNILKLRLFKEQKEFCAYSGEKIKISDLQDEKMLEIDHIYPYSRSFDDSYMNKVLVFTKQNQEKLNQTPFEAFGNDSAKWQKIEVLAKNLPTKKQKRILDKNYKDKEQKDFKDRNLNDTRYIARLVLNYTKDYLDFLPLSDDENTKLNDTQKGSKVHVEAKSGMLTSALRHTWGFSAKDRNNHLHHAIDAVIIAYANNSIVKAFSDFKKEQESNSAELYAKKISELDYKNKRKFFEPFSGFRQKVLDKIDEIFVSKPERKKPSGALHEETFRKEEEFYQSYGGKEGVLKALELGKIRKVNGKIVKNGDMFRVDIFKHKKTNKFYAVPIYTMDFALKVLPNKAVARSKKGEIKDWILMDENYEFCFSLYKDSLILIQTKDMQEPELVYFNAFTSSTVSLIVSKHDNKFETLSKNQKILFKNANEKEVIAKSIGIQNLKVFEKYIVSALGEVTKAEFRQREDFKK

SEQ ID NO: 140 - protein, 987 aa, Campylobacter jejuni
  Campylobacter jejuni subsp. jejuni LMG 23210
MARILAFDIGISSIGWAFSENDELKDCGVRIFTKAENPKTGESLALPRRLARSARKRLARRKARLNHLKHLIANEFKLNYEDYQSFDESLAKAYKGSLISPYELRFRALNELLSKQDFARVILHIAKRRGYDDIKNSDDKEKGAILKAIKQNEEKLANYQSVGEYLYKEYFQKFKENSKEFTNVRNKKESYERCIAQSFLKDELKLIFKKQREFGFSFSKKFEEEVLSVAFYKRALKDFSHLVGNCSFFTDEKRAPKNSPLAFMFVALTRIINLLNNLKNTEGILYTKDDLNALLNEVLKNGTLTYKQTKKLLGLSDDYEFKGEKGTYFIEFKKYKEFIKALGDHSLSQDDLNEIAKDITLIKDEIKLKKALVKYDLNQNQIDSLSKLEFKDHLNISFKALKLITPLMLEGKKYDEACNELNLKVAINEDKKDFLPAFNETYYKDEVTNPVVLRAIKEYRKVLNALLKKYGKVHKINIELAREVGKNYSQRAKIEKEQNENYKAKKDAELECEKLGLKINSKNILKLRLFKEQKEFCAYSGEKIKISDLQDEKMLEIDHIYPYSRSFDDSYMNKVLVFTKQNQEKLNQTPFEAFGNDSAKWQKIEVLAKNLPTKKQKRILDKNYKDKEQKDFKDRNLNDTRYIARLVLNYTKDYLDFLPLSDDENTKLNDTQKGSKVHVEAKSGMLTSALRHTWGFSAKDRNNHLHHAIDAVIIAYANNSIVKAFSDFKKEQESNSAELYAKKISELDYKNKRKFFEPFSGFRQKVLDKIDEIFVSKPERKKPSGALHEETFRKEEEFYQSYGGKEGVLKALELGKIRKVNGKIVKNGDMFRVDIFKHKKTNKFYAVPIYTMDFALKVLPNKAVARSKKGEIKDWILMDENYEFCFSLYKDSLILIQTKDMQEPELVYFNAFTSSTVSLIVSKHDNKFETLSKNQKILFKNANEKEVIAKSIGIQNLKVFEKYIVSALGEVTKAEFRQREDFKNELR

SEQ ID NO: 141 - protein, 984 aa, Campylobacter jejuni
  Campylobacter jejuni subsp. jejuni LMG 23211
MARILAFDIGISSIGWAFSENDELKDCGVRIFTKAENPKTGESLALPRRLARSARKRLARRKARLNHLKHLIANEFKLNYEDYQSFDESLAKAYKGSLISPYELRFRALNELLSKQDFARVILHIAKRRGYDDIKNNGDEEKSEILKAIKQNEEKLVNYQSVGEYLYKEYFQKFKENSKEFINVRNKKESYERCITQSFLKDELKLIFQKQREFGFSFSKKFEEEVLSVAFYKRALKDFSHLVGNCSFFTDEKRAPKNSPLAFMFVALTRIINLLNNLKNTEGILYTKDDLNALLNEVLKNGTLTYKQTKKLLGLSDDYEFKGEKGTYFIEFKKYKEFIKALDEHSLSQDDLNEIAKDITLIKDEIKLKKALAKYDLNQNQIDSLSKLEFKDHLNISFKALKLITPLMLEGKKYDEACNELNLKVAINEDKKDFLPAFNETYYKDEVTNPVVLRAIKEYRKILNALLKKYGKVHKINIELAREVGKNHSQRAKIEKEQNENYKAKKDAEIECEKLGLKINSKNILKLRLFKEQKEFCAYSGEKIKISDLQDEKMLEIDHIYPYSRSFDDSYMNKVLVFTKQNQEKLNKTPFEAFGNDGVKWQKIEVLAKNLPEKKQKRILDKNYKDKEQKDFKDRNLNDTRYIARLVLNYTKDYLDFLPLSDDENTKLNDTQKGSKVHVEAKSGMLTSALRHTWGFSTKDRNNHLHHAIDAAIIAYANNSIVKAFSDFKKEQESNSAELYAKKISELDYKNKRKFFEPFSGFRQKVLDKIDEIFVSKPERKKPSGALHEETFRKEEEFYQSYGGKEGVLKALELGKIRKVNGKIVKNGDMFRVDIFKHKKTNKFYAVPIYTMDFALKVLPNKAVARSKKGEIKDWILMDENYEFCFSLYKDSLILIQTKDMQEPELVYFNAFTSSTVSLVVSKHDNKFETLSKNQKILFKNANEKEVIAKSIGIQNLKVFEKYIVSALGEVTKAEFRQREDFKK

SEQ ID NO: 142 - protein, 984 aa, Campylobacter jejuni
  Campylobacter jejuni subsp. jejuni LMG 23263
MARILAFDIGISSIGWAFSENDELKDCGVRIFTKAENPKTGESLALPRRLARSARKRLARRKARLNHLKHLIANEFKLNYEDYQSFDESLAKAYKGSLISPYELRFRALNELLSKQDFARVILHIVKRRGYDDIKNSDDKEKGAILKAIKQNEEKLANYQSVGEYLYKEYFQKFKENSKEFTNVRNKKESYERCIAQSFLKDELKLIFKKQREFGFSFSKKFEEEVLSVAFYKRALKDFSHLVGNCSFFTDEKRAPKNSPLAFMFVALTRIINLLNNLKNTEGILYTKDDLNTLLNEVLKNGTLTYKQTKKLLGLSDDYEFKGEKGTYFIEFKKYKEFIKALGDHSLSQDDLNEIAKDITLIKDEIKLKKALAKYDLNQNQIDSLSKLEFKDHLNISFKALKLITPLMLEGKKYDEACNELNLKVAINEDKKDFLPAFNETYYKDEVTNPVVLRAIKEYRKVLNALLKKYGKVHKINIELAREVGKNHSQRAKIEKEQNENYKAKKDAEFECEKLGLKINSKNILKLRLFKEQKEFCAYSGEKIKISDLQDEKMLEIDHIYPYSRSFDDSYMNKVLVFTKQNQEKLNKTPFEAFGNDSAKWQKIEVLAKNLPTKKQKRILDKNYKDKEQKDFKDRNLNDTRYIARLVLNYTKDYLDFLPLSDDENTKLNDTQKGSKVHVEAKSGMLTSALRHTWGFSTKDRNNHLHHAIDAVIIAYANNSIVKAFSDFKKEQESNSAELYAKKISELDYKNKRKFFEPFSGFRQKVLDKIDEIFVSKPERKKPSGALHEETFRKEEEFYQSYGGKEGVLKALELGKIRKVNGKIVKNGDMFRVDIFKHKKTNKFYAVPIYTMDFALKVLPNKAVARSKKGEIKDWILMDENYEFCFSLYKDSLILIQTKDMQEPEFVYYNAFTSSTVSLIVSKHDNKFETLSKNQKILFKNANEKEVIAKSIGIQNLKVFEKYIVSALGEVTKAEFRQREDFKK

SEQ ID NO: 143 - protein, 984 aa, Campylobacter jejuni
  Campylobacter jejuni subsp. jejuni LMG 23264
MARILAFDIGISSIGWAFSENDELKDCGVRIFTKVENPKTGESLALPRRLARSARKRLARRKARLNHLKHLIANEFKLNYEDYQSFDESLAKAYKGSLISPYELRFRALNELLSKQDFARVILHIAKRRGYDDIKNSDDKEKGAILKAIKQNEEKLANYQSVGEYLYKEYFQKFKENSKEFTNVRNKKESYERCIAQSFLKDELKLIFKKQREFGFSFSKKFEEEVLSVAFYKRALKDFSHLVGNCSFFTDEKRAPKNSPLAFMFVALTRIINLLNNLKNTEGILYTKDDLNALLNEVLKNGTLTYKQTKKLLGLSDDYEFKGEKGTYFIEFKKYKEFIKALGEHNLSQDDLNEIAKDITLIKDEIKLKKALAKYDLNQNQIDSLSKLEFKDHLNISFKALKLITPLMLEGKKYDEACNELNLKVAINEDKKDFLPAFNETYYKDEVTNPVVLRAIKEYRKVLNALLKKYGKVHKINIELAREVGKNHSQRAKIEKEQNENYKAKKDAELECEKLGLKINSKNILKLRLFKEQKEFCAYSGEKIKISDLQDEKMLEIDHIYPYSRSFDDSYMNKVLVFTKQNQEKLNKTPFEAFGNDSAKWQKIEVLAKNLPTKKQKRILDKNYKDKEQKDFKDRNLNDTRYIARLVLNYTKDYLDFLPLSNDENTKLNDTQKGSKVHVEAKSGMLTSALRHTWGFSTKDRNNHLHHAIDAVIIAYANNSIVKAFSDFKKEQESNSAELYAKKISELDYKNKRKFFEPFSGFRQKVLDKIDEIFVSKPERKKPSGALHEETFRKEEEFYQSYGGKEGVLKALELGKIRKVNGKIVKNGDMFRVDIFKHKKTNKFYAVPIYTMDFALKVLPNKAVARSKKGEIKDWILMDENYEFCFSLYKDSLILIQTKDMQEPEFVYYNAFTSSTVSLIVSKHDNKFETLSKNQKILFKNANEKEVIAKSIGIQNLKVFEKYIVSALGEVTKAEFRQREDFKK

SEQ ID NO: 144 - protein, 987 aa, Campylobacter jejuni
  Campylobacter jejuni subsp. jejuni LMG 23269
MARILAFDIGISSIGWAFSENDELKDCGVRIFTKAENPKTGESLALPRRLARSARKRLARRKARLNHLKHLIANEFKLNYEDYQSFDESLAKAYKGSLISPYELRFRALNELLSKQDFARVILHIAKRRGYDDIKNNGDEEKSEILKAIKQNEEKLVNYQSVGEYLYKEYFQKFKENSKEFINVRNKKESYERCIAQSFLKDELKLIFQKQREFGFSFSKKFEEEVLSVAFYKRALKDFSHLVGNCSFFTDEKRAPKNSPLAFMFVALTRIINLLNNLKNTEGILYTKDDLNTLLNEVLKNGTLTYKQTKKLLGLSDDYEFKGEKGTYFIEFKKYKEFIKALGEHNLSQDNLNEIAKDITLIKDEIKLKKALAKYDLNQNQIDSLSKLEFKDHLNISFKALKLITPLMLEGKKYDEAYNELNLKVAINEDKKDFLPAFNETYYKDEVTNPVVLRAIKEYRKVLNALLKKYGKVHKINIELAREVGKNHSQRAKIEKEQNENYKAKKDAELECEKLGLKINSKNILKLRLFKEQKEFCAYSGEKIKISDLQDEKMLEIDHIYPYSRSFDDSYMNKVLVFTKQNQEKLNQTPFEAFGNDSAKWQKIEVLAKNLPTKKQKRILDKNYKDKEQKDFKDRNLNDTRYIARLVLNYTKDYLDFLPLSDDENTKLNDTQKGSKVHVEAKSGMLTSALRHTWGFSAKDRNNHLHHAIDAVIIAYANNSIVKAFSDFKKEQESNSAELYAKKISELDYKNKRKFFEPFSGFRQKVLDKIDEIFVSKPERKKPSGALHEETFRKEEEFHQSYGGKEGVLKALELGKIRKVNGKIVKNGDMFRVDIFKHKKTNKFYAVPIYTMDFALKVLPNKAVVQGKDKKSGLIKDWILMDENYEFCFSLYKDSLILIQTKDMQEPELVYFNAFTSSTVSLIVSKHDNKFETLSKNQKILFKNANEKEVIAKSIGIQNLKVFEKYIVSALGEVTKAEFRQREDFKK

SEQ ID NO: 145 - protein, 987 aa, Campylobacter jejuni
  Campylobacter jejuni subsp. jejuni LMG 23357
MARILAFDIGISSIGWAFSENDELKDCGVRIFTKAENPKTGESLALPRCLARSARKRLARRKARLNHLKHLIANEFKLNYEDYQSFDESLAKAYKGSLISPYELRFRALNELLSKQDFARVILHIAKRRGYDDIKNNGDEEKGEILKAIKQNEEKLVSYQSVGEYLYKEYFQKFKENSKEFINVRNKKESYERCIAQSFLKDELKLIFQKQRKFGFSFSKKFEEEVLSVAFYKRALKDFSHLVGNCSFFTDEKRAPKNSPLAFMFVALTRIINLLNNLKNTEGILYTKDDLNTLLNEVLKNGTLTYKQTKKLLGLSNDYEFKGEKGTYFIEFQKYKEFVKALGEHNLSQDDLNEIAKDITLIKDEIKLKKALAKYDLNQNQIDSLSKLEFKDHLNISFKALKLITPLMLEGKKYDEACNELNLKVAINEDKKDFLPAFNETYYKDEVTNPVVLRAIKEYRKVLNALLKKYGKVHKINIELAREVGKNHSQRAKIEKEQNENYKAKKDAELECEKLGLKINSKNILKLRLFKEQKEFCVYSGEKIKISDLQDEKMLEIDHIYPYSRSFDDSYMNKVLVFTKQNQEKLNKTPFETFGNDRVKWQKIEVLAKNLPTKKQKRILDKNYKDKEQKDFKDRNLNDTRYIARLVLNYTKDYLDFLPLSDDENTKLNDTQKGSKVHVEAKSGMLTSTLRHTWGFSTKDRNNHLHHAIDAAIIAYANNSIVKAFSDFKKEQESNTAELYAKKISELDYKNKRKFFEPFSGFRQKLLDKIDEIFVSKPERKKPSGALHEETFRKEEEFYQSYGGKEGVLKALELGKIRKVNGKIVSNGDMFRVDIFKHKKTNKFYAVPIYTMDFALKVLPNKAVVQGKDKKSGLIKDWILMDENYEFCFSLYKDSLILIQTKDMQEPELVYYERLDSSNASLTVSKHDNKFETLSKNQKILFKNANEKEVIAKSIGIQNLKVFEKYIVSALGEVTKAEFRQREDFKK

SEQ ID NO: 146 - protein, 984 aa, Campylobacter jejuni
  Campylobacter jejuni subsp. jejuni NCTC 11168 = ATCC 700819
MARILAFDIGISSIGWAFSENDELKDCGVRIFTKVENPKTGESLALPRRLARSARKRLARRKARLNHLKHLIANEFKLNYEDYQSFDESLAKAYKGSLISPYELRFRALNELLSKQDFARVILHIAKRRGYDDIKNSDDKEKGAILKAIKQNEEKLANYQSVGEYLYKEYFQKFKENSKEFTNVRNKKESYERCIAQSFLKDELKLIFKKQREFGFSFSKKFEEEVLSVAFYKRALKDFSHLVGNCSFFTDEKRAPKNSPLAFMFVALTRIINLLNNLKNTEGILYTKDDLNALLNEVLKNGTLTYKQTKKLLGLSDDYEFKGEKGTYFIEFKKYKEFIKALGEHNLSQDDLNEIAKDITLIKDEIKLKKALAKYDLNQNQIDSLSKLEFKDHLNISFKALKLVTPLMLEGKKYDEACNELNLKVAINEDKKDFLPAFNETYYKDEVTNPVVLRAIKEYRKVLNALLKKYGKVHKINIELAREVGKNHSQRAKIEKEQNENYKAKKDAELECEKLGLKINSKNILKLRLFKEQKEFCAYSGEKIKISDLQDEKMLEIDHIYPYSRSFDDSYMNKVLVFTKQNQEKLNQTPFEAFGNDSAKWQKIEVLAKNLPTKKQKRILDKNYKDKEQKNFKDRNLNDTRYIARLVLNYTKDYLDFLPLSDDENTKLNDTQKGSKVHVEAKSGMLTSALRHTWGFSAKDRNNHLHHAIDAVIIAYANNSIVKAFSDFKKEQESNSAELYAKKISELDYKNKRKFFEPFSGFRQKVLDKIDEIFVSKPERKKPSGALHEETFRKEEEFYQSYGGKEGVLKALELGKIRKVNGKIVKNGDMFRVDIFKHKKTNKFYAVPIYTMDFALKVLPNKAVARSKKGEIKDWILMDENYEFCFSLYKDSLILIQTKDMQEPEFVYYNAFTSSTVSLIVSKHDNKFETLSKNQKILFKNANEKEVIAKSIGIQNLKVFEKYIVSALGEVTKAEFRQREDFKK

SEQ ID NO: 147 - protein, 983 aa, Campylobacter jejuni
  Campylobacter jejuni subsp. jejuni NW
MARILAFDIGISSIGWAFSENDELKDCGVRIFTKAENPKTGESLALPRRLARSARKRLARRKARLNHLKHLIANEFKLNYEDYQSFDESLAKAYKGSLISPYELRFRALNELLSKQDFARVILHIAKRRGYDDIKNSDDKEKGAILKAIKQNEEKLANYQSVGEYLYKEYFQKFKENSKEFTNVRNKKESYERCIAQSFLKDELKLIFKKQREFGFSFSKKFEEEVLSVAFYKRALKDFSHLVGNCSFFTDEKRAPKNSPLAFMFVALTRIINLLNNLKNTEGILYTKDDLNALLNEVLKNGTLTYKQTKKLLGLSDDYEFKGEKGTYFIEFKKYKEFIKALGEHNLSQDDLNEIAKDITLIKDEIKLKKALAKYDLNQNQIDSLSKLEFKDHLNISFKALKLVTPLMLEGKKYDEACNELNLKVAINEDKKDFLPAFNETYYKDEVTNPVVLRAIKEYRKVLNALLKKYGKVHKINIELAREVGKNHSQRAKIEKEQNENYKAKKDAELECEKLGLKINSKNILKLRLFKEQKEFCAYSGEKIKISDLQDEKMLEIDHIYPYSRSFDDSYMNKVLVFTKQNQEKLNQTPFEAFGNDSAKWQKIEVLAKNLPTKKQKRILDKNYKDKEQKNFKDRNLNDTRYIARLVLNYTKDYLDFLPLSDDENTKLNDTQKGSKVHVEAKSGMLTSALRHTWGFSAKDRNNHLHHAIDAVIIAYANNSIVKAFSDFKKEQESNSAELYAKKISELDYKNKRKFFEPFSGFRQKVLDKIDEIFVSKPERKKPSGALHEETFRKEEFYQSYGGKEGVLKALELGKIRKVNGKIVKNGDMFRVDIFKHKKTNKFYAVPIYTMDFALKVLPNKAVARSKKGEIKDWILMDENYEFCFSLYKDSLILIQTKDMQEPEFVYYNAFTSSTVSLIVSKHDNKFETLSKNQKILFKNANEKEVIAKSIGIQNLKVFEKYIVSALGEVTKAEFRQREDFKK

SEQ ID NO: 148 - protein, 987 aa, Campylobacter jejuni
MARILAFDIGISSIGWAFSENDELKDCGVRIFTKAENPKTGESLALPRRLARSARKRLARRKARLNHLKHLIANEFKLNYEDYQSFDESLAKAYKGSLISPYELRFRALNELLSKQDFARVILHIAKRRGYDDIKNNGDEEKSEILKAIKQNEEKLVNYQSVGEYLYKEYFQKFKENSKEFINVRNKKESYERCIAQSFLKDELKLIFQKQREFGFSFSKKFEEEVLSVAFYKRALKDFSHLVGNCSFFTDEKRAPKNSPLAFMFVALTRIINLLNNLKNTEGILYTKDDLNTLLNEVLKNGTLTYKQTKKLLGLSDDYEFKGEKGTYFIEFKKYKEFIKALGEHNLSQDNLNEIAKDITLIKDEIKLKKALAKYDLNQNQIDSLSKLEFKDHLNISFKALKLITPLMLEGKKYDEAYNELNLKVAINEDKKDFLPAFNETYYKDEVTNPVVLRAIKEYRKVLNALLKKYGKVHKINIELAREVGKNHSQRAKIEKEQNENYKAKKDAELECEKLGLKINSKNILKLRLFKEQKEFCAYSGEKIKISDLQDEKMLEIDHIYPYSRSFDDSYMNKVLVFTKQNQEKLNQTPFEAFGNDSAKWQKIEVLAKNLPTKKQKRILDKNYKDKEQKDFKDRNLNDTRYIARLVLNYTKDYLDFLPLSDDENTKLNDTQKGSKVHVEAKSGMLTSALRHTWGFSAKDRNNHLHHAIDAVIIAYANNSIVKAFSDFKKEQESNSAELYAKKISELDYKNKRKFFEPFSGFRQKVLDKIDEIFVSKPERKKPSGALHEETFRKEEEFYQSYGGKEGVLKALELGKIRKVNGKIVKNGDMFRVDIFKHKKTNKFYPVPIYTMDFALKVLPNKAVVQGKDKKSGLIKDWILMDENYEFCFSLYKDSLILIQTKDMQEPELVYFNAFTSSTVSLIVSKHDNKFETLSKNQKILFKNANEKEVIAKSIGIQNLKVFEKYIVSALGEVTKAEFRQREDFKK

SEQ ID NO: 149 - protein, 1003 aa, Campylobacter lari
MRILGFDIGINSIGWAFVENDELKDCGVRIFTKAENPKNKESLALPRRNARSSRRRLKRRKARLIAIKRILAKELKLNYKDYVAADGELPKAYEGSLASVYELRYKALTQNLETKDLARVILHIAKHRGYMNKNEKKSNDAKKGKILSALKNNALKLENYQSVGEYFYKEFFQKYKKNTKNFIKIRNTKDNYNNCVLSSDLEKELKLILEKQKEFGYNYSEDFINEILKVAFFQRPLKDFSHLVGACTFFEEEKRACKNSYSAWEFVALTKIINEIKSLEKISGEIVPTQTINEVLNLILDKGSITYKKFRSCINLHESISFKSLKYDKENAENAKLIDFRKLVEFKKALGVHSLSRQELDQISTHITLIKDNVKLKTVLEKYNLSNEQINNLLEIEFNDYINLSFKALGMILPLMREGKRYDEACEIANLKPKTVDEKKDFLPAFCDSIFAHELSNPVVNRAISEYRKVLNALLKKYGKVHKIHLELARDVGLSKKAREKIEKEQKENQAVNAWALKECENIGLKASAKNILKLKLWKEQKEICIYSGNKISIEHLKDEKALEVDHIYPYSRSFDDSFINKVLVFTKENQEKLNKTPFEAFGKNIEKWSKIQTLAQNLPYKKKNKILDENFKDKQQEDFISRNLNDTRYIATLIAKYTKEYLNFLLLSENENANLKSGEKGSKIHVQTISGMLTSVLRHTWGFDKKDRNNHLHHALDAIIVAYSTNSIIKAFSDFRKNQELLKARFYAKELTSDNYKHQVKFFEPFKSFREKILSKIDEIFVSKPPRKRARRALHKDTFHSENKIIDKCSYNSKEGLQIALSCGRVRKIGTKYVENDTIVRVDIFKKQNKFYAIPIYAMDFALGILPNKIVITGKDKNNNPKQWQTIDESYEFCFSLYKNDLILLQKKNMQEPEFAYYNDFSISTSSICVEKHDNKFENLTSNQKLLFSNAKEGSVKVESLGIQNLKVFEKYIITPLGDKIKADFQPRENISLKTSKKYGLR

SEQ ID NO: 150 - protein, 1430 aa, Capnocytophaga canimorsus
MKHILGLDLGTNSIGWAVVKEAQNDNEQSEIVDVGVRVNPLTTDEKTNFEKGKPISTNADRTLKRSARRNLQRYKLRRKELIELLKEHQLISTDTILTENGKGTTFQTLELRAKSAKEKISLEELARVFLTINKKRGYKSSRKAKNEDEGQLIDGMEIAKRLYEENLTTGQLSLQLLKEGKKSLPDYYRSDLQFELDKVWNFQKQFHSHILTDEFYAQLKGKGQRATSALFLAKYQIYTAENKGSREDKKLQAYQWRVDALSKELTREQLAFVITEINNNLNNSSGYLGAISDRSKELYFNNETVGEYLWKQIAANPHTSLKNQVFYRQDYLDEFEQIWKTQSAFYPEILTDELKKELRDVVIFYQRKLKSQKSLVSFCEFENKEIEIKKEDGTSTKKVIGLKVAPKSSPLFQEFKIWQNLNNVLIRKKGSKTKKVDKNQQAVLFEEEKTIFELDLEAKQALFNELNLKGNLKAYYCLEILGYSPKEWEMNYSVLEGNRTNKALYEAYLKITDLEGYDAKNHLKVKLNKDEVELDDLKVPASEIKDMVQAIFKEAGINTDILHFNAELDGKDFENQASYQLWHLLYSYEGDDSKSGNELLYKLLETKFGFKKEYAQILANVSLSDDYGSLSTKAMRKIHPYIKENKFSTACELAGYRHSKHSLTKEENDNRVLKDSLEVLKKNSLRQPVVEKILNQMINLVNALLKKYRTENPNFKFDEIRIELARELKKNAEERANMTVNINKAKTEHEKIIKILKNEFGLPNPTRNDIIRYRLYEELKANGYKDLYTNEYIEKQDLFTKNIDIEHIIPKSRVFDDSFSNKTLSFRKTNLDKGERTAFDYIESKFGADKLEEYVARVEDLYKNNIISKAKYQKLLKKESEIGDGFVERDLRETQYIAKKAKEILLQITPNVLSTSGGITDRLREDWDLINVMKELNLPKYRALGLTQMEDRKYGQQVEVIIDWTKRNDHRHHAMDALTVAFTKHNHIQYLNYLNARKNEKHREHSNIMGIQQLETIKVTDKNGNEKRVFKAPMPNFRQVTKAFLENVLISHKAKNKVVTKNKNKVAGSNKVQEVLTPRGQLHKETVYGKYQYYVQKEEKIGGKFDLETIKKVANPLYQSLLKKRLEENGGDPKKAFTGKNSLAKNPIYLDDAQTEQLPEKVKLVWLENSFSIRKDITPENFKDEKLIDKILDEGVKRILKERLQSFGNDAKKAFSDLDKNPIWLNKEKGIAIKRVAISGVANAEPLHTKKDHLGKEILDKEGKSIPVDFISTGNNHHVAVYRDEKGNLQEKVVSVFEAVVRANQGLPIIDKTYNQHLGWEFLFTMKQNEMFVFSNESTGFNPNDIDLLDPKNKKIISPNLFRVQKFSKLQYGNSFVREFVFRHHLETTVEDRKELQGITYKQMKNSAFFNDIIKVRINHLGGIVSVGEY

SEQ ID NO: 151 - protein, 1436 aa, Capnocytophaga gingivalis
  Capnocytophaga gingivalis ATCC 33624
MKYIKYILGLDIGSNSIGWALIQLDLLQKTKRIIAAGSRIIPMDQKVLSDFGKGITISPTAQRTSYRNARHCRERHLLRRERLHRVLHILGFLPTHYDKQIDFSKRYGKFVDNTEPKIAYNEGKFLFMDSFQEMLSDFKSHQPDLFYTKKNGEESKIPYDWTIYYLRKKALSQKISKEELAWIILNFNQKRGYYQLREEEGNKENDFEIISSKIISVIKKDKDKKYNKYWYDIILENGLVYQAAFYNDFVYNWINQDREFIIERTSLKNGAEKVKLSYLPTFDEIDKMDKKEQDKYYKKIKIKTENSIGNKTVGCYIYDHILQNPNEKIKGKLVRTIERKYYKEELKAILEKQIALQPELFTDQLLADCIRELYSKNEAQQRNLAARDFVHLLVEDIIFYQRPLRRQKSTLANCSLESRSYIDKDSHTRKEAPLKVCPKSNPYYQEFRVLQWLQNLKIYEIDSDQEVTHQFIKTLEDKQQLFEFLMAQKEIDCEELLKYFLNQTYPNAKEKALKSELKKWKDTYRWNYVYDIGEKSSKKYPMNETRYELKRHLEKVANLPDDFLSSEVEYLLWHLIYSVKDKVAYEKGLKKFAQKHHLDKDSFVESFKKFNPYPSEYGSFSEKAIRKLLPLMRFGAHWDFNHIDKNTQKRIEDLITGVENEEIRTILREKAEKYQLEKETDFQDLPLWLAQYIVYNRHAEASSLEKWTSVNDLETYLNEFKQHSLRNPIVEQVVMETLRVVRDIWQQYGQGQASFFNEIHIELGRELKKTAKEREKLSKQNQKNEDINLSIKEKLKELEKYNTRAYSITHQEKYKLWLEQKHISPYTGQIISPENLFTDNYEIEHIIPQSRFFDDSLSNKVVCESIVNKAPYKDRQLGLEFIKNQGGRIVKELSKENKTIKIFTEEQYRTFIKEHYSNNPEKTKKLLLEEIPEKMVARQMNDTCYISKFISEILSKIVRSDEQDEGVHSKNVILCTGKITSILRQDWGLNDIWDNLILPRFERMNNLLQKEKFTIYSIEKQKKIPVVPINDQFKSFQKKRIDHRHHAMDAIIIACTTREHINYINNQHALEKEKDKKEKQEERDKLREKLCIKKYNNRSEGNYSWIFKKPWDTFTQEVRVALEDIVVSFKQNLRVINKATNYYERWVEENGKYIKKMVKQEGTNWAIRKPLHEETISGKIYLDREKITKNDILTATRKTVDSSFDDKRIKKITDTGIQKILLNYLKYKGSPEIAFSPEGLEELNKNLSIYNDGKPHKPIYKVRIYEKGSGRFALGEKGRKYKKYVQGASNLYFGIYQGAKRSFATIPLNEVIERQKQGLPSVPEYNEKGDLLLFSLSPNDLVYVPIEGEIIENIDFRNLSKEQKERIYNVNDFSSTCYFTPNRIAKAIFPKEVDLQRKGDKLSGSYDTKTASLEGIQIKEVCIKLKVDRLGNISKA

SEQ ID NO: 152 - protein, 1426 aa, Capnocytophaga ochracea
MKNILGLDLGTTSIGFAHIVEDENKEKSEIKELGVRIVSLTTDEQSDFEKGKSITTNANRTLKHGARLNLDRYQQRRKYLIDLLQKANLITPSSILAENGKNTTHSTWQLRAKAVTERIEKEEFARILLAINKKRGYKSSRKAKTEDEGQAIDGMAIAKRLYDENLTPGQLSLQLLQQNKKLLPDFYRSDLQKEFDLVWNFQKQFYPDILTDIFYKELQGKGKDATSKAFSKRYHFDTTENKGSKESVRLQAYQWRAEAISKQLSKEEVAYVLTEINNNLNNASGYLGAISDRSKELYFNRQTVGQYLYAKLQENRHNSLKNKVFYRQDYLDEFERIWETQASFHKELTDELKKQIRDVVIFYQRKPKSQKGLISFCEFESKEIEIEKDGKTITKNIGARVVPKSSPLFQEFKIWQILNNVICKRKGIRKKKISAKTTQLDLLNESSQTIFSLDMECKQLLFDELNLKGDLKSDKVLKLLGYSPQEWEINYNQLEGNRTQKALYEAYLKIVEMEAHDVKDILQIKSAKDDWSLDESPLSASEIREKVKAIFQTLGICTKILYFDPLLPVKEFEEQDSYQLWHLLYSYESDDSTSGNETLYRILEKKYAFKREHARILANVALQDDYGSLSTKAIRKIYPNIKENQYSTACEKAGYKHSKLSLTTEELEARELKNIIPLLKKNALRNPVVEKILNQMINVVNALIEKNSERDAEGKITKYFHFDEIRIELARELKKNAQKRYEMTQNINKAKLEHQKISEILQKEFGIKNPTKSDIIRYRLYQELEHNGYKELYTNAPIARDMLFSKNIEIEHIVPKARVFDDSFSNKTLTFHRINSDKGEYTAFDYITSLNSEEELNQYLTRVENAYKTKSISPTKYKNLLKKASEIGDDFINRDLRDTQYIAKKAKEILFQVTKNVLSTSGSITDRLREDWGLVDVMKELNMPKYQSLGLTEVEERKDGNKVTVIKNWTKRNDHRHHAMDALTVAFTKPSYIQYLNHLNARKDENNKNYSVILAIEEKETIKVPTNNGKNKRVFIEPIPNFRQVAKKHLEEIFISHKAKNKVVTKNTNKPAGTDKQQITLTPRGQLHKETIYGKYQYYINKEEKIGVKFDERTIAKVSNPVYREALLKRLQANDNDPKKAFAGKNALSKNPIYLDESKTKTLPEKVNLTYLEEDFSIRKDISPDNFKDLKSIEKVIDQGVKRILIKRLQAYDNDPKKAFVDLEKNPIWLNKEKGIAIKRVTISGVNNAQPLHIGKDHLGKTTLNKEGKEIPVDYVSTGNNHHVAIYRDKEGNLQEQIVSFFDAVVRAQQGIPIIDKTYKQAEGWQFLFTMKQNEMFVFPNATTGFNPAEIDLLDPKNKKLISPNLFRVQKIATKDYFFRHHLETNVETDNILKNVTWKREGLSGLKDIVKVRINHLGDIVSIGEY

SEQ ID NO: 153 - protein, 1437 aa, Capnocytophaga sp.
  Capnocytophaga sp. CM59
MKYIKYILGLDIGSNSIGWALIQLDLLQKTKRIIATGSRIIPMDQKVLSDFGKGITISPTAQRTSYRNARHCRERHLLRRERLHRVLHILGFLPTHYDKQIDFSKRYGKFVDNTEPKIAYNERKFLFMDSFQEMLADFKIHQPDLFYTKKNGEESKIPYDWTIYYLRKKALSRKISKEELAWIILNFNQKRGYYQLREEEEENKENDFEIISSKIISVIKKDKDKKYNKYWYDIILENGLVYQAAFYNDFVYNWINQDREFIIERISLKNGTEKVKLSYLPTFDEIDKMDKKEQDKYYKKIKIKTENSIGNKTVGCYIYDHILQNPNEKIKGKLVRTIERKYYKEELKAILEKQVALQPELFTDQLFADCIRELYSKNEAQQRNLAARDFVHLFVEDIIFYQRSLRRQKSTLANCSLESRSYIDKDSHTRKEAPLKVCPKSNPYYQEFRVLQWLQNLKIYEIDTDQEVTHEFIKTLEDKQQFFDFLMNQKEIDCEELLKYFLNQTYPNAREKALKSELKKWKDTYRWNYVYDIGEKSSKKYPMNETRYELKRHLEKVANLPDDFLSSEVEYLLWHLIYSVKDKVAYEKGLKTFAQKHHLDKDSFVESFKKFKPYPSEYGSFSEKAIRKLLPLMRFGSYWDFNHIDKNTQKRIEDLITGVENEEIRTILREKAEKYQLEKETDFQDLPLWLAQYIVYNRHAEASSLEKWTSVNDLETYLNEFKQYSLRNPIVEQVVMETLRVVRDIWQQYGQGQASFFDEIHIELGRELKKTAKEREKLSKQNQKNEDINLSIKEKLKELEKYNTRAYSITHQEKYKLWLEQKHISPYTGQIISPENLFTDNYEIEHIIPQSRFFDDSLSNKVVCESIVNKAPYKDRQLGLEFIKNQGGRIVKELSTENKTIKIFTEEQYRTFIKEHYSNNPEKTKKLLLEEIPEKMVARQMNDTCYISKFISEILSKIVRSDEQDEGVHSKNVILCTGKITSALKQDWGVNDVWNDLILPRFERMNDLTQSTLFTTYNEKYQKYLPTVPMEYSNGFQKKRIDHRHHAMDAIIIACATREHINYINNQHALEKGKDKKEKQKEHDKLREKLCIKKDNKGSEENYSWIFKKPWDTFTQEVQAALEGIVVSFKQNLRVINKATNYYERWVEENGKYIKKMVKQEGTNWAIRKPLHEETISGKIYLDREEITKNDILTATRKTVDSSFDEKRIKKITDTGIQKILLNYLKYKGSPEIAFSPEGLEELNKNLSIYNDGKPHKPIYKVRIYEKGSGRFALGEKGRKYKKYVQGAPNLYFGIYQGANKRSFATIPLNEVIERQKQGRPSIPEYNEKGDPLLFSLSPNDLVYVPVEGEIIEDIDFQNLSKEQKERIYNVNDFSSTCYFTPNRIAKAIFPKEVDLQRKGDKLPGSYDTKTASLEGIQIKEVCIKLKIDRLGNISKA

SEQ ID NO: 154 - protein, 1471 aa, Capnocytophaga sp.
  Capnocytophaga sp. oral taxon 324 str. F0483
MCKYFYIKNFITFVLSKSIIPMKHILGLDLGSNSIGWAFVQQDFENKQGKIIATGSRIIPMDQGILGDFERGNTVSQTAERTTYRSTRRLRERHLLRRERLHRVLHILGFLPPHYDAQIDFTKRYGKFIDNAEPKIAYNNGNFIFMNSFNEMIEDFKKHQPQLFYKKSNGEESKIPYDWTIYYLRKKALSQKITQQELAWLILHFNQKRGYYQLRGEEETENPNKEVAFHSLKVVDVEAEAPNKKGEIWYTIRLENGWIYRRTSKIPLDDWKGKTRDFIVTTDLNDDGTIKVDKEGKEKRSFRAPDENDWNLLKKKTEHDIDFSGKTVGAYIYDHLLQNPNQKIKGKLVRTIERKYYKDELKAILAKQIALQPELFTETLLADCIRELYRKNETQQQNLLSKDFLHLFVEDIIFYQRPLRSKKSTIANCTLEKRSYIDKETNERKDAPIKVCAKSNPYYQEFRVLQWLQNLRIYEIETDREVTAEFIETPQDCEALFNFLMSQKEIDNKGLLKYFLFAKNPQIKDKAAKSELKKWLTTYRWNYVYDAADNSSKKYPMNETGYELQRYLQKVEGLPANFLTFDITYQLWHLLYSVKDKVEFEKALKKFAKKKQLDKTSFVDSFKNFKPYPNEYGSFSEKAIKKLLPLMRFGNHWDFNRIDVSTQKRIDDLINGVANEDIRTIIREKAEKYQLNSETCFQDLPLWLAQYVVYNRHAEATDIEKWTSVSDLEAYLEDFKQHSLRNPIVEQVVTETLRVVRDIWQQYGGGQANFFDEIHIELGRELKKTAEERKQLSDKNQENESTNLRIKKLLAELKEDASIQNVRPYSLVQQELLKIYEEGVFSATDEVEEDIQKIRKKAEPSKADLQRYKLWLEQKYKSPYTGEVISLTKLFTEEYEIEHIIPQSRYYDDSLSNKVICESAVNKLKTNQLGLEFIQNHHGEKVRITANKEVTIFTEEQYKEFVKKHYANNSAKQQKLLLNEIPEKMVARQLNDTRYISKYISEILSKIVRSDEKDEGVNSKNIIPCTGKITTALKQDWGLNDVWNKLILPRFERMNQLTQTQLFTSYNDRLQKNLPTVPIEYSQGFQKKRIDHRHHAMDALVIACATREHINYMNNQHALDKSKDKKEKQQSRIDLRTILCEKKNNNWQFKKPWSTFTQEAKEALEHIVVSFKQNLRVINKATNYYEKWEEKNGVLVKKKVKQEGTNWAIRKPLHKETVSGKIVLDRKIGKDKILTATRKAVDITFTEKIISSITDTGIQKILLNYLKYKGSPEVAFSTEGLEELNKNIAQYNNGKKHQPIYKVRIFEEGSKFPLGETGAKATKYVEAAKGTNLFFGVYQGKGKRTYATIPLNEVIERQKQGLPSVPERNEKGEPLLFSLSPNDLVYVPMEGEIAETIDFNNLSKEQKERIYKTVSFTGNQCFFVQEAVATPIVNKMEYSPLNKMERDILGTMIKEVCIKLKVDRLGNITKA

SEQ ID NO: 155 - protein, 1450 aa, Capnocytophaga sp.
  Capnocytophaga sp. oral taxon 326 str. F0382
MKRILGLDLGSNSIGWAFVEQDFENKQGKIIATGSRIIPMDQGILGDFEKGNTVSQTAERTTYRSMRRLRERHLLRRERLHRVLHILGFLPPHYDAQIDFTKRYGKFIDNAEPKIAYNNGNFIFMNSFNEMIEDFKKYQPQLFYKKSNGEESKIPYDWTIYYLRKKVLSQKITQQELAWLILHFNQKRGYYQLRGEEETENPNKEVAFHSLKVVDVEAEAPNKKGEIWYTIRLENGWIYRRTSKIPLDDWKGKTRDFIVTTDLNDDGTIKVDKEGKEKRSFRAPDENDWNLLKKKTEHDIDFSGKTVGAYIYDHLLQNPNQKIKGKLVRTIERKYYKDELKAILAKQIALQPELFTETLLADCIRELYRKNETQQQNLLSKDFLHLFVEDIIFYQRPLRSKKSTIANCTLEKRSYIDKETNERKDTFIKVCAKSNPYYQEFRVLQWLQNLRIYEIETDREVTAEFIETAEDYEALFNFLMSQKEIDNEGLLKYFLFAKNPQIKDKVAKSELKKWLTTYRWNYVYDAADNSSKKYPMNETGYDLQRYLQKVEGLPANFLTFDITYRLWHLLYSVKDKVEFEKALKKFAQEYQLDEASFVDSFKNFKPYPNEYGSFSEKAIKKLLPLMRFGNHWDFNRIDVSTQKRIDDLINGVANDEIRTIIREKAEKYQLNSESCFQGLPLWLAQYVVYNRHAEATDIEKWTSVSDLETYLEDFKQHSLRNPIVEQVVTETLRVVRDIWQQYGGGQANFFDEIHIELGRELKKTAEERKQLSNRNQENENTNLRIKKLLAELKEDASIQNVRPYSPVQQELLKIYEEGVFSSTDQVEEDIQKIRKKAEPTTPEIQRYKLWLEQKYKSPYTGEVISLTKLFTEEYEIEHIIPQSRYYDDSLSNKVICESAVNKLKTNQLGLEFIQNHHGEKVRITGNKEVTIFTEEQYKEFVKKHYANNSAKQQKLLLNEIPEKMVARQLNDTRYISKYISEILSKIVRSDEKDEGVNSKNVIPCTGKITTALKQDWGLNDVWNELILPRFERMNQLTQTQLFTSYNDRFQKNLPTVPIEYSQGFQKKRIDHRHHAMDALVIACATREHINYMNNQHALDKNKDKKEKQQSRIDLRTILCEKKNNNWQFKKPWSTFTQETKEALEHIVVSFKQNLRVINKATNYYEKWEEKNGVLVKKKVKQEGTNWAIRKPLHKETVSGKIVLDRKIGKDKILTATRKEVDITFTEKIISSITDTGIQKILLNYLNYKGSPEVAFSAEGLEELNKNIAQYNDGKKHQPIYKVRIFEEGSKFPLGETGAKATKFVEAAKGTNLFFGVYQGKEKRSYATIPLNEVIERQKQGLPSVPERNEKGEPLLFSLSPNDLVYVPMEGEIAETIDFNNLSKEQKERIYKTVSFTGNQCFFVQEAVATPIVNKMEYSPLNKMERDILGTMIKEVCIKLKVDRLGNITKA

SEQ ID NO: 156 - protein, 1435 aa, Capnocytophaga sp.
  Capnocytophaga sp. oral taxon 329 str. F0087
MKNILGLDLGTTSIGFAHIVEDENKEKSEIKELGVRIVSLATDEQSDFEKGKSISTNANRTLKHGARLNLDRYQQRRKFLIDLLQKANLITSASILAENGKNTTHSTWQLRAKAVTERIEKEEFARVLLAINKKRGYKNSRKTKTEDEGQAIDGMAIAKCLYDENLTPGQLSLQLLQQNKKLLPDFYRSDLQKEFDLVWNLQKQFYPDILTDSFYKELQGKGKDATSKAFSKRYHFDTAENKGSKESVRLQAYQWRAEAISKQLSKEEVAYVLTEINNNLNNSSGYLGAISDRSKELYFNRQTVGQYLYAQLQENRHNSLKNKVFYRQDYLDEFERIWETQASFHKELTDELKKQIRDVVIFYQRKLKSQKGLVSFCEFESKEIEIEKDGKAITKSIGARVVPKSSPLFQEFKIWQILNNVTCKRKGIRKKKSSAKSTELDLFNEPSQSIFSLDMECKQLLFDELNLKGDLKSDKVLKLLGYSPQEWEINYNQLEGNRTQKSLYEAYLKIIEIEGYEVKDILQIKSTKDDWSLDESPLSASEIRERVKVIFQTLGICTKILYFDPLLPVKEFEQQYSYQLWHLLYSYESDDSTSGNETLYRILEKKYAFKREHATILANVALQDDYGSLSTKAIRKIYPYIKENQYSTACELAGYKHSKLSLTTEELEARELKNIIPLLKKNALRNPVVEKILNQMINVVNALIEKNSERDAEGKITKYFHFDEIRIELARELKKNAQERYEMTQNINKAKLEHQKISEKLQKQFGIKNPTKSDIIRYRLYQELEHNGYKELYTNTYIAPDVLFSKNIDIEHIVPKARVFDDSFSNKTLAFKEFNIKKGESTAFDYITSLNCEGELNQYLTRVENAYKTKSISLTKYKNLLKKASEIGDGFINRDLRDTQYIAKKAKEILFQVTKNVLSTSGSITDRLREDWGLVDVMKELNMPKYQSLGLTEVEERKDGNKVTVIKDWTKRNDHRHHAMDALTVAFTKPSYIQYLNHLNARKDENNKNYSVILAIEKKETIKVPINNGKNKRVFIEPILNFRQVAKKHLEEIFISHKAKNKVVTKNINKPAGTDKQQITLTPRGQLHKETIYGKYQYYVNKEEKVGVKFDERTITKVSNPLYREALLKRLQANDNDPKKAFAGKNALSKNPIYLDEAKTKTLPEKVNLTYLEEDFSIRKDISPDNFKDLKSIEKVIDQGVKRILIKRLQAYDNDPKKAFVDLEKNPIWLNKEKGIAIKRVTISGVSNAQPLHIGKDHLGKTTLNKEGKEVPVDYVSTGNNHHVAIYRDKEGNLQEQIVSFFEAVVRAQQGLPIIDKNYKQAEGWQFMFTMKQNEMFVFPNEATGFNPAEIDLLDPKNKKLISPNLFRVQTISIVKYGNSVVRDFKFRHHLETTLQDDKILQGITFQQIKSLEPLRNIVKVRINHLGDIVNIGEY

SEQ ID NO: 157 - protein, 1426 aa, Capnocytophaga sp.
  Capnocytophaga sp. oral taxon 335 str. F0486
MKNILGLDLGTTSIGFTHIVEDENKEKSEIKELGVRIVSLTTDEQSDFEKGKSISTNANRTLKHGARLNLDRYQQRRKFLIDLLQKANLITSSSILAENGKNTTHSTWQLRAKAVTERIEKEEFARVLLAINKKRGYKSSRKAKTEDEGQAIDGMAIAKRLYDENLTPGQLSLQLLQQNKKLLPDFYRSDLQKEFDLVWNFQKQFYPDILTDSFYKELQGKGKDATSKAFSKRYHFDTAENKGSRESVRLQAYQWRAEAISKQLSKEEVAYVLTEINNNLNNASGYLGAISDRSKELYFNRQTVGQYLYAQLQENKHNSLKNKVFYRQDYLDEFERIWETQASFHKELTEELKKQIRDVVIFYQRKLKSQKGLISFCEFESKEIEIEKDGKTITKSIGARVVPKSSPLFQEFKIWQILNNVTCKRKGIRKKKSSAKSTELDLFNEPSQTIFSLDMECKQLLFEELNLKGDLKSDKVLKLLGYSPQEWEINYNQLEGNRTQKALYEAYLKIVEMEAHDVKDILQIKSTKDDWALEESPLSASEIRERVKAIFQTLGICTKILYFDPLLPVKEFEEQDSYQLWHLLYSYESDDSTSGNETLYRILEKKYAFKREHATILANVTLQDDYGSLSTKAIRKIYPYIKENQYSTACEKAGYKHSKLSLTTEELEARELKNIIPLLKKNALRNPVVEKILNQMINVVNALIEKNSERDAEGKITKYFHFDEIRIELARELKKNAQERYEMTQNINKAKLEHQKISGILQKEFGIKNPTKSDITRYRLYQELAHNGYNDLYTNTYIPKELLFSKNIDIEHIVSKARVFDDSFSNKTLAFREFNIKKGESTAFDYITSLNNEEELNQYLNRVENAYKTKNISPAKYKNLLKKASEIGDGFINRDLRDTQYIAKKAKEILFQVTKNVLSTSGSITDRLREDWGLVDVMKELNMPKYQSLGLTEVEERKEGNKVTVIKNWTKRNDHRHHAMDALTVAFTKPSYIQYLNHLNARKDKNNKNYSVILAIEEKETIKVPTNNGKNKRVFIEPIPNFRQVAKKHLEEIFISHKAKNKVVTKNTNKPAGTDKQQITLTPRGQLHKETVYGKYQYYVNKEEKIGVKFDKETIAKVSNPVYREALLKRLQANDNDPKKAFAGKNALSKNPIYLDEAKTKTLTEKVNLTYLEEDFSIRKDISPDNFKDLKSIEKVIDQGVKRILIKRLQDYDNDPKKAFVDLEKNPIWLNKEKGIAIKRVTISGVNNAQPLHIGKDHLGKTTLNKEGKEIPVDYVSTGNNHHVAIYRDKEGNLQEQIVSFFEAVVGAQQGLPIVDKTYKQAEGWQFLFTMKQNEMFVFPNEATGFNPAEIDLLDPKNKKQISPNLFRVQKIATKDYFFRHHLETNVDTDNVLKNTTWKREGLSGLKDIVKVRINHLGDIVSIGEY

SEQ ID NO: 158 - protein, 1432 aa, Capnocytophaga sp.
  Capnocytophaga sp. oral taxon 380 str. F0488
MKNILGLDLGTTSIGFAHIVEDENKEKSEIKELGVRIVSLTTDEQSDFEKGKSITTNANRTLKHGARLNLDRYQQRRKYLIDLLHKANLITPSSILAENGKNTTHSTWQLRAKAVTERIEKEEFARILLAINKKRGYKSSRKAKTEDEGQAIDGMAIAKRLYDENLTPGQLSLQLLQQNKKLLPDFYRSDLQKEFDLVWNFQKQFYPDILTDIFYKELQGKGKDATSKAFSKRYHFDTAENKGSKESVRLQAYQWRAEAVSKQLSKEEVAYVLTEINNNLNNASGYLGAISDRSKELYFNRQTVGQYLYAQLQENRHNSLKNKVFYRQDYLDEFERIWETQALFHKELTDELKKQIRDVVIFYQRKPKSQKGLISFCEFESKEIEIEKDGKTITKNIGARVVPKSSPLFQEFKIWQILNNVICKRKGIRKKKISAKTTQLDLLNESSQTIFSLDMECKQLLFDELNLKGDLKSDKVLKLLGYSPQEWEINYNQLEGNRTQKALYEAYLKIVEMEAHDVKDILQIKSTKDDWSLDESPLSASEIRESVKAIFQALGICTKILYFDPLLPVKDFEEQDSYQLWHLLYSYESDDSTSGNETLYRILEKKYAFKREHARILANVALQDDYGSLSTKAIRKIYPNIKENQYSTACEMAGYKHSKLSLTTEELEARELKNIIPLLKKNALRNPVVEKILNQMINVVNALIEKNSERDAEGKITKYFHFDEIRIELARELKKNAQKRYEMTQNINKAKSEHQKISEILQKEFGIKNPTKSDIIRYRLYKELEHNGYKELYTNTYIAPDVLFSKNIDIEHIVPKARVFDDSFSNKTLAFKDFNIKKGESTAFDYITSLKNEEKLNQYLARVENAYKTKNISPAKYKNLLKKASEIGDGFINRDLRDTQYIAKKAKEILFQVTKNVLSTSGSITDRLREDWSLVDVMKELNMPKYQSLGLTEVEERKDGNKVTVIKDWTKRNDHRHHAMDALTVAFTKPSYIQYLNHLNARKDENNKNYSVILAIEKKETIKVPTNNGKNKRVFIEPIPNFRQVAKKHLEEIFISHKAKNKVVTKNTNKPAGTNKQQITLTPRGQLHKETIYGKYQYYVNKEEKVGVKFDKETIAKVSNPLYREALLKRLQANDNDPKKAFTGKNALSKNPIYLDEAKTKTLPEKVNLTYLEEDFSVRKKIVPKNPTSKEFVPNLKSIEKVVDEGVRNILIERLRVYNNDPEKAFVDLEKNPIWLNKEKGIAIKRVTISGVNNAQPLHIGKDHLGKTTLNKEGKEIPVDYVSTGNNHHVAIYRDKEGNLQEQIVSFFEAVVRTQQGLPIIDKTYKQEEGWQFLFTMKQNEMFVFPNEATGFNPAEIDLLDPKNKKQISPNLFRVQKIATKDYFFRHHLETNVETDNVLKNTTWKREGLSGLKDIVKVRINHLGDIVSIGEY

SEQ ID NO: 159 - protein, 1450 aa, Capnocytophaga sp.
  Capnocytophaga sp. oral taxon 412 str. F0487
MKHILGLDLGSNSIGWAFVQQDFENKQGKIIATGSRIIPMDQGILGDFERGNTVSQTAERTTYRNTRRLRERHLLRRERLHRVLHILGFLPPHYDSQIDFTKRYGKFIDNAEPKIAYNNGNFIFMNSFNEMIEDFKKYQPQLFYKKSNGEESKIPYDWTIYYLRKKALSQKITQQELAWLILHFNQKRGYYQLRGEEETENPNKEVAFHSLEVVDVEAEAPNKKGEIWYTIRLENGWIYRRTSKIPLDDWKGKTRDFIVTTDLNDDGTIKLDKEGKEKRSFRAPDENDWNLLKKKTEHDIDFSGKTVGAYIYDHLLQNPNQKIKGKLVRTIERKYYKDELKAILAKQIALQPELFTETLLADCIRELYRKNETQQQNLLSKDFLHLFVEDIIFYQRPLRSKKSTIANCTLEKRSYIDKETNERKDTPIKVCAKSNPYYQEFRVLQWLQNLRIYEIETDREVTAEFIETAQDNEALFNFLMSQKEIDNESLLKYFLFAKNPQIKDKVAKSELKKWLTTYRWNYVYDAADNSSKKYPMNETGYELQQYLQKVEGLPANFLTFDITYRLWHLLYSVKDKVEFEKALKKFAQEYQLDEASFVDSFKNFKPYPNEYGSFSEKAIKKLLPLMRFGNHWDFNRIDVSTQKRIDDLINGVANDEIRTIIREKAEKYQLNSETCFQGLPLWLAQYVVYNRHAEAADIEKWTSVNDLEAYLEDFKQHSLRNPIVEQVITETLRVVRDIWQRYGGGQANFFDEIHIELGRELKKTAEERKQLSNRNQENENTNLRIKKLLAELKEDASIQNVRPYSPVQQELLKIYEEGVFSATDEVEEDIQKIRKKAEPTTPEIQRYKLWLEQKYKSPYTGEVISLTKLFTEEYEIEHIIPQSRYYDDSLSNKVICESAVNKLKTNQLGLEFIQNHHGEKVRITANKEVTIFTEEQYKEFVKKHYANNSAKQQKLLLNEIPEKMVARQLNDTRYISKYISEILSKIVRSDEKDEGVNSKNIIPCTGKITTALKQDWGLNDVWNELILPRFERMNQLTQTQLFTSYNDRFQKNLPTVPIEYSQGFQKKRIDHRHHAMDALVIACATREHINYMNNQHALDKSKDKKEKQQSRIDLRTILCEKKNNNWQFKKPWSTFTQEAQEALEHIVVSFKQNLRVINKATNYYEKWEEKNGVLVKKKVKQEGTNWAIRKPLHKETVSGKIVLDRKIGKDKILTATRKSVDITFTEKIISSITDTGIQKILLNYLKYKGSPEVAFSAEGLEELNKNIAQYNDGKKHQPIYKVRIFEEGSKFPLGETGAKATKYVEAAKGTNLFFGVYQGKGKRTYATIPLNEVIERQKQGLPSVPERNEKGEPLLFSLSPNDLVYVPMEGEIAETIDFNNLSKEQKERIYKTVSFTGNQCFFVQEAVATPIVNKIEYSPLNKMERDILGTMIKEVCIKLKVDRLGNITKA

SEQ ID NO: 160 - protein, 1426 aa, Capnocytophaga sputigena
  Capnocytophaga sputigena ATCC 33612
MKNILGLDLGITSISFAHIVEDENKEKSEIKELGVRIVSLTTDEQSDFEKGKSITTNANRTLKHGARLNLDRYQQRRKYLIDLLQKANLITSSSILAENGKNTTHSTWQLRAKAVTERIEKEEFARVLLAINKKRGYKSSRKAKTEDEGQAIDGMAIAKRLYDENLTPGQLSLQLLQQNKKLLPDFYRSDLQREFDLVWNFQKQFYPDILTDSFYKELQGKGKDATSKAFSKRYHFDTAENKGSKESVRLQAYQWRAEAISKQLSKEEVAYVLTEINNNLNNASGYLGAISDRSKELYFNRQTVGQYLYAQLQENRHNSLKNKVFYRQDYLDEFERIWETQASFHKELTDELKKQIRDVVIFYQRKLKSQKGLISFCEFESKEIEIEKDGKTITKTIGARVVPKSSPLFQEFKIWQILNNVTCKRKGIRKKKSSAKSTELDLFNEPSQTIFSLDMECKQLLFDELNLKGDLKSDKVLKLLGYSPQEWEINYNQLEGNRTQKALYEAYLKIVEMEAHDVKDILQIKSAKDDWSLDESPLSASEIKEKVKDIFQALGICTKILYFDPLLPVKEFEKQDSYQLWHLLYSYESDDSTSGNETLYRILEKKYAFKREHARILANVALQDDYGSLSTKAIRKIYPNIKENQYSKACELAGYKHSKLSLTTEELEARELKNIIPLLKKNALRNPVVEKILNQMINVVNALIEKNSERDAEGKITKYFHFDEIRIELARELKKNAQKRYEMTQNINKAKLEHQKISEILQKKFGIKNPTKSDIIRYRLYQELEHNGYKELYTNAPIARDMLFSKNIEIEHIVPKARVFDDSFSNKTLTFHRINSNKGEYTAFDYITSLNSEEELNQYLTRVENAYKTKSISLTKYKNLLKKASEIGDGFINRDLRDTQYIAKKAKEILFQVTKNVLSTSGSITDRLREDWGLVDVMKELNMPKYQSLGLTEVEERKEGNKVTVIKNWTKRNDHRHHAMDALTVAFTKPSYIQYLNHLNARKDENNKNYSVILAIEEKETIKVPTNNGKNKRVFIEPIPNFRQVAKKHLEEIFISHKAKNKVVTKNVNKPAGTDKQQITLTPRGQLHKETIYGKYQYYVNKEEKVGVKFDERTITKVSNPLYREALLKRLQANDNDPKKAFTGKNALSKNPIYLDETKTKTLPEKVNLTYLEEDFSIRKDISPDNFKDLKSIEKVIDQGVKRILIKRLQDYDNDPKKAFVDLEKNPIWLNKEKGIAIKRVTISGVSNAQPLHIGKDHLGKTTLNKEGNEIPVDYVSTGNNHHVAIYRDKEGNLQEQIVSFFEAVVRTQQGLPIIDKTYKQEEGWQFLFTMKQNEMFVFPNATTGFNPAEIDLLDPKNKKLISPNLFRVQKIATKDYFFRHHLETNVETDNVLKNTTWKREGLSGLKDIVKVRINHLGDIVSIGEY

SEQ ID NO: 161 - protein, 1140 aa, Catellicoccus marimammalium
  Catellicoccus marimammalium M35/04/3
MKNMTKVNVGLDVGISSAGWSVINAETNQILESGVRLFSGSDADENVNRRNQRQGRRLFRRRKLRIQEAKKYLENVFQLKDIEPKDEWNPYEIRVRALNEKVSKEELSIALLNIVKHRGISYELEDVTDEEGTNTQSFQSGLDYNRRLLKTKTVGEIQYDRLQKYGQVRGQIQTEDGLLINIFPTKNYVEEVERILETQKKYHPEIDDVFIEKIISFVTRKREYFVGPGNEKSRTDYGIYRENGETLDNLFEILIGKDKFYPEEYRAAGSSYTAQIFNLLNDLNNLRIPTTEDHHLTKAQKEEIITELKNTSRLSGGMLKLISKVTKAPKEEISGYRKDEKDKPDLHSLAYYRKQKNMLEKEGIQIADFSEELLDELATMMTLNTEPGEIRKQLNKITNQYDILTPEVIEVLVKNHTAFVATSNHKWHRFSLKLMKEFIPELLETSKEQSTILCERGFIQNRASYLDENHHFNYAELRENLYNPVVRKSTCEMLKVFTAIQEKYPNIQNVIVELPRETNEDEQKRKIKKINDNNAKRKKEILKEAQAQSGLSEEALEEKLLKTKGLYLKLMLWYEQEGKCVYSGQEIPLSDLLQNKGGYEVDHIIPISISFDDRLCNKVLVRQQLNSQKSNQTPFEYMTTHTDGHLSFHELKELVGKNKRFSKEKRELLLAEIYSNDIETRKRFINRNLVDTSYTARIVLNALQQYKKENQLSMNVSVVRGAMTNILRKKVKLDKTRETFHHHAIDASLMAVIPNIEFFKERKEWLPKSANEEVVEVEVSEEETMPEKEFKVKMRLPESFIQDVQILQRNSFAKEEVSGPQTRERNLKIKFSHQVDQKMNRKVADDTIYGTRQAQLGKDKKEETYVIGKIKDIYNYDEYVRFKKRYDKNKESFLMYHHDPQTFEKLEEILAQYPEYIEDEKGKKKKVSPFALYREENGPVTKYAKKNNGPVIKQLKYYDSKLNRKIDISHKYSTKNRQVVLQSLKPYRTDVYRNQDTGEYTLVGIDQNDGKFVNGHYGIPKSRYEEIKANNKLSEHDEFVFSLYKNSMVKVIDENGESIVVRYLSRSMPNRKNNAEIKPVEKYQFEDGEVVPVYGKCRKQMQTVFVKKGWTLLKGNTDILGNTYFVEKESENPKKMIDDK

SEQ ID NO: 162 - protein, 1329 aa, Catenibacterium mitsuokai
  Catenibacterium mitsuokai DSM 15897
IVDYCIGLDLGTGSVGWAVVDMNHRLMKRNGKHLWGSRLFSNAETAANRRASRSIRRRYNKRRERIRLLRAILQDMVLEKDPTFFIRLEHTSFLDEEDKAKYLGTDYKDNYNLFIDEDFNDYTYYHKYPTIYHLRKALCESTEKADPRLIYLALHHIVKYRGNFLYEGQKFNMDASNIEDKLSDIFTQFTSFNNIPYEDDEKKNLEILEILKKPLSKKAKVDEVMTLIAPEKDYKSAFKELVTGIAGNKMNVTKMILCEPIKQGDSEIKLKFSDSNYDDQFSEVEKDLGEYVEFVDALHNVYSWVELQTIMGATHTDNASISEAMVSRYNKHHDDLKLLKDCIKNNVPNKYFDMFRNDSEKSKGYYNYINRPSKAPVDEFYKYVKKCIEKVDTPEAKQILNDIELENFLLKQNSRTNGSVPYQMQLDEMIKIIDNQAEYYPILKEKREQLLSILTFRIPYYFGPLNETSEHAWIKRLEGKENQRILPWNYQDIVDVDATAEGFIKRMRSYCTYFPDEEVLPKNSLIVSKYEVYNELNKIRVDDKLLEVDVKNDIYNELFMKNKTVTEKKLKNWLVNNQCCSKDAEIKGFQKENQFSTSLTPWIDFTNIFGKIDQSNFDLIENIIYDLTVFEDKKIMKRRLKKKYALPDDKVKQILKLKYKDWSRLSKKLLDGIVADNRFGSSVTVLDVLEMSRLNLMEIINDKDLGYAQMIEEATSCPEDGKFTYEEVERLAGSPALKRGIWQSLQIVEEITKVMKCRPKYIYIEFERSEEAKERTESKIKKLENVYKDLDEQTKKEYKSVLEELKGFDNTKKISSDSLFLYFTQLGKCMYSGKKLDIDSLDKYQIDHIVPQSLVKDDSFDNRVLVVPSENQRKLDDLVVPFDIRDKMYRFWKLLFDHELISPKKFYSLIKTEYTERDEERFINRQLVETRQITKNVTQIIEDHYSTTKVAAIRANLSHEFRVKNHIYKNRDINDYHHAHDAYIVALIGGFMRDRYPNMHDSKAVYSEYMKMFRKNKNDQKRWKDGFVINSMNYPYEVDGKLIWNPDLINEIKKCFYYKDCYCTTKLDQKSGQLFNLTVLSNDAHADKGVTKAVVPVNKNRSDVHKYGGFSGLQYTIVAIEGQKKKGKKTELVKKISGVPLHLKAASINEKINYIEEKEGLSDVRIIKDNIPVNQMIEMDGGEYLLTSPTEYVNARQLVLNEKQCALIADIYNAIYKQDYDNLDDILMIQLYIELTNKMKVLYPAYRGIAEKFESMNENYVVISKEEKANIIKQMLIVMHRGPQNGNIVYDDFKISDRIGRLKTKNHNLNNIVFISQSPTGIYTKKYKL

SEQ ID NO: 163 - protein, 1419 aa, Chryseobacterium sp.
  Chryseobacterium sp. CF314
MMIKNILGLDLGTNSIGWALIKQNFENKYGEILGMGSRIIPMSQDVLGEFGKGNSVSQTAARTGYRGVRRLRERFLLRRERLHRVLNVLNFLPEHYASQIDFEKRFGKFKYETEPKLAYNNDGFFFKNSFDEMLGDFKDHQFHLLENGRKVPYDWTIYYLRKKALSQKIEKEELAWILLNFNQKRGYYQLRGEDFEEEKDRVFVRLKVDRVVDSGENIKGKILYDVYFENGWKYEKQIVKTEDWIGRTKEFIVTESILKNGDTKRTFKAVDSEKDWIAIKTKTEQEIDKSHKTVGAYIYEALLQNPKQKIKGKLVRTIERKFYREELKKILERQKEFHPELQSDDLYNDCIRELYRNNEAHQITLSKKDFVHLLLNDLIFYQRPLRSQKSSVSNCTLEFRKYKDENGVEHAQYLKTIPKSNPYYQEFRVWQWMFNLNIYRKDDDTNVTKEFLSSTEDYETLFEFLNNRKEVDQKALLRHFKLNEKTHRWNYVEDKKYPCNETKTMISTRLEKVENYPSDFLTREMEQNIWHIIYSVNDKIEYEKALKSFAHKNNLDENSFFEAFKKFPPFKSEYGSFSEKAIKKLLPLLRLGKYWNWESIDRKSQGRIEKIITGEFDGNIKDKVREKAIHLTAENDFQGLQLWLAQYIVYGRHSEASMIGKWNSADDLEEFLKGFKQHSLRNPIVEQVITETLRVVKDIWLKYGNGAKDFFSEIHIELGREMKQTKDERVDATKRITENENTNLRIKALLAEMMNDNSVENIRPYSPMQQEILKIYEDGILKSDIEIDDDILKISKTAQPSSSDLKRYKLWLEQRYKSPYTGQIIPLNKLFTSEYEIEHIIPQSRYFDDSFSNKIICESAVNKLKDNYIGLGFIKQFGGMIVECGFGKSVEIFKAEEYEDFVKKHYANNRSKRNKLLLEEIPEKMIDRQLNDTRHISKYISGVLSNIVRQEDGTDEGVNSKNIVPGNGKITTQLKQDWGLNDVWNELILPRFERMNQLTNSTDFTSWNKNHQKFLPTVPIEFSKGFSKKRIDHRHHAMDALVIACATKDHINLLNNQSAKSDTKRYDLKRKLMKFERVVYSHSKTGEKIEKEVPKQFLKPWDNFTVDAKNKMETIIVSFKQNLRVINKATNHYEKWIEKDGIKRKELIKQEGTNWAIRKPMHKETVSGKVDLPGIKIPKGKILTATRKSLDTSFDLKTINSITDTGIQKILKNYLEFKGSSELAFSPEGIEDMNKNIEKFNDGKPHQSINKVRIFELGSKFSVGQTGNKKDKYVEAAKGTNLFFAVYEDKNGKRSYETIPLNEVIERQKQGLDSVSFKNKEDFLLCPNDLVYVPSEDELENIYNIDFKNLTTEKTGNIYKVVSFSGNQIFFIRQDIAISIVNKAEFSTLNKMERAIDGSMIKENCIKLKIDRLGNIAKI

SEQ ID NO: 164 - protein, 1021 aa, Clostridium cellulolyticum
MKYTLGLDVGIASVGWAVIDKDNNKIIDLGVRCFDKAEESKTGESLATARRIARGMRRRISRRSQRLRLVKKLFVQYEIIKDSSEFNRIFDTSRDGWKDPWELRYNALSRILKPYELVQVLTHITKRRGFKSNRKEDLSTTKEGVVITSIKNNSEMLRTKNYRTIGEMIFMETPENSNKRNKVDEYIHTIAREDLLNEIKYIFSIQRKLGSPFVTEKLEHDFLNIWEFQRPFASGDSILSKVGKCTLLKEELRAPTSCYTSEYFGLLQSINNLVLVEDNNTLTLNNDQRAKIIEYAHFKNEIKYSEIRKLLDIEPEILFKAHNLTHKNPSGNNESKKFYEMKSYHKLKSTLPTDIWGKLHSNKESLDNLFYCLTVYKNDNEIKDYLQANNLDYLIEYIAKLPTFNKFKHLSLVAMKRIIPFMEKGYKYSDACNMAELDFTGSSKLEKCNKLTVEPIIENVTNPVVIRALTQARKVINAIIQKYGLPYMVNIELAREAGMTRQDRDNLKKEHENNRKAREKISDLIRQNGRVASGLDILKWRLWEDQGGRCAYSGKPIPVCDLLNDSLTQIDHIYPYSRSMDDSYMNKVLVLTDENQNKRSYTPYEVWGSTEKWEDFEARIYSMHLPQSKEKRLLNRNFITKDLDSFISRNLNDTRYISRFLKNYIESYLQFSNDSPKSCVVCVNGQCTAQLRSRWGLNKNREESDLHHALDAAVIACADRKIIKEITNYYNERENHNYKVKYPLPWHSFRQDLMETLAGVFISRAPRRKITGPAHDETIRSPKHFNKGLTSVKIPLTTVTLEKLETMVKNTKGGISDKAVYNVLKNRLIEHNNKPLKAFAEKIYKPLKNGTNGAIIRSIRVETPSYTGVFRNEGKGISDNSLMVRVDVFKKKDKYYLVPIYVAHMIKKELPSKAIVPLKPESQWELIDSTHEFLFSLYQNDYLVIKTKKGITEGYYRSCHRGTGSLSLMPHFANNKNVKIDIGVRTAISIEKYNVDILGNKSIVKGEPRRGMEKYNSFKSN

SEQ ID NO: 165 - protein, 1065 aa, Clostridium perfringens
  Clostridium perfringens C str. JGS1495
MNKDINYALGLDIGITSVGWAVINLDLNRIEDLGVRIFNAAENPKDGSSLALPRRLARGRRRLLRRKAYRVERVRKLIVKNNILTKEELEGLFKNKEVIDVWEARVKGLDYKLSREEWAKILINFCKRRGFKSNRKNETKDKEAGQILSSISYNIEKMKETNSRTIGEYIYNEVKNSDDSYAPLRNKFGEYKMCVSRDVLREEIHTLFEKQRELGNNFASDEIEDKYFEIFNSQRPFSNFEDLEKLVGFCTFERKKHKRAPKHCISSEEFTLYEGINKLSIIKDGEKRKLSEEERTLVVNEAFNKKEIKYTTLRKLLGLSEDELFSTLTYSIDKDISKTENTKFVSLKGYHEIKRAIEKGVSKKAWQDIENNRNLLNDIAYVLTLGKTDDEIEKQLRLRNVPEELFESLLDMSFSKFNNLSIYALEKILPFMKEGYQYNEACEKAGYNFKAIYEGVRTKKLPVIEIDEIVNPVVNRALAQTRKVINSVIDKYGSPVRINIELARDLAKNFKDRKLIEKEQKENRANLDKIRENLRELMDKEPTAVEVLKYRLWEQQRGECAYTQSQIALERLFSPGYCEIDHIIPFSRSFDDSLSNKILVLGSENQRKGNKIPYEYFGEDSERWNSFEIWVKGSYLNYKKKANLLKKKFTEEEQRDWKARNLQDTKYICRYISNFVNNRLEFKESENKQKVITVNGRATAYLRSRWGLNKVREDGDKHHALDAAVVGVTTQGMVQKISKYSKAHELYTVRKNDEFVDVETGECVDVDEYKEIRKDILPRPWRGFSEELKLRLSDNPLEELKKLPIETYNEEFIKENVKPIFVSRVPFRKISGKLFKETIYSERAFKDGYFVSKKSLVDLKRGDLDNFYNYECDKKLYDAISERMKEFNYNGKKAFESPFRKPTKSGKEGPVVRSVKIKSAAPFKDGIPMNEGLVAKEGMVRIDIYEKEGKYFVVPVYRYQLAKGIVPKRAAIAGKSELKWPIMDQTYNFKFSIFKNDLIEIKYAKKDGYFGYYDGFDRHTASLVIENHDNSDRYRGIGVKTGVVEFNKYEVDVLGNYHKVNLGGN

SEQ ID NO: 166 - protein, 1065 aa, Clostridium perfringens
  Clostridium perfringens D str. JGS1721
MNKDINYALGLDIGITSVGWAVINLDLNRIEDLGVRIFNAAENLKDGSSLALPRRLARGRRRLLRRKAYRVERVRKLILKNNILTKEELEGLFKNKEVIDVWEARVKGLDYKLSREEWAKILINFCKRRGFKSNRKNEAKDKEAGQILSSISYNIEKMKETNSRTIGEYIYNEVKNSEDSYAPLRNKFGEYKMCVSRDVIREEIHTLFEKQRELGNNFASDEIEDKYFEIFNSQRPFSNFEDLEKLVGFCTFERKKHKRAPKHCISSEEFTLYEGINKLSIIKDGEKRKLSEEERTLVVNEAFNKKEIKYTTLRKLLGLSEEELFSTLTYSIDKDISKTENTKFVSLKGYHEIKRAIEKGVSKKAWQDIENNRNLLNDIAYVLTLGKTDDEIEKQLRLRNVPEELFESLLDMSFNKFNNLSIYALEKILPFMKEGYQYNEACEKAGYNFKAIYEGVRTKKLPVIEIDEIVNPVVNRALAQTRKVINSVIDKYGSPVRINIELARDLAKNFKDRKLIEKEQKENRANLDKIRENLRELMDKEPTVVEVLKYRLWEQQRGECAYTQSQIPLERLFSPGYCEIDHIIPFSRSFDDSLSNKILVLGSENQRKGNRTPYEYFGEDSERWNSFEIWVKGSYLNYKKKANLLKKKFSEEEQRDWKARNLQDTKYICRYISNFVNNRLEFKESENKQKVITVNGRATAYLRSRWGLNKVREDGDKHHALDAAVVGVTTQGMVQKISKYSKAHELYTVRKNDEFVDVETGECVDVDEYKEIRKDILPRPWRGFSEELKLRLSDNPLEELKKSPIETYNEEFIKENVKPIFVSRVPFRKISGKLFKETIYSERAFKDGYFVSKKSLVDLKRGDLDNFYNYECDKKLYDAISERMKEFNYNGKKAFESPFRKPTKSGKEGPVVRSVKIKSAVPFKDGIPMNEGLVAKEGMVRIDIYEKEGKYFVVPVYRYQLAKGIVPKRAAIAKKDELKWPIMDQTYNFKFSIYKNDLIEVKYDKKGVYFGYYDGFDRNSASLTIEKHDNSERYRSIGLKVGVLEINKYEVDVLGNYHKVKLGGN

SEQ ID NO: 167 - protein, 1116 aa, Clostridium spiroforme
  Clostridium spiroforme DSM 1552
MVEFLLKEMKIMGRLVLGLDIGITSVGYGVIDIDKNEFVDYGVRLFKEGTAINNEERRSKRGARRLKRRKTNRIADMKKLLERNGLIDEQYTALNNPYEIRKKGLKNKLSNYELATAILHITKNRGTCLESNADETQDEESTKNILSKNALELKDKYICEIQLARLEESGKIRGINNNFKTEDYLKELSKILENQDLEKETIDKIKEIVARRRRYDQGPGSEKSPTPYGSYRMENGELVHVNLIDMMRGKCSVFPDQLRAPQQSYSAELFNLLNDLNNLKINGEKLSSTEKQKIIDFVNEKGGITVKQLLKLIDVGITEISGFRIDKNEKPLITEFKGYKKVLKVFKNYNQESLLNDKSIVDTIMDINTKIKSIDERSDQLKQVLPSLDTSIINDLASIKGVSGYHSLSLKALNLINNEMLKTEMNQMQVLHQLDIFDKNRVSLKGQRQIYADDNAILSPVAKRAHRETFKVINKLRSIYGEFDSIVIETTRDKNTQDQKKRIKNNQKNYEERNTEVNNFLKEAGYNPENINAKTKMKIRLYIEQDAKSAYTLQDINLKELIEDEKAYEIDHIIPISISLDDSFNNKVLTTHDENQEKGNLTPISAFLKGKFHNGNLNTYKVFIQNNKNLNRKKKEYLLCEDDITRYEVVQNFINRNLVDTSYACRTVMNTLVHYFKDNEINTKVHTIKGQATSTFRKRIGLIKDREEDYFHHAIDALIVASLKKMNLINSYLMKVDFNEMYDEETGEIFNVLPDNSYLDEKYISFVSNLKNIYEESNKYIRGVMIKEKMTYPLIKVSHKIDTKPNRKISDDTIYSTRNVDNQDMLVERIKNIYDPKENAANTLINDIINDNTDKYIMYHKDPQTFDKIKAIVLNHFNEFKTDKNCYIVTKEGLYKLKGTSPLALYYEEFGPITKYAKKNNGPTIHSMKFYSEKLGNHLSITHKYSTVNKKVITKQISPYRTDFYQSPEGKYKFVTVRYKDVAYNAKKDKYIIDHSWYREQKKLKKIADEWIFVCSVHRDELIGIMKADGQKRIFDSSTESDGETLYHDAKTYEILKFTATNNDITGRFEVKPIYCYCKKQLMVSIGTCRKIQKFATDVLGNLYIVKDNVLKLEFK

SEQ ID NO: 168 - protein, 1338 aa, Coprococcus catus
  Coprococcus catus GD/7
MKQEYFLGLDMGTGSLGWAVTDSTYQVMRKHGKALWGTRLFESASTAEERRMFRTARRRLDRRNWRIQVLQEIFSEEISKVDPGFFLRMKESKYYPEDKRDAEGNCPELPYALFVDDNYTDKNYHKDYPTIYHLRKMLMETTEIPDIRLVYLVLHHMMKHRGHFLLSGDISQIKEFKSTFEQLIQNIQDEELEWHISLDDAAIQFVEHVLKDRNLTRSTKKSRLIKQLNAKSACEKAILNLLSGGTVKLSDIFNNKELDESERPKVSFADSGYDDYIGIVEAELAEQYYIIASAKAVYDWSVLVEILGNSVSISEAKIKVYQKHQADLKTLKKIVRQYMTKEDYKRVFVDTEEKLNNYSAYIGMTKKNGKKVDLKSKQCTQADFYDFLKKNVIKVIDHKEITQEIESEIEKENFLPKQVTKDNGVIPYQVHDYELKKILDNLGTRMPFIKENAEKIQQLFEFRIPYYVGPLNRVDDGKDGKFTWSVRKSDARIYPWNFTEVIDVEASAEKFIRRMTNKCTYLVGEDVLPKDSLVYSKFMVLNELNNLRLNGEKISVELKQRIYEELFCKYRKVTRKKLERYLVIEGIAKKGVEITGIDGDFKASLTAYHDFKERLTDVQLSQRAKEAIVLNVVLFGDDKKLLKQRLSKMYPNLTTGQLKGICSLSYQGWGRLSKTFLEEITVPAPGTGEVWNIMTALWQTNDNLMQLLSRNYGFTNEVEEFNTLKKETDLSYKTVDELYVSPAVKRQIWQTLKVVKEIQKVMGNAPKRVFVEMAREKQEGKRSDSRKKQLVELYRACKNEERDWITELNAQSDQQLRSDKLFLYYIQKGRCMYSGETIQLDELWDNTKYDIDHIYPQSKTMDDSLNNRVLVKKNYNAIKSDTYPLSLDIQKKMMSFWKMLQQQGFITKEKYVRLVRSDELSADELAGFIERQIVETRQSTKAVATILKEALPDTEIVYVKAGNVSNFRQTYELLKVREMNDLHHAKDAYLNIVVGNAYFVKFTKNAAWFIRNNPGRSYNLKRMFEFDIERSGEIAWKAGNKGSIVTVKKVMQKNNILVTRKAYEVKGGLFDQQIMKKGKGQVPIKGNDERLADIEKYGGYNKAAGTYFMLVKSLDKKGKEIRTIEFVPLYLKNQIEINHESAIQYLAQERGLNSPEILLSKIKIDTLFKVDGFKMWLSGRTGNQLIFKGANQLILSHQEAAILKGVVKYVNRKNENKDAKLSERDGMTEEKLLQLYDTFLDKLSNTVYSIRLSAQIKTLTEKRAKFIGLSNEDQCIVLNEILHMFQCQSGSANLKLIGGPGSAGILVMNNNITACKQISVINQSPTGIYEKEIDLIKL

SEQ ID NO: 169 - protein, 1384 aa, Coriobacterium glomerans
MKLRGIEDDYSIGLDMGTSSVGWAVTDERGTLAHFKRKPTWGSRLFREAQTAAVARMPRGQRRRYVRRRWRLDLLQKLFEQQMEQADPDFFIRLRQSRLLRDDRAEEHADYRWPLFNDCKFTERDYYQRFPTIYHVRSWLMETDEQADIRLIYLALHNIVKHRGNFLREGQSLSAKSARPDEALNHLRETLRVWSSERGFECSIADNGSILAMLTHPDLSPSDRRKKIAPLFDVKSDDAAADKKLGIALAGAVIGLKTEFKNIFGDFPCEDSSIYLSNDEAVDAVRSACPDDCAELFDRLCEVYSAYVLQGLLSYAPGQTISANMVEKYRRYGEDLALLKKLVKIYAPDQYRMFFSGATYPGTGIYDAAQARGYTKYNLGPKKSEYKPSESMQYDDFRKAVEKLFAKTDARADERYRMMMDRFDKQQFLRRLKTSDNGSIYHQLHLEELKAIVENQGRFYPFLKRDADKLVSLVSFRIPYYVGPLSTRNARTDQHGENRFAWSERKPGMQDEPIFPWNWESIIDRSKSAEKFILRMTGMCTYLQQEPVLPKSSLLYEEFCVLNELNGAHWSIDGDDEHRFDAADREGIIEELFRRKRTVSYGDVAGWMERERNQIGAHVCGGQGEKGFESKLGSYIFFCKDVFKVERLEQSDYPMIERIILWNTLFEDRKILSQRLKEEYGSRLSAEQIKTICKKRFTGWGRLSEKFLTGITVQVDEDSVSIMDVLREGCPVSGKRGRAMVMMEILRDEELGFQKKVDDFNRAFFAENAQALGVNELPGSPAVRRSLNQSIRIVDEIASIAGKAPANIFIEVTRDEDPKKKGRRTKRRYNDLKDALEAFKKEDPELWRELCETAPNDMDERLSLYFMQRGKCLYSGRAIDIHQLSNAGIYEVDHIIPRTYVKDDSLENKALVYREENQRKTDMLLIDPEIRRRMSGYWRMLHEAKLIGDKKFRNLLRSRIDDKALKGFIARQLVETGQMVKLVRSLLEARYPETNIISVKASISHDLRTAAELVKCREANDFHHAHDAFLACRVGLFIQKRHPCVYENPIGLSQVVRNYVRQQADIFKRCRTIPGSSGFIVNSFMTSGFDKETGEIFKDDWDAEAEVEGIRRSLNFRQCFISRMPFEDHGVFWDATIYSPRAKKTAALPLKQGLNPSRYGSFSREQFAYFFIYKARNPRKEQTLFEFAQVPVRLSAQIRQDENALERYARELAKDQGLEFIRIERSKILKNQLIEIDGDRLCITGKEEVRNACELAFAQDEMRVIRMLVSEKPVSRECVISLFNRILLHGDQASRRLSKQLKLALLSEAFSEASDNVQRNVVLGLIAIFNGSTNMVNLSDIGGSKFAGNVRIKYKKELASPKVNVHLIDQSVTGMFERRTKIGL

SEQ ID NO: 170 - protein, 1099 aa, Corynebacterium accolens
  Corynebacterium accolens ATCC 49725
MSLSYRVGIDVGTYSLGCTAIEVDDNDQPVNILSSVSLIHDSGLDPDQQKRAVTRLASSGVARRTRRLYRRRRRRMINLEKFLTSQGWETRPFEHYSDPYLPWNARVALVNGYISDDAQRGMYLSIAFRHIANHRGWRNPYWKVSSLYSPDKPSDAFEQIRKELEESTGHKIPETVTVGQLISFAQFGKDRLRGGGKKKDEKKPQEQVNQAVISARLHQIDHAREINEICRVQKIDDALRKQILDLVFAAESPKGAQIGRVGKDPLQPKLPRALKASDAFQQYRIVALAGNLRIYRDGVSTPLDRDEKLIVFNYLINLSHKEEPSWLKVAEVLNIDRGQLHGTATMTDDGERAGAAPPVHDTNRTILGCKIKPLVHWWEGANDDERAAMLKALSNSEVEDFDSPAGAQTQAFFANLDESEQEKLDSLHLPIGRAAYSEDTLMRLTSRMLDENLDLYEARLAEFDIPKDWAPPAPRIGEPVGNPAVDRVLKGVARWLEAAADEWGAPKSVVIEHVRDGFISKSKANEIDRANNARHKRNRELFKQMQENLGIDGKLRSSDLWRYQSVQRQNCQCAYCGSPITYTTCEMDHIVPRAGEGSTNTRDNLVATCHRCNLAKKNIPFAVWAAQTNIPGVSVKEALDRTRHWSEDSGMTSKDFKKFRKNVCDRLKRTVVDEPLDARSMESVAWMANELRGRVAQRFQEENTVVNVYRGELTAEARRAAGISDKLRFIDGTGKSRLDRRHHAVDAAVVAFTQNYVAETLAIRSNKKREAQLLQAAEQWKEFTGSDAEHRAAWNAWLPKMQKLAVLLQKALDEDRIAVTSNLRLRLGNGRAHEDSIGELKTIRVGDAISVTDIDRASSEALWCALTREPDFDENNGLPENPDRRIRIHGTWYDAEDDIEVFPVGAGAIKVRGGYAELSRFHHARIYKIPGKKAPVYCMLRVYNADLIRHRHEDLFSVEIKPQTMSVRQAEPKLRKALAENTAEYLGWLVTDDELVIDTSNFNTGQIAEMQSELGQVRRWRLDGFYSPSTLRLRPLQMSAEGLREDTSIGAKKIIDRPGWLPAINKLFGEGHVTVVRRDALGRARLTSNAHLPISWKAE

SEQ ID NO: 171 - protein, 1099 aa, Corynebacterium accolens
  Corynebacterium accolens ATCC 49726
MSLLYRVGIDVGTYSLGCTAIEVDDNDQPVSILSSVSLIHDSGLDPDQQKRAVTRLASSGVARRTRRLYRRRRRRMVKLENFLTAQGWETLPFERYSDPYLPWHARVALVNGYISDDTQRGQYLSIAFRHIANHRGWRNPYWKVSSLYSPDKPSDAFEQIRKELEASTGRQIPETATVGQLISFAQFGKDRLRGGGKQKDKKKPQEQVNQAVISARLHQIDHAREINEICRVQKIDDTLRKQILDLVFAAESPKGAQKGRVGKDPLQPKLFRALKASDAFQQYRIAALTGNLRIYRNGVTVPLDRDEKLIVFNYLVNLPKKEEPSWLKIAEILNIDRGQLRGTATMTDDGERAGATPPVHDTNRTILDSKVKPLAHWWENASDDERAAMLKSLSNSEVEDFDSPAGAQVQAFFADLDETEQEKLDSLHLPMGRAAYSEDTLMRLTNRMLDENLDLYEARLAEFGIPKDWAPPAPRIGEPVGNPAVDRVLKGVARWLEAAADEWGAPKSVVIEHVRDGFVSKSKAIEIDRANNNRHKRNRELFQKMQENLGIEGKVRSSDLWRYQSVQRQNCQCAYCGSPITYTTCEMDHIVPRAGEGSTNTRDNLVATCHRCNLAKKNIPFAVWAEKSTIPGVSVKEALDRTRHWSEDSGMSKKDFQKFRKNVCERLNRTVVDEPLDARSMESVAWMANELRGRVAQRFQEENTTVNVYRGALTAEARRAAGITDKLRFIDGTGKSRLDRRHHAVDAAVVAFIHNYVAETLAIRSNKKREAQLLQGTSQWKEFTGSDDKHRAVWNAWIPKMQKLAVLLQIALDEDRIVVTSNLRLRLGNGRAHEDTISELKTIRVGDAISVTDIDRASSEALWCALTREPDFDEKDGLPENPNRRIRVHGTWYDAEDEIEVFPVGAGAIKVRGGYAKLSRFHHARVYKIPGKKAPIYCMLRVYNTDLVQHRHEDLFSVELKPQTMSVRQAEPKLRKALAENTAEYLGWLVTDDELIIDTSTFRTGLIEEMQSEFGLVRRWRLDGFDSPSLLTLRPLHMSAEGLPDDCALGSRKIIDTKGWRVSINKVFNAGNTTVVRRDALGRARLTSNAHLPISWKEE

SEQ ID NO: 172 - protein, 1084 aa, Corynebacterium diphtheriae
MKYHVGIDVGTFSVGLAAIEVDDAGMPIKTLSLVSHIHDSGLDPDKIKSAVTRLASSGIARRTRRLYRRKRRRLQQLDKFIQRQGWPVIELEDYSDPLYPWKVRAELAASYIADEKERGEKLSVALRHIARHRGWRNPYAKVSSLYLPDEPSDAFKAIREEIKRASGQPVPETATVGQMVTLCELGTLKLRGEGGVLSARLQQSDHAREIQEICRMQEIGQELYRKIIDVVFAAESPKGSASSRVGKDPLQPGKNRALKASDAFQRYRIAALIGNLRVRVDGEKRILSVEEKNLVFDHLVNLAPKKEPEWVTIAEILGIDRGQLIGTATMTDDGERAGARPPTHDTNRSIVNSRIAPLVDWWKTASALEQHAMVKALSNAEVDDFDSPEGAKVQAFFADLDDDVHAKLDSLHLPVGRAAYSEDTLVRLTRRMLADGVDLYTARLQEFGIEPSWTPPAPRIGEPVGNPAVDRVLKTVSRWLKSATKTWGAPERVIIEHVREGFVTEKRAREMDGDMRRRAARNAKLFQEMQEKLNVQGKPSRADLWRYQSVQRQNCQCAYCGSPITFSNSEMDHIVPRAGQGSTNTRENLVAVCHRCNQSKGNTPFAIWAKNTSIEGVSVKEAVERTRHWVTDTGMRSTDFKKFTKAVVERFQRATMDEEIDARSMESVAWMANELRSRVAQHFASHGTTVRVYRGSLTAEARRASGISGKLEFLDGVGKSRLDRRHHAIDAAVIAFTSDYVAETLAVRSNLKQSQAHRQEAPQWREFTGKDAEHRAAWRVWCQKMEKLSALLTEDLRDDRVVVMSNVRLRLGNGSAHEETIGKLSKVKLGSQLSVSDIDKASSEALWCALTREPDFDPKDGLPANPERHIRVNGTHVYAGDNIGLFPVSAGSIALRGGYAELGSSFHHARVYKITSGKKPAFAMLRVYTIDLLPYRNQDLFSVELKPQTMSMRQAEKKLRDALATGNAEYLGWLVVDDELVVDTSKIATDQVKAVEAELGTIRRWRVDGFFGDTRLRLRPLQMSKEGIKKESAPELSKIIDRPGWLPAVNKLFSEGNVTVVRRDSLGRVRLESTAHLPVTWKVQ

SEQ ID NO: 173 - protein, 1084 aa, Corynebacterium diphtheriae
MKYHVGIDVGTFSVGLAAIEVDDAGMPIKTLSLVSHIHDSGLDPDKMKSAVTRLASSGIARRTRRLYRRKRRRLQQLDKFIQRQGWPVIELEDYSDPLYPWKVRAELAASYIADEKERGEKLSVALRHIARHRGWRNPYAKVSSLYLPDEPSDAFKSIREEIKRASGQPVPETATVGQMVTLCELGTLKLRGEGGVLSARLQQSDHAREIQEICRMQEIGQELYRKIIDVVFAAESPKGSASSRVGKDPLQPGKNRALKASDAFQRYRIAALIGNLRVRVDGEKRILSVEEKNLVFDHLVNLAPKKEPEWVTIAEILGIDRGQLIGTATMTDDGERAGARPPTHDTNRSIVNSRIAPLVDWWKTASALEQHAMVKALSNAEVDDFDSPEGAKVQAFFADLDDDVHAKLDSLHLPVGRAAYSEDTLVRLTRRMLADGVDLYTARLQEFGIEPSWTPPAPRIGEPVGNPAVDRVLKTVSRWLESATKTWGAPERVIIEHVREGFVTEKRAREMDGDMRRRAARNAKLFQEMQEKLNVQGKPSRADLWRYQSVQRQNCQCAYCGSPITFSNSEMDHIVPRAGQGSTNTRENLVAVCHRCNQSKGNTPFAIWAKNTSIEGVSVKEAVERTRHWVTDTGMRSTDFKKFTKAVVERFQRATMDEEIDARSMESVAWMANELRSRVAQHFASHGTTVRVYRGSLTAEARRASGISGKLEFLDGVGKSRLDRRHHAIDAAVIAFTSDYVAETLAVRSNLKQSQAHRQEAPQWREFTGKDAEHRAAWRVWCQKMEKLSALLTEDLRDDRVVVMSNVRLRLGNGSAHEETIGKLSKVKLGSQLSVSDIDKASSEALWCALTREPDFDPKDGLPANPERHIRVNGTHVYAGDNIGLFPVSAGSIALRGGYAELGSSFHHARVYKITSGKKPAFAMLRVYTIDLLPYRNQDLFSVELKPQTMSMRQAEKKLRDALATGNAEYLGWLVVDDELVVDTSKIATDQVKAVEAELGTIRRWRVDGFFGDTRLRLRPLQMSKEGIKKESAPELSKIIDRPGWLPAVNKLFSEGNVTVVRRDSLGRVRLESTAHLPVTWKVQ

SEQ ID NO: 174 - protein, 1084 aa, Corynebacterium diphtheriae
MKYHVGIDVGTFSVGLAAIEVDDAGMPIKTLSLVSHIHDSRLDPDKIKSAVTRLASSGIARRTRRLYRRKRRRLQQLDKFIQRQGWPVIELEDYSDPLYPWKVRAELAASYIADEKERGEKLSVALRHIARHRGWRNPYAKVSSLYLPDEPSDAFKAIREEIKRASGQPVPETATVGQMVTLCELGTLKLRGEGGVLSARLQQSDHAREIQEICRMQEIGQELYRKIIDVVFAAESPKGSASSRVGKDPLQPGKNRALKASDAFQRYRIAALIGNLRVRVDGEKRILSVEEKNLVFDHLVNLAPKKEPEWVTIAEILGIDRGQLIGTATMTDDGERAGARPPTHDTNRSIVNSRIAPLVDWWKTASALEQHAMVKALSNAEVDDFDSPEGAKVQAFFADLDDDVHAKLDSLHLPVGRAAYSEDTLVRLTRRMLADGVDLYTARLQEFGIEPSWTPPAPRIGEPVGNPAVDRVLKTVSRWLESATKTWGAPERVIIEHVREGFVTEKRAREMDGDMRRRAARNAKLFQEMQEKLNIQGKPSRADLWRYQSVQRQNCQCAYCGSPITFSNSEMDHIVPRAGQGSTNTRENLVAVCHRCNQSKGNTPFAIWAKNTSIEGVSVKEAVERTRHWVTDTGMRSTDFKKFTKAVVERFQRVTMDEEIDARSMESVAWMANELRSRVAQHFASRGTTVRVYRGSLTAEARRASGISGKLEFLDGVGKSRLDRRHHAIDAAVIAFTSDYVAETLAVRSNLKQSQAHRQEAPQWREFTGKDAEHRAAWRVWCQKMEKLSALLTEDLRDDRVVVMSNVRLRLGNGSAHEETIGKLSKVKLGSQLSVSDIDKASSEALWCALTREPDFDPKDGLPANPERHIRVNGTHVYAGDNIGLFPVSAGSIALRGGYAELGSSFHHARVYKITSGKKPAFAMLRVYTIDLLPYRNQDLFSVELKPQTMSMRQAEKKLRDALATGNAEYLGWLVVDDELVVDTSKIATDQVKAVEAELGTIRRWRVDGFFGDTRLRLRPLQMSKEGIKKESAPELSKIIDRPGWLPAVNKLFSEGNVTVVRRDSLGRVRLESTAHLPVTWKVQ

SEQ ID NO: 175 - protein, 1084 aa, Corynebacterium diphtheriae
  Corynebacterium diphtheriae bv. intermedius str. NCTC 5011
MKYHVGIDVGTFSVGLAAIEVDDAGMPIKTLSLVSHIHDSGLDPDEIKSAVTRLASSGIARRTRRLYRRKRRRLQQLDKFIQRQGWPVIELEDYSDPLYPWKVRAELAASYIADEKERGEKLSVALRHIARHRGWRNPYAKVSSLYLPDGPSDAFKAIREEIKRASGQPVPETATVGQMVTLCELGTLKLRGEGGVLSARLQQSDHAREIQEICRMQEIGQELYRKIIDVVFAAESPKGSASSRVGKDPLQPGKNRALKASDAFQRYRIAALIGNLRVRVDGEKRILSVEEKNLVFDHLVNLAPKKEPEWVTIAEILGIDRGQLIGTATMTDDGERAGARPPTHDTNRSIVNSRIAPLVDWWKTASALEQHAMVKALSNAEVDDFDSPEGAKVQAFFADLDDDVHAKLDSLHLPVGRAAYSEDTLVRLTRRMLADGVDLYTARLQEFGIEPSWTPPAPRIGEPVGNPAVDRVLKTVSRWLESATKTWGAPERVIIEHVREGFVTEKRAREMDGDMQRRAARNAKLFQEMQEKLNVQGKPSRADLWRYQSVQRQNCQCAYCGSPITFSNSEMDHIVPRAGQGSTNTRENLVAVCHRCNQSKGNTPFAIWAKNTSIEGVSVKEAVERTRHWVTDTGMRSPDFKKFTKAVVERFQRATMDEEIDARSMESVAWMANELRSRVAQHFASHGTTVRVYRGSLTAEARRASGISGKLKFFDGVGKSRLDRRHHAIDAAVIAFTSDYVAETLAVRSNLKQSQAHRQEAPQWREFTGKDAEHRAAWRVWCQKMEKLSALLTEDLRDDRVVVMSNVRLRLGNGSAHKETIGKLSKVKLGSQLSVSDIDKASSEALWCALTREPDFDPKEGLPANPERHIRVNGTHVYAGDNIGLFPVSAGSIALRGGYAELGSSFHHARVYKITSGKKPAFAMLRVYTIDLLPYRNQDLFSVELKPQTMSMRQAEKKLRDALATGNAEYLGWLVVDDELVVDTSKIATDQVKAVEAELGTIRRWRVDGFFSPSKLRLRPLQMSKEGIKKESAPELSKIIDRPGWLPAVNKLFSDGNVTVVRRDSLGRVRLESTAHLPVTWKVQ

SEQ ID NO: 176 - protein, 1084 aa, Corynebacterium diphtheriae
MKYHVGIDVGTFSVGLAAIEVDDAGMPIKTLSLVSHIHDSGLDPDKIKSAVTRLASSGIARRTRRLYRRKRRRLQQLDKFIQRQGWPVIELEDYSDPLYPWKVRAELAASYIADEKERGEKLSVALRHIARHRGWRNPYAKVSSLYLPDEPSDAFKAIREEIKRASGQPVPETATVGQMVTLCELGTLKLRGEGGVLSARLQQSDHAREIQEICRMQEIGQELYRKIIDVVFAAESPKGSASSRVGKDPLQPGKNRALKASDAFQRYRIAALIGNLRVRVDGEKRILSVEEKNLVFDHLVNLAPKKEPEWVTIAEILGIDRGQLIGTATMTDDGERAGARPPTHDTNRSIVNSRIAPLVDWWKTASALEQHAMVKALSNAEVDDFDSPEGAKVQAFFADLDDDVHAKLDSLHLPVGRAAYSEDTLVRLTRRMLADGVDLYTARLQEFGIEPSWTPPAPRIGEPVGNPAVDRVLKTVSRWLESATKTWGAPERVIIEHVREGFVTEKRAREMDGDMRRRAARNAKLFQEMQEKLNVQGKPSRADLWRYQSVQRQNCQCAYCGSPITFSNSEMDHIVPRAGQGSTNTRENLVAVCHRCNQSKGNTPFAIWAKNTSIEGVSVKEAVERTRHWVTDTGMRSTDFKKFTKAVVERFQRATMDEEIDARSMESVAWMANELRSRVAQHFASHGTTVRVYRGSLTAEARRASGISGKLEFLDGVGKSRLDRRHHAIDAAVIAFTSDYVAETLAVRSNLKQSQAHRQEAPQWREFTGKDAEHRAAWRVWCQKMEKLSALLTEDLRDDRVVVMSNVRLRLGNGSAHEETIGKLSKVKLGSQLSVSDIDKASSEALWCALTREPDFDPKDGLPANPERHIRVNGTHVYAGDNIGLFPVSAGSIALRGGYAELGSSFHHARVYKITSGKKPAFAMLRVYTIDLLPYRNQDLFSVELKPQTMSMRQAEKKLRDALATGNAEYLGWLVVDDELVVDTSKIATDQVKAVEAELGTIRRWRVDGFFGDTRLRLRPLQMSKEGIKKESAPELSKIIDRPGWLPAVNKLFSEGNVTVVRRDSLGRVRLESTAHLPVTWKVQ

SEQ ID NO: 177 - protein, 1084 aa, Corynebacterium diphtheriae
MKYHVGIDVGTFSVGLAAIEVDDAGMPIKTLSLVSHIHDSGLDPDEIKSAVTRLASSGIARRTRRLYRRKRRRLQQLDKFIQRQGWPVIELEDYSDPLYPWKVRAELAASYIADEKERGEKLSVALRHIARHRGWRNPYAKVSSLYLPDGPSDAFKAIREEIKRASGQPVPETATVGQMVTLCELGTLKLRGEGGVLSARLQQSDHAREIQEICRMQEIGQELYRKIIDVVFAAESPKGSASSRVGKDPLQPGKNRALKASDAFQRYRIAALIGNLRVWVDGEKRILSVEEKNLVFDHLVNLTPKKEPEWVTIAEILGIDRGQLIGTATMTDDGERAGARPPTHDTNRSIVNSRIAPLVDWWKTASALEQHAMVKALSNAEVDDFDSPERAKVQAFFADLDDDVHAKLDSLHLPVGRAAYSEDTLVRLTRRMLSDGVDLYTARLQEFGIEPSWTPPTPRIGEPVGNPAVDRVLKTVSRWLESATKTWGAPERVIIEHVREGFVTEKRAREMDGDMRRRAARNAKLFQEMQEKLNVQGKPSRADLWRYQSVQRQNCQCAYCGSPITFSNSEMDHIVPRAGQGSTNTRENLVAVCHRCNQSKGNTPFAIWAKNTSIEGVSVKEAVERTRHWVTDTGMRSTDFKKFTKAVVERFQRATMDEEIDARSMESVAWMANELRSRVAQHFASHGTTVRVYRGSLTAEARRASGISGKLEFLDGVGKSRLDRRHHAIDAAVIAFTSDYVAETLAVRSNLKQSQAHRQEAPQWREFTGKDAEHRATWRVWCQKMEKLSALLTEDLRDDRVVVMSNVRLRLGNGSAHEETIGKLSKVKLGSQLSVSDIDKASSEALWCALTREPDFDPKDGLPANPERHIRVNGTHVYAGDNIGLFPVSAGSIALRGGYAELGSSFHHARVYKITSGKKPAFAMLRVYTIDLLPYRNQDLFSVELKPQTMSMRQAEKKLRDALATGNAEYLGWLVVDDELVVDTSKIATDQVKAVEAELGTIRRWRVDGFFGDTRLRLRPLQMSKEGIKKESAPELSKIIDRPGWLPAVNKLFSEGNVTVVRRDSLGRVRLESTAHLPVTWKVQ

SEQ ID NO: 178 - protein, 1084 aa, Corynebacterium diphtheriae
MKYHVGIDVGTFSVGLAAIEVDDAGMPIKTLSLVSHIHDSGLDPDEIKSAVTRLASSGIARRTRRLYRRKRRRLQQLDKFIQRQGWPVIELEDYSDPLYPWKVRAELAASYIADEKERGEKLSVALRHIARHRGWRNPYAKVSSLYLPDGPSDAFKAIREEIKRASGQPVPETATVGQMVTLCELGTLKLRGEGGVLSARLQQSDYAREIQEICRMQEIGQELYRKIIDVVFAAESPKGSASSRVGKDPLQPGKNRALKASDAFQRYRIAALIGNLRVRVDGEKRILSVEEKNLVFDHLVNLTPKKEPEWVTIAEILGIDRGQLIGTATMTDDGERAGARPPTHDTNRSIVNSRIAPLVDWWKTASALEQHAMVKALSNAEVDDFDSPEGAKVQAFFADLDDDVHAKLDSLHLPVGRAAYSEDTLVRLTRRMLSDGVDLYTARLQEFGIEPSWTPPTPRIGEPVGNPAVDRVLKTVSRWLESATKTWGAPERVIIEHVREGFVTEKRAREMDGDMRRRAARNAKLFQEMQEKLNVQGKPSRADLWRYQSVQRQNCQCAYCGSPITFSNSEMDHIVPRAGQGSTNTRENLVAVCHRCNQSKGNTPFAIWAKNTSIEGVSVKEAVERTRHWVTDTGMRSTDFKKFTKAVVERFQRATMDEEIDARSMESVAWMANELRSRVAQHFASHGTTVRVYRGSLTAEARRASGISGKLKFFDGVGKSRLDRRHHAIDAAVIAFTSDYVAETLAVRSNLKQSQAHRQEAPQWREFTGKDAEHRAAWRVWCQKMEKLSALLTEDLRDDRVVVMSNVRLRLGNGSAHKETIGKLSKVKLSSQLSVSDIDKASSEALWCALTREPGFDPKEGLPANPERHIRVNGTHVYAGDNIGLFPVSAGSIALRGGYAELGSSFHHARVYKITSGKKPAFAMLRVYTIDLLPYRNQDLFSVELKPQTMSMRQAEKKLRDALATGNAEYLGWLVVDDELVVDTSKIATDQVKAVEAELGTIRRWRVDGFFSPSKLRLRPLQMSKEGIKKESAPELSKIIDRPGWLPAVNKLFSDGNVTVVRRDSLGRVRLESTAHLPVTWKVQ

SEQ ID NO: 179 - protein, 1084 aa, Corynebacterium diphtheriae
MKYHVGIDVGTFSVGLAAIEVDDAGMPIKTLSLVSHIHDSGLDPDKMKSAVTRLASSGIARRTRRLYRRKRRRLQQLDKFIQRQGWPVIELEDYSDPLYPWKVRAELAASYIADEKERGEKLSVALRHIARHRGWRNPYAKVSSLYLPDEPSDAFKSIREEIKRASGQPVPETATVGQMVTLCELGTLKLRGEGGVLSARLQQSDHAREIQEICRMQEIGQELYRKIIDVVFAAESPKGSASSRVGKDPLQPGKNRALKASDSFQRYRIAALISNLRVRVDGEKRILSVEEKNLVFDHLVNLAPKKEPEWVTIAEILGIDRGQLIGTATMTDDGERAGARPPTHDTNRSIVNSRIAPLVDWWKTASALEQHAMVKALSNAEVDDFDSPEGAKVQAFFADLDDDVHAKLDSLHLPVGRAAYSEDTLVRLTRRMLADGVDLYTARLQEFGIEPSWTPPAPRIGEPVGNPAVDRVLKTVSRWLESATKTWGAPERVIIEHVRDGFVTEKRAREMDGDMRRRAARNAKLFQEMQEKLNVQGKPSRADLWRYQSVQRQNCQCAYCGSPITFSNSEMDHIVPRAGQGSTNTRENLVAVCHRCNQSKGNTPFAIWAKNTSIEGVSVKEAVERTRHWVTDTGMRSTDFKKFTKAVVERFQRATMDEEIDARSMESVAWMANELRSRVAQHFASHGTTVRVYRGSLTAEARRASGISGKLEFLDGVGKSRLDRRHHAIDAAVIAFTSDYVAETLAVRSNLKQSQAHRQEAPQWREFTGKDAEHRAAWRVWCQKMEKLSALLTEDLRDDRVVVMSNVRLRLGNGSAHEETIGKLSKVKLGSQLSVSDIDKASSEALWCALTREPDFDPKDGLPANPERHIRVNGTHVYAGDNIGLFPVSAGSIALRGGYAELGSSFHHARVYKITSGKKPAFAMLRVYTIDLLPYRNQDLFSVELKPQTMSMRQAEKKLRDALATGNAEYLGWLVVDDELVVDTSKIATDQVKAVEAELGTIRRWRVDGFFGDTRLRLRPLQMSKEGIKKELAPELSKIIDRPGWLPAVNKLFSEGNVTVVRRDSLGRVRLESTAHLPVTWKVQ

SEQ ID NO: 180 - protein, 1089 aa, Corynebacterium matruchotii
  Corynebacterium matruchotii ATCC 14266
MNSANVNYRVGIDVGSYSLGMAAIAIDDDGKPTEILSAISLIHDSGVDPDSAKSAATRLATSGIARRTRRLYRRKRKRLAKLDKFISSQGWPLKEFEKYEDPFYPWRVRAELATTAITDQQELGEKLSIALRHIARHRGWRNPYSKVTALYTVTEPSDAFLAMQEECAKQLGRTIPETITVGQLVTGMNLGKTRLRGENSLLAARPRQSDNANEIHTIAKVQGLSNELVRQIIDHVFAAESPKGSAAEQVGKDPLQPTKKRALKASDAFQQYRIAALIGNLRIRGGKGNRRLTTEETRLVFDYLRSLPAKQEPTWQLVAEQLKIDRGNLVGTAIMTDDGERAGAKPPVHDTNRIMENTKIKPLATWWKSADADARAAMVKALSNAEVDDFDSQAGAQVQEFFFGISDEDQEKLDGLHLPIGRAAYSEDTLDRLTKRMIGEGMDLYEARQAEFKISNDWAPPAPEIGERVGNPAVDRVLKATARWLNAAERQWGAPKSVNIEHVRAAFMSESSARELDRDNQQRAKRNVKVVAEMQEKLGIEGRPSRADVWRFQSIQRQNGKCAYCGAEISFKNSEMDHIIPQAGEGSTNTRDNLVAVCRECNSSKSNIAFAVWAENTSRPGVSVQKAIERTHHWVTDSGLRKPEFDKFRKQVCDRLRRKATDEPIDARSLESVAWMANELRSRIAQKFKDGDTKVRVYKGALTAEARRASGISGKLEFVDGKGKSRLDRRHHAVDAAVVAFTSNYVAETLALRSNMKFDQELRRKAPQWREFTGSDHVHQVEWTKWKYRMQALAELLNNALVQDRIVVMHNLRLRLGNGAAHEDTIGKLTRLKVGDAISTTDIDRASSEALWCALTRDPDYDPKTGLPENPNRTIRIHGTHLTASDEITVFPVAAASIPIRDGFAKLGSNYHHVRLFRVPSGKKYKYCLMQVYTVDLLKFRKEDLFTVELKPQTISVRTCEALLRKALANGTAEYLGWLVSDDELLIDTSSFDTPGIVKLREEYGPVNRWRLAGLTSVTRLNLRPLYLSKEGLKPNVNPEIKKIIDNRSWIITVNKLFSSGHVKIIRRDALGRPRLHSAAHLPICWEVK

SEQ ID NO: 181 - protein, 1069 aa, Corynebacterium matruchotii
  Corynebacterium matruchotii ATCC 33806
MAAIAIDDDGKPTEILSAISLIHDSGVDPDSAKSAATRLATSGIARRTRRLYRRKRKRLAKLDKFISSQGWPLKEFEKYEDPFYPWRVRAELATTAITDQQELGEKLSIALRHIARHRGWRNPYSKVTALYTVTEPSDAFLAMQEECAKQLGRTIPETITVGQLVTGMNLGKTRLRGENSLLAARPRQSDNANEIHTIAKVQGLSNELVRQIIDHVFAAESPKGSAAEQVGKDPLQPTKKRALKASDAFQQYRIAALIGNLRIRGGKGNRRLTTEETRLVFDYLRSLPAKQEPTWQLVAEQLKIDRGNLVGTAIMTDDGERAGAKPPVHDTNRIMENTKIKPLATWWKSADADARAAMVKALSNAEVDDFDSQAGAQVQEFFFGISDEDQEKLDGLHLPIGRAAYSEDTLDRLTKRMIGEGMDLYEARQAEFKISNDWAPPAPEIGERVGNPAVDRVLKATARWLNAAERQWGAPKSVNIEHVRAAFMSESSARELDRDNQQRAKRNVKVVAEMQEKLGIEGRPSRADVWRFQSIQRQNGKCAYCGAEISFKNSEMDHIIPQVGEGSTNTRDNLVAVCRECNSSKSNIAFAVWAENTSRPGVSVQKAIERTHHWVTDSGLRKPEFDKFRKQVCDRLRRKATDEPIDARSLESVAWMANELRSRIAQKFKDGDTKVRVYKGALTAEARRASGISGKLEFVDGKGKSRLDRRHHAVDAAVVAFTSNYVAETLALRSNMKFDQELRRKAPQWREFTGSDHVHQVEWTKWKYRMQALAELLNNALVQDRIVVMHNLRLRLGNGAAHEDTIGKLTRLKVGDAISTTDIDRASSEALWCALTRDPDYDPKTGLPENPNRTIRIHGTHLTASDEITVFPVAAASIPIRDGFAKLGSNYHHVRLFRVPSGKKYKYCLMQVYTVDLLKFRKEDLFTVELKPQTISVRTCEALLRKALANGTAEYLGWLVSDDELLIDTSSFDTPGIVKLREEYGPVNRWRLAGLTSVTRLNLRPLYLSKEGLKPNVNPEIKKIIDNRSWIITVNKLFSSGHVKIIRRDALGRPRLHSAAHLPICWEVK

SEQ ID NO: 182 - protein, 1079 aa, Dinoroseobacter shibae
MRLGLDIGTSSIGWWLYETDGAGSDARITGVVDGGVRIFSDGRDPKSGASLAVDRRAARAMRRRRDRYLRRRATLMKVLAETGLMPADPAEAKALEALDPFALRAAGLDEPLPLPHLGRALFHLNQRRGFKSNRKTDRGDNESGKIKDATARLDMEMMANGARTYGEFLHKRRQKATDPRHVPSVRTRLSIANRGGPDGKEEAGYDFYPDRRHLEEEFHKLWAAQGAHHPELTETLRDLLFEKIFFQRPLKEPEVGLCLFSGHHGVPPKDPRLPKAHPLTQRRVLYETVNQLRVTADGREARPLTREERDQVIHALDNKKPTKSLSSMVLKLPALAKVLKLRDGERFTLETGVRDAIACDPLRASPAHPDRFGPRWSILDADAQWEVISRIRRVQSDAEHAALVDWLTEAHGLDRAHAEATAHAPLPDGYGRLGLTATTRILYQLTADVVTYADAVKACGWHHSDGRTGECFDRLPYYGEVLERHVIPGSYHPDDDDITRFGRITNPTVHIGLNQLRRLVNRIIETHGKPHQIVVELARDLKKSEEQKRADIKRIRDTTEAAKKRSEKLEELEIEDNGRNRMLLRLWEDLNPDDAMRRFCPYTGTRISAAMIFDGSCDVDHILPYSRTLDDSFPNRTLCLREANRQKRNQTPWQAWGDTPHWHAIAANLKNLPENKRWRFAPDAMTRFEGENGFLDRALKDTQYLARISRSYLDTLFTKGGHVWVVPGRFTEMLRRHWGLNSLLSDAGRGAVKAKNRTDHRHHAIDAAVIAATDPGLLNRISRAAGQGEAAGQSAELIARDTPPPWEGFRDDLRVRLDRIIVSHRADHGRIDHAARKQGRDSTAGQLHQETAYSIVDDIHVASRTDLLSLKPAQLLDEPGRSGQVRDPQLRKALRVATGGKTGKDFENALRYFASKPGPYQAIRRVRIIKPLQAQARVPVPAQDPIKAYQGGSNHLFEIWRLPDGEIEAQVITSFEAHTLEGEKRPHPAAKRLLRVHKGDMVALERDGRRVVGHVQKMDIANGLFIVPHNEANADTRNNDKSDPFKWIQIGARPAIASGIRRVSVDEIGRLRDGGTRPI

SEQ ID NO: 183 - protein, 1332 aa, Dolosigranulum pigrum
  Dolosigranulum pigrum ATCC 51524
MQKNYTIGLDIGTNSVGWAVMKDDYTLIRKRMKVLGNTDIKKIKKNFWGVRLFDEGETAKETRLKRGTRRRYQRRRNRLIYLQDIFQQPMLAIDENFFHRLDDSFFVPDDKSYDRHPIFGSLEEEVAYHNTYPTIYHLRKHLADNPEKADLRLVYTALAHIVKYRGHFLIEGELNTENTSISETFEQFLDTYSDIFKEQLVGDISKVEEILSSKQSRSRKHEQIMALFPNENKLGNFGRFMMLIVGNTSNFKPVFDLDDEYKLKLSDETYEEDLDTLLGMTDDVFLDVFMAAKNVYDAVEMSAIISTDTGNSKAVLSNQMINFYDEHKVDLAQLKQFFKTHLPDKYYECFSDPSKNGYAGYIDGKTNQEDFYKYIEKVMKTIKSDKKDYFLDKIDREVFLRKQRSFYNSVIPHQIHLQEMQAILDRQSQYYPFLAENRDKIESLVTFRIPYYVGPLTVSDQSEFAWMERQSDEPIRPWNFDEIVNKERSAEKFIERMTNMDTYLLEEKVLPKRSLLYQTFEVYNELTKVRYTNEQGKTEKLNRQQKAEIIETLFKQKNRVREKDIANYLEQYGYVDGTDIKGVEDKFNASLSTYNDLAKIDGAKAYLDDPEYADVWEDIIKILTIFEDKAMRKKQLQTYSDTLSPEILKKLERKHYTGWGRFSKKLINGLRDEGSNKTILDYLKSDEGSSGPTNRNFMQLIRDNTLSFKKKIEDAQTIEDTTHIYDTVAELPGSPAIKKGIRQALKIVEEIIDIIGYEPENIVVEMARESQTTKKGKDLSKERLEKLTEAIKEFDGPSDVKVKDLKNENLRNDRLYLYYLQNGRDMYTNEPLDINNLSKYDIDHIIPQSFTTDNSIDNKVLVSRTKNQGNKSDDVPSINIVHKMKPFWRQLHKAGLISDRKFKNLTKAEHGGLTEADRAHFLNRQLVETRQITKHVANLLDSQYNTAEEQRINIVLLKSSMTSRFRKEFKLYKVREINDYHHGHDAYLNAVVATTIMKVYPNLKPQFVYGQYKKTSMFKEEKATARKHFYSNITKFFKKEKVVNEETGEILWDTERHLSTIKRVLSWKQMNIVKKVEKQKGQLWKETIYPKGDSSKLIPVKEGMDPQKYGGLSQVSEAFAVVITHEKGKKKQLKSDLISIPIVDQKAYEQHPTAYLEEAGYNNPTVLHELFKYQLFELEDGSRRMIASAKEFQKGNQMVLPLELVELLYHANRYDKVKFPDSIEYVHDNLAKFDDLLEYVIDFSNKYINADKNVQKIQKIYKEHGTEDVELTVESFVNLMTFTAMGAPATFKFYGESITRSRYTSITEFRGSTLIFQSITGLYETRYKLEDN

SEQ ID NO: 184 - protein, 1340 aa, Dorea longicatena
  Dorea longicatena DSM 13814
MEQEYYLGLDMGTGSVGWAVTDSEYHVLRKHGKALWGVRLFESASTAEERRMFRTSRRRLDRRNWRIEILQEIFAEEISKKDPGFFLRMKESKYYPEDKRDINGNCPELPYALFVDDDFTDKDYHKKFPTIYHLRKMLMNTEETPDIRLVYLAIHHMMKHRGHFLLSGDINEIKEFGTTFSKLLENIKNEELDWNLELGKEEYAVVESILKDNMLNRSTKKTRLIKALKAKSICEKAVLNLLAGGTVKLSDIFGLEELNETERPKISFADNGYDDYIGEVENELGEQFYIIETAKAVYDWAVLVEILGKYTSISEAKVATYEKHKSDLQFLKKIVRKYLTKEEYKDIFVSTSDKLKNYSAYIGMTKINGKKVDLQSKRCSKEEFYDFIKKNVLKKLEGQPEYEYLKEELERETFLPKQVNRDNGVIPYQIHLYELKKILGNLRDKIDLIKENEDKLVQLFEFRIPYYVGPLNKIDDGKEGKFTWAVRKSNEKIYPWNFENVVDIEASAEKFIRRMTNKCTYLMGEDVLPKDSLLYSKYMVLNELNNVKLDGEKLSVELKQRLYTDVFCKYRKVTVKKIKNYLKCEGIISGNVEITGIDGDFKASLTAYHDFKEILTGTELAKKDKENIITNIVLFGDDKKLLKKRLNRLYPQITPNQLKKICALSYTGWGRFSKKFLEEITAPDPETGEVWNIITALWESNNNLMQLLSNEYRFMEEVETYNMGKQTKTLSYETVENMYVSPSVKRQIWQTLKIVKELEKVMKESPKRVFIEMAREKQESKRTESRKKQLIDLYKACKNEEKDWVKELGDQEEQKLRSDKLYLYYTQKGRCMYSGEVIELKDLWDNTKYDIDHIYPQSKTMDDSLNNRVLVKKKYNATKSDKYPLNENIRHERKGFWKSLLDGGFISKEKYERLIRNTELSPEELAGFIERQIVETRQSTKAVAEILKQVFPESEIVYVKAGTVSRFRKDFELLKVREVNDLHHAKDAYLNIVVGNSYYVKFTKNASWFIKENPGRTYNLKKMFTSGWNIERNGEVAWEVGKKGTIVTVKQIMNKNNILVTRQVHEAKGGLFDQQIMKKGKGQIAIKETDERLASIEKYGGYNKAAGAYFMLVESKDKKGKTIRTIEFIPLYLKNKIESDESIALNFLEKGRGLKEPKILLKKIKIDTLFDVDGFKMWLSGRTGDRLLFKCANQLILDEKIIVTMKKIVKFIQRRQENRELKLSDKDGIDNEVLMEIYNTFVDKLENTVYRIRLSEQAKTLIDKQKEFERLSLEDKSSTLFEILHIFQCQSSAANLKMIGGPGKAGILVMNNNISKCNKISIINQSPTGIFENEIDLLKI

SEQ ID NO: 185 - protein, 1380 aa, Eggerthella sp.
  Eggerthella sp. YY7918
MNLRHVGNYNIGLDMGTASVGWAAIDEQGELLHFKGKPTWGSRLFDSANTAATARMPRGQRRRYIRRRWRLDLLQKFFSEEMAEKDPEFFIRLRQSSLWPEDREGGHTAYHWPLFNDSDFNEKEYYEKFPTIFHLRQWLMETDEKADIRLIYLAFHNIVKHRGNFLQENNDSLSAQNANMRESLESFCIALEEWCDEKELTCSCDPQKLEHLFKEVKYRSDIRDGFAALLGLACSGENEVDVKAMAKEMGKAIVGYKADFSKIFTECDKEGSSFRLSDDEGPEAFLDICPDDGIALFEAIQMVYSSFILTGMLTEKGLSLSKISAYNQYGQDLESLKALVKEYVPNEYSSFFRGPTYSGSTEYDPSKAQGYTRYNLGPSKKGSGAKPMAYEDFKKSVEQLFANTNAINDERYKEMMGRFAEEKFLRRLRTSDNGRIPFQLNLEEMTAIIINQGKYYPFLLEQQEKLESLVRFRIPYYVGPLTRINARLDSKGNACFAWSKRKDGMDSASIKPWNWDEVIDKHASAQAFIERMTGTCTYLRGEPVLPRCSLLYEEYCVLNELNGARWTQDGDKFIRFDYKDRSDIIEELFKKRRGRIQYAAVADWMKQERSHANVHVSGGQGENAFESRLSSYHFFCNDVFGVDELPGSYVDMVEEIILWSTLFEDRSILREEIQRKYGDVLNEEQIKTICKKRFSGWGRLSRKLLCSLKAQTDNGPKSIMDILQEGDQNNGRVGRAMVFQEILHDEQLGFEQKIEEENTQSMLEGENLLIEDLPGSPAIRRSINQAVRIVDEIVGIAGHAPDNIFIEVTREDDTKKKGKRTTTRYSNIQKALEALKEEGAEALRELKTYKHNELDKRLSLYFMQNGKSLYSGIPLDIRRLSEYQIDHIIPQSYIKDDSYENMALVLPGENQSKADNLLISQDIRIKMKATWTALHKAGLMGDKKYNNLMNSSISDAKMKGFINRQLVETSQSVKLTQMMLSQKYPGAKVRPIKASISSQLRDACDLVKCREANDYHHAHDAYLACQVGRFVLKRHSSMFDNPIGMTKVIRDFVKRQGQEFKRNGKLPAYASRSGFIVQSFMRSGFDAETGELLRDDWNAPFEIARIKRCLNYRDCYISRMPMEDSGAFWDATIYSPKAGKKGALPVKQGLPVEKYGSYSREQFAYFFVYKAYNPKKKAYRLEFEAVPVRVASAVETRENALEEYAKSVAKQAGLEFVEVARPKVYKYQLIELGEDRLYITGKREVRNASQLAFSLDEIDLLKRLAEGEETSSEERERLFDVLIEKYARYAPRLARQLSVDSMSATFETLNAEEQLGILLSLVEIANGKRNMIDLSSAGGSKNAGCMNPTFSSELSSPGSNFTFIDQSVTGMFERRQRLEL

SEQ ID NO: 186 - protein, 1195 aa, Elusimicrobium minutum
MQKNINTKQNHIYIKQAQKIKEKLGDKPYRIGLDLGVGSIGFAIVSMEENDGNVLLPKEIIMVGSRIFKASAGAADRKLSRGQRNNHRHTRERMRYLWKVLAEQKLALPVPADLDRKENSSEGETSAKRFLGDVLQKDIYELRVKSLDERLSLQELGYVLYHIAGHRGSSAIRTFENDSEEAQKENTENKKIAGNIKRLMAKKNYRTYGEYLYKEFFENKEKHKREKISNAANNHKFSPTRDLVIKEAEAILKKQAGKDGFHKELTEEYIEKLTKAIGYESEKLIPESGFCPYLKDEKRLPASHKLNEERRLWETLNNARYSDPIVDIVTGEITGYYEKQFTKEQKQKLFDYLLTGSELTPAQTKKLLGLKNTNFEDIILQGRDKKAQKIKGYKLIKLESMPFWARLSEAQQDSFLYDWNSCPDEKLLTEKLSNEYHLTEEEIDNAFNEIVLSSSYAPLGKSAMLIILEKIKNDLSYTEAVEEALKEGKLTKEKQAIKDRLPYYGAVLQESTQKIIAKGFSPQFKDKGYKTPHTNKYELEYGRIANPVVHQTLNELRKLVNEIIDILGKKPCEIGLETARELKKSAEDRSKLSREQNDNESNRNRIYEIYIRPQQQVIITRRENPRNYILKFELLEEQKSQCPFCGGQISPNDIINNQADIEHLFPIAESEDNGRNNLVISHSACNADKAKRSPWAAFASAAKDSKYDYNRILSNVKENIPHKAWRFNQGAFEKFIENKPMAARFKTDNSYISKVAHKYLACLFEKPNIICVKGSLTAQLRMAWGLQGLMIPFAKQLITEKESESFNKDVNSNKKIRLDNRHHALDAIVIAYASRGYGNLLNKMAGKDYKINYSERNWLSKILLPPNNIVWENIDADLESFESSVKTALKNAFISVKHDHSDNGELVKGTMYKIFYSERGYTLTTYKKLSALKLTDPQKKKTPKDFLETALLKFKGRESEMKNEKIKSAIENNKRLFDVIQDNLEKAKKLLEEENEKSKAEGKKEKNINDASIYQKAISLSGDKYVQLSKKEPGKFFAISKPTPTTTGYGYDTGDSLCVDLYYDNKGKLCGEIIRKIDAQQKNPLKYKEQGFTLFERIYGGDILEVDFDIHSDKNSFRNNTGSAPENRVFIKVGTFTEITNNNIQIWFGNIIKSTGGQDDSFTINSMQQYNPRKLILSSCGFIKYRSPILKNKEG

SEQ ID NO: 187 - protein, 1337 aa, Enterococcus faecalis
  Enterococcus faecalis ATCC 29200
MKKDYVIGLDIGTNSVGWAVMTEDYQLVKKKMPIYGNTEKKKIKKNFWGVRLFEEGHTAEDRRLKRTARRRISRRRNRLRYLQAFFEEAMTDLDENFFARLQESFLVPEDKKWHRHPIFAKLEDEVAYHETYPTIYHLRKKLADSSEQADLRLIYLALAHIVKYRGHFLIEGKLSTENISVKEQFQQFMIIYNQTFVNGESRLVSAPLPESVLIEEELTEKASRTKKSEKVLQQFPQEKANGLFGQFLKLMVGNKADFKKVFGLEEEAKITYASESYEEDLEGILAKVGDEYSDVFLAAKNVYDAVELSTILADSDKKSHAKLSSSMIVRFTEHQEDLKKFKRFIRENCPDEYDNLFKNEQKDGYAGYIAHAGKVSQLKFYQYVKKIIQDIAGAEYFLEKIAQENFLRKQRTFDNGVIPHQIHLAELQAIIHRQAAYYPFLKENQEKIEQLVTFRIPYYVGPLSKGDASTFAWLKRQSEEPIRPWNLQETVDLDQSATAFIERMTNFDTYLPSEKVLPKHSLLYEKFMVFNELTKISYTDDRGIKANFSGKEKEKIFDYLFKTRRKVKKKDIIQFYRNEYNTEIVTLSGLEEDQFNASFSTYQDLLKCGLTRAELDHPDNAEKLEDIIKILTIFEDRQRIRTQLSTFKGQFSAEVLKKLERKHYTGWGRLSKKLINGIYDKESGKTILGYLIKDDGVSKHYNRNFMQLINDSQLSFKNAIQKAQSSEHEETLSETVNELAGSPAIKKGIYQSLKIVDELVAIMGYAPKRIVVEMARENQTTSTGKRRSIQRLKIVEKAMAEIGSNLLKEQPTTNEQLRDTRLFLYYMQNGKDMYTGDELSLHRLSHYDIDHIIPQSFMKDDSLDNLVLVGSTENRGKSDDVPSKEVVKDMKAYWEKLYAAGLISQRKFQRLTKGEQGGLTLEDKAHFIQRQLVETRQITKNVAGILDQRYNANSKEKKVQIITLKASLTSQFRSIFGLYKVREVNDYHHGQDAYLNCVVATTLLKVYPNLAPEFVYGEYPKFQTFKENKATAKAIIYTNLLRFFTEDEPRFTKDGEILWSNSYLKTIKKELNYHQMNIVKKVEVQKGGFSKESIKPKGPSNKLIPVKNGLDPQKYGGFDSPIVAYTVLFTHEKGKKPLIKQEILGITIMEKTRFEQNPILFLEEKGFLRPRVLMKLPKYTLYEFPEGRRRLLASAKEAQKGNQMVLPEHLLTLLYHAKQCLLPNQSESLAYVEQHQPEFQEILERVVDFAEVHTLAKSKVQQIVKLFEANQTADVKEIAASFIQLMQFNAMGAPSTFKFFQKDIERARYTSIKEIFDATIIYQSTTGLYETRRKVVD

SEQ ID NO: 188 - protein, 1337 aa, Enterococcus faecalis
  Enterococcus faecalis ATCC 4200
MKKDYVIGLDIGTNSVGWAVMTEDYQLVKKKMPIYGNTEKKKIKKNFWGVRLFEEGHTAEDRRLKRTARRRISRRRNRLRYLQAFFEEAMTALDENFFARLQESFLVPEDKKWHRHPIFAKLEDEVAYHETYPTIYHLRKKLADSSEQADLRLIYLALAHIVKYRGHFLIEGKLSTENISVKEQFQQFMIIYNQTFVNGESRLVSAPLPESVLIEEELTEKASRTKKSEKVLQQFPQEKANGLFGQFLKLMVGNKADFKKVFGLEEEAKITYASESYEEDLEGILAKVGDEYSDVFLAAKNVYDAVELSTILADSDKKSHAKLSSSMIVRFTEHQEDLKKFKRFIRENCPDEYDNLFKNEQKDGYAGYIAHAGKVSQLKFYQYVKKIIQDIAGAEYFLEKIAQENFLRKQRTFDNGVIPHQIHLAELQAIIHRQAAYYPFLKENQEKIEQLVTFRIPYYIGPLSKGDASTFAWLKRQSEEPIRPWNLQETVDLDQSATAFIERMTNFDTYLSSEKVLPKHSLLYEKFMVFNELTKISYTDDRGIKANFSGKEKEKIFDYLFKTRRKVKKKDIIQFYRNEYNTEIVTLSGLEEDQFNASFSTYQDLLKCGLTRAELDHPDNAEKLEDIIKILTIFEDRQRIRTQLSTFKGQFSAEVLKKLERKHYTGWGRLSKKLINGIYDKESGKTILGYLIKDDGVSKHYNRNFMQLINDSQLSFKNAIQKAQSSEHEETLSETVNELAGSPAIKKGIYQSLKIVDELVAIMGYAPKRIVVEMARENQTTSTGKRRSIQRLKIVEKAMAEIGSNLLKEQPTTNEQLRDTRLFLYYMQNGKDMYTGDELSLHRLSHYDIDHIIPQSFMKDDSLDNLVLVGSTENRGKSDDVPSKEVVKDMKAYWEKLYAAGLISQRKFQRLTKGEQGGLTLEDKAHFIQRQLVETRQITKNVAGILDQRYNANSKEKKVQIITLKASLTSQFRSIFGLYKVREVNDYHHGQDAYLNCVVATTLLKVYPNLAPEFVYGEYPKFQAFKENKATAKAIIYTNLLRFFTEDEPRFTKDGEILWSNSYLKTIKKELNYHQMNIVKKVEVQKGGFSKESIKPKGPSNKLIPVKNGLDPQKYGGFDSPVVAYTVLFTHEKGKKPLIKQEILGITIMEKTRFEQNPILFLEEKGFLRPRVLMKLPKYTLYEFPEGRRRLLASAKEAQKGNQMVLPEHLLTLLYHAKQCLLPNQSESLAYVEQHQPEFQEILERVVDFAEVHTLAKSKVQQIVKLFEANQTADVKEIAASFIQLMQFNAMGAPSTFKFFQKDIERARYTSIKEIFDATIIYQSTTGLYETRRKVVD

SEQ ID NO: 189 - protein, 1337 aa, Enterococcus faecalis
  Enterococcus faecalis D6
MKKDYVIGLDIGTNSVGWAVMTEDYQLVKKKMPIYGNTEKKKIKKNFWGVRLFEEGHTAEDRRLKRTARRRISRRRNRLRYLQAFFEEAMTALDENFFARLQESFLVPEDKKWHRHPIFAKLEDEVAYHETYPTIYHLRKKLADSSEQADLRLIYLALAHIVKYRGHFLIEGKLSTENISVKEQFQQFMIIYNQTFVNGESRLVSAPLPESVLIEEELTEKASRTKKSEKVLQQFPQEKANGLFGQFLKLMVGNKADFKKVFGLEEEAKITYASESYEEDLEGILAKVGDEYSDVFLAAKNVYDAVELSTILADSDKKSHAKLSSSMIVRFTEHQEDLKNFKRFIRENCPDEYDNLFKNEQKDGYAGYITHAGKVSQLKFYQYVKKIIQDIAGAEYFLEKIAQENFLRKQRTFDNGVIPHQIHLAELQAIIHRQAAYYPFLKENQEKIEQLVTFRIPYYVGPLSKGDANTFAWLKRQSEEPIRPWNLQETVDLDQSATAFIERMTNFDTYLPSEKVLPKHSLLYEKFMVFNELTKISYTDDRGIKANFSGKEKEKIFDYLFKTRRKVKKKDIIQFYRNEYNTEIVTLSGLEEDQFNASFSTYQDLLKCGLTRAELDHPDNAEKLEDIIKILTIFEDRQRIRTQLSTFKGQFSAEVLKKLERKHYTGWGRLSKKLINGIYDKESGKTILDYLIKDDGVSKHYNRNFMQLINDSQLSFKNAIQKAQSSEHEETLSETVNELAGSPAIKKGIYQSLKIVDELVAIMGYAPKRIVVEMARENQTTSTGKRRSIQRLKIVEKAMAEIGSNLLKEQPTTNEQLRDTRLFLYYMQNGKDMYTGDELSLHRLSHYDIDHIIPQSFMKDDSLDNLVLVGSTENRGKSDDVPSKEVVKDMKAYWEKLYAAGLISQRKFQRLTKGEQGGLTLEDKAHFIQRQLVETRQITKNVAGILDQRYNAKSKEKKVQIITLKASLTSQFRSIFGLYKVREVNDYHHGQDAYLNCVVATTLLKVYPNLAPEFVYGEYPKFQTFKENKATAKAIIYTNLLRFFTEDEPRFTKDGEILWSNSYLKTIKKELNYHQMNIVKKVEVQKGGFSKESIKPKGPSNKLIPVKNGLDPQKYGGFDSPIVAYTVLFTHEKGKKPLIKQEILGITIMEKTRFEQNPILFLEEKGFLRPRVLMKLPKYTLYQFPEGRRRLLASAKEAQKGNQMVLPEHLLTLLYHAKQCLLPNQSESLAYVEQHQPEFQEILERVVDFAEVHTLAKSKVQQIVKLFEANQTADVKEIAASFIQLMQFNAMGAPSTFKFFQKDIERARYTSIKEIFDATIIYQSTTGLYETRRKVVD

SEQ ID NO: 190 - protein, 1337 aa, Enterococcus faecalis
  Enterococcus faecalis E1Sol
MKKDYVIGLDIGTNSVGWAVMTEDYQLVKKKMPIYGNTEKKKIKKNFWGVRLFEEGHTAEDRRLKRTARRRISRRRNRLRYLQAFFEEAMTDLDENFFARLQESFLVPEDKKWHRHPIFAKLEDEVAYHETYPTIYHLRKKLADSSEQADLRLIYLALAHIVKYRGHFLIEGKLSTENTSVKEQFQQFMVIYNQTFVNGESRLVSAPLPESVLIEEELTEKASRTKKSEKVLQQFPQEKANGLFGQFLKLMVGNKADFKKVFGLEEEAKITYASESYEEDLEGILAKVGDEYSDVFLAAKNVYDAVELSTILADSDKKSHAKLSSSMIVRFTEHQEDLKKFKRFIRENCPDEYDNLFKNEQKDGYAGYIAHAGKVSQLKFYQYVKKIIQDIAGAEYFLEKIAQENFLRKQRTFDNGVIPHQIHLAELQAIIHRQAAYYPFLKENQEKIEQLVTFRIPYYVGPLSKGDASTFAWLKRQSEEPIRPWNLQETVDLDQSATAFIERMTNFDTYLPSEKVLPKHSLLYEKFMVFNELTKISYTDDRGIKANFSGKEKEKIFDYLFKTRRKVKKKDIIQFYRNEYNTEIVTLSGLEEDQFNASFSTYQDLLKCGLTRAELDHPDNAEKLEDIIKILTIFEDRQRIRTQLSTFKGQFSAEVLKKLERKHYTGWGRLSKKLINGIYDKESGKTILDYLVKDDGVSKHYNRNFMQLINDSQLSFKNAIQKAQSSEHEETLSETVNELAGSPAIKKGIYQSLKIVDELVAIMGYAPKRIVVEMARENQTTSTGKRRSIQRLKIVEKAMAEIGSNLLKEQPTTNEQLRDTRLFLYYMQNGKDMYTGDELSLHRLSHYDIDHIIPQSFMKDDSLDNLVLVGSTENRGKSDDVPSKKVVKKMKAYWEKLYAAGLISQRKFQRLTKGEQGGLTLEDKAHFIQRQLVETRQITKNVAGILDQRYNAKSKEKKVQIITLKASLTSQFRSIFGLYKVREVNDYHHGQDAYLNCVVATTLLKVYPNLAPEFVYGEYPKFQAFKENKATAKTIIYTNLMRFFTEDEPRFTKDSEILWSNSYLKTIKKELNYHQMNIVKKVEVQKGGFSKESIKPKGPSNKLIPVKNGLDPQKYGGFDSPVVAYTVLFTHEKGKKPLIKQEILGITIMEKTRFEQNPILFLEEKGFLRPRVLMKLPKYTLYEFPEGRRRLLASAKEAQKGNQMVLPEHLLTLLYHAKQCLLPNQSESLAYVEQHQPEFQEILERVVDFAEVHTLAKSKVQQIVKLFEANQTADVKEIAASFIQLMQFNAMGAPSTFKFFQKDIERARYTSIKEIFDATIIYQSTTGLYETRRKVVD

SEQ ID NO: 191 - protein, 1150 aa, Enterococcus faecalis
  Enterococcus faecalis Fly1
MYSIGLDLGISSVGWSVIDERTGNVIDLGVRLFSAKNSEKNLERRTNRGGRRLIRRKTNRLKDAKKILAAVGFYEDKSLKNSCPYQLRVKGLTEPLSKGEIYKVTLHILKKRGISYLDEDDTEAAKESQDYKEQVRKNAQLLTKYTPGQIQLQRLKENNRVKTGINAQGNYQLNVFKVSAYANELATILKTQQAFYPNELTDDWIALFVQPGIAEEAGLIYRKRPYYHGPGNEANNSPYGRWSDFKKTGQPATNIFDRLIGKDFQGELRASGLSLSAQQYNLLNDLTNLKIDGEIPLSPEQKEYILAELMTKEFTRFGVNDVAKLLGVKKERLSGWRLDKKGKPEIHTLKGYRNWRKIFAESGIDLATLPTETIDCLAKVLTLNTEHEGIENTLAFELPELAESVKLLVLDRYKELSQSVSTQAWHRFSLKTLHLLIPELMNATSEQNTLLEQFQLKSDVRKRYSEYKKLPTKDVLTEIYNPTVNKTVSQAFKVIDALLVKYGKEQIRYITIEMPRDDNEEDEKKRIKELHAKNSQRKNDSQSYFMQKSGWSQEKFQTTIQKNRRFLAKLLYYYEQDGICAYTGLSISPELLVSDSTEIDHIIPISISLDDSINNKVLVLSKANQVKGQQTPYDAWMDGSFKKINGKFSNWDDYQKWVESRHFSHKKENNLLETRNIFDSEQVEKFLARNLNDTRYASRLVLNTLQSFFANHETKVRVVNGSFTHTLRKKWGADLDKTRETHHHHAVDATLCAVTPFVKVSRYHYAVKEETGEKVMREIDFETGEIVDEMSYQEFKKSKKYERKTYQVKWPNFREQLKPVNLHPRIKFSHQVDRKANRKLSDATIYSVREKTEVKTLKSGKQKITTDEYTIGKIKDIYTVDGWEAFKKKQDKLLMKDLDEKTYERLLSIAETTPDFQEVEEKNGKVKRVKRSPFAVYCEENDIPAIQKYAKKNNGPLIRSLKYYDGKLNKHINITKDSQGRPVEKTKNGRKVTLQSLKPYRYDIYQDLETKAYYTVQLYYSDLRFVEGKYGITEKEYMKKVAEQTKGQVVRFCFSLQKNDGLEIEWKDSQRYDVRFYNFQSANSINFKGLEQEMMPAENQFKQKPYNNGAINLNIAKYGKEGKKLRKFNTDILGKKHYLYYEKEPKNIIK

SEQ ID NO: 192 - protein, 1337 aa, Enterococcus faecalis
MKKDYVIGLDIGTNSVGWAVMTEDYQLVKKKMPIYGNTEKKKIKKNFWGVRLFEEGHTAEDRRLKRTARRRISRRRNRLRYLQAFFEEAMTDLDENFFARLQESFLVPEDKKWHRHPIFAKLEDEVAYHETYPTIYHLRKKLADSSEQADLRLIYLALAHIVKYRGHFLIEGKLSTENISVKEQFQQFMIIYNQTFVNGESRLVSAPLPESVLIEEELTEKASRTKKSEKVLQQFPQEKANGLFGQFLKLMVGNKADFKKVFGLEEEAKITYASESYEEDLEGILAKVGDEYSDVFLAAKNVYDAVELSTILADSDKKSHAKLSSSMIVRFTEHQEDLKKFKRFIRENCPDEYDNLFKNEQKDGYAGYIAHAGKVSQLKFYQYVKKIIQDIAGAEYFLEKIAQENFLRKQRTFDNGVIPHQIHLAELQAIIHRQAAYYPFLKENQEKIEQLVTFRIPYYVGPLSKGDASTFAWLKRQSEEPIRPWNLQETVDLDQSATAFIERMTNFDTYLPSEKVLPKHSLLYEKFMVFNELTKISYTDDRGIKANFSGKEKEKIFDYLFKTRRKVKKKDIIQFYRNEYNTEIVTLSGLEEDQFNASFSTYQDLLKCGLTRAELDHPDNAEKLEDIIKILTIFEDRQRIRTQLSTFKGQFSAEVLKKLERKHYTGWGRLSKKLINGIYDKESGKTILDYLVKDDGVSKHYNRNFMQLINDSQLSFKNAIQKAQSSEHEETLSETVNELAGSPAIKKGIYQSLKIVDELVAIMGYAPKRIVVEMARENQTTSTGKRRSIQRLKIVEKAMAEIGSNLLKEQPTTNEQLRDTRLFLYYMQNGKDMYTGDELSLHRLSHYDIDHIIPQSFMKDDSLDNLVLVGSTENRGKSDDVPSKEVVKDMKAYWEKLYAAGLISQRKFQRLTKGEQGGLTLEDKAHFIQRQLVETRQITKNVAGILNQRYNANSKEKKVQIITLKASLTSQFRSIFGLYKVREVNDYHHGQDAYLNCVVATTLLKVYPNLAPEFVYGEYPKFQTFKENKATAKAIIYTNLLRFFTEDEPRFTKDGEILWSNSYLKTIKKELNYHQMNIVKKVEVQKGGFSKESIKPKGPSNKLIPVKNGLDPQKYGGFDSPVVAYTVLFTHEKGKKPLIKQEILGITIMEKTRFEQNPILFLEEKGFLRPRVLMKLPKYTLYEFPEGRRRLLASAKEAQKGNQMVLPEHLLTLLYHAKQCLLPNQSESLAYVEQHQPEFQEILERVVDFAEVHTLAKSKVQQIVKLFEANQTADVKEIAASFIQLMQFNAMGAPSTFKFFQKDIERARYTSIKEIFDATIIYQSTTGLYETRRKVVD

SEQ ID NO: 193 - protein, 1150 aa, Enterococcus faecalis
  Enterococcus faecalis R508
MYSIGLDLGISSVGWSVIDERTGNVIDLGVRLFSAKNSEKNLERRTNRGGRRLIRRKTNRLKDAKKILAAVGFYEDKSLKNSCPYQLRVKGLTEPLSKGEIYKVTLHILKKRGISYLDEDDTEAAKESQDYKEQVRKNAQLLTKYTPGQIQLQRLKENNRVKTGINVQGNYQLNVFKVSAYANELATILKTQQAFYPNELTDDWIALFVQPGIAEEAGLIYRKRPYYHGPGNEANNSPYGRWSDFQKTGEPATNIFDKLIGKDFQGELRASGLSLSAQQYNLLNDLTNLKIDGEVPLSSEQKEYILTELMTKEFTRFGVNDVVKLLGVKKERLSGWRLDKKGKPEIHTLKGYRNWRKIFAEAGIDLATLPTETIDCLAKVLTLNTEREGIENTLAFELPELSESVKLLVLDRYKELSQSISTQSWHRFSLKTLHLLIPELMNATSEQNTLLEQFQLKSDVRKRYSEYKKLPTKDVLAEIYNPTVNKTVSQAFKVIDALLVKYGKEQIRYITIEMPRDDNEEDEKKRIKELHAKNSQRKNDSQSYFMQKSGWSQEKFQTTIQKNRRFLAKLLYYYEQDGICAYTGLPISPELLVSDSTEIDHIIPISISLDDSINNKVLVLSKANQVKGQQTPYDAWMDGSFKKINGKFSNWDDYQKWVESRHFSHKKENNLLETRNIFDSEQVEKFLARNLNDTRYASRLVLNTLQSFFTNQETKVRVVNGSFTHTLRKKWGADLDKTRETHHHHAVDATLCAVTPFVKVSRYHYAVKEETGEKVMREIDFETGEIVNEMSYREFKKSKKYERKTYQVKWPNFREQLKPVNLHPRIKFSHQVDRKANRKLSDATIYSVREKTEVKTLKSGKQKITTDEYTIGKIKDIYTLDGWEAFKKKQDKLLMKDLDEKTYERLLSIAETTPDFQEVEEKNGKVKRVKRSPFAVYCEENDIPAIQKYAKKNNGPLIRSLKYYDGKLNKHINITKDSQGRPVEKTKNGRKVTLQSLKPYRYDIYQDLETKAYYTVQLYYSDLRFVEGKYGITEKEYMKKVAEQTKGQVVRFCFSLQKNDGLEIEWKDSQRYDVRFYNFQSANSINFKGLEQEIMPAENQFKQKPYNNGAINLNIAKYGKEGKKLRKFNTDILGKKHYLFYEKEPKNIIK

SEQ ID NO: 194 - protein, 1150 aa, Enterococcus faecalis
  Enterococcus faecalis T11
MYSIGLDLGISSVGWSVIDERTGNVIDLGVRLFSAKNSEKNLERRTNRGGRRLIRRKTNRLKDAKKILAAVGFYEDKSLKNSCPYQLRVKGLTEPLSKGEIYKVTLHILKKRGISYLDEDDTEAAKESQDYKEQVRENAQLLTKYTPGQIQLQRLKENNRVKTGINAQGNYQLNVFKVSAYANELATILKTQQAFYPNELTDDWIALFVQPGIAEEAGLIYRKRPYYHGPGNEANNSPYGRWSDFKKTGQPATNIFDKLIGKDFQGELRASGLSLSAQQYNLLNDLTNLKIDGEIPLSPEQKEYILAELMTKEFTRFGVNDVVKLLGVKKERLSGWRLDKKGKPEIHTLKGYRNWRKIFAESGIDLAMLPTETIDCLAKILTLNTEREGIENTLAFELPELAESVKLLVLDRYKELSQSVSTQAWHRFSLKTLHLLIPELMNATSEQNTLLEQFQLKSDVRKRYSEYKKLPTKDVLTEIYNPTVNKTVSQAFKVIDALLVKYGKEQIRYITIEMPRDDNEEDEKKRIKELHAKNSQRKNDSQSYFMQKSGWSQEKFQTTIQKNRRFLAKLLYYYEQDGICAYTGLSISPELLVSDSTEIDHIIPISISLDDSINNKVLVLSKANQVKGQQTPYDAWMDGSFKKINGKFSNWDDYQKWVESRHFSHKKENNLLETRNIFDSEQVEKFLARNLNDTRYASRLVLNTLQSFFANQETKVRVVNGSFTHTLRKKWGADLDKTRETHHHHAVDATLCAVTPFVKVSRYHYAVKEETGEKVMREIDFETGEIVDEMSYREFKKSKKYERKTYQVKWPNFREQLKPVNLHPRIKFSHQVDRKANRKLSDATIYSVREKTEVKTLKSGKQKITTDEYTIGKIKDIYTVDGWEAFKKKQDKLLMKDLDEKTYERLLSIAETTPDFQEVEEKNGKVKRVKRSPFAVYCEENDIPAIRKYAKKNNGPLIRSLKYYDGKLNKHINITKDSQGRPVEKTKNGRKVTLQSLKPYRYDIYQDLETKAYYTVQLYYSDLRFVEGKYGITEKEYMKKVAEQTKGQVVRFCFSLQKNDGLEIEWKDSQRYDVRFYNFQSANSINFKGLEQEMMPAENQFKQKPYNNGAINLNIAKYGKEGKKLRKFNTDILGKKHYLYYEKEPKNIIK

SEQ ID NO: 195 - protein, 1150 aa, Enterococcus faecalis
  Enterococcus faecalis TX0012
MYSIGLDLGISSVGWSVIDERTGNVIDLGVRLFSAKNSEKNLERRTNRGGRRLIRRKTNRLKDAKKILAAVGFYEDKSLKNSCPYQLRVKGLTEPLSRGEIYKVTLHILKKRGISYLDEVDTEAAKESQDYKEQVRKNAQLLTKYTPGQIQLQRLKENNRVKTGINAQGNYQLNVFKVSAYANELATILKTQQAFYPNELTDDWIALFVQPGIAEEAGLIYRKRPYYHGPGNEANNSPYGRWSDFQKTGEPATNIFDKLIGKDFQGELRASGLSLSAQQYNLLNDLTNLKIDGEVPLSSEQKEYILTELMTKEFTRFGVNDVVKLLGVKKERLSGWRLDKKGKPEIHTLKGYRNWRKIFAEAGIDLATLPTETIDCLAKVLTLNTEREGIENTLAFELPELSESVKLLVLDRYKELSQSISTQSWHRFSLKTLHLLIPELMNATSEQNTLLEQFQLKSDVRKRYSEYKKLPTKDVLAEIYNPTVNKTVSQAFKVIDALLVKYGKEQIRYITIEMPRDDNEEDEKKRIKELHAKNSQRKNDSQSYFMQKSGWSQEKFQTTIQKNRRFLAKLLYYYEQDGICAYTGLPISPELLVSDSTEIDHIIPISISLDDSINNKVLVLSKANQVKGQQTPYDAWMDGSFKKINGKFSNWDDYQKWVESRHFSHKKENNLLETRNIFDSEQVEKFLARNLNDTRYASRLVLNTLQSFFTNQETKVRVVNGSFTHTLRKKWGADLDKTRETHHHHAVDATLCAVTSFVKVSRYHYAVKEETGEKVMREIDFETGEIVNEMSYWEFKKSKKYERKTYQVKWPNFREQLKPVNLHPRIKFSHQVDRKANRKLSDATIYSVREKTEVKTLKSGKQKITTDEYTIGKIKDIYTLDGWEAFKKKQDKLLMKDLDEKTYERLLSIAETTPDFQEVEEKNGKVKRVKRSPFAVYCEENDIPAIQKYAKKNNGPLIRSLKYYDGKLNKHINITKDSQGRPVEKTKNGRKVTLQSLKPYRYDIYQDLETKAYYTVQLYYSDLRFVEGKYGITEKEYMKKVAEQTKGQVVRFCFSLQKNDGLEIEWKDSQRYDVRFYNFQSANSINFKGLEQEMMPAENQFKQKPYNNGAINLNIAKYGKEGKKLRKFNTDILGKKHYLFYEKEPKNIIK

SEQ ID NO: 196 - protein, 1150 aa, Enterococcus faecalis; identical to SEQ ID NO: 195
  Enterococcus faecalis TX0012

SEQ ID NO: 197 - protein, 1337 aa, Enterococcus faecalis
  Enterococcus faecalis TX0470
MKKDYVIGLDIGTNSVGWAVMTEDYQLVKKKMPIYGNTEKKKIKKNFWGVRLFEEGHTAEDRRLKRTARRRISRRRNRLRYLQAFFEEAMTALDENFFARLQESFLVPEDKKWHRHPIFAKLEDEVAYHETYPTIYHLRKKLADSSEQADLRLIYLALAHIVKYRGHFLIEGKLSTENISVKEQFQQFMIIYNQTFVNGESRLVSTPLPESVLIEEELTEKASRTKKSEKVLQQFPQEKANGLFGQFLKLMVGNKADFKKVFGLEEEAKITYASESYEEDLEGILAKVGDEYSDVFLAAKNVYDAVELSTILADSDKKSHAKLSSSMIVRFTEHQEDLKNFKRFIRENCPDEYDNLFKNEQKDGYAGYITHAGKVSQLKFYQYVKKIIQDIAGAEYFLEKIAQENFLRKQRTFDNGVIPHQIHLAELQAIIHRQAAYYPFLKENQEKIEQLVTFRIPYYVGPLSKGDASTFAWLKRQSEEPIRPWNLQETVDLDQSATAFIERMTNFDTYLPSEKVLPKHSLLYEKFMVFNELTKISYTDDRGIKANFSGKEKEKIFDYLFKTRRKVKKKDIIQFYRNEYNTEIVTLSGLEEDQFNASFSTYQDLLKCGLTRAELDHPDNAEKLEDIIKILTIFEDRQRIRTQLSTFKGQFSAEVLKKLERKHYTGWGRLSKKLINGIYDKESGKTILDYLVKDDGVSKHYNRNFMQLINDSQLSFKNAIQKAQSSEHEETLSETVNELAGSPAIKKGIYQSLKIVDELVAIMGYAPKRIVVEMARENQTTSTGKRRSIQRLKIVEKAMAEIGSNLLKEQPTTNEQLRDTRLFLYYMQNGKDMYTGDELSLHRLSHYDIDHIIPQSFMKDDSLDNLVLVGSTENRGKSDDVPSKEVVKDMKAYWEKLYAAGLISQRKFQRLTKGEQGGLTLEDKAHFIQRQLVETRQITKNVAGILDQRYNAKSKEKKVQIITLKASLTSQFRSIFGLYKVREVNDYHHGQDAYLNCVVATTLLKVYPNLAPEFVYGEYPKFQTFKENKATAKAIIYTNLLRFFTEDEPRFTKDGEILWSNSYLKTIKKELNYHQMNIVKKVEVQKGGFSKESIKPKGPSNKLIPVKNGLDPQKYGGFDSPIVAYTVLFTHEKGKKPLIKQEILGITIMEKTRFEQNPILFLEEKGFLRPRVLMKLPKYTLYEFPEGRRRLLASAKEAQKGNQMVLPEHLLTLLYHAKQCLLPNQSESLAYVEQHQPEFQEILERVVDFAEVHTLAKSKVQQIVKLFEANQTADVKEIAASFIQLMQFNAMGAPSTFKFFQKDIERARYTSIKEIFDATIIYQSTTGLYETRRKVVD

SEQ ID NO: 198 - protein, 1150 aa, Enterococcus faecalis
  Enterococcus faecalis TX1342
MYSIGLDLGVSSVGWSVIDERTGNVIDLGVRLFSAKNSEKNLERRTNRGGRRLIRRKTNRLKDAKKILAAVGFYEDKSLKNSCPYQLRVKGLTEPLSKGEIYKVTLHILKKRGISYLDEDDTEAAKESQDYKEQVRENAQLLTKYTPGQIQLQRLKENNRVKTGINAQGNYQLNVFKVSAYANELATILKTQQAFYPNELTDDWIALFVQPGIAEEAGLIYRKRPYYHGPGNEANNSPYGRWSDFKKTGQPATNIFDKLIGKDFQGELRASGLSLSAQQYNLLNDLTNLKIDGEIPLSPEQKEYILAELMTKEFTRFGINDVAKLLGVKKERLSGWRLDKKGKPEIHTLKGYRNWRKIFAESGIDLATLPTETIDCLAKVLTLNTEREGIENTLAFELPELAESVKLLVLDRYKELSQSVSTQAWHRFSLKTLHLLIPELMNATSEQNTLLEQFQLKSDVRKRYSEYKKLPTKDVLTEIYNPTVNKTVSQAFKVIDALLVKYGKEQIRYITIEMPRDDNEEDEKKRIKELHAKNSQRKNDSQSYFMQKSGWSQEKFQTTIQKNRRFLAKLLYYYEQDGICAYTGLSISPELLVSDSTEIDHIIPISISLDDSINNKVLVLSKANQVKGQQTPYDAWMDGSFKKINGKFSNWDDYQKWVESRHFSHKKENNLLETRNIFDSEQVEKFLARNLNDTRYASRLVLNTLQSFFANQETKVRVVNGSFTHTLRKKWGADLDKTRETHHHHAVDATLCAVTPFVKVSRYHYAVKEETGEKVMREIDFETGEIVDEMSYREFKKSKKYERKTYQVKWPNFREQLKPVNLHPRIKFSHQVDRKANRKLSDATIYSVREKTEVKTLKSGKQKITTDEYTIGKIKDIYTVDGWEAFKKKQDKLLMKDLDEKTYERLLSIAETTPDFQEVEEKNGKVKRVKRSPFAVYCEENDIPAIRKYAKNNNGPLIRSLKYYDGKLNKHINITKDSQGRPVEKTKNGRKVTLQSLKPYRYDIYQDLETKAYYTVQLYYSDLRFVEGKYGITEKEYMKKVAEQTKGQVVRFCFSLQKNDGLEIEWKDSQCYDVRFYNFQSANSINFKGLEQEMMPAENQFKQKPYNNGAINLNIAKYGKEGKKLRKFNTDILGKKHYLYYEKEPKNIIK

SEQ ID NO: 199 - protein, 1337 aa, Enterococcus faecalis
  Enterococcus faecalis TX4244
MKKDYVIGLDIGTNSVGWAVMTEDYQLVKKKMPIYGNTEKKKIKKNFWGVRLFEEGHTAEDRRLKRTARRRISRRRNRLRYLQAFFEEAMTDLDENFFARLQESFLVPEDKKWHRHPIFAKLEDEVAYHETYPTIYHLRKKLADSSEQADLRLIYLALAHIVKYRGHFLIEGKLSTENISVKEQFQQFMIIYNQTFVNGESRLVSAPLPESVLIEEELTEKASRTKKSEKVLQQFPQEKANGLFGQFLKLMVGNKADFKKVFGLEEEAKITYASESYEEDLEGILAKVGDEYSDVFLAAKNVYDAVELSTILADSDKKSHAKLSSSMIVRFTEHQEDLKKFKRFIRENCPDEYDNLFKNEQKDGYAGYIAHAGKVSQLKFYQYVKKIIQDIAGAEYFLEKIAQENFLRKQRTFDNGVIPHQIHLAELQAIIHRQAAYYPFLKENQEKIEQLVTFRIPYYVGPLSKGDASTFAWLKRQSEEPIRPWNLQETVDLDQSATAFIERMTNFDTYLPSEKVLPKHSLLYEKFMVFNELTKISYTDDRGIKANFSGKEKEKIFDYLFKTRRKVKKKDIIQFYRNEYNTEIVTLSGLEEDQFNASFSTYQDLLKCGLTRAELDHPDNAEKLEDIIKILTIFEDRQRIRTQLSTFKGQFSAEVLKKLERKHYTGWGRLSKKLINGIYDKESGKTILGYLIKDDGVSKHYNRNFMQLINDSQLSFKNAIQKAQSSEHEETLSETVNELAGSPAIKKGIYQSLKIVDELVAIMGYAPKRIVVEMARENQTTSTGKRRSIQRLKIVEKAMAEIGSNLLKEQPTTNEQLRDTRLFLYYMQNGKDMYTGDELSLHRLSHYDIDHIIPQSFMKDDSLDNLVLVGSTENLGKSDDVPSKEVVKDMKAYWEKLYAAGLISQRKFQRLTKGEQGGLTLEDKAHFIQRQLVETRQITKNVAGILDQRYNANSKEKKVQIITLKASLTSQFRSIFGLYKVREVNDYHHGQDAYLNCVVATTLLKVYPNLAPEFVYGEYPKFQTFKENKATAKAIIYTNLLRFFTEDEPRFTKDGEILWSNSYLKTIKKELNYHQMNIVKKVEVQKGGFSKESIKPKGPSNKLIPVKNGLDPQKYGGFDSPIVAYTVLFTHEKGKKPLIKQEILGITIMEKTRFEQNPILFLEEKGFLRPRVLMKLPKYTLYEFPEGRRRLLASAKEAQKGNQMVLPEHLLTLLYHAKQCLLPNQSESLAYVEQHQPEFQEILERVVDFAEVHTLAKSKVQQIVKLFEANQTADVKEIAASFIQLMQFNAMGAPSTFKFFQKDIERARYTSIKEIFDATIIYQSTTGLYETRRKVVD

SEQ ID NO: 200 - protein, 1339 aa, Enterococcus faecium
  Enterococcus faecium 1,141,733
MKKEYTIGLDIGTNSVGWSVLTDDYRLVSKKMKVAGNTEKSSTKKNFWGVRLFDEGQTAEARRSKRTARRRLARRRQRILELQKIFAPEILKIDEHFFARLNESFLVLDEKKQSRHPVFATIKQEKSYHQTYPTIYHLRQALADSSEKADIRLVYLAMAHLLKYRGHFLIEGELNTENSSVTETFRQFLSTYNQQFSEADDKQTEKLDEAVDCSFVFTEKMSKTKKAETLLKYFPHEKSNGYLSQFIKLMVGNQGNFKNVFGLEEAKLQFSKETYEEDLEELLEKIGDDYIDLFVQAKNVYDAVLLSEILSDSTKNTRAKLSAGMIRRYDAHKEDLVLLKRFVKENLPKKYRAFFGDNSVNGYAGYIEGHATQEDFYKFVKKELTGIRGSEVFLTKIEQENFLRKQRTFDNGVIPHQIHLTELRAIIANQKKHYPFLKEEQEKLESLLTFKIPYYVGPLAKKQENSPFAWLIRKSEEKIKPWNLPEIVDMEGSAVRFIERMINTDMYMPHNKVLPKNSLLYQKFSIYNELTKVRYQDERGQMNYFSSIEKKEIFHELFEKNRKVTKKDLQEFLYLKYDIKHAELSGIEKAFNASYTTYHDFLTMSENKREMKQWLEDPELASMFEEIIKTLTVFEDREMIKTRLSHHEATLGKHIIKKLTKKHYTGWGRLSKELIQGIRDKQSNKTILDYLINDDDFPHHRNRNFMQLINDDSLSFKKEIKKAQMITDTENLEEIVKELTGSPAIKKGILQSLKIVDEIVGIMGYEPANIVVEMARENQTTGRGLKSSRPRLKALEESLKDFGSQLLKEYPTDNSSLQKDRLYLYYLQNGRDMYTGAPLDIHRLSDYDIDHIIPRSFTTDNSIDNKVLVSSKENRLKKDDVPSEKVVKKMRSFWYDLYSSKLISKRKLDNLTKIKLTEEDKAGFIKRQLVETRQITKHVAGILHHRFNKAEDTNEPIRKVRIITLKSALVSQFRNRFGIYKVREINEYHHAHDAYLNGVVALALLKKYPQLAPEFVYGEYLKFNAHKANKATVKKEFYSNIMKFFESDTPVCDENGEIFWDKSKSIAQVKKVINHHHMNIVKKTEIQKGGFSKETVEPKKDSSKLLPRKNNWDPAKYGGLGSPNVAYTVAFTYEKGKARKRTNALEGITIMEREAFEQSPVLFLKNKGYEQAEIEMKLPKYALFELENGRKRMVASNKEAQKANSFLLPEHLVTLLYHAKQYDEISHKESFDYVNEHHKEFSEVFARVLEFAGKYTLAEKNIEKLEKIYKENQTDDLAKLASSFVNLMQFNAMGAPADFKFFDVTIPRKRYTSLTEIWQSTIIHQSITGLYETRIRMGK

SEQ ID NO: 201 - protein, 1340 aa, Enterococcus faecium
  Enterococcus faecium 1,231,408
MKKEYTIGLDIGTNSVGWSVLTDDYRLVSKKMKVAGNTEKSSTKKNFWGVRLFDEGQTAEARRSKRTARRRLARRRQRILELQKIFAPEILKIDEHFFARLNESFLVPDEKKQSRHPVFATIKQEKSYHQTYPTIYHLRQALADSSEKADIRLVYLAMAHLLKYRGHFLIEGELNTENSSVTETFRQFLSTYNQQFSEAGDKQTEKLDEAVDCSFVFTEKMSKTKKAETLLKYFPHEKSNGYLSQFIKLMVGNQGNFKNVFGLEEEAKLQFSKETYEEDLEELLEKIGDDYIDLFVQAKNVYDAVLLSEILSDSTKNTRAKLSAGMIRRYDAHKEDLVLLKRFVKENLPKKYRAFFGDNSVNGYAGYIEGHATQEAFYKFVKKELTGIRGSEVFLTKIEQENFLRKQRTFDNGVIPHQIHLSELRAIIANQKKHYPFLKEEQEKLESLLTFKIPYYVGPLAKKQENSPFAWLIRKSEEKIKPWNLPEIVDMEGSAVRFIERMINTDMYMPHNKVLPKNSLLYQKFSIYNELTKVRYQDERGQMNYFSSIEKKEIFHELFEKNRKVTKKDLQEFLYLKYDIKHAELSGIEKAFNASYTTYHDFLTMSENKREMKQWLEDPELASMFEEIIKTLTVFEDREMIKTRLSHHEATLGKHIIKKLTKKHYTGWGRLSKELIQGIRDKQSNKTILDYLINDDDFPHHRNRNFMQLINDDSLSFKKEIKKAQMITDTENLEEIVKELTGSPAIKKGILQSLKIVDEIVGIMGYEPANIVVEMARENQTTGRGLKSSRPRLKALEESLKDFGSQLLKEYPTDNSSLQKDRLYLYYLQNGRDMYTGAPLDIHRLSDYDIDHIIPRSFTTDNSIDNKVLVSSKENRLKKDDVPSEKVVKKMRSFWYDLYSSKLISKRKLDNLTKIKLTEEDKAGFIKRQLVETRQITKHVAGILHHRFNKAEDTNDPIRKVRIITLKSALVSQFRNRFGIYKVREINEYHHAHDAYLNGVVALALLKKYPQLAPEFVYGEYLKFNAHKANKATVKKEFYSNIMKFFESDTPVCDENGEIFWDKSKSIAQVKKVINHHHMNIVKKTEIQKGGFSKETVEPKKDSSKLLPRKNNWDPAKYGGLGSPNVAYTVAFTYEKGKARKRTNALEGITIMEREAFEQSPVLFLKNKGYEQAEIEMKLPKYALFELENGRKRMVASNKEAQKANSFLLPEHLVTLLYHAKQYDEISHKESFDYVNEHHKEFSEVFARVLEFAGKYTLAEKNIEKLEKIYKENQTDDLAKLASSFVNLMQFNAMGAPADFKFFDVTIPRKRYTSLTEIWQSTIIHQSITGLYETRIRMGK

SEQ ID NO: 202 - protein, 1339 aa, Enterococcus faecium
  Enterococcus faecium E1133
MKKEYTIGLDIGTNSVGWSVLTDDYRLVSKKMKVAGNTEKSSTKKNFWGVRLFDEGQTAEARRSKRTARRRLARRRQRILELQKIFAPEILKIDEHFFARLNESFLVLDEKKQSRHPVFATIKQEKSYHQTYPTIYHLRQALADSSEKADIRLVYLAMAHLLKYRGHFLIEGELNTENSSVTETFRQFLSTYNQQFSEADDKQTEKLDEAVDCSFVFTEKMSKTKKAETLLKYFPHEKSNGYLSQFIKLMVGNQGNFKNVFGLEEAKLQFSKETYEEDLEELLEKIGDDYIDLFVQAKNVYDAVLLSEILSDSTKNTRAKLSAGMIRRYDAHKEDLVLLKRFVKENLPKKYRAFFGDNSVNGYAGYIEGHATQEDFYKFVKKELTGIRGSEVFLTKIEQENFLRKQRTFDNGVIPHQIHLTELRAIIANQKKHYPFLKEEQEKLESLLTFKIPYYVGPLAKKQENSPFAWLIRKSEEKIKPWNLPEIVDMEGSAVRFIERMINTDMYIPHNKVLPKNSLLYQKFSIYNELTKVRYQDERGQMNYFSSIEKKEIFHELFEKNRKVTKKDLQEFLYLKYDIKHAELSGIEKAFNASYTTYHDFLTMSENKREMKQWLEDPELASMFEEIIKTLTVFEDREMIKTRLSHHEATLGKHIIKKLTKKHYTGWGRLSKELIQGIRDKQSNKTILDYLINDDDFPHHRNRNFMQLINDDSLSFKKEIKKAQMITDTENLEEIVKELTGSPAIKKGILQSLKIVDEIVGIMGYEPANIVVEMARENQTTGRGLKSSRPRLKALEESLKDFGSQLLKEYPTDNSSLQKDRLYLYYLQNGRDMYTGAPLDIHRLSDYDIDHIIPRSFTTDNSIDNKVLVSSKENRLKKDDVPSEKVVKKMRSFWYDLYSSKLISKRKLDNLTKIKLTEEDKAGFIKRQLVETRQITKHVAGILHHRFNKAEDTNEPIRKVRIITLKSALVSQFRNRFGIYKVREINEYHHAHDAYLNGVVALALLKKYPQLAPEFVYGEYLKFNAHKANKATVKKEFYSNIMKFFESDTPVCDENGEIFWDKSKSIAQVKKVINHHHMNIVKKTEIQKGGFSEETVEPKKDSSKLLPRKNNWDPAKYGGLGSPNVAYTVAFTYEKGKARKRTNALEGITIMEREAFEQSPVLFLKNKGYEQAEIEMKLPKYALFELENGRKRMVASNKEAQKANSFLLPEHLVTLLYHAKQYDEISHKESFDYVNEHHKEFSEVFARVLEFAGKYTLAEKNIEKLEKIYKENQTDDLAKLASSFVNLMQFNAMGAPADFKFFDVTIPRKRYTSLTEIWQSTIIHQSITGLYETRIRMGK

SEQ ID NO: 203 - protein, 1340 aa, Enterococcus faecium
  Enterococcus faecium E3083
MKKEYTIGLDIGTNSVGWSVLTDDYRLVSKKMKVAGNTEKSSTKKNFWGVRLFDEGQTAEARRSKRTARRRLARRRQRILELQKIFAPEILKIDEHFFARLNESFLVLDEKKQSRHPVFATIKQEKSYHQTYPTIYHLRQALADSSEKADIRLVYLAMAHLLKYRGHFLIEGELNTENSSVTETFRQFLSTYNQQFSEADDKQTEKLDEAVDCSFVFTEKMSKTKKAETLLKYFPHEKSNGYLSQFIKLMVGNQGNFKNVFGLEEEAKLQFSKETYEEDLEELLEKIGDDYIDLFVQAKNVYDAVLLSEILSDSTKNTRAKLSAGMIRRYDAHKEDLVLLKRFVKENLPKKYRAFFGDNSVNGYAGYIEGHATQEDFYKFVKKELTGIRGSEVFLTKIEQENFLRKQRTFDNGVIPHQIHLTELRAIIANQKKHYPFLKEEQEKLESLLTFKIPYYVGPLAKKQENSPFAWLIRKSEEKIKPWNLPEIVDMEGSAVRFIERMINTDMYIPHNKVLPKNSLLYQKFSIYNELTKVRYQDERGQMNYFSSIEKKEIFHELFEKNRKVTKKDLQEFLYLKYDIKHAELSGIEKAFNASYTTYHDFLTMSENKREMKQWLEDPELASMFEEIIKTLTVFEDREMIKTRLSHHEATLGKHIIKKLTKKHYTGWGRLSKELIQGIRDKQSNKTILDYLINDDDFPHHRNRNCMQLINDDSLSFKKEIKKAQMITDTENLEEIVKELTGSPAIKKGILQSLKIVDEIVGIMGYEPANIVVEMARENQTTGRGLKSSRPRLKALEESLKDFGSQLLKEYPTDNSSLQKDRLYLYYLQNGRDMYTGAPLDIHRLSDYDIDHIIPRSFTTDNSIDNKVLVSSKENRLKKDDVPSEKVVKKMRSFWYDLYSSKLISKRKLDNLTKIKLTEEDKAGFIKRQLVETRQITKHVAGILHHRFNKAEDTNEPIRKVRIITLKSALVSQFRNRFGIYKVREINEYHHAHDAYLNGVVALALLKKYPQLAPEFVYGEYLKFNAHKANKATVKKEFYSNIMKFFESDTPVCDENGEIFWDKSKSIAQVKKVINHHHMNIVKKTEIQKGGFSKETVEPKKDSSKLLPRKNNWDPTKYGGLGSPNVAYTVAFTYEKGKARKRTNALEGITIMEREAFEQSPVLFLKNKGYEQAEIEMKLPKYALFELENGRKRMVASNKEAQKANSFLLPEHLVTLLYHAKQYDEISHKESFDYVNEHHKEFSEVFARVLEFAGKYTLAEKNIEKLEKIYKENQTDDLAKLASSFVNLMQFNAMGAPADFKFFDVTIPRKRYTSLTEIWQSTIIHQSITGLYETRIRMGK

SEQ ID NO: 204 - protein, 1340 aa, Enterococcus faecium
  Enterococcus faecium PC4.1
MKKEYTIGLDIGTNSVGWSVLTDDYRLVSKKMKVAGNTEKSSTKKNFWGVRLFDEGQTAEARRSKRTARRRLARRRQRILELQKIFAPEILKIDEHFFARLNESFLVLDEKKQSRHPVFATIKQEKSYHQTYPTIYHLRQALADSSEKADIRLVYLAMAHLLKYRGHFLIEGELNTENSSVTETFRQFLSTYNQQFSEADDKQTEKLDEAVDCSFVFTEKMSKTKKAETLLKYFPHEKSNGYLSQFIKLMVGNQGNFKNVFGLEEEAKLQFSKETYEEDLEELLEKIGDDYIDLFVQAKNVYDAVLLSEILSDSTKNTRAKLSAGMIRRYDAHKEDLVLLKRFVKENLPKKYRAFFGDNSVNGYAGYIEGHATQEDFYKFVKKELTGIRGSEVFLTKIEQENFLRKQRTFDNGVIPHQIHLTELRAIIANQKKHYPFLKEEQEKLESLLTFKIPYYVGPLAKKQENSPFAWLIRKSEEKIKPWNLPEIVDMEGSAVRFIERMINTDMYIPHNKVLPKNSLLYQKFSIYNELTKVRYQDERGQMNYFSSIEKKEIFHELFEKNRKVTKKDLQEFLYLKYDIKHAELSGIEKAFNASYTTYHDFLTMSENKREMKQWLEDPELASMFEEIIKTLTVFEDREMIKTRLSHHEATLGKHIIKKLTKKHYTGWGRLSKELIQGIRDKQSNKTILDYLINDDDFPHHRNRNFMQLINDDSLSFKKEIKKAQMITDTENLEEIVKELTGSPAIKKGILQSLKIVDEIVGIMGYEPANIVVEMARENQTTGRGLKSSRPRLKALEESLKDFGSQLLKEYPTDNSSLQKDRLYLYYLQNGRDMYTGAPLDIHRLSDYDIDHIIPRSFTTDNSIDNKVLVSSKENRLKKDDVPSEKVVKKMRSFWYDLYSSKLISKRKLDNLTKIKLTEEDKAGFIKRQLVETRQITKHVAGILHHRFNKAEDTNEPIRKVRIITLKSALVSQFRNRFGIYKVREINEYHHAHDAYLNGVVALALLKKYPQLAPEFVYGEYLKFNAHKANKATVKKEFYSNIMKFFESDTPVCDENGEIFWDKSKSIAQVKKVINHHHMNIVKKTEIQKGGFSKETVEPKKDSSKLLPRKNNWDPAKYGGLGSPNVAYTVAFTYEKGKARKRTNALEGITIMEREAFEQSPVLFLKNKGYEQAEIEMKLPKYALFELENGRKRMVASNKEAQKANSFLLPEHLVTLLYHAKQYDEISHKESFDYVNEHHKEFSEVFARVLEFAGKYTLAEKNIEKLEKIYKENQTDDLAKLASSFVNLMQFNAMGAPADFKFFDVTIPRKRYTSLTEIWQSTIIHQSITGLYETRIRMGK

SEQ ID NO: 205 - protein, 1340 aa, Enterococcus faecium
  Enterococcus faecium TX1330
MKKEYTIGLDIGTNSVGWSVLTDDYRLVSKKMKVAGNTEKSSTKKNFWGVRLFDEGQTAEARRSKRTARRRLARRRQRILELQKIFAPEILKIDEHFFARLNESFLVLDEKKQSRHPVFATIKQEKSYHQTYPTIYHLRQALADSSEKADIRLVYLAMAHLLKYRGHFLIEGELNTENSSVTETFRQFLSTYNQQFSEADDKQTEKLDEAVDCSFVFTEKMSKTKKAETLLKYFPHEKSNGYLSQFIKLMVGNQGNFKNVFGLEEEAKLQFSKETYEEDLEELLEKIGDDYIDLFVQAKNVYDAVLLSEILSDSTKNTRAKLSAGMIRRYDAHKEDLVLLKRFVKENLPKKYRAFFGDNSVNGYAGYIEGHATQEDFYKFVKKELTGIRGSEVFLTKIEQENFLRKQRTFDNGVIPHQIHLTELRAIIANQKKHYPFLKEEQEKLESLLTFKIPYYVGPLAKKQENSPFAWLIRKSEEKIKPWNLPEIVDMEGSAVRFIERMNNTDMYIPHNKVLPKNSLLYQKFSIYNELTKVRYQDERGQMNYFSSIEKKEIFHELFEKNRKVTKKDLQEFLYLKYDIKHAELSGIEKAFNASYTTYHDFLTMSENKREMKQWLEDPELASMFEEIIKTLTVFEDREMIKTRLSHHEATLGKHIIKKLTKKHYTGWGRLSKELIQGIRDKQSNKTILDYLINDDDFPHHRNRNFMQLINDDSLSFKKEIKKAQMITDTENLEEIVKELTGSPAIKKGILQSLKIVDEIVGIMGYEPANIVVEMARENQTTGRGLKSSRPRLKALEESLKDFGSQLLKEYPTDNSSLQKDRLYLYYLQNGRDMYTGAPLDIHRLSDYDIDHIIPRSFTTDNSIDNKVLVSSKENRLKKDDVPSEKVVKKMRSFWYDLYSSKLISKRKLDNLTKIKLTEEDKAGFIKRQLVETRQITKHVAGILHHRFNKAEDTNEPIRKVRIITLKSALVSQFRNRFGIYKVREINEYHHAHDAYLNGVVALALLKKYPQLAPEFVYGEYLKFNAHKANKATVKKEFYSNIMKFFESDTPVCDENGEIFWDKSKSIAQVKKVINHHHMNIVKKTEIQKGGFSKETVEPKKDSSKLLPRKNNWDPAKYGGLGSPNVAYTVAFTYEKGKARKRTNALEGITIMEREAFEQSPVLFLKNKGYEQAEIEMKLPKYALFELENGRKRMVASNKEAQKANSFLLPEHLVTLLYHAKQYDEISHKESFDYVNEHHKEFSEVFARVLEFAGKYTLAEKNIEKLEKIYKENQTDDLAKLASSFVNLMQFNAMGAPADFKFFDVTIPRKRYTSLTEIWQSTIIHQSITGLYETRIRMGK

SEQ ID NO: 206 - protein, 1340 aa, Enterococcus faecium
  Enterococcus faecium TX1337RF
MKKEYTIGLDIGTNSVGWSVLTDDYRLVSKKMKVAGNTEKSSTKKNFWGVRLFDEGQTAEARRSKRTARRRLARRRQRILELQKIFAPEILKIDEHFFARLNESFLVLDEKKQSRHPVFATIKQEKSYHQTYPTIYHLRQALADSSEKADIRLVYLAMAHLLKYRGHFLIEGELNTENSSVTETFRQFLSTYNQQFSEADDKQTEKLDEAVDCSFVFTEKMSKTKKAETLLKYFPHEKSNGYLSQFIKLMVGNQGNFKNVFGLEEEAKLQFSKETYEEDLEELLEKIGDDYIDLFVQAKNVYDAVLLSEILSDSTKNTRAKLSAGMIRRYDAHKEDLVLLKRFVKENLPKKYRAFFGDNSVNGYAGYIEGHATQEDFYKFVKKELTGIRGSEVFLTKIEQENFLRKQRTFDNGVIPHQIHLTELRAIIANQKKHYPFLKEEQEKLESLLTFKIPYYVGPLAKKQENSPFAWLIRKSEEKIKPWNLPEIVDMEGSAVRFIERMINTDMYMPHNKVLPKNSLLYQKFSIYNELTKVRYQDERGQMNYFSSIEKKEIFHELFEKNRKVTKKDLQEFLYLKYDIKHAELSGIEKAFNASYTTYHDFLTMSENKREMKQWLEDPELASMFEEIIKTLTVFEDREMIKTRLSHHEATLGKHIIKKLTKKHYTGWGRLSKELIQGIRDKQSNKTILDYLINDDDFPHHRNRNFMQLINDDSLSFKKEIKKAQMITDTENLEEIVKELTGSPAIKKGILQSLKIVDEIVGIMGYEPANIVVEMARENQTTGRGLKSSRPRLKALEESLKDFGSQLLKEYPTDNSSLQKDRLYLYYLQNGRDMYTGAPLDIHRLSDYDIDHIIPRSFTTDNSIDNKVLVSSKENRLKKDDVPSEKVVKKMRSFWYDLYSSKLISKRKLDNLTKIKLTEEDKAGFIKRQLVETRQITKHVAGILHHRFNKAEDTNEPIRKVRIITLKSALVSQFRNRFGIYKVREINEYHHAHDAYLNGVVALALLKKYPQLAPEFVYGEYLKFNAHKANKATVKKEFYSNIMKFFESDTPVCDENGEIFWDKSKSIAQVKKVINHHHMNIVKKTEIQKGGFSKETVEPKKDSSKLLPRKNNWDPAKYGGLGSPNVAYTVAFTYEKGKARKRTNALEGITIMEREAFEQSPVLFLKNKGYEQAEIEMKLPKYALFELENGRKRMVASNKEAQKANSFLLPEHLVTLLYHAKQYDEISHKESFDYVNEHHKEFSEVFARVLEFAGKYTLAEKNIEKLEKIYKENQTDDLAKLASSFVNLMQFNAMGAPADFKFFDVTIPRKRYTSLTEIWQSTIIHQSITGLYETRIRMGK

SEQ ID NO: 207 - protein, 1336 aa, Enterococcus hirae
MTKDYTIGLDIGTNSVGWAVLTDDYQLMKRKMSVHGNTEKKKIKKNFWGARLFDEGQTAEFRRTKRTNRRRLARRKYRLSKLQDLFAEELCKQDDCFFVRLEESFLVPEEKQYKPASIFPTLEEEKEYYQKYPTIYHLRQKLVDSTEKEDLRLVYLALAHLLKYRGHFLFEGDLDTENTSIEESFRVFLEQYSKQSDQPLIVHQPVLTILTDKLSKTKKVEEILKYYPTEKINSFFAQCLKLIVGNQANFKRIFDLEAEVKLQFSKETYEEDLESLLEKIGDEYLDIFLQAKKVHDAILLSEIISSTVKHTKAKLSSGMVERYERHKADLAKFKQFVKENVPQKATVFFKDTTKNGYAGYIKGKTTQEEFYKFVKKELSGVVGSEPFLEKIDQETFLLKQRTYTNGVIPHQVHLIELKAIIDQQKQHYPFLEEAGPKIIALFKFRIPYYVGPLAKEQEASSFAWIERKTAEKINPWNFSEVVDIEKSAMRFIQRMTKQDTYLPTEKVLPKNSLLYQKYMIFNELTKVSYKDERGVKQYFSGDEKQQIFKQLFQKERGKITVKKLQNFLYTHYHIENAQIFGIEKAFNASYSTYHDFMKLAKTNQKAMQEWLEQPEMEPIFEDIVKILTIFEDRQMIKHQLSKYQEVFGEKLLKEFARKHYTGWGRFSAKLIHGIRDRKTNKTILDYLINDDDVPANRNRNLMQLINDEHLSFKEEIAKATVFSKHKSLVDVIQDLPGSPAIKKGIWQSLKIVEELIAIIGYKPKNIVIEMARENQKTHRTSPRLKALENGLKQIGSTLLKEQPTDNKALQKERLYLYYLQNGRDMYTGEPLEIENLHQYEVDHIIPRSFIVDNSIDNKVLVASKQNQKKRDDVPKKQIVNEQRIFWNQLKEAKLISPKKYAYLTKIELTPEDKARFIQRQLVETRQITKHVANILHQSFNQEEEGTDCDGVQIITLKATLTSQFRQTFGLYKVREINPHHHAHDAYLNGFIANVLLKRYPKLAPEFVYGKYVKYSLARENKATAKKEFYSNILKFLESDEPFCDENGEIYWEKSHHLPRIKKVLSSHQVNVVKKVEQQKGGFYKETVNSKEKPDKLIERKNNWDVTKYGGFGSPVIAYAIAFVYAKGKTQKKTRAIEGITIMEQAAFEKDPTTFLKEKGFPQVTEFIKLPKYTLFEFDNGRRRFLASHKESQKGNPFILSDQLVTLLYHAQHYDKITYQESFDYVNTHLSDFSAILTEVLAFAEKYTLADKNIERIQELYEENKYGETSMIAQSFLQLLQFNAIGAPADFKFFGVTIPRKRYTSLTEIWDATIIYQSVTGLYETRIRMGDLWAGEQ

SEQ ID NO: 208 - protein, 1330 aa, Enterococcus italicus
  Enterococcus italicus DSM 15952
MKNDYTIGLDIGTNSVGYSVVTDDYKVISKKMNVFGNTEKKSIKKNFWGVRLFESGQTAQEARMKRTSRRRIARRKNRICYLQEIFQPEMNHLDNNFFYRLNESFLVADDAKYDKHPIFGTLDEEIHFHEQFPTIYHLRKYLADGDEKADLRLVYLAIAHIIKFRGNFLIEGELNTENNSVIELSKVFVQLYNQTLSELEGFQFIDESIDFSEVLTQQLSKSERADNVLKLFPDEKGTGIFAQFIKLIVGNQGNFKKVFQLEEDQKLQLSTDDYEENIENLLAIIGDEYGDIFVAAQNLYQAILLAGILTSTEKTRAKLSASMIQRYEEHAKDLKLLKRFVKEHIPDKYAEIFNDATKNGYAGYIDGKTKEEEFYKYLKTTLVQKSGYQYFIEKIEQENFLRKQRIYDNGVIPHQVHAEELRAILRKQEKYYSFLKENHEKIEQIFKVRIPYYVGPLAKHNEQSRFAWNIRKSDEPIRPWNMNDVVDENASAVAFIERMTIKDIYLNENVLPRHSLIYEKFTVFNELTKVLYADDRGVFQRFSAEEKEDIFEKLFKSERKVTKKKLENYLRIELSISSPSVKGIEEQFNANFGTYLDLKKFDELHPYLDDEKYQDTLEEVIKVLTVFEDRSMIQNQLEQLPLNLSTKTIKALSRRKYTGWGRLSARLIDGIHDKNSGKTILDYLIEDESDSYIVNRNFMQLINDDHLSFKKIIEDSQPYKEQQSAEEIVSELSGSPAIKKGILQSLKIVDELVAIMGYKPKNIVVEMARENQTTGRGKQNSKPRLKGIENGLKEFSDSVLKGSSIDNKQLQNDRLYLYYLQNGKDMYTGHELDIDHLSTYDIDHIIPQSFLTDNSIDNRVLTTSKSNRGKSDNVPSEEVVRKMDRFWRKLLNAKLISERKYTNLTKKELTESDKAGFLKRQLVETRQITKHVATILDSKFNEDSNNRDVQIITLKSALVSEFRKTFNLYKVREINDLHHAHDAYLNAVVALSLLRVYPQLKPEFVYGEYGKNSIHDQNKATIKKQFYSNITRYFASKDYIINDDGEILWNKQETIAQVIKTLGMHQVNVVKKVEIQKGGFSKESIQPKGESQKLIRRKQQWNTKKYGGFDSPVVAYAILLSFDKGKRKARSFKIVGITIQDRESFEGNPILYLSKKDYHNPKVEAILPKYSLFEFENGRRRMVASASETQKGNQLIIPGHLMELLYHSKKIINGKNSDSVSYIQNNKEKFREIFEYIVDFSSKYISADANLNKIEKIFENNFHKASEQEIAKSFINLLTFTAMGAPADFEFFGEKIPRKRYVSISEIIDAVFIHQSITGLYETRVRLTEV

SEQ ID NO: 209 - protein, 1096 aa, Eubacterium dolichum
  Eubacterium dolichum DSM 3991
MMEVFMGRLVLGLDIGITSVGFGIIDLDESEIVDYGVRLFKEGTAAENETRRTKRGGRRLKRRRVTRREDMLHLLKQAGIISTSFHPLNNPYDVRVKGLNERLNGEELATALLHLCKHRGSSVETIEDDEAKAKEAGETKKVLSMNDQLLKSGKYVCEIQKERLRTNGHIRGHENNFKTRAYVDEAFQILSHQDLSNELKSAIITIISRKRMYYDGPGGPLSPTPYGRYTYFGQKEPIDLIEKMRGKCSLFPNEPRAPKLAYSAELFNLLNDLNNLSIEGEKLTSEQKAMILKIVHEKGKITPKQLAKEVGVSLEQIRGFRIDTKGSPLLSELTGYKMIREVLEKSNDEHLEDHVFYDEIAEILTKTKDIEGRKKQISELSSDLNEESVHQLAGLTKFTAYHSLSFKALRLINEEMLKTELNQMQSITLFGLKQNNELSVKGMKNIQADDTAILSPVAKRAQRETFKVVNRLREIYGEFDSIVVEMAREKNSEEQRKAIRERQKFFEMRNKQVADIIGDDRKINAKLREKLVLYQEQDGKTAYSLEPIDLKLLIDDPNAYEVDHIIPISISLDDSITNKVLVTHRENQEKGNLTPISAFVKGRFTKGSLAQYKAYCLKLKEKNIKTNKGYRKKVEQYLLNENDIYKYDIQKEFINRNLVDTSYASRVVLNTLTTYFKQNEIPTKVFTVKGSLTNAFRRKINLKKDRDEDYGHHAIDALIIASMPKMRLLSTIFSRYKIEDIYDESTGEVFSSGDDSMYYDDRYFAFIASLKAIKVRKFSHKIDTKPNRSVADETIYSTRVIDGKEKVVKKYKDIYDPKFTALAEDILNNAYQEKYLMALHDPQTFDQIVKVVNYYFEEMSKSEKYFTKDKKGRIKISGMNPLSLYRDEHGMLKKYSKKGDGPAITQMKYFDGVLGNHIDISAHYQVRDKKVVLQQISPYRTDFYYSKENGYKFVTIRYKDVRWSEKKKKYVIDQQDYAMKKAEKKIDDTYEFQFSMHRDELIGITKAEGEALIYPDETWHNFNFFFHAGETPEILKFTATNNDKSNKIEVKPIHCYCKMRLMPTISKKIVRIDKYATDVVGNLYKVKKNTLKFEFD

SEQ ID NO: 210 - protein, 1114 aa, Eubacterium rectale
MNYTEKEKLFMKYILALDIGIASVGWAILDKESETVIEAGSNIFPEASAADNQLRRDMRGAKRNNRRLKTRINDFIKLWENNNLSIPQFKSTEIVGLKVRAITEEITLDELYLILYSYLKHRGISYLEDALDDTVSGSSAYANGLKLNAKELETHYPCEIQQERLNTIGKYRGQSQIINENGEVLDLSNVFTIGAYRKEIQRVFEIQKKYHPELTDEFCDGYMLIFNRKRKYYEGPGNEKSRTDYGRFTTKLDANGNYITEDNIFEKLIGKCSVYPDELRAAAASYTAQEYNVLNDLNNLTINGRKLEENEKHEIVERIKSSNTINMRKIISDCMGENIDDFAGARIDKSGKEIFHKFEVYNKMRKALLEIGIDISNYSREELDEIGYIMTINTDKEAMMEAFQKSWIDLSDDVKQCLINMRKTNGALFNKWQSFSLKIMNELIPEMYAQPKEQMTLLTEMGVTKGTQEEFAGLKYIPVDVVSEDIFNPVVRRSVRISFKILNAVLKKYKALDTIVIEMPRDRNSEEQKKRINDSQKLNEKEMEYIEKKLAVTYGIKLSPSDFSSQKQLSLKLKLWNEQDGICLYSGKTIDPNDIINNPQLFEIDHIIPRSISFDDARSNKVLVYRSENQKKGNQTPYYYLTHSHSEWSFEQYKATVMNLSKKKEYAISRKKIQNLLYSEDITKMDVLKGFINRNINDTSYASRLVLNTIQNFFMANEADTKVKVIKGSYTHQMRCNLKLDKNRDESYSHHAVDAMLIGYSELGYEAYHKLQGEFIDFETGEILRKDMWDENMSDEVYADYLYGKKWANIRNEVVKAEKNVKYWHYVMRKSNRGLCNQTIRGTREYDGKQYKINKLDIRTKEGIKVFAKLAFSKKDSDRERLLVYLNDRRTFDDLCKIYEDYSDAANPFVQYEKETGDIIRKYSKKHNGPRIDKLKYKDGEVGACIDISHKYGFEKGSKKVILESLVPYRMDVYYKEENHSYYLVGVKQSDIKFEKGRNVIDEEAYARILVNEKMIQPGQSRADLENLGFKFKLSFYKNDIIEYEKDGKIYTERLVSRTMPKQRNYIETKPIDKAKFEKQNLVGLGKTKFIKKYRYDILGNKYSCSEEKFTSFC

SEQ ID NO: 211 - protein, 1391 aa, Eubacterium sp.
  Eubacterium sp. AS15
MENKQYYIGLDVGTNSVGWAVTDTSYNLLRAKGKDMWGARLFDEAKTAVERRTKRTSRRRSEREKARKAMLKELFADEINKVDPNFFIRLEESKFFLDDRSENNRQRYTLFNDAKFTDKDYYEKYKTIFHLRSALINSDEKFDVRLVFLAILNLFSHRGHFLNASLKGDGEIQGVDIFYNDLYEVCEEFEIDLPQISNIDNFEKILSQKGKSRTKILEELSEELSISKKEKIKYSLLKLICGMKIKVVDIYADEDIQEDDKKKDLGFRESDYEKSSLEVKEIIGDDHFELIERAKAVHDIGLLANIIGNSKYLCEARVEAYDNHHKDLQKIKELLKKYDIKAYTDMFRKMTDKNYSAYVGSVNSNIAKERRSVDNRKIEDLYEYIKKIALKNISDDNEDKIEILKKIETGEFLKKQLTASNGVIPNQLQSRELRAILKKAENYLPFLKEKGEKNLTVSEMIIQLFEFQIPYYVGPLDKNPKKDKNANSWAVIPSGGRILPWNFEDKVDVKGSRKEFIEKMVRKCTYLSEEHTLPKQSLLYEKFMVLNEINNIKIDGEKISVEAKQKIYNDLFMKGKKVSQKAIKQELISLNIMSKDSVLSGIDTVCNAYLSSIAKFRGVFDENVNNQSTIDMIEDIIFLKTVYSDEKRFVKEEIVEKYGDEIDKDKIKRILGFKFSNWGNISKSFLELEGADVGTGEIRSIIQSLWETNFNLMELLSSRFTYMDELEKRVKKLEKPLSEWTIEDLDDMYLSSPVKRMIWQSMKIVDEIQTVIGYAPKRIFVEMTRSEGEKVRTKSRKDRLKELYSAIKEDSKQWVKELDAKDESYFRSKKMYLYYLQKGRCMYSGEVIELDKLMDDNLYDIDHIYPRSFVKDDSLDNLVLVKKEINNRKQNDPITPQIQASCQGFWKVLHEQGFISNEKYSRLTRKTQEFSDEEKLSFINRQIVETGQATKCMAQILQKSMGEDVDVVFSKARLVSEFRHKFELFKSRLINDFHHANDAYLNIVVGNSYFVKFTRNPANFIKDARKNPDNPAYKYHMDRFFERDVKSKSEVAWIGQSEGNAGTIAIVKKTMSKNSPLITKKVEEGHGSITKETIVGVKEIKFGRNKVEKADKTPKKANLQAYRPIKTSDERLCNILRYGGRTSISISGYCLVEYVKKRKTIRSLEAIPVYLGRKDSLSEEKLLNYFRYNLNDGGKDSVSDIRLCLPFISTNSLVKIDGYLYYLGGKNDDRIQLYNAYQLKMKKEEVEYIRKIEKAVSMSKFDEIDREKNPVLTEEKNIELYNKIQDKFENTVFSKRMSLVKYNKKDLSFGDFLKNKKSKFEEIDLEKQCKVLYNIIFNLSNLKEVDLSDIGGSKSTGKCRCKKNITNYKEFKLIQQSITGLYSCEKDLMTI

SEQ ID NO: 212 - protein, 1107 aa, Eubacterium ventriosum
  Eubacterium ventriosum ATCC 27560
MGYTVGLDIGVASVGVAVLDENDNIVEAVSNIFDEADTSNNKVRRTLREGRRTKRRQKTRIEDFKQLWETSGYIIPHKLHLNIIELRNKGLTELLSLDELYCVLLSMLKHRGISYLEDADDGEKGNAYKKGLAFNEKQLKEKMPCEIQLERMKKYGKYHGEFIIEINDEKEYQSNVFTTKAYKKELEKIFETQRCNGNKINTKFIKKYMEIYERKREYYIGPGNEKSRTDYGIYTTRTDEEGNFIDEKNIFGKLIGKCSVYPEEYRASSASYTAQEFNLLNDLNNLKINNEKLTEFQKKEIVEIIKDASSVNMRKIIKKVIDEDIEQYSGARIDKKGKEIYHTFEIYRKLKKELKTINVDIDSFTREELDKTMDILTLNTERESIVKAFDEQKFVYEENLIKKLIEFRKNNQRLFSGWHSFSYKAMLQLIPVMYKEPKEQMQLLTEMNVFKSKKEKYVNYKYIPENEVVKEIYNPVVVKSIRTTVKILNALIKKYGYPESVVIEMPRDKNSDDEKEKIDMNQKKNQEEYEKILNKIYDEKGIEITNKDYKKQKKLVLKLKLWNEQEGLCLYSGKKIAIEDLLNHPEFFEIDHIIPKSISLDDSRSNKVLVYKTENSIKENDTPYHYLTRINGKWGFDEYKANVLELRRRGKIDDKKVNNLLCMEDITKIDVVKGFINRNLNDTRYASRVVLNEMQSFFESRKYCNTKVKVIRGSLTYQMRQDLHLKKNREESYSHHAVDAMLIAFSQKGYEAYRKIQKDCYDFETGEILDKEKWNKYIDDDEFDDILYKERMNEIRKKIIEAEEKVKYNYKIDKKCNRGLCNQTIYGTREKDGKIHKISSYNIYDDKECNSLKKMINSGKGSDLLMYNNDPKTYRDMLKILETYSSEKNPFVAYNKETGDYFRKYSKNHNGPKVEKVKYYSGQINSCIDISHKYGHAKNSKKVVLVSLNPYRTDVYYDNDTGKYYLVGVKYNHIKCVGNKYVIDSETYNELLRKEGVLNSDENLEDLNSKNITYKFSLYKNDIIQYEKGGEYYTERFLSRIKEQKNLIETKPINKPNFQRKNKKGEWENTRNQIALAKTKYVGKLVTDVLGNCYIVNMEKFSLVVDK

SEQ ID NO: 213 - protein, 1391 aa, Eubacterium yurii
  Eubacterium yurii subsp. margaretiae ATCC 43715
MENKQYYIGLDVGTNSVGWAVTDTSYNLLRAKGKDMWGARLFEKANTAAERRTKRTSRRRSEREKARKAMLKELFADEINRVDPSFFIRLEESKFFLDDRSENNRQRYTLFNDATFTDKDYYEKYKTIFHLRSALINSDEKFDVRLVFLAILNLFSHRGHFLNASLKGDGDIQGMDVFYNDLVESCEYFEIELPRITNIDNFEKILSQKGKSRTKILEELSEELSISKKDKSKYNLIKLISGLEASVVELYNIEDIQDENKKIKIGFRESDYEESSLKVKEIIGDEYFDLVERAKSVHDMGLLSNIIGNSKYLCEARVEAYENHHKDLLKIKELLKKYDKKAYNDMFRKMTDKNYSAYVGSVNSNIAKERRSVDKRKIEDLYKYIEDTALKNIPDDNKDKIEILEKIKLGEFLKKQLTASNGVIPNQLQSRELRAILKKAENYLPFLKEKGEKNLTVSEMIIQLFEFQIPYYVGPLDKNPKKDNKANSWAKIKQGGRILPWNFEDKVDVKGSRKEFIEKMVRKCTYISDEHTLPKQSLLYEKFMVLNEINNIKIDGEKISVEAKQKIYNDLFVKGKKVSQKDIKKELISLNIMDKDSVLSGTDTVCNAYLSSIGKFTGVFKEEINKQSIVDMIEDIIFLKTVYGDEKRFVKEEIVEKYGDEIDKDKIKRILGFKFSNWGNLSKSFLELEGADVGTGEVRSIIQSLWETNFNLMELLSSRFTYMDELEKRVKKLEKPLSEWTIEDLDDMYLSSPVKRMIWQSMKIVDEIQTVIGYAPKRIFVEMTRSEGEKVRTKSRKDRLKELYNGIKEDSKQWVKELDSKDESYFRSKKMYLYYLQKGRCMYSGEVIELDKLMDDNLYDIDHIYPRSFVKDDSLDNLVLVKKEINNRKQNDPITPQIQASCQGFWKILHDQGFMSNEKYSRLTRKTQEFSDEEKLSFINRQIVETGQATKCMAQILQKSMGEDVDVVFSKARLVSEFRHKFELFKSRLINDFHHANDAYLNIVVGNSYFVKFTRNPANFIKDARKNPDNPVYKYHMDRFFERDVKSKSEVAWIGQSEGNSGTIVIVKKTMAKNSPLITKKVEEGHGSITKETIVGVKEIKFGRNKVEKADKTPKKPNLQAYRPIKTSDERLCNILRYGGRTSISISGYCLVEYVKKRKTIRSLEAIPVYLGRKDSLSEEKLLNYFRYNLNDGGKDSVSDIRLCLPFISTNSLVKIDGYLYYLGGKNDDRIQLYNAYQLKMKKEEVEYIRKIEKAVSMSKFDEIDREKNPVLTEEKNIELYNKIQDKFENTVFSKRMSLVKYNKKDLSFGDFLKNKKSKFEEIDLEKQCKVLYNIIFNLSNLKEVDLSDIGGSKSTGKCRCKKNITNYKEFKLIQQSITGLYSCEKDLMTI

SEQ ID NO: 214 - protein, 1142 aa, Facklamia hominis
  Facklamia hominis CCUG 36813
MYSVGLDIGIASCGYSIINDVNGNIVELGTLLFKSRNSDNNEERRTNRGSRRLINRRRTRLDDGKKLLAEKGFKQDSKLKHVCPYELRVKGLHEKLTQGEIYKVVLHILKKRGISYLDESDENSSGIDGASYKDQVNLNLNLQKELTPGQIQLKRLKENGRIKSGVTFENGYQLNVFSVSAYANELNKILTKQSEYYSEIDQIWIDRFTKNGYRKEAGLVYRKRPYYDGPGNEKNNSIYGRWANFKEDGHPKENIFDQLIGLDSVDSTQVRASASTLTAQKYNLLNDLNNLTIIEDDRKFTTDEKVSIINYLMTQDITRFGPKELAKFYQLEVDQIRGWRIDNKGNPEIHSLKVYRDWKKIFNTSSIDLTSIQTWVVDELANVITLNTEIPSTLATLKIKIPDIDQQILNFVENNFYELKKKTSKNSWHSFSLKTLNILIPELLNTSEEQNTILERLNLKFDLKNKYAEKNQIPVKELLEQIYNPTVTKSVHQSIKLFNEIIEKYGKNNISYVTIEMPRDKNDQDQKDTIKRINKLNSERKNDSEKYFLERSGWDTIRFESALKKPRFAEKLLFYYEQKGKCAYSGQDILAESLLNESCEVDHIIPLSISFDDSIHNKVLVTASSNQEKGQRTPYMAFIDGAKLGQSWDDFVAWVNSCGFHRKKVQNLLYEENIFNPDVQRGFVSRNLNDTRYASRIVLNAIQSFFYKQKDLTKVKVVNGSFTHTLRKKWGSSLDKNRDTYHHHAVDATLCAVTPFINIVKYEFFEEDGIKYMVDLTTGEKVAYSDYKKMKFYDKRAYVPIWDGFIKQLTPANLYPKIKFSHQVDSKWNRKISDATIYSTRKIVETKINKKGVAKETVKDIVIDKIKDIYTPEGWRKFKEKQDKLLMKNFDEKTYNKLIKIAKEYPEKKEVQTSNGKVSLVEVSPFKMYCEEQNVPAIRKYSKKGNGPYIRSLKFYDKELGKHINITKDSYGNDIERTIRNKKIILKNQNSWRTDVYYNSVNNCYELLGIKYCHLKFYRGKYGIPKSIYDELKKEDEISSESVFKFSLYRHDRVRFEKDGEYIEALFGSKNESNKNYLELSPIDKNKWLSKENVKFFGEVAASGRFIKGLKPGIKVIKQSTDYMGHVYAIHQEKLKFVLSDA

SEQ ID NO: 215 - protein, 1512 aa, Fibrobacter succinogenes
MKKILGLDLGTNSIGWAVVNADEITRDDGSRYLKPNGISAAGSRIIPMSADILGDFEKGNSISQTAERTRMRMARRLHERALLRRERLLRVLNLLDFLPKHFADKIDRYGKFTDDSEPKLAWRKNTEGKYEFIFQDAFNEMLAEFKDKQPEIVEEGKKIPYDWTIYYLRKKALEKALSKEELSWILLQFNQKRGYYQLRGEEEEIPQDKKIEYLAQKVVKVEATDQKKGDDVWYNVYLENGMIYRRTSKAPLDWEGKVKEFIVTTEVENDGETPKKDKEGNIKRSFRAPKEDDWTLLKKKTEADIENSHKTVGCYIYDSLLNNPKQKIIGKLVRTVERKFYKEELTQILKKQVELIPELRDDNLYKQCIEELYPINEAHRNTIAKTDFANLFINDILFYQRPLKSKKSQIDNCPYEERIFIDSKTGEKKKVPVKCIAKSNPLFQEFRLWQFIQNLRIYQREKEIDGKLLTDIDITSECLKSEEDYVRLFDWLNDRETIEQEDLLKHLFNTKKSKNKENPYRWNYVEDKVYPCNETRATILKGFSKCGINASVLSPELEMALWHILYSVEDKKEIETALTHFAQKQGWNDDFAKVFSKAKPFKKDYGSYSEKAIKKLLSLMRMGKYWNQDNIDKNTLDRIDKIINGEYDEKISNRVRDNAINLKDISDFRGLPVWLACYIVYDRHSEAKDCTKWNSPEEIDSYLKKFKQHSLRNPIVEQVVTETLRTVRDIWIQEEQIDEIHLELGRDLKNPADKRKKMSENILKNENTNLRIKAMLMEFMNPSMGIENVRPYSPSQQDILRIYEENALDNLTKDDKDFDFISKISKQAQPSKTDIIRYKCWLEQKYRSPYTGKTISLSKLFTPAYEIEHVIPQSLYFDDSFSNKVICEAEVNKLKDRQLGYKFIAEHHGEKVQLSQGEVVEILSVDAYEKFVKENYANNRIKMKKLLMESIPDEFIERQLNDSRYISKVVKGLLSNIVREKIDDENYEPEAVSKNLISCNGAITDRLKKDWGMNDVWNSIILPRFIRMNQITGKDCFTTTNAEGHLIPQMPLELQKGFNKKRIDHRHHAMDAIVIACTTRDHVNLLNNEAAHSKFNATRYQLQRKLRRFEKAVIDGKEREVAKEFLKPWDSFSSDSKNILENIIVSFKQNQRVINKTTNAFLHFDENGKKTFIKQGKGDSWAIRKSMHKDTVFGEINLRKVRSVSLNEAIKVPERVLNKKIKEKILELKNNKIDAKNIKKYIEENHTGGYGIDSSKIDVFYFTKETKERFFATRKTLDTSFNQAKIKDSIADSGIQKILLAHLKSKNGDAEQAFSPDGIDEMNKNIVELNNGKFHQPILKVRVYEKADKFAVGQKGNKKVKFVEAAKGTNLFFAIFEKDGKRSYLTIPLNVMIDCQKQYGNQWKNNIEAYLKEKELVEKDVKLQFILSPNDLVYLPTEGSIDKKRIYKVVSFTNNRLYAIPYAIAKSIVDKNEFTQLNKIEFTDNKESIKDACVPVIIDRLGNVIEFNGKRL

SEQ ID NO: 216 - protein, 1365 aa, Filifactor alocis
MTKEYYLGLDVGTNSVGWAVTDSQYNLCKFKKKDMWGIRLFESANTAKDRRLQRGNRRRLERKKQRIDLLQEIFSPEICKIDPTFFIRLNESRLHLEDKSNDFKYPLFIEKDYSDIEYYKEFPTIFHLRKHLIESEEKQDIRLIYLALHNIIKTRGHFLIDGDLQSAKQLRPILDTFLLSLQEEQNLSVSLSENQKDEYEEILKNRSIAKSEKVKKLKNLFEISDELEKEEKKAQSAVIENFCKFIVGNKGDVCKFLRVSKEELEIDSFSFSEGKYEDDIVKNLEEKVPEKVYLFEQMKAMYDWNILVDILETEEYISFAKVKQYEKHKTNLRLLRDIILKYCTKDEYNRMFNDEKEAGSYTAYVGKLKKNNKKYWIEKKRNPEEFYKSLGKLLDKIEPLKEDLEVLTMMIEECKNHTLLPIQKNKDNGVIPHQVHEVELKKILENAKKYYSFLTETDKDGYSVVQKIESIFRFRIPYYVGPLSTRHQEKGSNVWMVRKPGREDRIYPWNMEEIIDFEKSNENFITRMTNKCTYLIGEDVLPKHSLLYSKYMVLNELNNVKVRGKKLPTSLKQKVFEDLFENKSKVTGKNLLEYLQIQDKDIQIDDLSGFDKDFKTSLKSYLDFKKQIFGEEIEKESIQNMIEDIIKWITIYGNDKEMLKRVIRANYSNQLTEEQMKKITGFQYSGWGNFSKMFLKGISGSDVSTGETFDIITAMWETDNNLMQILSKKFTFMDNVEDFNSGKVGKIDKITYDSTVKEMFLSPENKRAVWQTIQVAEEIKKVMGCEPKKIFIEMARGGEKVKKRTKSRKAQLLELYAACEEDCRELIKEIEDRDERDFNSMKLFLYYTQFGKCMYSGDDIDINELIRGNSKWDRDHIYPQSKIKDDSIDNLVLVNKTYNAKKSNELLSEDIQKKMHSFWLSLLNKKLITKSKYDRLTRKGDFTDEELSGFIARQLVETRQSTKAIADIFKQIYSSEVVYVKSSLVSDFRKKPLNYLKSRRVNDYHHAKDAYLNIVVGNVYNKKFTSNPIQWMKKNRDTNYSLNKVFEHDVVINGEVIWEKCTYHEDTNTYDGGTLDRIRKIVERDNILYTEYAYCEKGELFNATIQNKNGNSTVSLKKGLDVKKYGGYFSANTSYFSLIEFEDKKGDRARHIIGVPIYIANMLEHSPSAFLEYCEQKGYQNVRILVEKIKKNSLLIINGYPLRIRGENEVDTSFKRAIQLKLDQKNYELVRNIEKFLEKYVEKKGNYPIDENRDHITHEKMNQLYEVLLSKMKKFNKKGMADPSDRIEKSKPKFIKLEDLIDKINVINKMLNLLRCDNDTKADLSLIELPKNAGSFVVKKNTIGKSKIILVNQSVTGLYENRREL

SEQ ID NO: 217 - protein, 1347 aa, Finegoldia magna
  Finegoldia magna ACS-171-V-Col3
MKSEKKYYIGLDVGTNSVGWAVTDEFYNILRAKGKDLWGVRLFEKAKTAADTRTFRSGRRRNDRKGMRLQILREIFEDEIKKVDKDFYDRLDESKFWAEDKKVSGKYSLFNDKNFSDKQYFEKFPTIFHLRKYLMEEHGKVDIRYYFLAINQMMKRRGHFLIDGQISHVTDDKPLKEQLILLINDLLKIELEEELMDSIFEILADVNEKRTDKKNNLKELIKGQDFNKQEGNILNSIFESIVTGKAKIKNIISDEDILEKIKEDNKEDFVLTGDSYEENLQYFEEVLQENITLFNTLKSTYDFVILQSILKGKSTLSDAQVERYDEHKKDLEILKKVIKKYDEDGKLFKQVFKEDNGNGYVSYIGYYLNKNKKITAKKKISNIEFTKYVKGILEKQCDCEDEAVKYLLGKIEQENFLLKQISSINSVIPHQIHLFELDKILENLAKNYPSFNNKKEEFTKIEKIRKTFTFRIPYYVGPLNDYHKNNGGNAWIFRNKGEKIRPWNFEKIVDLHKSEEEFIKRMLNQCTYLPEETVLPKSSILYSEYMVLNELNNLRIKGKPLDTDVKLKLIEELFKKKTKVTLKSIRDYMIRNNFADKEDFDNSEKNLEIVSNMKSYIDFNNILGDKFELEMVEDLIEKITIHTGNKTLLKKYIEETYPDLSSSQIQKIINLKYKDWGRLSRKLLDGIKGRNKTDDVNTVINFMRNSSDNLMQIIEGKNYSFNEYIDNLRKKYIPQEISYEVVENLYVSPSVKKMIWQVIRVTEEITKVMGYDPDKIFIEMAKSEEEKKTTISRKNKLLDLYKAIKKDERDSQYEKLLTGLNKLDESELRSKKLYLYYTQMGRDMYTGEKIDLDKLFDSTHYDKDHIIPQSMKKDDSIINNLVLVNKNANQTTKGNIYPVPSSIRNNPDIYNYWKYLMEKEFISKEKYNRLIRNTPLTNEELGVFINRQLVETRQSTKAIKELFEKFYQKSKIIPVKASLASDLRKDMNTLKSREVNDLHHAHDAFLNIVAGDVWNREFTSNPINYVNENREGDKVKYSLSKYFTRPRKSKGKVIWTPEKGRKLIVDTLNKPSVLISNESHVKKGELFNATISGKKDYKKGKIYLPLKKDDRLKDVSKYGGYKAINGAFFFLVEHTKSKKRIRSIELFPLHLLSKFYEDKNTVLDYAINVLQLQDPKIIIDKINYRTEIIIDNFSYLISTKSNDGSITVKPNEQMYWRVDEISNLKKIENKYKKDAILTEEDRKIMESYIDKIYQQFKAGKYKNRRTTDTIIEKYEIIDLDTLDNKQLYQLLVAFISLSYKTSNNAVDFTVIGLGTECGKPRITNLPDNTYLVYKSITGIYEKRIRIK

SEQ ID NO: 218 - protein, 1348 aa, Finegoldia magna
MKSEKKYYIGLDVGTNSVGWAVTDEFYNILRAKGKDLWGVRLFEKADTAANTRIFRSGRRRNDRKGMRLQILREIFEDEIKKVDKDFYDRLDESKFWAEDKKVSGKYSLFNDKNFSDKQYFEKFPTIFHLRKYLMEEHGKVDIRYYFLAINQMMKRRGHFLIDGQISHVTDDKPLKEQLILLINDLLKIELEEELMDSIFEILADVNEKRTDKKNNLKELIKGQDFNKQEGNILNSIFESIVTGKAKIKNIISDEDILEKIKEDNKEDFVLTGDSYEENLQYFEEVLQENITLFNTLKSTYDFLILQSILKGKSTLSDAQVERYDEHKKDLEILKKVIKKYDEDGKLFKQVFKEDNGNGYVSYIGYYLNKNKKITAKKKISNIEFTKYVKGILEKQCDCEDEDVKYLLGKIEQENFLLKQISSINSVIPHQIHLFELDKILENLAKNYPSFNNKKEEFTKIEKIRKTFTFRIPYYVGPLNDYHKNNGGNAWIFRNKGEKIRPWNFEKIVDLHKSEEEFIKRMLNQCTYLPEETVLPKSSILYSEYMVLNELNNLRINGKPLDTDVKLKLIEELFKKKTKVTLKSIRDYMVRNNFADKEDFDNSEKNLEIASNMKSYIDFNNILEDKFDVEMVEDLIEKITIHTGNKKLLKKYIEETYPDLSSSQIQKIINLKYKDWGRLSRKLLDGIKGTKKETEKTDTVINFLRNSSDNLMQIIGSQNYSFNEYIDKLRKKYIPQEISYEVVENLYVSPSVKKMIWQVIRVTEEITKVMGYDPDKIFIEMAKSEEEKKTTISRKNKLLDLYKAIKKDERDSQYEKLLTGLNKLDDSDLRSRKLYLYYTQMGRDMYTGEKIDLDKLFDSTHYDKDHIIPQSMKKDDSIINNLVLVNKNANQTTKGNIYPVPSSIRNNPKIYNYWKYLMEKEFISKEKYNRLIRNTPLTNEELGGFINRQLVETRQSTKAIKELFEKFYQKSKIIPVKASLASDLRKDMNTLKSREVNDLHHAHDAFLNIVAGDVWNREFTSNPINYVKENREGDKVKYSLSKDFTRPRKSKGKVIWTPEKGRKLIVDTLNKPSVLISNESHVKKGELFNATIAGKKDYKKGKIYLPLKKDDRLQDVSKYGGYKAINGAFFFLVEHTKSKKRIRSIELFPLHLLSKFYEDKNTVLDYAINVLQLQDPKIIIDKINYRTEIIIDNFSYLISTKSNDGSITVKPNEQMYWRVDEISNLKKIENKYKKDAILTEEDRKIMESYIDKIYQQFKAGKYKNRRTTDTIIEKYEIIDLDTLDNKQLYQLLVAFISLSYKTSNNAVDFTVIGLGTECGKPRITNLPDNTYLVYKSITGIYEKRIRIK

SEQ ID NO: 219 - protein, 1348 aa, Finegoldia magna
  Finegoldia magna SY403409CC001050417
MKSEKKYYIGLDVGTNSVGWAVTDEFYNILRAKGKDLWGVRLFEKAKTAADTRTFRSGRRRNDRKGVRLQILREIFEDEIKKVDKDFYDRLDESKFWAEDKKVSGKYSLFNDKNFSDKQYFEKFPTIFHLRKYLMEEHGKVDIRYYFLAINQMMKRRGHFLIDGQISHVTDDKPLKQQLILLINDLLKIELEEEFMDSIFEILADVNEKKTEKKNILKELINAQDFNKQEGKILYSIFESIVTGKAKIKNIISDEDILEKIKEDNKEDFVLTGDSYEENLQYFEEVLQENITLFNTLKSAYDFVILQSILKGKSTLSDAQVERYDEHKKDLEILKKVIKKYDEDGKLFKQVFKEDNGNGYVSYIGYYLNKNKKITAKKKISNIEFTKYVKGILEKQCDCEDEDVKYLLGKIEQENFLLKQISSINSVIPHQIHLFELDKILENLAKYYPSFNNKKEEFTKIEKIRKTFTFRIPYYVGPLNDYHKNNGGNAWIFRNKGEKIRPWNFEKIVDLHKSEEEFIKRMLNQCTYLPEETVLPKSSILYSEYMVLNELNNLRINGKPIDTDVKLKLIEELFKKKTKVTLKSIRDYMIRNNFADKEDFDNSEKNLEIVSNMKSYIDFNNILGDKFELEMVEDLIEKITIHTGNKKLLKKYIEETYPDLSSSQIQKIINLKYKDWGRLSRKLLDGITGTNIETGEIDTVINFLRNSSDNLMQIIGSQNYSFNNDIDKLRKKYIPQEISYEVVENLYVSPSVKKMIWQVIRITEEITKVMGYDPDKIFIEMAKSEEGKKTTISRKNKLLALYKAIKKDERDSQYEKLLTGLNKLDDSDLRSRKLYLYYTQMGRDMYTGEKIDLDKLFDSTHYDKDHIIPQSMKKDDSIINNLVLVNKNANQTTKGNIYPVPSSIRNNPKIYNYWKYLMEKEFISKEKYNRLIRNTPLTNEELGGFINRQLVETRQSTKAIKELFEKFYKKSKIIPVKAILASDLRKDMNTLKSREVNDLHHAHDAFLNIVAGDVWNREFTSNPINYVKENREGDKVKYSLSKYFTRPRKSKGKVIWTPEKGRKLIVDTLNKPSVLISNESHVKKGELFNATIAGKKDYKKGKIYLPLKKDDRLQDVSKYGGYKAINGAFFFLVEHTKSKKRIRSIELFPLHLLSKFYEDKNTVLDYAINVLQLQDPKIIIDKINYRTEIIIDNFSYLISTKSNDGSITVKPNEQMYWRVDEISNLKKIENKYKKDAILTEEDRKIMESYIDKIYQQFKAGKYKNRRTTDTIIEKYEIIDLDTLDNKQLYQLLVAFISLSYKTSNNAVDFTVIGLGTECGKPRITNLPDNTYLVYKSITGIYEKRIRIK

SEQ ID NO: 220 - protein, 1516 aa, Flavobacteriaceae bacterium
  Flavobacteriaceae bacterium S85
MLKQQKDKIIGMNKKILGLDLGTNSIGWALVKQDLENKYGEIIGCGSRIIPMSQDVLGKFDAGISISQTAERTNYRSVRKLIQRNTLRRERLHRVLHQLDFLPKHYNDSIDFEKKLGQFKTDKETKLNYFVNQHGKHEFLFKDSFNEMVKEFKEEQPELFYIKNNGKETKIPYDWTIYYLRKKALSKKISKEELSWLVLNFNQKRGYYQLRGEIDEEKEKNKRYEKLYVSEVVKTNNTIKKTGEYLYDIYFDNGWKYEKQTTKPQDWLHKHKEFIITTTTLKNGETKRTFKTVDSEKDWIAIKSKTEQDIKESNKTVGAFIYDTLLKNPTQKIRGSLVKTIERKFYREEFEKILKEQIKHRPEINVNTAIGKENYTKCVTELYPRNEAHANNILTNDFNYLFTKDILFYQRPLKSKKSEIANCQYEYRTYIKKKEKTGKEERVKQPLKATPKSHPLFQEFRLWQFIHNLKIYIRETTVGNKPLFDVDITDTFFTSENDWATLFEYLNNKKEIEQKHVLEYLVSKKIISKSEKTDYRWNYVEDKKYPGNETRVDFINRLKKVENLNVDEFLTSELEFKLWHIIYSVTDKNEYEKALENFAIRQNIDKDSFVNSFKKFPPFKSDYGAYSTKAIKKLLPLMRLGKFWDGSEIPKVVVEKITDIKTRLTSVNYDESLFKKDEKKILETIVDDITPKQLLKSFVKLKGKNHLAGLNTYQACYLVYERHSESSDITQWENPDDIDSFLNHFKQHSLRNPIVEQVVTETLRTVRDIWKYYGNGSPNYFNEIHIELGREMKNPADKRKQMSAKINENENTNQRIKGILQELMNDGVQDIKPYSPSQQEILKIYEEGISQNPNVDYSKVSEDEITKIKKSNNPTLKEIQRYKLWLEQKYISPYTGKPIPLSELFTPAYQIEHIIPQSRYFDNSLSNKIICESEVNEDKSNKTAYEYLKTNGGSIVHGHHLLSLKEYEDHCQHYFKKNRTKLKNLLSEEIPEGFINRQLNDSRYISKLIKGLLSNIVREENEQEATSKNIVPVTGSITSKLKQDWGLNDKWNEIIAPRFKRLNKMTNSNDFGYFDEKINTFRIQVPDAISRGFNKKRIDHRHHTLDALVIACCTKKHIQYLNSLNNEIIKHELKPSILIKNAQGDYTKHFMLPWNNFPIDCKNAIENTIVSFKQNLRVINKTSNKYQSYKDENGNLRLGKDGKPKKGLTKQTKGNNWAVRKAMHEDTFYGEIVDGENKGKLKIKTLLDTSFDVKKIEDKVLDKSIRTILINYLKQDKYKNLSKPHEEAFSPNGIIEMNKNIISLNNNIPHKPIKRVTLKHEKGKKFSIKTLLDKKTKFAKSATGTNVFFCIYKNINGKIKYHTPSFEEIIEIQKQEFEIKYKSKLNVPETLFDKKESFELLFYLQPNDLVYLPNDEELKNRQLIDFNNLNKKQIKRIYKFTDGSGTTANFIPYQVAKVIFNLNKKEQAKSSFKYPIQNEFGVGSPQSKNQKSIEGILIKERCIKLKIDRLGNISKA

SEQ ID NO: 221 - protein, 1473 aa, Flavobacterium branchiophilum
MAKILGLDLGTNSIGWAVVERENIDFSLIDKGVRIFSEGVKSEKGIESSRAAERTGYRSARKIKYRRKLRKYETLKVLSLNRMCPLSIEEVEEWKKSGFKDYPLNPEFLKWLSTDEESNVNPYFFRDRASKHKVSLFELGRAFYHIAQRRGFLSNRLDQSAEGILEEHCPKIEAIVEDLISIDEISTNITDYFFETGILDSNEKNGYAKDLDEGDKKLVSLYKSLLAILKKNESDFENCKSEIIERLNKKDVLGKVKGKIKDISQAMLDGNYKTLGQYFYSLYSKEKIRNQYTSREEHYLSEFITICKVQGIDQINEEEKINEKKFDGLAKDLYKAIFFQRPLKSQKGLIGKCSFEKSKSRCAISHPDFEEYRMWTYLNTIKIGTQSDKKLRFLTQDEKLKLVPKFYRKNDFNFDVLAKELIEKGSSFGFYKSSKKNDFFYWFNYKPTDTVAACQVAASLKNAIGEDWKTKSFKYQTINSNKEQVSRTVDYKDLWHLLTVATSDVYLYEFAIDKLGLDEKNAKAFSKTKLKKDFASLSLSAINKILPYLKEGLLYSHAVFVANIENIVDENIWKDEKQRDYIKTQISEIIENYTLEKSRFEIINGLLKEYKSENEDGKRVYYSKEAEQSFENDLKKKLVLFYKSNEIENKEQQETIFNELLPIFIQQLKDYEFIKIQRLDQKVLIFLKGKNETGQIFCTEEKGTAEEKEKKIKNRLKKLYHPSDIEKFKKKIIKDEFGNEKIVLGSPLTPSIKNPMAMRALHQLRKVLNALILEGQIDEKTIIHIEMARELNDANKRKGIQDYQNDNKKFREDAIKEIKKLYFEDCKKEVEPTEDDILRYQLWMEQNRSEIYEEGKNISICDIIGSNPAYDIEHTIPRSRSQDNSQMNKTLCSQRFNREVKKQSMPIELNNHLEILPRIAHWKEEADNLTREIEIISRSIKAAATKEIKDKKIRRRHYLTLKRDYLQGKYDRFIWEEPKVGFKNSQIPDTGIITKYAQAYLKSYFKKVESVKGGMVAEFRKIWGIQESFIDENGMKHYKVKDRSKHTHHTIDAITIACMTKEKYDVLAHAWTLEDQQNKKEARSIIEASKPWKTFKEDLLKIEEEILVSHYTPDNVKKQAKKIVRVRGKKQFVAEVERDVNGKAVPKKAASGKTIYKLDGEGKKLPRLQQGDTIRGSLHQDSIYGAIKNPLNTDEIKYVIRKDLESIKGSDVESIVDEVVKEKIKEAIANKVLLLSSNAQQKNKLVGTVWMNEEKRIAINKVRIYANSVKNPLHIKEHSLLSKSKHVHKQKVYGQNDENYAMAIYELDGKRDFELINIFNLAKLIKQGQGFYPLHKKKEIKGKIVFVPIEKRNKRDVVLKRGQQVVFYDKEVENPKDISEIVDFKGRIYIIEGLSIQRIVRPSGKVDEYGVIMLRYFKEARKADDIKQDNFKPDGVFKLGENKPTRKMNHNQFTAFVEGIDFKVLPSGKFEKI

SEQ ID NO: 222 - protein, 1459 aa, Flavobacterium columnare
MKFNLGLDIGTNSIGWALVNEDYENKKGKIIAAGSRIIPMTQDILDKFGSGAITETQTALRTDYRSKRKLIQRFLLRRERLHRVLNVLDFLPKHYAESIDFEKYFGKFLPNTEPKLAYNQNQFIFQNSFLEMLKEFQEKHPELLTNNKKIPYDWTIYYLRKKALNQRIEKEELAWLLLQFNQKRGYNQLRDEEEESVPNKQVEFYSLKIIDVVADQPKEGRDKRWYSINLENGWTYRRESKTPLFNWEGKTKDFIVTTDLNQDGSIKKDKEGKEKRSFRAPSEGDWTLLKKKTEKEIYESGKTLGTYIYDALLNTPDLKIKGDFIRTIDRSIYKEELQQIINKQKEYHLELNSSKLYKACLEELYPKNEIYKSALKNKDIAYLFINDILYYQRPLKAPKYNIGKCTYESRTFKKEDKKIREYIPAVAKSHPLFQEFRLWQWIKNLKIYEKLSSDNCTDFFLTNEQDFENLFEFLWNKKEIDHKGILEYLVKTKFPDLKPKQVKTKVKEYRWNYVYDHEKDESKTYPCGETYFLLKNKLDKIYNAQDDFLDKERLYNLWHIIYSVTDKKQYEKALAKFALKNHLDTKSFVNTFKRIPPFKNDYAIYSLKAIKKLLPLMRVGKYWNYDDIDPITKQKIQCIITGEENDTISTLVREKTNHFSNENDFKNLPLWLAGYIVYNSHNESSEIEKWKSPQDIDTFLKKFKQHALRNPIVEQVVTETLRVVRDIWSKKGQGKKDFFNEIHIELGKDLKNPVDKRRKLSSTNTKNESTNTRIKALLIELFTQGVENVKPNSPKHQEILKIFEEGALNSGIEIEEDIIKISNTDQPTKKQLELYILWLEHKYKSPYTGQSIPLSKLFTPNYEIEHIIPRSKYYDDNLSNKVICETEINRLKNNQLGYEFINNHEIREVTLEEGKTIRLLSPEQYWNFVTTYYAKNKAKRENLLLKELPVQMVEKQLNDTRYVSKYVMQLLSKIVRKEDGTDNGINSTNILSISGKMTRALKNDWDLNDVWNDLLLYRFERLNTITKTNLFTTYSEQKQKRMPIVPDQYAKGFHKKRLDHRHHALDAIVIACITRNHINYMNNQNIQGEKLKKNAIEKENYREILQKSRLDIRAQLCEKKYNDNDPTKYNWVFIKPWADFTENTKDILESIIPSFKQNLRIINKTVNYYEKYNENGKKVKVRQIKGDNWAIRKPLHKETISGKVHLSYKTPAKGKILTATRKVLDSSMDFKSIEKITDTGIQKILKNYLEYKKSPELAFSPEGIEELNATITKYNNGFHHKPIYKVRIYEEGVKFPLGNKGNKKSKYVEAEKGTNLFFAIYKDQENNRYFETIPFNDVLETLKKGMSAVPEKNQEENTLVFALSPQDLVFVPTLDEIENPDIVDFKNLTKDQTNRIYKMVSSSGKQCFFIKAEVATSIVNKMEFSTSNKMENSIEGIQIKSNCWKLKLDRLGTITRVIK

SEQ ID NO: 223 - protein, 1535 aa, Flavobacterium columnare
MTKILGLDLGTNSIGWAIRDTENEGINQILDKGARIFSEGVKSENGKEISRAAERTAYRSARKIKYRRKLRKYETLKVLSINGMCPLSVEEVEQWKKSGFKEYPLNPEFLDWLRTNEDKNINPYLFRDKASKQKVTLFELGRALYHIAQRRGFLSNRLDQSAEGVFEEHNPQIQNLIEDLDSSNTILNELKEYYINLGIIDETEKSGFKKDLDEGEKKLKSLYNSLVAITKKNANDIETCKQELIARLNKKEDLGKVKGKIKDISQAMLDRNFKTLGQYFFSLYNKERIRNQYTSREEHYLEEFIIICQTQGIEGINTNEKLPEKKFTGLAKDLYRAIFFQRPLKSQKGLIGKCSFEKNKSRCAVSHPDYEEFRMWSYLNTIKIGTQSEKTLRFLTLEEKLKLVPKFYRKSDFNFEVLAKELVEKGASFGYYKSSKKNEFFYWFNYKPTDSVSACVVSASLENAIGKDWKIKTFEYQTRNTEKNEVTKSVDYKDLWHLLSVATSDTYLYDFAIEKLKLEPKNAKAFSKTKLKKDFASLSLAAIAKILPYLKQGLLYSHAVFMANIENIVDADIWKDEEQQKFIQSKIVELVDNYIVEKSKLELINGLLKIYNTEDKEGRKVYYSKEAESLFEADLRKKLVPFYKANIIIEEHEQEIIFQDLFPILMDQLKKQEFIKIGRLDKQIEAFLEGENEEGQIFCNHTDKLKKLYHPSDIEVFKKKTIKDEWGNEKVVLGSPLTTSIKNPMAMRALHQLRKVLNTLIANDQIDEDTRIHIEMARELNDANKRKGIQDFQNENKKFREEAIKEIKKLYLEECHKDVNPTEDDILRYQLWLEQGKCEIYEEGNNISICDIIGSNPSYDIEHTIPRSISQDNSQMNKTLCSLKFNRSIKKQKMPVELSNYNDILPRIAHWKKEAEELTRQIETISRSIKSAATKVAKDKNIRKRHYLTLKRDYILGKYERFTWEEPKVGFKNSQIPDTGIITKYAQAYLKSYFKRVESVKGGAVAEFRKLWGIQESFIDENWWKHYKDKDRDKHTHHTIDAITIACMPKDKYDLLAHAWRLEDEQDKKAAKVLIEQAKPWKTFKEDIEKIETEILVSHFTPDNVKKQSKSIIKNRGKKVYVLKNELPVNFKNKIEGKDYFKLKFDSKILYKIPKKKEKQTDTFYEELPKNYLNGVEGKDYFKINTTGKTFYKIPIFNQGDTIRGSLHQETTYGAIKLPDIDIETKKPLHTDKGGFILKKDIKGNEIVFFVVRKEISKISENDVQNIVDNVVRKKIENAIANSLITFKIVKKKKVAVIKEGVTIWMREPNIEKGIEGIPIKKVRIITNSVKNPIEIKVHSPLSKSRHKHKQKVYGQNDENYAMALYELDGKREFELINNFNLAKLLKQSQSYYPLHKEKEIKGKKILVPIEKRNNKDVILKRGQQVVFYDKTVENPKDISEIIDFRERIYIIEGLTIQRQKDKKTSKVNEYGIIQLRHFKEARKSEEISKDNFKPDGEFKINENKPTRKMNHNQFTAFVEGIDFKVLPSGKFQKI

SEQ ID NO: 224 - protein, 1354 aa, Flavobacterium psychrophilum
  Flavobacterium psychrophilum JIP02/86
MKKILGLDLGTNSIGWAFINEAENEIEVSSIVNTGVRIVPLTTDEESDFKKGNTISINADRTLKRGARRGLQRFKQRREALLETFNRIKFIATDFVYAETGAATTFSSYQLRAKSAVEAVTKEELVKVLLMLNKKRGYKSSRKAKTAEEGDAIDGMKIAKEIFENNLTPGQWVYNSLSKGGKFIPDFYHSDLQKELEKIVRFQNQFHSEQINDKLLADIQGKSRTQTSQHFSKTLNIPLAENKGTREETKLQHYQWRNEALANELDMKILAFIITEINNQINQSSGYLGAISDRSKELYFNQETVGQYQYKQLQENVHAKLKNQVFYRQDYLDEFEKIWETQAKFHSELNEKLKAEIRDITIFYQRKLKSQKHLVSFCEFEKGHKAIPKSSPLFQEFRIWQNLNNVVVKNETTKEVFELSEELKQLIAEELQFKESMTDVQMLTFCELKKGTHTVNFKKIEGNRTNTSIYKAFEKILEVEGYEIDFSKMKPLEIKETVAPIFETLNINTVILDFDPTIQGNDFDKQPYYQLWHLLYSAEDDDKLKETLKTKFGFKENHLPFILNINLQADYGSLSAKAIKKILPHLMDGHIYDKACLMVGYNHSSSLTTAQNNDRVLKDTLELLKKNSLRNPVVEKILNQMINVINAIMKDPAMGKPDEIRVELARELKANNEQRKKATSDINTATTEHERIRKLLHSEFNIPRVTRNDIIRYKLWLETGGISLYTGNPIKASDLFSKNYDIEHIIPKSRLFDDSFSNKTLCERQLNIDKSNKTAYSFLQEKLSENDFAAYENRVKDLFKTGKIKSYTKYKKLLMADNEIPEGFIDRQLRETQYIAKKAKEILLEVSRNVTATIGSVTDKLRQDWELVDVMKELNWEKYDKLGLTHIEEGKNGERLSKIKDWTKRNDHRHHAMDAITVAFTKPAYIQYLNNLNAKTQGENKANSIIGIENKHLYRDKNNKLRFISPMKNFREEAKKQLESILISYKAKNKVVTKNKNTTKKSGGTNQKIQLTPRGRLHKETVYGKLQQYATKEEKVNASFTEDYIQKVAKKEYREALLKRLEENDNDPKKAFTGKNALNKTPIYISLKDNIIVPEKVKTVWLETDYTIRKDITPDLKIDKVIDVGIKRILQNRLNEFNGDPKKAFVNLGESPIWLNKEKGIAIKRVTISGVSNAQALHTKKDHLGNEILDKNGNPIPVDFISTGNNHHVAIYRDEKGNLQEEVVSFYDAVIRRNLGLSVINKNHEKGWEFLFSMKQNEFFIFPSDGFNPHEIDLLNPNNYHLISPNIFRVQKISTKNYMFNHHLETKAVDGEMLKSKKELSKTSYHFIQTPTNLNGIIKVRINHLGKIVHLGEY

SEQ ID NO: 225 - protein, 1458 aa, Fluviicola taffensis
MTKTILGLDLGTNSIGWALINQDFDNKKGEILGMGSRIIPMTQDIKDEFGKGNSISQTAERTRLRGVRRLIHRTLLRRERLHRVLNIIGFLPEHYANQIDFEKRFGKFKPESEPKISFDGNDVFLFEKSYQEMLVDFKIHQPQLVSNGKKIPHDWTIYYLRKKALSKKIEKEELAWILLNFNQKRGYYQLRGEEEEETPNKLVEFHSLKIVEVNADEPQKGKPEIWYSLVLENGWVYRRASKTPLFDWKDKIREFIVTTEINNDGTVKTDKEGTEKRSFRAPKPEDWTLQKKKTEFELSKSGNEVGAFIYESILQKPNQKIRGKLISTIERKFYKEELKTILKTQLFFHKELKDEKLYNACIEELYKNNEAHRSLLSNKGFEHLFINDILFYQRPLRSKKSQISNCPLEKRTYKKEGIEITEGIKVISKSNPIYQEFRLWQWISNLSLYCIEPTETNVTSTFLNSIEDYENLFEFLNNRKEIEQKHLLKYLLENQGFKGKLLTNELEKFRWNFVADKKYPCNETGSLLHTRLSKVKNISPDFLTKEIEHQLWHIIYSVTDKIEYEQALKTFARKNNLDVDSFFEHFKKIPPFESTYGAYSEKAIKKLLPLIRLGKYWNWEAIDSISKDRISKILSGEYDENIKNRVREKAVHLTSENNFQGLQEWLAKYIVYDRHSEGNDLGKWTSVSDLETYLKEFKQHSLRNPIVEQVITETLRVVKDIWIKHGKGTENFFDEIHVELGREMKNNSEDRKRLTNTITENENTNLRIKALLMEMMNDNDVENVRPYSPSQQEILKIYEDGALNSNIELDDEIVKISKKAEPTKSELQRYKLWLEQKYRSPYTGQVIPLNKLFTSEYEIEHVVPQSRFFDDSFSNKVICESAVNKRKDNQLGLQFIKNHSGEKVELGFGKVVQVFTEEQYLDFVKEHYSKNRSKHNKLLLEEIPEKMIERQLNDTRYISKFVSSILSNIVRSEKDDDGLNSKNILPGNGKITTELKRDWGLNDVWNDLILPRFERMNTITNSDLFTTYNDKYQKHLPTVPFEYSKGFQKKRIDHRHHAMDALVIACATRDHLNLMNNQSAKSELKRYDLQNKLRKKEPYFNQKENKQKEAFKDFIKPWGTFTEDSKNALEKIIISFKQNLRVINKATNSYESYKDEDGNLRIGKDGKPEKGLIKQKGLNWAIRKPLHKDTVSGQINLSRIKLPNGKILTATRKNLDTSFDLKTIENSITDTGIQKILKNYLLSKESPELAFSPEGLEEMNNEIEKYNNGKFHHPINKARIYELGSKFNVGQTGNRRDKFVEAAKGTNLFFAIYQDENKNRSYETIPLNEVIEHQKWRASLPKEEQEKIPLVPVNKLKGTFIFSLSPNDLVYVPSNDELERSASIDFSKLKKEQINRLYKMVSSSGSQCFFVKSEVATSVVNKMEYSSLNKMEKSIDNLMVKEICIKLKIDRLGNISKA

SEQ ID NO: 226 - protein, 1646 aa, Francisella tularensis
MNIKILPIAIDLGAKNTGVFSAFYQKGTSLESLDNKNGKVYELSKDSYTLLMNNRTARRHQRRGIDRKQLVKRLFKLIWTKQLNLEWNKDTQQTISFLLNRRGFSFITDGYSPEYLNIAPEAVKAILMSILDDYNGEDDLDSYLQSATENDSKIDELYNKLLQKALEFKLRKLCIDIKEDKVTTKTLKELSNTEFKLLANYLVDYDRILRTQKFSYTDKQGNLRELNYYHHDKYNIQEFLKRNIIINDVILEKLTDDLDIWNLNFDKFDFEKNLEKLENQEDKDYLQTHLHHFVFAVNKIKSEMASGGRHRSQYFQEITNVLVENNHQEGYLKNFCENLHNKKYSNLSVKNLVNLIGNLSNLELKPLRKYFNDKIHAKADYWDEQKFAETYSDWILGEWRVGAKDKDKKDGAKYSYKNLCDELKQKVGINQDGIINQTKSDFVDFLLELDPCRTIPPYLDNNNRKPPKCQSLILNPKFLDNKYPNWQQYLQELKKLQTVQNYLGNFEIDLKDLKSSKEQPYFVKYKSLNQQIASGQRDYKDLDARVLQFIFDRVKASDELLLNEIYSHAKKLKQNTSSELEKLELCKKLDEVIANSQLSQILKSQHVNGIFEQGTFLHLVCKYYKQRQRARDSRLYIMPEYRYDKKLDKYNNTGRFDDDNQLLTYCNHKPRQKRYQLLNDLAGVLQVSPNFLKDKIGSDDDLFISKWLVEHIRGFKKACEDSLKIQKDNRGLLNHKINIARNTKGKCEKEIFNLICKIEGSEDKKGNYKHGLAYELGVLLFGEPNQASKLEFDRKIKKFNSIYSFAQIQQIAFAERKGNANTCAVCSADNAHRMQQIKVAKPVEGNKDNIILSAKAQRLPAIPTRIVDGAVKKIATILARNIVDDNWDNIKQALSNNQQLHVPIITESNAFEFEPALADIKGKSLKDKRKKALERIDPENVFKDKNNRIKEFAKGISAYSDANLANGDFDGAKEELDHIIPRSHKKYGTLNDEANLICVTREDNQNRGNKAVFLYDLKPNYKLKQFNTTDDLEIEKKIADTIWDASKQDFKFGNYRSFINLTPQEQIAFRHALFLADKNPIKKAVIRAIDNRNRTFVNGTQRYFAEVLANNIYLRAKKENLATNRITFDYFGIETTNSNGRGIADVRKLYEKVDSDIQAYAKGDKPQDSYSHLIDAMIAFCVAADEHKNEGSIGLKMGNQYGLFPTPDKYDENTGEIISWHNDDIFRKIKVSDNQFSDKKLVRKKATEGFNTHRQMTRDGIYGESYLPILIHKNLNEVRKGYNWENSEEIKIFKGKKYDIQQLNNLVYCLKFVDKPISIDIQITTLEELRNILETNNISTTAEYYYINLKTQKLHEYYIENYNTALGYKKYTKEMEFLRSLAYRTERVKIKSIDDVSMILAKDSNFKAGKIELPFKTEWQRLYLEWQNTTIKDNHEFLKSYFSVKNATKQHKKVRKDFSLPISTNEGKLLVKRKTWDNNFIYQILNDSDSRADGTKPFIPAFDISKNEIVETIIKSFTSKNIFWLPKNIELQKVDNKSIFAIDTSRWFEVETPKDLIEIGVSTIQYKIDNNSRPKVRVKLDYVMDDDSKINYFMNHSLLKSRYPDKVLEILKQSTIIEFESSGFNKTIKEMLGMTLAGIYNETSNN

SEQ ID NO: 227 - protein, 1629 aa, Francisella tularensis
MNFKILPIAIDLGVKNTGVFSAFYQKGTSLERLDNKNGKVYELSKDSYTLLMNNRTARRHQRRGIDRKQLVKRLFKLIWTEQLNLEWDKDTQQAISFLFNRRGFSFITDGYSPEYLNIVPEQVKAILMDIFDDYNGEDDLDSYLKLATEQESKISEIYNKLMQKILEFKLRKLCTDIKDDKVSTKTLKEITSYEFELLADYLANYSEILKTQKFSYTDKQGNLKELSYYHHDKYNIQEFLKRHATINIQILDTLLTDDLDIWNFNFEKFDFDKNEEKLQNQEDKDHIQAHLHHFVFAVNKIKSEMASGGRHRSQYFQEITNVLDENNHQEGYLKNFCENLHNKKYSNLSVKNLVNLIGNLSNLELKPLRKYFNDKIHAKADHWDEQKFTETYCHWILGEWRVGVKDQDKKDGAKYSYKDLCNELKQKVTKAGLVDFLLELDPCRTIPPYLDNNNRKPPKCQSLILNPKFLDNQYPNWQQYLQELKKLQSIQNYLESFETDLKVLKSSKDQPYFVEYRSSNQQIASGQRDYKDLDARILQFIFDRVKASDELLLNEIYFQAKKLKQKASSELEKLESSKKLDEVIANSQLSQILKSQHTNGIFEQGTFLHLVCKYYKQRQRARDSRLYIMPEYRYDKKLHKYNNTGRFDDDNQLLTYCNHKPRQKRYQLLNDLAGVLQVSPNFLKDKIGSDDDLFISKWLVEHIRGFKKACEDSLKIQKDNRGLLNHKINIARNTKGKCEKEIFNLICKIEGSEDKKGNYKHGLAYELGVLLFGEPNEASKPEFDRKIKKFNSIYSFAQIQQIAFAERKGNANTCAVCSADNAHRMQQIKITEPVEDNKDKIILSAKAQRLPAITTRIVDGAVKKMATILAKNIVDDNWQNIKQVLSAKHQLHIPIITESNAFEFEPALADVKGKSLKDRRKKALERISPENIFKDKNNRIKEFAKGISAYSGANLTDGDFDGAKEELDHIIPRSHKKYGTLNDEANLICVTRGDNKNKGNRIFCLRDLANNYKLKQFETTDDLEIEKKIADTIWDANKKDFKFGNYRSFINLTPQEQKAFRHALFLADENPIKQAVIRAINNRNRTFVNGTQRYFAEVLANNIYLRAKKENLNTDKISFDYFGIPTIGNGRGIAEIRQLYEKVDSDIQAYAKGDKPQASYSHLIDAMLAFCIAADEHRNDGSIGLEIDKNYSLYPLDKNTGEVFTKDIFSQIKITDNEFSDKKLVRKKATEGFNTHRQMTRDGIYAENYLPILIHKELDEVRKGYTWKNSEEIKIFKGKKYDIQQLNNLLYCLKFVDKPISIDIQISTLEELRNILTTNNIAATAEYYYINLKTQKLHEYYIENYNTALGYKKYTKEMEFLRSLAYRSERVKIKSIDDVKQVLDKDSNFIIGKITLPFKKEWQRLYREWQNITIKDDYEFLKSFFNVKSITKLHKKVRKDFSLPISTNEGKFLVKRKTWDNNFIYQILNDSDSRVDGTKPFIPAFDISKNEIVEAIIDSFTSKNIFWLPKNIELQKVDNKNIFAIDTSKWFEVETPSDLRDIGVATIQYKIDNNSRPKVRVKLDYVIDDDSKINYFTNHSLLKSRYPDKVLEILKQSTIIEFESSGFNKTIKEMLGMTLAGIYNETSNN

SEQ ID NO: 228 - protein, 1629 aa, Francisella novicida
  Francisella novicida FTG
MNFKILPIAIDLGVKNTGVFSAFYQKGTSLERLDNKNGKVYELSKDSYTLLMNNRTARRHQRRGIDRKQLVKRLFKLIWTEQLNLEWDKDTQQAISFLFNRRGFSFITDGYSPEYLNIVPEQVKAILMDIFDDYNGEDDLDSYLKLATEQESKISEIYNKLMQKILEFKLMKLCTDIKDDKVSTKTLKEITSYEFELLADYLANYSESLKTQKFSYTDKQGNLKELSYYHHDKYNIQEFLKRHATINDRILDTLLTDDLDIWNFNFEKFDFDKNEEKLQNQEDKDHIQAHLHHFVFAVNKIKSEMASGGRHRSQYFQEITNVLDENNHQEGYLKNFCENLHNKKYSNLSVKNLVNLIGNLSNLELKPLRKYFNDKIHAKADHWDEQKFTETYCHWILGEWRVGVKDQDKKDGAKYSYKDLCNELKQKVTKAGLVDFLLELDPCRTIPPYLDNNNRKPPKCQSLILNPKFLDNQYPNWQQYLQELKKLQSIQNYLDSFETDLKVLKSSKDQPYFVEYKSSNQQIASGQRDYKDLDARILQFIFDRVKASDELLLNEIYFQAKKLKQKASSELEKLESSKKLDEVIANSQLSQILKSQHTNGIFEQGTFLHLVCKYYKQRQRARDSRLYIMPEYRYDKKLHKYNNTGRFDDDNQLLTYCNHKPRQKRYQLLNDLAGVLQVSPNFLKDKIGSDDDLFISKWLVEHIRGFKKACEDSLKIQKDNRGLLNHKINIARNTKGKCEKEIFNLICKIEGSEDKKGNYKHGLAYELGVLLFGEPNEASKPEFDRKIKKFNSIYSFAQIQQIAFAERKGNANTCAVCSADNAHRMQQIKITEPVEDNKDKIILSAKAQRLPAIPTRIVDGAVKKMATILAKNIVDDNWQNIKQVLSAKHQLHIPIITESNAFEFEPALADVKGKSLKDRRKKALERISPENIFKDKNNRIKEFAKGISAYSGANLTDGDFDGAKEELDHIIPRSHKKYGTLNDEANLICVTRGDNKNKGNRIFCLRDLADNYKLKQFETTDDLEIEKKIADTIWDANKKDFKFGNYRSFINLTPQEQKAFRHALFLADENPIKQAVIRAINNRNRTFVNGTQRYFAEVLANNIYLRAKKENLNTDKISFDYFGIPTIGNGRGIAEIRQLYEKVDSDIQAYAKGDKPQASYSHLIDAMLAFCIAADEHRNDGSIGLEIDKNYSLYPLDKNTGEVFTKDIFSQIKITDNEFSDKKLVRKKAIEGFNTHRQMTRDGIYAENYLPILIHKELNEVRKGYTWKNSEEIKIFKGKKYDIQQLNNLVYCLKFVDKPISIDIQISTLEELRNILTTNNIAATAEYYYINLKTQKLHEYYIENYNTALGYKKYSKEMEFLRSLAYRSERVKIKSIDDVKQVLDKDSNFIIGKITLPFKKEWQRLYREWQNTTIKDDYEFLKSFFNVKSITKLHKKVRKDFSLPISTNEGKFLVKRKTWDNNFIYQILNDSDSRVDGTKPFIPAFDISKNEIVEAIIDSFTSKNIFWLPKNIELQKVDNKNIFAIDTSKWFEVETPSDLRDIGVATIQYKIDNNSRPKVRVKLDYVIDDDSKINYFTNHSLLKSRYPDKVLEILKQSTTIEFESSGFNKTIKEMLGMTLAGIYNETSNN

SEQ ID NO: 229 - protein, 1629 aa, Francisella novicida
  Francisella novicida GA99-3548
MNFKILPIAIDLGVKNTGVFSAFYQKGTSLERLDNKNGKVYELSKDSYTLLMNNRTARRHQRRGIDRKQLVKKLFKLIWTEQLNLEWDKDTQQAISFLFNRRGFSFITDGYSPEYLNIVPEQVKAILMDIFDDYNGEDDLDSYLKLATEQESKISEIYNKLMQKILEFKLRKLCTDIKDDKVSTKTLKEITSYEFELLADYLANYSESLKTQKFSYTDKQGNLKELSYYHHDKYNIQEFLKRHATINDEILDTLLTDDLDIWNFNFEKFDFDKNEEKLQNQEDKDHTQAHLHHFVFAVNKIKSEMASGGRHRGQYFQEITNVLDENNHQEGYLKNFCENLHNKKYSNLSVKNLVNLIGNLSNLELKPLRKYFNDKIHAKADHWDEQKFTETYCHWILGEWRVGLKDQDKKEGAKYSYKDLCNELKQKVTNAGLIDFLLELDPCRTIPPYLDNNNRKPPKCQSLILNPKFLDNQYPNWQQYLQELKKLQIIQDYLESFETDLKVLKSSKDQPYFVEYKSSNQQIASGQRDYKDLDARILQFIFDRVKASDELLLNEIYFQAKKLKQKASSELEKLESSKKLDEVIANSQLSKILKSQHTNGIFEQGTFLHLVCKYYKQRQRARDSRLYIMPEYRYDKKLDKYNNTGRFDDDNQLLTYCNHKPRQKRYQLLNDLAGVLQVSPNFLKDKIGSDDDLFISKWLVEHIRGFKKACEDSLKIQKDNRGLLNHKINIARNTKGKCEKEIFNLICKIEGSEDKKGNYKHGLAYELGVLLFGEPNEASKPEFDRKIKKFNSIYSFAQIQQIAFAERKGNANTCAVCSADNAHRMQQIKITEPVEDNKDKIILSAKAQRLPAIPTRIVDGAVKKMATILAKNIVDDNWQNIKQVLSAKHQLHIPIITESNAFEFEPALADVKGKSLKDRRKKALERISPENIFKDKNNRIKEFAKGISAYSGANLTDGDFDGAKEELDHIIPRSHKKYGTLNDEANLICVTRDDNKNKGNRIFCLHDLANNYKLKQFETTDDLEIEKKIADTIWDASKKDFKFGNYRSFINLTPQEQKAFRHALFLADENPIKQAVIRAINNRNRTFVNGTQRYFAEVLANNIYLRAKKENLNTDKISFDYFGIPTIGNGRGIAEIRQLYEKVDSDIQVYAKGDKPQASYSHLIDAMLAFCIAADEHRNDGSIGLEIDKNYSLYPLDKNTGEVFTKDIFSQIKITDNEFSDKKLVRKKATEGFNTHRQMTRDGIYAENYLPILIHKELDEVRKGYTWKNSEEIKIFKGKKYDIQQLNNLLYCLKFVDKPISIDIQISTLEELRNILTTNNIAATAEYYYINLKTQKLHEYYIENYNTALGYKKYTKEMEFLRSLAYRSERVKIKSIDDVKQVLDKDSNFIIGKITLPFKKEWQRLYREWQNTTIKDDYEFLKSFFNVKSITKLHKKVRKDFSLPISTNEGKFLVKRKTWDNNFIYQILNDSDSRVDGTKPFIPAFDISKNEIVEAIIDSFTSKNIFWLPKNIELQKVDNKNIFAIDTSKWFEVETPSDLRDIGVATIQYKIDNNSRPKVRVKLDYVIDDDSKINYFTNHSLLKSRYPDKVLEILKQSTIIEFESSGFNKTIKEMLGMTLAGIYNETSNN

SEQ ID NO: 230 - protein, 1629 aa, Francisella tularensis; identical to SEQ ID NO: 30

SEQ ID NO: 231 - protein, 1629 aa, Francisella novicida
  Francisella novicida GA99-3549
MNVKILPIAIDLGVKNTGVFSAFYQKGTSLERLDNKNGKVYELSKDSYTLLMNNRTARRHQRRGIDRKQLVKRLFKLIWTEQLNLEWDKDTQQAISFLFNRRGFSFITDGYSPEYLNIVPEQVKAILMDIFDDYNGEDDLDSYLKLATEQESKISEIYNKLMQKILEFKLRKLCTDIKDDKVSTKTLKEITSYEFELLADYLANYSEILKTQKFSYTDKQGNLKELSYYHHDKYNIQEFLKRHATINDEILDTLLTDDLDIWNFNFEKFDFDKNEEKLQNQEDKDHTQAHLHHFVFAVNKIKSEMASGGRHRGQYFQEITNVLDENNHQEGYLKNFCENLHNKKYSNLSVKNLVNLIGNLSNLELKPLRKYFNDKIHAKADHWDEQKFTETYCHWILGEWRVGVKDQDKKDGAKYSYKDLCNELKQKVTKAGLVDFLLELDPCRTIPPYLDNNNRKPPKCQSLILNPKFLDNQYPNWQQYLQELKKLQSIQNYLESFETDLKVLKSSKDQPYFVEYKSSNQQIASGQRDYKDLDARILQFIFDRVKASDELLLNEIYFQAKKLKQKASSELEKLESSKKLDEVIANSQLSQILKSQHTNGIFEQGTFLHLVCKYYKQRQRARDSRLYIMPEYRYDKKLDKYNNTGRFDDDNQLLTYCNHKPRQKRYQLLNDLAGVLQVSPNFLKDKIGSDDDLFISKWLVEHIRGFKKACEDSLKIQKDNRGLLNHKINIARNTKGKCEKEIFNLICKIEGSEDKKGNYKHGLAYELGVLLFGEPNEASKPEFDRKIKKFNSIYSFAQIQQIAFAERKGNANTCAVCSADNAHRMQQIKITEPVEDNKDKIILSAKAQRLPAIPTRIVDGAVKKMATILAKNIVDDNWQNIKQVLSAKHQLHIPIITESNAFEFEPALADVKGKSIKDRRKKALERISPENIFKDKNNRIKEFAKGISAYSGDNLASGDFDGAKEELDHIIPRSHKKYGTLNDEANLICVTRDDNKNKGNRIFCLHDLANNYKLKQFETTDDLEIEKKIADTIWDASKKDFKFGNYRSFINLTPQEQKAFRHALFLADENPIKQAVIRAINNRNRTFVNGTQRYFAEVLANNIYLRAKKENLNTDKISFDYFGIPTIGNGRGIVEIRQLYEKVDSDIQAYAKGDKPQASYSHLIDAMLAFCIAADEHRNDGSIGLEIDKNYSLYPLDKNTGEVFTKDIFSQIKITNNEFSDKKLVRKKATEGFNTHRQMTRDGIYAENYLPILIHKELDEVRKGYTWGNSEELKIHKGKKYDIQQLNNLVYCLKFIDKSISIDIQISTLEELRNILTTNNIATTAEYYYINLKTQKLHEYYIENYNTALGYKKYTKEMEFLRSLAYRSERVKIKSIDDVKQVLDKDSNFIIGKITLPFKKEWQRLYREWQNTTIKDDYEFLKSFFNVKSITKLHKKVRKDFSLPISTNEGKFLVKRKTWDNNFIYQILNDSDSRVDGTKPFIPAFDISKNEIVEAIIDSFTSKNIFWLPKNIELQKVDNKNIFAIDTSKWFEVETPSDLRDIGVATIQYKIDNNSRPKVRVKLDYVIDDDSKINYFTNHSLLKSRYPDKVLEILKQSTIIEFESSGFNKTIKEMLGMTLAGIYNETSNN

SEQ ID NO: 232 - protein, 1323 aa, Fructobacillus fructosus
  Fructobacillus fructosus KCTC 3544
MVYDVGLDIGTGSVGWVALDENGKLARAKGKNLVGVRLFDTAQTAADRRGFRTTRRRLSRRKWRLRLLDELFSAEINEIDSSFFQRLKYSYVHPKDEENKAHYYGGYLFPTEEETKKFHRSYPTIYHLRQELMAQPNKRFDIREIYLAIHHLVKYRGHFLSSQEKITIGSTYNPEDLANAIEVYADEKGLSWELNNPEQLTEIISGEAGYGLNKSMKADEALKLFEFDNNQDKVAIKTLLAGLTGNQIDFAKLFGKDISDKDEAKLWKLKLDDEALEEKSQTILSQLTDEEIELFHAVVQAYDGFVLIGLLNGADSVSAAMVQLYDQHREDRKLLKSLAQKAGLKHKRFSEIYEQLALATDEATIKNGISTARELVEESNLSKEVKEDTLRRLDENEFLPKQRTKANSVIPHQLHLAELQKILQNQGQYYPFLLDTFEKEDGQDNKIEELLRFRIPYYVGPLVTKKDVEHAGGDADNHWVERNEGFEKSRVTPWNFDKVFNRDKAARDFIERLTGNDTYLIGEKTLPQNSLRYQLFTVLNELNNVRVNGKKFDSKTKADLINDLFKARKTVSLSALKDYLKAQGKGDVTITGLADESKFNSSLSSYNDLKKTFDAEYLENEDNQETLEKIIEIQTVFEDSKIASRELSKLPLDDDQVKKLSQTHYTGWGRLSEKLLDSKIIDERGQKVSILDKLKSTSQNFMSIINNDKYGVQAWITEQNTGSSKLTFDEKVNELTTSPANKRGIKQSFAVLNDIKKAMKEEPRRVYLEFAREDQTSVRSVPRYNQLKEKYQSKSLSEEAKVLKKTLDGNKNKMSDDRYFLYFQQQGKDMYTGRPINFERLSQDYDIDHIIPQAFTKDDSLDNRVLVSRPENARKSDSFAYTDEVQKQDGSLWTSLLKSGFINRKKYERLTKAGKYLDGQKTGFIARQLVETRQIIKNVASLIEGEYENSKAVAIRSEITADMRLLVGIKKHREINSFHHAFDALLITAAGQYMQNRYPDRDSTNVYNEFDRYTNDYLKNLRQLSSRDEVRRLKSFGFVVGTMRKGNEDWSEENTSYLRKVMMFKNILTTKKTEKDRGPLNKETIFSPKSGKKLIPLNSKRSDTALYGGYSNVYSAYMTLVRANGKNLLIKIPISIANQIEVGNLKINDYIVNNPAIKKFEKILISKLPLGQLVNEDGNLIYLASNEYRHNAKQLWLSTTDADKIASISENSSDEELLEAYDILTSENVKNRFPFFKKDIDKLSQVRDEFLDSDKRIAVIQTILRGLQIDAAYQAPVKIISKKVSDWHKLQQSGGIKLSDNSEMIYQSATGIFETRVKISDLL

SEQ ID NO: 233 - protein, 1374 aa, Fusobacterium nucleatum
  Fusobacterium nucleatum subsp. vincentii ATCC 49256
MKKQKFSDYYLGFDIGTNSVGWCVTDLDYNVLRFNKKDMWGSRLFDEAKTAAERRVQRNSRRRLKRRKWRLNLLEEIFSDEIMKIDSNFFRRLKESSLWLEDKNSKEKFTLFNDDNYKDYDFYKQYPTIFHLRDELIKNPEKKDIRLIYLALHSIFKSRGHFLFEGQNLKEIKNFETLYNNLISFLEDNGINKSIDKDNIEKLEKIICDSGKGLKDKEKEFKGIFNSDKQLVAIFKLSVGSSVSLNDLFDTDEYKKEEVEKEKISFREQIYEDDKPIYYSILGEKIELLDIAKSFYDFMVLNNILSDSNYISEAKVKLYEEHKKDLKNLKYIIRKYNKENYDKLFKDKNENNYPAYIGLNKEKDKKEVVEKSRLKIDDLIKVIKGYLPKPERIEEKDKTIFNEILNKIELKTILPKQRISDNGTLPYQIHEVELEKILENQSKYYDFLNYEENGVSTKDKLLKTFKFRIPYYVGPLNSYHKDKGGNSWIVRKEEGKILPWNFEQKVDIEKSAEEFIKRMTNKCTYLNGEDVIPKDSFLYSEYIILNELNKVQVNDEFLNEENKRKIIDELFKENKKVSEKKFKEYLLVNQIANRTVELKGIKDSFNSNYVSYIKFKDIFGEKLNLDIYKEISEKSILWKCLYGDDKKIFEKKIKNEYGDILNKDEIKKINSFKFNTWGRLSEKLLTGIEFINLETGECYSSVMEALRRTNYNLMELLSSKFTLQESIDNENKEMNEVSYRDLIEESYVSPSLKRAILQTLKIYEEIKKITGRVPKKVFIEMARGGDESMKNKKIPARQEQLKKLYDSCGNDIANFSIDIKEMKNSLSSYDNNSLRQKKLYLYYLQFGKCMYTGREIDLDRLLQNNDTYDIDHIYPRSKVIKDDSFDNLVLVLKNENAEKSNEYPVKKEIQEKMKSFWRFLKEKNFISDEKYKRLTGKDDFELRGFMARQLVNVRQTTKEVGKILQQIEPEIKIVYSKAEIASSFREMFDFIKVRELNDTHHAKDAYLNIVAGNVYNTKFTEKPYRYLQEIKENYDVKKIYNYDIKNAWDKENSLEIVKKNMEKNTVNITRFIKEEKGELFNLNPIKKGETSNEIISIKPKLYDGKDNKLNEKYGYYTSLKAAYFIYVEHEKKNKKVKTFERITRIDSTLIKNEKNLIKYLVSQKKLLNPKIIKKIYKEQTLIIDSYPYTFTGVDSNKKVELKNKKQLYLEKKYEQILKNALKFVEDNQGETEENYKFIYLKKRNNNEKNETIDAVKERYNIEFNEMYDKFLEKLSSKDYKNYINNKLYTNFLNSKEKFKKLKLWEKSLILREFLKIFNKNTYGKYEIKDSQTKEKLFSFPEDTGRIRLGQSSLGNNKELLEESVTGLFVKKIKL

SEQ ID NO: 234 - protein, 1367 aa, Fusobacterium sp.
  Fusobacterium sp. 1_1_41FAA
MKKQQFSDYYLGFDIGTNSVGWCVTDFNYNVLRFNKKDMWGSRLFDEAKTAAERRVQRNSRRRLKRRKWRLNLLEEIFSDEILKIDSNFFRRLKESSLWLEDKSSKEKFTLFNDDNYKDYDFYKQYPTIFHLRNELIKNPEKKDIRLVYLALHSIFKSRGHFLFEGQNLKDIKNFETLYNNLMAFLEDNDIYKNIDSSYIGNLENIICDSKKGLKDKEKEFKEIFNSDKQLVGFFKLSVGSSVSLNDLFDTDEYKKGEVEKEKISFREQIYEDDKPIYYSILGEKIEFLDIAKSFYDFMVLNNILADSQYISEAKVKLYDEHKRDLKNLKYIIRKYNKENYDKLFKDKNESNYSAYIGLNKEKGKKEVIEKSRLKIDDFAKIIKGYLPKAEKIDEKDRSIFNEILDKIELKTILPKQRISDNGTLPYQIHEAELEKILENQAKYYDFLNHEENGISTKDKLLMTFKFRIPYYVGPLNSYHKNKGGNSWIVRKEEGKILPWNFEQKVDIEKSAEEFIKRMTNKCTYLNGEDVIPKDSFLYSEYIILNELNKVQVNDEFLNKEIKKKIIEDLFKKSKKISEKNFREYLLVNQITNKTVELKGVKDAFNSNYVSYIKFKDIFGDKLNLDIYKEISEKSILWKCLYGDDKKIFEKKIKSVYGDILTKDEIKKINSFKFNTWGRLSEKLLTEIEFIDLETGECYSSVMDALRRTNYNLMELLSSKFTLQENIDNENKEVSEFSYRDLVEESYVSPSLKRAILQTLKIYEEIRKITGRIPKKVFIEMARGGDETMKNKKIPARQEQLKKLYDSCGKDISNFSIDIKEMKNSLNSYDNNSLRQKKLYLYYLQFGKCMYTGKEIDLNRLLQNNDTYDIDHIYPRSKVIKDDSFDNLVLVLKNENAEKSNEYPLKKEIQEKMKSFWKFLKEKNFISDEKYKRLTGKDEFELRGFMARQLVNVRQTTKEAGKILQQIEPEIKIVYSKAEIASSFREMFDFIKVRELNDTHHAKDAYLNIVAGNVYNTKFTEKPYRYLQEIKENYDVKKIYNYDIKNAWDKEKSLEIVKKNMEKNTVNITRFIKEEKGQLFDLNPIRKGETSNEIIAIKPKFYEGSTEKLNEKYGYYKSLNPAYFIYVEHKEKNKIIRSFERVNLVDVNKIKDEKSLIKYLIENKGLIEPKVIKKVYKRQVILINNFPYSIVALDSNKLMDFENLKPLFLERKYEKILKNAIKFLEDNQGKTEEYYKFLYLKKKDRNEKNETIDSVKERYNIEFNEMYDKFLEKLDSKDYKNYINNKKYSELVNVKEKFIKLNLFDKAFTLKSFLDLFNRKTMADFSKVGLTKYLGKIQKISSNVLSKNELHLLEESVTGLFVKKIKL

SEQ ID NO: 235 - protein, 1367 aa, Fusobacterium sp.
  Fusobacterium sp. 3_1_27
MKKQKFSDYYLGFDIGTNSVGWCVTDLDYNVLRFNKKDMWGSRLFDEAKTAAERRVQRNSRRRLKRRKWRLNLLEEIFSDEIMKIDSNFFRRLKESSLWLEDKNSKEKFTLFNDDNYKDYDFYKQYPTIFHLRDELIKNPEKKDIRLIYLALHSIFKSRGHFLFEGQNLKEIKNFETLYNNLISFLEDNGINKSIDKDNIKKLEKIICDSGKGLKDKEKEFKEIFNSDKQLVAIFKLSVGSSVSLNDLFDTDEYKKEEVEKEKISFREQIYEDDKPIYYSILGEKIELLDIAKSFYDFMVLNNILSDSNYISEAKVKLYEEHKKDLKNLKYIIRKYNKENYDKLFKDKNENNYPAYIGLNKEKGKKEVVEKSGLKIDDLIKVIKGYLPKPERIEEKDKIIFNEILNKIELKTILPKQRISDNGTLPYQIHEVELEKILENQSKYYDFLNYEENGVSTKDKLLKTFKFRIPYYVGPLNSYHKDKGGNSWIVRKEEGKILPWNFEQKVDIEKSAEEFIKRMTNKCTYLNGEDVIPKDSFLYSEYIILNELNKVQVNDEFLNEENKRKIIDELFKENKKVSEKKFKEYLLVNQIANRTVELKGIKDSFNSNYVSYIKFKDIFGEKLNLDIYKEISEKSILWKCLYGDDKKIFEKKIKNEYGDILNKDEIKKINSFKFNTWGRLSEKLLTGIEFINLETGECYSSVMEALRRTNYNLMELLSSKFTLQESIDNGNKEMNEVSYRDLIEESYVSPSLKRAILQTLKIYEEIKKITGRVPKKVFIEMARGGDETMKNKKIPARQEQLKKLYDSCGNDIANFSIDIKKMKSSLSSYDNNSLRQKKLYLYYLQFGKCMYTGREIDLDRLLQNNDTYDIDHIYPRSKVIKDDSFDNLVLVLKNENAEKSNEYPVKKEIQEKMKSFWRFLKEKNFISDEKYKRLTGKDDFELRGFMARQLVNVRQTTKEVGKILQQIEPEIKIVYSKAEIASSFREMFDFIKVRELNDTHHAKDAYLNIVAGNVYNTKFTEKPYRYLQEIKENYDVKKIYNYDIKNAWDKENSLEIVKKNMKKNTVNITRFIKEEKGQLFDLNPIKKGETSNEIISIKPKLYNGKEEKLNEKYGYYKSLNPAYFLYVEHKEKNKRIKSFERVNLVDVNNIKDEKSLVKYLIENKKLVEPRLIKKVYKRQVILINDYPYSIVALDSNKLMDFENLKPLFLENKYEKILKNVIKFLEDNQGKSEENYKFIYLKKKDRYEKNETLESVKDRYNLEFNEMYDKFLEKLDSKDYKNYINNKKYKNLLDVKEKFIKLNLFDKAFTLKSFLDLFNRKTMADFSKVGLTKYLGKIQKISSNVLSKNELYLLEESVTGLFVKKIKL

SEQ ID NO: 236 - protein, 1367 aa, Fusobacterium sp.
  Fusobacterium sp. 3_1_36A2
MKKQKFSDYYLGFDIGTNSVGWCVTDLDYNVLRFNKKDMWGSRLFDEAKTAAERRVQRNSRRRLKRRKWRLNLLEEIFSDEIMKIDSNFFRRLKESSLWLEDKNSKEKFTLFNDDNYKDYDFYKQYPTIFHLRDELIKNPEKKDIRLIYLALHSIFKSRGHFLFEGQNLKEIKNFETLYNNLISFLEDNGINKSIDKDNIKKLEKIICDSGKGLKDKEKEFKEIFNSDKQLVAIFKLSVGSSVSLNDLFDTDEYKKEEVEKEKISFREQIYEDDKPIYYSILGEKIELLDIAKSFYDFMVLNNILSDSNYISEAKVKLYEEHKKDLKNLKYIIRKYNKENYDKLFKDKNENNYPAYIGLNKEKGKKEVVEKSGLKIDDLIKVIKGYLPKPERIEEKDKTIFNEILNKIELKTILPKQRISDNGTLPYQIHEVELEKILENQSKYYDFLNYEENGVSTKDKLLKTFKFRIPYYVGPLNSYHKDKGGNSWIVRKEEGKILPWNFEQKVDIEKSAEEFIKRMTNKCTYLNGEDVIPKDSFLYSEYIILNELNKVQVNDEFLNEENKRKIIDELFKENKKVSEKKFKEYLLVNQIANRTVELKGIKDSFNSNYVSYIKFKDIFGEKLNLDIYKEISEKSILWKCLYGDDKKIFEKKIKNEYGDILNKDEIKKINSFKFNTWGRLSEKLLTGIEFINLETGECYSSVMEALRRTNYNLMELLSSKFTLQESIDNGNKEMNEVSYRDLIEESYVSPSLKRAILQTLKIYEEIKKITGRVPKKVFIEMARGGDETMKNKKIPARQEQLKKLYDSCGNDIANFSIDIKKMKSSLSSYDNNSLRQKKLYLYYLQFGKCMYTGREIDLDRLLQNNDTYDIDHIYPRSKVIKDDSFDNLVLVLKNENAEKSNEYPVKKEIQEKMKSFWRFLKEKNFISDEKYKRLTGKDDFELRGFMARQLVNVRQTTKEVGKILQQIEPEIKIVYSKAEIASSFREMFDFIKVRELNDTHHAKDAYLNIVAGNVYNTKFTEKPYRYLQEIKENYDVKKIYNYDIKNAWDKENSLEIVKKNMKKNTVNITRFIKEEKGQLFDLNPIKKGETSNEIISIKPKLYNGKEEKLNEKYGYYKSLNPAYFLYVEHKEKNKRIKSFERVNLVDVNNIKDEKSLVKYLIENKKLVEPRLIKKVYKRQVILINDYPYSIVALDSNKLMDFENLKPLFLENKYEKILKNVIKFLEDNQGKSEENYKFIYLKKKDRYEKNETLESVKDRYNLEFNEMYDKFLEKLDSKDYKNYINNKKYKNLLDVKEKFIKLNLFDKAFTLKSFLDLFNRKTMADFSKVGLTKYLGKIQKISSNVLSKNELYLLEESVTGLFVKKIKL

SEQ ID NO: 237 - protein, 1391 aa, Galbibacter sp.
  Galbibacter sp. ck-I2-15
MKTILGLDLGTNSIGWALVKEAENENEVSDIIKLGVRVNPLTVDELTNFEGGKAYSNNAERTLKRGARRNLQRYKLRRENLIEILLKNGLINKDTALTEVGKETTHQTLKLRSKSANEKVSLEDLAKILLSINKKRGYKSSRKVNAEDDGVAIDGMEVAKLLYDENMTPGEYVLRLLESGKKHLPDFYRSDLQEEFNLVWKKQSEFYPLILTKELFFELHGKNKSQTWAICKEPLGIVGVKLKGSAKEQKFARYRLRKEALTQQIELEHLAIVLQDINNDSNKSSGYLGAISDRSKELFFNKETVGQYQYKQLQKDPNTSLKNQVFYRQDYLDEFEVIWRNQAKFYPQLTNELKQEIRDVVIFYQRKLKSQKNLISFCQFESTQQNYVEKETGKTKIRTIGRRVIPRSSPLFQEFKIWQSLNNLKFVNSESNQIIQFIELEDDVKKVVFDELNLRGDLKPNQVLKILSKYMKIGKLTQWKCNLEEIEGNRTNSALYNVFQMIAEEEGYGFNWGKKSALEIKSELKAIFSSIGINDSILDFDFSKKLDQQLSYQLWHLLYSAEEGNSKITEEDKFTYGNTGVALKKKLHLKFGFKPEYSTLISNLRFTSDYGNLSSKAISKILPFLRDGSDYSKACQYAGYNHSNSLSADELDNRELKPKLELLKKNSLRNPVVEKILNQMVNVVNQVIDNYGKPDEVRIELARELKKSAKERSQMTKNISDATRRNAEIKKYLSKEFGIPNPTKGDVIRYRLWEELASNGYKDLFRDKYIPKEKLFSNEIDIEHIIPKALLFDDSFSNKTLAFKVDNLKKADRTAFDFMSTDFSKDVDSYIGRIETLHKDGKISSSKYKKLMIPKSKLVDGFIERDLRNTQYIAKQARKMLLEVFKTVVPTTGKITDKLREDWDLINVMKELNFPKYKALGLTKKIERFDVGSEKIKSINVIEGWSKRNDHRHHAMDALAVAFTTHNHIQYLNYLNARKDIHHEMHGTIKSIENQIIGKDVMGKRRFIPPISDLRMKAKLQIESILISFKNKNKVVTWSVNKTKLKGKDNYNKRRQLTPRGQLHKETVYGKIKLIDPKPLKLNNKFTLVRASMIVDKVHREIVLQHLSKYDNNSEVAFDSKTIKIDPILIEGIGLKEVVCYEDVFKIRKKISGDNFKNEKHLEKVIDEKVKQILKDRVIKFQGNFKEAFSNLEENPIWLNKSKGIAVKSVAIKGVNNAESLHEGKDHFGDQILDKNKKQIPVDFVSTGNNHHVGIYEDKDGNLQERVVSFFEAVTRVNEGLPIIDKTYNSDIGWKFKFTMKQNEMFVFPSDDFDPNEFDLTDGKNAAKISPNLYRVQKIATKNYMFRHHLETVVTNDLEFTYKSIRSTGWLRNLVKVRINHLGEIVYVGEY

SEQ ID NO: 238 - protein, 1025 aa, Unknown
  Description of Unknown: gamma proteobacterium HdN1 polypeptide
MGGYMPQLMRYRLALDIGSTSIGWAMIRLSMQNEPIAIIRMGVRIFSDGRNPKDGSSLAVTRRVARQMRRRRDRLLKRKTRLLNALVQKKFFPEDADARKALVVLNPYELRKEGLYRQLSGPEFGRALFHISQRRGFLSNRKTDKKDNDSSVLKKAIVDLRQQLEVENCQTIGEWLFKQQQSGKSVRARLRGKTQKDKAYDFYIDRAMIAHEFDTLWVSQAKYDPLLFNEDARAILRDILLYQRPLKPVKPGRCTLIPDESRAPLALPLTQQARIYQELNHLRITTPALGAQALTVAQRNTIAALLEKSDVTFVKIAKALGLTSTTEFNLQDIKRDRLKGNATAIILARNQYFGRRWHDFNADLQNLIVDKLVNEGSETALIEWLKANTDVDESAAERVSGVTLPEGYGSLSVAALRRLLPALKEDVVVYSEAVKRAGFDSHSALSLIEQTGELYQELPYYGEVLQRHVGFGSGDPNDSPERRFGKIANPTVHIGLNELRKIINALIKRYGNPAEVVVELARDLKLSREKRKEIQEEQKQRQDRNEKRIKDACEILGIDPLVIDRGKRREISQKMQLWDELNPKDAANRRCPYTGDQISIEKLLSAEVEIEHILPFSKTLDDSLNNKTVAMRRANRDKGNRTPYEAFGESLNPDYDYDAILQRASLMPREKRKRFASDGYQQWLRDDKDFLSRALNDTAYLSRIAKEYLTLICPPNSVRAIPGRMTAQLRAMFGLNRLLSEGGIKNREDHRHHAIDAAVIGVTDQGLLQKFSRASARTRELQLSRLVDDMPLPWDTYREHVTRALEHLVVSHKPDHGYQGKMHEDTAWGLRDNGQVTRRVRSEDGGPRQRLLENKNVVKINSTRDFSRHGIDEQGQVNAYKGYVGGSNYCIEIWIDEKGKWNSDVVSTFQAYQIVRELGEKAAWQKLRNPLLSLSAKPLVMRLIIDDVVKMQIAGQNKIMRVVKIAQNGQIFFAEHNEANVDARDKDKNNPFKYISKTAGSLQKAGGIHMAISPIGDARPVRYGR

SEQ ID NO: 239 - protein, 1397 aa, Unknown
  Description of Unknown: gamma proteobacterium HTCC5015 polypeptide
MTKNYISPIAIDLGAKFTGVALYQYLEGADCTQEVAKGLLVDDRGNVTWSQEGRRGKRHQVRGYKRRKMAKRLLWLILDSEYGIKREEVTEPLLKFINGLLNRRGYTYISEEVDEESMNVSPLPFSEMMPDYFNSSAPLLEQLAKLLSDKNKLVRFRAEGKIPSNKNEFKKLLDTALDGKYKDEKKELSEAWGNILIASENVLKSTVDGHKSRSEYLANIKEDIKSNEELEKQISSKEIDGFYNLVGHLSNFQLRLLRKYFNDPNMSGVSYWDEKRLEKYFYQWVQGWHTKGGTDEAEKKNIILKTKGAPLLKTLKSLSADLTIPPYEDQNNRRPPKCQSVLLSDEKLTMHYPKWKEWVGQLVKQNDNAYLNENVTLANALHRIVERSRSIDPYQLRLLISITDAEKRNDLAGYKRLKLSLGSEVDEFLLLVKNIVDETKEAREGLWFETENKLFFKCGKTPPRKEKLKSTLLSAVLGKNLSDDEQSSFIEEFWKSGTPKIERRNVRGWCRLASQVQKTYGVYLKEYGLQQLHKLEAGKKLDDKPLALLYKNSGLIASKIGEALNIEPDEVSRFASPHSLAQIFNIIEGDVAGFNKTCRACTYENIWRMQEEKVESLLTNQLLSEIHGERKVPLKSAMCTRLSADSTRPFDGQMASIIEHIARKIAQHKIAQINDVPKEFSIDIPIIIESNQFSFTAELEEIKRGRGSAKAKKAKELGEKSKAGWVSKTERIKTSSEGICPYTGAPLGGSGEIDHIIPRSLTGRTKKTVFNSEANLIYCSSKGNHDKGNRVYVIEQLNDKYLKKQFSTSDVNLIKKKIKTTIQRFTEGGEKLRSFSELSREDQKAFRHALFVPELKSEVTSLLAVKNITRVNGTQAWLAKKIASLLAEHLDKQGRDYTLSAHQIDPWSVSKQRKMLASAEPIWAKKDPQPAASHVVDAVCTFLEALEQPHTASRLKTISSTSFEKTGWRSALIPDLIKVDALDRRPKYRRYNIGSTSLFKDGIYAERFLPILIDENGLMAGYDIDNSLKAKGADVVFESLSPFLLFKGEEVGAQSLSDWQERIDGRYLYMSIDKVKAFDYLQEKVGEKDIAAELLNSIHFTQRKTELRAKFSDDSGKKMKTLDAIRKSLKLTVTVNEIGKRKEKCGFSGTIGIPAKSAWENLLDEPLLETYWGTKMPPQEIWEKVYRKHFPRNIPNQAHRKVRKDFSLPVVDSVSGGFRVKRKTPNGYNYQLLAIDGYSAVGFKKEGDNVDFKSPALVPQIAESKSVTPISSELVHLDKNEIVYFDEWRKIDISDSDLKQFVSSLELAPGSQNRFYIRFTVDEDQFERHFKSALRVNGIQDLDTVNKTFDWNREIPSLLIPPRSNLFLLETGQKITFEYIANGANAEVKKAYSLRRA

SEQ ID NO: 240 - protein, 1186 aa, Gardnerella vaginalis
  Gardnerella vaginalis 1500E
MEGNISYAIGIDVGLNSVGLAAIRLDNNGEPIRILKAMSVIHDAGIDPNGAKESDTRKAISGVARRVRRLYRQRRRRLQKLDFLLHSLGFPVVENKDLDFSDSFIPWIFRAKLADEYIADEKQRKQMLSVAIRHIARHRGWRNPYQSIKSMTQETEYSEFYNELLKNIEKFAPGVGCEGSTPAQLVRDYLLLQQGKASRRLRITTDEKRKNHPNSLNPILPRKLMQSDNMLEILNIFNVQHIDDKYVREQIINAVFYAKSPRGSAENRVGKDAITGKGKRALKASLAFQKYRIISTISNLRIRENSKERCLTIEEKQSVYKLLTTSTDESSKEKSAEAPLYTWIDVADCLGIERYKLRGVGSQIGDGESVGNRPPMLNSELAIIYANNKSLGKSLLTWWLDANRTQEDKEALIEILSNTVDIEAIHDNPEYQDKYGSAIAFIDSMDETEIAALENISLPDGRAAYSLETLDKLNKQMLETDDDLFEARKKLFNLPNNWRPSEAPIAEPTGNPSVDRVLKIVHRFLISAKNRWGNPERINIEHVRSGFKSKKMANSYKELLDKRTKGKENLKAMMRNSLHLGMSDSISDADIRRYEAVQRQNGQCLYCGSEITYHTCELDHIVPRKGPGSTNTRENLVATCSLCNAQKCNTPFSTWCEQSTYCKNHDISVDSAINRVRAFIFPPNSYDKRGANQFKKEVIARLKQKVGDEAFDNRSIESVAWMANELHRRIDWYYNSQNYQTNNGISDITNKAQTNVGVYAGSLTAIARRMSGIDGKLEFFDGRRKTRFDRRHHAVDASVIAMMTPGIAQILAIKCNLRETQLLQGNKVVPGGIDWKEYPTANDQGYQQYANWSVRMNALLKLLNEEMRADRIAVVNSIRLRYNNSSVHQYKVNALLKLHVGDEIDSGTIRRSSTPALYCALTRNPDYDVNNGLPENPNRAILLHDKKLNADDSITFFKAQAVQLFVREGSAEIGSSTHHLRIYEYFKKLKSGKIKKSYGMIRVFQNDLHRHIHEDLFSCDLPEQSISMRYADTEVAHAVQTGNSNYLGYLVPGDEIIVDFSHVKLSGNIGTFVEFLNKIGANCAAYNHWVVVGTDTEKVLILKPSMISSEGIDKLYSNCKRNNFDYSSYEKSINEILVGKGWRVSVNVLAKYNAETIRRNALGEVRWTSRSHLPISWSWNTGENRE

SEQ ID NO: 241 - protein, 1186 aa, Gardnerella vaginalis
  Gardnerella vaginalis 284V
MEGNISYAIGIDVGLNSVGLAAIRLDDYGEPIRILKAMSVIHDAGIDPNGAKESDTRKAISGVARRVRRLYRQRRRRLQKLDFLLQSLGWPVVENKDLDFSDSFIPWIFRAKLADEYIADEEQRKQMLSVAIRHIARHRGWRNPYQSIKSMMQETEYSEFYNELLKNIEKLAPGVGCEGSTPAQLVRDYLLSQQGKASRRLRITTGGRRKNHPHSLDPVLPRKLMQSDNMLEILNIFNVQHIDDKYVREQIINAVFYAESPRGSAENRVGKDAITGKGKRALKASLAFQKYRIISTISNLRIRENSKERCLTIEEKQNVYKLLTTSIDKSSKRKSAEAPLYTWIDVADCLGIERYKLRGVGSQIGDGESVGNRPPMLNSELAILYANNKSLGQSLITWWLASNRTQEDKEALIEILSNTVDIEAIHDNPEYQDKYGSAIAFIDSMNETEIAALENISLPDGRAAYSLETLDELNKQMLETDDDLFEARKKLFNLPNNWRPAEAPIAEPTGNPSVDRVLKIVHRFLISAKNRWGNPERINIEHVRSGFQSKKMANSYKELLDKRTEGKENLKAMMRNSLHLGTSDSISDADIRRYEAVQRQNGQCLYCGSEITYHTCELDHIVPRKGPGSTNTRENLVATCSSCNAQKCNTPFATWCEQSTYCKNHDISADSAINRVRAFIFPPNSYDKRGANQFKKEVIARLKQKVGDEAFDNRSIESVAWMANELHRRIDWYYNSQNYQTNNGISDISNKAQTNVGVYAGSLTAIARRMSGIDGKLEFFDGRRKTRFDRRHHAVDASVIAMMTPGIAQILAIKCNLRETQLLQGNKVVPGGIDWKEYPTANDQGYQQYANWSVRMNALLKLLNEEMRADRIAVVNSIRLRYSNSSVHQYEVNALLKLHVGDEIDSETIRRSSTPALYCALTRNPDYDVNNGFPENPGRTILLHNKKLNADDSITFFKAQAVQLFVREGSAKIGNSIHHLRIYEYFEKLKSGKIKKSYGMIRVFQNDLHRHIHEDLFSCDLPEQSISMRYADTKVAHAVQTGNANYLGYLVPGDEIIVDFSHITLSENIGKFVEFLNKIGADCTAYRHWVVVGTDTEKVLILKPSMISSEGIDKLYSNCERNNFDYSSYEKSINEILAGKGWRVSVNVLAQYKAATIRRNALGEVRWASRSHLPISWSWDTGENRE

SEQ ID NO: 242 - protein, 1186 aa, Gardnerella vaginalis
  Gardnerella vaginalis 5-1
MEGNISYAIGIDVGLNSVGLAAIRLDNNGEPIRILKAMSVIHDAGIDPNGAKESDTRKAISGVARRVRRLYRQRRRRLQKLDFLLHSLGFPVVENKDLDFSDSFTPWIFRAKLADEYIADEKQRKQMLSVAIRHIARHRGWRNPYQSIKSMTQETEYSEFYNELLKNIEKFAPGVSCEGSTPAQLVRDYLLSQQGKASRRLRITTDDRRKNHPNSLDPVLPRKLMQSDNMLEILNIFNVQHIDNKYVREQIINAVFYAKSPRGSAENRVGKDAITGKGKRALKASLAFQKYRIISTISNLRIRENSKERCLTIEEKQSVYKLLTTSTDEYSKEKSAEAPLYTWIDVADCLGIERYKLRGVGSQIEDGESVGNRPPMLNSELAILYANAKSLKQSLITWWLAANRTQEDKEAFIEILSNTVDIEAIHDNPEYQDKYGSVIAFIDSMDETEIAALENISLPNGRAAYSLETLDKLNKQMLETDDDLFEARKKLFNLPNNWRPSEAPIAEPTGNPSVDRVLKIVHRFLISAKNRWGNPERINIEHVRSGFQSKKMANSYKKLLDKRTEGKENLKAMMRNSLHLGTSDSISDADIRRYEAVQRQNGQCLYCGSEITYHTCELDHIVPRKGPGSTNTRENLVATCSSCNAQKCNTPFATWCEESTYCKNHDISVDSAINRVRAFIFPPNSYDKRGASQFKKEVIARLKQKVGDEAFDNRSIESVAWMANELHRRIDWYYNSQNYQTNNGISDITNKAQTNVGVYAGSLTAIARRMSGIDGKLEFFDGRRKTRFDRRHHAVDASVIAMMTPGIAQILAIKCNLRETQLLQGNKVVPGGIDWKEYPTANDQGYQQYANWSVRMNALLELLNEEMRADRIAVVNSIRLRYSNSSVHKDDVHALLKLHVGDEIDSETIRRASTPALYCALTRNPDYDVNNGLPENTDRTILLHDKKLNADDSITFFKSKAAQLFVREGSVEIGNSIHHLRIYEYFEKLKSGKVKKSYGMIRVFQDDLHRYIHEDLFSCDLPEQSISMRYADTKVAHAVQTGNANYLGYLVPGDEIIVDFSHVKLSGYIGEFVEFLNKIGANCAAYKHWVVAGTDDKTTLILKPSMISSEGIDKLYSNCERNNFDYASYEKSIDKILVDKGWRVSVNVLDQYKAATIRRNALGEPRWASRSHLPISWSWDTGENRE

SEQ ID NO: 243 - protein, 1392 aa, Gemella haemolysans
  Gemella haemolysans ATCC 10379
MANKTWYLGLDIGSASVGWAATDTGYKIIRKNKKRLWGVRLFEEAKTAEDRRGYRSSRRRLARRKWRLNLLEELFTSEVKKVDENFFLRLKESQYHYEDKTHKVPYAIFNDKDYTDKDYYKDYPTIYHLRSKLMTEENPDIRKVFLAIHHIIKNRGHFLLQGQSFKDGNLNNLIKELLELDILHVGFEVTEEVVDKIADISLEKKTSKDKLNDIKELYPKEKQLLEVFRLIFGGKTSLDKLFAIDEYKELDAAIKSVSFKEKIYEEVRHDYEQVLSNYIELLDLAKLVYDSIILSDIKKEGKTLSESKVELFEKHRDDLLKLKNLVKNDSKLSEDKKVELYALIFKEDKDKGTNYVNYIRKSEEGKGCNYEDFKKFLVKELAKLEESSVKTEIIKDLELEQFLPLQRTKDNSVVPYQIHKEELVKILDNAARYHSFLNEKDESGYNVREKVIQLLEFRIPYYVGPLNSSKKAKEGGFAWSVRNTGYENTPVTPWNYSKVIDESASAEKFITNLTNKCTYLKGEDVLPKSSLLYSEFALLNELNALKYDGNRISLEARNTIIEKLFKQQGKKVTKTSIKNLLKAEGYIDGKGEITGIDITVKNDLKSYRDFKKILGNKFNSEHVENIILWITLYGESRKLIKAKIESVYGEVYSKDEITKMSRLVYKDWGRFSRKLLTELVSKKLYNEETGECLNIIGAMRQNNILFMELLADRFDYSKQIVEFNKELQEDVTEIAPEILDDLYVSPAVKRSIWQTVRIVEELKKIIGCAPAKIFVETTRSNQEKKKPTDSRKKQLELAYKAVKKDVKELEKEIGTINFDVLNDRLSSVEPSKLKAKKLYLYYTQLGRCMYSEEPINISELFDNNKYDIDHIYPQSKIKDDSFTNTVLVKRESNAAKTDRYPLGSDIQTPSNRRFWKFLKEKGLISDEKYNRLVRTEEFSDEELSGFIARQLVETSQSVKAVASILGELNPETSICYSKAENVSSFRQNFGKIKKGDRDSKNNDQLIKVREINDYHHAKDAYLNVVVGNVYDTKFTRNVFNFIKDKKDGRKYSLNKVFYENVSDSKTVAWEMDKTIHQVEKVMNNNNIMVTRRTSEQKGGLFDATVYKAKVAAKAKDGVYYPLKTSNSVVKDVAKYGGYTSIGIAYYSIFEYTIVNKKGEEKITRIIPIPIYISQNIKDSTALIEFGKSQIFCRAYEKIKDFKLLYRKLCIGSKININNYQYYIGGKSDERFYYDSAIQVTLDKKSEKYLKILSKYQNWKKENKDGELWENITKENNIELYNKLVEKMNSEIFTKKKSNKYNELNSEEIRNNFIKISVEEQAKVLLEILNLLTNKKSIFDLKSIDIKAARGKISFNLTSLIQFSIIEQSITGFYEKEITIIGDKGNDMENNNS

SEQ ID NO: 244 - protein, 1385 aa, Gemella morbillorum
  Gemella morbillorum M424
MKNKTWYLGLGVGPTSIGWAATDSNYKLLRKNKKRLWGVRLFEEAKTAVDRRTFRAERRRLARRKWRISLLEELFAKEVSKNDPNFFLRLKESKYHFEDKSLMNEYILFNDKDYTDKDYYKEYPTIYHLRLSLTTEENPDIRKVYLAVHSMLKNRGHFLLQGQSFNDSNIDSVIKELLELETVKINFEVTDEVIHSLKKIALEKKNLSDKNNDVKKLYPKEKQLQEIFKLVFGGKTSLDKLYDIEEYKELDNSVKSISFKEKVYEEVRPDYEQILSNYIELLDLAKLVYDSIVLADIKKEGKTISESKVELYNKHKDDLANLKKLVKIDSKLSEDKKKEVYFTIFKEDKEKGTNYVNYTHRSQEGKSCSYEDFKKFLKKELEKLEDSPTKTTILEELDLETFLPLQRTKDNSVVPYQIHKEELVKILDNAAKYHSFLAEKDDSGYSTREKVVQLFEFRIPYYIGPLNAHHNTENGGYSWAIRKKGMESVPVTPWNFKDVIDESASAEAFVNNLKNKCAYLSGEDVLPKNSLLYSEYALLNELNALRYEGNRISVEARDVIVTKLFKEQGKKVTKKTIKELLKTEGFIDGKGEIVGIDNIVKNDLKSYRDFKKILADKFDKERVENIILWITLYGESRKLIKEKITKVYGDFYTVDEIEKMSRLTYKDWGILSRKLLTELVSEKLYNEETGECLNIIGAMRQGTILFMELLADKFDYMSQIKNHNKENKDDITEITPDILENLHASPAVKRSIWQTVRIVEELKTIIGCVPTKIFIETTKRNNAPYKVPTLNRNDLVTKYKTIREHEIFELEKELKNTLDFTLNKNRLINEEPSKLKATKLYLYYTQLGRCMYTGKKIDLGELFDNNNKYDIDHIYPQSKVKDGSFNNIVLVTKASNDMKADVFPLKSKFQTKENKIFWRFLKEKKLITEEKYNRLVRTEEFSNGELTGFITRQLVETSQAIKVISNVLRELNPETTICYSKAENVSSFRQSFGKIKEANRKAENNEKLIRVQEINDYYNAKDAYLSIVVGNVYDVKFTRNVHNFIKNNKDARRYSLNGLFYTDVKNANTIAWEMDKTVHVVEKTMNNNNILITRRTSEQKGALYDATLYKAKVAEKAKEGTYYPLKTTDSKIKDVGKYGGFTKIKIAYYSIFEYTLDGKKGKQKITRIVPIPIYISQNIKDDKALLEYAQTRLPGKDLKIKYRKLCIGSLVKINNFNYYIGGKTNNNFTFDSAVQVILDKDSESYIKELAKYLNWKKENKDGKLWESITEDKNIQLYDSLVKKMNTGIFIRKTPNKYTELLTLEVKNKFINIDIDEQVKLLLEILNLLTNKKFTSKLNEIGITASRGVCSFNLSNQSQFSIIEQSVTGVYEKEKLIIEKKKEGIL

SEQ ID NO: 245 - protein, 1003 aa, Gluconacetobacter diazotrophicus
MIDESLTFGIDLGIGSCGWAVLRRPSAFGRKGVIEGMGSWCFDVPETSKERTPTNQIRRSNRLLRRVIRRRRNRMAAIRRLLHAAGLLPSTDSDALKRPGHDPWELRARGLDKPLKPVEFAVVLGHIAKRRGFKSAAKRKATNISSDDKKMLTALEATRERLGRYRTVGEMFARDPDFASRRRNREGKYDRTTARDDLEHEVHALFAAQRRLGQGFASPELEEAFTASAFHQRPMQDSERLVGFCPFERTEKRAAKLTPSFERFRLLARLLNLRITTPDGERPLTVDEIALVTRDLGKTAKLSIKRVRTLIGLEDNQRFTTIRPEDEDRDIVARTGGAMTGTATLRKALGEALWTDMQERPEQLDAIVQVLSFFEANETITEKLREIGLTLAVLDVLLTALDAGVFAKFKGAAHISTKAARNLLPHLEQGRRYDEACTMAGYDHAASRLSHHGQIVAKTQFNALVTEIGESIANPIARKALIEGLKQIWAMRNHWGLPGSIHVELARDVGNSIEKRREIEKHIEKNTALRARERREVHDLLDLEDVNGDTLLRYRLWKEQGGKCLYTGKAIHIRQIAATDNSVQVDHILPWSRFGDDSFNNKTLCLASANQQKKRSTPYEWLSGQTGDAWNAFVQRIETNKELRGFKKRNYLLKNAKEAEEKFRSRNLNDTRYAARLFAEAVKLLYAFGERQEKGGNRRVFTRPGALTAALRQAWGVESLKKQDGKRINDDRHHALDALTVAAVDEAEIQRLTKSFHEWEQQGLGRPLRRVEPPWESFRADVEATYPEVFVARPERRRARGEGHAATIRQVKERECTPIVFERKAVSSLKEADLERIKDGERNEAIVEAIRSWIATGRPADAPPRSPRGDIITKIRLATTIKAAVPVRGGTAGRGEMVRADVFSKPNRRGKDEWYLVPVYPHQIMNRKAWPKPPMRSIVANKDEDEWTEVGPEHQFRFSLYPRSNIEIIRPSGEVIEGYFVGLHRNTGALIPTPVGPDSYVIA

SEQ ID NO: 246 - protein, 1050 aa, Gluconacetobacter diazotrophicus
MGENMIDESLTFGIDLGIGSCGWAVLRRPSAFGRKGVIEGMGSWCFDVPETSKERTPTNQIRRSNRLLRRVIRRRRNRMAAIRRLLHAAGLLPSTDSDALKRPGHDPWELRARGLDKPLKPVEFAVVLGHIAKRRGFKSAAKRKATNISSDDKKMLTALEATRERLGRYRTVGEMFARDPDFASRRRNREGKYDRTTARDDLEHEVHALFAAQRRLGQGFASPELEEAFTASAFHQRPMQDSERLVGFCPFERTEKRAAKLTPSFERFRLLARLLNLRITTPDGERPLTVDEIALVTRDLGKTAKLSIKRVRTLIGLEDNQRFTTIRPEDEDRDIVARTGGAMTGTATLRKALGEALWTDMQERPEQLDAIVQVLSFFEANETITEKLREIGLTLAVLDVLLTALDAGVFAKFKGAAHISTKAARNLLPHLEQGRRYDEACTMAGYDHAASRLSHHGQIVAKTQFNALVTEIGESIANPIARKALIEGLKQIWAMRNHWGLPGSIHVELARDVGNSIEKRREIEKHIEKNTALRARERREVHDLLDLEDVNGDTLLRYRLWKEQGGKCLYTGKAIHIRQIAATDNSVQVDHILPWSRFGDDSFNNKTLCLASANQQKKRSTPYEWLSGQTGDAWNAFVQRIETNKELRGFKKRNYLLKNAKEAEEKFRSRNLNDTRYAARLFAEAVKLLYAFGERQEKGGNRRVFTRPGALTAALRQAWGVESLKKQDGKRINDDRHHALDALTVAAVDEAEIQRLTKSFHEWEQQGLGRPLRRVEPPWESFRADVEATYPEVFVARPERRRARGEGHAATIRQVKERECTPIVFERKAVSSLKEADLERIKDGERNEAIVEAIRSWIATGRPADAPPRSPRGDIITKIRLATTIKAAVPVRGGTAGRGEMVRADVFSKPNRRGKDEWYLVPVYPHQIMNRKAWPKPPMRSIVANKDEDEWTEVGPEHQFRFSLYPRSNIEIIRPSGEVIEGYFVGLHRNTGALTISAHNDPKSIHSGIGTKTLLAISKYQVDRFGRKSPVRKEVRTWHGEACISPTPPG

SEQ ID NO: 247 - protein, 1371 aa, Gordonibacter pamelaeae
  Gordonibacter pamelaeae 7-10-1-b
MNLRNVESYQVGLDIGTGSVGWAVLDDNGDLCRFKGKPTWGSRVFPTAETAAEARVHRGQRRRYDRRRQRIDLLQRFFADEVAKVDPEFFIRLNQARLHPENRDPAHADYRWPLFNGSNFTEKDYYRQFPTIYHLRAHLLKSDEPADIRLVYLALHNIVKHRGNFLHQDNPSLSARNANVGDAVEALCLALDEWCGAHDVECACDEAALAEALGDASLRPGEKRERAEAALGVEKAHKKLAKAVSSAVVGYAAEFGHVFFAESEGSKFALSNDEKVEAYVCPDEGRDLFDAMRAVHSSYVLMGILSEAQGELLSVCKVGEYERYKRDLETLKSLVRAYGPERYDEFFCGPFYEGTRDYDPGKAQGYTKYNLGASKLSHEDFLKEVQKLLKDIGAQADERYADIERAIEAGAFLRRLKTSDNGTIPYQLHLEEMDAIIERQAAFYPFLAQEKDKLKSLVSFRIPYYVGPLTQKNAARDGKGEARFAWSSRKPGMEDARVYPWNWEDVIDKDQSAEDFIRRMTGTCTYLKGEPVLARCSLDYELFCVLNELAGARWTQDGDKSYRFDAADRLGIVEDLFKKRKRVTYEAAEKWLARTHGPESGKSAGGAYHVSGGQGEDAFESQLSSHYDFCKILGVDELSDADEAMAEDIILWNTVFEDRSILKRKIKLAYGDRLGDAQVRKLCQKRYTGWGRLSGELLRGLRSATDNGPKTIMDILLEGDPNHARRMGAAMNLMEILHDDLLEFQAKIDEHNRERALAVGGMSVDEVTGSPALRRGINQALRVVDEIAGIAGKPPAHIYVEVTRDEGARNKGRRTTSRYRALEAALSSIKAQCADVYAELKERDPRALDDERLTLYFMQCGKCMYSGDALDINKLQTYQVDHILPQSYVKDDSFENKVLVRPDTNQRKGDTLLLDERLIARMRGFWRTLRDAELIGEKKFNNLTRTSVSDEQMKKFVSRQLVETGQMVKQVQQLLQARYPESEVQPVKAGVSHQLRVGCALAKSREINDFHHAHDAYLACQVGRFVQYRHSAVYSEPVKMAAVVKQFIKKQAEDYRRTRELPGSDGFIVSSFMTPGFDVKTGEVFRDAWDAGAEIDRIRRCFDYKDCFISRMPEETHGAFWDATIYSPRAAGKTLSLPLKRGLDPRKYGSYSREQFAYFFVYEAVKPKKKQRVLEFAPVPVRVASALANDPDALEDYARELAEAEGLVFERIRRRKVYKYQQIIVGDSRLYVTGREEVRNARQLAFSQDETKLICRIEQGEECEEGELLDLFRSMQRKYLACAPRLARLMKVAEMEEGFIAATASGKREVLLSLTSIAAAHRNSIDLKPIGRKGSSGQMKITFSKELSTNGILFVDSSVTGMFERRCRLGL

SEQ ID NO: 248 - protein, 1054 aa, Haemophilus parainfluenzae
  Haemophilus parainfluenzae ATCC 33392
MENKNLNYILGLDLGIASVGWAVVEIDEKENPLRLIDVGVRTFERAEVPKTGESLALSRRLARSARRLTQRRVARLKKAKRLLKSENILLSTDERLPHQVWQLRVEGLDHKLERQEWAAVLLHLIKHRGYLSQRKNESKSENKELGALLSGVDNNHKLLQQATYRSPAELAVKKFEVEEGHIRNQQGAYTHTFSRLDLLAEMELLFSRQQHFGNPFASEKLLENLTALLMWQKPALSGEAILKMLGKCTFEDEYKAAKNTYSAERFVWITKLNNLRIQENGLERALNDNERLALMEQPYDKNRLFYSQVRSILKLSDEAIFKGLRYSGEDKKAIETKAVLMEMKAYHQIRKVLEGNNLKAEWAELKANPTLLDEIGTAFSLYKTDEDISAYLAGKLSQPVLNALLENLSFDKFIQLSLKALYKLLPLMQQGLRYDEACREIYGDHYGKKTEENHHFLPQIPADEIRNPVVLRTLTQARKVINGVVRLYGSPARIHIETGREVGKSYKDRRELEKRQEENRKQRENAIKEFKEYFPHFAGEPKAKDILKMRLYKQQNAKCLYSGKPIELHRLLEKGYVEVDHALPFSRTWDDSFNNKVLVLANENQNKGNLTPFEWLDGKHNSERWRAFKALVETSAFPYAKKQRILSQKLDEKGFIERNLNDTRYVARFLCNFIADNMHLTGEGKRKVFASNGQITALLRSRWGLAKSREDNDRHHALDAVVVACSTVAMQQKITRFVRFEAGDVFTGERIDRETGEIIPLHFPTPWQFFKQEVEIRIFSDNPKLELENRLPDRPQANHEFVQPLFVSRMPTRKMTGQGHMETVKSAKRLNEGISVIKMPLTKLKLKDLELMVNREREKDLYDTLKARLEAFNDDPAKAFAEPFIKKGGAIVKSVRVEQIQKSGVLVREGNGVADNASMVRVDVFTKGGKYFLVPIYTWQVAKGILPNKAATQYKDEEDWEVMDNSATFKFSLHPNDLVKLVTKKKTILGYFNGLNRATGNIDIKEHDLDKSKGKQGIFEGVGIKLALSFEKYQVDELGKNIRLCKPSKRQPVR

SEQ ID NO: 249 - protein, 1052 aa, Haemophilus sputorum
  Haemophilus sputorum CCUG 13788
MKNTSLNYVLGLDLGISSVGWAVVEIDEKENPLSLIDVGVRTFERAETQKGESLALARRLARSARRLTQRRVARLKKAKRLLKSENILLSTDECLPHQVWQLRVEGLERKLERQEWAAVLLHLIKHRGYLSQRKNESKSENKELGALLSGVANNHKLLQQTTYRTPAELAVKKFEVEEGHIRNQQGSYTHTFSRLDLLSEMELLFSRQQHFGNPFTSEKLLENLTALLMWQKPALSGDAILKMLGKCTFENEYKAAKHTYSAERFIWITKLNNLRIQENGLERALNDNERLALMKQPYEKAKLTYAQVRSILNLSDEAIFKGLRYSGEDKKTSETKTVLMEMKAYHQIRLALEKNDLKTEWAELKVNSSLLDEIGTAFSLYKTDEDISTCLAGKLSQPVLNALLENLNFDKFIQLSLKALHKILPLMQQGLRYDEACAEIYGDHYGKKTEENHLLLPQIPADEIRNPVVLRTLTQARKVINGVVRLYSSPARIHIETGREVGKSYQDRRELEKRQEENRKQREKAISEIKTLFPNFSGEPKAKDILKMRLYYQQNAKCLYSGKPLELHRLLEQGYVEIDHALPFSRTWDDSFNNKVLVLANENQNKGNLTPFEWLDGKNNSERWKAFKALVETSAFPYTKKQRILSQKLDEKGFIERNLNDTRYVARFLCNFIADNMHLTGEGKRKVFASNGQITALLRGRWGLAKSREDNDRHHALDAVVVACSTVSMQQKITRFVRFEEGNVFTGERIDRETGEIIPLHFPAPWKFFREEVEIRIFSDNPKLELENRLIARPQANHEFVQPLFVSRMPTRKMIGQGHMETIKSAKRLNEGLSVIKMLLTKLRLKDLESMVNREREKELYEALKARLEAFNDEPAKAFAEPFMKKGGAIVKSVRVEQVQKSGVLVRDGNGVADNASMVRVDVFTKGGKYFLVPIYTWQVAKGILPNKAVIQGKNEEDWEVMDDATFRFSLHQNDLVKLVTKKKTIFGYFNGLNRATGNIDIKEHDLEKSKVKDGIHQSIGIKLALSFEKYQVDELGKNIRLCKSSKRQAVR

SEQ ID NO: 250 - protein, 1052 aa, Haemophilus parainfluenzae
MENKNLHYILGLDLGIASVGWAVVEIDEKENPLRLIDVGVRTFERAETQKGESLALSRRSARSARRLTQRRVARLKKAKRLLKSENILLSTDERLPHQVWQLRVEGLDRKLERQEWAAVLLHLIKHRGYLSQRKNESKSENKELGALLSGVASNHELLQQATYRTPAELAVKKFEVEEGHIRNQQGAYTHTFSRLDLLAEMELLFSRQQHFGNPFASEKLLENLTALLMWQKPALSGEDILKMLGKCTFEDEYKAAKNTYTAERFVWITKLNNLRIQENGLERALSDNERLMLIEQPYEKAKLTYAQVRSILNLSDDAIFKGVRYSGEDKKAIETKTTLMEMKAYHQIRKVLEGNNLKAEWVALKANPTLLDEIGTAFSLYKTDEDISAYLAGKLSQPVLNALLENLSFDKFIQLSLKALYKLLPLMQQGLRYDEACREIYGDHYGKKTEETHHFLPQIPADEIRNPVVLRTLTQARKVINGVVRLYGSPARIHIETGREVGKSYKDRHELKKRQEENRKQREKTISEIKTLFPNFSGEPKGKDILKMRLYYQQNAKCLYSGKPLELHRLFEQKYVEVDHALPLSRTWDDSFNNKVLVLANENQNKGNLTPFEWLDGKNNSERWRTFKALVETSAFPYAKKQRILSQKLDEKGFIERNLNDTRYVARFLCNFIADNMHLTGEGKRKVFASNGQITALLRRRWGLAKSREDNDRHHALDAVLVACSTVAMQQKITRFVRFKAGDVFTGERIDRETGEIIPLHFPTPWQFFKQEVEIRIFSDNPKLELENRLPDRPQANHEFVQPLFVSRMPTRKMTGQGHMETVKSAKRLNEGISMIKMPLTKLKLKDLELMVNREREKDLYDALKTRLEAFNDDPAKAFAEPFMKKGGAIVKSVRVEQVQKSGVLVRQGNGVADNASMVRVDVFTKDGKYFLVPIYTWQVAKGILPNKAVIQGKDEEDWEDIDDATFQFSLHPNDLISVKTKKDEFLGYFNGLNRHTGGINIRTHDLEKSKGKQGIFEGIGVKIALSFEKYQIDELGKNIRLCKPSKRQPVR

SEQ ID NO: 251 - protein, 1052 aa, Haemophilus sputorum
  Haemophilus sputorum HK 2154
MKNTSLNYVLGLDLGISSVGWAVVEIDEKENPLSLIDVGVRTFERAETQKGESLALARRLARSARRLTQRRVARLKKAKRLLKSENILLSTDECLPHQVWQLRVEGLERKLERQEWAAVLLHLIKHRGYLSQRKNESKSENKELGALLSGVANNHKLLQQTTYRTPAELAVKKFEVEEGHIRNQQGSYTHTFSRLDLLSEMELLFSRQQHFGNPFTSEKLLENLTALLMWQKPALSGDAILKMLGKCTFENEYKAAKHTYSAERFIWITKLNNLRIQENGLERALNDNERLALMKQPYEKAKLTYAQVRSILNLSDEAIFKGLRYSGEDKKTSETKTVLMEMKAYHQIRLALEKNDLKTEWAELKVNSSLLDEIGTAFSLYKTDEDISTCLAGKLSQPVLNALLENLNFDKFIQLSLKALHKILPLMQQGLRYDEACAEIYGDHYGKKTEENHLLLPQIPADEIRNPVVLRTLTQARKVINGVVRLYSSPARIHIETGREVGKSYQDRRELEKRQEENRKQREKAISEIKTLFPNFSGEPKAKDILKMRLYYQQNAKCLYSGKPLELHRLLEQGYVEIDHALPFSRTWDDSFNNKVLVLANENQNKGNLTPFEWLDGKNNSERWKAFKALVETSAFPYTKKQRILSQKLDEKGFIERNLNDTRYVARFLCNFIADNMHLTGEGKRKVFASNGQITALLRGRWGLAKSREDNDRHHALDAVVVACSTVSMQQKITRFVRFEEGNVFTGERIDRETGEIIPLHFPAPWKFFREEVEIRIFSDNPKLELENRLIARPQANHEFVQPLFVSRMPTRKMTGQGHMETIKSAKRLNEGLSVIKMLLTKLRLKDLESMVNREREKELYEALKARLEAFNDEPAKAFAEPFMKKGGAIVKSVRVEQVQKSGVLVRDGNGVADNASMVRVDVFTKGGKYFLVPIYTWQVAKGILPNKAVIQGKNEEDWEVMDDATFRFSLHQNDLVKLVTKKKTIFGYFNGLNRATGNIDIKEHDLEKSKVKDGIHQSIGIKLALSFEKYQVDELGKNIRLCKSSKRQAVR

SEQ ID NO: 252 - protein, 1338 aa, Helcococcus kunzii
  Helcococcus kunzii ATCC 51366
MQDYYLGLDIGTNSVGWAVTDENYNLLRKKGKDLWGVRLFKEAQPATERRGHRSSRRRTIRKSLRKQLLRELFEEEINAIDKDFFLRLDESKYWLEDKKIEGKYSLFNDENFTDKDYYEKFPTIFHLRKALIESDDKEDIRLYFLAINQMMKRRGHFLIDGKLSNVEDITPFKECIQNLINEELDTEIETEFYDKAIKIVSDYSLKKTEKKNLIKDLVKETDSIEDSKKIINIFNLLISGKSKVNGIFDDEEILEKIKEDNKEDFYLTSEKYEENLEYFSQLLDYRFELISSLKSIYDYIILQEVLKGKKYLSYAQVERYKNHKEDLRKLKQLIKKYDKNGKIYYQIFRDENFKKGYVAYLGYYKKNKKNVPVKKCDYDTFSKNIKSTLDKICDKEDPLYIELIDKIEKGGFLLKQIVSTNSVIPHQVHELELDKILENLEKNYPSFKEISDGVSKIDKIKMIFNFRIPYYVGPLNDYHKDKVNSNTWIVKNEGFENENIRPWNFSKIVDEHACEEEFIKRMINECSYIPGEKVLPKSSLLYSEYMVLNELNNLRVNGDKLNPKIKKEIVENIYKKERKVTLKKIRNFLIINNYVDSKVEFSGLSDGIKANMSSYIDFAEILDDNFDNNMVEDLIEQITIHVGNVKLLTEKISNKYPNLEKKQINKIVNLKFKDWARFSRKLLVGIEGTEKETGEINTIIGFLRETNENFMELMSNRYTFSEEISEIKKKYIPNKLSKQIVDDLYVSPAVKKMIWQVLNINDELIKVLGKQPKKIFIEMARGKEEKPEVKDSRKNKLIELYKNLGKEGKEWLNRIEDKTEADFRNRALYLYYTQMGRCMYTGEIIDIERLYDKELYDLDHIIPRKMKKDDSIHKNLVLVTRNSNQYEKKDNYPVPEVIKSRENVRHLWYALKKKGLITEEKYNRLTRINPLSDKELSEFIERQLVETRQTTKVVKDLFENYYTDSKIVTVKAGLVSELRRDFEVLKCREINDLNHAHDAFLNIIVGDVWSKKFTSNPYNFVKKNREKYTLNNIFTKNQKDLRGNEIWNCAEGKKRIIKTLNKPSVLFSVENFEQTGQLFDQNIIGKQDYKEKTSYVPIKGDERLQDISKYGGYRGISGAYFFIVEHTEKNKRVKTIESLPIYMKSYVEENGLLDFCTNEMKLVDPKIIVKKLNYKSEIIVDGFKYLISGKTENRLSLETNEYLYWNHTQTTDIKKILNINEKIELEKYNGDIESERENIIKYIQIILEKFKLKPFIKRRNLPNIEINFADYETEKLLQLLVNLIPLTTKYVSPVDLTVISGSKYAGKVLIPKKISNLNEVIFISKSITGIYESRRRII

SEQ ID NO: 253 - protein, 1007 aa, Helicobacter canadensis
  Helicobacter canadensis MIT 98-5491
MKVLGFDIGINSIGWAFVENNELKDCGVRLFTKAENPKTKESLALPRRNARSSRVRLRRRRSRLLSLKHIISKEFGLHYEDYIALDGNLPKAYTGKIESIYKLRYEALSQAISKEDLARVILHIAKHRGYMNKNQKTSQDSEKGAILSAIKENSNKIKHYQTAGEYFYKELFENLRDGTKEFKNIRNKAMKNEKTGNMESTYYNTILASDLEKELKLILEKQQAYHNYSDTFIKEVLEIAFYQRPLKDFSHLVGSCTFYENEKRACKNSYSAWEFIALGKIINTLESIKKDTGEIFSNEIITQILKEVLDKGSLSYTKLRKMINLDEKVKFKGLKYDKEGVEKTNLIEFKKLKEFKKALGEHNLERKTLDEIATHITLTKDENQLKKQLEQYALSQNQIDALAELDFNDHINLSFKALYEILPLMEKGKRYDEACNELGLKAKTSNQKSEFLPAFCDSIFAQELTNPIVNRAISEYRKVLNRLLKKYGKMHKIHIELARDAGLSKEARNKIEKEQKENKDINDKAEKTCKEFGLKPNAKNILKIKLWREQGEICAYSGKKITIDDLKEDKALEVDHIYPYSRSYDDSYNNKVLVFIKENQLKLNQTPYEAFGSNQEKWSKIQVLAQKLPYKKKNRILDENFKNKDQIEFISRNLNDTRYATSLIAKYTKEYLEFLPLSDDEDISLKSGEKGSKTHVQTMNGMLTSVLRHAWGFSQKDRNNHLHHALDAIIIAYSTNSIIKAFSDFKKNQEILKAKLYAKKLTSEEYKNQSKFTGFEKYRSKILEKLDSIFVSKPPNKNTKGALHEQTFYSYQDILEEYKTQEGLKRALECGKVRKIGTKYVVNDRMVRLDIFKKDNKFYGIPIYTMDFALGVLPNKVVTIGTDKDKIKKEWKTIDETYEFCFSLYKGDLVLIQKKEMQESEFAYYNGFDISSASISLEKHDNKFENLTENQKLLFPKAKEGDVEVRGIGIQGLKVFKKYMVTPLGEIQETRTEARQNIQPRKKHGLR

SEQ ID NO: 254 - protein, 1023 aa, Helicobacter cinaedi
  Helicobacter cinaedi CCUG 18818 = ATCC BAA-847
MKIYSFDIGVASIGWAFIENEVLQDCGIRIFTKAENPKNGASLALPRREARGVRKRLARRRGRLNTIKQLLCKEFGLQLEDYLSNDGELPKAYTASKANPLKSPYELRTLALSQKLDSKDLVRVILHIAKHRGYGNKHAKDSKDTESGKVKKAIEFNRKTLAEKGYRSVGEYLYREFFQQSRISQNNGATEFINVRNKAGNYEHCVAQDMLKEELESILNAQRQFGFSLKQDFESKLLTKIFEQRPLKSFADKVGNCCFIAGEKRAPKDSPSAIEFIALSRTINTLINLSKESGEIYNRAIILQIVESTLKKGEISYKELREIIRLDERLRFKDPRLDYSREIKEAEKVKFLEFKQLKGFKKALGESFTTLAISQLDEIAEHIALIKDRVKLNEKLESYALTKEQREALSNLSFSAHINLSLQALKQILPFMRGDNGEQCLDYDESVEKAGLKALSKDTLKGQMLPPLNEFEPYLSNPVVARALAEYRKVLNVLLKQYGSPHKIHIEYAREAKLSSTERQKYEKEQKDNYAANQAAHKKCQELGLEPSSTNLLKLKLWQEQGGLCLYSGAKITISYLQDPTALQVDHIYPYSRSFDDSYMNKCLVLTKANQEKGNRTPFEAFGTDSAKWGVITTLAQKLPHKKRRRILNTAFNDKEAGFKLRNLNDTSYIARLVADYTETYLEFLPLVESENTTLSKGQKGSKKHIAIVNGVLTSTMRYYLGFASKDRDNHLHHALDAVIIGFMNDSVIKAFSDFKKTQETSKAAYYAHTLSKQEYKKQRAFIQLPSGENFRVSVLEKVESVFVSKPPRKRVRGALHEATFYSPNDPKLLKNYGGTKGVERALALGKMRKVGAKIVSNGAMVRVDIFRHKSSGKFYGVPVYTMDFALGILPNKAVVVGKDQNGVIKDWLEMDSSYEFIFSLYKDDVILVQKKEMQRPELCYFVSFDTSGASIKVAKHDNNFSTLTENQKLLFSNATKEEVVGKSIGIQNLKVFEKWQVSVLGEVKRTQSYPRENISLASKAKK

SEQ ID NO: 255 - protein, 1023 aa, Helicobacter cinaedi
  Helicobacter cinaedi CCUG 18818
MKIYSFDIGVASIGWAFIENEVLQDCGIRIFTKAENPKNGASLALPRREARGVRKRLARRRGRLNTIKQLLCKEFGLQLEDYLSNDGELPKAYTASKANPLKSPYELRTLALSQKLDSKDLVRVILHIAKHRGYGNKHAKDSKDTESGKVKKAIEFNRKTLAEKGYRSVGEYLYREFFQQSRISQNNGATEFINVRNKAGNYEHCVAQDMLKEELESILNAQRQFGFSLKQDFENKLLTKIFEQRPLKSFADKVGNCCFIAGEKRAPKDSPSAIEFIALSRTINTLINLSKESGEIYNRAIILQIVESTLKKGEISYKELREIIRLDERLRFKDPRLDYSREIKEAEKVKFLEFKQLKGFKKALGESFTTLAISQLDEIAEHIALIKDRVKLNEKLESYALTKEQREALSNLSFSAHINLSLQALKQILPFMRGDNGEQCLDYDESVEKAGLKALSKDTLKGQMLPPLNEFEPYLSNPVVARALAEYRKVLNVLLKQYGSPHKIHIEYAREAKLSSTERQKYEKEQKDNYAANQAAHKKCQELGLEPSSTNLLKLKLWQEQGGLCLYSGAKITISYLQDPTALQVDHIYPYSRSFDDSYMNKCLVLTKANQEKGNRTPFEAFGTDSAKWGVITTLAQKLPHKKRRRILNTAFNDKEAGFKLRNLNDTSYIARLVADYTETYLEFLPLVESENTTLSKGQKGSKKHIAIVNGVLTSTMRYYLGFASKDRDNHLHHALDAVIIGFMNDSVIKAFSDFKKTQETSKAAYYAHTLSKQEYKKQRAFIQLPSGENFRVSVLEKVESVFVSKPPRKRVRGALHEATFYSPNDPKLLKNYGGTKGVERALALGKMRKVGAKIVSNGAMVRVDIFRHKSSGKFYGVPVYTMDFALGILPNKAVVVGKDQNGVIKDWLEMDSSYEFIFSLYKDDVILVQKKEMQRPELCYFVSFDTSGASIKVAKHDNNFSTLTENQKLLFSNATKEEVVGKSIGIQNLKVFEKWQVSVLGEVKRTQSYPRENISLASKAKK

SEQ ID NO: 256 - protein, 1023 aa, Helicobacter cinaedi
MKIYSFDIGVASIGWAFIENEVLQDCGIRIFTKAENPKNGASLALPRREARGVRKRLARRRGRLNTIKQLLCKEFGLQLEDYLSNDGELPKAYTASKANPLKSPYELRTLALSQKLDSKDLVRVILHIAKHRGYGNKHAKDSKDTESGKVKKAIEFNRKTLAEKGYRSVGEYLYREFFQQSRISQNNGATEFINVRNKAGNYEHCVAQDMLKEELESILNAQRQFGFSLKQDFENKLLTKIFEQRPLKSFADKVGNCCFIAGEKRTPKDSLSAIEFIALSRTINTLINLSKESGEIYNRAIILQIVESTLKKGEISYKELREIIRLDERLRFKDPRLDYSREIKEAEKVKFLEFKQLKGFKKALGESFTTLARSQLDEIAEHIALIKDRVKLNEKLESYALTKEQREALSNLSFSAHINLSLQALKQILPFMRGDNGEQCLDYDESVEKAGLKALSKDTLKGQMLPPLNEFEPYLSNPVVARALAEYRKVLNALLKQYGSPHKIHIEYAREAKLSSTERQKYEKEQKDNYAANQAAHKKCQELGLEPSSTNLLKLKLWQEQGGLCLYSGAKITISYLQDPTALQVDHIYPYSRSFDDSYMNKCLVLTKANQEKGNRTPFEAFGTDSAKWGVITTLAQKLPHKKRRRILNTAFNDKEAGFKLRNLNDTSYIARLVADYTETYLEFLPLVESENTTLGKGQKGSKKHIAIVNGALTSTMRYYLGFASKDRDNHLHHALDAVIIGFMNDSVIKAFSDFKKTQETSKAAYYAHTLSKQEYKKQRAFIQLPSGENFRASVLEKVESVFVSKPPRKRVRGALHEATFYSPNDPKLLKNYGGTKGVERALALGKMRKVGAKIVSNGAMVRVDIFRHKSSGKFYGVPVYTMDFALGILPNKAVVVGKDKNGVIKDWLEMDSSYEFIFSLYKDDLLLVQKKEMAEPELCYFMSFNSSIAQISVAKHDNNFSTLTKNQKLLFSNATQEDVSGKSIGIQNLQVFEKWQVSVLGEVKRTQSYPRENISLASKAKK

SEQ ID NO: 257 - protein, 1024 aa, Helicobacter mustelae
MIRTLGIDIGIASIGWAVIEGEYTDKGLENKEIVASGVRVFTKAENPKNKESLALPRTLARSARRRNARKKGRIQQVKHYLSKALGLDLECFVQGEKLATLFQTSKDFLSPWELRERALYRVLDKEELARVILHIAKRRGYDDITYGVEDNDSGKIKKAIAENSKRIKEEQCKTIGEMMYKLYFQKSLNVRNKKESYNRCVGRSELREELKTIFQIQQELKSPWVNEELIYKLLGNPDAQSKQEREGLIFYQRPLKGFGDKIGKCSHIKKGENSPYRACKHAPSAEEFVALTKSINFLKNLTNRHGLCFSQEDMCVYLGKILQEAQKNEKGLTYSKLKLLLDLPSDFEFLGLDYSGKNPEKAVFLSLPSTFKLNKITQDRKTQDKIANILGANKDWEAILKELESLQLSKEQIQTIKDAKLNFSKHINLSLEALYHLLPLMREGKRYDEGVEILQERGIFSKPQPKNRQLLPPLSELAKEESYFDIPNPVLRRALSEFRKVVNALLEKYGGFHYFHIELTRDVCKAKSARMQLEKINKKNKSENDAASQLLEVLGLPNTYNNRLKCKLWKQQEEYCLYSGEKITIDHLKDQRALQIDHAFPLSRSLDDSQSNKVLCLTSSNQEKSNKTPYEWLGSDEKKWDMYVGRVYSSNFSPSKKRKLTQKNFKERNEEDFLARNLVDTGYIGRVTKEYIKHSLSFLPLPDGKKEHIRIISGSMTSTMRSFWGVQEKNRDHHLHHAQDAIIIACIEPSMIQKYTTYLKDKETHRLKSHQKAQILREGDHKLSLRWPMSNFKDKIQESIQNIIPSHHVSHKVTGELHQETVRTKEFYYQAFGGEEGVKKALKFGKIREINQGIVDNGAMVRVDIFKSKDKGKFYAVPIYTYDFAIGKLPNKAIVQGKKNGIIKDWLEMDENYEFCFSLFKNDCIKIQTKEMQEAVLAIYKSTNSAKATIELEHLSKYALKNEDEEKMFTDTDKEKNKTMTRESCGIQGLKVFQKVKLSVLGEVLEHKPRNRQNIALKTTPKHV

SEQ ID NO: 258 - protein, 1688 aa, Ignavibacterium album
MEFKKVLGLDIGTNSIGCALLSLPKSIQDYGKGGRLEWLTSRVIPLDADYMKAFIDGKNGLPQVITPAGKRRQKRGSRRLKHRYKLRRSRLIRVFKTLNWLPEDFPLDNPKRIKETISTEGKFSFRISDYVPISDESYREFYREFGYPENEIEQVIEEINFRRKTKGKNKNPMIKLLPEDWVVYYLRKKALIKPTTKEELIRIIYLFNQRRGFKSSRKDLTETAILDYDEFAKRLAEKEKYSAENYETKFVSITKVKEVVELKTDGRKGKKRFKVILEDSRIEPYEIERKEKPDWEGKEYTFLVTQKLEKGKFKQNKPDLPKEEDWALCTTALDNRMGSKHPGEFFFDELLKAFKEKRGYKIRQYPVNRWRYKKELEFIWTKQCQLNPELNNLNINKEILRKLATVLYPSQSKFFGPKIKEFENSDVLHIISEDIIYYQRDLKSQKSLISECRYEKRKGIDGEIYGLKCIPKSSPLYQEFRIWQDIHNIKVIRKESEVNGKKKINIDETQLYINENIKEKLFELFNSKDSLSEKDILELISLNIINSGIKISKKEEETTHRINLFANRKELKGNETKSRYRKVFKKLGFDGEYILNHPSKLNRLWHSDYSNDYADKEKTEKSILSSLGWKNRNGKWEKSKNYDVFNLPLEVAKAIANLPPLKKEYGSYSALAIRKMLVVMRDGKYWQHPDQIAKDQENTSLMLFDKNLIQLTNNQRKVLNKYLLTLAEVQKRSTLIKQKLNEIEHNPYKLELVSDQDLEKQVLKSFLEKKNESDYLKGLKTYQAGYLIYGKHSEKDVPIVNSPDELGEYIRKKLPNNSLRNPIVEQVIRETIFIVRDVWKSFGIIDEIHIELGRELKNNSEERKKTSESQEKNFQEKERARKLLKELLNSSNFEHYDENGNKIFSSFTVNPNPDSPLDIEKFRIWKNQSGLTDEELNKKLKDEKIPTEIEVKKYILWLTQKCRSPYTGKIIPLSKLFDSNVYEIEHIIPRSKMKNDSTNNLVICELGVNKAKGDRLAANFISESNGKCKFGEVEYTLLKYGDYLQYCKDTFKYQKAKYKNLLATEPPEDFIERQINDTRYIGRKLAELLTPVVKDSKNIIFTIGSITSELKITWGLNGVWKDILRPRFKRLESIINKKLIFQDEDDPNKYHFDLSINPQLDKEGLKRLDHRHHALDATIIAATTREHVRYLNSLNAADNDEEKREYFLSLCNHKIRDFKLPWENFTSEVKSKLLSCVVSYKESKPILSDPFNKYLKWEYKNGKWQKVFAIQIKNDRWKAVRRSMFKEPIGTVWIKKIKEVSLKEAIKIQAIWEEVKNDPVRKKKEKYIYDDYAQKVIAKIVQELGLSSSMRKQDDEKLNKFINEAKVSAGVNKNLNTTNKTIYNLEGRFYEKIKVAEYVLYKAKRMPLNKKEYIEKLSLQKMFNDLPNFILEKSILDNYPEILKELESDNKYIIEPHKKNNPVNRLLLEHILEYHNNPKEAFSTEGLEKLNKKAINKIGKPIKYITRLDGDINEEEIFRGAVFETDKGSNVYFVMYENNQTKDREFLKPNPSISVLKAIEHKNKIDFFAPNRLGFSRIILSPGDLVYVPTNDQYVLIKDNSSNETIINWDDNEFISNRIYQVKKFTGNSCYFLKNDIASLILSYSASNGVGEFGSQNISEYSVDDPPIRIKDVCIKIRVDRLGNVRPL

SEQ ID NO: 259 - protein, 1092 aa, Ilyobacter polytropus
MKYSIGLDIGIASVGWSVINKDKERIEDMGVRIFQKAENPKDGSSLASSRREKRGSRRRNRRKKHRLDRIKNILCESGLVKKNEIEKIYKNAYLKSPWELRAKSLEAKISNKEIAQILLHIAKRRGFKSFRKTDRNADDTGKLLSGIQENKKIMEEKGYLTIGDMVAKDPKFNTHVRNKAGSYLFSFSRKLLEDEVRKIQAKQKELGNTHFTDDVLEKYIEVFNSQRNFDEGPSKPSPYYSEIGQIAKMIGNCTFESSEKRTAKNTWSGERFVFLQKLNNFRIVGLSGKRPLTEEERDIVEKEVYLKKEVRYEKLRKILYLKEEERFGDLNYSKDEKQDKKTEKTKFISLIGNYTIKKLNLSEKLKSEIEEDKSKLDKIIEILTFNKSDKTIESNLKKLELSREDIEILLSEEFSGTLNLSLKAIKKILPYLEKGLSYNEACEKADYDYKNNGIKFKRGELLPVVDKDLIANPVVLRAISQTRKVVNAIIRKYGTPHTIHVEVARDLAKSYDDRQTIIKENKKRELENEKTKKFISEEFGIKNVKGKLLLKYRLYQEQEGRCAYSRKELSLSEVILDESMTDIDHIIPYSRSMDDSYSNKVLVLSGENRKKSNLLPKEYFDRQGRDWDTFVLNVKAMKIHPRKKSNLLKEKFTREDNKDWKSRALNDTRYISRFVANYLENALEYRDDSPKKRVFMIPGQLTAQLRARWRLNKVRENGDLHHALDAAVVAVTDQKAINNISNISRYKELKNCKDVIPSIEYHADEETGEVYFEEVKDTRFPMPWSGFDLELQKRLESENPREEFYNLLSDKRYLGWFNYEEGFIEKLRPVFVSRMPNRGVKGQAHQETIRSSKKISNQIAVSKKPLNSIKLKDLEKMQGRDTDRKLYEALKNRLEEYDDKPEKAFAEPFYKPTNSGKRGPLVRGIKVEEKQNVGVYVNGGQASNGSMVRIDVFRKNGKFYTVPIYVHQTLLKELPNRAINGKPYKDWDLIDGSFEFLYSFYPNDLIEIEFGKSKSIKNDNKLTKTEIPEVNLSEVLGYYRGMDTSTGAATIDTQDGKIQMRIGIKTVKNIKKYQVDVLGNVYKVKREKRQTF

SEQ ID NO: 260 - protein, 1354 aa, Indibacter alkaliphilus
  Indibacter alkaliphilus LW1
MKKILGLDLGTTSIGWAFIKEPEKDVVGSEIVDMGVRIVPLSSDEENDFAKGNTISINADRTLKRGARRNLQRFKQRRNALLETFKEKNLIPSNFQYAEDGPSSTFSTLKLRDKAAKEKIELDDFVKVLLQINKKRGYKSSRKAMSEEDEGTAIDSMGIAKELYENDLTPGQWVYEALKNGRKNVPDFYRSDLQEEFKKIVNYQSEFYPDILNTSFVEDWMGKASTPTKQYFNKRGVQLAENKGKREERRLQEYKWRAEAVNFKIDLSEIALILSQINSQISNSSGYLGAISDRSKELYFKNLTVGQYLYQQVKKNPHTRLKGQVFYRQDYLDEFEKIWSVQSSFYPQLNDELKQEVRDVTIFFQRRLKSQKHLISNCEFEEHHKVVPKSHPIFQEFRIWQNLNNLTLIKKDNLNEKCELALEDKTALANELAFKKELSVKDALKVLGLKPSDWEFNFTKIEGNRTNHAFFEAFAKIIELEDGEPIDLGNLKADDILDQFSEAFLRIGIDTELLQVNSDIEGAEYEKQSYIQFWHLLYSSEDDQKLKQNLIRKFGFKPEHAKILASISLQDDHASLSSRAIKKILPHLQSGLIYDKACTYAGYNHSSSFTKDENEKRELRAELELLKKNSLRNPVVEKILNQMINVVNAILKDPNLGRPDEIRVEMARELKANAEQRKNMTSNIASATRDHEKYREILKKEFGLKRVTKNDLLRYKLWLETDGISLYTGKPIEASKLFSKEYDIEHIIPKARLFDDSFSNKTICERQLNIDKANVTAFSFLQNKLSADEFEQYQSRVKSLYGKLSKAKIQKLLMANDKIPEDFIARQLQETRYISKKAKEILFEITMRVSVTTGTITDKLREDWGLVEIMKELNWEKYDKLGLTYTIEGKHGERLNKIKDWNKRNDHRHHAMDALTVALTKPAYIQYLNNLNAKAIGNKKGTEIFAIEQKYLKRENGKLCFIPPIENIRAEAKKHLSKILVSYKAKNKVVTINKNKTKKKAGFNEQTALTPRGQLHKETVYGKSFHYSTKFEKIGASFDAQKINTVAKKEEREALLKRLAENGNDPKKAFTGKNSLNKMPIYLDLGKNIKLSEKVKTVVLEQNYTIRKNIDPDLKVDKVIDVGIKRILESRLEEFGGNAKLAFSNLEENPIWLNKEKGIPIKRVKISGVSNVESLHVKKDHFGEKILDEEGNEIPVDFVSTGNNHHVAIYEDEDGNLQDEVVNFYEAVIRRNQGESIIKYRHEEGWNFLYSIKQNEFFVFPSQDFNPNDFDLLDPKNYDLISPNLYRAQKFSKVMYGNSAVRDYVFRHHLETVLNDVKELKDVAYKQLKSLQYLNGIKKVRLNHLGQIIQVGEY

SEQ ID NO: 261 - protein, 1397 aa, Joostella marina
  Joostella marina DSM 19592
MKKVLGLDLGTNSIGWALVNEATKEEKKEGKSSEIIKLGVRVNPLTVDEKTNFEKGRPLSTNADRTLKRSARRNLQRYKLRRRNLIEILIKNGFITKDTPLTETGKDTTHQTLKLRAKSAKEKVDLKDFAKILLTINKKRGYKSSRKVNSDEDGLAIDGMAVAKHLYEQNLTPGQYVLNLLQKNKKYVPDFYRSDLQEEFKNIWNNQKTYYFDILTDTLFEELKDKNKSQTWAICKKPFDIAGIKQIGKASDKRLERYKWRTEGLTQKLNLEYLAIALQEINNDINKSSGYLGAISDRSKELFFNKETVGENLYRQLVKTPHTSLRNQVFYRQDYLDEFETIWETQAKFYPQLTHTLKEEIRDVIIFYQRKLKSQKSLISFCQFESWEQTYIEKETGKSKTRTVGRKVIPKSSPLFQEFKIWQNLNSLEFRNSDEGEIIEFIKLDEDIRQTVFEELNLRGNLKPNDVLKILGNYISLGKVSQWKCNFEEIEGNRTNAALYNVYQIIAENEGYGFDWAKKTASEINKELKNIFPQLGIDASILDFDFTQANFDKQTSYQLWHLLYSAEEDFKISEEDKVLYGNSSVSLKKKLHQKYGFKPEYTKLLTNISLQPDYGNLSAKAICNILPYLKENNVYSEACDLTGYNHSNFLTAEEQAKRPLKPILELLKKNSLRNPVVEKILNQMVNVVNQVIETYGKPDEIRIELTRELKKSAKERANMTKSIADATRRNDDYRKTIIKEFGIPNPTKSDVVRYRLWQELASRGYKDIFTDTEIKPQELFSNKIDIEHIIPKALLFDDSFSNKTLAFKKDNLKKANRTAYDFIANDYAPNLENYIERVESLHKDRKITRAKRNKLLMLQSKLPDGFIERDLRNSQYITKEAKKMLYEVCRTVVSTSGSITDKLREDWDLINVMKELNFPKYKALGLTEKIERYDIGAEKMKEVEIIEDWNKRNDHRHHAIDALTVAFSTHSHIQYLNHLNARRDEGHKKHAAIIAIESTITEKEGNKKRRFIAPLPNFRLQAKEHIESILVSFKNKNKVVTNNINKTKRIKKDKFNTKVQLTPRGQLHKETIYGKIKQPLEKHIKLNKSFTLEQAKLIIDKRQREKVLNHLEKYAHNSDIAFNSKTLKKNPLLISDEPLKEVLCFEEVFTIRKDISYDNFKNEKQLDKVIDEKVKQALKERINQYNGDFREAFSDIERNPIWLNKAKGICVKRATIKGVSNAEPLHTAKNHLGEEVLTENKEQIPVDYVSTGNNHHVAIYEDEDGNLQEKVVSFYEAVIRVNEGLPIIDKEYNKSLGWTFKFTMKQNEMFVFPSEDFNPTEIDLLDQKNASLISPNLFRVQKFTIKDYFFRHHLETTVENNNTLKNTTWRREGLSGIYGIIKIRLNHLGEIVQVGEY

SEQ ID NO: 262 - protein, 1060 aa, Kingella kingae
  Kingella kingae PYKK081
MAAKSLNYILGLDLGIASCGWAVVEMDEQENPLRLIDVGVRTFEEAENPKDGSSLAETRRLARAQRRLISRRANRMNKLCRLLKQENVLQANDYDEKGLIIGLPNQAWELRAQGLDRKLEPKEWAAVLIHLVKHRGYLSQRKNESQTADKELGALLSGMNHNHQLLQSQSNQYRTPAELAIKQFATQDGHIRNQRGAYTHTFNRLDLQNELNQLFDAQTRLGNPHVSGSLKTAINDLLMNQKAALSGDAILEMLGRCTFEPSEYKAAKNTYSAERFVWLGKLTNLRIQDNGLESALSREQRELLLNEPYNKTKLTYQQVRKLLRLPETAFFKGLRYGKDNAESATFMEMKSYHAIRKSLENKSLKSEWEKLKTQPKLLDLIGTAFSIYKTDDEIAGCLKNQLPENVIIALQGQLNFSNFMELSLKALEKLLPLMEQGLRYDEACTQIYGNRHEKIADKTEKFLPNIPADKLRNPVVLRTLTQARKVINAIIRRYGSPARVHIETGREVGKSFSDRDKLKKQQEENQEQRRRAIDEWKQFFPNAAHEPKAVDILKLRLYQLQQGKCLYSGLPIDVRRLPEKGYVEIDHALPFSRTWDDSFNNKILVLASENQNKGNQTPYEYLRGADNSESWRLFVENVQNCQFSPNKKQKIMAKQLDEKGFLERNLNDTRYVSRFLCQFISEHLHLTGKGKKRVFASNGQITALLRGRWGLSKNREENDRHHAVDAVVVACSTVAMQQKITQFVRYQKGNVFTGERIDKETGEVISIHFPTPWEHFREEVMIRVFDDNPLRTLPEKLPNRPEALHEYVMPLFVSRMPTRKMTGQGHKETIKSAKRLDEKISVLRVPLTQLKLNDLENMVNREREPALYEALKARLEQFKNDPAKAFAEPFFKQGGQQVKAVRVEIVQKSGMLLRKINGVADNGSMVRVDVFEKSGKFYLVPIYAWQVAEGILPNYAVVAHKDESDWILMDESYHFKFALYKNDLLEVQTKKGGIMGYFASLDRATGAITIREHDRDKKKCKDGEHRSIGVKMASSFKKLQVDELGKNIHETRSRKRPNIG

SEQ ID NO: 263 - protein, 1391 aa, Kordia algicida
  Kordia algicida OT-1
MKKILGLDLGTNSIGWALVNEAEHEHEQSSIVKLGVRVNPLSVDEKTNFEKGRPLSINADRTSKRSARRNLQRFKLRRKNLINLLLKHHIISNETILTEVGKNTTHQTLKLRSKATQEKISLEEFARILLSINKKRGYKSSRKEKNEDEGFTIDGMAIAKELYDNQLTPGQYVYNILQDGKNYIPDFYRSDLQAEFDDVWQFQKKFYSSILTDEFYLKLKGQGKENTRKLFLAIHQVYTAENKGKRDAVKLQYYKWRSEAVKKQLSIEEVAYVLVEINNNINKSSGYLGAISDRSKALYFNNETVGEYLYGQLVKNRHNSLRNQVFYRQDYLDEFEKIWETQAKFYDELTNELKQEIRDVVIFYQRKLKSQKHLISDCLFEKHHKAIPKSSPLFQEFKIWQNLNYLEFVHTQSKEKIFFSELDDETRQFVFAELNIRGTLKIKEIKKLIGLETPVYWKSNFDEIEGNRTNQVLYNVYQNIADDLGYGFDWSKKHAFEINAELQAIFKDVGIDTAILNFDASIEENDFDKQKSYQLWHLLYSAEDTDKATEEDKLIYGNINTKLKKQLHQKYGFEAKYGNLLANISLQQDYGNLSAKAIKKILPYLESGNSFYEACTIVGYNPSNSLTKEQQQNRKLKDKLELLPKNSLRNPVVEKILNQKVNLINQLIDEYGKPDEVRIELARELKKSAKQRADLSKHINDATLKNQNIRKTLQKDFGIQNPSKNDVIRYKLYDELKDNGYKTLFTNKYIPKEQLFSKDVDIEHIIPKAILFDDSFSNKTLAYRNVNLAKADATAFDFISSKHLDDLDNYKARVETLFQSKRISKGKYKKLLMTRQNLPEDFIERDLRNSQYIAKKATAMLKEVFRSVVPTSGRITDKLREDWDLVNVMKELNLPKYRTLGLTEFIERKNGNKIEQIIDWTKRNDHRHHAMDALTVAFTTHNHIQYLNNLNVTHGLNGVDTDHEKSRLYAIKQAITKVYIVGKTKKRKFIPPMENFRSHAKNHLEGILISFKNKNKVVTKNKNRTKTKTKGVFNEKIQLTPRGQLHKETIYGHAKKVIVTKEKVSSKFTHEKILQVTKPAYREALLKRLASFKNDPKKAFSGKNALSKNPLYFDITSGKKVPDTVKLSYFENSYVIRKEVNSDNFKNEKSLQKVLDVGIRRILEKRLADYNGNAKEAFSNLEKNPIWKDKEKGVCIKKVRIEALKNAEPLHVKKDHLGKIILDDENKSTPVDFISTGNNHHVAIYEDKDGKLHDKVVSFYEVVSRVNLGLPIIDKSFNSHLDWKFLFSMKQNEMFVFPSEDFNPKEIDIGNPKNNELISKYLFRVQKFSKVTYGNSAVRDYVFRHHLETELIDKKELKGITYYQLKSIGMLEKLVKVRINHIGKIVHIGEY

SEQ ID NO: 264 - protein, 1314 aa, Lactobacillus animalis
  Lactobacillus animalis KCTC 3501
MLKKDYSIGLDIGTNSVGHAVVTDDYKVPTKKMKVFGDTSKKTIKKNMLGVLLFNEGQTAADTRLKRGTRRRYTRRKNRLRYLQEIFAPELAKVDPNFLYRLEESSLVAEDKKYDVYPIFGKREEELLYHDTYKTIYHLRSALANNDQPADLRLVYLALAHIIKYRGNFLLEGEIDLRTTDINKVFAEFSETLNENSDENLGKLDVADIFKNNTFSKTKKSEELLKLSGAKKNQLAHQLFKMMVGNMGSFKKVLGTDEEHKLSFGKDTYEDDLNDLLAEAGDQYLDIFVAAKKVYDAAILASILDVKDTQTKTVFSQAMIERYEEHQKDLIELKRVFKKYLPEKCHDFFSEPKISGYAGYIDGKVSEEDFYKYTKKTLKGIPETEEILQKIDANNYLRKQRTFDNGAIPHQVHLKELVAIVENQGKYYPFLRENKDKFEKILNFRIPYYVGPLARGNSKFAWLTRAGEGKITPYNFDEMIDKETSAEDFIKHMTINDLYLPTEPVLPKHSLLYERYTIFNELAGVRYVTENGEAKYFDAQTKRSIFELFKLDRKVSEKMVIKHLKVVMPAIRIQALKGLDNGKFNASYGTYKDLVDMGVAPELLNDEVNSEKWEDIIKTLTIFEGRKLIKRRLENYRDFLGEDILRKLSRKKYTGWGRLSAKLLDGIYDKKTHKTILDCLMTEDYSQNFMQLINDDNYSFKETIKNAQVIEKEETLAKTVQELPGSPAIKKGILQSLEIVDEIIKVMGYKPKSIVVEMARETQKTHGTRKREDRVQQIVENLKDANELPEKLPSNAELSDERKYLYCLQNGRDMYTGAPLDYDHLQFYDVDHIIPQSFLKDDSIENKVLTIKKENVRKTNGLPSEAVIQKMGSFWKKLLDAGAMTNKKYDNLRRNLHGGLNEKLKERFIERQLVETRQITKYVAQLLDQRLNYDGNGVELDEKIAIVTLKAQLASQFRSEFKLRKVRALNNLHHAHDAYLNAIVANLIMAKYPELEPEFVYGKYRKAKFKGLGKATAKNTLYANVLYFLKENEVYPFWDKARDLPTIKRYLYRAQVNKVRKAERQIGGFSDEMLVPKSDSGKLLPRKEGLDPVKYGGYAKAVESYAVLITADEVKKGKTKKVKTLVNIPIIDSKKYEADPTAYLASRGYTNVTNSFILPKYSLLEDPEGRRRYLASFKEFQKANELILPQHLVELLYWVNAKDGEQKLEDHKAEFKELFDKIMEFADKYVVAPKNSEKIRRLYEENQDATPMELGKNFVELLRYTADGAASDFKFFGENIPRKRYNSAGSLLNGTLIYQSKTGLYETRIDLGKL

SEQ ID NO: 265 - protein, 1377 aa, Lactobacillus brevis
  Lactobacillus brevis subsp. gravesensis ATCC 27305
MESNHDGEQVKYTLGLDIGTSSIGYAAIDKHQKPIRAKGKHVIGVRLFQEGQTAADRRAFRTTRRRLKRRKWRLNLLNRLFDPYLSEVDPNFLPRLRQSNLSPKDDNKHFNGSTLFPDKTDAAFYRQYPTMYHLRYALMTEKRKFDIREVYLAIHHIVKYRGNFLNSATVDSFKTSNIDFTSQFDRLNELYRQVILDEPFQINMDQVDEMTNKLLDNDALKLDTQKQVAKLLPVIYNDKPIDKQYTRIATEFSKAILGYKTKLDVILNLDTQNAKDWVIRLDDEDIDDKLPALVENLDESRQEIVTIIRDLYAQITLNAIVPKGKSLSESMVDKYNDHKDHLDLLMGLIHELGDDSAKGIKLREAYTQYVGKSDDKTLNQDDFYAAIKKNLDEDSKRSPKIQRLIEQASFMPKQRTSANGVIPHQLHQLELDRIIENQGRYYPFLKKPNPNTHKPNGGKYKLDELVAFRIPYYVGPLITKRDQEKTSGADFAWMIRKPGQEGEITPWNFDQKVDRMASANRFIRRMTTKDSYLVAEDVLPDASLIYEKFKALNELNMLKVNDSRLSPSQKQDLFNNLFKKQKTIRTKKLQTYIRTNWELPSVMISGLADPDKFNSSLSTYIDFRDIFGEKVDDPNRQADYEEIIEWSTVFEDRKIYQAKLNQLDWLTEPQRKALLTKRYTGWGRLSKKLLTGLKDQNGDSILDQLWKTNDNFMQIQSRDEFAKQIHDENAKQFHEANNVDDILDDAFTSPQNKKAIRQVDKVVQDVVKAVGYAPDKIAIEFTRSLENNPQRTVSRQRQLQAAYKNIPREIMKSGLMAELGSVADSKKVLSDKLYLYFTQMGKDMYEDKTINIDNLPNYDIDHILPQAFIKDDSIDNRVLISKEENARKSNRVPLKFFGAKRMGFWKDLLNNGLISNRKFQNLTTDPEKISKYSAKGFIHRQLVETSQVIRLVANILGNEYSQAGTTIIEVSAKMNRQLREDFHLIKNRNVNDYHHAMDAYLTAYVGDYLYLRYPKLRPYFVYGDFKKAEDQDLNIRNFNFLHDLKDNESLDKIVDSETGEIVWEKHGSVKQLKKVYHYKFMLVSQEVYTRQDALFNQTIYPASDADKRKLIPIKNSKPVDVYGGYSGNIDAYMAIVRVHGKKEDNYKVVGIPMRAVTKLKKAEKEGHDSYLNAVHEVLKPQFTKKKKNRKTGEITETVDEFDVLLGKVYYRQLIVDGNKKFMLGSSSYQYNAKQLVLSDKAMQVLSKNGKVKSQDENQNLIDVYDEILEKVDQYFELYDQRHYRESLHKGRGIFVNLPLSNQYDGSKLTSYGKYETIDAILNGLHANATMSNLRYLGISSPFGKMQASNGLTIDPDSIICYQSPTGLFERQIKLSDL

SEQ ID NO: 266 - protein, 1371 aa, Lactobacillus buchneri
MKVNNYHIGLDIGTSSIGWVAIGKDGKPLRVKGKTAIGARLFQEGNPAADRRMFRTTRRRLSRRKWRLKLLEEIFDPYITPVDSTFFARLKQSNLSPKDSRKEFKGSMLFPDLTDMQYHKNYPTIYHLRHALMTQDKKFDIRMVYLAIHHIVKYRGNFLNSTPVDSFKASKVDFVDQFKKLNELYAAINPEESFKINLANSEDIGHQFLDPSIRKFDKKKQIPKIVPVMMNDKVTDRLNGKIASEIIHAILGYKAKLDVVLQCTPVDSKPWALKFDDEDIDAKLEKILPEMDENQQSIVAILQNLYSQVTLNQIVPNGMSLSESMIEKYNDHHDHLKLYKKLIDQLADPKKKAVLKKAYSQYVGDDGKVIEQAEFWSSVKKNLDDSELSKQIMDLIDAEKFMPKQRTSQNGVIPHQLHQRELDEIIEHQSKYYPWLVEINPNKHDLHLAKYKIEQLVAFRVPYYVGPMITPKDQAESAETVFSWMERKGTETGQITPWNFDEKVDRKASANRFIKRMTTKDTYLIGEDVLPDESLLYEKFKVLNELNMVRVNGKLLKVADKQAIFQDLFENYKHVSVKKLQNYIKAKTGLPSDPEISGLSDPEHFNNSLGTYNDFKKLFGSKVDEPDLQDDFEKIVEWSTVFEDKKILREKLNEITWLSDQQKDVLESSRYQGWGRLSKKLLTGIVNDQGERIIDKLWNTNKNFMQIQSDDDFAKRIHEANADQMQAVDVEDVLADAYTSPQNKKAIRQVVKVVDDIQKAMGGVAPKYISIEFTRSEDRNPRRTISRQRQLENTLKDTAKSLAKSINPELLSELDNAAKSKKGLTDRLYLYFTQLGKDIYTGEPINIDELNKYDIDHILPQAFIKDNSLDNRVLVLTAVNNGKSDNVPLRMFGAKMGHFWKQLAEAGLISKRKLKNLQTDPDTISKYAMHGFIRRQLVETSQVIKLVANILGDKYRNDDTKIIEITARMNHQMRDEFGFIKNREINDYHHAFDAYLTAFLGRYLYHRYIKLRPYFVYGDFKKFREDKVTMRNFNFLHDLTDDTQEKIADAETGEVIWDRENSIQQLKDVYHYKFMLISHEVYTLRGAMFNQTVYPASDAGKRKLIPVKADRPVNVYGGYSGSADAYMAIVRIHNKKGDKYRVVGVPMRALDRLDAAKNVSDADFDRALKDVLAPQLTKTKKSRKTGEITQVIEDFEIVLGKVMYRQLMIDGDKKFMLGSSTYQYNAKQLVLSDQSVKTLASKGRLDPLQESMDYNNVYTEILDKVNQYFSLYDMNKFRHKLNLGFSKFISFPNHNVLDGNTKVSSGKREILQEILNGLHANPTFGNLKDVGITTPFGQLQQPNGILLSDETKIRYQSPTGLFERTVSLKDL

SEQ ID NO: 267 - protein, 1371 aa, Lactobacillus buchneri
MKVNNYHIGLDIGTSSIGWVAIGEDGKPLRIKGKTAIGARLFQEGNPAADRRMFRTTRRRLSRRKWRLKLLEEIFDPYITPVDSTFFARLKQSNLSPKDSRKEFKGSMLFPDLTDMQYHKDYPTIYHLRHALMTQDEKFDIRMVYLAIHHIVKYRGNFLNSTPVDSFKASKVNFVDQFKKLNELYTAINPEESFQINLANSEDIGHQFLDPSIRKFDKKKQIPKIVPVSVDDKATDKINGKIASEIINAILGYKSKLDVVVQCTPVDSKSWALKFDEEDIDAKLQKILPEMDENQQSIIAILQNLYSQVTLNQIVPNGMSLSESMIEKYNDHHDHLKLYKKIIDQLADPKKKAALKKAYSQYVGDDGKVIEQADFWSSVKKNLDDSDLSKQIMDLIDAEKFMPKQRTSQNGVIPHQLHQRELDEIIEHQSKYYPWLAEINPNKHDLHLAKYKIEELVAFRVPYYVGPMITPDDQAKSAETVFSWMERKGKEAGQITPWNFDEKVDRNASANRFIKRMTTKDTYLIGEDVLPDESLLYEKFKVLNELNMVRVNGKLLKVADKQAIFQDLFENYKHISVKKLQNYIKSKTGLPSDPEISGLSDPEYFNNSLGTYNDFKKLFGNKVDEPDLQDDFEKIVEWSTVFEDKRILREKLNEITWLSDQQKDVLESSRYQGWGRLSKKLLTGIVNDQGERIIDELWNTNKNFMQIQSDNDFAKRIHEANADQMKAVDVEDVLADAYTSPQNKKAIRQVVKVVDDIQKAMGGVAPKYISIEFTRSEDRNPRRTISRQRQLENTLKDTAKSLAKSINPELLSELDNAAKSKKGLTDRLYLYFTQLGKDIYTGKPINIDEISTYDIDHILPQAFVKDDSLNNRVLVSKAINNGKSDNVPVQLFGAKMGHFWKQLAEAGLISKRKLKNLQTDPDTISKYAMHGFIRRQLVETSQVIKLVANILGDKYRNDNTKIIEITARMNHQMRDEFGFIKNREINDYHHAFDAYLTAFLGRYLYHRYIKLRPYFVYGDFKKFKEDKVTMRNFNFLHDLTDDTQEKIADAETGEVIWDRENSIQQLKDVYHYKFMLISHEVYTLRGAMFNQTVYPASDAGKRKLIPIKADRPINVYGGYSGSADAYMAIVRIHNKKGDKYRVVGVPMRARDRLDAAKKVSDADCDRALKDVLTPQLTKTKKSRKTGEITQVVEDFEIVLGKVMYRQLMIDGDKKFMLGSSTYQYNAKQLVLSDQSVKTLASKGRLDPLQESMDYNNVYTEILDKVNQYFSLYDMNKFRHKLNLGFSKFISFPNHNVFDGNTKASSGKREILEEVLNGLHANPTFGNLKDIGITTPFGQLQQPNGILLSDEAKIRYQSPTGLFERTVSLKDL

SEQ ID NO: 268 - protein, 1361 aa, Lactobacillus casei
  Lactobacillus casei BL23
MTKLGKPYGIGVDIGSNSIGFAAVDENSHLIRLKGKTVIGARLFEEGKAAADRRASRTTRRRLSRNRWRLSFLRDFFESHITPTGPNFFMRQKYSEISPKDKARYKYEKRLFNDRTDAEFYQQYPTMYHLRNRLLTDPSKADVREIYFAIHHILKSRGHFLTSGYAKDFNTNKVALNEIFPALQDAYAQVYPDLDITFDENKVNEFKTVLLNEKATPSDTQRALVNLLLAEDGDKDILKQQKQVLTEFAKAVVGLKTKLNVALGTEVDSSEATVWNFSLGQLDDKWAGIESAMTDEGTEILDQIRDLYRARLLNGIVPAGKTLSQAKVDDYAQHHEDLELFKDYLKQLEDDGTAKAIRQLYDRYIDGDDAKPFVREDFVKALTKEVTAHPNAKSPELLERLAQPDFMLKQRNKANGAIPVQMQQRELDQIIKNQSVYYDWLAAPNPVEKHRKSMPYQLDELLNFRIPYYVGPLVTAKEQKAAQGGVFAWMVRKDPDGNITPYNFDEKVDREASANTFIQRMKTTDTYLIGEDVLPKQSLLYQRYEVLNELNNVRVNNEKLSIEQKQQVIRELFERHNSVTIKQFAENLRAHGDYAHIPEIRGLADEKRFLSSLSTYRQLKSLLPDAIDDPAKQADIENIIAWSTVFEDAAIFKTKLKEINWLDSQTITKLSNIRYRGWGQFSHKFLNGLTLGNGHTIIQELFLSNNNLMQILTDETLQKKMTELNADKLKAANINDAIDDAYTSPSNKKALRQVLRVIEDIKRAADGQDPSWLYVETADGGGTPGKRTRARQHQLQEIYANAAHELIDSAVRGELEDKIADKADFNDRLVLYFMQGGRDIYTGTPLNIDQLSSYDIDHILPQSLIKDNSLDNRVLVHAIINREKNATFASTIYAQKMNATWRQWHEAGLISGRKLRNLQMRPDQIDKYASGFVARQLVETRQIIKLTEQIVAAQYPETKIIAVKAGLSHQLREELEFPKNRDVNHYHHAFDAFLAARIGTYLLKRFPNLQAFFTYGKFKKADVKKLRGFNFIRDITHAEDKIVVKDTGEVIWDKKRDVDELDRIYNFKRMLITHEVHFEKADLFKQTVYGAKDSKEAGGKKQLISKKKGYPVDIYGGYTQETGSYLSVVRLTKKAMYAVVKVSTRDAAKLAVAKSISEQKENETLNDIIDEKLSKISKNGKITHELFEVVLPRVGQKTLFKNSKYNLFLVNSDTYMHNYQELWMPREYQKMWKDISLSKYGDAQTEDQLDQIFGFIVSQVNSYFNLYDINQFRKKLNDAADKFATLPMRDTDDMQGKIATIGQLLIGLQANAARSDLRNLDIKTPLGLLQIPNGISLDSDTSVVYQSPTGLLEREVHLSDL

SEQ ID NO: 269 - protein, 1361 aa, Lactobacillus casei
  Lactobacillus casei Lc-10
MTKLGKPYGIGVDIGSNSIGFAAVDENSHLIRLKGKTVIGARLFEEGKAAADRRASRTTRRRLSRNRWRLSFLRDFFESHITPTGPNFFMRQKYSEISPKDKARYKYEKRLFNDRTDAEFYQQYPTMYHLRNRLLTDPSKADVREIYFAIHHILKSRGHFLTSGYAKDFNTNKVALNEIFPALQDAYAQVYPDLDITFDENKVNEFKTVLLNEKATPSDTQRALVNLLLAEDGDKDILKQQKQVLTEFAKAVVGLKTKLNVALGTEVDSSEATVWNFSLGQLDDKWAGIESAMTDEGTEILDQIRDLYRARLLNGIVPAGNTLSQAKVDDYAQHHEDLELFKDYLKQLEDDGTAKAIRQLYDRYIDGDDAKPFVREDFVKALTKEVTAHPNAKSPELLERLAQPDFMLKQRNKANGAIPVQMQQRELDQIIKNQSVYYDWLAAPNPVEKHRKSMPYQLDELLNFRIPYYVGPLVTAKEQKAAQGGVFAWMVRKDPDGNITPYNFDEKVDREASANTFIQRMKTTDTYLIGEDVLPKQSLLYQRYEVLNELNNVRVNNEKLSIEQKQQVIRELFERHNSVTIKQFAENLRAHGDYAHIPEIRGLADEKRFLSSLSTYRQLKSLLPDAIDDPAKQADIENIIAWSTVFEDAAIFKTKLKEINWLDSQTITKLSNIRYRGWGQFSHKFLNGLTLGNGHTIIQELFLSNNNLMQILTDETLQKKMTELNADKLKAANINDAIDDAYTSPSNKKALRQVLRVIEDIKRAADGQDPSWLYVETADGGGTPGKRTRARQHQLQEIYANAAHELIDSAVRGELEDKIADKADFNDRLVLYFMQGGRDIYTGTPLNIDQLSSYDIDHILPQSLIKDNSLDNRVLVHAIINREKNATFASTIYAQKMNATWRQWHEAGLISGRKLRNLQMRPDQIDKYASGFVARQLVETRQIIKLTEQIVAAQYPETKIIAVKAGLSHQLREELEFPKNRDVNHYHHAFDAFLAARIGTYLLKRFPNLQAFFTYGKFKKADVKKLRGFNFIRDITHAEDKIVVKDTGEVIWDKKRDVDELDRIYNFKRMLITHEVHFEKADLFKQTVYGAKDSKEAGGKKQLISKKKGYPVDIYGGYTQETGSYLSVVRLTKKAMYAVVKVSTRDAAKLAVAKSISEQKENETLNDIIDEKLSKISKNGKITHELFEVVLPRVGQKTLFKNSKYNLFLVNSDTYMHNYQELWMPREYQKMWKDISLSKYGDAQTEDQLDQIFGFIVSQVNSYFNLYDINQFRKKLNDAADKFATLPMRDTDDMQGKIATIGQLLIGLQANAARSDLRNLDIKTPLGLLQIPNGISLDSDTSVVYQSPTGLLEREVHLSDL

SEQ ID NO: 270 - protein, 1363 aa, Lactobacillus casei
  Lactobacillus casei M36
MTKLGKPYGIGVDIGSNSIGFAAVDENSHLIRLKGKTVIGARLFEEGKAAADRRASRTTRRRLSRNRWRLSFLRDFFESHITPTDPNFFMRQKYSEISPKDKARYKYEKRLFNDRTDAEFYQQYPTMYHLRNRLLTDPSKADVREIYFAIHHILKSRGHFLTSGYAKDFNTNKVALNEIFPALQDAYAQVYPDLDITFDENKVNEFKTVLLDEKATPSDTQRALVNLLLAEDGDKDILKQQKQVLTEFAKAVVGLKMKLNVALGTEVDSSEATAWNFSLGQLDDKWAGIESAMTDEGTEILDQIRDLYRARLLNGIVPAGKTLSQAKVDDYEQHHEDLELFKDYLKQLEDDGMAKVIRQLYDRYIDGDDAKPFVREDFVKALTKEVTAHPNAKSPELLERLVQPDFMLKQRNKANGAIPVQMQQRELDQIIKNQSVYYDWLAAPNPVEKHRQSMPYQLDELLNFRIPYYVGPLVTAKEQKAAQGGVFAWMVRKDPDGNITPYNFDEKVDREASANTFIQRMKTTDTYLIGEDVLPKQSLLYQSYEVLNELNNVRVNDNKLSFDQKQQVLGELFERHNTVTIKQFVDNLLAHGDYDRIPEVRGLADEKRFLSSLSTYNQLKGILHEAIDDSDKQTDIEKIIAWSTIFEDKAIFKTKLNEISWLTAGMINSLANIRYRGWGQFSHKLLNELTLSTGRTVFEELLISSHNLMQILTDEVLKQKIAELNAHELKASGIYAAIDDAYTSPSNKKALRQVLSVIDDITNAAGQAPNWLYIETADGDGVPGKRTNSRQRKIQEIYANAAQELITGSVRGELEDKIASRADFTDRLVLYFMQGGRDIYTGEPLNIDNLSSYDIDHILPQSLIKDNSLDNRVLVHPLVNREKDTIFASTRFAKQMNGMWRQWHAAGLISSRKLRNLQMRPDEIDKYASGFVARQLVETRQIIKLTEQIVADQYPDAKIIAVKAGLSSQLRKELDFPKNREVNHYHHAFDAFLAARIGTYLLKRYPNLEPFFTYGKFKKTEVKKLKSLKSFNFIRDMTHAKDKIVAKETGEIVWDNASDINELDRIYNFKRMLITHEVRFETASLFKQTLYAAKNSKNRGGSRQLIPKKKGYLVDIYGGYTQETGSYLSVVRLTKKAMYAVVKVSTRDAAKLAVAKSISEQKENETLKKIIDGKLSKTSKKGKTTHQLFEIVLPRVGQKTLFKNSKYNQFLVNSDTYMHNYQELWMPREYQRMWKDILLSNHGDAQLEGQLDQIFKFIVSQVNSYFNLYDINQFRKKIADATDKFAKLPTHDTDNARGKIATIGQLLIGLQANAMRSDLRNLDIKTPFGLLQIGTGITLDLDTSIIYQSPTGLFEREVPLTDL

SEQ ID NO: 271 - protein, 1361 aa, Lactobacillus casei; identical to SEQ ID NO: 268
  Lactobacillus casei group

SEQ ID NO: 272 - protein, 1360 aa, Lactobacillus casei
  Lactobacillus casei T71499
MTKLGKPYGIGVDIGSNSIGFAAVDENSHLIRLKGKTVIGARLFEEGKAAADRRASRTTRRRLSRNRWRLSFLRDFFESHITPTDPNFFMRQKYSEISPKDKARYKYEKRLFNDRTDAEFYQQYPTMYHLRTRLLTDPSKADVREIYFAIHHILKSRGHFLTPGYAKDFNTNKVALNEIFPALQDAYAQVYPDLDITFDENKVNEFKTVLLNEKATPSDTQRALVNLLLAEDGDKDILKQQKQVLTEFAKAVVGLKTKLNVALGTEVDSSEATVWNFSLGQLDDKWAGIESAMTDEGTEILDQIRDLYRARLLNGIVPAGKTLSQAKVDDYAQHHEDLELFKDYLKQLEDDGTAKAIRQLYDRYIDGDDAKPFVREDFVKALTKEVTAHPNAKSPELLERLAQPDFMLKQRNKANGAIPVQMQQRELDQIIKNQSVYYDWLAAPNPVEKHRKSMPYQLDELLNFRIPYYVGPLVTAKEQKAAQGGVFAWMVRKDPDGNITPYNFDEKVDREASANTFIQRMKTTDTYLIGEDVLPKQSLLYQSYEVLNELNNVRVNDNKLSFDQKQQVLGELFERHNTVTIKQFVDNLLAHGDYDRIPEVRGLADEKRFLSSLSTYNQLKGILHEAIDDADKQTDIENIIAWSTIFEDKAIFKTKLNEISWLNAGMINSLANIRYRGWGQFSHKLLNELTLSTGRTVFEELLISSRNLMQILTDEVLKQKIAELNAHELKASGIYAAIDDAYTSPSNKKALRQVLSVIDDITNAAGQAPNWLYIETADGDGVPGKRTNSRQRKIQEIYANAAQELITGSVRGELEDKIASRADFTDRLVLYFMQGGRDIYTGEPLNIDNLSSYDIDHILPQSLIKDNSLDNRVLVHPLVNREKDTIFASTRFAKQMNGMWRQWHAAGLISSRKLRNLQMRPDEIDKYASGFVARQLVETRQIIKLTEQIVADQYPDTKIIAVKAGLSSQLRKELDFPKNREVNHYHHAFDAFLAARIGTYLLKRYPNLEPFFTYGKFKKTEVKKLKSFNFIRDMTHAKDKIVAKETGEIVWDNASDINELDRIYNFKRMLITHEVRFETASLFKQTLYAAKNSKNRGGSRQLIPKKKGYLVDIYGGYTQETGSYLSVVRLTKKAMYAVVKVSTRDAAKLAVAKSISEQKENETLKKIIDGKLSKTSKKGKTTHQLFEIVLPRVGQKTLFKNSKYNQFLVNSDTYMHNYQELWMPREYQRMWKDILLSNHGDAQLEGQLDQIFKFIVSQVNSYFNLYDINQFRKKIADATDKFAKLPTHDTDNARGKIATIGQLLIGLQANAMRSDLRNLDIKTPFGLLQIGTGITLDLDTSIIYQSPTGLFEREVPLTDL

SEQ ID NO: 273 - protein, 1366 aa, Lactobacillus casei
  Lactobacillus casei UCD174
MTKLGKPYGIGVDIGSNSIGFAAVDENSHLIRLKGKTVIGARLFEEGKAAAYRRASRTTRRRLSRNRWRLSFLRDFFESHITPTDPNFFMRQKYSEISPKDKARYKYEKRLFNDRTDAEFYQQYPTMYHLRTRLLTDPSKADVREIYFAIHHILKSRGHFLTPGYAKDFNTNKVALNEIFPALQDAYAQVYPDLDITFDENKVNEFKTVLLNEKATPSDTQRALVNLLLAKEGDRDILKQQKQVLTEFAKAVVGLKTKLNVALGTEVDSSEATAWNFSLGQLDDKWAGIESAMTDEGTEILDQIRDLYRARLLNGIVPAGKTLSQAKVDDYAQHHEDLELFKDYLKQLEDDGTAKAIRQLYDRYIDGDDAKPFVREDFVKALTKEVTAHPNAKSPELLERLAQPDFMLKQRNKANGAIPVQMQQRELDQIIKNQAVYYDWLAAPNPVEKHRQSMTYQLDELLNFRIPYYVGPLVTAKEQKAAQGGVFAWMVRKDPDGNITPYNFDEKVDREASANTFIQRMKTTDTYLIGEDVLPKQSLLYQSYEVLNELNNVRVNDNKLSFDQKQQVLGELFERHNTVTIKQFVDNLLAHGDYDRIPEVRGLADEKRFLSSLSTYNQLKGILHEAIDDADKQTDIENIIAWSTIFEDKAIFKTKLNEISWLNAGMINSLANIRYRGWGQFSHKLLNELTLSTGRTVFEELLISSRNLMQILTDEVLKQKIAELNAHELKASGIYAAIDDAYTSPSNKKALRQVLSVIDDITNAAGQAPNWLYIETADGDGVPGKRTNSRQRKIQEIYANAAQELITGSVRGEFEDKIASRADFTDRLVLYFMQGGRDIYTGEPLNIDNLSSYDIDHILPQSLIKDNSLDNRVLVHPLVNREKDTIFASTRFAKQMNGMWRQWHAAGLISSRKLRNLQMRPDEIDKYASGFVARQLVETRQIIKLTEQIVADQYPDTKIIAVKAGLSSQLRKELDFPKNREVNHYHHAFDAFLAARIGTYLLKRYPNLEPFFTYGKFKKTEVKKLKSLKSLKSFNFIRDMTHAKDKIVAKETGEIVWDNASDINELDRIYNFKRMLITHEVRFETASLFKQTLYAAKNSKNRGGSRQLIPKKKGYLVDIYGGYTQETGSYLSVVRLTKKAMYAVVKVSTRDAAKLAVAKSISEQKENETLKKIIDGKLSKTSKKGKTTHQLFEIVLPRVGQKTLFKNSKYNQFLVNSDTYMHNYQELWMPREYQRMWKDILLSNHGDAQIEGQLDQIFKFIVSQVNSYFNLYDINQFRKKIADATDKFAKLPTHDTDNARGKIATIGQLLIGLQANAMRSDLRNLDIKTPFGLLQIGTGITLDLDTSIIYQSPTGLFEREVPLTDL

SEQ ID NO: 274 - protein, 1389 aa, Lactobacillus casei
MIIRTYELKTITTIAILKMFQLLTGGLSMTKLGKPYGIGVDIGSNSIGFAAVDENSHLIRLKGKTVIGARLFEEGKAAADRRASRTTRRRLSRNRWRLSFLRDFFESHITPTGPNFFMRQKYSEISPKDKARYKYEKRLFNDRTDAEFYQQYPTMYHLRNRLLTDPSKADVREIYFAIHHILKSRGHFLTSGYAKDFNTNKVALNEIFPALQDAYAQVYPDLDITFDENKVNEFKTVLLNEKATPSDTQRALVNLLLAEDGDKDILKQQKQVLTEFAKAVVGLKTKLNVALGTEVDSSEATVWNFSLGQLDDKWAGIESAMTDEGTEILDQIRDLYRARLLNGIVPAGKTLSQAKVDDYAQHHEDLELFKDYLKQLEDDGTAKAIRQLYDRYIDGDDAKPFVREDFVKALTKEVTAHPNAKSPELLERLAQPDFMLKQRNKANGAIPVQMQQRELDQIIKNQSVYYDWLAAPNPVEKHRKSMPYQLDELLNFRIPYYVGPLVTAKEQKAAQGGVFAWMVRKDPDGNITPYNFDEKVDREASANTFIQRMKTTDTYLIGEDVLPKQSLLYQRYEVLNELNNVRVNNEKLSIEQKQQVIRELFERHNSVTIKQFAENLRAHGDYAHIPEIRGLADEKRFLSSLSTYRQLKSLLPDAIDDPAKQADIENIIAWSTVFEDAAIFKTKLKEINWLDSQTITKLSNIRYRGWGQFSHKFLNGLTLGNGHTIIQELFLSNNNLMQILTDETLQKKMTELNADKLKAANINDAIDDAYTSPSNKKALRQVLRVIEDIKRAADGQDPSWLYVETADGGGTPGKRTRARQHQLQEIYANAAHELIDSAVRGELEDKIADKADFNDRLVLYFMQGGRDIYTGTPLNIDQLSSYDIDHILPQSLIKDNSLDNRVLVHAIINREKNATFASTIYAQKMNATWRQWHEAGLISGRKLRNLQMRPDQIDKYASGFVARQLVETRQIIKLTEQIVAAQYPETKIIAVKAGLSHQLREELEFPKNRDVNHYHHAFDAFLAARIGTYLLKRFPNLQAFFTYGKFKKADVKKLRGFNFIRDITHAEDKIVVKDTGEVIWDKKRDVDELDRIYNFKRMLITHEVHFEKADLFKQTVYGAKDSKEAGGKKQLISKKKGYPVDIYGGYTQETGSYLSVVRLTKKAMYAVVKVSTRDAAKLAVAKSISEQKENETLNDIIDEKLSKISKNGKITHELFEVVLPRVGQKTLFKNSKYNLFLVNSDTYMHNYQELWMPREYQKMWKDISLSKYGDAQTEDQLDQIFGFIVSQVNSYFNLYDINQFRKKLNDAADKFATLPMRDTDDMQGKIATIGQLLIGLQANAARSDLRNLDIKTPLGLLQIPNGISLDSDTSVVYQSPTGLLEREVHLSDL

SEQ ID NO: 275 - protein, 1354 aa, Lactobacillus coryniformis
  Lactobacillus coryniformis subsp. coryniformis KCTC 3167
MTLHYNVGLDIGTNSVGYTIVDDNGKILQVKGKNGYGVRVFKEGATAAERRIFRTTHRRLKRRKWRLRLLQDFFEPYILPQDDGFFIRRKESNLVLNDRDEDTASLFNDRSDRDFYQAYPTIYHLRQALMTEKRQFDVREIYLAMHHIIKYRGHFLLNGTVNNFTNNKIDLHSDFEELNALLLNVIPELKFQIDLDHSTMFQTTLLNTTISRSGRQRDLVKSFYNGSDDKQLAKQQKSVATELLKAILGLKAKFHKLFNLDLLETTEWEFSFDAEDIDDKLAKLEPLMTENQQQVMDILQRIFAAITLNGIVPEGKTLSASKVDSYQKHKQDLKLLKAIAQHSDKKTATVLQTAYNEYINGIASKPLKQEDFYKRLTNAVKKSSDPQVADMLALIDQEKFLPKQRTKENGAIPHQLHQLELERIIDNQKDYYPWLAELNPNQARQKVAKYKLSELVAFRVPYYVGPLIEPEVQQATSNAHFAWMARKEAGPITPWNFDQKVDRNVSAERFIKRMTTKDTYLLAEDVLPLHSLLYQRFIVLNELNNVRVNGQKLTKKQKQAVYQDLFKRQPHVTKKQFKSYLVQTGEFAESSKIEGLANETSFNSGLTTENELRKIFGAQLDEARYQVDFEQIIEWATLFEDAKILRTKLAEITWLTTEQIEKLAGIRYRGWGRFSRKLLAGLRDQNGQQIIDLLWDTPNNFMVIVSQAAFSEAITKENEKLIDRRGAQDVITDLYTSPQNKKALRQVLAIVADVQKAMGGVPPQRIFIEFAREDEKNPRRSVERSRQLEKLYQTISNEFLINSEVRQELKEAVDQKVNFKDRLFLYFLQGGVDLYSGKRINIDQLSHYDIDHILPQSFIKDDSLDNRVLVSQKLNRSKSDSVPLSEFANYKFGPAMQAKWLQLKEAGLLSKRKYDNLTLDPTKLSKFAPLGFVNRQLVETRQVIKLAANLLASEETKVVTIKANMTHQVRKELDFPKNRNVNNYHHAFDAYLTAFVGIFLSKRYPKLKPYFTYGDFQKGNKLPDLKNFNFLYELKNKDRSIDSNTGEIIWDKQRDLAYMNKIYNFKKVTVVHEVLTKSGALYNQTLYKASEDKASGRGTKQLIRKKDNMPTELYGGYTGSTSAFMSIVRLWKKDKPYYKVVGIPTRMAAKLANQAQLLDYLTKKFTTRKLVKKTGDYKTTVERFELVVPKVGFNQLVIDGGQPFMLGSATYQYNARELFISKEAVKALNKQLSTHVDLVQVFDEILVQVNRWFPLYDTNGFREKLSHGRDRFMKLNDSFEEKSDTQIDVLNRILIGFHANAARTNLKILGLGTDLGFMTQQAGIRLTEKAILVHQSPSGLFERKVALRDLKGLR

SEQ ID NO: 276 - protein, 1119 aa, Lactobacillus coryniformis
  Lactobacillus coryniformis subsp. torquens KCTC 3535
MGYRIGLDVGITSTGYAVLKTDKNGLPYKILTLDSVIYPRAENPQTGASLAEPRRIKRGLRRRTRRTKFRKQRTQQLFIHSGLLSKPEIEQILATPQAKYSVYELRVAGLDRRLTNSELFRVLYFFIGHRGFKSNRKAELNPENEADKKQMGQLLNSIEEIRKAIAEKGYRTVGELYLKDPKYNDHKRNKGYIDGYLSTPNRQMLVDEIKQILDKQRELGNEKLTDEFYATYLLGDENRAGIFQAQRDFDEGPGAGPYAGDQIKKMVGKDIFEPTEDRAAKATYTFQYFNLLQKMTSLNYQNTTGDTWHTLNGLDRQAIIDAVFAKAEKPTKTYKPTDFGELRKLLKLPDDARFNLVNYGSLQTQKEIETVEKKTRFVDFKAYHDLVKVLPEEMWQSRQLLDHIGTALTLYSSDKRRRRYFAEELNLPAELIEKLLPLNFSKFGHLSIKSMQNIIPYLEMGQVYSEATTNTGYDFRKKQISKDTIREEITNPVVRRAVTKTIKIVEQIIRRYGKPDGINIELARELGRNFKERGDIQKRQDKNRQTNDKIAAELTELGIPVNGQNIIRYKLHKEQNGVDPYTGDQIPFERAFSEGYEVDHIIPYSISWDDSYTNKVLTSAKCNREKGNRIPMVYLANNEQRLNALTNIADNIIRNSRKRQKLLKQKLSDEELKDWKQRNINDTRFITRVLYNYFRQAIEFNPELEKKQRVLPLNGEVTSKIRSRWGFLKVREDGDLHHAIDATVIAAITPKFIQQVTKYSQHQEVKNNQALWHDAEIKDAEYAAEAQRMDADLFNKIFNGFPLPWPEFLDELLARISDNPVEMMKSRSWNTYTPIEIAKLKPVFVVRLANHKISGPAHLDTIRSAKLFDEKGIVLSRVSITKLKINKKGQVATGDGIYDPENSNNGDKVVYSAIRQALEAHNGSGELAFPDGYLEYVDHGTKKLVRKVRVAKKVSLPVRLKNKAAADNGSMVRIDVFNTGKKFVFVPIYIKDTVEQVLPNKAIARGKSLWYQITESDQFCFSLYPGDMVHIESKTGIKPKYSNKENNTSVVPIKNFYGYFDGADIATASILVRAHDSSYTARSIGIAGLLKFEKYQVDYFGRYHKVHEKKRQLFVKRDE

SEQ ID NO: 277 - protein, 1368 aa, Lactobacillus curvatus
  Lactobacillus curvatus CRL 705
MSRPYNIGLDIGTSSIGWSVVDDQSKLVSVRGKYGYGVRLYDEGQTAAERRSFRTTRRRLKRRKWRLGLLREIFEPYITPIDDTFFLRQKQSNLSPKDQRKLYTQTSLFNDRTDRAFYDDYPTIYHLRYRLMTEKRQFDIREIYLAMHHIVKYRGHFLNEAPVSSFKSSEINLVAHFDRLNTIFADLFSESGFQLETDKLAEVKALLLDNQQSASNRQRQALSLIYTPSTNKAVEKQNKAIATELLKAILGLKAKFNVLTGIEAEDVKAWTLTFNAENFDEEMVKLESSLDDNAHQIIESLQELYSGVLLAGIVPENQSLSQAMITKYDDHQKHLKMLKAVREALAPGDRQRLKQAYDQYVDGQENTKAYSKEDFYGDITKALKNNPDHPIVSEIKKLIELDQFMPKQRTKDNGAIPHQLHQQELDRIIENQQQYYPWLAELNPNSKRQTVAKYKLDELVAFRVPYYVGPLITAEQQRQSSDAKFAWLIRKAEGRITPWNFDDKVDRQASANEFIKRMTTTDTYLLAEDVLPKQSLIYQRFEVLNELNGLKIDDQPITTELKQAIFTDLFMQKISVTVKNIQDYLVSEKRYASRPAITGLSDENKFNSRLSTYHDLKMIVGDAVDDVDKQADLEKCIEWSTIFEDGKIYSAKLNEIDWLTDQQRVQLAAKRYRGWGRLSAKLLTQIVNANGQRIMDLLWDTTDNFMRIVHSEDFDKLITEANQMMLAENDVQDVINDLYTSPQNKKALRQILLVVNDIQKAMKGQAPERILIEFAREDEVNSRLSVQRKRQVEQVYQNISNELLNNTEIRNELKDLSNSALSNTRLFLYFMQGGRDMYTGDSLNIDRLSTYDIDHILPQSFIKDNSLDNRVLVSQKMNRSKADQVPTDFTSVELGQKMQIQWEQMLRAGLITKKKYDNLTLNPDHISKYAMKGFINRQLVETRQVIKLATNLLMEQYGEDNIELITVKSGLTHQMRTEFDFPKNRNLNNHHHAFDAYLTAFVGLYLLKRYPKLKPYFVYGEYQKASQQDKWRNFNFLNGLKKDELVDENTEAVIWDKESGLAYLNKIYQFKKILVTRGVHENSGALFNQTLYAAKDDKASGQGGKQLIPAKQDRSTALYGGYSGKTVAYMCIVRIKNKKGDLYKVCGVETSWLAQLKQLTDEDSQKAFLEQKISPQFTKVKKQKGNIIEAVEEFEVIAPHILINQRFFDNGQELTLGSATYKHNEQELILDKTAVKLLNGALPLTQSEELAEQVYDEILDQVMHYFPLYDTNQFRAKLSTGKAAFMKLPWKSQWDGNKMVQVGQQVILDRILIGLHANAAMSDLKVLKMTTPFGMIQQSTGITLSADTQIIYQSPTGLFERRVALRDL

SEQ ID NO: 278 - protein, 1126 aa, Lactobacillus farciminis
  Lactobacillus farciminis KCTC 3681
MADRISLGLDIGVASVGFSVLDIDKGKVIELGARLFSATVAAGNQDRRDMRGARRLLNRNKQRRQDTGKLFKKFGLIDDFDKGSFYDNFNQNLNPYELRVKGLTEQLTKEELAESLYQIVKHRGISYALKDADVDEGGTDYSVSLKINSQELAEKTPAQIQLQRLNDYGKVRGQVVIGDDPDNQKVLLNVFPTSAYEKEAKQIIATQQQFYPESLTDKFTEEYCQILTRKRDYFVGPGNEKSRTDYGIYKTDGRTLDNLFEELIGHDKIYPEELRASAASYTAQLFNVLNDLNNLRILNYEDGKLTKEDKEKIIAEIKNNTTTINMLNVIKKVAGCSKDDIKGFRVNEKDKPEISSMPVYRKIHKDLLKAGVDISDWPVEFIDELSFILTLNTENGEIRKQLNNRLAPKFDFLNADLIQLIIDNKDSFEIKTNNKWHRFSVKTMNKLIPEMMERPVEQMTLLNEMGLVKKDKKRFENNKYLPYKEIAKDIFNPVASKSVREALKIVNAVLKKYGHIDYLVVEMPRDKNLKEEQDNIKEFQNKNKKAKDAAFEAFVKSVGSEQRVKEALSKNRKLQMKMRLWYQQQEIDPYNGKTIDATDLINNPDKFEIDHIIPQSISFYDSINNKTLCFASMNQVKGQKTPYEFMLEGHGQSYDKFKATVMANKNFGKAKRANYLFEENVSDIETRKRFLSRNLVDTRYSSRVVLNSLQDFFREKSADTKVTVIRGKFTSNMRKHWHIDKTRETFHHHAIDASIIAATPFLRMWKKGGTIFPVKVGEESIDIETGEILDDKNFDKAMYEEPYSGFVSEIMNADDRIKFSHQVDKKMNRKVSDATIYSTRTGKLAKDKKDAEYIVAKVKDIYSVDGFKKFKKVYDKDKTKFLLYKYDPRTFSKLERIISDCPDKVEKVQTNGKVKAVDISPFEMYRRDHGMIKKYSKKGNGPAIKQLKYLDKKLGSHIDITPANANGKHVILQSLKPWRTDVYLNHETGEYEIMGIKYSDLKFNKNEGYGIKKDKYLEIKKVEEVSEKSEFMFSLYRKDRVKVQDMKTGESVELLFWSRNFSNKKYAELKPISQAENDKKLPVYGKGRLIKRLIPKNCKIWKVNTTILGDPYYLEKESDSPKDILD

SEQ ID NO: 279 - protein, 1356 aa, Lactobacillus farciminis
  Lactobacillus farciminis KCTC 3681
MTKKEQPYNIGLDIGTSSVGWAVTNDNYDLLNIKKKNLWGVRLFEEAQTAKETRLNRSTRRRYRRRKNRINWLNEIFSEELAKTDPSFLIRLQNSWVSKKDPDRKRDKYNLFIDGPYTDKEYYREFPTIFHLRKELILNKDKADIRLIYLALHNILKYRGNFTYEHQKFNISNLNNNLSKELIELNQQLIKYDISFPDDCDWNHISDILIGRGNATQKSSNILKDFTLDKETKKLLKEVINLILGNVAHLNTIFKTSLTKDEEKLNFSGKDIESKLDDLDSILDDDQFTVLDAANRIYSTITLNEILNGESYFSMAKVNQYENHAIDLCKLRDMWHTTKNEEAVEQSRQAYDDYINKPKYGTKELYTSLKKFLKVALPTNLAKEAEEKISKGTYLVKPRNSENGVVPYQLNKIEMEKIIDNQSQYYPFLKENKEKLLSILSFRIPYYVGPLQSAEKNPFAWMERKSNGHARPWNFDEIVDREKSSNKFIRRMTVTDSYLVGEPVLPKNSLIYQRYEVLNELNNIRITENLKTNPIGSRLTVETKQRIYNELFKKYKKVTVKKLTKWLIAQGYYKNPILIGLSQKDEFNSTLTTYLDMKKIFGSSFMEDNKNYDQIEELIEWLTIFEDKQILNEKLHSSKYSYTPDQIKKISNMRYKGWGRLSKKILMDITTETNTPQLLQLSNYSILDLMWATNNNFISIMSNDKYDFKNYIENHNLNKNEDQNISDLVNDIHVSPALKRGITQSIKIVQEIVKFMGHAPKHIFIEVTRETKKSEITTSREKRIKRLQSKLLNKANDFKPQLREYLVPNKKIQEELKKHKNDLSSERIMLYFLQNGKSLYSEESLNINKLSDYQVDHILPRTYIPDDSLENKALVLAKENQRKADDLLLNSNVIDRNLERWTYMLNNNMIGLKKFKNLTRRVITDKDKLGFIHRQLVQTSQMVKGVANILDNMYKNQGTTCIQARANLSTAFRKALSGQDDTYHFKHPELVKNRNVNDFHHAQDAYLASFLGTYRLRRFPTNEMLLMNGEYNKFYGQVKELYSKKKKLPDSRKNGFIISPLVNGTTQYDRNTGEIIWNVGFRDKILKIFNYHQCNVTRKTEIKTGQFYDQTIYSPKNPKYKKLIAQKKDMDPNIYGGFSGDNKSSITIVKIDNNKIKPVAIPIRLINDLKDKKTLQNWLEENVKHKKSIQIIKNNVPIGQIIYSKKVGLLSLNSDREVANRQQLILPPEHSALLRLLQIPDEDLDQILAFYDKNILVEILQELITKMKKFYPFYKGEREFLIANIENFNQATTSEKVNSLEELITLLHANSTSAHLIFNNIEKKAFGRKTHGLTLNNTDFIYQSVTGLYETRIHIE

SEQ ID NO: 280 - protein, 1313 aa, Lactobacillus fermentum
  Lactobacillus fermentum 28-3-CHN
MHYLDEIFAPHLQEVDENFLRRLKQSNIHPEDPAKNQAFIGKLLFPDLLKKNERGYPTLIKMRDELPVEQRAHYPVTNIYKLREAMINEDRQFDLREVYLAVHHIMKYRGHFLNNASVDKFKVGRIDFYKSFNVLNEAYEELQNGEGSFTIEPSKVEKIGQLLLDTKMRKLNRQKAVAKLLEVKVADKEETKRNKQIATAMSKLVLGYKADFATVAMANGNEWKIDLSSETSEDEIEKFREELSDAQNDILTEITSLFSQIMLNEIVPNGMSISESMMDRYWTHERQLAEVKEYLATQPASARKEFDQVYNKYIGQAPKERGFDLEKGLKKILSKKENWKEIDELLKAGDFLPKQRTSANGVIPHQMHQQELDRIIEKQAKYYPWLATENPATGERDRHQAKYELDQLVSFRIPYYVGPLVTPEVQKATSGAKFAWAKRKEDGEITPWNLWDKIDRAESAEAFIKRMTVKDTYLLNEDVLPANSLLYQKYNVLNELNNVRVNGRRLSVGIKQDIYTELFKKKKTVKVSDVASLVMAKTRGVNKPSVEGLSDPKKFNSNLATYLDLKSIVGDKVDDNRYQTDLENIIEWRSVFEDGEIFADKLTEVEWLTDQQRSALVKKRYKGWGRLSKKLLTGIVDENGQRIIDLMWNTDQNFMQIVNQPVFKEQIDQLNQKAITNDGMTLREWVESVLDGAYTSPQNKKAIWQVVRVVEDIVKAVGNAPKSISIEFARNEGNKGEITRSRRTQLQKLFEDQAHELVKDTSLTEELEKAPDLSDRYYLYFTQGGKDMYTGDPINFDEISTKYDIDHILPQSFVKDDSLDNRVLVSRAENNKKSDRVPAKLYAAKMKPYWNQLLKQGLITQRKFENLTMDVDQNIKYRSLGFVKRQLVETRQVIKLTANILGSMYQEAGTDIIETRAGLTKQLREEFDLPKVREVNDYHHAVDAYLTTFAGQYLNRRYPKLRSFFVYGEYMKFKHGSDLKLRNFNFFHELMEGDKSQGKVVDQQTGELITTRDEVAKSFDRLLNMKYMLVSKEVHDRSDQLYGATIVTAKESGKLTSPIEIKKKRPVDLYGAYTNGTSAFMTIIKFTGNKPKYKVIGVPTTSAVGLKRVGKPGSESYNQELHRIIKSNPKVKKDFEIVVPHVSYSQLIVDDDCKFTLASDTYQHPATQLVLSKESMEIIADDFKFVKENTATADEQLVRVFDEIVNQMNHYFTIFDQRSNRQKVTKARDKFVSLPTESEYEGAKKTQVGKTEVITNLLMGLHANSAQGDLKVLGLSTFGFFQSSGGLNLSEDAMIVYQSPTGLFERRICLKDI

SEQ ID NO: 281 - protein, 1381 aa, Lactobacillus fermentum
  Lactobacillus fermentum ATCC 14931
MDYVKEYHIGLDIGTSSIGWAVTDSQFKLMRIKGKTAIGVRLFEEGKTAAERRTFRTTRRRLKRRKWRLHYLDKIFAPHLQEVDENFLRRLKQSNIHPEDPAKNQAFIGKLLFPDLLKKNERGYPTLIKMRDELPVEQRAHYPVTNIYKLREAMINEDRQFDLREVYLAVHHIVKYRGHFLNNASVDKFKVGRIDFDKSFNVLNEAYEELQNGEGSFTIEPSKVEKIGQLLLDTKMRKLDRQKAVAKLLEVKVADKEETKRNKQIATAMSKLVLGYKADFATVAMANGNEWKIDLSSETSEDEIEKFREELSDAQNDILTEITSLFSQIMLNAIVPNGMSISESMMDRYWTHERQLAEVKEYLATQPASARKEFDQVYNKYIGQVPKEKGFDLEKGLKKILSKKENWKEIDELLKAGDFLPKQRTSANGVIPHQMHQQELDRIIEKQAKYYPWLATENPATGERDRHQAKYELDQLVSFRIPYYVGPLVTPEVQKATSGAKFAWAKRKEDGEITPWNLWDKIDRAESAEAFIKRMTVKDTYLLNEDVLPANSLLYQKYNVLNELNNVRVNGRRLSVGIKQDIYTELFKKKKTVKAGDVASLVMAKTRGVNKPSVEGLSDPKKFNSNLATYLDLKSIMGDKVDDNRYQMDLENIIEWRSVFEDGEIFADKLTEVEWLTDEQRSALVKKRYKGWGRLSKKLLTGIVDENGQRIIDLMWNTDQNFMQIVNQPVFKEQIDQLNQKAITNDGMTLRERVESVLDDAYTSPQNKKAIWQVVRVVEDIVKAVGNAPKSISIEFARNEGNKGEITRSRRTQLQKLFEDQAHELVKDTSLTEELEKAPDLSDRYYFYFTQGGKDMYTGDPINFDEISTKYDIDHILPQSFVKDDSLDNRVLVSRAENNKKSDRVPAKLYAAKMKPYWNQLLKQGLITQRKFENLTMDVDQNIKYRSLGFVKRQLVETRQVIKLTANILGSMYQEAGTDIIETRAGLTKQLREEFDLPKVREVNDYHHAVDAYLTTFAGQYLNRRYPKLRSFFVYGEYMKFKHGSDLKLRNFNFFHELMEGDKSQGKVVDQQTGELITTRDEVAKSFDRLLNMKYMLVSKEVHDRSDQLYGATIVTAKESGKLTSPIEIKKNRPVDLYGAYTNGTSAFMTIIKFTGNKPKYKVIGVPTTSAVGLKRVGKPGSESYNQELHRIIKSNPKVKKDFEIVVPHVSYSQLIVDGDCKFTLASDTYQHPATQLVLSKESMEIIADDFKFVKENPATADEQLVRVFDEIVNQMNHYFTIFDQRSNRQKVTKARDKFVSLPTESEYEGAKKTQVGKTEVITNLLMGLHANAAQGDLKVLGLSTFGFFQSSGGLNLSEDAMIVYQSPTGLFERRICLKDI

SEQ ID NO: 282 - protein, 1327 aa, Lactobacillus florum
  Lactobacillus florum 2F
MTEQQQPYNIGLDIGTSSIGWAVTDQNDKLLHIRGHNGIGVRLFKEGESAAERRGFRTTRRRLSRRRWRLRFLDRIFDAELAKVDPNFLARLKQSNISPLDPNKQMFGNILFDDPQFDDQKFHQQYPTIYHLRSALAQPDAPQADVRLIYLALHHMIKFRGHFLNGAAVEKFHGGQLHLESEFQELNQIFSNQQRDHVQLQTSSLDEVATILKDNQRTPSDRQRELSARLFVPVDKTIDKENKKLATELLKAVLGLKAKFDVILGVEATDPQAFKLQFSSDDFDDKIAELASELTDEANEILTVLQRLYFSLNLADILTNRQTKQVADSISTAMINRYDDHKHHLKMLKELEAQVTQEQRDGLKKAYDEYIDGDKPTIDTFYTNIKKNLDDSELANQIKSLIDLQAFMPKQRSKENGSIPHQLHQRELDQLIEVQGKYYPWLLAAKDKLDALIAFRVPYYVGPMIDPNQSDDPQNTKFAWMVRKEAGEITPWNFEEKVDKTSSATNFIKRMTTTDTYLLGEPVLPKNSLLYQQFTVLNELNKLKVNGKALTVDQKKYLYEHVCKKQRRVTLKKLSDCLMARGDFPMGAIFTGTTDQKNMNNTLKTYQDFQEIFGDEIDNPDRQVDFEKMIEWSAIFEDREIFKLKLAELNWLTSEQLERVSKKRYQGWGRLSQKLLTHIVNENGERIIDQLWNTNQNFMEIMGQDSVKQAIQEHNGANVAQTGINETIDELYTSPQNKKAIRQILLVVDDIKKAVGYAPANIMMEFAREDRDDHRLIASRARQLEKTYQEISKNWFDNESVTQELKDQIKNKTKFTDRLYLYFIQGGIDLYTGHPLNIDQLSSYDIDHILPQSFLLDNSLNNRVLTSQAENRVHKEDRLPGETVANKMRPTWKMMREQGLMTQRKYNNLTLKPDQISKFNNRGQFINRQLVETRQVIKLAADIMSQKYQADQTKVVTVKANLTHHMREKFNFYKSRNVNDYHHAFDAYLTLFVGNWLLKEYPKLQPYFVYGDFAKTGTNNLKSFNFLYRFERDHKLNDKGAIDTDKDQQLGYMKRIYRFKKMLVTKQLETNEGALYGQTLYPAPKNDKKTRNLINSKKNRPSDIYGGYSNENGSFLTLVKLKKGSKYDYRLVAVPVSKISEIKESELATIEKAIAPQFLKSSGKYRDFQVVLSKILINQKVIDDGMIFTIGSKSYKHNAKQVVLSDNSIQIVSTLSRISDKEKLITVFDEIVDITSKYLPWYKVNDVEKTKMLFRQMQDIDEMKKIIDNSLIGLHCNASITDLGKVGLSKYWGRFVLTAGISLTVDAQLIYQSPTGLFEHRVKVSDL

SEQ ID NO: 283 - protein, 1391 aa, Lactobacillus gasseri
  Lactobacillus gasseri JV-V03
MTKIKNEYIVGLDVGTNSCGWVAMDFQNTILRMHGKTAIGSHLFDAGNSAADRRAFRTTRRRIKRRKWRLKLLEEIFDPYMTEVDPYFFARLKESGLSPLDKRKNVSSIVFPTALEDKKFYCNYPTIYHLRYDLMSEDKKFDLREIYLAIHHIVKYRGNFLYNTPVKDFEASKIDVKDSLEKLNELYERLDSEFTVELDSSNALEIEKIIRDKKVFKINKVKSIHQLLSLKTENKERTKLIKDVSKQIINAILGYKTKFETILLKNISKDEADDWEFKLTDVDADNKFENLIGDLNENEQEILLEIRNLANAITLSNIVEEGKTLSESMIDKYNKHSDDLELLKQVISDHPDRDKAKKLALAYDLYVNNRHGKLLQAKDVLGSKKTLSKEDFYKEVKKNLDDSKASQEILDTIALDSFMPKQRTNENGVIPYQLHQLELDRIIKNQGKYYPFLKEVNPVSSHLKEAPYKLDELIRFRVPYYVGPLISPNESTKNKQTKKNQNFAWMIRKEQGQITPWNFDQKVDRMASANKFIKRMTTKDTYLLGEDVLPANSLLYQKFTVLNELNNIKINGKRISVPLKEELYNNLFKKNSTVTTNKLKSYLKENYNLINVEIKGLADEKKFNSGLTTYNKLRNLKIFDQQLDDLNYDKDFERIIEWSTIFEDKAIYKDKLKTIKWLSDRQIDKLSKIRMQGWGQLSKKLLSQLTDNNGQTIIEQLWDSQNNFMQIVNQSDFKDAIAVANQNLLVNTSVEDILNEAYTSPANKKAIRQVVKVVDDIVKAASGKVPKQIAIEFTRDADDKAKISQTRANKLRKVYKELSNELASETIRNELERVAKDQKLLKDKYYLYFMQLGRDAYTGEPINIDDLGQYDIDHILPQSFIKDDSLENRVLVKKAVNNGKSDNVPVKLYGNRMAADLGMTIRHMWEKWKDQGLITKTKYNNLIIDPDKINKYESSGFIHRQLVETSQIIKLVSTILQSKYPDTEIIVVKARYNHYLRKHLNLYKSREVNDYHHAIDAYLSAICGNLLYQVYPYLRPFFVYGQYKKFSSDPKKEKIIYDKTRKYNFISQIFENKSNDIISLETKKKVFDKKDIIEKLKHAYNYKYMLVSRETETHDQEMFKMTVYPRLSRDTKKSRNLISKKKDMPTEIYGGYTNNSDAYMVIARINKKKGTEYRVFGVPMRELVNLRKAEKNGRYNAYLKQVLEPEIMYSKNGKKNKTISSFEIVKAKVPYKQVILDGDKKFMLASSTYVQNAKQLTLSQNSMQAITDNCENDTEEEKALEEKALIEAYDEILTNIDKYLPLFDINKFREKLHAGREKFINLSLDVKKDTILQVLNGLHDNAVMPKIKSLGLSTPLGFMQFSSGVPLSENAKLIYQSPTGLFEKRVKISDL

SEQ ID NO: 284 - protein, 1386 aa, Lactobacillus hominis
  Lactobacillus hominis CRBIP 24.179
MTKITEDYIVGLDIGTNSCGWVAMDSKNTILRMHGKTAIGSHLFDAGNSAADRRAFRTTRRRIKRRKWRLKLLEEIFDSHLAKVDPYFFARLKESGLSPLDTRKNVSSIIYPTSLEDKKFYVDNPTIYHLRYKLMTEDRKFDLREVYLAIHHIVKYRGNFLYNTPVKAFEASKIDVKGSLKKLNELYEGLDSEFNVELDSNNALEIENIIRDKKIFKINKVKEINQLLSLKTEDKERTKLMKDVSKQIVNAILGYKTKFETILLKDVSKDEADDWEFKLTDVDADNKFENLIGDLNENEQEILLVIRKLANAITLSNIVEEGKTLSESMKDKYKKHSDDLKLLKQVISDHPDRDKAKKLALAYDLYVNNRHGKILQAKDILEKKKTLSKEDFYKEIKKNLDDSKESQEILDAISLDSFMPKQRTNENGVIPYQLHQLELDKIIENQGKYYPFLKEVNPVSSHLKQAPYKLDELIRFRVPYYVGPLISPNESTKNKQTKKNQNFAWMIRKEQGQITPWNFDQKVDRMASANKFIKRMTTIDTYLLGEDVLPANSLLYQKFTVLNELNNVKINGKRISVPLKQELYNNLFKKNSTVTTNKLKSYLKENYKLIKVEIKGLSDEKKFNSGLTTYNKLKNLKIFDQQIDDPNYNKDFERIIEWSTIFEDKAIYKEKLKTIDWLSDRQIDKLSKIRMQGWGQLSKKLLSQLTDNNGQTIIEQLWDSQNNFMQIVNQADFKDAIAVANQNLLVDTSVEDILNEAYTSPANKKAIRQVVKVVDDIVKATSGKVPKQIAIEFTRDADDNAKISQSRANKLRKVYKEMSNELASETIRNELERVAKDQKLLKDKHYLYFMQLGRDAYTGELIDIDNLEQYDIDHVLPQSFIKDDSLENRVLVKKAVNNGKSDNVPVKLYGNRMATDLGMTIRHMWEKWKEQGLITKTKYNNLIIDPDKINKYESSGFIHRQLVETSQIIKLVSTILQSKYPDTEIIVVKARYNHYLRKRLNLYKSREVNDYHHAIDAYLSAICGNLLYQVYPYLRPFFVYGQYKKFSSEPEKEKIIYDKTRRYNFISQIFENKDNDIISRETKKKVFDKKDIIEKLKRAYNYKYMLVSRETETHDQEMFKMTVYPRLSRDTKKSRNLIPKKKDMPTEIYGGYTNNSDAYMIIARINKKKGPEYRVFGVPMRELVNLRKAEKNGHYKAYLKQVLEPEIMYSKNGKKNKTISSFEIVKAKVPYKQVILDGDKKFMLASSTYVQNAKQLTLSQYSMQAITDNCENDTEEEKALVEAYDEILTNIDKYLPLFDINKFREKLHAGREKFVDLPLAEKKETILQVLNGLHDNAVMPKIKSLGLSTPLGFMQFHTGVSLSENAKLIYQSPTGLFEKRLKISDL

SEQ ID NO: 285 - protein, 1369 aa, Lactobacillus iners
  Lactobacillus iners LactinV 11V1-d
MNNNYYLGLDLGTNSVGWAVTDDHYNIIKFHGKHMWGMRLFEEAETAKDRRLHRQARRRRQRLVERINLLEELFDKEISKVDQGFFARKKESDLHFEDKTTKSEYALFNDKSYTDRDYYKQYPTIFHLIMDLIENDKKRDIRLVYLACHYLIKHRGHFIFDGKNFTVDNSFENLLDKLITYLKDNDDITLSFPKDQLINIFKNSNLNSTEKSDQLKPFFGRTNLEKGIIKLLSGGKQDLSNMFRDETLKNSNYKNLKFSDNRFDDERDGYAADLGDRIDLLILLKQIYDASILESMMSQARVSIDGHKYISSAKVCAYEKHKSDLKRLKSLIKKYLPSEYNNIFRKITEKDNYVAYSKSNITNNKREKALKYVKYVDFTKYLTKKLKTIKTQDAEDDQEIFEIKGELEKQSFLPKQRTLDNSIIPYQLHLMELKKILDNQSKYYDFLLAKDDQEGITVKDKIISLLTFRLPYYIGPVNPAVHGKFAWVKRLANGKVTPWNYKEKIDIDASHEEFIKTKLSKCSFLIGCDVLPKNSLLYQKYMVLSELNTIKFNGVNISEKLKDDIYQNLFKNIQKVTKKRLQNYIKEHENIIGDVIVTGIDNAFKQGLVSYLKFKKIIGDKVDDDRYQKVLEKIIRDITLYDECAGKKIKKEYKDSDLFTEDELNKIVKLTFNDWGRLSAELLDQLEGEDTVSGETGKIIEFMQKHNYNLMQLMSKKFTFKSKIDEINKSYYQHDKFNYKSMIDSLYVSPATKRILWQSLKVVHEISKIMKHDPEKIFIEMARSKEDHPKRKLSRKADLKQVYKDSKKQIISIIGKDKYQDLSNELDNKDDRDLRWDNLYLYYTQLGRSMYSLKPIDISELMNKNLYDQDHIFPKSKKYDDSIENRVLVEKELNVKKSDIYPISDANIIPQKIKGQVESFWKMLYDHKLIGDKKYARLIRSKAFTDDELAGFIARQLVETRQATKETADLLKRLCPKSRIVYAKAQNASIFRQKFDIPKSRTINDLHHAQDAYLNIVVGNIFDTKFTQDPRNFIKNTKDSRNYNLEKIYDYNVERNNYVAWIAPDGETNGTIANVKCNLSTKDFRVTRPSFYKKGALFNQNLSRKGSNLAPIKEHSPKSNPLKYGGYSGKNNSFFVVVAGKDNKGKDIVKLIPVNTLIYNKMLHCDYKAKQELLTSYVANNFAINNFRIVKDDIKMYSLVKIDGAYYYLVGGTDERIEVKNAMQLLLSKDSIKAVKILEKESKDQFANIKNYKDIDIKLGRTFNEVVSKYTNSVFGKSMLISDKYRKDIFKSVEKSILEFNHLDTIGKADNLLKFVTLMRPSGSAHSLKMVGLIERIRKSNVISNFNEFKLINQSVTGLFENEEDLLKL

SEQ ID NO: 286 - protein, 1391 aa, Lactobacillus jensenii
  Lactobacillus jensenii 269-3
MKEIKDYIIGLDIGTNSCGYVVTDKQNNILKLKGKTAIGARLFKEGEAAADRRAFRTTRRRLARRRWRLSLLEEIFDEEMNKVDPSFFRRLKESDYSPKDRRKQFNSIVFESSEADKAFYEKYPTIYHLRNALMHDNQKHDLREIFLAVHHIVKYRGNFLREDSVKAFKAAKFTLQGEDGIGPVDKLNDLLKEIYIEAAPELATDNLSKIEDIIKDKKLYKQDKLKQIANLLPKAVDSKDKAKLNKDIAKQVANALMGYMFRLDTLFSFTDVDVKDYKLKFSDANIDESLDALTSLLTDAQIEFVLELQSIYNTIVLNEIVPDGMSLSESMVKKYDDHKKDLKLYKEYIDSLSDQKKAKQLEAAYALYVNYRKADLLAAKKLFEKKKIGDKKFVDVISNFEVFGKFVSDNLDDSELANKIKARLDLGEFLPKQRTNQNGVIPYQLHQVELTQILEKQGKYYPFLITPNPVESHRNNAPYEISELVSFRVPYYVGPLIDNQSIKDKQNKNKFAWMVRQKQGQITPWNFEEMVDTTESANQFIKRMTRKDTYLLAEDVLPKSSLIYQKFMILDELNRIKIDGKKLTSKLKHDIFEKLFKKQKSINLDNLKNYLLAEGNIPGLIEGLSDGINFNNSFSTYIDYRNIFGDEIDNPNKQADFEKMIEWSTVFEDRKIFKRKLKEITWLTPEQIKQVSSKRYSGWGRLSKKLLTQITDENGVNILQRLWNEPETLTEVLANPVIKRKISEANSLFVQINKVENILDDAYTSPQNKKAIRQVIRVVDDIIAAAHGKKPSQIAIEFARSSQNKAKVPDTRKKQLDKIYNKISSEILDSSIKNELKNLKSNKYLSKDKLFLYFKQMGRDAYTGDKLSLDQLQNYDIDHIFPRSFIKDDSLDNRVLTQKPINAKKSDYGIPALEFGNKYVPDLGITVKEMWKLWQENGLISKSKLINLCTNPKKIGSKRASGFINRQLVETSQVIKLVAIILQAEFPDTEIIEVKALQNTTLRESFHLYKNRSVNDYHHAIDAYLTTIVGNYLYQVYPKLRPYFVYGQFKKFNQEKNIDILKRLKNFNFLRQLIFNTDDNIYISGTKEIVFNKKDIIHKLETAYGYKYMNISRECYQETSSLFNQTLYAHNSSVKNSLIPKKKGLPTEIYGGYSGNKDSFFVLVKIVKKRTNLYRIVGIPTRELAKLNSSNNYNQALNKIVESKLCLKETESFKILIKRLLYGTLIVDNGQKFRIGSFKEKHNVQQLVLQLKSMKYIKFYIDGGQNYFTDVERKKLEKQDRDKCLLYVFDDIMNVVNKRFTLFDMSKYEKDGDSLREKFNCLDFNDKVSILSDLLKAFHANSDRTSITKLKITNLGRHQAGKNGITLTTNAQIIYQSPTGLFERRIKIKDL

SEQ ID NO: 287 - protein, 1395 aa, Lactobacillus jensenii
  Lactobacillus jensenii 27-2-CHN
MKEIKDYIIGLDIGTNSCGYVVTDKQNNILKLKGKTAIGARLFKEGQAAADRRSFRTTRRRLARRHWRLGLLEEIFDPEMEKIDPNFFRRLKESDYSPKDSRKQFNAIVFKSIKADKRFYKKYPTIYHLRNALMHDNQKHDLREIFMAVHHIVKYRGNFLREDSVNAFKAAKFSLRGEDGIGPVDKLNDLLKEIYSEYSPELATNNLSKIEDIIKDKNLYKQDKLKQVATLLIKEADSKDKAKLNKDIAKQVANSFMGYMFRLDTLFSLTDVDVKDYKLKFSDANIDESLDDLTSLLTDAQIEFVLELQSIYNTIVLNEIVPDGMSLSESMIKKYDDHKEDLKIFKEYIDSLSDQKKAKKLLSAYNLYVNYRKSDLVEAKNLFKNKKVGDKNFADVISNFEVFGKFVSDNLDDSELANKIKARLDLGEFLPKQRTNQNGVIPYQLHQVELTQILEKQGKYYPFLITPNPVESHRNNAPYEISELVSFRVPYYVGPLIDNQSIKDKQNKNKFAWMVRQKQGQITPWNLEEMVDTTESANQFIKRMTRKDTYLLAEDVLPKSSLVYQKFMILDELNRIKIDGKKLTSELKHDIFEKLFKKQKSINLDNLKNYLLVEGNIPGLIEGLSDGINFNNSFSTYIDYRNIFGDEIDNPNKQADFEKMIEWSTVFEDRKIFKRKLKEITWLTSEQIKQVSSKRYSGWGRLSKKLLTQITDENGVNILQRLWNEPETLTEVLANPVIKRKIVEANSSFTKAKDMKDILVEAYTSPQNKKAIRQVMRVVDDIIAAAHGKKPSQIAIEFAREDQDNPQMTKSRKAQLDQIYAKISDEFLDDAVKNELKNMKDNKPLAKDKVFLYFKQMGRDAYSGEKLSLDNLQDYDIDHIYPQSFIKDDSFDNRVLVQRAYNNGKSDNVPVLLFGNKIAAGLGITIRQMWKKWLELGLISKRKFNNLITDPEKISRNMASGFVNRQLVETSQVIKLVANILQAKLPDTEIIEVKASYNSILRKEFNLYKSREVNDYHHAIDAYLTTIVGNYLYQVYPKLRPYFVYGQFKKFGKAENQEDDPVKKIKKFNFIYQLIWGKDDAICISHTNQQVFSKKDIIDKLTTAYNFKYMNISHAVYTRNNNMFKQTLFPIIERTTAKTKSLIPKKLDRPTDIYGGYSNNNDAYLALVKVDKKRGSEYRVVGIPMRAAAMLKASKNYDEDLRKVIEPMVMFDKNGKAKRGIEGFRVLVGKMPFKQAVLDGNKKFMLTGTVDTPNLKQLVLSQQNMKYILDYIEDVDCRKHKFGDKVQNPDKCLLEVFDEIIEIVDKYFELFDSRDFREKLRNSRNKFIKLEASKKADTILAILKGLQAKSTRATIKELNISDFGRIITSSISPEAQLIYQSPTGLFERRVKVKDL

SEQ ID NO: 288 - protein, 1375 aa, Lactobacillus johnsonii
MTKIKDDYIVGLDIGTDSCGWVAMNSNNDILKLQGKTAIGSRLFEGGKSAAERRLFRTTHRRIKRRRWRLKLLEEFFDPYMAEVDPYFFARLKESGLSPLDKRKTVSSIVFPTSAEDKKFYDDYPTIYHLRYKLMTEDEKFDLREVYLAIHHIIKYRGNFLYNTSVKDFKASKIDVKSSIEKLNELYENLGLDLNVEFNISNTAEIEKVLKDKQIFKRDKVKKIAELFAIKTDNKEQSKRIKDISKQVANAVLGYKTRFDTIALKEISKDELSDWNFKLSDIDADSKFEALMGNLDENEQAILLTIKELFNEVTLNGIVEDGNTLSESMINKYNDHRDDLKLLKEVIENHIDRKKAKELALAYDLYVNNRHGQLLQAKKKLGKIKPRSKEDFYKVVNKNLDDSRASKEIKKKIELDSFMPKQRTNANGVIPYQLQQLELDKIIENQSKYYPFLKEINPVSSHLKEAPYKLDELIRFRVPYYVGPLISPNESTKDIQTKKNQNFAWMIRKEEGRITPWNFDQKVDRIESANKFIKRMTTKDTYLFGEDVLPANSLLYQKFTVLNELNNIRINGKRISVDLKQEIYENLFKKHTTVTVKKLENYLKENHNLVKVEIKGLADEKKFNSGLTTYNRFKNLNIFDNQIDDLKYRNDFEKIIEWSTIFEDKSIYKEKLRSIDWLNEKQINALSNIRLQGWGRLSKKLLAQLHDHNGQTIIEQLWDSQNNFMQIVTQADFKDAIAKANQNLLVATSVEDILNNAYTSPANKKAIRQVIKVVDDIVKAASGKVPKQIAIEFTRDADENPKRSQTRGSKLQKVYKDLSTELASKTIAEELNEAIKDKKLVQDKYYLYFMQLGRDAYTGEPINIDEIQKYDIDHILPQSFIKDDALDNRVLVSRAVNNGKSDNVPVKLFGNEMAANLGMTIRKMWEEWKNIGLISKTKYNNLLTDPDHINKYKSAGFIRRQLVETSQIIKLVSTILQSRYPNTEIITVKAKYNHYLREKFDLYKSREVNDYHHAIDAYLSAICGNLLYQNYPNLRPFFVYGQYKKFSSDPDKEKAIFNKTRKFSFISQLLKNKSENSKEIAKKLKRAYQFKYMLVSRETETRDQEMFKMTVYPRFSHDTVKAPRNLIPKKMGMSPDIYGGYTNNSDAYMVIVRIDKKKGTEYKILGIPTRELVNLKKAEKEDHYKSYLKEILTPRILYNKNGKRDKKITSFEIVKSKIPYKQVIQDGDKKFMLGSSTYVYNAKQLTLSTESMKAITNNFDKDSDENDALIKAYDEILDKVDKYLPLFDINKFREKLHSGREKFIKLSLEDKKDTILKVLEGLHDNAVMTKIPTIGLSTPLGFMQFPNGVILSENAKLIYQSPTGLFKKSVKISDL

SEQ ID NO: 289 - protein, 1382 aa, Lactobacillus mucosae
  Lactobacillus mucosae LM1
MDIGTNSIGWTAIDDHFSLLRVKGKNAIGVRTFKEGETAADRRGFRTARRRLSRRRWRLQFLDEFFAPYLAEVDPNFLARLKQSDISAKDPAKNQEYMGKLLFPDQEAASDGNGYPTLIQMRKAMPAEKAADFPVFNIYQLRYALMNEKRKFDLREIYLAVHHIVKYRGNFLNNTSVDKFKADQIDFNKSFETLNDLFRQVQPIAPFQIDLTKVDELGKLLLDTKQKKLDRQKAVAKLLPLIEDGTDKEIVKAHQQTAREISKLILGYKAKVGLILQNNLDQTLDMSTENSDDQLMQIAEELDDYQMELINQLSLLYSQIMLNEIVPNGETVSASMLNRYYKHRCQLKELKDYGAAQDKKTREQLDHLYAEYIGQIPKDSKFDFTKDLKKLMDKSDLGQKIKDEIEAGDYLPKQRTSANGVIPHQMHQQELDQIIENQKEYYPWLAEPNPVEKNIKNAKYKLDQLVSFRVPYYVGPMITLADQQKTSKASFAWAVRKKAGKITPWNFYDMIDREKSANNFIKRMTNKDTYLLSEDVLPASSLLYQKFTVLNELNNIRVNGRKLQPALKQAIYTDLFQKRKTVNLKTLTNFLAIHEPTLTKPKIEGLSNGRSFNSSLGTYIDMSKILGDSLDDLNYRDDIEKIIEWSTVFEDSEIYGVKLQEIQWLTNEQREKLVRKRYQGWGRLSKKLLTGITDENGQRIIDLMWDTSKNFMQIVHQPVFEEQIAELNQQLLQDADKAPLEVVDDILADAYTSPQNKKAIRQVVKVVADVVKAVGNAPASISIEFARNEDRNKELKNSRRHSIEKLYHETAEKLVKQTNLLEELGNVKDLNDRYYLYFTQAGRDMYDGTPINIDEISTHYEIDHILPQSFLKDNSLDNRVLVKKSENAAKSDRVPAKLYGAKMRAFWKQLKESQLISNRKYLNLTTDPEQVDKYQMQGFVHRQLVETRQIIKLAANIFGSLYPDSAVIETRAELTKQLREKFSLYKVRDVNDYHHAVDAYLTAFAGHYLYQRYPKLRPMFVYGDYAKIYADDLKRLRSVNLFHDLEKDQYNSGTAVNPETKEKIVDVDWLSDYVSKIQHFKYMLISKAVYTQHGQLYGATILPVAQVDKISAPIGIKDDKPVDIYGAYTNEVAAYMAIVRVNGKKPKYKVVSVPVRMLQRLKMAEQKGHDQYMQTLHDVLLRNFTSLKKNRKTGLKEAVVKDFDVLVPCVRYNQLVIDGDTKFTLGSATYQHNAKQLVLCNHSLETLANNFEYVRKHPDEADERMIMLYDDILDQVNHYFTLYDKNKFREKLNAGRDKYLKLPTFSQFENNKKTAIGKSEAIINILRGLHANAAITNLKCLGVSTPFGQLQSPSGIELSENAKLVYQSPTGLFSREVLLKDL

SEQ ID NO: 290 - protein, 1362 aa, Lactobacillus paracasei
  Lactobacillus paracasei subsp. paracasei 8700:2
MTKLGKPYGIGVDIGSNSIGFAAVDENSHLIRLKGKTVIGARLFEEGKAAAKRRAGRTTRRRLSRNRWRLSFLRDFFESHITPTDPNFFMRQKYSEISPKDKARYKYEKRLFNDRTDAEFYQQYSTMYHLRNRLMTDPSRADVREIYFAIHHILKSRGHFLTPGDAKDFNTNDVALDEIFPALQDAYAQVYPDLGITFDEDKANEFKTILLNEIATSIDTQRALVKLLLAEEDDKDILKQQKQVLTEFAKAVVGLKTKLNLALGTEVDSSEATAWNFSLGQLDDKWAGIESAMTDEGTEILDQIRDLYRARLLNGIVPTGKTLSQAKVDDYTQHHEDLQLFKAYLKQLEDDGTAKAIRQLYDRYIDGDDAAPFLRENFVKALTKDVTAHPNTKSPELLERLAQPDFMLKQRNKANGAIPVQMQQRELDQIIKNQAVYYDWLAAPNPVEKHRKSMPYQLDELLNFRIPYYVGPLVTAKEQKAAQGGVFAWMVRKDPEGNITPYNFDEKVDREASANTFIQRMKTTDTYLIGEDVLPKQSLLYQRYEVLNELNNVRVNNEKLSIEQKQQVIRELFERHNSVTIKQFAENLRAHGDYAHIPEIRGLADEKRFLSSLSTYRQLKSLLPEAIDDPAKQADIENIIAWSTVFEDAAIFKTKLKEISWLGSEAITKLSNIRYRGWGQFSRKFLNGLTLGNGHTIIQELLLSTNNLMQILTDETLQKKMTELNADKLKTANINDAIDNAYTSPSNKKALRQVLRVVDDIKRAADGQDPSWLYVETADGGGTPGKRTRARQHQLQEIYANAAHELIDTAVRGELEDKISDKADFNDRLVLYFMQGGRDIYTGAPLNIDQLSSYDIDHILPQSLIKDNSLDNRVLVHAIINREKNATFASTIYAQKMNATWRQWHEAGLISGRKLRNLQMRPDQIDKYASGFVARQLVETRQIIKLTEQIVAAQYPDTKIIAVKAGLSHQLREELEFPKNRDVNHYHHAFDAFLAARIGTYLLKRFPNLQAFFTYGKFTKADVKKLRGFNFIRDITHAEDKIVAKDTGEVVWDKQRDVDELDRIYNFKRMLITHEVRFETADLFKQTVYGARDSKEAGGSKQLIPKKKGYPVDIYGGYFRENTAYLAVVKVTKKTETIFKVVKIATSQVAALNKARSRSTAEELSVLTELLKPKFSKVGKNGKITDTPFEVVLPRVPREQLFYNAKYGFFMVNSDTMFHNFQEIWVSRSDQKILQQIRKAKIDYPNVDQDLDNLFHNLADQIVKYFDLYSIAGFKEKISQSQNTFNDLAVDDTDQSVGKITVINELLKGAQANGMTGSLKVLKISTPFGFTQDKSGVLTKDSSIIYQSPTGLFERSVRLTDL

SEQ ID NO: 291 - protein, 1382 aa, Lactobacillus pentosus
  Lactobacillus pentosus IG1
MKKIVNYNLGLDIGTSSIGYAAIDDQGRPVRHQNKTVMGVRLFKEGKTAESTRIFRGTRRRLSHRHWRLGYLDRIFDNEIAKVDENFLPRLKASKRARSDEKRSFRGSLLFPETGDDAYYQKYPTIYHLRYALITQKKQFDIRLIYLALHHMIKYRGNFLDTTPVSAFNIHDIDLTDQFASLNDCYQLLDMDFEFQFDLNNIEQVQKLLLDETLSKTKRQAAVSKVLVMSTGNKAFDDQQNGIASEFIKALLGGPFDLSKILNLSVADVKSWKLHMTDKDVDDTLNSLVEELDENHKQIVNLLQMIYSQVMMLGLLNGQQSISASMIERYDDHAKHWAALKKLLPALGEQEQSTIIHAYTAYTGHSRTKQLSRAEFYTKVNSILKKHENIAEATGLIELIDRNEFMPKQRDAVNGVIPHQLHQRELQLIIQNQQKYYPFLAAKAYPDADETMIEQLLSFRVPYYAGPLVDRDFINESSDQEQAMQNTKFSWLKRREAGEITPWNFEQKVDVQETANRFIKRLTTKDTYLMTEDVLPKESLIYQRFEVLNELNAIRINDRRLTAENKQLAFQQLFMAGNTKNVSIKKFRNFVFDSLKFPEKVKITGFAGQHNFLAKLSTYHDFKKIFGERVDHTDLQPDFERIVEWCTIFEDRHIYREKLKEIQWLSQSEIDQLVLIRNHGWGRLSKRLLTGIRDSDGRTVMDQLWFGTDNFMRIISQSDFAAAIANENRTQLNQHGLEDVLDSAFMSPQNKKAIRQVLKVVDDIEQTLGCPPKKVMIEFTRSPDKKKQRTVTRLEKVQQAYKAVADQLAGQSIVSELDQYANTHSKLSDTYYLYFMQLGRDLYSGKPIDIDSPMLDDDHILPRAFMKDNSLDNRALTEKPINNTKAAKFPSKVFGQQKEVTDFWKLLRRCGLMSNIKEKHLYLDPDNVDKWTRRGFIHRQLVETSQVIKIVANILNDRYQQSQTEVLEVPARLGTELRECFGWYKVREVNDYHHVFDAYLAAFIGNYLYRRYPKLQPYFVYGNFAELNKAQLKNIKSFNFLYNITDNKRVVKDIETGQTLWDDQIRQQIQHIYEYKYMLTSHEAFTQHKELYGQTIYPRREFKPGTLKAIKQDQPQELYGGYKNLTAAYMCIVKIQARKRRAAEYRVVRVATESLSALQQAKRLGVQAYERCLRQELVRNNEILRTNADPNSAPREFEVLLDRVLCHQMIISDGQKYLLGSHAYKINCMQLVLSNNSMKILSTSIVKLKQMTNEPLVQVYREILDVVNKYFTLYDVNSFRENLNQFFDKFRTLPITNEYESSKSGKKLIHRGQLETLTLILRGLHANSDKVQYGDQSTLLGGFQTKDGIKLSKDSVIQYTSPAGLNVRTVKLRDLEQKEAQK

SEQ ID NO: 292 - protein, 1361 aa, Lactobacillus pentosus
  Lactobacillus pentosus KCA1
MNEPYGVGLDIGTNSVGWTVVDMNGRVRKVKGKTALGARLFKEGATAEDRRGFRTTRRRLKRVKWRLRLLREFFDQPISKIDPNFFARRKYSDISPRDPNYNGLAKTLFNDRTDKEFYDDYATIYHLRDKLMTSNRKFDIREIYLAIHHIVKYRGNFLRTGPASQYGSASLHLATSFQKLNDLFAQSEETLNLKLVTDEALLQQIQQILVRTDLSRSEQQRQIWPLMAVLTGASAAEKKRQKNVVVELSKALVGLKAKMNVVTLTEVDAAVVKDWTFTMEESQDKLPEIEEQLSEVGQQIMDEVIQLYASVNLAQLIPAGKRFSQHMVEKYKHHEKNLELLKAYIHSQSDSKRGREIRATYDRYIDGVDSKPVTQEMFYKDLMKYVEADATSNHLAAEIKDEIDSEQFMPKLRTKQNGSIPYQVQQYELDQIISHQKKYYPWLGEENPVAERRGKFPYKLDELVGFRVPYYVGPLITKEDQQATSGAGFAWMVRKADGPITPWNFDQKVDRIASATAFIQRMQTTDTYLIGEDVLPARSLIYQRFMVLNELNNMRVEDRKLAPQQKQRLYNQVFKQHQHVSVKNIQQNLMDAGEYRKTPQITGLADPKGFNSSLSTYHDFKKILLEAIADEHKRADIEKIILWSTTFEDSAIFKQKLEEVAWLTDAQRKQLSGLRYRGWGQLSHKLLTAFKDDKGRSIMDGLWETSDNFMQLRKQPAIETQIKEANQANLTDADIQDTINELYTSPQNKKAIREVMLVLDDIKNAMHGQTPSWIFVEAARGGGVAGRRTQSRSSQIVEAYKGTAKEIVSEKVQHELNEKIKAKADFNTRLVLYFLQNGRDLYTNEAINIDRLSEYDIDHILPQSLVKDDSLDNRVLTSARINREKNDTFASEKFGRKMGAQWRELHRNGLMTQRKLKHLLMRPDEISKHATDFINRQLVETRQVIKLVEELISSEYPAASIVAVKANLTHQFRQTFNFPKLREVNDYHHAFDASLTAFIGMYLLKQYPKLERFFVYGKFAKQPINLTRFNIIRKLAVAEKPIANIETGEILWDKTADIKYFEKLYNYKRLLVTHEVRENYGAMFKQTLFKASYNKSKTLVPKKNHMETSVYGGYSNQETAYLAIVRIPFKSGFKFIVVGIPTRMVAKIKHYQSLGATLNQATHKVIEPKFTKISRKTKQTVISDYEVVLPKVYLDQVVRDQVKGQMYRFSLGSDKEYHNVQELYLPLSIQQAFVGHYDESDDQRSNDLVKVYDAALKQLQRYFPLHLSRNFDQVASQAHQSFEGLKNNVQTSDKQLGKKEVLNSLFVGLHANATRSNLSVLGMSKDFGRIKSNGITLTDQAEIIYQSPTGLFERKVALKDL

SEQ ID NO: 293 - protein, 1358 aa, Lactobacillus pentosus
  Lactobacillus pentosus MP-10
MNEPYGVGLDIGTNSVGWTVVDMNGRVRKVKGKTALGARLFKEGATAEDRRGFRTTRRRLKRVKWRLRLLREFFDQPISKIDPNFFARRKYSDISPRDPNYNGLAKTLFNDRTDQEFYHDYPTIYHLRDKLMTSDRKFDIREIYLAIHHIVKYRGNFLRTGPASQYGSASLHLATSFQKLNDLFAQSEESLNFKLVTDEAQLQQIQQILVRTDLSRSEQQRQIWPLMVVLMGATAAEKKRQKDFAKELANALVGLKAKLNVVTLTNVDTTVVKDWTFTLEESQDKLPEIEEQLSEVGQQIMDEVIQLYASVNLAQLIPAGKRFSQHMVEKYNHHEKNLELLKAYIHSQSDSKRGREIRATYDRYIDGVKSKPVTQEMFYKDLMKYVEADATSNHLAAEIKDEIDSEQFMPKLRTKQNGSIPYQVQQYELDQIISHQKKYYPWLGEENPVAERRGKFPYKLDELVGFRVPYYVGPLITKEDQQATSGAGFAWMVRKADGPITPWNFDQKVDRIASATAFIQRMQTTDTYLIGEDVLPARSLIYQRFMVLNELNNMRVEDQKLAPRQKQRLYNQVFKQHQHVSVKNIQQNLMDAGEYRETPKITGLADPKGFNSSLSTYHDFKKILPEAIADEHKRADIEKIILWSTTFEDSAIFKQKLEEVAWLTDAQRKQLSGLRYRGWGQLSHKLLTAFKDDNGRSVMDGLWETSDNFMQLRKQPAIETQIKEANQANLTDADIQDTINELYTSPQNKKAIREVMLVLDDIKNAMHGQTPSWIFIEAARGGGVAGRRTQSRSKQIVEAYKSTAKEIVSEKVQHELNEKIKAKADFNTRLVLYFLQNGRDLYTNEAINIDRLSEYDIDHILPQSLVKDDSLDNRVLTSARINREKNDTFASEKFGRKMGAQWRELHRNGLMTQRKLKHLLMRPDEISKHATDFINRQLVETRQVIKLVEELISSEYPSASIVAVKANLTHQFRQTFNFPKLREVNDYHHAFDASLTAFIGMYLLKQYPKLERFFVYGKFAKQPINLTRFNVIRKLAVAEEPIANIETGEILWDKTADIKCFEKLYNYKRLLVTHEVRENYGAMFDQTIFKATDSRKRLIQKKKGFATETYGGYTGRTLAYLAIVKVVTNKDTQYQVVGIPTTMVTQIQQLEASGLTSKQAVTKAIGAMINENNKKLQSYEVLLPKVRFEQVVRDEVKGHIHRFALGTDTYYHNIQELYLPLTIQRAFLGKRNDTDAQTEQNLLTVFETTLAQVNRYFPLYEMNKFKQILNSAQEKFAALPTKNKTVKNKLVTGKDGVLNNLFIGLHANASLGDLKILGMKIGFGKLQVPGGLKLTDQAEIIYQSPTGLFERKVALKDL

SEQ ID NO: 294 - protein, 1358 aa, Lactobacillus plantarum
MKEPYGVGLDIGTNSVGWTVVDASGHVRKIKGQTGIGVRLFKEGAAAADRRGFRTTRRRLKRVKWRLRLLREFFDQPISKVDINFFARRKYSDVSPRDPNYNGLEKTLFNDRSDQDFYHDYPTIYHLREALMTQHRKFDVREIYLAIHHIVKYRGNFLRNDAATAYRSGTLDLQQHFETLNHLFSQADLELNLNLTTDVALLDSIKQTLVRTDISRSDRQKLIMPLLAVLTGATTAEKKRQKAVVTEFAKALVGNKTKIDVLTLTDIDATEAKDWAFSLEENQDKLPGIEDRFSEVGQQIIDEVIRLYASVNLAQLIPEGKRFSQSMVEKYKRHGEDLKLLKAYIRSQSDAKRGRAIRATYDQYIDGVKSKQVTQEAFQKALGKFVDADVDLNSWAAQIKQAIDSEQFMPKLRTKQNGAIPYQVQQNELDQIISNQKEYYPWLGEENPVIKRRGKFPYKLDELFGFRVPYYVGPLITKEMQAATANAGFAWMVRKADGPITPWNFDDKVDRVASATAFIQRMQTTDTYLIGEEVLPARSLIYQRFMVLNELNNIRVDDGQLTPRQKQRLYNQVFKKHKRVTAKNIQDNLVAAREFPTAPRITGLADPKVFNSSLSTYHDLKQVLPEAMSDVRKQADIEKIILWSTIFEDSTIFKQKLTEISWLTAAQLKQLGQLRYRGWGQLLRKLLTGLKDDNNRSIMDGLWETNANFMQLRSQPAIENQIKSANQANLTTADLQDTINELYTSPQNKKAIREVMVVLADIKDAMHGQTPNWIFVEAARGGGVAGRRTQSRSKQIVAAYQGTAQAIVRDQVQRELKEKIKNKANFNTRLVLYFLQNGRDLYTGDAINIDRLSEYDIDHILPQSLVKDDSLDNRVLTNARINREKNDTFASEKFGKKMGAKWKEMHRMGLMTKRKLDHLLMRPDEISKYATGFINRQLVETRQVIKLVEELINAEYPSTAIVSVKANLTHQFRQTFDFPKIREVNDYHHAFDAALTAFIGTYLLKRYPKLERFFVYGKFAKQPVNLTRFNVIRKLAKTDTPITDIDTGEVLWDKLTDIKYFETLYDYKRLLVTREVSENYGAMFDQTLLKASDNGKRLIRKKQSFDTAIYGGYTGKTLAYMAIVKVSTKKDVQYQVVGVPTTMVTQIEQLEQQGMTNKQAVTKVIEPLIAANNKKMLTYEVLLPKVRFEQVVRDRIKGQTHRFALGTDTYYHNIQELYLPLTLQRAFLGKQNESEVQLNQNLLTVFDATLAQVNRYFPLYEMNKFKKILNSARDQIELLEAKNQFVKNKLVLGKQGILTNMFIGLHANASYGDLKVLGVKIDFGKLQVPGGIKLTGDAEIIYQSPTGLFERKIALKDL

SEQ ID NO: 295 - protein, 1363 aa, Lactobacillus rhamnosus
MTKLNQPYGIGLDIGSNSIGFAVVDANSHLLRLKGETAIGARLFREGQSAADRRGSRTTRRRLSRTRWRLSFLRDFFAPHITKIDPDFFLRQKYSEISPKDKDRFKYEKRLFNDRTDAEFYEDYPSMYHLRLHLMTHTHKADPREIFLAIHHILKSRGHFLTPGAAKDFNTDKVDLEDIFPALTEAYAQVYPDLELTFDLAKADDFKAKLLDEQATPSDTQKALVNLLLSSDGEKEIVKKRKQVLTEFAKAITGLKTKFNLALGTEVDEADASNWQFSMGQLDDKWSNIETSMTDQGTEIFEQIQELYRARLLNGIVPAGMSLSQAKVADYGQHKEDLELFKTYLKKLNDHELAKTIRGLYDRYINGDDAKPFLREDFVKALTKEVTAHPNEVSEQLLNRMGQANFMLKQRTKANGAIPIQLQQRELDQIIANQSKYYDWLAAPNPVEAHRWKMPYQLDELLNFHIPYYVGPLITPKQQAESGENVFAWMVRKDPSGNITPYNFDEKVDREASANTFIQRMKTTDTYLIGEDVLPKQSLLYQKYEVLNELNNVRINNECLGTDQKQRLIREVFERHSSVTIKQVADNLVAHGDFARRPEIRGLADEKRFLSSLSTYHQLKEILHEAIDDPTKLLDIENIITWSTVFEDHTIFETKLAEIEWLDPKKINELSGIRYRGWGQFSRKLLDGLKLGNGHTVIQELMLSNHNLMQILADETLKETMTELNQDKLKTDDIEDVINDAYTSPSNKKALRQVLRVVEDIKHAANGQDPSWLFIETADGTGTAGKRTQSRQKQIQTVYANAAQELIDSAVRGELEDKIADKASFTDRLVLYFMQGGRDIYTGAPLNIDQLSHYDIDHILPQSLIKDDSLDNRVLVNATINREKNNVFASTLFAGKMKATWRKWHEAGLISGRKLRNLMLRPDEIDKFAKGFVARQLVETRQIIKLTEQIAAAQYPNTKIIAVKAGLSHQLREELDFPKNRDVNHYHHAFDAFLAARIGTYLLKRYPKLAPFFTYGEFAKVDVKKFREFNFIGALTHAKKNIIAKDTGEIVWDKERDIRELDRIYNFKRMLITHEVYFETADLFKQTIYAAKDSKERGGSKQLIPKKQGYPTQVYGGYTQESGSYNALVRVAEADTTAYQVIKISAQNASKIASANLKSREKGKQLLNEIVVKQLAKRRKNWKPSANSFKIVIPRFGMGTLFQNAKYGLFMVNSDTYYRNYQELWLSRENQKLLKKLFSIKYEKTQMNHDALQVYKAIIDQVEKFFKLYDINQFRAKLSDAIERFEKLPINTDGNKIGKTETLRQILIGLQANGTRSNVKNLGIKTDLGLLQVGSGIKLDKDTQIVYQSPSGLFKRRIPLADL

SEQ ID NO: 296 - protein, 1361 aa, Lactobacillus rhamnosus
  Lactobacillus rhamnosus HN001
MTKLNQPYGIGLDIGSNSIGFAVVDANSHLLRLKGETAIGARLFREGQSAAERRESRTTRRRLSRTRWRLSFLRDFFAPHITKIDPDFFLRQKYSEISPKDKDRFKYEKRLFNDRTDAEFYEDYPSMYHLRLHLMTHTHKADPREIFLAIHHILKSRGHFLTPGAAKDFNTDKVDLEDIFPALTEAYAQVYPDLELTFDLAKADDFKAKLLDEQATPSDTQKALVNLLLSSDGEKEIVKKRKQVLTEFAKAITGLKTKFNLALGTEVDEADASNWQFSMGQLDDKWSNIETSMTDQGTEIFEQIQEHYRARLLNGIVPAGMSLSQAKVADYGQHKEDLELFKTYLKKLNDHELAKTIRGLYDRYINGDDAKPFLREDFVKALTKEVTAHPNEVSEQLLNRMGQANFMLKQRTKANGAIPVQLQQRELDQIIANQSKYYDWLAKPNPVEKHRASKPYQLDELLTFRIPYYVGPLITPKEQAESRENVFAWMIRKDPSGNITPYNFDEKVDCPASANMFIQRMKNTDTYLIGEDVLPKRSLLYQKYEVLNELNNVSIDGRRLGADQKQRLIREVFERHSSVTIKQVAENLVAHGDFAKRPEIRGLADEKRFLSSLSTYHQLKKILHEAIDDPTKEHDIENIITWSTVFEDAAIFKTELAKISWLDSDTIKALSNIRYRGWGQFSRKLLDGLKLGNGHTVIQELMLSNHNLMQILTDETLKTTMAELNQDKLKADDIEDVINDAYTSPSNKKALRQVLRVVEDIKHAANGQDPSWLYIETADGPGTAGKRTQSRQKQIQTVYANAAQELIDSAVRGELEDKIADKASFTDRLVLYFMQGGRDIYTGAPLNIDQLSHYDIDHILPQSLIKDDSLDNRVLVNATINREKNNVFASTLFASKMAATWRKWHEAGLISGRKLRNLMLRPDEIDKFAHGFVARQLVETRQIIKLTEQIAAAQYPNTKIIAVKAGLSHQLREELDFPKNRDVNHYHHAFDAFLAARIGTYLLKRYPKLAPFFTYGEFAKVDVKKFREFNFIGALTHAKKNIVAKDTGEIVWDKERDIQELDRIYNFKRMLITHEVYFETADLFKQTIYAAKDSKERGGSKQLIPKKQGYPTQVYGGYTRENTAYLAVVKTVEKKADVYRVVRIATSQVAALKEARAQSTVKERELLKKFLTTKFTKIGKNGKKAITPFDIVIPRVPREQLFHNKRYGFFMVNSDTLMHNYQELWMSRSDQQILSKLVKSAKTVENGQVGRLFENIVEQINKYFPLYDINQFRKKLDQSKDIFSKLPLEGNGTTSGKRETIQNILTGAGTGAKNGDLKNLGIKTPFGFLQVPSGIVLDDDTTLIYQSPTGMLNRIVRLSEL

SEQ ID NO: 297 - protein, 1361 aa, Lactobacillus rhamnosus
  Lactobacillus rhamnosus R0011
MTKLNQPYGIGLDIGSNSIGFAVVDANSHLLRLKGETAIGARLFREGQSAAERRESRTTRRRLSRTRWRLSFLRDFFAPHITKIDPDFFLRQKYSEISPKDKDRFKYEKRLFNDRTDAEFYEDYPSMYHLRLHLMTHTHKADPREIFLAIHHILKSRGHFLTPGAAKDFNTDKVDLEDIFPALTEAYAQVYPDLELTFDLAKADDFKAKLLDEQATPSDTQKALVNLLLSSDGEKEIVKKRKQVLTEFAKAITGLKTKFNLALGTEVDEADASNWQFSMGQLDDKWSNIETSMTDQGTEIFEQIQELYRARLLNGIVPAGMSLSQAKVADYGQHKEDLELFKTYLKKLNDHELAKTIRGLYDRYINGDDAKPFLREDFVKALTKEVTAHPNEVSEQLLNRMGQANFMLKQRTKANGAIPVQLQQRELDQIIANQSKYYDWLAKPNPVEKHRASKPYQLDELLTFRIPYYVGPLITPKEQAESRENVFAWMIRKDPSGNITPYNFDEKVDCPASANMFIQRMKNTDTYLIGEDVLPKRSLLYQKYEVLNELNNVSIDGRRLGADQKQRLIREVFERHSSVTIKQVAENLVAHGDFAKRPEIRGLADEKRFLSSLSTYHQLKKILHEAIDDPTKEHDIENIITWSTVFEDAAIFKTELAKISWLDSDTIKALSNIRYRGWGQFSRKLLDGLKLGNGHTVIQELMLSNHNLMQILTDETLKTTMAELNQDKLKADDIEDVINDAYTSPSNKKALRQVLRVVEDIKHAANGQDPSWLYIETADGPGTAGKRTQSRQKQIQTVYANAAQELIDSAVRGELEDKIADKASFTDRLVLYFMQGGRDIYTGAPLNIDQLSHYDIDHILPQSLIKDDSLDNRVLVNATINREKNNVFASTLFASKMAATWRKWHEAGLISGRKLRNLMLRPDEIDKFAHGFVARQLVETRQIIKLTEQIAAAQYPNTKIIAVKAGLSHQLREELDFPKNRDVNHYHHAFDAFLAARIGTYLLKRYPKLAPFFTYGEFAKVDVKKFREFNFIGALTHAKKNIVAKDTGEIVWDKERDIQELDRIYNFKRMLITHEVYFETADLFKQTIYAAKDSKERGGSKQLIPKKQGYPTQVYGGYTRENTAYLAVVKTVEKKADVYRVVRIATSQVAALKEARAQSTVKERELLKKFLTTKFTKIGKNGKKAITPFDIVIPRVPREQLFHNKRYGFFMVNSDTLMHNYQELWMSRSDQQILSKLVKSAKTVENGQVGRLFENIVEQINKYFPLYDINQFRKKLDQSKDIFSKLPLEGNGTTSGKRETIQNILTGAGTGAKNGDLKNLGIKTPFGFLQVPSGIVLDDDTTLIYQSPTGMLNRIVRLSEL

SEQ ID NO: 298 - protein, 1375 aa, Lactobacillus ruminis
  Lactobacillus ruminis ATCC 25644
MRKNQEPYNIGLDIGTSSIGWSIMNDNFDLMRVKGKKGIGVRLYNEGQSAAERRMHRTARRRYGRRKWRLRLLEDFFDEHMAEVDDTFFARLKDSNISPKDDKKYRKSLLFPKSKGVTYQDDGEFYKKYPTMYHLRYALMTEHRKFDLREIYLAFHHMVKYRGNFLYDTSVDSFEAKNLDIKGKFDEINDLLSSYTDFYVDNSNAALVESILLEKNTTRKDKSKKIAKLLHVEDKEKGKNKKAKDLATQISNAVLGLKCNFHLIFELQQKYSFDLCSEKTEENIAKLSEVLDENQKMLLMILKEVQDQVMLNAFVPSGMSLSEAMMQKYDDYGEQLKIYHELEHSVSDDSAAKLRGAYRDYNDNIIKRIDGDNKKDTFYKRVKNILTKISKEYVDQDVLESCGKLKKLIDENKLFIRQRTAANGVLPHQLHQIEMRKIIDNQKEYYPWLAEPNPNEKRRVYSKYKVEELIAFRIPYYVGPLVDPNNADKNKEARFSWMVRKKDGEITPWNFYDKVDWAESANNFIERMKSKDTYLLGEDVVPKESMLYQKYEVLNELNNLRINDSGLSDSFEDVKLKQAIYNDLFKKQKIVKITDLQNYLVQNHKYLVKPKISGLADENRFLSSLSTYSDLKTIFGDKVDDRTYFNDFEKMVEYSTVFEDGHDYNQKLDEYTWLTKEEKYKIGKKRYRGWGKLSKKLLTGLRDKNNHTIMDNLWETNRNFMQIQTADEFSKQIAEENERHLKGSVSDAINDMYTSPANKKAIRQVLRVVDDIQKAMGYAPSSISLEFAREDGPSVRTVSRANRMKSIYEKYASEVSEEVMKDLDGVIKDKKGLNDRLYLYFEQQGKDMYSGHPLDFDKVISGQEYDIDHILPQAVIKDDSLDNRVLTTKALNNDVKSKGVPCRMFNGMHSFWKNLYDKGFISRRKFNNLTTNPENIDKYKMKGFVNRQLVETRQIIKLVANVLNDKYQNDDVDIIEVRAELTHDVRKHFKFYKNRNVNDYHHAFDAYLTSFIGHYLFKKYPNLRPLFDYNDFMKVSDNVFKQLRGNNFLGEFLNKTGDIISTDGNFVLNKEEMINKLNKAYAFKKILVTKEVGQRTGAMFNETRYPAPNSRKAALKYRRMPKPDSLISVKDYKNTDIYGGYSGKNDAYMVIVDMGKQYMVVGVPVRYTEKLDKLRIKHSELYRDELRKVLSRDKTLLDSKGNVKRFDIVLDRVLYGQLIEDGNELFTLGSSKYKRNFRQLFLDKQCIEILDSSATPQPTDEELIWVYDQILDKVDKYFELYDINRQRETLRKGRAAFCSLPNISMKKDDVTKKKILNEILVALHANESESNCEKIGKKVFGRLQVPGGIKLSKEAKLIYQSPTGLFERVVYLKDL

SEQ ID NO: 299 - protein, 1339 aa, Lactobacillus salivarius
  Lactobacillus salivarius SMXD51
MERYHIGLDIGTSSIGWAVIGDDFKIKKKKGKNLIGTRLFNEGATAAERRGFRTQRRRLNRRKWRLKLLEEIFDPYMAEVDEYFFARLKSSNLSPKDSNKKYLGSLLFPDKSDSNFYDKYPTIYHLRRDLMEKDEKFDLREIYLAIHHIVKYRGNFLEKVPAKNYKNSGASIGFLLEEVNSLYKDIIGDESIAILNSEKFEDVEKIILDEETRNLDKQKSVGKLLVEDKKKKNIVTAFSKAIFGYKFNIEDLLLIENDEKNKLTFNDENIDDIFNELSHSLDDKQMDLLTKTREIYFKFKLNMIVPTGYTLSESMIEKYEMHKAHLKMYKEFINTLNTKDRKILKNAYSDYINTEKAKAANAQENFYKTVKKIIKDNNSDTAKKIIVLIDEGNFMPKQRTGENGVIPHQLHQIELDRIIENQAKYYPWLAEANPVEKNRKFAKYKLDELVTFRVPYYVGPLIDKTESNKNEKETKFAWMVRKAKGTITPWNFENLVDRTESANRFIKRMTSKDTYIIGEDVLPASSLLYEKFKVLNELNNIKVNEKKLDIEQKQDIYLNLFTTAKNVTKKSLATYLNCSADSISGLSDGEKFNSSLSSYIDLKAILGNIVDDCNKNEDLEKIIEYSTVFEDGNIYKEKLSEISWLTDEQIEKLSNIHFKGWGRLSKKLLTQITNENGERIIDALWNTSNNFMQIINDESIQAKLAEINGKYAGKSDLEDILSEAYTSPQNKKAIRQVMKVVEDIEKAMQCEPTSISIEFTRKKQKSRLTNTRYKKISDVYEKIADEVISEYELRKLQSELDSNANNMRDRYYLYFMQLGRDMYTGEKINIDELHQRYDIDHILPQSFIKDDSINNRVLTRKDVNNKEKSDKTAADLYAVEMSDFWRKLRKQGLITEQKYKNLLTKSDSIDKYAKKGFIKRQLVETSQVVKLVANILQDKYSDTKIIEVRAKLNSNLREEYKLIKNRAVNDYHHAIDGYLTTFIGQYLYKTYPKLRSYFVYNDFKKLDSNYLKHMKKFNFLWQLQDDKTIDIYDNVNNKFVLNVPEMKKYIQKIYNYKYMLVSKEVTTKNGAFYDQTKYNAKTVNLIPIKKNKPTNIYGGYKGKVSSYMMLVKIRKKKEVIYKFVGVPRLWTDELDRLKDTTERKILLNEIAKNSLSKTEQDFEVILDKVYYGQLIIDGNQKYTLGSSEYKYNAMQLHLSKHALEVLAKENVKDAEITDKDLVSVYEEILSVVNKYFELYDINKFRQKLNEGLEIFRKLPVYNVYESNKIKQVGKFEVLNRILMGLHANAMITDLKVLGIKTKLGQMQVNGGIKLSPDAKLIYQSPTGIFSRAVRVKDLG

SEQ ID NO: 300 - protein, 1331 aa, Lactobacillus sanfranciscensis
MNKQPYNIGLDIGTSSVGWSATELDNRLLHIKGHNGIGVRLFKEGESAADRRGFRTTRRRLARRKWRLRLLNEIFATEIAKVDPSFFARLKQSNVSPKDPNKTMFENILFDDENLDDQKFHHDYKTIYHLRQAIINHPEQKFDIRLIYLAMHHIIKYRGHFLNQANVQDFKGGKIDLEKSFKALNDIFENQGRDLRLVTDKANQYVKVLSDNAKTRSDRKKELSKLLYVPIDKDTDKNSKKVTGEILKAILGNKAKFDVIFGIEVENPKEWVLTFNSDDFDDKIEGLSSQMTDEDSEILLILKELYFALNLSDILNNSVTDKNAKTLSEAMINRYDDHKNQLAMLKKVIDSSDKKHAKELKEAYSAYIDGENNKKISFEDLKKRIQKNLVDSELSQKINDLLDHDYFLPKQRSKENGAIPHQLQQQELDQIIESQKQYYPFLAELNPNEKRSRQAKYKLDELVAFRVPYYVGPMVEVTDSNQENNGKFAWMIRKEQGEITPWNFDEKVDRTETATKFITRMTTTDTYLIGEPVLPKNSLLYQKFVVLNELNNLKINQEIITPGQKQYLYEHVMKKNKRVTLKKIADALVIKGDYPYAPEVKGTTDQKNLNNGLTTYIDLAKIFGNELDDVDREADFEKIIEWSTIFEDQHIFALKLQELKWLTEKQRNQVVKLRYQGWGKLSKELLAGLVDDNGQRIIDLLWSDNQNFMQIVNQKSFKESIADHNGAHLEEKNLKDVINDLYTSPQNKKAIRQVILVVDDIINAVGYEPANIMMEFAREDSNDHRLTNSRSRQLENVYKDITNSWFDNDSVKDELEDKIKNKDKFTDRLYLYFTQGGKDLYTGEPLNIDDLSSYDIDHILPQSFILDNSLDNRVLTSQRNNRVSKEDQLPGELFGTKMHAFWKRLKAAHLISNKKYYNLTLTPNSISKFNNQGRFINRQLVETRQVIKLAAEILHNRYSEEKGTNIVTIKANLTHHMREKFNFYKNRNVNDYHHAFDAYLTAFVGNWLLQQYPKLKPYFVYGDFAKTEINNLKSFNMLYKFEQAHQLNEKDGKIAKDADALLGYMKNVYHFKKMLVTKKLETNHGALFKQTLYPSPAHDIKKRQLIKPKDNRPTDIYGGYTHEERKYMSLVKVIGKKDNEYRMANVPLLKINKNNDIKEILKSQFSNKKFEIVLPKVLKNQLFSENGALFVIGSKGYKYNANQLVLSDLDMKLLNDLSNNKSIDEVTINQLFKNIVDSTNKYMPLYEIKNLNEVVEKFNNLEFNDKKKTITDFLLATHANPTMSNLKNIGLPSYFGRFTSGNAGIKLSENANVIYQSPTGLFSRKVKISDF

SEQ ID NO: 301 - protein, 1419 aa, Lactobacillus sp.
  Lactobacillus sp. 66c
MAKPQNYTIGLDIGTNSVGWTVTDDQNNILRIKSKKAIGARLFEEGKVAAERRSFRTTRRRLSRRKWRIKLLEELFDEEISKVDPNFFARSHESWISPKDKRERYSAIVFPTPEEDKKFHNEYPTIYHLRDRLMKDDQKHDIREIYVAIHHIMKYRGNFLHDESIETYRSGMSSLGGGDERTILNTKILDDLNDAFADNLATQGISVNSASADQINEIVTSGHLNVDSQKAIAKLLLPTTLSSDDKKQDKKIKKLATDAAKNVASAWLGYKANFAAILNIQEVDKDKKKIYSFALQGADEEDKVETLESVLSQDQIEIVDRIIRIRHAIVLGEIIPVGMTLSEAMIEKYDQHAKDLKNLKTVIRNLKDRKNAVKLQAIYDLYVNNRHADTAKAMKLAGVKKRTELLEPEEFNKSIEKLLDDSPVSAEIKKRIAEKDFLPLQRSNSNGVIPNQLHQIELDEIIKKQSKYYPFLGETNEHASADVARKAPTKLDQLLTFRVPYYVGPLITKEEQEEQDGHSFAWMIRKNPKDHEKITPWNFDEKVDRMASATQFIKRMTTKDTYLLGEDVLPSSSLKYQLFTVLNELNNLRINHKKLTREEKEQVIEDLFKKYKTVKADKFKNYWQKGHAGLDVKIQGMADPEKFNSTMSTYIDLQKIFGDQLDDAQRQNDFEKIIEYSTIFEDRKILGEKLRADFVWLSEDQIKRLCRLRLQGWGRLSLKLLTRLTDADGQNVLERLLNSNDNFMQIVKDPVIKAKIEQKNQKLLRADWSENATESILDEAYTSPQNKKAIRQVMRVVHDIVKACDGNLPAKFAIEFARSQDDDPKRTVARADRLQKIYAQISDEVVSQGVKDQLSGMKSLKDRYYLYFMQGGRDAYTGKPLNIDRLSDYDIDHIMPQSFIKDDSLDNRVLVTRAVNNQKSDNVPVLLYGNHLVADLGITIREMWDRWQKSGMISKRKLANLLTDPATLSEYRAEGFINRQLVETSQVIKLTATILQSEFPDSKIIEVPAKYNSILRKQFDLYKSREVNDYHHAIDAYLSTIVGNYLYQVYPNLRRLFVYGEFKKFSHGEEESSHQAVRRVKSMNFLDDLLRGKHGDDIYCRVTGEVIFSRKDIISKLKQAYSFKQMLVTQEVFTKKSALFDQTVYPSPARDSKTRSGLIPRKQGMDTEIYGGYSGNKDAYFVLAQVVKSKGHTLQVVGVPIRALRALANCSNYSEQLLKIVKAQVLFNKKTGKAKKGISDVRILLDKIPYRQPVLDGSAFYMLGSSTYKYNLKQISLSQQSMKYILDYIDDPNFNKHEMTKIDQQNEKECLLSVYDEILDKMDKYLSLYDINGFRKKLHVGRDKFIKLEVEKQAEAIKNVLRGFHANSDMTKLSDLGLSTSLGFMQASDGIKLSDNAVFIYQSPTGLFERRVKVSDLLK

SEQ ID NO: 302 - protein, 1289 aa, Lactobacillus versmoldensis
  Lactobacillus versmoldensis KCTC 3814
MRRRYRRRRNRLNWLDELFADELAKIDPSFLLRMKNSWVSKKESTRKRDPYNLFIDEKYNDVDYFNQYPTIFHLRKELITEDKKVDIRLIYLAIHNIIKYRGNFTLENQNFDISQLSSNFSQQISDFFALFSDFGVIMPEDFDPDKISDILLNPNLSPSGKVSEAIATISPKTNVKAKIKIILLLLVGNNGDLKKLFDLETTEKIAVKLSSRHIDSELPIILSELNEQQENIITIANSIFGSIILKDFLGDETSISAAKVISFEDHKQDLQKLKTMWRETSNKEAVKAGKKAYEDYIGHEDSETFYKKIKKFLEKAQPVDLANKALAEIELENYLPKQRNRNNTVIPYQLNENELIAILDHQEKYYPFLKENRDKILSLLTFRIPYYVGPLQDSNNNRFSWMTRKASGAIRPWNFSEKVNVEQSSNDFIKRMRSTDTYLIGEPVLPKKSLIYQCYEVLSELNNTRVKDGSSNPKRLDVTIKQRIYNEIFKNQKSVSVKVLQNWLIKESYFKSPEISGLADKKKYLSSLSTYIDFKKIFGQRFVDDPVNSPQLEELAEWLTLFEDKKILLIKLQNSKYSYDQATINKLSTMRYQGTGKLSKKLLVDLKTTKKSIGKSGAESLSILDLMWSTKDNFMQIIHDADYTFEQQIKEFNYDTEDELTPLEKVANLHGSPALKRGLNQSIKVVADIVKFMGHDPEKIFIEFTRSDDFSKLTISRYRRIKKQYLEIAKAIKKIPAEFKDIKEYQTQLEENKGKLASERLMLYFLQCGHSLYSNKPIDLNMINSSKYHVDHILPQSYIKDDSLENKALVLASENENKIDNMLISHDIIATNLPRWQALKDQNLMGSKKFADLTRTTVTENQKKGFIQRQLVQTSQIVKNITLILNDLYKNTSCIETRATLSSEFRKAFSNFDETTYHYQFPEFVKNRDVNDFHHAQDAFLACVIGEYQLKKYPKDNLRLVYDQYSKFLDSLKKDTRKKNGRMPRYTQNGFIIGSMFNGKTYVDDNGEIIWDQKIKESIRKTFNYHQFNVVRQTIEQHGKLFNDTIQPHSDRYKLIPLKTNRDPAIYGGYNNDNNAYSVVLDVDGKKKINGIPIRIANQLKSDELDLSSWLENNIKHKKPMTILIDKVPKYQRIINEETGDLLITSANEVINNVQLFLPSMYTALISLLDSTKTEMYSKLLSNYEANILIDIYDYLLTKLKNNYPLYRKEWAKLAEHRDDFIESDLVTQASTLQQLIKFMHADPSNVNLKFGNFKGNRFGRKNGNIKLSKTDFIYESPTGLFKSIKHID

SEQ ID NO: 303 - protein, 1372 aa, Legionella pneumophila
  Legionella pneumophila 130b
MESSQILSPIGIDLGGKFTGVCLSHLEAFAELPNHANTKYSVILIDHNNFQLSQAQRRATRHRVRNKKRNQFVKRVALQLFQHILSRDLNAKEETALCHYLNNRGYTYVDTDLDEYIKDETTINLLKELLPSESEHNFIDWFLQKMQSSEFRKILVSKVEEKKDDKELKNAVKNIKNFITGFEKNSVEGHRHRKVYFENIKSDITKDNQLDSIKKKIPSVCLSNLLGHLSNLQWKNLHRYLAKNPKQFDEQTFGNEFLRMLKNFRHLKGSQESLAVRNLIQQLEQSQDYISILEKTPPEITIPPYEARTNTGMEKDQSLLLNPEKLNNLYPNWRNLIPGIIDAHPFLEKDLEHTKLRDRKRIISPSKQDEKRDSYILQRYLDLNKKIDKFKIKKQLSFLGQGKQLPANLIETQKEMETHFNSSLVSVLIQIASAYNKEREDAAQGIWFDNAFSLCELSNINPPRKQKILPLLVGAILSEDFINNKDKWAKFKNFWNTHKIGRTSLKSKCKEIEEARKNSGNAFKIDYEEALNHPEHSNNKALIKIIQTIPDIIQAIQSHLGHNDSQALIYHNPFSLSQLYTILETKRDGFHKNCVAVTCENYWRSQKTEIDPEISYASRLPADSVRPFDGVLARMMQRLAYEIAMAKWEQIKHIPDNSSLLIPIYLEQNRFEFEESFKKIKGGSSDKTLEQAIEKQNIQWEEKFQRIINASMNICPYKGASIGGQGEIDHIYPRSLSKKHFGVIFNSEANLIYCSSQGNREKKEEHYLLEHLSPLYLKHQFGTDNVSDIKNFISQNVANIKKYISFHLLTPEQQKAARHALFLDYDDEAFKTITKFLMSQQKARVNGTQKFLGKQIMEFLSTLADSKQLQLEFSIKQITAEEVHDHRELLSKQEPKLVKSRQQSFPSHAIDATLTMSIGLKEFPQFSQELDNSWFINHLMPDEVHLNPVRSKEKYNKPNISSTPLFKDSLYAERFIPVWVKGETFAIGFSEKDLFEIKPSNKEKLFTLLKTYSTKNPGESLQELQAKSKAKWLYFPINKTLALEFLHHYFHKEIVTPDDTTVCHFINSLRYYTKKESITVKILKEPMPVLSVKFESSKKNVLGSFKHTIALPATKDWERLFNHPNFLALKANPAPNPKEFNEFIRKYFLSDNNPNSDIPNNGHNIKPQKHKAVRKVFSLPVIPGNAGTMMRIRRKDNKGQPLYQLQTIDDTPSMGIQINEDRLVKQEVLMDAYKTRNLSTIDGINNSEGQAYATFDNWLTLPVSTFKPEIIKLEMKPHSKTRRYIRITQSLADFIKTIDEALMIKPSDSIDDPLNMPNEIVCKNKLFGNELKPRDGKMKIVSTGKIVTYEFESDSTPQWIQTLYVTQLKKQP

SEQ ID NO: 304 - protein, 1372 aa, Legionella pneumophila
MESSQILSPIGIDLGGKFTGVCLSHLEAFAELPNHANTKYSVILIDHNNFQLSQAQRRATRHRVRNKKRNQFVKRVALQLFQHILSRDLNAKEETALCHYLNNRGYTYVDTDLDEYIKDETTINLLKELLPSESEHNFIDWFLQKMQSSEFRKILVSKVEEKKDDKELKNAVKNIKNFITGFEKNSVEGHRHRKVYFENIKSDITKDNQLDSIKKKIPSVCLSNLLGHLSNLQWKNLHRYLAKNPKQFDEQTFGNEFLRMLKNFRHLKGSQESLAVRNLIQQLEQSQDYISILEKTPPEITIPPYEARTNTGMEKDQSLLLNPEKLNNLYPNWRNLIPGIIDAHPFLEKDLEHTKLRDRKRIISPSKQDEKRDSYILQRYLDLNKKIDKFKIKKQLSFLGQGKQLPANLIETQKEMETHFNSSLVSVLIQIASAYNKEREDAAQGIWFDNAFSLCELSNINPPRKQKILPLLVGAILSEDFINNKDKWAKFKIFWNTHKIGRTSLKSKCKEIEEARKNSGNAFKIDYEEALNHPEHSNNKALIKIIQTIPDIIQAIQSHLGHNDSQALIYHNPFSLSQLYTILETKRDGFHKNCVAVTCENYWRSQKTEIDPEISYASRLPADSVRPFDGVLARMMQRLAYEIAMAKWEQIKHIPDNSSLLIPIYLEQNRFEFEESFKKIKGSSSDKTLEQAIEKQNIQWEEKFQRIINASMNICPYKGASIGGQGEIDHIYPRSLSKKHFGVIFNSEVNLIYCSSQGNREKKEEHYLLEHLSPLYLKHQFGTDNVSDIKNFISQNVANIKKYISFHLLTPEQQKAARHALFLDYDDEAFKTITKFLMSQQKARVNGTQKFLGKQIMEFLSTLADSKQLQLEFSIKQITAEEVHDHRELLSKQEPKLVKSRQQSFPSHAIDATLTMSIGLKEFPQFSQELDNSWFINHLMPDEVHLNPVRSKEKYNKPNISSTPLFKDSLYAERFIPVWVKGETFAIGFSEKDLFEIKPSNKEKLFTLLKTYSTKNPGESLQELQAKSKAKWLYFPINKTLALEFLHHYFHKEIVTPDDTTVCHFINSLRYYTKKESITVKILKEPMPVLSVKFESSKKNVLGSFKHTIALPATKDWERLFNHPNFLALKANPAPNPKEFNEFIRKYFLSDNNPNSDIPNNGHNIKPQKHKAVRKVFSLPVIPGNAGTMMRIRRKDNKGQPLYQLQTIDDTPSMGIQINEDRLVKQEVLMDAYKTRNLSTIDGINNSEGQAYATFDNWLTLPVSTFKPEIIKLEMKPHSKTRRYIRITQSLADFIKTIDEALMIKPSDSIDDPLNMPNEIVCKNKLFGNELKPRDGKMKIVSTGKIVTYEFESDSTPQWIQTLYVTQLKKQP

SEQ ID NO: 305 - protein, 1355 aa, Leuconostoc gelidum
  Leuconostoc gelidum KCTC 3527
MTYSIGLDIGTGSVGWAVIGDDYRLKRAKGKNLIGVRLFDSATTAAERRGYRTTRRRLSRRHWRLRLLNDIFASDLAEQDENFLPRLKYSWVNPDDEQNPQLNSDVANGALFGSSETDKAFHKNYPTIYHLRHELMTDTAKHDLREVYLAIHHIVKYRGNFLNTADKINAENSFNVDLFIAALDEYNEFLETPITSIKDAQLFSDKLTDINARNKSVRVENAMSETYDDKSKIFKAILTALVGNTANFQTIFDLSDLEKDEAKNFKFKLDLEDVETKLDVVRAKLSDEQNAFLEAVLIAYDGITLKMILGDYKSISQSMIESYKSHQRDWKYIKNNVRLNEQKIEPDKNSVKFFKLDPKKLIYPSNLAYLQVISSNEDEHRKGLDYFKTAIQDADILQRIENDTFLPRQRTKRNGVLPYQLHLAELEQIIKKQSKYYPFLANIYTQDNKTENKLIGLLKFRVPYYVGPLVEAEKVTGDGKNHWLIKKELQENTPITPFNFDDVVDKDKSGEQFIKRITGTDSYLIGEPTLPENSLLYQKYNVLQELNNVRNERHQRLPIKVKQDIFEHVFKIDKNVNAKKVMAYLKLNGYGDFQIAGLSDTRTGKFNSNLSSYNYFVDLLGREKTEKIREDRLEEIIEIQTVFEDKILVAKRLSNLDFLTPQEKSKLSAKHYTGWGRLSQKLLTTQFIKTALSEAGDIIPQSHSIIDLLYYTDKNLMEILNDKTFNVRNWLTEQNKGTESGNSLYDQIDALAGPKDIKRGITQVFSIIDDIKKAMGSNPETVYLEFARETQTSRLTNSRLNRVQEIYNSPELKTEFAYLAKKLEAETKESIHDDRLYLYYLQEGRDMYTGKEIPFDQISSNYDIDHIIPQAFTKDDSLDNRVLVNRATNARKSNSPTFTNDIIDNRKSWWQSLVKRGLMSKEKFERLTDKRKTFSENQTNHFIARQLVETRQIIKNVADLIKNNYDGTQAVAIRASLTGEMRRYLDWPKNRDMNDYHHAHDALMMATVGKYVDRRGFFDNGSVSDGAGNAYNLYTKDWLVAARVGTRNDSQRVNPYGFIVGSMNSKAVRQQVNKETGEIVWGNENLDYLRHVLSYKKILVTRRLSGSSGRLYAETLFSPNPKAKLIAQKANRSVALYGGFTKAESAYTALVEFNKKGDRSYKLIKVPMAIANRVNDKQITVTAYIASLNLRDFSRVVLEHLPLGTLIRESDGSEFYAASSEYKHNAKELWAPKEILRSSKKLDKATADNLIDIFDFLTNDKTISNFKFYEKDLLHLKNVRDKFVEASDEIKIKVLSDVIYELHNDAGWRDPFKHIQEKPAWTMLQVKGGIKLSEKAAIVYQSPTGLFETITIVGE

SEQ ID NO: 306 - protein, 1337 aa, Listeria innocua
  Listeria innocua ATCC 33091
MKNMKKPYTIGLDIGTNSVGWAVLTDQYDLVKRKMKIAGDSEKKQIKKNFWGVRLFDEGQTAADRRMARTARRRIERRRNRISYLQGIFAEEMSKTDANFFCRLSDSFYVDNEKRNSRHPFFATIEEEVEYHKNYPTIYHLREELVNSSEKADLRLVYLALAHIIKYRGNFLIEGALDTQNTSVDGIYKQFIQTYNQVFASGIEDGSLKKLEDNKDVAKILVEKVTRKEKLERILKLYPGEKSAGMFAQFISLIVGSKGNFQKPFDLIEKSDIECAKDSYEEDLESLLALIGDEYAELFVAAKNAYSAVVLSSIITVAETETNAKLSASMIERFDTHEEDLGELKAFIKLHLPKHYEEIFSNTEKHGYAGYIDGKTKQADFYKYMKMTLENIEGADYFIAKIEKENFLRKQRTFDNGAIPHQLHLEELEAILHQQAKYYPFLKENYDKIKSLVTFRIPYFVGPLANGQSEFAWLTRKADGEIRPWNIEEKVDFGKSAVDFIEKMTNKDTYLPKENVLPKHSLCYQKYLVYNELTKVRYINDQGKTSYFSGQEKEQIFNDLFKQKRKVKKKDLELFLRNMSHVESPTIEGLEDSFNSSYSTYHDLLKVGIKQEILDNPVNTEMLENIVKILTVFEDKRMIKEQLQQFSDVLDGVVLKKLERRHYTGWGRLSAKLLMGIRDKQSHLTILDYLMNDDGLNRNLMQLINDSNLSFKSIIEKEQVTTADKDIQSIVADLAGSPAIKKGILQSLKIVDELVSVMGYPPQTIVVEMARENQTTGKGKNNSRPRYKSLEKAIKEFGSQILKEHPTDNQELRNNRLYLYYLQNGKDMYTGQDLDIHNLSNYDIDHIVPQSFITDNSIDNLVLTSSAGNREKGDDVPPLEIVRKRKVFWEKLYQGNLMSKRKFDYLTKAERGGLTEADKARFIHRQLVETRQITKNVANILHQRFNYEKDDHGNTMKQVRIVTLKSALVSQFRKQFQLYKVRDVNDYHHAHDAYLNGVVANTLLKVYPQLEPEFVYGDYHQFDWFKANKATAKKQFYTNIMLFFAQKDRIIDENGEILWDKKYLDTVKKVMSYRQMNIVKKTEIQKGEFSKATIKPKGNSSKLISRKTNWDPMKYGGLDSPNMAYAVVIEYAKGKNKLVFEKKIIRVTIMERKAFEKDEKAFLEEQGYRQPKVLAKLPKYTLYECEEGRRRMLASANEAQKGNQQVLPNHLVTLLHHVANCEVSDGKSLDYIESNREMFAELLAHVSEFAKRYTLAEANLNKINQLFEQNKEGDIKAIAQSFVDLMAFNAMGAPASFKFFETTIERKRYNNLKELLNSTIIYQSITGLYESRKRLDD

SEQ ID NO: 307 - protein, 1334 aa, Listeria innocua
MKKPYTIGLDIGTNSVGWAVLTDQYDLVKRKMKIAGDSEKKQIKKNFWGVRLFDEGQTAADRRMARTARRRIERRRNRISYLQGIFAEEMSKTDANFFCRLSDSFYVDNEKRNSRHPFFATIEEEVEYHKNYPTIYHLREELVNSSEKADLRLVYLALAHIIKYRGNFLIEGALDTQNTSVDGIYKQFIQTYNQVFASGIEDGSLKKLEDNKDVAKILVEKVTRKEKLERILKLYPGEKSAGMFAQFISLIVGSKGNFQKPFDLIEKSDIECAKDSYEEDLESLLALIGDEYAELFVAAKNAYSAVVLSSIITVAETETNAKLSASMIERFDTHEEDLGELKAFIKLHLPKHYEEIFSNTEKHGYAGYIDGKTKQADFYKYMKMTLENIEGADYFIAKIEKENFLRKQRTFDNGAIPHQLHLEELEAILHQQAKYYPFLKENYDKIKSLVTFRIPYFVGPLANGQSEFAWLTRKADGEIRPWNIEEKVDFGKSAVDFIEKMTNKDTYLPKENVLPKHSLCYQKYLVYNELTKVRYINDQGKTSYFSGQEKEQIFNDLFKQKRKVKKKDLELFLRNMSHVESPTIEGLEDSFNSSYSTYHDLLKVGIKQEILDNPVNTEMLENIVKILTVFEDKRMIKEQLQQFSDVLDGVVLKKLERRHYTGWGRLSAKLLMGIRDKQSHLTILDYLMNDDGLNRNLMQLINDSNLSFKSIIEKEQVTTADKDIQSIVADLAGSPAIKKGILQSLKIVDELVSVMGYPPQTIVVEMARENQTTGKGKNNSRPRYKSLEKAIKEFGSQILKEHPTDNQELRNNRLYLYYLQNGKDMYTGQDLDIHNLSNYDIDHIVPQSFITDNSIDNLVLTSSAGNREKGDDVPPLEIVRKRKVFWEKLYQGNLMSKRKFDYLTKAERGGLTEADKARFIHRQLVETRQITKNVANILHQRFNYEKDDHGNTMKQVRIVTLKSALVSQFRKQFQLYKVRDVNDYHHAHDAYLNGVVANTLLKVYPQLEPEFVYGDYHQFDWFKANKATAKKQFYTNIMLFFAQKDRIIDENGEILWDKKYLDTVKKVMSYRQMNIVKKTEIQKGEFSKATIKPKGNSSKLIPRKTNWDPMKYGGLDSPNMAYAVVIEYAKGKNKLVFEKKIIRVTIMERKAFEKDEKAFLEEQGYRQPKVLAKLPKYTLYECEEGRRRMLASANEAQKGNQQVLPNHLVTLLHHAANCEVSDGKSLDYIESNREMFAELLAHVSEFAKRYTLAEANLNKINQLFEQNKEGDIKAIAQSFVDLMAFNAMGAPASFKFFETTIERKRYNNLKELLNSTIIYQSITGLYESRKRLDD

SEQ ID NO: 308 - protein, 1334 aa, Listeria monocytogenes
MKNPYTIGLDIGTNSVGWAVLTNQYDLVKRKMKVAGNSDKKQIKKNFWGVRLFDDGQTAVDRRMNRTARRRIERRRNRISYLQEIFAVEMANIDANFFCRLNDSFYVDSEKRNSRHPFFATIEEEVAYHKNYRTIYHLREELVNSSEKADLRLVYLALAHIIKYRGNFLIEGALDTKNTSVDGVYEQFIQTYNQVFMSNIEEGTLAKVEENIEVANILAGKFTRREKFERILQLYPGEKSTGMFAQFISLIVGSKGNFQKVFDLIEKTDIECAKDSYEEDLEALLAIIGDEYAELFVAAKNTYNAVVLSSIITVTATETNAKLSASMIERFDAHEKDLGELKAFIKLHLPKQYQEIFNNAAIDGYAGYIDGKTKQVDFYKYLKTILENIEGADYFIAKIEEENFLRKQRTFDNGAIPHQLHLEELEAIIHQQAKYYPFLREDYEKIKSLVTFRIPYFVGPLAKGQSEFAWLTRKADGEIRPWNIEEKVDFGKSAVDFIEKMTNKDTYLPKENVLPKHSLCYQKYMVYNELTKVRYIDDQGKTNYFSGQEKQQIFNDLFKQKRKVKKKDLELFLRNINHIESPTIEGLEDSFNASYATYHDLLKVGMKQEILDNPLNTEMLEDIVKILTVFEDKPMIKEQLQQFSDVLDGGVLKKLERRHYTGWGRLSAKLLVGIREKQSHLTILDYLMNDDGLNRNLMQLINDSNLSFKSIIEKEQVSTTDKDLQSIVADLAGSPAIKKGILQSLKIVDELVSIMGYPPQTIVVEMARENQTTGKGKNNSKPRYKSLEKAIKEFGSKILKEHPTDNQELKNNRLYLYYLQNGKDMYTGQELDIHNLSNYDIDHIVPQSFITDNSIDNLVLTSSAGNREKGGDVPPLEIVRKRKVFWEKLYQGNLMSKRKFDYLTKAERGGLTDADKARFIHRQLVETRQITKNVANILHQRFNNETDNHGNTMEQVRIVTLKSALVSQFRKQFQLYKVREVNDYHHAHDAYLNGVVANTLLKVYPQLEPEFVYGEYHQFDWFKANKATAKKQFYTNIMLFFGQKERIIDENGEILWDKKYLETIKKVLDYRQMNIVKKTEIQKGEFSKATIKPKGNSSKLIPRKENWDPMKYGGLDSPNMAYAVIIEHAKGKKKLIFEKKIIRITIMERKMFEKDEEAFLEEKGYRHPKVLTKLPKYTLYECEKGRRRMLASANEAQKGNQLVLSNHLVSLLYHAKNCEASDGKSLKYIEAHRETFSELLAQVSEFATRYTLADANLSKINNLFEQNKEGDIQAIAQSFVDLMAFNAMGAPASFKFFEATIDRKRYTNLKELLSSTIIYQSITGLYESRKRLDD

SEQ ID NO: 309 - protein, 1334 aa, Listeria monocytogenes
  Listeria monocytogenes FSL J1-194
MKNPYTIGLDIGTNSVGWAVLTDQYDLVKRKMKVAGNSDKKQIKKNFWGVRLFDDGQTAVDRRMNRTARRRIERRRNRISYLQEIFAVEMANIDANFFCRLNDSFYVDSEKRNSRHPFFATIEEEVAYHKNYRTIYHLREELVNSSEKADLRLVYLALAHIIKYRGNFLIEGALDTKNTSVDEVYKQFIQTYNQVFMSNIEEGALAKVEENTEVASILAGKFTRREKFERILRLYPGEKSTGMFAQFISLIVGNKGNFQKVFNLVEKTDIECAKDSYEEDLEALLAIIGDEYAELFVAAKNTYNAVVLSSIITVTATETNAKLSASMIERFDAHEKELGELKAFIKLHLPKQYQEIFNNAEIDGYAGYIDGKTKQVDFYKYLKTTLENVEGADYFITKIEEENFLRKQRTFDNGVIPHQLHLEELEAILHQQAKYYPFLREGYDKIKSLVTFRIPYFVGPLANGQSEFAWLTRKDDGEIRPWNIEEKVDFGKSAVDFIEKMTNKDTYLPKENVLPKHSLCYQKYMVYNELTKIRYIDDQGKTNYFSGREKQQIFNDLFKQKRKVKKKDLELFLRNINHIESPTIEGLEDSFNASYATYHDLLKVGLKQEILDNPLNTEILEDIVKILTVFEDKRMIKEQLEQFSDVLDGVVLKKLERRHYTGWGRLSAKLLVGIRDKQSHLTILDYLMNDDGLNRNLMQLINDSNLSFKSIIEKEQVSTTDKDLQSIVADLAGSPAIKKGILQSLKIVDELVSIMGYPPQTIVVEMARENQTTGKGKNNSKPRYKSLEKAIKDFGSQILKEHPTDNQELKNNRLYLYYLQNGKDIYTGQELDIHNLSNYDIDHIVPQSFITDNSIDNLVLTSSAGNREKGGDVPPLEIVRKRKVFWEKLYQGNLMSKRKFDYLTKAERGGLTEADKARFIHRQLVETRQITKNVANILHQRFNKETDNHGNTMEQVRIVTLKSALVSQFRKQFQLYKVREVNDYHHAHDAYLNGVVANTLLKVYPQLEPEFVYGEYHQFDWFKANKATAKKQFYTNIMLFFAQKERIIDENGEILWDKKYLETIKKVLDYRQINIVKKTEIQKGEFSKATIKPKGNSSKLIPRKENWDPMKYGGLDSPNMAYAVIIEHAKGKKKIVIEKKLIQINIMERKMFEKDEEAFLEEKGYHQPKVLTKLPKYTLYECEKGRRRMLSSANEAQKGNQLVLSNHLVSLLYHAKNCEASDGKSLKYIEAHRETFSELLAQVSEFATKYTLADANLSKINNLFEQNKEGDIKAIAQSFVDLMAFNAMGAPASFKFFEATIDRKRYTNLKELLSSTIIYQSITGLYESRKRLDD

SEQ ID NO: 310 - protein, 1334 aa, Listeria monocytogenes
  Listeria monocytogenes FSL J1-208
MKNPYTIGLDIGTNSVGWAVLTDQYDLVKRKMKVAGNSDKKQIKKNFWGVRLFDEGETAADRRMNRTARRRIERRRNRISYLQEIFALEMANIDANFFCRLNDSFYVDSEKRNSRHPFFATIEEEVAYHKNYRTIYHLREELVNSSEKADLRLVYLALAHIIKYRGNFLIEGALDTKNTSVDGVYKQFIQTYNQVFISNIEEGTLAKMEENTTVADILAGKFTRKEKLERILQLYPGEKSTGMFAQFISLIVGSKGNFQKVFDLVEKTDIECAKDSYEEDLEALLAIIGDEYAELFVAAKNTYNAVVLSSIITVTDTETNAKLSASMIERFDAHEKDLSELKAFIKLHLPKQYEEIFSNVAIDGYAGYIDGKTKQVDFYKYLKTLLENIEGADYFIAKIEEENFLRKQRTFDNGAIPHQLHLEELEAILHQQAKYYPFLKEAYDKIKSLVTFRIPYFVGPLANGQSDFAWLTRKADGEIRPWNIEEKVDFGKSAVDFIEKMTNKDTYLPKENVLPKHSLYYQKYMVYNELTKVRYIDDQGKTNYFSGQEKQQIFNDYFKQKRKVSKKDLEQFLRNMSHIESPTIEGLEDSFNSSYATYHDLLKVGIKQEVLENPLNTEMLEDIVKILTVFEDKRMIKEQLQQFSDVLDGAVLKKLERRHYTGWGRLSAKLLVGIRDKQSHLTILDYLMNDDGLNRNLMQLINDSNLSFKSIIEKEQVSTTDKDLQSIVADLAGSPAIKKGILQSLKIVDELVSIMGYPPQTIVVEMARENQTTVKGKNNSRPRYKSLEKAIKEFGSQILKEHPTDNQELRNNRLYLYYLQNGKDMYTGQELDIHNLSNYDIDHIVPQSFITDNSIDNLVLTSSAGNREKGDDVPPLEIVRKRKVFWEKLFQGNLMSKRKFDYLTKAERGGLTEADKATFIHRQLVETRQITKNVANILHQRFNNETDNHGNNMEQVRIVMLKSALVSQFRKQFQLYKVREVNDYHHAHDAYLNGVVANTLLKVYPQLEPEFVYGEYHQFDWFKANKATAKKQFYTNIMLFFAQKERIIDENGEILWDKKYLETIKKVLDYRQMNIVKKTEIQKGEFSKATIKPKGNSSKLIPRKENWDPMKYGGLDSPNMAYAVIIEHAKGKKKVVFEKKIIRITIMERKAFEKDEKSFLEKQGYRQPKVLTKLPKYTLYECENGRRRMLASANEAQKGNQQVLKGQLITLLHHAKNCEASDGKSLDYIESNREMFGELLAHVSEFAKRYTLADANLSKINQLFEQNKDNDIKVIAQSFVNLMAFNAMGAPASFKFFEATIERKRYTNLKELLSATIIYQSITGLYEARKRLDG

SEQ ID NO: 311 - protein, 1334 aa, Listeria monocytogenes
  Listeria monocytogenes FSL N3-165
MKKPYTIGLDIGTNSVGWAVLTDQYDLVKRKMKISGDSEKKQIKKNFWGVRLFEKGETAAKRRMSRTARRRIERRRNRISYLQEIFAIQMNEVDDNFFNRLKESFYAESDKKYNRHPFFGTVEEEVAYYKDFPTIYHLRKELIDSQKKADLRLVYLALAHIIKYRGHFLIEGALDTKNTSIDEMFKQFLQIYNQVFANDIEEASLKKTEKNQEVAQILAEKFTRKDKLDKILSLYPGEKTTGVFAQFVNIIVGSTGKFKKHFNLHEKKDINCAEDTYDTDLESLLAIIGDEFAEVFVAAKNAYNAVVLSNIITVTDSTTRAKLSASLIERFENHKEDLKKMKRFVRTYLPEKYDEIFDDTEKHGYAGYISGKTKQADFYKYMKATLEKIEGADYFIAKIEEENFLRKQRTFDNGVIPHQLHLEELEAILHQQAKYYPFLREDYEKIKSLVTFRIPYFVGPLAKGQSEFAWLTRKADGEIRPWNIEEKVDFGKSAVDFIEKMTNKDTYLPKENVLPKHSLCYQKYMVYNELTKVRYIDDQGKTNYFSGQEKQQIFNDLFKQKRKVKKKDLELFLRNINQIESPTIEGLEDSFNASYATYHDLLKVGMKQEILDNPLNTEMLEDIVKILTVFEDKRMIKEQLQQFSDVLDGTVLKKLERRHYTGWGRLSAKLLVGIRDKQSHLTILDYLMNDDGLNRNLMQLINDSNLSFKSIIEKEQVSTTDKDLQSIVAELAGSPAIKKGILQSLKIVDELVSVMGYPPQTIVVEMARENQTTNKGKNNSKPRYKSLEKAIKEFGSQILKEHPTDNQELKNNRLYLYYLQNGKDMYTGQELDIHNLSNYDIDHIVPQSFITDNSVDNLVLTSSAGNREKGDNVPPLEIVQKRKIFWEKLYQGNLMSKRKFDYLTKAERGGLTEADKARFIHRQLVETRQITKNVANILHQRFNYKTDGNKDTMETVRIVTLKSALVSQFRKQFQFYKVREVNDYHHAHDAYLNGVVANTLLKVYPQLEPEFVYGEYHQFGWFKANKATAKKQFYTNIMLFFAQKDRIIDENGEILWDKRYLETVKKVLGYRQMNIVKKTEIQKGEFSNVTPNPKGKSNKLIPRKKDWDPIKYGGFDGSKMAYAIIIEYEKQKRKVRIEKKLIQINIMEREAFEKDEKTFLEEKGYHQPKVLIKVPKYTLYECKNGRRRMLGSANEAHKGNQMLLPNHLMALLYHAEKYEAIDGESLAYIEVHRALFDELLAYISEFARKYTLSNDRLDEINMLYERNKDGDVKSIAESFVSLKKFNAFGVHQDFSFFGTKIERKRDRKLNELLNSTIIYQSITGLYESRKRLDN

SEQ ID NO: 312 - protein, 1334 aa, Listeria monocytogenes
  Listeria monocytogenes FSL R2-503
MKNPYTIGLDIGTNSVGWAVLTDQYDLVKRKMKVAGNSDKKQIKKNFWGVRLFDDGQTAVDRRMNRTARRRIERRRNRISYLQEIFAVEMANIDANFFCRLNDSFYVDSEKRNSRHPFFATIEEEVAYHKNYRTIYHLREELVNSSEKADLRLVYLALAHIIKYRGNFLIEGALDTKNTSVDEVYKQFIQTYNQVFMSNIEEGALAKVEENTEVASILAGKFTRREKFERILRLYPGEKSTGMFAQFISLIVGNKGNFQKVFNLVEKTDIECAKDSYEEDLEALLAIIGDEYAELFVAAKNTYNAVVLSSIITVTATETNAKLSASMIERFDAHEKELGELKAFIKLHLPKQYQEIFNNAEIDGYAGYIDGKTKQVDFYKYLKTTLENVEGADYFITKIEEENFLRKQRTFDNGVIPHQLHLEELEAILHQQAKYYPFLREGYDKIKSLVTFRIPYFVGPLANGQSEFAWLTRKDDGEIRPWNIEEKVDFGKSAVDFIEKMTNKDTYLPKENVLPKHSLCYQKYMVYNELTKIRYIDDQGKTNYFSGREKQQIFNDLFKQKRKVKKKDLELFLRNINHIESPTIEGLEDSFNASYATYHDLLKVGLKQEILDNPLNTEILEDIVKILTVFEDKRMIKEQLEQFSDVLDGVVLKKLERRHYTGWGRLSAKLLVGIRDKQSHLTILDYLMNDDGLNRNLMQLINDSNLSFKSIIEKEQVSTTDKDLQSIVADLAGSPAIKKGILQSLKIVDELVSIMGYPPQTIVVEMARENQTTGKGKNNSKPRYKSLEKAIKDFGSQILKEHPTDNQELKNNRLYLYYLQNGKDIYTGQELDIHNLSNYDIDHIVPQSFITDNSIDNLVLTSSAGNREKGGDVPPLEIVRKRKVFWEKLYQGNLMSKRKFDYLTKAERGGLTEADKARFIHRQLVETRQITKNVANILHQRFNKETDNHGNTMEQVRIVTLKSALVSQFRKQFQLYKVREVNDYHHAHDAYLNGVVANTLLKVYPQLEPEFVYGEYHQFDWFKANKATAKKQFYTNIMLFFAQKERIIDENGEILWDKKYLETIKKVLDYRQINIVKKTEIQKGEFSKATIKPKGNSSKLIPRKENWDPVKYGGLDSPNMAYAVIIEHAKGKKKIVIEKKLIQINIMERKMFEKDEEAFLEEKGYHQPKVLTKLPKYTLYECEKGRRRMLSSANEAQKGNQLVLSNHLVSLLYHAKNCEASDGKSLKYIEAHRETFSELLAQVSEFATKYTLADANLSKINNLFEQNKEGDIKAIAQSFVDLMAFNAMGAPASFKFFEATIDRKRYTNLKELLSSTIIYQSITGLYESRKRLDD

SEQ ID NO: 313 - protein, 1334 aa, Listeria monocytogenes
  Listeria monocytogenes serotype 1/2a str. F6854
MKNPYTIGLDIGTNSVGWAVLTNQYDLVKRKMKVAGNSDKKQIKKNFWGVRLFDDGQTAVDRRMNRTARRRIERRRNRISYLQEIFAVEMANIDANFFCRLNDSFYVDSEKRNSRHPFFATIEEEVAYHDNYRTIYHLREKLVNSSEKADLRLVYLALAHIIKYRGNFLIEGALDTKNTSVDEVYKQFIETYNQVFMSNIEEGALAKVEENIEVANILAGKFTRREKFERILQLYPGEKSTGMFAQFISLIVGSKGNFQKVFDLIEKTDIECAKDSYEEDLETLLAIIGDEYAELFVAAKNTYNAVVLSSIITVTDTETNAKLSASMIERFDAHEKDLVELKAFIKLNLPKQYEEIFSNAAIDGYAGYIDGKTKQVDFYKYLKTILENIEGSDYFIAKIEEENFLRKQRTFDNGAIPHQLHLEELEAIIHQQAKYYPFLKEDYDKIKSLVTFRIPYFVGPLANGQSEFAWLTRKADGEIRPWNIEEKVDFGKSAVDFIEKMTNKDTYLPKENVLPKHSLCYQKYMVYNELTKIRYIDDQGKTNYFSGREKQQVFNDLFKQKRKVKKKDLELFLRNINHIESPTIEGLEDSFNASYATYHDLLKVGMKQEILDNPLNTEMLEDIVKILTVFEDKPMIKEQLQQFSDVLDGGVLKKLERRHYTGWGRLSAKLLVGIREKQSHLTILDYLMNDDGLNRNLMQLINDSNLSFKSIIEKEQVSTTDKDLQSIVAELAGSPAIKKGILQSLKIVDELVSIMGYPPQTIVVEMARENQTTGKGKNNSKPRYKSLEKAIKEFGSQILKEHPTDNQELKNNRLYLYYLQNGKDMYTGQELDIHNLSNYDIDHIVPQSFITDNSIDNLVLTSSAGNREKGGDVPPLEIVRKRKVFWEKLYQGNLMSKRKFDYLTKAERGGLTEADKARFIHRQLVETRQITKNVANILYQRFNKETDNHGNTMEQVRIVTLKSALVSQFRKQFQLYKVREVNGYHHAHDAYLNGVVANTLLKVYPQLEPEFVYGEYHQFDWFKANKATAKKQFYTNIMLFFAQKERIIDENGEILWDKKYLETIKKVLDYRQMNIVKKTEIQKGEFSKATIKPKGNSSKLIPRKENWDPMKYGGLDSPNMAYAVIIEHAKGKKKIVIEKKLIQINIMERKMFEKDEEAFLEEKGYRHPKVLTKLPKYTLYECEKGRRRMLASANEAQKGNQLVLSNHLVSLLYHAKNCEASDGKSLKYIEAHRETFSELLAQVSEFATRYTLADANLSKINNLFEQNKEGDIKAIAQSFVDLMAFNAMGAPASFKFFEATIDRKRYTNLKELLSSTIIYQSITGLYESRKRLDD

SEQ ID NO: 314 - protein, 1087 aa, Listeriaceae bacterium
  Listeriaceae bacterium TTU M1-001
MKKLVLGLDIGVASVGWGIIDAENGDVVDTGVRLFSSRDASENESRRTSRQSRRLSRRKKHRRERIKQLLLAHDMDICDIVNENPYELRVKGLNEKLEVSEIYVALTHLAKRRGVSYLDDVVEEGGTIKSEHLNKNMEEIKSGKMPCEIQLERFEKYGQVRGMIEINQDTEESSFLVNIFRTSDYIKEAKTILATQQKFHKQITNEFIDEYIHIMASKRDYFIGPGNEKSRTDYGVYRTNGDTWDNLFEILIGKCSVFPEETRAARSSYVAQEFNLLNDLNNLKISNLESGKLSASQKHDIVEKVKNSKKFGTKDLLKYIASVCECKIEDIGGCRVDKNRKPIMHTFENYRKVHNALNEAGVDLRLSETDYDELMKIMTLNSETLEIKKQCKEKLPQLTEDYLNVCLVLNKKGAFSGWHALSLKAMKLMMPELYGTSKNQMQIIHTMQLGKAYLKPLNQQKYLNSEAILEEIYNPIAARSIRQTIKVTNAILKKYGHLDSVIIEMPRDYQTSEDERKMIEKMQKENEKEKKAALKRAREEYPFPDEAFRNHKELATKLRLWYQQDQFCVYSGRKISVVDLVRNPNQFEIDHIIPQSVSLDDSLNNKVLCFSEENQKKGQQTPFYYHKGKSGNWTYEQYKLFVEKLFDKKKISNKKRELLLFEEDINKWDVRRGFIARNLVDTRYASRVILNSYQQYFGNHEMGTKVKVVRGKFTSQLRKKWRIFKDRNESHSHHAIDALIVAATANLRLWKKNTLGVSDEGKVYDKETGEILPFEKLTESEYNEMMNKEPYLNFKTKLQNIETKVKYSYRVSKKVNRKISDATIYSTRERDGIDYIVGKIKNIYDVKTYKDQFLKRYKKNKEQFLMYQHDPQTFAILENIMATYQDAENPFLAYKKEYGVIRKYSKKGGGSPVTSLKFIDKVLGQKIDLTAKNQAALPKNKKVVLQSITPYRADVYYDEIDKRYHLIGVKYSLFSFSKQGYVINPIAYQKLLEKEQIHSEMKFCFSLYREDIIEFGEDPDSLTRYRFWSKNESGKNKIEVKPIEKPNFEKQTVLTITKKIKILNKYQTDVLGNSFKAQEEKDPRNIE

SEQ ID NO: 315 - protein, 1345 aa, Marinilabilia sp.
  Marinilabilia sp. AK2
MKKILGLDLGTTSIGWAFIKEPEKDVVGSEIVDMGVRIVALSSDEENDFAKGNTISINADRTLKRGARRNLQRFKLRRDALLEIFKEMKLIPSNFKYAEDGPSSTFSTLKLRDKAAKEKIELDDLVKVLLQINKKRGYRSSRKAKSEEDDGSAIDSMGIAKELYENDLTPGQWVFEALQKGRKNVPDFYRSDLQEEFKKIVNYQSEFYPDVLNSSFVEDWMGKASTPTKQYFNKKGVHLAENKGKREERRLQEYNWRAVAVNSKIDLSEIALILSQINSQISNSSGYLGAISDRSKELYFKNQTVGQYLYQQIKINPHTRLKGQVFYRQDYLDEFEKIWSVQSGFHPQLNDALKKEIRDITIFFQRRLKSQKHLISNCEFEDYHKVVPKSHPIFQEFRIWQNLNNLTLIKKDNLNEKSELALEDKIALANELAFKREQSVKDALNILGLKSSEWEFNFTKIEGNRTNHAFFEAFAKIIEIEDGEPLDLGNLKADDILDQFSEAFLRIGIDPGLLQVNNDIEGPNYEKQPYIQFWHLLYSSEDDQKLKQNLIKKFGFKPDHAKILASISLQDDHASLSSRAIKKILPHLQSGLIYDKACTYAGYNHSSSFTKEENEKRELSSELDLLKKNSLRNPVVEKILNQMINVVNAILKDPNLGKPDEIRVEMARELKANAEQRKNMTSNIASATRDHEKYREILKKEFGLKRVTKNDLLRYKLWLETDGISLYTGKPIEASKLFSKEYDIEHIIPKTRLFDDSFSNKTICERQLNIDKANVTAFSFLQNKLSGDEFEQYQSRVKSLFGKLSKAKIQKLLMANDKIPEDFIARQLQETRYISKKAKEILFEITRRVSVTTGTITDKLREDWGLVEIMKELNWEKYDKLGLTYTIEGKHGERLNKIKDWSKRNDHRHHAMDALTVALTKPAYIQYLNNLNAKELNGKKSTEIFAIEQKYLKRENGKLCFIPPVENIRTEAKKHLSKVLISYKAKNKVVTINKNRTNKKAGFNEQIALTPRGQLHKETVYGKAFHYSTKFEKIGASFDVQKINAVAKKEEREALLKRLAENGDDPKKAFTGKNSLSKMPIYLDLKRNIKLPEKVKTVVLEQNYTIRKNIDPDLKLDKVIDVGVKRILENRLKEFGGNAKLALSNLDENPIWLNKEKGITIKRVKISGVSNVESLHVKKDHFGEPILDQVGNEIPVDFVSTGNNHHVAIYEDEKGNLQEEVVSFFEAVVRQNQGLPIINKNHSLGWKFLFTLKQNEYFVFPSDDFDPTDVDLMDEENYHLISPNLFRVQKFTTKDYFFRHHLETTVEDKSELKGVSFKRLGLPGLNCIKKIRINHLGKIIQVGEY

SEQ ID NO: 316 - protein, 1352 aa, Megasphaera sp.
  Megasphaera sp. UPII 135-E
MKKRNREEYYVGLDIGTSSVGWAVATPDYRIPKFRGHKMWGSRLFAEGKRAAERRQFRTNRRRLARRRDRLQILEELFAEEMAKVDNTFFMRLKESKFFLEDKTVKEKHILFSTDKFDADRFYKDNPTIYHVRKRLMEEEPQDIRELFLAVHHILKYRGHFLFAGSLEQNGASIEELVRTLLGKQGLAILDDTIDSNEMVNILKNTGETKSDRKKDVQELWNPLKDKVKKAQAAEMAGLVLGLKSDISKLFANSDYKDLDSSIKNINFSSGDYEEKRDDYANSIGDDIVLLDTMKALYDTLILSQILQGKRSISAAKVEDYNTHKEQLRALKAILKPHKRLYNEMFRENNKKDLSNYVAYISSYSEGKRVNREGFYKYVQAVLKQVDDSDSKQAILEAIRLETFLPLLRVKDNAVIPHQIHQAELEAILETARKKYNFLNDVSDGVSVKDKIIQLFTFRIPYYVGPLNPHSGETVADRKQGTGWVVRKQRGKVYPWNFADMVDVKASAEAFITNLTNKCTYLIGEDVLPKRSLLYSEFMLLNELNMIKYDGHELPVAIKQLYIEQVFKQEHKKQTKGRVLDFLKRNGLITGSATAVITGMDDAIKGDLQSYRDMVRIFGAGFDHSMAERIIRWVTLFGEAKDILENKIREVYGNSISDSQMRAIKKLKYADWGRLSQAFLIAVKGCDKSGVERNIITCLRASSQNLMEILSDQGTYIKQIKAWNHQHTTNMMDTLDYQLVDDLYVAPSVKRSIWQSLCIVEELVKIMGQAPKKIFVEVTRTKQAEKTKKDSRKKRLVELYTAIGKEGAAWKKEIEAHQAGDFRRKKLYLYYTQMGRCMYSNEPIAMDALFTSAYDIDHIYPQSLTKDGSWDNLVLVKSQLNKEKSDQYPLRPAIREKNKAHWQYLCRAGFISEKKYERLMRTTELTAEELSGFIARQLVETSQATKAVTGLLERIYTNTEICFVKAETVSQFRHQHNFIKIRELNNYHHAKDAYLNIVVGNVYHEKFTKNPWEFIARSTERRPYNLNRMYDFDLLKQGRVIWQVPKSLETVQAMMKSNDVRITKKLLVQKGELYDATITKAHKAKEGTYFPLKGADARLRDVHRYGGYEKIKIAYYSVFSCREKASNTIHTLIIPIPVYKAGLLQTEADLTAYAWQTKQKTKPIKDIYSAITPIYKKLCINTVVKIDGFKYFLGGKTGDYMWLDPAIPVVLDEQAAAYLKAISKVGRADDVENTAQAIDLITAEANEAFYDVLLKKMEAKIFAKAYQTIVEKLASETARERFRELSIGAQCSCLLEILNLLANNKTTFTFFKDKMGVTMSRRKQPMDLTKLEECIVYETSITGLYEKAVSLL

SEQ ID NO: 317 - protein, 1080 aa, Methylocystis sp.
  Methylocystis sp. ATCC 49242
MRVLGLDGGIASIGWALIEIFEDHEPSDGRIIDTGAWMFDAPEEKSQTGTKLKSELRRIFRGQRRVIRRRRQRMNEVRRILHRHGLLSSDNRDALKQPGLDPWKIRAEGIDRLLSPIEFAVALGHIARHRGFKSNSKGAKTSDLDAESSRMKKAVGETREKLARFGSPAKLLVEDEGFVLRQTKLKSGALETVRRFRNRDGDYSRSLLRDDLAAEVRALFRAQARLQSTFAKVELEAEFTQAAFFQRPLQDSERLVGPCPFEPAEKRSPKRGYSFELFRFLSRLNHLTLREGSEERTLTVEELRTAAADFGGVAKFTFSTLRKRLALPDIAIFVGIKADDEKKLDVVARSGEAATGTARLRRVVIDALGELAWGALISAPERLDKITEIITFRSDLDRIRAGLIEAGFDTPLIEAIVRAAADGKLDAFTGVGHISAKAARNIIPGLMRGMTYDKACAAAGYDHTASRERDAFDVGMHGKEALKKILQEERISRELVGSPSARKALIEAVKQVKAIIEKYGVPDRIHVELARDVGKSIEERRDIHFGIEKRSRQKDKLRELFGKEVGHLPQDGERGKEELLRFELWNEQMGRCLYTDEYINPKQLVASDNSVQVDHILPWSRFGDDSYLNKTLCTAKANQDKKGRTPYEWFRADKPEAEWDAFVARVESIQFMKGLKKRNYKLKNAEEAAEKFRSRNLNDTRWTCRLLAEALKQLYPKGEKDKDGKERRRVFTRPGALTNRLRRAWSLQRRKKSEKGERIADDRHHALDAIIVAATTESLLIRATREVQDIERKGLHYDLTKNITQPWPGFADEALDAVEKVFVARAERRRARGKAHDATIRHIAVRDDEAKVYERKKVGDIKLGDLIRVKDAERNAPLIENLRKWIEAGSPRDNPPLSPKGDPVSKVRLVTKNKVNITLDTGNPERLATVDRGEMARVDVFRKANRKGKYEYYLVPIYPHEIATMETPPMRAVQGGGDDDKWPEIDSTFEFLWSINQLSLLELTKPDGEVIRSYFRSLDRNTGALTVSGIANSTATRKGIGTRTLIDFKKLHVDRLGQIFEVERELRTWRGETWRGKDCI

SEQ ID NO: 318 - protein, 1082 aa, Methylosinus trichosporium
  Methylosinus trichosporium OB3b
MRVLGLDAGIASLGWALIEIEESNRGELSQGTIIGAGTWMFDAPEEKTQAGAKLKSEQRRTFRGQRRVVRRRRQRMNEVRRILHSHGLLPSSDRDALKQPGLDPWRIRAEALDRLLGPVELAVALGHIARHRGFKSNSKGAKTNDPADDTSKMKRAVNETREKLARFGSAAKMLVEDESFVLRQTPTKNGASEIVRRFRNREGDYSRSLLRDDLAAEMRALFTAQARFQSAIATADLQTAFTKAAFFQRPLQDSEKLVGPCPFEVDEKRAPKRGYSFELFRFLSRLNHVTLRDGKQERTLTRDELALAAADFGAAAKVSFTALRKKLKLPETTVFVGVKADEESKLDVVARSGKAAEGTARLRSVIVDALGELAWGALLCSPEKLDKIAEVISFRSDIGRISEGLAQAGCNAPLVDALTAAASDGRFDPFTGAGHISSKAARNILSGLRQGMTYDKACCAADYDHTASRERGAFDVGGHGREALKRILQEERISRELVGSPTARKALIESIKQVKAIVERYGVPDRIHVELARDVGKSIEEREEITRGIEKRNRQKDKLRGLFEKEVGRPPQDGARGKEELLRFELWSEQMGRCLYTDDYISPSQLVATDDAVQVDHILPWSRFADDSYANKTLCMAKANQDKKGRTPYEWFKAEKTDTEWDAFIVRVEALADMKGFKKRNYKLRNAEEAAAKFRNRNLNDTRWACRLLAEALKQLYPKGEKDKDGKERRRVFSRPGALTDRLRRAWGLQWMKKSTKGDRIPDDRHHALDAIVIAATTESLLQRATREVQEIEDKGLHYDLVKNVTPPWPGFREQAVEAVEKVFVARAERRRARGKAHDATIRHIAVREGEQRVYERRKVAELKLADLDRVKDAERNARLIEKLRNWIEAGSPKDDPPLSPKGDPIFKVRLVTKSKVNIALDTGNPKRPGTVDRGEMARVDVFRKASKKGKYEYYLVPIYPHDIATMKTPPIRAVQAYKPEDEWPEMDSSYEFCWSLVPMTYLQVISSKGEIFEGYYRGMNRSVGAIQLSAHSNSSDVVQGIGARTLTEFKKFNVDRFGRKHEVERELRTWRGETWRGKAYI

SEQ ID NO: 319 - protein, 1123 aa, Mobiluncus curtisii
  Mobiluncus curtisii subsp. holmesii ATCC 35242
MFVYLNSPRGFGPATFLTDLPHFCIIFGNNDFMDNRKYHVGIDVGTNSVGFAAVEVGDSGSPIRFLNTMVVIHDSGVDPEQKKYAITRLASAGTARRTRRLYRTRRQRLRELDDFISNELGYPLVNLENFADPYEPWKVRADLATIKLPADELPEAMSIALRHMARHRGWRSPYQRVEALHLHAEISEEFSALKKRVMEKTGDVFSDDATPAEVLVDLMGRQKIRGADGMLSGKLRQSDNANELRKIASVQGIDDETLNRIIDRVFFSRSPKGKASERVGMDALPGQGSKPRALKAMPSFQKFRIVSVICNLRIKDSGDDNRPLSMEEKEQLIGYLMSSTTDDHVTWTDVAELLHVKRSNLQGTAKEGPDGERPYTRPPVNSAWSKIKDSKIKSLVALWKTGDVDVQSAIVEALSNASVLEDARPGADIVVAYLESLDDKELESLDKVGLPAGRASYSEDSLERLTERMLQDDCDLFEARKREFGVSDDWKPPADPIYAPVGNPGVDRVLKIVNRLLMAAEREWGAPTQINIEHVRSGFSSELMQREFERENERRRAQNEEAVKAILTEKGGNSHVSKYDIIRYYAVKRQNCQCLYCGTPITFSDCELDHIVPRKGVGSTNSRVNLAAACRSCNRDKSNLPFAVWAGKTSNFDVSIDGAVSRVKQWQRSQNEGAREFRAFQNEVISRLLKTTEDPEIDSRSLESVAWMARELHHRVEYYFQSKGAQTQVSVYRGAVTAQARKSSGLEDKVKMIGGGGKTRLDRRHHAMDAATIALMTPGISTTLSEKNNLRDAQKFTGQSETWKDYCGRTETAREHFAVWKSNMERLTDLFNDKLENDAIPVVQPLRLRLSDSKAHDDGIGKLDSKKLGSVWSLADIDRAATPQIWTALTRCDDFDPTKGLPENANRVIRAQGVKYESEDNIPVFPSNVAAIAVRDGYAEIGSTIHHARIYRIDDGKKIFYSMIRVFAVDLLKHQAEDLFTVKLPPSAISIRTCEDSLRRALSNGTAEYLGWLVPGDEIIVDTSDKAFHTGQIGDLLRNFPVNSFRLTGFPSNSRLRLKPVLLAGEGLRDDAEDSIKKILSGQGWRPAINVLFSKGKPRIVRRNSLGIERPSSNNGLPFSWEA

SEQ ID NO: 320 - protein, 1091 aa, Mobiluncus mulieris
  Mobiluncus mulieris 28-1
MDSRKYRVGIDVGTNSVGFAAVEEDDSGSPTRFLNTMVVIHDSGVDPEQKKYAITRLASAGTARRTRRLYRTRRQRLRELDDFISNELGYPLVNLENFADPYEPWKVRADLATTKLPNDELPEAMSIALRHMARHRGWRSPYQRVEALHLHAEISKEFAALKERVVEKTGDVFSDDATPAEVLVDLMGRQKVRGADGVLSGKLRQSDNANELRKIASVQGIDDETLNRIIDRVFSSKSPKGKASERVGMDALPGQGSKPRALKAMPSFQKFRVVSVICNLRIKDSGGDARPLSMEEKEKLIDYLMSSTTDDHVTWTDVADLLHVKRSQLQGTAKEGFDGERPYTRPPVNSTWSKIKDSKIKSLVALWKTGDVDVQSAIVEALSNASVLEDSRPGADIVVAYLESLDDKELESLDKVGLPAGRASYSEDSLERLTERMLRDDCDLFEARKREFNVADDWKPPADPIYAPVGNPGVDRVLKIVNRLLMAAEREWGAPTQINIEHVRSGFSSELMQREFERENERRRAQNEEAVKAILTEKGGNSRVSKYDITRYYAVKRQHCQCLYCGTPITFSDCELDHIVPRKGVGSTNTRVNLAAACRSCNRDKSNLPFAVWAGKASNFDVSIDDAVSRVKQWQRSQNEGVREFRAFQNEVISRLLKTTEDPEIDSRSLESVAWMARELHHRVEYYFQSKGAQTQVSVYRGAVTAQARKSSGLEDKVKMIGGGGKTRLDRRHHAMDAATIALMTPGISTTLSEKNNLRDAQKFTGQSETWKDYCGRTETARKHFAVWKSNMERLTDLFNDKLENDAIPVVQPLRLRLSNSKAHDDGIGKLDSKKLGSVWSLADIDRAATPQIWTALTRCDDFDPTKGLPENANRVIRAQGVKYESEDNIPVFPSNVAAIAVRDGYAEIGSTIHHARIYRIDDGKKTFYSMIRVFAVDLLKHQAEDLFTVKLPPSAISIRTCEDSLRRALSNGTAEYLGWLVPGDEIIVDTSDKAFHTGQIGDLLRNFPVNSFRLTGFPSNSRLRLKPVLLAGEGLRDDAEDSIKKILLGQGWRPAINVLFSKGKPRIVRRNSLGIERPSSNNGLPFSWEA

SEQ ID NO: 321 - protein, 1091 aa, Mobiluncus mulieris
  Mobiluncus mulieris FB024-16
MDSRKYRVGIDVGTNSVGFAAVEEDDSGSPTRFLNTMVVIHDSGVDSEQKKYAITRLASAGTARRTRRLYRTRRQRLRELDDFISNELGYPLVNLENFADPYEPWKVRADLATTKLPNDELPEAMSIALRHMARHRGWRSPYQRVEALHLHAEISKEFAALKERVVEKTGDVFSDDATPAEVLVDLMGRQKVRGADGVLSGKLRQSDNANELRKIASVQGIDDETLNRIIDRVFSSKSPKGKASERVGMDALPGQGSKPRALKAMPSFQKFRVVSVICNLRIKDSGGDARPLSMEEKEKLIDYLMSSTTDDHVTWTDVADLLHVKRSQLQGTAKEGFDGERPYTRPPVNSTWSKIKDSKIKSLVALWKTGDVDVQSAIVEALSNASVLEDSRPGADIVVAYLESLDDKELESLDKVGLPAGRASYSEDSLERLTERMLRDDCDLFEARKREFNVADDWKPPADPIYAPVGNPGVDRVLKIVNRLLMAAEREWGAPTQINIEHVRSGFSSELMQREFERENERRRAQNEEAVKAILTEKGGNSRVSKYDITRYYAVKRQHCQCLYCGTPITFSDCELDHIVPRKGVGSTNTRVNLAAACRSCNRDKSNLPFAVWAGKASNFDVSIDDAVSRVKQWQRSQNEGVREFRAFQNEVISRLLKTTEDPEIDSRSLESVAWMARELHHRVEYYFQSKGAQTQVSVYRGAVTAQARKSSGLEDKVKMIGGGGKTRLDRRHHAMDAATIALMTPGISTTLSEKNNLRDAQKFTGQSETWKDYCGRTETARKHFAVWKSNMERLTDLFNDKLENDAIPVVQPLRLRLSNSKAHDDGIGKLDSKKLGSVWSLADIDRAATPQIWTALTRCDDFDPTKGLPENANRVIRAQGVKYESEDNIPVFPSNVAAIAVRDGYAEIGSTIHHARIYRIDDGKKTFYSMIRVFAVDLLKHQAEDLFTVKLPPSAISIRTCEDSLRRALSNGTAEYLGWLVPGDEIIVDTSDKAFHTGQIGDLLRNFPVNSFRLTGFPSNSRLRLKPVLLAGEGLRDDAEDSIKKILLGQGWRPAINVLFSKGKPRIVRRNSLGIERPSSNNGLPFSWEA

SEQ ID NO: 322 - protein, 1473 aa, Mucilaginibacter paludis
  Mucilaginibacter paludis DSM 18603
MKNILGLDLGTNSIGWALIEKDTDQKNGNILGTGSRIIPMSQDIKDEFGKGNSISQTADRTKFRSVRRLRERHLLRRERLHRVLNVLGFLPKHYADQIDFKKRLGKLVNETEPKLVYDNKNFIFKKSFEAMLSDFNQHQPLLLADGKKVPFDWTIYYLRKKALTEKIEKEELAWLILNFNQKRGYYQLRGEEEEENPNKMVAFHSLKIVEVIADESQKGKAETWYSLILENGWIYRRSSKTPLYDWKGKQRDFIVTTDLNDDGSIKTDKEGLEKRSFRAPVEDDWTLVKKKTEQEINRSHKTVGTYIYENLLQDPKQKIKGKLVRTIEREFYKDELKMILKNQQKFHPELNDEHLYINCVRELYRNNQAHQTILSKKDFVHLFIDDIIFYQRPLRSQKSSISNCTLEFRKYKNENGTDQTDYLKAIPKSHPLFQEFRLWQWIYNLGIYQKEDDTNVTDELIKNIDGYQDLFDFLNNKKEIRQDILIKFLVEQTGLKGKPLSSVVAKYRWNFVEDKIYPCNETGTQIRTRLAKVENTPEDFLTAETEIKLWHIIYSVNDKADYEKALKTFAEKHNLDTHSFVENFKKFPPFKSEYGSFSEKAIKKLLPLIRLGKYWSWENIDKKTQERIEKILTGEFDEAIKSRVRDKAIHLTEEDHFQGLQLWLASYVVYGRHSEADNLDKWHTVADLEDYLAEFRQHSLRNPIVEQVITETLRVVKDIWLQYGQGAKDFFSEIHIELAREMKNTGDERKRLTSLVTDNENTNLRIKVLLSELLNDGNVENVRPYSPMQQEALKIFEDGVLNSDIEIEDDILKISKMAQPTNTELKRYKLWLEQKYRSPYTGQIIPLNRLFTADYEIEHIIPQSRFFDDSFSNKIICESAVNQLKDKQLGLEFIKNHSGTIVKLGMGKTAKILDVESYNEFVKGNYTKNISKRNKLMLEEIPDKMIERQLNDTRYISKFIISALSNIVRSESNDDGFNSKNVLPGNGKITSRLKQDWGMNDIWNELILPRFERMNKITDSAVFTAWNENNQKFLPIVPLEFSKGFQKKRIDHRHHALDALVIAASTREHINLLNNEHAKSDKRFDLNRKLRKFEKVAYNDPKTGKRIEKEVPTIFLKPWETFTVDAKNSLESIIVSFKQNLRVINRATNYSESYNDENGALRLGKDGNPLKEKIKQSKGDSWAIRKPMHKDFVYGKVHLQNVKLPKDKFITAIRKSLDVTFDLKRIETITDTGIQKILKNYLHSKENKVELAFSPEGIEDMNQHIERYNDGKKHQPIHKVRVFEIGSRFSLGESGNKKTKFVEAAKGTNLFFAVYQDDNKGKRNYETIPLNIVIERQKLGLHSVPTEDAKGGKLLFHLSPNDMVYVPTSEELEDNLASVNIKRLNTAQRKRIYKVEKASGVECYFIRQDIAYLIKNYDAKTKIGELESQNKLQTTMTDDRLKITDVCVKLNIDRLGSIAETFLGNQYGASKKT

SEQ ID NO: 323 - protein, 1233 aa, Mycoplasma canis
  Mycoplasma canis PG 14
MEKKRKVTLGFDLGIASVGWAIVDSETNQVYKLGSRLFDAPDTNLERRTQRGTRRLLRRRKYRNQKFYNLVKRTEVFGLSSREAIENRFRELSIKYPNIIELKTKALSQEVCPDEIAWILHDYLKNRGYFYDEKETKEDFDQQTVESMPSYKLNEFYKKYGYFKGALSQPTESEMKDNKDLKEAFFFDFSNKEWLKEINYFFNVQKNILSETFIEEFKKIFSFTRDISKGPGSDNMPSPYGIFGEFGDNGQGGRYEHIWDKNIGKCSIFTNEQRAPKYLPSALIFNFLNELANIRLYSTDKKNIQPLWKLSSVDKLNILLNLFNLPISEKKKKLTSTNINDIVKKESIKSIMISVEDIDMIKDEWAGKEPNVYGVGLSGLNIEESAKENKFKFQDLKILNVLINLLDNVGIKFEFKDRNDIIKNLELLDNLYLFLIYQKESNNKDSSIDLFIAKNESLNIENLKLKLKEFLLGAGNEFENHNSKTHSLSKKAIDEILPKLLDNNEGWNLEAIKNYDEEIKSQIEDNSSLMAKQDKKYLNDNFLKDAILPPNVKVTFQQAILIFNKIIQKFSKDFEIDKVVIELAREMTQDQENDALKGIAKAQKSKKSLVEERLEANNIDKSVFNDKYEKLIYKIFLWISQDFKDPYTGAQISVNEIVNNKVEIDHIIPYSLCFDDSSANKVLVHKQSNQEKSNSLPYEYIKQGHSGWNWDEFTKYVKRVFVNNVDSILSKKERLKKSENLLTASYDGYDKLGFLARNLNDTRYATILFRDQLNNYAEHHLIDNKKMFKVIAMNGAVTSFIRKNMSYDNKLRLKDRSDFSHHAYDAAIIALFSNKTKTLYNLIDPSLNGIISKRSEGYWVIEDRYTGEIKELKKEDWTSIKNNVQARKIAKEIEEYLIDLDDEVFFSRKTKRKTNRQLYNETIYGIATKTDEDGITNYYKKEKFSILDDKDIYLRLLREREKFVINQSNPEVIDQIIEIIESYGKENNIPSRDEAINIKYTKNKINYNLYLKQYMRSLTKSLDQFSEEFINQMIANKTFVLYNPTKNTTRKIKFLRLVNDVKINDIRKNQVINKFNGKNNEPKAFYENINSLGAIVFKNSANNFKTLSINTQIAIFGDKNWDIEDFKTYNMEKIEKYKEIYGIDKTYNFHSFIFPGTILLDKQNKEFYYISSIQTVRDIIEIKFLNKIEFKDENKNQDTSKTPKRLMFGIKSIMNNYEQVDISPFGINKKIFE

SEQ ID NO: 324 - protein, 1233 aa, Mycoplasma canis; identical to SEQ ID NO: 323
  Mycoplasma canis PG 14

SEQ ID NO: 325 - protein, 1233 aa, Mycoplasma canis
  Mycoplasma canis UF31
MEKKRKVTLGFDLGIASIGWAIVDSETNQVYKLGSRLFDAPDTNLERRTQRGTRRLLRRRKYRNQKFYNLVKRTEVFGLSSREAIENRFRELSIKYPNIIELKTKALSQEVCPDEIAWILHDYLKNRGYFYDEKETKEDFDQQTVESMPSYKLNEFYKKYGYFKGALSQPTESEMKDNKDLKEAFFFDFSNKEWLKEINYFFNVQKNILSETFIEEFKKIFSFTRDISKGPGSDNMPSPYGIFGEFGDNGQGGRYEHIWDKNIGKCSIFTNEQRAPKYLPSALIFNFLNELANIRLYSTDKKNIQPLWKLSSIDKLNILLNLFNLPISEKKKKLTNANINDIVKKESTKSIMLSVEDIDMIKDEWAGKEPNVYGVGLSGLNIEESAKENKFKFQDLKILNVLINLLDNVGIKFEFKDRNDIIKNLELLDNLYLFLIYQKESNNKDSSIDLFIAKNELLNIENLKLKLKEFLLGAGNEFENHNSKTHSLSKKAIDAILPKLLDNNEGWNLEAIKNYDEEIKSQIEDNSSLMAKQDKKYLNDNFLKDAILPPNVKVTFQQAILIFNKIIQKFSKDFEIDKVVIELAREMTQDQENDALKGIAKAQKSKKSLVEERLEANNIDKSVFNDKYEKLIYKIFLWISQDFKDPYTGAQISTNEIVNNKVEIDHIIPYSLCFDDSSANKVLVHKQSNQEKSNSLPYEYIKQGHSGWNWDEFTKYVKRVFVNNVDSILSKKERLKKSENLLTTSYDGYDKLGFLARNLNDTRYATILFRDQLNNYAEHHLIDNKKMFKVIAMNGAVTSFIRKNMSYDNKLRLKDRSDFSHHAYDAAIIALFSNKTKTLYNLIDPSLNGIISKRSEGYWVIEDRYTGEIKELKKEDWTSIKNNVQARKIAKEIEEYLIDLDDEVFFSRKTKRKTNRQLYNETIYGIAAKTDEDGITNYYKKEKFSILDDKDIYLRLLREREKFVINQSNPEVIDQIIEIIESYGKENNIPSRDEAINIKYTKNKINYNLYLKQYMRSLTKSLDQFSEEFINQMIANKTFVLYNPTKNTTRKIKFLRLVNDVKINDIRKNQVINKFNGKNNEPKAFYENINSLGAIVFKNSANNFKTLSINTQIAIFGDKNWDIEDFKTYNMEKIEKYKEIYGIDKTYNFHSFIFPGTILLDKQNKEFYYISSIQTVRDIIEIKFLNKIEFKDENKNPDTSKTPKRLMFGIKSIMNNYEQVDISPFGINKKIFE

SEQ ID NO: 326 - protein, 1233 aa, Mycoplasma canis
  Mycoplasma canis UF33
MEKKRKVTLGFDLGIASVGWAIVDSETNQVYKLGSRLFDAPDTNLERRTQRGTRRLLRRRKYRNQKFYNLVKRTEVFGLSSREAIENRFRELSIKYPNIIELKTKALSQEVCPDEIAWILHDYLKNRGYFYDEKETKEDFDQQTVESMPSYKLNEFYKKYGYFKGALSQPTESEMKDNKDLKEAFFFDFSNKEWLKEINYFFNVQKNILSETFIEEFKKIFSFTRDISKGPGSDNMPSPYGIFGEFGDNGQGGRYEHIWDKNIGKCSIFTNEQRAPKYLPSALIFNFLNELANIRLYSTDKKNIQPLWKLSSVDKLNILLNLFNLPISEKKKKLTSTNINDIVKKESIKSIMISVEDIDMIKDEWAGKEPNVYGVGLSGLNIEENAKENKFKFQDLKILNVLINLLDNVGIKFEFKDRNDIIKNLELLDNLYLFLIYQKESNNKDSSIDLFIAKNKSLNIENLKLKLKEFLLGAGNEFENHNSKSHSLSKKAIDAILPKLLDNNEGWNLEAIKNYDEEIKSQIEDNSSLMAKQDKKYLNDNFLKDAILPPNVKVTFQQAILIFNKIIQKFSKDFEIDKVVIELAREMTQDQENDALKGMAKAQKSKKSLVEERLEANNIDKSVFNDKYEKLIYKIFLWISQDFKDPYTGAQISVNEIVNNKVEIDHIIPYSLCFDDSSANKVLVHKQSNQEKSNSLPYEYIKQGHSGWNWDEFTKYVKRVFVNNVDSILSKKERLKKSENLLTTSYDGYDKLGFLARNLNDTRYATILFRDQLNNYAEHHLIDNKKMFKVIAMNGAVTSFIRKNMSYDNKLRLKDRSDFSHHAYDAAIIALFSNKTKTLYNLIDPSLNGIISKRSEGYWVIEDRYTGEIKELKKEDWTSIKNNVQARKIAKEIEEYLIDLDDEVFFSRKTKRKTNRQLYNETIYGIAAKTDEDGITNYYKKEKFSILDDKDIYLRLLREREKFVINQSNPEVIDQIIEIIESYGKENNIPSRDEAINIKYTKNKINYNLYLKQYMRSLTKSLDKFSEEFINQMIANKTFVLYNPTKNTTRKIKFLRLVNDVKINDIRKNQVINKFNGKNNEPKAFYENINSLGAIVFKNSANNFKTLSINTQIAIFGDKNWDIEDFKTYNMEKIEKYKEIYGIDKTYNFHSFIFPGTILLDKQNKEFYYISSIQTVRDIIEIKFLNKIEFKDENKNQDTSKTPKRLMFGIKSIMNNYEQVDISPFGINKKIFE

SEQ ID NO: 327 - protein, 1233 aa, Mycoplasma canis
  Mycoplasma canis UFG1
MEKKRKVTLGFDLGIASVGWAIVDSETNQVYKLGSRLFDAPDTNLERRTQRGTRRLLRRRKYRNQKFYNLVKRTEVFGLSSREAIENRFRELSIKYPNIIELKTKALSQEVCPDEIAWILHDYLKNRGYFYDEKETKEDFDQQTVESMPSYKLNEFYKKYGYFKGALSQPTESEMKDNKDLKEAFFFDFSNKEWLKEINYFFNVQKNILSETFIEEFKKIFSFTRDISKGPGSDNMPSPYGIFGEFGDNGQGGRYEHIWDKNIGKCSIFTNEQRAPKYLPSALIFNFLNELANIRLYSTDKKNIQPLWKLSSVDKLNILLNLFNLPISEKKKKLTSTNINDIVKKESIKSIMLSVEDIDMIKYEWAGKEPNVYGVGLSGLNIEESAKENKFKFQDLKILNVLINLLDNVGIKFEFKDRNDIIKNLELLDNLYLFLIYQKESNNKDSSIDLFIAKNKSLNIENLKLKLKEFLLGAGNEFENHNSKTHSLSKKAIDAILPKLLDNNEGWNLEAIKNYDEEIKSQIEDNSSLMAKQDKKYLNDNFLKDAILPPNVKVTFQQAILIFNKIIQKFSKDFEIDKVVIELAREMTQDQENDALKGIAKAQKSKKSLVEERLEANNIDKSVFDDKYEKLIYKIFLWISQDFKDPYTGAKISANEIVNNKVEIDHIIPYSLCFDDSSANKVLVHKQSNQEKSNSLPYEYIKQGHSGWNWDEFTKYVKRVFVNNVDSILSKKERLKKSENLLTTSYDGYDKLGFLARNLNDTRYATILFRDQLNNYAEHHLIDNKKMFKVIAMNGAVTSFIRKNMSYDNKLRLKDRSDFSHHAYDAAIIALFSNKTKTLYNLIDPSLNGIISKRSEGYWVIEDRYTGEIKELKKEDWTSIKNNVQARKIAKEIEEYLIDLDDEVFFSRKTKRKTNRQLYNETIYGIAAKTDEDGITNYYKKEKFSILDDKDIYLRLLREREKFVINQSNPEVIDQIIEIIESYGKENNIPSRDEAINIKYTKNKINYNLYLKQYMRSLTKSLDQFSEEFINQMIANKTFVLYNPTKNTTRKIKFLRLVNDVKINDIRKNQVINKFNGKNNEPKAFYENINSLGAIVFKNSANNFKTLSINTQIAIFGDKNWDIEDFKTYNMEKIEKYKEIYGIDKTYNFHSFIFPGTILLDKQNKEFYYISSIQTVRDIIEIKFLNKIEFKDENKNQDTSKTPKRLMFGIKSIMNNYEQVDISPFGINKKIFE

SEQ ID NO: 328 - protein, 1233 aa, Mycoplasma canis
  Mycoplasma canis UFG4
MEKKRKVTLGFDLGIASVGWAIVDSETNQVYKLGSRLFDAPDTNLERRTQRGTRRLLRRRKYRNQKFYNLVKRTEVFGLSSREAIENRFRELSIKYPNIIELKTKALSQEVCPDEIAWILHDYLKNRGYFYDEKETKEDFDQQTIESMPSYKLNEFYKKYGYFKGALSQPTESEMKDNKDLKEAFFFDFSNKEWLKEINYFFNVQKNILSETFIEEFKKIFSFTRDISKGPGSDNMPSPYGIFGEFGDNGQGGRYEHIWDKNIGKCSIFTNEQRAPKYLPSALIFNFLNELANIRLYSTDKKNIQPLWKLSSIDKLNILLNLFNLPISEKKKKLTSANINDIVKKESTKSIMLSVEDIDMIKDEWAGKEPNVYGVGLSGLNIEESAKENKFKFQDLKILNVLINLLDNVGIKFEFKDRNDIIKNLELLDNLYLFLIYQKESNNKDSSIDLFIAKNESLNIENLKLKLKEFLLGAGNEFENHNSKTHSLSKKAIDAILPKLLDNNEGWNLEAIKNYDEEIKSQIEDNSFLMAKQDKKYLNDNFLKDAILPPNVKVTFQQAILIFNKIIQKFSKDFEIDKVVIELAREMTQDQENDALKGIAKAQKSKKSLVEERLEANNIDKSVFNEKYEKLIYKIFLWISQDFKDPYTGAKISANEIVDNKVEIDHIIPYSLCFDDSSANKVLVHKQSNQEKSNSLPYEYIKQGHSGWNWDEFTKYVKRVFVNNVDSILSKKERLKKSENLLTTSYDGYDKLGFLARNLNDTRYATILFRDQLNNYAEHHLIDDKKMFKVIAMNGAVTSFIRKNMSYDNKLRLKNRNDFSHHAYDAAIIALFSNKTKTLYNLIDPSLNGIISKRSEGYWVIEDRYTGEIKELKKEDWTSIKNNVQARKIAKEIEEYLIDLDDEVFFSRKTKRKTNRQLYNETIYGIAAKTDEDGITNYYKKEKLSILDDKDIYLRLLREREKFVINQSNPEVIDQIIEIIESYGKENNIPSRDEAINIKYTKNKINYNLYLKQYMRSLTKSLDQFSEEFINQMIANKTFVLYNPTKNTTRKIKFLRLVNDVKINDIRKNQVINKFNGKNNEPKAFYENINSLGAIVFKNSANNFKTLSINTQIAIFGDKNWDIEDFKTYNMEKIEKYKEIYGIDKTYNFHSFIFPGTILLDKQNKEFYYISSIQTVRDIIEIKFLNKIEFKDENKNQDTSKTPKRLMFGIKSIMNNYEQVDISPFGINKKIFE

SEQ ID NO: 329 - protein, 1239 aa, Mycoplasma cynos
MEEKRKVTLGFDLGVASVGWAIVDSETNEVYKLGSRLFDIPDTNIDRRAKRGSRRLVRRRSYRNQKFYNLIKRTKTFGFLDKEAIEKEFVLLSIKYPNIIELKVKGLQEEVSKSEAVWILHDYLKNRGYFYDDKEEKDDLENPSIESMPSYKLYEFYKEYGYFKGALSSPTESEKNKDSDLEKAIFFNFSNKEWTKEINHFFKIQKNIFSEDFKAKFMEFFSFIRDISKGPGSENMPSQYSIFGKYGDDGMGGKYQHIWDKNIGKCSIFKDKVRAPKYLPSALFFNLLNELSNIRLYSVDKREKSVLWRLSSKDKINIILNILQIILFKNDGKISNLDINKIVKNESIKSIILNEIDLDLIKDMWFEKEPNVYGIGLSGLNIEENKKENRFKFQDLKIFSVFIDLLKKSNINIEFNNEKDIIHNLKLLDELYFFLITQKYSRDKYGSIKKFILNNKSFNIDNLDEKLNIFLSISDDEFDNHNSKTHSLSKEAIYFIFPKLLHNNEGWNLEAIKNYDIDVREEISKHSFGIKKQDKKYLDDAFLDDAILPPSVKVTIKQSILIFNKIIKKFSNKFQIDNVVIELAREMTQEKEMDAQKSLNRLKKSRKKIIEERLNANNIDSKMFRDKTGEISPNYIYKIYLWISQNFKDPYTGENISANDILKNNVEIDHIIPYSLCFDDSSSNKVLVFKHSNQSKGNFLPFDMISTFSENSVWNWKEYTQYVEKTFKTNLESILDKKERVKKADNLLTSSYDGYDKLGFLARNLNDTRYATILFRDQLINYSENHLIDSKKMFKVIAMNGGVTSFIRKNMSFDSGLKVKDRSIFSHHAYDAAIIALFSNKTKILYNLINPSLDGIISKRSEGYWVLEDRLTGEIRKLNYNDWQSIKNNVEVKKIAREIESHLSNLDNVVMFSRKSKRKTNKELYNETLYGIATRIDENGIKNYYKKEKFNILEDENIYLRLLNERENFIINRSNPEVIDAIIEIFETIDKNKIPARDVAKNIKYTDNKIKYNLYLKDYMRKLVDEFPDKFRKDFIEQMIAKKIFILFNPIKNTTRKIKSLRSINNNKIEDIRKKQVLEKFNTAKNEPRSFYESLNSLGAIIFKNNLNIYKKMSISSQIATFGDKNWKIDDINTYNKEKLNKYKEIYGIDETYDFYSFIFPGTILLDEKNKEFLYISSIQTLKDKIELKFLDRIEFEKKNVNSNLKPKIKREIISTKKLMSDYKIIKISPLGINKKIFE

SEQ ID NO: 330 - protein, 1269 aa, Mycoplasma gallisepticum
MNNSIKSKPEVTIGLDLGVGSVGWAIVDNETNIIHHLGSRLFSQAKTAEDRRSFRGARRLIRRRKYKLKRFINLIWKYNSYFGFKNKEDILNNYQEQQKLHNTVLNLKLEALNAKIDPKALSWILHDYLKNRGHFYEDNRDFNVYPTEELANYFGEYGYYKGIIDSKEDNDDKLEEGLTKYKFSNQHWLEEIKKVLSNQTGLPEKFKEEYESLFSYVRNYSEGPGSINSVSPYGIYHLDEKEGKVVQKYNNIWDKTIGKCSIFPDEYRAPKNSPIAMIFNEINELSTIRSYSIYLTGWFINQEFKKAYLNKLLDLLIKTNSEKPIDARQFKKLREETIAESIGKETLKDVEREEKLEKEDHKWKLKGLKLNTNGKIQYNDLSSLAKFVHKLKQHLKLDFLLEDQYTTLDKINFLQSLFVYLGKHLRYSNRVDSANLKEFSDSNKLFERVLQEQKDDLFKLFEQTDKDDEKILAQTHSLSTKAMLLAITRMTNLDNDEDNQKNNDKGWNFEAIKNFDQKFIDITKKNNNLSLKQDKRYLDDRFINDAILSPGVKRILREATKVFNAILKQFSEEYDVTKVVIELARELSEEKELENTKNYEKLIKKNSDKISERLEALDIAEDKIEDILKSPTKSYKVLLWLQQDHIDPYSQKEIAFEDILTKTEKTEIDHIIPYSISFDDSSSNKLLVLAESNQAKSNQTPYEFITSGNAGIKWEDYEAYCRKFKDGDTSLLDSTQRSKKFAKMMKTDTSSKYDIGFLARNLNDTRYATIVFRDALKDYANNHLVEDKPMFKVVCINGGVTSFLRKNFDKSWYAKKDRDKNIHHAVDASIISIFSNETKTLFNQLTQFADYKLFKNTDGSWKKIDPKTGVVTEVTDENWKQIRVRNQVSEIAKVINKCIQDSNIERKARYSRKIENKTNISLFNDTVYSAKKVGYEDQIKRKNLKTLDIHESAEENKNSKVKKQFVYRKLVNVSLLNNDKLADLFAEKEDILMYRANPWVINLAEQIFNEYTENKKIKSQNVFEKYMLDLTKEFPEKFSEAFVKSMLRNKTAIIYNVEKKVVHRIKRLKILSSELKENKLSNVIIRSKNESGTKLSYQDTINSIALMIMRSIDPTAKKQYIRVPLNTLNLHLGDQDFDLHNIDAYLKKPKFVKYLKANEIGDEYKPWRVLTSGTLLIHKKDKKLMYISSFQNLKDVIEIKNLIETEYKENDDSDPKKKKKANRFLMTLSTILNDYILLDAKDNFDILGLSKNRIDEILNSKLGLDKITK

SEQ ID NO: 331 - protein, 1224 aa, Mycoplasma gallisepticum
MNNSIKSKPEVTIGLDLGVGSVGWAIVDNETNIIHHLGSRLFSQAKTAEDRRSFRGARRLIRRRKYKLKRFINLIWKYNSYFGFKNKEDILNNYQEQQKLHNTVLNLKLEALNAKIDPKALSWILHDYLKNRGHFYEDNRDFNVYPTEELANYFGEYGYYKGIIDSKEDNDDKLEEGLTKYKFSNQHWLEEIKKVLSNQTGLPEKFKEEYESLFSYVRNYSEGPGSINSVSPYGIYHLDEKEGKVVQKYNNIWDKTIGKCSIFPDEYRAPKNSPIAMIFNEINELSTIRSYSIYLTGWFINQEFKKAYLNKLLDLLIKTNSEKPIDARQFKKLREETIAESIGKETLKDVEREEKLEKEDHKWKLKGLKLNTNGKIQYNDLSSLAKFVHKLKQHLKLDFLLEDQYTTLDKINFLQSLFVYLGKHLRYSNRVDSANLKEFSDSNKLFERVLQEQKDDLFKLFEQTDKDDEKILAQTHSLSTKAMLLAITRMTNLDNDEDNQKNNDKGWNFEAIKNFDQKFIDITKKNNNLSLKQDKRYLDDRFINDAILSPGVKRILREATKVFNAILKQFSEEYDVTKVVIELARELSEEKELENTKNYEKLIKKNSDKISERLEALDIAEDKIEDILKSPTKSYKVLLWLQQDHIDPYSQKEIAFEDILTKTEKTEIDHIIPYSISFDDSSSNKLLVLAESNQAKSNQTPYEFITSGNAGIKWEDYEAYCRKFKDGDTSLLDSTQRSKKFAKMMKTDTSSKYDIGFLARNLNDTRYATIVFRDALKDYANNHLVEDKPMFKVVCINGGVTSFLRKNFDKSWYAKKDRDKNIHHAVDASIISIFSNETKTLFNQLTQFADYKLFKNTDGSWKKIDPKTGVVTEVTDENWKQIRVRNQVSEIAKVINKCIQDSNIERKARYSRKIENKTNISLFNDTVYSAKKVGYEDQIKRKNLKTLDIHESAEENKNSKVKKQFVYRKLVNVSLLNNDKLADLFAEKEDILMYRANPWVINLAEQIFNEYTENKKIKSQNVFEKYMLDLTKEFPEKFSEAFVKSMLRNKTAIIYNVEKKVVHRIKRLKILSSELKENKLSNVIIRSKNESGTKLSYQDTINSIALMIMRSIDPTAKKQYIRVPLNTLNLHLGDQDFDLHNIDAYLKKPKFVKYLKANEIGDEYKPWRVLTSGTLLIHKKDKKLMYISSFQNLKDVIEIKNLIETEYKENDDSDPKKRRKQIGS

SEQ ID NO: 332 - protein, 1269 aa, Mycoplasma gallisepticum
MNNSIKSKPEVTIGLDLGVGSVGWAIVDNETNIIHHLGSRLFSQAKTAEDRRSFRGVRRLIRRRKYKLKRFVNLIWKYNSYFGFKNKEDILNNYQEQQKLHNTVLNLKSEALNAKIDPKALSWILHDYLKNRGHFYEDNRDFNVYPTKELAKYFDKYGYYKGIIDSKEDNDNKLEEELTKYKFSNKHWLEEVKKVLSNQTGLPEKFKEEYESLFSYVRNYSEGPGSINSVSPYGIYHLDEKEGKVVQKYNNIWDKTIGKCNIFPDEYRAPKNSPIAMIFNEINELSTIRSYSIYLTGWFINQEFKKAYLNKLLDLLIKTNGEKPIDARQFKKLREETIAESIGKETLKDVENEEKLEKEDHKWKLKGLKLNTNGKIQYNDLSSLAKFVHKLKQHLKLDFLLEDQYATLDKINFLQSLFVYLGKHLRYSNRVDSANLKEFSDSNKLFERILQKQKDGLFKLFEQTDKDDEKILAQTHSLSTKAMLLAITRMTNLDNDEDNQKNNDKGWNFEAIKNFDQKFIDITKKNNNLSLKQNKRYLDDRFINDAILSPGVKRILREATKVFNAILKQFSEEYDVTKVVIELARELSEEKELENTKNYKKLIKKNGDKISEGLKALGISEDEIKDILKSPTKSYKFLLWLQQDHIDPYSLKEIAFDDIFTKTEKFEIDHIIPYSISFDDSSSNKLLVLAESNQAKSNQTPYEFISSGNAGIKWEDYEAYCRKFKDGDSSLLDSTQRSKKFAKMMKTDTSSKYDIGFLARNLNDTRYATIVFRDALEDYANNHLVEDKPMFKVVCINGSVTSFLRKNFDDSSYAKKDRDKNIHHAVDASIISIFSNETKTLFNQLTQFADYKLFKNTDGSWKKIDPKTGVVTEVTDENWKQIRVRNQVSEIAKVIEKYIQDSNIERKARYSRKIENKTNISLFNDTVYSAKKVGYEDQIKRKNLKTLDIHESAKENKNSKVKRQFVYRKLVNVSLLNNDKLADLFAEKEDILMYRANPWVINLAEQIFNEYTENKKIKSQNVFEKYMLDLTKEFPEKFSEFLVKSMLRNKTAIIYDDKKNIVHRIKRLKMLSSELKENKLSNVIIRSKNQSGTKLSYQDTINSLALMIMRSIDPTAKKQYIRVPLNTLNLHLGDHDFDLHNMDAYLKKPKFVKYLKANEIGDEYKPWRVLTSGTLLIHKKDKKLMYISSFQNLNDVIEIKNLIETEYKENDDSDSKKKKKANRFLMTLSTILNDYILLDAKDNFDILGLSKNRIDEILNSKLGLDKIVK

SEQ ID NO: 333 - protein, 1269 aa, Mycoplasma gallisepticum; identical to SEQ ID NO: 332
  Mycoplasma gallisepticum str. F

SEQ ID NO: 334 - protein, 1270 aa, Mycoplasma gallisepticum
MNNSIKSKPEVTIGLDLGVGSVGWAIVDNETNIIHHLGSRLFSQAKTAEDRRSFRGVRRLIRRRKYKLKRFVNLIWKYNSYFGFKNKEDILNNYQEQQKLHNTVLNLKLEALNAKIDPKALSWILHDYLKNRGHFYEDNRDFNVYPTEELANYFDEFGYYKGIIDSKNDDDDKLEEGLTKYKFSNQHWLEEVKKVLSNQTGLPEKFKEEYESLFSYVRNYSEGPGSINSVSPYGIYHLDEKEGKVVQKYNNIWDKTIGKCSIFPDEYRAPKNSPIAMIFNEINELSTIRSYSIYLTGWFINQEFKKAYLNKLLDLLIKTNSEKPIDARQFKKLREETIAESIGKETLKDVESEEKLEKDDHKWKLKGLKLNTNGKIQYNDLSSLAKFVHKLKQHLKLDFLLEDQYTPLDKINFLQSLYVYLGKHLRYSNRVDSANLKEFSDSSRLFERVLQEQKDGLFKLFEQTDKDDEKILTQTHSLSTKAMLLAITRMTNLDNDEDNQKNNDKGWNFEAIKNFDQKFIDITKTNNNLSLKQDKRYLDDQFINDAILSPGVKRILREATKVFNAILKQFSEEYDVTKVVIELARELSEEKELENTKNYKKLIKKNGDKISEGLKALGIAEDKIEEILKSPTKSYKVLLWLQQDHIDPYSQKEIAFDDILTKTEKTEIDHIIPYSISFDDSSSNKLLVLAESNQAKSNQTPYEFINSGKAEITWEVYEAYCHKFKNGDSSLLDSTQRSKKFAKMMKTDTSSKYDIGFLARNLNDTRYATIVFRDALKDYANNHLVEDKPMFKVVCINGGVTSFLRKNFDPKSWYAKKDRDKNIHHAVDASIISIFSNETKTLFNQLTKFADYKLFKNTDGSWKKIDPKTGVVSEVTDENWKQIRVRNQVSEIAKVIDKYIQDSNIERKARYSRKIENKTNISLFNDTVYSAKKVGYEDQIKRKNLKTLDIHESAEENKNSKVKKQFVYRKLVNVSLLNNDKLADLFAEKEDILMYRANPWVINLAEQIFNEYTENKKIKSQNVFEKYMLDLTKEFPEKFSEAFVKSMIRNKTAIIYNVEKDVVHRIKRLKILSSELKENKWSNVIIRSKNESGTKLSYQDTINSIALMIMRSIDPTAKKQYIRVPLNTLNLHLGDQDFDLHNIDAYLKKPKFVKYLKANEIGDEYKPWRVLTSGTLLIHKKDKKLMYISSFQNLNDLIEIKNLIETEYKENVDSDPKKKKKASQILRSLSVILNDYILLDAKYNFDILGLSKNKIDEILNSKLDLDKIAK

SEQ ID NO: 335 - protein, 1236 aa, Mycoplasma mobile
MYFYKNKENKLNKKVVLGLDLGIASVGWCLTDISQKEDNKFPIILHGVRLFETVDDSDDKLLNETRRKKRGQRRRNRRLFTRKRDFIKYLIDNNIIELEFDKNPKILVRNFIEKYINPFSKNLELKYKSVTNLPIGFHNLRKAAINEKYKLDKSELIVLLYFYLSLRGAFFDNPEDTKSKEMNKNEIEIFDKNESIKNAEFPIDKIIEFYKISGKIRSTINLKFGHQDYLKEIKQVFEKQNIDFMNYEKFAMEEKSFFSRIRNYSEGPGNEKSFSKYGLYANENGNPELIINEKGQKIYTKIFKTLWESKIGKCSYDKKLYRAPKNSFSAKVFDITNKLTDWKHKNEYISERLKRKILLSRFLNKDSKSAVEKILKEENIKFENLSEIAYNKDDNKINLPIINAYHSLTTIFKKHLINFENYLISNENDLSKLMSFYKQQSEKLFVPNEKGSYEINQNNNVLHIFDAISNILNKFSTIQDRIRILEGYFEFSNLKKDVKSSEIYSEIAKLREFSGTSSLSFGAYYKFIPNLISEGSKNYSTISYEEKALQNQKNNFSHSNLFEKTWVEDLIASPTVKRSLRQTMNLLKEIFKYSEKNNLEIEKIVVEVTRSSNNKHERKKIEGINKYRKEKYEELKKVYDLPNENTTLLKKLWLLRQQQGYDAYSLRKIEANDVINKPWNYDIDHIVPRSISFDDSFSNLVIVNKLDNAKKSNDLSAKQFIEKIYGIEKLKEAKENWGNWYLRNANGKAFNDKGKFIKLYTIDNLDEFDNSDFINRNLSDTSYITNALVNHLTFSNSKYKYSVVSVNGKQTSNLRNQIAFVGIKNNKETEREWKRPEGFKSINSNDFLIREEGKNDVKDDVLIKDRSFNGHHAEDAYFITIISQYFRSFKRIERLNVNYRKETRELDDLEKNNIKFKEKASFDNFLLINALDELNEKLNQMRFSRMVITKKNTQLFNETLYSGKYDKGKNTIKKVEKLNLLDNRTDKIKKIEEFFDEDKLKENELTKLHIFNHDKNLYETLKIIWNEVKIEIKNKNLNEKNYFKYFVNKKLQEGKISFNEWVPILDNDFKIIRKIRYIKFSSEEKETDEIIFSQSNFLKIDQRQNFSFHNTLYWVQIWVYKNQKDQYCFISIDARNSKFEKDEIKINYEKLKTQKEKLQIINEEPILKINKGDLFENEEKELFYIVGRDEKPQKLEIKYILGKKIKDQKQIQKPVKKYFPNWKKVNLTYMGEIFKK

SEQ ID NO: 336 - protein, 1265 aa, Mycoplasma ovipneumoniae
  Mycoplasma ovipneumoniae SC01
MHNKKNITIGFDLGIASIGWAIIDSTTSKILDWGTRTFEERKTANERRAFRSTRRNIRRKAYRNQRFINLILKYKDLFELKNISDIQRANKKDTENYEKIISFFTEIYKKCAAKHSNILEVKVKALDSKIEKLDLIWILHDYLENRGFFYDLEEENVADKYEGIEHPSILLYDFFKKNGFFKSNSSIPKDLGGYSFSNLQWVNEIKKLFEVQEINPEFSEKFLNLFTSVRDYAKGPGSEHSASEYGIFQKDEKGKVFKKYDNIWDKTIGKCSFFVEENRSPVNYPSYEIFNLLNQLINLSTDLKTTNKKIWQLSSNDRNELLDELLKVKEKAKIISISLKKNEIKKIILKDFGFEKSDIDDQDTIEGRKIIKEEPTTKLEVTKHLLATIYSHSSDSNWININNILEFLPYLDAICIILDREKSRGQDEVLKKLTEKNIFEVLKIDREKQLDFVKSIFSNTKFNFKKIGNFSLKAIREFLPKMFEQNKNSEYLKWKDEEIRRKWEEQKSKLGKTDKKTKYLNPRIFQDEIISPGTKNTFEQAVLVLNQIIKKYSKENIIDAIIIESPREKNDKKTIEEIKKRNKKGKGKTLEKLFQILNLENKGYKLSDLETKPAKLLDRLRFYHQQDGIDLYTLDKINIDQLINGSQKYEIEHIIPYSMSYDNSQANKILTEKAENLKKGKLIASEYIKRNGDEFYNKYYEKAKELFINKYKKNKKLDSYVDLDEDSAKNRFRFLTLQDYDEFQVEFLARNLNDTRYSTKLFYHALVEHFENNEFFTYIDENSSKHKVKISTIKGHVTKYFRAKPVQKNNGPNENLNNNKPEKIEKNRENNEHHAVDAAIVAIIGNKNPQIANLLTLADNKTDKKFLLHDENYKENIETGELVKIPKFEVDKLAKVEDLKKIIQEKYEEAKKHTAIKFSRKTRTILNGGLSDETLYGFKYDEKEDKYFKIIKKKLVTSKNEELKKYFENPFGKKADGKSEYTVLMAQSHLSEFNKLKEIFEKYNGFSNKTGNAFVEYMNDLALKEPTLKAEIESAKSVEKLLYYNFKPSDQFTYHDNINNKSFKRFYKNIRIIEYKSIPIKFKILSKHDGGKSFKDTLFSLYSLVYKVYENGKESYKSIPVTSQMRNFGIDEFDFLDENLYNKEKLDIYKSDFAKPIPVNCKPVFVLKKGSILKKKSLDIDDFKETKETEEGNYYFISTISKRFNRDTAYGLKPLKLSVVKPVAEPSTNPIFKEYIPIHLDELGNEYPVKIKEHTDDEKLMCTIK

SEQ ID NO: 337 - protein, 1314 aa, Mycoplasma synoviae
MLRLYCANNLVLNNVQNLWKYLLLLIFDKKIIFLFKIKVILIRRYMENNNKEKIVIGFDLGVASVGWSIVNAETKEVIDLGVRLFSEPEKADYRRAKRTTRRLLRRKKFKREKFHKLILKNAEIFGLQSRNEILNVYKDQSSKYRNILKLKINALKEEIKPSELVWILRDYLQNRGYFYKNEKLTDEFVSNSFPSKKLHEHYEKYGFFRGSVKLDNKLDNKKDKAKEKDEEEESDAKKESEELIFSNKQWINEIVKVFENQSYLTESFKEEYLKLFNYVRPFNKGPGSKNSRTAYGVFSTDIDPETNKFKDYSNIWDKTIGKCSLFEEEIRAPKNLPSALIFNLQNEICTIKNEFTEFKNWWLNAEQKSEILKFVFTELFNWKDKKYSDKKFNKNLQDKIKKYLLNFALENFNLNEEILKNRDLENDTVLGLKGVKYYEKSNATADAALEFSSLKPLYVFIKFLKEKKLDLNYLLGLENTEILYFLDSIYLAISYSSDLKERNEWFKKLLKELYPKIKNNNLEIIENVEDIFEITDQEKFESFSKTHSLSREAFNHIIPLLLSNNEGKNYESLKHSNEELKKRTEKAELKAQQNQKYLKDNFLKEALVPLSVKTSVLQAIKIFNQIIKNFGKKYEISQVVIEMARELTKPNLEKLLNNATNSNIKILKEKLDQTEKFDDFTKKKFIDKIENSVVFRNKLFLWFEQDRKDPYTQLDIKINEIEDETEIDHVIPYSKSADDSWFNKLLVKKSTNQLKKNKTVWEYYQNESDPEAKWNKFVAWAKRIYLVQKSDKESKDNSEKNSIFKNKKPNLKFKNITKKLFDPYKDLGFLARNLNDTRYATKVFRDQLNNYSKHHSKDDENKLFKVVCMNGSITSFLRKSMWRKNEEQVYRFNFWKKDRDQFFHHAVDASIIAIFSLLTKTLYNKLRVYESYDVQRREDGVYLINKETGEVKKADKDYWKDQHNFLKIRENAIEIKNVLNNVDFQNQVRYSRKANTKLNTQLFNETLYGVKEFENNFYKLEKVNLFSRKDLRKFILEDLNEESEKNKKNENGSRKRILTEKYIVDEILQILENEEFKDSKSDINALNKYMDSLPSKFSEFFSQDFINKCKKENSLILTFDAIKHNDPKKVIKIKNLKFFREDATLKNKQAVHKDSKNQIKSFYESYKCVGFIWLKNKNDLEESIFVPINSRVIHFGDKDKDIFDFDSYNKEKLLNEINLKRPENKKFNSINEIEFVKFVKPGALLLNFENQQIYYISTLESSSLRAKIKLLNKMDKGKAVSMKKITNPDEYKIIEHVNPLGINLNWTKKLENNN

SEQ ID NO: 338 - protein, 1304 aa, Mycoplasma synoviae
  Mycoplasma synoviae 53
MLNNVQNLWKYLLLLIFDKKIIFLFKIKVILIRRYMENNNKEKIVIGFDLGVASVGWSIVNAETKEVIDLGVRLFSEPEKADYRRAKRTTRRLLRRKKFKREKFHKLILKNAEIFGLQSRNEILNVYKDQSSKYRNILKLKINALKEEIKPSELVWILRDYLQNRGYFYKNEKLTDEFVSNSFPSKKLHEHYEKYGFFRGSVKLDNKLDNKKDKAKEKDEEEESDAKKESEELIFSNKQWINEIVKVFENQSYLTESFKEEYLKLFNYVRPFNKGPGSKNSRTAYGVFSTDIDPETNKFKDYSNIWDKTIGKCSLFEEEIRAPKNLPSALIFNLQNEICTIKNEFTEFKNWWLNAEQKSEILKFVFTELFNWKDKKYSDKKFNKNLQDKIKKYLLNFALENFNLNEEILKNRDLENDTVLGLKGVKYYEKSNATADAALEFSSLKPLYVFIKFLKEKKLDLNYLLGLENTEILYFLDSIYLAISYSSDLKERNEWFKKLLKELYPKIKNNNLEIIENVEDIFEITDQEKFESFSKTHSLSREAFNHIIPLLLSNNEGKNYESLKHSNEELKKRTEKAELKAQQNQKYLKDNFLKEALVPLSVKTSVLQAIKIFNQIIKNFGKKYEISQVVIEMARELTKPNLEKLLNNATNSNIKILKEKLDQTEKFDDFTKKKFIDKIENSVVFRNKLFLWFEQDRKDPYTQLDIKINEIEDETEIDHVIPYSKSADDSWFNKLLVKKSTNQLKKNKTVWEYYQNESDPEAKWNKFVAWAKRIYLVQKSDKESKDNSEKNSIFKNKKPNLKFKNITKKLFDPYKDLGFLARNLNDTRYATKVFRDQLNNYSKHHSKDDENKLFKVVCMNGSITSFLRKSMWRKNEEQVYRFNFWKKDRDQFFHHAVDASIIAIFSLLTKTLYNKLRVYESYDVQRREDGVYLINKETGEVKKADKDYWKDQHNFLKIRENAIEIKNVLNNVDFQNQVRYSRKANTKLNTQLFNETLYGVKEFENNFYKLEKVNLFSRKDLRKFILEDLNEESEKNKKNENGSRKRILTEKYIVDEILQILENEEFKDSKSDINALNKYMDSLPSKFSEFFSQDFINKCKKENSLILTFDAIKHNDPKKVIKIKNLKFFREDATLKNKQAVHKDSKNQIKSFYESYKCVGFIWLKNKNDLEESIFVPINSRVIHFGDKDKDIFDFDSYNKEKLLNEINLKRPENKKFNSINEIEFVKFVKPGALLLNFENQQIYYISTLESSSLRAKIKLLNKMDKGKAVSMKKITNPDEYKIIEHVNPLGINLNWTKKLENNN

SEQ ID NO: 339 - protein, 1401 aa, Myroides injenensis
  Myroides injenensis M09-0166
MKRILGLDLGTTSIGWAYVHEAENVNETSSIQKVGVRVNPLTTEEQTNFEKGKPITTNASRTLARSARRNLQRYKLRRDNLIQILKENNWINNTTSLTETGNHSTFETYELRNKAASEKLTLDQLSRVLLMLNKKRGYKSSRKVNSKEEGQLIDGMEVAKKLYHEQLTPGQLSLQLMNQGVKKLPDYYRSDLNQELESIWNFQQQFYPNILTDKFKEEINGKGLTSTSSAFWNIYNFNTAENKGSRDEKKKQALQWRSEALSKQLSKEIVAYIIADLNGQIYNSSGYLGAISDRSKELYFNNLTVGQYLFKQLKSNPHTSLKNQVFYRQDYLNEFEKIWETQSKFYPKELTAALKREIRDVIIFYQRKLKSQKGLISFCEFEQKQKTINGKTKTIGHRVIPKSSPLFQEFKIWQQLHNVVLRNKKTNEIVSLADEQKVHLFEELNLKGKLKSNQVLKLIENKPKDWELNYTELEGNNTNKALYNAYLDILDIEGYDVRNELKVKLNKDDIELSDLDVNASEIKEMIFSVFKHLGINTEILEFDATLEDKVFEKQASYQLWHLLYSYEEDNSPTGLDRLYNLLHKKFGFKLNHAKLIGNVLFQDDYGSLSSKAIKNIFPYITENNYYTACELAGYKHSKHSLTKEENETRELKNRLTILPKNSLRNPVVEKIINQMINVVNTLIDEENNILIAQGKEPNFQFDEIRIELARELKKNAKEREELTKSINKSKTDHEKIIKILQKEDGIKNPTRNDIVRFKLYSELKNNGYKDLYTNEYIERKDIFTKEYDIEHIIPQSKLFDDSFSNKTLVRRNVNLKKGNQTAYDFILCEYGQEKANEFETRITNLYNLGKDEGISKSKFKKLLMQESEIGNGFIERDLRETQYIAKKAKSLLLEITRNVISTSGSITDRLREDWGLINVMKELNLQKYRDAGLTEFVKMKDGNKKEVIIDWTKRNDHRHHAMDALTIAFTKHNHIQYLNHLNARKNVNNELHNNIIAIEKLETTLVSDERGNKKRIFKEPIANFRTIAKSHLEAILVSHKAKNKVVTKNINKISGKKISQQTLTPRGQLHKETIYGKIRQYVSKQEKVGPKFTIEVIEQVSNPTYRNLLLKRLEENNNDPKKAFGGKNSLNKNPIYINLEKNIKVPEVLKLVWLEDNYTIRKEISPDLKIDKVIDQGVKQILQNRLAQYKGDSKLAFSNLDANPIWLNEDKGIAIKRVTISGIATAQPLHRKKDHLGQPILDHNGQEIPVDFISTGNNHHVAIYEDENGKLQESVVSHFEAVERVNQKLPIIDKTFNQHLGWKFLFTMKQNELFLFPSDDFNPNEIDLFDKQNYTVISKHLFRIQKLSTKDYSFRHHLETNVEEIKDLKTITWRREGLNGIQNIIKVRTNHLGEIIHIGEY

SEQ ID NO: 340 - protein, 1466 aa, Myroides odoratus
  Myroides odoratus DSM 2801
MKNILGLDLGTNSIGWALVKEDFENKQGEILGLGSRIIPMSQDILGEFGRGNSISQTADRTGYRGVRRLRERHLLRRERLHRVLNILGFLPNHYAKEIDFTKRLGKFINHAEPKLSFDKEFIFKDSFNEMLKDFQQNQPGFIINKHGEEALVPYDWTIYYLRKKALTQKIDKEELAWILLNFNQKRGYYQLRGEEEEENTNKLVEFYSLKIIDVIADNEVNKKGEVWYSLHLENGWIYRRSSKISLVDWKDKVRDFIVTTDVNDDGSEKLDKDGVVKRSFRAPSADDWTLLKKKTEQDIDNSNKTVGAYIYENLLLNPKQKIKGKLVRTIERKFYKDELKQILEKQKEFHQELQNEQLLQDCVRELYKYNEQHQQMLESKDFVHLFLNDIIFYQRPLRSQKSLISNCTLEKRVSRDGVVFPIKVISKSNPYYQEFRLLQWLQNLAIYRKDDDVNVTQEFLNSIESWENLLQFLNAKKEIKQEQLIKFLLEQKGLKGNSLKTAILTYRWNYVTDKVYPMNETRSLIQDKLKKVENVATDFLSFDNEMALWHIIYSVNDKIEYEKALAKFASKHNLDEISFVESFKKFPPFKSDYGSFSEKAIKKLLPLMRFGSVWNKNNIVPSVLDRIDKILTGEYDEKIKIRVREKAEQFQLNQIEDFQNLPLWLAQYVVYDRHSEAEIAGKWNSVKDLENYLKEFKQHSLRNPIVEQIITETLRVVKDIWQQYGNGVQNFFDEIHIELGREMKNTADERKRITNSVTENENTNLRIKALLVELKEDTNIENVRPHSPMQQEILKIYEEGVLNAVENIDEDILKISKTAQPSKSELIRYKLWLEQKYQSPYTGEMIPLSRLFTSDYEIEHVIPQSRYFDDSLSNKVICEAAVNKRKDNQLGLEFIKNHHSEKIELGNGRTAQVLEVEAYESFVKKNYDKNRGKRNKLLLEDVPEKMIERQLNDTRYISKFVTHLLSNIVRKDEVNSKDDGINSKNIIPGNGKITSQLKQDWGLNDVWNELILPRFERMNNLTNSTDFTSTNTNGKIIPTVPLEYSKGFSKKRIDHRHHALDALVIALATRDHVNLLNNESALPKKDRTKEEQKSFRFDLQVNLRNKEKYFNVKEGREKEKFTTFKKPWNTLTQDTRDALENMVVSFKQNLRVINKATNYYESYTDENGNLRLDKYGNPKKELISQKGTNWAIRKSLHKETVSGQIHLDRVKVTKGKIVTATRKSLDSSFNEKSIESITDTGIQKILRNYLKAKDNKPDVAFSPEGIEELNKSISVYNEGKNHQPIIKVRIFEQGSKFPVGETGNKIAKFVEAAKGTNLFFGIYQDKTGKRSYDTIPLNLVIERLKQGLSPVPETNEKGHQLLFHLSPNDLVYVPTIDDNEQLDSNRVYKFTDSSDTTCNFIPSNISAIIFNINSKEQEKRGINYPIQNELGVGSPQSKNQKSFDGFMIKEVCIKLKVDRLGNISKT

SEQ ID NO: 341 - protein, 1077 aa, Neisseria bacilliformis
  Neisseria bacilliformis ATCC BAA-1200
MQQKPQRYILGLDLGIASVGWACVWADENEHPTGLLDCGVRTFERAEVPKTGDSLALARRQARSVRRLIRRRAHRLLRLRRLLKREGVLLSADFNENGLVRGLPIDAWALRVAGLDRKLSNKEWAAVLLHLVKHRGYLSQRKNETQSKDKELGRLLAGVNGNREALQNRSDEYRTAAELAVKKFAAENNGSLRNKGGDYSHTFDRKDLQRELHLLFERQRALDNPFTSSEMEAAVDELLMKQRSALQGEAVLKMLGRCTFEPSEYKAAKNTYSAERFVWLTKLNNLRIQYNGEERALSEAERRLLLDEPYQKAKLTYKQVRTILELPESAVFKGLRYGHGEDGLKAESGTLMEMKAYHAVRKALKDAGLEGEWENRIRNPELLDAIGTAFSLYKTDEDIRANLAAFRLSENVLEALLAGLNFDKFVHLSLKALAKILPLMEQGMRYDEACKEAYGDHYGAKEQEDHRLLPPFVADDIRNPVVFRTLTQARKIVNEIVRRYGSPLRVHIETGREVGKSFSDRKEIEKRQEENRKERERAAAHFKELFPNFAGEPKAQDILKLRLYEQQHGKCLYSGKEIDLRRLPEKGYVEIDHALPFSRTWDDSFNNKVLVLGKENQDKRNRTPYEYLDGKGNSGAWRAFAERVSGCRFPYAKKQRLLTQKLDEKTEQGFLERNLNDTRYVARFLCQFIEEKMHLEGAGKKRVFASNGQITALLRGFWGLKKVREENDRHHALDAVVVACSSVSMQQKITRHFRYREELEHIDRETGEVIHGFPQPWEFFRQEVMTRVFSDDPVSELAEKLDSRPEAVHEFVTPLFVSRAPHRKVTGQGHLETIRSAKRLDEKISVVKLPLTQLKTKDIERIVGYPNREPALYDALAARLAAFKDDPAKAFSEPFYKTGKDGKCGVLVKAVRVENVQKSGLLVRKDESGKMQGVADNATMVRVDVFGKNGKNYLVPVYAWQVEKGELPNRAVVAYADEEDWDEMDDSFEFKFSLYPNDLVEVVTKKDKFFGYYSGFNRATGAINIKEHDLSKSKVKNGVYEGIGVKTAQSFQKYQVDTLGKTIRLCKPEKRMGFKKK

SEQ ID NO: 342 - protein, 1082 aa, Neisseria cinerea
  Neisseria cinerea ATCC 14685
MAAFKPNPMNYILGLDIGIASVGWAIVEIDEEENPIRLIDLGVRVFERAEVPKTGDSLAAARRLARSVRRLTRRRAHRLLRARRLLKREGVLQAADFDENGLIKSLPNTPWQLRAAALDRKLTPLEWSAVLLHLIKHRGYLSQRKNEGETADKELGALLKGVADNTHALQTGDFRTPAELALNKFEKESGHIRNQRGDYSHTFNRKDLQAELNLLFEKQKEFGNPHVSDGLKEGIETLLMTQRPALSGDAVQKMLGHCTFEPTEPKAAKNTYTAERFVWLTKLNNLRILEQGSERPLTDTERATLMDEPYRKSKLTYAQARKLLDLDDTAFFKGLRYGKDNAEASTLMEMKAYHAISRALEKEGLKDKKSPLNLSPELQDEIGTAFSLFKTDEDITGRLKDRVQPEILEALLKHISFDKFVQISLKALRRIVPLMEQGNRYDEACTEIYGDHYGKKNTEEKIYLPPIPADEIRNPVVLRALSQARKVINGVVRRYGSPARIHIETAREVGKSFKDRKEIEKRQEENRKDREKSAAKFREYFPNFVGEPKSKDILKLRLYEQQHGKCLYSGKEINLGRLNEKGYVEIDHALPFSRTWDDSFNNKVLALGSENQNKGNQTPYEYFNGKDNSREWQEFKARVETSRFPRSKKQRILLQKFDEDGFKERNLNDTRYINRFLCQFVADHMLLTGKGKRRVFASNGQITNLLRGFWGLRKVRAENDRHHALDAVVVACSTIAMQQKITRFVRYKEMNAFDGKTIDKETGEVLHQKAHFPQPWEFFAQEVMIRVFGKPDGKPEFEEADTPEKLRTLLAEKLSSRPEAVHKYVTPLFISRAPNRKMSGQGHMETVKSAKRLDEGISVLRVPLTQLKLKDLEKMVNREREPKLYEALKARLEAHKDDPAKAFAEPFYKYDKAGNRTQQVKAVRVEQVQKTGVWVHNHNGIADNATIVRVDVFEKGGKYYLVPIYSWQVAKGILPDRAVVQGKDEEDWTVMDDSFEFKFVLYANDLIKLTAKKNEFLGYFVSLNRATGAIDIRTHDTDSTKGKNGIFQSVGVKTALSFQKYQIDELGKEIRPCRLKKRPPVR

SEQ ID NO: 343 - protein, 1081 aa, Neisseria flavescens
  Neisseria flavescens SK114
MTAFKPNPINYILGLDIGIASVGWAMVEIDEEENPIRLIDLGVRVFERAEVPKTGDSLAAARRLARSVRRLTRRRAHRLLRARRLLKREGVLQAADFDENGLIKSLPNTPWQLRAAALDRKLTPLEWSAVLLHLIKHRGYLSQRKNEGETADKELGALLKGVADNAHALQTGDFRTPAELAVNKFEKESGHIRNQRGDYSHTFSRKDLQAELVLLFEKQKEFGNPHISDGLKEGIETLLMAQRPALSGDAVQKMLGYCTFEPTEPKAAKNTYTAERFIWLTKLNNLRILEQGSERPLTDTERATLIDMPYKNKLTYAKARELLGLDDTAFFKGLRYGKDNAESATLMEMKAYHAIRRALEKEGLKDKKSPLSLSPELQDEIGTAFSLFKTDEDITGRLKGCLQPEILDALLKHINFDKFVQISLKALRRIVPLMEQGKRYDEACAETYGDHYGEKNSEEMLYLPPIPADEIRNPVVLRALSQARKVINGVVRRYGSPARIHIETAREVGKSFKDRKEIEKRQEENRKDREKAAAKFREYFPNFVGEPKSKDILKLRLYEQQHGKCLYSGKAIDIRRLNGKGYVEIDHALPFSRTWDDSFNNKVLVLGSENQNKGNRTPYEYLNGKDNSREWLEFKARVETSRFPHSKKQRVLLQKFDEKGFKERNLNDTRYVNRFLCQFVADHMQLTGKGKRRVFASNGQITNLLRGFWGLHKVRAENDRHHALDAVVVACSTVAMQQKITCFVRYKEMNAFDGKTVDKETGEVLHQKTHFPQPWEFFAQEVMIRVFGKPDGKPEFEEADTPEKLRALLAEKLSSRPEAVHEYVTPLFVSRAPNRKMSGAHKDTLRSAKRFVKHNEKISVKRVWLTEIKLADLENMVNYKNGREIELYEALKARLGAYGGNAKQAFDPKDNPFYKKGGQLVKAVRVEKTQESGVLLNKKNAYTIADNGDMVRVDVFCKVDKKGKNQYFIVPIYAWQVAENILPDIDCKGYRIDDSYTFCFSLHKYDLIAFQKDEKSKVEFAYYINCDSSNGRFYLAWHDKGSKEQQFRISTQNLVLMQKYQIDELGKEIRPCRLKKRPPVR

SEQ ID NO: 344 - protein, 1082 aa, Neisseria lactamica
MAAFKPNPMNYILGLDIGIASVGWAMVEIDKEENPIRLIDLGVRVFERAEVPKTGDSLAMARRLARSVRRLTRRRAHRLLRARRLLKREGVLQDADFDENGLVKSLPNTPWQLRAAALDRKLTCLEWSAVLLHLIKHRGYLSQRKNEGETADKELGALLKGVADNAHALQTGDFRTPAELALNKFEKESGHIRNQRGDYSHTFSRKDLQAELNLLFEKQKEFSNPHVSDSLKEGIETLLMAQRPALSGDAVQKMLGHCTFEPAEPKAAKNTYTAERFIWLTKLNNLRILEQGSERPLTDTERATLMDEPYRKSKLTYAQARKLLGLEDTAFFKGLRYGKDNAEAPTLMEMKAYHAISRALEKEGLKDKKSPLNLSTELQDEIGTAFSLFKTDKDITGRLKDRVQPEILEALLKHISFDKFVQISLKALRRIVPLMEQGKRYDEACAEIYGDHYCKKNAEEKIYLPPIPADEIRNPVVLRALSQARKVINCVVRRYGSPARIHIETAREVGKSFKDRKEIEKRQEENRKDREKAAAKFREYFPNFVGEPKSKDILKLRLYEQQHGKCLYSGKEINLVRLNEKGYVEIDHALPFSRTWDDSFNNKVLVLGSENQNKGNQTPYEYFNGKDNSREWQEFKARVETSRFPRSKKQRILLQKFDEEGFKERNLNDTRYVNRFLCQFVADHILLTGKGKRRVFASNGQITNLLRGFWGLRKVRAENDRHHALDAVVVACSTVAMQQKITRFVRYKEMNAFDGKTIDKETGEVLHQKAHFPQPWEFFAQEVMIRVFGKPDGKPEFEEADTPEKLRTLLAEKLSSRPEAVHEYVTPLFVSRAPNRKMSGQGHMETVKSAKRLDEGISVLRVPLTQLKLKGLEKMVNREREPKLYDALKAQLETHKDNPAKAFAEPFYKYDKAGNRTQQVKAVRIEQVQKTGVWVRNHNGIADNATMVRVDVFEKGGKYYLVPIYSWQVAKGILPDRAVVAFKDEEDWTVMDDSFEFRFVLYANDLIKLTAKKNEFLGYFVSLNRATGAIDIRTHDTDSTKGKNGIFQSVGVKTALSFQKNQIDELGKEIRPCRLKKRPPVR

SEQ ID NO: 345 - protein, 1082 aa, Neisseria meningitidis
MAAFKPNPINYILGLDIGIASVGWAMVEIDEDENPICLIDLGVRVFERAEVPKTGDSLAMARRLARSVRRLTRRRAHRLLRARRLLKREGVLQAADFDENGLIKSLPNTPWQLRAAALDRKLTPLEWSAVLLHLIKHRGYLSQRKNEGETADKELGALLKGVADNAHALQTGDFRTPAELALNKFEKESGHIRNQRGDYSHTFSRKDLQAELNLLFEKQKEFGNPHISDGLKEGIETLLMTQRPALSGDAVQKMLGHCTFEPAEPKAAKNTYTAERFIWLTKLNNLRILEQGSERPLTDTERTTLIDEPYRKSKLTYAQARKLLELDNTAFFKGLRYGKDNAEASTLMEMKAYHAISRALEKEGLKDKKSPLNLSPELQDEIGTAFSLFKTDEDITGRLKDRVQPEILEALLKHISFDKFVQISLKALRRIVPLMEQGKRYDEACAEIYGDHYGKKNTEEKIDLPPIPADEIRNPVVLRALSQARKVINGVVRRYGSPARIHIETAREVGKSFKDRKEIEKRQEENRKDREKAATKFREYFPNFVGEPKSKDILKLRLYEQQHGKCLYSGKEINLGRLNEKGYVEIDHALPFSRTWDDSFNNKVLVLGSENQNKGNQTPYEYFNGKDNSREWQEFKARVETSRFPRSKKQRILLQKFDEEGFKERNLNDTRYVNRFLCQFVADHMLLTGKGKRRVFASNGQITNLLRGFWGLRKVRAENDRHHALDAVVVACSTVAMQQKITRFVRYKEMNAFDGKTIDKETGEVLHQKTHFPQPWEFFAQEVMIRVFGKPDGKPEFEEADTPEKLRTLLAEKLSSRPEAVHEYVTPLFVSRAPNRKMSGQGHMETVKSAKRLDEGVSVLRVPLTQLKLKDLEKMVNREREPKLYEALKARLEAHKDDPAKAFAEPFYKYDKAGNRTQQVKAVRVEQVQKTGVWVRNHNGIADNATMVRVDVFEKGDKYYLVPIYSWQVAKGILPDRAVVQGKDEEDWQLIDDSFNFKFSLHPNDLVEVITKKARMFGYFASCHRGTGNINIRIHDLDHKIGKNGILEGIGVKTALSFQKYQIDELGKEIRPCRLKKRPPVR

SEQ ID NO: 346 - protein, 1082 aa, Neisseria meningitidis
  Neisseria meningitidis 2007056
MAAFKPNPINYILGLDIGIASVGWAMVEIDEDENPICLIDLGVRVFERAEVPKTGDSLAMARRLARSVRRLTRRRAHRLLRARRLLKREGVLQAADFDENGLIKSLPNTPWQLRAAALDRKLTPLEWSAVLLHLIKHRGYLSQRKNEGETADKELGALLKGVADNAHALQTGDFRTPAELALNKFEKESGHIRNQRGDYSHTFSRKDLQAELILLFEKQKEFGNPHVSGGLKEGIETLLMTQRPALSGDAVQKMLGHCTFEPAEPKAAKNTYTAERFIWLTKLNNLRILEQGSERPLTDTERATLMDEPYRKSKLTYAQARKLLGLEDTAFFKGLRYGKDNAEASTLMEMKAYHAISRALEKEGLKDKKSPLNLSPELQDEIGTAFSLFKTDEDITGRLKDRIQPEILEALLKHISFDKFVQISLKALRRIVPLMEQGKRYDEACAEIYGDHYGKKNTEEKIYLPPIPADEIRNPVVLRALSQARKVINGVVRRYGSPARIHIETAREVGKSFKDRKEIEKRQEENRKDREKAAAKFREYFPNFVGEPKSKDILKLRLYEQQHGKCLYSGKEINLGRLNEKGYVEIDHALPFSRTWDDSFNNKVLVLGSENQNKGNQTPYEYFNGKDNSREWQEFKARVETSRFPRSKKQRILLQKFDEDGFKERNLNDTRYVNRFLCQFVADRMRLTGKGKKRVFASNGQITNLLRGFWGLRKVRAENDRHHALDAVVVACSTVAMQQKITRFVRYKEMNAFDGKTIDKETGEVLHQKTHFPQPWEFFAQEVMIRVFGKPDGKPEFEEADTPEKLRTLLAEKLSSRPEAVHEYVTPLFVSRAPNRKMSGQGHMETVKSAKRLDEGVSVLRVPLTQLKLKDLEKMVNREREPKLYEALKARLEAHKDDPAKAFAEPFYKYDKAGNRTQQVKAVRVEQVQKTGVWVRNHNGIADNATMVRVDVFEKGDKYYLVPIYSWQVAKGILPDRAVVQGKDEEDWQLIDDSFNFKFSLHPNDLVEVITKKARMFGYFASCHRGTGNINIRIHDLDHKIGKNGILEGIGVKTALSFQKYQIDELGEEIRPCRLKKRPPVR

SEQ ID NO: 347 - protein, 1082 aa, Neisseria meningitidis
  Neisseria meningitidis 63049
MAAFKPNPINYILGLDIGIASVGWAMVEIDEEENPIRLIDLSVRVFERAEVPKTGDSLAMARRLARSVRRLTRRRAHRLLRARRLLKREGVLQAADFDENGLIKSLPNTPWQLRAAALDRKLTPLEWSAVLLHLIKHRGYLSQRKNEGETADKELGALLKGVADNAHALQTGDFRTPAELALNKFEKESGHIRNQRGDYSHTFSRKDLQAELILLFEKQKEFGNPHVSGGLKEGIETLLMTQRPALSGDAVQKMLGHCTFEPAEPKAAKNTYTAERFVWLTKLNNLRILEQGSERPLTDTERATLMDEPYRKSKLTYAQARKLLGLEDTAFFKGLRYGKDNAEASTLMEMKAYHAISRALEKEGLKDKKSPLRLSPELQDEIGTAFSLFKTDEDITGRLKDRVQPEILEALLKHISFDKFVQISLKALRRIVPLMEQGKRYDEACAEIYGDHYGKKNAEEKIYLPPIPADEIRNPVVLRALSQARKVINGVVRRYGSPARIHIETAREVGKSFKDRKEIEKRQEENRKDREKAAAKFREYFPNFVGEPKSKDILKLRLYEQQHGKCLYSGKEINLGRLNEKGYVEIDHALPFSRTWDDSFNNKVLVLGSENQNKGNQTPYEYFNGKDNSREWQEFKARVETSRFPRSKKQRILLQKFDEDGFKERNLNDTRYVNRFLCQFVADRMRLTGKGKKRVFASNGQITNLLRGFWGLRKVRAENDRHHALDAVVVACSTVAMQQKITRFVRYKEMNAFDGKTIDKETGEVLHQKTHFPQPWEFFAQEVMIRVFGKPDGKPEFEEADTPEKLRTLLAEKLSSRPEAVHEYVTPLFVSRAPNRKMSGQGHMETVKSAKRLDEGVSVLRVPLTQLKLKDLEKMVNREREPKLYEALKARLEAHKDDPAKAFAEPFYKYDKAGNRTQQVKAVRVEQVQKTGVWVRNHNGIADNATMVRVDVFEKGDKYYLVPIYSWQVAKGILPDRAVVQGKDEEDWQLIDDSFNFKFSLHPNDLVEVITKKARMFGYFASCHRGTGNINIRIHDLDHKIGKNGILEGIGVKTALSFQKYQIDELGKEIRPCRLKKRPPVR

SEQ ID NO: 348 - protein, 1082 aa, Neisseria meningitidis
MAAFKPNSINYILGLDIGIASVGWAMVEIDEEENPIRLIDLGVRVFERAEVPKTGDSLAMARRLARSVRRLTRRRAHRLLRTRRLLKREGVLQAANFDENGLIKSLPNTPWQLRAAALDRKLTPLEWSAVLLHLIKHRGYLSQRKNEGETADKELGALLKGVAGNAHALQTGDFRTPAELALNKFEKESGHIRNQRSDYSHTFSRKDLQAELILLFEKQKEFGNPHVSGGLKEGIETLLMTQRPALSGDAVQKMLGHCTFEPAEPKAAKNTYTAERFIWLTKLNNLRILEQGSERPLTDTERATLMDEPYRKSKLTYAQARKLLGLEDTAFFKGLRYGKDNAEASTLMEMKAYHAISRALEKEGLKDKKSPLNLSPELQDEIGTAFSLFKTDEDITGRLKDRIQPEILEALLKHISFDKFVQISLKALRRIVPLMEQGKRYDEACAEIYGDHYGKKNTEEKIYLPPIPADEIRNPVVLRALSQARKVINGVVRRYGSPARIHIETAREVGKSFKDRKEIEKRQEENRKDREKAAAKFREYFPNFVGEPKSKDILKLRLYEQQHGKCLYSGKEINLGRLNEKGYVEIDHALPFSRTWDDSFNNKVLVLGSENQNKGNQTPYEYFNGKDNSREWQEFKARVETSRFPRSKKQRILLQKFDEDGFKERNLNDTRYVNRFLCQFVADRMRLTGKGKKRVFASNGQITNLLRGFWGLRKVRAENDRHHALDAVVVACSTVAMQQKITRFVRYKEMNAFDGKTIDKETGEVLHQKTHFPQPWEFFAQEVMIRVFGKPDGKPEFEEADTLEKLRTLLAEKLSSRPEAVHEYVTPLFVSRAPNRKMSGQGHMETVKSAKRLDEGVSVLRVPLTQLKLKDLEKMVNREREPKLYEALKARLEAHKDDPAKAFAEPFYKYDKAGNRTQQVKAVRVEQVQKTGVWVRNHNGIADNATMVRVDVFEKGDKYYLVPIYSWQVAKGILPDRAVVQGKDEEDWQLIDDSFNFKFSLHPNDLVEVITKKARMFGYFASCHRGTGNINIRIHDLDHKIGKNGILEGIGVKTALSFQKYQIDELGKEIRPCRLKKRPPVR

SEQ ID NO: 349 - protein, 1082 aa, Neisseria meningitidis
  Neisseria meningitidis 92045
MAAFKPNPINYILGLDIGIASVGWAMVEIDEEENPIRLIDLGVRVFERAEVPKTGDSLAMARRLARSVRRLTRRRAHRLLRARRLLKREGVLQAADFDENGLIKSLPNTPWQLRAAALDRKLTPLEWSAVLLHLIKHRGYLSQRKNEGETADKELGALLKGVADNAHALQTGDFRTPAELALNKFEKECGHIRNQRGDYSHTFSRKDLQAELNLLFEKQKEFGNPHVSGGLKEGIETLLMTQRPALSGDAVQKMLGHCTFEPAEPKAAKNTYTAERFIWLTKLNNLRILEQGSERPLTDTERATLMDEPYRKSKLTYAQARKLLGLEDTAFFKGLRYGKDNAEASTLMEMKAYHAISRALEKEGLKDKKSPLNLSPELQDEIGTAFSLFKTDEDITGRLKDRIQPEILEALLKHISFDKFVQISLKALRRIVPLMEQGKRYDEACAEIYGDHYGKKNTEEKIYLPPIPADEIRNPVVLRALSQARKVINGVVRRYGSPARIHIETAREVGKSFKDRKEIEKRQEENRKDREKAAAKFREYFPNFVGEPKSKDILKLRLYEQQHGKCLYSGKEINLVRLNEKGYVEIDHALPFSRTWDDSFNNKVLVLGSENQNKGNQTPYEYFNGKDNSREWQEFKARVETSRFPRSKKQRILLQKFDEEGFKERNLNDTRYVNRFLCQFVADHILLTGKGKRRVFASNGQITNLLRGFWGLRKVRAENDRHHALDAVVVACSTVAMQQKITRFVRYKEMNAFDGKTIDKETGEVLHQKTHFPQPWEFFAQEVMIRVFGKPDGKPEFEEADTPEKLRTLLAEKLSSRPEAVHEYVTPLFVSRAPNRKMSGQGHMETVKSAKRLDEGVSVLRVPLTQLKLKDLEKMVNREREPKLYEALKARLEAHKDDPAKAFAEPFYKYDKAGNRTQQVKAVRVEQVQKTGVWVRNHNGIADNATMVRVDVFEKGGKYYLVPIYSWQVAKGILPDRAVVQGKDEEDWQLIDDSFNFKFSLHPNDLVEVITKKARMFGYFASCHRGTGNINIRIHDLDHKIGKNGILEGIGVKTALSFQKYQIDELGKEIRPCRLKKRPPVR

SEQ ID NO: 350 - protein, 1081 aa, Neisseria meningitidis
  Neisseria meningitidis 93003
MAAFKPNPINYILGLDIGIASVGWAMVEIDEEENPIRLIDLGVRVFERAEVPKTGDSLAMARRLARSVRRLTRRRAHRLLRARRLLKREGVLQAADFDENGLIKSLPNTPWQLRAAALDRKLTPLEWSAVLLHLIKHRGYLSQRKNEGETADKELGALLKGVADNAHALQTGDFRTPAELALNKFEKESGHIRNQRGDYSHTFSRKDLQAELILLFEKQKEFGNPHVSGGLKEGIETLLMTQRPALSGDAVQKMLGHCTFEPAEPKAAKNTYTAERFIWLTKLNNLRILEQGSERPLTDTERATLMDEPYRKSKLTYAQARKLLGLEDTAFFKGLRYGKDNAEASTLMEMKAYHAISRALEKEGLKDKKSPLNLSPELQDEIGTAFSLFKTDEDITGRLKDRVQPEILEALLKHISFDKFVQISLKALRRIVPLMEQGKRYDEACAEIYGDHYGKKNTEEEIYLPPITADEIRNPVVLRALSQARKVINAVVRRYGSPARIHIETAREVGKSFKDRKEIEKRQEENRKDREKAAAKFREYFPNFVGEPKSKDILKLRLYEQQHGKCLYSGKEINLVRLNEKGYVEIDHALPFSRTWDDSFNNKVLVLGSENQNKGNQTPYEYFNGKENSREWQEFKARVETSRFPRSKKQRILLQKFDEDGFKERNLNDTRYVNRFLCQFVADRMRLTGKGKKRVFASNGQITNLLRGFWGLHKVRAENDRHHALDAVVVACSTIAMQQKITRFVRYKEMNAFDGKTIDKETGEVLHQKAHFPQPWEFFAQEVMIRVFGKPDGKPEFEEADTPEKLRTLLAEKLSSRPEAVHEYVTPLFVSRAPNRKMSGQGHMETVKSAKRLDEGISVLRVPLTQLKLKDLEKMVNRAREPKLYEALKARLEAHKDDPAKAFAEPFYKYDKAGNRTQQVKAVRVEQVQKTGVWVRNHNGIADNATMVRVDVFEKAGKYYLVPIYSWQVAKGILPDRAVVAYADEEDWTVIDESFRFKFVLYSNDLIKVQLKKDSFLGYFSGLDRATGAISLREHDLEKSKGKDGMHRIGVKTALSFQKYQIDEMGKEIRPCRLKKRPPVR

SEQ ID NO: 351 - protein, 1081 aa, Neisseria meningitidis
  Neisseria meningitidis 93004
MAAFKPNPINYILGLDIGIASVGWAMVEIDEDENPICLIDLGVRVFERAEVPKTGDSLAMARRLARSVRRLTRRRAHRLLRARRLLKREGVLQAADFDENGLIKSLPNTPWQLRAAALDRKLTPLEWSAVLLHLIKHRGYLSQRKNEGETADKELGALLKGVADNAHALQTGDFRTPAKLALNKFEKESGHIRNQRGDYSHTFSRKDLQAELNLLFEKQKEFGNPHISDGLKEGIETLLMTQRPALSGDAVQKMLGHCTFEPTEPKAAKNTYTAERFVWLTKLNNLRILEQGSEQPLTDTQRAKLMDEPYRKSKLTYAQARKLLGLEDTAFFKGLRYGKDNAEASTLMEMKAYHAISRALEKEGLKDKKSPLNLSPELQDEIGTAFSLFKTDEDITGRLKDRVQPEILEALLKHISFDKFVQISLKALRRIVPLMEQGKRYNEACAEIYGDHYGKKNTEEKIYLPPIPADEIRNPVVLRALSQARKVINGVVRRYGSPARIHIETAREVGKSFKDRKEIEKRQEENRKDREKAAAKFQEYFPNFVGEPKSKDILKLRLYEQQHGKCLYSGKEINLGRLNEKGYVEIDHALPFSRTWDDSFNNKVLVLGSENQNKGNQTPYEYFNGKDNSREWQEFKARVETSRFPRSKKQRILLQKFDEDGFKERNLNDTRYVNRFLCQFVADRMRLTGKGKKRVFASNGQITNLLRGFWGLRKVRAENDRHHALDAVVVACSTVAMQQKITRFVRYKEMNAFDGKTIDKETGEVLHQKTHFPQPWEFFAQEVMIRVFGKPDGKPEFEEADTPEKLRTLLAEKLSSRPEAVHEYVTPLFVSRAPNRKMSGQGHMETVKSAKRLDEGVSVLRVPLTQLKLKDLEKMVNREREPKLYEALKARLEAHKDDPAKAFAEPFYKYDKAGNRTQQVKAVRVEQVQKTGVWVRNHNGIADNATMVRVDVFEKGDKYYLVPIYSWQVAKGILPDRAVVAYADEEDWTVIDESFRFKFVLYSNDLIKVQLKKDSFLGYFSGLDRATGAISLREHDLEKSKGKDGMHRIGVKTALSFQKYQIDEMGKEIRPCRLKKRPPVR

SEQ ID NO: 352 - protein, 1082 aa, Neisseria meningitidis
  Neisseria meningitidis 96023
MAAFKPNPINYILGLDIGIASVGWAMVEIDEDENPICLIDLGVRVFERAEVPKTGDSLAMARRLARSVRRLTRRRAHRLLRARRLLKREGVLQAADFDENGLIKSLPNTPWQLRAAALDRKLTPLEWSAVLLHLIKHRGYLSQRKNEGETADKELGALLKGVADNAHALQTGDFRTPAELALNKFEKESGHIRNQRGDYSHTFSRKDLQAELILLFEKQKEFGNPHVSGGLKEGIETLLMTQRPALSSDAVQKMLGHCTFEPAEPKAAKNTYTAERFIWLTKLNNLRILEQGSERPLTDTERATLMDEPYRKSKLTYAQARKLLGLEDTAFFKGLRYGKDNAEASTLMEMKAYHAISRALEKEGLKDKKSPLNLSPELQDEIGTAFSLFKTDEDITGRLKDRIQPEILEALLKHISFDKFVQISLKALRRIVPLMEQGKRYDEACAEIYGDHYGKKNTEEKIYLPPIPADEIRNPVVLRALSQARKVINGVVRRYGSPARIHIETAREVGKSFKDRKEIEKRQEENRKDREKAAAKFREYFPNFVGEPKSKDILKLRLYEQQHGKCLYSGKEINLGRLNEKGYVEIDHALPFSRTWDDSFNNKVLVLGSENQNKGNQTPYEYFNGKDNSREWQEFKARVETSRFPRSKKQRILLQKFDEDGFKERNLNDTRYVNRFLYQFVADRMRLTGKGKKRVFASNGQITNLLRGFWGLRKVRAENDRHHALDAVVVACSTVAMQQKITRFVRYKEMNAFDGKTIDKETGEVLHQKTHFPQPWEFFAQEVMIRVFGKPDGKPEFEEADTPEKLRTLLAEKLSSRPEAVHEYVTPLFVSRAPNRKMSGQGHMETVKSAKRLDEGVSVLRVPLTQLKLKDLEKMVNREREPKLYEALKARLEAHKDDPAKAFAEPFYKYDKAGNRTQQVKAVRVEQVQKTGVWVRNHNGIADNATMVRVDVFEKGDKYYLVPIYSWQVAKGILPDRAVVQGKDEEDWQLIDDSFNFKFSLHPNDLVEVITKKARMFGYFASCHRGTGNINIRIHDLDHKIGKNGILEGIGVKTALSFQKYQIDELGKEIRPCRLKKRPPVR

SEQ ID NO: 353 - protein, 1081 aa, Neisseria meningitidis
  Neisseria meningitidis 98008
MAAFKPNPINYILGLDIGIASVGWAMVEIDEDENPICLIDLGVRVFERAEVPKTGDSLAAARRLARSVRRLTRRRAHRLLRARRLLKREGVLQAADFDENGLIKSLPNTPWQLRSAALDRKLTPLEWSAVLLHLIKHRGYLSQRKNEGETADKELGALLKGVANNAHALQTGDFRTPAELALNKFEKESGHIRNQRGDYSHTFSRKDLQAELILLFEKQKEFGNPHVSGGLKEGIETLLMTQRPALSGDAVQKMLGHCTFEPAEPKAAKNTYTAERFIWLTKLNNLRILEQGSERPLTDTERATLMDEPYRKSKLTYAQARKLLGLEDTAFFKGLRYGKDNAEASTLMEMKAYHAISRALEKEGLKDKKSPLNLSPELQDEIGTAFSLFKTDEDITGRLKDRIQPEILEALLKHISFDKFVQISLKALRRIVPLMEQGKRYDEACAEIYGDHYGKKNTEEKIYLPPIPADEIRNPVVLRALSQARKVINGVVRRYGSPARIHIETAREVGKSFKDRKEIEKRQEENRKDREKAAAKFREYFPNFVGEPKSKDILKLRLYEQQHGKCLYSGKEINLGRLNEKGYVEIDHALPFSRTWDDSFNNKVLVLGSENQNKGNQTPYEYFNGKDNSREWQEFKARVETSRFPRSKKQRILLQKFDEDGFKERNLNDTRYVNRFLCQFVADRMRLTGKGKKRVFASNGQITNLLRGFWGLRKVRAENDRHHALDAVVVACSTVAMQQKITRFVRYKEMNAFDGKTIDKETGEVLHQKTHFPQPWEFFAQEVMIRVFGKPDGKPEFEEADTPEKLRTLLAEKLSSRPEAVHEYVTPLFVSRAPNRKMSGQGHMETVKSAKRLDEGVSVLRVPLTQLKLKDLEKMVNREREPKLYEALKARLEAHKDDPAKAFAEPFYKYDKAGNRTQQVKAVRVEQVQKTGVWVRNHNGIADNATMVRVDVFEKAGKYYLVPIYSWQVAKGILPDRAVVAYADEEGWTVIDESFRFKFVLYSNDLIKVQLKKDSFLGYFSGLDRATGAISLREHDLEKSKGKDGMHRIGVKTALSFQKYQIDEMGKEIRLCRLKKRPPVR

SEQ ID NO: 354 - protein, 1082 aa, Neisseria meningitidis
MAAFKPNPINYILGLDIGIASVGWAMVEIDEEENPIRLIDLGVRVFERAEVPKTGDSLAMVRRLARSVRRLTRRRAHRLLRARRLLKREGVLQAADFDENGLIKSLPNTPWQLRAAALDRKLTPLEWSAVLLHLIKHRGYLSQRKNEGETADKELGALLKGVADNAHALQTGDFRTPAELALNKFEKESGHIRNQRGDYSHTFSRKDLQAELILLFEKQKEFGNPHISGGLKEGIETLLMTQRPALSGDAVQKMLGHCTFEPAEPKAAKNTYTAERFIWLTKLNNLRILEQGSERPLTDTERATLMDEPYRKSKLTYAQARKLLGLEDTAFFKGLRYGKDNAEASTLMEMKAYHAISRALEKEGLKDKKSPLNLSPELQDEIGTAFSLFKTDEDITGRLKDRIQPEILEALLKHISFDKFVQISLKALRRIVPLMEQGKRYDEACAEIYGDHYGKKNTEEKIYLPPIPADEIRNPVVLRALSQARKVINGVVRRYGSPARIHIETAREVGKSFKDRKEIEKRQEENRKDREKAAAKFREYFPNFVGEPKSKDILKLRLYEQQHGKCLYSGKEINLGRLNEKGYVEIDHALPFSRTWDDSFNNKVLVLGSENQNKGNQTPYEYFNGKDNSREWQEFKARVETSRFPRSKKQRILLQKFDEDGFKERNLNDTRYVNRFLCQFVADRMRLTGKGKKRVFASNGQITNLLRGFWGLRKVRAENDRHHALDAVVVACSTVAMQQKITRFVRYKEMNAFDGKTIDKETGEVLHQKTHFPQPWEFFAQEVMIRVFGKPDGKPEFEEADTPEKLRTLLAEKLSSRPEAVHEYVTPLFVSRAPNRKMSGQGHMETVKSAKRLDEGVSVLRVPLTQLKLKDLEKMVNREREPKLYEALKARLEAHKDDPAKAFAEPFYKYDKAGNRTQQVKAVRVEQVQKTGVWVRNHNGIADNATMVRVDVFEKGDKYYLVPIYSWQVAKGILPDRAVVQGKDEEDWQLIDDSFNFKFSLHPNDLVEVITKKARMFGYFASCHRGTGNINIRIHDLDHKIGKNGILEGIGVKTALSFQKYQIDELGKEIRPCRLKKRPPVR

SEQ ID NO: 355 - protein, 1082 aa, Neisseria meningitidis
  Neisseria meningitidis alpha275
MAAFKPNPINYILGLDIGIASVGWAMVEIDEDENPICLIDLGVRVFERAEVPKTGDSLAAARRLARSVRRLTRRRAHRLLRARRLLKREGVLQAADFDENGLIKSLPNTPWQLRAAALDRKLTPLEWSAVLLHLIKHRGYLSQRKNEGETADKELGALLKGVADNAHALQTGDFRTPAELALNKFEKESGHIRNQRGDYSHTFSRKDLQAELILLFEKQKEFGNPHVSGGLKEGIETLLMTQRPALSGDAVQKMLGHCTFEPAEPKAAKNTYTAERFIWLTKLNNLRILEQGSERPLTDTERATLMDEPYRKSKLTYAQARKLLGLEDTAFFKGLRYGKDNAEASTLMEMKAYHAISRALEKEGLKDKKSPLNLSPELQDEIGTAFSLFKTDEDITGRLKDRVQPEILEALLKHISFDKFVQISLKALRRIVPLMEQGKRYDEACAEIYGDHYGKKNTEEKIYLPPIPADEIRNPVVLRALSQARKVINGVVRRYGSPARIHIETAREVGKSFKDRKEIEKRQEENRKDREKAAAKFREYFPNFVGEPKSKDILKLRLYEQQHGKCLYSGKEINLGRLNEKGYVEIDHALPFSRTWDDSFNNKVLVLGSENQNKGNQTPYEYFNGKDNSREWQEFKARVETSRFPRSKKQRILLQKFDEDGFKERNLNDTRYVNRFLCQFVADRMRLTGKGKKRVFASNGQITNLLRGFWGLRKVRAENDRHHALDAVVVACSTVAMQQKITRFVRYKEMNAFDGKTIDKETGEVLHQKTHFPQPWEFFAQEVMIRVFGKPDGKPEFEEADTPEKLRTLLAEKLSSRPEAVHEYVTPLFVSRAPNRKMSGQGHMETVKSAKRLDEGVSVLRVPLTQLKLKDLEKMVNREREPKLYEALKARLEAHKDDPAKAFAEPFYKYDKAGNRTQQVKAVRVEQVQKTGVWVRNHNGIADNATMVRVDVFEKGDKYYLVPIYSWQVAKGILPDRAVVQGKDEEDWQLIDDSFNFKFSLHPNDLVEVITKKARMFGYFASCHRGTGNINIRIHDLDHKIGKNGILEGIGVKTALSFQKYQIDELGKEIRPCRLKKRPPVR

SEQ ID NO: 356 - protein, 1082 aa, Neisseria meningitidis
  Neisseria meningitidis ATCC 13091
MAAFKPNPINYILGLDIGIASVGWAMVEIDEEENPIRLIDLGVRVFERAEVPKTGDSLAMARRLARSVRRLTRRRAHRLLRTRRLLKREGVLQAANFDENGLIKSLPNTLWQLRAAALDRKLTPLEWSAVLLHLIKHRGYLSQRKNEGETADKELGALLKGVAGNAHALQTGDFRTPAELALNKFEKESGHIRNQRGDYSHTFSRKDLQAELNLLFEKQKEFGNPHISDGLKEGIETLLMTQRPALSGDAVQKMLGHCTFEPTEPKAAKNTYTTERFIWLTKLNNLRILEQGSERPLTDTERATLMDEPYRKSKLTYAQARKLLELDDIAFFKGLRYGKDNAEASTLMEMKAYHAISRALEKEGLKDKKSPLNLSPELQDEIGTAFSLFKTDEDITGRLKDRIQPEILEALLKHINFDKFVQISLKALRRIVPLMEQGKRYDEACAEIYGDHYGKKNTEEKIDLPPIPADEIHNPVVLRALSQARKVINGVVRRYGSPARIHIETAREVGKSFKDRKEIEKRQEENRKDREKAAAKFREYFPNFVGEPKSKDILKLRLYEQQHGKCLYSGKEINLGRLNEKGYVEIDHALPFSRTWDDSFNNKVLVLGSENQNKGNQTPYEYFNGKDNSREWQEFKARVETSRFPRSKKQRILLQKFDEDGFKERNLNDTRYVNRFLCQFVADRMRLTGKGKKRVFASNGQITNLLRGFWGLRKVRAENDRHHALDAVVVACSTVAMQQKITRFVRYKEMNAFDGKTIDKETGEVLHQKTHFPQPWEFFAQEVMIRVFGKPDGKPEFEEADTPEKLRTLLTEKLSSRPEAVHEYVTPLFVSRAPNRKMSGQGHMETVKSAKRLDEGISVLRVPLTQLKLKDLEKMVNREREPKLYEALKARLEAHKDDPAKAFAEPFYKYDKAGNRTQQVKAMRVEQVQKTGVWVRNHNGIADNATMVRVDVFEKGDKYYLVPIYSWQVAKGILPDRAVVQGKDEEDWQLIDDSFNFKFSLHPNDLVEVITKKARMFGYFASCHRGTGNINIRIHDLDHKIGKNGILEGIGVKTALSFQKYQIDELGKEIRPCRLKKRPPVR

SEQ ID NO: 357 - protein, 1081 aa, Neisseria meningitidis
  Neisseria meningitidis N1568
MAAFKPNPINYILGLDIGIASVGWAMVEIDEEENPIRLIDLGVRVFERAEVPKTGDSLAMARRLARSVRRLTRRRAHRLLRARRLLKREGVLQAADFDENGLIKSLPNTPWQLRAAALDRKLTPLEWSAVLLHLIKHRGYLSQRKNEGETADKELGALLKGVADNAHALQTGDFRTPAELALNKFEKECGHIRNQRGDYSHTFSRKDLQAELNLLFEKQKEFGNPHVSGGLKEGIETLLMTQRPALSGDAVQKMLGHCTFEPAEPKAAKNTYTAERFIWLTKLNNLRILEQGSERPLTDTERATLMDEPYRKSKLTYAQARKLLSLEDTAFFKGLRYGKDNAEASTLMEMKAYHTISRALEKEGLKDKKSPLNLSPELQDEIGTAFSLFKTDEDITGRLKDRIQPEILEALLKHISFDKFVQISLKALRRIVPLMEQGKRYDEACAEIYGDHYGKKNTEEKIYLPPIPADEIRNPVVLRALSQARKVINGVVRRYGSPARIHIETAREVGKSFKDRKEIEKRQEENRKDREKAAAKFREYFPNFVGEPKSKDILKLRLYEQQHGKCLYSGKEINLGRLNEKGYVEIDHALPFSRTWDDSFNNKVLVLGSENQNKGNQTPYEYFNGKDNSREWQEFKARVETSRFPRSKKQRILLQKFDEDGFKERNLNDTRYVNRFLCQFVADRMRLTGKGKKRVFASNGQITNLLRGFWGLRKVRAENDRHHALDAVVVACSTVAMQQKITRFVRYKEMNAFDGKTIDKETGEVLHQKTHFPQPWEFFAQEVMIRVFGKPDGKPEFEEADTPEKLRTLLAEKLSSRPEAVHEYVTPLFVSRAPNRKMSGQGHMETVKSAKRLDEGVSVLRVPLTQLKLKDLEKMVNREREPKLYEALKARLEAHKDDPAKAFAEPFYKYDKAGNRTQQVKAVRVEQVQKTGVWVRNHNGIADNATMVRVDVFEKGDKYYLVPIYSWQVAKGILPDRAVVAYADEEDWTVIDESFRFKFVLYSNDLIKVQLKKDSFLGYFSGLDRATGAISLREHDLEKSKGKDGMHRIGVKTALSFQKYQIDEMGKEIRPCRLKKRPPVR

SEQ ID NO: 358 - protein, 1081 aa, Neisseria meningitidis
  Neisseria meningitidis NM140
MAAFKPNPINYILGLDIGIASVGWAMVEIDEDENPICLIDLGVRVFERAEVPKTGDSLAAARRLARSVRRLTRRRAHRLLRARRLLKREGVLQAADFDENGLIKSLPNTPWQLRSAALDRKLTPLEWSAVLLHLIKHRGYLSQRKNEGETADKELGALLKGVADNAHALQTGDFRTPAELALNKFEKESGHIRNRRGDYSHTFSRKDLQAELDLLFEKQKEFGNPHISDDLKEGIETLLMTQRPALSGDAVQKMLGHCTFEPTEPKAAKNTYTAERFVWLTKLNNLRILEQGSERPLTDTERATLMDEPYRKSKLTYAQARKLLELDDTAFFKGLRYGKDNAEASTLMEMKAYHAISRALEKEGLKDKKSPLNLSPELQDEIGTAFSLFKTDEDITGRLKDRVQPEILEVLLKHISFDKFVQISLKALRRIVPLMEQGKRYDEACAEIYGDHDGKKNTEEKIYLPPIPADEIRNPVVLRALSQARKVINAVVRRYGSPARIHIETAREVGKSFKDRKEIEKRQEENRKDREKAAAKFREYFPNFVGEPKSKDILKLRLYEQQHGKCLYSGKEINLGRLNEKGYVEIDHALPFSRTWDDSFNNKVLVLGSENQNKGNQTPYEYFNGKDNSREWQEFKARVETSRFPRSKKQRILLQKFDEEGFKERNLNDTRYVNRFLCQFVADHMLLTGKGKRRVFASNGQITNLLRGFWGLRKVRAENNRHHALDAVVVACSTVAMQQKITRFVRYKEMNAFDGKTIDKETGEVLHQKTHFPQPWEFFAQEVMIRVFGKPDGKPEFEEADTPEKLRTLLAEKLSSRPEAVHEYVTPLFVSRAPNRKMSGQGHMETVKSAKRLDEGVSVLRVPLTQLKLKDLEKMVNREREPKLYEALKARLEAHKDDPAKAFAEPFYKYDKAGNRTQQVKAVRVEQVQKTGVWVRNHNGIADNATMVRVDVFEKAGKYYLVPIYSWQVAKGILPDRAVVAYADEEGWTVIDESFRFKFVLYSNDLIKVQLKKDSFLGYFSGLDRATGAISLREHDLEKSKGKDGMHRIGVKTALSFQKYQIDEMGKEIRLCRLKKRPPVR

SEQ ID NO: 359 - protein, 1082 aa, Neisseria meningitidis
  Neisseria meningitidis NM220
MAAFKPNPINYILGLDIGIASVGWAMVEIDEEENPIRLIDLGVRVFERAEVPKTGDSLAMARRLARSVRRLTRRRAHRLLRARRLLKREGVLQAADFDENGLIKSLPNTPWQLRAAALDRKLTPLEWSAVLLHLIKHRGYLSQRKNEGETADKELGALLKGVANNAHALQTGDFRTPAELALNKFEKESGHIRNQRGDYSHTFSRKDLQAELILLFEKQKEFGNPHVSGGLKEGIETLLMTQRPALSGDAVQKMLGHCTFEPAEPKAAKNTYTAERFIWLTKLNNLRILEQGSERPLTDTERATLMDEPYRKSKLTYAQARKLLGLEDTAFFKGLRYGKDNAEASTLMEMKAYHAISRALEKEGLKDKKSPLNLSSELQDEIGTAFSLFKTDEDITGRLKDRVQPEILEALLKHISFDKFVQISLKALRRIVPLMEQGKRYDEACAEIYGDHYGKKNTEEKIYLPPIPADEIRNPVVLRALSQARKVINGVVRRYGSPARIHIETAREVGKSFKDRKEIEKRQEENRKDREKAAAKFREYFPNFVGEPKSKDILKLRLYEQQHGKCLYSGKEINLVRLNEKGYVEIDHALPFSRTWDDSFNNKVLVLGSENQNKGNQTPYEYFNGKDNSREWQEFKARVETSRFPRSKKQRILLQKFDEDGFKECNLNDTRYVNRFLCQFVADHILLTGKGKRRVFASNGQITNLLRGFWGLRKVRAENDRHHALDAVVVACSTVAMQQKITRFVRYKEMNAFDGKTIDKETGKVLHQKTHFPQPWEFFAQEVMIRVFGKPDGKPEFEEADTPEKLRTLLAEKLSSRPEAVHEYVTPLFVSRAPNRKMSGAHKDTLRSAKRFVKHNEKISVKRVWLTEIKLADLENMVNYKNGREIELYEALKARLEAYGGNAKQAFDPKDNPFYKKGGQLVKAVRVEKTQESGVLLNKKNAYTIADNGDMVRVDVFCKVDKKGKNQYFIVPIYAWQVAENILPDIDCKGYRIDDSYTFCFSLHKYDLIAFQKDEKSKVEFAYYINCDSSNGRFYLAWHDKGSKEQQFRISTQNLVLIQKYQVNELGKEIRPCRLKKRPPVR

SEQ ID NO: 360 - protein, 1082 aa, Neisseria meningitidis
  Neisseria meningitidis NM233
MAAFKPNPINYILGLDIGIASVGWAMVEIDEEENPIRLIDLGVRVFERAEVPKTGDSLAMARRLARSVRRLTRRRAHRLLRARRLLKREGVLQAADFDENGLIKSLPNTPWQLRAAALDRKLTPLEWSAVLLHLIKHRGYLSQRKNEGETADKELGALLKGVANNAHALQTGDFRTPAELALNKFEKESGHIRNQRGDYSHTFSRKDLQAELILLFEKQKEFGNPHVSGGLKEGIETLLMTQRPALSGDAVQKMLGHCTFEPAEPKAAKNTYTAERFIWLTKLNNLRILEQGSERPLTDTERATLMDEPYRKSKLTYAQARKLLGLEDTAFFKGLRYGKDNAEASTLMEMKAYHAISRALEKEGLKDKKSPLNLSSELQDEIGTAFSLFKTDEDITGRLKDRVQPEILEALLKHISFDKFVQISLKALRRIVPLMEQGKRYDEACAEIYGDHYGKKNTEEKIYLPPIPADKIRNPVVLRALSQARKVINGVVRRYGSPARIHIETAREVGKSFKDRKEIEKRQEENRKDREKAAAKFREYFPNFVGEPKSKDILKLRLYEQQHGKCLYSGKEINLVRLNEKGYVEIDHALPFSRTWDDSFNNKVLVLGSENQNKGNQTPYEYFNGKDNSREWQEFKARVETSRFPRSKKQRILLQKFDEDGFKECNLNDTRYVNRFLCQFVADHILLTGKGKRRVFASNGQITNLLRGFWGLRKVRAENDRHHALDAVVVACSTVAMQQKITRFVRYKEMNAFDGKTIDKETGKVLHQKTHFPQPWEFFAQEVMIRVFGKPDGKPEFEEADTPEKLRTLLAEKLSSRPEAVHEYVTPLFVSRAPNRKMSGAHKDTLRSAKRFVKHNEKISVKRVWLTEIKLADLENMVNYKNGREIELYEALKARLEAYGGNAKQAFDPKDNPFYKKGGQLVKAVRVEKTQESGVLLNKKNAYTIADNGDMVRVDVFCKVDKKGKNQYFIVPIYAWQVAENILPDIDCKGYRIDDSYTFCFSLHKYDLIAFQKDEKSKVEFAYYINCDSSNGRFYLAWHDKGSKEQQFRISTQNLVLIQKYQVNELGKEIRPCRLKKRPPVR

SEQ ID NO: 361 - protein, 1082 aa, Neisseria meningitidis
MAAFKPNPINYILGLDIGIASVGWAMVEIDEDENPICLIDLGVRVFERAEVPKTGDSLAMARRLARSVRRLTRRRAHRLLRARRLLKREGVLQAADFDENGLIKSLPNTPWQLRAAALDRKLTPLEWSAVLLHLIKHRGYLSQRKNEGETADKELGALLKGVADNAHALQTGDFRTPAELALNKFEKESGHIRNQRGDYSHTFSRKDLQAELILLFEKQKEFGNPHVSGGLKEGIETLLMTQRPALSSDAVQKMLGHCTFEPAEPKAAKNTYTAERFIWLTKLNNLRILEQGSERPLTDTERATLMDEPYRKSKLTYAQARKLLGLEDTAFFKGLRYGKDNAEASTLMEMKAYHAISRALEKEGLKDKKSPLNLSPELQDEIGTAFSLFKTDEDITGRLKDRIQPEILEALLKHISFDKFVQISLKALRRIVPLMEQGKRYDEACAEIYGDHYGKKNTEEKIYLPPIPADEIRNPVVLRALSQARKVINGVVRRYGSPARIHIETAREVGKSFKDRKEIEKRQEENRKDREKAAAKFREYFPNFVGEPKSKDILKLRLYEQQHGKCLYSGKEINLGRLNEKGYVEIDHALPFSRTWDDSFNNKVLVLGSENQNKGNQTPYEYFNGKDNSREWQEFKARVETSRFPRSKKQRILLQKFDEDGFKERNLNDTRYVNRFLCQFVADRMRLTGKGKKRVFASNGQITNLLRGFWGLRKVRAENDRHHALDAVVVACSTVAMQQKITRFVRYKEMNAFDGKTIDKETGEVLHQKTHFPQPWEFFAQEVMIRVFGKPDGKPEFEEADTPEKLRTLLAEKLSSRPEAVHEYVTPLFVSRAPNRKMSGQGHMETVKSAKRLDEGVSVLRVPLTQLKLKDLEKMVNREREPKLYEALKARLEAHKDDPAKAFAEPFYKYDKAGNRTQQVKAVRVEQVQKTGVWVRNHNGIADNATMVRVDVFEKGDKYYLVPIYSWQVAKGILPDRAVVQGKDEEDWQLIDDSFNFKFSLHPNDLVEVITKKARMFGYFASCHRGTGNINIRIHDLDHKIGKNGILEGIGVKTALSFQKYQIDELGKEIRPCRLKKRPPVR

SEQ ID NO: 362 - protein, 1082 aa, Neisseria meningitidis
MAAFKPNPINYILGLDIGIASVGWAMVEIDEDENPICLIDLGVRVFERAEVPKTGDSLAMARRLARSVRRLTRRRAHRLLRARRLLKREGVLQAADFDENGLIKSLPNTPWQLRAAALDRKLTPLEWSAVLLHLIKHRGYLSQRKNEGETADKELGALLKGVADNAHALQTGDFRTPAELALNKFEKESGHIRNQRGDYSHTFSRKDLQAELILLFEKQKEFGNPHVSGGLKEGIETLLMTQRPALSGDAVQKMLGHCTFEPAEPKAAKNTYTAERFIWLTKLNNLRILEQGSERPLTDTERATLMDEPYRKSKLTYAQARKLLGLEDTAFFKGLRYGKDNAEASTLMEMKAYHAISRALEKEGLKDKKSPLNLSPELQDEIGTAFSLFKTDEDITGRLKDRIQPEILEALLKHISFDKFVQISLKALRRIVPLMEQGKRYDEACAEIYGDHYGKKNTEEKIYLPPIPADEIRNPVVLRALSQARKVINGVVRRYGSPARIHIETAREVGKSFKDRKEIEKRQEENRKDREKAAAKFREYFPNFVGEPKSKDILKLRLYEQQHGKCLYSGKEINLGRLNEKGYVEIDHALPFSRTWDDSFNNKVLVLGSENQNKGNQTPYEYFNGKDNSREWQEFKARVETSRFPRSKKQRILLQKFDEDGFKERNLNDTRYVNRFLCQFVADRMRLTGKGKKRVFASNGQITNLLRGFWGLRKVRAENDRHHALDAVVVACSTVAMQQKITRFVRYKEMNAFDGKTIDKETGEVLHQKTHFPQPWEFFAQEVMIRVFGKPDGKPEFEEADTPEKLRTLLAEKLSSRPEAVHEYVTPLFVSRAPNRKMSGQGHMETVKSAKRLDEGVSVLRVPLTQLKLKDLEKMVNREREPKLYEALKARLEAHKDDPAKAFAEPFYKYDKAGNRTQQVKAVRVEQVQKTGVWVRNHNGIADNATMVRVDVFEKGDKYYLVPIYSWQVAKGILPDRAVVQGKDEEDWQLIDDSFNFKFSLHPNDLVEVITKKARMFGYFASCHRGTGNINIRIHDLDHKIGKNGILEGIGVKTALSFQKYQIDELGKEIRPCRLKKRPPVR

SEQ ID NO: 363 - protein, 1089 aa, Neisseria sp.
  Neisseria sp. oral taxon 014 str. F0314
MTAFKPNPLNYILGLDIGIASVGWAMVEIDDKENPVRLIDLGVRVFERAEMPKTGDSLAAARRLARSVRRLTRRRAHRLLRARRLLKHEGVLKPEDFDENGLVKPLPYIPKQPRNTPWQLRAAALDRKLTPLEWAAVLLHLVKHRGYLSQRKNEGETDDKELGALLKGVADNTHALQAGNFRTPAELALNKFEKESGHIRNQRGDYSHTFSRKDLQAELVLLFEKQKEFGNPYVSDDLKNGIENLLMTQRPALSGDAIQKMLGHCTFEPAEPKAAKNTYTAERFIWLTKLNNLRILNQGNERPLTDAERTTLMDEPYKKSKLTYAQARKLLDLDDTAFFKGLRYGKDNAESATLMEMKAYHAISRALEKEGLKDKKSPLSLSPELQDEIGTAFSLFKTDEEITGRLKGCLQPEILDALLKHISFDKFVQISLKALRRIVPLMEQGKRYDEACAEIYGDHHGRRNSEETLYLPPIPADEIRNPVVLRALSQARKVINGVGRRYGSPARIHIETAREVGKSFKDRKEIEKRQEENRKDREKAAAEFQEYFPNFVGEPKSKDILKLRLYRQQNCKCLYSGKEINLGRLNEKGYVEIDHALPFSRTWDDSFNNKVLVLGSENQNKGNRTPYEYLNGKDNSREWQEFKARVETSRFPHSKKQRILLQKFDEEGFKERNLNDTRYVNRFLCKFVADHMQLTGKGKRRVFASNGQITNLLRGFWGLRKVRAENDRHHALDAVVVACSTVAMQQRITRFVRYKEMNAFDGKTVDKETGEVLHQKTHFPQPWEFFAQEVMIRVFGKPDGKPELEEADTPEKLRALLAEKLSSRPEAVHEYVAPLFVSRAPNRKMSGQGHMETIKSPKRLDEGISVVRVPLTQLKLKDLEKMVNREREPKLYEALKARLEAHKDDPAKAFAEPFYKQDKAGNRTQQVKAVRIEQVQKTGVWVRNQNGIADNATMVRVDVFEKGGKYYLVPIYSWQVAKGILPDKAIIAFKDEEEWQLIDDSFNFKFPLHPNDLVEVITKKARIFGYFASCHRGTGNINIRIHDLDNKVGKNGILEGIGVKTALSFQKYQIDELGKEIRPCRLKKRPPVR

SEQ ID NO: 364 - protein, 1097 aa, Neisseria wadsworthii
  Neisseria wadsworthii 9715
MKKQPQRYILGLDLGIASVGWALILVDGAENPVGLLDCGVRTFERAEVPKTGDSLALARRQARSVRRLIRRRAHRLLRLRRLLKREGILSAADFNSDGLPNLPIDAWQLRVAGLERKLTNQEWAAVLLHLVKHRGYLSQRKSETQTENKELGRLLAGVAENSKLLSESSEQYRTPAELAVKLFAEQSGHLRNKGGEYTHTFNRLDLQKELHLLFERQYALGNPFASAELQSKVDELLMTQRSALQGEAVLKMLGKCTFEPSEYKAAKNTYSAERFIWLTKLNNLRILYNGEERALDEGDRKKLLDEPYKKAKLTYKQVRSILNLPESAVFKGLRYGKDSDGLKAENGTLMEMKAYHKIRTILDKAGLKGEWENRIRNPEILDKIGTAFSLYKTDEDIQAALADLRLPENVLDALLAGLNFDKFIQLSLKALRNILPLMERGIRYDEACKEVYGDHRALAESKNQVLLPPIPADEIRNPVVLRTLTQARKVINAIIRRYGSPQRVHIETARELGKSKQERDKIDRKNKENQNDRNRLASDIRKHFNFEPTPKDILKLRLYEQQHGKCLYSDLREEKGECLYTGNVIELHRLFEDGYVEIDHALPLSRTWDNSLNNKVLVLKSSNQNKGNKTPYEWLDGANNSRRWREFQARVQGCHFPYVKKQRIQTAKLDSKAEQGFLERNLNDTRYISKFMCQFITANLRLAETSNALMEEVAGENPYWKERKRQRVFAPSGSIIALLRGLWGLKKVREDNDRHHALDAIVVACSTVSMQQKITKAMQRRETLETVDSETGEVKTRIPQPWDFFRQEVMIRVFSDSPREELAEKLNSRPEALHDFVSPLFVSRAPNRKMTGQGHLETVKSAKRLSENISVVRKPLTALKLKDIENIVGYPDREPALYQALRERLLAHKDDPVKAFADKPFYKPAKDGGQGSLVKAVRIIENTKHGLKIRNGITDTNGDMVRTDVYQKTDKKGKRQYFIVPVYAWQVEKNELPTVDCKGYEIDDNYEFCFSLYKYDLIEIQNPNDINQELRAYYINCDSSDGRFWLAYHDKSAKEQQFRISTQNQPIIKKYQVDTLGKEIRLCKAEKRTALNGKKKK

SEQ ID NO: 365 - protein, 1426 aa, Niabella soli
  Niabella soli DSM 19437
MPRKNILGLDLGTTSIGFAKIIEDDDYQCSSVELIGVRVNPLTTDEQTNFEKGKPVSVNADRTLKRGMRRNLDRYQLRRDYLIEILRTHHIITADTKLAEDGKNTTHTTYALRALAATAEIPLEAFVRVLLAINKKRGYKSSRKAKNEDEGQLIDGMAIARRLYEESLTPGQFSYQLLKEGKKYLPDFYRSDLNTELNKVWNFQKQFYPEILTDEFKRHLEGKGQRATAVAFWGQHGFSMAENKGSREEKKLHAYKWRSEAAHKQLTKEEVAFVITEINNDLNKSSGYLGAISDRSKELFFNKQTVGQYLHQQLKENPHTRLKGQVFYRQDYLDEFETIWEMQAKFYSALTLELKEEVRDVVIFYQRKLKSQMGLISLCEFESKEIEIEKNGEKAKKRIGLRVAPKSSPLFQEFKIWQVLNNLEFRNKKTKEVFVPEMAAKQQLFDELNIKGNLLASEAIKILGYKTKDWEANYHTLEGNRTNKSLYDAWLKILELEGYDENLLKLSGSDDIDVSKIEKPALEIRQMVLAVFEVLGISGAILDFDAEADGKAFEQQPAYQLWHLLYSAEDDGKKYSQEDIFTYGHDNIGLKKKLCEKFGFRPEHTKILVNVVFSDDYGNLSSKAMRRIYPFIKELTYDKACAEAGYRHSAASLTKEEIAARPLQNRLDLLKKNELRSPVVEKILNQMVNVVNTLVDDENQNRKARGLSEDFHFDEIRIELARELKKNAKERAEMTTNINTAKQSHEKIIRILQTEFGVPNPSRNDIVRYKLYEELKNNGYKDLYTNTYISRDILFSKQIDVDHIIPQMSLFDDSFSNKTVVFRKDNQDKGNKTAYDYILGKYGEQALEEYISRITSLFELGKKNKEEGIGKAKFQKLQKRLVDIGDGFIERDLRESQYIAKKANNMLYAICRSVVSTSGEITARLREDWDLVNVMQEINLPKFRALGLTEMVEKKDGAQKERITDWTKRNDHRHHAMDALAIAFTRHSHIQYLNHLNARKDEANKWHPVVSKIEEKETVLIYDDLGNRKRKFKAPMPNFREVVKEHLENVLISHKAKNKVVTKNKNKIKTVRGEKVKTELTPRGQLHKETIYGRYRYYESKEEKIGPKFDAEMIGMVTNPQYKKLLLERLAANGNDPKKAFWGKNALNKNPLYVDEARQELLPEKILLRWLNDDYSIRKDVTPENLKDIKTIEKILDKGVKKILLKRLADFGNDPKKAFSDLDKNPIWQNEAKRIAIKRVTISGIKNAAPLHHKKDHLGNDILDEKGKQIPSSFVSTGNNHHVAIYRDAEGNLQERVVSLFDAVQLVNGGEPVIDKEYNKGIGWQFLFTMKQNEMFVFPDEKTGFNPREVDLLSSGNRKLISPNLFRVQKLASKNYFFRHHLETSVEEKKELKNIAYKPQLGLNALSNIVKVRINHIGEIVSVGEY

SEQ ID NO: 366 - protein, 1132 aa, Nitratifractor salsuginis
MKKILGVDLGITSFGYAILQETGKDLYRCLDNSVVMRNNPYDEKSGESSQSIRSTQKSMRRLIEKRKKRIRCVAQTMERYGILDYSETMKINDPKNNPIKNRWQLRAVDAWKRPLSPQELFAIFAHMAKHRGYKSIATEDLIYELELELGLNDPEKESEKKADERRQVYNALRHLEELRKKYGGETIAQTIHRAVEAGDLRSYRNHDDYEKMIRREDIEEEIEKVLLRQAELGALGLPEEQVSELIDELKACITDQEMPTIDESLFGKCTFYKDELAAPAYSYLYDLYRLYKKLADLNIDGYEVTQEDREKVIEWVEKKIAQGKNLKKITHKDLRKILGLAPEQKIFGVEDERIVKGKKEPRTFVPFFFLADIAKFKELFASIQKHPDALQIFRELAEILQRSKTPQEALDRLRALMAGKGIDTDDRELLELFKNKRSGTRELSHRYILEALPLFLEGYDEKEVQRILGFDDREDYSRYPKSLRHLHLREGNLFEKEENPINNHAVKSLASWALGLIADLSWRYGPFDEIILETTRDALPEKIRKEIDKAMREREKALDKIIGKYKKEFPSIDKRLARKIQLWERQKGLDLYSGKVINLSQLLDGSADIEHIVPQSLGGLSTDYNTIVTLKSVNAAKGNRLPGDWLAGNPDYRERIGMLSEKGLIDWKKRKNLLAQSLDEIYTENTHSKGIRATSYLEALVAQVLKRYYPFPDPELRKNGIGVRMIPGKVTSKTRSLLGIKSKSRETNFHHAEDALILSTLTRGWQNRLHRMLRDNYGKSEAELKELWKKYMPHIEGLTLADYIDEAFRRFMSKGEESLFYRDMFDTIRSISYWVDKKPLSASSHKETVYSSRHEVPTLRKNILEAFDSLNVIKDRHKLTTEEFMKRYDKEIRQKLWLHRIGNTNDESYRAVEERATQIAQILTRYQLMDAQNDKEIDEKFQQALKELITSPIEVTGKLLRKMRFVYDKLNAMQIDRGLVETDKNMLGIHISKGPNEKLIFRRMDVNNAHELQKERSGILCYLNEMLFIFNKKGLIHYGCLRSYLEKGQGSKYIALFNPRFPANPKAQPSKFTSDSKIKQVGIGSATGIIKAHLDLDGHVRSYEVFGTLPEGSIEWFKEESGYGRVEDDPHH

SEQ ID NO: 367 - protein, 1166 aa, Nitrobacter hamburgensis
MHVEIDFPHFSRGDSHLAMNKNEILRGSSVLYRLGLDLGSNSLGWFVTHLEKRGDRHEPVALGPGGVRIFPDGRDPQSGTSNAVDRRMARGARKRRDRFVERRKELIAALIKYNLLPDDARERRALEVLDPYALRKTALTDTLPAHHVGRALFHLNQRRGFQSNRKTDSKQSEDGAIKQAASRLATDKGNETLGVFFADMHLRKSYEDRQTAIRAELVRLGKDHLTGNARKKIWAKVRKRLFGDEVLPRADAPHGVRARATITGTKASYDYYPTRDMLRDEFNAIWAGQSAHHATITDEARTEIEHIIFYQRPLKPAIVGKCTLDPATRPFKEDPEGYRAPWSHPLAQRFRILSEARNLEIRDTGKGSRRLTKEQSDLVVAALLANREVKFDKLRTLLKLPAEARFNLESDRRAALDGDQTAARLSDKKGFNKAWRGFPPERQIAIVARLEETEDENELIAWLEKECALDGAAAARVANTTLPDGHCRLGLRAIKKIVPIMQDGLDEDGVAGAGYHIAAKRAGYDHAKLPTGEQLGRLPYYGQWLQDAVVGSGDARDQKEKQYGQFPNPTVHIGLGQLRRVVNDLIDKYGPPTEISIEFTRALKLSEQQKAERQREQRRNQDKNKARAEELAKFGRPANPRNLLKMRLWEELAHDPLDRKCVYTGEQISIERLLSDEVDIDHILPVAMTLDDSPANKIICMRYANRHKRKQTPSEAFGSSPTLQGHRYNWDDIAARATGLPRNKRWRFDANAREEFDKRGGFLARQLNETGWLARLAKQYLGAVTDPNQIWVVPGRLTSMLRGKWGLNGLLPSDNYAGVQDKAEEFLASTDDMEFSGVKNRADHRHHAIDGLVTALTDRSLLWKMANAYDEEHEKFVIEPPWPTMRDDLKAALEKMVVSHKPDHGIEGKLHEDSAYGFVKPLDATGLKEEEAGNLVYRKAIESLNENEVDRIRDIQLRTIVRDHVNVEKTKGVALADALRQLQAPSDDYPQFKHGLRHVRILKKEKGDYLVPIANRASGVAYKAYSAGENFCVEVFETAGGKWDGEAVRRFDANKKNAGPKIAHAPQWRDANEGAKLVMRIHKGDLIRLDHEGRARIMVVHRLDAAAGRFKLADHNETGNLDKRHATNNDIDPFRWLMASYNTLKKLAAVPVRVDELGRVWRVMPN

SEQ ID NO: 368 - protein, 1044 aa, Nitrosomonas sp.
  Nitrosomonas sp. AL212
MLHKMRYRLALDLGSTSLGWAMVRLNANQQPCAVIKAGVRIFSNGRNPKDGSSLAVTRREARSMRRRRDRLLKRKARMMRTLIEYGFFPANETQRKALENLNPYALRAKGLDEALTPSEFARALFHINQRRGFKSNRKTDKKDSDSGALKTAIKQLHSVLDPQGNDGKPRTVGELLYKRFTDLSKLPKDRTVRARYRQDKIVKDDGKTKIDKYYDLYIDRAMIEQEFDALWKKQSELNPILFTENARADLKDVLLYQRSLKPVKPGRCTFMSEEERAPLALPSTQRFRMYQEVNNLRILREGLKEESLTLQQRDDLINALEKNNRRTFTQIKKLLGVGGSVQFNFEDPKREELKGNTTSAILGKSEHFGEAWFAFNEAKQDAIVLQLIKEENEAKLVRWLQDETGIDEKRAEVIANAGLPEGYGSLCIEALARILPELRRDVVTYDKAVQAAGFEHHSKLNRNEEIPDITFKIESIDRNSGEIKQFHLHKELPYYGEYLQRHVGFGSGKPEDSIEKRYGKIANPTVHIGLNQVRVVVNALIKRYGHPSEIIVEVARDLKQSKDRRDEENKRQAENQKRNERLRKDIADILGISEERVRRDDIEKMILWEELSFDPADRRCPYSGVQVSTVMLLSDEVEVEHILPFSQTLDDSLNNKTVALRQANRIKGNRTPWEAFGTSNISGFDYSGILTRAELMPKAKRYRFAEDGYQRWLKDDAGFLARALNDTRHLSKIAREYMSLICPNTRVIPGQMTAMLRRNFGLNDVLGLNGEKNRNDHRHHAVDACVIAVTDQGLLQRFAAASASARERQLNRLVENMPLPWESYREHVRRAIDGIWVSHRPDHSHEGAMHNDTAYGLRGNGRVSFHKMVEGKREYIEDNLKVIEITDTKAIDRHGLLPTGKPRPYKGYKGDSNYCIEIVRNEKGRWEGEIISTFDAYQLVRKYGIVQLRYPVLSVSGKPLVMRLIRNDFVRLEHEGITRTLRVCKMREDGQVALADVTEANVDARTRTKEICYVFKTGGSLQKAKARRITISPIGELRDPGFKE

SEQ ID NO: 369 - protein, 1498 aa, Odoribacter laneus
  Odoribacter laneus YIT 12061
METTLGIDLGTNSIGLALVDQEEHQILYSGVRIFPEGINKDTIGLGEKEESRNATRRAKRQMRRQYFRKKLRKAKLLELLIAYDMCPLKPEDVRRWKNWDKQQKSTVRQFPDTPAFREWLKQNPYELRKQAVTEDVTRPELGRILYQMIQRRGFLSSRKGKEEGKIFTGKDRMVGIDETRKNLQKQTLGAYLYDIAPKNGEKYRFRTERVRARYTLRDMYIREFEIIWQRQAGHLGLAHEQATRKKNIFLEGSATNVRNSKLITHLQAKYGRGHVLIEDTRITVTFQLPLKEVLGGKIEIEEEQLKFKSNESVLFWQRPLRSQKSLLSKCVFEGRNFYDPVHQKWIIAGPTPAPLSHPEFEEFRAYQFINNIIYGKNEHLTAIQREAVFELMCTESKDFNFEKIPKHLKLFEKFNFDDTTKVPACTTISQLRKLFPHPVWEEKREEIWHCFYFYDDNTLLFEKLQKDYALQTNDLEKIKKIRLSESYGNVSLKAIRRINPYLKKGYAYSTAVLLGGIRNSFGKRFEYFKEYEPEIEKAVCRILKEKNAEGEVIRKIKDYLVHNRFGFAKNDRAFQKLYHHSQAITTQAQKERLPETGNLRNPIVQQGLNELRRTVNKLLATCREKYGPSFKFDHIHVEMGRELRSSKTEREKQSRQIRENEKKNEAAKVKLAEYGLKAYRDNIQKYLLYKEIEEKGGTVCCPYTGKTLNISHTLGSDNSVQIEHIIPYSISLDDSLANKTLCDATFNREKGELTPYDFYQKDPSPEKWGASSWEEIEDRAFRLLPYAKAQRFIRRKPQESNEFISRQLNDTRYISKKAVEYLSAICSDVKAFPGQLTAELRHLWGLNNILQSAPDITFPLPVSATENHREYYVITNEQNEVIRLFPKQGETPRTEKGELLLTGEVERKVFRCKGMQEFQTDVSDGKYWRRIKLSSSVTWSPLFAPKPISADGQIVLKGRIEKGVFVCNQLKQKLKTGLPDGSYWISLPVISQTFKEGESVNNSKLTSQQVQLFGRVREGIFRCHNYQCPASGADGNFWCTLDTDTAQPAFTPIKNAPPGVGGGQIILTGDVDDKGIFHADDDLHYELPASLPKGKYYGIFTVESCDPTLIPIELSAPKTSKGENLIEGNIWVDEHTGEVRFDPKKNREDQRHHAIDAIVIALSSQSLFQRLSTYNARRENKKRGLDSTEHFPSPWPGFAQDVRQSVVPLLVSYKQNPKTLCKISKTLYKDGKKIHSCGNAVRGQLHKETVYGQRTAPGATEKSYHIRKDIRELKTSKHIGKVVDITIRQMLLKHLQENYHIDITQEFNIPSNAFFKEGVYRIFLPNKHGEPVPIKKIRMKEELGNAERLKDNINQYVNPRNNHHVMIYQDADGNLKEEIVSFWSVIERQNQGQPIYQLPREGRNIVSILQINDTFLIGLKEEEPEVYRNDLSTLSKHLYRVQKLSGMYYTFRHHLASTLNNEREEFRIQSLEAWKRANPVKVQIDEIGRITFLNGPLC

SEQ ID NO: 370 - protein, 1389 aa, Oenococcus kitaharae
  Oenococcus kitaharae DSM 17330
MARDYSVGLDIGTSSVGWAAIDNKYHLIRAKSKNLIGVRLFDSAVTAEKRRGYRTTRRRLSRRHWRLRLLNDIFAGPLTDFGDENFLARLKYSWVHPQDQSNQAHFAAGLLFDSKEQDKDFYRKYPTIYHLRLALMNDDQKHDLREVYLAIHHLVKYRGHFLIEGDVKADSAFDVHTFADAIQRYAESNNSDENLLGKIDEKKLSAALTDKHGSKSQRAETAETAFDILDLQSKKQIQAILKSVVGNQANLMAIFGLDSSAISKDEQKNYKFSFDDADIDEKIADSEALLSDTEFEFLCDLKAAFDGLTLKMLLGDDKTVSAAMVRRFNEHQKDWEYIKSHIRNAKNAGNGLYEKSKKFDGINAAYLALQSDNEDDRKKAKKIFQDEISSADIPDDVKADFLKKIDDDQFLPIQRTKNNGTIPHQLHRNELEQIIEKQGIYYPFLKDTYQENSHELNKITALINFRVPYYVGPLVEEEQKIADDGKNIPDPTNHWMVRKSNDTITPWNLSQVVDLDKSGRRFIERLTGTDTYLIGEPTLPKNSLLYQKFDVLQELNNIRVSGRRLDIRAKQDAFEHLFKVQKTVSATNLKDFLVQAGYISEDTQIEGLADVNGKNFNNALTTYNYLVSVLGREFVENPSNEELLEEITELQTVFEDKKVLRRQLDQLDGLSDHNREKLSRKHYTGWGRISKKLLTTKIVQNADKIDNQTFDVPRMNQSIIDTLYNTKMNLMEIINNAEDDFGVRAWIDKQNTTDGDEQDVYSLIDELAGPKEIKRGIVQSFRILDDITKAVGYAPKRVYLEFARKTQESHLTNSRKNQLSTLLKNAGLSELVTQVSQYDAAALQNDRLYLYFLQQGKDMYSGEKLNLDNLSNYDIDHIIPQAYTKDNSLDNRVLVSNITNRRKSDSSNYLPALIDKMRPFWSVLSKQGLLSKHKFANLTRTRDFDDMEKERFIARSLVETRQIIKNVASLIDSHFGGETKAVAIRSSLTADMRRYVDIPKNRDINDYHHAFDALLFSTVGQYTENSGLMKKGQLSDSAGNQYNRYIKEWIHAARLNAQSQRVNPFGFVVGSMRNAAPGKLNPETGEITPEENADWSIADLDYLHKVMNFRKITVTRRLKDQKGQLYDESRYPSVLHDAKSKASINFDKHKPVDLYGGFSSAKPAYAALIKFKNKFRLVNVLRQWTYSDKNSEDYILEQIRGKYPKAEMVLSHIPYGQLVKKDGALVTISSATELHNFEQLWLPLADYKLINTLLKTKEDNLVDILHNRLDLPEMTIESAFYKAFDSILSFAFNRYALHQNALVKLQAHRDDFNALNYEDKQQTLERILDALHASPASSDLKKINLSSGFGRLFSPSHFTLADTDEFIFQSVTGLFSTQKTVAQLYQETK

SEQ ID NO: 371 - protein, 1389 aa, Oenococcus kitaharae; identical to SEQ ID NO: 370
  Oenococcus kitaharae DSM 17330

SEQ ID NO: 372 - protein, 1399 aa, Olsenella uli
MNLRNTTDEYNIGLDMGTNSVGWAVTDKAGAIAHFKGKPTLGSRLFDAAQTAAGARIHRSQRRRYVRRRWRLDLLQSLFQDEVSKVDSEFFCRLRQSRLYVGDREKGHADYTWPIFNDSDFNEVDYYKRFPTIYHLRKWLMETDEKADIRLIYLATHNIVKHRGNFLRENNKSLSSRDANPAQAVKSLRLALNDWCSERDYECAWKGEEDDGAIDEAILNVLADGEKGRSDQAKEIAKLTGVDCGDAKQSKQCNEAIAKAIVGLKVEMKNIFGEFPAEKTSYIYLSSDEDVEAVRESCPDDSGELFQALCKLYSAYILQELLSYADPSGQTISANMVAKYKQYGRDLRLLKELTRTYAPQKYDLFFRGETYAGSSDYVVDEARGYTRYNLGTTKANYDDFQKSVKELFKGTDALQDERYQEMMVAFGEQKFLRRLKTSDNGSIYYQLHLEELHTILENQGKHYPFLLSEEDKIESLVSFRIPYYVGPLTRKNAAIGHDGKERFAWSSRKDGMEHAVITPWNWEEIIDRDKSAEDFIMRMTGDCTYLQGEPVLPKCSLLYEEFCALNEFNGAHWTVDGDDERRFDAAQRERIMCDLFRRTRSVTYNKVSDWLERKYNFTGARVRGGQGEHGFESKLGSYIFFCKDVFKTDGLDEADYTMIEQIILWSTLFEDRDILKRKIEEAYGGDRLTSEQIKVICKKRFTGWGRLSKRLLTDIKVNTDTGRKSIMDVLREGNPNNGQRSRTMVFMEVLRDEDLGFQKAIDGLNRDYFREHNNGLMDVNDLPGSPAIRRSINQAVRIVDEIASIARKEPTNIFIEVTREEDDPRKKGKRTKRRYDAIKSALEKFKKDDPSLWKELCEKAPGDMDERLSLYFMQRGKCMYSGRPIKIEELHTGKYEVDHIIPRSYIKDDSFENKVLVYREENQHKTDALLIDSSIRQKMGGYWRMLHDAKLVGDKKFRNLFRNHIDDKAMKGFVARQIVETSQMVKLVQTLFEARYPNTRIVPVKAGISHDLREAAGLVKCREANDFHHAHDAFLACRIGLFIQKRHPSVYDNPIGLARIMRDYARMQAREYKKSHCLAHTQGFIVNSFLSSGFDEETGEIFKDDWDAKAEVEGIRRVLNCRQCFISRMPVEGDTRYGGRYWGETIYSPKGKHKHEIPLKQGLDPNLYGGYSDLLYSYFLIYEASDVSSGERVLRFIGIPTSIAARMANQKRLEEYVSRLALQENLEHVRMVRKIMKKQLIEVDNCRLLVTAADAVTNATELAFSLDEMKIISTCAKCINGADPSAIDKIGNAQDSFFDNLKRRGSDRCALLFSQLKLDKLSQNFYMISSDDKSKILISILDRIRAKSNSVDLSLVGGAKHAAQMKFDFNAKLNNPASSFVLIDQSVTGMFERRTRIGL

SEQ ID NO: 373 - protein, 1535 aa, Ornithobacterium rhinotracheale
MNTILGLDLGTNSIGWALIKVLNDKTRLPLEIIDLGVVVIPTDQRTLDKFSKGESISKTAERTKQKGVRKLYERKKLRRERLHRVLNILGFLPEHYSKKIDFKKHLGQFFGNSQPKISYVENDHGKHEFIFMDSYREMLKEFSKHNIKNVPYDWTIYYLRKKALSQKISKEELAWVILNFNKKRGYYQFRDDNADENKENKIEKYYALKVTNVKKEDAQNYTITLENGWIYKNKSKISLLDWVGSTKEFISTEKFDNKGNIIKKKNGEDDRTLKLVDSEKDWIAIKKSTEDRIENYGKTVGTYLYEHLLKDPNQKLNGELINIIDRKFYKNELKQILEKQKEFHPELLNEDLFQKSIIELYPKNSTRQKELKNKDLCYLLIDDVIYYQRDLKKKNSTINKCSFESREYYLNGEKQIQKINCIAKSKPLYQEFRTLQFIKNLKVYEIIDGLEKDITSKLLPDFETKEHFFEWLNDKEKIDQLQLLSYKCFDLHDNVKNDLIAKGIKRPTEKAIRTELLEKYRWNYSKDNDRNFLLNETRFKILKYLKKVDKKLTLTNEQIESLWLLLYSAKDERELKNGLQKFSEKNKLPKKFSDIFISFPPFKKEYGAYSEKALKKLLSLVRFGKYWSFNKIDNNIQNKIMNILNGEVDDSISDRVREKTILLQDKNDFQDLPLWLASYVAYNRFSEVSEIKYWDSPDKIEFLKQHSIGNPIVEKIINETLKLIKDIWVIHGKSCKNFFSEIHIELSREIKSSSKKRAQITNNNTKNQKLNNLIKSLLIEMASDTKYENVTPYSPSQQEILKIYDEGIYSKEENSEKIKEINKIRNNNKISKSDITKYKLWLEQGYISPYTGKIIPLTKLFTAKYQKEHIIPQTKFFDDSFNNKVICEAEVNKLKDNSLAMNFIKAKGGKAVKLSDGETVTILNQEEYKQLVRTSFKKNSIKLRNLLLEEIPDTFTKRQLNDTKYISKLVLSLLSNIVREKGELESTAKRIVSTNGQITSILRNDWGLNNIWNKLITPRFERLNNINKNKIYGNWENKKGKNVFQINYLNDNLSTLNTKRIDHRHHALDALIVACTTRNHINFLNNQYAKSRNQRHDLRAKLKRRETITTEGSKKQVFKDFIKPWESFTQDALKKLETTIVNFKVNKRIINKTINWYKKWEKQKDGTYKKIQKKQTKGDAWAIRKPLHIDTIYGIVCKKLPLKSALENYKNIIDENLKHKIKELKEVNKFDNNQIINFFKECNFIFEDNNIQKVEVYDFKDNRDKTILSSSRQLIDESFTPKKIGKVLDPTIRNILLKHLNSTKYNNKFDSDGNPIKPEKLAFSPEGLKDLNKNIKHLNNNKEHQPIKRVKLFETLGNKIKVGYTQQKNKKFAETATGTNLFLGIYSDNNKRDFKTIPLILAIQREKEGLNPCPDTDEKGNQLLFSLSPNELVFVPNNEERKNPNLVDFENLSKDQIDRIYKFVSCTGSEAYFVPSRTAKPIIENENGTNNKSQRIIEFNEKTSIKNEKNEPVLIKTICWKIEVNRLGKIIKVIK

SEQ ID NO: 374 - protein, 1443 aa, Parabacteroides johnsonii
  Parabacteroides johnsonii DSM 18315
MIKLLYLEKLKQYTMKKILGLDLGTSSIGWALVNEAENSDEVSSIIKLGVRVNPLTVDEMQNFEKGKSITTNADRTLKRSMRRNLQRYKLRRDALIELLKKVGFITDKTILSEQGNRTTFETYRLRAKAAEEEISLKELARVLLMINKKRGYKSSRKAKGEEEGALIDGMEIAKKLYDEDLTPGQLCLQLLESGKKFFPDFYRSDLQEEFNKIWDFQKQFNLFSFCDVAKEEVKGKNKSQTWAILAKYFVETKKVNVWNEHEAQTENREEVYKLVGLKRTVKGEELKKENYRWRVQALTEQLDLEKIAVVLQEINGQISASSGYLGAISDRSKVLYFNRQTVGQYQMAELNKNPNMSLRNMVFYRQDYLDEFNVIWEKQAEFHKELTPELKKEIRDIIIFYQRRLKSQKGLISFCEFENREVVVEKEGKKQTKIIGCKVIPRSHPLFQEFKIWQTLNNIEVFVGEKKGKRKKSNVSSDLFGDTEDALITEGRRFLYQEEKKILAKELSIKKGLTKAEILRLLFENPQELDINFKQIDGNQTGFALFSAYSNMIEKYGYEPLDFKKPAEDLISQLKTVFTDLGWNTDLLFIDLDKENKEWEKQPYFRLWHLLYSFEGDNTPTGNGKLIEKIMQLCGIEKEYAIELANVSLQDDYGSLSAKAIKKILLYLKEGNQYDMACEYAGYRHSKSSLTKEEIENKVLKDKLEILPKNSLRNPVVEKILNQMVNVINTVMEVYGRPDEIRVELARELKKSAKEREELTKAVAKNTREHEEIRKVLQSEFGMINVSRNDIIRYKLYEELKDNGYKTLYSNQYIPREKLFSKEIDIEHIIPQSRLFDDSLSNKTLEYKSINIEKGNKTAYDFVKEKYGEEGLQQYLNRCENLCKDKKAKLRKLKMELNEIPDGFIDRDLRNTQYIAKKALSMLTEICRRVVATTGSITDKLREDWQLVDVMKELNLPKYEALGLVEVYEDKDGRKIKRIKDWTKRNDHRHHAMDALTVAFTKDVFIQYFNNKNAAWESDSKEHTNIVGIKTRYFESGKAVPPIPLGQFRVEAKCHLENLLVSIKAKNKVVTTNVNCIKKKGGTYKNTQQTPRGQLHLETIYGSHNQYVTKIEKVNASFDAVKIATVSKQDYRNALLKRLEVFGNDPKKAFTGKNSLEKNPIYLDRAQTIQVPDKVQTVELETAYTIRKPVDPTLNVDKVVDKKIRLILEQRLKEYGGDAKKAFVNLDENPIWLNEEKGISIKRVTIRGISKAQALHDKKDKDGNFILDETGKRIPVDFVNTGNNHHVAIYRKPVLDKKGQVIFDDEGNPMYELDEDVVPFFEAVTRANLGIPIIDKDYKKSEGWQFLFSMKQNEYFVFPNEKTGFNPKEVDLLDPDNYAMISPNLFRVQKIGLNDYTFRHHLETTIQNDLKFITWIRCGKSGIKDIVKVRINHIGQIVSVGEY

SEQ ID NO: 375 - protein, 1424 aa, Parabacteroides sp.
  Parabacteroides sp. D13
MKRILGLDLGTNSIGWALVNEAETDEEVSSIIRLGVRVNPLTVDETQNFEKGKSITTNAERTLKRSMRRNLQRYKLRRDALVEFLKELGFITDETILSEQGNRTTFETCRLRAKAAEEEISLEELSRVLLMINKKRGYKSSRKVKKEEDGVLIDGMEIAKKLYEEDLTPGQLCSQLLESGKKVLPDFYRSDLQEELDRIWSVQKQFHPDVFCDAAKEEIKGKNRSQTWAILANYFVWKEEVVGWNDREAKNETIEKECKLVGLKRTTKGYELKKENYRWRAQALTEQLGLEEIAVVLQEINGQINASSGYLGAISDRSKVLYFNHQTVGQYQMAELDKNPHASLRNMVFYRQDYLDEFDRIWEKQAEFHKELTAELKKEIRDMIIFYQRRLKSQKGLISFCEFERLEIVVEKDGKKQTKVIGCKVIPRSHPLFQEFKVWQTLNDIKVLGREKKRNALSASESRALYPEEKEILARELAIKENMKKADVLKLLFENPQELDLNFKQIDGNRTGFSLFSAYSKMIEKYGYEPLDFKKPADEIIGQLRTIFTDLGWNTNLFTIDLTKEGKELEMQPYFRLWHLLYSFEGDNTSTGNGKLIEKIMQLCGVEKEYAVELASLSFQDDYGSLSAKAIKRILPYLKEGNLYDVACEYAGYRHSKSSLTKEEIENKVLKGKLEVLPKNSLRNPVVEKILSQMVNVINTIIDTYGKPDEIRVELARELKKSAKEREELTKAIAKSTREHEEIRKLLQDEFGMMNVSRNDIIRYKLYEELKDNGYKTLYSNQYIPKEKIFSKEIDIEHIIPQSRLFDDSLSNKTLEYKAINIEKGNKTAYDFVKEKYGEEGLQQYINRCESLFNDKKAKLRKLKMEQKDIPDGFIDRDLRNTQYIAKKALAMLNEICRRVVATTGSITDQLREDWQLVDVMKELNLPKYEALGFVETYEDKDGRKIKRIKDWTKRNDHRHHAMDALTVAFTKDAFIQYFNNKNAAQDSGNRNHTNIIGIKTRYFDKGRALPPIPLEQFRIEAKQHLEKLLVSIKAKNKVVTVNVNRTKKRKGENTKIQQTPRGQLHLETVYGSHKQYVTKIEKVNASFDAAKIATVSKRAYRNALLKRLETFGNDPKKAFTGKNALEKNPLYADKYQTIRVPEKVQTVEFETIYTIRKPVDPALNVDKVVDVKVRAILERRLKEYGGDPKKAFVNFWENPIWLNKEKGISIKRVSIRGINNAQSIHVKKDKNGNPIWDENGKQIPVDFVNTGNNHHVAIYRKPVLDKKGQVTFDEDGNLMYELDEVVVPFFEAVTRANLGLPIIDKDYRKSEGWQFLFSMKQNEYFVFPNEKTGFNPKEVDLLNPDNYAMISPNLFRVQTMSKVMYGNNVVRDYKFRHHLETTVKDMKELKDIAYKQYKTLSFGNSVVKIRINHIGQIVSVGEY

SEQ ID NO: 376 - protein, 1428 aa, Parasutterella excrementihominis
  Parasutterella excrementihominis YIT 11859
MGKTHIIGVGLDLGGTYTGTFITSHPSDEAEHRDHSSAFTVVNSEKLSFSSKSRTAVRHRVRSYKGFDLRRRLLLLVAEYQLLQKKQTLAPEERENLRIALSGYLKRRGYARTEAETDTSVLESLDPSVFSSAPSFTNFFNDSEPLNIQWEAIANSPETTKALNKELSGQKEADFKKYIKTSFPEYSAKEILANYVEGRRAILDASKYIANLQSLGHKHRSKYLSDILQDMKRDSRITRLSEAFGSTDNLWRIIGNISNLQERAVRWYFNDAKFEQGQEQLDAVKLKNVLVRALKYLRSDDKEWSASQKQIIQSLEQSGDVLDVLAGLDPDRTIPPYEDQNNRRPPEDQTLYLNPKALSSEYGEKWKSWANKFAGAYPLLTEDLTEILKNTDRKSRIKIRSDVLPDSDYRLAYILQRAFDRSIALDECSIRRTAEDFENGVVIKNEKLEDVLSGHQLEEFLEFANRYYQETAKAKNGLWFPENALLERADLHPPMKNKILNVIVGQALGVSPAEGTDFIEEIWNSKVKGRSTVRSICNAIENERKTYGPYFSEDYKFVKTALKEGKTEKELSKKFAAVIKVLKMVSEVVPFIGKELRLSDEAQSKFDNLYSLAQLYNLIETERNGFSKVSLAAHLENAWRMTMTDGSAQCCRLPADCVRPFDGFIRKAIDRNSWEVAKRIAEEVKKSVDFTNGTVKIPVAIEANSFNFTASLTDLKYIQLKEQKLKKKLEDIQRNEENQEKRWLSKEERIRADSHGICAYTGRPLDDVGEIDHIIPRSLTLKKSESIYNSEVNLIFVSAQGNQEKKNNIYLLSNLAKNYLAAVFGTSDLSQITNEIESTVLQLKAAGRLGYFDLLSEKERACARHALFLNSDSEARRAVIDVLGSRRKASVNGTQAWFVRSIFSKVRQALAAWTQETGNELIFDAISVPAADSSEMRKRFAEYRPEFRKPKVQPVASHSIDAMCIYLAACSDPFKTKRMGSQLAIYEPINFDNLFTGSCQVIQNTPRNFSDKTNIANSPIFKETIYAERFLDIIVSRGEIFIGYPSNMPFEEKPNRISIGGKDPFSILSVLGAYLDKAPSSEKEKLTIYRVVKNKAFELFSKVAGSKFTAEEDKAAKILEALHFVTVKQDVAATVSDLIKSKKELSKDSIENLAKQKGCLKKVEYSSKEFKFKGSLIIPAAVEWGKVLWNVFKENTAEELKDENALRKALEAAWPSSFGTRNLHSKAKRVFSLPVVATQSGAVRIRRKTAFGDFVYQSQDTNNLYSSFPVKNGKLDWSSPIIHPALQNRNLTAYGYRFVDHDRSISMSEFREVYNKDDLMRIELAQGTSSRRYLRVEMPGEKFLAWFGENSISLGSSFKFSVSEVFDNKIYTENAEFTKFLPKPREDNKHNGTIFFELVGPRVIFNYIVGGAASSLKEIFSEAGKERS

SEQ ID NO: 377 - protein, 1037 aa, Parvibaculum lavamentivorans
MERIFGFDIGTTSIGFSVIDYSSTQSAGNIQRLGVRIFPEARDPDGTPLNQQRRQKRMMRRQLRRRRIRRKALNETLHEAGFLPAYGSADWPVVMADEPYELRRRGLEEGLSAYEFGRAIYHLAQHRHFKGRELEESDTPDPDVDDEKEAANERAATLKALKNEQTTLGAWLARRPPSDRKRGIHAHRNVVAEEFERLWEVQSKFHPALKSEEMRARISDTIFAQRPVFWRKNTLGECRFMPGEPLCPKGSWLSQQRRMLEKLNNLAIAGGNARPLDAEERDAILSKLQQQASMSWPGVRSALKALYKQRGEPGAEKSLKFNLELGGESKLLGNALEAKLADMFGPDWPAHPRKQEIRHAVHERLWAADYGETPDKKRVIILSEKDRKAHREAAANSFVADFGITGEQAAQLQALKLPTGWEPYSIPALNLFLAELEKGERFGALVNGPDWEGWRRTNFPHRNQPTGEILDKLPSPASKEERERISQLRNPTVVRTQNELRKVVNNLIGLYGKPDRIRIEVGRDVGKSKREREEIQSGIRRNEKQRKKATEDLIKNGIANPSRDDVEKWILWKEGQERCPYTGDQIGFNALFREGRYEVEHIWPRSRSFDNSPRNKTLCRKDVNIEKGNRMPFEAFGHDEDRWSAIQIRLQGMVSAKGGTGMSPGKVKRFLAKTMPEDFAARQLNDTRYAAKQILAQLKRLWPDMGPEAPVKVEAVTGQVTAQLRKLWTLNNILADDGEKTRADHRHHAIDALTVACTHPGMTNKLSRYWQLRDDPRAEKPALTPPWDTIRADAEKAVSEIVVSHRVRKKVSGPLHKETTYGDTGTDIKTKSGTYRQFVTRKKIESLSKGELDEIRDPRIKEIVAAHVAGRGGDPKKAFPPYPCVSPGGPEIRKVRLTSKQQLNLMAQTGNGYADLGSNHHIAIYRLPDGKADFEIVSLFDASRRLAQRNPIVQRTRADGASFVMSLAAGEAIMIPEGSKKGIWIVQGVWASGQVVLERDTDADHSTTTRPMPNPILKDDAKKVSIDPIGRVRPSND

SEQ ID NO: 378 - protein, 1058 aa, Pasteurella multocida
  Pasteurella multocida subsp. gallicida X73
MQTTNLSYILGLDLGIASVGWAVVEINENEDPIGLIDVGVRIFERAEVPKTGESLALSRRLARSTRRLIRRRAHRLLLAKRFLKREGILSTTDLEKGLPNQAWELRVAGLERRLSAIEWGAVLLHLIKHRGYLSKRKNESQTNNKELGALLSGVAQNHQLLQSDDYRTPAELALKKFAKEEGHIRNQRGAYTHTFNRLDLLAELNLLFAQQHQFGNPHCKEHIQQYMTELLMWQKPALSGEAILKMLGKCTHEKNEFKAAKHTYSAERFVWLTKLNNLRILEDGAERALNEEERQLLINHPYEKSKLTYAQVRKLLGLSEQAIFKHLRYSKESAESATFMELKAWHAIRKALENQGLKDTWQDLAKKPDLLDEIGTAFSLYKTDEDIQQYLEGKLPDSVINALLVSLNFDKFIELSLKSLRKILPLMEQGKRYDQACHEIYGHHYGEKNQQISQLLPVIPTQEIRNPVVLRTLSQARKVINAIIRQYGSPARVHIETGRELGKSFKERREIQKQQEDNRTKRESAVQKFKELFSDFSSEPKSKDILKFRLYEQQHGKCLYSGKEINIHRLNEKGYVEIDHALPFSRTWDDSFNNKVLVLASENQNKGNQTPYEWLQGKINSERWKNFVALVLGSQCSAAKKQRLLTQVIDDNKFIDRNLNDTRYIARFLSNYIQENLLLVGKNKKNVFTPNGQITALLRSRWGLIKVRENNDRHHALDAIVVACATPSMQQKITRFIRFKEVHPYKIENRYEMVDQESGEIISPHFPEPWAYFRQEVNIRVFDNHPDTVLKEMLPDRPQANHQFVQPLFVSRAPTRKMSGQGHMETIKSAKRLAEGISVLRIPLTQLKPNLLENMVNKEREPALYVGLKARLAEFNQDPAKAFATPFYKQGGQQVKAIRVELVQKSGVLVRQGNGVADNAPGSIVRTDVFIKNNKFFLVPIYTWQVAKGILPNKAIVAHKNEDEWEEMDEGAKFKFSIFPNDLIELRTKTECFLGYYIGPDRHNGSISLREHDSEISKGNAGVYRVGVKLALSLEKYHIDELGKNRRICRPHQRRPVR

SEQ ID NO: 379 - protein, 1056 aa, Pasteurella multocida
  Pasteurella multocida subsp. multocida str. P52VAC
MQTTNLSYILGLDLGIASVGWAVVEINENEDPIGLIDVGVRIFERAEVPKTGESLALSRRLARSTRRLIRRRARRLLLAKRFLKREGILSTTDLEKGLPNQAWELRVAGLERRLSAIEWGAVLLHLIKHRGYLSKRKNESQTNNKELGALLSGVAQNHQLLQSDDYRTPAELALKKFAKEEGHIRNQRGAYTHTFNRLDLLAELNLLFAQQHQFGNPHCKEHIQQYMTELLMWQKPALSGEAILKMLGKCTHEKNEFKAAKHTYSAERFVWLTKLNNLRILEDGAERALNEEERQLLINHPYEKSKLTYAQVRKLLGLSEQAIFKHLRYSKENAESATFMELKAWHAIRKALENQGLKDTWQDLAKKPDLLDEIGTAFSLYKTDEDIQQYLTNKVPNSVINALLVFLNFDKFIELALKSLRKILPLMEQGKRYDQACREIYGHHYGEANQKTSQLLPAIPAQEIRNPVVLRTLSQARKVINAIIRQYGSPARVHIETGRELGKSFKERREIQKQQEDNRTKRESAVQKFKELFSDFSSEPKSKDILKFRLYEQQHGKCLYSGKEINIHRLNEKGYVEIDHALPFSRTWDDSFNNKVLVLASENQNKGNQTPYEWLQGKINSERWKNFVALVLGSQCSAAKKQRLLTQVIDDNKFIDRNLNDTRYIARFLSNYIQENLLLVGKNKKNVFTPNGQITALLRSRWGLIKIRENNDRHHALDAIVVACATPSMQQKITRFIRFKEVHPYKIENRYEMVDQESGEIISPHFPEPWAYFRQEVNIRVFDNHPDTVLKEMLPDRPQANHQFVQPLFVSRAPTRKMSGQGHMETIKSAKRLAEGISVLRIPLTQLKPNLLENMVNKEREPALYAGLKARLAEFNQDPAKAFTTPFYKQGGQQVKAIRVEQVQKSGVLVRENNGVADNASIVRTDVFIKNNKFFLVPIYTWQVAKGILPNKAIVAHKNEDEWEEMDEGAKFKFSLFPNDLVELKTKKEYFFGYYIGLDRATGNISLKEHDGEISKGKDGVYRVGVKLALSFEKYQVDELGKNRQICRPQQRQPVR

SEQ ID NO: 380 - protein, 1056 aa, Pasteurella multocida
MQTTNLSYILGLDLGIASVGWAVVEINENEDPIGLIDVGVRIFERAEVPKTGESLALSRRLARSTRRLIRRRAHRLLLAKRFLKREGILSTIDLEKGLPNQAWELRVAGLERRLSAIEWGAVLLHLIKHRGYLSKRKNESQTNNKELGALLSGVAQNHQLLQSDDYRTPAELALKKFAKEEGHIRNQRGAYTHTFNRLDLLAELNLLFAQQHQFGNPHCKEHIQQYMTELLMWQKPALSGEAILKMLGKCTHEKNEFKAAKHTYSAERFVWLTKLNNLRILEDGAERALNEEERQLLINHPYEKSKLTYAQVRKLLGLSEQAIFKHLRYSKENAESATFMELKAWHAIRKALENQGLKDTWQDLAKKPDLLDEIGTAFSLYKTDEDIQQYLTNKVPNSVINALLVSLNFDKFIELSLKSLRKILPLMEQGKRYDQACREIYGHHYGEANQKTSQLLPAIPAQEIRNPVVLRTLSQARKVINAIIRQYGSPARVHIETGRELGKSFKERREIQKQQEDNRTKRESAVQKFKELFSDFSSEPKSKDILKFRLYEQQHGKCLYSGKEINIHRLNEKGYVEIDHALPFSRTWDDSFNNKVLVLASENQNKGNQTPYEWLQGKINSERWKNFVALVLGSQCSAAKKQRLLTQVIDDNKFIDRNLNDTRYIARFLSNYIQENLLLVGKNKKNVFTPNGQITALLRSRWGLIKARENNNRHHALDAIVVACATPSMQQKITRFIRFKEVHPYKIENRYEMVDQESGEIISPHFPEPWAYFRQEVNIRVFDNHPDTVLKEMLPDRPQANHQFVQPLFVSRAPTRKMSGQGHMETIKSAKRLAEGISVLRIPLTQLKPNLLENMVNKEREPALYAGLKARLAEFNQDPAKAFATPFYKQGGQQVKAIRVEQVQKSGVLVRENNGVADNASIVRTDVFIKNNKFFLVPIYTWQVAKGILPNKAIVAHKNEDEWEEMDEGAKFKFSLFPNDLVELKTKKEYFFGYYIGLDRATGNISLKEHDGEISKGKDGVYRVGVKLALSFEKYQVDELGKNRQICRPQQRQPVR

SEQ ID NO: 381 - protein, 1364 aa, Pediococcus acidilactici
  Pediococcus acidilactici DSM 20284
MGDRKYNLGLDIGTSSIGFAAVDENNQPIRVKGKTAIGVRLFEEGKTAADRRGFRTTRRRLSRRRWRINLLNEIFDAHLAEVDPTFLARLKESNRSNLDPKKSFQGSLLFPERKDYQFYEEYPTIYHLRKALMEKDRKFDFREIYLAVHHIIKYRGNFLNGTPMRSFKVENIELDTLFDQLNQLYAEIVPDNELAFDLAQVADVKDVLSSTTIYKMDKKKQLVKMMLLPASNKALQSENKKIVTQFVNAILNYKFKLDVLLQVETDADWSLKLNDEGADDKLEEFTGDLDENRLEIIDLLQRLHNWFSLNEITKDGNSLSAAMVEKYENHHHHLGLLKKVIENHPDAKKAKALKETYTAYVGKTDDKTQNQDDFYKAVEKNLDDSPDAKEIKRLIQLDQFMPKQRTGQNGAIPHQLHQQELDQIIEKQSKYYPFLAEPNPNVKRRKDAPYKLDELIAFKIPYYVGPLVTPEEQAQNGENVFAWMKRKAAGPITPWNFDEKVDRMESANRFIRRMTTKDTYLFGEDVLPAESMIYQKFVVLNELNNLKINGRHLSLKDKQDVYNDLFKQQKTVSIKALQNYYVTKKKAATAPTVGGLADPKKFLSSLSTYIDFKNMFGERVNDPQFQEDLEQIVEWSTIFEDRGIFKAKLQALGWLSEKQIQQLVAKRYKGWGRLSKKLLTGLKNAEGYSILDEMWRSTGNFMQIQSRPEFAALIQQANEKQFEGNDPDNVWENIENILGDAYTSPQNKKAIRQVVKVVQDIEKAVGNPPEKIAIEFTREAAANPQRTQSRLRTLEKLYESAEEVVDAGLTAELAEFKENKHVLSDKYYLYFTQLGRDVYTGDTISLDKLNDYDVDHILPQSFIKDDSLDNRVLTIRAVNNGKSDNVPAKMFGKKMGSFWRYLLDNGMISKRKYNNLITDPDNISKYAQKGFINRQLVETSQVIKLTANILNGIYDKDTEIIEVPAKMNSQMRKMFDLVKVREVNDYHHAFDAYLTIFIGNYLYKCYPKLQPYFVYDNFKKFGNKEDIGHKRFNFLGKIEREKKVVAPETGEILWSNVAPNETIKQIKKVYDYKFMIVSREITTRRAELFNQTVYPKNYHGKLIPIKEDRPTDLYGGYSGNTDAYLAIVALEDKKKGKYFKVVGIPTRVAAKLEKLKQQDSQQYLQALHKVIAPQFTKSTKKGIKKTEFEIVLDKVHYRQLVQDGPVKMMLGSSTYKYNAKQLVLSEKALQVIADDRKFDETQKDDNLIAVYDEILSIVNQSFDLYDINGFRKKLNDNRDQFIDLPAETKYEGRKVVAHGKREMILEILKGLHANAAFGNLKPIGFSTAFGQLQVPNGIILSKNAILIHQSPSGLFERKIKLSDL

SEQ ID NO: 382 - protein, 1366 aa, Pediococcus acidilactici
  Pediococcus acidilactici MA18/5M
MGDRKYNLGLDIGTSSIGFAAVDENNQPIRVKGKTAIGVRLFEEGKTAADRRGFRTTRRRLSRRRWRINLLNEIFDAHLAEVDPTFLARLKESNRSNLDPKKSFQGSLLFPERKDYQFYEEYPTIYHLRKALMEEDRKFDIREIYLAVHHIIKYRGNFLNGTPMRSFKVENIELDTLFDQLNQLYAEIVPDNELAFDLAQVADVKDVLSSTTIYKMDKKKQLVKMMLLPASNKALQSENKKIVTQFVNAILNYKFKLDVLLQVETDADWSLKLNDEGADDKLEEFTGDLDENRLEIIDLLQRLHNWFSLNEITKDGNSLSAAMVEKYENHHHHLGLLKKVIENHPDAKKAKALKETYTAYVGKTDDKTQNQDDFYKAVEKNLDDSPDAKEIKRLIQLDQFMPKQRTGQNGAIPHQLHQQELDQIIEKQSKYYPFLAEPNPNVKRRKDAPYKLDELIAFKIPYYVGPLVTPEEQAQNKENVFAWMKRKAAGPITPWNFDEKVDRMESANRFIRRMTTKDTYLFGEDVLPAESMIYQKFVVLNELNNLKINGRHLSLKDKQDVYNDLFKQQKTVSIKALQNYYVTKKKAATAPTVGGLADPKKFLSSLSTYIDFKNMFGERVNDPQFQEDLEQIVEWSTIFEDRGIFKAKLQALGWLSEKQIQQLVAKRYKGWGRLSKKLLTGLKNAEGYSILDEMWRSTENFMQIQTRPEFAALIQQANEKQFEGNDPNNVWENIESILGDAYTSPQNKKAIRQVVKVVQDIEKAVGNPPEKIAIEFTREAAANPQRTQSRLRTLEKLYESAEEVVDAGLTAELAEFKENKHVLSDKYYLYFTQLGRDVYTGDTISLDKLNDYDVDHILPQSFIKDDSLDNRVLTIRAVNNGKSDNVPAKMFGKKMGSFWRYLLDNGMISKRKYNNLITDPDNISKYAQKGFINRQLVETSQVIKLTANILNGIYDKDTEIIEVPAKMNSQMRKMFDLVKVREVNDYHHAFDAYLTIFIGKYLYKCYPKLRPYFVYGKFKKFGDNEDIEVGDGRFNFLNRIERLKNVTDPETGEILWSNVAPNETIKQIKKVYNYKFMLVSRETTTRRAELFNQTVYPKNYRGKLIPIKEDRPTDLYGGYSGNTDAYLAIVALEDKKKGKYFKVVGIPTRAAAKLEKLKQQDSQQYLQALHKVIAPQFTKSTKKGIKKTEFEIVLDKVHYRQLVQDGPVKMMLGSSTYKYNAKQLVLSEKALQVIADDRKFDETQKDDNLIAVYDEILSIVNQSFDLYDINGFRKKLNDNRDQFIDLPAETKYEGRKVVAHGKREMILEILKGLHANAAFGNLKPIGFSTAFGQLQVPNGIILSKNAILIHQSPSGLFERKIKLSDL

SEQ ID NO: 383 - protein, 1364 aa, Peptoniphilus duerdenii
  Peptoniphilus duerdenii ATCC BAA-1640
MKNLKEYYIGLDIGTASVGWAVTDESYNIPKFNGKKMWGVRLFDDAKTAEERRTQRGSRRRLNRRKERINLLQDLFATEISKVDPNFFLRLDNSDLYREDKDEKLKSKYTLFNDKDFKDRDYHKKYPTIHHLIMDLIEDEGKKDIRLLYLACHYLLKNRGHFIFEGQKFDTKNSFDKSINDLKIHLRDEYNIDLEFNNEDLIEIITDTTLNKTNKKKELKNIVGDTKFLKAISAIMIGSSQKLVDLFEDGEFEETTVKSVDFSTTAFDDKYSEYEEALGDTISLLNILKSIYDSSILENLLKDADKSKDGNKYISKAFVKKFNKHGKDLKTLKRIIKKYLPSEYANIFRNKSINDNYVAYTKSNITSNKRTKASKFTKQEDFYKFIKKHLDTIKETKLNSSENEDLKLIDEMLTDIEFKTFIPKLKSSDNGVIPYQLKLMELKKILDNQSKYYDFLNESDEYGTVKDKVESIMEFRIPYYVGPLNPDSKYAWIKRENTKITPWNFKDIVDLDSSREEFIDRLIGRCTYLKEEKVLPKASLIYNEFMVLNELNNLKLNEFLITEEMKKAIFEELFKTKKKVTLKAVSNLLKKEFNLTGDILLSGTDGDFKQGLNSYIDFKNIIGDKVDRDDYRIKIEEIIKLIVLYEDDKTYLKKKIKSAYKNDFTDDEIKKIAALNYKDWGRLSKRFLTGIEGVDKTTGEKGSIIYFMREYNLNLMELMSGHYTFTEEVEKLNPVENRELCYEMVDELYLSPSVKRMLWQSLRVVDEIKRIIGKDPKKIFIEMARAKEAKNSRKESRKNKLLEFYKFGKKAFINEIGEERYNYLLNEINSEEESKFRWDNLYLYYTQLGRCMYSLEPIDLADLKSNNIYDQDHIYPKSKIYDDSLENRVLVKKNLNHEKGNQYPIPEKVLNKNAYGFWKILFDKGLIGQKKYTRLTRRTPFEERELAEFIERQIVETRQATKETANLLKNICQDSEIVYSKAENASRFRQEFDIIKCRTVNDLHHMHDAYLNIVVGNVYNTKFTKNPLNFIKDKDNVRSYNLENMFKYDVVRGSYTAWIADDSEGNVKAATIKKVKRELEGKNYRFTRMSYIGTGGLYDQNLMRKGKGQIPQKENTNKSNIEKYGGYNKASSAYFALIESDGKAGRERTLETIPIMVYNQEKYGNTEAVDKYLKDNLELQDPKILKDKIKINSLIKLDGFLYNIKGKTGDSLSIAGSVQLIVNKEEQKLIKKMDKFLVKKKDNKDIKVTSFDNIKEEELIKLYKTLSDKLNNGIYSNKRNNQAKNISEALDKFKEISIEEKIDVLNQIILLFQSYNNGCNLKSIGLSAKTGVVFIPKKLNYKECKLINQSITGLFENEVDLLNL

SEQ ID NO: 384 - protein, 1087 aa, Phascolarctobacterium succinatutens
  Phascolarctobacterium succinatutens YIT 12067
MLRMKYAIGLDIGIASVGYAVLALDHEENPWGIIRLGSRIFDVAENPKDGASLALPRREARSVRRRLRRHHHRLERIKNLLINTEFITKDELLHLYDGNLSDVYELRVKALDYSVTNAELTRILLHLAQRRGFKSNRKSDANDKEAGQLLEAVSANAKRMQENHYRTVGEMFYKDDLFSKYKRNKGGTYLTTVHRDMIAAEARTILEKQFALGNNICTQDFIDKYLSILLSQRQFDEGPGEPSPYAGNQIANMIGKCTFEPNEYRAAKASYSFERFNLLQKVNHLRLLLEGKSIALDNEQRKKIIALAHDKADLRYSHIRKALGLDEKVLFNTITYNDDVSVIEKKTKFNFLQAYHQIKKVLAEDMQKLTTEQLDNIGQILSTYKSDNKRTEELSALGLEKKIIDALLGINGLSKFAHLSLKALRKINPYLEEGKIYNEACTAAGYDFKAHANTQKTELLPAYKEEMDDITSPVARRAIAQSIKVINAIIREQKGSPLYINIELAREMAKGFDERTQIDKANKENQAKNERIMERIRTEFHKANPTGMDLIKLKLWEEQDGRSPYSQKAISINRLFEPGYVDIDHIVPYSISFDDSFKNKVLVFSDENRDKGNRLPIAYLQSKFGAKAAENFMIWVQSNIKDYKKRQKLLKREITEEDINKFKERNLQDTKTISRFLYNYINDYLLFAPSDTGKKKRVTAVNGTITAYLRKRWGINKIRANGDKHHAVDAVVIACTTDKMIKDLSSFSRYHELEYTHTDTESFLVNSLTGEILKRFPYPWEDFRPELMARLSDNPADALRKLNLIFYHGIDLSTIKPIFVSRMPRHKVTGAAHKATIKSARCLDNGIVICKTSLQNLKLDKEGEIANYYAPESDTILYNALKERLRSYDNKPAKAFAEPFYKPKADGTPGPLVKKVKVYEKSTLNVAVQQNTAVADNDSMVRVDVFHVKGNGYYLVPIYIADTLKKELPNKAIVAYKPYADWPVMDDSNFIFSLYPNDLIKFEHKNSVKFAKVNKESTLNDFYSTKSEIVYFKGCNINTGAITIINHENTYVVSSLGVKTLPSLEKYQADVLGNYTKVKKEVRKPFR

SEQ ID NO: 385 - protein, 1333 aa, Planococcus antarcticus
  Planococcus antarcticus DSM 14505
MKNYTIGLDIGVASVGWVCIDENYKILNYNNRHAFGVHEFESAESAAGRRLKRGMRRRYNRRKKRLQLLQSLFDSYITDSGFFSKTDSQHFWKNNNEFENRSLTEVLSSLRISSRKYPTIYHLRSDLIESNKKMDLRLVYLALHNLVKYRGHFLQEGNWSEAASAEGMDDQLLELVTRYAELENLSPLDLSESQWKAAETLLLNRNLTKTDQSKELTAMFGKEYEPFCKLVAGLGVSLHQLFPSSEQALAYKETKTKVQLSNENVEEVMELLLEEESALLEAVQPFYQQVVLYELLKGETYVAKAKVSAFKQYQKDMASLKNLLDKTFGEKVYRSYFISDKNSQREYQKSHKVEVLCKLDQFNKEAKFAETFYKDLKKLLEDKSKTSIGTTEKDEMLRIIKAIDSNQFLQKQKGIQNAAIPHQNSLYEAEKILRNQQAHYPFITTEWIEKVKQILAFRIPYYIGPLVKDTTQSPFSWVERKGDAPITPWNFDEQIDKAASAEAFISRMRKTCTYLKGQEVLPKSSLTYERFEVLNELNGIQLRTTGAESDFRHRLSYEMKCWIIDNVFKQYKTVSTKRLLQELKKSPYADELYDEHTGEIKEVFGTQKENAFATSLSGYISMKSILGAVVDDNPAMTEELIYWIAVFEDREILHLKIQEKYPSITDVQRQKLALVKLPGWGRFSRLLIDGLPLDEQGQSVLDHMEQYSSVFMEVLKNKGFGLEKKIQKMNQHQVDGTKKIRYEDIEELAGSPALKRGIWRSVKIVEELVSIFGEPANIVLEVAREDGEKKRTKSRKDQWEELTKTTLKNDPDLKSFIGEIKSQGDQRFNEQRFWLYVTQQGKCLYTGKALDIQNLSMYEVDHILPQNFVKDDSLDNLALVMPEANQRKNQVGQNKMPLEIIEANQQYAMRTLWERLHELKLISSGKLGRLKKPSFDEVDKDKFIARQLVETRQIIKHVRDLLDERFSKSDIHLVKAGIVSKFRRFSEIPKIRDYNNKHHAMDALFAAALIQSILGKYGKNFLAFDLSKKDRQKQWRSVKGSNKEFFLFKNFGNLRLQSPVTGEEVSGVEYMKHVYFELPWQTTKMTQTGDGMFYKESIFSPKVKQAKYVSPKTEKFVHDEVKNHSICLVEFTFMKKEKEVQETKFIDLKVIEHHQFLKEPESQLAKFLAEKETNSPIIHARIIRTIPKYQKIWIEHFPYYFISTRELHNARQFEISYELMEKVKQLSERSSVEELKIVFGLLIDQMNDNYPIYTKSSIQDRVQKFVDTQLYDFKSFEIGFEELKKAVAANAQRSDTFGSRISKKPKPEEVAIGYESITGLKYRKPRSVVGTKR

SEQ ID NO: 386 - protein, 1197 aa, Porphyromonas sp.
  Porphyromonas sp. oral taxon 279 str. F0450
MLMSKHVLGLDLGVGSIGWCLIALDAQGDPAEILGMGSRVVPLNNATKAIEAFNAGAAFTASQERTARRTMRRGFARYQLRRYRLRRELEKVGMLPDAALIQLPLLELWELRERAATAGRRLTLPELGRVLCHINQKRGYRHVKSDAAAIVGDEGEKKKDSNSAYLAGIRANDEKLQAEHKTVGQYFAEQLRQNQSESPTGGISYRIKDQIFSRQCYIDEYDQIMAVQRVHYPDILTDEFIRMLRDEVIFMQRPLKSCKHLVSLCEFEKQERVMRVQQDDGKGGWQLVERRVKFGPKVAPKSSPLFQLCCIYEAVNNIRLTRPNGSPCDITPEERAKIVAHLQSSASLSFAALKKLLKEKALIADQLTSKSGLKGNSTRVALASALQPYPQYHHLLDMELETRMMTVQLTDEETGEVTEREVAVVTDSYVRKPLYRLWHILYSIEEREAMRRALITQLGMKEEDLDGGLLDQLYRLDFVKPGYGNKSAKFICKLLPQLQQGLGYSEACAAVGYRHSNSPTSEEITERTLLEKIPLLQRNELRQPLVEKILNQMINLVNALKAEYGIDEVRVELARELKMSREERERMARNNKDREERNKGVAAKIRECGLYPTKPRIQKYMLWKEAGRQCLYCGRSIEEEQCLREGGMEVEHIIPKSVLYDDSYGNKTCACRRCNKEKGNRTALEYIRAKGREAEYMKRINDLLKEKKISYSKHQRLRWLKEDIPSDFLERQLRLTQYISRQAMAILQQGIRRVSASEGGVTARLRSLWGYGKILHTLNLDRYDSMGETERVSREGEATEELHITNWSKRMDHRHHAIDALVVACTRQSYIQRLNRLSSEFGREDKKKEDQEAQEQQATETGRLSNLERWLTQRPHFSVRTVSDKVAEILISYRPGQRVVTRGRNIYRKKMADGREVSCVQRGVLVPRGELMEASFYGKILSQGRVRIVKRYPLHDLKGEVVDPHLRELITTYNQELKSREKGAPIPPLCLDKDKKQEVRSVRCYAKTLSLDKAIPMCFDEKGEPTAFVKSASNHHLALYRTPKGKLVESIVTFWDAVDRARYGIPLVITHPREVMEQVLQRGDIPEQVLSLLPPSDWVFVDSLQQDEMVVIGLSDEELQRALEAQNYRKISEHLYRVQKMSSSYYVFRYHLETSVADDKNTSGRIPKFHRVQSLKAYEERNIRKVRVDLLGRISLL

SEQ ID NO: 387 - protein, 1485 aa, Prevotella bivia
  Prevotella bivia JCVIHMP010
MKNILGLDLGTNSIGWAKISIDDNGKYIKDSIKLGSRIIPMSQDVLSNFSKGVTLSQTSERTSFRGARRLRERTLLRRERLHRILHLLGFLPKHYEKAIGWDRNDNKTYGKFINHAEPKLAWCKDNNGKMRFLFMDSFHDMLSEFSEKHPELLANGKKIPLDWTIYYLRKKALYKAITKEELAWILLNFNQKRGYYQLRGEEDRDSEANKKEYLELKVIGVEATGEKKGNDIWYNIHLENGWIYRRSSKNPLNDWLGKVKSFIVTTDLDADGNPKKDKDGNIKRSFRAPSEGDWTLIKKRTESLLENSGQTVGQFIYNHILEEPSAKIRGNFIRTIERKYYKDELKAILEKQKEFHHELSSESLLTECAKELYKRNIAHQEVLLKKGIIHLLLNDILFYQRPLKIKKSLIDNCPYENYKYVDKKSGDIKVKSIKCIAKSNPFFQEFRLWQFVSNLRLYRKSDDKDVTSEHLVTTDDYANLFTYLNNRKDIKQSVLLKEYFKIKKVKTINGAEYPVRWNYIDDDNKTYPCNETRYDILHALSKTELKSEWLTPERTYRLWHLLYSIESKEETKKALNKLNLSDDFTEAFLTIKPFKKEYGSYSEKAIKKLLSLMRMGYLWSEDEAIKQVGAEIEKTIEGELPDYVLQRLEKSQHNYNKISDFSGLPLWLASYIIYGRHSEAKEIIHWDNPESMMAYIKDFRQHSMRNPIVEQCVLETLRTVHDIWKEIGHIDEIHIELGREMKSTSEQRKAITQNVLHNQNTNIRIKLLLQELKNDNNITGVRPYSPMQQEILRIYEEGALQGLTKEDKDYNDILKISQTAQPTSNELTRYKLWLEQKYRSPYTGKAISLSKLFTSAYQIEHVIPQSRYFDDSLSNKVICESEVNTLKKAMLGMEFIKTCGGQKVHCTLLGDVEIYNEEDYKAFVNEHYSNNRTKRNKLLMEDIPQEFINRQLNDSRYISKMVKQLLSAIVRGQEEVEATSKFVIPCTGGITDRLKKDWGLNDIWNNLVSPRFQRMNALTGSEYFGHWENKEGKRVFQTTMPIQLQQGFSKKRIDHRHHAMDALVIACASRNIISYLNNETAQDTERRRDLRQKLCDKGGSVRKPWDSFTQDTQYALKDIIVTFKNYVRIINKATNYYEHYKTDGKKGMISQKGDELWAIRKPMHKETVFGKVNLRRPKRVSLSKAIDSVDIICNRKLKKYIKARLNEGLQKKQILNIFKELNNVWEGIDVNKIDIWEMSNDKEPMVATRKQLDTSFDEKKIRSISDTGIQKILLNYLITKNNNPELAFTPEGIQEMNSNISEYNDHKKHQPIYKVRVTEPLGAKYPIGTMGNNPKKFVEAQAGTNLYFAIYEDKEGKRNYDTIPLNIAAERLNQQLSPVPETNENNTPLKFYLSPNDLVYVPSEEERHSGNNIQLDKNRIYKMVSSTSKRCFFIHHRVAISLVDKKEFSAQNKMERSIDNEQVMIKSVCWKLITDRLGNIIKVIK

SEQ ID NO: 388 - protein, 1457 aa, Prevotella buccae
  Prevotella buccae ATCC 33574
MKTILGLDLGTNSIGWAKVSVDDYGNYLHDIKLGSRIIPMSQDVLGNFDSGVTVSQTAQRTEFRSKRRLVQRNLQRRERLHRVLHVLDFLPAHYDAAIGWDRTEAVTYGKFLNHAEPKLAWEELGNGKRRFLFMDSFHEMVADFARCQPALVADGKKIPLDWTIYYLRKKALTQAITKEELAWILLNFNQKRGYYQLRGEEEEENPTKQEEYYELKVVSVEATDSRKGNDTWYNVHLENGWIYRRSSKISLDDWVGKVKQFIVTTEYEKDGATLKTDKEGYVKRSFRAPNENDWGLRKKRTETLLEMSGKTVGAFIYDHLLQEPADKIRGNFIRTIERHYYKAELEAILAEQCKYHIELRDKEMLEACARELYLNNLPHQRSLMKKDMTYLLLYDLIFYQRPLKSKKALIANCPYEYYEYVDKETGEIKRQNIKCIAKSNPYFQEFRLWQFVLNLRLFDRVEDKEVTANYLPTADDHARLFTYLNDRKEINQETLLKDYFKLKKVKIGNEKEYPIRWNYIEDKEKKYPCNETRYELLMALDRAGIEHKWLDDNNLEYRLWHLLYSVEVKSESETALRKLKNDDAFVNSFLKVKPFKKEYGAYSEKAIKRLLAVMRKGFLWNEQDICDETRKRIEIIIKGDVDEKVKERMGHAAYSFDRVSDFQGLPEWLACYVVYGRHSEAMDIQHWDSPERLMAYINNFKQYSLRNPIVEQCILETLRTVHDIWKETGQIDEIHVELGREMKSTSEERARRTQNVLRNENTNLRIKSLLIELKNDTDICNVHPYSPMQQEILRIYEEGALQELNREDEDFEEISKISQMSQPSGKELNRYKLWLEQKYRSPYTGKAISLAKLFTPAYQIEHVIPQSRYFDDSFTNKVICEAEVNTLKSNLLGYEFIKKHGGEIIHCTTLGDVRIFSESEYKAFVMDHYANNKSKKDKLLMEDIPQEFLSRQMNDSRYISKVVKTLLSNIVRMADESEATSKSVIVCTGGVTDRLKKDWGLNDVWNSIVYSRFERLNRLTGTEAFGHWENKDGKRVFQTSMPLELQRGFRKKRIDHRHHAMDALVIACASRNIVNYLNNESANNPKKREDLRRQLCDKNRVIRKPWETFTQDAYNALENVVVSFKNYVRVINKATNRYEHYDENGKKRFVQQKGSELWAIRKPMHKETYYGHVNLRRKELVTLQKALDDIPSICDKKLRDYISALVEKHFNKRQLLAHFKSTDYYWQKQYVNKVYVWTFSDDIKPLVATRKLLDTSFDAKRIGTITDTGIQKILRNYLEAKGGNATLAFTPEGIAEMNQNISKYNDGKPHQPILKVRITEPMGAKYRVGQTGNKMAKYVEAQSGTNLYFAIYEDSEGKRSYTTVPLDEVAERLKQRLSPVPEKDENDVPLKFYLSPNDLVYVPTEEELQLRECKLNKDRIYKMVSSTGNECHFIPYYVANVIYNKGGFNMQMHRPQS

SEQ ID NO: 389 - protein, 1218 aa, Prevotella buccalis
  Prevotella buccalis ATCC 35310
MNKRILGLDTGTNSLGWAVVDWDEHAQSYELIKYGDVIFQEGVKIEKGIESSKAAERSGYKAIRKQYFRRRLRKIQVLKVLVKYHLCPYLSDDDLRQWHLQKQYPKSDELMLWQRTSDEEGKNPYYDRHRCLHEKLDLTVEADRYTLGRALYHLTQRRGFLSNRLDTSADNKEDGVVKSGISQLSTEMEEAGCEYLGDYFYKLYHEQGNKVRIRQRYTDRKKHYQHEFDAICEKQELSSELIEDLQRAIFFQLPLKSQRHGVGRCTFERGKPRCADSHPDYEEFRMLCFVNNIQVKGPHDLELRPLTYEEREKIEHLFFRKSKPNFDFEDIAKELAGKKNYAWIHDKEERAYKFNYRMTQGVPGCPTTAQLKSIFGDDWKTGIAETYTLIQKKNGSKSLQEMVDDVWNVLYSFSSVEKLKEFAHHKLQLDEENAEKFAKIKLSHSFAALSLKAIRKFLPFLRKGMYYTHASFFANIPTIVGKEIWNNEQSRKYIMENVGELVFNYQPKHRDVQGTIEMLIKDFLANNFELPAGATDKLYHPSMIETYPHALRNEFGILQLGSPRTNAIRNPMAMRSLHVLRRVVNQLLKESIIDENTEVHVEYARELNDANKRRAIADRQKEQDKQHKKYGDEIRKLYKEETGKDIEPTQTDVLKFQLWEEQNHYCLYTGEQIGITDFIGSNPKFDIEHTIPQSVGGDSTQMNLTLCDNRFNREVKKAKLPTELANHEEILTRIEPWKNKYEQLVKERDKQRTFAGMDKAVKDIRIQKRHKLQMEIDYWRGKYERFTMTEVPEGFSRRQGTGIGLISRYAGLYLKSLFHQADSRNKSNVYVVKGVATAEFRKMWGLQSEYEKKCRDNHSHHCMDAITIACIGKREYDLMAEYYHMEETFRQGRGSKPKFSKPWATFTEDVLNIYKNLLVVHDTPNNMPKHTKKYVQTSKGKVLAQGDTARGSLHLDTYYGAIERDGEIRYVVRRPLSSFTNPKELENIVDETVKRTIKEAIADKNFKQAIAEPIYMNEDKGILIKKVRCFANSVKQPINIRQHRDLSKKEYKQQYHVMNENNYLLAIYEGLVKNKVVREFEIVSYIEAAKYYKRSQDRNIFSSIVPTHSTKYGLPLKTKLLMGQQVLMFEENPDEIQVDNTKDLVKRLYKVVGIEKDGRIKFKHHQEARKEGLTIYSTPYKNNDDYVPIFRQSIKNINILVDGIDFNIDILGKVTLKE

SEQ ID NO: 390 - protein, 1422 aa, Prevotella denticola
  Prevotella denticola CRIS 18C-A
MTQKVLGLDLGTNSIGSSVRNLDLSDDLKGQLEFFSSDIFRSSVNKESNGREYSLAAQRSAHSRSRGLNEARRRKLWATLDLLIKYGFCPMSPESLMRWRTYDKQRGLFREYPIDDKNFNAWILLDFDGDGKPDYSSPYQLRRELVIRQFDFDQPIERYKLGRALYHIAQHRGFKSSKGETLSQQETNSKQSLTDDTADVAGEMKASEEKLSKGLSTYMKENNLLTVGAAFAQLEDEGVRVRNNNDYRAIRSQFQREIETIFKFQQGLSVENELYERLVSEKKNIGTIFYKRPLRSQRGNVGKCTLERTKPRCAIGHPLFEKFRAWTLINNIKVRMSEEEQAEQLPMKLRFELYNDCFLAFVRAEFKFEDIRKYLEKRLGVHFSYNDKTINYKDSTSVAGCPITARFRKLLGEDWESFHVDGQKQRQAHGKNNASFHTVSYSTNDIWHFCYDAEEPEAVLSFAQDNLKWEKKKAEELVRIWSAIPQGYAMLSQKAIRNINKMLILGLKYSDAVLLAKVPEIVEITDGEILSVTEDYHRVEAQVGYEKQINNIVNALIAKYKSASEEYRFADHNYEYQLDKSDEKDIIKQIESNIGTRKWSLLDADEQTDILQKVRDKYQNFFRSHERKFVESPKLGECFEEYLMKKFPMVEGERWKKLYHPSQIAIYRPVPANKDRSALRLGNPDIGAIKNPTVLRVLNTLRKRVNQLLDDGIISPDETRVVVETARELNDANRKWALDTYNRIRHDENEKIKKILAEFYPKRDNISTVDIDKARYVIDQREMDYFTEAKTYHKDIKKYKLWLEQGGQCMYTGRTINLSNLFDPNSFDVEHTIPESISFDSSDMNLTLCDAHYNRFIKKNHIPADLPNYDKSVVIDGKEYSPIKPRLQRWADRVERLNRNVEYWRGQARRAQNKDRKDQCMREMHLWKMELEYWTKKLERFTITEVTDEFKNSQLVDTRVITRHAVLYLKSIFPHVDVQRGDVTAKFRKILGIQSVDEKKDRSLHSHHAIDATTLTIIPGAAKRERMLELFAKIEEVNKMLSFSGNEDRTGLKQELDGLKNQLNKEVKACRIGHNVSEIGTFINDNIIINHHVKNQALTPVRRRLRKRGHIVGGMDNPRWQTGDALRGEIHKASYYGAITQYAKDKEGKVLMKEGRPQINPTIKFVIRRELKYKKSSTDSGFASWDDLGKAIVDKELFALMKGQFPEGTSFKDACEQGIYMIKKGKNGEVDTKLYRIRHIRCKTKQKNALKIKEQAYKSEKEYKRYFYAAVGDLYAMCCYTNGKTREFKIYSLYDISCHRKVGVEDIPEFITDKKGNRLMLDYKLHTGDMILLYKENPEELYDLDNVSLSKLLYKINGFENDGLRIRMVNHLVAKEAMGESVKDYAKLPDIIRCGVKTIKFLVMGENRDFVIKNGKISFNHR

SEQ ID NO: 391 - protein, 1375 aa, Prevotella histicola
  Prevotella histicola F0411
MKKILGLDLGTTSIGWALVYESENTDEKSSIVRLGVRVNPLSVDEKGNFEKGKAITTNADRQQTHGARINLQRYKLRRENLKDCLQKQGWIGTEALCEEGKTSTFETYMLRAKAAEEEISLHELCRVLFMMNKKRGYKSNRKANNKEDGKLFDGMTVAKKLYEEHLTPAEYSFQLLSSGKKFKQEYYRSDLKEEFDRIWNEQQKYYPEILTDDFKQQLQGKSKGNTSKIFLGKYGIYSADLKGLDRKLQPLKWRVEALKQQVDKEVLAFVISDLNGQIASTSGLLGAISDRSKELYFNKQTVGQYLWTSLKETPHVSIKNKPFYRQDYLDEFEKIWETQATYHKELTPELKQEIRDIIIFYQRPLKSKKGLISVCELEQRKVKVTIDGKEKEISIGPKVAPKSSPMFQEFRIWQNLNNILLIDKGNNSIHPLYEEEKNLLYEELSVKEKLSKAEALKVLNKNSKQWDLNYKEIEGNRTQAVLYDCYNRIIVMTGHEEYNFKKLKASEIRSYVKTTFTGLGFNTDILEFDSSLTGHELEKQPMYQLWHLLYSYESDNSRTGNDALLRKLETAFGFPKEYAAVLSDVVFEDSYGNLSVKAMRKILPHLQAGLNYSQACEEAGYKHSRRSLTKNELDQKEYKEKLELLPKNSLHNPVVEKILNQMINVINAVIDEYGKPDEIRIELARELKIGAAERENMTRSINQGNAENKRIREILEKEFALSYISRNDIIKYKLYEELKSNGFKTLYSDTYISKDKLFSKDFDIEHIIPKARLFDDSLSNKTIEARDVNIAKSNKTAFDFISEKYDQQGIEAYKKKLDILLQDGSISKAKYNRLLMKEADIPSGFIDRDLRDTQYIAKKAYEILSDLVRNVTPTTGAVTSRLREDWQLVDVMKELNFEKYQKLGLVEVIEDRDGRKIKRIKDWTKRNDHRHHAMDALTIAFTKPSYIQYLNNLNARSDKNSSIYGIENKELHREDNKLRFNAPLPINEFRAEARRHLKSILVSVKAKNKVMTQNVNVIKTKHGVIKKVQLTPRGELHNATFYGTKKRPIIKMVKVGAALDEVTIKKVSSSFIREALLDRLHEYNGDAKKAFTGRNSIDKNPIYIDEEHKKTVPALVKTIEWEMYHPTRKLISPDLKIDKVIDKGIREILKTRLAKFNGDAQKAFSNLDENPIYKDEAKKITLKRVSLEGVSSVIPLHTLKDREGKLVVGKDGKPVLGDYVQTSNNHHIAFYMDENGNLQDNVVSFFEAAERKSQGVPVIDKNYNHDKGWNFLFTMKQNEYFVFPNEVTGFNPSEVDLMDEANYSIISPNLYRVQKMSKASGRDYWFRHHLEAMLNDDPKLRNSMFKRITSLKALEGIVKVRINCIGKIVAVGEYD

SEQ ID NO: 392 - protein, 1380 aa, Prevotella intermedia
MKRILGLDLGTTSIGWALVNEAENNNEASSIVRLGVRVNPLTVDEKSNFEKGKAITTNADRQLRHGARINLQRYKLRRQNLHDCLQKQGWLGTEAMYEEGKASTFETYKLRAKAAEEEISLHEFARVLFMLNKKRGYKSNRKANNKEDGQLFDGMTIAKKLYEEHLTPAEYSLQLLNKGKKFTQGYYRSDLNAELERIWDEQKKYYPEILTDEFKQQLEGKTKTNTSKIFLAKYGIYSADLKGLDRKFQPLKWRVEALQQQVDKEVLAFVISDLKGQIANTSGLLGAISDRSKELYFNKQTVGQYLWASLEENPHISIKNKPFYRQDYLDEFEKIWETQAAFHKQLTPELKQEIRDIIIFYQRPLKSKKSLISVCELEQRKVKATIDGKEKEITIGPKVAPKSSPVFQEFRIWQNLNNVLLIDNDTNEKRPLDEVERNLLYKELSIKAKLSKTEALKILNKKGKQWDLNYRELEGNRTQAILFDCYNRIITLTGHEECDFKKIKASEIRHYVSTIFKNLGFSTEILDFDPSLKKHELEKQPMYQLWHLLYSYESDNSRTGNESLLRKLETTFGFPEEYATVLCDVVFEEDYGNLSVKAMREILPYLQAGNDYSQACAYAGYNHSRHSLTKEELDQKVYKERLELLPKNSLRNPVVEKILNQMINVINAIIDEYGKPDEIRIEMARELKSSAADRKKTTHAISQGNAENQRIREILEKEFSLSYISRNDIIKYKLYEELEPNYYKTLYSDTYITKDKLFSKDFDIEHIIPKARLFDDSFSNKTLEARNINLEKSNKTAFDFIKEKYGEDGAEAYKKKLDMLLENDAISRPKYNNLLRAEADIPSDFINRDLRNTQYIAKKACEILGELVKTVTPTTGKITNRLREDWQLVDVMKELNFEKYEKLGLTEIVEDRDGRKIKRIKDWTKRNDHRHHAMDALAIAFTKPSFIQYLNNLNARSNKGDSIYAIENKELHYEEGKLRFNAPIPVNEFRAEAKRHLSAILVSIKAKNKVMTQNVNKIKTKHGIIKKIQLTPRGPLHNETIYGTKMRPIIKMVKVGAALDEATINKVSSPAIREALLKRLNEYSGNAKKAFTGKNTLEKNPIYLNAGRTKTVPSLVKTVEWESFHPTRKLIDKDLNVDKVVDKGIREILKARLEEFNGDAKKAFSNLEENPIYLDEAKKIALKRVSIEGVLSAIPLHTLKNQAGKPITGKDGKPVLGNYVQTSNNHHIAFYYDEDGNLQDNAVSFFEAAERKSQGIPVIDKDYNRDKGWRFLFTMKQNEYFVFPNEATGFIPSEVDLTDEANYGIISPNLYRVQKVSRIDKGTSASRDYWFRHHLETILNDDAKLKNLAFKRIRGLLELKDIIKVRINSTGKIVAVGEYD

SEQ ID NO: 393 - protein, 1425 aa, Prevotella micans
  Prevotella micans F0438
MIQKIFGLDLGTNSIGSSVRNLELGENLTEQLEFFSSDIFGSSVSKNSNGREYSLAGNRSAHRRSRGLNEARRRKLWATLDLLIEHGLCPMSPDSLMQWRTYDKQKGLYRQYPIEDKDFNAWIMLDFNGDGKPDYSSPYQLRRELVVRQFDFDQPIERYKLGRALYHIAQHRGFKSSKGETIADQEKNEKKPIAEEGADIANEMKASETKLSKGLVAYMQENHLKTVGEAFAKLEDERVRIRNNESYRAIRSQYQDEIKEIFTYQKKLSVESELYERLTSEKKGVGTIFYKRPLRSQRGNVGKCTLERNKPRCPIGRPEFEEFRAWTLINNIKIRETAGEPYKQLPIKLRQELLKDCFLSKVKADFKFEDIRKYIEKRLGLSFSNDDKTINYKDSVSIAACPVTVRMKKLLGENWANCRIDGEKRRQAHGKNNNNEHIVSYTEEDIWHVCYNAEDPEEVSNFARKALHWDENKIKELVRLWTSIPQGYAMLSLKAIRNINRMLLLGLKYSDAVLLAKLPDIVPVSDEDILAITKEFLQLEDKLNQEKQINNIVNSLIANYKSKLEENRFADHNYQYQLGEGDDEDINTQIKSHIGAKLWVQIGADEQTKIFQAVRSKYQDFFKSYKRKFVESPKLGELLVAFLTEKFPNVKSKQWERLYHPSQIAIYRPIPVDNDRSKLRLGNPNIGAIKNPTVMRVLNTLRRRVNQLLDDGVISPDETRVVVETARELNDANTKWALDRYNRIRRDENEKIRKILKELNPTTNSISEQDIDKARYIFEQCETDFYTDGKVPYYNKDIKKYKLWLEQGGQCLYTGQTINLTNLFNPNAFDMEHTIPKSISFDNSDQNLTLCESYYNRFIKKNNIPTDMPNYDKDVTINGKEYTAIKPRLQRWKERVDRLSRNVDFWKGQARRAQDKDRKDECIREKHLWDMELAYWKGKLERFTMTDVTDGFKNSQLVDTRVITRHAVLYLKSIFNHVEVQRGETTAEFRKILGLQSIDEKKDRSLHSHHAIDATMLTVIPSAAKRDRMLELFYKIEETKKALKNYNDNNKTGLNLELKGLEEKLDKEKKDCRVGRRVNDLDRFINENIIVSHHTKDQALTPAHRRLRKRGKIVGGKEHPRWQTGDSLRGEIHKASYYGAITQFAKDANGKVLMKDGQAQIDPTIYYVIRRELKYKRSTQDSGFTNWEDLEKVIVDTDLFGLMKGQFPEGTSFKDACEQGFYMIKKGKNGEGDVKTHRIRHVRCKAVKTALRIKEQTYKSSKDYKQFFYAAVGDLYVMCYYTDGKKRDFKIYSLYDISNHRKSGTEDIPKFITDKKGNHLPLDYKLRTGDMVLLYKDNPEELKDLDQVNLKRRLYKVNRFESEGLIILLTHHLSTTTERGCSIGKIENYQNLPTAIRCGIKTIKFLIMGKHRDFVIRNGNIEFKH

SEQ ID NO: 394 - protein, 1506 aa, Prevotella nigrescens
  Prevotella nigrescens ATCC 33563
MKTILGLDLGPNSIGWAKVEVDDEGNYLRNIKLGSRIIPMTQDMLGDFDKGVKVSQTAIRTDFRGNRRLIERHLLRRERLHRVLHALKFLPKHYEDAIGWDRNEPATYGKFVNNSEPKLAWERQEDGSMRFLFMESFNEMVADFAQNQPSLVSDGKKIPLDWTIYYLRKKALTRPIKKEELAWILLNFNQKRGYYQLRGEEEEDNLTKRKEYYKLKVVGVEADGAPKGGKTWYNIHLENGWTARCQSKIPLDDWVGKVKEYIVTTEYEDDGKTPKCDKEGKVKRSFKSPEKDDWQLIKTRTEKFIDDSNKTVGAFIYDYLLEKPFDKIRGKYIRTIERKYYKNELREILREQTKYHEGLHSLEALKICAEELYKNNQQHQEYLLKKDMTFLLLNDLIFYQRPLKSKKSLIADCPYEVYKYDDKLTGKKGQKKIKCIAKSNPYYQEFRLWQFIANLRLFSVTDGKEVTAEYLKTEEDYVRLFSFLNDRKDIKQETFLRSFLKLKKESIGSEKIYPIRWNYIEDANKSYPCNATRHELLLAFDRADIPRELLDVEEREYRLWHLLYSIEAKEETESALRKLKANKAFGDLNIDDAFVNSFLKIKPFEKEYGAYSEKAIKKLLAVMRRGSLWKEADICEATKQNIAKILQNDIDEKLKKKIEAAVSSFNKLSDFQGLPTWLACYVVYGRHSEAAQIQCWQSPEDLKTYINKFKQHSLRNPIVEQCLLETLRTVYDIWKDAGQIDEIHIELGRNMKSTAEQRARKTKDILRNENTNLRIKNLLVELKNDDKIENVRPYSPSQQEILRIYEEGALQELSKEDEMFEDISKISKMAQPSPTELSRYKLWLEQKYRSPYTGRVIPLSKLFTTAYQIEHIIPQSRYFDDSFNNKVICESEVNSLKDNMLGYEFIKECGGRIVHCTLLGDVKIFTKEEYKDFVTKHYIDNTYKRDKLLLEDIPQEFSARQLNDSRYISKMVQTVLSNIVRAENEQEATSKFVVSCNGAITNRLKKDWGLNDVWSSIVCPRFKRLNEITKTNAFGHWEDKAGKHVFQTTVPLELQRGFSKKRIDHRHHAMDALVIACASRNIVNYLNNESANSPEKREDLRKKLCDEKRKIRKPWKTFTQDAREALSDVVVSFKNYVRVINKATNYYEHYSSSGNKVMISQKGNDMWAIRKPLHKESVFGRVNLCRKVIVSLKKALENIPAICDKTLRDYINALVEKHFNTRQLLAHFKSINYRLNRQCVEKVEVWQFSDEKIEMVARRKSLDTSFDDKQISSITDTGIQKILLNYLQTKDGNAEIAFTPEGIEEMNKNISLYNDGKAHQPILKVRVATPKGMKYPVGQTGNKATKFVVAEKGTNLYFAIYENELGVRSYDTIPLNIVVERLKEGLSPVPQANEADIPLKFYLSPNDLVYVPTKENEDELCRDRIYKFVDSSGTTANFVPHTSANTIYNVDKEYAEKCCNGAVFLNEYGLGSPQSKNQRALTGEMIKEICWKLKVDRLGNIIKVIK

SEQ ID NO: 395 - protein, 1380 aa, Prevotella nigrescens
  Prevotella nigrescens F0103
MKRILGLDLGTTSIGWALVNEAESNNEASSIVRLGVRVNPLTVDEKSNFEKGKAITTNADRQLRHGARINLQRYKLRRQNLHDCLQKQGWLGTEAMYEEGKASTFETYKLRAKAAEEEISLHEFARVLFMLNKKRGYKSNRKANNKEDGQLFDGMTIAKKLYEEHLTPAEYSLQLLNKGKKFTQGYYRSDLNAELERIWDEQKKYYPEILTDEFKQQLEGKTKTNTSKIFLAKYGIYSADLKGLDRKLQPLKWRVEALKQQVDKEVLAFVISDLKGQIANTSGLLGAISDRSKELYFNKQTVGQYLWASLEENPHISIKNKPFYRQDYLDEFEKIWETQATFHKQLTPELKQEIRDIIIFYQRPLKSKKSLISVCELEQRKVKATIDGKEKEITIGPKVAPKSSPVFQEFRIWQNLNNVLLIDNDTNEKRPLDEDERYLLYKELSIKAKLSKTEALKILNKKGKQWDLNYKELEGNRTQAILFDCYNRIITLTGHEECDFKKIKASEIRHYVSTIFKNLGFSTEILDFDPSLEKHELEKQPMYQLWHLLYSYESDNSRTGNESLLRKLETTFGFPEEYATVLCDVVFEEDYGNLSVKAMRKILPYLQAGNDYSQACAYAGYNHSRHSLTKEELDQKVYKERLELLPKNSLRNPVVEKILNQMINVINAIIDEYGKPDEIRIEMARELKSSAADRKKTTHAINQGNDENQCIREILEKEFALSYISRNDIIKYKLYEELKPNGFKTLYSDTYIPKDKLFSKDFDIEHIIPKARLFDDSYSNKTLEARDINLAKSNKTAFDFVKEKYGEQGAEAYKKKLDMLLGNNVISKPKYNKLLMTEADIPSDFINRDLRNTQYIARKACEILGELVRTVTPTTGKITNRLREDWQLVDVMKELNFEKYEKLGLTEIVEDRDGRKIKRIKDWTKRNDHRHHAMDALAIAFTKPSYIQYLNNLNARSNKGDSIYAIENKELHYEEGKLRFNAPIPVNVFRAEAKRHLSAILVSIKAKNKVMTQNVNKIKTKHGIIKKIQLTPRGPLHNETIYGTKMRPIIKKVKVGAALDEATINKVSSPAIREVLLKRLNEYSGNAKKAFTGKNTLDKNPIYLNAERTKTVPASVKTVEWENYHPIRKPITPDLKVDKVIDKGIGEILKARLEEFNGDAKKAFSNLEENPIYLDQTKKIALKRVSIEGVLSTIPLHTLKNQAGKPIMGKDGKPVLGNYVQTSNNHHIAFYYDEDGNLQDNAVSFFEAAERKSQGISVIDKDYNRDKGWRFLFTMKQNEYFVFPNEATGFIPSEVDLTDEANYGIISPNLYRVQKMSRIEKGTSVSRDYWFRHHLETILNDDSRLKNSAFKRINSLKPLEGIIKVRINSIGKIVAVGEYD

SEQ ID NO: 396 - protein, 1391 aa, Prevotella oralis
  Prevotella oralis ATCC 33269
MKKILGLDLGTTSIGWALVNEKENNEELSSIIRLGVRVNPLTVDEKSNFEKGKDITTNADRTKCRSARRNLQRFKLRREALADCLKRHGLMTDETPLCETNNSIIFKTYSNRAKAVCEKIALDDFVRVLFMINKKRGYKSSRKLNTDDEGTLVDGMDVAKLLYNEQITPGEYLLRLFKKGKKTRPDFYLSDLKAELERIWDFQRTFYPEILCNALKEDLKGKSRTQSSAIFYAKYKVSTAKIAGKDKRLQELTWRTDALRKQLTIDEVAYVICSINGEVNGSSQRLSMISDRSKLLYFNHQTIGQYLMQRLEENPNAGLKNIIFYRQDYEDEFNDIWNSQATYHKELTPELKKEVKDIIFYQRGLKSCKWLINYCELEHEEIEVKTPEGKLRKITIGSKTCPKSSPLFQEFKIWQVLNNLQVSPLNSRRKAKRKKDEEPSLFSDEDMNTACRYLNEEEKLTLFKELSIKKELKKKDALKLLFENYKELDLNYKVISGNVTMANLYRAFQDIISLTGNGEFDFQAMPAEEAEKTVEEIFGGLGYKTAFLHFDASLHDKEFERQPAYRLWHLLYSYAGDQSKTGIEALVKRIQELCGFEPEYARILANISFIPDYGNLSSKAMRKILPYMQDGYEYSEACSKAGYRHSASSLTKEEINKKNYKTHLDEIKRNSLRNPIVEKILNQMVNVVNSVIDTYSNIDEIRIEMARELKKSKPEREDMSFAISKATKETERIKGILEQEFKIQHVTRNDIIRYRLYEELKPNGYKTLYSNTYIPREDLFSKKFDIEHIIPKARLFDDSYSNKTLELRDINIEKGNQTAYDFVLSKYGEEGLYKYEQRVEEFKKNNEQAGTKCRKLLMREADIPSDFLNRDLNDSQYIAKKAHELLREIVPTVTATTGSITNRLREDWKLVNVMKELNWEKYDKLGLTEEYKDKDGNTVRHIKDWTKRNDHRHHAMDALTIAFTKPSFIQYLNNLNARSNRGGSIYGIEQKELERENNKLVFIPPIDPKIFRKQAKEHLSNILISIKAKNKVVTKNVNKTKSKSGTNRKVQLTPRGQLHLETVYGKIRTYKTEEIKVGTKLTEELIAKVADKKIREALMQRLSEYGGNIKKAFQNISKHPIWLNGSHTKHVPEKVKIVFFEDVFTIRKAITPDIKIDKVIDSKIRRILQERLNEFGGEASKAFSNLDENPIWFNRDKGIAIKSVKIRGIAKGTAIRVKKDIHGKTIIGNNGYPVANDYVNTGNNHHVAIFRDKDGNLQEHIVSFYEATARAIQNLPIVDRNYNSEKDWKFLFSMKQNEYFVFPNPNTGFNPSEISLKDEKNYALISPNLFRVQKLSHYYYVFRHHLETNVDTNLQLKDITWKRITAVNNLTGAVKVRIDHLGRIVDVGEYK

SEQ ID NO: 397 - protein, 1204 aa, Prevotella ruminicola
MERILGIDTGTNSLGWAIVDKDENQYHLVAKGTNIFSEGVKIEKGIESSKAAERTEHRSVRKHYWRRKIRKIRLLTILSDNDLCPRLKHEQLRQWRLKKVYPTDDTFMEWQRTEDKAQVNPYKFRYICLTQKLDLSDITQRFILGRALYHLNQRRGFLSNRKEATKESEGTVKEGISSLSKDMKDSGCEYLGEYFYQLYQQGKKIRNHYTARKEHYLKEFKAICSKQELDDALIEKLEKAIFDQRPLKSQKGQVGTCTFEKGKSRCPSSHPLYEDFRMYSFINNIKVQVDTLYDKGERSLTDEEKQLIIPLFKRKSKRTFPFEDIAKKIAGKNNYCYIKSNEEKAYKFNYQMDTQVSGSPVNAQLEEIFGEDWLSSVCEVYTLANNKSRFQIMNDVWHVLFFYDDEDKLKEFAKDRLQLDDELAEKFSKISIPNDYAALSLKAIRKIMPYLRDYGLIYSEAVFLANLVDVLPQHVWGIKEMREAAIENVIDVMHSYDKNNIDGITLEGCVKTFLKERYQVSDDNLKKLYHPSMLDPYPRQRPNDEGVFQLGSPRISSVKNPMAMHSLFRLRKVVNLMLKKGYITPDTKVHIEFSRDLNDANKRWAIQTWQRENEKERERCRKEIEKYIASPSDTDILKYQLWEEQNHKCLYTGDEIRITDFLGDNPKYDIEHTIPRSAGGDSTKMNLTLCSSRFNRDEKKTKLPAELVNHDEILERISNWKEKYEDIDKQIRKISTKGATSKEDKDSKIRRRHYLILQRDYWRGKYQRFTMTEVPEGFSRRQGTDISVISRYARMYLKSVFKQVYIVKGIATSDFRKMWGIQDEYAKKERVNHVHHCIDAITIACIGKAEYDKLADYRHQYDDYLFQGKTKPTFDKPWPSFVIDIKHIQDELLIAHYAKDNLEKFTKKNLRGKDGRIIRDKFGNKLQMKGDTSRNSLHNDKFYGAINHEGEIKYVYRTNIEALDAKSIGNIVDPTVRSIIESAIAIHGSLKAAINKGIWMNEEKHIPIKKVRVFRNDVKKPIELKDQRDLSDKDYKQHYYVTNDGNYMMLIFSKLNNKGREIRQHVVINSLEATEVIKSHKRSQVGKVVWESYYSKEGFDLIYKLKSGTMILLYENNRDEVWDLDIRNLQKRLYIITKMKYDGRIYMMHHQEAREKKDLEEKSGSFKINEDYRPLIVNSYNQFNALVQDLDFEINDLGEIRRLI

SEQ ID NO: 398 - protein, 1424 aa, Prevotella sp.
  Prevotella sp. C561
MTQKVLGLDLGTNSIGSAVRNLDLSDDLQWQLEFFSSDIFRSSVNKESNGREYSLAAQRSAHRRSRGLNEVRRRRLWATLNLLIKHGFCPMSSESLMRWCTYDKRKGLFREYPIDDKDFNAWILLDFNGDGRPDYSSPYQLRRELVTRQFDFEQPIERYKLGRALYHIAQHRGFKSSKGETLSQQETNSKPSSTDEIPDVAGAMKASEEKLSKGLSTYMKEHNLLTVGAAFAQLEDEGVRVRNNNDYRAIRSQFQHEIETIFKFQQGLSVESELYERLISEKKNVGTIFYKRPLRSQRGNVGKCTLERSKPRCAIGHPLFEKFRAWTLINNIKVRMSVDTLDEQLPMKLRLDLYNECFLAFVRTEFKFEDIRKYLEKRLGIHFSYNDKTINYKDSTSVAGCPITARFRKMLGEEWESFRVEGQKERQAHSKNNISFHRVSYSIEDIWHFCYDAEEPEAVLAFAQETLRLERKKAEELVRIWSAMPQGYAMLSQKAIRNINKILMLGLKYSDAVILAKVPELVDVSDEELLSIAKDYYLVEAQVNYDKRINSIVNGLIAKYKSVSEEYRFADHNYEYLLDESDEKDIIRQIENSLGARRWSLMDANEQTDILQKVRDRYQDFFRSHERKFVESPKLGESFENYLTKKFPMVEREQWKKLYHPSQITIYRPVSVGKDRSVLRLGNPDIGAIKNPTVLRVLNTLRRRVNQLLDDGVISPDETRVVVETARELNDANRKWALDTYNRIRHDENEKIKKILEEFYPKRDGISTDDIDKARYVIDQREVDYFTGSKTYNKDIKKYKFWLEQGGQCMYTGRTINLSNLFDPNAFDIEHTIPESLSFDSSDMNLTLCDAHYNRFIKKNHIPTDMPNYDKAITIDGKEYPAITSQLQRWVERVERLNRNVEYWKGQARRAQNKDRKDQCMREMHLWKMELEYWKKKLERFTVTEVTDGFKNSQLVDTRVITRHAVLYLKSIFPHVDVQRGDVTAKFRKILGIQSVDEKKDRSLHSHHAIDATTLTIIPVSAKRDRMLELFAKIEEINKMLSFSGSEDRTGLIQELEGLKNKLQMEVKVCRIGHNVSEIGTFINDNIIVNHHIKNQALTPVRRRLRKKGYIVGGVDNPRWQTGDALRGEIHKASYYGAITQFAKDDEGKVLMKEGRPQVNPTIKFVIRRELKYKKSAADSGFASWDDLGKAIVDKELFALMKGQFPAETSFKDACEQGIYMIKKGKNGMPDIKLHHIRHVRCEAPQSGLKIKEQTYKSEKEYKRYFYAAVGDLYAMCCYTNGKIREFRIYSLYDVSCHRKSDIEDIPEFITDKKGNRLMLDYKLRTGDMILLYKDNPAELYDLDNVNLSRRLYKINRFESQSNLVLMTHHLSTSKERGRSLGKTVDYQNLPESIRSSVKSLNFLIMGENRDFVIKNGKIIFNHR

SEQ ID NO: 399 - protein, 1483 aa, Prevotella sp.
  Prevotella sp. MSX73
MKTILGLDLGTNSIGWAKVSVDDYGNYLHDIKLGSRIIPMSQDVLGNFDSGVTVSQTAQRTEFRSKRRLVQRNLQRRERLHRVLHVLDFLPAHYDAAIGWDRTEAVTYGKFLNHAEPKLAWEELGNGKRRFLFMDSFHEMVADFARCQPALVADGKKIPLDWTIYYLRKKALTQAITKEELAWILLNFNQKRGYYQLRGEEEEENPTKQEEYYELKVVSVEATDSRKGNDTWYNVHLENGWIYRRSSKISLDDWVGKVKQFIVTTEYEKDGTTLKTDKEGNVKRSFRAPNENDWGLRKKRTETLLEMSGKTVGAFIYDHLLQEPADKIRGNFIRTIERHYYKAELEAILAEQCKYHIELRDKEMLEACARELYLNNLPHQRSLMKKDMTYLLLYDLIFYQRPLKSKKALIANCPYEYYEYVDKETGEIKRQNIKCIAKSNPYFQEFRLWQFVLNLRLFDRVEDKEVTANYLPTADDHARLFTYLNDRKEINQETLLKDYFKLKKVKIGNEKEYPIRWNYIEDKEKKYPCNETRYELLMALDRAGIEHKWLDDNNLEYRLWHLLYSVEVKSESETALRKLKNDDAFVNSFLKVKPFKKEYGAYSEKAIKRLLAVMRKGFLWNEQDICDETRKRIEIIIKGDVDEKVKERMGHAAYSFDRVSDFQGLPEWLACYVVYGRHSEAMDIQRWDSPERLMAYINNFKQYSLRNPIVEQCILETLRTVHDIWKETGQIDEIHVELGREMKSTSEERARRTQNVLRNENTNLRIKSLLIELKNDTDICNVHPYSPMQQEILRIYEEGALQELNREDEDFEEISKISQMSQPSGKELNRYKLWLEQKYRSPYTGKAISLAKLFTPAYQIEHVIPQSRYFDDSFTNKVICEAEVNTLKSNLLGYEFIKKHGGEIIHCTTLGDVRIFSESEYKAFVMDHYANNKSKKDKLLMEDIPQEFLSRQMNDSRYISKVVKTLLSNIVRMADESEATSKSVIVCTGGVTDRLKKDWGLNDVWNSIVYSRFERLNRLTGTEAFGHWENKDGKRVFQTSMPLELQRGFRKKRIDHRHHAMDALVIACASRNIVNYLNNESANNPKKREDLRRQLCDKNRVIRKPWETFTQDAYNALENVVVSFKNYVRVINKATNRYEHYDENGKKRFVQQKGSELWAIRKPMHKETYYGHVNLRRKELVTLQKALDDIPSICDKKLRDYISALVEKHFNKRQLLAHFKSTDYYWQKQYVNKVYVWTFSDDIKPLVATRKLLDTSFDAKRIGTITDTGIQKILRNYLEAKGGNATLAFTPEGIVEMNQNISKYNDGKPHQPILKVRITEPMGAKYRVGQTENKMAKYVEAQSGTNLYFAIYEDSEGKRSYTTVPLDEVAERLKQRLSPVPEKDENDVPLKFYLSPNDLVYVPTEEELQLRECKLNKDRIYKMVSSTGSECHFIPYYVANVIYNKVEFEAKNKIGRALTGEMIKAVCWKLEIDRLGNILKVIK

SEQ ID NO: 400 - protein, 1375 aa, Prevotella sp.
  Prevotella sp. oral taxon 306 str. F0472
MKKILGLDLGTTSIGWALVNESENKDEQSSIVRLGVRVIPLTVDEKGNFEKGKAITTNADRQQVHAARINLQRYKLRRENLRDCLQKQGWIGSEPMCEDGKSSTFETYKLRAKAAVEEVSLHEFARVLFMLNKKRGYKSNRKANDKEEGKLFDGMTIAKKLYEEHLTPAEYSLQLLNTGRKFTPEYYRSDLIEEFEKIWNEQQKYYPEILTDEFKQQLEGKAKSNTSKLFLGKYGIYSADTKGLDRRLQPLKWRVEAMKQQVDKDVLAFVISDLKGQIANTSGLLGAISDRSKELYFSKQTIGQYLWASLQENPHISIKNQPFYRQDYLDEFEKIWETQATYHKELTSELKQEIRDIIIFYQRPLKSKKNLIAVCELEQRKVKVTVDGKEKEITIGPKIAPKSSPMFQEFRIWQNLNNILLLDHETNSKRPLYEEERNLLYEELSVKEKLSKTEALKVLGKKSKQWDLNYKELEGNRTQAVLYDCYNRIIVMSGHEECNFKKLKASDIRHYVKMIFKNLAFNTDILCFDSSLKGHELERQPMCQLWHLLYSYEGDNSRTGNDALLRKLETSFGFPKEYAAVLADVIFEDSYGNLSVKAMRNILPHLQAGKDYSQACEEAGYKHSRRSLTKEELNQKVYKEKLELLPKNSLHNPVVEKILNQMVNVINAVIEEYGKPDEIRIELARDLKIGAAERENMTRSINQGNAENKRIREILEKEFALSYLSRNDIIKYKLYEELKSNGFKTLYSDTYISKDKLFSKDFDIEHIIPKARLFDDSLSNKTIEARDVNIAKSNKTAFDFILERYGEQGVKTYKTKLLRLLEDGAISNKKYNNLLKTEADIPSGFIDRDLRNTQYIAKKAYEILSELVKIVTPTTGSVTNRLREDWQLVDVMKELNFEKYQKLGLADVIEDRDGRKVKRIKDWTKRNDHRHHAMDALTIAFTKPSYIQYLNNLNARSDKSSSIYGIEVKELHREEGKFRFNAPLPINEFRAEAKRHLKSVLVSIKAKKKVMTQNVNKIKTKHGIIKKVQLTPRGELHNATYYGTKKRPLVRMVKVGAALDEATIKRVCSPAIRAALLKRLNAYNGDAKEAFTGRNSIDKNPIYLDIEQTKLVPVLVKTIEWGMYHPIRKRITPDLKIDKVIDKGIREKLKARLAEFNGDAQKAFSNLDENPIYMDEAKRITLKRVSIEGVLSAIPLHTLKDKAGKPVIGSDGKPVFGDYVQTSNNHHIAFYIDDKGNLQDNPVSFFEAAERKSQGVPVIDRRYNCDKGWHFVFTMKQNEYFVFPNEATGFIPSEVDLLDEANYCIISPNLYRVQKLSKASGRDYWFRHHLETMLNDDLRLKNSTFKRIQSLKGLEDIVKVRINSIGKIVAVGKYD

SEQ ID NO: 401 - protein, 1216 aa, Prevotella stercorea
  Prevotella stercorea DSM 18206
MTKILGIDTGTNSLGWAIVDKTADNYNLLDKGVNIFQEGVKIEKGIESSKAAERTEHRATRVRYYRIKLRKIRLLRILSDNHLCPPLSQEELSTWRLKKVYPKNELFMQWQRTDDDTEKTPYAYRHKCIHEKLDLSDVTDRYILGRAFYHIIQRRGFLSNRKEQGGEDSGKVKEGISTLTHEMNEAGYEYLGDYFYALYNKGEKIRKHYTARNEHFLSEFKAICEKQDLEKELGSEVVRNIEKAIFDQRPLKSQKGQVGKCVFEKNKTKCPSSHPMYEEFRMLTFINNIKIKTPNDDVLRPLNTGEREKIMPLFFRKSKKQFDFEDITKKLAPKKMYGFYKKEEDAEMPFLFNYPMDTSVSGCPVTAALKDVFGDDWITAICETYTLGEGKSRFDIVNDIWHALYFYSDKDKLAEFAINRLQLSEDEAKIFSEISLPADYASLSLKAICKILPYLRRGLIYSHAVFLGNLCEVMPKYEWSIKEMRETIIDNIIMEMDKCDTKDKRTFEVCIKDYLKGQYNVSDNSLKKLYHPSMIETYPRVQYTNEHGVYQLGSPRIDSVRNPMAMRSMFRLRKLVNRLLVEGKIDQNTEVHIEFARELNDANKRNAIALFVKENQSANDEARKQIITLFKKETGTDIEPTDKDILKYVLWEEQNHICLYTGKQIRISDFIGANPKFDIEHTIPRSVGGDSTKMNLTLCDSRFNREVKKTKLPVELPNHDEIMERIKEWKKNYELLDIQIRKNKKLSKGATTKEQKDTIIRKRHLLELRRDYWRGKYERFTMESVPEGFSRRQGTDISVISKYARLYLKSLFNRVYTVKGIATSDFRKIWGIQDIYSKKERINHVHHCIDAIVIACIGLDEYNKLGAYYHDEENNKWYGMSKASFKKPWATFVEDIKKIQDEILVYHYTPDNMPKQGRRRIKIDGKKILCKGDAARGSLHNDTYYGAIENDGAVKYVKRIDLASLEEKDVKNIVDDTVRSIIEAAIKEKGFKDAMASTIWMNEEKRVPIKKVRCFTPSITKPLNIRKQRDVSIKEYKQQYHVANDSNYLLALYIGTDNKGKEKREFEIVNILQAAQYYRTSNDKEVVDRHIVPIKSEHDYPFAYTLKIGTMVLLYEKSPNEVWDATIKERNRRLYKVTGLSTMRMKGRNGEYAYATVKLIHNEEARPSKDIKAKNGEYEQGEEFRPAIIMLHTQLNALVQGYDFEINELGEIRRLR

SEQ ID NO: 402 - protein, 1234 aa, Prevotella tannerae
  Prevotella tannerae ATCC 51259
MPNFWSIFTENLQTYLMKTRILGLDTGTNSLGWAVVDRDENNQYTPICRGDLIFTEGVKQEKGIEFSLAAERTSYRASRRHYFRRRLRKVEVLKVLVKHKLCPPLSDEALNRWHTKKEYPLDEDFILWQRTNEADNKNPYHDRHICLHRKLNLKDSQTDRYTLGRALYHLTQRRGFLSNRLDQNEEAEETGKVKSAISELSKEMKEAGCEFLGDYFYLLYRTEGNRVRIRSRYTDREKHYLQEFKEICRVQELDEDLAKALEKTIFFQRPLKSQRQGVGKCTMEKGHSRCAVSHPLYEEYRLLCYLNNIRIKTPSDDRLRPLNAEEREKITPLFYKEKNFDFEKIAKKLAGKTPFGWIRDAEDWPYQFNYRMTQEAPACPTTAQLIKVFGEDWKAALAETYTMSAKQDGTLKTEDEICTDIWNVLYSFSSKEKLKEFGLKKLQLDEVQAKAFSEIRLTRDFASLSLKAIRKILFFLRTGEDYSKAIFLANIPTIVGEEIWNDIERRSRLLYKVDLALRPQEERDAEEHRTIAERIKAAVAAEVPDAPIDLLYHPSMIEAYPDAKRNERFDCYQLGSPKTNAVRNPMAMRSLHMVRKVINHLLRKHIIDEKTEIHIEYARELNDANKRQAIADWQRELSKRHTAYAQNIRQLYKAETGLVIEPTKADILKYQLWEEQQHVCLYTGKKIGIADFLGANPKFDIEHTIPRSRGGDSTQENLTLCESKFNRDIKRDKLPTELANYEEILARIEHWKKQCYALKLKRDGIRTHSGLEKSIKDSRIRRRHLVGLEYGYLKGKYDRFTMKEVPEGFSRRQGAGIGLISKYAGLFLKSLFKDPKNPNRSNVYVVKGAITAEFRKLWGLQQADEAKSRENHTHHCIDAYTIACIGPCEYAALAAYYRSDEEFKYGRRREKPQFEKPWPTFTEDLLKLQEELLIVHQTTDKLGKRDRRKVKTPRGKFLTGGDSARGRLHQETYYGAINYDGNIKYVVRKPLDSLTEKDLDKIVDETVMGIVKGAVEAKGSLKEALADGIYMNKEKGILIKRVRIFSDVSEPINLKQLRDVSTKEYKRHIHLRKDENYLFAIYEGIDKKKNKKQTETATVDYLDAAKFYKDSKRRDKANSLVGDYSKKNKLPLKCILKKRQMVLFYEHSPEEIRFKDKKDLSRRLYIVTSIAKDGRVKFLHHQAATATGIQSSPSPFTNDGEHQPYYRLSASNIKVLVAGIDFDINILGEITPKL

SEQ ID NO: 403 - protein, 1487 aa, Prevotella timonensis
  Prevotella timonensis CRIS 5C-B1
MKNILGLDLGSNSVGWALVKVEENGNPIGSIKMGSRIIPMSQDILGSFEKGDTVSQTAQRTLYRGKRRLIERHVLRRERLCRVLHIMNFLPAHFDRLLGWDKTDNKTYGKFIDDSEPKLAWRQNKNEMGKMEFVFMDSFHEMLSDFAKHQPQLIANGKKVPLDWTIYYLRKKALTQLISKEELAWILLNFNKKRGYYQLRGEEEEEQPTKKEEYKVLKVISVDADEGQKGNGIWYNIHLEDGGIYKKKSDIPLYDWVGKTLQLIVVTTYEKDGKTPKIFDSGKQNPSYRLPKEDDWGLVKKRTESQLQSSGKTVGAFIYDNILSKPDDKIRGNLVRTIERKYYKKELIEILQQQAKYHDELHNQNLLESCAKELYAHNDVHYNEVIKSNMINLLVNDIIFYQRPLKSKKSLIANCKYESYEYVDKETGEIKEMPIKCIAKSNPYYQEFRLWQFIHNLRLSDVVTREDVTAQYLSTPQDYCNLFTYLNDRKEIKQDILLKDFFKIKKVQIDKEKVFPIEWNYIKDATKSYPCNETRYELLSALKRAGMDKQWLDDTPNMQYRLWHLLYSVEEKEESAKALRKLYDDDKFVTSFLKIKPFNKCYGAYSEKAIKRLLTLMRMGKAWNEQAIDAKTLKCIQQIITDNVDSKLKEKIDDSRYVLHHVSDFQGLPTYLASYVIYGRHSEVTDIQCWDSPEDLLKFIRDFKQHSLRNPIVEQVILETLRVVYDIWKAEKHIDEIHVEVAREMKLTAQQRNEANLRNLNNEATNLRIKYLLEELKNDTFIKDVRPLSPIHQEKMRIYEQAVLGNLNKQDKDYDDIIKISKKEHPTNAELIRYKLWLEQRYCSPYTGKAISLSKLFTTAYEIEHIIPQSRYFDNSFNNKVICEAEVNKAKGNMLGYEFIKKQGGQKIYCTQLGKAVTILKEEAYKQFVNEHYAHNKRKRDNLLAENIPESFSSRQLNDTRYITKTIMSLLSNVVRQQSEEEATAKNLLPSSGSVTDRLKNDWGLKDVWNTIVTPRFERLNKLSGTNDFGEMKEENGNRYFQTNVPLEYEKGFKKKRIDHRHHAMDALVIACTTRNMVNYISNANANSPKQREDLRQLLCDKNRIINKPWDTFTQDALKALNDIVVSFKNNVRIINRATNRYQRYDKNGKKIIFSQKGDDMWAIRKSMHKETVFGRVNLIRKEVLPIAKALDNISAICNAQLRAYVNDLVDKHFNKKQLVAHFKSLNYKWNRQDVSKVEVWISSDNKTPMVAVRKPLDTSFDKKKIASITDTGIQTILLNYLESKGGDASVAFAPEGIQEMNSNIELYNNGKAHKPIKNVRLSEPLGAKYQVGERGAKTKKYVEADKGTNLFFAIYEDEEGKRYYYSVPLREAIERQKQKLSPVPEYNEKGVALKFYLSPNDLVYVPTEEERTMGTCHIDKARIYKMVSSTGCSCYFVPSTFAKVIVDKVELQSLNKMEKAITDECIKEVCWKLKVDRLGNIINVIK

SEQ ID NO: 404 - protein, 1218 aa, Prevotella timonensis
  Prevotella timonensis CRIS 5C-B1
MNKRILGLDTGTNSLGWAVVDWDEHAQSYELIKYGDVIFQEGVKIEKGIESSKAAERSGYKAIRKQYFRRRLRKIQVLKVLVKYHLCPYLSDDDLRQWHLQKQYPKSDELMLWQRTSDEEGKNPYYDRHRCLHEKLDLTVEADRYTLGRALYHLTQRRGFLSNRLDTSADNKEDGVVKSGISQLSTEMEEAGCEYLGDYFYKLYDAQGNKVRIRQRYTDRNKHYQHEFDAICEKQELSSELIEDLQRAIFFQLPLKSQRHGVGRCTFERGKPRCADSHPDYEEFRMLCFVNNIQVKGPHDLELRPLTYEEREKIEPLFFRKSKPNFDFEDIAKALAGKKNYAWIHDKEERAYKFNYRMTQGVPGCPTIAQLKSIFGDDWKTGIAETYTLIQKKNGSKSLQEMVDDVWNVLYSFSSVEKLKEFAHHKLQLDEESAEKFAKIKLSHSFAALSLKAIRKFLPFLRKGMYYTHASFFANIPTIVGKEIWNKEQNRKYIMENVGELVFNYQPKHREVQGTIEMLIKDFLANNFELPAGATDKLYHPSMIETYPNAQRNEFGILQLGSPRTNAIRNPMAMRSLHILRRVVNQLLKESIIDENTEVHVEYARELNDANKRRAIADRQKEQDKQHKKYGDEIRKLYKEETGKDIEPTQTDVLKFQLWEEQNHHCLYTGEQIGITDFIGSNPKFDIEHTIPQSVGGDSTQMNLTLCDNRFNREVKKAKLPTELANHEEILTRIEPWKNKYEQLVKERDKQRTFAGMDKAVKDIRIQKRHKLQMEIDYWRGKYERFTMTEVPEGFSRRQGTGIGLISRYAGLYLKSLFHQADSRNKSNVYVVKGVATAEFRKMWGLQSEYEKKCRDNHSHHCMDAITIACIGKREYDLMAEYYRMEETFKQGRGSKPKFSKPWATFTEDVLNIYKNLLVVHDTPNNMPKHTKKYVQTSIGKVLAQGDTARGSLHLDTYYGAIERDGEIRYVVRRPLSSFTKPEELENIVDETVKRTIKEAIADKNFKQAIAEPIYMNEEKGILIKKVRCFAKSVKQPINIRQHRDLSKKEYKQQYHVMNENNYLLAIYEGLVKNKVVREFEIVSYIEAAKYYKRSQDRNIFSSIVPTHSTKYGLPLKTKLLMGQLVLMFEENPDEIQVDNTKDLVKRLYKVVGIEKDGRIKFKYHQEARKEGLPIFSTPYKNNDDYAPIFRQSINNINILVDGIDFTIDILGKVTLKE

SEQ ID NO: 405 - protein, 1496 aa, Prevotella veroralis
  Prevotella veroralis F0319
MKTILGLDLGTNSIGWAKVCVDDNGNYLRDIKLGSRIIPMSQDVLGNFDKGVTESQTSVRTGFRGVRRIRERSLLRRERLHRVLHVLGYLPPHYDSAIGWNKNEPSTYGKFLNHGEPKLAWEHKEDGSMRFLFMESFHEMMADFAKSQPSLVSDGKKIPLDWTIYYLRKKALSQPIRKEELAWLLLNFNQKRGYYQLRGEEDDDNPTKCEEYYELKVVGIEADEEGKNGNTWYNVKLENGWIYRRQSKIPLDDWIGKVREFIVTTEYEKDGITLKKDKNGDVKRSFRSPSEDDWGLRKKRTEKLLDSSKMTVGAFVYDHLLAEPSDKIRGKFIRTIERKYYKKELYAILCEQSKYHEELRSGDYLNKCAEELYKNNQPHRNSLLTKDLAYLLLEDLIFYQRPLKTKKSLIAECPYEAYKYVDKETGEIKRQGIKCIAKSNPYYQEFRLWQFISNLRLFNKADDKEVTADYLPTQDDYVRLFAYLNDRKEINQETLLKEFFKLKKITVNSEKVFPIRWNYIEDKEKKYPCNETRHELLLALDRARIDHSWLEKPGQEYRLWHLLYSVESKEETKEALRKLKDDDAFVESFLKVKPFKREYGAYSEKAIKKLLAVMRMGSLWRETDICDTTKGNITKILQGEIDEKLKEKISASVSSYNQLSDFQGLPVWLACYVVYGRHSEAAEIQHWKTPESLLAYINGFKQHSLRNPIVEQCILETLRTVHDIWKEVGHIDEIHVELGRNMKSTADQRARISENVLRNENTNLRIKSLLLELKNDPNIKDVRPYSPMQQEKLRIYEEGVLQELTKDDKDFTEITKISTMAQPSAKELQRYKLWLEQKYRSPYTGKSISLTKLFTSAYQIEHVIPQSRYFDDSFSNKVICESEVNSLKDNMLGYEFIKNHGGEIIHCTMLGDVKVLSESEYKAFVNDHYAHNKRKRENLLLEDIPQEFLNRQMNDSRYISKVVKALLSNIVRAEGEEEATSKFVVSCSGGITDRLKKDWGLNDVWNKIVYPRFERLNRLTGTEAFGQWENKDGKRVFQTAVPLELQRGFNKKRIDHRHHAMDALVIACTSRNIINYLNNESANNPKKREDLRQKLCDKNRTIRKPWETFTQDATAALEDVIVSFKNYVRIINKATNYYERYDVEGKKVIAEQRGDDMWAIRKPMHEATYYGRVNLRRKKKVNLRVALENISSICDNKLRIYINGLVEKGFNTKQILDKFKNTNDHFSMQKIDKVEIWQFTNEEEKLVATRKPLDTSFDTKKIASITDTGIQTILLNYLETKGGDSTIAFTPEGIVEMNQNISKYNNGKEHMPILKVRLYTKLGKKIPVGQTGCKAKQFVIAEAGTNLYFAIYEDEEGKRSYRTIPLNEVVERLKQGLSPVPEKNDKDVHLKFYLSPNDLVYVPIEDEHESLAKDHIYKFVDSSGTTANFIPHRSANVIFELNKKDAEKFCSGSIIQNEYGVGSSQSKNQKAITGEMIKAVCRKLEVDRLGNVIKVI

SEQ ID NO: 406 - protein, 1062 aa, Ralstonia syzygii
  Ralstonia syzygii R24
MAEKQHRWGLDIGTNSIGWAVIALIEGRPAGLVATGSRIFSDGRNPKDGSSLAVERRGPRQMRRRRDRYLRRRDRFMQALINVGLMPGDAAARKALVTENPYVLRQRGLDQALTLPEFGRALFHLNQRRGFQSNRKTDRATAKESGKVKNAIAAFRAGMGNARTVGEALARRLEDGRPVRARMVGQGKDEHYELYIAREWIAQEFDALWASQQRFHAEVLADAARDRLRAILLFQRKLLPVPVGKCFLEPNQPRVAAALPSAQRFRLMQELNHLRVMTLADKRERPLSFQERNDLLAQLVARPKCGFDMLRKIVFGANKEAYRFTIESERRKELKGCDTAAKLAKVNALGTRWQALSLDEQDRLVCLLLDGENDAVLADALREHYGLTDAQIDTLLGLSFEDGHMRLGRSALLRVLDALESGRDEQGLPLSYDKAVVAAGYPAHTADLENGERDALPYYGELLWRYTQDAPTAKNDAERKFGKIANPTVHIGLNQLRKLVNALIQRYGKPAQIVVELARNLKAGLEEKERIKKQQTANLERNERIRQKLQDAGVPDNRENRLRMRLFEELGQGNGLGTPCIYSGRQISLQRLFSNDVQVDHILPFSKTLDDSFANKVLAQHDANRYKGNRGPFEAFGANRDGYAWDDIRARAAVLPRNKRNRFAETAMQDWLHNETDFLARQLTDTAYLSRVARQYLTAICSKDDVYVSPGRLTAMLRAKWGLNRVLDGVMEEQGRPAVKNRDDHRHHAIDAVVIGATDRAMLQQVATLAARAREQDAERLIGDMPTPWPNFLEDVRAAVARCVVSHKPDHGPEGGLHNDTAYGIVAGPFEDGRYRVRHRVSLFDLKPGDLSNVRCDAPLQAELEPIFEQDDARAREVALTALAERYRQRKVWLEELMSVLPIRPRGEDGKTLPDSAPYKAYKGDSNYCYELFINERGRWDGELISTFRANQAAYRRFRNDPARFRRYTAGGRPLLMRLCINDYIAVGTAAERTIFRVVKMSENKITLAEHFEGGTLKQRDADKDDPFKYLTKSPGALRDLGARRIFVDLIGRVLDPGIKGD

SEQ ID NO: 407 - protein, 1066 aa, Rhodopseudomonas palustris
MSERVVRRILGIDLGIASCGWGVVDISGAGGGIIATGVRCFDAPLIDKTGEPKSATRRTARGQRRIVRRRRQRMNGVRRLLCEFGLLPDPRPDALNQAMRRISTASAAAQVTPWTLRAAAHQRLLSNEELAVVLGHIARHRGFRSNAKNEAGANAADETSKMKKAMEATREGLAKYHAFGDMIANDPKFANRKRNRDKDYSHTAKRSDLEDEVRAILRAQLRFGSAAATETLAQTFADVAFFQRPLQDSEDRVGDCPFEPGQKRAARRAPSFELFRFLSRLANLKLAVGRSPERRLTAEEIALAAKGFGETKKTITFKSLREALDLDPNARFSGIGKDKEASLDVVARTGGAAYGTKTLKDALGDAPWRSLSRTPETLDRIAEILSFREDITSIRNGLEDLGLDSLVVEALMQAAANGDFKEFTRAGHISARAARNIIPGLREGLVYSEACARVGYDHAARLSVPLDQVGSPVTRKALSEALKQVRAVAREYGPIDYFHIELARSVGKSAEERKQLTDGIEARNVEKAKRRKQAEEHLGRAPSDDELLRYELAKEQNFKCIYSGDAIDPAGVAANDTRYQVDHILPWSRFGDDSYLNKTLCTARSNQNKRGRTPFEWFEADKTDVEWMEYVARVENLQEVKGRKKRNYSIKDAAAIEDKFKARNLTDTQWATRLLADELSRMFPPRECERAICGRADGGNDGLTIVEERRVFTRPGAITSKLRRAWGLEGLKKQDGKRVEDDRHHAVDALVLAATTESLLQRLTVEVQRREREGRPDDIFHCAEPWRGFRADVRRTVYGSETMPGIFVSRAERRRARGKAHDATIKQIREIEGERLVFERKPVEKLTDKDLEKIPIPKPYGQVSDPKRLRDELVESLRAWIAAGKPKDRPPLSPKGDVIRKVRIQTNDKVSVEINGGTVDRGDMARVDVFRKKNKKAVWEYYVVPIYPHQIVALNDPPDRAVIAYAEDKDWKEIDSSYEFLWSLFGLSYVEISKANGECIDGYFRGLHRGTGAASVCKHISLGKDATVSGIGLKTLASFKKFTIDRLGRKFEIPREVRTWRGEACT

SEQ ID NO: 408 - protein, 1064 aa, Rhodopseudomonas palustris
MSECVTRRILGIDLGIASCGWGVIEVGEASGSIIASGVRCFDAPLIDKTGEPKSATRRTARGQRRIIRRRRQRMNAVRRLLAEFGVLTGRSPDALHQALLRLSQSVAGSQVTPWTLRAAAHERKLTNDELAVVLGHIARHRGFRSNSKNDGGANAADETSKMKKAMETTREGLARYHSFGAMIASDPKFADRKRNRDKDYSHTAKRSDLEDEVRTIFRSQTRFGSLVASEKLSQAFADAAFFQRPLQDSEDMVGSCPFEPGQKRTARRAPSFELFRFLSRLANLKLTVGRAPERRLTPDEIALAAKGFGETKKSITFKSLREALDLDPNARFSGVAKEKESTLDVAARTGGAAYGTKTLKDALGDAPWRSLSRMPEKLDRIAEILSFREDMKAIRNGLEEVGLDGLVVDALMQATANGDFKDFTRAAHISALAARNIIPGLREGLVYSDACTRVGYDHAARPAVPLSQIGSPVTRKALSEALKQVRAVAREYGPIDYFHIELARSIGKSAEERKKLTDGIEARNVEKEKRRKEAAEHLGRAPSDDELLRYELAKEQNFKCIYSGDPIDPAGISANDTRYQVDHILPWSRFGDDSYVNKTLCTARSNQNKRGRTPFEWFDADKTEAEWMEYSARVEDLKEVKGRKKRNYSIKDAASVEDKFKARNLTDTQWATRLLADELKRMFPPRECERVVTVRADGGNDGLSIVEERRVFTRPGAITSKLRRAWGLEGLKKQDGKRVEDDRHHAVDALVLAATTESLLNRLTVEVQQREREGRQDDIFHCSQPWPGFRVDVQRTVYGSETMPGIFVSRAERRRARGKAHDATVKQIRDIDGERIVFERKPIEKLTDKDLERIPVPEPYGKAADPKKLRDELVENLRAWIAAGKPKDKPPRSPKGDIIRKVRIETKDKVAVEINGGTVDRGDMARVDVFRKKNKKGVWEFYVIPIYPHQIVASALPPNRAVIAYKAESEWTAIDGCFEFAWSLNPMSYLELVKSNGELIEGYFRSMDRTTGAINLSPMSTNSETIRSIGVKTLSSFRKFTVDRLGRKFEIPREVRTWRGEACT

SEQ ID NO: 409 - protein, 1173 aa, Rhodospirillum rubrum
  Rhodospirillum rubrum ATCC 11170
MRPIEPWILGLDIGTDSLGWAVFSCEEKGPPTAKELLGGGVRLFDSGRDAKDHTSRQAERGAFRRARRQTRTWPWRRDRLIALFQAAGLTPPAAETRQIALALRREAVSRPLAPDALWAALLHLAHHRGFRSNRIDKRERAAAKALAKAKPAKATAKATAPAKEADDEAGFWEGAEAALRQRMAASGAPTVGALLADDLDRGQPVRMRYNQSDRDGVVAPTRALIAEELAEIVARQSSAYPGLDWPAVTRLVLDQRPLRSKGAGPCAFLPGEDRALRALPTVQDFIIRQTLANLRLPSTSADEPRPLTDEEHAKALALLSTARFVEWPALRRALGLKRGVKFTAETERNGAKQAARGTAGNLTEAILAPLIPGWSGWDLDRKDRVFSDLWAARQDRSALLALIGDPRGPTRVTEDETAEAVADAIQIVLPTGRASLSAKAARAIAQAMAPGIGYDEAVTLALGLHHSHRPRQERLARLPYYAAALPDVGLDGDPVGPPPAEDDGAAAEAYYGRIGNISVHIALNETRKIVNALLHRHGPILRLVMVETTRELKAGADERKRMIAEQAERERENAEIDVELRKSDRWMANARERRQRVRLARRQNNLCPYTSTPIGHADLLGDAYDIDHVIPLARGGRDSLDNMVLCQSDANKTKGDKTPWEAFHDKPGWIAQRDDFLARLDPQTAKALAWRFADDAGERVARKSAEDEDQGFLPRQLTDTGYIARVALRYLSLVTNEPNAVVATNGRLTGLLRLAWDITPGPAPRDLLPTPRDALRDDTAARRFLDGLTPPPLAKAVEGAVQARLAALGRSRVADAGLADALGLTLASLGGGGKNRADHRHHFIDAAMIAVTTRGLINQINQASGAGRILDLRKWPRTNFEPPYPTFRAEVMKQWDHIHPSIRPAHRDGGSLHAATVFGVRNRPDARVLVQRKPVEKLFLDANAKPLPADKIAEIIDGFASPRMAKRFKALLARYQAAHPEVPPALAALAVARDPAFGPRGMTANTVIAGRSDGDGEDAGLITPFRANPKAAVRTMGNAVYEVWEIQVKGRPRWTHRVLTRFDRTQPAPPPPPENARLVMRLRRGDLVYWPLESGDRLFLVKKMAVDGRLALWPARLATGKATALYAQLSCPNINLNGDQGYCVQSAEGIRKEKIRTTSCTALGRLRLSKKAT

SEQ ID NO: 410 - protein, 1059 aa, Rhodovulum sp.
  Rhodovulum sp. PH10
MGIRFAFDLGTNSIGWAVWRTGPGVFGEDTAASLDGSGVLIFKDGRNPKDGQSLATMRRVPRQSRKRRDRFVLRRRDLLAALRKAGLFPVDVEEGRRLAATDPYHLRAKALDESLTPHEMGRVIFHLNQRRGFRSNRKADRQDREKGKIAEGSKRLAETLAATNCRTLGEFLWSRHRGTPRTRSPTRIRMEGEGAKALYAFYPTREMVRAEFERLWTAQSRFAPDLLTPERHEEIAGILFRQRDLAPPKIGCCTFEPSERRLPRALPSVEARGIYERLAHLRITTGPVSDRGLTRPERDVLASALLAGKSLTFKAVRKTLKILPHALVNFEEAGEKGLDGALTAKLLSKPDHYGAAWHGLSFAEKDTFVGKLLDEADEERLIRRLVTENRLSEDAARRCASIPLADGYGRLGRTANTEILAALVEETDETGTVVTYAEAVRRAGERTGRNWHHSDERDGVILDRLPYYGEILQRHVVPGSGEPEEKNEAARWGRLANPTVHIGLNQLRKVVNRLIAAHGRPDQIVVELARELKLNREQKERLDRENRKNREENERRTAILAEHGQRDTAENKIRLRLFEEQARANAGIALCPYTGRAIGIAELFTSEVEIDHILPVSLTLDDSLANRVLCRREANREKRRQTPFQAFGATPAWNDIVARAAKLPPNKRWRFDPAALERFEREGGFLGRQLNETKYLSRLAKIYLGKICDPDRVYVTPGTLTGLLRARWGLNSILSDSNFKNRSDHRHHAVDAVVIGVLTRGMIQRIAHDAARAEDQDLDRVFRDVPVPFEDFRDHVRERVSTITVAVKPEHGKGGALHEDTSYGLVPDTDPNAALGNLVVRKPIRSLTAGEVDRVRDRALRARLGALAAPFRDESGRVRDAKGLAQALEAFGAENGIRRVRILKPDASVVTIADRRTGVPYRAVAPGENHHVDIVQMRDGSWRGFAASVFEVNRPGWRPEWEVKKLGGKLVMRLHKGDMVELSDKDGQRRVKVVQQIEISANRVRLSPHNDGGKLQDRHADADDPFRWDLATIPLLKDRGCVAVRVDPIGVVTLRRSNV

SEQ ID NO: 411 - protein, 1405 aa, Riemerella anatipestifer
MKTILGLDLGTNSIGWALVKEAENSNEKSEIIKLGVRVNPLTVDEKTNFEAGRPLSTNADRTAKRSARRNLQRYKLRRKNLIDLLIKNQLIDKDTPLTEIGKNTTHQTLELRAKAARERIELEDLARVFLAINKKRGYRSSRKVNNEEEGQAVDGMAVAKKLYDENLTPGQYAYELLSKGKKYVPDFYRSDLQAEFNAIWEYQKQFYADILDDELYNALKGQGQQNSRKRFLAIKGVYTAENKGKRDDVKLRHYKWRSEAISKKINIEEVAYVLVEINNDLNKSSGYLGAISDRSKELYFNKETVGENLWKQIQKNPHTSLKNQVFYRQDYLDEFEQIWETQAQFHPQLTLALKEQIRDVIIFYQRKLKSQKGLLSFCQFESWEIERKDENGNVILNKTTQLPKRQTVGRRVAPKSSPLFQEFKIWQNINNLEVTKISEGASKNKKETETLSDDERKLLFEELNLRGNLSQKEVLQILGLKDKEYKTNFSEGLEGNRTNAALFNIYQQIAENEGYGFDWSKKSAQEIKEELKAVFPQIGIQADILDFNANLDGKEFENQASYQLWHLLYSAEEDDKINEEDQIIYGNSAVSLKKKLCEKFGFTPEYAKWIANVSLQDDYGNLSTKAMRKIIPYLIDGNDYSEACALAGYNHSNSLTKEENDNRELLDKLELLPKNSLRNPVVEKILNQMVNVVNQVIETYGKPDEVRIELARELKKSAEKRAEMTKSINEATRRNEDIKKLITKDFGIPNPTKSDVVRYRLWEELAPLAYKDVFTGKQIKKEDLFSSKIDIEHIIPKALLFDDSFSNKTLVFRETNLKKADRTAYDFIESDYNATLDDYIQRVETLYNNTKGTISKGKRNKLLMAQKNLPDGFIERDLRNSQYIAKKAKAMLYQVFKDVNVTSGSITDRLREDWDLINVMKELNFPKYKALGLTEIEERYDIGQEKTKRVEVITDWTKRNDHRHHAMNALTVAFTTSSHIQYLNYLNARKNESHKEHKNIKGIENKITHKQKDKRKFIPPMPNFREEAKKHIETILVSIKNKNKVYTKNINKTKKKSGHNTKEQLTPRGQLHKETVYGKSKRPMSKPTKINKNFSLEQAQLIINVQEKELVLRHLAQFDNNPAVAFDTKTLKKMPLLKNGEPLKEVLCFEEIFTIRKDITPDLKIEKVVDEKIKAILEQRKKDFGGNAKEAFSDLDKNPIWLNKKKGICIKRVTITGVSNAEALHHQKDHLGREILDDNGNPIPADFVSTGNNHHLAVYLDSEGKLQDNIVSFYEAVVRTSQGLPVVDKGLNKDLGWKFLFSLKQNEMFVFPNDDFDINDFDLLDDKKAELISKHLYRVQKISKVSAGNSFVRDIVFRHHLETTVKEVKELKDISYIQLKSLEGLRNIKKVRINHIGKIVQVGEY

SEQ ID NO: 412 - protein, 1400 aa, Riemerella anatipestifer
MKTILGLDLGTNSIGWALVKETENSNEKSEIIKLGVRVNPLTVDEKTNFEAGRPLSTNADRTAKRSARRNLQRYKLRRKNLIDLLIKHRLIDKDTPLTEIGKNTTHQTLELRAKAARERIELEDLARVFLAINKKRGYRSSRKVNNEEEGQVVDGMAVAKKLYDENLTPGQYAYELLSKGKKYVPDFYRSDLQAEFDSIWEYQKQFYADILDDELYNALKGQGQQNSRKRFLAIKGVYTAENKGKRDEVKLQHYKWRSEAITQKLSIEEVAYVLVEINNDLNKSSGYLGAISDRSKELYFNKETVGENLWKQIQKNPHTSLKNQVFYRQDYLDEFEQIWETQAQFHPQLTLALKEQIRDVVIFYQRKLKSQKGLLSFCQFESWEIERKDENGNVILNKTTQLPKRQTVGRRVAPKSSPLFQEFKIWQNINNLEIAKISDGNSKNKKETEALSDDERKLLFEELNLRGNLSQKEVLQILGLKDKEYKTNFPEGLEGNRTNAALFNIYQQIAENEGYGDWTKKSAQEIKEELKAVFPQIGIQADILDFNAELDGKEFENQASYQLWHLLYSAEEDDKINEEDQIIYGNSAVSLKKKLCEKFGFTPEYAKWIANVSLQDDYGNLSTKAMRKIIPYLIDGNDYSEACALAGYNHSNSLTKEENDNRERLNKLELLPKNSLRNPVVEKILNQMVNVVNQVIETYGKPDEVRIELARELKKSAEERAEMTKGINEATRRNEDIKKLITKNFGIPNPTKNDVVRYRLWEELAPLAYKDVFTGRQIKKEDLFSSKIDIEHIIPKALLFDDSFSNKTLAFRETNLKKADRTAYGFIESDYNATLDDYIQRVETLYNNAKGTISKGKRNKLLMAQKNLPDGFIERDLRNSQYIAKKAKSMIEKVFNDVNVTSGSITDRLREDWDLINVMKELNFPKYKALGLTEIEERYDIGQEKTKKVEVITDWTKRNDHRHHAMDALTVAFTTKSHVQYLNNLNTIHSLKGDEVDLELSKLYGLKNTITEVVNKKRKFIPPMPNFREEAKKHIETILVSIKNKNKVYTKNINKTKKESGYHTKEQLTPRGQLHKETVYGKSKRPMNKPTKINKNFSLEQAQLIINVQEKELVLRHLAQFDNNPAVAFDTKTLKKMPLLKNGEPLKEVLCFEEIFTIRKDITPDLKIEKVVDEKIKAILEQRKKDFGGNAKEAFSDLDKNPIWLNKEKGICIKRVTITGVSNAEALHHQKDHLGREILDDNGNPIPADFVSTGNNHHVAIYEDEKGKLQEKVVSLYEAVARANQGLPVVDKGLNEDLGWKFLFTMKQNEMFVFPNDDFDVNDIDLLDENNAKIISQHLFRVQKLATKNYMFRHHLETNVQEVKELNDIAYKSIRSTEPLKNIKKVRINHIGKIVQVGEY

SEQ ID NO: 413 - protein, 1140 aa, Roseburia intestinalis
  Roseburia intestinalis L1-82
MRENGSDERRRNMDEKMDYRIGLDIGIASVGWAVLQNNSDDEPVRIVDLGVRIFDTAEIPKTGESLAGPRRAARTTRRRLRRRKHRLDRIKWLFENQGLINIDDFLKRYNMAGLPDVYQLRYEALDRKLTDEELAQVLLHIAKHRGFRSTRKAETAAKENGAVLKATDENQKRMQEKGYRTVGEMIYLDEAFRTGCSWSEKGYILTPRNKAENYQHTMLRAMLVEEVKEIFSSQRRLGNEKATEELEEKYLEIMTSQRSFDLGPGMQPDGKPSPYAMEGFSDRVGKCTFLGDQGELRGAKGTYTAEYFVALQKINHTKLVNQDGETRNFTEEERRALTLLLFTQKEVKYAAVRKKLGLPEDILFYNLNYKKAATKEEQQKENQNTEKAKFIGMPYYHDYKKCLEERVKYLTENEVRDLFDEIGMILTCYKNDDSRTERLAKLGLVPIEMEGLLAYTPTKFQHLSMKAMRNIIPFLEKGMTYDKACEEAGYDFKADSKGTKQKLLTGENVNQTINEITNPVVKRSVSQTVKVINAIIRTYGSPQAINIELAREMSKTFEERRKIKGDMEKRQKNNEDVKKQIQELGKLSPTGQDILKYRLWQEQQGICMYSGKTIPLEELFKPGYDIDHILPYSITFDDSFRNKVLVTSQENRQKGNRTPYEYMGNDEQRWNEFETRVKTTIRDYKKQQKLLKKHFSEEERSEFKERNLTDTKYITTVIYNMIRQNLEMAPLNRPEKKKQVRAVNGAITAYLRKRWGLPQKNRETDTHHAMDAVVIACCTDGMIQKISRYTKVRERCYSKGTEFVDAETGEIFRPEDYSRAEWDEIFGVHIPKPWETFRAELDVRMGDDPKGFLDTHSDVALELDYPEYIYENLRPIFVSRMPNHKVTGAAHADTIRSPRHFKDEGIVLTKTALTDLKLDKDGEIDGYYNPQSDLLLYEALKKQLLLYGNDAKKAFAQDFHKPKADGTEGPVVRKVKIQKKQTMGVFVDSGNGIAENGGMVRIDVFRVNGKYYFVPVYTADVVKKVLPNRASTAHKPYGEWKVMEDKDFLFSLYSRDLIHIKSKKDIPIKMVNGGMEGIKETYAYYIGADISAANIQGIAHDSRYKFRGLGIQSLDVLEKCQIDVLGHVSVVRSEKRMGFS

SEQ ID NO: 414 - protein, 1128 aa, Roseburia intestinalis
  Roseburia intestinalis M50/1
MDEKMDYRIGLDIGIASVGWAVLQNNSDDEPVRIVDLGVRIFDTAEIPKTGESLAGPRRAARTTRRRLRRRKHRLDRIKWLFENQGLINIDDFLKRYNMAGLPDVYQLRYEALDRKLTDEELAQVLLHIAKHRGFRSTRKAETAAKENGAVLKATDENQKRMQEKGYRTVGEMIYLDEAFRIGCSWSEKGYILTPRNKAENYQHTMLRAMLVEEVKEIFSSQRRLGNKKATEELEEKYLEIMTSQRSFDLGPGMQPDGKPSPYAMEGFSDRVGKCTFLGDQGELRGAKGTYTAEYFVALQKINHTKLVNQDGETRNFTEEERRALTLLLFTQKEVKYAAVRKKLGLPEDILFYNLNYKKAATKEEQQKENQNTEKAKFIGMPYYHDYKKCLEERVKYLTENEVRDLFDEIGMILTCYKNDDSRTERLAKLGLVPIEMEGLLAYTPTKFQHLSMKAMRNIIPFLEKGMTYDKACEEAGYDFKADSKGTKQKLLTGENVNQTINEITNPVVKRSVSQTVKVINAIIRTYGSPQAINIELAREMSKTFEERRKIKGDMEKRQKNNEDVKKQIQELGKLSPTGQDILKYRLWQEQQGICMYSGKTIPLEELFKPGYDIDHILPYSITFDDSFRNKVLVTSQENRQKGNRTPYEYMGNDEQRWNEFETRVKTTIRDYKKQQKLLKKHFSEEERSEFKERNLTDTKYITTVIYNMIRQNLEMAPLNRPEKKKQVRAVNGAITAYLRKRWGLPQKNRETDTHHAMDAVVIACCTDGMIQKISRYTKVRERCYSKGTEFVDAETGEIFRPEDYSRAEWDEIFGVHIPKPWETFRAELDVRMGDDPKGFLDTHSDVALELDYPEYIYENLRPIFVSRMPNHKVTGAAHADTIRSPRHFKDEGIVLTKTALTDLKLDKDGEIDGYYNPQSDLLLYEALKKQLLLYGNDAKKAFAQDFHKPKADGTEGPVVRKVKIQKKQTMGVFVDSGNGIAENGGMVRIDVFRVNGKYYFVPVYTADVVKKVLPNRASTANKPYSEWRTMEDKDFLFSLYSRDLVHIKSKKGIPIKNVDGSLGESKEVYAYYIGADISGAKIEGKAHDSRYTFRGIGVQKLELIEKCQVDILGHISTVKNEKRMGFS

SEQ ID NO: 415 - protein, 1152 aa, Roseburia inulinivorans
  Roseburia inulinivorans DSM 16841
MNAEHGKEGLLIMEENFQYRIGLDIGITSVGWAVLQNNSQDEPVRITDLGVRIFDVAENPKNGDALAAPRRDARTTRRRLRRRRHRLERIKFLLQENGLIEMDSFMERYYKGNLPDVYQLRYEGLDRKLKDEELAQVLIHIAKHRGFRSTRKAETKEKEGGAVLKATTENQKIMQEKGYRTVGEMLYLDEAFHTECLWNEKGYVLTPRNRPDDYKHTILRSMLVEEVHAIFAAQRAHGNQKATEGLEEAYVEIMTSQRSFDMGPGLQPDGKPSPYAMEGFGDRVGKCTFEKDEYRAPKATYTAELFVALQKINHTKLIDEFGTGRFFSEEERKTIIGLLLSSKELKYGTIRKKLNIDPSLKFNSLNYSAKKEGETEEERVLDTEKAKFASMFWTYEYSKCLKDRTEEMPVGEKADLFDRIGEILTAYKNDDSRSSRLKELGLSGEEIDGLLDLSPAKYQRVSLKAMRKMQPYLEDGLIYDKACEAAGYDFRALNDGNKKHLLKGEEINAIVNDITNPVVKRSVSQTIKVINAIIQKYGSPQAVNIELAREMSKNFQDRTNLEKEMKKRQQENERAKQQIIELGKQNPTGQDILKYRLWNDQGGYCLYSGKKIPLEELFDGGYDIDHILPYSITFDDSYRNKVLVTAQENRQKGNRTPYEYFGADEKRWEDYEASVRLLVRDYKKQQKLLKKNFTEEERKEFKERNLNDTKYITRVVYNMIRQNLELEPFNHPEKKKQVWAVNGAVTSYLRKRWGLMQKDRSTDRHHAMDAVVIACCTDGMIHKISRYMQGRELAYSRNFKFPDEETGEILNRDNFTREQWDEKFGVKVPLPWNSFRDELDIRLLNEDPKNFLLTHADVQRELDYPGWMYGEEESPIEEGRYINYIRPLFVSRMPNHKVTGSAHDATIRSARDYETRGVVITKVPLTDLKLNKDNEIEGYYDKDSDRLLYQALVRQLLLHGNDGKKAFAEDFHKPKADGTEGPVVRKVKIEKKQTSGVMVRGGTGIAANGEMVRIDVFRENGKYYFVPVYTADVVRKVLPNRAATHTKPYSEWRVMDDANFVFSLYSRDLIHVKSKKDIKTNLVNGGLLLQKEIFAYYTGADIATASIAGFANDSNFKFRGLGIQSLEIFEKCQVDILGNISVVRHENRQEFH

SEQ ID NO: 416 - protein, 1156 aa, Ruminococcus albus
  Ruminococcus albus 8
MGNYYLGLDVGIGSIGWAVINIEKKRIEDFNVRIFKSGEIQEKNRNSRASQQCRRSRGLRRLYRRKSHRKLRLKNYLSIIGLTTSEKIDYYYETADNNVIQLRNKGLSEKLTPEEIAACLIHICNNRGYKDFYEVNVEDIEDPDERNEYKEEHDSIVLISNLMNEGGYCTPAEMICNCREFDEPNSVYRKFHNSAASKNHYLITRHMLVKEVDLILENQSKYYGILDDKTIAKIKDIIFAQRDFEIGPGKNERFRRFTGYLDSIGKCQFFKDQERGSRFTVIADIYAFVNVLSQYTYTNNRGESVFDTSFANDLINSALKNGSMDKRELKAIAKSYHIDISDKNSDTSLTKCFKYIKVVKPLFEKYGYDWDKLIENYTDTDNNVLNRIGIVLSQAQTPKRRREKLKALNIGLDDGLINELTKLKLSGTANVSYKYMQGSIEAFCEGDLYGKYQAKFNKEIPDIDENAKPQKLPPFKNEDDCEFFKNPVVFRSINETRKLINAIIDKYGYPAAVNIETADELNKTFEDRAIDTKRNNDNQKENDRIVKEIIECIKCDEVHARHLIEKYKLWEAQEGKCLYSGETITKEDMLRDKDKLFEVDHIVPYSLILDNTINNKALVYAEENQKKGQRTPLMYMNEAQAADYRVRVNTMFKSKKCSKKKYQYLMLPDLNDQELLGGWRSRNLNDTRYICKYLVNYLRKNLRFDRSYESSDEDDLKIRDHYRVFPVKSRFTSMFRRWWLNEKTWGRYDKAELKKLTYLDHAADAIIIANCRPEYVVLAGEKLKLNKMYHQAGKRITPEYEQSKKACIDNLYKLFRMDRRTAEKLLSGHGRLTPIIPNLSEEVDKRLWDKNIYEQFWKDDKDKKSCEELYRENVASLYKGDPKFASSLSMPVISLKPDHKYRGTITGEEAIRVKEIDGKLIKLKRKSISEITAESINSIYTDDKILIDSLKTIFEQADYKDVGDYLKKTNQHFFTTSSGKRVNKVTVIEKVPSRWLRKEIDDNNFSLLNDSSYYCIELYKDSKGDNNLQGIAMSDIVHDRKTKKLYLKPDFNYPDDYYTHVMYIFPGDYLRIKSTSKKSGEQLKFEGYFISVKNVNENSFRFISDNKPCAKDKRVSITKKDIVIKLAVDLMGKVQGENNGKGISCGEPLSLLKEKN

SEQ ID NO: 417 - protein, 1341 aa, Ruminococcus lactaris
  Ruminococcus lactaris ATCC 29176
MGKGYYVGLDMGTGSVGWAVTDESYQILRRHGKAMWGVRLFESAKTAEERRMFRTGRRRLDRRGWRIEILQEIFAEEISRVDPGFFLRMKESKYYPEDKRDIQGNCPELPYTLFVDKTFTDKDFHKKYPTIYHLRKMLMETEDTPDMRLVYLALHHMMKHRGHFLLSGDISQVTEFKNTFNQFIENIRNEEMDFEIELDESAVQMIEETLKDKNLTRSAKKSKLVKGLNAKNVRDKAFLTLLSGGTVKLSDLFGMEELNEGERPKISFADNGYEEYAAVVEMELGELYYIVESAKAVYDWAILSDILGGSTSVSDAKVRAYEKHKADLKYLKAVVKEYFPKEVYNAVFVESSDKLNNYPAYIGMTKKNGKKVSLEGKRCSREEFMDFLKKNIVVKLPDEEAKMYLQSELEKDSFLPKQVNKDNGVIPYQVHKYELKKILDNLGDKIPFLKENAEKIEKLFSFRIPYYVGPLRTGNGENSKFAWAERKSTEKIYPWNFENVIDVEQSAENFIRRMTNKCTYLIGEDVLPKDSLLYSKFMVLNELNNLRLDGQKISVELKQKIYRDVFCRSRKVTQKKLKSYLIREGIAGKNVELTGIDGDFKGSLTAYHDFKEKLIDVELTQKEKEEIILNIVLFGDDKKLLKQRLKKKFPQLTEKQINTVTALSYKGWGRLSKKLLEEVTVPAPETGEVWNIITALWETNDNFMQLLSKEYQFSDRIEEFNEEKADPEVSYQTIEDLYVSPAVKRQIWQTLQIIQEIEKVMGEKPKRVFVEMAREKQENKRTESRKKTLSDLYTKCKKEEPEWIEALCTSLEKHEEHQLRSDKLYLYYTQKGRCMYSGEPIDLEDLWDNTKYDIDHIYPQSKTMDDSLKNRVLVKKEYNAKKSDTYPIAADIQKKMMPFWKSLLTGGFIPKEKYDRLVRNNPLDANELAGFIERQIVETRQSTKAVAEILKKILPDTEIVYVKAKTVSKFRQDFDFIKVRDMNDLHHAKDAYLNIVVGNVYFVKFTKNAAWFVKENPGRTYNLEKMFIWDVARDGEIAWKAGKSGSIVQVRAMMEKNHILVTRRSYEVKGGLFDQQILKKGKGQVPVKESDERLRDIGKYGGYNKAAGVYFMLVSSKDKKGKEQRTIEFVPIYLKDRVEKDMESARNYLMEERGLREPKILIKKIKIDTLFKVDGFYMWLSGRTSNQLIFKGANQLILSKEDMKTLKKVVKYIQRQKEDKNVKISMRDGITEEELLKLYETFLDKIRHSIYGARLSSQEKTLVNGKEKFIDLSVEAKCQVLYEILHLFQCQSGAANLKMIGGPASAGILVMNNNISKCKNISIVNQSPTGIYEKEIDLLRV

SEQ ID NO: 418 - protein, 1471 aa, Scardovia wiggsiae
  Scardovia wiggsiae F0424
MGYKAPRNDKGEIDYGVGLDLGNGSVGWVAMDKDYHLIRARGHELIGARLFDPANSAENRRESRTTRRRLSRRRWRLRMLDSLFASELAKIDPNFLARRKYSWVHPKDEQNHENWYGSIIFGSKEQDKQFYKDYPTIYHLRKKLTEDTERHDIREIYVAIHHIVKYRGHFLREGEINSENLFDPEGFVELIKDVIKLNNSYDESTPIFEASPADVSEALLNEHTSRSGRIEDTLDKLDFSVSRVDKHELKGMRDAAKAVIGAIVGNTADFSKIFNLDNLDKDSKDNLKLKFADSNFDEKYGGVVGSGLLDETQIELVDRIHAVYDAVALKGILGDAHTISEAKVESYEKHRKNWKLIKEELRTKENKDEVDLWYGDLSGRQYKNPPDPEKGPDEGSKKDSPIRDSDQKQNLIKKANDYFTELIDDSQLSEEQKNCLKNDINNGQLFPVQRSSDNGVIPYQIHLNELRRIIENQKQYYPFLAETFIRKTAEGKSYEENKIVALLKFRVPYYVGPLVSKEDMEEHSSGNSAYHWMARNPGRGEAITPWNFDEVVDKDESGARFISRLTGTDTYLLGEPTLPQHSLLYEEYMVLSELNNVRLNVRQGNHWSDKNRQRLSYKQKEFLIENLFKEHKTVTRKRAEDCLSSMGCGEVQLFGLSDEKKFASSLSSYITLKKILGKAFVDDSGNSAILERIIEVQTVFEDREPLTHQLSLIDSLTVEQRKQLAKIHYTGWGKLSRKLLTSKKGSYKIHSQNEIMRTQHSIIDIMRGDSLNLIEIIRDKKIGIGEWIDNENLDRETGESDVSRLESVFEGIVMSPRVKRGVVQAVRVIDDLAKAIGNPPQRIFIEMADEVQASQRTVSRLSRLKALYGSPSLQKEFNDLKDLRKSLNETKDADLQEDRLYLYYIQLGKDLYTGKEISIDSLSSAYDIDHIVPQALTQDDSIDNRVLVSRKENARKTDSYLYTPDLIKNMRPLWGKLLAAGLMSQKKYDALTRVDDFKDREKQRFVQRSLVETRQIMKNVSTILRTYYGEDTNVVTLKSSITHDMRKYLGFPYKNRDINDYHHAQDALCISAAGQFMLNRHFVSGGEVTDGASNAYNMYLAEYLQEFRDAKARGERKRSTAFGFVVGSMSSKDDEKRTDHRTGEIVWSETNAEYLRKVMNYKKMLITQKVGDVKTRALYDETRYGHKESSAKSIKFDNLRRDTSLYGGFSGASTAYMMLVEYKKKNKLVSITAQEASLLAVADQKNDTVSVMDGILASHGLSGAKILLPKIVTGQLLDYSDALVTLQSASELNTARQMWLPRNDYNDIDIILKSKDIEDAAHKLGYDSDTVHVLRRIQKLFEAVFRVAESQFPLHQLSKDQQEEILRDPQNYGFGSAVKLLGGLLKALHANAENTNLAGLVKVLHGDKEYSDDGKAKEFKKFGFSPRWRRISNPTGFTLSDSDTFIYQSPSGIFEQRVTVKELKEKADKQK

SEQ ID NO: 419 - protein, 1178 aa, Scardovia inopinata
  Scardovia inopinata F0304
MGKRHNSNMAKKKISYRIGIDVGLNSTGLAAIEVDDDGAPIRILNTMSVIHDGGVDPDAAKVRGTRLAISGIARRTRRMRRRRAKRLDRLEQILEKYGYTDTEPVLEEPYGPWICRAELADGFINDDEQRRMMIGIAIRHIARHRGWRNPYQNVRALLNIDDSDLSEEYKNLKEKVQDQINDGKDLPNFTPSQLVRDYLDNFSGQPAARIRTGKAGPRGNRRDAVGILPQRMRQSDYAYELQRIFDMQKIGRDEAQELLMAVFEAKSPKGSAEKRIGKDPLTGKKRALKASLAFQKYRIVATITNLRIKTGTGSERMLSPTELNDIYTYLLRVQDDNHLPTWEDICEEVLHIGRYQLAGIGKTFEGGERISNMPPVIQTSLAIHGLSEGTLAEKLTKWWDKADDDSRESMIKLLSNTVDIDRVNEVDENFASALDFIDSLDDEELTKLDKIALPRGRAAYSEEALNKLTADMLNTGDDLFSARQRIYHVNNSWRPPQPPIGEPLGNPAVDRVLKITNRYLMNCLNRWGQPRRVTIEHTRSGFTSVKQATEHQKISDKRAEYRRDIVKQLEEAGVESVHEYDIRRWEAVQRQNGQCLYCGRDITFKTCEMDHIVPRKGPGSTNTRTNFAAVCPECNRMKSNIPFASWAETKEAKDRGVSLDKAIKQVRFFNFTKNEYSPQAQRNFKKSMIERLKQKTSDEPLDNRSIESVSWMADELYKRIDWYFNHEQYETSKKAINDDKDNLSGTQVVVYPGSITAEARNAAGLGGNIHFIGGRYKTRLDRRHHAVDACVIAMMEPGIARILTERNQLRQAQRLTARIEDDEVNWKDYPTENTAGYNKYQAWSDRMHALLEYMNNALDYDKIPVVRWERLQLGNRSAHEDTIHPLKKLPLSHEISAIDINHASTPALYEALVSLPDFSEQDGLPADPSRQINVNGERYSGDDLVSFFNSNAAQIAIQGGSAELGTAFHHARIYRCWTVGKNGKKKIFFGMIRVYQHDLLHAKNEDLFTYPLKRSSVSMRYAKKEVVHAILSGNAEYVGYLCVGDELVLDLKGDKSNDEGGSRLSGQVGEFVQKFEEDSKVNSQIVNRWTVDGFPDEAKLRLRPSMFAGEGLKNMKSELVENAAIKNILSKTGWRVSVDVISKKSPVVLRRNAFGEPRWKTNAGLPVSYRWQDTETKE

SEQ ID NO: 420 - protein, 1063 aa, Simonsiella muelleri
  Simonsiella muelleri ATCC 29453
MEKFHYVLGLDLGIASVGWAAIEIDKETETSIGLLDCGVRTFERAEVPKTGDSLAKARREARSTRRLIRRRSHRLLRLKRLLKREIFRQPETFKDLPINAWQLRVKGLDSRLNEYEWAAVLLHLVKHRGYLSQRKSEMSETDSKSEMGRLLAGVAENHQLLQQEQYRTPAELALKKFVKHFRNKGGDYAHTFNRLDLQAELHLLFQKQRELGNPFTSPELERQVDDLLMTQRSALQGDAILKMLGHCGFEPEQFKAAKNTFSAERFIWLTKLNNLRIQDQGKERALTADERTKLLDEPYKKSKLTYAQVRKLLSLPQTAIFKGLRYDLEHDKKAENSTLMEMKSYHNIRQTLEKSGLKTEWQSIATQPEILDAIGTAFSIYKTDEDISHELKTCRLPENVLNELLKNINFDGFIQLSLTALRKILPLMEQGYRYDEACTQIYGNHHSGSLQQESKQFLPHIPIDDVRNPVVFRTLTQARKVVNAIIRRYGSPARVHIEMARELGKSKSDRDRIEKQQQKNKKERENAVAKFKEDFPDFVGEPRGKDILKMRLYEQQHGKCLYSGHDIDINRLNEKGYVEIDHALPFSRTWDDSQNNKVLVLGSENQNKRNQTPDEYLDGANNSQRWLEFQARVQTCHFSYGKKQRIQLAKLDDETEKGFLERNLNDTRYIARFMCQFVQENLYLTGKGKRLVFASNGGMTATLRNLWGLRKVREDNDRHHALDAIVVACSTASMQQKITKAFQRHESIEYVDTETGEVKFRIPQPWDFFRQEVMIRVFSDQPCEDLVEKLSARPEALHDNVTPLFVSRAPNRKMSGQGHLETIKSAKRLSEENSMVKKPLTTLKLKDIPEIVGYPSREPQLYAALKTRLETHDDDPIKAFAKPFYKPNKNGELGALVRSVRVKGVQNTGVMVHDGKGIADNATMVRVDVYTKAGKNYLVPVYVWQVAQGILPNRAVTSGKSEADWDLIDESFEFKFSLSRGDLVEMISNKGRIFGYYNGLDRANGSIGIREHDLEKSKGKDGVHRVGVKTATAFNKYHVDPLGKEIHRCSSEPRPTLKIKSKK

SEQ ID NO: 421 - protein, 1327 aa, Solobacterium moorei
  Solobacterium moorei F0204
MEGQMKNNGNNLQQGNYYLGLDVGTSSVGWAVTDTDYNVLKFRGKSMWGARLFDEASTAEERRTHRGNRRRLARRKYRLLLLEQLFEKEIRKIDDNFFVRLHESNLWADDKSKPSKFLLFNDTNFTDKDYLKKYPTIYHLRSDLIHNSTEHDIRLVFLALHHLIKYRGHFIYDNSANGDVKTLDEAVSDFEEYLNENDIEFNIENKKEFINVLSDKHLTKKEKKISLKKLYGDITDSENINISVLIEMLSGSSISLSNLFKDIEFDGKQNLSLDSDIEETLNDVVDILGDNIDLLIHAKEVYDIAVLTSSLGKHKYLCDAKVELFEKNKKDLMILKKYIKKNHPEDYKKIFSSPTEKKNYAAYSQTNSKNVCSQEEFCLFIKPYIRDMVKSENEDEVRIAKEVEDKSFLTKLKGTNNSVVPYQIHERELNQILKNIVAYLPFMNDEQEDISVVDKIKLIFKFKIPYYVGPLNTKSTRSWVYRSDEKIYPWNFSNVIDLDKTAHEFMNRLIGRCTYTNDPVLPMDSLLYSKYNVLNEINPIKVNGKAIPVEVKQAIYTDLFENSKKKVTRKSIYIYLLKNGYIEKEDIVSGIDIEIKSKLKSHHDFTQIVQENKCTPEEIERIIKGILVYSDDKSMLRRWLKNNIKGLSENDVKYLAKLNYKEWGRLSKTLLTDIYTINPEDGEACSILDIMWNTNATLMEILSNEKYQFKQNIENYKAENYDEKQNLHEELDDMYISPAARRSIWQALRIVDEIVDIKKSAPKKIFIEMAREKKSAMKKKRTESRKDTLLELYKSCKSQADGFYDEELFEKLSNESNSRLRRDQLYLYYTQMGRSMYTGKRIDFDKLINDKNTYDIDHIYPRSKIKDDSITNRVLVEKDINGEKTDIYPISEDIRQKMQPFWKILKEKGLINEEKYKRLTRNYELTDEELSSFVARQLVETQQSTKALATLLKKEYPSAKIVYSKAGNVSEFRNRKDKELPKFREINDLHHAKDAYLNIVVGNVYDTKFTEKFFNNIRNENYSLKRVFDFSVPGAWDAKGSTFNTIKKYMAKNNPIIAFAPYEVKGELFDQQIVPKGKGQFPIKQGKDIEKYGGYNKLSSAFLFAVEYKGKKARERSLETVYIKDVELYLQDPIKYCESVLGLKEPQIIKPKILMGSLFSINNKKLVVTGRSGKQYVCHHIYQLSINDEDSQYLKNIAKYLQEEPDGNIERQNILNITSVNNIKLFDVLCTKFNSNTYEIILNSLKNDVNEGREKFSELDILEQCNILLQLLKAFKCNRESSNLEKLNNKKQAGVIVIPHLFTKCSVFKVIHQSITGLFEKEMDLLK

SEQ ID NO: 422 - protein, 1179 aa, Sphaerochaeta globosa
MSKKVSRRYEEQAQEICQRLGSRPYSIGLDLGVGSIGVAVAAYDPIKKQPSDLVFVSSRIFIPSTGAAERRQKRGQRNSLRHRANRLKFLWKLLAERNLMLSYSEQDVPDPARLRFEDAVVRANPYELRLKGLNEQLTLSELGYALYHIANHRGSSSVRTFLDEEKSSDDKKLEEQQAMTEQLAKEKGISTFIEVLTAFNTNGLIGYRNSESVKSKGVPVPTRDIISNEIDVLLQTQKQFYQEILSDEYCDRIVSAILFENEKIVPEAGCCPYFPDEKKLPRCHFLNEERRLWEAINNARIKMPMQEGAAKRYQSASFSDEQRHILFHIARSGTDITPKLVQKEFPALKTSIIVLQGKEKAIQKIAGFRFRRLEEKSFWKRLSEEQKDDFFSAWTNTPDDKRLSKYLMKHLLLTENEVVDALKTVSLIGDYGPIGKTATQLLMKHLEDGLTYTEALERGMETGEFQELSVWEQQSLLPYYGQILTGSTQALMGKYWHSAFKEKRDSEGFFKPNTNSDEEKYGRIANPVVHQTLNELRKLMNELITILGAKPQEITVELARELKVGAEKREDIIKQQTKQEKEAVLAYSKYCEPNNLDKRYIERFRLLEDQAFVCPYCLEHISVADIAAGRADVDHIFPRDDTADNSYGNKVVAHRQCNDIKGKRTPYAAFSNTSAWGPIMHYLDETPGMWRKRRKFETNEEEYAKYLQSKGFVSRFESDNSYIAKAAKEYLRCLFNPNNVTAVGSLKGMETSILRKAWNLQGIDDLLGSRHWSKDADTSPTMRKNRDDNRHHGLDAIVALYCSRSLVQMINTMSEQGKRAVEIEAMIPIPGYASEPNLSFEAQRELFRKKILEFMDLHAFVSMKTDNDANGALLKDTVYSILGADTQGEDLVFVVKKKIKDIGVKIGDYEEVASAIRGRITDKQPKWYPMEMKDKIEQLQSKNEAALQKYKESLVQAAAVLEESNRKLIESGKKPIQLSEKTISKKALELVGGYYYLISNNKRTKTFVVKEPSNEVKGFAFDTGSNLCLDFYHDAQGKLCGEIIRKIQAMNPSYKPAYMKQGYSLYVRLYQGDVCELRASDLTEAESNLAKTTHVRLPNAKPGRTFVIIITFTEMGSGYQIYFSNLAKSKKGQDTSFTLTTIKNYDVRKVQLSSAGLVRYVSPLLVDKIEKDEVALCGE

SEQ ID NO: 423 - protein, 1426 aa, Sphingobacterium spiritivorum
  Sphingobacterium spiritivorum ATCC 33861
MKHILGLDLGTNSIGWALIKQDFENKQGEILGMGSRIIPMSQDILGDFGKGNSVSQTAERTKYRSVRRLRERFLLRRERLHRILNVLGFLPEHYASQIDFTKRFGKFKEETEPKLVYSNEGFIFKKSFEEMLSDFKTHQPQLLEDNKKIPYDWTIYYLRKKALSRKIEKEELAWILLNFNQKRGYYQLRGEEEEENPNKLIEFYSLKIVDVLADEPQKGKSDIWYSLILENGWIYRRSSKTPLFDWKEKTRDFIVTIDLNDDGSVKTDKEGNEKRSFRAPGENDWTLVKKKTEQEIDSSRKTVGTYIYETLLKNPKQKIKGKLVRTIERKFYKTELKQILEKQKEFHPELRQDDLYSDCVRELYKNNEAHQLTLSKKDFVHLFMEDIIFYQRPLGSQKSSISNCTLEFRKYKDENGTEHTQYLKAIPKSNPYYQEFRIWQWMYNLNIYKKEDDTNVTKDFLNTKADFESLFEFLNNRKEVDQKALLKHFKLNDKTHRWNYVEDKKYPCNETKTMILSRLDKVENISDDFLTREMEQKIWHIIYSVNDKVEYEKALKSFAGKNNLEDNSFFEAFKKFPPFKSEYGAFSEKAIKKLLPLMRMGKFWNYNNISEQSKSRIQKIITGEYDENIKDKVREKAIHLTTETDFQGLQLWLVQYIVYGRHSEAAMLGKWNSADDLEEFLKEFKQHSLRNPIVEQVITETLRVVKDIWQKYGNGAKDFFREIHIELGREMKLPAEERERLTRQISENENTNFRIKALLAEMMDDNSVENVRPFSPMQQEILKIYEEGVLNSDIEIEDDILKISKTAQPSSSDLKRYKLWLEQKYKSPYTGQIIPLNKLFTPEYEIEHIIPQSRYFDDSFTNKIICESAVNKLKDNYIGLEFIKKLGGSIVECGNGKSVAILKHDAYEDFIKKHYANNRSKRNKLLLEDIPEKMIERQMNDTRYISKYISGVLSNIVRVEDGTDEGVNSKNIVPGNGKITTQLKQDWGLNDVWNDLILPRFERMNHLTNSTDFTAWNENHQKFLPTVPVEFSKGFSKKRIDHRHHALDALVIACATKDHVNLLNNQSAKSDTKRYDLKKKLMKFEKVAYNHPQTGERIEREAPKQFLKPWETFTIDAKNHLETIIVSFKQNLRVINKATNYYEKYVEKEGTKVKERVEQKGTNWAIRKPMHKETVSGKIDLPRIKVPKGKILTATRKSLDTSFNLKTIGSITDTGIQKILKNYLQYKDNNPELAFSPEGIEDMNKNIEKFNNGKAHQSISKVRVFELGSKFPLGQSGNKKEKYVEAAKGTNLFFAIYQDKNGKRSYETIPLNEVIERQKQGLSVVDLKGVDDFYLSPNDLVYVPSEDELENISMIDFNKMSSERIYKVVSFTGNQIFFVRQDIATSVVNKAEFSTLNKMERAIDGTMIKETCVKLQIDRLGNISKI

SEQ ID NO: 424 - protein, 1110 aa, Sphingobium sp.
  Sphingobium sp. AP49
MAEGKKRIWRLGADLGANSLGWAAIELSAPVNGKPIAILAAGSRIFSDGRDPKSGASLAVDRRDARAMRRRRDRFKQRQKALIKYLIADGLFPADEAARNAMAAIDPYAVRARALDEALSLPELGRALFHLNQRRGFKSNRKADRKADDDAGKIAIGIDRTRDAIAEDEADAGAEPGSWTFGKWLHERRLKGQSVRTRLRPESGEDAKGDGYDFYPDRALMEEEFDAIWAAQAPHHPDVLTNDVHDRLHEIIFYQRPLKAPQVGMCSLIPGDRRLPKAHPLFQRRRLLEELNALMIVRPGEVAQRLTREERDILLLKLKDKNKVSFATLRKALKLDPDARFNKESEDRTDLKGDEVAAVMGSKTRFGNLWVHLSIEAQWDVLARLDAVESDAEDAAFCAWLVETYALTPEQARAVANAPLPPGYGRFGETATRKLIEALRDGKKDDRVLVYSEAVTEAGLGHHSDRRTGEVFEDAKGRPQLPYYGVALERHIMPGTGDPSDPEEMRVGRLTNPTVHIGLNQLRRILNVLIRAYGPPAEIAIELARELKLTDEDKKRINRENNDNRIAAERRSEKLLAIGQADSGANRALLKLWEELNPANVLDRRCIYSGRQISIDMLFSAAVEVDHILPFAATLDDSNGNKIVCLREANREKRKRSPHDAWGHSARWDEIAARAAQLPRNKRWRFEPDAMDKFRDEGGFQARHLVDTQYLARLSREYLATLYPEKGEGSGHIWVSPGRLTEMVRRKLGLNDLLPDHNFGGGADQAKNRLDHRHHAIDAVVVAIVDRGMLNAIARASGQEGAEGRERIIIPEPWDGFRDALRETVNRITVSHRTDHGTASKAGLPKGKDATAGRLHNDTAYGFTGDTDAKGNSIVVRRVPLSSFKKLADLDRIRDADLKAALYQHLNGLEGKAFEKALAEFHKLEWHNFGGVRRVRVTEPLTVIPIKDRNGRIYKGYKGDSNYRYDVWELPDGKWVTNWKNEAGEAMSSVISMFDAHQSSEPPRPHPAARKILSLHQNDLLAIEREGEDRKLMRVVKFGQSGQITLAEHQQAGDLKKRDAVSNDDDPFKYFAPTSGGLKKVKARQVRIDEIGRVLDPGFPARTARRKTRG

SEQ ID NO: 425 - protein, 1090 aa, Sphingomonas sp.
  Sphingomonas sp. S17
MDWRLGLDLGANSLGWAALRLDRAGDPIGILAMGSRIFSDGRDPKSGASLAVDRRAARAMRRRRDRFKQRQAALLKYLIRDGLFPADQADRQRLADEDPYALRARALDEELSLFEIGRALFHLNQRRGFQSNRKADRGQDDEAGKIAVGVDRLNQQMEEQGARTLGEFLHQRRRAATDANHIPSVRTRLRPETGEGAKGDGYDFYPSRALIAEEFEEIWAAQAPHYPDTLTQQVHDRLYEIIFHQRPLRAPQVGQCTLVAGETRLPKAHPLFQKRRLLEEINALMIVRPGEIAQRLTPEERDTLYLKLKDKRTVSFATLRKTLKLDSAARFNKESENRTELKGDEVAAELGAKTRLGTRWQHLSGDQQWEVVHRLMALESQADEAAFRDWISQTYDLLPEQAAAVLGARLPQGHGRFGPTATTTLIDSLLHDRTEDGRVVVYSEAVQRSGLGHHSDLRHDRDDEDVTELPYYGVALERHIMPGTAEPTDPEEMRIGRLTNPTVHIGLNQLRHVVNRLIRAYGPPKEIAIELARELKLSEDEKKKRNSENRDNRLAAEGRSKKLEEIRQRDTGANRALLKLWEELNPGNVLDRRCIYTGEQISIDMLFSDRVEVDHILPFAQTLDDSNGNKLLCLREANREKRRRSPYEAWGHTDRWPDIAERASRLPKPKRWRFEPDAMQRFATEDGFLARHLVDTQYLGRLAREYLSWLYPGRGEGSGHVWVSPGRLTEMVRRKLGLNDLLPDHNFGGGADQPKNRLDHRHHAIDALVVAIVDRGMLQAIARASGQDGSEGRERIHIPAPWDGFRDDLRVAVNGIIVSHRPDHGTVAKAGLARGRDQTAGRLHNDTAYGLTGETDAKGNSIVVRRIPLSAIKKPADIARVRDPLLRNALAEFTKGLDGKAFEARIGRFHELGPLLYRGIRRVRVVETLTVIPIRDAEGRAYKGYKGDSNYRYDVWEMPDGKWRCQVVSMFDAHQSTEQARPHPAARKILSLQRNDILAIERTEGDRELVRVVKFSEKQFAVAPPHEGGSLKTRDGNADDPFRYLYPSPNTLKGWRARQVRIDELGRVLDPGFPARKSVRRTRPRAAPVD

SEQ ID NO: 426 - protein, 1084 aa, Sporolactobacillus vineae
  Sporolactobacillus vineae DSM 21990 = SL153
MKYSIGLDIGISSVGWSVINLDRERIELMGARLFDAAENPKNGSSLAAPRRDARSARRRLRRRRYRVGRVRHFIIDRGLVTRGQADQLFDWKDGDLDIWLVRVNALERLLTDREFARVLIHIAKNRGYRSNRKSEAKSGENGQVLSAIKANKELMEEKGYQTVAEMLVNEPETFAGRKRNRGGEYTHVIARSELEHEIRLIFTKQRAFGNRFATEENENTYVKIWAAQRPVATKDDILKKIGDCTFEKGEKRAPKASYAFQYFRALDKLNRLRILSVREPSRNLTDDERNLIVPALFNHDKQKYSDLRKILQLRDDQKFNELFYDPGKSLKENENKTFLSLAEQYKIRKVIRDVQGKDGLLQYRPLDIDTIAYALTVFKDDQDTRDYLSNTFVNGNGKQVLNLANRAFDAELIDGLLSLSFAKFGHLSLKALHKLIPHMEQGLSYYDACKKVGYHDNEQVGKSKQHLLPVIPADEIRNPVVVRSLSQTRKVINAIIKRYGSPTFMYIELAREMGRPYNERRDLEKQYNKNRTVNDSAIEQIHELYPEIGAPRGHDILKYKLWQQQDCKCAYSLEKIPAEKIFEPGYAEVDHIIPYSRSFDDSNSNKVLVLSRMNQEKKNRTPYEWFGGDEHRWNKFESYVNALKVNRKKKSLLTKKNMDTEEEDTFKSRHLNDTRYITRFIKSFVEDNLLFREIEGAKQHVFTVNGAYTSLMRKRWGFNKNREESDLHHSVDAVIIAVSQPFRNEVSRYFKHREISLPQLLKRTWDYFPEPWEGFVKELRARTLQDPEKLKLALESLDLDSYDPEFIDEVKPIFISRMPKRSIKGQIHDETLRRNRGKTKDGFVKIVTRTRLENIKFDKNGDFPMYGRESDPKTYQAIKQRYLENNKDKKKAFIEPLYKPAKNPNNASLIRSVKIEDKANQIVPLRDEAVAYNASIVRTEVYRNKETGKFYLAPVYVSDVFAGREPRRFIRANVPYEQWVNITDKFTFLFNLYPNDVIYIKMKKVKTTKSNINKTISWQESYFYFKGTDIHTGAITIIDHMNSFTDRVGTQGLQLFEKYQVDPLGNLSRVHGETQYGVPALSHS

SEQ ID NO: 427 - protein, 1053 aa, Staphylococcus aureus; identical to SEQ ID NO: 28
  Staphylococcus aureus subsp. aureus

SEQ ID NO: 428 - protein, 1054 aa, Staphylococcus lugdunensis
  Staphylococcus lugdunensis M23590
MNQKFILGLDIGITSVGYGLIDYETKNIIDAGVRLFPEANVENNEGRRSKRGSRRLKRRRIHRLERVKKLLEDYNLLDQSQIPQSTNPYAIRVKGLSEALSKDELVIALLHIAKRRGIHKIDVIDSNDDVGNELSTKEQLNKNSKLLKDKFVCQIQLERMNEGQVRGEKNRFKTADIIKEIIQLLNVQKNFHQLDENFINKYIELVEMRREYFEGPGKGSPYGWEGDPKAWYETLMGHCTYFPDELRSVKYAYSADLFNALNDLNNLVIQRDGLSKLEYHEKYHIIENVFKQKKKPTLKQIANEINVNPEDIKGYRITKSGKPQFTEFKLYHDLKSVLFDQSILENEDVLDQIAEILTIYQDKDSIKSKLTELDILLNEEDKENIAQLTGYTGTHRLSLKCIRLVLEEQWYSSRNQMEIFTHLNIKPKKINLTAANKIPKAMIDEFILSPVVKRTFGQAINLINKIIEKYGVPEDIIIELARENNSKDKQKFINEMQKKNENTRKRINEIIGKYGNQNAKRLVEKIRLHDEQEGKCLYSLESIPLEDLLNNPNHYEVDHIIPRSVSFDNSYHNKVLVKQSENSKKSNLTPYQYFNSGKSKLSYNQFKQHILNLSKSQDRISKKKKEYLLEERDINKFEVQKEFINRNLVDTRYATRELTNYLKAYFSANNMNVKVKTINGSFTDYLRKVWKFKKERNHGYKHHAEDALIIANADFLFKENKKLKAVNSVLEKPEIESKQLDIQVDSEDNYSEMFIIPKQVQDIKDFRNFKYSHRVDKKPNRQLINDTLYSTRKKDNSTYIVQTIKDIYAKDNTTLKKQFDKSPEKFLMYQHDPRTFEKLEVIMKQYANEKNPLAKYHEETGEYLTKYSKKNNGPIVKSLKYIGNKLGSHLDVTHQFKSSTKKLVKLSIKPYRFDVYLTDKGYKFITISYLDVLKKDNYYYIPEQKYDKLKLGKAIDKNAKFIASFYKNDLIKLDGEIYKIIGVNSDTRNMIELDLPDIRYKEYCELNNIKGEPRIKKTIGKKVNSIEKLTTDVLGNVFTNTQYTKPQLLFKRGN

SEQ ID NO: 429 - protein, 1334 aa, Staphylococcus pseudintermedius
MGRKPYILSLDIGTGSVGYACMDKGFNVLKYHDKDALGVYLFDGALTAQERRQFRTSRRRKNRRIKRLGLLQELLAPLVQNPNFYQFQRQFAWKNDNMDFKNKSLSEVLSFLGYESKKYPTIYHLQEALLLKDEKFDPELIYMALYHLVKYRGHFLFDHLKIENLTNNDNMHDFVELIETYENLNNIKLNLDYEKTKVIYEILKDNEMTKNDRAKRVKNMEKKLEQFSIMLLGLKFNEGKLFNHADNAEELKGANQSHTFADNYEENLTPFLTVEQSEFIERANKIYLSLTLQDILKGKKSMAMSKVAAYDKFRNELKQVKDIVYKADSTRTQFKKIFVSSKKSLKQYDATPNDQTFSSLCLFDQYLIRPKKQYSLLIKELKKIIPQDSELYFEAENDTLLKVLNTTDNASIPMQINLYEAETILRNQQKYHAEITDEMIEKVLSLIQFRIPYYVGPLVNDHTASKFGWMERKSNESIKPWNFDEVVDRSKSATQFIRRMTNKCSYLINEDVLPKNSLLYQEMEVLNELNATQIRLQTDPKNRKYRMMPQIKLFAVEHIFKKYKTVSHSKFLEIMLNSNHRENFMNHGEKLSIFGTQDDKKFASKLSSYQDMTKIFGDIEGKRAQIEEIIQWITIFEDKKILVQKLKECYPELTSKQINQLKKLNYSGWGRLSEKLLTHAYQGHSIIELLRHSDENFMEILTNDVYGFQNFIKEENQVQSNKIQHQDIANLTTSPALKKGIWSTIKLVRELTSIFGEPEKIIMEFATEDQQKGKKQKSRKQLWDDNIKKNKLKSVDEYKYIIDVANKLNNEQLQQEKLWLYLSQNGKCMYSGQSIDLDALLSPNATKHYEVDHIFPRSFIKDDSIDNKVLVIKKMNQTKGDQVPLQFIQQPYERIAYWKSLNKAGLISDSKLHKLMKPEFTAMDKEGFIQRQLVETRQISVHVRDFLKEEYPNTKVIPMKAKMVSEFRKKFDIPKIRQMNDAHHAIDAYLNGVVYHGAQLAYPNVDLFDFNFKWEKVREKWKALGEFNTKQKSRELFFFKKLEKMEVSQGERLISKIKLDMNHFKINYSRKLANIPQQFYNQTAVSPKTAELKYESNKSNEVVYKGLTPYQTYVVAIKSVNKKGKEKMEYQMIDHYVFDFYKFQNGNEKELALYLAQRENKDEVLDAQIVYSLNKGDLLYINNHPCYFVSRKEVINAKQFELTVEQQLSLYNVMNNKETNVEKLLIEYDFIAEKVINEYHHYLNSKLKEKRVRTFFSESNQTHEDFIKALDELFKVVTASATRSDKIGSRKNSMTHRAFLGKGKDVKIAYTSISGLKTTKPKSLFKLAESRNEL

SEQ ID NO: 430 - protein, 1334 aa, Staphylococcus pseudintermedius; identical to SEQ ID NO: 429
  Staphylococcus pseudintermedius ED99

SEQ ID NO: 431 - protein, 1112 aa, Staphylococcus simulans
  Staphylococcus simulans ACS-120-V-Sch1
MLVGLKFKQSILFENMENAEDIKESATGSDAISLSDDYYENLSEFLTDEQLNFIESANTFFMGIMLDRILKGATSISAAKVRDYKIFKSQLKLIKDIVYQNKYDKYHEFFVTSKEDMRAYQENPDAKNFGKLSKFDQYLIHSKDQYAKLMKDLKGLVPKEYTEVLNLIDEQKFLVVQNTTDNASIPYQNNVFEAENILRNQQKYYPEITEEMIGKVINLISFRIPYYVGPLTNKNGQSDFAWMIRKSDEQTLPWNFDKVIDKSKSAEKFIRRMTSKCTYLLEEDVLPKHSLLYQEMEVLNELNNVQLRGENEPKHRIHRLDPKVKQFIYHNLFQKKKNVTHKDLITLLQNSEHRNTLNKTSGQKLKVFGTQNDSKFASKLSTYNDMKAILGSVENKRQMIEELVLWITIFEDKAILKQKIGEKYPNITEKQLNQIVKLNYSGWGRLSEKLLTKEVNGRSLIDLMYSTENNFMEIITDKTLGFDCFIKNSNKVKNAKISYKDVAELRTSPALKKGIWNAIKMVREISNLFGAPEKIIIEFATEDQAKGKRQKSRSELWDDLVKKNNLKRNKEFEGLFEELKAYPDLDFSNPKLWLYIHQNGKCMYTKKPIDLERLMSDTNNQLYEIDHILPRTFVKDDSINNKVLVIQSANQKKSGDKMPLEIFDNHVLVPFWKMLYENDLISSSKLSKLMKKEFNDLDKEGFIQRQLVETRQIISHVSDFLTEEYPSTTVVPMKANVVSELRRKFDIPKIRQLNDWHHAVDAYLNGFVYQAARVFYPKVNLFEFNFKWEKVREKWRQLGEFTENNKKREFFLFKRMENYVNEYGEGMISKLIFDLDNFKFNYSRKVESTESAFYKQSAFSPKNTTAQYDSDKNKTAIYKEMKNKRGIVVSYTYVKKDQELIGYGVFNETVFEYVNNADVDMNTRALKIVRKAFPKLDIKKAQYLFSINKGDALLVNGHPFLFVSAYERINGKQLEFDIAMQRKIKQALSPYNNMTEQEKVEFYNQFAEKVIEEFRNSIGLQSRDRKVNLIKNLFNNTEKSNDSMTQSILEVLKMTKVSAERSKELKIRWNGQTPNTFIDTKNNAEIQYKSITGLKTTKPKSIFKLAESKNEL

SEQ ID NO: 432 - protein, 1370 aa, Streptococcus agalactiae
  Streptococcus agalactiae 2603V/R
MNKPYSIGLDIGTNSVGWSIITDDYKVPAKKMRVLGNTDKEYIKKNLIGALLFDGGNTAADRRLKRTARRRYTRRRNRILYLQEIFAEEMSKVDDSFFHRLEDSFLVEEDKRGSKYPIFATLQEEKDYHEKFSTIYHLRKELADKKEKADLRLIYIALAHIIKFRGHFLIEDDSFDVRNTDISKQYQDFLEIFNTTFENNDLLSQNVDVEAILTDKISKSAKKDRILAQYPNQKSTGIFAEFLKLIVGNQADFKKYFNLEDKTPLQFAKDSYDEDLENLLGQIGDEFADLFSAAKKLYDSVLLSGILTVIDLSTKAPLSASMIQRYDEHREDLKQLKQFVKASLPEKYQEIFADSSKDGYAGYIEGKTNQEAFYKYLSKLLTKQEDSENFLEKIKNEDFLRKQRTFDNGSIPHQVHLTELKAIIRRQSEYYPFLKENQDRIEKILTFRIPYYIGPLAREKSDFAWMTRKTDDSIRPWNFEDLVDKEKSAEAFIHRMTNNDFYLPEEKVLPKHSLIYEKFTVYNELTKVRYKNEQGETYFFDSNIKQEIFDGVFKEHRKVSKKKLLDFLAKEYEEFRIVDVIGLDKENKAFNASLGTYHDLEKILDKDFLDNPDNESILEDIVQTLTLFEDREMIKKRLENYKDLFTESQLKKLYRRHYTGWGRLSAKLINGIRDKESQKTILDYLIDDGRSNRNFMQLINDDGLSFKSIISKAQAGSHSDNLKEVVGELAGSPAIKKGILQSLKIVDELVKVMGYEPEQIVVEMARENQTTNQGRRNSRQRYKLLDDGVKNLASDLNGNILKEYPTDNQALQNERLFLYYLQNGRDMYTGEALDIDNLSQYDIDHIIPQAFIKDDSIDNRVLVSSAKNRGKSDDVPSLEIVKDCKVFWKKLLDAKLMSQRKYDNLTKAERGGLTSDDKARFIQRQLVETRQITKHVARILDERFNNELDSKGRRIRKVKIVTLKSNLVSNFRKEFGFYKIREVNNYHHAHDAYLNAVVAKAILTKYPQLEPEFVYGDYPKYNSYKTRKSATEKLFFYSNIMNFFKTKVTLADGTVVVKDDIEVNNDTGEIVWDKKKHFATVRKVLSYPQNNIVKKTEIQTGGFSKESILAHGNSDKLIPRKTKDIYLDPKKYGGFDSPIVAYSVLVVADIKKGKAQKLKTVTELLGITIMERSRFEKNPSAFLESKGYLNIRADKLIILPKYSLFELENGRRRLLASAGELQKGNELALPTQFMKFLYLASRYNESKGKPEEIEKKQEFVNQHVSYFDDILQLINDFSKRVILADANLEKINKLYQDNKENISVDELANNIINLFTFTSLGAPAAFKFFDKIVDRKRYTSTKEVLNSTLIHQSITGLYETRIDLGKLGED

SEQ ID NO: 433 - protein, 1377 aa, Streptococcus agalactiae
  Streptococcus agalactiae 515
MNKPYSIGLDIGTNSVGWSIITDDYKVPAKKMRVLGNTDKEYIKKNLIGALLFDGGNTAADRRLKRTARRRYTRRRNRILYLQEIFAEEMSKVDDSFFHRLEDSFLVEEDKRGSKYPIFATMQEEKYYHEKFPTIYHLRKELADKKEKADLRLVYLALAHIIKFRGHFLIEDDRFDVRNTDIQKQYQAFLEIFDTTFENNHLLSQNVDVEAILTDKISKSAKKDRILAQYPNQKSTGIFAEFLKLIVGNQADFKKHFNLEDKTPLQFAKDSYDEDLENLLGQIGDEFADLFSVAKKLYDSVLLSGILTVTDLSTKAPLSASMIQRYDEHHEDLKHLKQFVKASLPENYREVFADSSKDGYAGYIEGKTNQEAFYKYLLKLLTKQEGSEYFLEKIKNEDFLRKQRTFDNGSIPHQVHLTELRAIIRRQSEYYPFLKENQDRIEKILTFRIPYYVGPLAREKSDFAWMTRKTDDSIRPWNFEDLVDKEKSAEAFIHRMTNNDLYLPEEKVLPKHSLIYEKFTVYNELTKVRFLAEGFKDFQFLNRKQKETIFNSLFKEKRKVTEKDIISFLNKVDGYEGIAIKGIEKQFNASLSTYHDLKKILGKDFLDNTDNELILEDIVQTLTLFEDREMIKKCLDIYKDFFTESQLKKLYRRHYTGWGRLSAKLINGIRNKENQKTILDYLIDDGSANRNFMQLINDDDLSFKPIIDKARTGSHSDNLKEVVGELAGSPAIKKGILQSLKIVDELVKVMGYEPEQIVVEMARENQTTAKGLSRSRQRLTTLRESLANLKSNILEEKKPKYVKDQVENHHLSDDRLFLYYLQNGRDMYTKKALDIDNLSQYDIDHIIPQAFIKDDSIDNRVLVSSAKNRGKSDDVPSIEIVKARKMFWKNLLDAKLMSQRKYDNLTKAERGGLTSDDKARFIQRQLVETRQITKHVARILDERFNNEVDNGKKICKVKIVTLKSNLVSNFRKEFGFYKIREVNDYHHAHDAYLNAVVAKAILTKYPQLEPEFVYGMYRQKKLSKIVHEDKEEKYSEATRKMFFYSNLMNMFKRVVRLADGSIVVRPVIETGRYMGKTAWDKKKHFATVRKVLSYPQNNIVKKTEIQTGGFSKESILAHGNSDKLIPRKTKDIYLDPKKYGGFDSPIVAYSVLVVADIKKGKAQKLKTVTELLGITIMERSRFEKNPSAFLESKGYLNIRDDKLMILPKYSLFELENGRRRLLASAGELQKGNELALPTQFMKFLYLASRYNESKGKPEEIEKKQEFVNQHVSYFDDILQLINDFSKRVILADANLEKINKLYQDNKENIPVDELANNIINLFTFTSLGAPAAFKFFDKIVDRKRYTSTKEVLNSTLIHQSITGLYETRIDLGKLGED

SEQ ID NO: 434 - protein, 1370 aa, Streptococcus agalactiae; identical to SEQ ID NO: 432

SEQ ID NO: 435 - protein, 1378 aa, Streptococcus agalactiae
  Streptococcus agalactiae ATCC 13813
MNKPYSIGLDIGTNSVGWSIITDDYKVPAKKMRVLGNTDKEYIKKNLIGALLFDGGNTAADRRLKRTARRRYTRRRNRILYLQEIFAEEMSKVDDSFFHRLEDSFLVEEDKRGSKYPIFATMQEEKYYHEKFPTIYHLRKELADKKEKADLRLIYLALAHIIKFRGHFLIEDDRFDVRNTDIQKQYQAFLEIFDTTFENNDLLSQNVDVEAILTDKISKSAKKDRILARYPNQKSTGIFAEFLKLIVGNQADFKKHFNLEDKTPLQFAKDSYDEDLENLLGQIGDEFADLFSAAKKLYDSVLLSGILTVIDLSTKAPLSASMIQRYDEHHEDLKHLKQFVKASLPENYREVFADSSKDGYAGYIEGKTSQEAFYKYLLKLLTKQEGSEYLLEKIKNEDFLRKQRTFDNGSIPHQVHLTELRAIIRRQSEYYPFLKENLDRIEKILTFRIPYYVGPLAREKSDFAWMTRKTDDSIRPWNFEDLVDKEKSAEAFIHRMTNNDLYLPEEKVLPKHSLIYEKFTVYNELTKVRFLAEGFKDFQFLNRKQKETIFNSLFKEKRKVTEKDIISFLNKVDGYEGIAIKGIEKQFNASLSTYHDLKKILGKDFLDNTDNELILEDIIQTLTLFEDREMIKKRLDIYKDFFTESQLKKLYRRHYTGWGRLSAKLINGIRNKENQKTILDYLIDDGSANRNFMQLIKDAGLSFKPIIDKARTGSHSDNLKEVVGELAGSPAIKKGILQSLKIVDELVKVMGYEPEQIVVEMARENQTTAKGLSRSRQRLTTLRESLGNLKSNILEEKKPKYVKDQVENHHLSDDRLFLYYLQNGKDMYTDDELDIDNLSQYDIDHIIPQAFIKDDSIDNRVLVSSAKNRGKSDDVPSIEIVKARKMFWKNLLDAKLMSQRKYDNLTKAERGGLTSDDKARFIQRQLVETRQITKHVARILDERFNNELDSKGRRIRKVKIVTLKSNLVSNFRKEFGFYKIREVNNYHHAHDAYLNAVVAKAILTKYPQLEPEFVYGLYRRKKLSKIVREDKEEKYSEATRKMFFYSNLMNMFKRVVRLADGSIVVRPVIETGRYMGKTAWDKKKHFATVRKVLSYPQNNIVKKTEIQTGGFSKESILAHGNSDKLIPRKTKDIYLDPKKYGGFDSPIVAYSVLVVADIKKGKAQKLKTVTELLGITIMERSRFEKNTSAFLESKGYLNIRDDKLMILPKYSLFELENGRRRLLASAGELQKGNELALPTQFMKFLYLASRYNESKGKPEEIEKKQEFVNQHVSYFDDILQLINDFSNRVILADANLEKINKLYQDNKENIPVDELANNIINLFTFTSLGAPAAFKFFDKIVDRKRYTSTKEVLNSTLIHQSITGLYETRIDLGKLGEG

SEQ ID NO: 436 - protein, 1370 aa, Streptococcus agalactiae
  Streptococcus agalactiae CJB111
  MOD_RES (117)..(117): Any amino acid
MNKPYSIGLDIGTNSVGWSIITDDYKVPAKKMRVLGNTDKEYIKKNLIGALLFDGGNTAADRRLKRTARRRYTRRRNRILYLQEIFAEEMSKVDDSFFHRLEDSFLVEEDKRGSKYXIFATLQEEKDYHEKFSTIYHLRKELADKKEKADLRLIYIALAHIIKFRGHFLIEDDSFDVRNTDISKQYQDFLEIFNTTFENNDLLSQNVDVEAILTDKISKSAKKDRILAQYPNQKSTGIFAEFLKLIVGNQADFKKYFNLEDKTPLQFAKDSYDEDLENLLGQIGDEFADLFSAAKKLYDSVLLSGILTVIDLSTKAPLSASMIQRYDEHREDLKQLKQFVKASLPEKYQEIFADSSKDGYAGYIEGKTNQEAFYKYLSKLLTKQEDSENFLEKIKNEDFLRKQRTFDNGSIPHQVHLTELKAIIRRQSEYYPFLKENQDRIEKILTFRIPYYIGPLAREKSDFAWMTRKTDDSIRPWNFEDLVDKEKSAEAFIHRMTNNDFYLPEEKVLPKHSLIYEKFTVYNELTKVRYKNEQGETYFFDSNIKQEIFDGVFKEHRKVSKKKLLDFLAKEYEEFRIVDVIGLDKENKAFNASLGTYHDLEKILDKDFLDNPDNESILEDIVQTLTLFEDREMIKKRLENYKDLFTESQLKKLYRRHYTGWGRLSAKLINGIRDKESQKTILDYLIDDGRSNRNFMQLINDDGLSFKSIISKAQAGSHSDNLKEVVGELAGSPAIKKGILQSLKIVDELVKVMGYEPEQIVVEMARENQTTNQGRRNSRQRYKLLDDGVKNLASDLNGNILKEYPTDNQALQNERLFLYYLQNGRDMYTGEALDIDNLSQYDIDHIIPQAFIKDDSIDNRVLVSSAKNRGKSDDVPSLEIVKDCKVFWKKLLDAKLMSQRKYDNLTKAERGGLTSDDKARFIQRQLVETRQITKHVARILDERFNNELDSKGRRIRKVKIVTLKSNLVSNFRKEFGFYKIREVNNYHHAHDAYLNAVVAKAILTKYPQLEPEFVYGDYPKYNSYKTRKSATEKLFFYSNIMNFFKTKVTLADGTVVVKDDIEVNNDTGEIVWDKKKHFATVRKVLSYPQNNIVKKTEIQTGGFSKESILAHGNSDKLIPRKTKDIYLDPKKYGGFDSPIVAYSVLVVADIKKGKAQKLKTVTELLGITIMERSRFEKNPSAFLESKGYLNIRADKLIILPKYSLFELENGRRRLLASAGELQKGNELALPTQFMKFLYLASRYNESKGKPEEIEKKQEFVNQHVSYFDDILQLINDFSKRVILADANLEKINKLYQDNKENISVDELANNIINLFTFTSLGAPAAFKFFDKIVDRKRYTSTKEVLNSTLIHQSITGLYETRIDLGKLGED

SEQ ID NO: 437 - protein, 1370 aa, Streptococcus agalactiae
  Streptococcus agalactiae COH1
MNKPYSIGLDIGTNSVGYSVVTDDYKVPAKKMRVLGNTDKEYIKKNLIGALLFDGGNTASDRRLKRTARRRYTRRRNRILYLQEIFAEEMSKVDDSFFHRLEDSFLVEDDKRGSKYPIFATMQEEKDYHEKFPTIYHLRKELADKKEKANLRLVYLALAHIIKFRGHFLIEDDSFDVRNTDIQRQYQAFLEIFDTTFENNHLLSQNIDVEGILTDKISKSAKKDRILAQYPNQKSTGIFAEFLKLIVGNQADFKKHFNLEDKTPLQFAKDSYDEDLENLLGQIGDEFADLFSVAKKLYDSVLLSGILTVTDLSTKAPLSASMIQRYDEHREDLKQLKQFVKASLPEKYQEIFTDSSKDGYAGYIEGKTNQGAFYKYLSKLLTKQEGSEYFLEKIKNEDFLRKQRTFDNGSIPHQVHLTELKAIIRRQSEYYPFLKENLDRIEKILTFRIPYYVGPLAREKSDFAWMTRKTDDSIRPWNFEELVDKEASAEAFIHRMTNNDLYLPEEKVLPKHSLIYEKFTVYNELTKVRYKNEQGETYFFDSNIKQEIFDGVFKEHRKVSKKKLLDFLAKEYEEFRIVDVIGLDKENKAFNASLGTYHDLKKILDKDFLDNPDNESILEDIVQTLTLFEDREMIKKRLENYKDLFTESQLKKLYRRHYTGWGRLSAKLINGIRDKESQKTILDYLISDGRANRNFMQLIHDDGLSFKPIIDKAQAGSHSDNLKEVVGELAGSPAIKKGILQSLKIVDELVKVMGYEPEQVVVEMARENQTTNQGRRNTRQRYKLLEEGVKNLASDLNGNILKEYPTDNQALQNERLFLYYLQNGRDMYTGEALDIDNLSQYDIDHIVPQAFIKDDSIDNRVLVSSAKNRGKSDNVPSIDIVKARKAFWKKLLDAKLMSQRKYDNLTKAERGGLTSDDKARFIQRQLVETRQITKHVARILDERFNNELDSKGRRIRKVKIVTLKSNLVSNFRKEFGFYKIREVNDYHHAHDAYLNAVVAKAILTKYPQLEPEFVYGDYPKYNSYKTRKSATEKLFFYSNIMNFFKTKVTLADGTVVVKDDIEVNNDTGEIVWDKKKHFATVRKVLSYPQVNIVKKTEIQTGGFSKESILAHGNSDKLIPRKTKDIYLDPKKYGGFDSPIVAYSVLVVADIKKGKAQKLKTVTELLGITIMERFRFEKNPSAFLESKGYLNIRDDKLMILPKYSLFELENGRRRLLASAGELQKGNELALPTQYMKFLYLASRYNELKGKPEEIEQKQEFVVQHVSYFDDILQIINDFSNRVILADANLEKINKLYQDNKENISVDELANNIINLFTFTSLGAPAAFKFFDKIVDRKRYTSTKEVLNSTLIHQSITGLYETRIDLGKLGED

SEQ ID NO: 438 - protein, 1370 aa, Streptococcus agalactiae
  Streptococcus agalactiae FSL S3-026
MNKPYSIGLDIGTNSVGWSIITDDYKVPAKKMRVLGNTDKEYIKKNLIGALLFDGGNTAADRRLKRTARRRYTRRRNRILYLQEIFAEEMSKVDDSFFHRLEDSFLVEEDKRGSKYPIFATMQEEKYYHEKFPTIYHLRKELADKKEKADLRLIYLALAHIIKFRGHFLIEDDRFDVRNTDIQKQYQAFLEIFDTTFENNDLLSQNVDVEAILTDKISKSAKKDRILARYPNQKSTGIFAEFLKLIVGNQADFKKHFNLEDKTPLQFAKDSYDEDLENLLGQIGDEFADLFSAAKKLYDSVLLSGILTVTDLSTKAPLSASMIQRYDEHREDLKQLKQFVKASLPEKYQEIFADSSKDGYAGYIEGKTNQEAFYKYLSKLLTKQEGSEYLLEKIKNEDFLRKQRTFDNGSIPHQVHLTELRAIIRRQSEYYPFLKENLDRIEKILTFRIPYYVGPLAREKSDFAWMTRKTDDSIRPWNFEDLVDKEKSAEAFIHRMTNNDLYLPEEKVLPKHSLIYEKFTVYNELTKVRFLAEGFKDFQFLNRKQKETIFNSLFKEKRKVTEKDIISFLNKVDGYEGIAIKGIEKQFNASLSTYHDLKKILGKDFLDNTDNELILEDIVQTLTLFEDREMIRKRLDIYKDFFTESQLKKLYRRHYTGWGRLSAKLINGIRNKENQKTILDYLIDDGSANRNFMQLIKDAGLSFKPIIDKARTGSHSDNLKEVVGELAGSPAIKKGILQSLKIVDELVKVMGYEPEQIVVEMARENQTTAKGLSRLRQRLTTLRESLANLKSNILEEKKPKYVKDQVENHHLSDDRLFLYYLQNGKDMYTDDELDIDNLSQYDIDHIIPQAFIKDDSIDNRVLVSSAKNRGKSDDVPSVEIVKDCKVFWKKLLDAKLMSQRKYDNLTKAERGGLTSDDKARFIQRQLVETRQITKHVARILDERFNNELDSKGRRIRKVKIVTLKSNLVSNFRKEFGFYKIREVNNYHHAHDAYLNAVVAKAILTKYPQLEPEFVYGDYPKYNSYKTRKSATEKLFFYSNIMNFFKTKVTLADGTVVVKDDIEVNNDTGEIVWDKKKHFATVRKVLSYPQVNIVKKTEIQTGGFSKESILAHGNSDKLIPRKTKDIYLDPKKYGGFDSPIVAYSVLVVADIKKGKAQKLKTVTELLGITIMERSRFEKNPSAFLESKGYLNIRDDKLMILPKYSLFELENGRRRLLASADELQKGNELALPTQFMKFLYLASRYNELKGKPEEIEQKQEFVVQHVSYFDDILQIINDFSNRVILADANLEKINKLYQDNKENIPVDELANNIINLFTFTSLGAPAAFKFFDKIVDRKRYTSTKEVLNSTLIHQSITGLYETRIDLGKLGED

SEQ ID NO: 439 - protein, 1370 aa, Streptococcus agalactiae
  Streptococcus agalactiae GB00112
MNKPYSIGLDIGTNSVGYSVVTDDYKVPAKKMRVLGNTDKEYIKKNLIGALLFDGGNTASDRRLKRTARRRYTRRRNRILYLQEIFAEEMSKVDDSFFHRLEDSFLVEDDKRGSKYPIFATMQEEKDYHEKFPTIYHLRKELADKKEKADLRLVYLALAHIIKFRGHFLIEDDSFDVRNTDIQRQYQAFLEIFDTTFENNHLLSQNIDVEGILTDKISKSAKKDRILAQYPNQKSTGIFAEFLKLIVGNQADFKKHFNLEDKTPLQFAKDSYDEDLENLLGQIGDEFADLFSVAKKLYDSVLLSGILTVTDLSTKAPLSASMIQRYDEHREDLKQLKQFVKASLPEKYQEIFTDSSKDGYAGYIEGKTNQGAFYKYLSKLLTKQEGSEYFLEKIKNEDFLRKQRTFDNGSIPHQVHLTELKAIIRRQSEYYPFLKENLDRIEKILTFRIPYYVGPLAREKSDFAWMTRKTDDSIRPWNFEELVDKEASAEAFIHRMTNNDLYLPEEKVLPKHSLIYEKFTVYNELTKVRYKNEQGETYFFDSNIKQEIFDGVFKEHRKVSKKKLLDFLAKEYEEFRIVDVIGLDKENKAFNASLGTYHDLKKILDKDFLDNPDNESILEDIVQTLTLFEDREMIKKRLENYKDLFTESQLKKLYRRHYTGWGRLSAKLINGIRDKESQKTILDYLISDGRANRNFMQLIHDDGLSFKPIIDKAQAGSHSDNLKEVVGELAGSPAIKKGILQSLKIVDELVKVMGYEPEQVVVEMARENQTTNQGRRNTRQRYKLLEEGVKNLASDLNGNILKEYPTDNQALQNERLFLYYLQNGRDMYTGEALDIDNLSQYDIDHIVPQAFIKDDSIDNRVLVSSAKNRGKSDNVPSIDIVKARKAFWKKLLDAKLMSQRKYDNLTKAERGGLTSDDKARFIQRQLVETRQITKHVARILDERFNNELDSKGRRIRKVKIVTLKSNLVSNFRKEFGFYKIREVNDYHHAHDAYLNAVVAKAILTKYPQLEPEFVYGDYPKYNSYKTRKSATEKLFFYSNIMNFFKTKVTLADGTVVVKDDIEVNNDTGEIVWDKKKHFATVRKVLSYPQVNIVKKTEIQTGGFSKESILAHGNSDKLIPRKTKDIYLDPKKYGGFDSPIVAYSVLVVADIKKGKAQKLKTVTELLGITIMERFRFEKNPSAFLESKGYLNIRDDKLMILPKYSLFELENGRRRLLASAGELQKGNELALPTQYMKFLYLASRYNELKGKPEEIEQKQEFVVQHVSYFDDILQIINDFSNRVILADANLEKINKLYQDNKENISVDELANNIINLFTFTSLGAPAAFKFFDKIVDRKRYTSTKEVLNSTLIHQSITGLYETRIDLGKLGED

SEQ ID NO: 440 - protein, 1370 aa, Streptococcus agalactiae
  Streptococcus agalactiae H36B
  MOD_RES (9)..(9): Any amino acid
MNKPYSIGXDIGTNSVGWSIITDDYKVPAKKMRVLGNTDKEYIKKNLIGALLFDGGNTAADRRLKRTARRRYTRRRNRILYLQEIFAEEMSKVDDSFFHRLEDSFLVEEDKRGSKYPIFATLQEEKDYHEKFSTIYHLRKELADKKEKADLRLIYIALAHIIKFRGHFLIEDDSFDVRNTDISKQYQDFLEIFNTTFENNDLLSQNVDVEAILTDKISKSAKKDRILAQYPNQKSTGIFAEFLKLIVGNQADFKKYFNLEDKTPLQFAKDSYDEDLENLLGQIGDEFADLFSAAKKLYDSVLLSGILTVIDLSTKAPLSASMIQRYDEHREDLKQLKQFVKASLPEKYQEIFADSSKDGYAGYIEGKTNQEAFYKYLSKLLTKQEDSENFLEKIKNEDFLRKQRTFDNGSIPHQVHLTELKAIIRRQSEYYPFLKENQDRIEKILTFRIPYYIGPLAREKSDFAWMTRKTDDSIRPWNFEDLVDKEKSAEAFIHRMTNNDFYLPEEKVLPKHSLIYEKFTVYNELTKVRYKNEQGETYFFDSNIKQEIFDGVFKEHRKVSKKKLLDFLAKEYEEFRIVDVIGLDKENKAFNASLGTYHDLEKILDKDFLDNPDNESILEDIVQTLTLFEDREMIKKRLENYKDLFTESQLKKLYRRHYTGWGRLSAKLINGIRDKESQKTILDYLIDDGRSNRNFMQLINDDGLSFKSIISKAQAGSHSDNLKEVVGELAGSPAIKKGILQSLKIVDELVKVMGYEPEQIVVEMARENQTTNQGRRNSRQRYKLLDDGVKNLASDLNGNILKEYPTDNQALQNERLFLYYLQNGRDMYTGEALDIDNLSQYDIDHIIPQAFIKDDSIDNRVLVSSAKNRGKSDDVPSLEIVKDCKVFWKKLLDAKLMSQRKYDNLTKAERGGLTSDDKARFIQRQLVETRQITKHVARILDERFNNELDSKGRRIRKVKIVTLKSNLVSNFRKEFGFYKIREVNNYHHAHDAYLNAVVAKAILTKYPQLEPEFVYGDYPKYNSYKTRKSATEKLFFYSNIMNFFKTKVTLADGTVVVKDDIEVNNDTGEIVWDKKKHFATVRKVLSYPQNNIVKKTEIQTGGFSKESILAHGNSDKLIPRKTKDIYLDPKKYGGFDSPIVAYSVLVVADIKKGKAQKLKTVTELLGITIMERSRFEKNPSAFLESKGYLNIRADKLIILPKYSLFELENGRRRLLASAGELQKGNELALPTQFMKFLYLASRYNESKGKPEEIEKKQEFVNQHVSYFDDILQLINDFSKRVILADANLEKINKLYQDNKENISVDELANNIINLFTFTSLGAPAAFKFFDKIVDRKRYTSTKEVLNSTLIHQSITGLYETRIDLGKLGED

SEQ ID NO: 441 - protein, 1377 aa, Streptococcus agalactiae
MNKPYSIGLDIGTNSVGWSIITDDYKVPAKKMRVLGNTDKEYIKKNLIGALLFDGGNTAADRRLKRTARRRYTRRRNRILYLQEIFAEEMSKVDDSFFHRLEDSFLVEEDKRGSKYPIFATMQEEKYYHEKFPTIYHLRKELADKKEKADLRLVYLALAHIIKFRGHFLIEDDRFDVRNTDIQKQYQAFLEIFDTTFENNHLLSQNVDVEAILTDKISKSAKKDRILAQYPNQKSTGIFAEFLKLIVGNQADFKKHFNLEDKTPLQFAKDSYDEDLENLLGQIGDEFADLFSVAKKLYDSVLLSGILTVTDLSTKAPLSASMIQRYDEHHEDLKHLKQFVKASLPENYREVFADSSKDGYAGYIEGKTNQEAFYKYLLKLLTKQEGSEYFLEKIKNEDFLRKQRTFDNGSIPHQVHLTELRAIIRRQSEYYPFLKENQDRIEKILTFRIPYYVGPLAREKSDFAWMTRKTDDSIRPWNFEDLVDKEKSAEAFIHRMTNNDLYLPEEKVLPKHSLIYEKFTVYNELTKVRFLAEGFKDFQFLNRKQKETIFNSLFKEKRKVTEKDIISFLNKVDGYEGIAIKGIEKQFNASLSTYHDLKKILGKDFLDNTDNELILEDIVQTLTLFEDREMIKKCLDIYKDFFTESQLKKLYRRHYTGWGRLSAKLINGIRNKENQKTILDYLIDDGSANRNFMQLINDDDLSFKPIIDKARTGSHSDNLKEVVGELAGSPAIKKGILQSLKIVDELVKVMGYEPEQIVVEMARENQTTAKGLSRSRQRLTTLRESLANLKSNILEEKKPKYVKDQVENHHLSDDRLFLYYLQNGRDMYTKKALDIDNLSQYDIDHIIPQAFIKDDSIDNRVLVSSAKNRGKSDDVPSIEIVKARKMFWKNLLDAKLMSQRKYDNLTKAERGGLTSDDKARFIQRQLVETRQITKHVARILDERFNNEVDNGKKICKVKIVTLKSNLVSNFRKEFGFYKIREVNDYHHAHDAYLNAVVAKAILTKYPQLEPEFVYGMYRQKKLSKIVHEDKEEKYSEATRKMFFYSNLMNMFKRVVRLADGSIVVRPVIETGRYMRKTAWDKKKHFATVRKVLSYPQNNIVKKTEIQTGGFSKESILAHGNSDKLIPRKTKDIYLDPKKYGGFDSPIVAYSVLVVADIKKGKAQKLKTVTELLGITIMERSRFEKNPSAFLESKGYLNIRDDKLMILPKYSLFELENGRRRLLASAGELQKGNELALPTQFMKFLYLASRYNESKGKPEEIEKKQEFVNQHVSYFDDILQLINDFSKRVILADANLEKINKLYQDNKENIPVDELANNIINLFTFTSLGAPAAFKFFDKIVDRKRYTSTKEVLNSTLIHQSITGLYETRIDLGKLGED

SEQ ID NO: 442 - protein, 1370 aa, Streptococcus agalactiae
MNKPYSIGLDIGTNSVGWSIITDDYKVPAKKMRVLGNTDKEYIKKNLIGALLFDGGNTAADRRLKRTARRRYTRRRNRILYLQEIFAEEMSKVDDSFFHRLEDSFLVEEDKRGSKYPIFATMQEEKDYHEKFPTIYHLRKELADKKEKADLRLVYLALAHIIKFRGHFLIEDDRFDVRNTDIQKQYQAFLEIFDTSFENNHLLSQNVDVEAILTDKISKSAKKDRILAQYPNQKSTGIFAEFLKLIVGNQADFKKHFNLEDKTPLQFAKDSYDEDLENLLGQIGDEFADLFSAAKKLYDSVLLSGILTVTDLSTKAPLSASMIQRYDEHREDLKQLKQFVKASLPEKYQEIFADSSKDGYAGYIEGKTNQEAFYKYLSKLLTKQEDSEYFLEKIKNEDFLRKQRTFDNGSIPHQVHLTELKAIIRRQSEYYPFLKENQDKIEKILTFRIPYYVGPLARGNSDFAWMTRKTDDSIRPWNFEDLVDKEKSAEAFIHRMTNNDLYLPEEKVLPKHSLIYEKFTVYNELTKVRYKNEQGETYFFDSNVKQEIFDGVFKEHRKVSKKQLLDFLAKEFEEFRIVDVTGLDKENKAFNASLGTYHDLKKILDKDFLDNPDNESILEDIVQTITLFEDREMIKKRLENYKDLFTESQLKKLYRRHYTGWGRLSAKLINGIRDRESQKTILDYLISDGRANRNFMQLINDDGLSFKSIISKAQSGSHSDNLKEVVGELAGSPAIKKGILQSLKIVDELVKVMGYEPEQIVVEMARENQTTNQGRRNSRQRYKLLEDGVKNLASDLNGDILKEYPTDNQALQNERLFLYYLQNGRDMYTGEALDIDNLSQYDIDHIVPQAFIKDDSIDNRVLVSSAKNRGKSDDVPSIDIVKARKAFWKKLLDAKLISQRKYDNLTKAERGGLTPDDKAGFIQRQLVETRQITKHVARILDERFNNKVDDNNKPIRKVKIVTLKSNLVSNFRKEFGFYKIREVNNYHHAHDAYLNAVVAKAILTKYPQLEPEFVYGDYPKYNSYKTRKSATEKLFFYSNIMNFFKTKVTLADETVVVKDDIEVNNETGEIAWDKKKHFATVRKVLSYPQVNIVKKTEVQTGGFSKESILAHSNSDKLIPRKTKDIYLDPKKYGGFDSPIVAYSVLVLADIKKGKAQKLKTVKELIGITIMERERFEKNPSAFLESKGYLNIRTDKLIILPKYSLFELENGRRRLLASAGELQKGNELALPTQYMKFLYLASRYNESKGKPEEIEKKQEFVNQHVSYFDDILQLINDFSKRVILADANLEKINKLYSDNKDNTPVDELAKNIINLFTFTSLGAPAAFKFFDKSVDRKRYTSTKEVLDSTLIHQSITGLYETRIDLGKLGED

SEQ ID NO: 443 - protein, 1370 aa, Streptococcus agalactiae
  Streptococcus agalactiae STIR-CD-17
MNKPYSIGLDIGTNSVGWSIITDDYKVPAKKMRVLGNTDKEYIKKNLIGALLFDGGNTAADRRLKRTARRRYTRRRNRILYLQEIFAEEMSKVDDSFFHRLEDSFLVEEDKRGSKYPIFATMQEEKDYHEKFPTIYHLRKELADKKEKADLRLVYLALAHIIKFRGHFLIEDDRFDVRNTDIQKQYQAFLEIFDTSFENNHLLSQNVDVEAILTDKISKSAKKDRILAQYPNQKSTGIFAEFLKLIVGNQADFKKHFNLEDKTPLQFAKDSYDEDLENLLGQIGDEFADLFSAAKKLYDSVLLSGILTVTDLSTKAPLSAYMIQRYDEHREDLKQLKQFVKASLPEKYQEIFADSSKDGYAGYIEGKTNQEAFYKYLSKLLTKQEDSEYFLEKIKNEDFLRKQRTFDNGSIPHQVHLTELKAIIRRQSEYYPFLKENQDKIEKILTFRIPYYVGPLARGNSDFAWMTRKTDDSIRPWNFEDLVDKEKSAEAFIHRMTNNDLYLPEEKVLPKHSLIYEKFTVYNELTKVRYKNEQGETYFFDSNVKQEIFDGVFKEHRKVSKKQLLDFLAKEFEEFRIVDVTGLDKENKAFNASLGTYHDLKKILDKDFLDNPDNESILEDIVQTITLFEDREMIKKRLENYKDLFTESQLKKLYRRHYTGWGRLSAKLINGIRDRESQKTILDYLISDGRANRNFMQLINDDGLSFKSIISKAQSGSHSDNLKEVVGELAGSPAIKKGILQSLKIVDELVKVMGYEPEQIVVEMARENQTTNQGRRNSRQRYKLLEDGVKNLASDLNGDILKEYPTDNQALQNERLFLYYLQNGRDMYTGEALDIDNLSQYDIDHIVPQAFIKDDSIDNRVLVSSAKNRGKSDDVPSIDIVKARKAFWKKLLDAKLISQRKYDNLTKAERGGLTPDDKAGFIQRQLVETRQITKHVARILDERFNNKVDDNNKPIRKVKIVTLKSNLVSNFRKEFGFYKIREVNNYHHAHDAYLNAVVAKAILTKYPQLEPEFVYGDYPKYNSYKTRKSATEKLFFYSNIMNFFKTKVTLADETVVVKDDIEVNNETGEIAWDKKKHFATVRKVLSYPQVNIVKKTEVQTGGFSKESILAHSNSDKLIPRKTKDIYLDPKKYGGFDSPIVAYSVLVLADIKKGKAQKLKTVKELIGITIMERERFEKNPSAFLESKGYLNIRTDKLIILPKYSLFELENGRRRLLASAGELQKGNELALPTQYMKFLYLASRYNESKGKPEEIEKKQEFVNQHISYFDDILQLINDFSKRVILADANLEKINKLYSDNKDNTPVDELAKNIINLFTFTSLGAPAAFKFFDKSVDRKRYTSTKEVLDSTLIHQSITGLYETRIDLGKLGED

SEQ ID NO: 444 - protein, 1125 aa, Streptococcus anginosus
  Streptococcus anginosus 1_2_62CV
MNGLVLGLDIGIASVGVGILNKETGEIIHANSRIFPAATADSNVERRGFRQGRRLGRRKKHRSARLNNLFEEFGFITDFSAIPLNLNPYALRVKGLSEELTNEELFIALKNIIKRRGISYLDDASEDGETASNEYGKAVEENRKLLADKTPGQIQLERFEKYGQVRGDFTVVENGENHRLINVFSTSAYKKEAERILRRQQEFNVRISDEFIEAYLTILTGKRKYYHGPGNEKSRTDYGRFRTDGTTLDNIFGILIGKCTFYPDEYRAAKASYTAQEFNLLNDLNNLTVPTETKKLSPEQKRQIVEYARTAKTLGTPTLLKYIAKLVDGSIDDIKGYRIDKSDKPEMHTFDAYRKMRTLDLVNIDALSRETLDDLAHILTLNTESEGILEALNSKMPSTFTKEQIDELIQFRKKNSAVFGKGWHNFSLKLMNELISELYETSEEQMTILTRLGKQRSREISKRTKYIDEKELTEEIYNPVVAKSVRQAIKIINEATKRYGIFDNIVIEMARENNEEDAKKDYIKRQKANQDEKNASMEKAAFQYNGKKELPDSIFHGHKELATKIRLWHQQGERCLYTGKNISIRDLIHNPHQYEIDHILPLSLSFDDGLANKVLVLATANQEKGQRTPFQAIDSMDDAWSYREFKQYVRNSKSLSNKKKDYLLTEEDISKIEVKQKFIERNLVDTRYSSRVVLNTLQEFYKTNDFDTKISVVRGQFTSQLRRKWKIEKSRDTYHHHAVDALIIAASSQLRLWKKQNNPLISYKEGQFVDPETGEILSLTDDEYKELVFRPPYDYFVDTLKSKSFEDSILFSYQVDSKYNRKISDATIYGTRKAQLGKDKQEETYVLGKIKDIYSQKGYEDFIKRYNKDETQFLIYHKDPQTFEKVIEEILKTYPDKELNEKGKEIPCNPFEKYRQENGPIRKYSKKGKGPEIKSLKYYDNKLGNHIDITPVNSQNQVVLQSLKPWRTDVYFNPRTSKYELMGLKYSDLRFEKGSGSYGISPEKYNKVKAKEGVNEDSEFKFTLYKNDLILIKDTETGEQQLFRYGSRNDTSKHYVELKPYEKAKFEGNQQLMNLLGTVAKGGQCLKGINKPNLSIYKVKTDVLGNKYFIKKEGDQPQLNFKKKF

SEQ ID NO: 445 - protein, 1345 aa, Streptococcus anginosus
  Streptococcus anginosus F0211
MDQKYSIGLDIGTNSVGWAVVTDDYKVPAKKMKVLGNTDKQSIKKNLLGALLFDSGETAEATRLKRTARRRYTRRRNRLRYLQEIFAEEMNKVDENFFQRLDDSFLVDEDKRGERHPIFGNIAAEVKYHDDFPTIYHLRKHLADISQKADLRLVYLALAHMIKFRGHFLIEGQLKAENTNVQALFKDFVEVYDKTVEESHLSEMTVDALSILTEKVSKSRRLENLIAHYPAEKKNTLFGNLIALSLGLQPNFKTNFQLSEDAKLQFSKDTYEEDLEGLLGEIGDEYADLFASAKNLYDAILLSGILTVDDNSTKAPLSASMVKRYEEHQKDLKKLKDFIKVNAPDQYNAIFKDKNKKGYAGYIENGVKQDEFYKYLKGILLQINGSGDFLDKIDREDFLRKQRTFDNGSIPHQIHLQEMHAILRRQEEHYPFLKENQDKIEKILTFRIPYYVGPLARKGSRFAWAEYKADEKITPWNFDDILDKEKSAEKFITRMTLNDLYLPEEKVLPKHSLLYETFTVYNELTKVKYVNEQGEAKFFDANMKQEIFDHVFKENRKVTKDKLLNYLNKEFEEFRIVNLTGLDKENKAFNSSLGTYHDLRKILDKSFLDDKANEKTIEDIIQTLTLFEDREMIRQRLQKYSDIFTKAQLKKLERRHYTGWGRLSYKLINGIRNKENKKTILDYLIDDGYANRNFMQLINDDALSFKEEIARAQIIGDVDDIANVVHDLPGSPAIKKGILQSVKIVDELVKVMGHNPANIIIEMARENQMTDKGRRNSQQRLKLLQDSLKNLDNPVNIKNVENQQLQNDRLFLYYIQNGKDMYTGETLDINNLSQYDIDHIIPQAFIKDNSLDNRVLTRSDKNRGKSDDVPSIEVVHEMKSFWSKLLSVKLITQRKFDNLTKAERGGLTEEDKAGFIKRQLVETRQITKHVAQILDERFNTEFDGNKRRIRNVKIITLKSNLVSNFRKEFELYKVREINDYHHAHDAYLNAVVGNALLLKYPQLEPEFVYGEYPKYNSYRSRKSATEKFLFYSNILRFFKKEDIQTNEDGEIAWNKEKHIKILRKVLSYPQVNIVKKTEEQTGGFSKESILPKGESDKLIPRKTKNSYWNPKKYGGFDSPVVAYSILVFADVEKGKSKKLRKVQDMVGITIMEKKRFEKHPVDFLEQRGYRNVRLEKIIKLPKYSLFELENKRRRLLASARELQKGNELVIPQRFTTLLYHSYQIEKNYEPEHREYVEKHKDEFKELLEYISVFSRKYVLADNNLTKIEMLFSKNKDAEVSSLAKSFISLLTFTAFGAPAAFNFFGENIDRKRYTSVTECLNATLIHQSITGLYETRIDLSKLGED

SEQ ID NO: 446 - protein, 1386 aa, Streptococcus anginosus
  Streptococcus anginosus SK1138
MNQKYSIGLDIGTNSVGWAVITDDYKVPAKKMKVLGNTDKQSIKKNLLGALLFDSGETAEATRLKRTARRRYTRRRNRLRYLQEIFAEEMMQVDESFFQRLDDSFLVDEDKRGERHPIFGNIAAEVKYHDEFPTIYHLRKHLADISQKADLRLVYLALAHMIKFRGHFLIEGQLKAENTNVQALFKDFVEVYDKTVEESHLSEITVDALSILTEKVSKSRRLENLIAHYPAEKKNTLFGNLIALFLGLQPNFKTNFQLSEDAKLQFSKDTYEEDLEGLLGEVGDEYADLFASAKNLYDAILLSGILTVDDNSTKAPLSASMVKRYEEHQKDLKKFEDFIKVNALDQYNAIFKDKNKKGYAGYIESGVKQDEFYKYLKGILLQINGSGDFLDKIDREDFLRKQRTFDNGSIPHQIHLQEMHAILRRQGEHYPFLKENQDKIEKILTFRIPYYVGPLARKGSRFAWAEYKADEKITPWNFDDILDKEKSAEKFITRMTLNDLYLPEEKVLPKHSLLYETFTVYNELTKVKYVNEQGEAKFFDANMKQEIFDHVFKENRKVTKDKLLNYLNKEFEEFRIVNLTGLDKENKVFNSSLGTYHDLRKILNKSFLDNKENAQIIEDIIQTLTLFEDREMIRQRLQKYSDIFTKAQLKKLERRHYTGWGRLSYKLINGIRNKENKKTILDYLIDDGYANRNFMQLINDDALSFKEEIAKAQIIGDVDDIANVVHDLPGSPAIKKGILQSVKIVDELVKVMGHNPANIIIEMARENQTTDRGRRNSQQRLKLLQDSLKNLDNPVNIKNVENQQLQNDRLFLYYIQNGKDMYTGETLDINNLSQYDIDHIIPQAYIKDDSFDNRVLTSSSENRGKSDNVPSIEVVCARKADWMRLRKAGLISQRKFDNLTKAERGGLTENDKAGFIKRQLVETRQITKHVAQVLDARFNAKHDENKKVIRDVKIITLKSNLVSQFRKDFKFYKVREINDYHHAHDAYLNAVIGTALLKKYPKLASEFVYGEFKKYDVRKFIAKSDKEIGKATAKYFFYSNLMNFFKKEVKFADGTVVERPDIETSEDGEIAWNKQTDFKIVRKVLSYPQVNIVKKTEVQTHGLDRGKPRGLFNANPSPKPKPDSSENLVGVKRNLDPKKYGGYAGISNSYAVLVKAIIEKGVKKKETMVLEFQGISILDRITFEKDKRAFLLGKGYKDIKKIIELPKYSLFELKDGSRRMLASILSTNNKRGEIHKGNELFVPQKFTTLLYHAKRINNPINKDHIEYVKKHRDDFKELLNYVLEFNEKYVGATKNGERLKEAVADFDSKSNEEICTSFLGAVNSKNAGLFELTSLGSASDFEFLGVKIPRYRDYTPSSLLKDSTLIHQSITGLYETRIDLSKLGED

SEQ ID NO: 447 - protein, 1396 aa, Streptococcus anginosus
  Streptococcus anginosus SK52 = DSM 20563
MTKPYSIGLDIGTNSVGWAVITDDYKVPAKKMKVLGNTNRDYIKKNLLGALLFDGGETAEGRRLKRTARRRYTRRKNRLRYLQEIFAEEMMQVDESFFQRLDDSFLVEEDKQGSKYPIFGTLKEEKEYHKKFKTIYHLREELANSKEKADLRLVYLALAHMIKFRGHFLYEGDLKAENTDVQALFKDFVEEYDKTIEESHLSEITVDALSILTEKVSKSSRLENLIAHYPTEKKNTLFGNLIALSLGLQANFKTNFQLSEDAKLQFSKDTYEEDLEGLLGEVGDEYADLFVSAKNLYDAILLSGILTVDDNSTKAPLSASMVKRYKEHKEELAAFKRFIKEKLPKKYEEIFKDDTKNGYAGYVGADKKLRKRSGKLATEEEFYKYVKGILNKVEGADYFLDKIDREDFLRKQRTFDNGSIPHQIHLQEMHAILRRQGEHYPFLKENQDKIEKILTFRIPYYVGPLARKGSRFAWAEYKADEKITPWNFDDILDKEKSAEKFITRMTLNDLYLPEEKVLPKHSPLYETFTVYNELTKVKYVNEQGEAKFFDTNMKQEIFDHVFKENRKVTKDKLLNYLNKEFEEFRIVNLTGLDKENKAFNASLGTYHDLRKILDKSFLDDKVNEKIIEDIIQTLTLFEDREMIRQRLQKYSDIFTTQQLKELERRHYTGWGRLSYKLINGIRNKENKKTILDYLIDDGYANRNFMQLINDDALSFKEEIARAQIIGDVDDIANVVHDLPGSPAIKKGILQSVKIVDELVKVMGHNPTNIIIEMARENQTTDKGRRNSQQRLKLLQDSLKNLDNPVNIKNVENQQLQNDRLFLYYIQNGKDMYTGETLDINNLSQYDIDHIIPQAFIKDNSLDNRVLTRSDKNRGKSDDVPSIEVVHEMKSFWSKLLSVKLITQRKFDNLTKAERGGLTENDKAGFIKRQLVETRQITKHVAQVLDARFNAKHDENKKVIRDVKIITLKSNLVSQFRKDFKFYKVREINDYHHAHDAYLNAVIGTALLKKYPKLASEFVYGEFKKYDVRKFIAKSDKEIGKATAKYFFYSNLMNFFKKEVKFADGTVVERPDIETSEDGEIAWNKQTDFKIVRKVLSYPQVNIVKKTEVQTHGLDRGKPRGLFNANPSPKPKPDSSENLVGIKRNLDPKKYGGYAGISNSYAVLVKAIIEKGVKKKETMVLEFQGISILDRITFEKDKRAFLLGKGYKDIKKIIELPKYSLFELKDGSRRMLASILSTNNKRGEIHKGNELFVPQKFTTLLYHAKRINNPINKDHIEYVKKHRDDFKELLNYVLEFNEKYVGATKNGERLKEAVADFDSKSNEEICTSFLGAVNSKNAGLFELTSLGSASDFEFLGVKIPRYRDYTPSSLLKDSILIHQSITGLYETRIDLSKLGED

SEQ ID NO: 448 - protein, 1373 aa, Streptococcus bovis
  Streptococcus bovis ATCC 700338
MTKKNYSIGLDIGTNSVGWAVITDDYKVPAKKMKVLGNTDKKYIKKNLLGALLFDSGETAEATRLKRTARRRYTRRKNRLRYLQEIFAEEMTKVDESFFQRLDESFLRWDDDNKKLGRYPIFGNKADVVKYHQEFPTIYHLRKHLADSSEKADLRLVYLALAHMIKFRGHFLIEGELNAENTDVQKIFADFVGVYDRTFDDSHLSEITVDAASILTEKISKSRRLENLIKYYPTEKKNTLFGNLIALALGLQPNFKMNFKLSEDAKLQFSKDSYEEDLGELLGKIGDDYADLFTSAKNLYDAILLSGILIVDDNSTKAPLSASMIKRYVEHQEDLEKLKEFIKANKSELYHDIFKDKNKNGYAGYIENGVKQDEFYKYLKNTLSKIAGSDYFLDKIEREDFLRKQRTFDNGSIPHQIHLQEMHAILRRQGDYYPFLKENQDRIEKILTFRIPYYVGPLARKDSRFSWAEYHSDEKITPWNFDKVIDKEKSAEKFITRMTLNDLYLPEEKVLPKHSHVYETYAVYNELTKIKYVNEQGKDSFFDSNMKQEIFDHVFKENRKVTKEKLLNYLNKEFPEYRIKDLIGLDKENKSFNASLGTYHDLKKILDKAFLDDKVNEEVIEDIIKTLTLFEDKDMIHERLQKYSDIFTADQLKKLERRHYTGWGRLSYKLINGIRNKENNKTILDYLIDDGSANRNFMQLINDDTLPFKQIIQKSQVVGDVDDIEAVVHDLPGSPAIKKGILQSVKIVDELVKVMGDNPDNIVIEMARENQTTNRGRSQSQQRLKKLQNSLKELGSNILNEEKPSYIEDKVENSHLQNDQLFLYYIQNGKDMYTGDELDIDHLSDYDIDHIIPQAFIKDDSIDNRVLTSSAKNRGKSDDVPSLDIVRARKAEWVRLYKSGLISKRKFDNLTKAERGGLTEADKAGFIKRQLVETRQITKHVAQILDARFNTESDENDKVIRDVKVITLKSNLVSQFRKDFEFYKVREINDYHHAHDAYLNAVVGTALLKKYPKLASEFVYGEYKKYDIRKFITNSSDKATAKYFFYSNLMNFFKRVIRYSNGKVIVRPVVEYSKDTEDIAWDKKSNFRTICKVLSYPQVNIVKKVETQTGGFSKESILPKGDSDKLIPRKTKKAYWDTKKYGGFDSPTVAYSVFVVADVEKGKAKKLKTVKELVGISIMERSFFEENPVEFLENKGYHNIREDKLIKLPKYSLFEFEGGKRRLLASASELQKGNEMVIPGHLVKLLYHAQRINSFNSTKYLDYVSAHKKEFEKVLSCVEDFANLYVDVEKNLSKIRAVADSMDNFSIEEISNSFINLLTLTALGAPADFNFLGEKIPRKRYTSTKECLNATLIHQSITGLYETRIDLSKIGEE

SEQ ID NO: 449 - protein, 1375 aa, Streptococcus canis
  Streptococcus canis FSL Z3-227
MEKKYSIGLDIGTNSVGWAVITDDYKVPSKKFKVLGNTNRKSIKKNLMGALLFDSGETAEATRLKRTARRRYTRRKNRIRYLQEIFANEMAKLDDSFFQRLEESFLVEEDKKNERHPIFGNLADEVAYHRNYPTIYHLRKKLADSPEKADLRLIYLALAHIIKFRGHFLIEGKLNAENSDVAKLFYQLIQTYNQLFEESPLDEIEVDAKGILSARLSKSKRLEKLIAVFPNEKKNGLFGNIIALALGLTPNFKSNFDLTEDAKLQLSKDTYDDDLDELLGQIGDQYADLFSAAKNLSDAILLSDILRSNSEVTKAPLSASMVKRYDEHHQDLALLKTLVRQQFPEKYAEIFKDDTKNGYAGYVGIGIKHRKRTTKLATQEEFYKFIKPILEKMDGAEELLAKLNRDDLLRKQRTFDNGSIPHQIHLKELHAILRRQEEFYPFLKENREKIEKILTFRIPYYVGPLARGNSRFAWLTRKSEEAITPWNFEEVVDKGASAQSFIERMTNFDEQLPNKKVLPKHSLLYEYFTVYNELTKVKYVTERMRKPEFLSGEQKKAIVDLLFKTNRKVTVKQLKEDYFKKIECFDSVEIIGVEDRFNASLGTYHDLLKIIKDKDFLDNEENEDILEDIVLTLTLFEDREMIEERLKTYAHLFDDKVMKQLKRRHYTGWGRLSRKMINGIRDKQSGKTILDFLKSDGFSNRNFMQLIHDDSLTFKEEIEKAQVSGQGDSLHEQIADLAGSPAIKKGILQTVKIVDELVKVMGHKPENIVIEMARENQTTTKGLQQSRERKKRIEEGIKELESQILKENPVENTQLQNEKLYLYYLQNGRDMYVDQELDINRLSDYDVDHIVPQSFIKDDSIDNKVLTRSVENRGKSDNVPSEEVVKKMKNYWRQLLNAKLITQRKFDNLTKAERGGLSEADKAGFIKRQLVETRQITKHVARILDSRMNTKRDKNDKPIREVKVITLKSKLVSDFRKDFQLYKVRDINNYHHAHDAYLNAVVGTALIKKYPKLESEFVYGDYKVYDVRKMIAKSEQEIGKATAKRFFYSNIMNFFKTEVKLANGEIRKRPLIETNGETGEVVWNKEKDFATVRKVLAMPQVNIVKKTEVQTGGFSKESILSKRESAKLIPRKKGWDTRKYGGFGSPTVAYSILVVAKVEKGKAKKLKSVKVLVGITIMEKGSYEKDPIGFLEAKGYKDIKKELIFKLPKYSLFELENGRRRMLASATELQKANELVLPQHLVRLLYYTQNISATTGSNNLGYIEQHREEFKEIFEKIIDFSEKYILKNKVNSNLKSSFDEQFAVSDSILLSNSFVSLLKYTSFGASGGFTFLDLDVKQGRLRYQTVTEVLDATLIYQSITGLYETRTDLSQLGGD

SEQ ID NO: 450 - protein, 1345 aa, Streptococcus constellatus
  Streptococcus constellatus subsp. constellatus SK53
MGKPYSIGLDIGTNSVGWAVVTDDYKVPAKKMKVLGNTDKQSIKKNLLGALLFDSGETAEATRLKRTARRRYTRRKNRLRYLQEIFTGEMNKVDENFFQRLDDSFLVDEDKRGEHHPIFGNIAAEVKYHDDFPTIYHLRRHLADTSKKADLRLVYLALAHMIKFRGHFLYEGDLKAENTDVQALFKDFVEEYDKTIEESHLSEITVDALSILTEKVSKSSRLENLIAHYPTEKKNTLFGNLIALSLDLHPNFKTNFQLSEDAKLQFSKDTYEEDLEGFLGEVGDEYADLFASAKNLYDAILLSGILTVDDNSTKAPLSASMVKRYEEHQKDLKKLKDFIKVNAPDQYNAIFKDKNKKGYASYIESGVKQDEFYKYLKGILLKINGSGDFLDKIDREDFLRKQRTFDNGSIPHQIHLQEMHAILRRQGEHYPFLKENQDKIEKILTFRIPYYVGPLARKGSRFAWAEYKADEKITPWNFDDILDKEKSAEKFITRMTLNDLYLPEEKVLPKHSPLYEAFTVYNELTKVKYVNEQGEAKFFDTNMKQEIFDHVFKENRKVTKDKLLNYLNKEFEEFRIVNLTGLDKENKAFNSSLGTYHDLRKILDKSFLDDKANEKTIEDIIQTLTLFEDREMIRQRLQKYSDIFTKAQLKKLERRHYTGWGRLSYKLINGIRNKENKKTILDYLIDDGYANRNFMQLINDDALSFKEEIARAQIIDDVDDIANVVHDLPGSPAIKKGILQSVKIVDELVKVMGHNPANIIIEMARENQTTDKGRRNSQQRLKLLQDSLKNLDNPVNIKNVENQQLQNDRLFLYYIQNGKDMYTGETLDINNLSQYDIDHIIPQAFIKDNSLDNRVLTRSDKNRGKSDDVPSIEVVHEMKSFWSKLLSVKLITQRKFDNLTKAERGGLTEEDKAGFIKRQLVETRQITKHVAQILDERFNTEFDGNKRRIRNVKIITLKSNLVSNFRKEFELYKVREINDYHHAHDAYLNAVVGNALLLKYPQLEPEFVYGEYPKYNSYRSRKSATEKFLFYSNILRFFKKEDIQTNEDGEIAWNKEKHIKILRKVLSYPQVNIVKKTEEQTGGFSKESILPKGESDKLIPRKTKNSYWDPKKYGGFDSPVVAYSILVFADVEKGKSKKLRKVQDMVGITIMEKKRFEKNPVDFLEQRGYRNVRLEKIIKLPKYSLFELENKRRRLLASAKELQKGNELVIPQRFTTLLYHSYRIEKDYEPEHREYVEKHKDEFKELLEYISVFSRKYVLADNNLTKIEMLFSKNKDAEVSSLAKSFISLLTFTAFGAPAAFNFFGENIDRKRYTSVTECLNATLIHQSITGLYETRIDLSKLGED

SEQ ID NO: 451 - protein, 1371 aa, Streptococcus dysgalactiae
MDKKYSIGLDIGTNSVGWAVITDDYKVPSKKFKVLGNTDRHSIKKNLIGALLFDSGETAEATRLKRTARRRYTRRKNRIRYLQEIFSSEMSKVDDSFFHRLEESFLVEEDKKHERHPIFGNIVDEVAYHEKYPTIYHLRKKLADSTDKADLRLIYLALAHMIKFRGHFLIEGDLNPDNSDMDKLFIQLVQTYNQLFEENPINASRVDAKAILSARLSKSRRLENLIAQLPGEKRNGLFGNLIALSLGLTPNFKSNFDLAEDAKLQLSKDTYDDDLDNLLAQIGDQYADLFLAAKNLSDAILLSDILRVNSEITKAPLSASMIKRYDEHHQDLTLLKALVRQQLPEKYKEIFFDQSKNGYAGYIDGGASQEEFYKFIKPILEKMDGTEELLAKLNREDLLRKQRTFDNGSIPHQIHLGELHAILRRQEDFYPFLKDNREKIEKILTFRIPYYVGPLARGNSRFAWMTRKSEETITPWNFEEVVDKGASAQSFIERMTNFDKNLPNEKVLPKHSLLYEYFTVYNELTKVKYVTEGMRKPEFLSGKQKEAIVDLLFKTNRKVTVKQLKEDYFKKIECFDSVEISGVEDRFNASLGTYHDLLKIIKDKDFLDNEENEDILEDIVLTLTLFEDKEMIEERLKKYANLFDDKVMKQLKRRHYTGWGRLSRKLINGIRDKQSGKTILDFLKSDGFANRNFMQLINDDSLTFKEAIQKAQVSGQGHSLHEQIANLAGSPAIKKGILQSVKVVDELVKVMGHKPENIVIEMARENQTTQKGQKNSRERMKRIEEGIKELGSQILKEHPVENTQLQNEKLYLYYLQNGRDMYVDQELDINRLSDYDVDHIVPQSFIKDDSIDNKVLTRSDKNRGKSDNVPSEEVVKKMKNYWRQLLNAKLITQRKFDNLTKAERGGLSELDKAGFIKRQLVETRQITKHVAQILDSRMNTKYDENDKLIREVKVITLKSKLVSDFRKDFQFYKVREINNYHHAHDAYLNAVVGTALIKKYPKLESEFVYGDYKVYDVRKMIAKSEQEIGKATAKRFFYSNIMNFFKTEITLANGEIRKRPLIETNEETGEIVWDKGRDFATVRKVLSMPQVNIVKKTEVQTGALTNESIYARGSFDKLISRKHRFESSKYGGFGSPTVTYSVLVVAKSKVQDGKVKKIKTGKELIGITLLDKLVFEKNPLKFIEDKGYGNVQIDKCIKLPKYSLFEFENGTRRMLASVMANNNSRGDLQKANEMFLPAKLVTLLYHAHKIESSKELEHEAYILDHYNDLYQLLSYIERFASLYVDVEKNISKVKELFSNIESYSISEICSSVINLLTLTASGAPADFKFLGTTIPRKRYGSPQSILSSTLIHQSITGLYETRIDLSQLGGD

SEQ ID NO: 452 - protein, 1371 aa, Streptococcus dysgalactiae
MDKKYSIGLDIGTNSVGWAVITDDYKVPSKKFKVLGNTDRHSIKKNLIGALLFDSGETAEATRLKRTARRRYTRRKNRIRYLQEIFSSEMSKVDDSFFHRLEESFLVEEDKKHERHPIFGNIVDEVAYHEKYPTIYHLRKKLADSTDKADLRLIYLALAHMIKFRGHFLIEGDLNPDNSDVDKLFIQLVQTYNQLFEEKPINASGVDAKAILSARLSKSKRLENLIAQLPGEKKNGLFGNLIALSLGLTPNFKSNFDLAEDAKLQLSKDTYDDDLDNLLAQIGNQYADLFLAAKNLSDAILLSDILRVNSEITKAPLSASMIKRYDEHHQDLTLLKALVRQQLPEKYKEIFFDQSKNGYAGYIDGGASQEEFYKFIKPILEKMDGTEELLAKLNREDLLRKQRTFDNGSIPHQIHLGELHAILRRQEDFYPFLKDNREKIEKILTFRIPYYVGPLARGNSRFAWMTRKSEETITPWNFEEVVDKGASAQSFIERMTNFDKNLPNEKVLPKHSLLYEYFTVYNELTKVKYVTEGMRKPEFLSGKQKEAIVDLLFKTNRKVTVKQLKEDYFKKIECFDSVEISGVEDRFNASLGTYHDLLKIIKDKDFLDNEENEDILEDIVLTLTLFEDKEMIEERLKKYANLFDDKVMKQLKRRHYTGWGRLSRKLINGIRDKQSGKTILDFLKSDGFANRNFMQLINDDSLTFKEAIQKAQVSGQGHSLHEQIANLAGSPAIKKGILQSVKVVDELVKVMGHKPENIVIEMARENQTTQKGQKNSRERMKRIEEGIKELGSQILKEHPVENTQLQNEKLYLYYLQNGRDMYVDQELDINRLSDYDVDHIVPQSFIKDDSIDNKVLTRSDKNRGKSDNVPSEEVVKKMKNYWRQLLNAKLITQRKFDNLTKAERGGLSELDKAGFIKRQLVETRQITKHVAQILDSRMNTKYDENDKLIREVKVITLKSKLVSDFRKDFQFYKVREINNYHHAHDAYLNAVVGTALIKKYPKLESEFVYGDYKVYDVRKMIAKSEQEIGKATAKRFFYSNIMNFFKTEITLANGEIRKRPLIETNEETGEIVWDKGRDFATVRKVLSMPQVNIVKKTEVQTGALTNESIYARGSFDKLISRKHRFESSKYGGFGSPTVTYSVLVVAKSKVQDGKVKKIKTGKELIGITLLDKLVFEKNPLKFIEDKGYGNVQIDKCIKLPKYSLFEFENGTRRMLASVMANNNSRGDLQKANEMFLPAKLVTLLYHAHKIESSKELEHEAYILDHYNDLYQLLSYIERFASLYVDVEKNISKVKELFSNIESYSISEICSSVINLLTLTASGAPADFKFLGTTIPRKRYGSPQSILSSTLIHQSITGLYETRIDLSQLGGD

SEQ ID NO: 453 - protein, 1371 aa, Streptococcus dysgalactiae
MDKKYSIGLDIGTNSVGWAVITDDYKVPSKKFKVLGNTDRHSIKKNLIGALLFDSGETAEATRLKRTARRRYTRRKNRIRYLQEIFSSEMSKVDDSFFHRLEESFLVEEDKKHERHPIFGNIVDEVAYHEKYPTIYHLRKKLADSTDKADLRLIYLALAHMIKFRGHFLIEGDLNPDNSDMDKLFIQLVQTYNQLFEENPINASRVDAKAILSARLSKSRRLENLIAQLPGEKRNGLFGNLIALSLGLTPNFKSNFDLAEDAKLQLSKDTYDDDLDNLLAQIGDQYADLFLAAKNLSDAILLSDILRVNSEITKAPLSASMIKRYDEHHQDLTLLKALVRQQLPEKYKEIFFDQSKNGYAGYIDGGASQEEFYKFIKPILEKMDGTEELLAKLNREDLLRKQRTFDNGSIPHQIHLGELHAILRRQEDFYPFLKDNREKIEKILTFRIPYYVGPLARGNSRFAWMTRKSEETITPWNFEEVVDKGASAQSFIERMTNFDKNLPNEKVLPKHSLLYEYFTVYNELTKVKYVTEGMRKPEFLSGKQKEAIVDLLFKTNRKVTVKQLKEDYFKKIECFDSVEISGVEDRFNASLGTYHDLLKIIKDKDFLDNEENEDILEDIVLTLTLFEDKEMIEERLKKYANLFDDKVMKQLKRRHYTGWGRLSRKLINGIRDKQSGKTILDFLKSDGFANRNFMQLINDDSLTFKEAIQKAQVSGQGHSLHEQIANLAGSPAIKKGILQSVKVVDELVKVMGHKPENIVIEMARENQTTQKGQKNSRERMKRIEEGIKELGSQILKEHPVENTQLQNEKLYLYYLQNGRDMYVDQELDINRLSDYDVDHIVPQSFIKDDSIDNKILTRSDKNRGKSDNVPSEEVVKKMKNYWRQLLNAKLITQRKFDNLTKAERGGLSELDKAGFIKRQLVETRQITKHVAQILDSRMNTKYDENDKLIREVKVITLKSKLVSDFRKDFQFYKVREINNYHHAHDAYLNAVVGTALIKKYTKLESEFVYGDYKVYDVRKMIAKSEQEIGKATAKRFFYSNIMNFFKTEITLANGEIRKRPLIETNEETGEIVWDKGRDFATVRKVLSMPQVNIVKKTEVQTGALTNESIYARGSFDKLISRKHRFESSKYGGFGSPTVTYSVLVVAKSKVQDGKVKKIKTGKELIGMTLLDKLVFEKNPLKFIEDKGYGNVQIDKCIKLPKYSLFEFENGTRRMLASVMANNNSRGDLQKANEMFLPAKLVTLLYHAHKIESSKELEHEAYILDHYNDLYQLLSYIERFASLYVDVEKNISKVKELFSNIESYSISEICSSVINLLTLTASGAPADFKFLGTTIPRKRYGSPQSILSSTLIHQSITGLYETRIDLSQLGGD

SEQ ID NO: 454 - protein, 1371 aa, Streptococcus dysgalactiae
MDKKYSIGLDIGTNSVGWAVITDDYKVPSKKFKVLGNTDRHSIKKNLIGALLFDSGETAEATRLKRTARRRYTRRKNRIRYLQEIFSSEMSKVDDSFFHRLEESFLVEEDKKHERHPIFGNIVDEVAYHEKYPTIYHLRKKLADSTDKADLRLIYLALAHMIKFRGHFLIEGDLNPDNSDMDKLFIQLVQTYNQLFEENPINASRVDAKAILSARLSKSRRLENLIAQLPGEKRNGLFGNLIALSLGLTPNFKSNFDLAEDAKLQLSKDTYDDDLDNLLAQIGDQYADLFLAAKNLSDAILLSDILRVNSEITKAPLSASMIKRYDEHHQDLTLLKALVRQQLPEKYKEIFFDQSKNGYAGYIDGGASQEEFYKFIKPILEKMDGTEELLAKLNREDLLRKQRTFDNGSIPHQIHLGELHAILRRQEDFYPFLKDNREKIEKILTFRIPYYVGPLARGNSRFAWMTRKSEETITPWNFEEVVDKGASAQSFIERMTNFDKNLPNEKVLPKHSLLYEYFTVYNELTKVKYVTEGMRKPEFLSGKQKEAIVDLLFKTNRKVTVKQLKEDYFKKIECFDSVEISGVEDRFNASLGTYHDLLKIIKDKDFLDNEENEDILEDIVLTLTLFEDKEMIEERLKTYAHLFDDKVMKQLKRRHYTGWGRLSRKLINGIRDKQSGKTILDFLKSDGFANRNFIQLIHDDSLTFKEAIQKAQVSGQGHSLHEQIANLAGSPAIKKGILQSVKVVDELVKVMGHKPENIVIEMARENQTTQKGQKNSRERMKRIEEGIKELGSQILKEHPVENTQLQNEKLYLYYLQNGRDMYVDQELDINRLSDYDVDHIVPQSFIKDDSIDNKVLTRSDKNRGKSDDVPSEEVVKKMKNYWRQLLNAKLITQRKFDNLTKAERGGLSELDKAGFIKRQLVETRQITKHVAQILDSRMNTKYDENDKLIREVKVITLKSKLVSDFRKDFQFYKVREINNYHHAHDAYLNAVVGTALIKKYPKLESEFVYGDYKVYDVRKMIAKSEQEIGKATAKRFFYSNIMNFFKTEITLANGEIRKRPLIETNEETGEIVWNKGRDFATVRKVLSMPQVNIVKKTEVQTGALTNESIYARGSFDKLISRKHRFESSKYGGFGSPTVTYSVLVVAKSKVQDGKVKKIKTGKELIGITLLDKLVFEKNPLKFIEDKGYGNVQIDKCIKLPKYSLFEFENGTRRMLASVMANNNSRGDLQKANEMFLPAKLVTLLYHAHKIESSKELEHEAYILDHYNDLYQLLSYIERFASLYVDVEKNISKVKELFSNIESYSISEICSSVINLLTLTASGAPADFKFLGTTIPRKRYGSPQSILSSTLIHQSITGLYETRIDLSQLGGD

SEQ ID NO: 455 - protein, 1348 aa, Streptococcus equi
MKKPYTIALDIGTNSVGWVVVTDDYRVPTKKMKVLGNTERKTIKKNLIGALLFDSGDTAEGTRLKRTARRRYTRRKNRLRYLKEIFTEEMAKVDDGFFQRLEDSFYVLEDKEGNKHPIFANLADEVAYHKKYPTIYHLRKELVDNPQKADLRLIYLAVAHIIKFRGHFLIEGTLSSKNNNLQKSFDHLVDTYNLLFEEQRLLTEGINAKELLSAALSKSKRLENLISLIPGQKKTGIFGNIIALSLGLTPNFKANFGLSKDVKLQLAKDTYADDLDSLLAQIGDQYADLFLAAKNLSDAILLSDILTESDEITRAPLSASMVKRYREHHKDLVTLKTLIKDQLPEKYQEIFLDKTKNGYAGYIEGQVSQEEFYKYLKPILARLDGSEPLLLKIDREDFLRKQRTFDNGSIPHQIHLEELHAILRRQEVFYPFLKDNRKKIESLLTFRIPYYVGPLARGHSRFAWVKRKFDGAIRPWNFEEIVDEEASAQIFIEKMTKNDLYLPNEKVLPKHSLLYETFTVYNELTKVKYATEGMTRPQFLSADQKQAIVDLLFKTNRKVTVKQLKENYFKKIECWDSVEITGVEDSFNASLGTYHDLLKIIQDKDFLDNPDNQKIIEDIILTLTLFEDKKMISKRLDQYAHLFDKVVLNKLERHHYTGWGRLSGKLINGIRDKQSGKTILDFLKADGFANRNFMQLIHDSELSFIDEIAKAQVIGKTEYSKDLVGNLAGSPAIKKGISQTIKIVDELVKIMGYLPQQIVIEMARENQTTAQGIKNARQRMRKLEETAKKLGSNILKEHPVDNSQLQNDKRYLYYLQNGKDMYTGDDLDIDYLSSYDIDHIIPQSFIKNNSIDNKVLTSQGANRGKLDNVPSEAIVRKMKGYWQSLLRAGAISKQKFDNLTKAERGGLTQVDKAGFIQRQLVETRQITKHVAQILDSRFNTEFDDHNKRIRKVHIITLKSKLVSDFRKEFGLYKIRDINHYHHAHDAYLNAVVAKAILGKYPQLAPEFVYGDYPKYNSFKERQKATQKMLFYSNILKFFKDQESLHVNSDGEEIWNANKHLPIIKNVLSIPQVNIVKKTEVQTGGFYKESILSKGNSDKLIPRKNNWDTRKYGGFDSPTVAYSVLVIAKMEKGKAKVLKPVKEMVGITIMERTAFEENPVVFLEARGYREIQEHLIIKLPKYSLFELENGRRRLLASASELQKGNELFLPVDYMTFLYLAAHYHELTGSSEDVLRKKYFVDRHLHYFDDIIQMINDFAERHILASSNLEKINHTYHNNSDLPVNERAENIINVFTFVALGAPAAFKFFDATIDRKRYTSTKEVLNATLIHQSVTGLYETRIDLSQLGEN

SEQ ID NO: 456 - protein, 1377 aa, Streptococcus equinus
  Streptococcus equinus ATCC 9812
MEKTYSIGLDIGTNSVGWAVITDDYKVPAKKMKVLGNTDKKYIKKNLLGALLFDSGETAEATRLKRAARRRYTRRKNRLRYLQEIFAKEMAKVDESFFQRLEESFLTDDDKTFDSHPIFGNKAEEDTYHQEFPTIYHLRKHLADSPEKVDLRLVYLALAHMIKFRGHFLIEGQLNAENTDVQKIFADFVGVYDRTFDDSHLSEITVDAASILTEKISKSRRLENLIKQYPTEKKNTLFGNLVALALGLQPNFKTNFKLSEDAKLQFSKDTYDEDLEELLGKIGDDYADLFTAAKNLYDAILLSGILTVDDNSTKAPLSASMIKRYEEHHEDLEKLKTFIKVNNFDKYHEIFKDKSKNGYAGYIENGVKQDIFYKHLKSIISEKNGGQYFLDKIEREDFLRKQRTFDNGSIPYQIHLQEMRTILRRQGEYYPFLKENQAKIEKILTFRIPYYVGPLARKNSRFAWAKYHSDEPITPWNFDEVVDKEKSAEKFITRMTLNDLYLPEEKVLPKHSYVYETFAVYNELTKIKYVNEQGKSFFFDANMKQEIFDHVFKENRKVTKAKLLSYLNNEFEEFRINDLIGLDKDSKSFNASLGTYHDLKKILDKSFLDDKTNEQIIEDIVLTLTLFEDRDMIHERLQKYSDIFTSQQLKKLERRHYTGWGRLSYKLINGIRNKENNKTILDFLIDDGDANRNFMQLINDDSLSFKTTIQEAQVVGDVDDIEAVVHDLPGSPAIKKGILQSVKIVDELVKVMGHNPQNIVIEMARENQITGYGRNRSNQRLKRLQDSLKEFGSDILSKKKPSYVDSKVENSHLQNDRLFLYYIQNGKDMYTGEELDIDHLSDYDIDHIIPQAFIKDNSIDNRVLTSSAKNRGKSDDVPSIEIVRNRKSYWYKLYKSGLISKRKFDNLTKAERGGLTETDKAGFIKRQLVETRQITKHVAQILDARFNTKCDENDKVIRDVKVITLKSSLVSQFRKEFKFYKVREINDYHHAHDAYLNAVVGTALLKKYPKLAPEFVYGEYKKYDVRKLVAKSSDNHSELGKATAKYFFYSNLMNFFKTEVKYADGRVFERPDIETNADGEVVWNKQRDFNIVRKVLSYPQVNIVKKVEVQTGGFSKESILPKGDSDKLIPRKTKKLQWETQKYGGFDSPTVAYSVLVVADVEKGKTRKLKTVKELVGISIMERSSFEENPVSFLEKKGYHNVQEDKLIKLPKYSLFEFEGGRRRLLASATELQKGNEVVLPQYMVNLLYHSQHVNNSHKPEHLNYVKQHKDEFKDIFNLIISIARINILKPKVVDNLINEFTEYGQEDISSLSESFINLLKFISFGAPGAFKFLKLDVKQSNLRYKSTTEALSATLIHQSVTGLYETRIDLSKLGEE

SEQ ID NO: 457 - protein, 1370 aa, Streptococcus gallolyticus
MTKKNYSIGLDIGTNSVGWAVITDDYKVPAKKMKVLGNTDKKYIKKNLLGALLFDSGETAEATRLKRTARRRYTRRKNRLRYLQEIFAEEMTKVDESFFYRLDESFLTTDEKDFERHPIFGNKAEEDAYHQKFPTIYHLRNYLADSSEKADLRLVYLALAHMIKYRGHFLIEGKLNAENTDVQKLFTDFVGVYDRTFDDSHLSEITVDVASTLTEKISKSRRLENLIKYYPTEKKNTLFGNLIALALGLQPNFKMNFKLSEDAKLQFSKDTYEEDLEELLGKIGDDYADLFTSAKNLYDAILLSGILTVDDNSTKAPLSASMIKRYVEHHEDLEKLKEFIKANKSELYHDIFKDKNKNGYAGYIENGVKQDEFYKYLKNTLSKIDGSDYFLDKIEREDFLRKQRTFDNGSIPHQIHLQEMHAILRRQGDYYPFLKEKQDRIEKILTFRIPYYVGPLVRKDSRFAWAEYRSDEKITPWNFDKVIDKEKSAEKFITRMTLNDLYLPEEKVLPKHSHVYETYAVYNELTKIKYVNEQGKESFFDSNMKQEIFDHVFKENRKVTKEKLLNYLNKEFPEYRIKDLIGLDKENKSFNASLGTYHDLKKILDKAFLDDKVNEEVIEDIIKTLTLFEDKDMIHERLQKYSDIFTANQLKKLERRHYTGWGRLSYKLINGIRNKENNKTILDYLIDDGSANRNFMQLINDDTLPFKQIIQKSQVVGDVDDIEAVVHDLPGSPAIKKGILQSVKIVDELVKVMGDNPDNIVIEMARENQTTNRGRSQSQQRLKKLQSSLKELGSNILNEEKPSYIEDKVENSHLQNDQLFLYYIQNGKDMYTGDELDIDHLSDYDIDHIIPQAFIKDDSIDNRVLTSSAKNRGKSDDVPSLDIVRARKAEWVRLYKSGLISKRKFDNLTKAERGGLTEADKAGFIKRQLVETRQITKHVAQILDARFNTEHDENDKVIRDVKVITLKSNLVSQFRKDFEFYKVREINDYHHAHDAYLNAVVGTALLKKYPKLASEFVYGEYKKYDIRKFITNSSDKATAKYFFYSNLMNFFKTKVKYADGTVFERPIIETNADGEIAWNKQIDFEKVRKVLSYPQVNIVKKVETQTGGFSKESILPKGDSDKLIPRKTKKVYWDTKKYGGFDSPTVAYSVFVVADVEKGKAKKLKTVKELVGISIMERSFFEENPVEFLENKGYHNIREDKLIKLPKYSLFEFEGGRRRLLASASELQKGNEMVLPGYLVELLYHAHRADNFNSTEYLNYVSEHKKEFEKVLSCVEDFANLYVDVEKNLSKIRAVADSMDNFSIEEISNSFINLLTLTALGAPADFNFLGEKIPRKRYTSTKECLTATLIHQSITGLYETRIDLSKLGEE

SEQ ID NO: 458 - protein, 1370 aa, Streptococcus gallolyticus; identical to SEQ ID NO: 457
  Streptococcus gallolyticus subsp. gallolyticus TX20005

SEQ ID NO: 459 - protein, 1371 aa, Streptococcus gallolyticus
MTEKNYSIGLDIGTNSVGWAVITDDYKVPAKKMKVLGNTDKKYIKKNLLGALLFDNGETAEATRLKRTARRRYTRRKNRLRYLQEIFAEEMAKVDESFFYRLDESFLTTDDKDFERHPIFGNKADEIKYHQEFPTIYHLRKHLADSHEKADLRLIYLALAHMIKFRGHFLIEGELNAENTDVQKLFEAFVEVYDRTFDDSNLSEITVDASSILTEKFSKSRRLENLIKHYPTEKKNTLFGNLVALALGLQPNFKTSFKLSEDAKLQFSKDTYEEDLEELIGKIGDEYADLFTSAKNLYDAILLSGILTVADNTTKAPLSASMIKRYNEHQVDLKKLKEFIKNNASDKYDEIFNDKDKNGYAGYIENGVKQDEFYKYLKTTLSKIDGSDYFLDKIEREDFLRKQRTFDNGSIPHQIHLQEMHAILRRQGEHYAFLKENQAKIEKILTFRIPYYVGPLARKNSRFAWAEYHSDEKITPWNFDEIIDKEKSAEKFITRMTLNDLYLPEEKVLPKHSLVYETYTVYNELTKVKYVNEQGKSNFFDANMKQEIFEHVFKENRKVTKDKFLNYLNKEFPEYRIQDLIGLDKENKSFNASLGTYHDLKKILDKSFLDDKTNETIIEDIIQTLTLFEDRDMIRQRLQKYSDIFTPQQLKKLERRHYTGWGRLSYKLINGIRNKENGKSILDYLIDDGYANRNFMQLISDDTLPFKQIIKDAQIIGDIDDVTSVVRELPGSPAIKKGILQSVKIVDELVKVMGHNPDNIVIEMARENQTTNRGRNQSQQRLKKLQDSLKELGSNILNEEKPSYIEGKVENNHLQDDRLFLYYIQNGKDMYTGDELDIDHLSDYDIDHIIPQAFIKDDSIDNRVLTSSAKNRGKSDDVPSLDIVHDRKADWIRLYKSGLISKRKFDNLTKAERGGLTENDKAGFIKRQLVETRQITKHVAQILDSRFNTERDENDKVIRNVKVITLKSNLVSQFRKDFKFYKVREINDYHHAHDAYLNAVVGTALLKKYPKLAPEFVYGEYKKYDIRKFITSSGDKATAKYFFYSNLMNFFKRVIRYSNGKVVVRPVIECSKDTGEIAWNKQTDFEKVRRVLSYPQVNIVKKVETQTGGFSKESILPKGNSDKLIPRKTKKFRWDTPKYGGFDSPNIAYSVFVIADVEKGKAKKLKTVKELVGISIMERSSFEENPVVFLEKKGYQNVQEDNLIKLPKYSLFEFEGGRRRLLASASELQKGNEVVLSRHLVELLYHAHRVNSFNNSEHLKYVSEHKKEFGEVLSCVENFAKSYVDVEKNLGKIRAVADKIDTFSIEDISISFVNLLTLTALGAPADFNFLGEKIPRKRYTSTKECLNATLIHQSITGLYETRIDLSKLGEE

SEQ ID NO: 460 - protein, 1130 aa, Streptococcus gallolyticus
MTNGKILGLDIGIASVGVGIIEAKTGKVVHANSRLFSAANAENNAERRGFRGSRRLNRRKKHRVKRVRDLFEKYEIVTDFRNLNLNPYELRVKGLTEQLTNEELFAALRTISKRRGISYLDDAEDDSTGSTDYAKSIDENRRLLKTKTPGQIQLERLEKYGQLRGNFTVYDENGEAHRLINVFSTSDYEKEARKILETQADYNKKITAEFIDDYVEILTQKRKYYHGPGNEKSRTDYGRFRTDGTTLENIFGILIGKCSFYPDEYRASKASYTAQEYNFLNDLNNLKVPTETGKLSTEQKEALVEFAKSTATLGPAKLLKEIAKILDCKVDEIKGYREDDKGKPDLHTFEPYRKLKFNLDSVNIDDLSREVLDKLADILTLNTEREGIEDAIRHNLPNQFTEGQISEIIKVRKSQSTAFNKGWHSFSAKLMNELIPELYATSDEQMTILTRLEKFKVNKKSSKNTKTIDEKEVTDEIYNPVVAKSVRQTIKIINAAVKKYGDFDKIVIEMPRDKNADDEKKFIDKRNKENKKEKDDALKRAAYLYNGTDKLPDEVFHGNKQLETKIRLWYQQGERCLYSGKPIPIQELVHNSNNFEIDHILPLSLSFDDSLANKVLVYAWTNQEKGQKTPYQVIDSMDAAWSFREMKDYVLKQKGLGKKKRDYLLTTENIDKIEVKKKFIERNLVDTRYASRVVLNSLQSALRELGKDTKISVIRGQFTSQLRRKWKIDKSRETYHHHAVDALIIAASSQLKLWEKQDNPMFVDYGNNQVVDKQTGEILSVSDDEYKELVFQPPYQGFVNMISSKGFEDEILFSYQVDSKYNRKVSDATIYSTRKAKIGKDKKEETYVLGKIKDIYSQNGFDTFIKKYNKDKTQFLMYQKDPLTWENVIEVILRDYPTTKKSEDGKNDVKCNPFEEYRRENGLVCKYSKKGKGTPIKSLKYYDKKLGNCIDITPEGSKNEVVLQSLNPWRADVYFNPETLKYELLGLKYSDLSFEKGTGKYHISQEKYDVIKEKEGIGKKSEFKFTLYRNDLILIKDTASGEQEIYRFLSRTMPNVKHYAELKPYDKEKFDNVQELVEALGEADKVGRCIKGLNKSNLSIYKVRTDVLGNKYFVKKEGDKPKLDFKNNKK

SEQ ID NO: 461 - protein, 1136 aa, Streptococcus gordonii
MNGLVLGLDIGIASVGVGILEKDTGKIIHASSRLFPAATADNNVERRSNRQGRRLNRRKKHRSVRLQDLFEGYGLLTDFSKVSMNLNPYQLRVQGMENQLTNEELFVALKNIVKRRGISYLDDASEDGGTVSSDYGKAVEENRKLLAEKTPGQIQLERFEKYGQLRGDFTVEENGEKHRLINVFSTSAYRKEAERILRKQQEFNSKITDEFIEDYLIILTGKRKYYHGPGNEKSRTDYGRFRTDGTTLDNIFGILIGKCTFYTEEYRASKASYTAQEFNLLNDLNNLTVPTETKKLSEEQKKLIIEYAKSAKTLGASTLLKYIAKMIDASVDQIRGYRVDVNNKPEMHTFEVYRKMQSLETIKVEELPRKVLDELAHILTLNTEREGIEEAINSKLKDIFNRDQVLELVQFRKNNSSLFSKGWHNFSIKLMMELIPELYETSEEQMTILTRLGKQRSKETSKRTKYIDEKELTEEIYNPVVAKSVRQAIKIINEATKKYGIFDNIVIEMARENNEEDAKKDYIKRQKANQDEKNAAMEKAAFQYNGKKELPDNIFHGHKELTTKIRLWHQQGEKCLYTGKNIPISDLIHNQYKYEIDHILPLSLSFDDSLSNKVLVLATANQEKGQRTPFQALDSMDDAWSYREFKSYVKDSKLLSNKKKDYLLTEEDISKIEVKQKFIERNLVDTRYSSRVVLNALQDFYKSHQLDTTISVVRGQFTSQLRRKWGIEKSRETYHHHAVDALIIAASSQLRLWKKHSNPLIAYKEGQFVDSETGEIVSLSDEEYKELVFKAPYDHFVDTLRSKKFEDSILFSYQVDSKYNRKISDATIYATRKAKLDKEKKEYTYTLGKIKDIYALGTKTPSKTGFYKFLDLYKTDKSQFLMYQKDRKTWDEVIEKIIEQYRPFKEYDKNGKEVDFNPFEKYRIGNGPIRKYSKKGNGPEIKSLKYYDILLGKHKNITPDGSRNTVALLSLNPWRTDVYYNSETKKYEFLGLKYADLCFEEGGAYGISEVKYKKIREKEGIGKNSEFKFTLYKNDLILIKDTETNCQQFFRFWSRTGKDNPKSFEKHKIELKPYEKAKFEKGEELKVLGKVPPSSNQFQKNMQIENLSIYKVKTDILGNKHFIKKEGDEPKLKFKK

SEQ ID NO: 462 - protein, 1129 aa, Streptococcus infantarius
  Streptococcus infantarius subsp. infantarius ATCC BAA-102
MSNGKILGLDIGVASVGVGIIDSKTGNVIHANSRLFSAANAENNAERRGFRGARRLTRRKKHRVKRVRDLFEKYDISTDFRNLNLNPYELRVKGLTEQLTNEELFAALRTIAKRRGISYLDDAEDDSTGSSDYAKSIDENRRLLKTKTPGQIQLERLEKYGQLRGNFTVYDENGEAHRLINVFSTSDYKNEARKILETQSNYNKQITDEFIEDYIEILTQKRKYYHGPGNEKSRTDYGRFRTDGTTLENIFGILIGKCSFYPEEYRASKASYTAQEFNFLNDLNNLKVPTETGKLSTEQKEYLVDFAKKSKALGASKLLKEIAKIVDCSVDDIKGYRVDNKDKPDLHTFEPYRKLKFNLSSIDIDELSRETLDKLADILTLNTEREGIEDAIKRNLPSQFTEEQISEIVQIRKNQSSAFNKGWHSFSAKLMNELIPELYVTSEEQMTILTRLEKFKVNKKSSKNTKTIDEKEITDEIYNPVVAKSVRQTIKIINAAVKKYGDFDKIVIEMPRDKNAEDEKKFIDKKQKENKKEKDDSLKRAAFLYNGTDNLPDGVFHGNKELKTKIRLWYQQGERCLYSGKLISIHDLVHNSNKFEIDHILPLSLSFDDSLANKVLVYAWTNQEKGQKTPYQVIDSMDTAWSFREMKDYVLKQKGLGKKKCEYLLTTENIDKIEVKKKFIERNLVDTRYASRVVLNSLQTALKELGKDTKVSVVRGQFTSQLRRKWNIDKSRETYHHHAVDALIIAASSQLKLWQKQENPMFESYGENQVVNKETGEILSISDDKYKELVFQPPYQGFVNTISSKGFEDEILFSYQVDSKFNRKVSDATIYSTRKAKLGKDKKDETYVLGKIKDIYSQDGFDTFIKRYKKDKTQFLMYQKDPLTWENVIEVILRDYPSEKLSEDGKKTVKCNPFEEYRRENGLICKYSKKGNGTPIKSLKYYDKKLGNCIDITPEKSKNRVVLRQISPWRADIYFNLETLKYELMGLKYSDLSFEKGTGKYHISQEKYDAIREKEGIGKKSEFKFTLYRNDLILIKDTLNNCERMLRFGSKNDTSKHYVELKPLEKGTFDSEEEILPVLGKVAKSGQFIKGLNKPNISIYKVRTDVLGNKFFIKKEGDKPKLDFKNNNK

SEQ ID NO: 463 - protein, 1375 aa, Streptococcus infantarius
MEKSYSIGLDIGTNSVGWAVITDDYKVPAKKMKVLGNTDKKYIKKNLLGALLFDSGETAEVTRLKRTARRRYTRRKNRLRYLQEIFAKEMTKVDESFFQRLEESFLTDDDKTFDSHPIFGNKAEEDAYHQKFPTIYHLRKYLADSQEKADLRLVYLALAHMIKYRGHFLIEGELNAENTDVQKLFNVFVETYDKIVDESHLSEIEVDASSILTEKVSKSRRLENLIKQYPTEKKNTLFGNLIALALGLQPNFKTNFKLSEDAKLQFSKDTYEEDLEELLGKVGDDYADLFISAKNLYDAILLSGILTVDDNSTKAPLSASMIKRYVEHHEDLEKLKEFIKINKLKLYHDIFKDKTKNGYAGYIDNGVKQDEFYKYLKTILTKIDDSDYFLDKIERDDFLRKQRTFDNGSIPHQIHLQEMHSILRRQGDYYPFLKENQAKIEKILTFRIPYYVGPLARKDSRFAWANYHSDEPITPWNFDEVVDKEKSAEKFITRMTLNDLYLPEEKVLPKHSHVYETFTVYNELTKIKYVNEQGESFFFDANMKQEIFDHVFKENRKVTKAKLLSYLNNEFEEFRINDLIGLDKDSKSFNASLGTYHDLKKILDKSFLDDKTNGQIIEDIVLTLTLFEDRDMIHERLQKYSDFFTSQQLKKLERRHYTGWGRLSYKLINGIRNKENNKTILDFLIDDGHANRNFMQLINDESLSFKTIIQEAQVVGDVDDIEAVVHDLPGSPAIKKGILQSVKIVDELVKVMGDNPDNIVIEMARENQTTGYGRNKSNQRLKRLQDSLKEFGSDILSKKKPSYVDSKVENSHLQNDRLFLYYIQNGKDMYTGEELDIDRLSDYDIDHIIPQAFIKDNSIDNKVLTSSAKNRGKSDDVPSIEIVRNRRSYWYKLYKSGLISKRKFDNLTKAERGGLTEADKAGFIKRQLVETRQITKHVAQILDARFNTKRDENDKVIRDVKVITLKSNLVSQFRKEFKFYKVREINDYHHAHDAYLNAVVGTALLKKYPKLTPEFVYGEYKKYDVRKLIAKSSDDYSEMGKATAKYFFYSNLMNFFKTEVKYADGRVFERPDIETNADGEVVWNKQKDFDIVRKVLSYPQVNIVKKVEAQTGGFSKESILSKGDSDKLIPRKTKKVYWNTKKYGGFDSPTVAYSVLVVADIEKGKAKKLKTVKELVGISIMERSFFEENPVSFLEKKGYHNVQEDKLIKLPKYSLFEFEGGRRRLLASATELQKGNEVMLPAHLVELLYHAHRIDSFNSTEHLKYVSEHKKEFEKVLSCVENFSNLYVDVEKNLSKVRAAAESMTNFSLEEISASFINLLTLTALGAPADFNFLGEKIPRKRYTSTKECLSATLIHQSVTGLYETRIDLSKLGEE

SEQ ID NO: 464 - protein, 1368 aa, Streptococcus iniae
  Streptococcus iniae 9117
MRKPYSIGLDIGTNSVGWAVITDDYKVPSKKMRIQGTTDRTSIKKNLIGALLFDNGETAEATRLKRTTRRRYTRRKYRIKELQKIFSSEMNELDIAFFPRLSESFLVSDDKEFENHPIFGNLKDEITYHNDYPTIYHLRQTLADSDQKADLRLIYLALAHIIKFRGHFLIEGNLDSENTDVHVLFLNLVNIYNNLFEEDIVETASIDAEKILTSKTSKSRRLENLIAEIPNQKRNMLFGNLVSLALGLTPNFKTNFELLEDAKLQISKDSYEEDLDNLLAQIGDQYADLFIAAKKLSDAILLSDIITVKGASTKAPLSASMVQRYEEHQQDLALLKNLVKKQIPEKYKEIFDNKEKNGYAGYIDGKTSQEEFYKYIKPILLKLDGTEKLISKLEREDFLRKQRTFDNGSIPHQIHLNELKAIIRRQEKFYPFLKENQKKIEKLFTFKIPYYVGPLANGQSSFAWLKRQSNESITPWNFEEVVDQEASARAFIERMTNFDTYLPEEKVLPKHSPLYEMFMVYNELTKVKYQTEGMKRPVFLSSEDKEEIVNLLFKKERKVTVKQLKEEYFSKMKCFHTVTILGVEDRFNASLGTYHDLLKIFKDKAFLDDEANQDILEEIVWTLTLFEDQAMIERRLVKYADVFEKSVLKKLKKRHYTGWGRLSQKLINGIKDKQTGKTILGFLKDDGVANRNFMQLINDSSLDFAKIIKNEQEKTIKNESLEETIANLAGSPAIKKGILQSIKIVDEIVKIMGQNPDNIVIEMARENQSTMQGIKNSRQRLRKLEEVHKNTGSKILKEYNVSNTQLQSDRLYLYLLQDGKDMYTGKELDYDNLSQYDIDHIIPQSFIKDNSIDNTVLTTQASNRGKSDNVPNIETVNKMKSFWYKQLKSGAISQRKFDHLTKAERGALSDFDKAGFIKRQLVETRQITKHVAQILDSRFNSNLTEDSKSNRNVKIITLKSKMVSDFRKDFGFYKLREVNDYHHAQDAYLNAVVGTALLKKYPKLEAEFVYGDYKHYDLAKLMIQPDSSLGKATTRMFFYSNLMNFFKKEIKLADDTIFTRPQIEVNTETGEIVWDKVKDMQTIRKVMSYPQVNIVMKTEVQTGGFSKESIWPKGDSDKLIARKKSWDPKKYGGFDSPIIAYSVLVVAKIAKGKTQKLKTIKELVGIKIMEQDEFEKDPIAFLEKKGYQDIQTSSIIKLPKYSLFELENGRKRLLASAKELQKGNELALPNKYVKFLYLASHYTKFTGKEEDREKKRSYVESHLYYFDEIMQIIVEYSNRYILADSNLIKIQNLYKEKDNFSIEEQAINMLNLFTFTDLGAPSAFKFFNGDIDRKRYSSTNEIINSTLIYQSPTGLYETRIDLSKLGGK

SEQ ID NO: 465 - protein, 1338 aa, Streptococcus macacae
  Streptococcus macacae NCTC 11558
MTKPYSIGLDIGTNSVGWAVVTDGYKVPAKKMKVLGNTDKSHIKKNLLGALLFDSGNTAKDRRLKRTARRRYTRRRNRILYLQEIFAEEMAKADESFFQRLNESFLTNDDKEFDSHPIFGNKAEEEAHHHKFPTIFHLRKHLADSTEKSDLRLIYLALAHMIKFRGHFLIEGQLKAENTNVQTLFDDFVEVYDKTVEESHLSEISVSSILTEKISKSRRLENLIKYYPTEKKNTLFGNLIALSLGLQPNFKTNFKLSEDAKLQFSKDTYEEDLGELLGKIGDNYADLFISAKNLYDAILLSGILTIDDNTTKAPLSASMIKRYEEHQEDLAQLKKFIRQNLPDQYSEVFSDKTKDGYAGYIDGKTNQEAFYKYIKNMLSKTEGADYFLDKIDREDFLRKQRTFDNGSVPHQIHLQEMHAILRRQGEYYPFLKENQDKIEKILTFRIPYYVGPLARKGSRFAWAEYKADKKVTPWNFDDILDKEKSAEEFITRMTLNDLYLPEEKVLPKHSLVYETFNVYNELTKVKYVNEQGKAIFFDANMKQEIFDHVFKENRKVTKDKLLNYLNKEFEEFRIVNLTGLDKENKAFNSSLGTYHDLRKILDKSFLDDKVNEKIIEDIIQTLTLFEDREMIRQRLQKYSDIFTTQQLKKLERRHYTGWGRLSAKLINGIRDKQSNKTILGYLIDDGYSNRNFMQLINDDSLPFKEEIARAQVIGETDDLNQLVSDIAGSPAIKKGILQSLKIVDELVKVMGHNPANIVIEMARENQTTAKGRRSSQQRYKRLEEAIKNLDHDLNHKILKEHPTDNQALQNDRLFLYYLQNGRDMYTEDPLDINRLSDYDIDHIIPQSFIKDDSIDNKVLVSSAKNRGKSDNVPSEDVVNRMRPFWNKLLSCGLISQRKYSNLTKKELKPDDKAGFIKRQLVETRQITKHVAQILDARFNTKRDENKKVIRDVKIITLKSNLVSQFRKDFKFYKVREINDYHHAHDAYLNAVIGKALLDVYPQLEPEFVYGEYPHFHGYKENKATAKKFFYSNIMNFFKKDDIRTDENGEIVWKKDEHISNIKRVLSYPQVNIVKKVEIQTVGQNGGLFDDNPKSPLEVTPSKLVPLKKELNPKKYGGYQKPTTAYPVLLITDTKQLIPISVMNKKQFEQNPVKFLRDRGYQQVGKNDFIKLPKYTLVDIGDGIKRLWASSKEIHKGNQLVVSKKSQILLYHAHHLDSDLSNDYLQNHNQQFDVLFNEIISFSKKCKLGKEHIQKIENVYSNKKNSASIEELAESFIKLLGFTQLGATSPFNFLGVKLNQKQYKGKKDYILPCTEGTLIRQSITGLYETRVDLSKIGED

SEQ ID NO: 466 - protein, 1130 aa, Streptococcus macedonicus
MTNGKILGLDIGIASVGVGIIEAKTGKVVHANSRLFSAANAENNAERRGFRGSRRLNRRKKHRVKRVRDLFEKYGIVTDFRNLNLNPYELRVKGLTEQLTNEELFAALRTISKRRGISYLDDAEDDSTGSTDYAKSIDENRRLLKTKTPGQIQLERLEKYGQLRGNFTVYDENGEAHRLINVFSTSDYEKEARKILETQADYNKKITAEFIDDYVEILTQKRKYYHGPGNEKSRTDYGRFRTDGTTLENIFGILIGKCNFYPDEYRASKASYTAQEYNFLNDLNNLKVPTETGKLSTEQKESLVEFAKNTAILGPAKLLKEIAKILDCKVDEIKGYREDDKGKPDLHTFEPYRKLKFNLDSVNIDYLSREVLDKLADILTLNTEREGIEDAIKRNLPNQFTEEQISEIINVRKSQSTAFNKGWHSFSAKLMNELIPELYATSDEQMTILTRLEKFKVKKKSSKNIKTIDEKEITDEIYNPVVAKSVRQTIKIINAAVKKYGDFDKIVIEMPRDKNADDEKKFINKRNKENKKEKDDALKRAAYLYNGTDKLPDEVFHGNKQLETKIRLWYQQGERCLYSGKPIPIQELVHNSNNFEIDHILPLSLSFDDSLANKVLVYSWTNQEKGQKTPYQVIDSMDAAWSFREMKEYVLKQKGLGKKKRDYLLTTENIDKIEVKKKFIERNLVDTRYASRVVLNSLQSALRELGKDTKVSVVRGQFTSQLRRKWKIDKSRETYHHHAVDALIIAASSQLKLWEKQDNPMFVDYGNNQVVDKQTGEILSVSDNEYKELVFQPPYQGFVNTISSKGFEDEILFSYQVDSKYNRKVSDATIYSTRKAKIGKDKKEETYVLGKIKDIYSQNGFDTFVKKYNKDKTQFLMYQKDPLTWENVIEVILGDYPTTKKSEDGKNDVKCNPFEEYRRENGLICKYSKKGKGTPIKSLKYYDKKLGNCIDITPEESRNKVILQSINPWRADVYFNPETLKYELMGLKYSDLSFEKGTGNYHISQEKYDAIKEKEGIGKKSEFKFTLYRNDLILIKDIASGEQEIYRFLSRTMPNVNHYVELKPYDKEKFDNVQELVEALGEADKVGRCIKSLNKPNISIYKVRTDVLGNKYFVKKEGDKPKLDFKNNKK

SEQ ID NO: 467 - protein, 1134 aa, Streptococcus mitis
  Streptococcus mitis ATCC 6249
MNGLVLGLDIGIASEGVGILEKNSGKIIHANSRLFPAATADNNVERRKNRQARRLNRRKKHRGVRFQDLFEDYGLLTDFSKVSINLNPYRLRVDGLNQQLTNEELFIALKNIVKRRGISYLDDASEDGGAVSSDYGKAVEENRKLLAEQTPGQIQLERFEKYGQVRGDFTVVENGEKLRLINVFSTSAYKKEAERILRKQQEFNNQITDEFIEDYLKILTGKRKYYHGPGNEKSRTDYGRFRTDGTTLDNIFGILIGKCTFYPEEYRASKASYTAQEFNLLNDLNNLTVPTETKKLSEEQKKVIVEYAKEAKTLGASTLLKYIAKMIDASVDQIRGYRVDVNNKPEMHTFEVYRKMQSLETISVGELSRNVLDELAHILTLNTEREGMEEAINTKLKDSFSQDQVLELVQFRKNNSSLFSKGWHNFSLKLMMELIPELYETSEEQMTILTRLGKQKSKETSKRTKYIDEKELTEEIYNPVVAKSVRQAIKIINEATKKHGIFDNIVIEMARENNEEDAKKDYIKRQKANQDEKNAAMEKAAFQYNGKKELPDNIFHGHKELATKIRLWHQQGEKCLYTGKTIPISDLIYNQYKYEIDHILPLSLSFDDSLSNKVLALATANQEKGQRTPFQALDSMDDAWSYREFKSYVKDLKSLSNKKKDYLLTEEDISKIEVKQKFIERNLVDTRYSSRVVLNALQDFYKSHQFDTTISVVRGQFTSQLRRKWGLEKSRETYHHHAVDALIIAASSQLRLWKKQNNPLITYKEGQFVDSQTGEIISLTDDEYKELVFKAPYDHFVDTLSSKTFEDSILFSYQVDSKFNRKISDATIYATRKAKLDKEKKEYTYTLGKIKDIYSLGTKTPSKTGFYKFLDLYNKDKSQFLMFQKDRKTWDEVIEKIMEQYRPFKEYDKTGKLVDFNPFEKYRQENEPIRKYSKKGNGPEIKSLKYYDILLGKHKNITPEGSRNTVALLSLNPWRTDVYYNMETKKYEFLGLKYADLPFEEGGAYGISTETYNELREKEGIGKNSEFKFTLYKNDLILIKDTETNCQQIFRFWSRTGKDNPKSFEKHKIELKPYEKARFEKGEELEVLGKVPPSSNQLQKNMQIENLSIYKVKTDVLGNKHFIKKEGDKPKLKF

SEQ ID NO: 468 - protein, 1392 aa, Streptococcus mitis
  Streptococcus mitis SK321
MNNNNYSIGLDIGTNSVGWAVITDDYKVPSKKMKVLGNTDKHFIKKNLIGALLFDEGATAEDRRFKRTARRRYTRRKNRLRYLQEIFSEEMSKVDSSFFHRLDDSFLVPEDKRGSKYPIFATLAEEKEYHKKFPTIYHLRKHLADSKEKTDLRLIYLALAHMIKYRGHFLYEESFDIKNNDIQKIFSEFISIYDNTFEGSSLSGQNAQVEAIFTDKISKSAKRERILKLFAYEKSTDLFSEFLKLIVGNQADFKKHFDLEEKAPLQFSKDTYDEDLENLLGQIGDDFADLFLVAKKLYDAILLSGILTVTDSSTKAPLSASMIERYENHQKDLAALKQFIQNNLQEKYDEVFSDQSKDGYARYINGKTTQEAFYKYIKNLLSKFEGSDYFLDKIEREDFLRKQRTFDNGSIPHQIHLQEMNAIIRRQGEHYPFLKEYKEKIETILTFRIPYYVGPLARGNRNFAWLTRNSDQAIRPWNFEEIVDQASSAEEFINKMTNYDLYLPEEKVLPKHSLLYETFAVYNELTKVKFISEGLRDYQFLDSGQKKQIVNQLFKEKRKVTEKDIIQYLHNVDGYDGIELKGIEKQFNASLSTYHDLLKIIKDKEFMDDPKNEEILENIVHTLTIFEDREMIKQRLAQYASIFDKKVIKALTRRHYTGWGKLSAKLINGICDKKTGKTILDYLIDDGYSNRNFMQLINDDGLSFKDIIQKAQVVGKTNDVKQVVQELPGSPAIKKGILQSIKLVDELVKVMGHAPESIVIEIARENQTTARGKKNSQQRYKRIEDALKNLAPGLDSNILKEHPTDNIQLQNDRLFLYYLQNGKDMYTGEALDINQLSSYDIDHIVPQAFIKDDSLDNRVLTSSKDNRGKSDNVPSLEVVQKRKAFWQQLLDSKLISEHKFNNLTKAERGGLDERDKVGFIRRQLVETRQITKHVAQILDARFNTEVNEKDKKNRTVKIITLKSNLVSNFRKEFKLYKVREINDYHHAHDAYLNAVVAKAILKKYPKLEPGFVYGDYQKYDIKRYISRSKDPKEVEKATEKYFFYSNLLNFFKEEVHYADGTIVKRENIEYSKDTGEIAWNKEKDFATIKKVLSLPQVNIVKKTEIQTHGLDRGKPRGLFNSNPSPKPSEDRKENLVPIKQGLDPRKYGGYAGISNSYAVLVKAIIEKGAKKQQKTVLEFQGISILDKINFEKNKENYLLEKGYIKILSTITLPKYSLFEFPDGTRRRLASILSTNNKRGEIHKGNELVIPEKYTTLLYHAKNINKTLEPEHLEYVEKHRNDFAKLLEYVLNFNDKYVGALKNGERIRQAFIDWETVDIEKLCFSFIGPRNSKNAGLFELTSQGSASDFEFLGVKIPRYRDYTPSSLLNATLIHQSITGLYETRIDLSKLGED

SEQ ID NO: 469 - protein, 1345 aa, Streptococcus mutans
  Streptococcus mutans 11SSST2
MKKPYSIGLDIGTNSVGWAVVTDDYKVPAKKMKVLGNTDKSHIKKNLLGALLFDSGNTAADRRLKRTARRRYTRRRNRILYLQEIFAEEMSKVDDSFFHRLEDSFLVTEDKRGERHPIFGNLEEEVKYHENFPTIYHLRQYLADNPEKVDLRLVYLALAHIIKFRGHFLIEGKFDTRNNDVQRLFQEFLAVYDNTFENSSLQEQNVQVEEILTDKISKSAKKDRVLKLFPNEKSNGRFAEFLKLIVGNQADFKKHFELEEKAPLQFSKDTYEEELEVLLTQIGDNYAELFLSAKKLYDSILLSGILTVTDVSTKAPLSASMIQRYNEHQMDLAQLKQFIRQKLSDKYNEVFSDVSKDGYAGYIDGKTNQEAFYKYLKGLLNKIEGSGYFLDKIEREDFLRKQRTFDNGSIPHQIHLQEMRAIIRRQAEFYPFLADNQDRIEKILTFRIPYYVGPLARGKSDFAWLSRKSADKITPWNFDEIVDKESSAEAFINRMTNYDLYLPNQKVLPKHSLLYEKFTVYNELTKVKYKTEQGKTAFFDANMKQEIFDGVFKVYRKVTKDKLMDFLEKEFDEFRIVDLTGLDKENKAFNASYGTYHDLRKILDKDFLDNSKNEKILEDIVLTLTLFEDREMIRKRLENYSDLLTKEQVKKLERRHYTGWGRLSAELIHGIRNKESRKTLLDYLIDDGNSNRNFMQLINDDALSFKEEIAKAQVIGETDNLNQVVSDIAGSPAIKKGILQSLKIVDELVKIMGHQPENIVVEMARENQFTNQGRRNSQQRLKGLTDSIKEFGSQILKEHPVENSQLQNDRLFLYYLQNGRDMYTGEELDIDYLSQYDIDHIIPQAFIKDNSIDNRVLTSSKENRGKSDDVPSKDVVRKMKPYWSKLLSAKLITQRKFDNLTKAERGGLTDDDKAGFIKRQLVETRQITKHVARILDERFNTETDENNKKIRQVKIVTLKSNLVSNFRKEFELYKVREINDYHHAHDAYLNAVIGKALLGVYPQLEPEFVYGDYPHFHGHEENKATAKKFFYSNIMNFFKKDDVRTDKNGEIIWKKDEHISNIKKVLSYPQVNIVKKVEEQTGGFSKESILPKGNSDKLIPRKTKKFYWDTKKYGGFDSPIVAYSILVIADIEKGKSKKLKTVKALVGVTIMEKMTFERDPVAFLERKGYRNVQEENIIKLPKYSLFKLENGRKRLLASARELQKGNEIVLPNHLGTLLYHAKNIHKVDEPKHLDYVDKHKDEFKELLDVVSNFSKKYTLAEGNLEKIKELYAQNNGEDLKELSSSFINLLTFTAIGAPAAFKFFDKNIDRKRYTSTTEILNATLIHQSITGLYETRIDLSKLGGD

SEQ ID NO: 470 - protein, 1345 aa, Streptococcus mutans; identical to SEQ ID NO: 469
  Streptococcus mutans 11SSST2

SEQ ID NO: 471 - protein, 1345 aa, Streptococcus mutans
  Streptococcus mutans 11VS1
MKKPYSIGLDIGTNSVGWAVVTDDYKVPAKKMKVLGNTDKSHIKKNLLGALLFDSGNTAEDRRLKRTARRRYTRRRNRILYLQEIFSEEMGKVDDSFFHRLEDSFLVTEDKRGERHPIFGNLEEEVKYHENFPTIYHLRQYLADNPEKVDLRLVYLALAHIIKFRGHFLIEGKFDTRNNDVQRLFQEFLAVYDNTFENSSLQEQNVQVEEILTDKISKSAKKDRVLKLFPNEKSNGRFAEFLKLIVGNQADFKKHFELEEKAPLQFSKDTYEEELEVLLAQIGDNYAELFLSAKKLYDSILLSGILTVTDVSTKAPLSASMIQRYNEHQMDLAQLKQFIRQKLSDKYNEVFSDVSKDGYAGYIDGKTNQEAFYKYLKGLLNKIEGSGYFLDKIEREDFLRKQRTFDNGSIPHQIHLQEMRAIIRRQAEFYPFLADNQDRIEKILTFRIPYYVGPLARGKSDFAWLSRKSADKITPWNFDEIVDKESSAEAFINRMTNYDLYLPNQKVLPKHSLLYEKFTVYNELTKVKYKTEQGKTAFFDANMKQEIFDGVFKVYRKVTKDKLMDFLEKEFDEFRIVDLTGLDKENKVFNASYGTYHDLCKILDKDFLDNSKNEKILEDIVLTLTLFEDREMIRKRLENYSDLLTKEQVKKLERRHYTGWGRLSAELIHGIRNKESRKTILDYLIDDGNSNRNFMQLINDDALSFKEEIAKAQVIGETDNLNQVVSDIAGSPAIKKGILQSLKIVDELVKIMGHQPENIVVEMARENQFTKQGRRNSQQRLKGLTDSIKEFGSQILKEHPVENSQLQNDRLFLYYLQNGRDMYTGEELDIDYLSQYDIDHIIPQAFIKDNSIDNRVLTSSKENRGKSDDVPSKDVVRKMKSYWSKLLSAKLITQRKFDNLTKAERGGLTDDDKAGFIKRQLVETRQITKHVARILDERFYTETDENNKKIRQVKIVTLKSNLVSNFRKEFELYKVREINDYHHAHDAYLNAVIGKALLGVYPQLEPEFVYGDYPHFHGHKENKATAKKFFYSNIMNFFKKDDVRTDKNGEIIWKKDEHISNIKKVLSYPQVNIVKKVEEQTGGFSKESILPKGNSDKLIPRKTKKFYWDTKKYGGFDSPIVAYSILVIADIEKGKSKKLKTVKALVGVTIMEKMTFERDPVAFLERKGYRNVQEENIIKLPKYSLFKLENGRKRLLASARELQKGNEIVLPNHLGTLLYHAKNIHKVDEPKHLDYVDKHKDEFKELLDVVSNFSKKYTLAEGNLEKIKELYAQNNGEDLKELASSFINLLTFTAIGAPATFKFFDKNIDRKRYTSTTEILNATLIHQSITGLYETRIDLSKLGGD

SEQ ID NO: 472 - protein, 1345 aa, Streptococcus mutans
  Streptococcus mutans 14D
MKKPYSIGLDIGTNSVGWAVVTDDYKVPAKKMKVLGNTDKSHIKKNLLGALLFDSGNTAADRRLKRTARRRYTRRRNRILYLQEIFAEEMSKVDDSFFHRLEDSFLVTEDKRGERHPIFGNLEEEVKYHENFPTIYHLRQYLADNPEKVDLRLVYLALAHIIKFRGHFLIEGKFDTRNNDVQRLFQEFLAVYDNTFENSSLQEQNVQVEEILTDKISKSAKKDRVLKLFPNEKSNGRFAEFLKLIVGNQADFKKHFELEEKAPLQFSKDTYEEELEVLLAQIGDNYAELFLSAKKLYDSILLSGILTVTDVSTKAPLSASMIQRYNEHQMDLAQLKQFIRQKLSDKYNEVFSDVSKDGYAGYIDGKTNQEAFYKYLKGLLNKIEGSGYFLDKIEREDFLRKQRTFDNGSIPHQIHLQEMRAIIRRQAEFYPFLADNQDRIEKILTFRIPYYVGPLARGKSDFAWLSRKSADKITPWNFDEIVDKESSAEAFINRMTNYDLYLPNQKVLPKHSLLYEKFTVYNELTKVKYKTEQGKTAFFDANMKQEIFDGVFKVYRKVTKDKLMDFLEKEFDEFRIVDLTGLDKENKAFNASYGTYHDLRKILDKDFLDNSKNEKILEDIVLTLTLFEDREMIRKRLENYSDLLTKEQVKKLERRHYTGWGRLSAELIHGIRNKESRKTILDYLIDDGNSNRNFMQLINDDALSFKEEIAKAQVIGETDNLNQVVSDIAGSPAIKKGILQSLKIVDELVKIMGHQPENIVVEMARENQFTNQGRRNSQQRLKGLTDSIKEFGSQILKEHPVEHSQLQNDRLFLYYLQNGRDMYTGEELDIDYLSQYDIDHIIPQAFIKDNSIDNRVLTSSKENRGKSDDVPSKNVVRKMKSYWSKLLSAKLITQRKFDNLTKAERGGLTDDDKAGFIKRQLVETRQITKHVARILDERFHTETDENNKKIRQVKIVTLKSNLVSNFRKEFELYKVREINDYHHAHDAYLNAVIGKALLGVYPQLEPEFVYGDYPHFHGHKENKATAKKFFYSNIMNFFKKDDVRTDKNGEIIWKKDEHISNIKKVLSYPQVNIVKKVEEQTGGFSKESILPKGNSDKLIPRKTKKFYWDTKKYGGFDSPIVAYSILVIADIEKGKSKKLKTVKALVGVTIMEKMTFERDPVAFLERKGYRNVQEENIIKLPKYSLFKLENGRKRLLASARELQKGNEIVLPNHLGTLLYHAKNIHKVDEPKHLDYVDKHKDEFKELLDVVSNFSKKYTLAEGNLEKIKELYAQNNGEDLKELASSFINLLTFTAIGAPATFKFFDKNIDRKRYTSTTEILNATLIHQSITGLYETRIDLSKLGGD

SEQ ID NO: 473 - protein, 1355 aa, Streptococcus mutans
  Streptococcus mutans 15VF2
MKKSYSIGLDIGTNSVGWAVVTDDYKVPAKKMKVLGNTDKSHIKKNLLGALLFDSGNTAEDRRLKRTARRRYTRRRNRILYLQEIFSEEMGKVDDSFFHRLDESFLTDDDKNFDSHPIFGNKAEEDAYHQKFPTIYHLRKHLADSTEKADLRLVYLALAHMIKFRGHFLIEGELNAENTDVQKLFADFVGVYDRTFDDSHLSEITVDASSILTEKISKSRRLEKLINNYPKEKKNTLFGNLIALSLGLQPNFKTNFKLSEDAKLQFSKDTYEEDLEELLGKIGDDYADLFTLAKNLYDAILLSGILTADDSSTKAPLSASMIKRYAEHHEDLEKLKEFIKANKPELYHDIFKDETKNGYAGYIENGVKQDEFYKYLKNTLSKIAGSDYFLDKIEREDFLRKQRTFDNGSIPHQIHLQEMHAILRRQGDYYPFLKENQDRIEKILTFRIPYYVGPLARKNSRFAWAEYHSDEAVMPWNFDQVIDKESSAQAFIEHMTNNDLYLPNEKVLPKHSPLYEKYTVYNELTKIKYVTEIGEAKFFDANLKQEIFDGLFKHERKVTKKKLRTFLDKNFDEFRIVDIQGLDKETETFNASYATYQDLLKVIKDKVFMDNPENAEILENIVLTLTLFEDREMIKQRLAKYADVFDKKVIDQLARRHYTGWGRLSAKLLNGIRDKQSCKTIMDYLIDDAQSNRNLMQLITDDNLTFKDDIVKAQYVDNSDDLHQVVQSLAGSPAIKKGILQSLKIVDELVKVMGKEPEQIVVEMARENQTTAKGRRNSQQRYKRLKEAIKSLDRDLNHKILKEHPTDNQALQNNRLFLYYLQNGRDMYTGESLDINRLSDYDIDHVIPQAFIKDNSIDNRVLTSSKANRGKSDDVPSEDVVNRMRPFWNKLLSSGLISQRKYNNLTKKELTPDDKAGFIKRQLVETRQITKHVARMLDERFNKEFDDNNKRIRRVKIVTLKSNLVSSFRKEFELYKVREINDYHHAHDAYLNAVVVKALLVKYPKLEPEFVYGEYPKYNSYRERKTATQKMFFYSNIMNMFKSKVKLADDQIVERPMIEVNDETGEIAWDKTKHITTVKKVLSYPQVNIVKKVEEQTIGQNGGLFDDNPKSPLEVIPSKLVPLKKALNPEKYGGYQKPTTAYPILLIVDTKQLIPISVMDKKRFEQNPVKFLKDKGYQQIEKNNFVKLPKYTLVDIGNGIKRLWASSKEVHKGNQLVVSKKSQDLLYHAHHLDNDYSNEYVKNHYQQFDILFNEITSFSKKCKLGKEHIQKIEEAYSKERDSASIEELADGFIKLLGFTQLGATSPFSFLGIKLNQKQYTGKKDYLLPCMEATLIHQSITGLYETRIDLNKLGGD

SEQ ID NO: 474 - protein, 1355 aa, Streptococcus mutans; identical to SEQ ID NO: 473
  Streptococcus mutans 15VF2

SEQ ID NO: 475 - protein, 1345 aa, Streptococcus mutans
  Streptococcus mutans 1SM1
MKKPYSIGLDIGTNSVGWAVVTDDYKVPAKKMKVLGNTDKSHIKKNLLGALLFDSGNTAEDRRLKRTARRRYTRRRNRILYLQEIFSEEMGKVDDSFFHRLEDSFLVTEDKRGERHPIFGNLEEEVKYHENFPTIYHLRQYLADNPEKVDLRLVYLALAHIIKFRGHFLIEGKFDTRNNDVQRLFQEFLAVYDNTFENSSLQEQNVQVEEILTDKISKSAKKDRVLKLFPNEKSNGRFAEFLKLIVGNQADFKKHFELEEKAPLQFSKDTYEEDLEELLGKIGDDYADLFTLAKNLYDAILLSGILTADDSSTKAPLSASMIQRYNEHQMDLAQLKQFIRQKLSDKYNEVFSDVSKDGYAGYIDGKTNQEAFYKYLKGLLNKIEGSGYFLDKIEREDFLRKQRTFDNGSIPHQIHLQEMRAIIRRQAEFYPFLADNQDRIEKILTFRIPYYVGPLARGKSDFAWLSRKSADKITPWNFDEIVDKESSAEAFINRMTNYDLYLPNQKVLPKHSLLYEKFTVYNELTKVKYKTEQGKTAFFDANMKQEIFDGVFKVYRKVTKDKLMDFLEKEFDEFRIVDLTGLDKENKVFNASYGTYHDLCKILDKDFLDNSKNEKILEDIVLTLTLFEDREMIRKRLENYSDLLTKEQVKKLERRHYTGWGRLSAELIHGIRNKESRKTILDYLIDDGNSNRNFMQLINDDALSFKEEIAKAQVIGETDNLNQVVSDIAGSPAIKKGILQSLKIVDELVKIMGHQPENIVVEMARENQFTNQGRRNSQQRLKGLTDSIKEFGSQILKEHPVENSQLQNDRLFLYYLQNGRDMYTGEELDIDYLSQYDIDHIIPQAFIKDNSIDNRVLTSSKENRGKSDDVPSKDVVRKMKSYWSKLLSAKLITQRKFDNLTKAERGGLTDDDKAGFIKRQLVETRQITKHVARILDERFYTETDENNKKIRQVKIVTLKSNLVSNFRKEFELYKVREINDYHHAHDAYLNAVIGKALLGVYPQLEPEFVYGDYPHFHGHKENKATAKKFFYSNIMNFFKKDDVRTDKNGEIIWKKDEHISNIKKVLSYPQVNIVKKVEEQTGGFSKESILPKGNSDKLIPRKTKKFYWDTKKYGGFDSPIVAYSILVIADIEKGKSKKLKTVKALVGVTIMEKMTFERDPVAFLERKGYRNVQEENIIKLPKYSLFKLENGRKRLLASARELQKGNEIVLPNHLGTLLYHAKNIHKVDEPKHLDYVDKHKDEFKELLDVVSNFSKKYTLAEGNLEKIKELYAQNNGEDLKELASSFINLLTFTAIGAPATFKFFDKNIDRKRYTSTTEILNATLIHQSITGLYETRIDLSKLGGD

SEQ ID NO: 476 - protein, 1345 aa, Streptococcus mutans; identical to SEQ ID NO: 475
  Streptococcus mutans 1SM1

SEQ ID NO: 477 - protein, 1350 aa, Streptococcus mutans
  Streptococcus mutans 24
MKKPYSIGLDIGTNSVGWAVVTDDYKVPAKKMKVLGNTDKSHIEKNLLGALLFDSGNTAEDRRLKRTARRRYTRRRNRILYLQEIFSEEMGKVDDSFFHRLEDSFLVTEDKRGERHPIFGNLEEEVKYHENFPTIYHLRQYLADNPEKVDLRLVYLALAHIIKFRGHFLIEGKFDTRNNDVQRLFQEFLAVYDNTFENSSLQEQNVQVEEILTDKISKSAKKDRVLKLFPNEKSNGRFAEFLKLIVGNQADFKKHFELEEKAPLQFSKDTYEEELEVLLAQIGDNYAELFLSAKKLYDSILLSGILTVTDVSTKAPLSASMIQRYNEHQMDLTQLKQFIRQKLSDKYNEVFSDVSKDGYAGYIDGKTNQEAFYKYLKGLLNKIEGSGYFLDKIEREDFLRKQRTFDNGSIPHQIHLQEMRAIIRRQAEFYPFLADNQDRIEKILTFRIPYYVGPLARGKSDFAWLSRKSADKITPWNFDEIVDKESSAEAFINRMTNYDLYLPNQKVLPKHSLLYEKFTVYNELTKVKYKTEQGKTAFFDANMKQEIFDGVFKVYRKVTKDKLMDFLEKEFDEFRIVDLTGLDKENKAFNASYGTYHDLRKILDKDFLDNSKNEKILEDIVLTLTLFEDREMIRKRLKNYSDLLTKEQLKKLERRHYTGWGRLSAELIHGIRNKESRKTILDYLIDDGNSNRNFMQLINDDALSFKEEIAKAQVIGETDNLNQVVSDIAGSPAIKKGILQSLKIVDELVKIMGHQPENIVVEMARENQFTNQGRQNSQQRLKGLTDSIKEFGSQILKEHPVENSQLQNDRLFLYYLQNGRDMYTGEELDIDYLSQYDIDHIIPQAFIKDNSIDNRVLTSSKENRGKSDDVPSEDVVNRMRPFWNKLLSSGLISQRKYNNLTKKELTLDDKAGFIKRQLVETRQITKHVARMLDERFNKEFDDNNKRICKVKIVTLKSNLVSSFRKEFELYKVREINDYHHAHDAYLNAVVVKALLVKYSKLEPEFVYGEYPKYNSYRERKTATQKMFFYSNIMNMFKSKVKLADDQIVERPMIEVNDETGEIAWDKTKHITTVKKVLSYPQVNIVKKVEEQTIGQNGGLFDDNPKSPLEVIPSKLVPLKKALNPEKYGGYQKPTTAYPILLIVDTKQLIPISVMDKKRFEQNPVKFLKDKGYQQIEKNNFVKLPKYTLVDIGNGIKRLWASSKEVHKGNQLVVSKKSQDLLYHAHHLDNDYSNEYVKNHYQQFDILFNEITSFSKKCKLGKEHIQKIEEAYSKERDSASIEELADGFIKLLGFTQLGATSPFSFLGIKLNQKQYTGKKDYLLPCMEATLIHQSITGLYETRIDLSKLGGD

SEQ ID NO: 478 - protein, 1350 aa, Streptococcus mutans; identical to SEQ ID NO: 477
  Streptococcus mutans 24

SEQ ID NO: 479 - protein, 1345 aa, Streptococcus mutans; identical to SEQ ID NO: 472
  Streptococcus mutans 2VS1

SEQ ID NO: 480 - protein, 1345 aa, Streptococcus mutans; identical to SEQ ID NO: 472
  Streptococcus mutans 2VS1

SEQ ID NO: 481 - protein, 1345 aa, Streptococcus mutans; identical to SEQ ID NO: 471
  Streptococcus mutans 3SN1

SEQ ID NO: 482 - protein, 1345 aa, Streptococcus mutans; identical to SEQ ID NO: 471
  Streptococcus mutans 3SN1

SEQ ID NO: 483 - protein, 1345 aa, Streptococcus mutans
  Streptococcus mutans 4SM1
MKKPYSIGLDIGTNSVGWAVVTDDYKVPAKKMKVLGNTDKSHIKKNLLGALLFDSGNTAEDRRLKRTARRRYTRRRNRILYLQEIFSEEMGKVDDSFFHRLEDSFLVTEDKRGERHPIFGNLEEEVKYHENFPTIYHLRQYLADNPEKVDLRLVYLALAHIIKFRGHFLIEGKFDTRNNDVQRLFQEFLAVYDNTFENSSLQEQNVQVEEILTDKISKSAKKDRVLKLFPNEKSNGRFAEFLKLIVGNQADFKKHFELEEKAPLQFSKDTYEEDLEELLGKIGDDYADLFTLAKNLYDAILLSGILTADDSSTKAPLSASMIQRYNEHQMDLAQLKQFIRQKLSDKYNEVFSDVSKDGYAGYIDGKTNQEAFYKYLKGLLNKIEGSGYFLDKIEREDFLRKQRTFDNGSIPHQIHLQEMRAIIRRQAEFYPFLADNQDRIEKILTFRIPYYVGPLARGKSDFAWLSRKSADKITPWNFDEIVDKESSAEAFINRMTNYDLYLPNQKVLPKHSLLYEKFTVYNELTKVKYKTEQGKTAFFDANMKQEIFDGVFKVYRKVTKDKLMDFLEKEFDEFRIVDLTGLDKENKVFNASYGTYHDLCKILDKDFLDNSKNEKILEDIVLTLTLFEDREMIRKRLENYSDLLTKEQVKKLERRHYTGWGRLSAELIHGIRNKESRKTILDYLIDDGNSNRNFMQLINDDALSFKEEIAKAQVIGETDNLNQVVSDIAGSPAIKKGILQSLKIVDELVKIMGHQPENIVVEMARENQFTNQGRRNSQQRLKGLTDSIKEFGSQILKEHPVENSQLQNDRLFLYYLQNGRDMYTGEELDIDYLSQYDIDHIIPQAFIKDNSIDNRVLTSSKENRGKSDDVPSKDVVRKMKPYWSKLLSAKLITQRKFDNLTKAERGGLTDDDKAGFIKRQLVETRQITKHVARILDERFNTETDENNKKIRQVKIVTLKSNLVSNFRKEFELYKVREINDYHHAHDAYLNAVIGKALLGVYPQLEPEFVYGDYPHFHGHEENKATAKKFFYSNIMNFFKKDDVRTDKNGEIIWKKDEHISNIKKVLSYPQVNIVKKVEEQTGGFSKESILPKGNSDKLIPRKTKKFYWDTKKYGGFDSPIVAYSILVIADIEKGKSKKLKTVKALVGVTIMEKMTFERDPVAFLERKGYRNVQEENIIKLPKYSLFKLENGRKRLLASARELQKGNEIVLPNHLGTLLYHAKNIHKVDEPKHLDYVDKHKDEFKELLDVVSNFSKKYTLAEGNLEKIKELYAQNNGEDLKELASSFINLLTFTAIGAPATFKFFDKNIDRKRYTSTTEILNATLIHQSITGLYETRIDLSKLGGD

SEQ ID NO: 484 - protein, 1345 aa, Streptococcus mutans; identical to SEQ ID NO: 483
  Streptococcus mutans 4SM1

SEQ ID NO: 485 - protein, 1345 aa, Streptococcus mutans
  Streptococcus mutans 4VF1
MKKPYSIGLDIGTNSVGWAVVTDDYKVPAKKMKVLGNTDKSHIKKNLLGALLFDSGNTAEDRRLKRTARRRYTRRRNRILYLQEIFSEEMGKVDDSFFHRLEDSFLVTEDKRGERHPIFGNLEEEVKYHENFPTIYHLRQYLADNPEKVDLRLVYLALAHIIKFRGHFLIEGKFDTRNNDVQRLFQEFLAVYDNTFENSSLQEQNVQVEEILTDKISKSAKKDRVLKLFPNEKSNGRFAEFLKLIVGNQADFKKHFELEEKAPLQFSKDTYEEELEVLLAQIGDNYAELFLSAKKLYDSILLSGILTVTDVSTKAPLSASMIQRYNEHQMDLAQLKQFIRQKLSDKYNEVFSDVSKDGYAGYIDGKTNQEAFYKYLKGLLNKIEGSGYFLDKIEREDFLRKQRTFDNGSIPHQIHLQEMRAIIRRQAEFYPFLADNQDRIEKILTFRIPYYVGPLARGKSDFAWLSRKSADKITPWNFDEIVDKESSAEAFINRMTNYDLYLPNQKVLPKHSLLYEKFTVYNELTKVKYKTEQGKTAFFDANMKQEIFDGVFKVYRKVTKDKLMDFLEKEFDEFRIVDLTGLDKENKVFNASYGTYHDLCKILDKDFLDNSKNEKILEDIVLTLTLFEDREMIRKRLENYSDLLTKEQVKKLERRHYTGWGRLSAELIHGIRNKESRKTILDYLIDDGNSNRNFMQLINDDALSFKEEIAKAQVIGETDNLNQVVSDIAGSPAIKKGILQSLKIVDELVKIMGHQPENIVVEMARENQFTKQGRRNSQQRLKGLTDSIKEFGSQILKEHPVENSQLQNDRLFLYYLQNGRDMYTGEELDIDYLSQYDIDHIIPQAFIKDNSIDNRVLTSSKENRGKSDDVPSKDVVRKMKSYWSKLLSAKLITQRKFDNLTKAERGGLTDDDKAGFIKRQLVETRQITKHVARILDERFYTETDENNKKIRQVKIVTLKSNLVSNFRKEFELYKVREINDYHHAHDAYLNAVIGKALLGVYPQLEPEFVYGDYPHFHGHKENKATAKKFFYSNIMNFFKKDDVRTDRNGEIIWKKDEHISNIKKVLSYPQVNIVKKVEEQTGGFSKESILPKGNSDKLIPRKTKKFYWDTKKYGGFDSPIVAYSILVIADIEKGKSKKLKTVKALVGVTIMEKMTFERDPVAFLERKGYRNVQEENIIKLPKYSLFKLENGRKRLLASARELQKGNEIVLPNHLGTLLYHAKNIHKVDEPKHLDYVDKHKDEFKELLDVVSNFSKKYTLAEGNLEKIKELYAQNNGEDLKELASSFINLLTFTAIGAPATFKFFDKNIDRKRYTSTTEILNATLIHQSITGLYETRIDLSKLGGD

SEQ ID NO: 486 - protein, 1345 aa, Streptococcus mutans; identical to SEQ ID NO: 485
  Streptococcus mutans 4VF1

SEQ ID NO: 487 - protein, 1345 aa, Streptococcus mutans
  Streptococcus mutans 5SM3
MKKPYSIGLDIGTNSVGWAVVTDDYKVPAKKMKVLGNTDKSHIEKNLLGALLFDSGNTAEDRRLKRTARRRYTRRRNRILYLQEIFSEEMGKVDDSFFHRLEDFFLVTEDKRGERHPIFGNLEEEVKYHENFPTIYHLRQYLADNPEKVDLRLVYLALAHIIKFRGHFLIEGKFDTRNNDVQRLFQEFLAVYDNTFENSSLQEQNVQVEEILTDKISKSAKKDRVLKLFPNEKSNGRFAEFLKLIVGNQADFKKHFELEEKAPLQFSKDTYEEELEVLLAQIGDNYAELFLSAKKLYDSILLSGILTADDSSTKAPLSASMIQRYNEHQMDLAQLKQFIRQKLSDKYNEVFSDVSKDGYAGYIDGKTNQEAFYKYLKGLLNKIEGSGYFLDKIEREDFLRKQRTFDNGSIPHQIHLQEMRAIIRRQSEFYPFLADNQDRIEKILTFRIPYYVGPLARGKSDFAWLSRKSADKITPWNFDEIVDKESSAEAFINRMTNYDLYLPNQKVLPKHSLLYEKFTVYNELTKVKYKTEQGETAFFDANMKQEIFDGVFKVYRKVTKDKLMDFLEKEFDEFRIVDLTGLDKENKAFNASYGTYHDLRKILDKDFLDNSKNEKILEDIVLTLTLFEDREMIRKRLKNYSDLLTKEQLKKLERRHYTGWGRLSAELIHGIRNKESRKTILDYLIDDGNSNRNFMQLINDDALSFKEEIAKAQVIGETDNLNQVVSDIAGSPAIKKGILQSLKIVDELVKIMGHQPENIVVEMARENQFTNQGRRNSQQRLKGLTDSIKEFGSQILKEHPVENSQLQNDRLFLYYLQNGRDMYTGEELDIDYLSQYDIDHIIPQAFIKDNSIDNRVLTSSKENRGKSDDVPSKDVVRKMKPYWSKLLSAKLITQRKFDNLTKAERGGLTDDDKAGFIKRQLVETRQITKHVARILDERFNTETDENNKKIRQVKIVTLKSNLVSNFRKEFELYKVREINDYHHAHDAYLNAVIGKALLGVYPQLEPEFVYGDYPHFHGHEENKATAKKFFYSNIMNFFKKDDVRTDKNGEIIWKKDEHISNIKKVLSYPQVNIVKKVEEQTGGFSKESILPKGNSDKLIPRKTKKFYWDTKKYGGFDSPIVAYSILVIADIEKGKSKKLKTVKALVGVTIMEKMTFERDPVAFLERKGYRNVQEENIIKLPKYSLFKLENGRKRLLASARELQKGNEIVLPNHLGTLLYHAKNIHKVDEPKHLDYVDKHKDEFKELLDVVSNFSKKYTLAEGNLEKIKELYAQNNGEDLKELASSFINLLTFTAIGAPATFKFFDKNIDRKRYTSTTEILNATLIHQSITGLYETRIDLSKLGGD

SEQ ID NO: 488 - protein, 1345 aa, Streptococcus mutans; identical to SEQ ID NO: 487
  Streptococcus mutans 5SM3

SEQ ID NO: 489 - protein, 1359 aa, Streptococcus mutans
  Streptococcus mutans 66-2A
MKKPYSIGLDIGTNSVGWAVVTDDYKVPAKKMKVLGNTDKSHIKKNLLGALLFDSGNTAEDRRLKRTARRRYTRRRNRILYLQEIFAEEMMQVDESFFQRLDDSFLVEEDKRGSRYPIFGTLKEEKKYHKEFKTIYHLREKLANSTEKADLRLVYLSLAHMIKFRGHFLIEGQLKAENTNVQALFKDFVEVYDKTVEESHLSEMTVDALSILTEKVSKSRRLENLVECYPTEKKNTLFGNLIALSLGLQPNFKTNFQLSEDAKLQFSKDTYEEDLEGLLGEIGDEYADLFASAKNLYDAILLSGILAVDDNTTKAPLSASMVKRYKEHKEELAAFKRFIKEKLPKKYEEIFKDDTKNGYAGYVGADKKLRKRSGKLATEEEFYKYVKGILNKVEGADVWLDKIDREDFLRKQRTFDNGSIPHQIHLQEMHAILRRQGEHYPFLKENQDKIEKILTFRIPYYVGPLVRKGSRFAWAEYKADEKITPWNFDDILDKEKSAEKFITRMTLNDLYLPEEKVLPKHSLLYETFTVYNELTKVKYVNEQGEAKFFDANMKQEIFDHVFKENRKVTKDKLLNYLNKEFEEFRIVNLTGLDKENKVFNSSLGTYHDLRKILNKSFLDNKENEQIIEDIIQTLTLFEDREMIRQRLQKYSDIFTKAQLKKLERRHYTGWGRLSYKLINGIRDKQSNKTILGYLIDDGYSNRNFMQLINDDALSFKEEIAKAQVIGEMDGLNQVVSDIAGSPAIKKGILQSLKIVDELVKVMGHNPANIVIEMARENQTTAKGRRSSQKRYKRLEEAIKNLDHDLNHKILKEHPTDNQALQNDRLFLYYLQNGRDMYTEDPLDINRLSDYDIDHIIPQAFIKDNSIDNRVLTRSDKNRGKSDDVPSEEVVHKMKPFWSKLLSAKLITQRKFDNLTKAERGGLTDDDKAGFIKRQLVETRQITKHVARILDERFNTETDENNKKIRQVKIVTLKSNLVSNFRKEFELYKVREINDYHHAHDAYLNAVIGKALLGVYPQLEPEFVYGDYPHFHGHKENKATAKKFFYSNIMNFFKKGDVRTDKNGEIIWKKDEHISNIKKVLSYPQVNIVKKVEEQTGGFSKESILPKGNSDKLIPRKTKKFYWDTKKYGGFDSPIVAYSILVIADIEKGKSKKLKTVKALVGVTIMEKMTFERDPVAFLERKGYRNVQEENIIKLPKYSLFKLENGRKRLLASARELQKGNEIVLPNHLETLLYHAKNIHKVDEPKHLDYVDKHKDEFKELLDVVSNFSKKYTLAEGNLEKIKELYAQNNGEDLKELASSFINLLTFTAIGAPAAFKFFDKNIDRKRYTSTTEILNATLIHQSITGLYETRIDLNKLGGD

SEQ ID NO: 490 - protein, 1359 aa, Streptococcus mutans; identical to SEQ ID NO: 489
  Streptococcus mutans 66-2A

SEQ ID NO: 491 - protein, 1345 aa, Streptococcus mutans
  Streptococcus mutans 8ID3
MKKPYSIGLDIGTNSVGWAVVTDDYKVPAKKMKVLGNTDKSHIEKNLLGALLFDSGNTAEDRRLKRTARRRYTRRRNRILYLQEIFSEEMGKVDDSFFHRLEDSFLVTEDKRGERHPIFGNLEEEVKYHENFPTIYHLRQYLADNPEKVDLRLVYLALAHIIKFRGHFLIEGKFDTRNNDVQRLFQEFLAVYDNTFENSSLQEQNVQVEEILTDKISKSAKKDRVLKLFPNEKSNGRFAEFLKLIVGNQADFKKHFELEEKAPLQFSKDTYEEELEVLLAQIGDNYAELFLSAKKLYDSILLSGILTVTDVGTKAPLSASMIQRYNEHQMDLAQLKQFIRQKLSDKYNEVFSDVSKDGYAGYIDGKTNQEAFYKYLKGLLNKIEGSGYFLDKIEREDFLRKQRTFDNGSIPHQIHLQEMRAIIRRQAEFYPFLADNQDRIEKLLTFRIPYYVGPLARGKSDFAWLSRKSADKITPWNFDEIVDKESSAEAFINRMTNYDLYLPNQKVLPKHSLLYEKFTVYNELIKVKYKTEQGKTAFFDANMKQEIFDGVFKVYRKVTKDKLMDFLEKEFDEFRIVDLTGLDKENKVFNASYGTYHDLCKILDKDFLDNSKNEKILEDIVLTLTLFEDREMIRKRLENYSDLLTKEQVKKLERRHYTGWGRLSAELIHGIRNKESRKTILDYLIDDGNSNRNFMQLINDDALSFKEEIAKAQVIGETDNLNQVVSDIAGSPAIKKGILQSLKIVDELVKIMGHQPENIVVEMARENQFTNQGRRNSQQRLKGLTDSIKEFGSQILKEHPVENSQLQNDRLFLYYLQNGRDMYTGEELDIDYLSQYDIDHIIPQAFIKDNSIDNRVLTSSKENRGKSDDVPSKDVVRKMKSYWSKLLSAKLITQRKFDNLTKAERGGLTDDDKAGFIKRQLVETRQITKHVARILDERFNTETDENNKKIRQVKIVTLKSNLVSNFRKEFELYKVREINDYHHAHDAYLNAVIGKALLGVYPQLEPEFVYGDYPHFHGHKENKATAKKFFYSNIMNFFKKDDVRTDKNGEIIWKKDEHISNIKKVLSYPQVNIVKKVEEQTGGFSKESILPKGNSDKLIPRKTKKFYWDTKKYGGFDSPIVAYSILVIADIEKGKSKKLKTVKALVGVTIMEKMTFERDPVAFLERKGYRNVQEENIIKLPKYSLFKLENGRKRLLASARELQKGNEIVLPNHLGTLLYHAKNIHKVDEPKHLDYVDKHKDEFKELLDVVSNFSKKYTLAEGNLEKIKELYAQNNGEDLKELASSFINLLTFTAIGAPATFKFFDKNIDRKRYTSTTEILNATLIHQSITGLYETRIDLNKLGGD

SEQ ID NO: 492 - protein, 1345 aa, Streptococcus mutans; identical to SEQ ID NO: 491
  Streptococcus mutans 8ID3

SEQ ID NO: 493 - protein, 1345 aa, Streptococcus mutans
  Streptococcus mutans A19
MKKPYSIGLDIGTNSVGWSVVTDDYKVPAKKMKVLGNTDKSHIEKNLLGALLFDSGNTAEDRRLKRTARRRYTRRRNRILYLQEIFSEEMGKVDDSFFHRLEDSFLVTEDKRGERHPIFGNLEEEVKYHENFPTIYHLRQYLADNPEKVDLRLVYLALAHIIKFRGHFLIEGKFDTRNNDVQRLFQEFLAVYDNTFENSSLQEQNVQVEEILTDKISKSAKKDRVLKLFPNEKSNGRFAEFLKLIVGNQADFKKHFELEEKAPLQFSKDTYEEELEVLLAQIGDNYAELFLSAKKLYDSILLSGILTVTDVGTKAPLSASMIQRYNEHQMDLAQLKQFIRQKLSDKYNEVFSDVSKDGYAGYIDGKTNQEAFYKYLKGLLNKIEGSGYFLDKIEREDFLRKQRTFDNGSIPHQIHLQEMRAIIRRQAEFYPFLADNQDRIEKLLTFRIPYYVGPLARGKSDFAWLSRKSADKITPWNFDEIVDKESSAEAFINRMTNYDLYLPNQKVLPKHSLLYEKFTVYNELTKVKYKTEQGKTAFFDANMKQEIFDGVFKVYRKVTKDKLMDFLEKEFDEFRIVDLTGLDKENKVFNASYGTYHDLCKILDKDFLDNSKNEKILEDIVLTLTLFEDREMIRKRLENYSDLLTKEQVKKLERRHYTGWGRLSAELIHGIRNKESRKTILDYLIDDGNSNRNFMQLINDDALSFKEEIAKAQVIGETDNLNQVVSDIAGSPAIKKGILQSLKIVDELVKIMGHQPENIVVEMARENQFTNQGRRNSQQRLKGLTDSIKEFGSQILKEHPVENSQLQNDRLFLYYLQNGRDMYTGEELDIDYLSQYDIDHIIPQAFIKDNSIDNRVLTSSKENRGKSDDVPSKDVVRKMKSYWSKLLSAKLITQRKFDNLTKAERGGLTDDDKAGFIKRQLVETRQITKHVARILDERFNTETDENNKKIRQVKIVTLKSNLVSNFRKEFELYKVREINDYHHAHDAYLNAVIGKALLGVYPQLEPEFVYGDYPHFHGHKENKATAKKFFYSNIMNFFKKDDVRIDKNGEIIWKKDEHISNIKKVLSYPQVNIVKKVEEQTGGFSKESILPKGNSDKLIPRKTKKFYWDTKKYGGFDSPIVAYSILVIADIEKGKSKKLKTVKALVGVTIMEKMTFERDPVAFLERKGYRNVQEENIIKLPKYSLFKLENGRKRLLASARELQKGNEIVLPNHLGTLLYHAKNIHKVDEPKHLDYVDKHKDEFKELLDVVSNFSKKYTLAEGNLEKIKELYAQNNGEDLKELASSFINLLTFTAIGAPATFKFFDKNIDRKRYTSTTEILNATLIHQSITGLYETRIDLSKLGGD

SEQ ID NO: 494 - protein, 1345 aa, Streptococcus mutans; identical to SEQ ID NO: 493
  Streptococcus mutans A19

SEQ ID NO: 495 - protein, 1345 aa, Streptococcus mutans; identical to SEQ ID NO: 472
  Streptococcus mutans B

SEQ ID NO: 496 - protein, 1345 aa, Streptococcus mutans; identical to SEQ ID NO: 472
  Streptococcus mutans G123

SEQ ID NO: 497 - protein, 1345 aa, Streptococcus mutans
MKKPYSIGLDIGTNSVGWAVVTDDYKVPAKKMKVLGNTDKSHIKKNLLGALLFDSGNTAEDRRLKRTARRRYTRRRNRILYLQEIFSEEMGKVDDSFFHRLDESFLTDDDKNFDSHPIFGNKAEEDAYHQKFPTIYHLRKHLADSTEKADLRLVYLALAHMIKFRGHFLIEGELNAENTDVQKLFADFVGVYDRTFDDSHLSEITVDASSILTEKISKSRRLEKLINNYPKEKKNTLFGNLIALSLGLQPNFKTNFKLSEDAKLQFSKDTYEEELEVLLAQIGDNYAELFLSAKKLYDSILLSGILTVTDVSTKAPLSASMIQRYNEHQMDLAQLKQFIRQKLSDKYNEVFSDVSKDGYAGYIDGKTNQEAFYKYLKGLLNKIEGSGYFLDKIEREDFLRKQRTFDNGSIPHQIHLQEMRAIIRRQAEFYPFLADNQDRIEKILTFRIPYYVGPLARGKSDFAWLSRKSADKITPWNFDEIVDKESSVEAFINRMTNYDLYLPNQKVLPKHSLLYEKFTVYNELTKVKYKTEQGKTAFFDANMKQEIFDGVFKVYRKVTKDKLMDFLEKEFDEFRIVDLTGLDKENKAFNASYGTYHDLRKILDKDFLDNSKNEKILEDIVLTLTLFEDREMIRKRLKNYSDLLTKEQLKKLERRHYTGWGRLSAELIHGIRNKESRKTILDYLIDDGNSNRNFMQLINDDALSFKEEIAKAQVIGETDNLNQVVSDIAGSPAIKKGILQSLKIVDELVKIMGHQPENIVVEMARENQFTNQGRRNSQQRLKGLTDSIKEFGSQILKEHPVENSQLQNDRLFLYYLQNGRDMYTGEELDIDYLSQYDIDHIIPQAFIKDNSIDNRVLTSSKENRGKSDDVPSKDVVRKMKSYWSKLLSAKLITQRKFDNLTKGERGGLTDDDKAGFIKRQLVETRQITKHVARILDERFNTETDENNKKIRQVKIVTLKSNLVSNFRKEFELYKVREINDYHHAHDAYLNAVIGKALLGVYPQLEPEFVYGDYPHFHGHKENKATAKKFFYSNIMNFFKKDDVRTDKNGEIIWKKDEYISNIKKVLSYPQVNIVKKVEEQTGGFSKESILPKGDSDKLIPRKTKKFYWDTKKYGGFDSPIVAYSILVIADIEKGKSKKLKTVKALVGVTIMEKMTFERDPVAFLERKGYRNVQEENIIKLPKYSLFKLENGRKRLLASARELQKGNEIVLPNHLGTLLYHAKNIHKVDEPKHLDYVDKHKDEFKELLDVVSNFSKKYTLAEGNLEKIKELYAQNNGEDLKELASSFINLLTFTAIGAPATFKFFDKNIDRKRYTSTTEILNATLIHQSITGLYETRIDLSKLGGD

SEQ ID NO: 498 - protein, 1345 aa, Streptococcus mutans
MKKPYSIGLDIGTNSVGWAVVTDDYKVPDKKMKVLGNTDKSHIKKNLLGALLFDSGNTAEDRRLKRTARRRYTRRRNRILYLQEIFSEEMGKVDDSFFHRLEDSFLVTEDKRGERHPIFGNLEEEVKYHENFPTIYHLRQYLADNPEKTDLRLVYLALAHIIKFRGHFLIEGKFDTRNNDVQRLFQEFLAVYDNTFENSSLQEQNVQVEEILTDKISKSAKKDRVLKLFPNEKSNGRFAEFLKLIVGNQADFKKHFELEEKAPLQFSKDIYEEELEVLLAQIGDNYAELFLSAKKLYDSILLSGILTVTDVSTKAPLSASMIQRYNEHQMDLAQLKQFIRQKLSDKYNEVFSDVSKDGYAGYIDGKTNQEAFYKYLKGLLNKIEGSGYFLDKIEREDFLRKQRTFDNGSIPHQIHLQEMRAIIRRQAEFYPFLADNQDRIEKILTFRIPYYVGPLARGKSDFAWLSRKSADKITPWNFDEIVDKESSVEAFINRMTNYDLYLPNQKVLPKHSLLYEKFTVYNELTKVKYKTEQGKTAFFDANMKQEIFDGVFKVYRKVTKDKLMDFLEKEFDEFRIVDLTGLDKENKAFNASYGTYHDLRKILDKDFLDNSKNEKILEDIVLTLTLFEDREMIRKRLKNYSDLLTKEQLKKLERRHYTGWGRLSAELIHGIRNKESRKTILDYLIDDGNSNRNFMQLINDDALSFKEEIAKAQVIGETDNLNQVVSDIAGSPAIKKGILQSLKIVDELVKIMGHQPENIVVEMARENQFTNQGRRNSQQRLKGLTDSIKEFGSQILKEHPVENSQLQNDRLFLYYLQNGRDMYTGEELDIDYLSQYDIDHIIPQAFIKDNSIDNRVLTSSKENRGKSDDVPSKDVVRKMKSYWSKLLSAKLITQRKFDNLTKAERGGLTDDDKAGFIKRQLVETRQITKHVARILDERFYTETDENNKKIRQVKIVTLKSNLVSNFRKEFELYKVREINDYHHAHDAYLNAVIGKALLGVYPQLEPEFVYGDYPHFHGHKENKATAKKFFYSNIMNFFKKDDVRTDKNGEIIWKKDEHISNIKKVLSYPQVNIVKKVEEQTGGFSKESILPKGNSDKLIPRKTKKFYWDTKKYGGFDSPIVAYSILVIADIEKGKSKKLKTVKALVGVTIMEKMTFERDPVAFLERKGYRNVQEENIIKLPKYSLFKLENGRKRLLASARELQKGNEIVLPNHLGTLLYHAKNIHKVDEPKHLDYVDKHKDEFKELLDVVSNFSKKYTLAEGNLEKIKELYAQNNGEDLKELASSFINLLTFTAIGAPATFKFFDKNIDRKRYTSTTEILNATLIHQSITGLYETRIDLSKLGGD

SEQ ID NO: 499 - protein, 1345 aa, Streptococcus mutans
  Streptococcus mutans M21
MKKPYSIGLDIGTNSVGWAVVTDDYKVPAKKMKVLGNTDKSHIKKNLLGALLFDSGNTAEDRRLKRTARRRYTRRRNRILYLQEIFSEEMGKVDDSFFHRLEDSFLVTEDKRGERHPIFGNLEEEVKYHENFPTIYHLRQYLADNPEKTDLRLVYLALAHIIKFRGHFLIEGKFDTRNNDVQRLFQEFLAVYDNTFENSSLQEQNVQVEEILTDKISKSAKKDRVLKLFPNEKSNGRFAEFLKLIVGNQADFKKHFELEEKAPLQFSKDIYEEELEVLLAQIGDNYAELFLSAKKLYDSILLSGILTVTDVSTKAPLSASMIQRYNEHQMDLAQLKQFIRQKLSDKYNEVFSDVSKDGYAGYIDGKTNQEAFYKYLKGLLNKIEGSGYFLDKIEREDFLRKQRTFDNGSIPHQIHLQEMRAIIRRQAEFYPFLADNQDRIEKILTFRIPYYVGPLARGKSDFAWLSRKSADKITPWNFDEIVDKESSVEAFINRMTNYDLYLPNQKVLPKHSLLYEKFTVYNELTKVKYKTEQGKTAFFDANMKQEIFDGVFKVYRKVTKDKLMDFLEKEFDEFRIVDLTGLDKENKAFNASYGTYHDLRKILDKDFLDNSKNEKILEDIVLTLTLFEDREMIRKRLKNYSDLLTKEQLKKLERRHYTGWGRLSAELIHGIRNKESRKTILDYLIDDGNSNRNFMQLINDDALSFKEEIAKAQVIGETDNLNQVVSDIAGSPAIKKGILQSLKIVDELVKIMGHQPENIVVEMARENQFTNQGRRNSQQRLKGLTDSIKEFGSQILKEHPVENSQLQNDRLFLYYLQNGRDMYTGEELDIDYLSQYDIDHIIPQAFIKDNSIDNRVLTSSKENRGKSDDVPSKNVVRKMKSYWSKLLSAKLITQRKFDNLTKAERGGLTDDDKAGFIKRQLVETRQITKHVARILDERFHTETDENNKKIRQVKIVTLKSNLVSNFRKEFELYKVREINDYHHAHDAYLNAVIGKALLGVYPQLEPEFVYGDYPHFHGHKENKATAKKFFYSNIMNFFKKDDVRTDKNGEIIWKKDEHISNIKKVLSYPQVNIVKKVEEQTGGFSKESILPKGNSDKLIPRKTKKFYWDTKKYGGFDSPIVAYSILVIADIEKGKSKKLKTVKALVGVTIMEKMTFERDPVAFLERKGYRNVQEENIIKLPKYSLFKLENGRKRLLASARELQKGNEIVLPNHLGTLLYHAKNIHKVDEPKHLDYVDKHKDEFKELLDVVSNFSKKYTLAEGNLEKIKELYAQNNGEDLKELASSFINLLTFTAIGAPATFKFFDKNIDRKRYTSTTEILNATLIHQSITGLYETRIDLSKLGGD

SEQ ID NO: 500 - protein, 1345 aa, Streptococcus mutans; identical to SEQ ID NO: 499
  Streptococcus mutans M21

SEQ ID NO: 501 - protein, 1345 aa, Streptococcus mutans
  Streptococcus mutans M230
MKKPYSIGLDIGTNSVGWAVVTDDYKVPAKKMKVLGNTDKSHIKKNLLGALLFDSGNTAEDRRLKRTARRRYTRRRNRILYLQEIFSEEMGKVDDSFFHRLEDSFLVTEDKRGERHPIFGNLEEEVKYHENFPTIYHLRQYLADNPEKVDLRLVYLALAHIIKFRGHFLIEGKFDTRNNDVQRLFQEFLAVYDNTFENSSLQEQNVQVEEILTDKISKSAKKDRVLKLFPNEKSNGRFAEFLKLIVGNQADFKKHFELEEKAPLQFSKDTYEEELEVLLAQIGDNYAELFLSAKKLYDSILLSGILTVTDVSTKAPLSASMIQRYNEHQMDLAQLKQFIRQKLSDKYNEVFSDVSKDGYAGYIDGKTNQEAFYKYLKGLLNKIEGSGYFLDKIEREDFLRKQRTFDNGSIPHQIHLQEMRAIIRRQAEFYPFLADNQDRIEKILTFRIPYYVGPLARGKSDFAWLSRKSADKITPWNFDEIVDKESSAEAFINRMTNYDLYLPNQKVLPKHSLLYEKFTVYNELTKVKYKTEQGKTAFFDANMKQEIFDGVFKVYRKVTKDKLMDFLEKEFDEFRIVDLTGLDKENKVFNASYGTYHDLCKILDKDFLDNSKNEKILEDIVLTLTLFEDREMIRKRLENYSDLLTKEQVKKLERRHYTGWGRLSAELIHGIRNKESRKTILDYLIDDGNSNRNFMQLINDDALSFKEEIAKAQVIGETDNLNQVVSDIAGSPAIKKGILQSLKIVDELVKIMGHQPENIVVEMARENQFTNQGRQNSQQRLKGLTDSIKEFGSQILKEHPVENSQLQNDRLFLYYLQNGRDMYTGEELDIDYLSQYDIDHIIPQAFIKDNSIDNRVLTSSKENRGKSDDVPSEDVVRKMKSYWSKLLSAKLITQRKFDNLTKAERGGLTDDDKAGFIKRQLVETRQITKHVARILDERFYTETDENNKKIRQVKIVTLKSNLVSNFRKEFELYKVREINDYHHAHDAYLNAVIGKALLGVYPQLEPEFVYGDYPHFHGHKENKATAKKFFYSNIMNFFKKDDVRTDKNGEIIWKKDEHISNIKKVLSYPQVNIVKKVEEQTGGFSKESILPKGNSDKLIPRKTKKFYWDTKKYGGFDSPIVAYSILVIADIEKGKSKKLKTVKALVGVTIMEKMTFERDPVAFLERKGYRNVQEENIIKLPKYSLFKLENGRKRLLASARELQKGNEIVLPNHLGTLLYHAKNIHKVDEPKHLDYVDKHKDEFKELLDVVSNFSKKYTLAEGNLEKIKELYAQNNGEDLKELASSFINLLTFTAIGAPATFKFFDKNIDRKRYTSTTEILNATLIHQSITGLYETRIDLSKLGGD

SEQ ID NO: 502 - protein, 1345 aa, Streptococcus mutans; identical to SEQ ID NO: 501
  Streptococcus mutans M230

SEQ ID NO: 503 - protein, 1345 aa, Streptococcus mutans
  Streptococcus mutans M2A
MKKPYSIGLDIGTNSVGWAVVTDDYKVPAKKMKVLGNTDKSHIKKNLLGALLFDSGNTAEDRRLKRTARRRYTRRRNRILYLQEIFSEEMGKVDDSFFHRLEDSFLVTEDKRGERHPIFGNLEEEVKYHENFPTIYHLRQYLADNPEKTDLRLVYLALAHIIKFRGHFLIEGKFDTRNNDVQRLFQEFLAVYDNTFENSSLQEQNVQVEEILTDKISKSAKKDRVLKLFPNEKSNGRFAEFLKLIVGNQADFKKHFELEEKAPLQFSKDIYEEELEVLLAQIGDNYAELFLSAKKLYDSILLSGILTVTDVSTKAPLSASMIQRYNEHQMDLAQLKQFIRQKLSDKYNEVFSDVSKDGYAGYIDGKTNQEAFYKYLKGLLNKIEGSGYFLDKIEREDFLRKQRTFDNGSIPHQIHLQEMRAIIRRQAEFYPFLADNQDRIEKILTFRIPYYVGPLARGKSDFAWLSRKSADKITPWNFDEIVDKESSVEAFINRMTNYDLYLPNQKVLPKHSLLYEKFTVYNELTKVKYKTEQGKTAFFDANMKQEIFDGVFKVYRKVTKDKLMDFLEKEFDEFRIVDLTGLDKENKAFNASYGTYHDLRKILDKDFLDNSKNEKILEDIVLTLTLFEDREMIRKRLKNYSDLLTKEQLKKLERRHYTGWGRLSAELIHGIRNKESRKTILDYLIDDGNSNRNFMQLINDDALSFKEEIAKAQVIGETDNLNQVVSDIAGSPAIKKGILQSLKIVDELVKIMGHQPENIVVEMARENQFTNQGRRNSQQRLKGLTDSIKEFGSQILKEHPVENSQLQNDRLFLYYLQNGRDMYTGEELDIDYLSQYDIDHIIPQAFIKDNSIDNRVLTSSKENRGKSDDVPSKDVVRKMKSYWSKLLSAKLITQRKFDNLTKAERGGLTDDDKAGFIKRQLVETRQITKHVARILDERFNTETDENNKKIRQVKIVTLKSNLVSNFRKEFELYKVREINDYHHAHDAYLNAVIGKALLGVYPQLEPEFVYGDYPHFHGHKENKATAKKFFYSNIMNFFKKDDVRTDKNGEIIWKKDEHISNIKKVLSYPQVNIVKKVEEQTGGFSKESILPKGNSYKLIPRKTKKFYWDTKKYGGFDSPIVAYSILVIADIEKGKSKKLKTVKALVGVTIMEKMTFERDPVAFLERKGYRNVQEENIIKLPKYSLFKLENGRKRLLASARELQKGNEIVLPNHLGTLLYHAKNIHKVDEPKHLDYVDKHKDEFKELLDVVSNFSKKYTLAEGNLEKIKELYAQNNGEDLKELASSFINLLTFTAIGAPAAFKFFDKNIDRKRYTSTTEILNATLIHQSITGLYETRIDLSKLGGD

SEQ ID NO: 504 - protein, 1345 aa, Streptococcus mutans; identical to SEQ ID NO: 503
  Streptococcus mutans M2A

SEQ ID NO: 505 - protein, 1345 aa, Streptococcus mutans
  Streptococcus mutans N29
MKKPYSIGLDIGTNSVGWAVVTDDYKVPAKKMKVLGNTDKSHIKKNLLGALLFDSGNTAADRRLKRTARRRYTRRRNRILYLQEIFAEEMSKVDDSFFHRLEDSFLVTEDKRGERHPIFGNLEEEVKYHENFPTIYHLRQYLADNPEKVDLRLVYLALAHIIKFRGHFLIEGKFDTRNNDVQRLFQEFLAVYDNTFENSSLQEQNVQVEEILTDKISKSAKKDRVLKLFPNEKSNGRFAEFLKLIVGNQADFKKHFELEEKAPLQFSKDTYEEELEVLLAQIGDNYAELFLSAKKLYDSILLSGILTVTDVSTKAPLSASMIQRYNEHQMDLAQLKQFIRQKLSDKYNEVFSDVSKDGYAGYIDGKTNQEAFYKYLKGLLNKIEGSGYFLDKIEREDFLRKQRTFDNGSIPHQIHLQEMRAIIRRQAEFYPFLADNQDRIEKILTFRIPYYVGPLARGKSDFAWLSRKSADKITPWNFDEIVDKESSAEAFINRMTNYDLYLPNQKVLPKHSLLYEKFTVYNELTKVKYKTEQGKTAFFDANMKQEIFDGVFKVYRKVTKDKLMDFLEKEFDEFRIVDLTGLDKENKAFNASYGTYHDLRKILDKDFLDNSKNEKILEDIVLTLTLFEDREMIRKRLENYSDLLTKEQVKKLERRHYTGWGRLSAELIHGIRNKESRKTILDYLIDDGNSNRNFMQLINDDALSFKEEIAKAQVIGETDNLNQVVSDIAGSPAIKKGILQSLKIVDELVKIMGHQPENIVVEMARENQFTNQGRRNSQQRLKGLTDSIKEFGSQILKEHPVENSQLQNDRLFLYYLQNGRDMYTGEELDIDYLSQYDIDHIIPQAFIKDNSIDNRVLTSSKENRGKSDDVPSKNVVRKMKSYWSKLLSAKLITQRKFDNLTKAERGGLTDDDKAGFIKRQLVETRQITKHVARILDERFHTETDENNKKIRQVKIVTLKSNLVSNFRKEFELYKVREINDYHHAHDAYLNAVIGKALLGVYPQLEPEFVYGDYPHFHGHKENKATAKKFFYSNIMNFFKKDDVRTDKNGEIIWKKDEHISNIKKVLSYPQVNIVKKVEEQTGGFSKESILPKGNSDKLIPRKTKKFYWDTKKYGGFDSPIVAYSILVIADIEKGKSKKLKTVKALVGVTIMEKMTFERDPVAFLERKGYRNVQEENIIKLPKYSLFKLENGRKRLLASARELQKGNEIVLPNHLGTLLYHAKNIHKVDEPKHLDYVDKHKDEFKELLDVVSNFSKKYTLAEGNLEKIKELYAQNNGEDLKELSSSFINLLTFTAIGAPAAFKFFDKNIDRKRYTSTTEILNATLIHQSITGLYETRIDLSKLGGD

SEQ ID NO: 506 - protein, 1345 aa, Streptococcus mutans; identical to SEQ ID NO: 505
  Streptococcus mutans N29

SEQ ID NO: 507 - protein, 1345 aa, Streptococcus mutans
  Streptococcus mutans N3209
MKKPYSIGLDIGTNSVGWAVVTDDYKVPAKKMKVLGNTDKSHIKKNLLGALLFDSGNTAEDRRLKRTTRRRYTRRRNRILYLQEIFSEEMGKVDDSFFHRLEDSFLVTEDKRGERHPIFGNLEEEVKYHENFPTIYHLRQYLADNPEKTDLRLVYLALAHIIKFRGHFLIEGKFDTRNNDVQRLFQEFLAVYDNTFENSSLQEQNVQVEEILTDKISKSAKKDRVLKLFPNEKSNGCFAEFLKLIVGNQADFKKHFELEEKAPLQFSKDTYEEELEVLLAQIGDNYAELFLSAKKLYDSILLSGILTVTDVSTKAPLSASMIQRYNEHQMDLTQLKQFIRQKLSDKYNEVFSDVSKDGYAGYIDGKTNQEAFYKYLKGLLNKIEGSGYFLDKIEREDFLRKQRTFDNGSIPHQIHLQEMRAIIRRQAEFYPFLADNQDRIEKLLTFRIPYYVGPLASGKSDFAWLSRKSADKITPWNFDEIVDKESSAEAFINRMTNYDLYLPNQKVLPKHSLLYEKFTVYNELTKVKYKTEQGKTAFFDANMKQEIFDGVFKVYRKVTKDKLMDFLEKEFDEFRIVDLTGLDKENKVFNASYGTYHDLCKILDKDFLDNSKNEKILEDIVLTLTLFEDREMIRKRLENYSDLLTKEQVKKLERRHYTGWGRLSAELIHGIRNKESRKTILDYLIDDGNSNRNFMQLINDDALSFKEEIAKAQVIGETDNLNQVVSDIAGSPAIKKGILQSLKIVDELVKIMGHQPENIVVEMARENQFTNQGRRNSQQRLKGLTDSIKEFGSQILKEHPVENSQLQNDRLFLYYLQNGRDMYTGEELDIDYLSQYDIDHIIPQAFIKDNSIDNRVLTSSKENRGKSDDVPSKDVVRKMKSYWSKLLSAKLITQRKFDNLTKAERGGLTDDDKAGFIKRQLVETRQITKHVARILDERFNTETDENNKKIRQVKIVTLKSNLVSNFRKEFELYKVREINDYHHAHDAYLNAVIGKALLGVYPQLEPEFVYGDYPHFHGHKENKATAKKFFYSNIMNFFKKDDVRTDKNGEIIWKKDEHISNIKKVLSYPQVNIVKKVEEQTGGFSKESILPKGNSDKLIPRKTKKFYWDTKKYGGFDSPIVAYSILVIADIEKGKSKKLKTVKALVGVTIMEKMTFERDPVAFLERKGYRNVQEENIIKLPKYSLFKLENGRKRLLASARELQKGNEIVLPNHLGTLLYHAKNIHKVDEPKHLDYVDKHKDEFKELLDVVSNFSKKYTLAEGNLEKIKELYAQNNGEDLKELASSFINLLTFTAIGAPATFKFFDKNIDRKRYTSTTEILNATLIHQSITGLYETRIDLSKLGGD

SEQ ID NO: 508 - protein, 1345 aa, Streptococcus mutans; identical to SEQ ID NO: 507
  Streptococcus mutans N3209

SEQ ID NO: 509 - protein, 1345 aa, Streptococcus mutans
  Streptococcus mutans N66
MKKPYSIGLDIGTNSVGWAVVTDDYKVPAKKMKVLGNTDKSHIKKNLLGALLFDSGNTAEDRRLKRTARRRYTRRRNRILYLQEIFSEEMGKVDDSFFHRLEDSFLVTEDKRGERHPIFGNLEEEVKYHENFPTIYHLRQYLADNPEKTDLRLVYLALAHIIKFRGHFLIEGKFDTRNNDVQRLFQEFLAVYDNTFENSSLQEQNVQVEEILTDKISKSAKKDRVLKLFPNEKSNGRFAEFLKLIVGNQADFKKHFELEEKAPLQFSKDIYEEELEVLLAQIGDNYAELFLSAKKLYDSILLSGILTVTDVSTKAPLSASMIQRYNEHQMDLAQLKQFIRQKLSDKYNEVFSDVSKDGYAGYIDGKTNQEAFYKYLKGLLNKIEGSGYFLDKIEREDFLRKQRTFDNGSIPHQIHLQEMRAIIRRQAEFYPFLADNQDRIEKILTFRIPYYVGPLARGKSDFAWLSRKSADKITPWNFDEIVDKESSAEAFINRMTNYDLYLPNQKVLPKHSLLYEKFTVYNELTKVKYKTEQGKTAFFDANMKQEIFDGVFKVYRKVTKDKLMDFLEKEFDEFRIVDLTGLDKENKAFNASYGTYHDLRKILDKDFLDNSKNEKILEDIVLTLTLFEDREMIRKRLKNYSDLLTKEQLKKLERRHYTGWGRLSAELIHGIRNKESRKTILDYLIDDGNSNRNFMQLINDDALSFKEEIAKAQVIGETDNLNQVVSDIAGSLAIKKGILQSLKIVDELVKIMGHQPENIVVEMARENQFTNQGRRNSQQRLKGLTDSIKEFGSQILKEHPVENSQLQNDRLFLYYLQNGRDMYTGEELDIDYLSQYDIDHIIPQAFIKDNSIDNRVLTSSKENRGKSDDVPSKDVVRKMKSYWSKLLSAKLITQRKFDNLTKGERGGLTDDDKAGFIKRQLVETRQITKHVARILDERFNTETDENNKKIRQVKIVTLKSNLVSNFRKEFELYKVREINDYHHAHDAYLNAVIGKALLGVYPQLEPEFVYGDYPHFHGHKENKATAKKFFYSNIMNFFKKDDVRTDKNGEIIWKKDEYISNIKKVLSYPQVNIVKKVEEQTGGFFKESILPKGDSDKLIPRKTKKFYWDTKKYGGFDSPIVAYSILVIADIEKGKSKKLKTVKALVGVTIMEKMTFERDPVAFLERKGYRNVQEENIIKLPKYSLFKLENGRKRLLASARELQKGNEIVLPNHLGTLLYHAKNIHKVDEPKHLDYVDKHKDEFKELLDVVSNFSKKYTLAEGNLEKIKELYAQNNGEDLKELASSFINLLTFTAIGAPATFKFFDKNIDRKRYTSTTEILNATLIHQSITGLYETRIDLSKLGGD

SEQ ID NO: 510 - protein, 1345 aa, Streptococcus mutans; identical to SEQ ID NO: 509
  Streptococcus mutans N66

SEQ ID NO: 511 - protein, 1350 aa, Streptococcus mutans
  Streptococcus mutans NFSM1
MKKPYSIGLDIGTNSVGWAVVTDDYKVPAKKMTVLGNTDKSHIKKNLLGALLFDSGNTAADRRLKRTARRRYTRRRNRILYLQEIFAEEMSKVDDSFFHRLEDSFLVTEDKRGERHPIFGNLEEEVKYHENFPTIYHLRQYLADNPEKVDLRLVYLALAHIIKFRGHFLIEGKFDTRNNDVQRLFQEFLAVYDNTFENSSLQEQNVQVEEILTDKISKSAKKDRVLKLFPNEKSNGRFAEFLKLIVGNQADFKKHFELEEKTPLQFSKDTYEEELEVLLAQIGDNYAELFLSAKKLYDSILLSGILTVTDVSTKAPLSASMIQRYNEHQMDLAQLKQFIRQKLSDKYNEVFSDVSKDGYAGYIDGKTNQEAFYKYLKGLLNKIEGSGYFLDKIEREDFLRKQRTFDNGSIPHQIHLQEMRAIIRRQAEFYPFLADNQDRIEKILTFRIPYYVGPLARGKSDFAWLSRKSADKITPWNFDEIVDKESSAEAFINRMTNYDLYLPNQKVLPKHSLLYEKFTVYNELTKVKYKTEQGKTAFFDANMKQEIFDGVFKVYRKVTKDKLMDFLEKEFDEFRIVDLTGLDKENKAFNASYGTYHDLRKILDKDFLDNSKNEKILEDIVLTLTLFEDREMIRKRLENYSDLLTKEQVKKLERRHYTGWGRLSAELIHGIRNKESRKTILDYLIDDGNSNRNFMQLINDDALSFKEEIAKAQVIGETDNLNQVVSDIAGSPAIKKGILQSLKIVDELVKIMGHQPENIVVEMARENQFTNQGRRNSQQRLKGLTDSIKEFGSQILKEHPVENSQLQNDRLFLYYLQNGRDMYTGEELDIDYLSQYDIDHIIPQAFIKDNSIDNRVLTSSKENRGKSDDVPSEDVVNRMRPFWNKLLSSGLISQRKYNNLTKKELTPDDKAGFIKRQLVETRQITKHVARMLDERFNKEFDDNNKRIRRVKIVTLKSNLVSSFRKEFELYKVREINDYHHAHDAYLNAVVVKALLVKYPKLEPEFVYGEYPKYNSYRERKTATQKMFFYSNIMNMFKSKVKLADDQIVERPMIEVNDETGEIAWDKTKHITTVKKVLSYPQVNIVKKVEEQTIGQNGGLFDDNPKSPLEVIPSKLVPLKKALNPEKYGGYQKPTTAYPILLIVDTKQLIPISVMDKKRFEQNPVKFLKDKGYQQIEKNNFVKLPKYTLVDIGNGIKRLWASSKEVHKGNQLVVSKKSQDLLYHAHHLDNDYSNEYVKNHYQQFDILFNEITSFSKKCKLGKEHIQKIEEAYSKERDSASIEELADGFIKLLGFTQLGATSPFSFLGIKLNQKQYTGKKDYLLPCMEATLIHQSITGLYETRIDLSKLGGD

SEQ ID NO: 512 - protein, 1350 aa, Streptococcus mutans; identical to SEQ ID NO: 511
  Streptococcus mutans NFSM1

SEQ ID NO: 513 - protein, 1345 aa, Streptococcus mutans; identical to SEQ ID NO: 485
  Streptococcus mutans NLML1

SEQ ID NO: 514 - protein, 1338 aa, Streptococcus mutans
  Streptococcus mutans NLML4
MDLIGTNSVGWAVVTDDYKVPAKKMKVLGNTDKSHIKKNLLGALLFDSGNTAADRRLKRTARRRYTRRRNRILYLQEIFAEEMSKVDDSFFHRLEDSFLVTEDKRGERHPIFGNLEEEVKYHENFPTIYHLRQYLADNPEKVDLRLVYLALAHIIKFRGHFLIEGKFDTRNNDVQRLFQEFLAVYDNTFENSSLQEQNVQVEEILTDKISKSAKKDRVLKLFPNEKSNGRFAEFLKLIVGNQADFKKHFELEEKAPLQFSKDTYEEELEVLLAQIGDNYAELFLSAKKLYDSILLSGILTVTDVSTKAPLSASMIQRYNEHQMDLAQLKQFIRQKLSDKYNEVFSDVSKDGYAGYIDGKTNQEAFYKYLKGLLNKIEGSGYFLDKIEREDFLRKQRTFDNGSIPHQIHLQEMRAIIRRQAEFYPFLADNQDRIEKILTFRIPYYVGPLARGKSDFAWLSRKSADKITPWNFDEIVDKESSAEAFINRMTNYDLYLPNQKVLPKHSLLYEKFTVYNELTKVKYKTEQGKTAFFDANMKQEIFDGVFKVYRKVTKDKLMDFLEKEFDEFRIVDLTGLDKENKAFNASYGTYHDLRKILDKDFLDNSKNEKILEDIVLTLTLFEDREMIRKRLENYSDLLTKEQVKKLERRHYTGWGRLSAELIHGIRNKESRKTILDYLIDDGNSNRNFMQLINDDALSFKEEIAKAQVIGETDNLNQVVSDIAGSPAIKKGILQSLKIVDELVKIMGHQPENIVVEMARENQFTNQGRRNSQQRLKGLTDSIKEFGSQILKEHPVEHSQLQNDRLFLYYLQNGRDMYTGEELDIDYLSQYDIDHIIPQAFIKDNSIDNRVLTSSKENRGKSDDVPSKNVVRKMKSYWSKLLSAKLITQRKFDNLTKAERGGLTDDDKAGFIKRQLVETRQITKHVARILDERFHTETDENNKKIRQVKIVTLKSNLVSNFRKEFELYKVREINDYHHAHDAYLNAVIGKALLGVYPQLEPEFVYGDYPHFHGHKENKATAKKFFYSNIMNFFKKDDVRTDKNGEIIWKKDEHISNIKKVLSYPQVNIVKKVEEQTGGFSKESILPKGNSDKLIPRKTKKFYWDTKKYGGFDSPIVAYSILVIADIEKGKSKKLKTVKALVGVTIMEKMTFERDPVAFLERKGYRNVQEENIIKLPKYSLFKLENGRKRLLASARELQKGNEIVLPNHLGTLLYHAKNIHKVDEPKHLDYVDKHKDEFKELLDVVSNFSKKYTLAEGNLEKIKELYAQNNGEDLKELASSFINLLTFTAIGAPATFKFFDKNIDRKRYTSTTEILNATLIHQSITGLYETRIDLSKLGGD

SEQ ID NO: 515 - protein, 1338 aa, Streptococcus mutans; identical to SEQ ID NO: 514
  Streptococcus mutans NLML4

SEQ ID NO: 516 - protein, 1128 aa, Streptococcus mutans
  Streptococcus mutans NLML5
MANSKILGLDIGIASVGVGIIDKETGKIIHVNSRIFPAATADSNVERRGFRQGRRLVRRKKHRKVRLADLFLDSNLLTDFSKVSLNLNPYQLRVKGLNEELSNEELFIALKSIVSRRGISYLDDASEDSGANSSEYGKAVEENRKLLEDRTPGQIQLERFEKYGKVRGDFTVVENGENHRLINVFSTSAYKKEAERILRRQQEFNIRIADEFIEAYLTILTGKRKYYHGPGNEKSRTDYGRFRTDGTTLDNIFGILIGKCTFYPDEYRAAKASYTAQEFNLLNDLNNLTVPTETKKLSEEQKRQIIEHAKTVKTLGAPTLLKYIAKLVGCSADDIKGYRIDKSDKPEIHTFEAYRKMRTMELIKVADLSRESLDALAHILTLNTEREGIEEAIRDRFTNKEFNQEQINELVLFRKNNSSLFGKGWHNFSLKLMKELIPELYETSEEQMTILTRLGKQRVKKSSNRTNYIDEKELTEEIYNPVVAKSVRQAIKIINLATKKYGVFDNIVIEMARESNEDDEKKAIQNAQKANEDEKEAALLKAAHQFNGKEELPDSIFHGHKELLTKIRLWHQQGEKCLYTGKTIFINDLIHNPYKYEIDHILPLSLSFDDSLANKVLVLSTANQEKGQRTPFQSLDSMDGAWTYREFKAYVKGLKTLSNKKKDYLLNEEDINKNEVKQKFIERNLVDTRYSSRVVLNTLQDFYKKREFDTKISVVRGQFTSQIRRKWRIEKTRETYHHHAVDALIIAASSQLNLWKKQNNPLISYKEDQFVDPETGEILSLSDDEYKELVFKAPYDHFVDTLKSKKFEDSILFSYQVDSKYNRKISDATIYGTRKARLGKDSQEETYVLGKIKDIYSQKGYEDFIKKYKKDKTQFLMYHKDPQTFEKVIEEILKTYSDKELNEKGKEVPCNPFEKYRQENGPVRKYSKKGNGPEIKSIKYYDNKLGNHIDITPNNSHHQVVLQSLKPWRTDVYFNPKSGKYELMGLKYSDLRFEKVSGDYGISVKKYNEIKSKEGVDENSEFKFTLYKNDLILIKDTESGEQELFRFLSRTMPNQKHYVELKPYDKSKFEGHQKLMDIFGEVAKGGQCLKGLNKSNISIYKVKTDVLGNKYFIKKEGDQPQLNFKKKI

SEQ ID NO: 517 - protein, 1128 aa, Streptococcus mutans; identical to SEQ ID NO: 516
  Streptococcus mutans NLML5

SEQ ID NO: 518 - protein, 1125 aa, Streptococcus mutans
  Streptococcus mutans NLML8
MTNGKILGLDIGIASVGVGIINAKTGNVEHASSRIFPAANADNNVERRSARGGRRLIRRKKHRLKRVEDLFEKYNIDTDFSNLNLNPYQLRVKGLNEQLSNEELFAILKNIAKRRGISYLDDAEDDSVGSSDYAKAIDENRKLLKKQTPGEIQLKRLEKYGQLRGNFTIQDENGEYHRLINVFSTSDYVKEARRILETQSYYNKFITESFVEDYIKILQGKRKYYVGPGNEKSRTDYGIYRTDGETLDNLFGILIGKCGFYPEEYRAAKASYTAQEYNFLNDLNNLTVPTETKKLSTEQKYQLVDFAKTASTLEAAKLLKEIAKLVGCQVEEIKGYRLDNKDKPDLHTFEPFRKLKSNLTTIAVENLSITTLDTLAHILTLNTEREGIEEAIQKELPNIFSDEQITGIIAVRKKNSQIFGKGWHSFSIKLMKELIPELYETSEEQMTILIRLKKVKTNSKITNRTKYINEQEVTDEIYNPVVSKSIRQTVKIINAAIKKYGAFDQIVIEMPRESNEEDERKFIADLQKSNAKEKDDAMKQAALLYNGKAELPHGVFHGHKELATKIRLWYQQGERCLYSGKHIDIHDLIHNQHMFEIDHVLPLSLSFDDSLANKVLVYSWANQEKGQRTPFQALPQMASAWSFRELRDYISKQKGISKKKRDYLLTEQDINKVEVKQKFIERNLVDTRYVSRVVLNTLQDALKVMNKETKISVIRGQFTSQLRRQWRIDKSRETYHHHAVDALIIAASSQLRLWKKQNNPMFAEDKHGQKINLDTGEVLSDDAYKELVYQAPYQGFVNTISSKSFEDEILFSYQVDSKVNRKISDATIYATRQAQLGKDKKEETYVLGKIKDIYSQAGYDAFRKKYDKDKAVFLMYQKDPETWEKVIEVILRDYKELDDKGKEIGNPFERYKVKHGFVRKYSRKNKGTEIKSLKYYDNKLGNHIDITPNNSKHSVVLQSINPWRADLYFNPETTKYELMGLKYADLSFEKGTGKYSISREKYDEIKEREGISSKSEFKFTLYKNDLILVKDIGNHKELIARFNSKNDTSKHYVELKPWNKAKFDSEEELIPAFGKVAKSGQFIKGLNKPDLSIYKVKTDILGHKYYIKKEGDKPKLNFENKIKNK

SEQ ID NO: 519 - protein, 1125 aa, Streptococcus mutans; identical to SEQ ID NO: 518
  Streptococcus mutans NLML8

SEQ ID NO: 520 - protein, 1345 aa, Streptococcus mutans
  Streptococcus mutans NLML9
MKKPYSIGLDIGTNSVGWAVVTDDYKVSAKKMKVLGNTDKSHIKKNLLGALLFDSGNTAEDRRLKRTARRRYTRRRNRILYLQEIFAEEMSKVDDSFFHRLEDSFLVTEDKRGERHPIFGNLEEEVKYHENFPTIYHLRQYLADNPEKVDLRLVYLALAHIIKFRGHFLIEGKFDTRNNDVQRLFQEFLAVYDNTFENSSLQEQNVQVEEILTDKISKSAKKDRVLKLFPNEKSNGRFAEFLKLIVGNQADFKKHFELEEKAPLQFSKDTYEEELEVLLAQIGDNYAELFLSAKKLYDSILLSGILTVTDVSTKAPLSASMIQRYNEHQMDLAQLKQFIRQKLSDKYNEVFSDVSKDGYAGYIDGKTNQEAFYKYLKGLLNKIEGSGYFLDKIEREDFLRKQRTFDNGSIPHQIHLQEMRAIIRRQAEFYPFLADNQDRIEKILTFRIPYYVGPLARGKSDFAWLSRKSADKITPWNFDEIVDKESSAEAFINRMTNYDLYLPNQKVLPKHSLLYEKFTVYNELTKVKYKTEQGKTAFFDANMKQEIFDGVFKVYRKVTKDKLMDFLEKEFDEFRIVDLTGLDKENKAFNASYGTYHDLRKILDKDFLDNSKNEKILEDIVLTLTLFEDREMIRKRLENYSDLLTKEQVKKLERRHYTGWGRLSAELIHGIRNKESRKTILDYLIDDGNSNRNFMQLINDDALSFKEEIAKAQVIGETDNLNQVVSDIAGSPAIKKGILQSLKIVDELVKIMGHQPENIVVEMARENQFTNQGRRNSQQRLKGLTDSIKEFGSQILKEHPVEHSQLQNDRLFLYYLQNGRDMYTGEELDIDYLSQYDIDHIIPQAFIKDNSIDNRVLTSSKENRGKSDDVPSKNVVRKMKSYWSKLLSAKLITQRKFDNLTKAERGGLTDDDKAGFIKRQLVETRQITKHVARILDERFHTETDENNKKIRQVKIVTLKSNLVSNFRKEFELYKVREINDYHHTHDAYLNAVIGKALLGVYPQLEPEFVYGDYPHFHGHKENKATAKKFFYSNIMNFFKKDDVRTDKNGEIIWKKDEHISNIKKVLSYPQVNIVKKVEEQTGGFSKESILPKGNSDKLIPRKTKKFYWDTKKYGGFDSPIVAYSILVIADIEKGKSKKLKTVKALVGVTIMEKMTFERDPVAFLERKGYRNVQEENIIKLPKYSLFKLENGRKRLLASARELQKGNEIVLPNHLGTLLYHAKNIHKVDEPKHLDYVDKHKDEFKELLDVVSNFSKKYTLAEGNLEKIKELYAQNNGEDLKELASSFINLLTFTAIGAPATFKFFDKNIDRKRYTSTTEILNATLIHQSITGLYETRIDLSKLGGD

SEQ ID NO: 521 - protein, 1345 aa, Streptococcus mutans; identical to SEQ ID NO: 520
  Streptococcus mutans NLML9

SEQ ID NO: 522 - protein, 1355 aa, Streptococcus mutans
  Streptococcus mutans NMT4863
MKKPYSIGLDIGTNSVGWAVVTDDYKVPAKKMKVLGNTDKSHIKKNLLGALLFDSGNTAEDRRLKRTARRRYTRRRNRILYLQEIFAEEMSKVDDSFFHRLDESFLTDDDKNFDSHPIFGNKAEEDAYHQKFPTIYHLRKHLADSTEKADLRLVYLALAHMIKFRGHFLIEGELNAENTDVQKLFADFVGVYDRTFDDSHLSEITVDASSILTEKISKSRRLEKLINNYPKEKKNTLFGNLIALSLGLQPNFKTNFKLSEDAKLQFSKDTYEEDLEELLGKIGDDYADLFTLAKNLYDAILLSGILTADDSSTKAPLSASMIKRYAEHHEDLEKLKEFIKANKPELYHDIFKDETKNGYAGYIENGVKQDEFYKYLKNTLSKITGSDYFLDQIEREDFLRKQRTFDNGSIPHQIHLQEMHAILRRQGDYYPFLKENQDRIEKILTFRIPYYVGPLARKNSRFAWAEYHSDEAVTPWNFDQVIDKESSAQAFIEHMTNNDLYLPNEKVLPKHSPLYEKYTVYNELTKIKYVTEIGEAKFFDANLKQEIFDGLFKHERKVTKKKLRTFLDKNFDEFRIVDIQGLDKETETFNASYATYQDLLKVIKDKVFMDNPENAEILENIVLTLTLFEDREMIKQRLAKYADVFDKKVIDQLARRHYTGWGRLSAKLLNGIRDKQSCKTIMDYLIDDAQSNRNLMQLITDDNLTFKDDIVKAQYVDNSDDLHQVVQSLAGSPAIKKGILQSLKIVDELVKVMGKEPEQIVVEMARENQTTAKGRRNSQQRYKRLKEAIKSLDRDLNHKILKEHPTDNQALQNNRLFLYYLQNGRDMYTGESLDINRLSDYDIDHVIPQAFIKDNSIDNRVLTSSKANRGKSDDVPSEDVVNRMRPFWNKLLSSGLISQRKYNNLTKKELTLDDKAGFIKRQLVETRQITKHVARMLDERFNKEFDDNNKRIRRVKIVTLKSNLVSSFRKEFELYKVREINDYHHAHDAYLNAVVVKALLVKYPKLEPEFVYGEYPKYNSYRERKTATQKMFFYSNIMNMFKSKVKLADDQIVERPMIEVNDETGEIAWDKTKHITTVKKVLSYPQVNIVKKVEEQTIGQNGGLFDDNPKSPLEVIPSKLVPLKKALNPEKYGGYQKPTTAYPILLIVDTKQLIPISVMDKKRFEQNPVKFLKDKGYQQIEKNNFVKLPKYTLVDIGNGIKRLWASSKEVHKGNQLVVSKKSQDLLYHAHHLDNDYSNEYVKNHYQQFDILFNEITSFSKKCKLGKEHIQKIEEAYSKERDFASIEELADGFIKLLGFTQLGATSPFSFLGIKLNQKQYTGKKDYLLPCMEATLIHQSITGLYETRIDLSKLGGD

SEQ ID NO: 523 - protein, 1355 aa, Streptococcus mutans; identical to SEQ ID NO: 522
  Streptococcus mutans NMT4863

SEQ ID NO: 524 - protein, 1345 aa, Streptococcus mutans
MKKPYSIGLDIGTNSVGWAVVTDDYKVPAKKMKVLGNTDKSHIKKNLLGALLFDSGNTAADRRLKRTARRRYTRRRNRILYLQEIFAEEMSKVDDSFFHRLEDSFLVTEDKRGERHPIFGNLEEEVKYHENFPTIYHLRQYLADNPEKVDLRLVYLALAHIIKFRGHFLIEGKFDTRNNDVQRLFQEFLAVYDNTFENSSLQEQNVQVEEILTDKISKSAKKDRVLKLFPNEKSNGRFAEFLKLIVGNQADFKKHFELEEKAPLQFSKDTYEEELEVLLAQIGDNYAELFLSAKKLYDSILLSGILTVTDVSTKAPLSASMIQRYNEHQMDLAQLKQFIRQKLSDKYNEVFSDVSKDGYAGYIDGKTNQEAFYKYLKGLLNKIEGSGYFLDKIEREDFLRKQRTFDNGSIPHQIHLQEMRAIIRRQAEFYPFLADNQDRIEKILTFRIPYYVGPLARGKSDFAWLSRKSADKITPWNFDEIVDKESSAEAFINRMTNYDLYLPNQKVLPKHSLLYEKFTVYNELTKVKYKTEQGKTAFFDANMKQEIFDGVFKVYRKVTKDKLMDFLEKEFDEFRIVDLTGLDKENKAFNASYGTYHDLRKILDKDFLDNSKNEKILEDIVLTLTLFEDREMIRKRLENYSDLLTKEQVKKLERRHYTGWGRLSAELIHGIRNKESRKTILDYLIDDGNSNRNFMQLINDDALSFKEEIAKAQVIGETDNLNQVVSDIAGSPAIKKGILQSLKIVDELVKIMGHQPENIVVEMARENQFTNQGRRNSQQRLKGLTDSIKEFGSQILKEHPVKHSQLQNDRLFLYYLQNGRDMYTGEELDIDYLSQYDIDHIIPQAFIKDNSIDNRVLTSSKENRGKSDDVPSKNVVRKMKSYWSKLLSAKLITQRKFDNLTKAERGGLTDDDKAGFIKRQLVETRQITKHVARILDERFHTETDENNKKIRQVKIVTLKSNLVSNFRKEFELYKVREINDYHHAHDAYLNAVIGKALLGVYPQLEPEFVYGDYPHFHGHKENKATAKKFFYSNIMNFFKKDDVRTDKNGEIIWKKDEHISNIKKVLSYPQVNIVKKVEEQTGGFSKESILPKGNSDKLIPRKTKKFYWDTKKYGGFDSPIVAYSILVIADIEKGKSKKLKTVKALVGVTIMEKMTFERDPVAFLERKGYRNVQEENIIKLPKYSLFKLENGRKRLLASARELQKGNEIVLPNHLGTLLYHAKNIHKVDEPKHLDYVDKHKDEFKELLDVVSNFSKKYTLAEGNLEKIKELYAQNNGEDLKELASSFINLLTFTAIGAPATFKFFDKNIDRKRYTSTTEILNATLIHQSITGLYETRIDLSKLGGD

SEQ ID NO: 525 - protein, 1345 aa, Streptococcus mutans; identical to SEQ ID NO: 471
  Streptococcus mutans NV1996

SEQ ID NO: 526 - protein, 1345 aa, Streptococcus mutans
  Streptococcus mutans NVAB
MKKPYSIGLDIGTNSVGWAVVTDDYKVPAKKMKVLGNTDKSHIKKNLLGALLFDSGNTAADRRLKRTARRRYTRRRNRILYLQEIFAEEMSKVDDSFFHRLEDSFLVTEDKRGERHPIFGNLEEEVKYHENFPTIYHLRQYLADNPEKVDLRLVYLALAHIIKFRGHFLIEGKFDTRNNDVQRLFQEFLAVYDNTFENSSLQEQNVQVEEILTDKISKSAKKDRVLKLFPNEKSNGRFAEFLKLIVGNQADFKKHFELEEKAPLQFSKDTYEEELEVLLAQIGDNYAELFLSAKKLYDSILLSGILTVTDVSTKAPLSASMIQRYNEHQMDLAQLKQFIRQKLSDKYNEVFSDVSKDGYAGYIDGKTNQEAFYKYLKGLLNKIEGSGYFLDKIEREDFLRKQRTFDNGSIPHQIHLQEMRAIIRRQAEFYPFLADNQDRIEKILTFRIPYYVGPLARGKSDFAWLSRKSADKITPWNFDEIVDKESSAEAFINRMTNYDLYLPNQKVLPKHSLLYEKFTVYNELTKVKYKTEQGKTAFFDANMKQEIFDGVFKVYRKVTKDKLMDFLEKEFDEFRIVDLTGLDKENKVFNASYGTYHDLCKILDKDFLDNSKNEKILEDIVLTLTLFEDREMIRKRLENYSDLLTKEQVKKLERRHYTGWGRLSAELIHGIRNKESRKTILDYLIDDGNSNRNFMQLINDDALSFKEEIAKAQVIGETDNLNQVVSDIAGSPAIKKGILQSLKIVDELVKIMGHQPENIVVEMARENQFTKQGRRNSQQRLKGLTDSIKEFGSQILKEHPVENSQLQNDRLFLYYLQNGRDMYTGEELDIDYLSQYDIDHIIPQAFIKDNSIDNRVLTSSKENRGKSDDVPSKDVVRKMKSYWSKLLSAKLITQRKFDNLTKAERGGLTDDDKAGFIKRQLVETRQITKHVARILDERFYTETDENNKKIRQVKIVTLKSNLVSNFRKEFELYKVREINDYHHAHDAYLNAVIGKALLGVYPQLEPEFVYGDYPHFHGHKENKATAKKFFYSNIMNFFKKDDVRTDKNGEIIWKKDEHISNIKKVLSYPQVNIVKKVEEQTGGFSKESILPKGNSDKLIPRKTKKFYWDTKKYGGFDSPIVAYSILVIADIEKGKSKKLKTVKALVGVTIMEKMTFERDPVAFLERKGYRNVQEENIIKLPKYSLFKLENGRKRLLASARELQKGNEIVLPNHLGTLLYHAKNIHKVDEPKHLDYVDKHKDEFKELLDVVSNFSKKYTLAEGNLEKIKELYAQNNGEDLKELASSFINLLTFTAIGAPATFKFFDKNIDRKRYTSTTEILNATLIHQSITGLYETRIDLSKLGGD

SEQ ID NO: 527 - protein, 1345 aa, Streptococcus mutans; identical to SEQ ID NO: 526
  Streptococcus mutans NVAB

SEQ ID NO: 528 - protein, 1345 aa, Streptococcus mutans
  Streptococcus mutans R221
MKKPYSIGLDIGTNSVGWAVVTDDYKVPAKKMKVLGNTDKSHIKKNLLGALLFDSGNTAEDRRLKRTARRRYTRRRNRILYLQEIFSEEMGKVDDSFFHRLEDSFLVTEDKRGERHPIFGNLEEEVKYHENFPTIYHLRQYLADNPEKTDLRLVYLALAHIIKFRGHFLIEGKFDTRNNDVQRLFQEFLAVYDNTFENSSLQEQNVQVEEILTDKISKSAKKDRVLKLFPNEKSNGRFAEFLKLIVGNQADFKKHFELEEKAPLQFSKDIYEEELEVLLAQIGDNYAELFLSAKKLYDSILLSGILTVTDVSTKAPLSASMIQRYNEHQMDLAQLKQFIRQKLSDKYNEVFSDVSKDGYAGYIDGKTNQEAFYKYLKGLLNKIEGSGYFLDKIEREDFLRKQRTFDNGSIPHQIHLQEMRAIIRRQAEFYPFLADNQDRIEKILTFRIPYYVGPLARGKSDFAWLSRKSADKITPWNFDEIVDKESSVEAFINRMTNYDLYLPNQKVLPKHSLLYEKFTVYNELTKVKYKTEQGKTAFFDANMKQEIFDGVFKVYRKVTKDKLMDFLEKEFDEFRIVDLTGLDKENKAFNASYGTYHDLRKILDKDFLDNSKNEKILEDIVLTLTLFEDREMIRKRLKNYSDLLTKEQLKKLERRHYTGWGRLSAELIHGIRNKESRKTILDYLIDDGNSNRNFMQLINDDALSFKEEIAKAQVIGETDNLNQVVSDIAGSPAIKKGILQSLKIVDELVKIMGHQPENIVVEMARENQFTNQGRRNSQQRLKGLTDSIKEFGSQILKEHPVENSQLQNDRLFLYYLQNGRDMYTGEELDIDYLSQYDIDHIIPQAFIKDNSIDNRVLTSSKENRGKSDDVPSKDVVRKMKSYWSKLLSAKLITQRKFDNLTKAERGGLTDDDKAGFIKRQLVETRQITKHVARILDERFNTETDENNKKIRQVKIVTLKSNLVSNFRKEFELYKVREINDYHHAHDAYLNAVIGKALLGVYPQLEPEFVYGDYPHFHGHKENKATAKKFFYSNIMNFFKKDDVRTDKNGEIIWKKDEHISNIKKVLSYPQVNIVKKVEEQTGGFSKESILPKGNSDKLIPRKTKKFYWDTKKYGGFDSPIVAYSILVIADIEKGKSKKLKTVKALVGVTIMEKMTFERDPVAFLERKGYRNVQEENIIKLPKYSLFKLENGRKRLLASARELQKGNEIVLPNHLGTLLYHAKNIHKVDEPKHLDYVDKHKDEFKELLDVVSNFSKKYTLAEGNLEKIKELYAQNNGEDLKELASSFINLLTFTAIGAPATFKFFDKNIDRKRYTSTTEILNATLIHQSITGLYETRIDLNKLGGD

SEQ ID NO: 529 - protein, 1345 aa, Streptococcus mutans; identical to SEQ ID NO: 528
  Streptococcus mutans R221

SEQ ID NO: 530 - protein, 1345 aa, Streptococcus mutans
  Streptococcus mutans S1B
MKKPYSIGLDIGTNSVGWAVVTDDYKVPAKKMKVLGNTDKSHIKKNLLGALLFDSGNTAEDRRLKRTARRRYTRRRNRILYLQEIFSEEMGKVDDSFFHRLDESFLTDDDKNFDSYPIFGNKAEEDAYHQKFPTIYHLRKHLADSTEKADLRLVYLALAHMIKFRGHFLIEGELNAENTDVQKLFADFVGVYDRTFDDSHLSEITVDASSILTEKISKSRRLEKLINNYPKEKKNTLFRNLVALSLGLQPNFKTNFKLSEDAKLQFSKDTYEEDLEELLGKIGDDYADLFTLAKNLYDAILLSGILTADDSSTKAPLSASMIKRYAEHHEDLEKLKEFIKANKPELYHDIFKDETKNGYAGYIENGVKQDEFYKYLKNTLSKIAGSDYFLDKIEREDFLRKQRTFDNGSIPHQIHLQEMHAILRRQGDYYPFLKENQDRIEKILTFRIPYYVGPLARGKSDFAWLSRKSADKITPWNFDEIVDKESSVEAFINRMTNYDLYLPNQKVLPKHSLLYEKFTVYNELTKVKYKTEQGKTAFFDANMKQEIFDGVFKVYRKVTKDKLMDFLEKEFDEFRIVDLTGLDKENKAFNASYGTYHDLRKILDKDFLDNSKNEKILEDIVLTLTLFEDREMIRKRLKNYSDLLTKEQLKKLERRHYTGWGRLSAELIHGIRNKESRKTILDYLIDDGNSNRNFMQLINDDALSFKEEIAKAQVIGETDNLNQVVSDIAGSPAIKKGILQSLKIVDELVKIMGHQPENIVVEMARENQFTNQGRRNSQQRLKGLTDSIKEFGSQILKEHPVENSQLQNDRLFLYYLQNGRDMYTGEELDIDYLSQYDIDHIIPQAFIKDNSIDNRVLTSSKENRGKSDDVPSKDVVRKMKSYWSKLLSAKLITQRKFDNLTKGERGGLTDDDKAGFIKRQLVETRQITKHVARILDERFNTETDENNKKIRQVKIVTLKSNLVSNFRKEFELYKVREINDYHHAHDAYLNAVIGKALLGVYPQLEPEFVYGDYPHFHGHKENKATAKKFFYSNIMNFFKKDDVRTDKNGEIIWKKDEYISNIKKVLSYPQVNIVKKVEEQTGGFSKESILPKGDSDKLIPRKTKKFYWDTKKYGGFDSPIVAYSILVIADIEKGKSKKLKTVKALVGVTIMEKMTFERDPVAFLERKGYRNVQEENIIKLPKYSLFKLENGRKRLLASARELQKGNEIVLPNHLGTLLYHAKNIHKVDEPKHLDYVDKHKDEFKELLDVVSNFSKKYTLAEGNLEKIKELYAQNNGEDLKELASSFINLLTFTAIGAPATFKFFDKNIDRKRYTSTTEILNATLIHQSITGLYETRIDLSKLGGD

SEQ ID NO: 531 - protein, 1345 aa, Streptococcus mutans; identical to SEQ ID NO: 530
  Streptococcus mutans S1B

SEQ ID NO: 532 - protein, 1345 aa, Streptococcus mutans; identical to SEQ ID NO: 471
  Streptococcus mutans SF1

SEQ ID NO: 533 - protein, 1345 aa, Streptococcus mutans
  Streptococcus mutans SF14
MKKPYSIGLDIGTNSVGWAVVTDDYKVPAKKMKVLGNTDKSHIKKNLLGALLFDSGNTAEDRRLKRTARRRYTRRRNRILYLQEIFSEEMGKVNDSFFHRLEDSFLVTEDKRGERHPIFGNLEEEVKYHENFPTIYHLRQYLADNPEKVDLRLVYLALAHIIKFRGHFLIEGKFDTRNNDVQRLFQEFLAVYDNTFENSSLQEQNVQVEEILTDKISKSAKKDRVLKLFPNEKSNGRFAEFLKLIVGNQADFKKHFELEEKAPLQFSKDTYEEELEVLLAQIGDNYAELFLSAKKLYDSILLSGILTVTDVSTKAPLSASMIQRYNEHQMDLAQLKQFIRQKLSDKYNEVFSDVSKDGYAGYIDGKTNQEAFYKYLKGLLNKIEGSGYFLDKIEREDFLRKQRTFDNGSIPHQIHLQEMRAIIRRQAEFYPFLADNQDRIEKILTFRIPYYVGPLARGKSDFAWLSRKSADKITPWNFDEIVDKESSAEAFINRMTNYDLYLPNQKVLPKHSLLYEKFTVYNELTKVKYKTEQGKTAFFDANMKQEIFDGVFKVYRKVTKDKLMDFLEKEFDEFRIVDLTGLDKENKVFNASYGTYHDLCKILDKDFLDNSKNEKILEDIVLTLTLFEDREMIRKRLENYSDLLTKEQVKKLERRHYTGWGRLSAELIHGIRNKESRKTILDYLIDDGNSNRNFMQLINDDALSFKEEIAKAQVIGETDNLNQVVSDIAGSPAIKKGILQSLKIVDELVKIMGHQPENIVVEMARENQFTKQGRRNSQQRLKGLTDSIKEFGSQILKEHPVENSQLQNDRLFLYYLQNGRDMYTGEELDIDYLSQYDIDHIIPQAFIKDNSIDNRVLTSSKENRGKSDDVPSKDVVRKMKSYWSKLLSAKLITQRKFDNLTKAERGGLTDDDKAGFIKRQLVETRQITKHVARILDERFYTETDENNKKIRQVKIVTLKSNLVSNFRKEFELYKVREINDYHHAHDAYLNAVIGKALLGVYPQLEPEFVYGDYPHFHGHKENKATAKKFFYSNIMNFFKKDDVRTDKNGEIIWKKDEYISNIKKVLSYPQVNIVKKVEEQTGGFSKESILPKGNSDKLIPRKTKKFYWDTKKYGGFDSPIVAYSILVIADIEKGKSKKLKTVKALVGVTIMEKMTFERDPIAFLERKGYRNVQEENIIKLPKYSLFKLENGRKRLLASARELQKGNEIVLPNHLGTLLYHAKNIHKVDEPKHLDYVDKHKDEFKELLDVVSNFSKKYTLAEGNLEKIKELYAQNNGEDLKELASSFINLLTFTAIGAPAAFKFFDKNIDRKRYTSTTEILNATLIHQSITGLYETRIDLSKLGGD

SEQ ID NO: 534 - protein, 1345 aa, Streptococcus mutans; identical to SEQ ID NO: 533
  Streptococcus mutans SF14

SEQ ID NO: 535 - protein, 1345 aa, Streptococcus mutans
  Streptococcus mutans SM1
MKKPYSIGLDIGTNSVGWAVVTDDYKVPAKKMKVLGNTDKSHIKKNLLGALLFDSGNTAEDRRLKRTARRRYTRRRNRILYLQEIFSEEMGKVDDSFFHRLEDSFLVTEDKRGERHPIFGNLEEEVKYHENFPTIYHLRQYLADNPEKVDLRLVYLALAHIIKFRGHFLIEGKFDTRNNDVQKLFQEFLAVYDNTFENSSLQEQNVQVEEILTDKISKSAKKDRVLKLFPNEKSNGRFAEFLKLIVGNQADFKKHFELEEKAPLQLSKDTYEEELEVLLAQIGDNYAELFLSAKKLYDSILLSGILTVTDVSTKAPLSASMIQRYNEHQMDLAQLKQFIRQKLSDKYNEVFSDVSKDGYAGYIDGKTNQEAFYKYLKGLLNKIEGSGYFLDKIEREDFLRKQRTFDNGSIPHQIHLQEMRAIIRRQAEFYPFLADNQDRIEKILTFRIPYYVGPLARGKSDFAWLSRKSADKITPWNFDEIVDKESSVEAFINRMTNYDLYLPNQKVLPKHSLLYEKFTVYNELTKVKYKTEQGKTAFFDANMKQEIFDGVFKVYRKVTKDKLMDFLEKEFDEFRIVDLTGLDKENKAFNASYGTYHDLRKILDKDFLDNSKNEKILEDIVLTLTLFEDREMIRKRLENYSDLLTKEQVKKLERRHYTGWGRLSAELIHGIRNKESRKTLLDYLIDDGNSNRNFMQLINDDALSFKEEIAKAQVIGETDNLNQVVSDIAGSPAIKKGILQSLKIVDELVKIMGHQPENIVVEMARENQFTNQGRRNSQQRLKGLTDSIKEFGSQILKEHPVENSQLQNDRLFLYYLQNGRDMYTGEELDIDYLSQYDIDHIIPQAFIKDNSIDNRVLTSSKENRGKSDDVPSKDVVRKMKSYWSKLLSAKLITQRKFDNLTKAERGGLTDDDKAGFIKRQLVETRQITKHVARILDERFNTETDENNKKIRQVKIVTLKSNLVSNFRKEFELYKVREINDYHHAHDAYLNAVIGKALLGVYPQLEPEFVYGDYPHFHGHKENKATAKKFFYSNIMNFFKKDDVRTDKNGEIIWKKDEYISNIKKVLSYPQVNIVKKVEEQTGGFSKESILPKGNSDKLIPRKTKKFYWDTKKYGGFDSPIVAYSILVIADIEKGKSKKLKTVKALVGVTIMEKMTFERDPIAFLERKGYRNVQEENIIKLPKYSLFKLENGRKRLLASARELQKGNEIVLPNHLGTLLYHAKNIHKVDEPKHLDYVDKHKDEFKELLDVVSNFSKKYTLAEGNLEKIKELYAQNNGEDLKELASSFINLLTFTAIGAPATFKFFDKNIDRKRYTSTTEILNATLIHQSITGLYETRIDLSKLGGD

SEQ ID NO: 536 - protein, 1345 aa, Streptococcus mutans; identical to SEQ ID NO: 535
  Streptococcus mutans SM1

SEQ ID NO: 537 - protein, 1345 aa, Streptococcus mutans
  Streptococcus mutans SM4
MKKPYSIGLDIGTNSVGWAVVTDDYKVPAKKMKVLGNTDKSHIKKNLLGALLFDSGNTAEDRRLKRTARRRYTRRRNRILYLQEIFSEEMDKVDDSFFHRLEDSFLVTEDKRGERHPIFGNLEEEVKYHENFPTIYHLRQYLADNPEKVDLRLVYLALAHIIKFRGHFLIEGKFDTRNNDVQRLFQEFLAVYDNTFENSSLQEQNVQVEEILTDKISKSAKKDRVLKLFPNEKSNGRFAEFLKLIVGNQADFKKHFELEEKAPLQFSKDTYEEELEVLLAQIGDNYAELFLSAKKLYDSILLSGILTVTDVSTKAPLSASMIQRYNEHQMDLAQLKQFIRQKLSDKYNEVFSDVSKDGYAGYIDGKTNQEAFYKYLKGLLNKIEGSGYFLDKIEREDFLRKQRTFDNGSIPHQIHLQEMRAIIRRQAEFYPFLADNQDRIEKILTFRIPYYVGPLARGKSDFAWLSRKSADKITPWNFDEIVDKESSAEAFINRMTNYDLYLPNQKVLPKHSLLYEKFTVYNELTKVKYKTEQGKTAFFDANMKQEIFDGVFKVYRKVTKDKLMDFLEKEFDEFRIVDLTGLDKENKVFNASYGTYHDLCKILDKDFLDNSKNEKILEDIVLTLTLFEDREMIRKRLENYSDLLTKEQVKKLERRHYTGWGRLSAELIHGIRNKESRKTILDYLIDDGNSNRNFMQLINDDALSFKEEIAKAQVIGETDNLNQVVSDIAGSPAIKKGILQSLKIVDELVKIMGHQPENIVVEMARENQFTKQGRRNSQQRLKGLTDSIKEFGSQILKEHPVENSQLQNDRLFLYYLQNGRDMYTGEELDIDYLSQYDIDHIIPQAFIKDNSIDNRVLTSSKENRGKSDDVPSKDVVRKMKSYWSKLLSAKLITQRKFDNLTKAERGGLTDDDKAGFIKRQLVETRQITKHVARILDERFYTETDENNKKIRQVKIVTLKSNLVSNFRKEFELYKVREINDYHHAHDAYLNAVIGKALLGVYPQLEPEFVYGDYPHFHGHKENKATAKKFFYSNIMNFFKKDDVRTDKNGEIIWKKDEHISNIKKVLSYPQVNIVKKVEEQTGGFSKESILPKGNSDKLIPRKTKKFYWDTKKYGGFDSPIVAYSILVIADIEKGKSKKLKTVKALVGVTIMEKMTFERDPVAFLERKGYRNVQEENIIKLPKYSLFKLENGRKRLLASARELQKGNEIVLPNHLGTLLYHAKNIHKVDEPKHLDYVDKHKDEFKELLDVVSNFSKKYTLAEGNLEKIKELYAQNNGEDLKELASSFINLLTFTAIGAPATFKFFDKNIDRKRYTSTTEILNATLIHQSITGLYETRIDLSKLGGD

SEQ ID NO: 538 - protein, 1345 aa, Streptococcus mutans; identical to SEQ ID NO: 537
  Streptococcus mutans SM4

SEQ ID NO: 539 - protein, 1345 aa, Streptococcus mutans
  Streptococcus mutans SM6
MKKPYSIGLDIGTNSVGWAVVTDDYKVPAKKMKVLGNTDKSHIKKNLLGALLFDSGNTAEDRRLKRTARRRYTRRRNRILYLQEIFSEEMGKVDDSFFHRLEDSFLVTEDKRGERHPIFGNLEEEVKYHENFPTIYHLRQYLADNPEKTDLRLVYLALAHIIKFGGHFLIEGKFDTRNNDVQRLFQEFLAVYDNTFENSSLQEQNVQVEEILTDKISKSAKKDRVLKLFPNEKSNGRFAEFLKLIVGNQADFKKHFELEEKAPLQFSKDIYEEELEVLLAQIGDNYAELFLSAKKLYDSILLSGILTVTDVSTKAPLSASMIQRYNEHQMDLAQLKQFIRQKLSDKYNEVFSDVSKDGYAGYIDGKTNQEAFYKYLKGLLNKIEGSGYFLDKIEREDFLRKQRTFDNGSIPHQIHLQEMRAIIRRQAEFYPFLADNQDRIEKILTFRIPYYVGPLARGKSDFAWLSRKSADKITPWNFDEIVDKESSVEAFINRMTNYDLYLPNQKVLPKHSLLYEKFTVYNELTKVKYKTEQGKTAFFDANMKQEIFDGVFKVYRKVTKDKLMDFLEKEFDEFRIVDLTGLDKENKAFNASYGTYHDLRKILDKDFLDNSKNEKILEDIVLTLTLFEDREMIRKRLKNYSDLLTKEQLKKLERRHYTGWGRLSAELIHGIRNKESRKTILDYLIDDGNSNRNFMQLINDDALSFKEEIAKAQVIGETDNLNQVVSDIAGSPAIKKGILQSLKIVDELVKIMGHQPENIVVEMARENQFTNQGRRNSQQRLKGLTDSIKEFGSQILKEHPVENSQLQNDRLFLYYLQNGRDMYTGEELDIDYLSQYDIDHIIPQAFIKDNSIDNRVLTSSKENRGKSDDVPSKNVVRKMKSYWSKLLSAKLITQRKFDNLTKAERGGLTDDDKAGFIKRQLVETRQITKHVARILDERFHTETDENNKKIRQVKIVTLKSNLVSNFRKEFELYKVREINDYHHAHDAYLNAVIGKALLGVYPQLEPEFVYGDYPHFHGHKENKATAKKFFYSNIMNFFKKDDVRTDKNGEIIWKKDEHISNIKKVLSYPQVNIVKKVEEQTGGFSKESILPKGNSDKLIPRKTKKFYWDTKKYGGFDSPIVAYSILVIADIEKGKSKKLKTVKALVGVTIMEKMTFERDPVAFLERKGYRNVQEENIIKLPKYSLFKLENGRKRLLASARELQKGNEIVLPNHLGTLLYHAKNIHKVDEPKHLDYVDKHKDEFKELLDVVSNFSKKYTLAEGNLEKIKELYAQNNGEDLKELASSFINLLTFTAIGAPATFKFFDKNIDRKRYTSTTEILNATLIHQSITGLYETRIDLSKLGGD

SEQ ID NO: 540 - protein, 1345 aa, Streptococcus mutans; identical to SEQ ID NO: 539
  Streptococcus mutans SM6

SEQ ID NO: 541 - protein, 1134 aa, Streptococcus mutans
  Streptococcus mutans ST1
MANGKILGLDIGIASVGVGIIDKETGKIIHVNSRIFPAATADSNVERRGFRQGRRLVRRKKHRKVRLADLFLDSNLLTDFSKVSLNLNPYQLRVKGLNEELSNEELFIALKSIVSRRGISYLDDASEDSGANSSEYGKAVEENRKLLEDRTPGQIQLERFEKYGKVRGDFTVVENGENHRLINVFSTSAYKKEAERILRRQQEFNMRIADEFIEAYLTILTGKRKYYHGPGNEKSRTDYGRFRTDGTTLDNIFGILIGKCTFYPDEYRAAKASYTAQEFNLLNDLNNLTVPTETKKLSEEQKRQIIEHAKTVKTLGAPTLLKYIVKLVGCSADDIKGYRIDKSDKPEIHTFEAYRKMRTMELIKVDDLSRESLDALAHILTLNTEREGIEEAIRDRFTNKEFNQEQINELVLFRKNNSSLFGKGWHNFSLKLMKELIPELYETSEEQMTILTRLGKQRVKKSSNRTNYIDEKELTEEIYNPVVAKSVRQAIKIINLATKKYGVFDNIVIEMARESNEDDEKKAIQNAQKANEDEKKAALLKAAHQFNGKEELPDSIFHGHKELLTKIRLWHQQGEKCLYTGKTIFINDLIHNPYKYEIDHILPLSLSFDDSLANKVLVLSTANQEKGQRTPFQSLDSMDGAWTYREFKSYVKGLKTLSNKKKDYLLTEENIDKIEVKQKFIERNLVDTRYSSRVVLNALQDFYKERKFDTKISVVRGQFTSQLRRKWRIEKTRETYHHHAVDALIIAASSQLNLWKKQNNPLISYKEDQFVDPETGEILSLSDDEYKKLVFKAPYEHFVDTLKSKKFEDSILFSYQVDSKYNRKISGATICGTRKAQLGKDTQEETYVLGKIKDIYSQKGYEDFIKKYKKDKTQFLMYHKDPQTFEKVIEEILKTYPDKELNEKGKEVSCNPFEKYRQENGPVRKYSKKGNGPEIKSLKYYDEVLGKNIDITPKNSLNKVVLRSLNPWRTDVYFNHETRKYEFLGLKYSDLRYLKGEHRYGILIGDYKKIKDKEGIEKESEFKFTLYKNDLILIKDTAKGKEELFRFWSRTGKDNAKTFEKNKIELKPYSKSQFEKGEDTNVLGKLYASSNQLQKSFGTLENLSIYKVRTDVLGNKYFIKKEGDKPQLNFKKKL

SEQ ID NO: 542 - protein, 1134 aa, Streptococcus mutans; identical to SEQ ID NO: 541
  Streptococcus mutans ST1

SEQ ID NO: 543 - protein, 1350 aa, Streptococcus mutans
  Streptococcus mutans ST6
MKKPYSIGLDIGTNSVGWAVVTDDYKVPAKKMKVLGNTDKSHIEKNLLGALLFDSGNTAEDRRLKRTARRRYTRRRNRILYLQEIFSEEMGKVDDSFFHRLEDSFLVTEDKRGERHPIFGNLEEEVKYHENFPTIYHLRQYLADNPEKVDLRLVYLALAHIIKFRGHFLIEGKFDTRNNDVQRLFQEFLAVYDNTFENSSLQEQNVQVEEILTDKISKSAKKDRVLKLFPNEKSNGRFAEFLKLIVGNQADFKKHFELEEKAPLQFSKDTYEEELEVLLAQIGDNYAELFLSAKKLYDSILLSGILTVTDVSTKAPLSASMIQRYNEHQMDLTQLKQFIRQKLSDKYNEVFSDVSKDGYAGYIDGKTNQEAFYKYLKGLLNKIEGSGYFLDKIEREDFLRKQRTFDNGSIPHQIHLQEMRAIIRRQAEFYSFLADNQDRIEKILTFRIPYYVGPLARGKSDFAWLSRKSADKITPWNFDEIVDKESSAEAFINRMTNYDLYLPNQKVLPKHSLLYEKFTVYNELTKVKYKTEQGKTAFFDANMKQEIFDGVFKVYRKVTKDKLMDFLEKEFDEFRIVDLTGLDKENKAFNASYGTYHDLRKILDKDFLDNSKNEKILEDIVLTLTLFEDREMIRKRLENYSDLLTKEQVKKLERRHYTGWGRLSAELIHGIRNKESRKTILDYLIDDGNSNRNFMQLINDDALSFKEEIAKAQVIGETDNLNQVVSDIAGSPAIKKGILQSLKIVDELVKIMGHQPENIVVEMARENQFTNQGRRNSQQRLKGLTDSIKEFGSQILKEHPVENSQLQNDRLFLYYLQNGRDMYTGEELDIDYLSQYDIDHIIPQAFIKDNSIDNRVLTSSKENRGKSDDVPSEDVVNRMRPFWNKLLSSGLISQRKYNNLTKKELTLDDKAGFIKRQLVETRQITKHVARMLDERFNKEFDDNNKRIRKVKIVTLKSNLVSSFRKEFELYKVREINDYHHAHDAYLNAVVVKALLVKYSKLEPEFVYGEYPKYNSYRERKTATQKMFFYSNIMNMFKSKVKLADDQIVERPMIEVNDETGEIAWDKTKHITTVKKVLSYPQVNIVKKVEEQTIGQNGGLFDDNPKSPLEVIPSKLVPLKKALNPEKYGGYQKPTTAYPILLIVDTKQLIPISVMDKKRFEQNPVKFLKDKGYQQIEKNNFVKLPKYTLVDIGNGIKRLWASSKEVHKGNQLVVSKKSQDLLYHAHHLDNDYSNEYVKNHYQQFDILFNEITSFSKKCKLGKEHIQKIEEAYSKERDSASIEELADGFIKLLGFTQLGATSPFSFLGIKLNQKQYTGKKDYLLPCMEATLIHQSITGLYETRIDLSKLGGD

SEQ ID NO: 544 - protein, 1350 aa, Streptococcus mutans; identical to SEQ ID NO: 543
  Streptococcus mutans ST6

SEQ ID NO: 545 - protein, 1125 aa, Streptococcus mutans
  Streptococcus mutans U2A
MTNGKILGLDIGIASVGVGIINAKTGNVEHASSRIFPAANADNNVERRSARGGRRLIRRKKHRLKRVEDLFEKYNIDTDFSNLNLNPYQLRVKGLNEQLSNEELFAILKNIAKRRGISYLDDAEDDSVGSSDYAKAIDENRKLLKKQTPGEIQLKRLEKYGQLRGNFTIQDENGEYHRLINVFSTSDYVKEARRILETQSYYNKFITESFVEDYIKILQGKRKYYVGPGNEKSRTDYGIYRTDGETLDNLFGILIGKCGFYPEEYRAAKASYTAQEYNFLNDLNNLTVPTETKKLSTEQKYQLVDFAKTASTLGAAKLLKEIAKLVGCQVEEIKGYRLDNKDKPDLHTFEPFRKLKSNLTTIAVENLSITTLDTLAHILTLNTEREGIEEAIQKELPNIFSDEQITEIIAVRKKNSQIFGKGWHSFSIKLMKELIPELYETSEEQMTILTRLKKVKTNSKITNRTKYINEEEITDEIYNPVVSKSIRQTVKIINATIKKYGAFDQIIIEMPRESNEEDERKFIADLQKSNAKEKDDAMKQAALLYNGKDELPHDVFHGHKELATKIRLWYQQGERCLYSGKHIDIHDLIHNQHMFEIDHVLPLSLSFDDSLANKVLVYSWANQEKGQRTPFQALPQMASAWSFRELRDYISKQKGISKKKRDYLLTEQDINKVEVKQKFIERNLVDTRYVSRVVLNTLQDALKVMNKETKISVIRGQFTSQLRRQWRIDKSRETYHHHAVDALIIAASSQLRLWKKQNNPMFAEDKHGQKINLDTGEVLSDDAYKELVYQAPYQGFVNTISSKSFEDEILFSYQVDSKVNRKISDATIYATRQAQLGKDKKEETYVLGKIKDIYSQAGYDAFRKKYDKDKAVFLMYQKDPETWEKVIEVILRDYKELDDKGKEIGNPFERYKVKHGFVRKYSRKNKGTEIKSLKYYDNKLGNHIDITPNNSKHSVVLQSINPWRADLYFNPETTKYELMGLKYADLSFEKGTGKYSISREKYDEIKEREGISSKSEFKFTLYKNDLILVKDIGNHKELIARFNSKNDTSKHYVELKPWNKAKFDSEEELIPAFGKVAKSGQFIKGLNKPDLSIYKVKTDILGHKYYIKKEGDKPKLNFENKIKNK

SEQ ID NO: 546 - protein, 1125 aa, Streptococcus mutans; identical to SEQ ID NO: 545
  Streptococcus mutans U2A

SEQ ID NO: 547 - protein, 1345 aa, Streptococcus mutans
  Streptococcus mutans UA159
MKKPYSIGLDIGTNSVGWAVVTDDYKVPAKKMKVLGNTDKSHIEKNLLGALLFDSGNTAEDRRLKRTARRRYTRRRNRILYLQEIFSEEMGKVDDSFFHRLEDSFLVTEDKRGERHPIFGNLEEEVKYHENFPTIYHLRQYLADNPEKVDLRLVYLALAHIIKFRGHFLIEGKFDTRNNDVQRLFQEFLAVYDNTFENSSLQEQNVQVEEILTDKISKSAKKDRVLKLFPNEKSNGRFAEFLKLIVGNQADFKKHFELEEKAPLQFSKDTYEEELEVLLAQIGDNYAELFLSAKKLYDSILLSGILTVTDVGTKAPLSASMIQRYNEHQMDLAQLKQFIRQKLSDKYNEVFSDVSKDGYAGYIDGKTNQEAFYKYLKGLLNKIEGSGYFLDKIEREDFLRKQRTFDNGSIPHQIHLQEMRAIIRRQAEFYPFLADNQDRIEKLLTFRIPYYVGPLARGKSDFAWLSRKSADKITPWNFDEIVDKESSAEAFINRMTNYDLYLPNQKVLPKHSLLYEKFTVYNELTKVKYKTEQGKTAFFDANMKQEIFDGVFKVYRKVTKDKLMDFLEKEFDEFRIVDLTGLDKENKVFNASYGTYHDLCKILDKDFLDNSKNEKILEDIVLTLTLFEDREMIRKRLENYSDLLTKEQVKKLERRHYTGWGRLSAELIHGIRNKESRKTILDYLIDDGNSNRNFMQLINDDALSFKEEIAKAQVIGETDNLNQVVSDIAGSPAIKKGILQSLKIVDELVKIMGHQPENIVVEMARENQFTNQGRRNSQQRLKGLTDSIKEFGSQILKEHPVENSQLQNDRLFLYYLQNGRDMYTGEELDIDYLSQYDIDHIIPQAFIKDNSIDNRVLTSSKENRGKSDDVPSKDVVRKMKSYWSKLLSAKLITQRKFDNLTKAERGGLTDDDKAGFIKRQLVETRQITKHVARILDERFNTETDENNKKIRQVKIVTLKSNLVSNFRKEFELYKVREINDYHHAHDAYLNAVIGKALLGVYPQLEPEFVYGDYPHFHGHKENKATAKKFFYSNIMNFFKKDDVRTDKNGEIIWKKDEHISNIKKVLSYPQVNIVKKVEEQTGGFSKESILPKGNSDKLIPRKTKKFYWDTKKYGGFDSPIVAYSILVIADIEKGKSKKLKTVKALVGVTIMEKMTFERDPVAFLERKGYRNVQEENIIKLPKYSLFKLENGRKRLLASARELQKGNEIVLPNHLGTLLYHAKNIHKVDEPKHLDYVDKHKDEFKELLDVVSNFSKKYTLAEGNLEKIKELYAQNNGEDLKELASSFINLLTFTAIGAPATFKFFDKNIDRKRYTSTTEILNATLIHQSITGLYETRIDLNKLGGD

SEQ ID NO: 548 - protein, 1345 aa, Streptococcus mutans; identical to SEQ ID NO: 472
  Streptococcus mutans W6

SEQ ID NO: 549 - protein, 1121 aa, Streptococcus oralis
  Streptococcus oralis SK1074
MNGLVLGLDIGIASVGVGILEKNSGKIIHANSRLFPAATADNNVERRKNRQARRLNRRKKHRGVRFQDLFEDYGLLTDFSKVSINLNPYRLRVDGLNQQLTNEELFIALKNIVKRRGISYLDDASEDGGAVSSDYGKAVEENRKLLAEQTPGQIQLERFEKYGQVRGDFTVVENGEKCRLINVFSTSAYRKEAEKILRKQQEFNNQITDEFIEDYLKILTGKRKYYHGPGNEKSRTDYGRFRTDGTTLDNIFGVLIGKCTFYPNEYRASKSSYTAQEFNLLNDLNNLTVPTETKKLSEEQKKVIVEYAKEAKTLGASTLLKYIVKMIDASVDQISGYRVDVNNKPEMHTFEVYRKMQSLETISVGELSRNVLDELAHILTLNTEREGIEEAINSKLMGVFSQDQVLELVQFRKNNSSLFSKGWHNFSLKLMMELIPELYETSEEQMTILTRLGKQKSKETSKRTKYIDEKELTEEIYNPVVAKSVRQAIKIINEATKKHGIFDNIVIEMARENNEEDAKKDYIKRQKANQDEKNAAMEKAAFQYNGKKELPGNIFNGHKELATKIRLWHQQGEKCLYTGKTIPISDLIHNQYKYEIDHILPLSLSFDDSLSNKVLVHATANQEKGQRTPFQALDSMDDAWSYREFKSYVKDLKSLSNKKKDYLLTEEDISKIEVKQKFIERNLVDTRYSSRVVLNALQDFYKSHQFDTTISVVRGQFTSQLRRKWGLEKSRETYHHHAVDALIIAASSQLRLWKKQNNPLITYKEGQFVDSQTGEIISLTDDEYKELVFKAPYDHFVDTLHSKTFEDGILFSYQVDSKYNRKISDATIYATRKAKLDKDKSEETYVLGKIKDIYSQAGYDAFIKIYNKDKRKFLMYHKDPQTFEKVIEEILRTYPSKERNDKNKEVPCNPFEKYRQENGPIRKYSKKGNGPEIKCLKYYDNKLGNYIDISPDGSDNQVVLQSLKPWRTDVYFNHQTKEYELMGLKYSDLSFEKGSGKYSISNEKYNSIKRIEGVNEQSEFKFTLYKNDLILIKDSENNEQKLFRFNSRNDTAKHYVELKPYDKARFDGQQELITILGNVAKGGQCLKGLNKSNISIFKVKTDVLGKKHIIKKEGDEPKLKF

SEQ ID NO: 550 - protein, 1373 aa, Streptococcus oralis
  Streptococcus oralis SK304
MENKNYSIGLDIGTNSVGWAVITDDYKVPSKKMKVLGNTDKRFIKKNLIGALLFDEGTTAEARRLKRTARRRYTRRKNRLRYLQEIFAEEMSKVDSSFFHRLDDSFLIPEDKKGSKYPIFATLIEEKEYHKQFPTIYHLRKQLADSKEKTDLRLIYLALAHMIKYRGHFLYEDTFDIKNNDIQKIFNEFISIYNNTFEGNSLSGQNVQVEAIFTDKISKSAKRERVLKLFPDEKSTGLFSEFLKLIVGNQADFKKHFDLEEKAPLQFSRDTYDEDLENLLGQIGDDFADLFVAAKKLYDAILLSGILTVTDPSTKAPLSASMIERYENHQKDLATLKQFIKTNLPEKYDEVFSDQSKDGYAGYIDGKTTQESFYKYIKNLLSKFEGADYFLEKIEREDFLRKQRTFDNGSIPHQIHLQEMNAILRRQGEHYPFLKENKEKIEKILTFRIPYYVGPLARGNRDFAWLTRNSDQAIRPWNFEEIVDKASSAESFINKMTNYDLYLPEEKVLPKHSLLYETFAVYNELTKVKFIAEGLRDYQFLDSRQKKDIFYTLFKAEDKRKVTEKDIIQYLHTVDGYDGIELKGIEKQFNASLSTYHDLLKIIKDKEFMDDPNNEEILENIVHTLTIFEDREMIKQRLAQYDSLFDEKVIKALTRRHYTGWGKLSSKLINGIRDKQTGKTILDYLMDDGYNNRNFMQLINDDELSFKEIIKKAQVVGKTDDVKQVVQELPGSPAIKKGILQSIKLVDELVKVMGHEPESIVIEMARENQTTARGKKNSQQRYKRIEDSLKILASGLNAKILKEHPTDNIQLQNDRLFLYYLQNGRDMYTGKPLDINQLSSYDIDHIVPQAFIKDDSLDNRVLTSLKDNRGKSDNVPSLEVVEKMKTFWQQLLDSKLISYRKFNNLTKAERGGLDERDKVGFIKRQLVETRQITKHVAQILDARYNTEVNEKDKKNRTVKIITLKSNLVSNFRKEFRLYKIREINDYHHAHDAYLNAVVAKAILKKYPKLEPEFVYGDYQKYDLKRYISRSKDPKEIEKATEKYFFYSNLLNFFKEEVHYADGTIVKRENIEYSKDTGEIAWNKEKDFATIKKVLSLPQVNIVKKREVQTGGFSKESILPKGNSDKLIPRKTKDILWDTTKYGGFDSPVIAYSILLIADIEKGKAKRLKTVKTLVGITIMEKATFEKSPIAFLENKGYHNVRKENILCLPKYSLFELKNGRRRMLASAKELQKGNEIVLPVHLTTLLYHAKNIHRLDEPEHLEYIQKHRNEFKGLLNLVSEFSQKYVLADANLEKIKNLYADNEQADIEILANSFINLLTFTALGAPAAFKFFGKDVDRKRYTTVSEILNATLIHQSITGLYETRIDLSKLGED

SEQ ID NO: 551 - protein, 1134 aa, Streptococcus oralis
  Streptococcus oralis SK313
MNGLVLGLDIGIASVGVGILEKNSGKIVHASSRIFPAATADNNVERRKNRQARRLHRRKKHRGARLKDLFEYYGLLTDFSKVSINLNPYRLRVDGLDQQLTNEELFIALKNIVKRRGISYLDDASEDGGTVSSDYGKAVEENRKLLAEQTPGQIQLERFEKYGQLRGDFTVVENSEKCRLINVFSTSAYKKEAERILRKQQEFNNQITDEFIEDYLKILTGKRKYYHGPGNEKSRTDYGRFRTDGATLDNIFGILIGKCTFYPNEYRASKASYTAQEFNLLNDLNNLTVPTETKKLSEEQKKTIIEYAKSAKTLGASTLLKYIAKMIDASVDQIRGYRVDVNNKPEMHTFEVYRKMQSLETISVGELSRNILDELAHILTLNTEREGIEEAINTKLRDSFSQDQVLELVQFRKNNSSLFSKGWHNFSLKLMMELIPELYETSEEQMTILTRLGKQKSKETSKRTKYIDEKEVTEEIYNPVVAKSVRQAIKIINEATKKHGIFDNIVIEMARENNEEDAKKDYIKRQKANQDEKYAAMEKAAFQYNGKKELPDNIFHGHKELATKIRLWHQQGEKCLYTGKSIPISDLIHNQYKYEIDHILPLSLSFDDSLSNKVLVLATANQEKGQRTPFQALDSMDDAWSYREFKSYVKESKLLGNKKKEYLLTEEDISKIEVKQKFIERNLVDTRYSSRVVLNALQDFYKNHNFDTTISVVRGQFTSQLRRKWGLEKSRETYHHHAVDALIIAASSQLRLWKKQNNPLIAYKEGQFVDSQTGEIISLTDDEYKELVFKAPYDHFVDTLSSKTFEDSILFSYQVDSKFNRKISDATIYATRKAKLDKEKKEYTYTLGKIKDIYSLGTKTPSKTGFYKFLDLYNKDKSQFLMFQKDRKTWDEVIEKIMEQYRPFKEYDKAGKLVDFNPFEKYRQENGPIRKYSKKGNGPEIKSLKYYDILLGKHKNITPEGSRNTVALLSLNPWRTDVYYNMETKKYEFLGLKYADLPFEEGGAYGISTETYNELREKEGIGKNSEFKFTLYKNDLILIKDTETNCQQFFRFWSRTGKDNPKSFEKHKIELKPYEKAKFEKGEELEVLGKVPPSSNQFQKNMQIENLSIYKVKTDVLGNKHFIKKEGDKPKLKF

SEQ ID NO: 552 - protein, 1371 aa, Streptococcus oralis
  Streptococcus oralis SK610
MENKNYSIGLDIGTNSVGWSVITDDYKVPSKKMKVLGNTDKRFIKKNLIGALLFDEGTTAEARRLKRTARRRYTRRKNRLRYLQEIFAEEMSKVDSSFFHRLDDSFLIPEDKRGSKYPIFATLAEEKEYHKQFPTIYHLRKQLADSKEKTDLRLIYLALAHMIKYRGHFLYEDTFDIKNNDIQKIFSEFISIYDNTFEGSSLSGQNAQVEAIFTDKISKSAKRERVLKLFPDEKSTGLFSEFLKLIVGNQADFKKHFDLGEKAPLQFSKDTYDEDLENLLGQIGDDFADLFLVAKKLYDAILLSGILTVTDPSTKAPLSASMIERYENHQKDLAVLKQFIKNNLPEKYDEVFSDQSKDGYAGYIDGKTTQEAFYKYIKNLLSKFEGTDYFLEKIEREDFLRKQRTFDNGSIPHQIHLQEMNAILRRQGEHYPFLKDNKEKIEKILTFRIPYYVGPLARGNRDFAWLTRNSDEAIRPWNFEEIVDKASSAEDFINKMTNYDLYLPEEKVLPKHSLLYETFAVYNELTKVKFIAEGLRDYQFLDSGQKKQIVTQLFKEKRKVTEKDIIQFLHNVDGYDGIELKGIEKQFNASLSTYHDLLKIIKDKEFMDDSKNEEILENIVHTLTIFEDREMIKQRLAQYDSLFDEKVIKALIRRHYTGWGKLSAKLIDGICDKQTGNTILDYLIDDGKNNRNFMQLINDDGLSFKEITQKAQVVGKTDDVKQVVQELPGSPAIKKGILQSIKIVDELVKVMGHTPESIVIEMARENQTTARGKKNSQQRYKRIEDALKNLASGLDSNILKEHPTNNIQLQNDRLFLYYLQNGRDMYTGKPLDINQLSSYDIDHIVPQAFIKDDSLDNRVLTSLKDNRGKSDNVPSIEVVQKRKAFWQQLLDSKLISERKFNNLTKAERGGLDERDKVGFIKRQLVETRQITKHVAQILDARFNKEVNEKDKKNRTVKIITLKSNLVSNFRKEFRLYKVREINDYHHAHDAYLNAVVAKAILKKYPKLEPEFVYGDYQKYDLKRYISRSRNPKEVEKATEKYFFYSNLLNFFKEEVHYADGTIVKRENIEYSKDTGEIAWNKEKDFATIKKVLSYPQVNIVKKREVQTGGFSKESILPKGNSDKLIPRKTKDILWETTKYGGFDSPVIAYSILLIADIEKGKAKKLKTVKTLVGITIMEKAAFEENPITFLENKGYHNVRKENILCLPKYSLFELENGRRRLLASAKELQKGNEIVLPVYLTTLLYHSKNVHKLDEPEHLEYIQKHRNEFKDLLNLVSEFSQKYVLADANLEKIQNLYADNEQADIEILANSFINLLTFTALGAPAAFKFFGKDIDRKRYTTVSEILNATLIHQSITGLYETRIDLSKLGED

SEQ ID NO: 553 - protein, 1140 aa, Streptococcus parasanguinis
  Streptococcus parasanguinis F0449
MNGLVLGLDIGIASVGVGILKKDIGEIIHTNSRLFSAATADSNIERRGHRGGKRLTRRKKHRSIRLHDLFEDFGLLTDFSKVSINLNPYQLRVQGLDNQLTNEELFIALKNIVKRRGISYLDDASEDGGTVSSDYGKAVEENRKLLAEQTPGQIQLDRFEKYGQVRGDFNVVENGEKRRLINVFTTSAYSKEAERILRKQQEFNKKITDEFIEDYLTILTGKRKYYHGPGNEKSRTDYGRYTTKKDPEGKYITLDNIFGILIGKCTFYPDEYRASKASYTAQEFNLLNDLNNLTVPTETKKLSEEQKKTIIKYAKTAKTLGASTLLKYIAKLIGASVDQIHGYRIDPNKKPEMHTFETYRKMQSLETISVEELPRKVLDELAHILTLNTEREGIEEAINATLKDTFSQDQVLELVQFRKNNSSLFSKGWHSFSLKLMMELIPELYETSEEQMTILTRLGKQKSKETSKRTKYIDEKELTEEIYNPVVAKSVRQAIKIINEATKKYGIFDNIVIEMARENNEEDAKKEYIKRQKANLDEKNAAMEKAAFQYNGKKELPDNVFHGHKELATKIRLWHQQGEKCLYTGKNIPISDLIQNQYKYEIDHILPLSLSFDDSLSNKVLVLATANQEKGQRTPFQALDSMDDAWSYREFKSYVKDSKLLGNKKKEYLLTEEDISKIEVKQKFIERNLVDTRYSSRVVLNALQDFYKEHQFDTTISVVRGQFTSQLRRKWGLEKSRETYHHHAVDALIIAASSQLRLWKKQNNPLISYTEGQFVDQVTGEIISLSDDEYKELVFKAPYDHFVDTLKSKKFEDSILFSYQVDSKYNRKISDATIYATRKAKLDKENKEYTYTLGKIKDIYALGTKSPSKTGFYKFLDLYNKDKSQFLMFQKDRKTWDEVIEKIIEQYRPFKEYDENGKEVDFNPFEKYRIENGPIRKYSKKGNGPEIKSLKYYDNLLGKFVDITPSESKNPVALLSLNPWRTDVYYNTETSKYEFLGLKYADLCFEKGGAYGISEVKYNKIREKEGIGKESEFKFTLYKNDLILIKDTETNCQQIFRFWSRTGKDNPKSFEKHKIELKPYEKARFEKGEELEVLGKVPPSSNQLQKNMQIENLSIYKVKTDVLGNKHFIKKEGEEPKLKF

SEQ ID NO: 554 - protein, 1130 aa, Streptococcus pasteurianus
MTNGKILGLDIGIASVGVGIIEAKTGKVVHANSRLFSAANAENNAERRGFRGSRRLNRRKKHRVKRVRDLFEKYGIVTDFRNLNLNPYELRVKGLTEQLKNEELFAALRTISKRRGISYLDDAEDDSTGSTDYAKSIDENRRLLKNKTPGQIQLERLEKYGQLRGNFTVYDENGEAHRLINVFSTSDYEKEARKILETQADYNKKITAEFIDDYVEILTQKRKYYHGPGNEKSRTDYGRFRTDGTTLENIFGILIGKCNFYPDEYRASKASYTAQEYNFLNDLNNLKVSTETGKLSTEQKESLVEFAKNTATLGPAKLLKEIAKILDCKVDEIKGYREDDKGKPDLHTFEPYRKLKFNLESINIDDLSREVIDKLADILTLNTEREGIEDAIKRNLPNQFTEEQISEIIKVRKSQSTAFNKGWHSFSAKLMNELIPELYATSDEQMTILTRLEKFKVNKKSSKNTKTIDEKEVTDEIYNPVVAKSVRQTIKIINAAVKKYGDFDKIVIEMPRDKNADDEKKFIDKRNKENKKEKDDALKRAAYLYNSSDKLPDEVFHGNKQLETKIRLWYQQGERCLYSGKPISIQELVHNSNNFEIDHILPLSLSFDDSLANKVLVYAWTNQEKGQKTPYQVIDSMDAAWSFREMKDYVLKQKGLGKKKRDYLLTTENIDKIEVKKKFIERNLVDTRYASRVVLNSLQSALRELGKDTKVSVVRGQFTSQLRRKWKIDKSRETYHHHAVDALIIAASSQLKLWEKQDNPMFVDYGKNQVVDKQTGEILSVSDDEYKELVFQPPYQGFVNTISSKGFEDEILFSYQVDSKYNRKVSDATIYSTRKAKIGKDKKEETYVLGKIKDIYSQNGFDTFIKKYNKDKTQFLMYQKDSLTWENVIEVILRDYPTTKKSEDGKNDVKCNPFEEYRRENGLICKYSKKGKGTPIKSLKYYDKKLGNCIDITPEESRNKVILQSINPWRADVYFNPETLKYELMGLKYSDLSFEKGTGNYHISQEKYDAIKEKEGIGKKSEFKFTLYRNDLILIKDIASGEQEIYRFLSRTMPNVNHYVELKPYDKEKFDNVQELVEALGEADKVGRCIKGLNKPNISIYKVRTDVLGNKYFVKKKGDKPKLDFKNNKK

SEQ ID NO: 555 - protein, 1374 aa, Streptococcus pseudoporcinus
  Streptococcus pseudoporcinus LQ 940-04
MKKRYSYSIGLDIGTNSVGWAVINEDYKVPAKKMTVFGNTDRKTIKKNLLGTVLFDSGETAQARRLKRTNRRRYTRRRYRLCQLQNIFATEMVKVDDTFFQRLSESFFYYQDKAFDKHPIFGNSKEERAYHKTYPTIYHLRKDLADRDQKADLRLIYLALSHIIKFRGHFLIEGKLNSENTDVQKLFIALVTVYNLLFEEEPIAGETCDAKALLTAKTSKSKRLESLISEFPGQKKNGLFGNLLALALGLRPNFKSNFGLSEDAKLQITKDTYEEELDNLLAEIGDHYADLFLAAKNLSDAILLSDILTLSDENTRAPLSASMIKRYEEHQEDLALLKKLVKEQMPEKYWEIFSNAKKNGYAGYIEGKVSQEDFYRYIKPILSRLKGGDEFLAKIDRDDFLRKQRTFDNGSIPHQIHLKELHAILRRQEKYYPFLAEQKEKIEQLLCFRIPYYVGPLAKGGNSSFAWLKRRSDEPITPWNFKDVVDEEASAQAFIEGMTNYDTYLPEEKVLPKHSPLYEMFTVYNELTKVKYIAENMTKPLYLSAEQKEAIIDHLFKQTRKVTVKDLKEKYFSQIEGLENVDVTGVEGAFNASLGTYNDLLKIIKDKAFLDDEANAEILEEIVLILTLFQDEKLIEKRLAKYANLFEKSVLKKLRKRHYRGWGRLSRQLIDGMKDKASGKTILDFLKADDFANRNFIQLINDSSLDFEKLIDDAQKKAIKRESLTEAVANLAGSPAIKKGILQSLKVVDEIVKVMGHNPDNIVIEMSRENQTTAQGLKNARQRLKKIKEVHKKTGSRILEDNSERITNLTLQDNRLYLYLLQDGKDMYTGQDLDINNLSQYDIDHIIPQSFIKDNSIDNLVLTTQKANRGKSDNVPSIEVVRDMKDRVWRRQLANGAISRQKFDHLTKAERGGLADSDKARFLRRQLVETRQITKHVAQLLDSRFNSKSNQNKKLARNVKIITLKSKIVSDFRKDFGLYKLREVNNYHHAHDAYLNAVVGTALLKKYPKLEAEFVYGDYKHFDLVKLISKSDPSLGKATAKVFFYSNIMNFFKEELSLADGTLMKRPVIETNTETGEVVWDKVKDFKTIRKVLSYPQVNIVKKTEIQSGAFSKESVLSKGNSDKLIERKKGWDPKKYGGFDSPNTAYSIFVVAKVAKRKAQKLKTVKEIVGITIMEQAEYEKDNIAFLEKKGYQDIQEKLLIKLPKYSLFELENGRRRLLASANEFQKGNELALSGKYMKFLYLASRYDKLSSKIESEQQKKLFVEQHLHYFDEILDIVVKHATCYIKAENNLKKIISLYKKKEAYSINEQALNMLNLFIFTSLGAPSTFVFFDETIDRKRYTTSSDVLNGILIQQSITGLYETRIDLSRFGGD

SEQ ID NO: 556 - protein, 1368 aa, Streptococcus pyogenes
  Streptococcus pyogenes MGAS10270
MDKKYSIGLDIGTNSVGWAVITDDYKVPSKKFKVLGNTDRHSIKKNLIGALLFDSGETAEATRLKRTARRRYTRRKNRICYLQEIFSNEMAKVDDSFFHRLEESFLVEEDKKHERHPIFGNIVDEVAYHEKYPTIYHLRKKLVDSTDKADLRLIYLALAHMIKFRGHFLIEGDLNPDNSDVDKLFIQLVQTYNQLFEENPINASGVDAKAILSARLSKSRRLENLIAQLPGEKKNGLFGNLIALSLGLTPNFKSNFDLAEDAKLQLSKDTYDDDLDNLLAQIGDQYADLFLAAKNLSDAILLSDILRLNSEITKAPLSASMIKRYDEHHQDLTLLKALVRQQLPEKYKEIFFDQSKNGYAGYIDGGASQEEFYKFIKPILEKMDGTEELLAKLNREDLLRKQRTFDNGSIPHQIHLGELHAILRRQEDFYPFLKDNREKIEKILTFRIPYYVGPLARGNSRFAWMTRKSEETITPWNFEEVVDKGASAQSFIERMTNFDKNLPNEKVLPKHSLLYEYFTVYNELTKVKYVTEGMRKPAFLSGEQKKAIVDLLFKTNRKVTVKQLKEDYFKKIECFDSVEISGVEDRFNASLGTYHDLLKIIKDKDFLDNEENEDILEDIVLTLTLFEDREMIEERLKTYAHLFDDKVMKQLKRRRYTGWGRLSRKLINGIRDKQSGKTILDFLKSDGFANRNFMQLIHDDSLTFKEDIQKAQVSGQGDSLHEHIANLAGSPAIKKGILQTVKVVDELVKVMGRHKPENIVIEMARENQTTQKGQKNSRERMKRIEEGIKELGSQILKEHPVENTQLQNEKLYLYYLQNGRDMYVDQELDINRLSDYDVDHIVPQSFIKDDSIDNKVLTRSDKNRGKSDNVPSEEVVKKMKNYWRQLLNAKLITQRKFDNLTKAERGGLSELDKAGFIKRQLVETRQITKHVAQILDSRMNTKYDENDKLIREVKVITLKSKLVSDFRKDFQFYKVREINNYHHAHDAYLNAVVGTALIKKYPKLESEFVYGDYKVYDVRKMIAKSEQEIGKATAKYFFYSNIMNFFKTEITLANGEIRKRPLIETNGETGEIVWDKGRDFATVRKVLSMPQVNIVKKTEVQTGGFSKESILPKRNSDKLIARKKDWDPKKYGGFDSPTVAYSVLVVAKVEKGKSKKLKSVKELLGLTIMERSSFEKNPIDFLEAKGYKEVKKDLIIKLPKYSLFELENGRKRMLASAGELQKGNELALPSKYVNFLYLASHYEKLKGSPEDNEQKQLFVEQHKHYLDEIIEQISEFSKRVILADANLDKVLSAYNKHRDKPIREQAENIIHLFTLTNLGAPAAFKYFDTTIDRKRYTSTKEVLDATLIHQSITGLYETRIDLSQLGGD

SEQ ID NO: 557 - protein, 1371 aa, Streptococcus pyogenes
MDKKYSIGLDIGTNSVGWAVITDDYKVPSKKFKVLGNTDRHSIKKNLIGALLFDSGETAEATRLKRTARRRYTRRKNRICYLQEIFSNEMAKVDDSFFHRLEESFLVEEDKKHERHPIFGNIVDEVAYHEKYPTIYHLRKKLADSTDKADLRLIYLALAHMIKFRGHFLIEGDLNPDNSDVDKLFIQLVQTYNQLFEENPINASRVDAKAILSARLSKSRRLENLIAQLPGEKKNGLFGNLIALSLGLTPNFKSNFDLAEDAKLQLSKDTYDDDLDNLLAQIGDQYADLFLAAKNLSDATLLSDILRVNSEITKAPLSASMIKRYDEHHQDLTLLKALVRQQLPEKYKEIFFDQSKNGYAGYIDGGASQEEFYKFIKPILEKMDGTEELLAKLNREDLLRKQRTFDNGSIPHQIHLGELHAILRRQEDFYPFLKDNREKIEKILTFRIPYYVGPLARGNSRFAWMTRKSEETITPWNFEEVVDKGASAQSFIERMTNFDKNLPNEKVLPKHSLLYEYFTVYNELTKVKYVTEGMRKPAFLSGEQKKAIVDLLFKTNRKVTVKQLKEDYFKKIECFDSVEISGVEDRFNASLGTYHDLLKIIKDKDFLDNEENEDILEDIVLTLTLFEDKEMIEERLKTYAHLFDDKVMKQLKRRHYTGWGRLSRKLINGIRDKQSGKTILDFLKSDGFANRNFIQLIHDDSLTFKEAIQKAQVSGQGHSLHEQIANLAGSPAIKKGILQSVKVVDELVKVMGHKPENIVIEMARENQTTQKGQKNSRERMKRIEEGIKELGSQILKEHPVENTQLQNEKLYLYYLQNGRDMYVDQELDINRLSDYDVDHIVPQSFIKDDSIDNKVLTRSDKNRGKSDDVPSEEVVKKMKNYWRQLLNAKLITQRKFDNLTKAERGGLSELDKAGFIKRQLVETRQITKHVAQILDSRMNTKYDENDKLIREVKVITLKSKLVSDFRKDFQFYKVREINNYHHAHDAYLNAVVGTALIKKYPKLESEFVYGDYKVYDVRKMIAKSEQEIGKATAKRFFYSNIMNFFKTEITLANGEIRKRPLIETNEETGEIVWDKGRDFATVRKVLSMPQVNIVKKTEVQTGALTNESIYARGSFDKLISRKHRFESSKYGGFGSPTVTYSVLVVAKSKVQDGKVKKIKTGKELIGITLLDKLVFEKNPLKFIEDKGYGNVQIDKCIKLPKYSLFEFENGTRRMLASVMANNNSRGDLQKANEMFLPAKLVTLLYHAHKIESSKELEHEAYILDHYNDLYQLLSYIERFASLYVDVEKNISKVKELFSNIESYSISEICSSVINLLTLTASGAPADFKFLGTTIPRKRYGSPQSILSSTLIHQSITGLYETRIDLSQLGSD

SEQ ID NO: 558 - protein, 1367 aa, Streptococcus pyogenes
MDKKYSIGLDIGTNSVGWAVITDDYKVPSKKFKVLGNTDRHSIKKNLIGALLFGSGETAEATRLKRTARRRYTRRKNRICYLQEIFSNEMAKVDDSFFHRLEESFLVEEDKKHERHPIFGNIVDEVAYHEKYPTIYHLRKKLADSTDKADLRLIYLALAHMIKFRGHFLIEGDLNPDNSDVDKLFIQLVQIYNQLFEENPINASRVDAKAILSARLSKSRRLENLIAQLPGEKRNGLFGNLIALSLGLTPNFKSNFDLAEDAKLQLSKDTYDDDLDNLLAQIGDQYADLFLAAKNLSDAILLSDILRVNSEITKAPLSASMIKRYDEHHQDLTLLKALVRQQLPEKYKEIFFDQSKNGYAGYIDGGASQEEFYKFIKPILEKMDGTEELLVKLNREDLLRKQRTFDNGSIPHQIHLGELHAILRRQEDFYPFLKDNREKIEKILTFRIPYYVGPLARGNSRFAWMTRKSEETITPWNFEEVVDKGASAQSFIERMTNFDKNLPNEKVLPKHSLLYEYFTVYNELTKVKYVTEGMRKPAFLSGEQKKAIVDLLFKTNRKVTVKQLKEDYFKKIECFDSVEISGVEDRFNASLGAYHDLLKIIKDKDFLDNEENEDILEDIVLTLTLFEDRGMIEERLKTYAHLFDDKVMKQLKRRRYTGWGRLSRKLINGIRDKQSGKTILDFLKSDGFANRNFMQLIHDDSLTFKEDIQKAQVSGQGHSLHEQIANLAGSPAIKKGILQTVKIVDELVKVMGHKPENIVIEMARENQTTQKGQKNSRERMKRIEEGIKELGSQILKEHPVENTQLQNEKLYLYYLQNGRDMYVDQELDINRLSDYDVDHIVPQSFIKDDSIDNKVLTRSDKNRGKSDNVPSEEVVKKMKNYWRQLLNAKLITQRKFDNLTKAERGGLSELDKAGFIKRQLVETRQITKHVAQILDSRMNTKYDENDKLIREVKVITLKSKLVSDFRKDFQFYKVREINNYHHAHDAYLNAVVGTALIKKYPKLESEFVYGDYKVYDVRKMIAKSEQEIGKATAKYFFYSNIMNFFKTEITLANGEIRKRPLIETNGETGEIVWDKGRDFATVRKVLSMPQVNIVKKTEVQTGGFSKESILPKRNSDKLIARKKDWDPKKYGGFDSPTVAYSVLVVAKVEKGKSKKLKSVKELLGITIMERSSFEKNPIDFLEAKGYKEVKKDLIIKLPKYSLFELENGRKRMLASAGELQKGNELALPSKYVNFLYLASHYEKLKGSPEDNEQKQLFVEQHKHYLDEIIEQISEFSKRVILADANLDKVLSAYNKHRDKPIREQAENIIHLFTLTNLGAPAAFKYFDTTIDRKRYTSTKEVLDATLIHQSITGLYETRIDLSQLGGD

SEQ ID NO: 559 - protein, 1368 aa, Streptococcus sp.
MDKKYSIGLDIGTNSVGWAVITDDYKVPSKKFKVLGNTDRHSIKKNLIGALLFDSGEIAEATRLKRTARRRYTRRKNRICYLQEIFSNEMAKVDDSFFHRLEESFLVEEDKKHERHPIFGNIVDEVAYHEKYPTIYHLRKKLVDSTDKADLRLIYLALAHMIKFRGHFLIEGDLNPDNSDVDKLFIQLVQTYNQLFEENPINASGVDAKAILSARLSKSRRLENLIAQLPGEKKNGLFGNLIALSLGLTPNFKSNFDLAEDAKLQLSKDTYDDDLDNLLAQIGDQYADLFLAAKNLSDAILLSDILRLNSEITKAPLSASMIKRYDEHHQDLTLLKALVRQQLPEKYKEIFFDQSKNGYAGYIDGGASQEEFYKFIKPILEKMDGTEELLAKLNREDLLRKQRTFDNGSIPHQIHLGELHAILRRQEDFYPFLKDNREKIEKILTFRIPYYVGPLARGNSRFAWMTRKSEETITPWNFEEVVDKGASAQSFIERMTNFDKNLPNEKVLPKHSLLYEYFTVYNELTKVKYVTEGMRKPAFLSGEQKKAIVDLLFKTNRKVTVKQLKEDYFKKIECFDSVEISGVEDRFNASLGTYHDLLKIIKDKDFLDNEENEDILEDIVLTLTLFEDREMIEERLKTYAHLFDDKVMKQLKRRRYTGWGRLSRKLINGIRDKQSGKTILDFLKSDGFANRNFMQLIHDDSLTFKEDIQKAQVSGQGDSLHEHIANLAGSPAIKKGILQTVKVVDELVKVMGRHKPENIVIEMARENQTTQKGQKNSRERMKRIEEGIKELGSQILKEHPVENTQLQNEKLYLYYLQNGRDMYVDQELDINRLSDYDVDHIVPQSFIKDDSIDNKVLTRSDKNRGKSDNVPSEEVVKKMKNYWRQLLNAKLITQRKFDNLTKAERGGLSELDKAGFIKRQLVETRQITKHVAQILDSRMNTKYDENDKLIREVKVITLKSKLVSDFRKDFQFYKVREINNYHHAHDAYLNAVVGTALIKKYPKLESEFVYGDYKVYDVRKMLAKSEQEIGKATAKYFFYSNIMNFFKTEITLANGEIRKRPLIETNGETGEIVWDKGRDFATVRKVLSMPQVNIVKKTEVQTGGFSKESILPKRNSDKLIARKKDWDPKKYGGFDSPTVAYSVLVVAKVEKGKSKKLKSVKELLGITIMERSSFEKNPIDFLEAKGYKEVRKDLIIKLPKYSLFELENGRKRMLASAGELQKGNELALPSKYVNFLYLASHYEKLKGSPEDNEQKQLFVEQHKHYLDEIIEQISEFSKRVILADANLDKVLSAYNKHRDKPIREQAENIIHLFTLTNLGAPTAFKYFDTTIDRKRYTSTKEVLDATFIHQSITGLYETRIDLSQLGGD

SEQ ID NO: 560 - protein, 1368 aa, Streptococcus pyogenes
MDKKYSIGLDIGTNSVGWAVITDDYKVPSKKLKGLGNTDRHGIKKNLIGALLFDSGETAEATRLKRTARRRYTRRKNRICYLQEIFSNEMAKVDDSFFHRLEESFLVEEDKKHERHPIFGNIVDEVAYHEKYPTIYHLRKKLADSTDKVDLRLIYLALAHMIKFRGHFLIEGDLNPDNSDVDKLFIQLVQTYNQLFEENPINASRVDAKAILSARLSKSRRLENLIAQLPGEKKNGLFGNLIALSLGLTPNFKSNFDLAEDAKLQLSKDTYDDDLDNLLAQIGDQYADLFLAAKNLSDATLLSDILRVNSEITKAPLSASMIKRYDEHHQDLTLLKALVRQQLPEKYKEIFFDQSKNGYAGYIDGGASQEEFYKFIKPILEKMDGTEELLAKLNREDLLRKQRTFDNGSIPYQIHLGELHAILRRQEDFYPFLKDNREKIEKILTFRIPYYVGPLARGNSRFAWMTRKSEETITPWNFEEVVDKGASAQSFIERMTNFDKNLPNEKVLPKHSLLYEYFTVYNELTKVKYVTEGMRKPAFLSGEQKKAIVDLLFKTNRKVTVKQLKEDYFKKIECFDSVEISGVEDRFNASLGTYHDLLKIIKDKDFLDNEENEDILEDIVLTLTLFEDREMIEERLKTYAHLFDDKVMKQLKRRRYTGWGRLSRKLINGIRDKQSGKTILDFLKSDGFANRNFMQLIHDDSLTFKEDIQKAQVSGQGDSLHEHIANLAGSPAIKKGILQTVKVVDELVKVMGRHKPENIVIEMARENQTTQKGQKNSRERMKRIEEGIKELGSDILKEYPVENTQLQNEKLYLYYLQNGRDMYVDQELDINRLSDYDVDHIVPQSFLKDDSIDNKVLTRSDKNRGKSDNVPSEEVVKKMKNYWRQLLNAKLITQRKFDNLTKAERGGLSELDKVGFIKRQLVETRQITKHVAQILDSRMNTKYDENDKLIREVRVITLKSKLVSDFRKDFQFYKVREINNYHHAHDAYLNAVVGTALIKKYPKLESEFVYGDYKVYDVRKMIAKSEQEIGKATAKYFFYSNIMNFFKTEITLANGEIRKRPLIETNGETGEIVWDKGRDFATVRKVLSMPQVNIVKKTEVQTGGFSKESILPKRNSDKLIARKKDWDPKKYGGFDSPTVAYSVLVVAKVEKGKSKKLKSVKELLGITIMERSSFEKDPIDFLEAKGYKEVRKDLIIKLPKYSLFELENGRKRMLASAGELQKGNELALPSKYVNFLYLASHYEKLKGSPEDNEQKQLFVEQHKHYLDEIIEQISEFSKRVILADANLDKVLSAYNKHRDKPIREQAENIIHLFTLTNLGAPAAFKYFDTTIDRKRYTSTKEVLDATLIHQSITGLYETRIDLSQLGGD

SEQ ID NO: 561 - protein, 1368 aa, Streptococcus pyogenes
MDKKYSIGLDIGTNSVGWAVITDDYKVPSKKFKVLGNTDRHSIKKNLIGALLFDSGETAEATRLKRTARRRYTRRKNRICYLQEIFSNEMAKVDDSFFHRLEESFLVEEDKKHERHPIFGNIVDEVAYHEKYPTIYHLRKKLVDSTDKADLRLIYLALAHMIKFRGHFLIEGDLNPDNSDVDKLFIQLVQTYNQLFEENPINASGVDAKAILSARLSKSRRLENLIAQLPGEKKNGLFGNLIALSLGLTPNFKSNFDLAEDAKLQLSKDTYDDDLDNLLAQIGDQYADLFLAAKNLSDAILLSDILRVNTEITKAPLSASMIKRYDEHHQDLTLLKALVRQQLPEKYKEIFFDQSKNGYAGYIDGGASQEEFYKFIKPILEKMDGTEELLVKLNREDLLRKQRTFDNGSIPHQIHLGELHAILRRQEDFYPFLKDNREKIEKILTFRIPYYVGPLARGNSRFAWMTRKSEETITPWNFEEVVDKGASAQSFIERMTNFDKNLPNEKVLPKHSLLYEYFTVYNELTKVKYVTEGMRKPAFLSGEQKKAIVDLLFKTNRKVTVKQLKEDYFKKIECFDSVEISGVEDRFNASLGTYHDLLKIIKDKDFLDNEENEDILEDIVLTLTLFEDREMIEERLKTYAHLFDDKVMKQLKRRRYTGWGRLSRKLINGIRDKQSGKTILDFLKSDGFANRNFMQLIHDDSLTFKEDIQKAQVSGQGDSLHEHIANLAGSPAIKKGILQTVKVVDELVKVMGRHKPENIVIEMARENQTTQKGQKNSRERMKRIEEGIKELGSQILKEHPVENTQLQNEKLYLYYLQNGRDMYVDQELDINRLSDYDVDHIVPQSFLKDDSIDNKVLTRSDKNRGKSDNVPSEEVVKKMKNYWRQLLNAKLITQRKFDNLTKAERGGLSELDKAGFIKRQLVETRQITKHVAQILDSRMNTKYDENDKLIREVKVITLKSKLVSDFRKDFQFYKVREINNYHHAHDAYLNAVVGTALIKKYPKLESEFVYGDYKVYDVRKMIAKSEQEIGKATAKYFFYSNIMNFFKTEITLANGEIRKRPLIETNGETGEIVWDKGRDFATVRKVLSMPQVNIVKKTEVQTGGFSKESILPKRNSDKLIARKKDWDPKKYGGFDSPTVAYSVLVVAKVEKGKSKKLKSVKELLGITIMERSSFEKNPIDFLEAKGYKEVKKDLIIKLPKYSLFELENGRKRMLASAGELQKGNELALPSKYVNFLYLASHYEKLKGSPEDNEQKQLFVEQHKHYLDEIIEQISEFSKRVILADANLDKVLSAYNKHRDKPIREQAENIIHLFTLTNLGAPAAFKYFDTTIDRKRYTSTKEVLDATLIHQSITGLYETRIDLSQLGGD

SEQ ID NO: 562 - protein, 1368 aa, Streptococcus pyogenes
MDKKYSIGLDIGTNSVGWAVITDDYKVPSKKFKVLGNTDRHSIKKNLIGALLFDSGETAEATRLKRTARRRYTRRKNRICYLQEIFSNEMAKVDDSFFHRLEESFLVEEDKKHERHPIFGNIVDEVAYHEKYPTIYHLRKKLVDSTDKADLRLIYLALAHMIKFRGHFLIEGDLNPDNSDVDKLFIQLVQTYNQLFEENPINASGVDAKAILSARLSKSRRLENLIAQLPGEKKNGLFGNLIALSLGLTPNFKSNFDLAEDAKLQLSKDTYDDDLDNLLAQIGDQYADLFLAAKNLSDAILLSDILRLNSEITKAPLSASMIKRYDEHHQDLTLLKALVRQQLPEKYKEIFFDQSKNGYAGYIDGGASQEEFYKFIKPILEKMDGTEELLAKLNREDLLRKQRTFDNGSIPHQIHLGELHAILRRQEDFYPFLKDNREKIEKILTFRIPYYVGPLARGNSRFAWMTRKSEETITPWNFEEVVDKGASAQSFIERMTNFDKNLPNEKVLPKHSLLYEYFTVYNELTKVKYVTEGMRKPAFLSGEQKKAIVDLLFKTNRKVTVKQLKEDYFKKIECFDSVEISGVEDRFNASLGTYHDLLKIIKDKDFLDNEENEDILEDIVLTLTLFEDREMIEERLKTYAHLFDDKVMKQLKRRRYTGWGRLSRKLINGIRDKQSGKTILDFLKSDGFANRNFMQLIHDDSLTFKEDIQKAQVSGQGDSLHEHIANLAGSPAIKKGILQTVKVVDELVKVMGRHKPENIVIEMARENQTTQKGQKNSRERMKRIEEGIKELGSQILKEHPVENTQLQNEKLYLYYLQNGRDMYVDQELDINRLSDYDVDHIVPQSFIKDDSIDNKVLTRSDKNRGKSNNVPSEEVVKKMKNYWRQLLNAKLITQRKFDNLTKAERGGLSELDKAGFIKRQLVETRQITKHVAQILDSRMNTKYDENDKLIREVKVITLKSKLVSDFRKDFQFYKVREINNYHHAHDAYLNAVVGTALIKKYPKLESEFVYGDYKVYDVRKMIAKSEQEIGKATAKYFFYSNIMNFFKTEITLANGEIRKRPLIETNGETGEIVWDKGRDFATVRKVLSMPQVNIVKKTEVQTGGFSKESILPKRNSDKLIARKKDWDPKKYGGFDSPTVAYSVLVVAKVEKGKSKKLKSVKELLGITIMERSSFEKNPIDFLEAKGYKEVRKDLIVKLPKYSLFELENGRKRMLASAGELQKGNELALPSKYVNFLYLASHYEKLKGSPEDNEQKQLFVEQHKHYLDEIIEQISEFSKRVILADANLDKVLSAYNKHRDKPIREQAENIIHLFTLTNLGAPAAFKYFDTTIDRKRYTSTKEVLDATFIHQSITGLYETRIDLSQLGGD

SEQ ID NO: 563 - protein, 1368 aa, Streptococcus pyogenes
MDKKYSIGLDIGTNSVGWAVITDDYKVPSKKFKVLGNTDRHSIKKNLIGALLFDSGEIAEATRLKRTARRRYTRRKNRICYLQEIFSNEMAKVDDSFFHRLEESFLVEEDKKHERHPIFGNIVDEVAYHEKYPTIYHLRKKLVDSTDKADLRLIYLALAHMIKFRGHFLIEGDLNPDNSDVDKLFIQLVQTYNQLFEENPINASGVDAKAILSARLSKSRRLENLIAQLPGEKKNGLFGNLIALSLGLTPNFKSNFDLAEDAKLQLSKDTYDDDLDNLLAQIGDQYADLFLAAKNLSDAILLSDILRLNSEITKAPLSASMIKRYDEHHQDLTLLKALVRQQLPEKYKEIFFDQSKNGYAGYIDGGASQEEFYKFIKPILEKMDGTEELLAKLNREDLLRKQRTFDNGSIPHQIHLGELHAILRRQEDFYPFLKDNREKIEKILTFRIPYYVGPLARGNSRFAWMTRKSEETITPWNFEEVVDKGASAQSFIERMTNFDKNLPNEKVLPKHSLLYEYFTVYNELTKVKYVTEGMRKPAFLSGEQKKAIVDLLFKTNRKVTVKQLKEDYFKKIECFDSVEISGVEDRFNASLGTYHDLLKIIKDKDFLDNEENEDILEDIVLTLTLFEDREMIEERLKTYAHLFDDKVMKQLKRRRYTVWGRLSRKLINGIRDKQSGKTILDFLKSDGFANRNFMQLIHDDSLTFKEDIQKAQVSGQGDSLHEHIANLAGSPAIKKGILQTVKVVDELVKVMGRHKPENIVIEMARENQTTQKGQKNSRERMKRIEEGIKELGSQILKEHPVENTQLQNEKLYLYYLQNGRDMYVDQELDINRLSDYDVDHIVPQSFIKDDSIDNKVLTRSDKNRGKSDNVPSEEVVKKMKNYWRQLLNAKLITQRKFDNLTKAERGGLSELDKAGFIKRQLVETRQITKHVAQILDSRMNTKYDENDKLIREVKVITLKSKLVSDFRKDFQFYKVREINNYHHAHDAYLNAVVGTALIKKYPKLESEFVYGDYKVYDVRKMLAKSEQEIGKATAKYFFYSNIMNFFKTEITLANGEIRKRPLIETNGETGEIVWDKGRDFATVRKVLSMPQVNIVKKTEVQTGGFSKESILPKRNSDKLIARKKDWDPKKYGGFDSPTVAYSVLVVAKVEKGKSKKLKSVKELLGITIMERSSFEKNPIDFLEAKGYKEVRKDLIIKLPKYSLFELENGRKRMLASAGELQKGNELALPSKYVNFLYLASHYEKLKGSPEDNEQKQLFVEQHKHYLDEIIEQISEFSKRVILADANLDKVLSAYNKHRDKPIREQAENIIHLFTLTNLGAPTAFKYFDTTIDRKRYTSTKEVLDATFIHQSITGLYETRIDLSQLGGD

SEQ ID NO: 564 - protein, 1368 aa, Streptococcus pyogenes
MDKKYSIGLDIGTNSVGWAVITDDYKVPSKKFKVLGNTDRHSIKKNLIGALLFDSGETAEATRLKRTARRRYTRRKNRICYLQEIFSNEIAKVDDSFFHRLEESFLVEEDKKHERHPIFGNIVDEVAYHEKYPTIYHLRKKLADSTDKADLRLIYLALAHMIKFRGHFLIEGDLNPDNSDVDKLFIQLVQTYNQLFEENPINASRVDAKAILSARLSKSRRLENLIAQLPGEKRNGLFGNLIALSLGLTPNFKSNFDLAEDAKLQLSKDTYDDDLDNLLAQIGDQYADLFLAAKNLSDAILLSDILRVNTEITKAPLSASMIKRYDEHHQDLTLLKALVRQQLPEKYKEIFFDQSKNGYAGYIDGGASQEEFYKFIKPILEKMDGTEELLAKLNREDLLRKQRTFDNGSIPHQIHLGELHAILRRQEDFYPFLKDNREKIEKILTFRIPYYVGPLARGNSRFAWMTRKSEETITPWNFEEVVDKGASAQSFIERMTNFDKNLPNEKVLPKHSLLYEYFTVYNELTKVKYVTEGMRKPAFLSGEQKKAIVDLLFKTNRKVTVKQLKEDYFKKIECFDSVEISGVEDRFNASLGTYHDLLKIIKDKDFLDNEENEDILEDIVLTLTLFEDREMIEERLKTYAHLFDDKVMKQLKRRRYTGWGRLSRKLINGIRDKQSGKTILDFLKSDGFANRNFMQLIHDDSLTFKEDLQKAQVSGQGDSLHEHIANLAGSPAIKKGILQTVKVVDELVKVMGRHKPENIVIEMARENQTTQKGQKNSRERMKRIEEGIKELGSDILKEYPVETTQLQNEKLYLYYLQNGRDMYVDQELDINRLSDYDVDHIVPQSFLKDDSIDNKVLTRSDKNRGKSDNVPSEEVVKKMKNYWKQLLNAKLITQRKFDNLTKAERGGLSELDKAGFIKRQLVETRQITKHVAQILDSRMNTKYDENDKLIREVRVITLKSKLVSDFRKDFQFYKVREINNYHHAHDAYLNAVVGTALIKKYPKLESEFVYGDYKVYDIRKMIAKSEQEIGKATAKYFFYSNIMNFFKTEITLANGEIRKRPLIETNGETGEIVWDKGRDFATVRKVLSMPQVNIVKKTEVQTGGFSKESILPKRNSDKLIARKKDWDPKKYGGFDSPTVAYSVLVVAKVEKGKSKKLKSVKELVGITIMERSSFEKDPVDFLEAKGYKEVRKDLIIKLPKYSLFELENGRKRMLASAGELQKGNELALPSKYVNFLYLASHYEKLKGSPEDNEQKQLFVEQHKHYLDEIIEQISEFSKRVILADANLDKVLSAYNKHRDKPIREQAENIIHLFTLTNLGAPAAFKCFDTTIGRNRYKSIKEVLDATLIHQSITGLYETRIDLSQLGGD

SEQ ID NO: 565 - protein, 1368 aa, Streptococcus pyogenes [sequence omitted]

SEQ ID NO: 566 - protein, 1368 aa, Streptococcus pyogenes; identical to SEQ ID NO: 560

SEQ ID NO: 567 - protein, 1370 aa, Streptococcus ratti
  Streptococcus ratti FA-1 = DSM 20564
MKKPYSIGLDIGTNSVGWAVITDDYKVPAKKMKVLGNTDKNYIKKNLLGALLFDSGNTAEDRRLKRTARRRYTRRRNRLLYLQDIFSDEMNKVDESFFHRLEDSFLVSEDKRGDHHPIFGNVVDEVKYHEQFPTIYHLRKYLADTPEKADLRLVYLALAHMIKFRGHFLIDDPKLDVKNTDSQELFSQFLTAYDVTQEDSHLADVKINISDIITEKMNKSRKVEALLFHFPSQKKNSFFGNLVSLVFGLLPNFKTNFNLAEDAKLQLSKDSYDEDLENLLGQIGDEYTDVFVAARKLYDSILLSGILTVNDLSTKAILSASMVRRYEEHNKDLAKLKAFVKANFTHDVFKEVFSDASKNGYAGYIEGKTSQEDFYKYVKNLIGKVDGSADFIEKIDREDFLRKQRTFDNGSIPHQVHLAEMKAILRRQGEYYPFLKEHAEKIQQILTFRIPYYVGPLDRHGHSDFAWASFNSEEKVTPWNFEEIIDKNKSAQAFIERMTNQDLYLPNEKVLPKHSPLYEKYTVYNELTKIKYVTETGTAKFFDANLKQEIFDGLFKKERKVTKRKLLTFLEKNFDEFRIVDIQGLDKETETFNASYGIYQDLLKIIKDKAFMDDSENADILEDIVLTLTLFEDREMIKQRLAKYADLFDKKVIDNLARRRYTGWGRLSAKLLNGIRDKRSRKTIMDYLVDDGRSNRNLMQLITDDNLTFKDEIAKAQYSDNSDDLHQVVQDLAGSPAIKKGILQSVKIVDELVKVMGYEPEQIVVEMARENQTTAKGRRNSQQRYKRLEEAIKNLDRDLNYKILKEHPTDNQALQNDRLFLYYLQNGRDMYTGESLDINRLSDYDIDHIIPQAFIKDNSIDNRVLVSSAKNRGKSDDVPSEDVVNRMRPFWNKLLNCGLISQRKYSNLTKKELTPNDKAGFIKRQLVETRQITKHVARILDEHFNKEFDEDKKRIRKVKVVTLKSNLVSNFRKEFELYKVREINDYHHAHDAYLNAVVAKALLMKYPKLEPEFVYGEYPKYNSYRERKTATQRMFFYSNIMNMFKSKVKLADERIIERPMIEVNDETGEIAWDKTKHIATVKKVLSYPQINIVKKVEEQTGGLTNETIYPRGSFDKLLNRKNTLEASKYGGFGSPTVAYCVLVVADSKNENGKVKKLKLGSELLGITILEKNDFENNSLDFLSRKGYQGVQEKKIIKLPKYSLFEFQDGSRRMLSSVMANDNKRGDLQKANEMILPAYLVKLLYHAKHINSVGEPAHKNYINEHCSEFQDLLNYIRQFADKFVDVDKNLSKIRSLSKSMAEYSVSEICSSFVNLLTLTALGAPADFKFFGTTIPRKRYGSPQSILSATLIHQSITGLYETRIDLSKLGED

SEQ ID NO: 568 - protein, 1127 aa, Streptococcus salivarius
MSDLVLGLDIGIGSVGVGILNKVTGEIIHKNSRIFPAAQAENNVERRINRQGRRLTRRKKHRRVRLNHLFEESGLITDFTNVSINLNPYQLRVKGLTDELSNEELFIALKNMVKHRGISYLDDASDDGNSSVGDYAQIVKENSKQLETKTPGQIQLERYQKYGQLRGDFTVEEDGKKHRLINVFPTSAYRAEALRILQTQQEFNPQITDEFINSYLQILTGKRKYYHGPGNEKSRTDYGRYTTKKDSEDEYITLDNIFGILIGKCTFYPEEYRAAKASYTAQEFNLLNDLNNLTVPTETKKLSEEQKNQIITNVKNEKAMGPAKLFKYIAKLLSCDVADIKGYRIDKSDKAEIHTFEAYRKMKTLATIDIEQMERENLDKLAYVLTLNTEKEGIQEALEHEFADGTFSQEQIDELVQFRKANSSIFGKGWHSFSVKLMMELIPELYATSEEQMTILTRLGKQKTTSSSNKTKYIDEKQLTEEIYNPVAAKSVRQAIKIVNAAIKEYGDFDNIVIEMARETNEDDEKKAIQKIQKANKDEKDAAMLKAANQYNGKAELPHSVFHGHKQLATKIRLWHQQGERCLYTGKTISIHDLINNSNQFEIDHILPLSITFDDSLANKVLVYATANQEKGQRTPYQALDSMDDAWSFRELKAFVRDSKALSNKKKEYLLTEEDISKFDVRKKFIERNLVDTRYASRVVLNALQEHFRVHKTDTKVSVVRGQFTSQLRRHWGIEKTRDTYHHHAVDALIIAASSQLNLWKKQKNTLVSYSEDQLLDIETGELISDDEYKESVFKAPYQHFVDTLKSKEFEDSILFSYQVDSKFNRKISDATIYATRQAKVGKDKKDETYVLGKIKDIYSQTGYDAFIKIYKKDKSKFLMYRHDPQTFEKVIEPILENYPNKELNEKGKEVPCNPFLKYKEDHGYIRKYSKKGNGPEIKSLKYYDSKLGNHIDITPKNSNNKVVLQSVSPWRADVYFNKTTGKYEILGLKYADLKFEKGTGTYKISEEKYNDIKIKEGVDSDSEFKFTLYKNDLLLIKDTETKEQQLFRFLSRTMPNVKHYVELKPYDKQKFDDNEELIKILGIVAKGGQCKKGVSKPNISIYKIRTDVLGNQHIIKNEGDKPKLDF

SEQ ID NO: 569 - protein, 1385 aa, Streptococcus salivarius
  Streptococcus salivarius K12
MTKPYSIGLDIGTNSVGWAVITDDYKVPSKKMKVLGNTSKKYIKKNLLGALLFDSGITAEGRRLKRTARRRYTRRRNRILYLQEIFSTEMATLDDAFFQRLDDSFLVPDDKRDSKYPIFGNLVEEKVYHDEFPTIYHLRKHLADSSKKADLRLVYLALAHMIKYRGHFLIEGDFNSKNNDLQKNFQDFLDTYNAIFESDLSLENSKQLEEIVKDKISKSAKKDRILKLFPGEKNSGIFSEFLKLIVGNQADFRKYFNLDEKTSLQFSKESYDEDLETLLGHIGDDYSDVFLKAKKLYDAILLSGILTVTDNGTEAPLSSAMIMRYKEHEEDLALLKAYIRNISLETYNEVFKDNTKNGYAGYIDGKTSQEDFYVYLKRLLAGLEGADYFLEKIDREDFLRKQRTFDNGSIPYQIYLQEMRAILDKQAKFYPFLAKNKERIEKILTFRIPYYVGPLARGNSDFAWSIRKRNEKITPWNFEDVIDKESSAEAFINRMTSFDLYLPEEKVLPKHSLLYENFTVYNELTKVRFIAEGMRDYQFLDSKQKKDIVRLYFKGKRKVTDKDIIEYLHAIDGYDGIELKGIEKQFNSSLSTYHDLLNIINDKEFLDDSSNETIIEEIIHTLTMFEDREMIKQRLSKFDNIFDKSVLKKLSRRHYTGWGKLSAKLINGIRDEKSGNTILDYLIDDGVSNRNFMQLIHDDALSFKKKIKKAQIIGDKDNIKQVVKSLPGSPAIKKGILQSIKIVDELVKVMGREPESIVVEMARENQYTNQGKSNSQQRLKRLEESLKGLGSKILKENVPTRLSKIDNNALQNDRLYLYYLQNGKDMYTGEELDIDRLSNYDIDHIIPQAFLKDDSIDNKVLVSSASNRGKSDDVPSLEVVKKRKTLWYQLLKSKLISQRKFDNLTKAERGGLSQEEKAGFIQRQLVETRQITKHVARLLDERFNNKKDENNRTLRTVKIITLKSSLVSQFRKDFELYKVREINDFHHAHDAYLNAVVASALLKKYPKLEPEFVYGDYPKYNSFRERKSATEKVYFYSNIMNIFKKSIPLADGTVIDRPLIEVNEETGESVWNKVADLNTVRKVLSYSQVNIVKKVEEQNHGLDRGKPKGLFNANLSSKPKPNSKENLVGAKEYLDPKKYGGYAGISNSFAILVKGTIEKGAKKKITNVLEFQGISILDRIYYRKDKLNFLLEKGYKDIELIIELPKYSLFELSDGSRRMLASILSTNNKRGEIHKGNQIFISQKFVKLLYHAKRISSTFNENHRKYVENHKKEFEELFYYILEFNENYVGAKKNGELLKSAFQSWQNHSIDELCSSFIGPTGSERKGLFELTSRGGAADFEFLGVKIPRYRDYTPSSLLKDATLIHQSVTGLYETRIDLGKLGED

SEQ ID NO: 570 - protein, 1135 aa, Streptococcus salivarius
  Streptococcus salivarius PS4
MSDLVLGLDIGIGSVGVGILNKVTGEIIHKNSRIFPAAQAENNLERRTNRQGRRLTRRKKHRRVRLNHLFEESGLITDFTKVSINLNPYQLRVKGLTAELSNEELFIALKNMVKHRGISYLDDASDDGNSSVGDYAQIVKENSKQLETKTPGQIQLERYQKYGQLRGDFTVEEDGRKHRLINVFPTSAYHAEALRILQTQQEFNPQITDEFINSYLEILTGKRKYYHGPGNEKSRTDYGKYTTKKDAQGQYITLNNIFGILIGKCTFYPEEYRAAKASYTAQEFNLLNDLNNLTVPTETKKLSEEQKYQIITYVKNEKAMGPAKLFKYIAKLLACDIADIKGYRIDKSDKAEIHTFEAYRKMKTLETIDIEQIEREKLDKLAYVLTLNTEREGIQEALDHEFADGTFSQEQVDELVQFRKANSSIFGKGWHSFSVKLMMELIPELYATSEEQMTILTRLGKQKTTSSSNKTKYIDEKQLTEEIYNPVVAKSVRQAIKIVNAAIKKYGDFDNIVIEMARETNEDDEKKAIQKIQKANKAEKDAAMRKAANQYNGKAELPHSVFHGHKQLATKIRLWHQQGERCLYTGKTISIHDLINNPNQFEIDHILPLSITFDDSLANKVLVYATANQEKGQRTPYQALDSMDDAWSFRELKAFVRESKALSNKKKEYLLTEEDISKFDVRKKFIERNLVDTRYASRVVLNALQEHFKAHKIDTKVSVVRGQFTSQLRRHWGIDKTRDTYHHHAVDALIIAASSQLNLWKKQKNTLVSYSEDQLLDIETGELISDDEYKESVFKAPYQHFVDTLKSKEFEDSILFSYQVDSKFNRKISDATIYATRQAKVGKDKKDETYVLGKIKDIYALGTKTPSKTGFYKFLDLYNKDKSQFLVYQKDRKTWDEVIEKIMEQYRPFKESDKNGKEVDFNPFEKYRIENGPIRKYSRKGNGPEIKSLKYYASKLGNHIDITPKDSNNKVVLQSVSPWRADVYFNKTTGSYEILGLKYADLQFEKGTGTYRISEEKYNDIKKKEGVDSDSEFKFTLYKNDLLLIKDTETKEQRLFRFLSRSMPNKKHYVELKPYSKDKFEKNESLIEILGSADKSGRCIKGLAKSNLSIFKVRTDVLGNQHIIKNEGDKPKLDF

SEQ ID NO: 571 - protein, 1377 aa, Streptococcus sanguinis
  Streptococcus sanguinis SK115
MKKPYSIGLDIGTNSVGWAVITDDYKVPSKKMKVLGNTDKHFIKKNLIGALLFDEGTTAEDRRLKRTSRRRYTRRKNRLRYLQEIFSEEISKLDSSFFHRLDDSFLVPEDKRGSKYPIFATLEEEKEYHKKFPTIYHLRKHLADSKEKTDLRLIYLALAHMIKYRGHFLYEESFDIKNNDIQKIFNEFISIYDNTFEGSSLSGQNAQVEAIFTDKISKSTKRERVLKLFSDEKSTGLFSEFLKLIVGNQADFKKHFDLEEKAPLQFSKDTYDEDLENLLGQIGDGFADLFLVAKKLYDAILLSGILTVTDPSTKAPLSASMIERYENHQEDLAALKQFIKNNLSEKYAEVFSDQSKDGYAGFIDGKTTQEAFYKYIKNLLSKLEGADYFLNKIEREDFLRKQRTFDNGSIPHQIHLQEMNAILRRQGEHYLFLKENREKIEKILAFRIPYYVGPLARGNRDFAWLTRNSDQAIRPWNFEEVVDKASSAEDFINKMTNYDLYLPEEKVLPKHSLLYETFAVYNELTKVKFIAEGLRDYQFLDSGQKKQIVNQLFKDKRKVTEKDIIHYLHNVDGYDGIELKGIEKQFNASLSTYHDLLKIIKDKEFMDNPKNGEILENIIHTLTIFEDREMIKQRLAQYDTLFDEKVIKALTRRHYTGWGKLSAKLINGIRDKQTGKTILEYLIDDGDCNRNFMQLINDDGLSFKEIIQKAQVVGKTDDVKQVVQEIPGSPAIKKGILQSIKIVDELVKVMGHNPESIVIEMARENQTTAKGKKNSQQRYKRIEDALKNLAPGLDSNILKENPTDNIQLQNDRLFLYYLQNGKDMYTGKAIDINQLSNYDIDHIIPQAFIKDDSLDNRVLTSSKDNRGKSDNVPSIEVVQKRKAFWQQLLDSKLISERKFNNLTKAKRGGLDERDKVGFIKRQLVETRQITKHVAQLLDTRFNTEVNEENQKIRTVKIITLKSNLVSNFRKEFGLYKVREINDYHHAHDAYLNAVVAKAILKKYPKLEPEFVYGDYQKYDLKRYILKSKASNTIDKATEKYFFYSNLLNFFKEKVRYADGTIKKRENIEYSNDTGEIAWNKEKDFATIKKVLSLPQVNIVKKTEEQTVGQNGGLFDNNIVSKKKVVDASKLIPIKSSLSPEKYGGYARPTIAYSVLVIADIEKGKGKAKKLKRIKEIVGITIQDKKKFESNPVTYLEECGYKNINSNLIIKLPKYSLFEFNDGQRRLLASSIELQKGNELILPYHLTALLYHAQRINKISEPIHKQYVEAHQNEFKELLTTIISLSKKYIQKPNVELLLQQAFDQADKDIYQLSESFISLLKLTSFGAPGAFKFLGVEISQSSVRYKPNSQFLDTTLIHQSITGLYETRIDLSKLGED

SEQ ID NO: 572 - protein, 1392 aa, Streptococcus sanguinis
  Streptococcus sanguinis SK330
MENKNYSIGLDIGTNSVGWAVITDDYKVPSKKMKVFGNTDKHFIKKNLIGALLFDEGATAEDRRLKRTARRRYTRRKNRLRYLQEIFSEEISKLDSSFFHRLDDSFLVPKDKRGSKYPIFATLEEEKEYHKKFPTIYHLRKHLADSKEKTDLRLIYLALAHMIKYRGHFLYEESFDIKNNDIQKIFNEFISIYDNTFEGSSLSGQNAQVEAIFTDKISKSAKRERVLKLFSDEKSTSLFSEFLKLIVGNQADFKKHFDLEEKAPLQFSKDTYDEDLENLLGQIGDGFTDLFLVAKKLYDAILLSGILTVTDPSTKAPLSASMIERYESHQKDLAALKQFIKNNLPKRYNEVFSDQSKDGYAGYIDGKTTQEAFYKYIKNLLSKFEGADYFLDKIEREDFLRKQRTFDNGSIPHQIHLQEMNAILRRQGEHYPFLKENREKIEKILTFRIPYYVGPLARGNRDFAWLTRNSDQAIRPWNFEEIVDKASSAEEFINKMTNYDLYLPEEKVLPKHSLLYETFAVYNELTKVKFIAEGLRDYQFLDSGQKKQIVNQLFKEKRKVTEKDIIHYLHNVDGYDGIELKGIEKQFNASLSTYHDLLKIIKDKEFMDDPKNEEILENIVHTLTIFEDREMIKQRLAQYDSIFDEKVIKALTRRHYTGWGKLSAKLINGICDKQTGDTILDYLIDDGKINRNFMQLINDDGLSFKEIIQKAQVVGKTDDVKQVVQELPGSPAIKKGILQSIKIVDELVKVMGYAPESIVIEMARENQTTARGKKNSQQRYKRIEDSLKNLAPGLDSNILKENPTDNIQLQNDRLFLYYLQNGKDMYTGKPLDIDQLSSYDIDHIIPQAFIKDDSIDNRVLTSSKDNRGKSDNVPSLEVVQKRKAFWQQLLDSKLISERKFNNLTKAERGGLDERDKVGFIRRQLVETRQITKHVAQILDASFNTEVNEKNQKIRTVKIITLKSNLVSNFRKEFELYKVREINDYHHAHDAYLNAVVAKAILKKYPKLEPEFVYGDYQKYDLKRYISRFKPSKEIEKATEKYFFYSNLLNFFKEEVHYADGIIVKRENIEYSKDTGEIAWNKEKDFATIKKVLSYPQVNIVKKTEIQTHGLDRGKPKGLFNSNPSPKPSEDSKENLVPIKQGLDPRKYGGYAGISNSYAVLVKAIVEKGAKKQQKTILEFQGISILDKINFENNKENYLLKKRYIEILSTITLPKYSLFEFPDGTRRRLASILSTNNKRGEIHKGNELVLPGKYTTLLYHAKNINKKLEPEHLEYVEKHRNDFAKLLECVLNFNDKYVGALKNGERIRQAFTDWETVDIEKLCFSFIGPENSKNAGLFELTSQGSASDFEFLGVKIPRYRDYAPSSLLKATLIHQSITGLYETRIDLSKLGED

SEQ ID NO: 573 - protein, 1370 aa, Streptococcus sanguinis
  Streptococcus sanguinis SK353
MKKPYSIGLDIGTNSVGWAVVTDDYKVPAKKMRVFGDTDRSHIKKNLLGTLLFDDGNTAESRRLKRTARRRYTRRRNRILYLQEIFTESMNEIDESFFHRLDDSFLVPEDKRGSKYPIFATLQEEKEYHKQFPTIYHLRKQLADSKEKSDVRLIYLALAHMIKYRGHFLYEETFDIKNNDIQKIFNEFINIYDNTFEGSSLSGQNAQVEAIFTDKISKSAKRERVLKLFPDEKSTGLFSEFLKLIVGNQADFKKHFDLEEKAPLQFSKDTYDEELENLLGQIGDDFADLFLIAKKLYDAILLSGILTVTDPSTKAPLSASMIERYENHQKDLAALKQFIKNNLPEKYVEVFSDQSKDGYAGYIDGKTTQEAFYKYIKNLLSKFEGADYFLDKIEREDFLRKQRTFDNGSIPHQIHLQEMNAILRRQGEHYPFLKENREKIEKILTFRIPYYVGPLARDNRDFSWLTRNSDEPIRPWNFEEVVDKARSAEDFIHRMTNYDLYLPEEKVLPKHSLLYETFAVYNELTKVKFIAEGLRDYQFLDSGQKKQIVNQLFKEKRKVTEKDIIHYLHNVDGYDGIELKGIEKQFNANLSTYHDLLKITKDKEFMDDPKNEEILENIVHTLTIFEDREMIKQRLAQYDTLFDEKVIKALTRRHYTGWGKLSAKLINGIRDKQSGKTILDYLIDDDKINRNFMQLINDDGLSFKEIIQKAQVVGKTDDVKQVVQELPGSPAIKKGILQSIKIVDELVKVMGYALESIVIEMARENQTTARGKKNSQQRYKRIEDALKNLAPGLDSNILKENPTDNIQLKNDRLFLYYLQNGKDMYTGKPLDINQLSSYDIDHIIPQAFIKDDSIDNRVLTSSKDNRGKSDNVPSLEVVQKRKAFWQQLLDSKLISERKFNNLTKAERGGLDERDKVGFIRRQLVETQQITKNVAQILDARFNTEVKEKNQKIRTVKIITLKSNLVSNFRKEFGLYKVREINNYHHAHDAYLNAVVAKAILKKYPKLEPEFVYGDYQKYDLKKYISRFKPSKEIEKATEKYFFYSNLLNFFKEEVLYADGTIRKRENIEYSKDTGEIAWDKEKDFATIKKVLSYPQVNIVKKREVQTGGFSKESILPKGNSDKLIPRKTKDILWDTTKYGGFDSPVIAYSILLIADIEKGKAKKLKTVKTLVGITIMEKAAFEENPITFLENKGYHNVRKENILCLPKYSLFELENGRRRLLASAKELQKGNEIVLPVCLTTLLYHSKNLHKLDEPEHLEYIQKHRNEFKDLLNLVSEFSQKYILAEANLEKIKDLYADNEQADIEILANSFINLLTFTALGAPAAFKFFGKDVDRKRYTTVSEILNATLIHQSITGLYETRIDLSKLGEE

SEQ ID NO: 574 - protein, 1421 aa, Streptococcus sanguinis
  Streptococcus sanguinis SK49
MTKFNKNYSIGLDIGVSSVGYAVVTEDYRVPAFKFKVLGNTEKEKIKKNLIGSTTFVSAQPAKGTRVFRVNRRRIDRRNHRITYLRDIFQKEIEKVDKNFYRRLDESFRVLGDKSEDLQIKQPFFGDKELETAYHKKYPTIYHLRKHLADADKNSPVADIREVYMAISHILKYRGHFLTLDKINPNNINMQNSWIDFIESCQEVFDLEISDESKNIADIFKSSENRQEKVKKILPYFQQELLKKDKSIFKQLLQLLFGLKTKFKDCFELEEEPDLNFSKENYDENLENFLGSLEEDFSDVFAKLKVLRDTILLSGMLTYTGATHARFSATMVERYEEHRKDLQRFKFFIKQNLSEQDYLDIFGRKTQNGFDVDKETKGYVGYITNKMVLTNPQKQKTIQQNFYDYISGKITGIEGAEYFLNKISDGTFLRKLRTSDNGAIPNQIHAYELEKIIERQGKDYPFLLENKDKLLSILTFKIPYYVGPLAKGSNSRFAWIKRATSSDILDDNDEDTRNGKIRPWNYQKLINMDETRDAFITNLIGNDIILLNEKVLPKRSLIYEEVMLQNELTRVKYKDKYGKAHFFDSELRQNIINGLFKNNSKRVNAKSLIKYLSDNHKDLNAIEIVSGVEKGKSFNSTLKTYNDLKTIFSEELLDSEIYQKELEEIIKVITVFDDKKSIKNYLTKFFGHLEILDEEKINQLSKLRYSGWGRYSAKLLLDIRDEDTGFNLLQFLRNDEENRNLTKLISDNTLSFEPKIKDIQSKSTIEDDIFDEIKKLAGSPAIKRGILNSIKIVDELVQIIGYPPHNIVIEMARENMTTEEGQKKAKTRKTKLESALKNIENSLLENGKVPHSDEQLQSEKLYLYYLQNGKDMYTLDKTGSPAPLYLDQLDQYEVDHIIPYSFLPIDSIDNKVLTHRENNQQKLNNIPDKETVANMKPFWEKLYNAKLISQTKYQRLTTSERTPDGVLTESMKAGFIERQLVETRQIIKHVARILDNRFSDTKIITLKSQLITNFRNTFHIAKIRELNDYHHAHDAYLAVVVGQTLLKVYPKLAPELIYGHHAHFNRHEENKATLRKHLYSNIMRFFNNPDSKVSKDIWDCNRDLPIIKDVIYNSQINFVKRTMIKKGAFYNQNPVGKFNKQLAANNRYPLKTKALCLDTSIYGGYGPMNSALSIIIIAERFNEKKGKIETVKEFHDIFIIDYEKFNNNPFQFLNDTSENGFLKKNNINRVLGFYRIPKYSLMQKIDGTRMLFESKSNLHKATQFKLTKTQNELFFHMKRLLTKSNLMDLKSKSAIKESQNFILKHKEEFDNISNQLSAFSQKMLGNTTSLKNLIKGYNERKIKEIDIRDETIKYFYDNFIKMFSFVKSGAPKDINDFFDNKCTVARMRPKPDKKLLNATLIHQSITGLYETRIDLSKLGED

SEQ ID NO: 575 - protein, 1026 aa, Streptococcus sp.
  Streptococcus sp. BS35b
MNGLVLGLDIGIASVGVGILEKNSGKIIHANSRLFPAATADNNVERRKNRQARRLNRRKKHRGVRFQDLFEDYGLLTDFSKVSINLNPYRLRVDGLNQQLTNEELFIALKNIVKRRGISYLDDASEDGGAVSSDYGKAVEENRKLLAEQTPGQIQLERFEKYGQVRGDFTVVENGEKRRLINVFSTSAYRKEAEKILRKQQEFNNQITDEFIEDYLKILTGKRKYYHGPGNEKSRTDYGRFRTDGTTLDNIFGVLIGKCTFYPNEYRASKSSYTAQEFNLLNDLNNLTVPTETKKLSEEQKKVIVEYAKEAKTLGASTLLKYIVKMIDASVDQISGYRVDVNNKPEMHTFEVYRKMQSLETISVGELSRNVLDELAHILTLNTEREGIEEAINSKLMGVFSQDQVLELVQFRKNNSSLFSKGWHNFSLKLMMELIPELYETSEEQMTILTRLGKQKSKETSKRTKYIDEKELTEEIYNPVVAKSVRQAIKIINEATKKHGIFDNIVIEMARENNEEDAKKDYIKRQKANQDEKNAAMEKAAFQYNGKKELPGNIFNGHKELATKIRLWHQQGEKCLYTGKTIPISDLIHNQYKYEIDHILPLSLSFDDSLSNKVLVHATANQEKGQRTPFQALDSMDDAWSYREFKSYVKDLKSLSNKKKDYLLTEEDISKIEVKQKFIERNLVDTRYSSRVVLNALQDFYKSHQFDTTISVVRGQFTSQLRRKWGLEKSRETYHHHAVDALIIAASSQLRLWKKQNNPLITYKEGQFIDSQTGEIISLTDDEYKELVFKAPYDHFVDTLHSKTFEDGILFSYQVDSKYNRKISDATIYATRKAKLDKDKSEETYVLGKIKDIYSQAGYDAFIKIYNKDKRKFLMYHKDPQTFEKVIEEILRTYPSKERNDKNKEVPCNPFEKYRQENGPIRKYSKKGNGPEIKCLKYYDNKLGNYIDISPDGSDNQVVLQSLKPWRTDVYFNHQTKKYELMGLKYSDLSFEKGSGKYSISNEKYNSIKRIEGVNEQSEFKFTLYK

SEQ ID NO: 576 - protein, 1139 aa, Streptococcus sp.
  Streptococcus sp. C150
MSDLVLGLDIGIGSVGVGILNKVTGEIIHKNSRIFPAAQAENNLERRTNRQGRRLTRRKKHRRVRLNHLFEESGLITDFTKVSINLNPYQLRVKGLTAELSNEELFIALKNMVKHRGISYLDDASDDGNSSVGDYAQIVKENSKQLETKTPGQIQLERYQKYGQLRGDFTVEEDGRKHRLINVFPTSAYHAEALRILQTQQEFNPQITDEFINSYLEILTGKRKYYHGPGNEKSRTDYGKYTTKKDAQGQYITLNNIFGILIGKCTFYPEEYRAAKASYTAQEFNLLNDLNNLTVPTETKKLSEEQKYQIITYVKNEKAMGPAKLFKYIAKLLSCDVADIKGYRIDKSDKAEIHTFEAYRKMKTLETLDVKKMAREELDKLAYVLTLNTEREGIQEALDHEFADGTFSQEQVDELVQFRKANSSIFGKGWHSFSVKLMMELIPELYATSEEQMTILTRLGKQKTTSSSNKTKYIDEKQLTEEIYNPVVAKSVRQAIKIVNAAIKKYGDFDNIVIEMARETNEDDEKKAIQKIQKANKAEKDAAMRKAANQYNGKAELPHSVFHGHKQLATKIRLWHQQGERCLYTGKTISIHDLINNPNQFEIDHILPLSITFDDSLANKVLVYATANQEKGQRTPYQALDSMDDAWSFRELKAFVRESKALSNKKKEYLLTEEDISKFDVRKKFIERNLVDTRYASRVVLNALQEHFRTHKIDTKVSVVRGQFTSQLRRHWGIEKTRDTYHHHAVDALIIAASSQLNLWKKQKNTLVSYSEDQLLDIETGELISDDEYKESVFKAPYQHFVDTLKSKEFEDSILFSYQVDSKFNRKISDATIYATRKAKLDKEKKEYTYTLGKIKDIYALGTKTPSKTGFYKFLDLYKKDKSQFLMYQKDRRTWDEVIEKILEQYRPFKEKDKNGKEVDFNPFEKYRIENGPIRKYSRKGNGPEIKSLKYYDNLLGRFVDITPSESKNPVALLSLNPWRTDVYYNTETRKYEFLGLKYADLCFEKGGSYGISKVKYNKIREKEGIGKNSEFKFTLYKNDLILIKDTETNRQQIFRFWSRTGKDNPKSFEKHKLELKPYEKTRFEKGEELKVLGKVPPSSNRLQKNMQIENLSIYKVRTDVLGNQHIIKNEGDKPKLDF

SEQ ID NO: 577 - protein, 1377 aa, Streptococcus sp.
  Streptococcus sp. C300
MNNKPYSIGLDIGTNSVGWSVITDDYKVPSKKMKVLGNTDKRFIKKNLIGALLFDEGTTAEARRLKRTARRRYTRRKNRLRYLQEIFAEEMSKVDSSFFHRLDDSFLIPEDKRGSKYPIFATLVEEKEYHKQFPTIYHLRKQLADSKEKADLRLIYLVLAHMIKYRGHFLYEEAFDIKNNDIQKIFNEFISIYDNTFEGSSLSGQNAQVETIFTDKISKSAKRERVLKLFPDEKSTGLFSEFLKLIVGNQADFKKHFDLEEKAPLQFSKDTYDEDLENLLEQIGDDFADLFVAAKKLYDAILLSGILTVTDPSTKAPLSASMIERYENHQKDLAVLKQFIKTNLPEKYVEVFSDQSKDGYAGYIDGKTTQEAFYKYIKNLLSKFDGADYFLDKIEREVFLRKQRTFDNGSIPHQIHLQEMNTILRRQGEHYPFLKENKEKIEKILTFRIPYHVGPLARGNRDFAWLTRNSDQAIRPWNFEEIVDKASSAEDFINKMTNYDLYLPEEKVLPKHSLLYETFAVYNELTKVKFIAEGMRDYQFLDSGQKKKIINQLFKKKRKVTEDDIIDCLQKIDNYDGIELKGIEKQFNASLSTYHDILKIIRDKEFMDDPKNGDILENVIHTLTIFEDREMIKQRLAQYNSIFDEKVIKALSRKHYTGWGKLSAKLIDGIRDKQTGKTILDYLMDDGKSNRNFMQLIKDDELSFTEIIQKAQVVGDTDNLRQVVQNLPGSPAIKKGILQSIKIVDELVKVMGHAPESIVIEMARENQTTARGKKNSQQRYKRIEDSLKNLASGLDSNILKENPTDNIQLQNDRLFLYYLQNGKDMYTGEALNINQLSSYDIDHIIPQAFIKDDSLDNRVLTSSKDNRGKSDNVPSLEVVEKMKAFWQQLLDSKLISERKYNNLTKAERERGGLNELDKVGFIKRQLVETRQITKHVAQILDARFNKEVTEKNKKNRNVKIITLKSNMVSNFRKEFGLYKVREINDYHHAHDAYLNAVVAKAILKKYPKLEPEFVYGDYQKYDLKRYISRSKDPKEVEKATEKYFFYSNLLNFFKEEVHYADGTIVKRENIEYSKDTGEIAWNKEKDFATIKKVLSLPQVNIVKKTEEQTVGQNGGLFDNNIVSKKKVVDASKLIPIKSGLSPEKYGGYARPTIAYSVLVTYKQNNKIKNTMVGIPVLTKLEFERDPNLYLRNLGINNVSHVIKLVKYTVLEFKHKYGTYRRFIVSNQELKRANQIFVTTKQMKLISQYTTLDKNEHDSLLKNNQQLIQSIWNQFLEFMLATDLVNKKQYDELILTNNQTIEECRNIMNRVITTLSFTNINAGQKKIIFDDTLSLPIKRWQFTDSDKMVKKIIESTLIHQSITGLYETRIDLSKLGED

SEQ ID NO: 578 - protein, 1371 aa, Streptococcus sp.
  Streptococcus sp. F0441
MENKNYSIGLDIGTNSVGWSVITDDYKVPSKKMKVLGNTDKHFIKKNLIGALLFDEGTTAEARRLKRTARRRYTRRKNRLRYLQEIFSEEIGKVDSSFFHRLDDSFLIPEDKRGSKYPIFATLAEEKKYHKQFPTIYHLRKQLADSKEKTDLRLIYLALAHMIKYRGHFLYEEAFDIKNNDIQKIFNEFISIYNNTFEGNSLSGQNVQVEAIFTDKISKSAKRERVLKLFPDEKSTGLFSEFLKLIVGNQADFKKHFDLEEKAPLQFSRDTYDEDLENLLGQIGDDFADLFLVAKKLYDAILLSGILTVTNPSTKAPLSASMIERYENHQKDLASLKQFIKNNLPEKYDEVFSDQSEDGYAGYIDGKTTQETFYKYIKNLLSKFEGADYFLDKIEREDFLRKQRTFDNGSIPHQIHLQEMNAILRRQGEHYPFLKENKEKIEKILTFRIPYYVGPLARGNRDFAWLTRNSDQAIRPWNFEEIVDKASSAEDFINKMTNYDLYLPEEKVLPKHSLLYETFAVYNELTKVKFIAEGLRDYQFLDSGQKKQIVTQLFKEKRKVTEKDIIQFLHNVDGYDGIELKGIEKQFNASLSTYHDLLKIIKDKAFMDDAKNEAILENIVHTLTIFEDREMIKQRLAQYDSLFDEKVIKALTRRHYTGWGKLSAKLINGISDKQTGNTILDYLIDDGEINRNFMQLINDDGLSFKEIIQKAQVVGKTNDVKQVVQELPGSPAIKKGILQSIKIVDELVKVMGHAPESIVIEMARENQTTARGKKNSQQRYKRIEDSLKILASGLNSKILKEHPTDNIQLQNDRLFLYYLQNGKDMYTGEALDINQLSSCDIDHIIPQAFIKDDSLDNRVLTSSKDNRGKSDNVPSLEVVDKMKVFWQQLLDSKLISYRKFNNLTKAERGGLNELDKVGFIKRQLVETRQITKHVAQILDARFNKEVTEKDKKNRTVKIITLKSNLVSNFRKEFELYKVREINDYHHAHDAYLNAVVAKAILKKYPKLEPEFVYGDYQKYDLKRYISRSKDPKEIEKATEKYFFYSNLLNFFKEEVHYADGTIVKRENIEYSKDTGEIAWNKEKDFATIKKVLSLPQVNIVKKREVQTGGFSKESILPKGNSDKLIPRKTKDILWDTTKYGGFDSPVIAYSILLIADIEKGKAKKLKTVKTLVGITIMEKDAFEKNPIAFLENKGYHNVCKENILCLPKYSLFELENGRRRLLASAKELQKCNEIVLPVYLTTLLYHSKNVHKLDEPGHLEYIQKHRNEFKDLLNLVSEFSQKYVLADANLEKIKNLYADNEQADIEILANSFINLLTFTALGAPAAFKFFGKDVDRKRYTTVSEILNATLIHQSITGLYETRIDLSKLGED

SEQ ID NO: 579 - protein, 1121 aa, Streptococcus sp.
  Streptococcus sp. GMD6S
MNGLVLGLDIGIASVGVGILEKNSGKIIHANSRLFPAATADNNVERRKNRQARRLHRRKKHRGVRFQDLFEDYGLLTDFSKVSINLNPYRLRVDGLNQQLTNEELFIALKNIVKRRGISYLDDASEDGGTVSSDYGKAVEENRKLLAEQTPGQIQLERFEKYGQVRGDFTVVENGEKRRLINVFSTSAYRKEAERILRKQQEFNSKITDEFIEDCLKILTGKRKYYHGPGNEKSRTDYGRFRTDGTTLDNIFGILIGKCTFYPDEYRASKASYTAQEFNLLNDLNNLTVPTETKKLSEEQKKVIVEYAKEAKTLGASTLLKYIAKMIDASVDQIRGYRVDVNNKPEIHTFEAYRKMQSLETISVGELSRNVLDELAHILTLNTEREGIEEAINTKLKDSFSQDQVLELVQFRKNNSSLFSKGWHNFSLKLMMELIPELYETSEEQMTILTRLGKQKSKEISKRTKYIDEKELTEEIYNPVVAKSVRQAIKIINEATKKHGIFDNIVIEMARENNEEDAKKDYIKRQKANQDEKNAAMEKAAFQYNGKKELPDSIFHGQKELATKIRLWHQQGEKCLYTGKNIPISDLIHNQYKYEIDHILPLSLSFDDSLSNKVLVLATANQEKGQRTPFQALDSMDDAWSYREFKSYVKESKLLGNKKKEYLLTEEDISKIEVKQKFIERNLIDTRYSSRVVLNALQDFYKAHKFDTTISVVRGQFTSQLRRKWGLEKSRETYHHHAVDALIIAASSQLRLWKKQNNPLIAYKEGQFVDSETGEIISLSDDEYKELVFKAPYDHFVDTLSSKTFEDSILFSYQVDSKFNRKISDATIYATRKAKLDKEKSEETYVLGKIKDIYSQAGYDAFIKIYNKDKSKFLMYHKDPQTFEKVIEEILRTYPSKELNDKNKEIPCNPFEKYRQENGPIRKYSKKSNGPEIKSLKYYDNKLGNHIDITPESSDNQVVLQSLKPWRTDVYFNHQTKKYELMGLKYSDLSFEKGSGKYSISNQKYNSIKRIEGIDEQSEFKFTLYKNDLILIKDSENNEQKLFRFNSRNDTAKHYIELKPYDKAKFDGEQELITILGNVAKGGRCLKGLNKSNISIFKVKTDVLGKKHIIKKEGDEPKLKF

SEQ ID NO: 580 - protein, 1375 aa, Streptococcus sp.
  Streptococcus sp. M334
MSNKSYSIGLDIGTNSVGWAVITDDYKVPSKKMKVLGNTDKHFIKKNLIGALLFDEGTTAEDRRLKRTARRRYTRRKNRLRYLQEIFSQEISKVDSSFFHRLDDFFLVPEDKRGSKYPIFATLVEEKEYHKKFPTIYHLRKHLADSKEKTDLRLIYLALAHMIKYRGHFLYEESFDIKNNDIQKIFSEFISIYDNTFEGKSLSGQNAQVEAIFTDKISKSTKRERVLKLFPDEKSTGLFSEFLKLIVGNQADFKKHFDLEEKAPLQFSKDTYDEDLENLLGQIGDDFADLFLVAKKLYDAILLSGILTVKDLSTKAPLSASMIERYENHQKDLAALKQFIQNNLQEKYDEVFSDQSKDGYAGYIDGKTTQEAFYKYIKNLLSKFEGADYFLDKIEREDFLKKQRTFDNGSIPHQIHLQEMNAIIRRQGEHYPFLQENKEKIEKILTFRIPYYVGPLARGNGDFAWLTRNSDQAIRPWNFEEIVDQASSAEDFINKMTNYDLYLPEEKVLPKHSLLYETFAVYNELTKVKFIAEGLTRYQFLDKKQKKDIFDTFFKAENKRKVTEKDIIHYLHNVDGYDGIELKGIEKQFNASLSTYHDLLKIIKDKAFMDDSKNEEILENIIHTLTIFEDREMIKQRLAQYDSLFDEKVIKALTRRHYTGWGKLSAKLINGIRDKKSGKTILDYLIDDGEINRNFMQLIHDDGLSFKEIIQKAQVFGKTNDVKQVVQELPGSPAIKKGILQSIKIVDELVKVMGHAPESIVIEMARENQTTARGKKNSQQRYKRIEDSLKNLASGLDSNILKENPTDNIQLQNDRLFLYYLQNGRDMYTGKPLEINQLSNYDIDHIIPQAFIKDDSLDNRVLTSSKDNRGKSDNVPSLEVVEKMKAFWQQLLDSKLISERKFNNLTKAERERGGLNELDKVGFIKRQLVETRQITKHVAQFLDARFNKEVTEKDKKNRNVKIITLKSNLVSNFRKEFGLYKVREINDYHHAHDAYLNAVLAKAILKKYPKLEPEFVYGDYQKYDLQRYISKSREPKEVEKATQKYFFYSNLLNFFKEEVHYADGTIVKRENIEYSKDTGEIAWNKEKDFATVKKVLSLPQVNIVKKTEVQTGGFSKESILPKGNSDKLIPRKTKEILWDTTKYGGFDSPVIAYSILLIADIEKGKAKKLKTVKTLVGITIMEKATFEKNPITFLENKGYHNVRKENILCLPKYSLFELESGRRRMLASAKELQKGNEIVLPVYLTTLLYHSKNVHKLDEPEHLEYIQKHRYEFKDLLNLVSEFSQKYVLADANLEKIKNLYADNEQADIEILANSFINLLTFTALGAPAAFKFLGKDVDRKRYTTVSEILNATLIHQSITGLYETRIDLSKLGED

SEQ ID NO: 581 - protein, 1371 aa, Streptococcus sp.
  Streptococcus sp. oral taxon 056 str. F0418
MNNNNYSIGLDIGTNSVGWAVITDDYKVPSKKMRVLGNTDKRFIKKNLIGALLFDEGTTAEDRRLKRTARRRYTRRKNRLRYLQEIFAEEMSKVDSSFFHRLDDSFLVPEDKSGSKYPIFATLAEEKEYHKKFPTIYHLRKHLADSKEKADLRLIYLALAHITKYRGHFLYEEAFDIKNNDIQKIFNEFINIYDNTFEGSSLSGQNAQVEAIFTGKISKSVKREHVLKLFPDEKSTGLFSEFLKLIVGNQADFKKHFDLEEKASLQFSKDTYDEDLENLLGQIGDDFADLFLVAKKLYDAILLSGILTVTDPSTKAPLSASMIERYENHQEDLAALKQFIKNNLPEKYAEVFSDQSKDGYAGYIDGKTTQEAFYKYIKNLLSKFEGADYFLDKIEREDFLRKQRTFDNGSIPHQIHLQEMNAILRRQGEHYPLLKENKEKIEKILTFRIPYYVGPLARGNRDFAWLTRNSDQAIRPWNFEEIVDKASSAESFINKMTNYDLYLPEEKVLPKHSLLYETFAVYNELTKVKFIAEGLRDYQFFDSGQKKQIVNQLFKEKRKVTEKDIIHYLHNVDGYDGIELKGIEKQFNASLSTYHDLLKIIKDKEFMDNHKNQEILENIVHTLTIFEDREMIKQRLAQYDSIFDEKVIKALTRRHYTGWGKLSAKLINGICDKKTGKTILDYLIDDGYNNRNFMQLINDDGLSFKEIIQKAQVVGKTDDLTQVVRELSGSPAIKKGILQSIKIVDELVKIMGYAPESIVIEMARENQTTAKGKKNSQQRYKRIEDALKNLAPGLDSTISKENPTDNIQLQNDRLFLYYLQNGKDMYTGEALDINQLSSYDIDHIIPQAFIKDDSLDNRVLTSSKDNRGKSDNVPSLEVVKKRKAFWQQLLDSKLISERKFNNLTKAERGGLDERDKVGFIKRQLVETRQITKHVARILDARFNTEVSEKNQKIRSVKIITLKSNLVSNFRKEFKLYKVREINDYHHAHDAYLNAVVAKAILKKYPKLEPEFVYGDYQKYDLKRYISKSKDPKEVEKATEKYFFYSNLLNFFKEEVHYADGTIVKRENIEYSKDTGEIAWNKEKDFVTIKKVLSYPQVNIVKKREVQTGGFSKESILPKGNSDKLIPRKTKDILWDTTKYGGFDSPVIAYSILLIADIEKGKAKKLKTVKTLVGITIMEKAAFEKNPITFLENKGYHNVRKENILCLPKYSLFELENGRRRLLASAKELQKGNEIVLPVYLTTLLYHSKNVHKLDEPEHLEYIQKHRYEFKDLLNLVSEFSQKYVLAEANLEKIKSLYVDNEQADIEILANSFINLLTFTALGAPAAFKFFGKDVDRKRYTTVSEILNATLIHQSITGLYETRIDLSKLGED

SEQ ID NO: 582 - protein, 1420 aa, Streptococcus sp.
  Streptococcus sp. oral taxon 071 str. 73H25AP
MAKFNKNYSIGLDIGVSSVGYAVVTEDYRVPAFKFKVLGNTEKEKIKKNLIGSTTFVPAQSAQGTRVFRVNRRRIDRRNHRIAYLRDIFQKEIEKIDKNFYRRLDESFRVLGDKSEDIQIKQPFFGNKELETAYHKKYPTIYHLRKHLADADKNSPVADIREVYMVLSHILKYRGHFLTLGKIDPNNINMQNSWIDFIESCQDAFDLEISDESKTIAAIFKSSENRQEKVKQILSYFQQELLKKDKSIFKQLLQLLFGLKTKFKDCFELEEEPDLNFSKENYDENLENLLGALEEDFSDVFAKLKILRDTILLSSMLTYTGATHARFSATMVERYEEHRKDLQRFKSFVKQNLSEQDYLDIFGRKTPTGFDVDKETKGYVGYISNKMVLTNPQKQKTIQQNFYDYISGKITGIEGAECFLNKISDGTFLRKLRTTDNGAIPNQIHAYELEKIIERQGRDYPFLLENKDKLLSILTFKIPYYVGPLAKGNNSRFAWIKRTTSQDVLDDNDEDTRNGKIRPWNYHKLINMDETRDAFIINLIGNDIILLNEKVLPKRSLIYEEVMLQNELTRVKYKDKYGKIHFFNSELRQEIINNLFKTNSKRVSSAMLLSYLENFTNLQAVEIVSGIEKGKSLNSTLKTYNDLKTIFSEELLDSEIYQKELEEIIKVITVFDDKKSIKNYLTKYFGHLEFLNEEKINQLSKLRYTGWGRYSGKLLLGIRDEDTGFNLMQFLRNDDENRNLTQLISDTTLSFDSAIKAIQSKSTVEDDVFEEIKNLAGSPAIKRGILNSIKIVDELVQIIGYPPQNIIIEMARENMTTEEGQKKAKTRKSKLESALKNIEDSVLESGKVPHSDEQLQSEKLYLYYLQNGKDMYSLDKTGSPTPLYRDQLDQYEVDHIIPYSFLPIDSIDNKVLTHRENNQRKLNNIPDKETVANMKPFWEKLYNAKLISQTKYQRLTTSERTPDGVLTESMKAGFIERQLVETRQIIKHVARILDNRFSDTKIITLKSQLVTNFRNTFHIAKIRELNDYHHAHDAYLAVVVGQTLLKAYPKLAPELIYGHHAHFNRHEENKATLRKHLYSNIMRFFNNPDSKVSKDIWDCNRDLPIVKDVIYNSQINFVKRTMIKKGAFYNQNPVGKLNKQIAANNRYPLKTKVSSLDTSIYGGYGPMNSALSIIIIAERFNEKKGKIETVKEFHDIFIIDYEKFNNNPFQFLNNVSEEGFLKKNDLNRVLAFYRISKYSLMQKIDGTRMLFESKSNLHKVTQFKLTKTQNELFFHMKRLLTKSNLMDLKSESAIKESQNFIQTHQNEFDNIADRLSNYSQKMLGETKSLQTLINGYNERPIKQIDNNEETIRYYYDNFIKMFSFVKSGAPKDIINFFNDKYTVPRMRPKPDRKMLDATLIHQSITGLYETRIDLSKLGED

SEQ ID NO: 583 - protein, 1122 aa, Streptococcus suis
  Streptococcus suis 89/1591
MSNGKILGLDIGIASVGVGVIDAQTGEIIHASSRIFPSANAANNAERRTFRGSRRLIRRKKHRIKRLDDLFNDFHINLDGEMSTDNPYVLRVKGLSQKLTVEELYISIKNIMKRRGISYLDDAESDNEAGRSDYAKAIERNRQLLTSKTPGEIQLERLEKYGQLRGNFTIIDEEGQSQQIINVFSTSDYVKEVEKILDCQKMYHKFISDEFCDKLIELLREKRKYYVGPGNEKSRTDYGIYRTDGTTLENLFGILIGKCTFYPDQYRSSRASYTAQEFNFLNDLNNLTVPTETKKLSQEQKEFLVNYAKETSVLGAGKILQQIAKLADCKVEDIRGYRLDNKDKPELHTFETYRAMKGLVPLVDIGVLSREQLDILADILTLNTDFEGIREALKKQLPNVFDEKQVKGLASFRKSKSQLFAKGWHNLSQKIMLEVIPELYATSDEQMTILTRLGKFEKSSVAEYPSSINVDEITDEIYNPVVAKSIRQTIKIINASIKKWGEFDQIVIEMPRDRNEDEEKKRIADGQKANAKEKADSILRAAELYCAGKVLPDYVYNGHNQLATKIRLWYQQGERCIYTGQPISIHDLIHNQNQYEIDHILPLSLTFDDSLSNKVLVLATANQEKAQRTPYNYLKSATSAWSYREFKDYVTKRKGIGKKKCEYLTFEEDINGFEVRSKFIQRNLVDTRYASKVILNALQDYFKISGIQTKVSVVRGQFTSQLRHKWGIEKTRETYHHHAVDALIIAASSQLRLWKKQESPLVVDYQEGRQVDLETGEILELTDEQYKELVYQPPYQGFVNTISSSAFDNEILFSYQVDSKVNRKISDATIYATRNAQLGKDKTEGIYVLGKIKDIYTQAGYEAFLKRYTKDKTSFLMYHKDLDTWEKVIEIILRDYREYDEKGKEIGNPFERYRRENGYVKKYSRKGNGTAIKSLKYYDNKLGNHIDITPENSRNAVVLQSLKPWRTDVYFNKETGKYEFLGIKYSDLSFEKGTGEYGISQEKYDSIKIAEGVAKKSIFKFTLYKQDLLFIKDIENNFGKLLRFTSKNDTSKHYVELKPYDKNKFGTEEPLLPVLGNVAKSGQCIKGLNKSNISIYKVRTDILGYRHFIKQEGEHPQLKFKK

SEQ ID NO: 584 - protein, 1122 aa, Streptococcus suis
MSNGKILGLDIGIASVGVGVIDAQTGEIIHASSRIFPSANAANNAERRTFRGSRRLIRRKKHRIKRLDDLFNDFHINLDGEMSTDNPYVLRVKGLSQKLTVEELYISIKNIMKRRGISYLDDAESDNEAGRSDYAKAIERNRQLLTSKTPGEIQLERLEKYGQLRGNFTIIDEEGQSQQIINVFSTSDYVKEVEKILDCQKMYHKFISDEFCDKLIELLREKRKYYVGPGNEKSRTDYGIYRTDGTTLENLFGILIGKCTFYPDQYRSSRASYTAQEFNFLNDLNNLTVPTETKKLSQEQKEFLVNYAKETSVLGAGKILQQIAKLADCKVEDIRGYRLDNKDKPELHTFETYRAMKGLVPLVDIGVLSREQLDILADILTLNTDFEGIREALKKQLPNVFDEKQVKGLASFRKSKSQLFAKGWHNLSQKIMLEVIPELYATSDEQMTILTRLGKFEKSSVAEYPSSINVDEITDEIYNPVVAKSIRQTIKIINASIKKWDEFDQIVIEMPRDRNEDEEKKRIADGQKANAKEKADSILRAAELYCAGKVLPDYVYNGHNQLATKIRLWYQQGERCIYTGQPISIHDLIHNQNQYEIDHILPLSLTFDDSLSNKVLVLATANQEKAQRTPYNYLKSATSAWSYREFKDYVTKRKGIGKKKCEYLTFEEDINGFEVRSKFIQRNLVDTRYASKVILNALQDYFKISGIQTKVSVVRGQFTSQLRHKWGIEKTRETYHHHAVDALIIAASSQLRLWKKQESPLVVDYQEGRQVDLETGEILELTDEQYKELVYQPPYQGFVNTISSSAFDNEILFSYQVDSKVNRKISDATIYATRNAQLGKDKTEGIYVLGKIKDIYTQAGYEAFLKRYTKDKTSFLMYHKDLDTWEKVIEIILRDYREYDEKGKEIGNPFERYRRENGYVKKYSRKGNGTAIKSLKYYDNKLGNHIDITPENSRNAVVLQSLKPWRTDVYFNKETGKYEFLGIKYSDLSFEKGTGEYGISQEKYDSIKIAEGVAKKSIFKFTLYKQDLLFIKDIENNFGKLLRFTSKNDTSKHYVELKPYDKNKFGTEEPLLPVLGNVAKSGQCIKGLNKSNISIYKVRTDILGYRHFIKQEGEHPQLKFKK

SEQ ID NO: 585 - protein, 1381 aa, Streptococcus suis
MVKKKYAIGIDIGTNSVGWSIVTDDYKVPSKKMKVFGNTEKRYIKKNLLGTLLFDEGNTAENRRLKRTARRRYTRRRNRILYLQEIFAEEINKIDDSFFQRLDDSFLIVEDKQGSKHPIFGTLQEEKEYHKQFPTIYHLRKQLADSSQKADIRLIYLALAHIIKYRGHFLFEGDLKSENKDVQHLFNDFVEMFDKTVEGSYLSENLPNVADVLVEKVSKSRRLENILHYFPNEKKNGLFGNFLALALGLQPNFKTNFELAEDAKIQFSKETYEEDLEELLGKIGDDYADLFIATKSLYDGILLAGILSTTDSTTKAPLSSSMVNRYEEHQKDLALLKNFIHQNLSDSYKEVFNDKLKDGYAGYIEGKTTQENFYRFIKKAIEKIEGSNYFIDKIDREDFLRKQRTFDNGSIPHQIHLQEMHAIIRRQAEFYPFLVENQDKIEKILTFRIPYYVGPLARGKSEFAWLNRKSDEKIRPWNFDEMVDKETSAENFITRMTNYDRYLPDQKVLPKHSLLYEKFAVYNELTKVKFIAEGMRDYQFLDSGQKKDIVKTLFKTKRKVTAKDIKAYLENSNGYAGVELKGLEEQFNASLPTYHDLLKILRDKAFIDAEENQEILEDIVLTLTLFEDREMIRKRLEKYKDILTEEQRKKLERRHYTGWGRLSAKLINGILDKVTRKTILGYLIDDGTSNRNFMQLINDDTLSFVDEIRLAQGSGEAEDYRAEVQNLAGSPAIKKGILQSLKIVDELIEVMGYEPEHIVVEMARENQFTNQGRRNSQQRINRLENALKDFGSKILEEQKPYGVSKVNNIHLQSDRLFLYYLQNGKDMYTDEELDIDHLSEYDIDHIIPQAFIKDDSLDNKVLTKSAKNRGKSDDVPSMEIVHNRKNFWRQLLKSKLISQRKFDNLTKAERGGLTNEDKARFIQRQLVETRQITKHVARMLDTRFNTKLDEAGNRIRDPKVNIITLKSNLVSQFRKDYQLYKIREINNYHHAHDAYINAVVATALLKKYPQLAPEFVYGEYPTYNSYNSRKSATEKVLFYSNIMNFFKRIVVHSKTGEVRIRPVIEVNKETGEIVWDKKSDFRTVRKVLSYPQVNVVKKTEVQNHGLDRGKPKGFYNANLSPRPKEGSVENLVPAKQSFDTKRYGGYAGISNSYAVLVNGIIEKGKKKSKAEVTEFQGISILARKDFDKNPKQYLLNLGYKDIKSIIKLPKYSLFELENGSRRMLASILSTNNKRGEIHKGNEMYLPDKFVTLLYHAMRVNRTLEPGHKKYVETHRHVFDELLIYILEYNEKIVGAKANGKRIVEAYSARKDTDNLEELCNSFINLLNLTALGSAVDFEFLGTKIPRYRDYTPSSLLKATLIHQSVTGLYETRIDLSKLGGD

SEQ ID NO: 586 - protein, 1122 aa, Streptococcus suis; identical to SEQ ID NO: 583

SEQ ID NO: 587 - protein, 1388 aa, Streptococcus thermophilus
MTKPYSIGLDIGTNSVGWAVITDNYKVPSKKMKVLGNTSKKYIKKNLLGVLLFDSGITAEGRRLKRTARRRYTRRRNRILYLQEIFSTEMATLDDAFFQRLDDSFLVPDDKRDSKYPIFGNLVEEKVYHDEFPTIYHLRKYLADSTKKADLRLVYLALAHMIKYRGHFLIEGEFNSKNNDIQKNFQDFLDTYNAIFESDLSLENSKQLEEIVKDKISKLEKKDRILKLFPGEKNSGIFSEFLKLIVGNQADFRKCFNLDEKASLHFSKESYDEDLETLLGYIGDDYSDVFLKAKKLYDAILLSGFLTVTDNETEAPLSSAMIKRYNEHKEDLALLKEYIRNISLKTYNEVFKDDTKNGYAGYIDGKTNQEDFYVYLKNLLAEFEGADYFLEKIDREDFLRKQRTFDNGSIPYQIHLQEMRAILDKQAKFYPFLAKNKERIEKILTFRIPYYVGPLARGNSDFAWSIRKRNEKITPWNFEDVIDKESSAEAFINRMTSFDLYLPEEKVLPKHSLLYETFNVYNELTKVRFIAESMRDYQFLDSKQKKDIVRLYFKDKRKVTDKDIIEYLHAIYGYDGIELKGIEKQFNSSLSTYHDLLNIINDKEFLDDSSNEAIIEEIIHTLTIFEDREMIKQRLSKFENIFDKSVLKKLSRRHYTGWGKLSAKLINGIRDEKSGNTILDYLIDDGISNRNFMQLIHDDALSFKKKIQKAQIIGDEDKGNIKEVVKSLPGSPAIKKGILQSIKIVDELVKVMGGRKPESIVVEMARENQYTNQGKSNSQQRLKRLEKSLKELGSKILKENIPAKLSKIDNNALQNDRLYLYYLQNGKDMYTGDDLDIDRLSNYDIDHIIPQAFLKDNSIDNKVLVSSASNRGKSDDFPSLEVVKKRKTFWYQLLKSKLISQRKFDNLTKAERGGLLPEDKAGFIQRQLVETRQITKHVARLLDEKFNNKKDENNRAVRTVKIITLKSTLVSQFRKDFELYKVREINDFHHAHDAYLNAVIASALLKKYPKLEPEFVYGDYPKYNSFRERKSATEKVYFYSNIMNIFKKSISLADGRVIERPLIEVNEETGESVWNKESDLATVRRVLSYPQVNVVKKVEEQNHGLDRGKPKGLFNANLSSKPKPNSNENLVGAKEYLDPKKYGGYAGISNSFAVLVKGTIEKGAKKKITNVLEFQGISILDRINYRKDKLNFLLEKGYKDIELIIELPKYSLFELSDGSRRMLASILSTNNKRGEIHKGNQIFLSQKFVKLLYHAKRISNTINENHRKYVENHKKEFEELFYYILEFNENYVGAKKNGKLLNSAFQSWQNHSIDELCSSFIGPTGSERKGLFELTSRGSAADFEFLGVKIPRYRDYTPSSLLKDATLIHQSVTGLYETRIDLAKLGEG

SEQ ID NO: 588 - protein, 1128 aa, Streptococcus thermophilus
MSDLVLGLDIGIGSVGVGILNKVTGEIIHKNSRIFPAAQAENNLVRRTNRQGRRLTRRKKHRIVRLNRLFEESGLITDFTKISINLNPYQLRVKGLTDELSNEELFIALKNMVKHRGISYLDDASDDGNSSVGDYAQIVKENSKQLETKTPGQIQLERYQTYGQLRGDFTVEKDGKKHRLINVFPTSAYRSEALRILQTQQEFNPQITDEFINRYLEILTGKRKYYHGPGNEKSRTDYGRYRTSGETLDNIFGILIGKCTFYPEEFRAAKASYTAQEFNLLNDLNNLTVPTETKKLSKEQKNQIINYVKNEKAMGPAKLFKYIAKLLSCDVADIKGYRIDKSGKAEIHTFEAYRKMKTLETLDIEQMDRETLDKLAYVLTLNTEREGIQEALEHEFADGSFSQKQVDELVQFRKANSSIFGKGWHNFSVKLMMELIPELYETSEEQMTILTRLGKQKRLRLQIKQNISNKTKYIDEKLLTEEIYNPVVAKSVRQAIKIVNAAIKEYGDFDNIVIEMARETNEDDEKKAIQKIQKANKDEKDAAMLKAANQYNGKAELPHSVFHGHKQLATKIRLWHQQGERCLYTGKTISIHDLINNPNQFEVDHILPLSITFDDSLANKVLVYATANQEKGQRTPYQALDSMDDAWSFRELKAFVRESKTLSNKKKEYLLTEEDISKFDVRKKFIERNLVDTRYASRVVLNALQEHFRAHKIDTKVSVVRGQFTSQLRRHWGIEKTRDTYHHHAVDALIIAASSQLNLWKKQKNTLVSYSEEQLLDIETGELISDDEYKESVFKAPYQHFVDTLKSKEFEDSILFSYQVDSKFNRKISDATIYATRQAKVGKDKKDETYVLGKIKDIYTQDGYDAFMKIYKKDKSKFLMYRHDPQTFEKVIEPILENYPNKQMNEKGKEVPCNPFLKYKEEHGYIRKYSKKGNGPEIKSLKYYDSKLLGNPIDITPENSKNKVVLQSLKPWRTDVYFNKATGKYEILGLKYADLQFEKGTGTYKISQEKYNDIKKKEGVDSDSEFKFTLYKNDLLLVKDTETKEQQLFRFLSRTLPKQKHYVELKPYDKQKFEGGEALIKVLGNVANGGQCIKGLAKSNISIYKVRTDVLGNQHIIKNEGDKPKLDF

SEQ ID NO: 589 - protein, 1121 aa, Streptococcus thermophilus
MSDLVLGLDIGIGSVGVGILNKVTGEIIHKNSRIFPAAQAENNLVRRTNRQGRRLTRRKKHRIVRLNRLFEESGLITDFTKISINLNPYQLRVKGLTDELSNEELFIALKNMVKHRGISYLDDASDDGNSSVGDYAQIVKENSKQLETKTPGQIQLERYQTYGQLRGDFTVEKDGKKHRLINVFPTSAYRSEALRILQTQQEFNPQITDEFINRYLEILTGKRKYYHGPGNEKSRTDYGRYRTSGETLDNIFGILIGKCTFYPDEFRAAKASYTAQEFNLLNDLNNLTVPTETKKLSKEQKNQIINYVKNEKAMGPAKLFKYIAKLLSCDVADIKEYRIDKSGKAEIHTFEAYRKMKTLETLDIEQMDRETLDKLAYVLTLNTEREGIQEALEHEFADGSFSQKQVDELVQFRKANSSIFGKGWHNFSVKLMMELIPELYETSEEQMTILTRLGKQKTTSSSNKTKYIDEKLLTEEIYNPVVAKSVRQAIKIVNAAIKEYGDFDNIVIEMARETNEDDEKKAIQKIQKANKDEKDAAMLKAANQYNGKAELPHSVFHGHKQLATKIRLWHQQGERCLYTGKTISIHDLINNSNQFEVDHILPLSITFDDSLANKVLVYATANQEKGQRTPYQALDSMDDAWSFRELKAFVRESKTLSNKKKEYLLTEEDISKFDVRKKFIERNLVDTRYASRVVLNALQEHFRAHKIDTKVSVVRGQFTSQLRRHWGIEKTRDTYHHHAVDALIIAASIQLNLWKKQKNTLVSYSEDQLLDIETGELISDDEYKESVFKAPYQHFVDTLKSKEFEDSILFSYQVDSKFNRKISDATIYATRQAKVGKDKADETYVLGKIKDIYTQDGYDAFMKIYKKDKSKFLMYRHDPQTFEKVIEPILENYPNKQINEKGKEVPVNPFLKYKEEHGYIRKYSKKGNGPEIKSLKYYDSKLGNHIDITPKDSNNKVVLQSVSPWRADVYFNKTTGKYEILGLKYADLQFEKGTGTYKISQEKYNDIKKKEGVDSDSEFKFTLYKNDLLLVKDTETKEQQLFRFLSRTMPKQKHYVELKPYDKQKFEGGEALIKVLGNVANSGQCKKGLGKSNISIYKVRTDVLGNQHIIKNEGDKPKLDF

SEQ ID NO: 590 - protein, 1388 aa, Streptococcus thermophilus
MTKPYSIGLDIGTNSVGWAVTTDNYKVPSKKMKVLGNTSKKYIKKNLLGVLLFDSGITAEGRRLKRTARRRYTRRRNRILYLQEIFSTEMATLDDAFFQRLDDSFLVPDDKRDSKYPIFGNLVEEKAYHDEFPTIYHLRKYLADSTKKADLRLVYLALAHMIKYRGHFLIEGEFNSKNNDIQKNFQDFLDTYNAIFESDLSLENSKQLEEIVKDKISKLEKKDRILKLFPGEKNSGIFSEFLKLIVGNQADFRKCFNLDEKASLHFSKESYDEDLETLLGYIGDDYSDVFLKAKKLYDAILLSGFLTVTDNETEAPLSSAMIKRYNEHKEDLALLKEYIRNISLKTYNEVFKDDTKNGYAGYIDGKTNQEDFYVYLKKLLAEFEGADYFLEKIDREDFLRKQRTFDNGSIPYQIHLQEMRAILDKQAKFYPFLAKNKERIEKILTFRIPYYVGPLARGNSDFAWSIRKRNEKITPWNFEDVIDKESSAEAFINRMTSFDLYLPEEKVLPKHSLLYETFNVYNELTKVRFIAESMRDYQFLDSKQKKDIVRLYFKDKRKVTDKDIIEYLHAIYGYDGIELKGIEKQFNSSLSTYHDLLNIINDKEFLDDSSNEAIIEEIIHTLTIFEDREMIKQRLSKFENIFDKSVLKKLSRRHYTGWGKLSAKLINGIRDEKSGNTILDYLIDDGISNRNFMQLIHDDALSFKKKIQKAQIIGDEDKGNIKEVVKSLPGSPAIKKGILQSIKIVDELVKVMGGRKPESIVVEMARENQYTNQGKSNSQQRLKRLEKSLKELGSKILKENIPAKLSKIDNNALQNDRLYLYYLQNGKDMYTGDDLDIDRLSNYDIDHIIPQAFLKDNSIDNKVLVSSASNRGKSDDVPSLEVVKKRKTFWYQLLKSKLISQRKFDNLTKAERGGLSPEDKAGFIQRQLVETRQITKHVARLLDEKFNNKKDENNRAVRTVKIITLKSTLVSQFRKDFELYKVREINDFHHAHDAYLNAVVASALLKKYPKLEPEFVYGDYPKYNSFRERKSATEKVYFYSNIMNIFKKSISLADGRVIERPLIEVNEETGESVWNKESDLATVRRVLSYPQVNVVKKVEEQNHGLDRGKPKGLFNANLSSKPKPNSNENLVGAKEYLDPKKYGGYAGISNSFTVLVKGTIEKGAKKKITNVLEFQGISILDRINYRKDKLNFLLEKGYKDIELIIELPKYSLFELSDGSRRMLASILSTNNKRGEIHKGNQIFLSQKFVKLLYHAKRISNTINENHRKYVENHKKEFEELFYYILEFNENYVGAKKNGKLLNSAFQSWQNHSIDELCSSFIGPTGSERKGLFELTSRGSAADFEFLGVKIPRYRDYTPSSLLKDATLIHQSVTGLYETRIDLAKLGEG

SEQ ID NO: 591 - protein, 1121 aa, Streptococcus thermophilus
MSDLVLGLDIGIGSVGVGILNKVTGEIIHKNSRIFPAAQAENNLVRRTNRQGRRLARRKKHRRVRLNRLFEESGLITDFTKISINLNPYQLRVKGLTDELSNEELFIALKNMVKHRGISYLDDASDDGNSSVGDYAQIVKENSKQLETKTPGQIQLERYQTYGQLRGDFTVEKDGKKHRLINVFPTSAYRSEALRILQTQQEFNPQITDEFINRYLEILTGKRKYYHGPGNEKSRTDYGRYRTSGETLDNIFGILIGKCTFYPDEFRAAKASYTAQEFNLLNDLNNLTVPTETKKLSKEQKNQIINYVKNEKAMGPAKLFKYIAKLLSCDVADIKGYRIDKSGKAEIHTFEAYRKMKTLETLDIEQMDRETLDKLAYVLTLNTEREGIQEALEHEFADGSFSQKQVDELVQFRKANSSIFGKGWHNFSVKLMMELIPELYETSEEQMTILTRLGKQKTTSSSNKTKYIDEKLLTEEIYNPVVAKSVRQAIKIVNAAIKEYGDFDNIVIEMARETNEDDEKKAIQKIQKANKDEKDAAMLKAANQYNGKAELPHSVFHGHKQLATKIRLWHQQGERCLYTGKTISIHDLINNSNQFEVDHILPLSITFDDSLANKVLVYATANQEKGQRTPYQALDSMDDAWSFRELKAFVRESKTLSNKKKEYLLTEEDISKFDVRKKFIERNLVDTRYASRVVLNALQEHFRAHKIDTKVSVVRGQFTSQLRRHWGIEKTRDTYHHHAVDALIIAASSQLNLWKKQKNTLVSYSEDQLLDIETGELISDDEYKESVFKAPYQHFVDTLKSKEFEDSILFSYQVDSKFNRKISDATIYATRQAKVGKDKADETYVLGKIKDIYTQDGYDAFMKIYKKDKSKFLMYRHDPQTFEKVIEPILENYPNKQINEKGKEVPCNPFLKYKEEHGYIRKYSKKGNGPEIKSLKYYDSKLGNHIDITPKDSNNKVVLQSVSPWRADVYFNKTTGKYEILGLKYADLQFEKGTGTYKISQEKYNDIKKKEGVDSDSEFKFTLYKNDLLLVKDTETKEQQLFRFLSRTMPKQKHYVELKPYDKQKFEGGEALIKVLGNVANSGQCKKGLGKSNISIYKVRTDVLGNQHIIKNEGDKPKLDF

SEQ ID NO: 592 - protein, 1122 aa, Streptococcus thermophilus
MSDLVLGLDIGIGSVGVGILNKVTGEIIHKNSRIFPAAQAENNLVRRTNRQGRRLTRRKKHRIVRLNRLFEESGLITDFTKISINLNPYQLRVKGLTDELSNEELFIALKNMVKHRGISYLDDASDDGNSSVGDYAQIVKENSKQLETKTPGQIQLERYQTYGQLRGDFTVEKDGKKHRLINVFPTSAYRSEALRILQTQQEFNSQITDEFINRYLEILTGKRKYYHGPGNEKSRTDYGRYRTNGETLDNIFGILIGKCTFYPDEFRAAKASYTAQEFNLLNDLNNLTVPTETKKLSKEQKNQIINYVKNEKVMGPAKLFKYIAKLLSCDVADIKGHRIDKSGKAEIHTFEAYRKMKTLETLDIEQMDRETLDKLAYVLTLNTEREGIQEALEHEFADGSFSQKQVDELVQFRKANSSIFGKGWHNFSVKLMMELIPELYETSEEQMTILTRLGKQKTTSSSNKTKYIDEKLLTEEIYNPVVAKSVRQAIKIVNAAIKEYGDFDNIVIEMARETNEDDEKKAIQKIQKANKDEKDAAMLKAANQYNGKAELPHSVFHGHKQLATKIRLWHQQGERCLYTGKTISIHDLINNPNQFEVDHILPLSITFDDSLANKVLVYATANQEKGQRTPYQALDSMDDAWSFRELKAFVRESKTLSNKKKEYLLTEEDISKFDVRKKFIERNLVDTRYASRVVLNALQEHFRAHKIDTKVSVVRGQFTSQLRRHWGIEKTRDTYHHHAVDALIIAASSQLNLWKKQKNTLVSYSEEQLLDIETGELISDDEYKESVFKAPYQHFVDTLKSKEFEDSILFSYQVDSKFNRKISDATIYATRQAKVGKDKKDETYVLGKIKDIYTQDGYDAFMKIYKKDKSKFLMYRHDPQTFEKVIEPILENYPNKEMNEKGKEVPCNPFLKYKEEHGYIRKYSKKGNGPEIKSLKYYDSKLLGNPIDITPENSKNKVVLQSLKPWRTDVYFNKNTGKYEILGLKYADLQFEKKTGTYKISQEKYNGIMKEEGVDSDSEFKFTLYKNDLLLVKDTETKEQQLFRFLSRTMPNVKYYVELKPYSKDKFEKNESLIEILGSADKSGRCIKGLGKSNISIYKVRTDVLGNQHIIKNEGDKPKLDF

SEQ ID NO: 593 - protein, 1388 aa, Streptococcus thermophilus
MTKPYSIGLDIGTNSVGWAVITDNYKVPSKKMKVLGNTSKKYIKKNLLGVLLFDSGITAEGRRLKRTARRRYTRRRNRILYLQEIFSTEMATLDDAFFQRLDDSFLVPDDKRDSKYPIFGNLVEEKAYHDEFPTIYHLRKYLADSTKKADLRLVYLALAHMIKYRGHFLIEGEFNSKNNDIQKNFQDFLDTYNAIFESDLSLENSKQLEEIVKDKISKLEKKDRILKLFPGEKNSGIFSEFLKLIVGNQADFRKCFNLDEKASLHFSKESYDEDLETLLGYIGDDYSDVFLKAKKLYDAILLSGFLTVTDNETEAPLSSAMIKRYNEHKEDLALLKEYIRNISLKTYNEVFKDDTKNGYAGYIDGKTNQEDFYVYLKNLLAEFEGADYFLEKIDREDFLRKQRTFDNGSIPYQIHLQEMRAILDKQAKFYPFLAKNKERIEKILTFRIPYYVGPLARGNSDFAWSIRKRNEKITPWNFEDVIDKESSAEAFINRMTSFDLYLPEEKVLPKHSLLYETFNVYNELTKVRFIAESMRDYQFLDSKQKKDIVRLYFKDKRKVTDKDIIEYLHAIYGYDGIELKGIEKQFNSSLSTYHDLLNIINDKEFLDDSSNEAIIEEIIHTLTIFEDREMIKQRLSKFENIFDKSVLKKLSRRHYTGWGKLSAKLINGIRDEKSGNTILDYLIDDGISNRNFMQLIHDDALSFKKKIQKAQIIGDEDKGNIKEVVKSLPGSPAIKKGILQSIKIVDELVKVMGGRKPESIVVEMARENQYTNQGKSNSQQRLKRLEKSLKELGSKILKENIPAKLSKIDNNALQNDRLYLYYLQNGKDMYTGDDLDIDRLSNYDIDHIIPQAFLKDNSIDNKVLVSSASNRGKSDDFPSLEVVKKRKTFWYQLLKSKLISQRKFDNLTKAERGGLLPEDKAGFIQRQLVETRQITKHVARLLDEKFNNKKDENNRAVRTVKIITLKSTLVSQFRKDFELYKVREINDFHHAHDAYLNAVIASALLKKYPKLEPEFVYGDYPKYNSFRERKSATEKVYFYSNIMNIFKKSISLADGRVIERPLIEVNEETGESVWNKESDLATVRRVLSYPQVNVVKKVEEQNHGLDRGKPKGLFNANLSSKPKPNSNENLVGAKEYLDPKKYGGYAGISNSFAVLVKGTIEKGAKKKITNVLEFQGISILDRINYRKDKLNFLLEKGYKDIELIIELPKYSLFELSDGSRRMLASILSTNNKRGEIHKGNQIFLSQKFVKLLYHAKRISNTINENHRKYVENHKKEFEELFYYILEFNENYVGAKKNGKLLNSAFQSWQNHSIDELCSSFIGPTGSERKGLFELTSRGSAADFEFLGVKIPRYRDYTPSSLLKDATLIHQSVTGLYETRIDLAKLGEG

SEQ ID NO: 594 - protein, 1121 aa, Streptococcus thermophilus
MSDLVLGLDIGIGSVGVGILNKVTGEIIHKNSRIFPAAQAENNLVRRTNRQGRRLTRRKKHRRVRLNRLFEESGLITDFTKISINLNPYQLRVKGLTDELSNEELFIALKNMVKHRGISYLDDASDDGNSSVGDYAQIVKENSKQLETKTPGQIQLERYQTYGQLRGDFTVEKDGKKHRLINVFPTSAYRSEALRILQTQQEFNPQITDEFVNRYLEILTGKRKYYHGPGNEKSRTDYGRYRTNGETLDNIFGILIGKCTFYPEEFRAAKASYTAQEFNLLNDLNNLTVPTETKKLSKEQKNQIINYVKNEKAMGPAKLFKYIAKLLSCDVADIKGYRIDKSGKAEIHTFEAYRKMKTLETLDIEQMDRETLDKLAYVLTLNTEREGIQEALEHEFADGSFSQKQVDELVQFRKANSSIFGKGWHNFSVKLMMELIPELYETSEEQMTILKRLGKQKTTSSSNKTKYIDEKLLTEEIYNPVVAKSIRQAIKIVNAAIKEYGDFDNIVIEMARETNEDDEKKAIQKIQKANKDEKDAAMLKAANQYNGKAELPHSVFHGHKQLATKIRLWHQQGERCLYTGKTISIHDLINNPNQFEVDHILPLSITFDDSLANKVLVYATANQEKGQRTPYQALDSMDDAWSFRELKAFVRESKTLSNKKKEYLLTEEDISKFDVRKKFIERNLVDTRYASRVVLNALQEHFRAHKIDTKVSVVRGQFTSQLRRHWGIEKTRDTYHHHAVDALIIAASSQLNLWKKQKNTLVSYSEDQLLDIETGELISDDEYKESVFKAPYQHFVDTLKSKEFEDSILFSYQVDSKFNRKISDATIYATRQAKVGKDKKDETYVLGKIKDIYTQDGYDAFMKIYKKDKSKFLMYRHDPQTFEKVIEPILENYPNKEMNEKGKEVPCNPFLKYKEEHGYIRKYSKKGNDPEIKSLKYYDSKLGNHIDITPKDSNNKVVLQSVSPWRADVYFNKTTGKYEILGLKYADLQFEKGTGTYKISQEKYNDIKKKEGVDSDSEFKFTLYKNDLLLVKDTETKEQQLFRFLSRTMPKQKHYVELKPYDKQKFEGGEALIKVLGNVANSGQCKKGLGKSNISIYKVRTDVLGNQHIIKNEGDKPKLDF

SEQ ID NO: 595 - protein, 1122 aa, Streptococcus thermophilus
  Streptococcus thermophilus MTCC 5460
MSDLVLGLDIGIGSVGVGILNKVTGEIIHKNSRIFPAAQAENNVERRTNRQGRRLTRRKKHRRVRLNRLFEESGLITDFTKISINLNPYQLRVRGLTDELSNEELFIALKNMVKHRGISYLDDASDDGNSSVGDYAQIVKENSKQLETKTPGQIQLERYQTYGQLRGDFTVEKDGKKHRLINVFPTSAYRSEALRILQTQQEFNSQITDEFINRYLEILTGKRKYYHGPGNEKSRTDYGRYRTSGETLDNIFGILIGKCTFYPEEFRAAKASYTAQEFNLLNDLNNLTVPTETKKLSKEQKNQIINYVKNEKAMGPAKLFKYIAKLLSCDVADIKGYRIDKSGKAEIHTFEAYRKMKTLETLDIEQMDRETLDKLAYVLTLNTEREGIQEALEHEFADGSFSQKQVDELVQFRKASSSIFGKGWHNFSVKLMMELIPELYETSEEQMTILTRLGKQKTTSSSNKTKYIDEKLLTEEIYNPVVAKSVRQAIKIVNAAIKEYGDFDNIVIEMARETNEDDEKKAIQKIQKANKDEKDAAMLKAANQYNGKAELPHSVFHGHKQLATKIRLWHQQGERCLYTGKTISIHDLINNPNQFEVDHILPLSITFDDSLANKVLVYATANQEKGQRTPYQALDSMDDAWSFRELKAFVRESKTLSNKKKEYLLTEEDISKFDVRKKFIERNLVDTRYASRVVLNALQEHFRAHKIDTKVSVVRGQFTSQLRRHWGIEKTRDTYHHHAVDALIIAASSQLNLWKKQKNTLVSYSEDQLLDIETGELISDDEYKESVFKAPYQHFVDTLKSKEFEDSILFSYQVDSKFNRKLSDATIYATRQAKVGKDKKDETYVLGKIKDIYTQDGYDAFMKIYKKDKSKFLMYRHDPQTFEKVIEPILENYPNKEMNEKGKEVPCNPFLKYKEEHGYIRKYSKKGNGPEIKSLKYYDSKLLGNPIDITPENSKNKVVLQSLKPWRADVYFNKTTGKYEILGLKYADLQFEKKTGTYKISQEKYNGIMKEEGVDSDSEFKFTLYKNDLLLVKDTETKEQQLFRFLSRTMPNVKYYVELKPYSKDKFEKNESLIEILGSADKSGRCIKGLGKSNISIYKVRTDVLGNQHIIKNEGDKPKLDF

SEQ ID NO: 596 - protein, 1121 aa, Streptococcus thermophilus
MSDLVLGLDIGIGSVGVGILNKVTGEIIHKNSRIFPAAQAENNLVRRTNRQGRRLTRRKKHRIVRLNRLFEESGLITDFTKISINLNPYQLRVKGLTDELSNEELFIALKNMVKHRGISYLDDASDDGNSSVGDYAQIVKENSKQLETKTPGQIQLERYQTYGQLRGDFTVEKDGKKHRLINVFPTSAYRSEALRILQTQQEFNPQITDEFINRYLEILTGKRKYYHGPGNEKSRTDYGRYRTSGETLDNIFGILIGKCTFYPDEFRAAKASYTAQEFNLLNDLNNLTVPTETKKLSKEQKNQIINYVKNEKAMGPAKLFKYIAKLLSCDVADIKGYRIDKSGKAEIHTFEAYRKMKTLETLDIEQMDRETLDKLAYVLTLNTEREGIQEALEHEFADGSFSQKQVDELVQFRKANSSIFGKGWHNFSVKLMMELIPELYETSEEQMTILTRLGKQKTTSSSNKTKYIDEKLLTEEIYNPVVAKSVRQAIKIVNAAIKEYGDFDNIVIEMARETNEDDEKKAIQKIQKANKDEKDAAMLKAANQYNGKAELPHSVFHGHKQLATKIRLWHQQGERCLYTGKTISIHDLINNSNQFEVDHILPLSITFDDSLANKVLVYATANQEKGQRTPYQALDSMDDAWSFRELKAFVRESKTLSNKKKEYLLTEEDISKFDVRKKFIERNLVDTRYASRVVLNALQEHFRAHKIDTKVSVVRGQFTSQLRRHWGIEKTRDTYHHHAVDALIIAASSQLNLWKKQKNTLVSYSEDQLLDIETGELISDDEYKESVFKAPYQHFVDTLKSKEFEDSILFSYQVDSKFNRKISDATIYATRQAKVGKDKADETYVLGKIKDIYTQDGYDAFMKIYKKDKSKFLMYRHDPQTFEKVIEPILENYPNKQMNEKGKEVPCNPFLKYKEEHGYIRKYSKKGNGPEIKSLKYYDSKLGNHIDITPKDSNNKVVLQSVSPWRADIYFNNTTGKYEILGLKYADLQFEKGTGTYKISQEKYNDIKKKEGVDSDSEFKFTLYKNDLLLVKETETKEQQLFRFLSRTMPKQKHYVELKPYDKQKFEGGEALIKVLGNVANGGQCIKGLGKSNISIYKVRTDVLGNQHIIKNEGDKPKLDF

SEQ ID NO: 597 - protein, 1388 aa, Streptococcus thermophilus
MTKPYSIGLDIGTNSVGWAVITDNYKVPSKKMKVLGNTSKKYIKKNLLGVLLFDSGITAEGRRLKRTARRRYTRRRNRILYLQEIFSTEMATLDDAFFQRLDDSFLVPDDKRDSKYPIFGNLVEEKAYHDEFPTIYHLRKYLADSTKKADLRLVYLALAHMIKYRGHFLIEGEFNSKNNDIQKNFQDFLDTYNAIFESDLSLENSKQLEEIVKDKISKLEKKDRILKLFPGEKNSGIFSEFLKLIVGNQADFRKCFNLDEKASLHFSKESYDEDLETLLGYIGDDYSDVFLKAKKLYDAILLSGFLTVTDNETEAPLSSAMIKRYNEHKEDLALLKEYIRNISLKTYNEVFKDDTKNGYAGYIDGKTNQEDFYVYLKNLLAEFEGADYFLEKIDREDFLRKQRTFDNGSIPYQIHLQEMRAILDKQAKFYPFLAKNKERIEKILTFRIPYYVGPLARGNSDFAWSIRKRNEKITPWNFEDVIDKESSAEAFINRMTSFDLYLPEEKVLPKHSLLYETFNVYNELTKVRFIAESMRDYQFLDSKQKKDIVRLYFKDKRKVTDKDIIEYLHAIYGYDGIELKGIEKQFNSSLSTYHDLLNIINDKEFLDDSSNEAIIEEIIHTLTIFEDREMIKQRLSKFENIFDKSVLKKLSRRHYTGWGKLSAKLINGIRDEKSGNTILDYLIDDGISNRNFMQLIHDDALSFKKKIQKAQIIGDEDKGNIKEVVKSLPGSPAIKKGILQSIKIVDELVKVMGGRKPESIVVEMARENQYTNQGKSNSQQRLKRLEKSLKELGSKILKENIPAKLSKIDNNALQNDRLYLYYLQNGKDMYTGDDLDIDRLSNYDIDHIIPQAFLKDNSIDNKVLVSSASNRGKSDDFPSLEVVKKRKTFWYQLLKSKLISQRKFDNLTKAERGGLLPEDKAGFIQRQLVETRQITKHVARLLDEKFNNKKDENNRAVRTVKIITLKSTLVSQFRKDFELYKVCEINDFHHAHDAYLNAVIASALLKKYPKLEPEFVYGDYPKYNSFRERKSATEKVYFYSNIMNIFKKSISLADGRVIERPLIEVNEETGESVWNKESDLATVRRVLSYPQVNVVKKVEEQNHGLDRGKPKGLFNANLSSKPKPNSNENLVGAKEYLDPKKYGGYAGISNSFAVLVKGTIEKGAKKKITNVLEFQGISILDRINYRKDKLNFLLEKGYKDIELIIELPKYSLFELSDGSRRMLASILSTNNKRGEIHKGNQIFLSQKFVKLLYHAKRISNTINENHRKYVENHKKEFEELFYYILEFNENYVGAKKNGKLLNSAFQSWQNHSIDELCSSFIGPTGSERKGLFELTSRGSAADFEFLGVKIPRYRDYTPSSLLKDATLIHQSVTGLYETRIDLAKLGEG

SEQ ID NO: 598 - protein, 1128 aa, Streptococcus vestibularis
  Streptococcus vestibularis ATCC 49124
MSDLVLGLDIGIGSVGVGILNKVTGEIIHKNSRIFPAAQAENNVERRTNRQGRRLTRRKKHRRVRLNHLFEESGLITDFTKVSINLNPYQLRVKGLIDELSNEELFIALKNMVKHRGISYLDDASDDGNSSVGDYAQIVKENSKQLETKTPGQIQLERYQKYGQLRGDFTVEEDGKKHRLINVFPTSAYRSEALRILQTQKEFNPQITDEFINRYLEILTGKRKYYHGPGNEKSRTDYGRYTTKKDSENEYITLDNIFGILIGKCTFYPEEYRAAKASYTAQEFNLLNDLNNLTVPTETKKLSEEQKNQIINYVKNEKAMGPAKLFKYIAKLLSCDVADIKGYRIDKSDKAEIHTFEAYRKMKTLETIDFEKMSRDQLDKLAYVLTLNTEREGIQEALDHEFADGNFSQEQIDELVQFRKANSSIFGKGWHNFSVKLMMELIPELYATSEEQMTILTRLGKQKTTSSSNKTKYIDEKLLTEEIYNPVVAKSVRQAIKIVNAAIKEYGDFDNIVIEMARETNEDDEKKAIQKIQKANKDEKDAAMLKAANQYNGRAELPHSVFHGHKQLATKIRLWHQQGERCLYTGKTISIHDLINNPNQFEIDHILPLSITFDDSLANKVLVYATANQEKGQRTPYQALDSMDDAWSFRELKAFVRESKSLSNKKKEYLLTEEDISRFDVRKKFIERNLVDTRYASRVVLNALQEHFRAHKTDTKVSVVRGQFTSQLRRHWGIEKTRDTYHHHAVDALIIAASSQLNLWKKQKNTLVNYSENQLLDIETGELISDDEYKESVFKAPYQHFVDTLKSKEFEDSILFSYQVDSKFNRKISDATIYATRQAKVGKDKKDETYVLGKIKDIYSQTGYDAFIKIYQKDKSKFLMYRHDPQTFEKVIEPILENYPNKEMNEKGKEVPCNPFLKYKEEHGDYIRKYSKKGNGPEIKSLKYYDSKLGNHIDITPKDSNNKVVLQSVSPWRADVYFNKTTGKYEILGLKYADLQFEKGTGTYKISQEKYNVIKKKEGVDSDSEFKFTLYKNDLLLIKDTETKEQQLFRFLSRTKPNVKHYVELKPYDKQKFEGNESLINVLGAVAKGGQCQKGINKPNISIYKVRTDVLGNQHIIKNEGDKPKLDF

SEQ ID NO: 599 - protein, 1084 aa, Subdoligranulum sp.
  Subdoligranulum sp. 4_3_54A2FAA
MKNTLYGIGLDIGVASVGWAVVGLNGTGEPVGLHRLGVRIFDKAEQPKTGESLAAPRRMARGMRRRLRRKALRRADVYALLERSGLSTREELAQMFEAGGLEDIYALRTRALDEPVGKAEFSRILLHLAQRRGFKSNRRTASDGEDGRLLAAVNENRRRMAQGGWRTVGEMLYRHEAFALHKRNKADDYLSTVGRDMVAEEASILFERQRAMGCSWAAPELQAEYLSILLRQRSFDEGPGGNSPYGGNQVEKMVGRCTFEPDEPRAAKAAYSFEYFSLLQKLNHIRLAENGETRPLTQPQRQQLLSLAHKTPDISLARIRKELALPETVQFNGVRCRANETLEESEKKEKFACLPAYHKMRKALDGVVKGRISSLSISQRDAAATALSLYKNEDTLRAKLTEAGFQAPEIDALAGLTGFSKFGHLSLKACRKLIPHLEQGLTYDQACTAAGYDFKGHGAGERAFTLPAAAPEMEQITSPVVRRAVAQTIKVVNGIIREMDASPAWVRIELARELSKTFGERQEMDRSMRENAAQNERLMQELRDTFHLLSPTGQDLVKYRLWKEQDGVCAYSLRRLDVERLFEPGYVDVDHIVPYSLSFDDRRSNKVLVLSSENRQKGNRLPLQYLQGKRREDFIVWTNSSVHDYRKRQNLLREKLSGDEAEGFRQRNLQDTQHMARFLYNYISDHLAFAQSEALGKKRVFAVSGAVTSHLRKRWGLSKVRADGDLHHALDAAVVACTTDGMIRRISGYYGHIEGEYLQDADGAGSQHARTKERFPAPWPRFRDELIVRLSEQPAEPLLDINPEFYCEYGTEHIRPVFVSRMPRRKVTGPGHKETIKGAAAADEGLLTVRKALTELKLDKDGEIKDYYMPSSDTLLYEALKAQLRRFGGDGKKAFAEPFYKPKADGTPGPLVRKVKTTEKATLTVPVHGGAASNDTMVRVDVFLVPGDGYYWVPVYTADTLKPELPNRAVVQGKPYSEWKEMREEDFIFSLYPNDLVYVEHKSGLKFTLQNADSTLEKTRTQTSAFAYFVSGSISTASITIRTHDNAYGIPSLGVKTLKTFHKYQVDVLGNVFPVHKETRQKFR

SEQ ID NO: 600 - protein, 1422 aa, Sutterella wadsworthensis
  Sutterella wadsworthensis 3_1_45B
MTQSERRFSCSIGIDMGAKYTGVFYALFDREELPTNLNSKAMTLVMPETGPRYVQAQRTAVRHRLRGQKRYTLARKLAFLVVDDMIKKQEKRLTDEEWKRGREALSGLLKRRGYSRPNADGEDLTPLENVRADVFAAHPAFSTYFSEVRSLAEQWEEFTANISNVEKFLGDPNIPADKEFIEFAVAEGLIDKTEKKAYQSALSTLRANANVLTGLRQMGHKPRSEYFKAIEADLKKDSRLAKINEAFGGAERLARLLGNLSNLQLRAERWYFNAPDIMKDRGWEPDRFKKTLVRAFKFFHPAKDQNKQHLELIKQIENSEDIIETLCTLDPNRTIPPYEDQNNRRPPLDQTLLLSPEKLTRQYGEIWKTWSARLTSAEPTLAPAAEILERSTDRKSRVAVNGHEPLPTLAYQLSYALQRAFDRSKALDPYALRALAAGSKSNKLTSARTALENCIGGQNVKTFLDCARRYYREADDAKVGLWFDNADGLLERSDLHPPMKKKILPLLVANILQTDETTGQKFLDEIWRKQIKGRETVASRCARIETVRKSFGGGFNIAYNTAQYREVNKLPRNAQDKELLTIRDRVAETADFIAANLGLSDEQKRKFANPFSLAQFYTLIETEVSGFSATTLAVHLENAWRMTIKDAVINGETVRAAQCSRLPAETARPFDGLVRRLVDRQAWEIAKRVSTDIQSKVDFSNGIVDVSIFVEENKFEFSASVADLKKNKRVKDKMLSEAEKLETRWLIKNERIKKASRGTCPYTGDRLAEGGEIDHILPRSLIKDARGIVFNAEPNLIYASSRGNQLKKNQRYSLSDLKANYRNEIFKTSNIAAITAEIEDVVTKLQQTHRLKFFDLLNEHEQDCVRHALFLDDGSEARDAVLELLATQRRTRVNGTQIWMIKNLANKIREELQNWCKTTNNRLHFQAAATNVSDAKNLRLKLAQNQPDFEKPDIQPIASHSIDALCSFAVGSADAERDQNGFDYLDGKTVLGLYPQSCEVIHLQAKPQEEKSHFDSVAIFKEGIYAEQFLPIFTLNEKIWIGYETLNAKGERCGAIEVSGKQPKELLEMLAPFFNKPVGDLSAHATYRILKKPAYEFLAKAALQPLSAEEKRLAALLDALRYCTSRKSLMSLFMAANGKSLKKREDVLKPKLFQLKVELKGEKSFKLNGSLTLPVKQDWLRICDSPELADAFGKPCSADELTSKLARIWKRPVMRDLAHAPVRREFSLPAIDNPSGGFRIRRTNLFGNELYQVHAINAKKYRGFASAGSNVDWSKGILFNELQHENLTECGGRFITSADVTPMSEWRKVVAEDNLSIWIAPGTEGRRYVRVETTFIQASHWFEQSVENWAITSPLSLPASFKVDKPAEFQKAVGTELSELLGQPRSEIFIENVGNAKHIRFWYIVVSSNKKMNESYNNVSKS

SEQ ID NO: 601 - protein, 1049 aa, Tistrella mobilis
MINERLTFGIDLGIGSCGWAVLRHADAAGEPGVIEGLGSWCFDVPETSKERIPTNQVRRSNRLLRRVIRRRRNRMAEIRRLFHAQGLLPSADEDALKRPRLDPWELRARGLDQCLSAEEFAVALGHIARHRGFRSSAKRKAANTSGEDSKMLSALLVTRERTARYRTVGEMFARDPEYSARRRNRDGIFDRTVARDDLIHEVGKLFEAQRARGSAFASPDLEADFNAIAFRQAEMQDSERLVGNCPFERDEKRAARWAPSFERFRLLTRLINLRIATAEGERRFTPEDLARVSAELGATAKLPVSRVRALIGLLPDERFTTIRVEDEDRDIVARTGEAAPGTWRLRKTLGEALWAEMQARPDQLDAIAHVLSFFEATAKIRSELDRLGLPAAVIEALDRGLEDGAFAKFKGAGHISAKACRNLLPHLQQGHRYDQACRLAGYDHAASTLSHTAQVVSKAGFNALVTELGESIANPIARKALTEGLKQIRAMCARWGLPGAIHIELAREVGNSIEKRRELESQRETTTKRRQTERDEIRGLLALEDVDDDTLLRYRLWKEQGGKCLYTGKDIHVRQLIATDNSVQVDHILPWSRFGDDSFNNKTLCLASANQRKRGQTPWEWFSLTGTPEAWEVFASRVETSKDLRGFKKRNLLLKNADEVAQRFRSRNLNDTRYAARLLAEAAKLFYPAGDRQEKDGRRRVLTRPGPLTAALRHAWGLESLKKADGKRVSDDRHHALDALAVAAISEREVQRLTRSFQEWEQQGLARPLRHVAPPWPGFRGDVLAAYAQAFVARPERRRARGKGHDASIRQVVGEGPEAQVFERRGLADLKEADLDRVKDPERNQAIIEAVRAWILAGRPADAPPRSPRGDVIVKLRTAPAKKIKPAVPVRGGTADRGDMVRIDVFTRPNRKGRDEWYLVPIYPHQVMNRKAWPHPPMRSVVAYKDEAGWTEIGAEHSFRFSLYPRSYVQLVKSNGDVIEGYLVSMDRSTGAFRVFVHNNPAEMAKGIGAKTLLNLRKFNVDRFGVRTEVKSEVRTWHGEVCTSPVPPD

SEQ ID NO: 602 - protein, 1395 aa, Treponema denticola
  Treponema denticola AL-2
MKKEIKDYFLGLDVGTGSVGWAVTDTDYKLLKANRKDLWGMRCFETAETAEVRRLHRGARRRIERRKKRIKLLQELFSQEIAKIDEGFFQRMKESPFYAEDKTILQENALFNDKDFTDKTYHKAYPTINHLIKAWIENKVKPDPRLLYLACHNIIKKRGHFLFEGDFDSENQFDTSIQALFEYLREDMEVDIDADSQKVKEILKDSSLKNSEKQSRLNKILGLKPSDKQKKAITNLISGNKINFADLYDNPDLKDAEKNSISFSKDDFDALSDDLASILGDSFELLLKAKAVYNCSVLSKVIGDEQYLSFAKVKIYEKHKTDLTKLKAVIKKHFPNNYKKVFGYNQDNESKNNYSGYVGVCKTKNKKLVINNSVNQEDFYKFLKPILSAKSEIKEVNDILAEIETGNFLPKQISKSNAEIPYQLRKMELEKILSNAEKHFSFLKQKDEKGLSHSEKIIMLLTFKIPYYIGPINDNHKKSFPDRCWVVKKEKSPSGKTTPWNFFDHIDKEKTAEEFITSRTNFCTYLIGESVLPKNSLLYSEYTVLNEINNLQIIIDGKNICDTKLKQKIYEDLFKKYKKITQKQISTFIKHEGICNKTDEVIILGIDKECTSSLKSYIELKNIFGKQVDEISTKNMLEEIIRWATIYDEGEGKTILKTKIKAEYGKYCSDEQIKKILNLKFSGWGRLSRKFLETVTSEMPGFSEPVNIITAMRETQNNLMELLSSEFKFTENIKKINSGFEDAEKQFSYDGLVKPLFLSPSVKKMLWQTLKLVKEISHITQAPPKKIFIEMAKGAELEPARTKTRLKILQDLYSSCKNDADAFSSEIQYLSGKIENEDNLRLRSDKLYLYYTQLGKCMYCGKPIEIGHVFDTSNYDIDHIYPQSKIKDDSISNRVLVCSSCNKNKEDKYPLKSEIQSKQRGFWNFLQRNNFISLEKLNRLTRTTPISDDETAKFIARQLVETRQATKVAAKVLEKMFPETKIVYSKAETVSMFRNKFDIIKCREINDFHHAHDAYLNIVVGNVYNTKFTNNPWNFIKEKRDNPKIADTYNYYKVFDYDVKRNNITAWEKGKTIITVKDMLKRNTPIYTRQAACKKGGLFDQTIMKKGLGQHPLKKEGPFSNISKYGGYNKVSAAYYTLIEYEEKGNKIRSLETIPLYLVKDIQKDQDVLKSYLTDLLGKKEFKILVPKIKINSLLKINGFPCHITGKTNDSFLLRPAVQFCCSNDEVLYFKKIIRFSEIRSQREKIGKTISPYEDLSFRSYIKENLCKKTKNDEIGEKEFYDLLQKKNLEIYDMLLTKHKDTIYKKRPNSATIDILVKGKEKFKSLIIENQFEVILEILKLFSATRNVSELQHIGGSKYSGVAKIGNKISSLDNCILIYQSITGIFEKRIDLLKV

SEQ ID NO: 603 - protein, 1395 aa, Treponema denticola
  Treponema denticola ASLM
MKKEIKDYFLGLDVGTGSVGWAVTDTDYKLLKANRKDLWGMRCFETAETAEVRRLHRGARRRIERRKKRIKLLQELFSQEIAKIDEGFFQRMKESPLYAEDKTILQENTLFNDKDFTDKTYHKAYPTINHLIKAWIENKVKPDPRLLYLACHNIIKKRGHFLFEGDFDSENQFDTSIQALFEYLREDMEVDIDADSQKVKEILKDSSLKNSEKQSRLNKMLGLKPSDKQKKAITNLISGNKINFADLYDNPDLKDAEKNSISFSKDDFDALSDDLASILGDSFELLLKAKAVYNCSVLSKVIGDEQYLSFAKVKIYEKHKTDLTKLKNVIKKHFPKDYKKVFGYNKNEKNNNNYSGYVGVCKTKSKKLIINNSVNQEDFYKFLKTILSAKSEIKEVNDILTEIETGTFLPKQISKSNAEIPYQLRKMELEKILSNAEKHFSFLKQKDEKGLSHSEKIIMLLTFKIPYYIGPINDNHKKSFPDRCWVVKKEKSPSGKTTPWNFFDHIDKEKTAEEFITSRTNFCTYLIGESVLPKNSLLYSEYTVLNEINNLQIIIDGKNICDTKLKQKIYEELFKKYKKITQKQISTFIKHEGICNKTDEVIILGIDKECTSSLKSYIELKNIFGKQVDEISTKNMLEEIIRWATIYDEGEGKTILKTKIKAEYGKYCSDEQIKKILNLKFSGWGRLSRKFLETVTSEMPGFSEPVNIITAMRETQNNLMELLSSEFKFTENIKKINSGFEDVEKQFSYDGLVKPLFLSPSVKKMLWQTLKLVKEISHITQAPPKKIFIEMAKGAELDPVRTKTRLKILQDLYNNCKNDADAFSSEIKDLSGKIENEDNLRLRSDKLYLYYTQLGKCMYCGKPIEIGHVFDTSNYDIDHIYPQSKIKDDSISNRVLVCSSCNKNKEDKYPLKAEIQSKQRGFWNFLQRNNFISLEKFNRLTRATPISDDETAKFIARQLVETRQATKVAARVLEKMFPETKIVYSKAETVSMFRNKFDIVKCREINDFHHAHDAYLNIVVGNVYNTKFTNNLWNFIKEKRDNPKIADTYNYYKVFDYDVKRNNITAWEKGKTIITVKDMLKRNTPIYTRQAACKKGGLFDQTIMKKGLGQHPLKKEGPFSNISKYGGYNKVSAAYYTLIEYEEKGNKIRSLETIPLYLVKDIQKDQDVLKSYLTDLLGKKEFKILVPKIKINSLLKINGFPCHITGKTNDSFLLRPAVQFCCSNDEVLYFKKIIRFSEIRSQREKIGKTISPYEDLSFRSYIKENLCKKTKNDEIGEKEFYDLLQKKNLEIYDMLLTKHKDTIYKKRPNSATIDILVKGKEKFKSLIIENQFEVILEILKLFSATRNVSDLQHIGGSKYSGVAKIGNKISSLDNCILIYQSITGIFEKRIDLLKV

SEQ ID NO: 604 - protein, 1395 aa, Treponema denticola
  Treponema denticola ATCC 35405
MKKEIKDYFLGLDVGTGSVGWAVTDTDYKLLKANRKDLWGMRCFETAETAEVRRLHRGARRRIERRKKRIKLLQELFSQEIAKTDEGFFQRMKESPFYAEDKTILQENTLFNDKDFADKTYHKAYPTINHLIKAWIENKVKPDPRLLYLACHNIIKKRGHFLFEGDFDSENQFDTSIQALFEYLREDMEVDIDADSQKVKEILKDSSLKNSEKQSRLNKILGLKPSDKQKKAITNLISGNKINFADLYDNPDLKDAEKNSISFSKDDFDALSDDLASILGDSFELLLKAKAVYNCSVLSKVIGDEQYLSFAKVKIYEKHKTDLTKLKNVIKKHFPKDYKKVFGYNKNEKNNNNYSGYVGVCKTKSKKLIINNSVNQEDFYKFLKTILSAKSEIKEVNDILTEIETGTFLPKQISKSNAEIPYQLRKMELEKILSNAEKHFSFLKQKDEKGLSHSEKIIMLLTFKIPYYIGPINDNHKKFFPDRCWVVKKEKSPSGKTTPWNFFDHIDKEKTAEAFITSRTNFCTYLVGESVLPKSSLLYSEYTVLNEINNLQIIIDGKNICDIKLKQKIYEDLFKKYKKITQKQISTFIKHEGICNKTDEVIILGIDKECTSSLKSYIELKNIFGKQVDEISTKNMLEEIIRWATIYDEGEGKTILKTKIKAEYGKYCSDEQIKKILNLKFSGWGRLSRKFLETVTSEMPGFSEPVNIITAMRETQNNLMELLSSEFTFTENIKKINSGFEDAEKQFSYDGLVKPLFLSPSVKKMLWQTLKLVKEISHITQAPPKKIFIEMAKGAELEPARTKTRLKILQDLYNNCKNDADAFSSEIKDLSGKIENEDNLRLRSDKLYLYYTQLGKCMYCGKPIEIGHVFDTSNYDIDHIYPQSKIKDDSISNRVLVCSSCNKNKEDKYPLKSEIQSKQRGFWNFLQRNNFISLEKLNRLTRATPISDDETAKFIARQLVETRQATKVAAKVLEKMFPETKIVYSKAETVSMFRNKFDIVKCREINDFHHAHDAYLNIVVGNVYNTKFTNNPWNFIKEKRDNPKIADTYNYYKVFDYDVKRNNITAWEKGKTIITVKDMLKRNTPIYTRQAACKKGELFNQTIMKKGLGQHPLKKEGPFSNISKYGGYNKVSAAYYTLIEYEEKGNKIRSLETIPLYLVKDIQKDQDVLKSYLTDLLGKKEFKILVPKIKINSLLKINGFPCHITGKTNDSFLLRPAVQFCCSNNEVLYFKKIIRFSEIRSQREKIGKTISPYEDLSFRSYIKENLWKKTKNDEIGEKEFYDLLQKKNLEIYDMLLTKHKDTIYKKRPNSATIDILVKGKEKFKSLIIENQFEVILEILKLFSATRNVSDLQHIGGSKYSGVAKIGNKISSLDNCILIYQSITGIFEKRIDLLKV

SEQ ID NO: 605 - protein, 1395 aa, Treponema denticola
  Treponema denticola H1-T
MKKEIKDYFLGLDVGTGSVGWAVTDTDYKLLKANRKDLWGMRCFETAETAEVRRLHRGARRRIERRKKRIKLLQELFSQEIAKIDEGFFQRMKESPFYAEDKTILQENALFNDKDFTDKTYHKAYPTINHLIKAWIENKVKPDPRLLYLACHNIIKKRGHFLFEGDFDSENQFDTSIQALFEYLREDMEVDIDADSQKVKEILKDSSLKNSEKQSRLNKILGLKPSDKQKKAITNLISGNKINFADLYDNPDLKDAEKNSISFSKDDFDALSDDLASILGDSFELLLKAKAVYNCSVLSKVIGDEQYLSFAKVKIYEKHKTDLTKLKAVIKKHFPNNYKKVFGYNQDNESKNNYSGYVGVCKTKNKKLVINNSVNQEDFYKFLKPILSAKSEIKEVNDILAEIETGNFLPKQISKSNAEIPYQLRKMELEKILSNAEKHFSFLKQKDEKGLSHSEKIIMLLTFKIPYYIGPINDNHKKSFPDRCWVVKKEKSPSGKTTPWNFFDHIDKEKTAEEFITSRTNFCTYLIGESVLPKNSLLYSEYTVLNEINNLQIIIDGKNICDTKLKQKIYEDLFKKYKKITQKQISTFIKHEGICNKTDEVIILGIDKECTSSLKSYIELKNIFGKQVDEISTKNMLEEIIRWATIYDEGEGKTILKTKIKAEYGKYCSDEQIKKILNLKFSGWGRLSRKFLETVTSEMPGFSEPVNIITAMRETQNNLMELLSSEFKFTENIKKINSGFEDAEKQFSYDGLVKPLFLSPSVKKMLWQTLKLVKEISHITQAPPKKIFIEMAKGAELEPARTKTRLKILQDLYSSCKNDADAFSSEIQYLSGKIENEDNLRLRSDKLYLYYTQLGKCMYCGKPIEIGHVFDTSNYDIDHIYPQSKIKDDSISNRVLVCSSCNKNKEDKYPLKSEIQSKQRGFWNFLQRNNFISLEKLNRLTRTTPISDDETAKFIARQLVETRQATKVAAKVLEKMFPETKIVYSKAETVSMFRNKFDIIKCREINDFHHAHDAYLNIVVGNVYNTKFTNNPWNFIKEKRDNPKIADTYNYYKVFDYDVKRNNITAWEKGKTIITVKDMLKRNTPIYTRQAACKKGELFNQTIMKKGLGQHPLKKEGPFSNISKYGGYNKVSAAYYTLIEYEEKVNKIRSLETIPLYLVKDIQKDQDVLKSYLTDLLGKKEIKILVPKIKINSLLKINGFPCHITGKTGDSFVLRPAVQFCCSNDEVLYFKKIIRFNEIRSQREKMGKTISPYEDLSFRSYIKENLCKKTKADEIGEKEFYDLLQKKNLEIYDMLLTKHKDTIYNKRPNSTTLGMLTKGRYEFINLKPKDQIIVMLEILKLFCTTREAIDLGLIKGKPAAGVATLGKKISNLDNCILIYQSITGIFEKRIDLLKV

SEQ ID NO: 606 - protein, 1395 aa, Treponema denticola
  Treponema denticola H-22
MKKEIKDYFLGLDVGTGSVGWAVTDTDYKLLKANRKDLWGMRCFETAETAEVRRLHRGARRRIERRKKRIKLLQELFSQEIAKIDEGFFQRMKESPFYAEDKTILQENTLFNDKDFTDKTYHKAYPTINHLIKAWIENKVKPDPRLLYLACHNIIKKRGHFLFEGDFDSENQFDTSIQALFEYLREDMEVDIDADSQKVKEILKDSSLKNSEKQSRLNKILGLKPSDKQKKAITNLISGNKINFADLYDNPDLKDAEKNSISFSKDDFDALSDDLASILGDSFELLLKAKAVYNCSVLSKVIGDEQYLSFAKVKIYEKHKTDLTKLKNVIKKHFPKDYKKVFGYNKNEKNNNNYSGYVGVCKTKSKKLIINNSVNQEDFYKFLKTILSAKSEIKEVNDILTEIETGTFLPKQISKSNAEIPYQLRKMELEKILSNAEKHFSFLKQKDEKGLSHSEKIIMLLTFKIPYYIGPINDNHKKSFPDRCWVIKKEKSPSGKTTPWNFFDHIDKDKTAEAFITSRTNFCTYLVGESVLPKSSLLYSEYTVLNEINNLQIIIDGKNICDIKLKQKIYEELFKKYKKITQKQISTFIKHEGICNKTDEVIILGIDKECTSSLKSYIELKNIFGKQVDEISTKNMLEEIIRWATIYDEGEGKTILKTKIKAEYGKYCSDEQIKKILNLKFSGWGRLSRKFLETVTSEMPGFSEPVNIITAMRETQNNLMELLSSEFKFTENIKKINSGFEDAEKQFSYNGLVKPLFLSPSVKKMLWQTLKLVKEISHITQAPPKKIFIEMAKGAELEPARTKTRLKILQDLYNNCKNDADAFSSEIKDLSGKIENEDNLRLRSDKLYLYYTQLGKCMYCGKPIEIGHVFDTSNYDIDHIYPQSKIKDDSISNRVLVCSSCNKNKEDKYPLKSEIQSKQRGFWNFLQRNNFISLEKLNRLTRTTPISDDETAKFIARQLVETRQATKVAAKVLEKMFPETKIVYSKAETVSMFRNKFDIIKCREINDFHHAHDAYLNIVVGNVYNTKFTNNPWNFIKEKRDNPKIADTYNYYKVFDYDVKRNNITAWEKGKTIITVKDMLKRNTPIYTRQAACKKGGLFDQTIMKKGLGQHPLKKEGAFSNISKYGGYNKVSAAYYTLIEYEEKGNKIRSLETIPLYLVKDIQKDQDVLKSYLTDLLGKKEIKILVPKIKINSLLKINGFPCHITGKTGDSFVLRPAVQFCCSNDEVLYFKKIIRFNEIRSQREKMGKTISPYEDLSFRSYIKENLCKKTKADEIGEKEFYDLLQKKNLEIYDMLLTKHKDTIYNKRPNSTTLGMLTKGRYEFINLKPKDQIIVMLEILKLFCTTREAIDLGLIKGKPAAGVATLGKKISNPDNCILIYQSITGIFEKRIDLLKV

SEQ ID NO: 607 - protein, 1395 aa, Treponema denticola
  Treponema denticola OTK
MKKEIKDYFLGLDVGTGSVGWAVTDTDYKLLKANRKDLWGMRCFETAETAEVRRLHRGARRRIERRKKRIKLLQELFSQEIAKIDEGFFQRMKESPLYAEDKTILQENTLFNDKDFTDKTYHKAYPTINHLIKAWIENKVKPDPRLLYLACHNIIKKRGHFLFEGDFDSENQFDTSIQALFEYLREDMELDIDADSQKVKEILKDSSLKNSEKQSRLNKMLGLKPSDKQKKAITNLISGNKINFADLYDNPDLKDAEKNSISFSKDDFDALSDDLASILGDSFELLLKAKAVYNCSVLSKVIGDEQYLSFAKVKIYEKHKTDLTKLKNVIKKHFPKDYKKVFGYNKNEKNNNNYSAYVGVCKITHKKLVIKNSASQEDFYKFLKTILSAKSEIKEVNDILTEIETGTFLPKQISKSNAEIPYQLRKMELEKILSNAEKHFSFLKQKDEKGLSHSEKIIMLLTFKIPYYIGPINDNHKKSFPDRCWVVKKEKSPSGKTTPWNFFDHIDKEKTAEEFITSRTNFCTYLIGESVLPKSSLLYSEYTVLNEINNLQIIIDGKNICDIKLKQKIYEELFKKYKKITQKQISTFIKHEGICNKTDEVIILGIDKECTSSLKSYIELKNIFGKQVDEISTKNMLEEIIRWATIYDEGEGKTILKTKIKAEYGKYCSDEQIKKILNLKFSGWGRLSRKFLETVTSEMPGFSEPVNIITAMRETQNNLMELLSSEFKFTENIKKINSGFEDAEKQFSYNGLVKPLFLSPSVKKMLWQTLKLVKEISHITQAPPKKIFIEMAKGAELEPARTKTRLKILQDLYSSCKNDADAFSSEIQYLSGKIENEDNLRLRSDKLYLYYTQLGKCMYCGKPIEIGHVFDTSNYDIDHIYPQSKIKDDSISNRVLVCSSCNKNKEDKYPLKAEIQSKQRGFWNFLQRNNFISLEKLNRLTRTSPISDDETAKFIARQLVETRQATKVAAKVLEKMFPETKIVYSKAETVSMFRNKFDIIKCREINDFHHAHDAYLNIVVGNVYNTKFTNNPWNFIKEKRDNPKIADTYNYYKVFDYDVKRNNITAWEKGKTIITVKDMLKRNTPIYTRQAACKKGELFNQTIMKKGLGQHPLKKEGPLSNISKYGGYNKVSAAYYTLIEYEEKGSKIRSLETIPLYLVKDIQKNKDGLKSYLTDQIGKKEIKILIPKIKINSLLKINGFPCHITGKMGEAFVLRPAVQFCCSNDEALYFKKIIRFNEIRKQREKMGKTISPYEDLSFRSYIKDNLCKKTKADEIEEKEFYDLLQKKNLEIYDMLLTKHKDTIYKKRPNSATIDILVKGKEKFKSLIIENQFEVILEILKLFSATRNVSDLQHIGGSKNAGNARVGNKISSLDNCILIYQSITGIFEKRIDLLKI

SEQ ID NO: 608 - protein, 1395 aa, Treponema denticola
  Treponema denticola SP37
MKKEIKDYFLGLDVGTGSVGWAVTDTDYKLLKANRKDLWGMRCFETAETAEVRRLHRGARRRIERRKKRIKLLQELFSQEIAKTDEGFFQRMKESPFYAEDKTILQENALFNDRDFTDKTYHKAYPTINHLIKAWIENKVKPDPRLLYLACHNIIKKRGHFLFEGDFDSENQFDTSIQALFEYLREDMEVDIDADSQKVKEILKDSSLKNSEKQSRLNKMLGLKPSDKQKKAITNLISGNKINFADLYDNPDLKDAEKNSISFSKDDFDALSDDLASILGDSFELLLKAKAVYNCSVLSKVIGDEQYLSFAKVKIYEKHKTDLTKLKNVIKKHFPNDYKKVFGYNKNEKNNNNYSAYVGVCKTKSKKLVINNTVNQEDFYKFLKPILLAKSEIKEVNDILTEIETGTFLPKQISKSNAEIPYQLRKMELEKILSNAEKHFSFLKQKDEKGLSHSEKIIMLLTFKIPYYIGPINDNHKKSFPDRCWVIKKEKSPSGKTTPWNFFDHIDKDKTAEAFITSRTNFCTYLVGESVLPKNSLLYSEYTVLNEINNLQIIIDGKNICDIKLKQKIYEELFKKYKKITQKQISTFIKHEGICNKTDEVIILGIDKECTSSLKSYIELKNIFGKQVDEISTKNMLEEIIRWATIYDEGEGKTILKTKIKAEYGKYCSDEQIKKILNLKFSGWGRLSRKFLETVTSEMPGFSEPVNIITAMRETQNNLMELLSSEFKFTENIKKINSGFEDVEKQFSYDSLVKPLFLSPSVKKMLWQTLKLVKEISHITQAPPKKIFIEMAKGAELDPVRTKTRLKILQDLYNNCKNDADAFSSEIKDLSGKIENEDNLRLRSDKLYLYYTQLGKCMYCGKPIEIGHVFDTSNYDIDHIYPQSKIKDDSISNRVLVCSSCNKNKEDKYPLKAEIQSKQRGFWNFLQRNNFISLEKLNRLTRTSPISDDETAKFIARQLVETRQATKVAAKVLEKMFPETKIVYSKAETVSMFRNKFDIIKCREINDFHHAHDAYLNIVVGNVYNTKFTNNPWNFIKEKRDNPKIADTYNYYKVFDYDVKRNNITAWEKGKTIITVKDMLKRNTPIYTRQAACKKGELFNQTIMKKGLGQHPLKKEGPLSNISKYGGYNKVSAAYYTLIEYEEKGSKIRSLETIPLYLVKDIQKNKDGLKSYLTDQIGKKEIKILIPKIKINSLLKINGFPCHITGKMGEAFVLRPAVQFCCSNDEALYFKKIIRFNEIRKQREKMGKTISPYEDLSFRSYIKDNLCKKTKADEIEEKEFYDLLQKKNLEIYDMLLTKHKDTIYKKRPNSATIDILVKGKEKFKSLIIENQFEVILEILKLFSATRNVSDLQHIGGSKNAGNARVGNKISSLDNCILIYQSITGIFEKRIDLLKI

SEQ ID NO: 609 - protein, 1062 aa, Treponema sp.
  Treponema sp. JC4
MIMKLEKWRLGLDLGTNSIGWSVFSLDKDNSVQDLIDMGVRIFSDGRDPKTKEPLAVARRTARSQRKLIYRRKLRRKQVFKFLQEQGLFPKTKEECMTLKSLNPYELRIKALDEKLEPYELGRALFNLAVRRGFKSNRKDGSREEVSEKKSPDEIKTQADMQTHLEKAIKENGCRTITEFLYKNQGENGGIRFAPGRMTYYPTRKMYEEEFNLIRSKQEKYYPQVDWDDIYKAIFYQRPLKPQQRGYCIYENDKERTFKAMPCSQKLRILQDIGNLAYYEGGSKKRVELNDNQDKVLYELLNSKDKVTFDQMRKALCLADSNSFNLEENRDFLIGNPTAVKMRSKNRFGKLWDEIPLEEQDLIIETIITADEDDAVYEVIKKYDLTQEQRDFIVKNTILQSGTSMLCKEVSEKLVKRLEEIADLKYHEAVESLGYKFADQTVEKYDLLPYYGKVLPGSTMEIDLSAPETNPEKHYGKISNPTVHVALNQTRVVVNALIKEYGKPSQIAIELSRDLKNNVEKKAEIARKQNQRAKENIAINDTISALYHTAFPGKSFYPNRNDRMKYRLWSELGLGNKCIYCGKGISGAELFTKEIEIEHILPFSRTLLDAESNLTVAHSSCNAFKAERSPFEAFGTNPSGYSWQEIIQRANQLKNTSKKNKFSPNAMDSFEKDSSFIARQLSDNQYIAKAALRYLKCLVENPSDVWTTNGSMTKLLRDKWEMDSILCRKFTEKEVALLGLKPEQIGNYKKNRFDHRHHAIDAVVIGLTDRSMVQKLATKNSHKGNRIEIPEFPILRSDLIEKVKNIVVSFKPDHGAEGKLSKETLLGKIKLHGKETFVCRENIVSLSEKNLDDIVDEKIKSKVKDYVAKHKGQKIEAVLSDFSKENGIKKVRCVNRVQTPIEITSGKISRYLSPEDYFAAVIWEIPGEKKTFKAQYIRRNEVEKNSKGLNVVKPAVLENGKPHPAAKQVCLLHKDDYLEFSDKGKMYFCRIAGYAATNNKLDIRPVYAVSYCADWINSTNETMLTGYWKPTPTQNWVSVNVLFDKQKARLVTVSPIGRVFRK

SEQ ID NO: 610 - protein, 1011 aa, Unknown
  Description of Unknown: uncultured delta proteobacterium HF0070_07E19 polypeptide
MSSKAIDSLEQLDLFKPQEYTLGLDLGIKSIGWAILSGERIANAGVYLFETAEELNSTGNKLISKAAERGRKRRIRRMLDRKARRGRHIRYLLEREGLPTDELEEVVVHQSNRTLWDVRAEAVERKLTKQELAAVLFHLVRHRGYFPNTKKLPPDDESDSADEEQGKINRATSRLREELKASDCKTIGQFLAQNRDRQRNREGDYSNLMARKLVFEEALQILAFQRKQGHELSKDFEKTYLDVLMGQRSGRSPKLGNCSLIPSELRAPSSAPSTEWFKFLQNLGNLQISNAYREEWSIDAPRRAQIIDACSQRSTSSYWQIRRDFQIPDEYRFNLVNYERRDPDVDLQEYLQQQERKTLANFRNWKQLEKIIGTGHPIQTLDEAARLITLIKDDEKLSDQLADLLPEASDKAITQLCELDFTTAAKISLEAMYRILPHMNQGMGFFDACQQESLPEIGVPPAGDRVPPFDEMYNPVVNRVLSQSRKLINAVIDEYGMPAKIRVELARDLGKGRELRERIKLDQLDKSKQNDQRAEDFRAEFQQAPRGDQSLRYRLWKEQNCTCPYSGRMIPVNSVLSEDTQIDHILPISQSFDNSLSNKVLCFTEENAQKSNRTPFEYLDAADFQRLEAISGNWPEAKRNKLLHKSFGKVAEEWKSRALNDTRYLTSALADHLRHHLPDSKIQTVNGRITGYLRKQWGLEKDRDKHTHHAVDAIVVACTTPAIVQQVTLYHQDIRRYKKLGEKRPTPWPETFRQDVLDVEEEIFITRQPKKVSGGIQTKDTLRKHRSKPDRQRVALTKVKLADLERLVEKDASNRNLYEHLKQCLEESGDQPTKAFKAPFYMPSGPEAKQRPILSKVTLLREKPEPPKQLTELSGGRRYDSMAQGRLDIYRYKPGGKRKDEYRVVLQRMIDLMRGEENVHVFQKGVPYDQGPEIEQNYTFLFSLYFDDLVEFQRSADSEVIRGYYRTFNIANGQLKISTYLEGRQDFDFFGANRLAHFAKVQVNLLGKVIK

SEQ ID NO: 611 - protein, 1032 aa, Unknown
  Description of Unknown: uncultured Termite group 1 bacterium phylotype Rs-D17 polypeptide
MLYHIANHRGTDSVRSFLEYDDDKIKENTLTAKIAKETKKVIDAKKYRTFGEYLYKGKIEKFQQNIRKKVSNRKTPANKNKEFAVTRDVIIKETEKILASQKQYYTYILTDEYIKKIKDAISYQTEKLIPESGYCPYFKDEKRLPRSHKLNEYRRMYEALNNAKYFDPVLDENTGEILSYQEKEFSREEKKILFDEVLLKGMELTESGAKKLLYHLPDGCEVQLQGRDKTTQKIKGYALVDLEASPFWLRLSQQQQDEFLYDWNSLPLEKLKPKLTNYYSLTESEVDETFQEIKLPSNYASVGKKAMEILLTYIKDGCSYTEALEKAVSEGKLKVDKQTMIYDSLPYYGKILKESTQKLIGKAFSKQFADRNYKEPDTNKNEREFGKIANPVVHQTLNELRKLINEIITVFGKKPLEIGLETTRELKKSKKNREYLSKQQNKNEYARNRIYKEYIEPHLSQIKSRQENPSKYISKFELLEEQNFICPFCSEKITPDDIINSKVDVEHIFPIEESEDITKNNLVIAHNECNADKGKKSPFDAFGDKTSGKYRWNCILHNAQKNLPHKVWRFYQGSLEKFLENKPMSRRFGTDNSYISKIAARYLACLFNDPYHSEIFCIKSSLIAQLRIAWDLNSIMVPLVKNILSEKELEEFKISKNKKIRIDNRHHALDAIVIAYANRGYHNFLNRIHAKEYKINYREKSWLSKILLPPLNRDLEDFKISVKDSIEKANVSIKHDHNTNGSLVKATAYKVYYSGAGEYIITTSKNVEEISFKEKEDPKDTLYRALCKFECRDIDIKDEKLIKKLKYNSTLYKKVQNNLSKAKQELEQDNKKTEEEGKKSQKITEVRIYKKACSLVKGQYIQCGSRLKDKFFAVKEPTEIKTGLGYDTGDNLFLDLYYDKTGKLCGEIIRKVNFNRNKPNYQKEGYTLFERIYQSDILEVDTSEDRISLKNKTGSAPSDRTFIKVNTFTEVNAYFDGKRDKIQIFFGNLLKSSFKNDSFFISSMQKYNVRKVILTSLGIIKYRSQILKNKEV

SEQ ID NO: 612 - protein, 1398 aa, Veillonella atypica
  Veillonella atypica ACS-134-V-Col7a
METQTSNQLITSHLKDYPKQDYFVGLDIGTNSVGWAVTNTSYELLKFHSHKMWGSRLFEEGESAVTRRGFRSMRRRLERRKLRLKLLEELFADAMAQVDSTFFIRLHESKYHYEDKTTGHSSKHILFIDEDYTDQDYFTEYPTIYHLRKDLMENGTDDIRKLFLAVHHILKYRGNFLYEGATFNSNAFTFEDVLKQALVNITFNCFDTNSAISSISNILMESGKTKSDKAKAIERLVDTYTVFDEVNTPDKPQKEQVKEDKKTLKAFANLVLGLSANLIDLFGSVEDIDDDLKKLQIVGDTYDEKRDELAKVWGDEIHIIDDCKSVYDAIILMSIKEPGLTISQSKVKAFDKHKEDLVILKSLLKLDRNVYNEMFKSDKKGLHNYVHYIKQGRTEETSCSREDFYKYTKKIVEGLADSKDKEYILNEIELQTLLPLQRIKDNGVIPYQLHLEELKVILDKCGPKFPFLHTVSDGFSVTEKLIKMLEFRIPYYVGPLNTHHNIDNGGFSWAVRKQAGRVTPWNFEEKIDREKSAAAFIKNLTNKCTYLFGEDVLPKSSLLYSEFMLLNELNNVRIDGKALAQGVKQHLIDSIFKQDHKKMTKNRIELFLKDNNYITKKHKPEITGLDGEIKNDLTSYRDMVRILGNNFDVSMAEDIITDITIFGESKKMLRQTLRNKFGSQLNDETIKKLSKLRYRDWGRLSKKLLKGIDGCDKAGNGAPKTIIELMRNDSYNLMEILGDKFSFMECIEEENAKLAQGQVVNPHDIIDELALSPAVKRAVWQALRIVDEVAHIKKALPSRIFVEVARTNKSEKKKKDSRQKRLSDLYSAIKKDDVLQSGLQDKEFGALKSGLANYDDAALRSKKLYLYYTQMGRCAYTGNIIDLNQLNTDNYDIDHIYPRSLTKDDSFDNLVLCERTANAKKSDIYPIDNRIQTKQKPFWAFLKHQGLISERKYERLTRIAPLTADDLSGFIARQLVETNQSVKATTTLLRRLYPDIDVVFVKAENVSDFRHNNNFIKVRSLNHHHHAKDAYLNIVVGNVYHEKFTRNFRLFFKKNGANRTYNLAKMFNYDVICTNAQDGKAWDVKTSMNTVKKMMASNDVRVTRRLLEQSGALADATIYKASVAAKAKDGAYIGMKTKYSVFADVTKYGGMTKIKNAYSIIVQYTGKKGEEIKEIVPLPIYLINRNATDIELIDYVKSVIPKAKDISIKYRKLCINQLVKVNGFYYYLGGKTNDKIYIDNAIELVVPHDIATYIKLLDKYDLLRKENKTLKASSITTSIYNINTSTVVSLSNKVGIDVFDYFMSKLRTPLYMKMKGNKVDELSSTGRSKFIKMTLEEQSIYLLEVLNLLTNSKTTFDVKPLGITGSRSTIGVKIHNLDEFKIINESITGLYSNEVTIV

SEQ ID NO: 613 - protein, 1398 aa, Veillonella parvula
  Veillonella parvula ATCC 17745
METQASNQLISSHLKGYPIKDYFVGLDIGTSSVGWAVTNKAYELLKFRSHKMWGSRLFDEGESAVARRGFRSMRRRLERRKLRLKLLEELFADAMAQVDPTFFMRLRESKYHYEDKTTGHSSKHILFIDKNYNDQDYFKEYPTVYHLRSELMKSGTDDIRKLFLAVHHILKYRGNFLYEGATFDSNASTLDDVIKQALENITFNCFDCNSAISSIGQILMEAGKTKSDKAKAIEHLVDTYIATDTVDTSSKTQKDQVKEDKKRLKAFANLVLGLNASLIDLFGSVEELEEDLKKLQITGDTYDDKRDELAKAWSDEIYIIDDCKSVYDAIILLSIKEPGLTISESKVKAFNKHKDDLAILKSLLKSDRSIYNTMFKVDEKGLHNYVHYIKQGRTEETSCNREDFYKYTKKIVEGLSDSKDKEYILSQIELQILLPLQRIKDNGVIPYQLHLEELKAILAKCGPKFPFLNEVADGFSVAEKLIKMLEFRIPYYVGPLNTHHNVDNGGFAWAVRKASGRVTPWNFDDKIDREKSAAAFIKNLTNKCTYLLGEDVLPKSSLLYSEFMLLNELNNVRIDGKPLEKVVKEHLIEAVFKQDHKKMTKNRIEQFLKDNGYISETHKHEITGLDGEIKNDLASYRDMVRILGDGFDRSMAEEIITDITIFGESKKMLRETLRKKFASCLDDEAIKKLTKLRYRDWGRLSQKLLNGIEGCDKAGDGTPETIIILMRNFSYNLMELLGDKFSFMERIQEINAKLTEGQIVNPHDIIDDLALSPAVKRAVWQALRIVDEVAHIKKALPARIFVEVTRSNKNEKKKKDSRQKRLSDLYAAIKKDDVLLNGLNNEIFGELKSSLAKYDDAALRSKKLYLYYTQMGRCAYTGEIIELSLLNTDNYDIDHIYPRSLTKDDSFDNLVLCKRTANAQKSDAYPISEEIQKTQKPFWTFLKQQGLISERKYERLTRITPLTADDLSGFIARQLVETNQSVKAATTLLRRLYPGVDVVFVKAENVTDFRHDNNFIKVRSLNHHHHAKDAYLNIVVGNVYHERFTRNFRAFFKKNGANRTYNLAKMFNYDVNCTNAKDGKAWDVKTSMDTVKKMMDSNDVRVTKRLLEQTGALADATIYKATVAGKAKDGAYIGMKTKSSVFADVSKYGGMTKIKNAYSIIVQYTGKKGEVIKEIVPLPIYLTNRNTTDQDLINYVASIIPQAKDISIIYGKLCINQLVKVNGFYYYLGGKTNSKFCIDNAIQVIVSNEWIPYLKVLEKFNNMRKDNKDLKANVVSTRALDNKHTIEVRIVEEKNIEFFDYLVSKLKMPIYQKMKGNKAAELSEKGYGLFKKMSLEEQSIHLIELLNLLTNQKTTFEVKPLGITASRSTVGSKISNQDEFKVINESITGLYSNEVTIV

SEQ ID NO: 614 - protein, 1395 aa, Veillonella sp.
  Veillonella sp. 6_1_27
METQASNQLISSHLKGYPIKDYFVGLDIGTSSVGWAVTNKAYELLKFRSHKMWGSRLFDEGESAVARRGFRSMRRRLERRKLRLKLLEELFADAMAQVDPTFFMRLRESKYHYEDKTTGHSSKHILFIDKNYTDQDYYKEYPTIYHLRVALMKSGTDDIRKLFLAVHHILKYRGNFLYEGATFDSNASTLDDVLKQALENITFNCFDSSAAIGSIGQILMELGKTKSDKAKAIERLVDTYIITDEVDTSGKTQKEQVKEDKKRLKSFANLVLGLSASLTDLFGSVEDLDEDLKKLQIIGDTYDERRDDLAKVWGDEIHIIDDCKSVYDAIILMSIKEPGLTISESKVKAFKKHKDDLAILKSLLKSDRSIYNTMFKVDEKGLHNYVHYIKQGRTEETSCNREDFYKYTKKVVEGLPDSKDKEYILSEIELQTLLPLQRIKDNGVIPYQLHLEELKVILAKCGPKFPFLNEVADGFSVAEKLIKMLEFRIPYYVGPLNTHHNVDNGGFAWAVRKASGRVTPWNFDDKIDREKSAAAFIKNLTNKCTYLLGEDVLPKSSLLYSEFMLLNELNNVRIDGKPLEKAVKEHLIEAVFKQDHKKMTKNRIEQFLKDNNYIPEKHKPEITGLDGEIKNDLASYRDMVRILGNNFDLSMAEEIITDITIFGESKKMLRETLRNKFSSRLDDEAIKKLSKLRYRDWGRLSRKLLNVIEGCDKAGDGTPETIIILMRNFSYNLMELLGDKFSFMERIQEINAKLIEGQIVNPHDIIDDLALSPAVKRAVWQALRIVDEIVHIKKTLPARIFVEVTRSNKAEKKKKDSRQKRLSDLYAAIKKDDALLSGLTNEEFGGLKSGLAKYDDAALRSKKLYLYYTQMGRCAYTGEVIDLSQLNTDNYDIDHIYPRSLTKDDSFDNLVLCKRTANAQKSDTYPISKEIQKAQKAFWIFLKQQGLISERKYERLTRITPLTADDLSGFIARQLVETNQSVKAATTLLRRLYPGVDVVFVKAENVTDFRHDNDFIKVRSLNHHHHAKDAYLNIVVGNVYHERFTRNFRAFFKKNGANRTYNLAKMFNYDVKCTNAKDGKAWAVKTSMDTVKKMMDSNDVRVTKRVYEQKGQLSDINLTKASKVKADIYLPIKANDPIMSQNMKYGGYSDIKNAYYTIIEYSDKKNNSIKAFIPIPIFIATKTLTKQALLEYIKTVLPKANNLRIIYKKVYNDQLLKIDGFNYYLGGRSNDRFCIDNAIQLIVPLEIQFYIKLVEKFTAIISENKNIALKASSVKSRNPINNQVENITLEYTQKLFDYLVSKFNELIYLKMRGNKLTDVNNIGRKQFIKLSLEERCKALAELLNIFTNMNKKLSLSTINVSASRKVVNFKISSLDEFKIVNESITGLYSHEITIV

SEQ ID NO: 615 - protein, 1120 aa, Veillonella sp.
  Veillonella sp. oral taxon 780 str. F0422
MGFKANLVNLFTDEDIEVILPEEKEFKSINLHEGIYEDVRDAYEDAWGDRFAIVDQCKVLHDIIVISSIIKPGQSLSEAKIESYNQHKEDLVLLKSVLKEDRKLYDDMFVVDTDKGTNYVKYTKQGVNGNTSATQEEFYKYVRKVVSVLPETEHTRRIVQKLEEGTFLPLQRISKNGVVPYQLHKEELVRILDKATVNFPFLNKVENGLTVADKIISILEFKIPYYVGPLNPTHSIENGGFAWVVRKEAGQVLPWNFEQKVDVQASAVKFIENLTNKCTYLIDQDVLPKYSLLYAEFSLLNELNNIRVNDKPLPADVKQAFIRDHFISLQDSKTATKKVVAKYLVDNNYVSQPPIITGMDQQIATKLTSHRDMTRILGEHFDHAMAEDIIRYITIFGESKDMLRQVLKNYYGDRLTTEQIKKLGKLTYTGWGRLSKKFLSDIWGMKKNDDDAEAGTIIEHMREGQENLMQLLSSSYSFIDVVQEYVTNVLGEKEKTAFEMLEDLSLSPMVKRSVWQTLRILDEIVSIRKELPKKIFVEVARTNKADKKRTQSRKALLEELYKQIKDEDVHVLQQELESKEDSALNSKKLYLYFTQMGRCMYSGRRIDIHELFTDKYDIDHIYPRSLTKDDSWHNIVLVEKQLNAEKTDRFPILSAIQSKQKGFWKLLWDRGFISEKKYDRLVRTTDLTDEELNQFINRQMVSTNQSVKAVTTLLHQLYPETEVVFSKAENVSDFRHDYDFVKVRSINHHHHAKDAYLNIVVGNVYHEKFTKNFLSFAKQKGTRRTYNLTKIFEYEIKLTEESKKVIWDPNIHMDIVKKMMKSNDVRVTQRAVPQKGGLSDETIYKKGIAKRGVYLPLKSSDERVRDVEKYGGRTSITISEYIILNIRDTSDQDRIEIFSLPLYIAGKKDIHKAIEEAYLSTCKKPASVVDIQILYRGLYIGSKVNINGFTYYMGGKTGSNVSIDSAVDVVMDITSSVYIKLLEKVAIKKIENPKTFRIENIKTSYNHKEVTVSKEQNIALYQELLKKLDTPLFSKMKGNKLEEFRTVGFDTFIALSLEEQASVLLEVLNVLTNFKTKRDITKIGMTSSRSTLGINISNTEQFSVITTSITGLYEQEIKIK

SEQ ID NO: 616 - protein, 1068 aa, Verminephrobacter eiseniae
MNKAVAYRLALDLGSTSLGWAIFRLNEAREPTAIIRAGVRIFSDGRNANSEPLAVHRRVARAMRRRRDRLLKRKKRMHDQLVQHGFFPAEVAERKELERLNPYQLRAKGLHEALTPGEFARALFHINQRRGFKSNRKTDRKDNDSGALKQAISELRKRIQDSDCATAGEWFWKERMQQKPEGVRGQWVRARYRKTPSTTDEGKKRIGYDLYVDRAMVEQEFDALWAAQAALQPGLFTEAARAELKDTLLYQRDLRPVKPGRCTLLPAEERAPLALPSTQRFRILQEVNNLRLLDEALREVPLNLAQRDAVVSALEGKKELSFAAIRKLLTLSGKFNLEDEKRAELKGNATSVILARKDLFGDAWAGFDAAVQDEIVWRLVSQESEGALIAWLQQHTGVDGVCAEAIVNTRLPDGYGRLSRKALERIVPALQREVCTYDKAVQAAGFAHHSDLGFDFDYAEDEVQQVGEHTIASTGEVQAQYAFKQLPYYGKALQRHVAFGSGDAKDHEEKCYGKIANPTVHIGLNQVRTVVNALIRRYGHPTEVVVELARDLKQSREQKQQTQREQADNQKRNEDIRKRIAPILETSPERVRDRDIKKWILWEELNKKDIADRHCPYSGERISATMLLSEAVEIEHILPFSRTLDDSLNNRTVAMRRANRIKGDRTPWEARADFEAQGWRYEAILQRAEGMPPRKRYRFAEDGYQRWLGKDRNFLARALNDTSYLSRLAANYLRLVCPQGVRVIPGQMTDKLRGKFGLNSVLGLDGKKNRNDHRHHAVDACVIGVTDQGLMQRFANASKQARENGLTRLVQDMLLPWWPSYYDHVERAVRHIRVSHRPDHGFEGAMMKGTAHGIREDGIREDGRIKQRPKAKGSADHKTITLIPIDEPRQLARHGVDAEGKPLPYKGYASGSNYCIEITKNGKGKWEGQVISTFDAYRIKAAADAAARAGQVISTVEADSIVRKSGWERLRGAQSQNGQPLVMRLVIGDSVRMEVDGRDEVMRVVKMSGKEMVFAPVREANVDKRNNMPDEQDPFTYTYKRADQLRKAKARQVTISPIGELRDPGFKG

SEQ ID NO: 617 - protein, 1440 aa, Weeksella virosa
MKTILGLDLGTNSIGWALVEQDFENKQGLILGMGSRIIPMDAGIIGKFAEGSSISQTAERTGYRSIRRLRERHLLRRERLHRVLNILKFLPEHYAAEIDFEKRFGQFLAETEPKLAWKKNAEGKFEFLFQRSFDEMVADFKANGQDIKIPYDWTIYYLRKKALTQKISPQELAWIILNFNQKRGYYQLRGEEEEENPNKKVEFYSLKIVDVVADEQPNKKGDTWYSLHLENGWVYRRSSKIPLYDWKDKVRDFIVTTDINEDGSEKLDKDGEVKRSFRAPKEDDWTLIKKKTEQEIEQFNQTVGSYIYEALLDNPTQKIRGKLVRTIERKFYKSELKKILEKQIELQPELFTEDLYNACARELYRRNVAHQQQLSSRDFVYLFLNDIIFYQRPLRSQKSLISNCSLEFRTIKDKDGNGQIIYLKAIPKSNPYYQEFRVWQWLYNLKIFTKEDDKDVTNQFINKVEDLEALFEFLMNQKEVNHTDILTYLIEPIVKSKYPNAKGKAFKDELKKELKKYRWNYVYDADKDESKSYPMNETRYELRKRLDKVENVPADFMTRKIEQHLWHIIYSVTDKIEFEKALKSFANKYDLHQESFVENFKRFKPFDSDYGTYSEKAIKKLLPLMRVGKYWSWDIIDDKTKTRIGKIITGEYDETIKNRVREKAIDLTEENHFQGLQLWLAQYIVYDRHSEADIAGKWNSVADLEQYLSEFKQHSLRNPIVEQVITETLRVVRDIWKQYGKGAKDYFDEIHIELGREMKNTAEERKRLSSIISENETTNLRIRAILEELMYDENMENVRPYSPMQQEALKIYEDGVLSSSVEIPEDIEKISKKSEPTKSEIQRYKLWLEQKYRSPYTGRPIPLSKLFTPAYQIEHIIPQARFFDDGFSNKVICESEVNALKDKMLGLEFIQNYYGQKVTTSFGEVTILTEDAYKAFVKEHYDKNRSKRNKLLLEEIPEKMIDRQMNDTRYISKYISKVLSNLVRGEKDDEGVNSKNIIPGNGKITGILKQDWGLNDVWNDLILPRFERMNQLTNSTDFTAWNEKHQKFLPSVPLELSKGFQKKRIDHRHHALDALIIACATRDHVNLLNNKHAKSRNERYDLQHKLRHTTPWQDKEGKVRTKFTEFKKPWETFTQDTKKELEKIVVNFKQNLRVINKATNYYEKIVDGKKVMFKQEGVNWAIRKPMHKETVSGKIDLPRVKVSKGKILTATRKSLDTSFNAKTILSITDTGIQKILLNYLKAKGNPELAFSPEGIEEMNQNISLYNDGKPHQPILKVRVFEQGSKFPLGETGNKTTKYVEAAKGTNLFFGVYEDNQGKRSYDTIPLNIVIERQKQGLNSVPETNEKGHRLLFSLSPNDLVYVPIEGEVFDETNPDVNRIYKVVSFSGSQMFCVRQDVATSIVYKLEFSSLNKMERTIDGIMIKEICIKLKVDRLGNISKA

SEQ ID NO: 618 - protein, 1409 aa, Wolinella succinogenes
MLVSPISVDLGGKNTGFFSFTDSLDNSQSGTVIYDESFVLSQVGRRSKRHSKRNNLRNKLVKRLFLLILQEHHGLSIDVLPDEIRGLFNKRGYTYAGFELDEKKKDALESDTLKEFLSEKLQSIDRDSDVEDFLNQIASNAESFKDYKKGFEAVFASATHSPNKKLELKDELKSEYGENAKELLAGLRVTKEILDEFDKQENQGNLPRAKYFEELGEYIATNEKVKSFFDSNSLKLTDMTKLIGNISNYQLKELRRYFNDKEMEKGDIWIPNKLHKITERFVRSWHPKNDADRQRRAELMKDLKSKEIMELLTTTEPVMTIPPYDDMNNRGAVKCQTLRLNEEYLDKHLPNWRDIAKRLNHGKFNDDLADSTVKGYSEDSTLLHRLLDTSKEIDIYELRGKKPNELLVKTLGQSDANRLYGFAQNYYELIRQKVRAGIWVPVKNKDDSLNLEDNSNMLKRCNHNPPHKKNQIHNLVAGILGVKLDEAKFAEFEKELWSAKVGNKKLSAYCKNIEELRKTHGNTFKIDIEELRKKDPAELSKEEKAKLRLTDDVILNEWSQKIANFFDIDDKHRQRFNNLFSMAQLHTVIDTPRSGFSSTCKRCTAENRFRSETAFYNDETGEFHKKATATCQRLPADTQRPFSGKIERYIDKLGYELAKIKAKELEGMEAKEIKVPIILEQNAFEYEESLRKSKTGSNDRVINSKKDRDGKKLAKAKENAEDRLKDKDKRIKAFSSGICPYCGDTIGDDGEIDHILPRSHTLKIYGTVFNPEGNLIYVHQKCNQAKADSIYKLSDIKAGVSAQWIEEQVANIKGYKTFSVLSAEQQKAFRYALFLQNDNEAYKKVVDWLRTDQSARVNGTQKYLAKKIQEKLTKMLPNKHLSFEFILADATEVSELRRQYARQNPLLAKAEKQAPSSHAIDAVMAFVARYQKVFKDGTPPNADEVAKLAMLDSWNPASNEPLTKGLSTNQKIEKMIKSGDYGQKNMREVFGKSIFGENAIGERYKPIVVQEGGYYIGYPATVKKGYELKNCKVVTSKNDIAKLEKIIKNQDLISLKENQYIKIFSINKQTISELSNRYFNMNYKNLVERDKEIVGLLEFIVENCRYYTKKVDVKFAPKYIHETKYPFYDDWRRFDEAWRYLQENQNKTSSKDRFVIDKSSLNEYYQPDKNEYKLDVDTQPIWDDFCRWYFLDRYKTANDKKSIRIKARKTFSLLAESGVQGKVFRAKRKIPTGYAYQALPMDNNVIAGDYANILLEANSKTLSLVPKSGISIEKQLDKKLDVIKKTDVRGLAIDNNSFFNADFDTHGIRLIVENTSVKVGNFPISAIDKSAKRMIFRALFEKEKGKRKKKTTISFKESGPVQDYLKVFLKKIVKIQLRTDGSISNIVVRKNAADFTLSFRSEHIQKLLK

SEQ ID NO: 619 - protein, 1059 aa, Wolinella succinogenes
MIERILGVDLGISSLGWAIVEYDKDDEAANRIIDCGVRLFTAAETPKKKESPNKARREARGIRRVLNRRRVRMNMIKKLFLRAGLIQDVDLDGEGGMFYSKANRADVWELRHDGLYRLLKGDELARVLIHIAKHRGYKFIGDDEADEESGKVKKAGVVLRQNFEAAGCRTVGEWLWRERGANGKKRNKHGDYEISIHRDLLVEEVEAIFVAQQEMRSTIATDALKAAYREIAFFVRPMQRIEKMVGHCTYFPEERRAPKSAPTAEKFIAISKFFSTVIIDNEGWEQKIIERKTLEELLDFAVSREKVEFRHLRKFLDLSDNEIFKGLHYKGKPKTAKKREATLFDPNEPTELEFDKVEAEKKAWISLRGAAKLREALGNEFYGRFVALGKHADEATKILTYYKDEGQKRRELTKLPLEAEMVERLVKIGFSDFLKLSLKAIRDILPAMESGARYDEAVLMLGVPHKEKSAILPPLNKTDIDILNPTVIRAFAQFRKVANALVRKYGAFDRVHFELAREINTKGEIEDIKESQRKNEKERKEAADWIAETSFQVPLTRKNILKKRLYIQQDGRCAYTGDVIELERLFDEGYCEIDHILPRSRSADDSFANKVLCLARANQQKTDRTPYEWFGHDAARWNAFETRTSAPSNRVRTGKGKIDRLLKKNFDENSEMAFKDRNLNDTRYMARAIKTYCEQYWVFKNSHTKAPVQVRSGKLTSVLRYQWGLESKDRESHTHHAVDAIIIAFSTQGMVQKLSEYYRFKETHREKERPKLAVPLANFRDAVEEATRIENTETVKEGVEVKRLLISRPPRARVTGQAHEQTAKPYPRIKQVKNKKKWRLAPIDEEKFESFKADRVASANQKNFYETSTIPRVDVYHKKGKFHLVPIYLHEMVLNELPNLSLGTNPEAMDENFFKFSIFKDDLISIQTQGTPKKPAKIIMGYFKNMHGANMVLSSINNSPCEGFTCTPVSMDKKHKDKCKLCPEENRIAGRCLQGFLDYWSQEGLRPPRKEFECDQGVKFALDVKKYQIDPLGYYYEVKQEKRLGTIPQMRSAKKLVKK

SEQ ID NO: 620 - protein, 1388 aa, Zunongwangia profunda
MKRILGLDLGTNSIGWALVNEAENEKEISKIIKLGVRVNPLTIDEKTNFEKGRPLSTNADRTLKRGARRNLQRYKLRRENLIEILIDNHIITKETPLTEIGKGTTYQTLSLRAKAVRERIDLEDFAKVLLAINKKRGYKSSRKASNDEEGQAIDGMAIAKELYERGITPGQYVLELLENDRKYIPDFYRSDLKQEFNKIWNNQKTFYPEILTDELFKELDGKNKSQTWAICQKPFNIKGIKRITKGREKTIENYHWRVKGLSGKLNLEKLAIILQEINNDINQSSGYLGGISDKSKKLYLNKETVGEFLYKQIAKNPHTSLKNQVFYRHDYLDEFEQIWKTQSNFNANLTDELKQEIRDVIIFYQRKIKSQKSLISFCQFESWEQEYFDKETGKTKTRTVGRRVIPKSSPLFQEFKIWQNLNHLVFTNSETDEKIEIKEVEQEIRKELFEELNLRGDLNPNDLLKILRSQFKIGKLSNWKCNFEKIEGNRTNAALFNIYQKISDFEGYGIDWNKSNAKKIRKELKATFPEIGIDASILEFDAYKKQLTNQSSYELWHLLYSAEEDFKISEQDKLIYGNSSVSLKKKLHLKFGFNPEYAKMLANLSLMSDYGNLSAKAIKKILPYLEDGHLYSEACRLAGYNHSKSLTAEELEKFEPKAKLDLLKKNSLRNPVVEKILNQMVNVVNQVIDTYGKPDGVRIELARELKKSAKERAEMTKGIADGTRRNEEIKKIITQKFGIPNPTKSDLVRYRLWQELESRGYKDIFTDKYISPDKIFSSEIDIEHIIPKALLFDDSFSNKTLSFRNVNLKKANRTALDFITQDYQSNVEAYKERVETWNKDNHISKGKRNKLLMSLKDIPDGFIERDLRNSQYIARKAKRMLYEVFPNEVLATSGSITDKLRSDWDLINVMKELNLPKYKALGLTEYEERLDKGTEELFKHEVIKDWTKRNDHRHHAMDALAVAFTTHNHIQYINNLNARKDITQDNHPIIKNIENLITEVNSKGKRVFKAPMSSFRESAKEQIEAILVSFKNKNKVVTKNINQTKKEGGFNYQNAKTPRGQLHKETIYGKSKQPLEKPVKINNRFCKKQVGLIINFKEQEAVLHHLKKYDNNEKIAFSNKTLKSDPIQVNGSPLREVKIFEEIFTIRKDINPDNFKTQKHLDKIIDKGIKEVMKKRLEEYNGDFKTAFSDLDKNPIWLNQSKGITIKRATISGVTNAEPLHQAKDHLGNIILDDNGKEIPIDYVSTGNNHHVAIYQDESGNLQEEVVSFYEAVIRKNQDQPIIKKRHPKGWKFLFTMKQNEMFVFSSENFNPSEIDLLDEKNAAIISPNLFRVQKIATKNYMFRHHLETEVTNNLDFTYRHFQATEWLRNLCKVRIDHIGRIVQIGEY

SEQ ID NO: 621-631 - skipped (11 entries)

SEQ ID NO: 632 - RNA, 22 nt, Homo sapiens
ugcucagguugcacagcuggga

SEQ ID NO: 633 - RNA, 22 nt, Homo sapiens
ucccagcugugcaaccugagca

SEQ ID NO: 634 - RNA, 22 nt, Homo sapiens
ucagguguggaaacugaggcag

SEQ ID NO: 635 - RNA, 22 nt, Homo sapiens
cugccucaguuuccacaccuga

SEQ ID NO: 636 - RNA, 22 nt, Homo sapiens
caaaaccgcgauuacucuugca

SEQ ID NO: 637 - RNA, 22 nt, Homo sapiens
ugcaagaguaaucgcgguuuug

SEQ ID NO: 638 - RNA, 21 nt, Homo sapiens
aaaaguaauugugguuuuugc

SEQ ID NO: 639 - RNA, 21 nt, Homo sapiens
gcaaaaaccacaauuacuuuu

SEQ ID NO: 640 - RNA, 21 nt, Homo sapiens
aaaaacugcaaucacuuuugc

SEQ ID NO: 641 - RNA, 21 nt, Homo sapiens
gcaaaagugauugcaguuuuu

SEQ ID NO: 642 - RNA, 22 nt, Homo sapiens
caaaagugauugugguuuuugc

SEQ ID NO: 643 - RNA, 22 nt, Homo sapiens
gcaaaaaccacaaucacuuuug

SEQ ID NO: 644 - RNA, 22 nt, Homo sapiens
agcaguguuuguuuugcccaca

SEQ ID NO: 645 - RNA, 22 nt, Homo sapiens
ugugggcaaaacaaacacugcu

SEQ ID NO: 646 - RNA, 22 nt, Homo sapiens
ucgggcgcaagagcacugcagu

SEQ ID NO: 647 - RNA, 22 nt, Homo sapiens
acugcagugcucuugcgcccga

SEQ ID NO: 648 - RNA, 21 nt, Homo sapiens
acacuuguugggaugaccugc

SEQ ID NO: 649 - RNA, 21 nt, Homo sapiens
gcaggucaucccaacaagugu

SEQ ID NO: 650 - RNA, 24 nt, Homo sapiens
aggagcuauccacuccaggugucc

SEQ ID NO: 651 - RNA, 24 nt, Homo sapiens
ggacaccuggaguggauagcuccu

SEQ ID NO: 652 - RNA, 23 nt, Homo sapiens
ccagagcagccugcgguaacagu

SEQ ID NO: 653 - RNA, 23 nt, Homo sapiens
acuguuaccgcaggcugcucugg

SEQ ID NO: 654 - RNA, 22 nt, Homo sapiens
aguugccagggcugccuuuggu

SEQ ID NO: 655 - RNA, 22 nt, Homo sapiens
accaaaggcagcccuggcaacu

SEQ ID NO: 656 - RNA, 21 nt, Homo sapiens
uagaccaucuuucuagaguau

SEQ ID NO: 657 - RNA, 21 nt, Homo sapiens
auacucuagaaagauggucua

SEQ ID NO: 658 - RNA, 22 nt, Homo sapiens
agcucuagaaagauuguugacc

SEQ ID NO: 659 - RNA, 22 nt, Homo sapiens
ggucaacaaucuuucuagagcu

SEQ ID NO: 660 - RNA, 21 nt, Homo sapiens
gggacuaggaugcagaccucc

SEQ ID NO: 661 - RNA, 21 nt, Homo sapiens
ggaggucugcauccuaguccc

SEQ ID NO: 662 - RNA, 23 nt, Homo sapiens
aggucugcauucaaauccccaga

SEQ ID NO: 663 - RNA, 23 nt, Homo sapiens
ucuggggauuugaaugcagaccu

SEQ ID NO: 664 - RNA, 20 nt, Homo sapiens
cauuacagcacagccauucu

SEQ ID NO: 665 - RNA, 20 nt, Homo sapiens
agaauggcugugcuguaaug

SEQ ID NO: 666 - RNA, 21 nt, Homo sapiens
ucuggcugugcuguaaugcag

SEQ ID NO: 667 - RNA, 21 nt, Homo sapiens
cugcauuacagcacagccaga

SEQ ID NO: 668 - RNA, 21 nt, Homo sapiens
ugacuucuaccucuuccaaag

SEQ ID NO: 669 - RNA, 21 nt, Homo sapiens
cuuuggaagagguagaaguca

SEQ ID NO: 670 - RNA, 22 nt, Homo sapiens
uuggaauaggggauaucucagc

SEQ ID NO: 671 - RNA, 22 nt, Homo sapiens
gcugagauauccccuauuccaa

SEQ ID NO: 672 - RNA, 22 nt, Homo sapiens
ucguaucagagauuccagacac

SEQ ID NO: 673 - RNA, 22 nt, Homo sapiens
gugucuggaaucucugauacga

SEQ ID NO: 674 - RNA, 23 nt, Homo sapiens
acugggaugucacugaauauggu

SEQ ID NO: 675 - RNA, 23 nt, Homo sapiens
accauauucagugacaucccagu

SEQ ID NO: 676 - RNA, 22 nt, Homo sapiens
caaaguccuuccuauuuuuccc

SEQ ID NO: 677 - RNA, 22 nt, Homo sapiens
gggaaaaauaggaaggacuuug

SEQ ID NO: 678 - RNA, 21 nt, Homo sapiens
gaagaauaggagggacuuugu

SEQ ID NO: 679 - RNA, 21 nt, Homo sapiens
acaaagucccuccuauucuuc

SEQ ID NO: 680 - RNA, 22 nt, Homo sapiens
ugggccaugcauuucuagaacu

SEQ ID NO: 681 - RNA, 22 nt, Homo sapiens
aguucuagaaaugcauggccca

SEQ ID NO: 682 - RNA, 21 nt, Homo sapiens
ucuagaaaugcaugacccacc

SEQ ID NO: 683 - RNA, 21 nt, Homo sapiens
ggugggucaugcauuucuaga

SEQ ID NO: 684 - RNA, 22 nt, Homo sapiens
uuccacugccacuaccuaauuu

SEQ ID NO: 685 - RNA, 22 nt, Homo sapiens
aaauuagguaguggcaguggaa

SEQ ID NO: 686 - RNA, 21 nt, Homo sapiens
auuagguaguggcaguggaac

SEQ ID NO: 687 - RNA, 21 nt, Homo sapiens
guuccacugccacuaccuaau

SEQ ID NO: 688 - RNA, 21 nt, Homo sapiens
caccgacucugucuccugcag

SEQ ID NO: 689 - RNA, 21 nt, Homo sapiens
cugcaggagacagagucggug

SEQ ID NO: 690 - RNA, 22 nt, Homo sapiens
cagcaggggagagagaggaguc

SEQ ID NO: 691 - RNA, 22 nt, Homo sapiens
gacuccucucucuccccugcug

SEQ ID NO: 692 - RNA, 22 nt, Homo sapiens
uuccagcccuucuaaugguagg

SEQ ID NO: 693 - RNA, 22 nt, Homo sapiens
ccuaccauuagaagggcuggaa

SEQ ID NO: 694 - RNA, 22 nt, Homo sapiens
uaccauuagaagagcuggaaga

SEQ ID NO: 695 - RNA, 22 nt, Homo sapiens
ucuuccagcucuucuaauggua

SEQ ID NO: 696 - RNA, 21 nt, Homo sapiens
ucaagugucaucugucccuag

SEQ ID NO: 697 - RNA, 21 nt, Homo sapiens
cuagggacagaugacacuuga

SEQ ID NO: 698 - RNA, 23 nt, Homo sapiens
uuugggauugacgccacaugucu

SEQ ID NO: 699 - RNA, 23 nt, Homo sapiens
agacauguggcgucaaucccaaa

SEQ ID NO: 700 - RNA, 21 nt, Homo sapiens
cugccuguucuuccacuccag

SEQ ID NO: 701 - RNA, 21 nt, Homo sapiens
cuggaguggaagaacaggcag

SEQ ID NO: 702 - RNA, 23 nt, Homo sapiens
uauggaguggacuuucagcuggc

SEQ ID NO: 703 - RNA, 23 nt, Homo sapiens
gccagcugaaaguccacuccaua

SEQ ID NO: 704 - RNA, 22 nt, Homo sapiens
ccucaccaucccuucugccugc

SEQ ID NO: 705 - RNA, 22 nt, Homo sapiens
gcaggcagaagggauggugagg

SEQ ID NO: 706 - RNA, 23 nt, Homo sapiens
caggcagaaguggggcugacagg

SEQ ID NO: 707 - RNA, 23 nt, Homo sapiens
ccugucagccccacuucugccug

SEQ ID NO: 708 - RNA, 20 nt, Homo sapiens
ucucuucaucuaccccccag

SEQ ID NO: 709 - RNA, 20 nt, Homo sapiens
cugggggguagaugaagaga

SEQ ID NO: 710 - RNA, 21 nt, Homo sapiens
uuggaggguguggaagacauc

SEQ ID NO: 711 - RNA, 21 nt, Homo sapiens
gaugucuuccacacccuccaa

SEQ ID NO: 712 - RNA, 22 nt, Homo sapiens
cugccagccccguuccagggca

SEQ ID NO: 713 - RNA, 22 nt, Homo sapiens
ugcccuggaacggggcuggcag

SEQ ID NO: 714 - RNA, 23 nt, Homo sapiens
acaaaguacagcauuagccuuag

SEQ ID NO: 715 - RNA, 23 nt, Homo sapiens
cuaaggcuaaugcuguacuuugu

SEQ ID NO: 716 - RNA, 23 nt, Homo sapiens
aaaggucauuguaagguuaaugc

SEQ ID NO: 717 - RNA, 23 nt, Homo sapiens
gcauuaaccuuacaaugaccuuu

SEQ ID NO: 718 - RNA, 22 nt, Homo sapiens
ugaggcuaaugcacuacuucac

SEQ ID NO: 719 - RNA, 22 nt, Homo sapiens
gugaaguagugcauuagccuca

SEQ ID NO: 720 - RNA, 24 nt, Homo sapiens
uauagagagcaggaagauuaaugu

SEQ ID NO: 721 - RNA, 24 nt, Homo sapiens
acauuaaucuuccugcucucuaua

SEQ ID NO: 722 - RNA, 23 nt, Homo sapiens
gugcuucaucguaauuaaccuua

SEQ ID NO: 723 - RNA, 23 nt, Homo sapiens
uaagguuaauuacgaugaagcac

SEQ ID NO: 724 - RNA, 24 nt, Homo sapiens
guggaaagcaugcauccagggugu

SEQ ID NO: 725 - RNA, 24 nt, Homo sapiens
acacccuggaugcaugcuuuccac

SEQ ID NO: 726 - RNA, 22 nt, Homo sapiens
agacacauuuggagagggaacc

SEQ ID NO: 727 - RNA, 22 nt, Homo sapiens
gguucccucuccaaaugugucu

SEQ ID NO: 728 - RNA, 22 nt, Homo sapiens
uucccuuugucauccuaugccu

SEQ ID NO: 729 - RNA, 22 nt, Homo sapiens
aggcauaggaugacaaagggaa

SEQ ID NO: 730 - RNA, 21 nt, Homo sapiens
gcugggaaggcaaagggacgu

SEQ ID NO: 731 - RNA, 21 nt, Homo sapiens
acgucccuuugccuucccagc

SEQ ID NO: 732 - RNA, 21 nt, Homo sapiens
uaccacaggguagaaccacgg

SEQ ID NO: 733 - RNA, 21 nt, Homo sapiens
ccgugguucuacccuguggua

SEQ ID NO: 734 - RNA, 22 nt, Homo sapiens
ggcuggagcgagugcaguggug

SEQ ID NO: 735 - RNA, 22 nt, Homo sapiens
caccacugcacucgcuccagcc

SEQ ID NO: 736 - RNA, 18 nt, Homo sapiens
ccaggcucugcaguggga

SEQ ID NO: 737 - RNA, 18 nt, Homo sapiens
ucccacugcagagccugg

SEQ ID NO: 738 - RNA, 22 nt, Homo sapiens
cugggaggugugauauuguggu

SEQ ID NO: 739 - RNA, 22 nt, Homo sapiens
accacaauaucacaccucccag

SEQ ID NO: 740 - RNA, 22 nt, Homo sapiens
gggaggugugaucucacacucg

SEQ ID NO: 741 - RNA, 22 nt, Homo sapiens
cgagugugagaucacaccuccc

SEQ ID NO: 742 - RNA, 22 nt, Homo sapiens
ugugauaucaugguuccuggga

SEQ ID NO: 743 - RNA, 22 nt, Homo sapiens
ucccaggaaccaugauaucaca

SEQ ID NO: 744 - RNA, 22 nt, Homo sapiens
ugugauaucgugcuuccuggga

SEQ ID NO: 745 - RNA, 22 nt, Homo sapiens
ucccaggaagcacgauaucaca

SEQ ID NO: 746 - RNA, 18 nt, Homo sapiens
ggugggcuucccggaggg

SEQ ID NO: 747 - RNA, 18 nt, Homo sapiens
cccuccgggaagcccacc

SEQ ID NO: 748 - RNA, 18 nt, Homo sapiens
cacugcaggacucagcag

SEQ ID NO: 749 - RNA, 18 nt, Homo sapiens
cugcugaguccugcagug

SEQ ID NO: 750 - RNA, 17 nt, Homo sapiens
ugagggaggagacugca

SEQ ID NO: 751 - RNA, 17 nt, Homo sapiens
ugcagucuccucccuca

SEQ ID NO: 752 - RNA, 18 nt, Homo sapiens
gaggcugaaggaagaugg

SEQ ID NO: 753 - RNA, 18 nt, Homo sapiens
ccaucuuccuucagccuc

SEQ ID NO: 754 - RNA, 22 nt, Homo sapiens
gucacugaugucuguagcugag

SEQ ID NO: 755 - RNA, 22 nt, Homo sapiens
cucagcuacagacaucagugac

SEQ ID NO: 756 - RNA, 22 nt, Homo sapiens
accugucuguggaaaggagcua

SEQ ID NO: 757 - RNA, 22 nt, Homo sapiens
uagcuccuuuccacagacaggu

SEQ ID NO: 758 - RNA, 22 nt, Homo sapiens
agaguuaacucaaaauggacua

SEQ ID NO: 759 - RNA, 22 nt, Homo sapiens
uaguccauuuugaguuaacucu

SEQ ID NO: 760 - RNA, 22 nt, Homo sapiens
uguugggauucagcaggaccau

SEQ ID NO: 761 - RNA, 22 nt, Homo sapiens
augguccugcugaaucccaaca

SEQ ID NO: 762 - RNA, 17 nt, Homo sapiens
gaagauggacguacuuu

SEQ ID NO: 763 - RNA, 17 nt, Homo sapiens
aaaguacguccaucuuc

SEQ ID NO: 764 - RNA, 21 nt, Homo sapiens
ucugaauagagucugaagagu

SEQ ID NO: 765 - RNA, 21 nt, Homo sapiens
acucuucagacucuauucaga

SEQ ID NO: 766 - RNA, 22 nt, Homo sapiens
caaggagacgggaacauggagc

SEQ ID NO: 767 - RNA, 22 nt, Homo sapiens
gcuccauguucccgucuccuug

SEQ ID NO: 768 - RNA, 20 nt, Homo sapiens
aaaagcugggcugagaggcg

SEQ ID NO: 769 - RNA, 20 nt, Homo sapiens
cgccucucagcccagcuuuu

SEQ ID NO: 770 - RNA, 18 nt, Homo sapiens
aggcuggagugagcggag

SEQ ID NO: 771 - RNA, 18 nt, Homo sapiens
cuccgcucacuccagccu

SEQ ID NO: 772 - RNA, 22 nt, Homo sapiens
gcgacucugaaaacuagaaggu

SEQ ID NO: 773 - RNA, 22 nt, Homo sapiens
accuucuaguuuucagagucgc

SEQ ID NO: 774 - RNA, 20 nt, Homo sapiens
aaagacucugcaagaugccu

SEQ ID NO: 775 - RNA, 20 nt, Homo sapiens
aggcaucuugcagagucuuu

SEQ ID NO: 776 - RNA, 21 nt, Homo sapiens
acaggagugggggugggacau

SEQ ID NO: 777 - RNA, 21 nt, Homo sapiens
augucccacccccacuccugu

SEQ ID NO: 778 - RNA, 21 nt, Homo sapiens
cgucccaccccccacuccugu

SEQ ID NO: 779 - RNA, 21 nt, Homo sapiens
acaggaguggggggugggacg

SEQ ID NO: 780 - RNA, 18 nt, Homo sapiens
aggagaaguaaaguagaa

SEQ ID NO: 781 - RNA, 18 nt, Homo sapiens
uucuacuuuacuucuccu

SEQ ID NO: 782 - RNA, 22 nt, Homo sapiens
auggccagagcucacacagagg

SEQ ID NO: 783 - RNA, 22 nt, Homo sapiens
ccucugugugagcucuggccau

SEQ ID NO: 784 - RNA, 21 nt, Homo sapiens
ugggcucaggguacaaagguu

SEQ ID NO: 785 - RNA, 21 nt, Homo sapiens
aaccuuuguacccugagccca

SEQ ID NO: 786 - RNA, 21 nt, Homo sapiens
cacaggcuuagaaaagacagu

SEQ ID NO: 787 - RNA, 21 nt, Homo sapiens
acugucuuuucuaagccugug

SEQ ID NO: 788 - RNA, 22 nt, Homo sapiens
gugacugauaccuuggaggcau

SEQ ID NO: 789 - RNA, 22 nt, Homo sapiens
augccuccaagguaucagucac

SEQ ID NO: 790 - RNA, 22 nt, Homo sapiens
ugucguggggcuugcuggcuug

SEQ ID NO: 791 - RNA, 22 nt, Homo sapiens
caagccagcaagccccacgaca

SEQ ID NO: 792 - RNA, 17 nt, Homo sapiens
acagggaggagauugua

SEQ ID NO: 793 - RNA, 17 nt, Homo sapiens
uacaaucuccucccugu

SEQ ID NO: 794 - RNA, 17 nt, Homo sapiens
gccggacaagagggagg

SEQ ID NO: 795 - RNA, 17 nt, Homo sapiens
ccucccucuuguccggc

SEQ ID NO: 796 - RNA, 17 nt, Homo sapiens
uuggaggcguggguuuu

SEQ ID NO: 797 - RNA, 17 nt, Homo sapiens
aaaacccacgccuccaa

SEQ ID NO: 798 - RNA, 18 nt, Homo sapiens
cucgaguuggaagaggcg

SEQ ID NO: 799 - RNA, 18 nt, Homo sapiens
cgccucuuccaacucgag

SEQ ID NO: 800 - RNA, 21 nt, Homo sapiens
cacggcaaaagaaacaaucca

SEQ ID NO: 801 - RNA, 21 nt, Homo sapiens
uggauuguuucuuuugccgug

SEQ ID NO: 802 - RNA, 22 nt, Homo sapiens
agauuguuucuuuugccgugca

SEQ ID NO: 803 - RNA, 22 nt, Homo sapiens
ugcacggcaaaagaaacaaucu

SEQ ID NO: 804 - RNA, 17 nt, Homo sapiens
ggugggggcuguuguuu

SEQ ID NO: 805 - RNA, 17 nt, Homo sapiens
aaacaacagcccccacc

SEQ ID NO: 806 - RNA, 20 nt, Homo sapiens
ggcuccuuggucuaggggua

SEQ ID NO: 807 - RNA, 20 nt, Homo sapiens
uaccccuagaccaaggagcc

SEQ ID NO: 808 - RNA, 22 nt, Homo sapiens
cgucccggggcugcgcgaggca

SEQ ID NO: 809 - RNA, 22 nt, Homo sapiens
ugccucgcgcagccccgggacg

SEQ ID NO: 810 - RNA, 22 nt, Homo sapiens
uggggauuuggagaagugguga

SEQ ID NO: 811 - RNA, 22 nt, Homo sapiens
ucaccacuucuccaaaucccca

SEQ ID NO: 812 - RNA, 17 nt, Homo sapiens
ugguagagcugaggaca

SEQ ID NO: 813 - RNA, 17 nt, Homo sapiens
uguccucagcucuacca

SEQ ID NO: 814 - RNA, 23 nt, Homo sapiens
uugaauucuuggccuuaagugau

SEQ ID NO: 815 - RNA, 23 nt, Homo sapiens
aucacuuaaggccaagaauucaa

SEQ ID NO: 816 - RNA, 20 nt, Homo sapiens
gagcuuggucuguagcgguu

SEQ ID NO: 817 - RNA, 20 nt, Homo sapiens
aaccgcuacagaccaagcuc

SEQ ID NO: 818 - RNA, 20 nt, Homo sapiens
ggauccgagucacggcacca

SEQ ID NO: 819 - RNA, 20 nt, Homo sapiens
uggugccgugacucggaucc

SEQ ID NO: 820 - RNA, 17 nt, Homo sapiens
aggguguguguguuuuu

SEQ ID NO: 821 - RNA, 17 nt, Homo sapiens
aaaaacacacacacccu

SEQ ID NO: 822 - RNA, 17 nt, Homo sapiens
ccugguggcuuccuuuu

SEQ ID NO: 823 - RNA, 17 nt, Homo sapiens
aaaaggaagccaccagg

SEQ ID NO: 824 - RNA, 22 nt, Homo sapiens
ucacaagguauugacuggcgua

SEQ ID NO: 825 - RNA, 22 nt, Homo sapiens
uacgccagucaauaccuuguga

SEQ ID NO: 826 - RNA, 19 nt, Homo sapiens
agagguagguguggaagaa

SEQ ID NO: 827 - RNA, 19 nt, Homo sapiens
uucuuccacaccuaccucu

SEQ ID NO: 828 - RNA, 22 nt, Homo sapiens
ccaggaggcggaggagguggag

SEQ ID NO: 829 - RNA, 22 nt, Homo sapiens
cuccaccuccuccgccuccugg

SEQ ID NO: 830 - RNA, 22 nt, Homo sapiens
auagugguugugaauuuaccuu

SEQ ID NO: 831 - RNA, 22 nt, Homo sapiens
aagguaaauucacaaccacuau

SEQ ID NO: 832 - RNA, 23 nt, Homo sapiens
gauugagacuaguagggcuaggc

SEQ ID NO: 833 - RNA, 23 nt, Homo sapiens
gccuagcccuacuagucucaauc

SEQ ID NO: 834 - RNA, 23 nt, Homo sapiens
ugacacggaggguggcuugggaa

SEQ ID NO: 835 - RNA, 23 nt, Homo sapiens
uucccaagccacccuccguguca

SEQ ID NO: 836 - RNA, 17 nt, Homo sapiens
gagacugggguggggcc

SEQ ID NO: 837 - RNA, 17 nt, Homo sapiens
ggccccaccccagucuc

SEQ ID NO: 838 - RNA, 21 nt, Homo sapiens
aagguuuggauagaugcaaua

SEQ ID NO: 839 - RNA, 21 nt, Homo sapiens
uauugcaucuauccaaaccuu

SEQ ID NO: 840 - RNA, 22 nt, Homo sapiens
cucaaguagucugaccagggga

SEQ ID NO: 841 - RNA, 22 nt, Homo sapiens
uccccuggucagacuacuugag

SEQ ID NO: 842 - RNA, 18 nt, Homo sapiens
gggugcgggccggcgggg

SEQ ID NO: 843 - RNA, 18 nt, Homo sapiens
ccccgccggcccgcaccc

SEQ ID NO: 844 - RNA, 18 nt, Homo sapiens
agagcagaaggaugagau

SEQ ID NO: 845 - RNA, 18 nt, Homo sapiens
aucucauccuucugcucu

SEQ ID NO: 846 - RNA, 21 nt, Homo sapiens
uggcaaacguggaagccgaga

SEQ ID NO: 847 - RNA, 21 nt, Homo sapiens
ucucggcuuccacguuugcca

SEQ ID NO: 848 - RNA, 18 nt, Homo sapiens
ggugggggguguuguuuu

SEQ ID NO: 849 - RNA, 18 nt, Homo sapiens
aaaacaacaccccccacc

SEQ ID NO: 850 - RNA, 22 nt, Homo sapiens
cuagugcucuccguuacaagua

SEQ ID NO: 851 - RNA, 22 nt, Homo sapiens
uacuuguaacggagagcacuag

SEQ ID NO: 852 - RNA, 22 nt, Homo sapiens
caagggaccaagcauucauuau

SEQ ID NO: 853 - RNA, 22 nt, Homo sapiens
auaaugaaugcuuggucccuug

SEQ ID NO: 854 - RNA, 22 nt, Homo sapiens
caggaaggauuuagggacaggc

SEQ ID NO: 855 - RNA, 22 nt, Homo sapiens
gccugucccuaaauccuuccug

SEQ ID NO: 856 - RNA, 22 nt, Homo sapiens
cuauuaaggacauuugugauuc

SEQ ID NO: 857 - RNA, 22 nt, Homo sapiens
gaaucacaaauguccuuaauag

SEQ ID NO: 858 - RNA, 22 nt, Homo sapiens
auuaaggacauuugugauugau

SEQ ID NO: 859 - RNA, 22 nt, Homo sapiens
aucaaucacaaauguccuuaau

SEQ ID NO: 860 - RNA, 17 nt, Homo sapiens
gaggcugagcugaggag

SEQ ID NO: 861 - RNA, 17 nt, Homo sapiens
cuccucagcucagccuc

SEQ ID NO: 862 - RNA, 22 nt, Homo sapiens
cgcgcggccgugcucggagcag

SEQ ID NO: 863 - RNA, 22 nt, Homo sapiens
cugcuccgagcacggccgcgcg

SEQ ID NO: 864 - RNA, 21 nt, Homo sapiens
agccaaguggaaguuacuuua

SEQ ID NO: 865 - RNA, 21 nt, Homo sapiens
uaaaguaacuuccacuuggcu

SEQ ID NO: 866 - RNA, 17 nt, Homo sapiens
ggagugggcuggugguu

SEQ ID NO: 867 - RNA, 17 nt, Homo sapiens
aaccaccagcccacucc

SEQ ID NO: 868 - RNA, 22 nt, Homo sapiens
uuucuauuucucaguggggcuc

SEQ ID NO: 869 - RNA, 22 nt, Homo sapiens
gagccccacugagaaauagaaa

SEQ ID NO: 870 - RNA, 22 nt, Homo sapiens
aacccagugggcuauggaaaug

SEQ ID NO: 871 - RNA, 22 nt, Homo sapiens
cauuuccauagcccacuggguu

SEQ ID NO: 872 - RNA, 17 nt, Homo sapiens
gggguggucuguuguug

SEQ ID NO: 873 - RNA, 17 nt, Homo sapiens
caacaacagaccacccc

SEQ ID NO: 874 - RNA, 20 nt, Homo sapiens
aaaaggcgggagaagcccca

SEQ ID NO: 875 - RNA, 20 nt, Homo sapiens
uggggcuucucccgccuuuu

SEQ ID NO: 876 - RNA, 20 nt, Homo sapiens
uaacggccgcgguacccuaa

SEQ ID NO: 877 - RNA, 20 nt, Homo sapiens
uuaggguaccgcggccguua

SEQ ID NO: 878 - RNA, 17 nt, Homo sapiens
gcugggcgaggcuggca

SEQ ID NO: 879 - RNA, 17 nt, Homo sapiens
ugccagccucgcccagc

SEQ ID NO: 880 - RNA, 19 nt, Homo sapiens
agagcuggcugaagggcag

SEQ ID NO: 881 - RNA, 19 nt, Homo sapiens
cugcccuucagccagcucu

SEQ ID NO: 882 - RNA, 18 nt, Homo sapiens
agggggcgggcuccggcg

SEQ ID NO: 883 - RNA, 18 nt, Homo sapiens
cgccggagcccgcccccu

SEQ ID NO: 884 - RNA, 22 nt, Homo sapiens
ucugguaagagauuugggcaua

SEQ ID NO: 885 - RNA, 22 nt, Homo sapiens
uaugcccaaaucucuuaccaga

SEQ ID NO: 886 - RNA, 22 nt, Homo sapiens
aauguggacuggugugaccaaa

SEQ ID NO: 887 - RNA, 22 nt, Homo sapiens
uuuggucacaccaguccacauu

SEQ ID NO: 888 - RNA, 17 nt, Homo sapiens
ggggcugggcgcgcgcc

SEQ ID NO: 889 - RNA, 17 nt, Homo sapiens
ggcgcgcgcccagcccc

SEQ ID NO: 890 - RNA, 21 nt, Homo sapiens
agaaggccuuuccaucucugu

SEQ ID NO: 891 - RNA, 21 nt, Homo sapiens
acagagauggaaaggccuucu

SEQ ID NO: 892 - RNA, 22 nt, Homo sapiens
ccagacuguggcugaccagagg

SEQ ID NO: 893 - RNA, 22 nt, Homo sapiens
ccucuggucagccacagucugg

SEQ ID NO: 894 - RNA, 21 nt, Homo sapiens
aauguaaacaggcuuuuugcu

SEQ ID NO: 895 - RNA, 21 nt, Homo sapiens
agcaaaaagccuguuuacauu

SEQ ID NO: 896 - RNA, 22 nt, Homo sapiens
gaggaaacugaagcugagaggg

SEQ ID NO: 897 - RNA, 22 nt, Homo sapiens
cccucucagcuucaguuuccuc

SEQ ID NO: 898 - RNA, 17 nt, Homo sapiens
cuccgggacggcugggc

SEQ ID NO: 899 - RNA, 17 nt, Homo sapiens
gcccagccgucccggag

SEQ ID NO: 900 - RNA, 22 nt, Homo sapiens
ugggcuggcagggcaagugcug

SEQ ID NO: 901 - RNA, 22 nt, Homo sapiens
cagcacuugcccugccagccca

SEQ ID NO: 902 - RNA, 17 nt, Homo sapiens
aagacugagaggaggga

SEQ ID NO: 903 - RNA, 17 nt, Homo sapiens
ucccuccucucagucuu

SEQ ID NO: 904 - RNA, 17 nt, Homo sapiens
ugagguaguaguuucuu

SEQ ID NO: 905 - RNA, 17 nt, Homo sapiens
aagaaacuacuaccuca

SEQ ID NO: 906 - RNA, 21 nt, Homo sapiens
uaugugaccucggaugaauca

SEQ ID NO: 907 - RNA, 21 nt, Homo sapiens
ugauucauccgaggucacaua

SEQ ID NO: 908 - RNA, 22 nt, Homo sapiens
gcugaugaugauggugcugaag

SEQ ID NO: 909 - RNA, 22 nt, Homo sapiens
cuucagcaccaucaucaucagc

SEQ ID NO: 910 - RNA, 22 nt, Homo sapiens
uuuaagcaggaaauagaauuua

SEQ ID NO: 911 - RNA, 22 nt, Homo sapiens
uaaauucuauuuccugcuuaaa

SEQ ID NO: 912 - RNA, 22 nt, Homo sapiens
ugugacaauagagaugaacaug

SEQ ID NO: 913 - RNA, 22 nt, Homo sapiens
cauguucaucucuauugucaca

SEQ ID NO: 914 - RNA, 18 nt, Homo sapiens
aggcugggcugggacgga

SEQ ID NO: 915 - RNA, 18 nt, Homo sapiens
uccgucccagcccagccu

SEQ ID NO: 916 - RNA, 20 nt, Homo sapiens
aaauggguggucugaggcaa

SEQ ID NO: 917 - RNA, 20 nt, Homo sapiens
uugccucagaccacccauuu

SEQ ID NO: 918 - RNA, 20 nt, Homo sapiens
cuggguugggcugggcuggg

SEQ ID NO: 919 - RNA, 20 nt, Homo sapiens
cccagcccagcccaacccag

SEQ ID NO: 920 - RNA, 17 nt, Homo sapiens
gcggggcugggcgcgcg

SEQ ID NO: 921 - RNA, 17 nt, Homo sapiens
cgcgcgcccagccccgc

SEQ ID NO: 922 - RNA, 22 nt, Homo sapiens
acuaaaggauauagaagguuuu

SEQ ID NO: 923 - RNA, 22 nt, Homo sapiens
aaaaccuucuauauccuuuagu

SEQ ID NO: 924 - RNA, 22 nt, Homo sapiens
ugagggaguaggauguaugguu

SEQ ID NO: 925 - RNA, 22 nt, Homo sapiens
aaccauacauccuacucccuca

SEQ ID NO: 926 - RNA, 22 nt, Homo sapiens
gaagaacuguugcauuugcccu

SEQ ID NO: 927 - RNA, 22 nt, Homo sapiens
agggcaaaugcaacaguucuuc

SEQ ID NO: 928 - RNA, 22 nt, Homo sapiens
cagggccucacuguaucgccca

SEQ ID NO: 929 - RNA, 22 nt, Homo sapiens
ugggcgauacagugaggcccug

SEQ ID NO: 930 - RNA, 22 nt, Homo sapiens
agacugacggcuggaggcccau

SEQ ID NO: 931 - RNA, 22 nt, Homo sapiens
augggccuccagccgucagucu

SEQ ID NO: 932 - RNA, 18 nt, Homo sapiens
acaggcaggauuggggaa

SEQ ID NO: 933 - RNA, 18 nt, Homo sapiens
uuccccaauccugccugu

SEQ ID NO: 934 - RNA, 22 nt, Homo sapiens
aggacuggacucccggcagccc

SEQ ID NO: 935 - RNA, 22 nt, Homo sapiens
gggcugccgggaguccaguccu

SEQ ID NO: 936 - RNA, 17 nt, Homo sapiens
gggagaagggucggggc

SEQ ID NO: 937 - RNA, 17 nt, Homo sapiens
gccccgacccuucuccc

SEQ ID NO: 938 - RNA, 25 nt, Homo sapiens
aaauaugaugaaacucacagcugag

SEQ ID NO: 939 - RNA, 25 nt, Homo sapiens
cucagcugugaguuucaucauauuu

SEQ ID NO: 940 - RNA, 26 nt, Homo sapiens
gcucagggaugauaacugugcugaga

SEQ ID NO: 941 - RNA, 26 nt, Homo sapiens
ucucagcacaguuaucaucccugagc

SEQ ID NO: 942 - RNA, 18 nt, Homo sapiens
cagcagugcgcagggcug

SEQ ID NO: 943 - RNA, 18 nt, Homo sapiens
cagcccugcgcacugcug

SEQ ID NO: 944 - RNA, 22 nt, Homo sapiens
gcuaaggaaguccugugcucag

SEQ ID NO: 945 - RNA, 22 nt, Homo sapiens
cugagcacaggacuuccuuagc

SEQ ID NO: 946 - RNA, 21 nt, Homo sapiens
ugacucugccuguaggccggu

SEQ ID NO: 947 - RNA, 21 nt, Homo sapiens
accggccuacaggcagaguca

SEQ ID NO: 948 - RNA, 21 nt, Homo sapiens
gaccgagagggccucggcugu

SEQ ID NO: 949 - RNA, 21 nt, Homo sapiens
acagccgaggcccucucgguc

SEQ ID NO: 950 - RNA, 21 nt, Homo sapiens
ggggggaugugcaugcugguu

SEQ ID NO: 951 - RNA, 21 nt, Homo sapiens
aaccagcaugcacaucccccc

SEQ ID NO: 952 - RNA, 22 nt, Homo sapiens
uggucugcaaagagaugacugu

SEQ ID NO: 953 - RNA, 22 nt, Homo sapiens
acagucaucucuuugcagacca

SEQ ID NO: 954 - RNA, 22 nt, Homo sapiens
ucauuauauguaugaucuggac

SEQ ID NO: 955 - RNA, 22 nt, Homo sapiens
guccagaucauacauauaauga

SEQ ID NO: 956 - RNA, 18 nt, Homo sapiens
cccagcaggacgggagcg

SEQ ID NO: 957 - RNA, 18 nt, Homo sapiens
cgcucccguccugcuggg

SEQ ID NO: 958 - RNA, 17 nt, Homo sapiens
auggagaaggcuucuga

SEQ ID NO: 959 - RNA, 17 nt, Homo sapiens
ucagaagccuucuccau

SEQ ID NO: 960 - RNA, 17 nt, Homo sapiens
ccccggggagcccggcg

SEQ ID NO: 961 - RNA, 17 nt, Homo sapiens
cgccgggcuccccgggg

SEQ ID NO: 962 - RNA, 22 nt, Homo sapiens
uggaaggagguugccggacgcu

SEQ ID NO: 963 - RNA, 22 nt, Homo sapiens
agcguccggcaaccuccuucca

SEQ ID NO: 964 - RNA, 17 nt, Homo sapiens
ggauggaggaggggucu

SEQ ID NO: 965 - RNA, 17 nt, Homo sapiens
agaccccuccuccaucc

SEQ ID NO: 966 - RNA, 17 nt, Homo sapiens
guggaccuggcugggac

SEQ ID NO: 967 - RNA, 17 nt, Homo sapiens
gucccagccagguccac

SEQ ID NO: 968 - RNA, 21 nt, Homo sapiens
ucgugcauauaucuaccacau

SEQ ID NO: 969 - RNA, 21 nt, Homo sapiens
augugguagauauaugcacga

SEQ ID NO: 970 - RNA, 21 nt, Homo sapiens
ugugguagauauaugcacgau

SEQ ID NO: 971 - RNA, 21 nt, Homo sapiens
aucgugcauauaucuaccaca

SEQ ID NO: 972 - RNA, 22 nt, Homo sapiens
ugagccgagcugagcuuagcug

SEQ ID NO: 973 - RNA, 22 nt, Homo sapiens
cagcuaagcucagcucggcuca

SEQ ID NO: 974 - RNA, 22 nt, Homo sapiens
gagcuuggaugagcugggcuga

SEQ ID NO: 975 - RNA, 22 nt, Homo sapiens
ucagcccagcucauccaagcuc

SEQ ID NO: 976 - RNA, 22 nt, Homo sapiens
gcugaacugggcugagcugggc

SEQ ID NO: 977 - RNA, 22 nt, Homo sapiens
gcccagcucagcccaguucagc

SEQ ID NO: 978 - RNA, 21 nt, Homo sapiens
uuaguccugccuguagguuua

SEQ ID NO: 979 - RNA, 21 nt, Homo sapiens
uaaaccuacaggcaggacuaa

SEQ ID NO: 980 - RNA, 20 nt, Homo sapiens
uugggcugggcuggguuggg

SEQ ID NO: 981 - RNA, 20 nt, Homo sapiens
cccaacccagcccagcccaa

SEQ ID NO: 982 - RNA, 20 nt, Homo sapiens
uaggaugggggugagaggug

SEQ ID NO: 983 - RNA, 20 nt, Homo sapiens
caccucucacccccauccua

SEQ ID NO: 984 - RNA, 22 nt, Homo sapiens
aaaaguaauuguggauuuugcu

SEQ ID NO: 985 - RNA, 22 nt, Homo sapiens
agcaaaauccacaauuacuuuu

SEQ ID NO: 986 - RNA, 22 nt, Homo sapiens
caaaaaccggcaauuacuuuug

SEQ ID NO: 987 - RNA, 22 nt, Homo sapiens
caaaaguaauugccgguuuuug

SEQ ID NO: 988 - RNA, 22 nt, Homo sapiens
gaaaacgacaaugacuuuugca

SEQ ID NO: 989 - RNA, 22 nt, Homo sapiens
ugcaaaagucauugucguuuuc

SEQ ID NO: 990 - RNA, 21 nt, Homo sapiens
caaaaacugcaauuacuuuca

SEQ ID NO: 991 - RNA, 21 nt, Homo sapiens
ugaaaguaauugcaguuuuug

SEQ ID NO: 992 - RNA, 21 nt, Homo sapiens
aaagguaauugugguuucugc

SEQ ID NO: 993 - RNA, 21 nt, Homo sapiens
gcagaaaccacaauuaccuuu

SEQ ID NO: 994 - RNA, 22 nt, Homo sapiens
caaaaacugcaguuacuuuugc

SEQ ID NO: 995 - RNA, 22 nt, Homo sapiens
gcaaaaguaacugcaguuuuug

SEQ ID NO: 996 - RNA, 20 nt, Homo sapiens
aaaagugauugcaguguuug

SEQ ID NO: 997 - RNA, 20 nt, Homo sapiens
caaacacugcaaucacuuuu

SEQ ID NO: 998 - RNA, 22 nt, Homo sapiens
aaagguaauugcaguuuuuccc

SEQ ID NO: 999 - RNA, 22 nt, Homo sapiens
gggaaaaacugcaauuaccuuu

SEQ ID NO: 1000 - RNA, 21 nt, Homo sapiens
uaaaaacugcaauuacuuuua

SEQ ID NO: 1001 - RNA, 21 nt, Homo sapiens
uaaaaguaauugcaguuuuua

SEQ ID NO: 1002 - RNA, 23 nt, Homo sapiens
ugcaaaaguaauugcaguuuuug

SEQ ID NO: 1003 - RNA, 23 nt, Homo sapiens
caaaaacugcaauuacuuuugca

SEQ ID NO: 1004 - RNA, 21 nt, Homo sapiens
aaaaguaacugcgguuuuuga

SEQ ID NO: 1005 - RNA, 21 nt, Homo sapiens
ucaaaaaccgcaguuacuuuu

SEQ ID NO: 1006 - RNA, 22 nt, Homo sapiens
aacggcaaugacuuuuguacca

SEQ ID NO: 1007 - RNA, 22 nt, Homo sapiens
ugguacaaaagucauugccguu

SEQ ID NO: 1008 - RNA, 22 nt, Homo sapiens
caaaaacugcaguuacuuuugu

SEQ ID NO: 1009 - RNA, 22 nt, Homo sapiens
acaaaaguaacugcaguuuuug

SEQ ID NO: 1010 - RNA, 22 nt, Homo sapiens
aaaaguaauugcgguuuuugcc

SEQ ID NO: 1011 - RNA, 22 nt, Homo sapiens
ggcaaaaaccgcaauuacuuuu

SEQ ID NO: 1012 - RNA, 20 nt, Homo sapiens
aaaaggcauugugguuuuug

SEQ ID NO: 1013 - RNA, 20 nt, Homo sapiens
caaaaaccacaaugccuuuu

SEQ ID NO: 1014 - RNA, 23 nt, Homo sapiens
cggcccgggcugcugcuguuccu

SEQ ID NO: 1015 - RNA, 23 nt, Homo sapiens
aggaacagcagcagcccgggccg

SEQ ID NO: 1016 - RNA, 20 nt, Homo sapiens
agagguauagggcaugggaa

SEQ ID NO: 1017 - RNA, 20 nt, Homo sapiens
uucccaugcccuauaccucu

SEQ ID NO: 1018 - RNA, 22 nt, Homo sapiens
uuccuaugcauauacuucuuug

SEQ ID NO: 1019 - RNA, 22 nt, Homo sapiens
caaagaaguauaugcauaggaa

SEQ ID NO: 1020 - RNA, 22 nt, Homo sapiens
aucauagaggaaaauccauguu

SEQ ID NO: 1021 - RNA, 22 nt, Homo sapiens
aacauggauuuuccucuaugau

SEQ ID NO: 1022 - RNA, 22 nt, Homo sapiens
cguggauauuccuucuauguuu

SEQ ID NO: 1023 - RNA, 22 nt, Homo sapiens
aaacauagaaggaauauccacg

SEQ ID NO: 1024 - RNA, 22 nt, Homo sapiens
ugaguauuacauggccaaucuc

SEQ ID NO: 1025 - RNA, 22 nt, Homo sapiens
gagauuggccauguaauacuca

SEQ ID NO: 1026 - RNA, 21 nt, Homo sapiens
cuuccgccccgccgggcgucg

SEQ ID NO: 1027 - RNA, 21 nt, Homo sapiens
cgacgcccggcggggcggaag

SEQ ID NO: 1028 - RNA, 22 nt, Homo sapiens
uagcuuaucagacugauguuga

SEQ ID NO: 1029 - RNA, 22 nt, Homo sapiens
ucaacaucagucugauaagcua

SEQ ID NO: 1030 - RNA, 22 nt, Homo sapiens
cacuagauugugagcuccugga

SEQ ID NO: 1031 - RNA, 22 nt, Homo sapiens
uccaggagcucacaaucuagug

SEQ ID NO: 1032 - RNA, 22 nt, Homo sapiens
aaggagcucacagucuauugag

SEQ ID NO: 1033 - RNA, 22 nt, Homo sapiens
cucaauagacugugagcuccuu

SEQ ID NO: 1034 - RNA, 22 nt, Homo sapiens
uacgucaucguugucaucguca

SEQ ID NO: 1035 - RNA, 22 nt, Homo sapiens
ugacgaugacaacgaugacgua

SEQ ID NO: 1036 - RNA, 22 nt, Homo sapiens
cacgcucaugcacacacccaca

SEQ ID NO: 1037 - RNA, 22 nt, Homo sapiens
ugugggugugugcaugagcgug

SEQ ID NO: 1038 - RNA, 21 nt, Homo sapiens
caacaccagucgaugggcugu

SEQ ID NO: 1039 - RNA, 21 nt, Homo sapiens
acagcccaucgacugguguug

SEQ ID NO: 1040 - RNA, 22 nt, Homo sapiens
uucaccaccuucuccacccagc

SEQ ID NO: 1041 - RNA, 22 nt, Homo sapiens
gcuggguggagaagguggugaa

SEQ ID NO: 1042 - RNA, 23 nt, Homo sapiens
cggguagagagggcagugggagg

SEQ ID NO: 1043 - RNA, 23 nt, Homo sapiens
ccucccacugcccucucuacccg

SEQ ID NO: 1044 - RNA, 18 nt, Homo sapiens
aauccuugcuaccugggu

SEQ ID NO: 1045 - RNA, 18 nt, Homo sapiens
acccagguagcaaggauu

SEQ ID NO: 1046 - RNA, 22 nt, Homo sapiens
caauuuagugugugugauauuu

SEQ ID NO: 1047 - RNA, 22 nt, Homo sapiens
aaauaucacacacacuaaauug

SEQ ID NO: 1048 - RNA, 22 nt, Homo sapiens
uauugcacauuacuaaguugca

SEQ ID NO: 1049 - RNA, 22 nt, Homo sapiens
ugcaacuuaguaaugugcaaua

SEQ ID NO: 1050 - RNA, 22 nt, Homo sapiens
ccuauucuugauuacuuguuuc

SEQ ID NO: 1051 - RNA, 22 nt, Homo sapiens
gaaacaaguaaucaagaauagg

SEQ ID NO: 1052 - RNA, 22 nt, Homo sapiens
uucaaguaauccaggauaggcu

SEQ ID NO: 1053 - RNA, 22 nt, Homo sapiens
agccuauccuggauuacuugaa

SEQ ID NO: 1054 - RNA, 23 nt, Homo sapiens
ccaguuaccgcuuccgcuaccgc

SEQ ID NO: 1055 - RNA, 23 nt, Homo sapiens
gcgguagcggaagcgguaacugg

SEQ ID NO: 1056 - RNA, 21 nt, Homo sapiens
gauuucaguggagugaaguuc

SEQ ID NO: 1057 - RNA, 21 nt, Homo sapiens
gaacuucacuccacugaaauc

SEQ ID NO: 1058 - RNA, 22 nt, Homo sapiens
uccuucauuccaccggagucug

SEQ ID NO: 1059 - RNA, 22 nt, Homo sapiens
cagacuccgguggaaugaagga

SEQ ID NO: 1060 - RNA, 23 nt, Homo sapiens
aaaauggugcccuagugacuaca

SEQ ID NO: 1061 - RNA, 23 nt, Homo sapiens
uguagucacuagggcaccauuuu

SEQ ID NO: 1062 - RNA, 21 nt, Homo sapiens
caagucacuagugguuccguu

SEQ ID NO: 1063 - RNA, 21 nt, Homo sapiens
aacggaaccacuagugacuug

SEQ ID NO: 1064 - RNA, 22 nt, Homo sapiens
ccaguauuaacugugcugcuga

SEQ ID NO: 1065 - RNA, 22 nt, Homo sapiens
ucagcagcacaguuaauacugg

SEQ ID NO: 1066 - RNA, 23 nt, Homo sapiens
ucccccaggugugauucugauuu

SEQ ID NO: 1067 - RNA, 23 nt, Homo sapiens
aaaucagaaucacaccuggggga

SEQ ID NO: 1068 - RNA, 22 nt, Homo sapiens
aaaagcuggguugagagggcga

SEQ ID NO: 1069 - RNA, 22 nt, Homo sapiens
ucgcccucucaacccagcuuuu

SEQ ID NO: 1070 - RNA, 22 nt, Homo sapiens
uggacggagaacugauaagggu

SEQ ID NO: 1071 - RNA, 22 nt, Homo sapiens
acccuuaucaguucuccgucca

SEQ ID NO: 1072 - RNA, 22 nt, Homo sapiens
uggugggccgcagaacaugugc

SEQ ID NO: 1073 - RNA, 22 nt, Homo sapiens
gcacauguucugcggcccacca

SEQ ID NO: 1074 - RNA, 22 nt, Homo sapiens
agugccugcuaugugccaggca

SEQ ID NO: 1075 - RNA, 22 nt, Homo sapiens
ugccuggcacauagcaggcacu

SEQ ID NO: 1076 - RNA, 22 nt, Homo sapiens
cuuggcaccuagcaagcacuca

SEQ ID NO: 1077 - RNA, 22 nt, Homo sapiens
ugagugcuugcuaggugccaag

SEQ ID NO: 1078 - RNA, 23 nt, Homo sapiens
uuauugcuuaagaauacgcguag

SEQ ID NO: 1079 - RNA, 23 nt, Homo sapiens
cuacgcguauucuuaagcaauaa

SEQ ID NO: 1080 - RNA, 22 nt, Homo sapiens
uugcauagucacaaaagugauc

SEQ ID NO: 1081 - RNA, 22 nt, Homo sapiens
gaucacuuuugugacuaugcaa

SEQ ID NO: 1082 - RNA, 22 nt, Homo sapiens
gugaauuaccgaagggccauaa

SEQ ID NO: 1083 - RNA, 22 nt, Homo sapiens
uuauggcccuucgguaauucac

SEQ ID NO: 1084 - RNA, 22 nt, Homo sapiens
uauggcacugguagaauucacu

SEQ ID NO: 1085 - RNA, 22 nt, Homo sapiens
agugaauucuaccagugccaua

SEQ ID NO: 1086 - RNA, 22 nt, Homo sapiens
ugauauguuugauauauuaggu

SEQ ID NO: 1087 - RNA, 22 nt, Homo sapiens
accuaauauaucaaacauauca

SEQ ID NO: 1088 - RNA, 21 nt, Homo sapiens
ugauauguuugauauuggguu

SEQ ID NO: 1089 - RNA, 21 nt, Homo sapiens
aacccaauaucaaacauauca

SEQ ID NO: 1090 - RNA, 18 nt, Homo sapiens
agcaggugcggggcggcg

SEQ ID NO: 1091 - RNA, 18 nt, Homo sapiens
cgccgccccgcaccugcu

SEQ ID NO: 1092 - RNA, 21 nt, Homo sapiens
cagugcaaguguagaugccga

SEQ ID NO: 1093 - RNA, 21 nt, Homo sapiens
ucggcaucuacacuugcacug

SEQ ID NO: 1094 - RNA, 22 nt, Homo sapiens
uauguaauaugguccacaucuu

SEQ ID NO: 1095 - RNA, 22 nt, Homo sapiens
aagauguggaccauauuacaua

SEQ ID NO: 1096 - RNA, 21 nt, Homo sapiens
aauauaacacagauggccugu

SEQ ID NO: 1097 - RNA, 21 nt, Homo sapiens
acaggccaucuguguuauauu

SEQ ID NO: 1098 - RNA, 22 nt, Homo sapiens
aucgggaaugucguguccgccc

SEQ ID NO: 1099 - RNA, 22 nt, Homo sapiens
gggcggacacgacauucccgau

SEQ ID NO: 1100 - RNA, 23 nt, Homo sapiens
aaugacacgaucacucccguuga

SEQ ID NO: 1101 - RNA, 23 nt, Homo sapiens
ucaacgggagugaucgugucauu

SEQ ID NO: 1102 - RNA, 22 nt, Homo sapiens
uacucaggagaguggcaaucac

SEQ ID NO: 1103 - RNA, 22 nt, Homo sapiens
gugauugccacucuccugagua

SEQ ID NO: 1104 - RNA, 23 nt, Homo sapiens
uggaagacuagugauuuuguugu

SEQ ID NO: 1105 - RNA, 23 nt, Homo sapiens
acaacaaaaucacuagucuucca

SEQ ID NO: 1106 - RNA, 22 nt, Homo sapiens
auaaagcuagauaaccgaaagu

SEQ ID NO: 1107 - RNA, 22 nt, Homo sapiens
acuuucgguuaucuagcuuuau

SEQ ID NO: 1108 - RNA, 23 nt, Homo sapiens
ucuuugguuaucuagcuguauga

SEQ ID NO: 1109 - RNA, 23 nt, Homo sapiens
ucauacagcuagauaaccaaaga

SEQ ID NO: 1110 - RNA, 22 nt, Homo sapiens
acaggugagguucuugggagcc

SEQ ID NO: 1111 - RNA, 22 nt, Homo sapiens
ggcucccaagaaccucaccugu

SEQ ID NO: 1112 - RNA, 24 nt, Homo sapiens
ucccugagacccuuuaaccuguga

SEQ ID NO: 1113 - RNA, 24 nt, Homo sapiens
ucacagguuaaagggucucaggga

SEQ ID NO: 1114 - RNA, 22 nt, Homo sapiens
caacaaaucccagucuaccuaa

SEQ ID NO: 1115 - RNA, 22 nt, Homo sapiens
uuagguagacugggauuuguug

SEQ ID NO: 1116 - RNA, 22 nt, Homo sapiens
cguguucacagcggaccuugau

SEQ ID NO: 1117 - RNA, 22 nt, Homo sapiens
aucaagguccgcugugaacacg

SEQ ID NO: 1118 - RNA, 20 nt, Homo sapiens
uaaggcacgcggugaaugcc

SEQ ID NO: 1119 - RNA, 20 nt, Homo sapiens
ggcauucaccgcgugccuua

SEQ ID NO: 1120 - RNA, 22 nt, Homo sapiens
aacacaccugguuaaccucuuu

SEQ ID NO: 1121 - RNA, 22 nt, Homo sapiens
aaagagguuaaccagguguguu

SEQ ID NO: 1122 - RNA, 22 nt, Homo sapiens
uaacagucuacagccauggucg

SEQ ID NO: 1123 - RNA, 22 nt, Homo sapiens
cgaccauggcuguagacuguua

SEQ ID NO: 1124 - RNA, 22 nt, Homo sapiens
accguggcuuucgauuguuacu

SEQ ID NO: 1125 - RNA, 22 nt, Homo sapiens
aguaacaaucgaaagccacggu

SEQ ID NO: 1126 - RNA, 21 nt, Homo sapiens
uaacagucuccagucacggcc

SEQ ID NO: 1127 - RNA, 21 nt, Homo sapiens
ggccgugacuggagacuguua

SEQ ID NO: 1128 - RNA, 23 nt, Homo sapiens
accuuggcucuagacugcuuacu

SEQ ID NO: 1129 - RNA, 23 nt, Homo sapiens
aguaagcagucuagagccaaggu

SEQ ID NO: 1130 - RNA, 23 nt, Homo sapiens
ucucacacagaaaucgcacccgu

SEQ ID NO: 1131 - RNA, 23 nt, Homo sapiens
acgggugcgauuucugugugaga

SEQ ID NO: 1132 - RNA, 22 nt, Homo sapiens
ugguugaccauagaacaugcgc

SEQ ID NO: 1133 - RNA, 22 nt, Homo sapiens
gcgcauguucuauggucaacca

SEQ ID NO: 1134 - RNA, 23 nt, Homo sapiens
caguaacaaagauucauccuugu

SEQ ID NO: 1135 - RNA, 23 nt, Homo sapiens
acaaggaugaaucuuuguuacug

SEQ ID NO: 1136 - RNA, 22 nt, Homo sapiens
agaguugagucuggacgucccg

SEQ ID NO: 1137 - RNA, 22 nt, Homo sapiens
cgggacguccagacucaacucu

SEQ ID NO: 1138 - RNA, 22 nt, Homo sapiens
agaauuguggcuggacaucugu

SEQ ID NO: 1139 - RNA, 22 nt, Homo sapiens
acagauguccagccacaauucu

SEQ ID NO: 1140 - RNA, 21 nt, Homo sapiens
ugauuguccaaacgcaauucu

SEQ ID NO: 1141 - RNA, 21 nt, Homo sapiens
agaauugcguuuggacaauca

SEQ ID NO: 1142 - RNA, 22 nt, Homo sapiens
uauagggauuggagccguggcg

SEQ ID NO: 1143 - RNA, 22 nt, Homo sapiens
cgccacggcuccaaucccuaua

SEQ ID NO: 1144 - RNA, 23 nt, Homo sapiens
uauggcuuuuuauuccuauguga

SEQ ID NO: 1145 - RNA, 23 nt, Homo sapiens
ucacauaggaauaaaaagccaua

SEQ ID NO: 1146 - RNA, 22 nt, Homo sapiens
auguagggcuaaaagccauggg

SEQ ID NO: 1147 - RNA, 22 nt, Homo sapiens
cccauggcuuuuagcccuacau

SEQ ID NO: 1148 - RNA, 23 nt, Homo sapiens
uauggcuuuucauuccuauguga

SEQ ID NO: 1149 - RNA, 23 nt, Homo sapiens
ucacauaggaaugaaaagccaua

SEQ ID NO: 1150 - RNA, 22 nt, Homo sapiens
aaccaucgaccguugaguggac

SEQ ID NO: 1151 - RNA, 22 nt, Homo sapiens
guccacucaacggucgaugguu

SEQ ID NO: 1152 - RNA, 22 nt, Homo sapiens
aacauucaaccugucggugagu

SEQ ID NO: 1153 - RNA, 22 nt, Homo sapiens
acucaccgacagguugaauguu

SEQ ID NO: 1154 - RNA, 25 nt, Homo sapiens
cuuccagacgcuccgccccacgucg

SEQ ID NO: 1155 - RNA, 25 nt, Homo sapiens
cgacguggggcggagcgucuggaag

SEQ ID NO: 1156 - RNA, 24 nt, Homo sapiens
aacaacaaaaucacuagucuucca

SEQ ID NO: 1157 - RNA, 24 nt, Homo sapiens
uggaagacuagugauuuuguuguu

SEQ ID NO: 1158 - RNA, 22 nt, Homo sapiens
agguagacugggauuuguuguu

SEQ ID NO: 1159 - RNA, 22 nt, Homo sapiens
aacaacaaaucccagucuaccu

SEQ ID NO: 1160 - RNA, 22 nt, Homo sapiens
aaacaccauugucacacuccac

SEQ ID NO: 1161 - RNA, 22 nt, Homo sapiens
guggagugugacaaugguguuu

SEQ ID NO: 1162 - RNA, 23 nt, Homo sapiens
uuuagugugauaauggcguuuga

SEQ ID NO: 1163 - RNA, 23 nt, Homo sapiens
ucaaacgccauuaucacacuaaa

SEQ ID NO: 1164 - RNA, 22 nt, Homo sapiens
uauggaaagacuuugccacucu

SEQ ID NO: 1165 - RNA, 22 nt, Homo sapiens
agaguggcaaagucuuuccaua

SEQ ID NO: 1166 - RNA, 21 nt, Homo sapiens
aguggcaaagucuuuccauau

SEQ ID NO: 1167 - RNA, 21 nt, Homo sapiens
auauggaaagacuuugccacu

SEQ ID NO: 1168 - RNA, 22 nt, Homo sapiens
cagcccggaucccagcccacuu

SEQ ID NO: 1169 - RNA, 22 nt, Homo sapiens
aagugggcugggauccgggcug

SEQ ID NO: 1170 - RNA, 20 nt, Homo sapiens
guggguuggggcgggcucug

SEQ ID NO: 1171 - RNA, 20 nt, Homo sapiens
cagagcccgccccaacccac

SEQ ID NO: 1172 - RNA, 23 nt, Homo sapiens
uucgggcuggccugcugcuccgg

SEQ ID NO: 1173 - RNA, 23 nt, Homo sapiens
ccggagcagcaggccagcccgaa

SEQ ID NO: 1174 - RNA, 21 nt, Homo sapiens
ugugcagcaggccaaccgaga

SEQ ID NO: 1175 - RNA, 21 nt, Homo sapiens
ucucgguuggccugcugcaca

SEQ ID NO: 1176 - RNA, 22 nt, Homo sapiens
cagggcaggaagaaguggacaa

SEQ ID NO: 1177 - RNA, 22 nt, Homo sapiens
uuguccacuucuuccugcccug

SEQ ID NO: 1178 - RNA, 22 nt, Homo sapiens
guccacuucugccugcccugcc

SEQ ID NO: 1179 - RNA, 22 nt, Homo sapiens
ggcagggcaggcagaaguggac

SEQ ID NO: 1180 - RNA, 22 nt, Homo sapiens
uuuggacagaaaacacgcaggu

SEQ ID NO: 1181 - RNA, 22 nt, Homo sapiens
accugcguguuuucuguccaaa

SEQ ID NO: 1182 - RNA, 20 nt, Homo sapiens
ccugcguguuuucuguccaa

SEQ ID NO: 1183 - RNA, 20 nt, Homo sapiens
uuggacagaaaacacgcagg

SEQ ID NO: 1184 - RNA, 22 nt, Homo sapiens
ugccgcccucucgcugcucuag

SEQ ID NO: 1185 - RNA, 22 nt, Homo sapiens
cuagagcagcgagagggcggca

SEQ ID NO: 1186 - RNA, 23 nt, Homo sapiens
gagggcagcguggguguggcgga

SEQ ID NO: 1187 - RNA, 23 nt, Homo sapiens
uccgccacacccacgcugcccuc

SEQ ID NO: 1188 - RNA, 22 nt, Homo sapiens
aggagcuagccaggcauaugca

SEQ ID NO: 1189 - RNA, 22 nt, Homo sapiens
ugcauaugccuggcuagcuccu

SEQ ID NO: 1190 - RNA, 20 nt, Homo sapiens
auaugccuggcuagcuccuc

SEQ ID NO: 1191 - RNA, 20 nt, Homo sapiens
gaggagcuagccaggcauau

SEQ ID NO: 1192 - RNA, 19 nt, Homo sapiens
cggcgcgaccggcccgggg

SEQ ID NO: 1193 - RNA, 19 nt, Homo sapiens
ccccgggccggucgcgccg

SEQ ID NO: 1194 - RNA, 21 nt, Homo sapiens
ucuugaagucagaacccgcaa

SEQ ID NO: 1195 - RNA, 21 nt, Homo sapiens
uugcggguucugacuucaaga

SEQ ID NO: 1196 - RNA, 22 nt, Homo sapiens
aacucguguucaaagccuuuag

SEQ ID NO: 1197 - RNA, 22 nt, Homo sapiens
cuaaaggcuuugaacacgaguu

SEQ ID NO: 1198 - RNA, 23 nt, Homo sapiens
ccuggacaccgcucagccggccg

SEQ ID NO: 1199 - RNA, 23 nt, Homo sapiens
cggccggcugagcgguguccagg

SEQ ID NO: 1200 - RNA, 21 nt, Homo sapiens
acucggcugcgguggacaagu

SEQ ID NO: 1201 - RNA, 21 nt, Homo sapiens
acuuguccaccgcagccgagu

SEQ ID NO: 1202 - RNA, 20 nt, Homo sapiens
ucacucucaccuugcuuugc

SEQ ID NO: 1203 - RNA, 20 nt, Homo sapiens
gcaaagcaaggugagaguga

SEQ ID NO: 1204 - RNA, 22 nt, Homo sapiens
uugcuaaguaggcugagauuga

SEQ ID NO: 1205 - RNA, 22 nt, Homo sapiens
ucaaucucagccuacuuagcaa

SEQ ID NO: 1206 - RNA, 22 nt, Homo sapiens
cacccccuguuuccuggcccac

SEQ ID NO: 1207 - RNA, 22 nt, Homo sapiens
gugggccaggaaacagggggug

SEQ ID NO: 1208 - RNA, 23 nt, Homo sapiens
ugggccagggagcagcugguggg

SEQ ID NO: 1209 - RNA, 23 nt, Homo sapiens
cccaccagcugcucccuggccca

SEQ ID NO: 1210 - RNA, 24 nt, Homo sapiens
ugcccaugccauacuuuugccuca

SEQ ID NO: 1211 - RNA, 24 nt, Homo sapiens
ugaggcaaaaguauggcaugggca

SEQ ID NO: 1212 - RNA, 22 nt, Homo sapiens
auggcaucguccccugguggcu

SEQ ID NO: 1213 - RNA, 22 nt, Homo sapiens
agccaccaggggacgaugccau

SEQ ID NO: 1214 - RNA, 22 nt, Homo sapiens
gacacaugaccauaaaugcuaa

SEQ ID NO: 1215 - RNA, 22 nt, Homo sapiens
uuagcauuuauggucauguguc

SEQ ID NO: 1216 - RNA, 23 nt, Homo sapiens
uggagagagaaaagagacagaag

SEQ ID NO: 1217 - RNA, 23 nt, Homo sapiens
cuucugucucuuuucucucucca

SEQ ID NO: 1218 - RNA, 22 nt, Homo sapiens
agacaguaguucuugccugguu

SEQ ID NO: 1219 - RNA, 22 nt, Homo sapiens
aaccaggcaagaacuacugucu

SEQ ID NO: 1220 - RNA, 19 nt, Homo sapiens
accaggcaagaaauauugu

SEQ ID NO: 1221 - RNA, 19 nt, Homo sapiens
acaauauuucuugccuggu

SEQ ID NO: 1222 - RNA, 21 nt, Homo sapiens
auugucccucucccuucccag

SEQ ID NO: 1223 - RNA, 21 nt, Homo sapiens
cugggaagggagagggacaau

SEQ ID NO: 1224 - RNA, 22 nt, Homo sapiens
acugggaagaggagcugaggga

SEQ ID NO: 1225 - RNA, 22 nt, Homo sapiens
ucccucagcuccucuucccagu

SEQ ID NO: 1226 - RNA, 23 nt, Homo sapiens
gaagauggugcugugcugaggaa

SEQ ID NO: 1227 - RNA, 23 nt, Homo sapiens
uuccucagcacagcaccaucuuc

SEQ ID NO: 1228 - RNA, 20 nt, Homo sapiens
ugugggacugcaaaugggag

SEQ ID NO: 1229 - RNA, 20 nt, Homo sapiens
cucccauuugcagucccaca

SEQ ID NO: 1230 - RNA, 21 nt, Homo sapiens
ucugaggccugccucucccca

SEQ ID NO: 1231 - RNA, 21 nt, Homo sapiens
uggggagaggcaggccucaga

SEQ ID NO: 1232 - RNA, 24 nt, Homo sapiens
ugggcgaggggugggcucucagag

SEQ ID NO: 1233 - RNA, 24 nt, Homo sapiens
cucugagagcccaccccucgccca

SEQ ID NO: 1234 - RNA, 21 nt, Homo sapiens
agguagaaugaggccugacau

SEQ ID NO: 1235 - RNA, 21 nt, Homo sapiens
augucaggccucauucuaccu

SEQ ID NO: 1236 - RNA, 19 nt, Homo sapiens
ucaggccucuuucuaccuu

SEQ ID NO: 1237 - RNA, 19 nt, Homo sapiens
aagguagaaagaggccuga

SEQ ID NO: 1238 - RNA, 20 nt, Homo sapiens
cggggugggugaggucgggc

SEQ ID NO: 1239 - RNA, 20 nt, Homo sapiens
gcccgaccucacccaccccg

SEQ ID NO: 1240 - RNA, 22 nt, Homo sapiens
guucuguuaacccauccccuca

SEQ ID NO: 1241 - RNA, 22 nt, Homo sapiens
ugaggggauggguuaacagaac

SEQ ID NO: 1242 - RNA, 22 nt, Homo sapiens
aggggacugguuaauagaacua

SEQ ID NO: 1243 - RNA, 22 nt, Homo sapiens
uaguucuauuaaccaguccccu

SEQ ID NO: 1244 - RNA, 23 nt, Homo sapiens
uggaguuaaggguugcuuggaga

SEQ ID NO: 1245 - RNA, 23 nt, Homo sapiens
ucuccaagcaacccuuaacucca

SEQ ID NO: 1246 - RNA, 22 nt, Homo sapiens
ucucugagcaaggcuuaacacc

SEQ ID NO: 1247 - RNA, 22 nt, Homo sapiens
gguguuaagccuugcucagaga

SEQ ID NO: 1248 - RNA, 22 nt, Homo sapiens
ugugggaucuggaggcaucugg

SEQ ID NO: 1249 - RNA, 22 nt, Homo sapiens
ccagaugccuccagaucccaca

SEQ ID NO: 1250 - RNA, 21 nt, Homo sapiens
acccucgucagguccccgggg

SEQ ID NO: 1251 - RNA, 21 nt, Homo sapiens
ccccggggaccugacgagggu

SEQ ID NO: 1252 - RNA, 22 nt, Homo sapiens
caccggggauggcagagggucg

SEQ ID NO: 1253 - RNA, 22 nt, Homo sapiens
cgacccucugccauccccggug

SEQ ID NO: 1254 - RNA, 23 nt, Homo sapiens
ugggcugagggcaggaggccugu

SEQ ID NO: 1255 - RNA, 23 nt, Homo sapiens
acaggccuccugcccucagccca

SEQ ID NO: 1256 - RNA, 23 nt, Homo sapiens
aauguggaaguggucugaggcau

SEQ ID NO: 1257 - RNA, 23 nt, Homo sapiens
augccucagaccacuuccacauu

SEQ ID NO: 1258 - RNA, 23 nt, Homo sapiens
gugaguguggauccuggaggaau

SEQ ID NO: 1259 - RNA, 23 nt, Homo sapiens
auuccuccaggauccacacucac

SEQ ID NO: 1260 - RNA, 22 nt, Homo sapiens
uuucuucuuagacauggcaacg

SEQ ID NO: 1261 - RNA, 22 nt, Homo sapiens
cguugccaugucuaagaagaaa

SEQ ID NO: 1262 - RNA, 22 nt, Homo sapiens
cugccaugucuaagaagaaaac

SEQ ID NO: 1263 - RNA, 22 nt, Homo sapiens
guuuucuucuuagacauggcag

SEQ ID NO: 1264 - RNA, 22 nt, Homo sapiens
uuucuucuuagacauggcagcu

SEQ ID NO: 1265 - RNA, 22 nt, Homo sapiens
agcugccaugucuaagaagaaa

SEQ ID NO: 1266 - RNA, 19 nt, Homo sapiens
uugccaugucuaagaagaa

SEQ ID NO: 1267 - RNA, 19 nt, Homo sapiens
uucuucuuagacauggcaa

SEQ ID NO: 1268 - RNA, 23 nt, Homo sapiens
ugcagcucugguggaaaauggag

SEQ ID NO: 1269 - RNA, 23 nt, Homo sapiens
cuccauuuuccaccagagcugca

SEQ ID NO: 1270 - RNA, 22 nt, Homo sapiens
caggauccacagagcuagucca

SEQ ID NO: 1271 - RNA, 22 nt, Homo sapiens
uggacuagcucuguggauccug

SEQ ID NO: 1272 - RNA, 22 nt, Homo sapiens
aacuagcucuguggauccugac

SEQ ID NO: 1273 - RNA, 22 nt, Homo sapiens
gucaggauccacagagcuaguu

SEQ ID NO: 1274 - RNA, 22 nt, Homo sapiens
aaagauggacaauuggcuaaau

SEQ ID NO: 1275 - RNA, 22 nt, Homo sapiens
auuuagccaauuguccaucuuu

SEQ ID NO: 1276 - RNA, 24 nt, Homo sapiens
agcugagcuccauggacgugcagu

SEQ ID NO: 1277 - RNA, 24 nt, Homo sapiens
acugcacguccauggagcucagcu

SEQ ID NO: 1278 - RNA, 22 nt, Homo sapiens
cuuccggucugugagccccguc

SEQ ID NO: 1279 - RNA, 22 nt, Homo sapiens
gacggggcucacagaccggaag

SEQ ID NO: 1280 - RNA, 22 nt, Homo sapiens
uggggugcccacuccgcaaguu

SEQ ID NO: 1281 - RNA, 22 nt, Homo sapiens
aacuugcggagugggcacccca

SEQ ID NO: 1282 - RNA, 26 nt, Homo sapiens
cucggccgcggcgcguagcccccgcc

SEQ ID NO: 1283 - RNA, 26 nt, Homo sapiens
ggcgggggcuacgcgccgcggccgag

SEQ ID NO: 1284 - RNA, 23 nt, Homo sapiens
cugggggacgcgugagcgcgagc

SEQ ID NO: 1285 - RNA, 23 nt, Homo sapiens
gcucgcgcucacgcgucccccag

SEQ ID NO: 1286 - RNA, 21 nt, Homo sapiens
cauacaaucugacauguauuu

SEQ ID NO: 1287 - RNA, 21 nt, Homo sapiens
aaauacaugucagauuguaug

SEQ ID NO: 1288 - RNA, 21 nt, Homo sapiens
auacaugucagauuguaugcc

SEQ ID NO: 1289 - RNA, 21 nt, Homo sapiens
ggcauacaaucugacauguau

SEQ ID NO: 1290 - RNA, 21 nt, Homo sapiens
ucccuccuucuguccccacag

SEQ ID NO: 1291 - RNA, 21 nt, Homo sapiens
cuguggggacagaaggaggga

SEQ ID NO: 1292 - RNA, 22 nt, Homo sapiens
acuggggagcagaaggagaacc

SEQ ID NO: 1293 - RNA, 22 nt, Homo sapiens
gguucuccuucugcuccccagu

SEQ ID NO: 1294 - RNA, 23 nt, Homo sapiens
gaaaauccuuuuuguuuuuccag

SEQ ID NO: 1295 - RNA, 23 nt, Homo sapiens
cuggaaaaacaaaaaggauuuuc

SEQ ID NO: 1296 - RNA, 23 nt, Homo sapiens
agggaaaaaaaaaaggauuuguc

SEQ ID NO: 1297 - RNA, 23 nt, Homo sapiens
gacaaauccuuuuuuuuuucccu

SEQ ID NO: 1298 - RNA, 22 nt, Homo sapiens
uguguccgggaaguggaggagg

SEQ ID NO: 1299 - RNA, 22 nt, Homo sapiens
ccuccuccacuucccggacaca

SEQ ID NO: 1300 - RNA, 22 nt, Homo sapiens
ugaaguuacaucauggucgcuu

SEQ ID NO: 1301 - RNA, 22 nt, Homo sapiens
aagcgaccaugauguaacuuca

SEQ ID NO: 1302 - RNA, 22 nt, Homo sapiens
aagcgaccaugauguaacuuca

SEQ ID NO: 1303 - RNA, 22 nt, Homo sapiens
ugaaguuacaucauggucgcuu

SEQ ID NO: 1304 - RNA, 21 nt, Homo sapiens
uuagugcauagucuuuggucu

SEQ ID NO: 1305 - RNA, 21 nt, Homo sapiens
agaccaaagacuaugcacuaa

SEQ ID NO: 1306 - RNA, 22 nt, Homo sapiens
accgaagacugugcgcuaaucu

SEQ ID NO: 1307 - RNA, 22 nt, Homo sapiens
agauuagcgcacagucuucggu

SEQ ID NO: 1308 - RNA, 21 nt, Homo sapiens
uuacacagcuggacagaggca

SEQ ID NO: 1309 - RNA, 21 nt, Homo sapiens
ugccucuguccagcuguguaa

SEQ ID NO: 1310 - RNA, 22 nt, Homo sapiens
uccaggcaggagccggacugga

SEQ ID NO: 1311 - RNA, 22 nt, Homo sapiens
uccaguccggcuccugccugga

SEQ ID NO: 1312 - RNA, 21 nt, Homo sapiens
cugggcucgggacgcgcggcu

SEQ ID NO: 1313 - RNA, 21 nt, Homo sapiens
agccgcgcgucccgagcccag

SEQ ID NO: 1314 - RNA, 22 nt, Homo sapiens
ggggcugugauugaccagcagg

SEQ ID NO: 1315 - RNA, 22 nt, Homo sapiens
ccugcuggucaaucacagcccc

SEQ ID NO: 1316 - RNA, 22 nt, Homo sapiens
cacuguuucaccacuggcucuu

SEQ ID NO: 1317 - RNA, 22 nt, Homo sapiens
aagagccaguggugaaacagug

SEQ ID NO: 1318 - RNA, 21 nt, Homo sapiens
gagccaguggugagacaguga

SEQ ID NO: 1319 - RNA, 21 nt, Homo sapiens
ucacugucucaccacuggcuc

SEQ ID NO: 1320 - RNA, 22 nt, Homo sapiens
aagguauuguucagacuuauga

SEQ ID NO: 1321 - RNA, 22 nt, Homo sapiens
ucauaagucugaacaauaccuu

SEQ ID NO: 1322 - RNA, 22 nt, Homo sapiens
ucugugauagagauucuuugcu

SEQ ID NO: 1323 - RNA, 22 nt, Homo sapiens
agcaaagaaucucuaucacaga

SEQ ID NO: 1324 - RNA, 21 nt, Homo sapiens
ucugaauuguaagaguuguua

SEQ ID NO: 1325 - RNA, 21 nt, Homo sapiens
uaacaacucuuacaauucaga

SEQ ID NO: 1326 - RNA, 23 nt, Homo sapiens
agaacucuugcagucuuagaugu

SEQ ID NO: 1327 - RNA, 23 nt, Homo sapiens
acaucuaagacugcaagaguucu

SEQ ID NO: 1328 - RNA, 22 nt, Homo sapiens
aacgggaaugcaggcuguaucu

SEQ ID NO: 1329 - RNA, 22 nt, Homo sapiens
agauacagccugcauucccguu

SEQ ID NO: 1330 - RNA, 23 nt, Homo sapiens
ucugaguuccuggagccuggucu

SEQ ID NO: 1331 - RNA, 23 nt, Homo sapiens
agaccaggcuccaggaacucaga

SEQ ID NO: 1332 - RNA, 23 nt, Homo sapiens
uggagauccagugcucgcccgau

SEQ ID NO: 1333 - RNA, 23 nt, Homo sapiens
aucgggcgagcacuggaucucca

SEQ ID NO: 1334 - RNA, 22 nt, Homo sapiens
uguugcaagucgguggagacgu

SEQ ID NO: 1335 - RNA, 22 nt, Homo sapiens
acgucuccaccgacuugcaaca

SEQ ID NO: 1336 - RNA, 22 nt, Homo sapiens
cucucuacugacuugcaacaua

SEQ ID NO: 1337 - RNA, 22 nt, Homo sapiens
uauguugcaagucaguagagag

SEQ ID NO: 1338 - RNA, 22 nt, Homo sapiens
ucucccuuccugcccuggcuag

SEQ ID NO: 1339 - RNA, 22 nt, Homo sapiens
cuagccagggcaggaagggaga

SEQ ID NO: 1340 - RNA, 26 nt, Homo sapiens
cccagggcuuggaguggggcaagguu

SEQ ID NO: 1341 - RNA, 26 nt, Homo sapiens
aaccuugccccacuccaagcccuggg

SEQ ID NO: 1342 - RNA, 23 nt, Homo sapiens
uaucugcugggcuuucugguguu

SEQ ID NO: 1343 - RNA, 23 nt, Homo sapiens
aacaccagaaagcccagcagaua

SEQ ID NO: 1344 - RNA, 21 nt, Homo sapiens
uggcuguuggagggggcaggc

SEQ ID NO: 1345 - RNA, 21 nt, Homo sapiens
gccugcccccuccaacagcca

SEQ ID NO: 1346 - RNA, 22 nt, Homo sapiens
cagcccuccucccgcacccaaa

SEQ ID NO: 1347 - RNA, 22 nt, Homo sapiens
uuugggugcgggaggagggcug

SEQ ID NO: 1348 - RNA, 22 nt, Homo sapiens
uaggggcagcagaggaccuggg

SEQ ID NO: 1349 - RNA, 22 nt, Homo sapiens
cccagguccucugcugccccua

SEQ ID NO: 1350 - RNA, 22 nt, Homo sapiens
uugaggagacauggugggggcc

SEQ ID NO: 1351 - RNA, 22 nt, Homo sapiens
ggcccccaccaugucuccucaa

SEQ ID NO: 1352 - RNA, 21 nt, Homo sapiens
gcagcccagcugaggccucug

SEQ ID NO: 1353 - RNA, 21 nt, Homo sapiens
cagaggccucagcugggcugc

SEQ ID NO: 1354 - RNA, 22 nt, Homo sapiens
gagcaggcgaggcugggcugaa

SEQ ID NO: 1355 - RNA, 22 nt, Homo sapiens
uucagcccagccucgccugcuc

SEQ ID NO: 1356 - RNA, 23 nt, Homo sapiens
ccagccacggacugagagugcau

SEQ ID NO: 1357 - RNA, 23 nt, Homo sapiens
augcacucucaguccguggcugg

SEQ ID NO: 1358 - RNA, 23 nt, Homo sapiens
guccuccaggccaugagcugcgg

SEQ ID NO: 1359 - RNA, 23 nt, Homo sapiens
ccgcagcucauggccuggaggac

SEQ ID NO: 1360 - RNA, 22 nt, Homo sapiens
ucaggcaguguggguaucagau

SEQ ID NO: 1361 - RNA, 22 nt, Homo sapiens
aucugauacccacacugccuga

SEQ ID NO: 1362 - RNA, 23 nt, Homo sapiens
ugagaguggaauucacaguauuu

SEQ ID NO: 1363 - RNA, 23 nt, Homo sapiens
aaauacugugaauuccacucuca

SEQ ID NO: 1364 - RNA, 23 nt, Homo sapiens
auacugugaauuucacugucaca

SEQ ID NO: 1365 - RNA, 23 nt, Homo sapiens
ugugacagugaaauucacaguau

SEQ ID NO: 1366 - RNA, 21 nt, Homo sapiens
caaauggacaggauaacaccu

SEQ ID NO: 1367 - RNA, 21 nt, Homo sapiens
agguguuauccuguccauuug

SEQ ID NO: 1368 - RNA, 22 nt, Homo sapiens
agguguuauccuauccauuugc

SEQ ID NO: 1369 - RNA, 22 nt, Homo sapiens
gcaaauggauaggauaacaccu

SEQ ID NO: 1370 - RNA, 22 nt, Homo sapiens
ugaucucaccgcugccuccuuc

SEQ ID NO: 1371 - RNA, 22 nt, Homo sapiens
gaaggaggcagcggugagauca

SEQ ID NO: 1372 - RNA, 22 nt, Homo sapiens
caggaggcagugggcgagcagg

SEQ ID NO: 1373 - RNA, 22 nt, Homo sapiens
ccugcucgcccacugccuccug

SEQ ID NO: 1374 - RNA, 22 nt, Homo sapiens
ugcaagacggauacugucaucu

SEQ ID NO: 1375 - RNA, 22 nt, Homo sapiens
agaugacaguauccgucuugca

SEQ ID NO: 1376 - RNA, 24 nt, Homo sapiens
ugucagugacuccugccccuuggu

SEQ ID NO: 1377 - RNA, 24 nt, Homo sapiens
accaaggggcaggagucacugaca

SEQ ID NO: 1378 - RNA, 22 nt, Homo sapiens
agggggcgcagucacugacgug

SEQ ID NO: 1379 - RNA, 22 nt, Homo sapiens
cacgucagugacugcgcccccu

SEQ ID NO: 1380 - RNA, 23 nt, Homo sapiens
ucaaaauguagaggaagacccca

SEQ ID NO: 1381 - RNA, 23 nt, Homo sapiens
uggggucuuccucuacauuuuga

SEQ ID NO: 1382 - RNA, 22 nt, Homo sapiens
aauuuacucugcaaucuucucc

SEQ ID NO: 1383 - RNA, 22 nt, Homo sapiens
ggagaagauugcagaguaaauu

SEQ ID NO: 1384 - RNA, 22 nt, Homo sapiens
agaagauugcagaguaaguucc

SEQ ID NO: 1385 - RNA, 22 nt, Homo sapiens
ggaacuuacucugcaaucuucu

SEQ ID NO: 1386 - RNA, 26 nt, Homo sapiens
cacaggacugacuccucaccccagug

SEQ ID NO: 1387 - RNA, 26 nt, Homo sapiens
cacuggggugaggagucaguccugug

SEQ ID NO: 1388 - RNA, 22 nt, Homo sapiens
ucuggggaugaggacagugugu

SEQ ID NO: 1389 - RNA, 22 nt, Homo sapiens
acacacuguccucauccccaga

SEQ ID NO: 1390 - RNA, 20 nt, Homo sapiens
augggugauggguguggugu

SEQ ID NO: 1391 - RNA, 20 nt, Homo sapiens
acaccacacccaucacccau

SEQ ID NO: 1392 - RNA, 22 nt, Homo sapiens
uuggccaccacaccuaccccuu

SEQ ID NO: 1393 - RNA, 22 nt, Homo sapiens
aagggguaggugugguggccaa

SEQ ID NO: 1394 - RNA, 22 nt, Homo sapiens
uguaguuguauuguauugccac

SEQ ID NO: 1395 - RNA, 22 nt, Homo sapiens
guggcaauacaauacaacuaca

SEQ ID NO: 1396 - RNA, 23 nt, Homo sapiens
uagcaauacaguacaaauauagu

SEQ ID NO: 1397 - RNA, 23 nt, Homo sapiens
acuauauuuguacuguauugcua

SEQ ID NO: 1398 - RNA, 22 nt, Homo sapiens
ucagucacauaucuagugucua

SEQ ID NO: 1399 - RNA, 22 nt, Homo sapiens
uagacacuagauaugugacuga

SEQ ID NO: 1400 - RNA, 22 nt, Homo sapiens
gacacuaggcaugugagugauu

SEQ ID NO: 1401 - RNA, 22 nt, Homo sapiens
aaucacucacaugccuaguguc

SEQ ID NO: 1402 - RNA, 22 nt, Homo sapiens
ucaaucacuugguaauugcugu

SEQ ID NO: 1403 - RNA, 22 nt, Homo sapiens
acagcaauuaccaagugauuga

SEQ ID NO: 1404 - RNA, 25 nt, Homo sapiens
agcggggaggaagugggcgcugcuu

SEQ ID NO: 1405 - RNA, 25 nt, Homo sapiens
aagcagcgcccacuuccuccccgcu

SEQ ID NO: 1406 - RNA, 22 nt, Homo sapiens
agcccgccccagccgagguucu

SEQ ID NO: 1407 - RNA, 22 nt, Homo sapiens
agaaccucggcuggggcgggcu

SEQ ID NO: 1408 - RNA, 23 nt, Homo sapiens
gccccggcgcgggcggguucugg

SEQ ID NO: 1409 - RNA, 23 nt, Homo sapiens
ccagaacccgcccgcgccggggc

SEQ ID NO: 1410 - RNA, 22 nt, Homo sapiens
agcaaggcggcaucucucugau

SEQ ID NO: 1411 - RNA, 22 nt, Homo sapiens
aucagagagaugccgccuugcu

SEQ ID NO: 1412 - RNA, 21 nt, Homo sapiens
agagaugccgccuugcuccuu

SEQ ID NO: 1413 - RNA, 21 nt, Homo sapiens
aaggagcaaggcggcaucucu

SEQ ID NO: 1414 - RNA, 23 nt, Homo sapiens
uugaagaggaggugcucuguagc

SEQ ID NO: 1415 - RNA, 23 nt, Homo sapiens
gcuacagagcaccuccucuucaa

SEQ ID NO: 1416 - RNA, 22 nt, Homo sapiens
acaacagugacuugcucuccaa

SEQ ID NO: 1417 - RNA, 22 nt, Homo sapiens
uuggagagcaagucacuguugu

SEQ ID NO: 1418 - RNA, 18 nt, Homo sapiens
gggugagggcaggugguu

SEQ ID NO: 1419 - RNA, 18 nt, Homo sapiens
aaccaccugcccucaccc

SEQ ID NO: 1420 - RNA, 18 nt, Homo sapiens
cgugucuucuggcuugau

SEQ ID NO: 1421 - RNA, 18 nt, Homo sapiens
aucaagccagaagacacg

SEQ ID NO: 1422 - RNA, 23 nt, Homo sapiens
ugcaucaggccagaagacaugag

SEQ ID NO: 1423 - RNA, 23 nt, Homo sapiens
cucaugucuucuggccugaugca

SEQ ID NO: 1424 - RNA, 21 nt, Homo sapiens
aaugagagaccuguacuguau

SEQ ID NO: 1425 - RNA, 21 nt, Homo sapiens
auacaguacaggucucucauu

SEQ ID NO: 1426 - RNA, 22 nt, Homo sapiens
uccaguacaggucucucauuuc

SEQ ID NO: 1427 - RNA, 22 nt, Homo sapiens
gaaaugagagaccuguacugga

SEQ ID NO: 1428 - RNA, 22 nt, Homo sapiens
ugggauccagacagugggagaa

SEQ ID NO: 1429 - RNA, 22 nt, Homo sapiens
uucucccacugucuggauccca

SEQ ID NO: 1430 - RNA, 22 nt, Homo sapiens
uucucccacuaccaggcuccca

SEQ ID NO: 1431 - RNA, 22 nt, Homo sapiens
ugggagccugguagugggagaa

SEQ ID NO: 1432 - RNA, 22 nt, Homo sapiens
ccaaccuagguggucagaguug

SEQ ID NO: 1433 - RNA, 22 nt, Homo sapiens
caacucugaccaccuagguugg

SEQ ID NO: 1434 - RNA, 22 nt, Homo sapiens
aacucugaccccuuagguugau

SEQ ID NO: 1435 - RNA, 22 nt, Homo sapiens
aucaaccuaaggggucagaguu

SEQ ID NO: 1436 - RNA, 23 nt, Homo sapiens
gugccaccuuaacugcagccaau

SEQ ID NO: 1437 - RNA, 23 nt, Homo sapiens
auuggcugcaguuaagguggcac

SEQ ID NO: 1438 - RNA, 22 nt, Homo sapiens
aaguuggcugcaguuaaggugg

SEQ ID NO: 1439 - RNA, 22 nt, Homo sapiens
ccaccuuaacugcagccaacuu

SEQ ID NO: 1440 - RNA, 22 nt, Homo sapiens
aagggggaaggaaacauggaga

SEQ ID NO: 1441 - RNA, 22 nt, Homo sapiens
ucuccauguuuccuucccccuu

SEQ ID NO: 1442 - RNA, 22 nt, Homo sapiens
uccauguuuccuucccccuucu

SEQ ID NO: 1443 - RNA, 22 nt, Homo sapiens
agaagggggaaggaaacaugga

SEQ ID NO: 1444 - RNA, 21 nt, Homo sapiens
acacauggguggcuguggccu

SEQ ID NO: 1445 - RNA, 21 nt, Homo sapiens
aggccacagccacccaugugu

SEQ ID NO: 1446 - RNA, 22 nt, Homo sapiens
uaggccacagccacccaugugu

SEQ ID NO: 1447 - RNA, 22 nt, Homo sapiens
acacauggguggcuguggccua

SEQ ID NO: 1448 - RNA, 21 nt, Homo sapiens
agcuguaccugaaaccaagca

SEQ ID NO: 1449 - RNA, 21 nt, Homo sapiens
ugcuugguuucagguacagcu

SEQ ID NO: 1450 - RNA, 22 nt, Homo sapiens
ucacaaaucuauaauaugcagg

SEQ ID NO: 1451 - RNA, 22 nt, Homo sapiens
ccugcauauuauagauuuguga

SEQ ID NO: 1452 - RNA, 21 nt, Homo sapiens
ugcuuaaguuguaccaaguau

SEQ ID NO: 1453 - RNA, 21 nt, Homo sapiens
auacuugguacaacuuaagca

SEQ ID NO: 1454 - RNA, 22 nt, Homo sapiens
ccuggcauauuugguauaacuu

SEQ ID NO: 1455 - RNA, 22 nt, Homo sapiens
aaguuauaccaaauaugccagg

SEQ ID NO: 1456 - RNA, 22 nt, Homo sapiens
ugagggcuccaggugacggugg

SEQ ID NO: 1457 - RNA, 22 nt, Homo sapiens
ccaccgucaccuggagcccuca

SEQ ID NO: 1458 - RNA, 22 nt, Homo sapiens
accugccagcaccucccugcag

SEQ ID NO: 1459 - RNA, 22 nt, Homo sapiens
cugcagggaggugcuggcaggu

SEQ ID NO: 1460 - RNA, 23 nt, Homo sapiens
ggcaggagggcugugccagguug

SEQ ID NO: 1461 - RNA, 23 nt, Homo sapiens
caaccuggcacagcccuccugcc

SEQ ID NO: 1462 - RNA, 22 nt, Homo sapiens
cccucucuggcuccuccccaaa

SEQ ID NO: 1463 - RNA, 22 nt, Homo sapiens
uuuggggaggagccagagaggg

SEQ ID NO: 1464 - RNA, 24 nt, Homo sapiens
ugggggagccaugagauaagagca

SEQ ID NO: 1465 - RNA, 24 nt, Homo sapiens
ugcucuuaucucauggcuccccca

SEQ ID NO: 1466 - RNA, 21 nt, Homo sapiens
guaccuucugguucagcuagu

SEQ ID NO: 1467 - RNA, 21 nt, Homo sapiens
acuagcugaaccagaagguac

SEQ ID NO: 1468 - RNA, 23 nt, Homo sapiens
aacugaaccaggagugagcuucg

SEQ ID NO: 1469 - RNA, 23 nt, Homo sapiens
cgaagcucacuccugguucaguu

SEQ ID NO: 1470 - RNA, 22 nt, Homo sapiens
uggggaaggcgucagugucggg

SEQ ID NO: 1471 - RNA, 22 nt, Homo sapiens
cccgacacugacgccuucccca

SEQ ID NO: 1472 - RNA, 21 nt, Homo sapiens
agacccugcagccuucccacc

SEQ ID NO: 1473 - RNA, 21 nt, Homo sapiens
ggugggaaggcugcagggucu

SEQ ID NO: 1474 - RNA, 22 nt, Homo sapiens
acccagguucccucuggccgca

SEQ ID NO: 1475 - RNA, 22 nt, Homo sapiens
ugcggccagagggaaccugggu

SEQ ID NO: 1476 - RNA, 23 nt, Homo sapiens
agggccagaggagccuggagugg

SEQ ID NO: 1477 - RNA, 23 nt, Homo sapiens
ccacuccaggcuccucuggcccu

SEQ ID NO: 1478 - RNA, 22 nt, Homo sapiens
auagugggaagcuggcagauuc

SEQ ID NO: 1479 - RNA, 22 nt, Homo sapiens
gaaucugccagcuucccacuau

SEQ ID NO: 1480 - RNA, 21 nt, Homo sapiens
aucugccagcuuccacagugg

SEQ ID NO: 1481 - RNA, 21 nt, Homo sapiens
ccacuguggaagcuggcagau

SEQ ID NO: 1482 - RNA, 25 nt, Homo sapiens
caugcugaccucccuccugccccag

SEQ ID NO: 1483 - RNA, 25 nt, Homo sapiens
cuggggcaggagggaggucagcaug

SEQ ID NO: 1484 - RNA, 23 nt, Homo sapiens
ugggaggggagaggcagcaagca

SEQ ID NO: 1485 - RNA, 23 nt, Homo sapiens
ugcuugcugccucuccccuccca

SEQ ID NO: 1486 - RNA, 22 nt, Homo sapiens
ucauuuaucuguugggaagcua

SEQ ID NO: 1487 - RNA, 22 nt, Homo sapiens
uagcuucccaacagauaaauga

SEQ ID NO: 1488 - RNA, 23 nt, Homo sapiens
cuggcggagcccauuccaugcca

SEQ ID NO: 1489 - RNA, 23 nt, Homo sapiens
uggcauggaaugggcuccgccag

SEQ ID NO: 1490 - RNA, 22 nt, Homo sapiens
cacacaaguggcccccaacacu

SEQ ID NO: 1491 - RNA, 22 nt, Homo sapiens
aguguugggggccacuugugug

SEQ ID NO: 1492 - RNA, 22 nt, Homo sapiens
ugcugggggccacaugagugug

SEQ ID NO: 1493 - RNA, 22 nt, Homo sapiens
cacacucauguggcccccagca

SEQ ID NO: 1494 - RNA, 21 nt, Homo sapiens
gcccugaccuguccuguucug

SEQ ID NO: 1495 - RNA, 21 nt, Homo sapiens
cagaacaggacaggucagggc

SEQ ID NO: 1496 - RNA, 23 nt, Homo sapiens
uguagagcagggagcaggaagcu

SEQ ID NO: 1497 - RNA, 23 nt, Homo sapiens
agcuuccugcucccugcucuaca

SEQ ID NO: 1498 - RNA, 22 nt, Homo sapiens
ccaccaggucuagcauugggau

SEQ ID NO: 1499 - RNA, 22 nt, Homo sapiens
aucccaaugcuagaccuggugg

SEQ ID NO: 1500 - RNA, 22 nt, Homo sapiens
aaucccaaugcuagacccggug

SEQ ID NO: 1501 - RNA, 22 nt, Homo sapiens
caccgggucuagcauugggauu

SEQ ID NO: 1502 - RNA, 22 nt, Homo sapiens
gcugcgggcugcggucagggcg

SEQ ID NO: 1503 - RNA, 22 nt, Homo sapiens
cgcccugaccgcagcccgcagc

SEQ ID NO: 1504 - RNA, 21 nt, Homo sapiens
aaaggugcucaaauuagacau

SEQ ID NO: 1505 - RNA, 21 nt, Homo sapiens
augucuaauuugagcaccuuu

SEQ ID NO: 1506 - RNA, 22 nt, Homo sapiens
ccuaauuugaacaccuucggua

SEQ ID NO: 1507 - RNA, 22 nt, Homo sapiens
uaccgaagguguucaaauuagg

SEQ ID NO: 1508 - RNA, 19 nt, Homo sapiens
aggcagguuaucugggcug

SEQ ID NO: 1509 - RNA, 19 nt, Homo sapiens
cagcccagauaaccugccu

SEQ ID NO: 1510 - RNA, 20 nt, Homo sapiens
augcgaggaugcugacagug

SEQ ID NO: 1511 - RNA, 20 nt, Homo sapiens
cacugucagcauccucgcau

SEQ ID NO: 1512 - RNA, 22 nt, Homo sapiens
ugaaacuggagcgccuggagga

SEQ ID NO: 1513 - RNA, 22 nt, Homo sapiens
uccuccaggcgcuccaguuuca

SEQ ID NO: 1514 - RNA, 22 nt, Homo sapiens
accagcgcguuuucaguuucau

SEQ ID NO: 1515 - RNA, 22 nt, Homo sapiens
augaaacugaaaacgcgcuggu

SEQ ID NO: 1516 - RNA, 25 nt, Homo sapiens
aagggaggaggagcggaggggcccu

SEQ ID NO: 1517 - RNA, 25 nt, Homo sapiens
agggccccuccgcuccuccucccuu

SEQ ID NO: 1518 - RNA, 22 nt, Homo sapiens
gcccgagaggauccgucccugc

SEQ ID NO: 1519 - RNA, 22 nt, Homo sapiens
gcagggacggauccucucgggc

SEQ ID NO: 1520 - RNA, 22 nt, Homo sapiens
aggacugauccucucgggcagg

SEQ ID NO: 1521 - RNA, 22 nt, Homo sapiens
ccugcccgagaggaucaguccu

SEQ ID NO: 1522 - RNA, 23 nt, Homo sapiens
ucaggcaaagggauauuuacaga

SEQ ID NO: 1523 - RNA, 23 nt, Homo sapiens
ucuguaaauaucccuuugccuga

SEQ ID NO: 1524 - RNA, 21 nt, Homo sapiens
uuucugucuuuucugguccag

SEQ ID NO: 1525 - RNA, 21 nt, Homo sapiens
cuggaccagaaaagacagaaa

SEQ ID NO: 1526 - RNA, 23 nt, Homo sapiens
uggccggaugggacaggaggcau

SEQ ID NO: 1527 - RNA, 23 nt, Homo sapiens
augccuccugucccauccggcca

SEQ ID NO: 1528 - RNA, 23 nt, Homo sapiens
ucuaaagacuagacuucgcuaug

SEQ ID NO: 1529 - RNA, 23 nt, Homo sapiens
cauagcgaagucuagucuuuaga

SEQ ID NO: 1530 - RNA, 23 nt, Homo sapiens
uggcccggcgacgucucacgguc

SEQ ID NO: 1531 - RNA, 23 nt, Homo sapiens
gaccgugagacgucgccgggcca

SEQ ID NO: 1532 - RNA, 23 nt, Homo sapiens
ugaguggggcucccgggacggcg

SEQ ID NO: 1533 - RNA, 23 nt, Homo sapiens
cgccgucccgggagccccacuca

SEQ ID NO: 1534 - RNA, 21 nt, Homo sapiens
agcggugcuccugcgggccga

SEQ ID NO: 1535 - RNA, 21 nt, Homo sapiens
ucggcccgcaggagcaccgcu

SEQ ID NO: 1536 - RNA, 23 nt, Homo sapiens
ccggucccaggagaaccugcaga

SEQ ID NO: 1537 - RNA, 23 nt, Homo sapiens
ucugcagguucuccugggaccgg

SEQ ID NO: 1538 - RNA, 22 nt, Homo sapiens
aaggcccgggcuuuccucccag

SEQ ID NO: 1539 - RNA, 22 nt, Homo sapiens
cugggaggaaagcccgggccuu

SEQ ID NO: 1540 - RNA, 22 nt, Homo sapiens
agggaaggaggcuuggucuuag

SEQ ID NO: 1541 - RNA, 22 nt, Homo sapiens
cuaagaccaagccuccuucccu

SEQ ID NO: 1542 - RNA, 21 nt, Homo sapiens
gagguuuggggaggauuugcu

SEQ ID NO: 1543 - RNA, 21 nt, Homo sapiens
agcaaauccuccccaaaccuc

SEQ ID NO: 1544 - RNA, 20 nt, Homo sapiens
cgccccuccugcccccacag

SEQ ID NO: 1545 - RNA, 20 nt, Homo sapiens
cugugggggcaggaggggcg

SEQ ID NO: 1546 - RNA, 22 nt, Homo sapiens
ugcggggacaggccagggcauc

SEQ ID NO: 1547 - RNA, 22 nt, Homo sapiens
gaugcccuggccuguccccgca

SEQ ID NO: 1548 - RNA, 22 nt, Homo sapiens
ccugacccacccccucccgcag

SEQ ID NO: 1549 - RNA, 22 nt, Homo sapiens
cugcgggagggggugggucagg

SEQ ID NO: 1550 - RNA, 22 nt, Homo sapiens
cucgggcggaggugguugagug

SEQ ID NO: 1551 - RNA, 22 nt, Homo sapiens
cacucaaccaccuccgcccgag

SEQ ID NO: 1552 - RNA, 24 nt, Homo sapiens
agaggacccguagcugcuagaagg

SEQ ID NO: 1553 - RNA, 24 nt, Homo sapiens
ccuucuagcagcuacggguccucu

SEQ ID NO: 1554 - RNA, 22 nt, Homo sapiens
uuguggaucucaaggaugugcu

SEQ ID NO: 1555 - RNA, 22 nt, Homo sapiens
agcacauccuugagauccacaa

SEQ ID NO: 1556 - RNA, 22 nt, Homo sapiens
uucucuuucuuuagccuugugu

SEQ ID NO: 1557 - RNA, 22 nt, Homo sapiens
acacaaggcuaaagaaagagaa

SEQ ID NO: 1558 - RNA, 22 nt, Homo sapiens
caaggccaaaggaagagaacag

SEQ ID NO: 1559 - RNA, 22 nt, Homo sapiens
cuguucucuuccuuuggccuug

SEQ ID NO: 1560 - RNA, 23 nt, Homo sapiens
augcggaccuggguuagcggagu

SEQ ID NO: 1561 - RNA, 23 nt, Homo sapiens
acuccgcuaacccagguccgcau

SEQ ID NO: 1562 - RNA, 22 nt, Homo sapiens
agccaggcucugaagggaaagu

SEQ ID NO: 1563 - RNA, 22 nt, Homo sapiens
acuuucccuucagagccuggcu

SEQ ID NO: 1564 - RNA, 22 nt, Homo sapiens
uuucccuucagagccuggcuuu

SEQ ID NO: 1565 - RNA, 22 nt, Homo sapiens
aaagccaggcucugaagggaaa

SEQ ID NO: 1566 - RNA, 22 nt, Homo sapiens
ccagagaugguugccuuccuau

SEQ ID NO: 1567 - RNA, 22 nt, Homo sapiens
auaggaaggcaaccaucucugg

SEQ ID NO: 1568 - RNA, 23 nt, Homo sapiens
cagggaggcgcucacucucugcu

SEQ ID NO: 1569 - RNA, 23 nt, Homo sapiens
agcagagagugagcgccucccug

SEQ ID NO: 1570 - RNA, 22 nt, Homo sapiens
caugacgucacagaggcuucgc

SEQ ID NO: 1571 - RNA, 22 nt, Homo sapiens
gcgaagccucugugacgucaug

SEQ ID NO: 1572 - RNA, 23 nt, Homo sapiens
aggccucugugacgucacggugu

SEQ ID NO: 1573 - RNA, 23 nt, Homo sapiens
acaccgugacgucacagaggccu

SEQ ID NO: 1574 - RNA, 23 nt, Homo sapiens
ugccccaccugcugaccacccuc

SEQ ID NO: 1575 - RNA, 23 nt, Homo sapiens
gaggguggucagcagguggggca

SEQ ID NO: 1576 - RNA, 23 nt, Homo sapiens
gugagugggagccgguggggcug

SEQ ID NO: 1577 - RNA, 23 nt, Homo sapiens
cagccccaccggcucccacucac

SEQ ID NO: 1578 - RNA, 21 nt, Homo sapiens
uaggacuagauguuggaauua

SEQ ID NO: 1579 - RNA, 21 nt, Homo sapiens
uaauuccaacaucuaguccua

SEQ ID NO: 1580 - RNA, 22 nt, Homo sapiens
aaauucauguucaaucuaaacc

SEQ ID NO: 1581 - RNA, 22 nt, Homo sapiens
gguuuagauugaacaugaauuu

SEQ ID NO: 1582 - RNA, 22 nt, Homo sapiens
uuuagauugaacaugaaguuag

SEQ ID NO: 1583 - RNA, 22 nt, Homo sapiens
cuaacuucauguucaaucuaaa

SEQ ID NO: 1584 - RNA, 21 nt, Homo sapiens
gagggcaugcgcacuuugucc

SEQ ID NO: 1585 - RNA, 21 nt, Homo sapiens
ggacaaagugcgcaugcccuc

SEQ ID NO: 1586 - RNA, 21 nt, Homo sapiens
acaaggugugcaugccugacc

SEQ ID NO: 1587 - RNA, 21 nt, Homo sapiens
ggucaggcaugcacaccuugu

SEQ ID NO: 1588 - RNA, 22 nt, Homo sapiens
cuucugaucaagauuuguggug

SEQ ID NO: 1589 - RNA, 22 nt, Homo sapiens
caccacaaaucuugaucagaag

SEQ ID NO: 1590 - RNA, 21 nt, Homo sapiens
ccaaaucuugaucagaagccu

SEQ ID NO: 1591 - RNA, 21 nt, Homo sapiens
aggcuucugaucaagauuugg

SEQ ID NO: 1592 - RNA, 24 nt, Homo sapiens
aggcaggggcuggugcugggcggg

SEQ ID NO: 1593 - RNA, 24 nt, Homo sapiens
cccgcccagcaccagccccugccu

SEQ ID NO: 1594 - RNA, 21 nt, Homo sapiens
cgccugcccagcccuccugcu

SEQ ID NO: 1595 - RNA, 21 nt, Homo sapiens
agcaggagggcugggcaggcg

SEQ ID NO: 1596 - RNA, 22 nt, Homo sapiens
uuaacuccuuucacacccaugg

SEQ ID NO: 1597 - RNA, 22 nt, Homo sapiens
ccaugggugugaaaggaguuaa

SEQ ID NO: 1598 - RNA, 21 nt, Homo sapiens
uggauguggaaggaguuaucu

SEQ ID NO: 1599 - RNA, 21 nt, Homo sapiens
agauaacuccuuccacaucca

SEQ ID NO: 1600 - RNA, 22 nt, Homo sapiens
ugagugauugauagcuauguuc

SEQ ID NO: 1601 - RNA, 22 nt, Homo sapiens
gaacauagcuaucaaucacuca

SEQ ID NO: 1602 - RNA, 21 nt, Homo sapiens
auagcaauugcucuuuuggaa

SEQ ID NO: 1603 - RNA, 21 nt, Homo sapiens
uuccaaaagagcaauugcuau

SEQ ID NO: 1604 - RNA, 21 nt, Homo sapiens
ucugaaagagcaguugguguu

SEQ ID NO: 1605 - RNA, 21 nt, Homo sapiens
aacaccaacugcucuuucaga

SEQ ID NO: 1606 - RNA, 23 nt, Homo sapiens
cgcgggcgcuccuggccgccgcc

SEQ ID NO: 1607 - RNA, 23 nt, Homo sapiens
ggcggcggccaggagcgcccgcg

SEQ ID NO: 1608 - RNA, 20 nt, Homo sapiens
ccaggagauccagagagaau

SEQ ID NO: 1609 - RNA, 20 nt, Homo sapiens
auucucucuggaucuccugg

SEQ ID NO: 1610 - RNA, 22 nt, Homo sapiens
auucucucuggaucccauggau

SEQ ID NO: 1611 - RNA, 22 nt, Homo sapiens
auccaugggauccagagagaau

SEQ ID NO: 1612 - RNA, 22 nt, Homo sapiens
ucugccauccucccuccccuac

SEQ ID NO: 1613 - RNA, 22 nt, Homo sapiens
guaggggagggaggauggcaga

SEQ ID NO: 1614 - RNA, 24 nt, Homo sapiens
ggugggauggagagaagguaugag

SEQ ID NO: 1615 - RNA, 24 nt, Homo sapiens
cucauaccuucucuccaucccacc

SEQ ID NO: 1616 - RNA, 18 nt, Homo sapiens
ugagaugacacuguagcu

SEQ ID NO: 1617 - RNA, 18 nt, Homo sapiens
agcuacagugucaucuca

SEQ ID NO: 1618 - RNA, 21 nt, Homo sapiens
agcagacuugaccuacaauua

SEQ ID NO: 1619 - RNA, 21 nt, Homo sapiens
uaauuguaggucaagucugcu

SEQ ID NO: 1620 - RNA, 22 nt, Homo sapiens
cagaacaggagcauagaaaggc

SEQ ID NO: 1621 - RNA, 22 nt, Homo sapiens
gccuuucuaugcuccuguucug

SEQ ID NO: 1622 - RNA, 22 nt, Homo sapiens
uuaauuuuuuguuucggucacu

SEQ ID NO: 1623 - RNA, 22 nt, Homo sapiens
agugaccgaaacaaaaaauuaa

SEQ ID NO: 1624 - RNA, 23 nt, Homo sapiens
cuugccauccugguccacugcau

SEQ ID NO: 1625 - RNA, 23 nt, Homo sapiens
augcaguggaccaggauggcaag

SEQ ID NO: 1626 - RNA, 22 nt, Homo sapiens
guggaccaggauggcaagggcu

SEQ ID NO: 1627 - RNA, 22 nt, Homo sapiens
agcccuugccauccugguccac

SEQ ID NO: 1628 - RNA, 22 nt, Homo sapiens
auaccucaucuagaaugcugua

SEQ ID NO: 1629 - RNA, 22 nt, Homo sapiens
uacagcauucuagaugagguau

SEQ ID NO: 1630 - RNA, 22 nt, Homo sapiens
uucuagaugagagauauauaua

SEQ ID NO: 1631 - RNA, 22 nt, Homo sapiens
uauauauaucucucaucuagaa

SEQ ID NO: 1632 - RNA, 22 nt, Homo sapiens
ucuucuuccuuugcagaguuga

SEQ ID NO: 1633 - RNA, 22 nt, Homo sapiens
ucaacucugcaaaggaagaaga

SEQ ID NO: 1634 - RNA, 22 nt, Homo sapiens
aauucuguaaaggaagaagagg

SEQ ID NO: 1635 - RNA, 22 nt, Homo sapiens
ccucuucuuccuuuacagaauu

SEQ ID NO: 1636 - RNA, 22 nt, Homo sapiens
uaggagggaauaguaaaagcag

SEQ ID NO: 1637 - RNA, 22 nt, Homo sapiens
cugcuuuuacuauucccuccua

SEQ ID NO: 1638 - RNA, 22 nt, Homo sapiens
acccuugagccugaucccuagc

SEQ ID NO: 1639 - RNA, 22 nt, Homo sapiens
gcuagggaucaggcucaagggu

SEQ ID NO: 1640 - RNA, 22 nt, Homo sapiens
aauguuggaauccucgcuagag

SEQ ID NO: 1641 - RNA, 22 nt, Homo sapiens
cucuagcgaggauuccaacauu

SEQ ID NO: 1642 - RNA, 21 nt, Homo sapiens
uagcggggauuccaauauugg

SEQ ID NO: 1643 - RNA, 21 nt, Homo sapiens
ccaauauuggaauccccgcua

SEQ ID NO: 1644 - RNA, 22 nt, Homo sapiens
ugauugucuucauaucuagaac

SEQ ID NO: 1645 - RNA, 22 nt, Homo sapiens
guucuagauaugaagacaauca

SEQ ID NO: 1646 - RNA, 22 nt, Homo sapiens
uucuggauaugaagacaaucaa

SEQ ID NO: 1647 - RNA, 22 nt, Homo sapiens
uugauugucuucauauccagaa

SEQ ID NO: 1648 - RNA, 23 nt, Homo sapiens
ccccgguguuggggcgcgucugc

SEQ ID NO: 1649 - RNA, 23 nt, Homo sapiens
gcagacgcgccccaacaccgggg

SEQ ID NO: 1650 - RNA, 21 nt, Homo sapiens
ggcgcgcccagcucccgggcu

SEQ ID NO: 1651 - RNA, 21 nt, Homo sapiens
agcccgggagcugggcgcgcc

SEQ ID NO: 1652 - RNA, 20 nt, Homo sapiens
ugaggagaugcugggacuga

SEQ ID NO: 1653 - RNA, 20 nt, Homo sapiens
ucagucccagcaucuccuca

SEQ ID NO: 1654 - RNA, 21 nt, Homo sapiens
agagucggcgacgccgccagc

SEQ ID NO: 1655 - RNA, 21 nt, Homo sapiens
gcuggcggcgucgccgacucu

SEQ ID NO: 1656 - RNA, 22 nt, Homo sapiens
ugaagccagcucuggucugggc

SEQ ID NO: 1657 - RNA, 22 nt, Homo sapiens
gcccagaccagagcuggcuuca

SEQ ID NO: 1658 - RNA, 22 nt, Homo sapiens
ugagaccaggacuggaugcacc

SEQ ID NO: 1659 - RNA, 22 nt, Homo sapiens
ggugcauccaguccuggucuca

SEQ ID NO: 1660 - RNA, 24 nt, Homo sapiens
gaugcgccgcccacugccccgcgc

SEQ ID NO: 1661 - RNA, 24 nt, Homo sapiens
gcgcggggcagugggcggcgcauc

SEQ ID NO: 1662 - RNA, 22 nt, Homo sapiens
gcggggguggcggcggcauccc

SEQ ID NO: 1663 - RNA, 22 nt, Homo sapiens
gggaugccgccgccacccccgc

SEQ ID NO: 1664 - RNA, 22 nt, Homo sapiens
uuacggaccagcuaagggaggc

SEQ ID NO: 1665 - RNA, 22 nt, Homo sapiens
gccucccuuagcugguccguaa

SEQ ID NO: 1666 - RNA, 21 nt, Homo sapiens
cacacauagcagguguauaua

SEQ ID NO: 1667 - RNA, 21 nt, Homo sapiens
uauauacaccugcuaugugug

SEQ ID NO: 1668 - RNA, 22 nt, Homo sapiens
guauacaccugauauguguaug

SEQ ID NO: 1669 - RNA, 22 nt, Homo sapiens
cauacacauaucagguguauac

SEQ ID NO: 1670 - RNA, 22 nt, Homo sapiens
ugaaugguaaagcgaugucaca

SEQ ID NO: 1671 - RNA, 22 nt, Homo sapiens
ugugacaucgcuuuaccauuca

SEQ ID NO: 1672 - RNA, 20 nt, Homo sapiens
aucgcuuuaccauucauguu

SEQ ID NO: 1673 - RNA, 20 nt, Homo sapiens
aacaugaaugguaaagcgau

SEQ ID NO: 1674 - RNA, 18 nt, Homo sapiens
uggauaugaugacugaaa

SEQ ID NO: 1675 - RNA, 18 nt, Homo sapiens
uuucagucaucauaucca

SEQ ID NO: 1676 - RNA, 18 nt, Homo sapiens
cggugagcgcucgcuggc

SEQ ID NO: 1677 - RNA, 18 nt, Homo sapiens
gccagcgagcgcucaccg

SEQ ID NO: 1678 - RNA, 23 nt, Homo sapiens
ucugcacugugaguuggcuggcu

SEQ ID NO: 1679 - RNA, 23 nt, Homo sapiens
agccagccaacucacagugcaga

SEQ ID NO: 1680 - RNA, 24 nt, Homo sapiens
acauccugcuccacagggcagagg

SEQ ID NO: 1681 - RNA, 24 nt, Homo sapiens
ccucugcccuguggagcaggaugu

SEQ ID NO: 1682 - RNA, 22 nt, Homo sapiens
ucuggcuaucucacgagacugu

SEQ ID NO: 1683 - RNA, 22 nt, Homo sapiens
acagucucgugagauagccaga

SEQ ID NO: 1684 - RNA, 22 nt, Homo sapiens
auauuauuagccacuucuggau

SEQ ID NO: 1685 - RNA, 22 nt, Homo sapiens
auccagaaguggcuaauaauau

SEQ ID NO: 1686 - RNA, 21 nt, Homo sapiens
agaaguggcuaauaauauuga

SEQ ID NO: 1687 - RNA, 21 nt, Homo sapiens
ucaauauuauuagccacuucu

SEQ ID NO: 1688 - RNA, 22 nt, Homo sapiens
uaaaguggcagaguauagacac

SEQ ID NO: 1689 - RNA, 22 nt, Homo sapiens
gugucuauacucugccacuuua

SEQ ID NO: 1690 - RNA, 22 nt, Homo sapiens
ugucuauacucugucacuuuac

SEQ ID NO: 1691 - RNA, 22 nt, Homo sapiens
guaaagugacagaguauagaca

SEQ ID NO: 1692 - RNA, 21 nt, Homo sapiens
ucucaguaaguggcacucugu

SEQ ID NO: 1693 - RNA, 21 nt, Homo sapiens
acagagugccacuuacugaga

SEQ ID NO: 1694 - RNA, 21 nt, Homo sapiens
gacagagugccacuuacugaa

SEQ ID NO: 1695 - RNA, 21 nt, Homo sapiens
uucaguaaguggcacucuguc

SEQ ID NO: 1696 - RNA, 22 nt, Homo sapiens
aacucacgaaguauaccgaagu

SEQ ID NO: 1697 - RNA, 22 nt, Homo sapiens
acuucgguauacuucgugaguu

SEQ ID NO: 1698 - RNA, 22 nt, Homo sapiens
uucgguauacuuugugaauugg

SEQ ID NO: 1699 - RNA, 22 nt, Homo sapiens
ccaauucacaaaguauaccgaa

SEQ ID NO: 1700 - RNA, 22 nt, Homo sapiens
acuggcaugcugcauuuauaua

SEQ ID NO: 1701 - RNA, 22 nt, Homo sapiens
uauauaaaugcagcaugccagu

SEQ ID NO: 1702 - RNA, 22 nt, Homo sapiens
aucuaaaugcagcaugccaguc

SEQ ID NO: 1703 - RNA, 22 nt, Homo sapiens
gacuggcaugcugcauuuagau

SEQ ID NO: 1704 - RNA, 19 nt, Homo sapiens
cauccguccgucuguccac

SEQ ID NO: 1705 - RNA, 19 nt, Homo sapiens
guggacagacggacggaug

SEQ ID NO: 1706 - RNA, 21 nt, Homo sapiens
aguggaccgaggaaggaagga

SEQ ID NO: 1707 - RNA, 21 nt, Homo sapiens
uccuuccuuccucgguccacu

SEQ ID NO: 1708 - RNA, 22 nt, Homo sapiens
uacacaagaaaaccaaggcuca

SEQ ID NO: 1709 - RNA, 22 nt, Homo sapiens
ugagccuugguuuucuugugua

SEQ ID NO: 1710 - RNA, 21 nt, Homo sapiens
uaacauaauaguguggauuga

SEQ ID NO: 1711 - RNA, 21 nt, Homo sapiens
ucaauccacacuauuauguua

SEQ ID NO: 1712 - RNA, 21 nt, Homo sapiens
ugcuuaaccuugcccucgaaa

SEQ ID NO: 1713 - RNA, 21 nt, Homo sapiens
uuucgagggcaagguuaagca

SEQ ID NO: 1714 - RNA, 21 nt, Homo sapiens
uuggacgguaagguuaagcaa

SEQ ID NO: 1715 - RNA, 21 nt, Homo sapiens
uugcuuaaccuuaccguccaa

SEQ ID NO: 1716 - RNA, 21 nt, Homo sapiens
aaaagcaucaggaaguaccca

SEQ ID NO: 1717 - RNA, 21 nt, Homo sapiens
uggguacuuccugaugcuuuu

SEQ ID NO: 1718 - RNA, 21 nt, Homo sapiens
gcaggacaggcagaaguggau

SEQ ID NO: 1719 - RNA, 21 nt, Homo sapiens
auccacuucugccuguccugc

SEQ ID NO: 1720 - RNA, 22 nt, Homo sapiens
cagggcuggcagugacaugggu

SEQ ID NO: 1721 - RNA, 22 nt, Homo sapiens
acccaugucacugccagcccug

SEQ ID NO: 1722 - RNA, 22 nt, Homo sapiens
auuucccugccauucccuuggc

SEQ ID NO: 1723 - RNA, 22 nt, Homo sapiens
gccaagggaauggcagggaaau

SEQ ID NO: 1724 - RNA, 22 nt, Homo sapiens
uggcggcgguaguuaugggcuu

SEQ ID NO: 1725 - RNA, 22 nt, Homo sapiens
aagcccauaacuaccgccgcca

SEQ ID NO: 1726 - RNA, 22 nt, Homo sapiens
gcucccucuagggucgcucgga

SEQ ID NO: 1727 - RNA, 22 nt, Homo sapiens
uccgagcgacccuagagggagc

SEQ ID NO: 1728 - RNA, 22 nt, Homo sapiens
ugggaacuuaguagagguuuaa

SEQ ID NO: 1729 - RNA, 22 nt, Homo sapiens
uuaaaccucuacuaaguuccca

SEQ ID NO: 1730 - RNA, 21 nt, Homo sapiens
uggggcuagugaugcaggacg

SEQ ID NO: 1731 - RNA, 21 nt, Homo sapiens
cguccugcaucacuagcccca

SEQ ID NO: 1732 - RNA, 22 nt, Homo sapiens
gcugacagcagggcuggccgcu

SEQ ID NO: 1733 - RNA, 22 nt, Homo sapiens
agcggccagcccugcugucagc

SEQ ID NO: 1734 - RNA, 21 nt, Homo sapiens
auuggacugcugauggcccgu

SEQ ID NO: 1735 - RNA, 21 nt, Homo sapiens
acgggccaucagcaguccaau

SEQ ID NO: 1736 - RNA, 22 nt, Homo sapiens
aggccaucagcaguccaaugaa

SEQ ID NO: 1737 - RNA, 22 nt, Homo sapiens
uucauuggacugcugauggccu

SEQ ID NO: 1738 - RNA, 22 nt, Homo sapiens
uuggacagaaaacacgcaggaa

SEQ ID NO: 1739 - RNA, 22 nt, Homo sapiens
uuccugcguguuuucuguccaa

SEQ ID NO: 1740 - RNA, 20 nt, Homo sapiens
ccugcguguuuucuguccaa

SEQ ID NO: 1741 - RNA, 20 nt, Homo sapiens
uuggacagaaaacacgcagg

SEQ ID NO: 1742 - RNA, 22 nt, Homo sapiens
ugagacaggcuuaugcugcuau

SEQ ID NO: 1743 - RNA, 22 nt, Homo sapiens
auagcagcauaagccugucuca

SEQ ID NO: 1744 - RNA, 22 nt, Homo sapiens
auagcagcaugaaccugucuca

SEQ ID NO: 1745 - RNA, 22 nt, Homo sapiens
ugagacagguucaugcugcuau

SEQ ID NO: 1746 - RNA, 20 nt, Homo sapiens
gagacagguucaugcugcua

SEQ ID NO: 1747 - RNA, 20 nt, Homo sapiens
uagcagcaugaaccugucuc

SEQ ID NO: 1748 - RNA, 21 nt, Homo sapiens
auagcagcauaagccugucuc

SEQ ID NO: 1749 - RNA, 21 nt, Homo sapiens
gagacaggcuuaugcugcuau

SEQ ID NO: 1750 - RNA, 22 nt, Homo sapiens
uguguggauccuggaggaggca

SEQ ID NO: 1751 - RNA, 22 nt, Homo sapiens
ugccuccuccaggauccacaca

SEQ ID NO: 1752 - RNA, 22 nt, Homo sapiens
agacaucaagaucagucccaaa

SEQ ID NO: 1753 - RNA, 22 nt, Homo sapiens
uuugggacugaucuugaugucu

SEQ ID NO: 1754 - RNA, 22 nt, Homo sapiens
uuugggacugaucuugaugucu

SEQ ID NO: 1755 - RNA, 22 nt, Homo sapiens
agacaucaagaucagucccaaa

SEQ ID NO: 1756 - RNA, 22 nt, Homo sapiens
aaggaaccagaaaaugagaagu

SEQ ID NO: 1757 - RNA, 22 nt, Homo sapiens
acuucucauuuucugguuccuu

SEQ ID NO: 1758 - RNA, 22 nt, Homo sapiens
ucuggccuugacuugacucuuu

SEQ ID NO: 1759 - RNA, 22 nt, Homo sapiens
aaagagucaagucaaggccaga

SEQ ID NO: 1760 - RNA, 23 nt, Homo sapiens
ucaaggccagaggucccacagca

SEQ ID NO: 1761 - RNA, 23 nt, Homo sapiens
ugcugugggaccucuggccuuga

SEQ ID NO: 1762 - RNA, 21 nt, Homo sapiens
acuccaguuuuaguucucuug

SEQ ID NO: 1763 - RNA, 21 nt, Homo sapiens
caagagaacuaaaacuggagu

SEQ ID NO: 1764 - RNA, 22 nt, Homo sapiens
aagagaacugaaaguggagccu

SEQ ID NO: 1765 - RNA, 22 nt, Homo sapiens
aggcuccacuuucaguucucuu

SEQ ID NO: 1766 - RNA, 22 nt, Homo sapiens
uaagggguguauggcagaugca

SEQ ID NO: 1767 - RNA, 22 nt, Homo sapiens
ugcaucugccauacaccccuua

SEQ ID NO: 1768 - RNA, 21 nt, Homo sapiens
uuucagauaacaguauuacau

SEQ ID NO: 1769 - RNA, 21 nt, Homo sapiens
auguaauacuguuaucugaaa

SEQ ID NO: 1770 - RNA, 22 nt, Homo sapiens
aagcaauacuguuaccugaaau

SEQ ID NO: 1771 - RNA, 22 nt, Homo sapiens
auuucagguaacaguauugcuu

SEQ ID NO: 1772 - RNA, 22 nt, Homo sapiens
uacuaacugcagauucaaguga

SEQ ID NO: 1773 - RNA, 22 nt, Homo sapiens
ucacuugaaucugcaguuagua

SEQ ID NO: 1774 - RNA, 21 nt, Homo sapiens
auugccuaacaugugccagaa

SEQ ID NO: 1775 - RNA, 21 nt, Homo sapiens
uucuggcacauguuaggcaau

SEQ ID NO: 1776 - RNA, 22 nt, Homo sapiens
ucugguauguaguagguaauaa

SEQ ID NO: 1777 - RNA, 22 nt, Homo sapiens
uuauuaccuacuacauaccaga

SEQ ID NO: 1778 - RNA, 22 nt, Homo sapiens
aguugccuuuuuguucccaugc

SEQ ID NO: 1779 - RNA, 22 nt, Homo sapiens
gcaugggaacaaaaaggcaacu

SEQ ID NO: 1780 - RNA, 21 nt, Homo sapiens
auaggcaccaaaaagcaacaa

SEQ ID NO: 1781 - RNA, 21 nt, Homo sapiens
uuguugcuuuuuggugccuau

SEQ ID NO: 1782 - RNA, 22 nt, Homo sapiens
ccugcaacuuugccugaucaga

SEQ ID NO: 1783 - RNA, 22 nt, Homo sapiens
ucugaucaggcaaaguugcagg

SEQ ID NO: 1784 - RNA, 22 nt, Homo sapiens
ugaucaggcaaaauugcagacu

SEQ ID NO: 1785 - RNA, 22 nt, Homo sapiens
agucugcaauuuugccugauca

SEQ ID NO: 1786 - RNA, 22 nt, Homo sapiens
uuguggcuggucaugaggcuaa

SEQ ID NO: 1787 - RNA, 22 nt, Homo sapiens
uuagccucaugaccagccacaa

SEQ ID NO: 1788 - RNA, 21 nt, Homo sapiens
uuagucucaugaucagacaca

SEQ ID NO: 1789 - RNA, 21 nt, Homo sapiens
ugugucugaucaugagacuaa

SEQ ID NO: 1790 - RNA, 22 nt, Homo sapiens
aaagauagacaauuggcuaaau

SEQ ID NO: 1791 - RNA, 22 nt, Homo sapiens
auuuagccaauugucuaucuuu

SEQ ID NO: 1792 - RNA, 22 nt, Homo sapiens
uuagccaauuguccaucuuuag

SEQ ID NO: 1793 - RNA, 22 nt, Homo sapiens
cuaaagauggacaauuggcuaa

SEQ ID NO: 1794 - RNA, 22 nt, Homo sapiens
ucugugagaccaaagaacuacu

SEQ ID NO: 1795 - RNA, 22 nt, Homo sapiens
aguaguucuuuggucucacaga

SEQ ID NO: 1796 - RNA, 22 nt, Homo sapiens
uuguucuuuggucuuucagcca

SEQ ID NO: 1797 - RNA, 22 nt, Homo sapiens
uggcugaaagaccaaagaacaa

SEQ ID NO: 1798 - RNA, 23 nt, Homo sapiens
cgggcuguccggaggggucggcu

SEQ ID NO: 1799 - RNA, 23 nt, Homo sapiens
agccgaccccuccggacagcccg

SEQ ID NO: 1800 - RNA, 23 nt, Homo sapiens
ucuguauucuccuuugccugcag

SEQ ID NO: 1801 - RNA, 23 nt, Homo sapiens
cugcaggcaaaggagaauacaga

SEQ ID NO: 1802 - RNA, 23 nt, Homo sapiens
uacauggauggaaaccuucaagc

SEQ ID NO: 1803 - RNA, 23 nt, Homo sapiens
gcuugaagguuuccauccaugua

SEQ ID NO: 1804 - RNA, 22 nt, Homo sapiens
uauggagguucuagaccauguu

SEQ ID NO: 1805 - RNA, 22 nt, Homo sapiens
aacauggucuagaaccuccaua

SEQ ID NO: 1806 - RNA, 22 nt, Homo sapiens
gggaccauccugccugcugugg

SEQ ID NO: 1807 - RNA, 22 nt, Homo sapiens
ccacagcaggcaggaugguccc

SEQ ID NO: 1808 - RNA, 22 nt, Homo sapiens
ucagcaggcaggcuggugcagc

SEQ ID NO: 1809 - RNA, 22 nt, Homo sapiens
gcugcaccagccugccugcuga

SEQ ID NO: 1810 - RNA, 22 nt, Homo sapiens
ucaccugaccucccaugccugu

SEQ ID NO: 1811 - RNA, 22 nt, Homo sapiens
acaggcaugggaggucagguga

SEQ ID NO: 1812 - RNA, 22 nt, Homo sapiens
caggcacgggagcucaggugag

SEQ ID NO: 1813 - RNA, 22 nt, Homo sapiens
cucaccugagcucccgugccug

SEQ ID NO: 1814 - RNA, 21 nt, Homo sapiens
ugaguguugucuacgagggca

SEQ ID NO: 1815 - RNA, 21 nt, Homo sapiens
ugcccucguagacaacacuca

SEQ ID NO: 1816 - RNA, 21 nt, Homo sapiens
acugacaggagagcauuuuga

SEQ ID NO: 1817 - RNA, 21 nt, Homo sapiens
ucaaaaugcucuccugucagu

SEQ ID NO: 1818 - RNA, 22 nt, Homo sapiens
ugaccugggacucggacagcug

SEQ ID NO: 1819 - RNA, 22 nt, Homo sapiens
cagcuguccgagucccagguca

SEQ ID NO: 1820 - RNA, 22 nt, Homo sapiens
ucucaggaguaaagacagaguu

SEQ ID NO: 1821 - RNA, 22 nt, Homo sapiens
aacucugucuuuacuccugaga

SEQ ID NO: 1822 - RNA, 22 nt, Homo sapiens
aacucugucuucacucaugagu

SEQ ID NO: 1823 - RNA, 22 nt, Homo sapiens
acucaugagugaagacagaguu

SEQ ID NO: 1824 - RNA, 22 nt, Homo sapiens
uggggcggagcuuccggaggcc

SEQ ID NO: 1825 - RNA, 22 nt, Homo sapiens
ggccuccggaagcuccgcccca

SEQ ID NO: 1826 - RNA, 22 nt, Homo sapiens
caaucagcaaguauacugcccu

SEQ ID NO: 1827 - RNA, 22 nt, Homo sapiens
agggcaguauacuugcugauug

SEQ ID NO: 1828 - RNA, 22 nt, Homo sapiens
uggcagugucuuagcugguugu

SEQ ID NO: 1829 - RNA, 22 nt, Homo sapiens
acaaccagcuaagacacugcca

SEQ ID NO: 1830 - RNA, 22 nt, Homo sapiens
ccaauauuggcugugcugcucc

SEQ ID NO: 1831 - RNA, 22 nt, Homo sapiens
ggagcagcacagccaauauugg

SEQ ID NO: 1832 - RNA, 21 nt, Homo sapiens
uagcagcacagaaauauuggc

SEQ ID NO: 1833 - RNA, 21 nt, Homo sapiens
gccaauauuucugugcugcua

SEQ ID NO: 1834 - RNA, 21 nt, Homo sapiens
uaauuuuauguauaagcuagu

SEQ ID NO: 1835 - RNA, 21 nt, Homo sapiens
acuagcuuauacauaaaauua

SEQ ID NO: 1836 - RNA, 22 nt, Homo sapiens
gagcuuauucauaaaagugcag

SEQ ID NO: 1837 - RNA, 22 nt, Homo sapiens
cugcacuuuuaugaauaagcuc

SEQ ID NO: 1838 - RNA, 22 nt, Homo sapiens
aagacgggaggaaagaagggag

SEQ ID NO: 1839 - RNA, 22 nt, Homo sapiens
cucccuucuuuccucccgucuu

SEQ ID NO: 1840 - RNA, 22 nt, Homo sapiens
cagugguuuuacccuaugguag

SEQ ID NO: 1841 - RNA, 22 nt, Homo sapiens
cuaccauaggguaaaaccacug

SEQ ID NO: 1842 - RNA, 22 nt, Homo sapiens
auucuaauuucuccacgucuuu

SEQ ID NO: 1843 - RNA, 22 nt, Homo sapiens
aaagacguggagaaauuagaau

SEQ ID NO: 1844 - RNA, 22 nt, Homo sapiens
aaccagcaccccaacuuuggac

SEQ ID NO: 1845 - RNA, 22 nt, Homo sapiens
guccaaaguuggggugcugguu

SEQ ID NO: 1846 - RNA, 24 nt, Homo sapiens
aaagacauaggauagagucaccuc

SEQ ID NO: 1847 - RNA, 24 nt, Homo sapiens
gaggugacucuauccuaugucuuu

SEQ ID NO: 1848 - RNA, 22 nt, Homo sapiens
uaacugguugaacaacugaacc

SEQ ID NO: 1849 - RNA, 22 nt, Homo sapiens
gguucaguuguucaaccaguua

SEQ ID NO: 1850 - RNA, 20 nt, Homo sapiens
cgugccacccuuuuccccag

SEQ ID NO: 1851 - RNA, 20 nt, Homo sapiens
cuggggaaaaggguggcacg

SEQ ID NO: 1852 - RNA, 17 nt, Homo sapiens
guggggccaggcggugg

SEQ ID NO: 1853 - RNA, 17 nt, Homo sapiens
ccaccgccuggccccac

SEQ ID NO: 1854 - RNA, 22 nt, Homo sapiens
aaaagcuggguugagagggcaa

SEQ ID NO: 1855 - RNA, 22 nt, Homo sapiens
uugcccucucaacccagcuuuu

SEQ ID NO: 1856 - RNA, 22 nt, Homo sapiens
gguccagaggggagauagguuc

SEQ ID NO: 1857 - RNA, 22 nt, Homo sapiens
gaaccuaucuccccucuggacc

SEQ ID NO: 1858 - RNA, 23 nt, Homo sapiens
uagccuucagaucuugguguuuu

SEQ ID NO: 1859 - RNA, 23 nt, Homo sapiens
aaaacaccaagaucugaaggcua

SEQ ID NO: 1860 - RNA, 23 nt, Homo sapiens
ccacuuggaucugaaggcugccc

SEQ ID NO: 1861 - RNA, 23 nt, Homo sapiens
gggcagccuucagauccaagugg

SEQ ID NO: 1862 - RNA, 22 nt, Homo sapiens
ugugcgcagggagaccucuccc

SEQ ID NO: 1863 - RNA, 22 nt, Homo sapiens
gggagaggucucccugcgcaca

SEQ ID NO: 1864 - RNA, 22 nt, Homo sapiens
ugucuacuacuggagacacugg

SEQ ID NO: 1865 - RNA, 22 nt, Homo sapiens
ccagugucuccaguaguagaca

SEQ ID NO: 1866 - RNA, 21 nt, Homo sapiens
aaggcagggcccccgcucccc

SEQ ID NO: 1867 - RNA, 21 nt, Homo sapiens
ggggagcgggggcccugccuu

SEQ ID NO: 1868 - RNA, 21 nt, Homo sapiens
cugacuguugccguccuccag

SEQ ID NO: 1869 - RNA, 21 nt, Homo sapiens
cuggaggacggcaacagucag

SEQ ID NO: 1870 - RNA, 25 nt, Homo sapiens
aaaaaccacaauuacuuuugcacca

SEQ ID NO: 1871 - RNA, 25 nt, Homo sapiens
uggugcaaaaguaauugugguuuuu

SEQ ID NO: 1872 - RNA, 23 nt, Homo sapiens
caaaaaccgcaauuacuuuugca

SEQ ID NO: 1873 - RNA, 23 nt, Homo sapiens
ugcaaaaguaauugcgguuuuug

SEQ ID NO: 1874 - RNA, 22 nt, Homo sapiens
augugccugagggaguaagaca

SEQ ID NO: 1875 - RNA, 22 nt, Homo sapiens
ugucuuacucccucaggcacau

SEQ ID NO: 1876 - RNA, 20 nt, Homo sapiens
ucuuacucccucaggcacug

SEQ ID NO: 1877 - RNA, 20 nt, Homo sapiens
cagugccugagggaguaaga

SEQ ID NO: 1878 - RNA, 22 nt, Homo sapiens
agacacauuuggagagggaccc

SEQ ID NO: 1879 - RNA, 22 nt, Homo sapiens
gggucccucuccaaaugugucu

SEQ ID NO: 1880 - RNA, 22 nt, Homo sapiens
gguucccucuccaaaugugucu

SEQ ID NO: 1881 - RNA, 22 nt, Homo sapiens
agacacauuuggagagggaacc

SEQ ID NO: 1882 - RNA, 21 nt, Homo sapiens
aaaauuucuuucacuacuuag

SEQ ID NO: 1883 - RNA, 21 nt, Homo sapiens
cuaaguagugaaagaaauuuu

SEQ ID NO: 1884 - RNA, 21 nt, Homo sapiens
uuagugaaggcuauuuuaauu

SEQ ID NO: 1885 - RNA, 21 nt, Homo sapiens
aauuaaaauagccuucacuaa

SEQ ID NO: 1886 - RNA, 20 nt, Homo sapiens
acuguaaacgcuuucugaug

SEQ ID NO: 1887 - RNA, 20 nt, Homo sapiens
caucagaaagcguuuacagu

SEQ ID NO: 1888 - RNA, 22 nt, Homo sapiens
gcaugugaugaagcaaaucagu

SEQ ID NO: 1889 - RNA, 22 nt, Homo sapiens
acugauuugcuucaucacaugc

SEQ ID NO: 1890 - RNA, 24 nt, Homo sapiens
caaagugaugaguaauacuggcug

SEQ ID NO: 1891 - RNA, 24 nt, Homo sapiens
cagccaguauuacucaucacuuug

SEQ ID NO: 1892 - RNA, 20 nt, Homo sapiens
gaaucggaaaggaggcgccg

SEQ ID NO: 1893 - RNA, 20 nt, Homo sapiens
cggcgccuccuuuccgauuc

SEQ ID NO: 1894 - RNA, 21 nt, Homo sapiens
uugugaagaaagaaauucuua

SEQ ID NO: 1895 - RNA, 21 nt, Homo sapiens
uaagaauuucuuucuucacaa

SEQ ID NO: 1896 - RNA, 22 nt, Homo sapiens
aggaggcaucuugagaaaugga

SEQ ID NO: 1897 - RNA, 22 nt, Homo sapiens
uccauuucucaagaugccuccu

SEQ ID NO: 1898 - RNA, 24 nt, Homo sapiens
acaaaaaaaaaagcccaacccuuc

SEQ ID NO: 1899 - RNA, 24 nt, Homo sapiens
gaaggguugggcuuuuuuuuuugu

SEQ ID NO: 1900 - RNA, 22 nt, Homo sapiens
uguuguacuuuuuuuuuuguuc

SEQ ID NO: 1901 - RNA, 22 nt, Homo sapiens
gaacaaaaaaaaaaguacaaca

SEQ ID NO: 1902 - RNA, 21 nt, Homo sapiens
ucucucggcuccucgcggcuc

SEQ ID NO: 1903 - RNA, 21 nt, Homo sapiens
gagccgcgaggagccgagaga

SEQ ID NO: 1904 - RNA, 23 nt, Homo sapiens
cgagggcauuucaugaugcaggc

SEQ ID NO: 1905 - RNA, 23 nt, Homo sapiens
gccugcaucaugaaaugcccucg

SEQ ID NO: 1906 - RNA, 22 nt, Homo sapiens
augaagugcacucaugauaugu

SEQ ID NO: 1907 - RNA, 22 nt, Homo sapiens
acauaucaugagugcacuucau

SEQ ID NO: 1908 - RNA, 22 nt, Homo sapiens
ugucuacauuaaugaaaagagc

SEQ ID NO: 1909 - RNA, 22 nt, Homo sapiens
gcucuuuucauuaauguagaca

SEQ ID NO: 1910 - RNA, 22 nt, Homo sapiens
ucacccugcaucccgcacccag

SEQ ID NO: 1911 - RNA, 22 nt, Homo sapiens
cugggugcgggaugcaggguga

SEQ ID NO: 1912 - RNA, 22 nt, Homo sapiens
gugggcugggcugggcugggcc

SEQ ID NO: 1913 - RNA, 22 nt, Homo sapiens
ggcccagcccagcccagcccac

SEQ ID NO: 1914 - RNA, 20 nt, Homo sapiens
cgcgggucggggucugcagg

SEQ ID NO: 1915 - RNA, 20 nt, Homo sapiens
ccugcagaccccgacccgcg

SEQ ID NO: 1916 - RNA, 21 nt, Homo sapiens
ucaccugagcucccgugccug

SEQ ID NO: 1917 - RNA, 21 nt, Homo sapiens
caggcacgggagcucagguga

SEQ ID NO: 1918 - RNA, 20 nt, Homo sapiens
aggcaugggaggucagguga

SEQ ID NO: 1919 - RNA, 20 nt, Homo sapiens
ucaccugaccucccaugccu

SEQ ID NO: 1920 - RNA, 23 nt, Homo sapiens
caucagcacccuauguccuuucu

SEQ ID NO: 1921 - RNA, 23 nt, Homo sapiens
agaaaggacauagggugcugaug

SEQ ID NO: 1922 - RNA, 22 nt, Homo sapiens
aaagacauaguugcaagauggg

SEQ ID NO: 1923 - RNA, 22 nt, Homo sapiens
cccaucuugcaacuaugucuuu

SEQ ID NO: 1924 - RNA, 22 nt, Homo sapiens
uuugugaccugguccacuaacc

SEQ ID NO: 1925 - RNA, 22 nt, Homo sapiens
gguuaguggaccaggucacaaa

SEQ ID NO: 1926 - RNA, 22 nt, Homo sapiens
gaugguugaccagagagcacac

SEQ ID NO: 1927 - RNA, 22 nt, Homo sapiens
gugugcucucuggucaaccauc

SEQ ID NO: 1928 - RNA, 20 nt, Homo sapiens
aaaagcuggguugagagggu

SEQ ID NO: 1929 - RNA, 20 nt, Homo sapiens
acccucucaacccagcuuuu

SEQ ID NO: 1930 - RNA, 21 nt, Homo sapiens
cacaagguauugguauuaccu

SEQ ID NO: 1931 - RNA, 21 nt, Homo sapiens
agguaauaccaauaccuugug

SEQ ID NO: 1932 - RNA, 22 nt, Homo sapiens
uaguaccaguaccuuguguuca

SEQ ID NO: 1933 - RNA, 22 nt, Homo sapiens
ugaacacaagguacugguacua

SEQ ID NO: 1934 - RNA, 22 nt, Homo sapiens
aguauucuguaccagggaaggu

SEQ ID NO: 1935 - RNA, 22 nt, Homo sapiens
accuucccugguacagaauacu

SEQ ID NO: 1936 - RNA, 22 nt, Homo sapiens
uggcaguguauuguuagcuggu

SEQ ID NO: 1937 - RNA, 22 nt, Homo sapiens
accagcuaacaauacacugcca

SEQ ID NO: 1938 - RNA, 22 nt, Homo sapiens
uauacaagggcaagcucucugu

SEQ ID NO: 1939 - RNA, 22 nt, Homo sapiens
acagagagcuugcccuuguaua

SEQ ID NO: 1940 - RNA, 22 nt, Homo sapiens
agcgagguugcccuuuguauau

SEQ ID NO: 1941 - RNA, 22 nt, Homo sapiens
auauacaaagggcaaccucgcu

SEQ ID NO: 1942 - RNA, 22 nt, Homo sapiens
caaucacuaacuccacugccau

SEQ ID NO: 1943 - RNA, 22 nt, Homo sapiens
auggcaguggaguuagugauug

SEQ ID NO: 1944 - RNA, 23 nt, Homo sapiens
uaggcagugucauuagcugauug

SEQ ID NO: 1945 - RNA, 23 nt, Homo sapiens
caaucagcuaaugacacugccua

SEQ ID NO: 1946 - RNA, 22 nt, Homo sapiens
cagccacaacuacccugccacu

SEQ ID NO: 1947 - RNA, 22 nt, Homo sapiens
aguggcaggguaguuguggcug

SEQ ID NO: 1948 - RNA, 22 nt, Homo sapiens
aggcaguguauuguuagcuggc

SEQ ID NO: 1949 - RNA, 22 nt, Homo sapiens
gccagcuaacaauacacugccu

SEQ ID NO: 1950 - RNA, 22 nt, Homo sapiens
aaucacuaaccacacggccagg

SEQ ID NO: 1951 - RNA, 22 nt, Homo sapiens
ccuggccgugugguuagugauu

SEQ ID NO: 1952 - RNA, 23 nt, Homo sapiens
aggcaguguaguuagcugauugc

SEQ ID NO: 1953 - RNA, 23 nt, Homo sapiens
gcaaucagcuaacuacacugccu

SEQ ID NO: 1954 - RNA, 20 nt, Homo sapiens
guccgcucggcgguggccca

SEQ ID NO: 1955 - RNA, 20 nt, Homo sapiens
ugggccaccgccgagcggac

SEQ ID NO: 1956 - RNA, 23 nt, Homo sapiens
gaacgccuguucuugccaggugg

SEQ ID NO: 1957 - RNA, 23 nt, Homo sapiens
ccaccuggcaagaacaggcguuc

SEQ ID NO: 1958 - RNA, 19 nt, Homo sapiens
aagugugcagggcacuggu

SEQ ID NO: 1959 - RNA, 19 nt, Homo sapiens
accagugcccugcacacuu

SEQ ID NO: 1960 - RNA, 21 nt, Homo sapiens
aggggugcuaucugugauuga

SEQ ID NO: 1961 - RNA, 21 nt, Homo sapiens
ucaaucacagauagcaccccu

SEQ ID NO: 1962 - RNA, 22 nt, Homo sapiens
cuuucagucagauguuugcugc

SEQ ID NO: 1963 - RNA, 22 nt, Homo sapiens
gcagcaaacaucugacugaaag

SEQ ID NO: 1964 - RNA, 22 nt, Homo sapiens
uguaaacauccccgacuggaag

SEQ ID NO: 1965 - RNA, 22 nt, Homo sapiens
cuuccagucggggauguuuaca

SEQ ID NO: 1966 - RNA, 22 nt, Homo sapiens
uguaaacauccucgacuggaag

SEQ ID NO: 1967 - RNA, 22 nt, Homo sapiens
cuuccagucgaggauguuuaca

SEQ ID NO: 1968 - RNA, 22 nt, Homo sapiens
agaaguaauugcgguuuugcca

SEQ ID NO: 1969 - RNA, 22 nt, Homo sapiens
uggcaaaaccgcaauuacuucu

SEQ ID NO: 1970 - RNA, 22 nt, Homo sapiens
caaaacuggcaauuacuuuugc

SEQ ID NO: 1971 - RNA, 22 nt, Homo sapiens
gcaaaaguaauugccaguuuug

SEQ ID NO: 1972 - RNA, 22 nt, Homo sapiens
aaaaguaauugcgaguuuuacc

SEQ ID NO: 1973 - RNA, 22 nt, Homo sapiens
gguaaaacucgcaauuacuuuu

SEQ ID NO: 1974 - RNA, 22 nt, Homo sapiens
caagaaccucaguugcuuuugu

SEQ ID NO: 1975 - RNA, 22 nt, Homo sapiens
acaaaagcaacugagguucuug

SEQ ID NO: 1976 - RNA, 22 nt, Homo sapiens
caaaaaucucaauuacuuuugc

SEQ ID NO: 1977 - RNA, 22 nt, Homo sapiens
gcaaaaguaauugagauuuuug

SEQ ID NO: 1978 - RNA, 22 nt, Homo sapiens
caaaaaccacaguuucuuuugc

SEQ ID NO: 1979 - RNA, 22 nt, Homo sapiens
gcaaaagaaacugugguuuuug

SEQ ID NO: 1980 - RNA, 22 nt, Homo sapiens
aaaaguaauugugguuuuugcc

SEQ ID NO: 1981 - RNA, 22 nt, Homo sapiens
ggcaaaaaccacaauuacuuuu

SEQ ID NO: 1982 - RNA, 21 nt, Homo sapiens
ugacaacuauggaugagcucu

SEQ ID NO: 1983 - RNA, 21 nt, Homo sapiens
agagcucauccauaguuguca

SEQ ID NO: 1984 - RNA, 21 nt, Homo sapiens
aacaggugacugguuagacaa

SEQ ID NO: 1985 - RNA, 21 nt, Homo sapiens
uugucuaaccagucaccuguu

SEQ ID NO: 1986 - RNA, 21 nt, Homo sapiens
aaaacggugagauuuuguuuu

SEQ ID NO: 1987 - RNA, 21 nt, Homo sapiens
aaaacaaaaucucaccguuuu

SEQ ID NO: 1988 - RNA, 21 nt, Homo sapiens
gcuaguccugacucagccagu

SEQ ID NO: 1989 - RNA, 21 nt, Homo sapiens
acuggcugagucaggacuagc

SEQ ID NO: 1990 - RNA, 21 nt, Homo sapiens
aggguaagcugaaccucugau

SEQ ID NO: 1991 - RNA, 21 nt, Homo sapiens
aucagagguucagcuuacccu

SEQ ID NO: 1992 - RNA, 22 nt, Homo sapiens
auauuaccauuagcucaucuuu

SEQ ID NO: 1993 - RNA, 22 nt, Homo sapiens
aaagaugagcuaaugguaauau

SEQ ID NO: 1994 - RNA, 22 nt, Homo sapiens
gaugagcucauuguaauaugag

SEQ ID NO: 1995 - RNA, 22 nt, Homo sapiens
cucauauuacaaugagcucauc

SEQ ID NO: 1996 - RNA, 19 nt, Homo sapiens
agguugacauacguuuccc

SEQ ID NO: 1997 - RNA, 19 nt, Homo sapiens
gggaaacguaugucaaccu

SEQ ID NO: 1998 - RNA, 20 nt, Homo sapiens
auguauaaauguauacacac

SEQ ID NO: 1999 - RNA, 20 nt, Homo sapiens
guguguauacauuuauacau

SEQ ID NO: 2000 - RNA, 24 nt, Homo sapiens
cugaagugauguguaacugaucag

SEQ ID NO: 2001 - RNA, 24 nt, Homo sapiens
cugaucaguuacacaucacuucag

SEQ ID NO: 2002 - RNA, 22 nt, Homo sapiens
aagauguggaaaaauuggaauc

SEQ ID NO: 2003 - RNA, 22 nt, Homo sapiens
gauuccaauuuuuccacaucuu

SEQ ID NO: 2004 - RNA, 21 nt, Homo sapiens
uagauaaaauauugguaccug

SEQ ID NO: 2005 - RNA, 21 nt, Homo sapiens
cagguaccaauauuuuaucua

SEQ ID NO: 2006 - RNA, 21 nt, Homo sapiens
cuucuugugcucuaggauugu

SEQ ID NO: 2007 - RNA, 21 nt, Homo sapiens
acaauccuagagcacaagaag

SEQ ID NO: 2008 - RNA, 22 nt, Homo sapiens
uaugcauuguauuuuuaggucc

SEQ ID NO: 2009 - RNA, 22 nt, Homo sapiens
ggaccuaaaaauacaaugcaua

SEQ ID NO: 2010 - RNA, 21 nt, Homo sapiens
uuuccauaggugaugagucac

SEQ ID NO: 2011 - RNA, 21 nt, Homo sapiens
gugacucaucaccuauggaaa

SEQ ID NO: 2012 - RNA, 21 nt, Homo sapiens
uuggccacaauggguuagaac

SEQ ID NO: 2013 - RNA, 21 nt, Homo sapiens
guucuaacccauuguggccaa

SEQ ID NO: 2014 - RNA, 22 nt, Homo sapiens
ugugucacucgaugaccacugu

SEQ ID NO: 2015 - RNA, 22 nt, Homo sapiens
acaguggucaucgagugacaca

SEQ ID NO: 2016 - RNA, 23 nt, Homo sapiens
acuuacagacaagagccuugcuc

SEQ ID NO: 2017 - RNA, 23 nt, Homo sapiens
gagcaaggcucuugucuguaagu

SEQ ID NO: 2018 - RNA, 19 nt, Homo sapiens
aggcugcggaauucaggac

SEQ ID NO: 2019 - RNA, 19 nt, Homo sapiens
guccugaauuccgcagccu

SEQ ID NO: 2020 - RNA, 23 nt, Homo sapiens
uaaaucccauggugccuucuccu

SEQ ID NO: 2021 - RNA, 23 nt, Homo sapiens
aggagaaggcaccaugggauuua

SEQ ID NO: 2022 - RNA, 21 nt, Homo sapiens
aaacuacugaaaaucaaagau

SEQ ID NO: 2023 - RNA, 21 nt, Homo sapiens
aucuuugauuuucaguaguuu

SEQ ID NO: 2024 - RNA, 21 nt, Homo sapiens
guucaaauccagaucuauaac

SEQ ID NO: 2025 - RNA, 21 nt, Homo sapiens
guuauagaucuggauuugaac

SEQ ID NO: 2026 - RNA, 19 nt, Homo sapiens
ccgguuccagucccuggag

SEQ ID NO: 2027 - RNA, 19 nt, Homo sapiens
cuccagggacuggaaccgg

SEQ ID NO: 2028 - RNA, 20 nt, Homo sapiens
aggguguuucucucaucucu

SEQ ID NO: 2029 - RNA, 20 nt, Homo sapiens
agagaugagagaaacacccu

SEQ ID NO: 2030 - RNA, 24 nt, Homo sapiens
gaccuggacauguuugugcccagu

SEQ ID NO: 2031 - RNA, 24 nt, Homo sapiens
acugggcacaaacauguccagguc

SEQ ID NO: 2032 - RNA, 20 nt, Homo sapiens
auggagauagauauagaaau

SEQ ID NO: 2033 - RNA, 20 nt, Homo sapiens
auuucuauaucuaucuccau

SEQ ID NO: 2034 - RNA, 19 nt, Homo sapiens
agcugucugaaaaugucuu

SEQ ID NO: 2035 - RNA, 19 nt, Homo sapiens
aagacauuuucagacagcu

SEQ ID NO: 2036 - RNA, 21 nt, Homo sapiens
agaccuggcccagaccucagc

SEQ ID NO: 2037 - RNA, 21 nt, Homo sapiens
gcugaggucugggccaggucu

SEQ ID NO: 2038 - RNA, 23 nt, Homo sapiens
acuugggcacugaaacaaugucc

SEQ ID NO: 2039 - RNA, 23 nt, Homo sapiens
ggacauuguuucagugcccaagu

SEQ ID NO: 2040 - RNA, 24 nt, Homo sapiens
acugggggcuuucgggcucugcgu

SEQ ID NO: 2041 - RNA, 24 nt, Homo sapiens
acgcagagcccgaaagcccccagu

SEQ ID NO: 2042 - RNA, 23 nt, Homo sapiens
aucgcugcgguugcgagcgcugu

SEQ ID NO: 2043 - RNA, 23 nt, Homo sapiens
acagcgcucgcaaccgcagcgau

SEQ ID NO: 2044 - RNA, 22 nt, Homo sapiens
gucccucuccaaaugugucuug

SEQ ID NO: 2045 - RNA, 22 nt, Homo sapiens
caagacacauuuggagagggac

SEQ ID NO: 2046 - RNA, 22 nt, Homo sapiens
acuuguaugcuagcucagguag

SEQ ID NO: 2047 - RNA, 22 nt, Homo sapiens
cuaccugagcuagcauacaagu

SEQ ID NO: 2048 - RNA, 22 nt, Homo sapiens
uuuaggauaagcuugacuuuug

SEQ ID NO: 2049 - RNA, 22 nt, Homo sapiens
caaaagucaagcuuauccuaaa

SEQ ID NO: 2050 - RNA, 21 nt, Homo sapiens
guguugaaacaaucucuacug

SEQ ID NO: 2051 - RNA, 21 nt, Homo sapiens
caguagagauuguuucaacac

SEQ ID NO: 2052 - RNA, 22 nt, Homo sapiens
uaugucugcugaccaucaccuu

SEQ ID NO: 2053 - RNA, 22 nt, Homo sapiens
aaggugauggucagcagacaua

SEQ ID NO: 2054 - RNA, 22 nt, Homo sapiens
ggggcuggggccggggccgagc

SEQ ID NO: 2055 - RNA, 22 nt, Homo sapiens
gcucggccccggccccagcccc

SEQ ID NO: 2056 - RNA, 22 nt, Homo sapiens
ugagguaguagguuguaugguu

SEQ ID NO: 2057 - RNA, 22 nt, Homo sapiens
aaccauacaaccuacuaccuca

SEQ ID NO: 2058 - RNA, 21 nt, Homo sapiens
gugucuuuugcucugcaguca

SEQ ID NO: 2059 - RNA, 21 nt, Homo sapiens
ugacugcagagcaaaagacac

SEQ ID NO: 2060 - RNA, 24 nt, Homo sapiens
ccccgggaacgucgagacuggagc

SEQ ID NO: 2061 - RNA, 24 nt, Homo sapiens
gcuccagucucgacguucccgggg

SEQ ID NO: 2062 - RNA, 22 nt, Homo sapiens
acccgucccguucguccccgga

SEQ ID NO: 2063 - RNA, 22 nt, Homo sapiens
uccggggacgaacgggacgggu

SEQ ID NO: 2064 - RNA, 22 nt, Homo sapiens
augggugaauuuguagaaggau

SEQ ID NO: 2065 - RNA, 22 nt, Homo sapiens
auccuucuacaaauucacccau

SEQ ID NO: 2066 - RNA, 22 nt, Homo sapiens
cuggacugagccgugcuacugg

SEQ ID NO: 2067 - RNA, 22 nt, Homo sapiens
ccaguagcacggcucaguccag

SEQ ID NO: 2068 - RNA, 22 nt, Homo sapiens
cuggacugagccaugcuacugg

SEQ ID NO: 2069 - RNA, 22 nt, Homo sapiens
ccaguagcauggcucaguccag

SEQ ID NO: 2070 - RNA, 22 nt, Homo sapiens
uacguagauauauauguauuuu

SEQ ID NO: 2071 - RNA, 22 nt, Homo sapiens
aaaauacauauauaucuacgua

SEQ ID NO: 2072 - RNA, 24 nt, Homo sapiens
aaauauauauauauauguacguau

SEQ ID NO: 2073 - RNA, 22 nt, Homo sapiens
gcucuuuucauuaauguagaca

SEQ ID NO: 2074 - RNA, 22 nt, Homo sapiens
ugcuggaucagugguucgaguc

SEQ ID NO: 2075 - RNA, 22 nt, Homo sapiens
gacucgaaccacugauccagca

SEQ ID NO: 2076 - RNA, 19 nt, Homo sapiens
uggauuuuuggaucaggga

SEQ ID NO: 2077 - RNA, 19 nt, Homo sapiens
ucccugauccaaaaaucca

SEQ ID NO: 2078 - RNA, 22 nt, Homo sapiens
uuauaaagcaaugagacugauu

SEQ ID NO: 2079 - RNA, 22 nt, Homo sapiens
aaucagucucauugcuuuauaa

SEQ ID NO: 2080 - RNA, 23 nt, Homo sapiens
uagugcaauauugcuuauagggu

SEQ ID NO: 2081 - RNA, 23 nt, Homo sapiens
acccuauaagcaauauugcacua

SEQ ID NO: 2082 - RNA, 22 nt, Homo sapiens
acccuaucaauauugucucugc

SEQ ID NO: 2083 - RNA, 22 nt, Homo sapiens
gcagagacaauauugauagggu

SEQ ID NO: 2084 - RNA, 17 nt, Homo sapiens
uaagugcuuccaugcuu

SEQ ID NO: 2085 - RNA, 17 nt, Homo sapiens
aagcauggaagcacuua

SEQ ID NO: 2086 - RNA, 22 nt, Homo sapiens
ucggccugaccacccaccccac

SEQ ID NO: 2087 - RNA, 22 nt, Homo sapiens
gugggguggguggucaggccga

SEQ ID NO: 2088 - RNA, 21 nt, Homo sapiens
ggggggggggggggggggccg

SEQ ID NO: 2089 - RNA, 21 nt, Homo sapiens
cggcccccccccccccccccc

SEQ ID NO: 2090 - RNA, 22 nt, Homo sapiens
cuauacgaccugcugccuuucu

SEQ ID NO: 2091 - RNA, 22 nt, Homo sapiens
agaaaggcagcaggucguauag

SEQ ID NO: 2092 - RNA, 22 nt, Homo sapiens
agagguaguagguugcauaguu

SEQ ID NO: 2093 - RNA, 22 nt, Homo sapiens
aacuaugcaaccuacuaccucu

SEQ ID NO: 2094 - RNA, 22 nt, Homo sapiens
ccgcacuguggguacuugcugc

SEQ ID NO: 2095 - RNA, 22 nt, Homo sapiens
gcagcaaguacccacagugcgg

SEQ ID NO: 2096 - RNA, 21 nt, Homo sapiens
uaaagugcugacagugcagau

SEQ ID NO: 2097 - RNA, 21 nt, Homo sapiens
aucugcacugucagcacuuua

SEQ ID NO: 2098 - RNA, 22 nt, Homo sapiens
aacuggaucaauuauaggagug

SEQ ID NO: 2099 - RNA, 22 nt, Homo sapiens
cacuccuauaauugauccaguu

SEQ ID NO: 2100 - RNA, 26 nt, Homo sapiens
aaguaguugguuuguaugagaugguu

SEQ ID NO: 2101 - RNA, 26 nt, Homo sapiens
aaccaucucauacaaaccaacuacuu

SEQ ID NO: 2102 - RNA, 21 nt, Homo sapiens
aagugaucuaaaggccuacau

SEQ ID NO: 2103 - RNA, 21 nt, Homo sapiens
auguaggccuuuagaucacuu

SEQ ID NO: 2104 - RNA, 22 nt, Homo sapiens
ucagaugaucuaaaggccuaua

SEQ ID NO: 2105 - RNA, 22 nt, Homo sapiens
uauaggccuuuagaucaucuga

SEQ ID NO: 2106 - RNA, 21 nt, Homo sapiens
uaggccuuuagaucacuuaaa

SEQ ID NO: 2107 - RNA, 21 nt, Homo sapiens
uuuaagugaucuaaaggccua

SEQ ID NO: 2108 - RNA, 21 nt, Homo sapiens
acucuagcugccaaaggcgcu

SEQ ID NO: 2109 - RNA, 21 nt, Homo sapiens
agcgccuuuggcagcuagagu

SEQ ID NO: 2110 - RNA, 22 nt, Homo sapiens
agaaggaaauugaauucauuua

SEQ ID NO: 2111 - RNA, 22 nt, Homo sapiens
uaaaugaauucaauuuccuucu

SEQ ID NO: 2112 - RNA, 21 nt, Homo sapiens
agagaagaagaucagccugca

SEQ ID NO: 2113 - RNA, 21 nt, Homo sapiens
ugcaggcugaucuucuucucu

SEQ ID NO: 2114 - RNA, 24 nt, Homo sapiens
agccuggaagcuggagccugcagu

SEQ ID NO: 2115 - RNA, 24 nt, Homo sapiens
acugcaggcuccagcuuccaggcu

SEQ ID NO: 2116 - RNA, 23 nt, Homo sapiens
aggaugagcaaagaaaguagauu

SEQ ID NO: 2117 - RNA, 23 nt, Homo sapiens
aaucuacuuucuuugcucauccu

SEQ ID NO: 2118 - RNA, 22 nt, Homo sapiens
aaccacuuucuuugcucaucca

SEQ ID NO: 2119 - RNA, 22 nt, Homo sapiens
uggaugagcaaagaaagugguu

SEQ ID NO: 2120 - RNA, 22 nt, Homo sapiens
cggaugagcaaagaaagugguu

SEQ ID NO: 2121 - RNA, 22 nt, Homo sapiens
aaccacuuucuuugcucauccg

SEQ ID NO: 2122 - RNA, 22 nt, Homo sapiens
aggcauugacuucucacuagcu

SEQ ID NO: 2123 - RNA, 22 nt, Homo sapiens
agcuagugagaagucaaugccu

SEQ ID NO: 2124 - RNA, 21 nt, Homo sapiens
agugaaugauggguucugacc

SEQ ID NO: 2125 - RNA, 21 nt, Homo sapiens
ggucagaacccaucauucacu

SEQ ID NO: 2126 - RNA, 21 nt, Homo sapiens
aguuaggauuaggucguggaa

SEQ ID NO: 2127 - RNA, 21 nt, Homo sapiens
uuccacgaccuaauccuaacu

SEQ ID NO: 2128 - RNA, 19 nt, Homo sapiens
auggauaaggcuuuggcuu

SEQ ID NO: 2129 - RNA, 19 nt, Homo sapiens
aagccaaagccuuauccau

SEQ ID NO: 2130 - RNA, 22 nt, Homo sapiens
augguacccuggcauacugagu

SEQ ID NO: 2131 - RNA, 22 nt, Homo sapiens
acucaguaugccaggguaccau

SEQ ID NO: 2132 - RNA, 23 nt, Homo sapiens
caagucuuauuugagcaccuguu

SEQ ID NO: 2133 - RNA, 23 nt, Homo sapiens
aacaggugcucaaauaagacuug

SEQ ID NO: 2134 - RNA, 22 nt, Homo sapiens
caggauguggucaaguguuguu

SEQ ID NO: 2135 - RNA, 22 nt, Homo sapiens
aacaacacuugaccacauccug

SEQ ID NO: 2136 - RNA, 23 nt, Homo sapiens
ccucagggcuguagaacagggcu

SEQ ID NO: 2137 - RNA, 23 nt, Homo sapiens
agcccuguucuacagcccugagg

SEQ ID NO: 2138 - RNA, 21 nt, Homo sapiens
ccuguugaaguguaaucccca

SEQ ID NO: 2139 - RNA, 21 nt, Homo sapiens
uggggauuacacuucaacagg

SEQ ID NO: 2140 - RNA, 18 nt, Homo sapiens
cgggcguggugguggggg

SEQ ID NO: 2141 - RNA, 18 nt, Homo sapiens
cccccaccaccacgcccg

SEQ ID NO: 2142 - RNA, 20 nt, Homo sapiens
cgggcgugguggugggggug

SEQ ID NO: 2143 - RNA, 20 nt, Homo sapiens
cacccccaccaccacgcccg

SEQ ID NO: 2144 - RNA, 23 nt, Homo sapiens
cuggagauauggaagagcugugu

SEQ ID NO: 2145 - RNA, 23 nt, Homo sapiens
acacagcucuuccauaucuccag

SEQ ID NO: 2146 - RNA, 26 nt, Homo sapiens
gaugaugauggcagcaaauucugaaa

SEQ ID NO: 2147 - RNA, 26 nt, Homo sapiens
uuucagaauuugcugccaucaucauc

SEQ ID NO: 2148 - RNA, 25 nt, Homo sapiens
gggcgacaaagcaagacucuuucuu

SEQ ID NO: 2149 - RNA, 25 nt, Homo sapiens
aagaaagagucuugcuuugucgccc

SEQ ID NO: 2150 - RNA, 25 nt, Homo sapiens
gaacccaugagguugaggcugcagu

SEQ ID NO: 2151 - RNA, 25 nt, Homo sapiens
acugcagccucaaccucauggguuc

SEQ ID NO: 2152 - RNA, 17 nt, Homo sapiens
gugggggagaggcuguc

SEQ ID NO: 2153 - RNA, 17 nt, Homo sapiens
gacagccucucccccac

SEQ ID NO: 2154 - RNA, 20 nt, Homo sapiens
uaaagagcccuguggagaca

SEQ ID NO: 2155 - RNA, 20 nt, Homo sapiens
ugucuccacagggcucuuua

SEQ ID NO: 2156 - RNA, 22 nt, Homo sapiens
uaguacugugcauaucaucuau

SEQ ID NO: 2157 - RNA, 22 nt, Homo sapiens
auagaugauaugcacaguacua

SEQ ID NO: 2158 - RNA, 20 nt, Homo sapiens
ucguuugccuuuuucugcuu

SEQ ID NO: 2159 - RNA, 20 nt, Homo sapiens
aagcagaaaaaggcaaacga

SEQ ID NO: 2160 - RNA, 21 nt, Homo sapiens
uggacugcccugaucuggaga

SEQ ID NO: 2161 - RNA, 21 nt, Homo sapiens
ucuccagaucagggcagucca

SEQ ID NO: 2162 - RNA, 22 nt, Homo sapiens
uggguggucuggagauuugugc

SEQ ID NO: 2163 - RNA, 22 nt, Homo sapiens
gcacaaaucuccagaccaccca

SEQ ID NO: 2164 - RNA, 22 nt, Homo sapiens
ugugagguuggcauuguugucu

SEQ ID NO: 2165 - RNA, 22 nt, Homo sapiens
agacaacaaugccaaccucaca

SEQ ID NO: 2166 - RNA, 17 nt, Homo sapiens
uucaaguaauucaggug

SEQ ID NO: 2167 - RNA, 17 nt, Homo sapiens
caccugaauuacuugaa

SEQ ID NO: 2168 - RNA, 22 nt, Homo sapiens
uucuggaauucugugugaggga

SEQ ID NO: 2169 - RNA, 22 nt, Homo sapiens
ucccucacacagaauuccagaa

SEQ ID NO: 2170 - RNA, 22 nt, Homo sapiens
uuuucaacucuaaugggagaga

SEQ ID NO: 2171 - RNA, 22 nt, Homo sapiens
ucucucccauuagaguugaaaa

SEQ ID NO: 2172 - RNA, 18 nt, Homo sapiens
acguuggcucugguggug

SEQ ID NO: 2173 - RNA, 18 nt, Homo sapiens
caccaccagagccaacgu

SEQ ID NO: 2174 - RNA, 22 nt, Homo sapiens
ccaccuccccugcaaacgucca

SEQ ID NO: 2175 - RNA, 22 nt, Homo sapiens
uggacguuugcaggggaggugg

SEQ ID NO: 2176 - RNA, 22 nt, Homo sapiens
acucggcguggcgucggucgug

SEQ ID NO: 2177 - RNA, 22 nt, Homo sapiens
cacgaccgacgccacgccgagu

SEQ ID NO: 2178 - RNA, 21 nt, Homo sapiens
ucgaccggaccucgaccggcu

SEQ ID NO: 2179 - RNA, 21 nt, Homo sapiens
agccggucgagguccggucga

SEQ ID NO: 2180 - RNA, 22 nt, Homo sapiens
ugagaacugaauuccauaggcu

SEQ ID NO: 2181 - RNA, 22 nt, Homo sapiens
agccuauggaauucaguucuca

SEQ ID NO: 2182 - RNA, 22 nt, Homo sapiens
aaucauacacgguugaccuauu

SEQ ID NO: 2183 - RNA, 22 nt, Homo sapiens
aauaggucaaccguguaugauu

SEQ ID NO: 2184 - RNA, 22 nt, Homo sapiens
uagguuauccguguugccuucg

SEQ ID NO: 2185 - RNA, 22 nt, Homo sapiens
cgaaggcaacacggauaaccua

SEQ ID NO: 2186 - RNA, 21 nt, Homo sapiens
ccaguccugugccugccgccu

SEQ ID NO: 2187 - RNA, 21 nt, Homo sapiens
aggcggcaggcacaggacugg

SEQ ID NO: 2188 - RNA, 22 nt, Homo sapiens
ucugcccccuccgcugcugcca

SEQ ID NO: 2189 - RNA, 22 nt, Homo sapiens
uggcagcagcggagggggcaga

SEQ ID NO: 2190 - RNA, 22 nt, Homo sapiens
ggaggggucccgcacugggagg

SEQ ID NO: 2191 - RNA, 22 nt, Homo sapiens
ccucccagugcgggaccccucc

SEQ ID NO: 2192 - RNA, 22 nt, Homo sapiens
cccugugcccggcccacuucug

SEQ ID NO: 2193 - RNA, 22 nt, Homo sapiens
cagaagugggccgggcacaggg

SEQ ID NO: 2194 - RNA, 20 nt, Homo sapiens
ccccagggcgacgcggcggg

SEQ ID NO: 2195 - RNA, 20 nt, Homo sapiens
cccgccgcgucgcccugggg

SEQ ID NO: 2196 - RNA, 22 nt, Homo sapiens
accuugccuugcugcccgggcc

SEQ ID NO: 2197 - RNA, 22 nt, Homo sapiens
ggcccgggcagcaaggcaaggu

SEQ ID NO: 2198 - RNA, 21 nt, Homo sapiens
auuugugcuuggcucugucac

SEQ ID NO: 2199 - RNA, 21 nt, Homo sapiens
gugacagagccaagcacaaau

SEQ ID NO: 2200 - RNA, 22 nt, Homo sapiens
auuguccuugcuguuuggagau

SEQ ID NO: 2201 - RNA, 22 nt, Homo sapiens
aucuccaaacagcaaggacaau

SEQ ID NO: 2202 - RNA, 21 nt, Homo sapiens
auccccagauacaauggacaa

SEQ ID NO: 2203 - RNA, 21 nt, Homo sapiens
uuguccauuguaucuggggau

SEQ ID NO: 2204 - RNA, 23 nt, Homo sapiens
cagugcaauaguauugucaaagc

SEQ ID NO: 2205 - RNA, 23 nt, Homo sapiens
gcuuugacaauacuauugcacug

SEQ ID NO: 2206 - RNA, 22 nt, Homo sapiens
gcucugacuuuauugcacuacu

SEQ ID NO: 2207 - RNA, 22 nt, Homo sapiens
aguagugcaauaaagucagagc

SEQ ID NO: 2208 - RNA, 23 nt, Homo sapiens
uaagugcuuccauguuuuaguag

SEQ ID NO: 2209 - RNA, 23 nt, Homo sapiens
cuacuaaaacauggaagcacuua

SEQ ID NO: 2210 - RNA, 22 nt, Homo sapiens
acuuuaacauggaagugcuuuc

SEQ ID NO: 2211 - RNA, 22 nt, Homo sapiens
gaaagcacuuccauguuaaagu

SEQ ID NO: 2212 - RNA, 23 nt, Homo sapiens
uaagugcuuccauguuucagugg

SEQ ID NO: 2213 - RNA, 23 nt, Homo sapiens
ccacugaaacauggaagcacuua

SEQ ID NO: 2214 - RNA, 22 nt, Homo sapiens
uuuaacauggggguaccugcug

SEQ ID NO: 2215 - RNA, 22 nt, Homo sapiens
cagcagguacccccauguuaaa

SEQ ID NO: 2216 - RNA, 23 nt, Homo sapiens
uaagugcuuccauguuugagugu

SEQ ID NO: 2217 - RNA, 23 nt, Homo sapiens
acacucaaacauggaagcacuua

SEQ ID NO: 2218 - RNA, 22 nt, Homo sapiens
acuuuaacauggaggcacuugc

SEQ ID NO: 2219 - RNA, 22 nt, Homo sapiens
gcaagugccuccauguuaaagu

SEQ ID NO: 2220 - RNA, 22 nt, Homo sapiens
aauugcacuuuagcaaugguga

SEQ ID NO: 2221 - RNA, 22 nt, Homo sapiens
ucaccauugcuaaagugcaauu

SEQ ID NO: 2222 - RNA, 22 nt, Homo sapiens
acuguugcuaauaugcaacucu

SEQ ID NO: 2223 - RNA, 22 nt, Homo sapiens
agaguugcauauuagcaacagu

SEQ ID NO: 2224 - RNA, 23 nt, Homo sapiens
agcucggucugaggccccucagu

SEQ ID NO: 2225 - RNA, 23 nt, Homo sapiens
acugaggggccucagaccgagcu

SEQ ID NO: 2226 - RNA, 22 nt, Homo sapiens
aaaaacugagacuacuuuugca

SEQ ID NO: 2227 - RNA, 22 nt, Homo sapiens
ugcaaaaguagucucaguuuuu

SEQ ID NO: 2228 - RNA, 19 nt, Homo sapiens
aaaaacuguaauuacuuuu

SEQ ID NO: 2229 - RNA, 19 nt, Homo sapiens
aaaaguaauuacaguuuuu

SEQ ID NO: 2230 - RNA, 22 nt, Homo sapiens
aaaacuguaauuacuuuuguac

SEQ ID NO: 2231 - RNA, 22 nt, Homo sapiens
guacaaaaguaauuacaguuuu

SEQ ID NO: 2232 - RNA, 23 nt, Homo sapiens
ugcaaaaguaauugcaguuuuug

SEQ ID NO: 2233 - RNA, 23 nt, Homo sapiens
caaaaacugcaauuacuuuugca

SEQ ID NO: 2234 - RNA, 23 nt, Homo sapiens
caaaaaccgcaauuacuuuugca

SEQ ID NO: 2235 - RNA, 23 nt, Homo sapiens
ugcaaaaguaauugcgguuuuug

SEQ ID NO: 2236 - RNA, 22 nt, Homo sapiens
aaaaguaaucgcgguuuuuguc

SEQ ID NO: 2237 - RNA, 22 nt, Homo sapiens
gacaaaaaccgcgauuacuuuu

SEQ ID NO: 2238 - RNA, 22 nt, Homo sapiens
aaaaguacuugcggauuuugcu

SEQ ID NO: 2239 - RNA, 22 nt, Homo sapiens
agcaaaauccgcaaguacuuuu

SEQ ID NO: 2240 - RNA, 22 nt, Homo sapiens
aaaaguauuugcggguuuuguc

SEQ ID NO: 2241 - RNA, 22 nt, Homo sapiens
gacaaaacccgcaaauacuuuu

SEQ ID NO: 2242 - RNA, 21 nt, Homo sapiens
caaagguauuugugguuuuug

SEQ ID NO: 2243 - RNA, 21 nt, Homo sapiens
caaaaaccacaaauaccuuug

SEQ ID NO: 2244 - RNA, 22 nt, Homo sapiens
ccaaaacugcaguuacuuuugc

SEQ ID NO: 2245 - RNA, 22 nt, Homo sapiens
gcaaaaguaacugcaguuuugg

SEQ ID NO: 2246 - RNA, 22 nt, Homo sapiens
aaaaguaauugcgguuuuugcc

SEQ ID NO: 2247 - RNA, 22 nt, Homo sapiens
ggcaaaaaccgcaauuacuuuu

SEQ ID NO: 2248 - RNA, 22 nt, Homo sapiens
uagcaaaaacugcaguuacuuu

SEQ ID NO: 2249 - RNA, 22 nt, Homo sapiens
aaaguaacugcaguuuuugcua

SEQ ID NO: 2250 - RNA, 20 nt, Homo sapiens
ggagguugggaagggcagag

SEQ ID NO: 2251 - RNA, 20 nt, Homo sapiens
cucugcccuucccaaccucc

SEQ ID NO: 2252 - RNA, 18 nt, Homo sapiens
ugaggcgggggggcgagc

SEQ ID NO: 2253 - RNA, 18 nt, Homo sapiens
gcucgcccccccgccuca

SEQ ID NO: 2254 - RNA, 20 nt, Homo sapiens
agagaugaagcgggggggcg

SEQ ID NO: 2255 - RNA, 20 nt, Homo sapiens
cgcccccccgcuucaucucu

SEQ ID NO: 2256 - RNA, 24 nt, Homo sapiens
ggaggccgggguggggcggggcgg

SEQ ID NO: 2257 - RNA, 24 nt, Homo sapiens
ccgccccgccccaccccggccucc

SEQ ID NO: 2258 - RNA, 19 nt, Homo sapiens
ggggagcgaggggcggggc

SEQ ID NO: 2259 - RNA, 19 nt, Homo sapiens
gccccgccccucgcucccc

SEQ ID NO: 2260 - RNA, 23 nt, Homo sapiens
uauucauuuauccccagccuaca

SEQ ID NO: 2261 - RNA, 23 nt, Homo sapiens
uguaggcuggggauaaaugaaua

SEQ ID NO: 2262 - RNA, 24 nt, Homo sapiens
acuggcuagggaaaaugauuggau

SEQ ID NO: 2263 - RNA, 24 nt, Homo sapiens
auccaaucauuuucccuagccagu

SEQ ID NO: 2264 - RNA, 22 nt, Homo sapiens
uucauuugccucccagccuaca

SEQ ID NO: 2265 - RNA, 22 nt, Homo sapiens
uguaggcugggaggcaaaugaa

SEQ ID NO: 2266 - RNA, 24 nt, Homo sapiens
ugggcuaagggagaugauugggua

SEQ ID NO: 2267 - RNA, 24 nt, Homo sapiens
uacccaaucaucucccuuagccca

SEQ ID NO: 2268 - RNA, 22 nt, Homo sapiens
acuccagccccacagccucagc

SEQ ID NO: 2269 - RNA, 22 nt, Homo sapiens
gcugaggcuguggggcuggagu

SEQ ID NO: 2270 - RNA, 22 nt, Homo sapiens
aggaggaauuggugcuggucuu

SEQ ID NO: 2271 - RNA, 22 nt, Homo sapiens
aagaccagcaccaauuccuccu

SEQ ID NO: 2272 - RNA, 22 nt, Homo sapiens
aggcagcgggguguaguggaua

SEQ ID NO: 2273 - RNA, 22 nt, Homo sapiens
uauccacuacaccccgcugccu

SEQ ID NO: 2274 - RNA, 22 nt, Homo sapiens
uccauuacacuacccugccucu

SEQ ID NO: 2275 - RNA, 22 nt, Homo sapiens
agaggcaggguaguguaaugga

SEQ ID NO: 2276 - RNA, 22 nt, Homo sapiens
acugcugagcuagcacuucccg

SEQ ID NO: 2277 - RNA, 22 nt, Homo sapiens
cgggaagugcuagcucagcagu

SEQ ID NO: 2278 - RNA, 23 nt, Homo sapiens
caaagugcuguucgugcagguag

SEQ ID NO: 2279 - RNA, 23 nt, Homo sapiens
cuaccugcacgaacagcacuuug

SEQ ID NO: 2280 - RNA, 23 nt, Homo sapiens
cacccggcugugugcacaugugc

SEQ ID NO: 2281 - RNA, 23 nt, Homo sapiens
gcacaugugcacacagccgggug

SEQ ID NO: 2282 - RNA, 23 nt, Homo sapiens
agcuucuuuacagugcugccuug

SEQ ID NO: 2283 - RNA, 23 nt, Homo sapiens
caaggcagcacuguaaagaagcu

SEQ ID NO: 2284 - RNA, 23 nt, Homo sapiens
agcagcauuguacagggcuauga

SEQ ID NO: 2285 - RNA, 23 nt, Homo sapiens
ucauagcccuguacaaugcugcu

SEQ ID NO: 2286 - RNA, 17 nt, Homo sapiens
ccugagaaaagggccaa

SEQ ID NO: 2287 - RNA, 17 nt, Homo sapiens
uuggcccuuuucucagg

SEQ ID NO: 2288 - RNA, 19 nt, Homo sapiens
ggccacugagucagcacca

SEQ ID NO: 2289 - RNA, 19 nt, Homo sapiens
uggugcugacucaguggcc

SEQ ID NO: 2290 - RNA, 18 nt, Homo sapiens
agggcauguccagggggu

SEQ ID NO: 2291 - RNA, 18 nt, Homo sapiens
acccccuggacaugcccu

SEQ ID NO: 2292 - RNA, 23 nt, Homo sapiens
gccuggagcuacuccaccaucuc

SEQ ID NO: 2293 - RNA, 23 nt, Homo sapiens
gagaugguggaguagcuccaggc

SEQ ID NO: 2294 - RNA, 17 nt, Homo sapiens
caguguucagagaugga

SEQ ID NO: 2295 - RNA, 17 nt, Homo sapiens
uccaucucugaacacug

SEQ ID NO: 2296 - RNA, 18 nt, Homo sapiens
aucugaccugaugaaggu

SEQ ID NO: 2297 - RNA, 18 nt, Homo sapiens
accuucaucaggucagau

SEQ ID NO: 2298 - RNA, 18 nt, Homo sapiens
ccagagguggggacugag

SEQ ID NO: 2299 - RNA, 18 nt, Homo sapiens
cucaguccccaccucugg

SEQ ID NO: 2300 - RNA, 17 nt, Homo sapiens
ccccgccaccgccuugg

SEQ ID NO: 2301 - RNA, 17 nt, Homo sapiens
ccaaggcgguggcgggg

SEQ ID NO: 2302 - RNA, 22 nt, Homo sapiens
caguugggucuaggggucagga

SEQ ID NO: 2303 - RNA, 22 nt, Homo sapiens
uccugaccccuagacccaacug

SEQ ID NO: 2304 - RNA, 19 nt, Homo sapiens
cuuggggcauggaguccca

SEQ ID NO: 2305 - RNA, 19 nt, Homo sapiens
ugggacuccaugccccaag

SEQ ID NO: 2306 - RNA, 16 nt, Homo sapiens
aggaaacagggaccca

SEQ ID NO: 2307 - RNA, 16 nt, Homo sapiens
ugggucccuguuuccu

SEQ ID NO: 2308 - RNA, 17 nt, Homo sapiens
gacauucagacuaccug

SEQ ID NO: 2309 - RNA, 17 nt, Homo sapiens
cagguagucugaauguc

SEQ ID NO: 2310 - RNA, 18 nt, Homo sapiens
auucuaagugccuuggcc

SEQ ID NO: 2311 - RNA, 18 nt, Homo sapiens
ggccaaggcacuuagaau

SEQ ID NO: 2312 - RNA, 17 nt, Homo sapiens
acucagucauggucauu

SEQ ID NO: 2313 - RNA, 17 nt, Homo sapiens
aaugaccaugacugagu

SEQ ID NO: 2314 - RNA, 19 nt, Homo sapiens
cugugggcucagcucuggg

SEQ ID NO: 2315 - RNA, 19 nt, Homo sapiens
cccagagcugagcccacag

SEQ ID NO: 2316 - RNA, 16 nt, Homo sapiens
cuaggaggccuuggcc

SEQ ID NO: 2317 - RNA, 16 nt, Homo sapiens
ggccaaggccuccuag

SEQ ID NO: 2318 - RNA, 16 nt, Homo sapiens
uccagcucgguggcac

SEQ ID NO: 2319 - RNA, 16 nt, Homo sapiens
gugccaccgagcugga

SEQ ID NO: 2320 - RNA, 21 nt, Homo sapiens
ggcuccuccucucaggaugug

SEQ ID NO: 2321 - RNA, 21 nt, Homo sapiens
cacauccugagaggaggagcc

SEQ ID NO: 2322 - RNA, 21 nt, Homo sapiens
gcaggcacagacagcccuggc

SEQ ID NO: 2323 - RNA, 21 nt, Homo sapiens
gccagggcugucugugccugc

SEQ ID NO: 2324 - RNA, 20 nt, Homo sapiens
ucagggagucaggggagggc

SEQ ID NO: 2325 - RNA, 20 nt, Homo sapiens
gcccuccccugacucccuga

SEQ ID NO: 2326 - RNA, 19 nt, Homo sapiens
gggggaagaaaaggugggg

SEQ ID NO: 2327 - RNA, 19 nt, Homo sapiens
ccccaccuuuucuuccccc

SEQ ID NO: 2328 - RNA, 18 nt, Homo sapiens
cauucaacuagugauugu

SEQ ID NO: 2329 - RNA, 18 nt, Homo sapiens
acaaucacuaguugaaug

SEQ ID NO: 2330 - RNA, 18 nt, Homo sapiens
cagcagucccucccccug

SEQ ID NO: 2331 - RNA, 18 nt, Homo sapiens
cagggggagggacugcug

SEQ ID NO: 2332 - RNA, 17 nt, Homo sapiens
ccaauuaccacuucuuu

SEQ ID NO: 2333 - RNA, 17 nt, Homo sapiens
aaagaagugguaauugg

SEQ ID NO: 2334 - RNA, 17 nt, Homo sapiens
cucagugacucaugugc

SEQ ID NO: 2335 - RNA, 17 nt, Homo sapiens
gcacaugagucacugag

SEQ ID NO: 2336 - RNA, 21 nt, Homo sapiens
gcaguucugagcacaguacac

SEQ ID NO: 2337 - RNA, 21 nt, Homo sapiens
guguacugugcucagaacugc

SEQ ID NO: 2338 - RNA, 18 nt, Homo sapiens
cuaggggguuugcccuug

SEQ ID NO: 2339 - RNA, 18 nt, Homo sapiens
caagggcaaacccccuag

SEQ ID NO: 2340 - RNA, 16 nt, Homo sapiens
cucuccucccggcuuc

SEQ ID NO: 2341 - RNA, 16 nt, Homo sapiens
gaagccgggaggagag

SEQ ID NO: 2342 - RNA, 21 nt, Homo sapiens
gaguguaguucugagcagagc

SEQ ID NO: 2343 - RNA, 21 nt, Homo sapiens
gcucugcucagaacuacacuc

SEQ ID NO: 2344 - RNA, 18 nt, Homo sapiens
gggucccggggagggggg

SEQ ID NO: 2345 - RNA, 18 nt, Homo sapiens
ccccccuccccgggaccc

SEQ ID NO: 2346 - RNA, 18 nt, Homo sapiens
uaaaauuugcauccagga

SEQ ID NO: 2347 - RNA, 18 nt, Homo sapiens
uccuggaugcaaauuuua

SEQ ID NO: 2348 - RNA, 17 nt, Homo sapiens
uggggcucagcgaguuu

SEQ ID NO: 2349 - RNA, 17 nt, Homo sapiens
aaacucgcugagcccca

SEQ ID NO: 2350 - RNA, 18 nt, Homo sapiens
gggcucacaucaccccau

SEQ ID NO: 2351 - RNA, 18 nt, Homo sapiens
auggggugaugugagccc

SEQ ID NO: 2352 - RNA, 18 nt, Homo sapiens
gcggcgaguccgacucau

SEQ ID NO: 2353 - RNA, 18 nt, Homo sapiens
augagucggacucgccgc

SEQ ID NO: 2354 - RNA, 17 nt, Homo sapiens
accccacuccugguacc

SEQ ID NO: 2355 - RNA, 17 nt, Homo sapiens
gguaccaggaguggggu

SEQ ID NO: 2356 - RNA, 19 nt, Homo sapiens
ucucccuugagggcacuuu

SEQ ID NO: 2357 - RNA, 19 nt, Homo sapiens
aaagugcccucaagggaga

SEQ ID NO: 2358 - RNA, 17 nt, Homo sapiens
uugucugcugaguuucc

SEQ ID NO: 2359 - RNA, 17 nt, Homo sapiens
ggaaacucagcagacaa

SEQ ID NO: 2360 - RNA, 19 nt, Homo sapiens
gcauugugcagggcuauca

SEQ ID NO: 2361 - RNA, 19 nt, Homo sapiens
ugauagcccugcacaaugc

SEQ ID NO: 2362 - RNA, 19 nt, Homo sapiens
ugcccuccuuucuucccuc

SEQ ID NO: 2363 - RNA, 19 nt, Homo sapiens
gagggaagaaaggagggca

SEQ ID NO: 2364 - RNA, 16 nt, Homo sapiens
uucagcaggaacagcu

SEQ ID NO: 2365 - RNA, 16 nt, Homo sapiens
agcuguuccugcugaa

SEQ ID NO: 2366 - RNA, 18 nt, Homo sapiens
ccccugggccggccuugg

SEQ ID NO: 2367 - RNA, 18 nt, Homo sapiens
ccaaggccggcccagggg

SEQ ID NO: 2368 - RNA, 17 nt, Homo sapiens
cagccugacaggaacag

SEQ ID NO: 2369 - RNA, 17 nt, Homo sapiens
cuguuccugucaggcug

SEQ ID NO: 2370 - RNA, 17 nt, Homo sapiens
gggagucuacagcaggg

SEQ ID NO: 2371 - RNA, 17 nt, Homo sapiens
cccugcuguagacuccc

SEQ ID NO: 2372 - RNA, 18 nt, Homo sapiens
cagugcaauguuuuccuu

SEQ ID NO: 2373 - RNA, 18 nt, Homo sapiens
aaggaaaacauugcacug

SEQ ID NO: 2374 - RNA, 17 nt, Homo sapiens
augugggcucaggcuca

SEQ ID NO: 2375 - RNA, 17 nt, Homo sapiens
ugagccugagcccacau

SEQ ID NO: 2376 - RNA, 16 nt, Homo sapiens
ugccuuccugucugug

SEQ ID NO: 2377 - RNA, 16 nt, Homo sapiens
cacagacaggaaggca

SEQ ID NO: 2378 - RNA, 22 nt, Homo sapiens
cugggacaggaggaggaggcag

SEQ ID NO: 2379 - RNA, 22 nt, Homo sapiens
cugccuccuccuccugucccag

SEQ ID NO: 2380 - RNA, 18 nt, Homo sapiens
gcuggugacaugagaggc

SEQ ID NO: 2381 - RNA, 18 nt, Homo sapiens
gccucucaugucaccagc

SEQ ID NO: 2382 - RNA, 18 nt, Homo sapiens
ugggagcuggacuacuuc

SEQ ID NO: 2383 - RNA, 18 nt, Homo sapiens
gaaguaguccagcuccca

SEQ ID NO: 2384 - RNA, 20 nt, Homo sapiens
ucccacuacuucacuuguga

SEQ ID NO: 2385 - RNA, 20 nt, Homo sapiens
ucacaagugaaguaguggga

SEQ ID NO: 2386 - RNA, 18 nt, Homo sapiens
ccaguguggcucagcgag

SEQ ID NO: 2387 - RNA, 18 nt, Homo sapiens
cucgcugagccacacugg

SEQ ID NO: 2388 - RNA, 17 nt, Homo sapiens
uucugagcugaggacag

SEQ ID NO: 2389 - RNA, 17 nt, Homo sapiens
cuguccucagcucagaa

SEQ ID NO: 2390 - RNA, 17 nt, Homo sapiens
ccggcauguccagggca

SEQ ID NO: 2391 - RNA, 17 nt, Homo sapiens
ugcccuggacaugccgg

SEQ ID NO: 2392 - RNA, 18 nt, Homo sapiens
ccuagacaccuccaguuc

SEQ ID NO: 2393 - RNA, 18 nt, Homo sapiens
gaacuggaggugucuagg

SEQ ID NO: 2394 - RNA, 17 nt, Homo sapiens
uggagagaaaggcagua

SEQ ID NO: 2395 - RNA, 17 nt, Homo sapiens
uacugccuuucucucca

SEQ ID NO: 2396 - RNA, 19 nt, Homo sapiens
aauguuuuuuccuguuucc

SEQ ID NO: 2397 - RNA, 19 nt, Homo sapiens
ggaaacaggaaaaaacauu

SEQ ID NO: 2398 - RNA, 18 nt, Homo sapiens
ucccuggaguuucuucuu

SEQ ID NO: 2399 - RNA, 18 nt, Homo sapiens
aagaagaaacuccaggga

SEQ ID NO: 2400 - RNA, 18 nt, Homo sapiens
cuggagucuaggauucca

SEQ ID NO: 2401 - RNA, 18 nt, Homo sapiens
uggaauccuagacuccag

SEQ ID NO: 2402 - RNA, 16 nt, Homo sapiens
gcagcauucauguccc

SEQ ID NO: 2403 - RNA, 16 nt, Homo sapiens
gggacaugaaugcugc

SEQ ID NO: 2404 - RNA, 18 nt, Homo sapiens
gaaagagagcugagugug

SEQ ID NO: 2405 - RNA, 18 nt, Homo sapiens
cacacucagcucucuuuc

SEQ ID NO: 2406 - RNA, 19 nt, Homo sapiens
ggccuuguuccugucccca

SEQ ID NO: 2407 - RNA, 19 nt, Homo sapiens
uggggacaggaacaaggcc

SEQ ID NO: 2408 - RNA, 20 nt, Homo sapiens
agcccccuggccccaaaccc

SEQ ID NO: 2409 - RNA, 20 nt, Homo sapiens
ggguuuggggccagggggcu

SEQ ID NO: 2410 - RNA, 18 nt, Homo sapiens
cucugggaaaugggacag

SEQ ID NO: 2411 - RNA, 18 nt, Homo sapiens
cugucccauuucccagag

SEQ ID NO: 2412 - RNA, 18 nt, Homo sapiens
ccgcuuucugagcuggac

SEQ ID NO: 2413 - RNA, 18 nt, Homo sapiens
guccagcucagaaagcgg

SEQ ID NO: 2414 - RNA, 17 nt, Homo sapiens
ggugaggcuagcuggug

SEQ ID NO: 2415 - RNA, 17 nt, Homo sapiens
caccagcuagccucacc

SEQ ID NO: 2416 - RNA, 17 nt, Homo sapiens
acauugccagggaguuu

SEQ ID NO: 2417 - RNA, 17 nt, Homo sapiens
aaacucccuggcaaugu

SEQ ID NO: 2418 - RNA, 17 nt, Homo sapiens
cacuguggguacaugcu

SEQ ID NO: 2419 - RNA, 17 nt, Homo sapiens
agcauguacccacagug

SEQ ID NO: 2420 - RNA, 17 nt, Homo sapiens
ucccugagcaaagccac

SEQ ID NO: 2421 - RNA, 17 nt, Homo sapiens
guggcuuugcucaggga

SEQ ID NO: 2422 - RNA, 18 nt, Homo sapiens
gggauucuguagcuuccu

SEQ ID NO: 2423 - RNA, 18 nt, Homo sapiens
aggaagcuacagaauccc

SEQ ID NO: 2424 - RNA, 21 nt, Homo sapiens
uuagcgguggaccgcccugcg

SEQ ID NO: 2425 - RNA, 21 nt, Homo sapiens
cgcagggcgguccaccgcuaa

SEQ ID NO: 2426 - RNA, 21 nt, Homo sapiens
cugugggcucagcgcgugggg

SEQ ID NO: 2427 - RNA, 21 nt, Homo sapiens
ccccacgcgcugagcccacag

SEQ ID NO: 2428 - RNA, 18 nt, Homo sapiens
cagccccacagccucaga

SEQ ID NO: 2429 - RNA, 18 nt, Homo sapiens
ucugaggcuguggggcug

SEQ ID NO: 2430 - RNA, 20 nt, Homo sapiens
cccugagacccuaaccuuaa

SEQ ID NO: 2431 - RNA, 20 nt, Homo sapiens
uuaagguuagggucucaggg

SEQ ID NO: 2432 - RNA, 18 nt, Homo sapiens
uugcacuugucucaguga

SEQ ID NO: 2433 - RNA, 18 nt, Homo sapiens
ucacugagacaagugcaa

SEQ ID NO: 2434 - RNA, 20 nt, Homo sapiens
uguuccucugucucccagac

SEQ ID NO: 2435 - RNA, 20 nt, Homo sapiens
gucugggagacagaggaaca

SEQ ID NO: 2436 - RNA, 19 nt, Homo sapiens
ggcuugcaugggggacugg

SEQ ID NO: 2437 - RNA, 19 nt, Homo sapiens
ccagucccccaugcaagcc

SEQ ID NO: 2438 - RNA, 17 nt, Homo sapiens
ccaguuuucccaggauu

SEQ ID NO: 2439 - RNA, 17 nt, Homo sapiens
aauccugggaaaacugg

SEQ ID NO: 2440 - RNA, 19 nt, Homo sapiens
ccugagacccuaguuccac

SEQ ID NO: 2441 - RNA, 19 nt, Homo sapiens
guggaacuagggucucagg

SEQ ID NO: 2442 - RNA, 19 nt, Homo sapiens
ccucagaucagagccuugc

SEQ ID NO: 2443 - RNA, 19 nt, Homo sapiens
gcaaggcucugaucugagg

SEQ ID NO: 2444 - RNA, 22 nt, Homo sapiens
cauugcacuugucucggucuga

SEQ ID NO: 2445 - RNA, 22 nt, Homo sapiens
ucagaccgagacaagugcaaug

SEQ ID NO: 2446 - RNA, 21 nt, Homo sapiens
aggcggagacuugggcaauug

SEQ ID NO: 2447 - RNA, 21 nt, Homo sapiens
caauugcccaagucuccgccu

SEQ ID NO: 2448 - RNA, 22 nt, Homo sapiens
ccuauucuugguuacuugcacg

SEQ ID NO: 2449 - RNA, 22 nt, Homo sapiens
cgugcaaguaaccaagaauagg

SEQ ID NO: 2450 - RNA, 19 nt, Homo sapiens
aauggauuuuuggagcagg

SEQ ID NO: 2451 - RNA, 19 nt, Homo sapiens
ccugcuccaaaaauccauu

SEQ ID NO: 2452 - RNA, 22 nt, Homo sapiens
ugcggggcuagggcuaacagca

SEQ ID NO: 2453 - RNA, 22 nt, Homo sapiens
ugcuguuagcccuagccccgca

SEQ ID NO: 2454 - RNA, 22 nt, Homo sapiens
aaaaguaauugcggauuuugcc

SEQ ID NO: 2455 - RNA, 22 nt, Homo sapiens
ggcaaaauccgcaauuacuuuu

SEQ ID NO: 2456 - RNA, 22 nt, Homo sapiens
caaaaguaauuguggauuuugu

SEQ ID NO: 2457 - RNA, 22 nt, Homo sapiens
acaaaauccacaauuacuuuug

SEQ ID NO: 2458 - RNA, 23 nt, Homo sapiens
uaagugcuuccauguuuugguga

SEQ ID NO: 2459 - RNA, 23 nt, Homo sapiens
ucaccaaaacauggaagcacuua

SEQ ID NO: 2460 - RNA, 23 nt, Homo sapiens
acuuaaacguggauguacuugcu

SEQ ID NO: 2461 - RNA, 23 nt, Homo sapiens
agcaaguacauccacguuuaagu

SEQ ID NO: 2462 - RNA, 21 nt, Homo sapiens
cuauacaaucuacugucuuuc

SEQ ID NO: 2463 - RNA, 21 nt, Homo sapiens
gaaagacaguagauuguauag

SEQ ID NO: 2464 - RNA, 22 nt, Homo sapiens
ugagguaguagguuguauaguu

SEQ ID NO: 2465 - RNA, 22 nt, Homo sapiens
aacuauacaaccuacuaccuca

SEQ ID NO: 2466 - RNA, 22 nt, Homo sapiens
cuguacagccuccuagcuuucc

SEQ ID NO: 2467 - RNA, 22 nt, Homo sapiens
ggaaagcuaggaggcuguacag

SEQ ID NO: 2468 - RNA, 20 nt, Homo sapiens
caccaggcauuguggucucc

SEQ ID NO: 2469 - RNA, 20 nt, Homo sapiens
ggagaccacaaugccuggug

SEQ ID NO: 2470 - RNA, 23 nt, Homo sapiens
ugaguaccgccaugucuguuggg

SEQ ID NO: 2471 - RNA, 23 nt, Homo sapiens
cccaacagacauggcgguacuca

SEQ ID NO: 2472 - RNA, 22 nt, Homo sapiens
uacccagagcaugcagugugaa

SEQ ID NO: 2473 - RNA, 22 nt, Homo sapiens
uucacacugcaugcucugggua

SEQ ID NO: 2474 - RNA, 22 nt, Homo sapiens
aagugcugucauagcugagguc

SEQ ID NO: 2475 - RNA, 22 nt, Homo sapiens
gaccucagcuaugacagcacuu

SEQ ID NO: 2476 - RNA, 23 nt, Homo sapiens
cacucagccuugagggcacuuuc

SEQ ID NO: 2477 - RNA, 23 nt, Homo sapiens
gaaagugcccucaaggcugagug

SEQ ID NO: 2478 - RNA, 22 nt, Homo sapiens
ucgacagcacgacacugccuuc

SEQ ID NO: 2479 - RNA, 22 nt, Homo sapiens
gaaggcagugucgugcugucga

SEQ ID NO: 2480 - RNA, 22 nt, Homo sapiens
uagguaguuuccuguuguuggg

SEQ ID NO: 2481 - RNA, 22 nt, Homo sapiens
cccaacaacaggaaacuaccua

SEQ ID NO: 2482 - RNA, 21 nt, Homo sapiens
uacaguacugugauaacugaa

SEQ ID NO: 2483 - RNA, 21 nt, Homo sapiens
uucaguuaucacaguacugua

SEQ ID NO: 2484 - RNA, 22 nt, Homo sapiens
caguuaucacagugcugaugcu

SEQ ID NO: 2485 - RNA, 22 nt, Homo sapiens
agcaucagcacugugauaacug

SEQ ID NO: 2486 - RNA, 23 nt, Homo sapiens
ugugcaaaucuaugcaaaacuga

SEQ ID NO: 2487 - RNA, 23 nt, Homo sapiens
ucaguuuugcauagauuugcaca

SEQ ID NO: 2488 - RNA, 22 nt, Homo sapiens
aguuuugcauaguugcacuaca

SEQ ID NO: 2489 - RNA, 22 nt, Homo sapiens
uguagugcaacuaugcaaaacu

SEQ ID NO: 2490 - RNA, 23 nt, Homo sapiens
aguuuugcagguuugcauccagc

SEQ ID NO: 2491 - RNA, 23 nt, Homo sapiens
gcuggaugcaaaccugcaaaacu

SEQ ID NO: 2492 - RNA, 22 nt, Homo sapiens
aguuuugcagguuugcauuuca

SEQ ID NO: 2493 - RNA, 22 nt, Homo sapiens
ugaaaugcaaaccugcaaaacu

SEQ ID NO: 2494 - RNA, 23 nt, Homo sapiens
ugugcaaauccaugcaaaacuga

SEQ ID NO: 2495 - RNA, 23 nt, Homo sapiens
ucaguuuugcauggauuugcaca

SEQ ID NO: 2496 - RNA, 23 nt, Homo sapiens
uacugcaucaggaacugauugga

SEQ ID NO: 2497 - RNA, 23 nt, Homo sapiens
uccaaucaguuccugaugcagua

SEQ ID NO: 2498 - RNA, 22 nt, Homo sapiens
augguuccgucaagcaccaugg

SEQ ID NO: 2499 - RNA, 22 nt, Homo sapiens
ccauggugcuugacggaaccau

SEQ ID NO: 2500 - RNA, 21 nt, Homo sapiens
agcuacaucuggcuacugggu

SEQ ID NO: 2501 - RNA, 21 nt, Homo sapiens
acccaguagccagauguagcu

SEQ ID NO: 2502 - RNA, 22 nt, Homo sapiens
cucaguagccaguguagauccu

SEQ ID NO: 2503 - RNA, 22 nt, Homo sapiens
aggaucuacacuggcuacugag

SEQ ID NO: 2504 - RNA, 22 nt, Homo sapiens
uuaucagaaucuccagggguac

SEQ ID NO: 2505 - RNA, 22 nt, Homo sapiens
guaccccuggagauucugauaa

SEQ ID NO: 2506 - RNA, 23 nt, Homo sapiens
aucaacagacauuaauugggcgc

SEQ ID NO: 2507 - RNA, 23 nt, Homo sapiens
gcgcccaauuaaugucuguugau

SEQ ID NO: 2508 - RNA, 21 nt, Homo sapiens
caaaacgugaggcgcugcuau

SEQ ID NO: 2509 - RNA, 21 nt, Homo sapiens
auagcagcgccucacguuuug

SEQ ID NO: 2510 - RNA, 22 nt, Homo sapiens
cagcagcaauucauguuuugaa

SEQ ID NO: 2511 - RNA, 22 nt, Homo sapiens
uucaaaacaugaauugcugcug

SEQ ID NO: 2512 - RNA, 18 nt, Homo sapiens
uucacagggaggugucau

SEQ ID NO: 2513 - RNA, 18 nt, Homo sapiens
augacaccucccugugaa

SEQ ID NO: 2514 - RNA, 20 nt, Homo sapiens
gcggagagagaauggggagc

SEQ ID NO: 2515 - RNA, 20 nt, Homo sapiens
gcuccccauucucucuccgc

SEQ ID NO: 2516 - RNA, 21 nt, Homo sapiens
ccugcgagucuccggcggugg

SEQ ID NO: 2517 - RNA, 21 nt, Homo sapiens
ccaccgccggagacucgcagg

SEQ ID NO: 2518 - RNA, 21 nt, Homo sapiens
gggcuagggccugcugccccc

SEQ ID NO: 2519 - RNA, 21 nt, Homo sapiens
gggggcagcaggcccuagccc

SEQ ID NO: 2520 - RNA, 19 nt, Homo sapiens
uucugcugccggccaaggc

SEQ ID NO: 2521 - RNA, 19 nt, Homo sapiens
gccuuggccggcagcagaa

SEQ ID NO: 2522 - RNA, 22 nt, Homo sapiens
uccucaucacacugcaccuuag

SEQ ID NO: 2523 - RNA, 22 nt, Homo sapiens
cuaaggugcagugugaugagga

SEQ ID NO: 2524 - RNA, 20 nt, Homo sapiens
gguagugaguuaucagcuac

SEQ ID NO: 2525 - RNA, 20 nt, Homo sapiens
guagcugauaacucacuacc

SEQ ID NO: 2526 - RNA, 20 nt, Homo sapiens
gauauucagaggcuaggugg

SEQ ID NO: 2527 - RNA, 20 nt, Homo sapiens
ccaccuagccucugaauauc

SEQ ID NO: 2528 - RNA, 21 nt, Homo sapiens
acggcccaggcggcauuggug

SEQ ID NO: 2529 - RNA, 21 nt, Homo sapiens
caccaaugccgccugggccgu

SEQ ID NO: 2530 - RNA, 21 nt, Homo sapiens
agcaugacagaggagaggugg

SEQ ID NO: 2531 - RNA, 21 nt, Homo sapiens
ccaccucuccucugucaugcu

SEQ ID NO: 2532 - RNA, 21 nt, Homo sapiens
gggaagagcuguacggccuuc

SEQ ID NO: 2533 - RNA, 21 nt, Homo sapiens
gaaggccguacagcucuuccc

SEQ ID NO: 2534 - RNA, 19 nt, Homo sapiens
ccgccugagcuagcugugg

SEQ ID NO: 2535 - RNA, 19 nt, Homo sapiens
ccacagcuagcucaggcgg

SEQ ID NO: 2536 - RNA, 24 nt, Homo sapiens
uuggaagcuuggaccaacuagcug

SEQ ID NO: 2537 - RNA, 24 nt, Homo sapiens
cagcuaguugguccaagcuuccaa

SEQ ID NO: 2538 - RNA, 19 nt, Homo sapiens
ucuagugcgggcguucccg

SEQ ID NO: 2539 - RNA, 19 nt, Homo sapiens
cgggaacgcccgcacuaga

SEQ ID NO: 2540 - RNA, 24 nt, Homo sapiens
aggagcagugccggccaaggcgcc

SEQ ID NO: 2541 - RNA, 24 nt, Homo sapiens
ggcgccuuggccggcacugcuccu

SEQ ID NO: 2542 - RNA, 19 nt, Homo sapiens
gaauacgucugguugaucc

SEQ ID NO: 2543 - RNA, 19 nt, Homo sapiens
ggaucaaccagacguauuc

SEQ ID NO: 2544 - RNA, 20 nt, Homo sapiens
cuuauaucagaggcuguggg

SEQ ID NO: 2545 - RNA, 20 nt, Homo sapiens
cccacagccucugauauaag

SEQ ID NO: 2546 - RNA, 20 nt, Homo sapiens
uuccgccagucgguggccgg

SEQ ID NO: 2547 - RNA, 20 nt, Homo sapiens
ccggccaccgacuggcggaa

SEQ ID NO: 2548 - RNA, 19 nt, Homo sapiens
aaggggcugggggagcaca

SEQ ID NO: 2549 - RNA, 19 nt, Homo sapiens
ugugcucccccagccccuu

SEQ ID NO: 2550 - RNA, 23 nt, Homo sapiens
agguugggaucgguugcaaugcu

SEQ ID NO: 2551 - RNA, 23 nt, Homo sapiens
agcauugcaaccgaucccaaccu

SEQ ID NO: 2552 - RNA, 22 nt, Homo sapiens
ggguggggauuuguugcauuac

SEQ ID NO: 2553 - RNA, 22 nt, Homo sapiens
guaaugcaacaaauccccaccc

SEQ ID NO: 2554 - RNA, 22 nt, Homo sapiens
uauugcacuugucccggccugu

SEQ ID NO: 2555 - RNA, 22 nt, Homo sapiens
acaggccgggacaagugcaaua

SEQ ID NO: 2556 - RNA, 22 nt, Homo sapiens
uauugcacucgucccggccucc

SEQ ID NO: 2557 - RNA, 22 nt, Homo sapiens
ggaggccgggacgagugcaaua

SEQ ID NO: 2558 - RNA, 22 nt, Homo sapiens
agggacgggacgcggugcagug

SEQ ID NO: 2559 - RNA, 22 nt, Homo sapiens
cacugcaccgcgucccgucccu

SEQ ID NO: 2560 - RNA, 21 nt, Homo sapiens
aucacauugccagggauuucc

SEQ ID NO: 2561 - RNA, 21 nt, Homo sapiens
ggaaaucccuggcaaugugau

SEQ ID NO: 2562 - RNA, 22 nt, Homo sapiens
gggguuccuggggaugggauuu

SEQ ID NO: 2563 - RNA, 22 nt, Homo sapiens
aaaucccauccccaggaacccc

SEQ ID NO: 2564 - RNA, 22 nt, Homo sapiens
acugcagugaaggcacuuguag

SEQ ID NO: 2565 - RNA, 22 nt, Homo sapiens
cuacaagugccuucacugcagu

SEQ ID NO: 2566 - RNA, 23 nt, Homo sapiens
agcuacauugucugcuggguuuc

SEQ ID NO: 2567 - RNA, 23 nt, Homo sapiens
gaaacccagcagacaauguagcu

SEQ ID NO: 2568 - RNA, 22 nt, Homo sapiens
accuggcauacaauguagauuu

SEQ ID NO: 2569 - RNA, 22 nt, Homo sapiens
aaaucuacauuguaugccaggu

SEQ ID NO: 2570 - RNA, 22 nt, Homo sapiens
ucguaccgugaguaauaaugcg

SEQ ID NO: 2571 - RNA, 22 nt, Homo sapiens
cgcauuauuacucacgguacga

SEQ ID NO: 2572 - RNA, 21 nt, Homo sapiens
cauuauuacuuuugguacgcg

SEQ ID NO: 2573 - RNA, 21 nt, Homo sapiens
cgcguaccaaaaguaauaaug

SEQ ID NO: 2574 - RNA, 23 nt, Homo sapiens
uacuccagagggcgucacucaug

SEQ ID NO: 2575 - RNA, 23 nt, Homo sapiens
caugagugacgcccucuggagua

SEQ ID NO: 2576 - RNA, 21 nt, Homo sapiens
ucccacguuguggcccagcag

SEQ ID NO: 2577 - RNA, 21 nt, Homo sapiens
cugcugggccacaacguggga

SEQ ID NO: 2578 - RNA, 23 nt, Homo sapiens
ccucaccaccccuucugccugca

SEQ ID NO: 2579 - RNA, 23 nt, Homo sapiens
ugcaggcagaagggguggugagg

SEQ ID NO: 2580 - RNA, 24 nt, Homo sapiens
cugcaggcagaaguggggcugaca

SEQ ID NO: 2581 - RNA, 24 nt, Homo sapiens
ugucagccccacuucugccugcag

SEQ ID NO: 2582 - RNA, 21 nt, Homo sapiens
ccaaaccagucgugccugugg

SEQ ID NO: 2583 - RNA, 21 nt, Homo sapiens
ccacaggcacgacugguuugg

SEQ ID NO: 2584 - RNA, 22 nt, Homo sapiens
cucaaaccggcugugccugugg

SEQ ID NO: 2585 - RNA, 22 nt, Homo sapiens
ccacaggcacagccgguuugag

SEQ ID NO: 2586 - RNA, 21 nt, Homo sapiens
acaggcacgacugguuuggca

SEQ ID NO: 2587 - RNA, 21 nt, Homo sapiens
ugccaaaccagucgugccugu

SEQ ID NO: 2588 - RNA, 22 nt, Homo sapiens
uccgaacucuccauuccucugc

SEQ ID NO: 2589 - RNA, 22 nt, Homo sapiens
gcagaggaauggagaguucgga

SEQ ID NO: 2590 - RNA, 20 nt, Homo sapiens
ugggaauggggguaagggcc

SEQ ID NO: 2591 - RNA, 20 nt, Homo sapiens
ggcccuuacccccauuccca

SEQ ID NO: 2592 - RNA, 22 nt, Homo sapiens
aggcgauguggggauguagaga

SEQ ID NO: 2593 - RNA, 22 nt, Homo sapiens
ucucuacauccccacaucgccu

SEQ ID NO: 2594 - RNA, 21 nt, Homo sapiens
uaguggucagagggcuuauga

SEQ ID NO: 2595 - RNA, 21 nt, Homo sapiens
ucauaagcccucugaccacua

SEQ ID NO: 2596 - RNA, 22 nt, Homo sapiens
ucugacaucagugauucuccug

SEQ ID NO: 2597 - RNA, 22 nt, Homo sapiens
caggagaaucacugaugucaga

SEQ ID NO: 2598 - RNA, 22 nt, Homo sapiens
cgcgccugcaggaacugguaga

SEQ ID NO: 2599 - RNA, 22 nt, Homo sapiens
ucuaccaguuccugcaggcgcg

SEQ ID NO: 2600 - RNA, 23 nt, Homo sapiens
ugggcaggggcuuauuguaggag

SEQ ID NO: 2601 - RNA, 23 nt, Homo sapiens
cuccuacaauaagccccugccca

SEQ ID NO: 2602 - RNA, 22 nt, Homo sapiens
ugcaggggucgggugggccagg

SEQ ID NO: 2603 - RNA, 22 nt, Homo sapiens
ccuggcccacccgaccccugca

SEQ ID NO: 2604 - RNA, 20 nt, Homo sapiens
aggcgcacccgaccacaugc

SEQ ID NO: 2605 - RNA, 20 nt, Homo sapiens
gcauguggucgggugcgccu

SEQ ID NO: 2606 - RNA, 22 nt, Homo sapiens
auaguccgaguaacgucggggc

SEQ ID NO: 2607 - RNA, 22 nt, Homo sapiens
gccccgacguuacucggacuau

SEQ ID NO: 2608 - RNA, 23 nt, Homo sapiens
cugggcccgcggcgggcgugggg

SEQ ID NO: 2609 - RNA, 23 nt, Homo sapiens
ccccacgcccgccgcgggcccag

SEQ ID NO: 2610 - RNA, 21 nt, Homo sapiens
uacuuggaaaggcaucaguug

SEQ ID NO: 2611 - RNA, 21 nt, Homo sapiens
caacugaugccuuuccaagua

SEQ ID NO: 2612 - RNA, 22 nt, Homo sapiens
ugcaacgaaccugagccacuga

SEQ ID NO: 2613 - RNA, 22 nt, Homo sapiens
ucaguggcucagguucguugca

SEQ ID NO: 2614 - RNA, 22 nt, Homo sapiens
ugcaacuuaccugagucauuga

SEQ ID NO: 2615 - RNA, 22 nt, Homo sapiens
ucaaugacucagguaaguugca

SEQ ID NO: 2616 - RNA, 21 nt, Homo sapiens
cacuguguccuuucugcguag

SEQ ID NO: 2617 - RNA, 21 nt, Homo sapiens
cuacgcagaaaggacacagug

SEQ ID NO: 2618 - RNA, 22 nt, Homo sapiens
cacuggcuccuuucuggguaga

SEQ ID NO: 2619 - RNA, 22 nt, Homo sapiens
ucuacccagaaaggagccagug

SEQ ID NO: 2620 - RNA, 22 nt, Homo sapiens
cacuguuuccuuucugagugga

SEQ ID NO: 2621 - RNA, 22 nt, Homo sapiens
uccacucagaaaggaaacagug

SEQ ID NO: 2622 - RNA, 21 nt, Homo sapiens
uauucagaaaggugccaguca

SEQ ID NO: 2623 - RNA, 21 nt, Homo sapiens
ugacuggcaccuuucugaaua

SEQ ID NO: 2624 - RNA, 20 nt, Homo sapiens
auuccuagaaauuguucaua

SEQ ID NO: 2625 - RNA, 20 nt, Homo sapiens
uaugaacaauuucuaggaau

SEQ ID NO: 2626 - RNA, 22 nt, Homo sapiens
uaauacugucugguaaaaccgu

SEQ ID NO: 2627 - RNA, 22 nt, Homo sapiens
acgguuuuaccagacaguauua

SEQ ID NO: 2628 - RNA, 22 nt, Homo sapiens
ugaaacauacacgggaaaccuc

SEQ ID NO: 2629 - RNA, 22 nt, Homo sapiens
gagguuucccguguauguuuca

SEQ ID NO: 2630 - RNA, 22 nt, Homo sapiens
cuauacaaccuacugccuuccc

SEQ ID NO: 2631 - RNA, 22 nt, Homo sapiens
gggaaggcaguagguuguauag

SEQ ID NO: 2632 - RNA, 22 nt, Homo sapiens
ugagguaguagguugugugguu

SEQ ID NO: 2633 - RNA, 22 nt, Homo sapiens
aaccacacaaccuacuaccuca

SEQ ID NO: 2634 - RNA, 22 nt, Homo sapiens
uaacacugucugguaacgaugu

SEQ ID NO: 2635 - RNA, 22 nt, Homo sapiens
acaucguuaccagacaguguua

SEQ ID NO: 2636 - RNA, 22 nt, Homo sapiens
caucuuaccggacagugcugga

SEQ ID NO: 2637 - RNA, 22 nt, Homo sapiens
uccagcacuguccgguaagaug

SEQ ID NO: 2638 - RNA, 22 nt, Homo sapiens
uaauacugccugguaaugauga

SEQ ID NO: 2639 - RNA, 22 nt, Homo sapiens
ucaucauuaccaggcaguauua

SEQ ID NO: 2640 - RNA, 22 nt, Homo sapiens
caucuuacugggcagcauugga

SEQ ID NO: 2641 - RNA, 22 nt, Homo sapiens
uccaaugcugcccaguaagaug

SEQ ID NO: 2642 - RNA, 23 nt, Homo sapiens
uaauacugccggguaaugaugga

SEQ ID NO: 2643 - RNA, 23 nt, Homo sapiens
uccaucauuacccggcaguauua

SEQ ID NO: 2644 - RNA, 22 nt, Homo sapiens
cgucuuacccagcaguguuugg

SEQ ID NO: 2645 - RNA, 22 nt, Homo sapiens
ccaaacacugcuggguaagacg

SEQ ID NO: 2646 - RNA, 22 nt, Homo sapiens
uccagcaucagugauuuuguug

SEQ ID NO: 2647 - RNA, 22 nt, Homo sapiens
caacaaaaucacugaugcugga

SEQ ID NO: 2648 - RNA, 20 nt, Homo sapiens
uacaguauagaugauguacu

SEQ ID NO: 2649 - RNA, 20 nt, Homo sapiens
aguacaucaucuauacugua

SEQ ID NO: 2650 - RNA, 22 nt, Homo sapiens
ggauaucaucauauacuguaag

SEQ ID NO: 2651 - RNA, 22 nt, Homo sapiens
cuuacaguauaugaugauaucc

SEQ ID NO: 2652 - RNA, 21 nt, Homo sapiens
cggggcagcucaguacaggau

SEQ ID NO: 2653 - RNA, 21 nt, Homo sapiens
auccuguacugagcugccccg

SEQ ID NO: 2654 - RNA, 21 nt, Homo sapiens
uccuucugcuccgucccccag

SEQ ID NO: 2655 - RNA, 21 nt, Homo sapiens
cugggggacggagcagaagga

SEQ ID NO: 2656 - RNA, 21 nt, Homo sapiens
cgggggcggggccgaagcgcg

SEQ ID NO: 2657 - RNA, 21 nt, Homo sapiens
cgcgcuucggccccgcccccg

SEQ ID NO: 2658 - RNA, 21 nt, Homo sapiens
uccugcgcgucccagaugccc

SEQ ID NO: 2659 - RNA, 21 nt, Homo sapiens
gggcaucugggacgcgcagga

SEQ ID NO: 2660 - RNA, 22 nt, Homo sapiens
caucagaauucauggaggcuag

SEQ ID NO: 2661 - RNA, 22 nt, Homo sapiens
cuagccuccaugaauucugaug

SEQ ID NO: 2662 - RNA, 22 nt, Homo sapiens
agcuuccaugacuccugaugga

SEQ ID NO: 2663 - RNA, 22 nt, Homo sapiens
uccaucaggagucauggaagcu

SEQ ID NO: 2664 - RNA, 21 nt, Homo sapiens
ugacagcgcccugccuggcuc

SEQ ID NO: 2665 - RNA, 21 nt, Homo sapiens
gagccaggcagggcgcuguca

SEQ ID NO: 2666 - RNA, 24 nt, Homo sapiens
agcgcgggcugagcgcugccaguc

SEQ ID NO: 2667 - RNA, 24 nt, Homo sapiens
gacuggcagcgcucagcccgcgcu

SEQ ID NO: 2668 - RNA, 22 nt, Homo sapiens
cugggaggugugauaucguggu

SEQ ID NO: 2669 - RNA, 22 nt, Homo sapiens
accacgauaucacaccucccag

SEQ ID NO: 2670 - RNA, 22 nt, Homo sapiens
ugugauaucaugguuccuggga

SEQ ID NO: 2671 - RNA, 22 nt, Homo sapiens
ucccaggaaccaugauaucaca

SEQ ID NO: 2672 - RNA, 22 nt, Homo sapiens
aggugcuccaggcuggcucaca

SEQ ID NO: 2673 - RNA, 22 nt, Homo sapiens
ugugagccagccuggagcaccu

SEQ ID NO: 2674 - RNA, 22 nt, Homo sapiens
gagcaauguagguagacuguuu

SEQ ID NO: 2675 - RNA, 22 nt, Homo sapiens
aaacagucuaccuacauugcuc

SEQ ID NO: 2676 - RNA, 22 nt, Homo sapiens
uguccucuagggccugcagucu

SEQ ID NO: 2677 - RNA, 22 nt, Homo sapiens
agacugcaggcccuagaggaca

SEQ ID NO: 2678 - RNA, 20 nt, Homo sapiens
aaaggcauaaaaccaagaca

SEQ ID NO: 2679 - RNA, 20 nt, Homo sapiens
ugucuugguuuuaugccuuu

SEQ ID NO: 2680 - RNA, 21 nt, Homo sapiens
uaacgcauaauauggacaugu

SEQ ID NO: 2681 - RNA, 21 nt, Homo sapiens
acauguccauauuaugcguua

SEQ ID NO: 2682 - RNA, 22 nt, Homo sapiens
uugaggaaaagauggucuuauu

SEQ ID NO: 2683 - RNA, 22 nt, Homo sapiens
aauaagaccaucuuuuccucaa

SEQ ID NO: 2684 - RNA, 26 nt, Homo sapiens
aagaggaagaaauggcugguucucag

SEQ ID NO: 2685 - RNA, 26 nt, Homo sapiens
cugagaaccagccauuucuuccucuu

SEQ ID NO: 2686 - RNA, 20 nt, Homo sapiens
gcucggacugagcagguggg

SEQ ID NO: 2687 - RNA, 20 nt, Homo sapiens
cccaccugcucaguccgagc

SEQ ID NO: 2688 - RNA, 21 nt, Homo sapiens
acagggccgcagauggagacu

SEQ ID NO: 2689 - RNA, 21 nt, Homo sapiens
agucuccaucugcggcccugu

SEQ ID NO: 2690 - RNA, 21 nt, Homo sapiens
gcagagaacaaaggacucagu

SEQ ID NO: 2691 - RNA, 21 nt, Homo sapiens
acugaguccuuuguucucugc

SEQ ID NO: 2692 - RNA, 22 nt, Homo sapiens
acugauuaucuuaacucucuga

SEQ ID NO: 2693 - RNA, 22 nt, Homo sapiens
ucagagaguuaagauaaucagu

SEQ ID NO: 2694 - RNA, 23 nt, Homo sapiens
ucucugaguaccauaugccuugu

SEQ ID NO: 2695 - RNA, 23 nt, Homo sapiens
acaaggcauaugguacucagaga

SEQ ID NO: 2696 - RNA, 22 nt, Homo sapiens
aacuaguaauguuggauuaggg

SEQ ID NO: 2697 - RNA, 22 nt, Homo sapiens
cccuaauccaacauuacuaguu

SEQ ID NO: 2698 - RNA, 22 nt, Homo sapiens
auauguauaugugacugcuacu

SEQ ID NO: 2699 - RNA, 22 nt, Homo sapiens
aguagcagucacauauacauau

SEQ ID NO: 2700 - RNA, 21 nt, Homo sapiens
uggccaaaaagcaggcagaga

SEQ ID NO: 2701 - RNA, 21 nt, Homo sapiens
ucucugccugcuuuuuggcca

SEQ ID NO: 2702 - RNA, 22 nt, Homo sapiens
ggaggaaccuuggagcuucggc

SEQ ID NO: 2703 - RNA, 22 nt, Homo sapiens
gccgaagcuccaagguuccucc

SEQ ID NO: 2704 - RNA, 23 nt, Homo sapiens
gaggcugaugugaguagaccacu

SEQ ID NO: 2705 - RNA, 23 nt, Homo sapiens
aguggucuacucacaucagccuc

SEQ ID NO: 2706 - RNA, 21 nt, Homo sapiens
cuguccuaagguuguugaguu

SEQ ID NO: 2707 - RNA, 21 nt, Homo sapiens
aacucaacaaccuuaggacag

SEQ ID NO: 2708 - RNA, 21 nt, Homo sapiens
ucuucaaccucaggacuugca

SEQ ID NO: 2709 - RNA, 21 nt, Homo sapiens
ugcaaguccugagguugaaga

SEQ ID NO: 2710 - RNA, 22 nt, Homo sapiens
ugugauaucaugguuccuggga

SEQ ID NO: 2711 - RNA, 22 nt, Homo sapiens
ucccaggaaccaugauaucaca

SEQ ID NO: 2712 - RNA, 22 nt, Homo sapiens
cugggaggugugauauuguggu

SEQ ID NO: 2713 - RNA, 22 nt, Homo sapiens
accacaauaucacaccucccag

SEQ ID NO: 2714 - RNA, 22 nt, Homo sapiens
cagguagauauuugauaggcau

SEQ ID NO: 2715 - RNA, 22 nt, Homo sapiens
augccuaucaaauaucuaccug

SEQ ID NO: 2716 - RNA, 21 nt, Homo sapiens
gccuaucacauaucugccugu

SEQ ID NO: 2717 - RNA, 21 nt, Homo sapiens
acaggcagauaugugauaggc

SEQ ID NO: 2718 - RNA, 20 nt, Homo sapiens
gggcuggggcgcggggaggu

SEQ ID NO: 2719 - RNA, 20 nt, Homo sapiens
accuccccgcgccccagccc

SEQ ID NO: 2720 - RNA, 18 nt, Homo sapiens
ugcuuccuuucagagggu

SEQ ID NO: 2721 - RNA, 18 nt, Homo sapiens
acccucugaaaggaagca

SEQ ID NO: 2722 - RNA, 21 nt, Homo sapiens
ugaguuggccaucugagugag

SEQ ID NO: 2723 - RNA, 21 nt, Homo sapiens
cucacucagauggccaacuca

SEQ ID NO: 2724 - RNA, 23 nt, Homo sapiens
aacauucauuguugucggugggu

SEQ ID NO: 2725 - RNA, 23 nt, Homo sapiens
acccaccgacaacaaugaauguu

SEQ ID NO: 2726 - RNA, 21 nt, Homo sapiens
ucacagugaaccggucucuuu

SEQ ID NO: 2727 - RNA, 21 nt, Homo sapiens
aaagagaccgguucacuguga

SEQ ID NO: 2728 - RNA, 22 nt, Homo sapiens
caacaaaucacagucugccaua

SEQ ID NO: 2729 - RNA, 22 nt, Homo sapiens
uauggcagacugugauuuguug

SEQ ID NO: 2730 - RNA, 21 nt, Homo sapiens
cucacugaacaaugaaugcaa

SEQ ID NO: 2731 - RNA, 21 nt, Homo sapiens
uugcauucauuguucagugag

SEQ ID NO: 2732 - RNA, 23 nt, Homo sapiens
aacauucauugcugucggugggu

SEQ ID NO: 2733 - RNA, 23 nt, Homo sapiens
acccaccgacagcaaugaauguu

SEQ ID NO: 2734 - RNA, 22 nt, Homo sapiens
accaucgaccguugauuguacc

SEQ ID NO: 2735 - RNA, 22 nt, Homo sapiens
gguacaaucaacggucgauggu

SEQ ID NO: 2736 - RNA, 23 nt, Homo sapiens
aacauucaacgcugucggugagu

SEQ ID NO: 2737 - RNA, 23 nt, Homo sapiens
acucaccgacagcguugaauguu

SEQ ID NO: 2738 - RNA, 22 nt, Homo sapiens
accacugaccguugacuguacc

SEQ ID NO: 2739 - RNA, 22 nt, Homo sapiens
gguacagucaacggucaguggu

SEQ ID NO: 2740 - RNA, 22 nt, Homo sapiens
cuguugccacuaaccucaaccu

SEQ ID NO: 2741 - RNA, 22 nt, Homo sapiens
agguugagguuaguggcaacag

SEQ ID NO: 2742 - RNA, 22 nt, Homo sapiens
auaagacgagcaaaaagcuugu

SEQ ID NO: 2743 - RNA, 22 nt, Homo sapiens
acaagcuuuuugcucgucuuau

SEQ ID NO: 2744 - RNA, 22 nt, Homo sapiens
auaagacgaacaaaagguuugu

SEQ ID NO: 2745 - RNA, 22 nt, Homo sapiens
acaaaccuuuuguucgucuuau

SEQ ID NO: 2746 - RNA, 21 nt, Homo sapiens
agggagggacgggggcugugc

SEQ ID NO: 2747 - RNA, 21 nt, Homo sapiens
gcacagcccccgucccucccu

SEQ ID NO: 2748 - RNA, 23 nt, Homo sapiens
ucuggcuccgugucuucacuccc

SEQ ID NO: 2749 - RNA, 23 nt, Homo sapiens
gggagugaagacacggagccaga

SEQ ID NO: 2750 - RNA, 22 nt, Homo sapiens
uggaauguaaagaaguauguau

SEQ ID NO: 2751 - RNA, 22 nt, Homo sapiens
auacauacuucuuuacauucca

SEQ ID NO: 2752 - RNA, 22 nt, Homo sapiens
aacaucacagcaagucugugcu

SEQ ID NO: 2753 - RNA, 22 nt, Homo sapiens
agcacagacuugcugugauguu

SEQ ID NO: 2754 - RNA, 21 nt, Homo sapiens
uuaagacuugcagugauguuu

SEQ ID NO: 2755 - RNA, 21 nt, Homo sapiens
aaacaucacugcaagucuuaa

SEQ ID NO: 2756 - RNA, 22 nt, Homo sapiens
aacaucacugcaagucuuaaca

SEQ ID NO: 2757 - RNA, 22 nt, Homo sapiens
uguuaagacuugcagugauguu

SEQ ID NO: 2758 - RNA, 21 nt, Homo sapiens
acagacuugcugugauguuca

SEQ ID NO: 2759 - RNA, 21 nt, Homo sapiens
ugaacaucacagcaagucugu

SEQ ID NO: 2760 - RNA, 22 nt, Homo sapiens
aaaccguuaccauuacugaguu

SEQ ID NO: 2761 - RNA, 22 nt, Homo sapiens
aacucaguaaugguaacgguuu

SEQ ID NO: 2762 - RNA, 22 nt, Homo sapiens
uagcaagagaaccauuaccauu

SEQ ID NO: 2763 - RNA, 22 nt, Homo sapiens
aaugguaaugguucucuugcua

SEQ ID NO: 2764 - RNA, 23 nt, Homo sapiens
ugaggggcagagagcgagacuuu

SEQ ID NO: 2765 - RNA, 23 nt, Homo sapiens
aaagucucgcucucugccccuca

SEQ ID NO: 2766 - RNA, 22 nt, Homo sapiens
caagcucgcuucuaugggucug

SEQ ID NO: 2767 - RNA, 22 nt, Homo sapiens
cagacccauagaagcgagcuug

SEQ ID NO: 2768 - RNA, 22 nt, Homo sapiens
aacccguagauccgaucuugug

SEQ ID NO: 2769 - RNA, 22 nt, Homo sapiens
cacaagaucggaucuacggguu

SEQ ID NO: 2770 - RNA, 22 nt, Homo sapiens
caagcucgugucuguggguccg

SEQ ID NO: 2771 - RNA, 22 nt, Homo sapiens
cggacccacagacacgagcuug

SEQ ID NO: 2772 - RNA, 22 nt, Homo sapiens
cacccguagaaccgaccuugcg

SEQ ID NO: 2773 - RNA, 22 nt, Homo sapiens
cgcaaggucgguucuacgggug

SEQ ID NO: 2774 - RNA, 23 nt, Homo sapiens
uggagacgcggcccuguuggagu

SEQ ID NO: 2775 - RNA, 23 nt, Homo sapiens
acuccaacagggccgcgucucca

SEQ ID NO: 2776 - RNA, 23 nt, Homo sapiens
ucuacagugcacgugucuccagu

SEQ ID NO: 2777 - RNA, 23 nt, Homo sapiens
acuggagacacgugcacuguaga

SEQ ID NO: 2778 - RNA, 22 nt, Homo sapiens
caaauucguaucuaggggaaua

SEQ ID NO: 2779 - RNA, 22 nt, Homo sapiens
uauuccccuagauacgaauuug

SEQ ID NO: 2780 - RNA, 23 nt, Homo sapiens
uacccuguagauccgaauuugug

SEQ ID NO: 2781 - RNA, 23 nt, Homo sapiens
cacaaauucggaucuacagggua

SEQ ID NO: 2782 - RNA, 23 nt, Homo sapiens
ccugcagcgacuugauggcuucc

SEQ ID NO: 2783 - RNA, 23 nt, Homo sapiens
ggaagccaucaagucgcugcagg

SEQ ID NO: 2784 - RNA, 22 nt, Homo sapiens
ucagugcacuacagaacuuugu

SEQ ID NO: 2785 - RNA, 22 nt, Homo sapiens
acaaaguucuguagugcacuga

SEQ ID NO: 2786 - RNA, 22 nt, Homo sapiens
aaaguucugagacacuccgacu

SEQ ID NO: 2787 - RNA, 22 nt, Homo sapiens
agucggagugucucagaacuuu

SEQ ID NO: 2788 - RNA, 22 nt, Homo sapiens
ccuguucuccauuacuuggcuc

SEQ ID NO: 2789 - RNA, 22 nt, Homo sapiens
gagccaaguaauggagaacagg

SEQ ID NO: 2790 - RNA, 21 nt, Homo sapiens
uucaaguaauucaggauaggu

SEQ ID NO: 2791 - RNA, 21 nt, Homo sapiens
accuauccugaauuacuugaa

SEQ ID NO: 2792 - RNA, 22 nt, Homo sapiens
gcccugaacgaggggucuggag

SEQ ID NO: 2793 - RNA, 22 nt, Homo sapiens
cuccagaccccucguucagggc

SEQ ID NO: 2794 - RNA, 22 nt, Homo sapiens
gcugacuccuaguccagggcuc

SEQ ID NO: 2795 - RNA, 22 nt, Homo sapiens
gagcccuggacuaggagucagc

SEQ ID NO: 2796 - RNA, 22 nt, Homo sapiens
aucacacaaaggcaacuuuugu

SEQ ID NO: 2797 - RNA, 22 nt, Homo sapiens
acaaaaguugccuuugugugau

SEQ ID NO: 2798 - RNA, 22 nt, Homo sapiens
agagguugcccuuggugaauuc

SEQ ID NO: 2799 - RNA, 22 nt, Homo sapiens
gaauucaccaagggcaaccucu

SEQ ID NO: 2800 - RNA, 21 nt, Homo sapiens
gguagauuuuccuucuauggu

SEQ ID NO: 2801 - RNA, 21 nt, Homo sapiens
accauagaaggaaaaucuacc

SEQ ID NO: 2802 - RNA, 21 nt, Homo sapiens
aucauagaggaaaauccacgu

SEQ ID NO: 2803 - RNA, 21 nt, Homo sapiens
acguggauuuuccucuaugau

SEQ ID NO: 2804 - RNA, 22 nt, Homo sapiens
guagauucuccuucuaugagua

SEQ ID NO: 2805 - RNA, 22 nt, Homo sapiens
uacucauagaaggagaaucuac

SEQ ID NO: 2806 - RNA, 22 nt, Homo sapiens
cugguacaggccugggggacag

SEQ ID NO: 2807 - RNA, 22 nt, Homo sapiens
cugucccccaggccuguaccag

SEQ ID NO: 2808 - RNA, 22 nt, Homo sapiens
ucucccaacccuuguaccagug

SEQ ID NO: 2809 - RNA, 22 nt, Homo sapiens
cacugguacaaggguugggaga

SEQ ID NO: 2810 - RNA, 22 nt, Homo sapiens
acggguuaggcucuugggagcu

SEQ ID NO: 2811 - RNA, 22 nt, Homo sapiens
agcucccaagagccuaacccgu

SEQ ID NO: 2812 - RNA, 22 nt, Homo sapiens
ucacaagucaggcucuugggac

SEQ ID NO: 2813 - RNA, 22 nt, Homo sapiens
gucccaagagccugacuuguga

SEQ ID NO: 2814 - RNA, 22 nt, Homo sapiens
aacccguagauccgaacuugug

SEQ ID NO: 2815 - RNA, 22 nt, Homo sapiens
cacaaguucggaucuacggguu

SEQ ID NO: 2816 - RNA, 21 nt, Homo sapiens
cuguacaggccacugccuugc

SEQ ID NO: 2817 - RNA, 21 nt, Homo sapiens
gcaaggcaguggccuguacag

SEQ ID NO: 2818 - RNA, 22 nt, Homo sapiens
ugagguaguaguuuguacaguu

SEQ ID NO: 2819 - RNA, 22 nt, Homo sapiens
aacuguacaaacuacuaccuca

SEQ ID NO: 2820 - RNA, 22 nt, Homo sapiens
ucccugagacccuaacuuguga

SEQ ID NO: 2821 - RNA, 22 nt, Homo sapiens
ucacaaguuagggucucaggga

SEQ ID NO: 2822 - RNA, 22 nt, Homo sapiens
caagcuuguaucuauagguaug

SEQ ID NO: 2823 - RNA, 22 nt, Homo sapiens
cauaccuauagauacaagcuug

SEQ ID NO: 2824 - RNA, 23 nt, Homo sapiens
aaagugcugcgacauuugagcgu

SEQ ID NO: 2825 - RNA, 23 nt, Homo sapiens
acgcucaaaugucgcagcacuuu

SEQ ID NO: 2826 - RNA, 22 nt, Homo sapiens
uuuagagacggggucuugcucu

SEQ ID NO: 2827 - RNA, 22 nt, Homo sapiens
agagcaagaccccgucucuaaa

SEQ ID NO: 2828 - RNA, 24 nt, Homo sapiens
uggcccugacugaagaccagcagu

SEQ ID NO: 2829 - RNA, 24 nt, Homo sapiens
acugcuggucuucagucagggcca

SEQ ID NO: 2830 - RNA, 21 nt, Homo sapiens
gcgacccauacuugguuucag

SEQ ID NO: 2831 - RNA, 21 nt, Homo sapiens
cugaaaccaaguaugggucgc

SEQ ID NO: 2832 - RNA, 22 nt, Homo sapiens
gaaaucaagcgugggugagacc

SEQ ID NO: 2833 - RNA, 22 nt, Homo sapiens
ggucucacccacgcuugauuuc

SEQ ID NO: 2834 - RNA, 21 nt, Homo sapiens
cccugggccucugcuccccag

SEQ ID NO: 2835 - RNA, 21 nt, Homo sapiens
cuggggagcagaggcccaggg

SEQ ID NO: 2836 - RNA, 24 nt, Homo sapiens
uggggagcugaggcucugggggug

SEQ ID NO: 2837 - RNA, 24 nt, Homo sapiens
cacccccagagccucagcucccca

SEQ ID NO: 2838 - RNA, 20 nt, Homo sapiens
ggggagcuguggaagcagua

SEQ ID NO: 2839 - RNA, 20 nt, Homo sapiens
uacugcuuccacagcucccc

SEQ ID NO: 2840 - RNA, 25 nt, Homo sapiens
cuagugagggacagaaccaggauuc

SEQ ID NO: 2841 - RNA, 25 nt, Homo sapiens
gaauccugguucugucccucacuag

SEQ ID NO: 2842 - RNA, 20 nt, Homo sapiens
agagucuugugaugucuugc

SEQ ID NO: 2843 - RNA, 20 nt, Homo sapiens
gcaagacaucacaagacucu

SEQ ID NO: 2844 - RNA, 23 nt, Homo sapiens
gcagcagagaauaggacuacguc

SEQ ID NO: 2845 - RNA, 23 nt, Homo sapiens
gacguaguccuauucucugcugc

SEQ ID NO: 2846 - RNA, 23 nt, Homo sapiens
ugagcgccucgacgacagagccg

SEQ ID NO: 2847 - RNA, 23 nt, Homo sapiens
cggcucugucgucgaggcgcuca

SEQ ID NO: 2848 - RNA, 23 nt, Homo sapiens
ucccuguccuccaggagcucacg

SEQ ID NO: 2849 - RNA, 23 nt, Homo sapiens
cgugagcuccuggaggacaggga

SEQ ID NO: 2850 - RNA, 22 nt, Homo sapiens
cuauacggccuccuagcuuucc

SEQ ID NO: 2851 - RNA, 22 nt, Homo sapiens
ggaaagcuaggaggccguauag

SEQ ID NO: 2852 - RNA, 22 nt, Homo sapiens
ugagguaggagguuguauaguu

SEQ ID NO: 2853 - RNA, 22 nt, Homo sapiens
aacuauacaaccuccuaccuca

SEQ ID NO: 2854 - RNA, 22 nt, Homo sapiens
cugcgcaagcuacugccuugcu

SEQ ID NO: 2855 - RNA, 22 nt, Homo sapiens
agcaaggcaguagcuugcgcag

SEQ ID NO: 2856 - RNA, 22 nt, Homo sapiens
ugagguaguaguuugugcuguu

SEQ ID NO: 2857 - RNA, 22 nt, Homo sapiens
aacagcacaaacuacuaccuca

SEQ ID NO: 2858 - RNA, 22 nt, Homo sapiens
ugcccuguggacucaguucugg

SEQ ID NO: 2859 - RNA, 22 nt, Homo sapiens
ccagaacugaguccacagggca

SEQ ID NO: 2860 - RNA, 21 nt, Homo sapiens
ugguucuagacuugccaacua

SEQ ID NO: 2861 - RNA, 21 nt, Homo sapiens
uaguuggcaagucuagaacca

SEQ ID NO: 2862 - RNA, 23 nt, Homo sapiens
ugucugcccgcaugccugccucu

SEQ ID NO: 2863 - RNA, 23 nt, Homo sapiens
agaggcaggcaugcgggcagaca

SEQ ID NO: 2864 - RNA, 22 nt, Homo sapiens
aaaaguaauugcggucuuuggu

SEQ ID NO: 2865 - RNA, 22 nt, Homo sapiens
accaaagaccgcaauuacuuuu

SEQ ID NO: 2866 - RNA, 18 nt, Homo sapiens
ucgaggagcucacagucu

SEQ ID NO: 2867 - RNA, 18 nt, Homo sapiens
agacugugagcuccucga

SEQ ID NO: 2868 - RNA, 22 nt, Homo sapiens
cuauacaaucuauugccuuccc

SEQ ID NO: 2869 - RNA, 22 nt, Homo sapiens
gggaaggcaauagauuguauag

SEQ ID NO: 2870 - RNA, 22 nt, Homo sapiens
cuauacagucuacugucuuucc

SEQ ID NO: 2871 - RNA, 22 nt, Homo sapiens
ggaaagacaguagacuguauag

SEQ ID NO: 2872 - RNA, 22 nt, Homo sapiens
ugagguaguagauuguauaguu

SEQ ID NO: 2873 - RNA, 22 nt, Homo sapiens
aacuauacaaucuacuaccuca

SEQ ID NO: 2874 - RNA, 22 nt, Homo sapiens
aaaaguaauugugguuuuggcc

SEQ ID NO: 2875 - RNA, 22 nt, Homo sapiens
ggccaaaaccacaauuacuuuu

SEQ ID NO: 2876 - RNA, 22 nt, Homo sapiens
aaaaguaauugcgguuuuugcc

SEQ ID NO: 2877 - RNA, 22 nt, Homo sapiens
ggcaaaaaccgcaauuacuuuu

SEQ ID NO: 2878 - RNA, 22 nt, Homo sapiens
ccucugaaauucaguucuucag

SEQ ID NO: 2879 - RNA, 22 nt, Homo sapiens
cugaagaacugaauuucagagg

SEQ ID NO: 2880 - RNA, 22 nt, Homo sapiens
ugagaacugaauuccauggguu

SEQ ID NO: 2881 - RNA, 22 nt, Homo sapiens
aacccauggaauucaguucuca

SEQ ID NO: 2882 - RNA, 22 nt, Homo sapiens
acagcaggcacagacaggcagu

SEQ ID NO: 2883 - RNA, 22 nt, Homo sapiens
acugccugucugugccugcugu

SEQ ID NO: 2884 - RNA, 22 nt, Homo sapiens
ugccugucuacacuugcugugc

SEQ ID NO: 2885 - RNA, 22 nt, Homo sapiens
gcacagcaaguguagacaggca

SEQ ID NO: 2886 - RNA, 22 nt, Homo sapiens
uagcaccaucugaaaucgguua

SEQ ID NO: 2887 - RNA, 22 nt, Homo sapiens
uaaccgauuucagauggugcua

SEQ ID NO: 2888 - RNA, 22 nt, Homo sapiens
acugauuucuuuugguguucag

SEQ ID NO: 2889 - RNA, 22 nt, Homo sapiens
cugaacaccaaaagaaaucagu

SEQ ID NO: 2890 - RNA, 24 nt, Homo sapiens
gcugguuucauauggugguuuaga

SEQ ID NO: 2891 - RNA, 24 nt, Homo sapiens
ucuaaaccaccauaugaaaccagc

SEQ ID NO: 2892 - RNA, 22 nt, Homo sapiens
cugguuucacaugguggcuuag

SEQ ID NO: 2893 - RNA, 22 nt, Homo sapiens
cuaagccaccaugugaaaccag

SEQ ID NO: 2894 - RNA, 23 nt, Homo sapiens
uagcaccauuugaaaucaguguu

SEQ ID NO: 2895 - RNA, 23 nt, Homo sapiens
aacacugauuucaaauggugcua

SEQ ID NO: 2896 - RNA, 22 nt, Homo sapiens
uagcaccauuugaaaucgguua

SEQ ID NO: 2897 - RNA, 22 nt, Homo sapiens
uaaccgauuucaaauggugcua

SEQ ID NO: 2898 - RNA, 22 nt, Homo sapiens
ugaccgauuucuccugguguuc

SEQ ID NO: 2899 - RNA, 22 nt, Homo sapiens
gaacaccaggagaaaucgguca

SEQ ID NO: 2900 - RNA, 23 nt, Homo sapiens
ugucacucggcucggcccacuac

SEQ ID NO: 2901 - RNA, 23 nt, Homo sapiens
guagugggccgagccgagugaca

SEQ ID NO: 2902 - RNA, 22 nt, Homo sapiens
cugccaauuccauaggucacag

SEQ ID NO: 2903 - RNA, 22 nt, Homo sapiens
cugugaccuauggaauuggcag

SEQ ID NO: 2904 - RNA, 21 nt, Homo sapiens
cugaccuaugaauugacagcc

SEQ ID NO: 2905 - RNA, 21 nt, Homo sapiens
ggcugucaauucauaggucag

SEQ ID NO: 2906 - RNA, 20 nt, Homo sapiens
acugccccaggugcugcugg

SEQ ID NO: 2907 - RNA, 20 nt, Homo sapiens
ccagcagcaccuggggcagu

SEQ ID NO: 2908 - RNA, 22 nt, Homo sapiens
aacgccauuaucacacuaaaua

SEQ ID NO: 2909 - RNA, 22 nt, Homo sapiens
uauuuagugugauaauggcguu

SEQ ID NO: 2910 - RNA, 22 nt, Homo sapiens
cuuucagucggauguuugcagc

SEQ ID NO: 2911 - RNA, 22 nt, Homo sapiens
gcugcaaacauccgacugaaag

SEQ ID NO: 2912 - RNA, 22 nt, Homo sapiens
aauugcacgguauccaucugua

SEQ ID NO: 2913 - RNA, 22 nt, Homo sapiens
uacagauggauaccgugcaauu

SEQ ID NO: 2914 - RNA, 22 nt, Homo sapiens
cggguggaucacgaugcaauuu

SEQ ID NO: 2915 - RNA, 22 nt, Homo sapiens
aaauugcaucgugauccacccg

SEQ ID NO: 2916 - RNA, 22 nt, Homo sapiens
cugggagguggauguuuacuuc

SEQ ID NO: 2917 - RNA, 22 nt, Homo sapiens
gaaguaaacauccaccucccag

SEQ ID NO: 2918 - RNA, 22 nt, Homo sapiens
uguaaacauccuacacucagcu

SEQ ID NO: 2919 - RNA, 22 nt, Homo sapiens
agcugaguguaggauguuuaca

SEQ ID NO: 2920 - RNA, 22 nt, Homo sapiens
cugggagaggguuguuuacucc

SEQ ID NO: 2921 - RNA, 22 nt, Homo sapiens
ggaguaaacaacccucucccag

SEQ ID NO: 2922 - RNA, 22 nt, Homo sapiens
cugggagaaggcuguuuacucu

SEQ ID NO: 2923 - RNA, 22 nt, Homo sapiens
agaguaaacagccuucucccag

SEQ ID NO: 2924 - RNA, 23 nt, Homo sapiens
uguaaacauccuacacucucagc

SEQ ID NO: 2925 - RNA, 23 nt, Homo sapiens
gcugagaguguaggauguuuaca

SEQ ID NO: 2926 - RNA, 22 nt, Homo sapiens
uuuuucauuauugcuccugacc

SEQ ID NO: 2927 - RNA, 22 nt, Homo sapiens
ggucaggagcaauaaugaaaaa

SEQ ID NO: 2928 - RNA, 23 nt, Homo sapiens
ucaagagcaauaacgaaaaaugu

SEQ ID NO: 2929 - RNA, 23 nt, Homo sapiens
acauuuuucguuauugcucuuga

SEQ ID NO: 2930 - RNA, 23 nt, Homo sapiens
caaagugcuuacagugcagguag

SEQ ID NO: 2931 - RNA, 23 nt, Homo sapiens
cuaccugcacuguaagcacuuug

SEQ ID NO: 2932 - RNA, 22 nt, Homo sapiens
ggauuccuggaaauacuguucu

SEQ ID NO: 2933 - RNA, 22 nt, Homo sapiens
agaacaguauuuccaggaaucc

SEQ ID NO: 2934 - RNA, 23 nt, Homo sapiens
guccaguuuucccaggaaucccu

SEQ ID NO: 2935 - RNA, 23 nt, Homo sapiens
agggauuccugggaaaacuggac

SEQ ID NO: 2936 - RNA, 22 nt, Homo sapiens
acugcauuaugagcacuuaaag

SEQ ID NO: 2937 - RNA, 22 nt, Homo sapiens
cuuuaagugcucauaaugcagu

SEQ ID NO: 2938 - RNA, 23 nt, Homo sapiens
uaaagugcuuauagugcagguag

SEQ ID NO: 2939 - RNA, 23 nt, Homo sapiens
cuaccugcacuauaagcacuuua

SEQ ID NO: 2940 - RNA, 22 nt, Homo sapiens
gaggguuggguggaggcucucc

SEQ ID NO: 2941 - RNA, 22 nt, Homo sapiens
ggagagccuccacccaacccuc

SEQ ID NO: 2942 - RNA, 22 nt, Homo sapiens
cugugcgugugacagcggcuga

SEQ ID NO: 2943 - RNA, 22 nt, Homo sapiens
ucagccgcugucacacgcacag

SEQ ID NO: 2944 - RNA, 22 nt, Homo sapiens
ccaguggggcugcuguuaucug

SEQ ID NO: 2945 - RNA, 22 nt, Homo sapiens
cagauaacagcagccccacugg

SEQ ID NO: 2946 - RNA, 22 nt, Homo sapiens
uguaacagcaacuccaugugga

SEQ ID NO: 2947 - RNA, 22 nt, Homo sapiens
uccacauggaguugcuguuaca

SEQ ID NO: 2948 - RNA, 22 nt, Homo sapiens
ucacaguggucucugggauuau

SEQ ID NO: 2949 - RNA, 22 nt, Homo sapiens
auaaucccagagaccacuguga

SEQ ID NO: 2950 - RNA, 22 nt, Homo sapiens
uaaucucagcuggcaacuguga

SEQ ID NO: 2951 - RNA, 22 nt, Homo sapiens
ucacaguugccagcugagauua

SEQ ID NO: 2952 - RNA, 22 nt, Homo sapiens
cagugccucggcagugcagccc

SEQ ID NO: 2953 - RNA, 22 nt, Homo sapiens
gggcugcacugccgaggcacug

SEQ ID NO: 2954 - RNA, 20 nt, Homo sapiens
gugcauugcuguugcauugc

SEQ ID NO: 2955 - RNA, 20 nt, Homo sapiens
gcaaugcaacagcaaugcac

SEQ ID NO: 2956 - RNA, 19 nt, Homo sapiens
acuggacuuggaggcagaa

SEQ ID NO: 2957 - RNA, 19 nt, Homo sapiens
uucugccuccaaguccagu

SEQ ID NO: 2958 - RNA, 25 nt, Homo sapiens
acuggacuuggagucagaagagugg

SEQ ID NO: 2959 - RNA, 25 nt, Homo sapiens
ccacucuucugacuccaaguccagu

SEQ ID NO: 2960 - RNA, 20 nt, Homo sapiens
acuggacuuggagucagaaa

SEQ ID NO: 2961 - RNA, 20 nt, Homo sapiens
uuucugacuccaaguccagu

SEQ ID NO: 2962 - RNA, 19 nt, Homo sapiens
acuggacuuggagucagga

SEQ ID NO: 2963 - RNA, 19 nt, Homo sapiens
uccugacuccaaguccagu

SEQ ID NO: 2964 - RNA, 20 nt, Homo sapiens
acuggacuuggagccagaag

SEQ ID NO: 2965 - RNA, 20 nt, Homo sapiens
cuucuggcuccaaguccagu

SEQ ID NO: 2966 - RNA, 20 nt, Homo sapiens
acugggcuuggagucagaag

SEQ ID NO: 2967 - RNA, 20 nt, Homo sapiens
cuucugacuccaagcccagu

SEQ ID NO: 2968 - RNA, 21 nt, Homo sapiens
acuggacuuggugucagaugg

SEQ ID NO: 2969 - RNA, 21 nt, Homo sapiens
ccaucugacaccaaguccagu

SEQ ID NO: 2970 - RNA, 21 nt, Homo sapiens
acuggacuaggagucagaagg

SEQ ID NO: 2971 - RNA, 21 nt, Homo sapiens
ccuucugacuccuaguccagu

SEQ ID NO: 2972 - RNA, 19 nt, Homo sapiens
acuggauuuggagccagaa

SEQ ID NO: 2973 - RNA, 19 nt, Homo sapiens
uucuggcuccaaauccagu

SEQ ID NO: 2974 - RNA, 20 nt, Homo sapiens
aggaauguuccuucuuugcc

SEQ ID NO: 2975 - RNA, 20 nt, Homo sapiens
ggcaaagaaggaacauuccu

SEQ ID NO: 2976 - RNA, 21 nt, Homo sapiens
ucagugcaugacagaacuugg

SEQ ID NO: 2977 - RNA, 21 nt, Homo sapiens
ccaaguucugucaugcacuga

SEQ ID NO: 2978 - RNA, 20 nt, Homo sapiens
ucacaccugccucgcccccc

SEQ ID NO: 2979 - RNA, 20 nt, Homo sapiens
ggggggcgaggcagguguga

SEQ ID NO: 2980 - RNA, 21 nt, Homo sapiens
gugggcgggggcaggugugug

SEQ ID NO: 2981 - RNA, 21 nt, Homo sapiens
cacacaccugcccccgcccac

SEQ ID NO: 2982 - RNA, 22 nt, Homo sapiens
acgcccuucccccccuucuuca

SEQ ID NO: 2983 - RNA, 22 nt, Homo sapiens
ugaagaagggggggaagggcgu

SEQ ID NO: 2984 - RNA, 22 nt, Homo sapiens
uugcauauguaggaugucccau

SEQ ID NO: 2985 - RNA, 22 nt, Homo sapiens
augggacauccuacauaugcaa

SEQ ID NO: 2986 - RNA, 23 nt, Homo sapiens
guuugcacgggugggccuugucu

SEQ ID NO: 2987 - RNA, 23 nt, Homo sapiens
agacaaggcccacccgugcaaac

SEQ ID NO: 2988 - RNA, 22 nt, Homo sapiens
gacuauagaacuuucccccuca

SEQ ID NO: 2989 - RNA, 22 nt, Homo sapiens
ugagggggaaaguucuauaguc

SEQ ID NO: 2990 - RNA, 21 nt, Homo sapiens
agggggaaaguucuauagucc

SEQ ID NO: 2991 - RNA, 21 nt, Homo sapiens
ggacuauagaacuuucccccu

SEQ ID NO: 2992 - RNA, 21 nt, Homo sapiens
cuuuuugcggucugggcuugc

SEQ ID NO: 2993 - RNA, 21 nt, Homo sapiens
gcaagcccagaccgcaaaaag

SEQ ID NO: 2994 - RNA, 21 nt, Homo sapiens
ucuuguguucucuagaucagu

SEQ ID NO: 2995 - RNA, 21 nt, Homo sapiens
acugaucuagagaacacaaga

SEQ ID NO: 2996 - RNA, 23 nt, Homo sapiens
cccaguguucagacuaccuguuc

SEQ ID NO: 2997 - RNA, 23 nt, Homo sapiens
gaacagguagucugaacacuggg

SEQ ID NO: 2998 - RNA, 22 nt, Homo sapiens
acaguagucugcacauugguua

SEQ ID NO: 2999 - RNA, 22 nt, Homo sapiens
uaaccaaugugcagacuacugu

SEQ ID NO: 3000 - RNA, 22 nt, Homo sapiens
acaguagucugcacauugguua

SEQ ID NO: 3001 - RNA, 22 nt, Homo sapiens
uaaccaaugugcagacuacugu

SEQ ID NO: 3002 - RNA, 23 nt, Homo sapiens
cccaguguuuagacuaucuguuc

SEQ ID NO: 3003 - RNA, 23 nt, Homo sapiens
gaacagauagucuaaacacuggg

SEQ ID NO: 3004 - RNA, 22 nt, Homo sapiens
uggagugugacaaugguguuug

SEQ ID NO: 3005 - RNA, 22 nt, Homo sapiens
caaacaccauugucacacucca

SEQ ID NO: 3006 - RNA, 22 nt, Homo sapiens
ugcccuaaaugccccuucuggc

SEQ ID NO: 3007 - RNA, 22 nt, Homo sapiens
gccagaaggggcauuuagggca

SEQ ID NO: 3008 - RNA, 23 nt, Homo sapiens
uaaggugcaucuagugcaguuag

SEQ ID NO: 3009 - RNA, 23 nt, Homo sapiens
cuaacugcacuagaugcaccuua

SEQ ID NO: 3010 - RNA, 22 nt, Homo sapiens
cuccuauaugaugccuuucuuc

SEQ ID NO: 3011 - RNA, 22 nt, Homo sapiens
gaagaaaggcaucauauaggag

SEQ ID NO: 3012 - RNA, 21 nt, Homo sapiens
gaacggcuucauacaggaguu

SEQ ID NO: 3013 - RNA, 21 nt, Homo sapiens
aacuccuguaugaagccguuc

SEQ ID NO: 3014 - RNA, 22 nt, Homo sapiens
ugugacugguugaccagagggg

SEQ ID NO: 3015 - RNA, 22 nt, Homo sapiens
ccccucuggucaaccagucaca

SEQ ID NO: 3016 - RNA, 23 nt, Homo sapiens
acugcccuaagugcuccuucugg

SEQ ID NO: 3017 - RNA, 23 nt, Homo sapiens
ccagaaggagcacuuagggcagu

SEQ ID NO: 3018 - RNA, 23 nt, Homo sapiens
uaaggugcaucuagugcagauag

SEQ ID NO: 3019 - RNA, 23 nt, Homo sapiens
cuaucugcacuagaugcaccuua

SEQ ID NO: 3020 - RNA, 22 nt, Homo sapiens
cagugcaaugaugaaagggcau

SEQ ID NO: 3021 - RNA, 22 nt, Homo sapiens
augcccuuucaucauugcacug

SEQ ID NO: 3022 - RNA, 21 nt, Homo sapiens
acucuuucccuguugcacuac

SEQ ID NO: 3023 - RNA, 21 nt, Homo sapiens
guagugcaacagggaaagagu

SEQ ID NO: 3024 - RNA, 24 nt, Homo sapiens
uuuggcaaugguagaacucacacu

SEQ ID NO: 3025 - RNA, 24 nt, Homo sapiens
agugugaguucuaccauugccaaa

SEQ ID NO: 3026 - RNA, 21 nt, Homo sapiens
agggcccccccucaauccugu

SEQ ID NO: 3027 - RNA, 21 nt, Homo sapiens
acaggauugagggggggcccu

SEQ ID NO: 3028 - RNA, 22 nt, Homo sapiens
cagugcaauguuaaaagggcau

SEQ ID NO: 3029 - RNA, 22 nt, Homo sapiens
augcccuuuuaacauugcacug

SEQ ID NO: 3030 - RNA, 22 nt, Homo sapiens
uucacauugugcuacugucugc

SEQ ID NO: 3031 - RNA, 22 nt, Homo sapiens
gcagacaguagcacaaugugaa

SEQ ID NO: 3032 - RNA, 22 nt, Homo sapiens
ucggauccgucugagcuuggcu

SEQ ID NO: 3033 - RNA, 22 nt, Homo sapiens
agccaagcucagacggauccga

SEQ ID NO: 3034 - RNA, 22 nt, Homo sapiens
cugaagcucagagggcucugau

SEQ ID NO: 3035 - RNA, 22 nt, Homo sapiens
aucagagcccucugagcuucag

SEQ ID NO: 3036 - RNA, 22 nt, Homo sapiens
ccucuuccccuugucucuccag

SEQ ID NO: 3037 - RNA, 22 nt, Homo sapiens
cuggagagacaaggggaagagg

SEQ ID NO: 3038 - RNA, 22 nt, Homo sapiens
ugagugacaggggaaaugggga

SEQ ID NO: 3039 - RNA, 22 nt, Homo sapiens
uccccauuuccccugucacuca

SEQ ID NO: 3040 - RNA, 22 nt, Homo sapiens
ucaggacacuucugaacuugga

SEQ ID NO: 3041 - RNA, 22 nt, Homo sapiens
uccaaguucagaaguguccuga

SEQ ID NO: 3042 - RNA, 22 nt, Homo sapiens
caguucagaaguguuccugagu

SEQ ID NO: 3043 - RNA, 22 nt, Homo sapiens
acucaggaacacuucugaacug

SEQ ID NO: 3044 - RNA, 21 nt, Homo sapiens
uuucccuuuccauccuggcag

SEQ ID NO: 3045 - RNA, 21 nt, Homo sapiens
cugccaggauggaaagggaaa

SEQ ID NO: 3046 - RNA, 21 nt, Homo sapiens
uugccagggcaggagguggaa

SEQ ID NO: 3047 - RNA, 21 nt, Homo sapiens
uuccaccuccugcccuggcaa

SEQ ID NO: 3048 - RNA, 21 nt, Homo sapiens
agagauugguagaaaucaggu

SEQ ID NO: 3049 - RNA, 21 nt, Homo sapiens
accugauuucuaccaaucucu

SEQ ID NO: 3050 - RNA, 23 nt, Homo sapiens
aaucggacccauuuaaaccggag

SEQ ID NO: 3051 - RNA, 23 nt, Homo sapiens
cuccgguuuaaauggguccgauu

SEQ ID NO: 3052 - RNA, 24 nt, Homo sapiens
ucugggcacaggcggauggacagg

SEQ ID NO: 3053 - RNA, 24 nt, Homo sapiens
ccuguccauccgccugugcccaga

SEQ ID NO: 3054 - RNA, 21 nt, Homo sapiens
ccagugacugagcuggagcca

SEQ ID NO: 3055 - RNA, 21 nt, Homo sapiens
uggcuccagcucagucacugg

SEQ ID NO: 3056 - RNA, 22 nt, Homo sapiens
aggauaggaagaaugaagugcu

SEQ ID NO: 3057 - RNA, 22 nt, Homo sapiens
agcacuucauucuuccuauccu

SEQ ID NO: 3058 - RNA, 22 nt, Homo sapiens
aggagaguggauuccagguggu

SEQ ID NO: 3059 - RNA, 22 nt, Homo sapiens
accaccuggaauccacucuccu

SEQ ID NO: 3060 - RNA, 22 nt, Homo sapiens
uccuccucuaccucaucccagu

SEQ ID NO: 3061 - RNA, 22 nt, Homo sapiens
acugggaugagguagaggagga

SEQ ID NO: 3062 - RNA, 22 nt, Homo sapiens
ugagggguuuggaaugggaugg

SEQ ID NO: 3063 - RNA, 22 nt, Homo sapiens
ccaucccauuccaaaccccuca

SEQ ID NO: 3064 - RNA, 21 nt, Homo sapiens
auccaguucucugagggggcu

SEQ ID NO: 3065 - RNA, 21 nt, Homo sapiens
agcccccucagagaacuggau

SEQ ID NO: 3066 - RNA, 22 nt, Homo sapiens
aaccccuaaggcaacuggaugg

SEQ ID NO: 3067 - RNA, 22 nt, Homo sapiens
ccauccaguugccuuagggguu

SEQ ID NO: 3068 - RNA, 21 nt, Homo sapiens
ucauccucgucucccucccag

SEQ ID NO: 3069 - RNA, 21 nt, Homo sapiens
cugggagggagacgaggauga

SEQ ID NO: 3070 - RNA, 22 nt, Homo sapiens
agggaaggggacgaggguuggg

SEQ ID NO: 3071 - RNA, 22 nt, Homo sapiens
cccaacccucguccccuucccu

SEQ ID NO: 3072 - RNA, 23 nt, Homo sapiens
aagaagagacugagucaucgaau

SEQ ID NO: 3073 - RNA, 23 nt, Homo sapiens
auucgaugacucagucucuucuu

SEQ ID NO: 3074 - RNA, 23 nt, Homo sapiens
caauggcacaaacucauucuuga

SEQ ID NO: 3075 - RNA, 23 nt, Homo sapiens
ucaagaaugaguuugugccauug

SEQ ID NO: 3076 - RNA, 21 nt, Homo sapiens
acugaauccucuuuuccucag

SEQ ID NO: 3077 - RNA, 21 nt, Homo sapiens
cugaggaaaagaggauucagu

SEQ ID NO: 3078 - RNA, 22 nt, Homo sapiens
ugggaugagggauugaagugga

SEQ ID NO: 3079 - RNA, 22 nt, Homo sapiens
uccacuucaaucccucauccca

SEQ ID NO: 3080 - RNA, 22 nt, Homo sapiens
caggccauauugugcugccuca

SEQ ID NO: 3081 - RNA, 22 nt, Homo sapiens
ugaggcagcacaauauggccug

SEQ ID NO: 3082 - RNA, 22 nt, Homo sapiens
uagcagcacauaaugguuugug

SEQ ID NO: 3083 - RNA, 22 nt, Homo sapiens
cacaaaccauuaugugcugcua

SEQ ID NO: 3084 - RNA, 22 nt, Homo sapiens
cgaaucauuauuugcugcucua

SEQ ID NO: 3085 - RNA, 22 nt, Homo sapiens
uagagcagcaaauaaugauucg

SEQ ID NO: 3086 - RNA, 22 nt, Homo sapiens
uagcagcacaucaugguuuaca

SEQ ID NO: 3087 - RNA, 22 nt, Homo sapiens
uguaaaccaugaugugcugcua

SEQ ID NO: 3088 - RNA, 22 nt, Homo sapiens
ccaauauuacugugcugcuuua

SEQ ID NO: 3089 - RNA, 22 nt, Homo sapiens
uaaagcagcacaguaauauugg

SEQ ID NO: 3090 - RNA, 22 nt, Homo sapiens
cuagguauggucccagggaucc

SEQ ID NO: 3091 - RNA, 22 nt, Homo sapiens
ggaucccugggaccauaccuag

SEQ ID NO: 3092 - RNA, 20 nt, Homo sapiens
guguguggaaaugcuucugc

SEQ ID NO: 3093 - RNA, 20 nt, Homo sapiens
gcagaagcauuuccacacac

SEQ ID NO: 3094 - RNA, 22 nt, Homo sapiens
gugugcggaaaugcuucugcua

SEQ ID NO: 3095 - RNA, 22 nt, Homo sapiens
uagcagaagcauuuccgcacac

SEQ ID NO: 3096 - RNA, 23 nt, Homo sapiens
agcagcauuguacagggcuauca

SEQ ID NO: 3097 - RNA, 23 nt, Homo sapiens
ugauagcccuguacaaugcugcu

SEQ ID NO: 3098 - RNA, 22 nt, Homo sapiens
aacuggcccucaaagucccgcu

SEQ ID NO: 3099 - RNA, 22 nt, Homo sapiens
agcgggacuuugagggccaguu

SEQ ID NO: 3100 - RNA, 22 nt, Homo sapiens
cgggguuuugagggcgagauga

SEQ ID NO: 3101 - RNA, 22 nt, Homo sapiens
ucaucucgcccucaaaaccccg

SEQ ID NO: 3102 - RNA, 21 nt, Homo sapiens
gcagggacagcaaaggggugc

SEQ ID NO: 3103 - RNA, 21 nt, Homo sapiens
gcaccccuuugcugucccugc

SEQ ID NO: 3104 - RNA, 22 nt, Homo sapiens
uucccuuugucauccuucgccu

SEQ ID NO: 3105 - RNA, 22 nt, Homo sapiens
aggcgaaggaugacaaagggaa

SEQ ID NO: 3106 - RNA, 23 nt, Homo sapiens
auggccaaaacugcaguuauuuu

SEQ ID NO: 3107 - RNA, 23 nt, Homo sapiens
aaaauaacugcaguuuuggccau

SEQ ID NO: 3108 - RNA, 25 nt, Homo sapiens
aaaaaccacaauuacuuuugcacca

SEQ ID NO: 3109 - RNA, 25 nt, Homo sapiens
uggugcaaaaguaauugugguuuuu

SEQ ID NO: 3110 - RNA, 21 nt, Homo sapiens
caaaagugaucgugguuuuug

SEQ ID NO: 3111 - RNA, 21 nt, Homo sapiens
caaaaaccacgaucacuuuug

SEQ ID NO: 3112 - RNA, 23 nt, Homo sapiens
caaagacugcaauuacuuuugcg

SEQ ID NO: 3113 - RNA, 23 nt, Homo sapiens
cgcaaaaguaauugcagucuuug

SEQ ID NO: 3114 - RNA, 23 nt, Homo sapiens
aaaaguaacugcgguuuuugccu

SEQ ID NO: 3115 - RNA, 23 nt, Homo sapiens
aggcaaaaaccgcaguuacuuuu

SEQ ID NO: 3116 - RNA, 22 nt, Homo sapiens
ugccuggaacauaguagggacu

SEQ ID NO: 3117 - RNA, 22 nt, Homo sapiens
agucccuacuauguuccaggca

SEQ ID NO: 3118 - RNA, 21 nt, Homo sapiens
auaggacucauauagugccag

SEQ ID NO: 3119 - RNA, 21 nt, Homo sapiens
cuggcacuauaugaguccuau

SEQ ID NO: 3120 - RNA, 20 nt, Homo sapiens
agacacuauacgagucauau

SEQ ID NO: 3121 - RNA, 20 nt, Homo sapiens
auaugacucguauagugucu

SEQ ID NO: 3122 - RNA, 23 nt, Homo sapiens
ugugacugcauuaugaaaauucu

SEQ ID NO: 3123 - RNA, 23 nt, Homo sapiens
agaauuuucauaaugcagucaca

SEQ ID NO: 3124 - RNA, 20 nt, Homo sapiens
uggcuuuuaacuuugauggc

SEQ ID NO: 3125 - RNA, 20 nt, Homo sapiens
gccaucaaaguuaaaagcca

SEQ ID NO: 3126 - RNA, 21 nt, Homo sapiens
cacagcaaguguagacaggca

SEQ ID NO: 3127 - RNA, 21 nt, Homo sapiens
ugccugucuacacuugcugug

SEQ ID NO: 3128 - RNA, 21 nt, Homo sapiens
ccugucugugccugcuguaca

SEQ ID NO: 3129 - RNA, 21 nt, Homo sapiens
uguacagcaggcacagacagg

SEQ ID NO: 3130 - RNA, 22 nt, Homo sapiens
uaaauagaguaggcaaaggaca

SEQ ID NO: 3131 - RNA, 22 nt, Homo sapiens
uguccuuugccuacucuauuua

SEQ ID NO: 3132 - RNA, 22 nt, Homo sapiens
uccuuugccuauucuauuuaag

SEQ ID NO: 3133 - RNA, 22 nt, Homo sapiens
cuuaaauagaauaggcaaagga

SEQ ID NO: 3134 - RNA, 22 nt, Homo sapiens
guugggacaagaggacggucuu

SEQ ID NO: 3135 - RNA, 22 nt, Homo sapiens
aagaccguccucuugucccaac

SEQ ID NO: 3136 - RNA, 17 nt, Homo sapiens
cagagaauuguuuaauc

SEQ ID NO: 3137 - RNA, 17 nt, Homo sapiens
gauuaaacaauucucug

SEQ ID NO: 3138 - RNA, 20 nt, Homo sapiens
uagaggaagcuguggagaga

SEQ ID NO: 3139 - RNA, 20 nt, Homo sapiens
ucucuccacagcuuccucua

SEQ ID NO: 3140 - RNA, 22 nt, Homo sapiens
uccccuucugcaggccugcugg

SEQ ID NO: 3141 - RNA, 22 nt, Homo sapiens
ccagcaggccugcagaagggga

SEQ ID NO: 3142 - RNA, 23 nt, Homo sapiens
aucagggcuuguggaaugggaag

SEQ ID NO: 3143 - RNA, 23 nt, Homo sapiens
cuucccauuccacaagcccugau

SEQ ID NO: 3144 - RNA, 23 nt, Homo sapiens
ucuggcaaguaaaaaacucucau

SEQ ID NO: 3145 - RNA, 23 nt, Homo sapiens
augagaguuuuuuacuugccaga

SEQ ID NO: 3146 - RNA, 23 nt, Homo sapiens
ucgaggacugguggaagggccuu

SEQ ID NO: 3147 - RNA, 23 nt, Homo sapiens
aaggcccuuccaccaguccucga

SEQ ID NO: 3148 - RNA, 24 nt, Homo sapiens
uggguagagaaggagcucagagga

SEQ ID NO: 3149 - RNA, 24 nt, Homo sapiens
uccucugagcuccuucucuaccca

SEQ ID NO: 3150 - RNA, 22 nt, Homo sapiens
uaaagaacucuuaaaacccaau

SEQ ID NO: 3151 - RNA, 22 nt, Homo sapiens
auuggguuuuaagaguucuuua

SEQ ID NO: 3152 - RNA, 23 nt, Homo sapiens
ugauggauaaaagacuacauauu

SEQ ID NO: 3153 - RNA, 23 nt, Homo sapiens
aauauguagucuuuuauccauca

SEQ ID NO: 3154 - RNA, 22 nt, Homo sapiens
ugccuaggcugagacugcagug

SEQ ID NO: 3155 - RNA, 22 nt, Homo sapiens
cacugcagucucagccuaggca

SEQ ID NO: 3156 - RNA, 22 nt, Homo sapiens
uggcccaaccuauucaguuagu

SEQ ID NO: 3157 - RNA, 22 nt, Homo sapiens
acuaacugaauagguugggcca

SEQ ID NO: 3158 - RNA, 23 nt, Homo sapiens
cugacugaauagguagggucauu

SEQ ID NO: 3159 - RNA, 23 nt, Homo sapiens
aaugacccuaccuauucagucag

SEQ ID NO: 3160 - RNA, 24 nt, Homo sapiens
ucuguagccugggagcaauggggu

SEQ ID NO: 3161 - RNA, 24 nt, Homo sapiens
accccauugcucccaggcuacaga

SEQ ID NO: 3162 - RNA, 23 nt, Homo sapiens
uaggagcucaacagaugccuguu

SEQ ID NO: 3163 - RNA, 23 nt, Homo sapiens
aacaggcaucuguugagcuccua

SEQ ID NO: 3164 - RNA, 19 nt, Homo sapiens
gagggcggguggaggagga

SEQ ID NO: 3165 - RNA, 19 nt, Homo sapiens
uccuccuccacccgcccuc

SEQ ID NO: 3166 - RNA, 25 nt, Homo sapiens
auaacauuguaaagcgcuucuuucg

SEQ ID NO: 3167 - RNA, 25 nt, Homo sapiens
cgaaagaagcgcuuuacaauguuau

SEQ ID NO: 3168 - RNA, 24 nt, Homo sapiens
agauauuuugaguguuuggaauug

SEQ ID NO: 3169 - RNA, 24 nt, Homo sapiens
caauuccaaacacucaaaauaucu

SEQ ID NO: 3170 - RNA, 22 nt, Homo sapiens
aacuccaaacacucaaaacuca

SEQ ID NO: 3171 - RNA, 22 nt, Homo sapiens
ugaguuuugaguguuuggaguu

SEQ ID NO: 3172 - RNA, 22 nt, Homo sapiens
caugcuaggauagaaagaaugg

SEQ ID NO: 3173 - RNA, 22 nt, Homo sapiens
ccauucuuucuauccuagcaug

SEQ ID NO: 3174 - RNA, 24 nt, Homo sapiens
gguugggcagugaggaggguguga

SEQ ID NO: 3175 - RNA, 24 nt, Homo sapiens
ucacacccuccucacugcccaacc

SEQ ID NO: 3176 - RNA, 22 nt, Homo sapiens
uggaaaaaacuggugugugcuu

SEQ ID NO: 3177 - RNA, 22 nt, Homo sapiens
aagcacacaccaguuuuuucca

SEQ ID NO: 3178 - RNA, 22 nt, Homo sapiens
cuggggagauccucgagguugg

SEQ ID NO: 3179 - RNA, 22 nt, Homo sapiens
ccaaccucgaggaucuccccag

SEQ ID NO: 3180 - RNA, 22 nt, Homo sapiens
caaccucgacgaucuccucagc

SEQ ID NO: 3181 - RNA, 22 nt, Homo sapiens
gcugaggagaucgucgagguug

SEQ ID NO: 3182 - RNA, 21 nt, Homo sapiens
ugaggagaucgucgagguugg

SEQ ID NO: 3183 - RNA, 21 nt, Homo sapiens
ccaaccucgacgaucuccuca

SEQ ID NO: 3184 - RNA, 22 nt, Homo sapiens
caaccucgaggaucuccccagc

SEQ ID NO: 3185 - RNA, 22 nt, Homo sapiens
gcuggggagauccucgagguug

SEQ ID NO: 3186 - RNA, 21 nt, Homo sapiens
gguggggcaaugggaucaggu

SEQ ID NO: 3187 - RNA, 21 nt, Homo sapiens
accugaucccauugccccacc

SEQ ID NO: 3188 - RNA, 23 nt, Homo sapiens
ggggaaagcgaguagggacauuu

SEQ ID NO: 3189 - RNA, 23 nt, Homo sapiens
aaaugucccuacucgcuuucccc

SEQ ID NO: 3190 - RNA, 22 nt, Homo sapiens
cagaaggggaguugggagcaga

SEQ ID NO: 3191 - RNA, 22 nt, Homo sapiens
ucugcucccaacuccccuucug

SEQ ID NO: 3192 - RNA, 21 nt, Homo sapiens
ccaggcucugcagugggaacu

SEQ ID NO: 3193 - RNA, 21 nt, Homo sapiens
aguucccacugcagagccugg

SEQ ID NO: 3194 - RNA, 21 nt, Homo sapiens
cucccacuuccagaucuuucu

SEQ ID NO: 3195 - RNA, 21 nt, Homo sapiens
agaaagaucuggaagugggag

SEQ ID NO: 3196 - RNA, 22 nt, Homo sapiens
aaagaucuggaagugggagaca

SEQ ID NO: 3197 - RNA, 22 nt, Homo sapiens
ugucucccacuuccagaucuuu

SEQ ID NO: 3198 - RNA, 22 nt, Homo sapiens
cugcccuagucuagcugaagcu

SEQ ID NO: 3199 - RNA, 22 nt, Homo sapiens
agcuucagcuagacuagggcag

SEQ ID NO: 3200 - RNA, 22 nt, Homo sapiens
uucagccaggcuagugcagucu

SEQ ID NO: 3201 - RNA, 22 nt, Homo sapiens
agacugcacuagccuggcugaa

SEQ ID NO: 3202 - RNA, 22 nt, Homo sapiens
uaggauuacaagugucggccac

SEQ ID NO: 3203 - RNA, 22 nt, Homo sapiens
guggccgacacuuguaauccua

SEQ ID NO: 3204 - RNA, 22 nt, Homo sapiens
agagcugagacuagaaagccca

SEQ ID NO: 3205 - RNA, 22 nt, Homo sapiens
ugggcuuucuagucucagcucu

SEQ ID NO: 3206 - RNA, 22 nt, Homo sapiens
ggcuuucuagucucagcucucc

SEQ ID NO: 3207 - RNA, 22 nt, Homo sapiens
ggagagcugagacuagaaagcc

SEQ ID NO: 3208 - RNA, 23 nt, Homo sapiens
cugauaagaacagaggcccagau

SEQ ID NO: 3209 - RNA, 23 nt, Homo sapiens
aucugggccucuguucuuaucag

SEQ ID NO: 3210 - RNA, 21 nt, Homo sapiens
ucccuaccccuccacucccca

SEQ ID NO: 3211 - RNA, 21 nt, Homo sapiens
uggggaguggagggguaggga

SEQ ID NO: 3212 - RNA, 23 nt, Homo sapiens
uuagggaguagaaggguggggag

SEQ ID NO: 3213 - RNA, 23 nt, Homo sapiens
cuccccacccuucuacucccuaa

SEQ ID NO: 3214 - RNA, 22 nt, Homo sapiens
uauaaaaugagggcaguaagac

SEQ ID NO: 3215 - RNA, 22 nt, Homo sapiens
gucuuacugcccucauuuuaua

SEQ ID NO: 3216 - RNA, 22 nt, Homo sapiens
ugugacuuuaagggaaauggcg

SEQ ID NO: 3217 - RNA, 22 nt, Homo sapiens
cgccauuucccuuaaagucaca

SEQ ID NO: 3218 - RNA, 22 nt, Homo sapiens
agguggaugcaaugugaccuca

SEQ ID NO: 3219 - RNA, 22 nt, Homo sapiens
ugaggucacauugcauccaccu

SEQ ID NO: 3220 - RNA, 23 nt, Homo sapiens
cgcagacaaugccuacuggccua

SEQ ID NO: 3221 - RNA, 23 nt, Homo sapiens
uaggccaguaggcauugucugcg

SEQ ID NO: 3222 - RNA, 17 nt, Homo sapiens
gaguucuacagucagac

SEQ ID NO: 3223 - RNA, 17 nt, Homo sapiens
gucugacuguagaacuc

SEQ ID NO: 3224 - RNA, 22 nt, Homo sapiens
uaggacugugcuuggcacauag

SEQ ID NO: 3225 - RNA, 22 nt, Homo sapiens
cuaugugccaagcacaguccua

SEQ ID NO: 3226 - RNA, 22 nt, Homo sapiens
cugggguucugagacagacagu

SEQ ID NO: 3227 - RNA, 22 nt, Homo sapiens
acugucugucucagaaccccag

SEQ ID NO: 3228 - RNA, 22 nt, Homo sapiens
aaaggaggaaauaggcaggcca

SEQ ID NO: 3229 - RNA, 22 nt, Homo sapiens
uggccugccuauuuccuccuuu

SEQ ID NO: 3230 - RNA, 22 nt, Homo sapiens
ugcccugccuguuuucuccuuu

SEQ ID NO: 3231 - RNA, 22 nt, Homo sapiens
aaaggagaaaacaggcagggca

SEQ ID NO: 3232 - RNA, 23 nt, Homo sapiens
uagugaguuagagaugcagagcc

SEQ ID NO: 3233 - RNA, 23 nt, Homo sapiens
ggcucugcaucucuaacucacua

SEQ ID NO: 3234 - RNA, 19 nt, Homo sapiens
acuggccugggacuaccgg

SEQ ID NO: 3235 - RNA, 19 nt, Homo sapiens
ccgguagucccaggccagu

SEQ ID NO: 3236 - RNA, 21 nt, Homo sapiens
ugcacggcacuggggacacgu

SEQ ID NO: 3237 - RNA, 21 nt, Homo sapiens
acguguccccagugccgugca

SEQ ID NO: 3238 - RNA, 23 nt, Homo sapiens
uguguacacacgugccaggcgcu

SEQ ID NO: 3239 - RNA, 23 nt, Homo sapiens
agcgccuggcacguguguacaca

SEQ ID NO: 3240 - RNA, 17 nt, Homo sapiens
ggggcgcggccggaucg

SEQ ID NO: 3241 - RNA, 17 nt, Homo sapiens
cgauccggccgcgcccc

SEQ ID NO: 3242 - RNA, 22 nt, Homo sapiens
agaaggggugaaauuuaaacgu

SEQ ID NO: 3243 - RNA, 22 nt, Homo sapiens
acguuuaaauuucaccccuucu

SEQ ID NO: 3244 - RNA, 19 nt, Homo sapiens
aucgggcccucggcgccgg

SEQ ID NO: 3245 - RNA, 19 nt, Homo sapiens
ccggcgccgagggcccgau

SEQ ID NO: 3246 - RNA, 17 nt, Homo sapiens
gcuucuguaguguaguc

SEQ ID NO: 3247 - RNA, 17 nt, Homo sapiens
gacuacacuacagaagc

SEQ ID NO: 3248 - RNA, 22 nt, Homo sapiens
gccucucucggagucgcucgga

SEQ ID NO: 3249 - RNA, 22 nt, Homo sapiens
uccgagcgacuccgagagaggc

SEQ ID NO: 3250 - RNA, 23 nt, Homo sapiens
aaagucucgcucucugccccuca

SEQ ID NO: 3251 - RNA, 23 nt, Homo sapiens
ugaggggcagagagcgagacuuu

SEQ ID NO: 3252 - RNA, 24 nt, Homo sapiens
ugaggggccucagaccgagcuuuu

SEQ ID NO: 3253 - RNA, 24 nt, Homo sapiens
aaaagcucggucugaggccccuca

SEQ ID NO: 3254 - RNA, 23 nt, Homo sapiens
agaagaaggcggucggucugcgg

SEQ ID NO: 3255 - RNA, 23 nt, Homo sapiens
ccgcagaccgaccgccuucuucu

SEQ ID NO: 3256 - RNA, 20 nt, Homo sapiens
uuggccauggggcugcgcgg

SEQ ID NO: 3257 - RNA, 20 nt, Homo sapiens
ccgcgcagccccauggccaa

SEQ ID NO: 3258 - RNA, 23 nt, Homo sapiens
ccugggcagcguguggcugaagg

SEQ ID NO: 3259 - RNA, 23 nt, Homo sapiens
ccuucagccacacgcugcccagg

SEQ ID NO: 3260 - RNA, 23 nt, Homo sapiens
agaggcuuugugcggauacgggg

SEQ ID NO: 3261 - RNA, 23 nt, Homo sapiens
ccccguauccgcacaaagccucu

SEQ ID NO: 3262 - RNA, 21 nt, Homo sapiens
cccuugggucugaugggguag

SEQ ID NO: 3263 - RNA, 21 nt, Homo sapiens
cuaccccaucagacccaaggg

SEQ ID NO: 3264 - RNA, 25 nt, Homo sapiens
ugccccaucugugcccuggguagga

SEQ ID NO: 3265 - RNA, 25 nt, Homo sapiens
uccuacccagggcacagauggggca

SEQ ID NO: 3266 - RNA, 23 nt, Homo sapiens
uguggaagguagacggccagaga

SEQ ID NO: 3267 - RNA, 23 nt, Homo sapiens
ucucuggccgucuaccuuccaca

SEQ ID NO: 3268 - RNA, 20 nt, Homo sapiens
ucuggccagcuacgucccca

SEQ ID NO: 3269 - RNA, 20 nt, Homo sapiens
uggggacguagcuggccaga

SEQ ID NO: 3270 - RNA, 23 nt, Homo sapiens
uggggacguagcuggccagacag

SEQ ID NO: 3271 - RNA, 23 nt, Homo sapiens
cugucuggccagcuacgucccca

SEQ ID NO: 3272 - RNA, 22 nt, Homo sapiens
cucucuggccgucuaccuucca

SEQ ID NO: 3273 - RNA, 22 nt, Homo sapiens
uggaagguagacggccagagag

SEQ ID NO: 3274 - RNA, 23 nt, Homo sapiens
ucugggagguuguagcaguggaa

SEQ ID NO: 3275 - RNA, 23 nt, Homo sapiens
uuccacugcuacaaccucccaga

SEQ ID NO: 3276 - RNA, 22 nt, Homo sapiens
uccugcguaggaucugaggagu

SEQ ID NO: 3277 - RNA, 22 nt, Homo sapiens
acuccucagauccuacgcagga

SEQ ID NO: 3278 - RNA, 22 nt, Homo sapiens
agcucugcugcucacuggcagu

SEQ ID NO: 3279 - RNA, 22 nt, Homo sapiens
acugccagugagcagcagagcu

SEQ ID NO: 3280 - RNA, 21 nt, Homo sapiens
ggccagccaccaggagggcug

SEQ ID NO: 3281 - RNA, 21 nt, Homo sapiens
cagcccuccugguggcuggcc

SEQ ID NO: 3282 - RNA, 17 nt, Homo sapiens
cgcgccgggcccggguu

SEQ ID NO: 3283 - RNA, 17 nt, Homo sapiens
aacccgggcccggcgcg

SEQ ID NO: 3284 - RNA, 23 nt, Homo sapiens
ggaggcgcaggcucggaaaggcg

SEQ ID NO: 3285 - RNA, 23 nt, Homo sapiens
cgccuuuccgagccugcgccucc

SEQ ID NO: 3286 - RNA, 22 nt, Homo sapiens
guggaguccuggggaauggaga

SEQ ID NO: 3287 - RNA, 22 nt, Homo sapiens
ucuccauuccccaggacuccac

SEQ ID NO: 3288 - RNA, 23 nt, Homo sapiens
agggacugccuuaggagaaaguu

SEQ ID NO: 3289 - RNA, 23 nt, Homo sapiens
aacuuucuccuaaggcagucccu

SEQ ID NO: 3290 - RNA, 17 nt, Homo sapiens
gggauaugaagaaaaau

SEQ ID NO: 3291 - RNA, 17 nt, Homo sapiens
auuuuucuucauauccc

SEQ ID NO: 3292 - RNA, 22 nt, Homo sapiens
uggaagggagaagagcuuuaau

SEQ ID NO: 3293 - RNA, 22 nt, Homo sapiens
auuaaagcucuucucccuucca

SEQ ID NO: 3294 - RNA, 22 nt, Homo sapiens
acuuuccucacucccgugaagu

SEQ ID NO: 3295 - RNA, 22 nt, Homo sapiens
acuucacgggagugaggaaagu

SEQ ID NO: 3296 - RNA, 21 nt, Homo sapiens
uucgcgggcgaaggcaaaguc

SEQ ID NO: 3297 - RNA, 21 nt, Homo sapiens
gacuuugccuucgcccgcgaa

SEQ ID NO: 3298 - RNA, 22 nt, Homo sapiens
caucuggcauccgucacacaga

SEQ ID NO: 3299 - RNA, 22 nt, Homo sapiens
ucugugugacggaugccagaug

SEQ ID NO: 3300 - RNA, 22 nt, Homo sapiens
ugagggacagaugccagaagca

SEQ ID NO: 3301 - RNA, 22 nt, Homo sapiens
ugcuucuggcaucugucccuca

SEQ ID NO: 3302 - RNA, 22 nt, Homo sapiens
aaacuaaucucuacacugcugc

SEQ ID NO: 3303 - RNA, 22 nt, Homo sapiens
gcagcaguguagagauuaguuu

SEQ ID NO: 3304 - RNA, 22 nt, Homo sapiens
gcaguaguguagagauugguuu

SEQ ID NO: 3305 - RNA, 22 nt, Homo sapiens
aaaccaaucucuacacuacugc

SEQ ID NO: 3306 - RNA, 21 nt, Homo sapiens
gcugcaccggagacuggguaa

SEQ ID NO: 3307 - RNA, 21 nt, Homo sapiens
uuacccagucuccggugcagc

SEQ ID NO: 3308 - RNA, 21 nt, Homo sapiens
uacccagucuccggugcagcc

SEQ ID NO: 3309 - RNA, 21 nt, Homo sapiens
ggcugcaccggagacugggua

SEQ ID NO: 3310 - RNA, 24 nt, Homo sapiens
uguggacagugagguagagggagu

SEQ ID NO: 3311 - RNA, 24 nt, Homo sapiens
acucccucuaccucacuguccaca

SEQ ID NO: 3312 - RNA, 22 nt, Homo sapiens
agcuuuugggaauucagguagu

SEQ ID NO: 3313 - RNA, 22 nt, Homo sapiens
acuaccugaauucccaaaagcu

SEQ ID NO: 3314 - RNA, 21 nt, Homo sapiens
accugaauuaccaaaagcuuu

SEQ ID NO: 3315 - RNA, 21 nt, Homo sapiens
aaagcuuuugguaauucaggu

SEQ ID NO: 3316 - RNA, 22 nt, Homo sapiens
auauaccuguucggucucuuua

SEQ ID NO: 3317 - RNA, 22 nt, Homo sapiens
uaaagagaccgaacagguauau

SEQ ID NO: 3318 - RNA, 22 nt, Homo sapiens
aggggaccaaagagauauauag

SEQ ID NO: 3319 - RNA, 22 nt, Homo sapiens
cuauauaucucuuugguccccu

SEQ ID NO: 3320 - RNA, 23 nt, Homo sapiens
uuuguauggauauguguguguau

SEQ ID NO: 3321 - RNA, 23 nt, Homo sapiens
auacacacacauauccauacaaa

SEQ ID NO: 3322 - RNA, 22 nt, Homo sapiens
uguguuagaauaggggcaauaa

SEQ ID NO: 3323 - RNA, 22 nt, Homo sapiens
uuauugccccuauucuaacaca

SEQ ID NO: 3324 - RNA, 22 nt, Homo sapiens
auugccucuguucuaacacaag

SEQ ID NO: 3325 - RNA, 22 nt, Homo sapiens
cuuguguuagaacagaggcaau

SEQ ID NO: 3326 - RNA, 22 nt, Homo sapiens
aagggcuuccucucugcaggac

SEQ ID NO: 3327 - RNA, 22 nt, Homo sapiens
guccugcagagaggaagcccuu

SEQ ID NO: 3328 - RNA, 21 nt, Homo sapiens
ccugcagagaggaagcccuuc

SEQ ID NO: 3329 - RNA, 21 nt, Homo sapiens
gaagggcuuccucucugcagg

SEQ ID NO: 3330 - RNA, 22 nt, Homo sapiens
aggauuucagaaauacuggugu

SEQ ID NO: 3331 - RNA, 22 nt, Homo sapiens
acaccaguauuucugaaauccu

SEQ ID NO: 3332 - RNA, 24 nt, Homo sapiens
agauguauggaaucuguauauauc

SEQ ID NO: 3333 - RNA, 24 nt, Homo sapiens
gauauauacagauuccauacaucu

SEQ ID NO: 3334 - RNA, 22 nt, Homo sapiens
cggggagagaacgcagugacgu

SEQ ID NO: 3335 - RNA, 22 nt, Homo sapiens
acgucacugcguucucuccccg

SEQ ID NO: 3336 - RNA, 19 nt, Homo sapiens
uggggcggagcuuccggag

SEQ ID NO: 3337 - RNA, 19 nt, Homo sapiens
cuccggaagcuccgcccca

SEQ ID NO: 3338 - RNA, 21 nt, Homo sapiens
ucacgcggagagauggcuuug

SEQ ID NO: 3339 - RNA, 21 nt, Homo sapiens
caaagccaucucuccgcguga

SEQ ID NO: 3340 - RNA, 22 nt, Homo sapiens
caggcgucugucuacguggcuu

SEQ ID NO: 3341 - RNA, 22 nt, Homo sapiens
aagccacguagacagacgccug

SEQ ID NO: 3342 - RNA, 22 nt, Homo sapiens
caccuugcgcuacucaggucug

SEQ ID NO: 3343 - RNA, 22 nt, Homo sapiens
cagaccugaguagcgcaaggug

SEQ ID NO: 3344 - RNA, 22 nt, Homo sapiens
aaucugagaaggcgcacaaggu

SEQ ID NO: 3345 - RNA, 22 nt, Homo sapiens
accuugugcgccuucucagauu

SEQ ID NO: 3346 - RNA, 22 nt, Homo sapiens
aaggccuuucugaaccuucaga

SEQ ID NO: 3347 - RNA, 22 nt, Homo sapiens
ucugaagguucagaaaggccuu

SEQ ID NO: 3348 - RNA, 22 nt, Homo sapiens
gugacaucacauauacggcagc

SEQ ID NO: 3349 - RNA, 22 nt, Homo sapiens
gcugccguauaugugaugucac

SEQ ID NO: 3350 - RNA, 24 nt, Homo sapiens
ucagaacaaaugccgguucccaga

SEQ ID NO: 3351 - RNA, 24 nt, Homo sapiens
ucugggaaccggcauuuguucuga

SEQ ID NO: 3352 - RNA, 22 nt, Homo sapiens
ugagaaccacgucugcucugag

SEQ ID NO: 3353 - RNA, 22 nt, Homo sapiens
cucagagcagacgugguucuca

SEQ ID NO: 3354 - RNA, 17 nt, Homo sapiens
ucauauugcuucuuucu

SEQ ID NO: 3355 - RNA, 17 nt, Homo sapiens
agaaagaagcaauauga

SEQ ID NO: 3356 - RNA, 22 nt, Homo sapiens
ugugacagauugauaacugaaa

SEQ ID NO: 3357 - RNA, 22 nt, Homo sapiens
uuucaguuaucaaucugucaca

SEQ ID NO: 3358 - RNA, 23 nt, Homo sapiens
uggaguccaggaaucugcauuuu

SEQ ID NO: 3359 - RNA, 23 nt, Homo sapiens
aaaaugcagauuccuggacucca

SEQ ID NO: 3360 - RNA, 22 nt, Homo sapiens
aagcccuuaccccaaaaaguau

SEQ ID NO: 3361 - RNA, 22 nt, Homo sapiens
auacuuuuugggguaagggcuu

SEQ ID NO: 3362 - RNA, 22 nt, Homo sapiens
aagcccuuaccccaaaaagcau

SEQ ID NO: 3363 - RNA, 22 nt, Homo sapiens
augcuuuuugggguaagggcuu

SEQ ID NO: 3364 - RNA, 22 nt, Homo sapiens
uggaauguaaggaagugugugg

SEQ ID NO: 3365 - RNA, 22 nt, Homo sapiens
ccacacacuuccuuacauucca

SEQ ID NO: 3366 - RNA, 22 nt, Homo sapiens
cuuaucagauuguauuguaauu

SEQ ID NO: 3367 - RNA, 22 nt, Homo sapiens
aauuacaauacaaucugauaag

SEQ ID NO: 3368 - RNA, 22 nt, Homo sapiens
uuauaauacaaccugauaagug

SEQ ID NO: 3369 - RNA, 22 nt, Homo sapiens
cacuuaucagguuguauuauaa

SEQ ID NO: 3370 - RNA, 22 nt, Homo sapiens
cuuagcagguuguauuaucauu

SEQ ID NO: 3371 - RNA, 22 nt, Homo sapiens
aaugauaauacaaccugcuaag

SEQ ID NO: 3372 - RNA, 22 nt, Homo sapiens
auauaauacaaccugcuaagug

SEQ ID NO: 3373 - RNA, 22 nt, Homo sapiens
cacuuagcagguuguauuauau

SEQ ID NO: 3374 - RNA, 22 nt, Homo sapiens
cacuuagcagguuguauuauau

SEQ ID NO: 3375 - RNA, 22 nt, Homo sapiens
auauaauacaaccugcuaagug

SEQ ID NO: 3376 - RNA, 22 nt, Homo sapiens
auaauacaaccugcuaagugcu

SEQ ID NO: 3377 - RNA, 22 nt, Homo sapiens
agcacuuagcagguuguauuau

SEQ ID NO: 3378 - RNA, 22 nt, Homo sapiens
uuugguccccuucaaccagcug

SEQ ID NO: 3379 - RNA, 22 nt, Homo sapiens
cagcugguugaaggggaccaaa

SEQ ID NO: 3380 - RNA, 22 nt, Homo sapiens
uuugguccccuucaaccagcua

SEQ ID NO: 3381 - RNA, 22 nt, Homo sapiens
uagcugguugaaggggaccaaa

SEQ ID NO: 3382 - RNA, 22 nt, Homo sapiens
uguaaacauccuugacuggaag

SEQ ID NO: 3383 - RNA, 22 nt, Homo sapiens
cuuccagucaaggauguuuaca

SEQ ID NO: 3384 - RNA, 22 nt, Homo sapiens
ugucaguuugucaaauacccca

SEQ ID NO: 3385 - RNA, 22 nt, Homo sapiens
ugggguauuugacaaacugaca

SEQ ID NO: 3386 - RNA, 22 nt, Homo sapiens
cguguauuugacaagcugaguu

SEQ ID NO: 3387 - RNA, 22 nt, Homo sapiens
aacucagcuugucaaauacacg

SEQ ID NO: 3388 - RNA, 21 nt, Homo sapiens
uucacaguggcuaaguuccgc

SEQ ID NO: 3389 - RNA, 21 nt, Homo sapiens
gcggaacuuagccacugugaa

SEQ ID NO: 3390 - RNA, 22 nt, Homo sapiens
agggcuuagcugcuugugagca

SEQ ID NO: 3391 - RNA, 22 nt, Homo sapiens
ugcucacaagcagcuaagcccu

SEQ ID NO: 3392 - RNA, 21 nt, Homo sapiens
aucacauugccagggauuacc

SEQ ID NO: 3393 - RNA, 21 nt, Homo sapiens
gguaaucccuggcaaugugau

SEQ ID NO: 3394 - RNA, 22 nt, Homo sapiens
uggguuccuggcaugcugauuu

SEQ ID NO: 3395 - RNA, 22 nt, Homo sapiens
aaaucagcaugccaggaaccca

SEQ ID NO: 3396 - RNA, 22 nt, Homo sapiens
cuuucagucggauguuuacagc

SEQ ID NO: 3397 - RNA, 22 nt, Homo sapiens
gcuguaaacauccgacugaaag

SEQ ID NO: 3398 - RNA, 22 nt, Homo sapiens
ugccuacugagcugauaucagu

SEQ ID NO: 3399 - RNA, 22 nt, Homo sapiens
acugauaucagcucaguaggca

SEQ ID NO: 3400 - RNA, 22 nt, Homo sapiens
ugccuacugagcugaaacacag

SEQ ID NO: 3401 - RNA, 22 nt, Homo sapiens
cuguguuucagcucaguaggca

SEQ ID NO: 3402 - RNA, 22 nt, Homo sapiens
uggcucaguucagcaggaacag

SEQ ID NO: 3403 - RNA, 22 nt, Homo sapiens
cuguuccugcugaacugagcca

SEQ ID NO: 3404 - RNA, 21 nt, Homo sapiens
uucacaguggcuaaguucugc

SEQ ID NO: 3405 - RNA, 21 nt, Homo sapiens
gcagaacuuagccacugugaa

SEQ ID NO: 3406 - RNA, 22 nt, Homo sapiens
agagcuuagcugauuggugaac

SEQ ID NO: 3407 - RNA, 22 nt, Homo sapiens
guucaccaaucagcuaagcucu

SEQ ID NO: 3408 - RNA, 23 nt, Homo sapiens
uguaguguuuccuacuuuaugga

SEQ ID NO: 3409 - RNA, 23 nt, Homo sapiens
uccauaaaguaggaaacacuaca

SEQ ID NO: 3410 - RNA, 21 nt, Homo sapiens
cauaaaguagaaagcacuacu

SEQ ID NO: 3411 - RNA, 21 nt, Homo sapiens
aguagugcuuucuacuuuaug

SEQ ID NO: 3412 - RNA, 22 nt, Homo sapiens
ugaaggucuacugugugccagg

SEQ ID NO: 3413 - RNA, 22 nt, Homo sapiens
ccuggcacacaguagaccuuca

SEQ ID NO: 3414 - RNA, 22 nt, Homo sapiens
uuguacaugguaggcuuucauu

SEQ ID NO: 3415 - RNA, 22 nt, Homo sapiens
aaugaaagccuaccauguacaa

SEQ ID NO: 3416 - RNA, 21 nt, Homo sapiens
cuggauggcuccuccaugucu

SEQ ID NO: 3417 - RNA, 21 nt, Homo sapiens
agacauggaggagccauccag

SEQ ID NO: 3418 - RNA, 23 nt, Homo sapiens
ucuuggaguaggucauugggugg

SEQ ID NO: 3419 - RNA, 23 nt, Homo sapiens
ccacccaaugaccuacuccaaga

SEQ ID NO: 3420 - RNA, 22 nt, Homo sapiens
cucaucugcaaagaaguaagug

SEQ ID NO: 3421 - RNA, 22 nt, Homo sapiens
cacuuacuucuuugcagaugag

SEQ ID NO: 3422 - RNA, 22 nt, Homo sapiens
aacuguuugcagaggaaacuga

SEQ ID NO: 3423 - RNA, 22 nt, Homo sapiens
ucaguuuccucugcaaacaguu

SEQ ID NO: 3424 - RNA, 22 nt, Homo sapiens
cuugguucagggagggucccca

SEQ ID NO: 3425 - RNA, 22 nt, Homo sapiens
uggggacccucccugaaccaag

SEQ ID NO: 3426 - RNA, 22 nt, Homo sapiens
aggaccuucccugaaccaagga

SEQ ID NO: 3427 - RNA, 22 nt, Homo sapiens
uccuugguucagggaagguccu

SEQ ID NO: 3428 - RNA, 21 nt, Homo sapiens
accuccugugugcauggauua

SEQ ID NO: 3429 - RNA, 21 nt, Homo sapiens
uaauccaugcacacaggaggu

SEQ ID NO: 3430 - RNA, 22 nt, Homo sapiens
uacccauugcauaucggaguug

SEQ ID NO: 3431 - RNA, 22 nt, Homo sapiens
caacuccgauaugcaaugggua

SEQ ID NO: 3432 - RNA, 18 nt, Homo sapiens
aaagcuggguugagaagg

SEQ ID NO: 3433 - RNA, 18 nt, Homo sapiens
ccuucucaacccagcuuu

SEQ ID NO: 3434 - RNA, 20 nt, Homo sapiens
gguauccguuuggggauggu

SEQ ID NO: 3435 - RNA, 20 nt, Homo sapiens
accauccccaaacggauacc

SEQ ID NO: 3436 - RNA, 22 nt, Homo sapiens
gaaggcagcagugcuccccugu

SEQ ID NO: 3437 - RNA, 22 nt, Homo sapiens
acaggggagcacugcugccuuc

SEQ ID NO: 3438 - RNA, 22 nt, Homo sapiens
ucagugcaucacagaacuuugu

SEQ ID NO: 3439 - RNA, 22 nt, Homo sapiens
acaaaguucugugaugcacuga

SEQ ID NO: 3440 - RNA, 22 nt, Homo sapiens
aaguucuguuauacacucaggc

SEQ ID NO: 3441 - RNA, 22 nt, Homo sapiens
gccugaguguauaacagaacuu

SEQ ID NO: 3442 - RNA, 22 nt, Homo sapiens
cuggcccucucugcccuuccgu

SEQ ID NO: 3443 - RNA, 22 nt, Homo sapiens
acggaagggcagagagggccag

SEQ ID NO: 3444 - RNA, 21 nt, Homo sapiens
cuagacugaagcuccuugagg

SEQ ID NO: 3445 - RNA, 21 nt, Homo sapiens
ccucaaggagcuucagucuag

SEQ ID NO: 3446 - RNA, 21 nt, Homo sapiens
ucgaggagcucacagucuagu

SEQ ID NO: 3447 - RNA, 21 nt, Homo sapiens
acuagacugugagcuccucga

SEQ ID NO: 3448 - RNA, 21 nt, Homo sapiens
cacauuacacggucgaccucu

SEQ ID NO: 3449 - RNA, 21 nt, Homo sapiens
agaggucgaccguguaaugug

SEQ ID NO: 3450 - RNA, 22 nt, Homo sapiens
aggugguccguggcgcguucgc

SEQ ID NO: 3451 - RNA, 22 nt, Homo sapiens
gcgaacgcgccacggaccaccu

SEQ ID NO: 3452 - RNA, 23 nt, Homo sapiens
cgcauccccuagggcauuggugu

SEQ ID NO: 3453 - RNA, 23 nt, Homo sapiens
acaccaaugcccuaggggaugcg

SEQ ID NO: 3454 - RNA, 20 nt, Homo sapiens
ccucugggcccuuccuccag

SEQ ID NO: 3455 - RNA, 20 nt, Homo sapiens
cuggaggaagggcccagagg

SEQ ID NO: 3456 - RNA, 23 nt, Homo sapiens
ccuaguagguguccaguaagugu

SEQ ID NO: 3457 - RNA, 23 nt, Homo sapiens
acacuuacuggacaccuacuagg

SEQ ID NO: 3458 - RNA, 21 nt, Homo sapiens
acggugcuggauguggccuuu

SEQ ID NO: 3459 - RNA, 21 nt, Homo sapiens
aaaggccacauccagcaccgu

SEQ ID NO: 3460 - RNA, 23 nt, Homo sapiens
ucagcaccaggauauuguuggag

SEQ ID NO: 3461 - RNA, 23 nt, Homo sapiens
cuccaacaauauccuggugcuga

SEQ ID NO: 3462 - RNA, 23 nt, Homo sapiens
ucaacaaaaucacugaugcugga

SEQ ID NO: 3463 - RNA, 23 nt, Homo sapiens
uccagcaucagugauuuuguuga

SEQ ID NO: 3464 - RNA, 22 nt, Homo sapiens
aacaauauccuggugcugagug

SEQ ID NO: 3465 - RNA, 22 nt, Homo sapiens
cacucagcaccaggauauuguu

SEQ ID NO: 3466 - RNA, 23 nt, Homo sapiens
ggcagguucucacccucucuagg

SEQ ID NO: 3467 - RNA, 23 nt, Homo sapiens
ccuagagagggugagaaccugcc

SEQ ID NO: 3468 - RNA, 23 nt, Homo sapiens
gacacgggcgacagcugcggccc

SEQ ID NO: 3469 - RNA, 23 nt, Homo sapiens
gggccgcagcugucgcccguguc

SEQ ID NO: 3470 - RNA, 21 nt, Homo sapiens
auguaugugugcaugugcaug

SEQ ID NO: 3471 - RNA, 21 nt, Homo sapiens
caugcacaugcacacauacau

SEQ ID NO: 3472 - RNA, 22 nt, Homo sapiens
uauacaagggcagacucucucu

SEQ ID NO: 3473 - RNA, 22 nt, Homo sapiens
agagagagucugcccuuguaua

SEQ ID NO: 3474 - RNA, 20 nt, Homo sapiens
ggcggcggcggaggcggggg

SEQ ID NO: 3475 - RNA, 20 nt, Homo sapiens
cccccgccuccgccgccgcc

SEQ ID NO: 3476 - RNA, 22 nt, Homo sapiens
gcaggugcucacuuguccuccu

SEQ ID NO: 3477 - RNA, 22 nt, Homo sapiens
aggaggacaagugagcaccugc

SEQ ID NO: 3478 - RNA, 19 nt, Homo sapiens
ggggccuggcggugggcgg

SEQ ID NO: 3479 - RNA, 19 nt, Homo sapiens
ccgcccaccgccaggcccc

SEQ ID NO: 3480 - RNA, 22 nt, Homo sapiens
gcccaaaggugaauuuuuuggg

SEQ ID NO: 3481 - RNA, 22 nt, Homo sapiens
cccaaaaaauucaccuuugggc

SEQ ID NO: 3482 - RNA, 22 nt, Homo sapiens
caaagaauucuccuuuugggcu

SEQ ID NO: 3483 - RNA, 22 nt, Homo sapiens
agcccaaaaggagaauucuuug

SEQ ID NO: 3484 - RNA, 22 nt, Homo sapiens
cugcaauguaagcacuucuuac

SEQ ID NO: 3485 - RNA, 22 nt, Homo sapiens
guaagaagugcuuacauugcag

SEQ ID NO: 3486 - RNA, 23 nt, Homo sapiens
aaaagugcuuacagugcagguag

SEQ ID NO: 3487 - RNA, 23 nt, Homo sapiens
cuaccugcacuguaagcacuuuu

SEQ ID NO: 3488 - RNA, 22 nt, Homo sapiens
acuguaguaugggcacuuccag

SEQ ID NO: 3489 - RNA, 22 nt, Homo sapiens
cuggaagugcccauacuacagu

SEQ ID NO: 3490 - RNA, 23 nt, Homo sapiens
caaagugcucauagugcagguag

SEQ ID NO: 3491 - RNA, 23 nt, Homo sapiens
cuaccugcacuaugagcacuuug

SEQ ID NO: 3492 - RNA, 23 nt, Homo sapiens
gggguauuguuuccgcugccagg

SEQ ID NO: 3493 - RNA, 23 nt, Homo sapiens
ccuggcagcggaaacaauacccc

SEQ ID NO: 3494 - RNA, 23 nt, Homo sapiens
uagcagcgggaacaguucugcag

SEQ ID NO: 3495 - RNA, 23 nt, Homo sapiens
cugcagaacuguucccgcugcua

SEQ ID NO: 3496 - RNA, 21 nt, Homo sapiens
cgagccucaagcaagggacuu

SEQ ID NO: 3497 - RNA, 21 nt, Homo sapiens
aagucccuugcuugaggcucg

SEQ ID NO: 3498 - RNA, 22 nt, Homo sapiens
uagucccuuccuugaagcgguc

SEQ ID NO: 3499 - RNA, 22 nt, Homo sapiens
gaccgcuucaaggaagggacua

SEQ ID NO: 3500 - RNA, 21 nt, Homo sapiens
acuggacuuggagucagaagg

SEQ ID NO: 3501 - RNA, 21 nt, Homo sapiens
ccuucugacuccaaguccagu

SEQ ID NO: 3502 - RNA, 22 nt, Homo sapiens
cuccugacuccagguccugugu

SEQ ID NO: 3503 - RNA, 22 nt, Homo sapiens
acacaggaccuggagucaggag

SEQ ID NO: 3504 - RNA, 22 nt, Homo sapiens
uuuguucguucggcucgcguga

SEQ ID NO: 3505 - RNA, 22 nt, Homo sapiens
ucacgcgagccgaacgaacaaa

SEQ ID NO: 3506 - RNA, 22 nt, Homo sapiens
acggauguuugagcaugugcua

SEQ ID NO: 3507 - RNA, 22 nt, Homo sapiens
uagcacaugcucaaacauccgu

SEQ ID NO: 3508 - RNA, 23 nt, Homo sapiens
ucaaaugcucagacuccuguggu

SEQ ID NO: 3509 - RNA, 23 nt, Homo sapiens
accacaggagucugagcauuuga

SEQ ID NO: 3510 - RNA, 22 nt, Homo sapiens
cggcaacaagaaacugccugag

SEQ ID NO: 3511 - RNA, 22 nt, Homo sapiens
cucaggcaguuucuuguugccg

SEQ ID NO: 3512 - RNA, 22 nt, Homo sapiens
uagguaguuucauguuguuggg

SEQ ID NO: 3513 - RNA, 22 nt, Homo sapiens
cccaacaacaugaaacuaccua

SEQ ID NO: 3514 - RNA, 22 nt, Homo sapiens
caauguuuccacagugcaucac

SEQ ID NO: 3515 - RNA, 22 nt, Homo sapiens
gugaugcacuguggaaacauug

SEQ ID NO: 3516 - RNA, 21 nt, Homo sapiens
gugcauuguaguugcauugca

SEQ ID NO: 3517 - RNA, 21 nt, Homo sapiens
ugcaaugcaacuacaaugcac

SEQ ID NO: 3518 - RNA, 18 nt, Homo sapiens
aucccaccucugccacca

SEQ ID NO: 3519 - RNA, 18 nt, Homo sapiens
ugguggcagaggugggau

SEQ ID NO: 3520 - RNA, 19 nt, Homo sapiens
aucccaccacugccaccau

SEQ ID NO: 3521 - RNA, 19 nt, Homo sapiens
augguggcaguggugggau

SEQ ID NO: 3522 - RNA, 22 nt, Homo sapiens
accuuccucuccaugggucuuu

SEQ ID NO: 3523 - RNA, 22 nt, Homo sapiens
aaagacccauggagaggaaggu

SEQ ID NO: 3524 - RNA, 22 nt, Homo sapiens
aaagacccauugaggagaaggu

SEQ ID NO: 3525 - RNA, 22 nt, Homo sapiens
accuucuccucaaugggucuuu

SEQ ID NO: 3526 - RNA, 21 nt, Homo sapiens
aauguagagauugaucaaaau

SEQ ID NO: 3527 - RNA, 21 nt, Homo sapiens
auuuugaucaaucucuacauu

SEQ ID NO: 3528 - RNA, 23 nt, Homo sapiens
acggaauauguauacggaauaua

SEQ ID NO: 3529 - RNA, 23 nt, Homo sapiens
uauauuccguauacauauuccgu

SEQ ID NO: 3530 - RNA, 24 nt, Homo sapiens
agagcucacagcuguccuucucua

SEQ ID NO: 3531 - RNA, 24 nt, Homo sapiens
uagagaaggacagcugugagcucu

SEQ ID NO: 3532 - RNA, 22 nt, Homo sapiens
aucaaauaaggacuagucugca

SEQ ID NO: 3533 - RNA, 22 nt, Homo sapiens
ugcagacuaguccuuauuugau

SEQ ID NO: 3534 - RNA, 23 nt, Homo sapiens
augagacucauguaaaacaucuu

SEQ ID NO: 3535 - RNA, 23 nt, Homo sapiens
aagauguuuuacaugagucucau

SEQ ID NO: 3536 - RNA, 21 nt, Homo sapiens
auggaauguauauacggaaua

SEQ ID NO: 3537 - RNA, 21 nt, Homo sapiens
uauuccguauauacauuccau

SEQ ID NO: 3538 - RNA, 22 nt, Homo sapiens
auuguagaaccuaagauuggcc

SEQ ID NO: 3539 - RNA, 22 nt, Homo sapiens
ggccaaucuuagguucuacaau

SEQ ID NO: 3540 - RNA, 22 nt, Homo sapiens
caucucuaaggaacucccccaa

SEQ ID NO: 3541 - RNA, 22 nt, Homo sapiens
uugggggaguuccuuagagaug

SEQ ID NO: 3542 - RNA, 23 nt, Homo sapiens
uauggggcuucuguagagauuuc

SEQ ID NO: 3543 - RNA, 23 nt, Homo sapiens
gaaaucucuacagaagccccaua

SEQ ID NO: 3544 - RNA, 20 nt, Homo sapiens
ccguguuucccccacgcuuu

SEQ ID NO: 3545 - RNA, 20 nt, Homo sapiens
aaagcgugggggaaacacgg

SEQ ID NO: 3546 - RNA, 15 nt, Homo sapiens
aggagauccuggguu

SEQ ID NO: 3547 - RNA, 15 nt, Homo sapiens
aacccaggaucuccu

SEQ ID NO: 3548 - RNA, 22 nt, Homo sapiens
cucgugggcucuggccacggcc

SEQ ID NO: 3549 - RNA, 22 nt, Homo sapiens
ggccguggccagagcccacgag

SEQ ID NO: 3550 - RNA, 22 nt, Homo sapiens
caguggccagagcccugcagug

SEQ ID NO: 3551 - RNA, 22 nt, Homo sapiens
cacugcagggcucuggccacug

SEQ ID NO: 3552 - RNA, 22 nt, Homo sapiens
cugcagaguuuguacggaccgg

SEQ ID NO: 3553 - RNA, 22 nt, Homo sapiens
ccgguccguacaaacucugcag

SEQ ID NO: 3554 - RNA, 20 nt, Homo sapiens
uccguacaaacucugcugug

SEQ ID NO: 3555 - RNA, 20 nt, Homo sapiens
cacagcagaguuuguacgga

SEQ ID NO: 3556 - RNA, 22 nt, Homo sapiens
cuuccccccaguaaucuucauc

SEQ ID NO: 3557 - RNA, 22 nt, Homo sapiens
gaugaagauuacuggggggaag

SEQ ID NO: 3558 - RNA, 23 nt, Homo sapiens
ugaggauauggcagggaagggga

SEQ ID NO: 3559 - RNA, 23 nt, Homo sapiens
uccccuucccugccauauccuca

SEQ ID NO: 3560 - RNA, 23 nt, Homo sapiens
uuuugcaugacccugggaguagg

SEQ ID NO: 3561 - RNA, 23 nt, Homo sapiens
ccuacucccagggucaugcaaaa

SEQ ID NO: 3562 - RNA, 22 nt, Homo sapiens
gacucacucacaggauugugca

SEQ ID NO: 3563 - RNA, 22 nt, Homo sapiens
ugcacaauccugugagugaguc

SEQ ID NO: 3564 - RNA, 22 nt, Homo sapiens
acacagugcuucauccacuacu

SEQ ID NO: 3565 - RNA, 22 nt, Homo sapiens
aguaguggaugaagcacugugu

SEQ ID NO: 3566 - RNA, 22 nt, Homo sapiens
uaguggaugaugcacucugugc

SEQ ID NO: 3567 - RNA, 22 nt, Homo sapiens
gcacagagugcaucauccacua

SEQ ID NO: 3568 - RNA, 21 nt, Homo sapiens
ugaugauacagguggagguag

SEQ ID NO: 3569 - RNA, 21 nt, Homo sapiens
cuaccuccaccuguaucauca

SEQ ID NO: 3570 - RNA, 22 nt, Homo sapiens
cuacuucuaccuguguuaucau

SEQ ID NO: 3571 - RNA, 22 nt, Homo sapiens
augauaacacagguagaaguag

SEQ ID NO: 3572 - RNA, 22 nt, Homo sapiens
ugcgacauuggaaguaguauca

SEQ ID NO: 3573 - RNA, 22 nt, Homo sapiens
ugauacuacuuccaaugucgca

SEQ ID NO: 3574 - RNA, 21 nt, Homo sapiens
uuagaccuaguacacguccuu

SEQ ID NO: 3575 - RNA, 21 nt, Homo sapiens
aaggacguguacuaggucuaa

SEQ ID NO: 3576 - RNA, 22 nt, Homo sapiens
uuuccuacccuaccugaagacu

SEQ ID NO: 3577 - RNA, 22 nt, Homo sapiens
agucuucagguaggguaggaaa

SEQ ID NO: 3578 - RNA, 22 nt, Homo sapiens
aucuguaagagaaaguaaauga

SEQ ID NO: 3579 - RNA, 22 nt, Homo sapiens
ucauuuacuuucucuuacagau

SEQ ID NO: 3580 - RNA, 24 nt, Homo sapiens
cccggacaggcguucgugcgacgu

SEQ ID NO: 3581 - RNA, 24 nt, Homo sapiens
acgucgcacgaacgccuguccggg

SEQ ID NO: 3582 - RNA, 23 nt, Homo sapiens
accuggacccagcguagacaaag

SEQ ID NO: 3583 - RNA, 23 nt, Homo sapiens
cuuugucuacgcuggguccaggu

SEQ ID NO: 3584 - RNA, 22 nt, Homo sapiens
accaagucugcgucauccucuc

SEQ ID NO: 3585 - RNA, 22 nt, Homo sapiens
gagaggaugacgcagacuuggu

SEQ ID NO: 3586 - RNA, 23 nt, Homo sapiens
aguggaugauggagacucgguac

SEQ ID NO: 3587 - RNA, 23 nt, Homo sapiens
guaccgagucuccaucauccacu

SEQ ID NO: 3588 - RNA, 24 nt, Homo sapiens
guuccacacugacacugcagaagu

SEQ ID NO: 3589 - RNA, 24 nt, Homo sapiens
acuucugcagugucaguguggaac

SEQ ID NO: 3590 - RNA, 24 nt, Homo sapiens
ccugcuggucaggaguggauacug

SEQ ID NO: 3591 - RNA, 24 nt, Homo sapiens
caguauccacuccugaccagcagg

SEQ ID NO: 3592 - RNA, 23 nt, Homo sapiens
gagggucuugggagggaugugac

SEQ ID NO: 3593 - RNA, 23 nt, Homo sapiens
gucacaucccucccaagacccuc

SEQ ID NO: 3594 - RNA, 22 nt, Homo sapiens
auauacagggggagacucuuau

SEQ ID NO: 3595 - RNA, 22 nt, Homo sapiens
auaagagucucccccuguauau

SEQ ID NO: 3596 - RNA, 22 nt, Homo sapiens
auauacagggggagacucucau

SEQ ID NO: 3597 - RNA, 22 nt, Homo sapiens
augagagucucccccuguauau

SEQ ID NO: 3598 - RNA, 21 nt, Homo sapiens
agaggauacccuuuguauguu

SEQ ID NO: 3599 - RNA, 21 nt, Homo sapiens
aacauacaaaggguauccucu

SEQ ID NO: 3600 - RNA, 22 nt, Homo sapiens
ucuacaaaggaaagcgcuuucu

SEQ ID NO: 3601 - RNA, 22 nt, Homo sapiens
agaaagcgcuuuccuuuguaga

SEQ ID NO: 3602 - RNA, 22 nt, Homo sapiens
ucaaaacugaggggcauuuucu

SEQ ID NO: 3603 - RNA, 22 nt, Homo sapiens
agaaaaugccccucaguuuuga

SEQ ID NO: 3604 - RNA, 24 nt, Homo sapiens
uucuccaaaagaaagcacuuucug

SEQ ID NO: 3605 - RNA, 24 nt, Homo sapiens
cagaaagugcuuucuuuuggagaa

SEQ ID NO: 3606 - RNA, 23 nt, Homo sapiens
uucucgaggaaagaagcacuuuc

SEQ ID NO: 3607 - RNA, 23 nt, Homo sapiens
gaaagugcuucuuuccucgagaa

SEQ ID NO: 3608 - RNA, 22 nt, Homo sapiens
ccucuagauggaagcacugucu

SEQ ID NO: 3609 - RNA, 22 nt, Homo sapiens
agacagugcuuccaucuagagg

SEQ ID NO: 3610 - RNA, 22 nt, Homo sapiens
aucgugcaucccuuuagagugu

SEQ ID NO: 3611 - RNA, 22 nt, Homo sapiens
acacucuaaagggaugcacgau

SEQ ID NO: 3612 - RNA, 22 nt, Homo sapiens
aucgugcaucccuuuagagugu

SEQ ID NO: 3613 - RNA, 22 nt, Homo sapiens
acacucuaaagggaugcacgau

SEQ ID NO: 3614 - RNA, 22 nt, Homo sapiens
aucgugcauccuuuuagagugu

SEQ ID NO: 3615 - RNA, 22 nt, Homo sapiens
acacucuaaaaggaugcacgau

SEQ ID NO: 3616 - RNA, 22 nt, Homo sapiens
caaagcgcuccccuuuagaggu

SEQ ID NO: 3617 - RNA, 22 nt, Homo sapiens
accucuaaaggggagcgcuuug

SEQ ID NO: 3618 - RNA, 23 nt, Homo sapiens
caaagcgcuucucuuuagagugu

SEQ ID NO: 3619 - RNA, 23 nt, Homo sapiens
acacucuaaagagaagcgcuuug

SEQ ID NO: 3620 - RNA, 23 nt, Homo sapiens
ucucuggagggaagcacuuucug

SEQ ID NO: 3621 - RNA, 23 nt, Homo sapiens
cagaaagugcuucccuccagaga

SEQ ID NO: 3622 - RNA, 21 nt, Homo sapiens
gaaagcgcuucucuuuagagg

SEQ ID NO: 3623 - RNA, 21 nt, Homo sapiens
ccucuaaagagaagcgcuuuc

SEQ ID NO: 3624 - RNA, 22 nt, Homo sapiens
cucuagagggaagcacuuucuc

SEQ ID NO: 3625 - RNA, 22 nt, Homo sapiens
gagaaagugcuucccucuagag

SEQ ID NO: 3626 - RNA, 22 nt, Homo sapiens
aaagugcauccuuuuagagugu

SEQ ID NO: 3627 - RNA, 22 nt, Homo sapiens
acacucuaaaaggaugcacuuu

SEQ ID NO: 3628 - RNA, 22 nt, Homo sapiens
cucuagagggaagcgcuuucug

SEQ ID NO: 3629 - RNA, 22 nt, Homo sapiens
cagaaagcgcuucccucuagag

SEQ ID NO: 3630 - RNA, 22 nt, Homo sapiens
caaagugccucccuuuagagug

SEQ ID NO: 3631 - RNA, 22 nt, Homo sapiens
cacucuaaagggaggcacuuug

SEQ ID NO: 3632 - RNA, 22 nt, Homo sapiens
aagugccuccuuuuagaguguu

SEQ ID NO: 3633 - RNA, 22 nt, Homo sapiens
aacacucuaaaaggaggcacuu

SEQ ID NO: 3634 - RNA, 22 nt, Homo sapiens
uucuccaaaagggagcacuuuc

SEQ ID NO: 3635 - RNA, 22 nt, Homo sapiens
gaaagugcucccuuuuggagaa

SEQ ID NO: 3636 - RNA, 22 nt, Homo sapiens
aaagugcuucccuuuggacugu

SEQ ID NO: 3637 - RNA, 22 nt, Homo sapiens
acaguccaaagggaagcacuuu

SEQ ID NO: 3638 - RNA, 21 nt, Homo sapiens
cuccagagggaaguacuuucu

SEQ ID NO: 3639 - RNA, 21 nt, Homo sapiens
agaaaguacuucccucuggag

SEQ ID NO: 3640 - RNA, 22 nt, Homo sapiens
acaaagugcuucccuuuagagu

SEQ ID NO: 3641 - RNA, 22 nt, Homo sapiens
acucuaaagggaagcacuuugu

SEQ ID NO: 3642 - RNA, 22 nt, Homo sapiens
cuacaaagggaagcacuuucuc

SEQ ID NO: 3643 - RNA, 22 nt, Homo sapiens
gagaaagugcuucccuuuguag

SEQ ID NO: 3644 - RNA, 22 nt, Homo sapiens
gaaggcgcuucccuuuagagcg

SEQ ID NO: 3645 - RNA, 22 nt, Homo sapiens
cgcucuaaagggaagcgccuuc

SEQ ID NO: 3646 - RNA, 21 nt, Homo sapiens
cuccagagggaugcacuuucu

SEQ ID NO: 3647 - RNA, 21 nt, Homo sapiens
agaaagugcaucccucuggag

SEQ ID NO: 3648 - RNA, 22 nt, Homo sapiens
cucuagagggaagcacuuucug

SEQ ID NO: 3649 - RNA, 22 nt, Homo sapiens
cagaaagugcuucccucuagag

SEQ ID NO: 3650 - RNA, 22 nt, Homo sapiens
gaaagugcuuccuuuuagaggc

SEQ ID NO: 3651 - RNA, 22 nt, Homo sapiens
gccucuaaaaggaagcacuuuc

SEQ ID NO: 3652 - RNA, 23 nt, Homo sapiens
cucuugagggaagcacuuucugu

SEQ ID NO: 3653 - RNA, 23 nt, Homo sapiens
acagaaagugcuucccucaagag

SEQ ID NO: 3654 - RNA, 22 nt, Homo sapiens
acuggacuuagggucagaaggc

SEQ ID NO: 3655 - RNA, 22 nt, Homo sapiens
gccuucugacccuaaguccagu

SEQ ID NO: 3656 - RNA, 22 nt, Homo sapiens
aaacaaacauggugcacuucuu

SEQ ID NO: 3657 - RNA, 22 nt, Homo sapiens
aagaagugcaccauguuuguuu

SEQ ID NO: 3658 - RNA, 22 nt, Homo sapiens
gaaguugcccauguuauuuucg

SEQ ID NO: 3659 - RNA, 22 nt, Homo sapiens
cgaaaauaacaugggcaacuuc

SEQ ID NO: 3660 - RNA, 21 nt, Homo sapiens
aaucauucacggacaacacuu

SEQ ID NO: 3661 - RNA, 21 nt, Homo sapiens
aaguguuguccgugaaugauu

SEQ ID NO: 3662 - RNA, 22 nt, Homo sapiens
gaaguuguucgugguggauucg

SEQ ID NO: 3663 - RNA, 22 nt, Homo sapiens
cgaauccaccacgaacaacuuc

SEQ ID NO: 3664 - RNA, 23 nt, Homo sapiens
ccuccguguuaccuguccucuag

SEQ ID NO: 3665 - RNA, 23 nt, Homo sapiens
cuagaggacagguaacacggagg

SEQ ID NO: 3666 - RNA, 23 nt, Homo sapiens
ugaggauggauagcaaggaagcc

SEQ ID NO: 3667 - RNA, 23 nt, Homo sapiens
ggcuuccuugcuauccauccuca

SEQ ID NO: 3668 - RNA, 22 nt, Homo sapiens
uucagaucccagcggugccucu

SEQ ID NO: 3669 - RNA, 22 nt, Homo sapiens
agaggcaccgcugggaucugaa

SEQ ID NO: 3670 - RNA, 19 nt, Homo sapiens
guccuaggaggcuccucug

SEQ ID NO: 3671 - RNA, 19 nt, Homo sapiens
cagaggagccuccuaggac

SEQ ID NO: 3672 - RNA, 21 nt, Homo sapiens
caauucucaaaggagccuccc

SEQ ID NO: 3673 - RNA, 21 nt, Homo sapiens
gggaggcuccuuugagaauug

SEQ ID NO: 3674 - RNA, 21 nt, Homo sapiens
guuggggugcaggggucugcu

SEQ ID NO: 3675 - RNA, 21 nt, Homo sapiens
agcagaccccugcaccccaac

SEQ ID NO: 3676 - RNA, 22 nt, Homo sapiens
uuuccggcucgcgugggugugu

SEQ ID NO: 3677 - RNA, 22 nt, Homo sapiens
acacacccacgcgagccggaaa

SEQ ID NO: 3678 - RNA, 23 nt, Homo sapiens
ugagugugugugugugagugugu

SEQ ID NO: 3679 - RNA, 23 nt, Homo sapiens
acacacucacacacacacacuca

SEQ ID NO: 3680 - RNA, 22 nt, Homo sapiens
agugggaggccagggcacggca

SEQ ID NO: 3681 - RNA, 22 nt, Homo sapiens
ugccgugcccuggccucccacu

SEQ ID NO: 3682 - RNA, 20 nt, Homo sapiens
ugagcccuguccucccgcag

SEQ ID NO: 3683 - RNA, 20 nt, Homo sapiens
cugcgggaggacagggcuca

SEQ ID NO: 3684 - RNA, 23 nt, Homo sapiens
aagugccgccaucuuuugagugu

SEQ ID NO: 3685 - RNA, 23 nt, Homo sapiens
acacucaaaagauggcggcacuu

SEQ ID NO: 3686 - RNA, 20 nt, Homo sapiens
acucaaacugugggggcacu

SEQ ID NO: 3687 - RNA, 20 nt, Homo sapiens
agugcccccacaguuugagu

SEQ ID NO: 3688 - RNA, 23 nt, Homo sapiens
aagugcccccacaguuugagugc

SEQ ID NO: 3689 - RNA, 23 nt, Homo sapiens
gcacucaaacugugggggcacuu

SEQ ID NO: 3690 - RNA, 22 nt, Homo sapiens
acucaaaagauggcggcacuuu

SEQ ID NO: 3691 - RNA, 22 nt, Homo sapiens
aaagugccgccaucuuuugagu

SEQ ID NO: 3692 - RNA, 22 nt, Homo sapiens
aaaccuguguuguucaagaguc

SEQ ID NO: 3693 - RNA, 22 nt, Homo sapiens
gacucuugaacaacacagguuu

SEQ ID NO: 3694 - RNA, 22 nt, Homo sapiens
acaguagagggaggaaucgcag

SEQ ID NO: 3695 - RNA, 22 nt, Homo sapiens
cugcgauuccucccucuacugu

SEQ ID NO: 3696 - RNA, 22 nt, Homo sapiens
gugaaauguuuaggaccacuag

SEQ ID NO: 3697 - RNA, 22 nt, Homo sapiens
cuagugguccuaaacauuucac

SEQ ID NO: 3698 - RNA, 23 nt, Homo sapiens
uugaacuguuaagaaccacugga

SEQ ID NO: 3699 - RNA, 23 nt, Homo sapiens
uccagugguucuuaacaguucaa

SEQ ID NO: 3700 - RNA, 22 nt, Homo sapiens
uagugguccuaaacauuucaca

SEQ ID NO: 3701 - RNA, 22 nt, Homo sapiens
ugugaaauguuuaggaccacua

SEQ ID NO: 3702 - RNA, 21 nt, Homo sapiens
ugcaggaccaagaugagcccu

SEQ ID NO: 3703 - RNA, 21 nt, Homo sapiens
agggcucaucuugguccugca

SEQ ID NO: 3704 - RNA, 21 nt, Homo sapiens
cucccacaugcaggguuugca

SEQ ID NO: 3705 - RNA, 21 nt, Homo sapiens
ugcaaacccugcaugugggag

SEQ ID NO: 3706 - RNA, 21 nt, Homo sapiens
caucccuugcaugguggaggg

SEQ ID NO: 3707 - RNA, 21 nt, Homo sapiens
cccuccaccaugcaagggaug

SEQ ID NO: 3708 - RNA, 22 nt, Homo sapiens
aaaaugaaaugagcccagccca

SEQ ID NO: 3709 - RNA, 22 nt, Homo sapiens
ugggcugggcucauuucauuuu

SEQ ID NO: 3710 - RNA, 21 nt, Homo sapiens
agccgcggggaucgccgaggg

SEQ ID NO: 3711 - RNA, 21 nt, Homo sapiens
cccucggcgauccccgcggcu

SEQ ID NO: 3712 - RNA, 19 nt, Homo sapiens
agggaccugagugucuaag

SEQ ID NO: 3713 - RNA, 19 nt, Homo sapiens
cuuagacacucaggucccu

SEQ ID NO: 3714 - RNA, 19 nt, Homo sapiens
aggugugucuguagagucc

SEQ ID NO: 3715 - RNA, 19 nt, Homo sapiens
ggacucuacagacacaccu

SEQ ID NO: 3716 - RNA, 24 nt, Homo sapiens
cauagcccggucgcugguacauga

SEQ ID NO: 3717 - RNA, 24 nt, Homo sapiens
ucauguaccagcgaccgggcuaug

SEQ ID NO: 3718 - RNA, 18 nt, Homo sapiens
cggcuggaggugugagga

SEQ ID NO: 3719 - RNA, 18 nt, Homo sapiens
uccucacaccuccagccg

SEQ ID NO: 3720 - RNA, 18 nt, Homo sapiens
cuaagaaguugacugaag

SEQ ID NO: 3721 - RNA, 18 nt, Homo sapiens
cuucagucaacuucuuag

SEQ ID NO: 3722 - RNA, 19 nt, Homo sapiens
gacuggacaagcugaggaa

SEQ ID NO: 3723 - RNA, 19 nt, Homo sapiens
uuccucagcuuguccaguc

SEQ ID NO: 3724 - RNA, 21 nt, Homo sapiens
gcuugucgcugcgguguugcu

SEQ ID NO: 3725 - RNA, 21 nt, Homo sapiens
agcaacaccgcagcgacaagc

SEQ ID NO: 3726 - RNA, 17 nt, Homo sapiens
ggcgggugcgggggugg

SEQ ID NO: 3727 - RNA, 17 nt, Homo sapiens
ccacccccgcacccgcc

SEQ ID NO: 3728 - RNA, 21 nt, Homo sapiens
ugugucccauuauuggugauu

SEQ ID NO: 3729 - RNA, 21 nt, Homo sapiens
aaucaccaauaaugggacaca

SEQ ID NO: 3730 - RNA, 22 nt, Homo sapiens
uuuaagaaaacaccauggagau

SEQ ID NO: 3731 - RNA, 22 nt, Homo sapiens
aucuccaugguguuuucuuaaa

SEQ ID NO: 3732 - RNA, 22 nt, Homo sapiens
gcuauuucacgacaccaggguu

SEQ ID NO: 3733 - RNA, 22 nt, Homo sapiens
aacccuggugucgugaaauagc

SEQ ID NO: 3734 - RNA, 23 nt, Homo sapiens
agcugguguugugaaucaggccg

SEQ ID NO: 3735 - RNA, 23 nt, Homo sapiens
cggccugauucacaacaccagcu

SEQ ID NO: 3736 - RNA, 21 nt, Homo sapiens
aauaauacaugguugaucuuu

SEQ ID NO: 3737 - RNA, 21 nt, Homo sapiens
aaagaucaaccauguauuauu

SEQ ID NO: 3738 - RNA, 22 nt, Homo sapiens
agaucgaccguguuauauucgc

SEQ ID NO: 3739 - RNA, 22 nt, Homo sapiens
gcgaauauaacacggucgaucu

SEQ ID NO: 3740 - RNA, 22 nt, Homo sapiens
aaucaugugcagugccaauaug

SEQ ID NO: 3741 - RNA, 22 nt, Homo sapiens
cauauuggcacugcacaugauu

SEQ ID NO: 3742 - RNA, 23 nt, Homo sapiens
uuuggcacuagcacauuuuugcu

SEQ ID NO: 3743 - RNA, 23 nt, Homo sapiens
agcaaaaaugugcuagugccaaa

SEQ ID NO: 3744 - RNA, 22 nt, Homo sapiens
uccuguacugagcugccccgag

SEQ ID NO: 3745 - RNA, 22 nt, Homo sapiens
cucggggcagcucaguacagga

SEQ ID NO: 3746 - RNA, 22 nt, Homo sapiens
gcuacuucacaacaccagggcc

SEQ ID NO: 3747 - RNA, 22 nt, Homo sapiens
ggcccugguguugugaaguagc

SEQ ID NO: 3748 - RNA, 22 nt, Homo sapiens
caucaucgucucaaaugagucu

SEQ ID NO: 3749 - RNA, 22 nt, Homo sapiens
agacucauuugagacgaugaug

SEQ ID NO: 3750 - RNA, 23 nt, Homo sapiens
acuccauuuguuuugaugaugga

SEQ ID NO: 3751 - RNA, 23 nt, Homo sapiens
uccaucaucaaaacaaauggagu

SEQ ID NO: 3752 - RNA, 22 nt, Homo sapiens
cuccuacauauuagcauuaaca

SEQ ID NO: 3753 - RNA, 22 nt, Homo sapiens
uguuaaugcuaauauguaggag

SEQ ID NO: 3754 - RNA, 23 nt, Homo sapiens
uuaaugcuaaucgugauaggggu

SEQ ID NO: 3755 - RNA, 23 nt, Homo sapiens
accccuaucacgauuagcauuaa

SEQ ID NO: 3756 - RNA, 22 nt, Homo sapiens
agaucagaaggugauuguggcu

SEQ ID NO: 3757 - RNA, 22 nt, Homo sapiens
agccacaaucaccuucugaucu

SEQ ID NO: 3758 - RNA, 22 nt, Homo sapiens
uacugcagacguggcaaucaug

SEQ ID NO: 3759 - RNA, 22 nt, Homo sapiens
caugauugccacgucugcagua

SEQ ID NO: 3760 - RNA, 21 nt, Homo sapiens
guuagggccaacaucucuugg

SEQ ID NO: 3761 - RNA, 21 nt, Homo sapiens
ccaagagauguuggcccuaac

SEQ ID NO: 3762 - RNA, 21 nt, Homo sapiens
aacauagaggaaauuccacgu

SEQ ID NO: 3763 - RNA, 21 nt, Homo sapiens
acguggaauuuccucuauguu

SEQ ID NO: 3764 - RNA, 21 nt, Homo sapiens
gguggauauuccuucuauguu

SEQ ID NO: 3765 - RNA, 21 nt, Homo sapiens
aacauagaaggaauauccacc

SEQ ID NO: 3766 - RNA, 23 nt, Homo sapiens
ucauagcccuguacaaugcugcu

SEQ ID NO: 3767 - RNA, 23 nt, Homo sapiens
agcagcauuguacagggcuauga

SEQ ID NO: 3768 - RNA, 22 nt, Homo sapiens
uaacacugucugguaaagaugg

SEQ ID NO: 3769 - RNA, 22 nt, Homo sapiens
ccaucuuuaccagacaguguua

SEQ ID NO: 3770 - RNA, 22 nt, Homo sapiens
caucuuccaguacaguguugga

SEQ ID NO: 3771 - RNA, 22 nt, Homo sapiens
uccaacacuguacuggaagaug

SEQ ID NO: 3772 - RNA, 22 nt, Homo sapiens
aacuggccuacaaagucccagu

SEQ ID NO: 3773 - RNA, 22 nt, Homo sapiens
acugggacuuuguaggccaguu

SEQ ID NO: 3774 - RNA, 22 nt, Homo sapiens
ugggucuuugcgggcgagauga

SEQ ID NO: 3775 - RNA, 22 nt, Homo sapiens
ucaucucgcccgcaaagaccca

SEQ ID NO: 3776 - RNA, 21 nt, Homo sapiens
augaccuaugaauugacagac

SEQ ID NO: 3777 - RNA, 21 nt, Homo sapiens
gucugucaauucauaggucau

SEQ ID NO: 3778 - RNA, 22 nt, Homo sapiens
aagcugccaguugaagaacugu

SEQ ID NO: 3779 - RNA, 22 nt, Homo sapiens
acaguucuucaacuggcagcuu

SEQ ID NO: 3780 - RNA, 22 nt, Homo sapiens
aguucuucaguggcaagcuuua

SEQ ID NO: 3781 - RNA, 22 nt, Homo sapiens
uaaagcuugccacugaagaacu

SEQ ID NO: 3782 - RNA, 22 nt, Homo sapiens
acagauucgauucuaggggaau

SEQ ID NO: 3783 - RNA, 22 nt, Homo sapiens
auuccccuagaaucgaaucugu

SEQ ID NO: 3784 - RNA, 23 nt, Homo sapiens
uacccuguagaaccgaauuugug

SEQ ID NO: 3785 - RNA, 23 nt, Homo sapiens
cacaaauucgguucuacagggua

SEQ ID NO: 3786 - RNA, 22 nt, Homo sapiens
uagcagcacguaaauauuggcg

SEQ ID NO: 3787 - RNA, 22 nt, Homo sapiens
cgccaauauuuacgugcugcua

SEQ ID NO: 3788 - RNA, 21 nt, Homo sapiens
ugagaugaagcacuguagcuc

SEQ ID NO: 3789 - RNA, 21 nt, Homo sapiens
gagcuacagugcuucaucuca

SEQ ID NO: 3790 - RNA, 22 nt, Homo sapiens
ggugcagugcugcaucucuggu

SEQ ID NO: 3791 - RNA, 22 nt, Homo sapiens
accagagaugcagcacugcacc

SEQ ID NO: 3792 - RNA, 21 nt, Homo sapiens
uugcucacuguucuucccuag

SEQ ID NO: 3793 - RNA, 21 nt, Homo sapiens
cuagggaagaacagugagcaa

SEQ ID NO: 3794 - RNA, 18 nt, Homo sapiens
cagggucagcugagcaug

SEQ ID NO: 3795 - RNA, 18 nt, Homo sapiens
caugcucagcugacccug

SEQ ID NO: 3796 - RNA, 21 nt, Homo sapiens
aagcauucuuucauugguugg

SEQ ID NO: 3797 - RNA, 21 nt, Homo sapiens
ccaaccaaugaaagaaugcuu

SEQ ID NO: 3798 - RNA, 21 nt, Homo sapiens
ccgucgccgccacccgagccg

SEQ ID NO: 3799 - RNA, 21 nt, Homo sapiens
cggcucggguggcggcgacgg

SEQ ID NO: 3800 - RNA, 27 nt, Homo sapiens
cacuguaggugauggugagagugggca

SEQ ID NO: 3801 - RNA, 27 nt, Homo sapiens
ugcccacucucaccaucaccuacagug

SEQ ID NO: 3802 - RNA, 23 nt, Homo sapiens
gggaugguagaccggugacgugc

SEQ ID NO: 3803 - RNA, 23 nt, Homo sapiens
gcacgucaccggucuaccauccc

SEQ ID NO: 3804 - RNA, 21 nt, Homo sapiens
uaggacacauggucuacuucu

SEQ ID NO: 3805 - RNA, 21 nt, Homo sapiens
agaaguagaccauguguccua

SEQ ID NO: 3806 - RNA, 22 nt, Homo sapiens
cuccugagccauucugagccuc

SEQ ID NO: 3807 - RNA, 22 nt, Homo sapiens
gaggcucagaauggcucaggag

SEQ ID NO: 3808 - RNA, 21 nt, Homo sapiens
gugccagcugcagugggggag

SEQ ID NO: 3809 - RNA, 21 nt, Homo sapiens
cucccccacugcagcuggcac

SEQ ID NO: 3810 - RNA, 21 nt, Homo sapiens
cccggagccaggaugcagcuc

SEQ ID NO: 3811 - RNA, 21 nt, Homo sapiens
gagcugcauccuggcuccggg

SEQ ID NO: 3812 - RNA, 21 nt, Homo sapiens
ucguggccuggucuccauuau

SEQ ID NO: 3813 - RNA, 21 nt, Homo sapiens
auaauggagaccaggccacga

SEQ ID NO: 3814 - RNA, 20 nt, Homo sapiens
ucugcaggguuugcuuugag

SEQ ID NO: 3815 - RNA, 20 nt, Homo sapiens
cucaaagcaaacccugcaga

SEQ ID NO: 3816 - RNA, 21 nt, Homo sapiens
uguucauguagauguuuaagc

SEQ ID NO: 3817 - RNA, 21 nt, Homo sapiens
gcuuaaacaucuacaugaaca

SEQ ID NO: 3818 - RNA, 18 nt, Homo sapiens
ucagcuggcccucauuuc

SEQ ID NO: 3819 - RNA, 18 nt, Homo sapiens
gaaaugagggccagcuga

SEQ ID NO: 3820 - RNA, 21 nt, Homo sapiens
uggcagggaggcugggagggg

SEQ ID NO: 3821 - RNA, 21 nt, Homo sapiens
ccccucccagccucccugcca

SEQ ID NO: 3822 - RNA, 20 nt, Homo sapiens
ucacuguucagacaggcgga

SEQ ID NO: 3823 - RNA, 20 nt, Homo sapiens
uccgccugucugaacaguga

SEQ ID NO: 3824 - RNA, 21 nt, Homo sapiens
ccccaccuccucucuccucag

SEQ ID NO: 3825 - RNA, 21 nt, Homo sapiens
cugaggagagaggaggugggg

SEQ ID NO: 3826 - RNA, 19 nt, Homo sapiens
gugaggacucgggaggugg

SEQ ID NO: 3827 - RNA, 19 nt, Homo sapiens
ccaccucccgaguccucac

SEQ ID NO: 3828 - RNA, 22 nt, Homo sapiens
ugagccccugugccgcccccag

SEQ ID NO: 3829 - RNA, 22 nt, Homo sapiens
cugggggcggcacaggggcuca

SEQ ID NO: 3830 - RNA, 22 nt, Homo sapiens
guggguacggcccagugggggg

SEQ ID NO: 3831 - RNA, 22 nt, Homo sapiens
ccccccacugggccguacccac

SEQ ID NO: 3832 - RNA, 22 nt, Homo sapiens
ucaccagcccuguguucccuag

SEQ ID NO: 3833 - RNA, 22 nt, Homo sapiens
cuagggaacacagggcugguga

SEQ ID NO: 3834 - RNA, 26 nt, Homo sapiens
gugagggcaugcaggccuggaugggg

SEQ ID NO: 3835 - RNA, 26 nt, Homo sapiens
ccccauccaggccugcaugcccucac

SEQ ID NO: 3836 - RNA, 23 nt, Homo sapiens
cucucaccacugcccucccacag

SEQ ID NO: 3837 - RNA, 23 nt, Homo sapiens
cugugggagggcaguggugagag

SEQ ID NO: 3838 - RNA, 24 nt, Homo sapiens
guggguaggguuugggggagagcg

SEQ ID NO: 3839 - RNA, 24 nt, Homo sapiens
cgcucucccccaaacccuacccac

SEQ ID NO: 3840 - RNA, 20 nt, Homo sapiens
gugucugggcggacagcugc

SEQ ID NO: 3841 - RNA, 20 nt, Homo sapiens
gcagcuguccgcccagacac

SEQ ID NO: 3842 - RNA, 20 nt, Homo sapiens
cuuccucgucugucugcccc

SEQ ID NO: 3843 - RNA, 20 nt, Homo sapiens
ggggcagacagacgaggaag

SEQ ID NO: 3844 - RNA, 23 nt, Homo sapiens
gugagugggagccccagugugug

SEQ ID NO: 3845 - RNA, 23 nt, Homo sapiens
cacacacuggggcucccacucac

SEQ ID NO: 3846 - RNA, 27 nt, Homo sapiens
accuucuuguauaagcacugugcuaaa

SEQ ID NO: 3847 - RNA, 27 nt, Homo sapiens
uuuagcacagugcuuauacaagaaggu

SEQ ID NO: 3848 - RNA, 22 nt, Homo sapiens
ggcgacaaaacgagacccuguc

SEQ ID NO: 3849 - RNA, 22 nt, Homo sapiens
gacagggucucguuuugucgcc

SEQ ID NO: 3850 - RNA, 22 nt, Homo sapiens
uugcuugaacccaggaagugga

SEQ ID NO: 3851 - RNA, 22 nt, Homo sapiens
uccacuuccuggguucaagcaa

SEQ ID NO: 3852 - RNA, 19 nt, Homo sapiens
ggagauggagguugcagug

SEQ ID NO: 3853 - RNA, 19 nt, Homo sapiens
cacugcaaccuccaucucc

SEQ ID NO: 3854 - RNA, 21 nt, Homo sapiens
accacugcacuccagccugag

SEQ ID NO: 3855 - RNA, 21 nt, Homo sapiens
cucaggcuggagugcaguggu

SEQ ID NO: 3856 - RNA, 22 nt, Homo sapiens
ggugguugaggcugcaguaagu

SEQ ID NO: 3857 - RNA, 22 nt, Homo sapiens
acuuacugcagccucaaccacc

SEQ ID NO: 3858 - RNA, 17 nt, Homo sapiens
ucgccuccuccucuccc

SEQ ID NO: 3859 - RNA, 17 nt, Homo sapiens
gggagaggaggaggcga

SEQ ID NO: 3860 - RNA, 22 nt, Homo sapiens
ucuauacagacccuggcuuuuc

SEQ ID NO: 3861 - RNA, 22 nt, Homo sapiens
gaaaagccagggucuguauaga

SEQ ID NO: 3862 - RNA, 22 nt, Homo sapiens
ucugggcaacaaagugagaccu

SEQ ID NO: 3863 - RNA, 22 nt, Homo sapiens
aggucucacuuuguugcccaga

SEQ ID NO: 3864 - RNA, 21 nt, Homo sapiens
gaucucacuuuguugcccagg

SEQ ID NO: 3865 - RNA, 21 nt, Homo sapiens
ccugggcaacaaagugagauc

SEQ ID NO: 3866 - RNA, 20 nt, Homo sapiens
ucgcgccccggcucccguuc

SEQ ID NO: 3867 - RNA, 20 nt, Homo sapiens
gaacgggagccggggcgcga

SEQ ID NO: 3868 - RNA, 25 nt, Homo sapiens
ugggaacggguuccggcagacgcug

SEQ ID NO: 3869 - RNA, 25 nt, Homo sapiens
cagcgucugccggaacccguuccca

SEQ ID NO: 3870 - RNA, 21 nt, Homo sapiens
uuaggccgcagaucuggguga

SEQ ID NO: 3871 - RNA, 21 nt, Homo sapiens
ucacccagaucugcggccuaa

SEQ ID NO: 3872 - RNA, 22 nt, Homo sapiens
aauaggccacggaucugggcaa

SEQ ID NO: 3873 - RNA, 22 nt, Homo sapiens
uugcccagauccguggccuauu

SEQ ID NO: 3874 - RNA, 21 nt, Homo sapiens
cacccagaucugcggccuaau

SEQ ID NO: 3875 - RNA, 21 nt, Homo sapiens
auuaggccgcagaucugggug

SEQ ID NO: 3876 - RNA, 22 nt, Homo sapiens
uuagggcccuggcuccaucucc

SEQ ID NO: 3877 - RNA, 22 nt, Homo sapiens
ggagauggagccagggcccuaa

SEQ ID NO: 3878 - RNA, 22 nt, Homo sapiens
uucauucggcuguccagaugua

SEQ ID NO: 3879 - RNA, 22 nt, Homo sapiens
uacaucuggacagccgaaugaa

SEQ ID NO: 3880 - RNA, 24 nt, Homo sapiens
uugcagcugccugggagugacuuc

SEQ ID NO: 3881 - RNA, 24 nt, Homo sapiens
gaagucacucccaggcagcugcaa

SEQ ID NO: 3882 - RNA, 21 nt, Homo sapiens
uugggacauacuuaugcuaaa

SEQ ID NO: 3883 - RNA, 21 nt, Homo sapiens
uuuagcauaaguaugucccaa

SEQ ID NO: 3884 - RNA, 22 nt, Homo sapiens
ucucacuguagccucgaacccc

SEQ ID NO: 3885 - RNA, 22 nt, Homo sapiens
gggguucgaggcuacagugaga

SEQ ID NO: 3886 - RNA, 22 nt, Homo sapiens
uuugaggcuacagugagaugug

SEQ ID NO: 3887 - RNA, 22 nt, Homo sapiens
cacaucucacuguagccucaaa

SEQ ID NO: 3888 - RNA, 18 nt, Homo sapiens
cagggaggugaaugugau

SEQ ID NO: 3889 - RNA, 18 nt, Homo sapiens
aucacauucaccucccug

SEQ ID NO: 3890 - RNA, 19 nt, Homo sapiens
gaugaugcugcugaugcug

SEQ ID NO: 3891 - RNA, 19 nt, Homo sapiens
cagcaucagcagcaucauc

SEQ ID NO: 3892 - RNA, 24 nt, Homo sapiens
ccagacagaauucuaugcacuuuc

SEQ ID NO: 3893 - RNA, 24 nt, Homo sapiens
gaaagugcauagaauucugucugg

SEQ ID NO: 3894 - RNA, 22 nt, Homo sapiens
cuccuggggcccgcacucucgc

SEQ ID NO: 3895 - RNA, 22 nt, Homo sapiens
gcgagagugcgggccccaggag

SEQ ID NO: 3896 - RNA, 21 nt, Homo sapiens
cuccguuugccuguuucgcug

SEQ ID NO: 3897 - RNA, 21 nt, Homo sapiens
cagcgaaacaggcaaacggag

SEQ ID NO: 3898 - RNA, 22 nt, Homo sapiens
cucggcgcggggcgcgggcucc

SEQ ID NO: 3899 - RNA, 22 nt, Homo sapiens
ggagcccgcgccccgcgccgag

SEQ ID NO: 3900 - RNA, 21 nt, Homo sapiens
gcccuccgcccgugcaccccg

SEQ ID NO: 3901 - RNA, 21 nt, Homo sapiens
cggggugcacgggcggagggc

SEQ ID NO: 3902 - RNA, 22 nt, Homo sapiens
gcccgcguguggagccaggugu

SEQ ID NO: 3903 - RNA, 22 nt, Homo sapiens
acaccuggcuccacacgcgggc

SEQ ID NO: 3904 - RNA, 22 nt, Homo sapiens
aaaaccgucuaguuacaguugu

SEQ ID NO: 3905 - RNA, 22 nt, Homo sapiens
acaacuguaacuagacgguuuu

SEQ ID NO: 3906 - RNA, 18 nt, Homo sapiens
uccagugcccuccucucc

SEQ ID NO: 3907 - RNA, 18 nt, Homo sapiens
ggagaggagggcacugga

SEQ ID NO: 3908 - RNA, 18 nt, Homo sapiens
ugaggcaguagauugaau

SEQ ID NO: 3909 - RNA, 18 nt, Homo sapiens
auucaaucuacugccuca

SEQ ID NO: 3910 - RNA, 22 nt, Homo sapiens
aggggcuggcuuuccucugguc

SEQ ID NO: 3911 - RNA, 22 nt, Homo sapiens
gaccagaggaaagccagccccu

SEQ ID NO: 3912 - RNA, 22 nt, Homo sapiens
uggagagaaaggcaguuccuga

SEQ ID NO: 3913 - RNA, 22 nt, Homo sapiens
ucaggaacugccuuucucucca

SEQ ID NO: 3914 - RNA, 22 nt, Homo sapiens
ucgugucuuguguugcagccgg

SEQ ID NO: 3915 - RNA, 22 nt, Homo sapiens
ccggcugcaacacaagacacga

SEQ ID NO: 3916 - RNA, 22 nt, Homo sapiens
ggcuacaacacaggacccgggc

SEQ ID NO: 3917 - RNA, 22 nt, Homo sapiens
gcccggguccuguguuguagcc

SEQ ID NO: 3918 - RNA, 21 nt, Homo sapiens
cggcggggacggcgauugguc

SEQ ID NO: 3919 - RNA, 21 nt, Homo sapiens
gaccaaucgccguccccgccg

SEQ ID NO: 3920 - RNA, 22 nt, Homo sapiens
cgcaggggccgggugcucaccg

SEQ ID NO: 3921 - RNA, 22 nt, Homo sapiens
cggugagcacccggccccugcg

SEQ ID NO: 3922 - RNA, 21 nt, Homo sapiens
ugagugccggugccugcccug

SEQ ID NO: 3923 - RNA, 21 nt, Homo sapiens
cagggcaggcaccggcacuca

SEQ ID NO: 3924 - RNA, 22 nt, Homo sapiens
gcugcgcuuggauuucgucccc

SEQ ID NO: 3925 - RNA, 22 nt, Homo sapiens
ggggacgaaauccaagcgcagc

SEQ ID NO: 3926 - RNA, 23 nt, Homo sapiens
caacggaaucccaaaagcagcug

SEQ ID NO: 3927 - RNA, 23 nt, Homo sapiens
cagcugcuuuugggauuccguug

SEQ ID NO: 3928 - RNA, 22 nt, Homo sapiens
ucaggccaggcacaguggcuca

SEQ ID NO: 3929 - RNA, 22 nt, Homo sapiens
ugagccacugugccuggccuga

SEQ ID NO: 3930 - RNA, 19 nt, Homo sapiens
accgugcaaagguagcaua

SEQ ID NO: 3931 - RNA, 19 nt, Homo sapiens
uaugcuaccuuugcacggu

SEQ ID NO: 3932 - RNA, 20 nt, Homo sapiens
ccuccugcccuccuugcugu

SEQ ID NO: 3933 - RNA, 20 nt, Homo sapiens
acagcaaggagggcaggagg

SEQ ID NO: 3934 - RNA, 20 nt, Homo sapiens
uguuuugauaacaguaaugu

SEQ ID NO: 3935 - RNA, 20 nt, Homo sapiens
acauuacuguuaucaaaaca

SEQ ID NO: 3936 - RNA, 23 nt, Homo sapiens
guguuaauuaaaccucuauuuac

SEQ ID NO: 3937 - RNA, 23 nt, Homo sapiens
guaaauagagguuuaauuaacac

SEQ ID NO: 3938 - RNA, 23 nt, Homo sapiens
cuguaauauaaauuuaauuuauu

SEQ ID NO: 3939 - RNA, 23 nt, Homo sapiens
aauaaauuaaauuuauauuacag

SEQ ID NO: 3940 - RNA, 22 nt, Homo sapiens
uuggggaaacggccgcugagug

SEQ ID NO: 3941 - RNA, 22 nt, Homo sapiens
cacucagcggccguuuccccaa

SEQ ID NO: 3942 - RNA, 21 nt, Homo sapiens
ccucccaugccaagaacuccc

SEQ ID NO: 3943 - RNA, 21 nt, Homo sapiens
gggaguucuuggcaugggagg

SEQ ID NO: 3944 - RNA, 21 nt, Homo sapiens
gguucuuagcauaggaggucu

SEQ ID NO: 3945 - RNA, 21 nt, Homo sapiens
agaccuccuaugcuaagaacc

SEQ ID NO: 3946 - RNA, 21 nt, Homo sapiens
uguucucuuugccaaggacag

SEQ ID NO: 3947 - RNA, 21 nt, Homo sapiens
cuguccuuggcaaagagaaca

SEQ ID NO: 3948 - RNA, 22 nt, Homo sapiens
aaaucucugcaggcaaauguga

SEQ ID NO: 3949 - RNA, 22 nt, Homo sapiens
ucacauuugccugcagagauuu

SEQ ID NO: 3950 - RNA, 22 nt, Homo sapiens
caugguucugucaagcaccgcg

SEQ ID NO: 3951 - RNA, 22 nt, Homo sapiens
cgcggugcuugacagaaccaug

SEQ ID NO: 3952 - RNA, 21 nt, Homo sapiens
uugugcuugaucuaaccaugu

SEQ ID NO: 3953 - RNA, 21 nt, Homo sapiens
acaugguuagaucaagcacaa

SEQ ID NO: 3954 - RNA, 22 nt, Homo sapiens
ucugcaagugucagaggcgagg

SEQ ID NO: 3955 - RNA, 22 nt, Homo sapiens
ccucgccucugacacuugcaga

SEQ ID NO: 3956 - RNA, 22 nt, Homo sapiens
gagagcaguguguguugccugg

SEQ ID NO: 3957 - RNA, 22 nt, Homo sapiens
ccaggcaacacacacugcucuc

SEQ ID NO: 3958 - RNA, 22 nt, Homo sapiens
aucacauugccagugauuaccc

SEQ ID NO: 3959 - RNA, 22 nt, Homo sapiens
ggguaaucacuggcaaugugau

SEQ ID NO: 3960 - RNA, 22 nt, Homo sapiens
agcagaggcagagaggcucagg

SEQ ID NO: 3961 - RNA, 22 nt, Homo sapiens
ccugagccucucugccucugcu

SEQ ID NO: 3962 - RNA, 23 nt, Homo sapiens
ugaggcucuguuagccuuggcuc

SEQ ID NO: 3963 - RNA, 23 nt, Homo sapiens
gagccaaggcuaacagagccuca

SEQ ID NO: 3964 - RNA, 22 nt, Homo sapiens
uaucauggaguugguaaagcac

SEQ ID NO: 3965 - RNA, 22 nt, Homo sapiens
gugcuuuaccaacuccaugaua

SEQ ID NO: 3966 - RNA, 22 nt, Homo sapiens
guuuuaccaccuccaggagacu

SEQ ID NO: 3967 - RNA, 22 nt, Homo sapiens
agucuccuggaggugguaaaac

SEQ ID NO: 3968 - RNA, 22 nt, Homo sapiens
cgccucuucagcgcugucuucc

SEQ ID NO: 3969 - RNA, 22 nt, Homo sapiens
ggaagacagcgcugaagaggcg

SEQ ID NO: 3970 - RNA, 23 nt, Homo sapiens
caggcagugacuguucagacguc

SEQ ID NO: 3971 - RNA, 23 nt, Homo sapiens
gacgucugaacagucacugccug

SEQ ID NO: 3972 - RNA, 23 nt, Homo sapiens
agaauugcguuuggacaaucagu

SEQ ID NO: 3973 - RNA, 23 nt, Homo sapiens
acugauuguccaaacgcaauucu

SEQ ID NO: 3974 - RNA, 22 nt, Homo sapiens
agauguccagccacaauucucg

SEQ ID NO: 3975 - RNA, 22 nt, Homo sapiens
cgagaauuguggcuggacaucu

SEQ ID NO: 3976 - RNA, 24 nt, Homo sapiens
agcagaagcagggagguucuccca

SEQ ID NO: 3977 - RNA, 24 nt, Homo sapiens
ugggagaaccucccugcuucugcu

SEQ ID NO: 3978 - RNA, 22 nt, Homo sapiens
uaugugggaugguaaaccgcuu

SEQ ID NO: 3979 - RNA, 22 nt, Homo sapiens
aagcgguuuaccaucccacaua

SEQ ID NO: 3980 - RNA, 22 nt, Homo sapiens
ugguuuaccgucccacauacau

SEQ ID NO: 3981 - RNA, 22 nt, Homo sapiens
auguaugugggacgguaaacca

SEQ ID NO: 3982 - RNA, 23 nt, Homo sapiens
cagugcaaugauauugucaaagc

SEQ ID NO: 3983 - RNA, 23 nt, Homo sapiens
gcuuugacaauaucauugcacug

SEQ ID NO: 3984 - RNA, 17 nt, Homo sapiens
uaauugcuuccauguuu

SEQ ID NO: 3985 - RNA, 17 nt, Homo sapiens
aaacauggaagcaauua

SEQ ID NO: 3986 - RNA, 23 nt, Homo sapiens
uugccacacugcaacaccuuaca

SEQ ID NO: 3987 - RNA, 23 nt, Homo sapiens
uguaagguguugcaguguggcaa

SEQ ID NO: 3988 - RNA, 21 nt, Homo sapiens
ucuggcuguuguggugugcaa

SEQ ID NO: 3989 - RNA, 21 nt, Homo sapiens
uugcacaccacaacagccaga

SEQ ID NO: 3990 - RNA, 22 nt, Homo sapiens
gauaucagcucaguaggcaccg

SEQ ID NO: 3991 - RNA, 22 nt, Homo sapiens
cggugccuacugagcugauauc

SEQ ID NO: 3992 - RNA, 21 nt, Homo sapiens
guuccugcugaacugagccag

SEQ ID NO: 3993 - RNA, 21 nt, Homo sapiens
cuggcucaguucagcaggaac

SEQ ID NO: 3994 - RNA, 20 nt, Homo sapiens
auauggguuuacuaguuggu

SEQ ID NO: 3995 - RNA, 20 nt, Homo sapiens
accaacuaguaaacccauau

SEQ ID NO: 3996 - RNA, 22 nt, Homo sapiens
ugcuaugccaacauauugccau

SEQ ID NO: 3997 - RNA, 22 nt, Homo sapiens
auggcaauauguuggcauagca

SEQ ID NO: 3998 - RNA, 21 nt, Homo sapiens
aggcaagaugcuggcauagcu

SEQ ID NO: 3999 - RNA, 21 nt, Homo sapiens
agcuaugccagcaucuugccu

SEQ ID NO: 4000 - RNA, 18 nt, Homo sapiens
cggggcggcaggggccuc

SEQ ID NO: 4001 - RNA, 18 nt, Homo sapiens
gaggccccugccgccccg

SEQ ID NO: 4002 - RNA, 19 nt, Homo sapiens
aaaagcuggguugagagga

SEQ ID NO: 4003 - RNA, 19 nt, Homo sapiens
uccucucaacccagcuuuu

SEQ ID NO: 4004 - RNA, 22 nt, Homo sapiens
cccaauacacggucgaccucuu

SEQ ID NO: 4005 - RNA, 22 nt, Homo sapiens
aagaggucgaccguguauuggg

SEQ ID NO: 4006 - RNA, 23 nt, Homo sapiens
agguuguccguggugaguucgca

SEQ ID NO: 4007 - RNA, 23 nt, Homo sapiens
ugcgaacucaccacggacaaccu

SEQ ID NO: 4008 - RNA, 23 nt, Homo sapiens
gcaaagcacacggccugcagaga

SEQ ID NO: 4009 - RNA, 23 nt, Homo sapiens
ucucugcaggccgugugcuuugc

SEQ ID NO: 4010 - RNA, 22 nt, Homo sapiens
ucucugggccugugucuuaggc

SEQ ID NO: 4011 - RNA, 22 nt, Homo sapiens
gccuaagacacaggcccagaga

SEQ ID NO: 4012 - RNA, 21 nt, Homo sapiens
gccccugggccuauccuagaa

SEQ ID NO: 4013 - RNA, 21 nt, Homo sapiens
uucuaggauaggcccaggggc

SEQ ID NO: 4014 - RNA, 22 nt, Homo sapiens
uccgucucaguuacuuuauagc

SEQ ID NO: 4015 - RNA, 22 nt, Homo sapiens
gcuauaaaguaacugagacgga

SEQ ID NO: 4016 - RNA, 22 nt, Homo sapiens
aacacaccuauucaaggauuca

SEQ ID NO: 4017 - RNA, 22 nt, Homo sapiens
ugaauccuugaauagguguguu

SEQ ID NO: 4018 - RNA, 24 nt, Homo sapiens
aauccuuggaaccuaggugugagu

SEQ ID NO: 4019 - RNA, 24 nt, Homo sapiens
acucacaccuagguuccaaggauu

SEQ ID NO: 4020 - RNA, 22 nt, Homo sapiens
uaaugccccuaaaaauccuuau

SEQ ID NO: 4021 - RNA, 22 nt, Homo sapiens
auaaggauuuuuaggggcauua

SEQ ID NO: 4022 - RNA, 23 nt, Homo sapiens
agggacuuuugggggcagaugug

SEQ ID NO: 4023 - RNA, 23 nt, Homo sapiens
cacaucugcccccaaaagucccu

SEQ ID NO: 4024 - RNA, 22 nt, Homo sapiens
uaaugccccuaaaaauccuuau

SEQ ID NO: 4025 - RNA, 22 nt, Homo sapiens
auaaggauuuuuaggggcauua

SEQ ID NO: 4026 - RNA, 22 nt, Homo sapiens
agggacuuucaggggcagcugu

SEQ ID NO: 4027 - RNA, 22 nt, Homo sapiens
acagcugccccugaaagucccu

SEQ ID NO: 4028 - RNA, 24 nt, Homo sapiens
gaaaaugaugaguagugacugaug

SEQ ID NO: 4029 - RNA, 24 nt, Homo sapiens
caucagucacuacucaucauuuuc

SEQ ID NO: 4030 - RNA, 23 nt, Homo sapiens
ugagcaccacacaggccgggcgc

SEQ ID NO: 4031 - RNA, 23 nt, Homo sapiens
gcgcccggccuguguggugcuca

SEQ ID NO: 4032 - RNA, 21 nt, Homo sapiens
gcuggucugcguggugcucgg

SEQ ID NO: 4033 - RNA, 21 nt, Homo sapiens
ccgagcaccacgcagaccagc

SEQ ID NO: 4034 - RNA, 22 nt, Homo sapiens
gccugcugggguggaaccuggu

SEQ ID NO: 4035 - RNA, 22 nt, Homo sapiens
accagguuccaccccagcaggc

SEQ ID NO: 4036 - RNA, 23 nt, Homo sapiens
gaagugcuucgauuuuggggugu

SEQ ID NO: 4037 - RNA, 23 nt, Homo sapiens
acaccccaaaaucgaagcacuuc

SEQ ID NO: 4038 - RNA, 22 nt, Homo sapiens
acucaaaaugggggcgcuuucc

SEQ ID NO: 4039 - RNA, 22 nt, Homo sapiens
ggaaagcgcccccauuuugagu

SEQ ID NO: 4040 - RNA, 22 nt, Homo sapiens
uauguaacaugguccacuaacu

SEQ ID NO: 4041 - RNA, 22 nt, Homo sapiens
aguuaguggaccauguuacaua

SEQ ID NO: 4042 - RNA, 21 nt, Homo sapiens
ugguagacuauggaacguagg

SEQ ID NO: 4043 - RNA, 21 nt, Homo sapiens
ccuacguuccauagucuacca

SEQ ID NO: 4044 - RNA, 22 nt, Homo sapiens
uguagauacgagcaccagccac

SEQ ID NO: 4045 - RNA, 22 nt, Homo sapiens
guggcuggugcucguaucuaca

SEQ ID NO: 4046 - RNA, 23 nt, Homo sapiens
acaggcggcuguagcaauggggg

SEQ ID NO: 4047 - RNA, 23 nt, Homo sapiens
cccccauugcuacagccgccugu

SEQ ID NO: 4048 - RNA, 22 nt, Homo sapiens
aauucccuuguagauaacccgg

SEQ ID NO: 4049 - RNA, 22 nt, Homo sapiens
ccggguuaucuacaagggaauu

SEQ ID NO: 4050 - RNA, 22 nt, Homo sapiens
uacgcgcagaccacaggauguc

SEQ ID NO: 4051 - RNA, 22 nt, Homo sapiens
gacauccuguggucugcgcgua

SEQ ID NO: 4052 - RNA, 22 nt, Homo sapiens
uuacacacaacugaggaucaua

SEQ ID NO: 4053 - RNA, 22 nt, Homo sapiens
uaugauccucaguuguguguaa

SEQ ID NO: 4054 - RNA, 23 nt, Homo sapiens
uagcccccaggcuucacuuggcg

SEQ ID NO: 4055 - RNA, 23 nt, Homo sapiens
cgccaagugaagccugggggcua

SEQ ID NO: 4056 - RNA, 23 nt, Homo sapiens
agggcauaggagaggguugauau

SEQ ID NO: 4057 - RNA, 23 nt, Homo sapiens
auaucaacccucuccuaugcccu

SEQ ID NO: 4058 - RNA, 22 nt, Homo sapiens
gaauguugcucggugaaccccu

SEQ ID NO: 4059 - RNA, 22 nt, Homo sapiens
agggguucaccgagcaacauuc

SEQ ID NO: 4060 - RNA, 23 nt, Homo sapiens
agguuacccgagcaacuuugcau

SEQ ID NO: 4061 - RNA, 23 nt, Homo sapiens
augcaaaguugcucggguaaccu

SEQ ID NO: 4062 - RNA, 22 nt, Homo sapiens
uauguaacacgguccacuaacc

SEQ ID NO: 4063 - RNA, 22 nt, Homo sapiens
gguuaguggaccguguuacaua

SEQ ID NO: 4064 - RNA, 21 nt, Homo sapiens
uaguagaccguauagcguacg

SEQ ID NO: 4065 - RNA, 21 nt, Homo sapiens
cguacgcuauacggucuacua

SEQ ID NO: 4066 - RNA, 23 nt, Homo sapiens
acuucaccugguccacuagccgu

SEQ ID NO: 4067 - RNA, 23 nt, Homo sapiens
acggcuaguggaccaggugaagu

SEQ ID NO: 4068 - RNA, 18 nt, Homo sapiens
guguucucugauggacag

SEQ ID NO: 4069 - RNA, 18 nt, Homo sapiens
cuguccaucagagaacac

SEQ ID NO: 4070 - RNA, 22 nt, Homo sapiens
caggucgucuugcagggcuucu

SEQ ID NO: 4071 - RNA, 22 nt, Homo sapiens
agaagcccugcaagacgaccug

SEQ ID NO: 4072 - RNA, 21 nt, Homo sapiens
ugucuugcaggccgucaugca

SEQ ID NO: 4073 - RNA, 21 nt, Homo sapiens
ugcaugacggccugcaagaca

SEQ ID NO: 4074 - RNA, 22 nt, Homo sapiens
aucaugaugggcuccucggugu

SEQ ID NO: 4075 - RNA, 22 nt, Homo sapiens
acaccgaggagcccaucaugau

SEQ ID NO: 4076 - RNA, 23 nt, Homo sapiens
uugcuaguugcacuccucucugu

SEQ ID NO: 4077 - RNA, 23 nt, Homo sapiens
acagagaggagugcaacuagcaa

SEQ ID NO: 4078 - RNA, 25 nt, Homo sapiens
uaggcaguguauugcuagcggcugu

SEQ ID NO: 4079 - RNA, 25 nt, Homo sapiens
acagccgcuagcaauacacugccua

SEQ ID NO: 4080 - RNA, 22 nt, Homo sapiens
auuggggacauuuugcauucau

SEQ ID NO: 4081 - RNA, 22 nt, Homo sapiens
augaaugcaaaauguccccaau

SEQ ID NO: 4082 - RNA, 22 nt, Homo sapiens
uuuugcgauguguuccuaauau

SEQ ID NO: 4083 - RNA, 22 nt, Homo sapiens
auauuaggaacacaucgcaaaa

SEQ ID NO: 4084 - RNA, 22 nt, Homo sapiens
uugggaucauuuugcauccaua

SEQ ID NO: 4085 - RNA, 22 nt, Homo sapiens
uauggaugcaaaaugaucccaa

SEQ ID NO: 4086 - RNA, 22 nt, Homo sapiens
uuuugcaauauguuccugaaua

SEQ ID NO: 4087 - RNA, 22 nt, Homo sapiens
uauucaggaacauauugcaaaa

SEQ ID NO: 4088 - RNA, 21 nt, Homo sapiens
gcaguccaugggcauauacac

SEQ ID NO: 4089 - RNA, 21 nt, Homo sapiens
guguauaugcccauggacugc

SEQ ID NO: 4090 - RNA, 22 nt, Homo sapiens
uaugugccuuuggacuacaucg

SEQ ID NO: 4091 - RNA, 22 nt, Homo sapiens
cgauguaguccaaaggcacaua

SEQ ID NO: 4092 - RNA, 23 nt, Homo sapiens
auacacauacacgcaacacacau

SEQ ID NO: 4093 - RNA, 23 nt, Homo sapiens
auguguguugcguguauguguau

SEQ ID NO: 4094 - RNA, 23 nt, Homo sapiens
uugcaugucagauuguaauuccc

SEQ ID NO: 4095 - RNA, 23 nt, Homo sapiens
gggaauuacaaucugacaugcaa

SEQ ID NO: 4096 - RNA, 21 nt, Homo sapiens
ucacuccucuccucccgucuu

SEQ ID NO: 4097 - RNA, 21 nt, Homo sapiens
aagacgggaggagaggaguga

SEQ ID NO: 4098 - RNA, 22 nt, Homo sapiens
ucaggcucaguccccucccgau

SEQ ID NO: 4099 - RNA, 22 nt, Homo sapiens
aucgggaggggacugagccuga

SEQ ID NO: 4100 - RNA, 22 nt, Homo sapiens
gucauacacggcucuccucucu

SEQ ID NO: 4101 - RNA, 22 nt, Homo sapiens
agagaggagagccguguaugac

SEQ ID NO: 4102 - RNA, 22 nt, Homo sapiens
agaggcuggccgugaugaauuc

SEQ ID NO: 4103 - RNA, 22 nt, Homo sapiens
gaauucaucacggccagccucu

SEQ ID NO: 4104 - RNA, 22 nt, Homo sapiens
aaucauacagggacauccaguu

SEQ ID NO: 4105 - RNA, 22 nt, Homo sapiens
aacuggaugucccuguaugauu

SEQ ID NO: 4106 - RNA, 22 nt, Homo sapiens
aaucguacagggucauccacuu

SEQ ID NO: 4107 - RNA, 22 nt, Homo sapiens
aaguggaugacccuguacgauu

SEQ ID NO: 4108 - RNA, 21 nt, Homo sapiens
uugaaaggcuauuucuugguc

SEQ ID NO: 4109 - RNA, 21 nt, Homo sapiens
gaccaagaaauagccuuucaa

SEQ ID NO: 4110 - RNA, 21 nt, Homo sapiens
cccagauaauggcacucucaa

SEQ ID NO: 4111 - RNA, 21 nt, Homo sapiens
uugagagugccauuaucuggg

SEQ ID NO: 4112 - RNA, 22 nt, Homo sapiens
caaccuggaggacuccaugcug

SEQ ID NO: 4113 - RNA, 22 nt, Homo sapiens
cagcauggaguccuccagguug

SEQ ID NO: 4114 - RNA, 20 nt, Homo sapiens
ccauggaucuccaggugggu

SEQ ID NO: 4115 - RNA, 20 nt, Homo sapiens
acccaccuggagauccaugg

SEQ ID NO: 4116 - RNA, 22 nt, Homo sapiens
cuuaugcaagauucccuucuac

SEQ ID NO: 4117 - RNA, 22 nt, Homo sapiens
guagaagggaaucuugcauaag

SEQ ID NO: 4118 - RNA, 22 nt, Homo sapiens
aguggggaacccuuccaugagg

SEQ ID NO: 4119 - RNA, 22 nt, Homo sapiens
ccucauggaaggguuccccacu

SEQ ID NO: 4120 - RNA, 23 nt, Homo sapiens
aggaccugcgggacaagauucuu

SEQ ID NO: 4121 - RNA, 23 nt, Homo sapiens
aagaaucuugucccgcagguccu

SEQ ID NO: 4122 - RNA, 22 nt, Homo sapiens
caaaccacacugugguguuaga

SEQ ID NO: 4123 - RNA, 22 nt, Homo sapiens
ucuaacaccacagugugguuug

SEQ ID NO: 4124 - RNA, 21 nt, Homo sapiens
cagcagcacacugugguuugu

SEQ ID NO: 4125 - RNA, 21 nt, Homo sapiens
acaaaccacagugugcugcug

SEQ ID NO: 4126 - RNA, 23 nt, Homo sapiens
uuucaagccagggggcguuuuuc

SEQ ID NO: 4127 - RNA, 23 nt, Homo sapiens
gaaaaacgcccccuggcuugaaa

SEQ ID NO: 4128 - RNA, 20 nt, Homo sapiens
ucacuaccugacaauacagu

SEQ ID NO: 4129 - RNA, 20 nt, Homo sapiens
acuguauugucagguaguga

SEQ ID NO: 4130 - RNA, 21 nt, Homo sapiens
ugcuguauugucagguaguga

SEQ ID NO: 4131 - RNA, 21 nt, Homo sapiens
ucacuaccugacaauacagca

SEQ ID NO: 4132 - RNA, 22 nt, Homo sapiens
uucugccucuguccagguccuu

SEQ ID NO: 4133 - RNA, 22 nt, Homo sapiens
aaggaccuggacagaggcagaa

SEQ ID NO: 4134 - RNA, 24 nt, Homo sapiens
agggcuggacucagcggcggagcu

SEQ ID NO: 4135 - RNA, 24 nt, Homo sapiens
agcuccgccgcugaguccagcccu

SEQ ID NO: 4136 - RNA, 21 nt, Homo sapiens
ugacugccucacugaccacuu

SEQ ID NO: 4137 - RNA, 21 nt, Homo sapiens
aaguggucagugaggcaguca

SEQ ID NO: 4138 - RNA, 24 nt, Homo sapiens
aauuugguuucugaggcacuuagu

SEQ ID NO: 4139 - RNA, 24 nt, Homo sapiens
acuaagugccucagaaaccaaauu

SEQ ID NO: 4140 - RNA, 21 nt, Homo sapiens
uacuuuucuagguuguugggg

SEQ ID NO: 4141 - RNA, 21 nt, Homo sapiens
ccccaacaaccuagaaaagua

SEQ ID NO: 4142 - RNA, 23 nt, Homo sapiens
ucacaacaaccuugcaggguaga

SEQ ID NO: 4143 - RNA, 23 nt, Homo sapiens
ucuacccugcaagguuguuguga

SEQ ID NO: 4144 - RNA, 22 nt, Homo sapiens
cuuggauuuuccugggccucag

SEQ ID NO: 4145 - RNA, 22 nt, Homo sapiens
cugaggcccaggaaaauccaag

SEQ ID NO: 4146 - RNA, 22 nt, Homo sapiens
ugaggacagggcaaauucacga

SEQ ID NO: 4147 - RNA, 22 nt, Homo sapiens
ucgugaauuugcccuguccuca

SEQ ID NO: 4148 - RNA, 22 nt, Homo sapiens
aucauaugaaccaaacucuaau

SEQ ID NO: 4149 - RNA, 22 nt, Homo sapiens
auuagaguuugguucauaugau

SEQ ID NO: 4150 - RNA, 22 nt, Homo sapiens
uagagucuggcugauaugguuu

SEQ ID NO: 4151 - RNA, 22 nt, Homo sapiens
aaaccauaucagccagacucua

SEQ ID NO: 4152 - RNA, 21 nt, Homo sapiens
ccugugcucccagggccucgc

SEQ ID NO: 4153 - RNA, 21 nt, Homo sapiens
gcgaggcccugggagcacagg

SEQ ID NO: 4154 - RNA, 22 nt, Homo sapiens
ugaggcccuuggggcacagugg

SEQ ID NO: 4155 - RNA, 22 nt, Homo sapiens
ccacugugccccaagggccuca

SEQ ID NO: 4156 - RNA, 22 nt, Homo sapiens
uccuaaaucugaaaguccaaaa

SEQ ID NO: 4157 - RNA, 22 nt, Homo sapiens
uuuuggacuuucagauuuagga

SEQ ID NO: 4158 - RNA, 24 nt, Homo sapiens
uuggacuuuuucagauuuggggau

SEQ ID NO: 4159 - RNA, 24 nt, Homo sapiens
auccccaaaucugaaaaaguccaa

SEQ ID NO: 4160 - RNA, 22 nt, Homo sapiens
augcaccugggcaaggauucug

SEQ ID NO: 4161 - RNA, 22 nt, Homo sapiens
cagaauccuugcccaggugcau

SEQ ID NO: 4162 - RNA, 23 nt, Homo sapiens
uaauccuugcuaccugggugaga

SEQ ID NO: 4163 - RNA, 23 nt, Homo sapiens
ucucacccagguagcaaggauua

SEQ ID NO: 4164 - RNA, 22 nt, Homo sapiens
uuuugugucucccauuccccag

SEQ ID NO: 4165 - RNA, 22 nt, Homo sapiens
cuggggaaugggagacacaaaa

SEQ ID NO: 4166 - RNA, 22 nt, Homo sapiens
agggggauggcagagcaaaauu

SEQ ID NO: 4167 - RNA, 22 nt, Homo sapiens
aauuuugcucugccaucccccu

SEQ ID NO: 4168 - RNA, 22 nt, Homo sapiens
gugcauggcuguauauauaaca

SEQ ID NO: 4169 - RNA, 22 nt, Homo sapiens
uguuauauauacagccaugcac

SEQ ID NO: 4170 - RNA, 21 nt, Homo sapiens
uauauauacagccaugcacuc

SEQ ID NO: 4171 - RNA, 21 nt, Homo sapiens
gagugcauggcuguauauaua

SEQ ID NO: 4172 - RNA, 22 nt, Homo sapiens
aaugcacccgggcaaggauucu

SEQ ID NO: 4173 - RNA, 22 nt, Homo sapiens
agaauccuugcccgggugcauu

SEQ ID NO: 4174 - RNA, 22 nt, Homo sapiens
aauccuuugucccugggugaga

SEQ ID NO: 4175 - RNA, 22 nt, Homo sapiens
ucucacccagggacaaaggauu

SEQ ID NO: 4176 - RNA, 22 nt, Homo sapiens
aaugcaccugggcaaggauuca

SEQ ID NO: 4177 - RNA, 22 nt, Homo sapiens
ugaauccuugcccaggugcauu

SEQ ID NO: 4178 - RNA, 21 nt, Homo sapiens
auccuugcuaucugggugcua

SEQ ID NO: 4179 - RNA, 21 nt, Homo sapiens
uagcacccagauagcaaggau

SEQ ID NO: 4180 - RNA, 22 nt, Homo sapiens
agacccuggucugcacucuauc

SEQ ID NO: 4181 - RNA, 22 nt, Homo sapiens
gauagagugcagaccagggucu

SEQ ID NO: 4182 - RNA, 21 nt, Homo sapiens
uugcagcugcgguuguaaggu

SEQ ID NO: 4183 - RNA, 21 nt, Homo sapiens
accuuacaaccgcagcugcaa

SEQ ID NO: 4184 - RNA, 22 nt, Homo sapiens
cgucaacacuugcugguuuccu

SEQ ID NO: 4185 - RNA, 22 nt, Homo sapiens
aggaaaccagcaaguguugacg

SEQ ID NO: 4186 - RNA, 22 nt, Homo sapiens
gggagccaggaaguauugaugu

SEQ ID NO: 4187 - RNA, 22 nt, Homo sapiens
acaucaauacuuccuggcuccc

SEQ ID NO: 4188 - RNA, 21 nt, Homo sapiens
uaaggcacccuucugaguaga

SEQ ID NO: 4189 - RNA, 21 nt, Homo sapiens
ucuacucagaagggugccuua

SEQ ID NO: 4190 - RNA, 22 nt, Homo sapiens
uauucaggaagguguuacuuaa

SEQ ID NO: 4191 - RNA, 22 nt, Homo sapiens
uuaaguaacaccuuccugaaua

SEQ ID NO: 4192 - RNA, 21 nt, Homo sapiens
uuuugcaccuuuuggagugaa

SEQ ID NO: 4193 - RNA, 21 nt, Homo sapiens
uucacuccaaaaggugcaaaa

SEQ ID NO: 4194 - RNA, 23 nt, Homo sapiens
ugauuguagccuuuuggaguaga

SEQ ID NO: 4195 - RNA, 23 nt, Homo sapiens
ucuacuccaaaaggcuacaauca

SEQ ID NO: 4196 - RNA, 23 nt, Homo sapiens
ggguuuguagcuuugcuggcaug

SEQ ID NO: 4197 - RNA, 23 nt, Homo sapiens
caugccagcaaagcuacaaaccc

SEQ ID NO: 4198 - RNA, 23 nt, Homo sapiens
cagggcucagggauuggauggag

SEQ ID NO: 4199 - RNA, 23 nt, Homo sapiens
cuccauccaaucccugagcccug

SEQ ID NO: 4200 - RNA, 23 nt, Homo sapiens
augcuacucggaaaucccacuga

SEQ ID NO: 4201 - RNA, 23 nt, Homo sapiens
ucagugggauuuccgaguagcau

SEQ ID NO: 4202 - RNA, 21 nt, Homo sapiens
gugggauuucugaguagcauc

SEQ ID NO: 4203 - RNA, 21 nt, Homo sapiens
gaugcuacucagaaaucccac

SEQ ID NO: 4204 - RNA, 23 nt, Homo sapiens
ccggggcagauugguguagggug

SEQ ID NO: 4205 - RNA, 23 nt, Homo sapiens
cacccuacaccaaucugccccgg

SEQ ID NO: 4206 - RNA, 23 nt, Homo sapiens
acggagacgacaagacugugcug

SEQ ID NO: 4207 - RNA, 23 nt, Homo sapiens
cagcacagucuugucgucuccgu

SEQ ID NO: 4208 - RNA, 22 nt, Homo sapiens
aauccacgcugagcuuggcauc

SEQ ID NO: 4209 - RNA, 22 nt, Homo sapiens
gaugccaagcucagcguggauu

SEQ ID NO: 4210 - RNA, 23 nt, Homo sapiens
aggaaaugaggcuggcuaggagc

SEQ ID NO: 4211 - RNA, 23 nt, Homo sapiens
gcuccuagccagccucauuuccu

SEQ ID NO: 4212 - RNA, 22 nt, Homo sapiens
ugauugguacgucuguggguag

SEQ ID NO: 4213 - RNA, 22 nt, Homo sapiens
cuacccacagacguaccaauca

SEQ ID NO: 4214 - RNA, 22 nt, Homo sapiens
aaucagugaaugccuugaaccu

SEQ ID NO: 4215 - RNA, 22 nt, Homo sapiens
agguucaaggcauucacugauu

SEQ ID NO: 4216 - RNA, 21 nt, Homo sapiens
uuacaggcgugaaccaccgcg

SEQ ID NO: 4217 - RNA, 21 nt, Homo sapiens
cgcggugguucacgccuguaa

SEQ ID NO: 4218 - RNA, 21 nt, Homo sapiens
uacugcagacaguggcaauca

SEQ ID NO: 4219 - RNA, 21 nt, Homo sapiens
ugauugccacugucugcagua

SEQ ID NO: 4220 - RNA, 21 nt, Homo sapiens
guuucaccauguuggucaggc

SEQ ID NO: 4221 - RNA, 21 nt, Homo sapiens
gccugaccaacauggugaaac

SEQ ID NO: 4222 - RNA, 23 nt, Homo sapiens
uaaauuucaccuuucugagaagg

SEQ ID NO: 4223 - RNA, 23 nt, Homo sapiens
ccuucucagaaaggugaaauuua

SEQ ID NO: 4224 - RNA, 22 nt, Homo sapiens
uucacaaggaggugucauuuau

SEQ ID NO: 4225 - RNA, 22 nt, Homo sapiens
auaaaugacaccuccuugugaa

SEQ ID NO: 4226 - RNA, 23 nt, Homo sapiens
uaaauuucaccuuucugagaaga

SEQ ID NO: 4227 - RNA, 23 nt, Homo sapiens
ucuucucagaaaggugaaauuua

SEQ ID NO: 4228 - RNA, 22 nt, Homo sapiens
uucucaaggaggugucguuuau

SEQ ID NO: 4229 - RNA, 22 nt, Homo sapiens
auaaacgacaccuccuugagaa

SEQ ID NO: 4230 - RNA, 21 nt, Homo sapiens
auugacacuucugugaguaga

SEQ ID NO: 4231 - RNA, 21 nt, Homo sapiens
ucuacucacagaagugucaau

SEQ ID NO: 4232 - RNA, 23 nt, Homo sapiens
uacucuggagagugacaaucaug

SEQ ID NO: 4233 - RNA, 23 nt, Homo sapiens
caugauugucacucuccagagua

SEQ ID NO: 4234 - RNA, 21 nt, Homo sapiens
auugacaccucugugagugga

SEQ ID NO: 4235 - RNA, 21 nt, Homo sapiens
uccacucacagaggugucaau

SEQ ID NO: 4236 - RNA, 22 nt, Homo sapiens
uucucaagagggaggcaaucau

SEQ ID NO: 4237 - RNA, 22 nt, Homo sapiens
augauugccucccucuugagaa

SEQ ID NO: 4238 - RNA, 22 nt, Homo sapiens
gagugccuucuuuuggagcguu

SEQ ID NO: 4239 - RNA, 22 nt, Homo sapiens
aacgcuccaaaagaaggcacuc

SEQ ID NO: 4240 - RNA, 18 nt, Homo sapiens
ugcuuccuuucagagggu

SEQ ID NO: 4241 - RNA, 18 nt, Homo sapiens
acccucugaaaggaagca

SEQ ID NO: 4242 - RNA, 22 nt, Homo sapiens
aucuggagguaagaagcacuuu

SEQ ID NO: 4243 - RNA, 22 nt, Homo sapiens
aaagugcuucuuaccuccagau

SEQ ID NO: 4244 - RNA, 22 nt, Homo sapiens
gaaagcgcuucccuuugcugga

SEQ ID NO: 4245 - RNA, 22 nt, Homo sapiens
uccagcaaagggaagcgcuuuc

SEQ ID NO: 4246 - RNA, 20 nt, Homo sapiens
cugcaaagggaagcccuuuc

SEQ ID NO: 4247 - RNA, 20 nt, Homo sapiens
gaaagggcuucccuuugcag

SEQ ID NO: 4248 - RNA, 21 nt, Homo sapiens
caaagcgcuucccuuuggagc

SEQ ID NO: 4249 - RNA, 21 nt, Homo sapiens
gcuccaaagggaagcgcuuug

SEQ ID NO: 4250 - RNA, 22 nt, Homo sapiens
cucuagagggaagcacuuucug

SEQ ID NO: 4251 - RNA, 22 nt, Homo sapiens
cagaaagugcuucccucuagag

SEQ ID NO: 4252 - RNA, 21 nt, Homo sapiens
aaagcgcuucccuucagagug

SEQ ID NO: 4253 - RNA, 21 nt, Homo sapiens
cacucugaagggaagcgcuuu

SEQ ID NO: 4254 - RNA, 22 nt, Homo sapiens
cucuagagggaagcgcuuucug

SEQ ID NO: 4255 - RNA, 22 nt, Homo sapiens
cagaaagcgcuucccucuagag

SEQ ID NO: 4256 - RNA, 22 nt, Homo sapiens
aaagugcauccuuuuagagguu

SEQ ID NO: 4257 - RNA, 22 nt, Homo sapiens
aaccucuaaaaggaugcacuuu

SEQ ID NO: 4258 - RNA, 22 nt, Homo sapiens
cucuagagggaagcgcuuucug

SEQ ID NO: 4259 - RNA, 22 nt, Homo sapiens
cagaaagcgcuucccucuagag

SEQ ID NO: 4260 - RNA, 22 nt, Homo sapiens
aaagugcaucuuuuuagaggau

SEQ ID NO: 4261 - RNA, 22 nt, Homo sapiens
auccucuaaaaagaugcacuuu

SEQ ID NO: 4262 - RNA, 22 nt, Homo sapiens
cucuagagggaagcgcuuucug

SEQ ID NO: 4263 - RNA, 22 nt, Homo sapiens
cagaaagcgcuucccucuagag

SEQ ID NO: 4264 - RNA, 21 nt, Homo sapiens
aaagugcuuccuuuuagaggg

SEQ ID NO: 4265 - RNA, 21 nt, Homo sapiens
cccucuaaaaggaagcacuuu

SEQ ID NO: 4266 - RNA, 22 nt, Homo sapiens
aaagugcuuccuuuuagagggu

SEQ ID NO: 4267 - RNA, 22 nt, Homo sapiens
acccucuaaaaggaagcacuuu

SEQ ID NO: 4268 - RNA, 22 nt, Homo sapiens
cucuagagggaagcacuuucug

SEQ ID NO: 4269 - RNA, 22 nt, Homo sapiens
cagaaagugcuucccucuagag

SEQ ID NO: 4270 - RNA, 22 nt, Homo sapiens
aaagugcuucucuuuggugggu

SEQ ID NO: 4271 - RNA, 22 nt, Homo sapiens
acccaccaaagagaagcacuuu

SEQ ID NO: 4272 - RNA, 20 nt, Homo sapiens
cuacaaagggaagcccuuuc

SEQ ID NO: 4273 - RNA, 20 nt, Homo sapiens
gaaagggcuucccuuuguag

SEQ ID NO: 4274 - RNA, 21 nt, Homo sapiens
aaagugcuuccuuuuugaggg

SEQ ID NO: 4275 - RNA, 21 nt, Homo sapiens
cccucaaaaaggaagcacuuu

SEQ ID NO: 4276 - RNA, 22 nt, Homo sapiens
aagugcuuccuuuuagaggguu

SEQ ID NO: 4277 - RNA, 22 nt, Homo sapiens
aacccucuaaaaggaagcacuu

SEQ ID NO: 4278 - RNA, 24 nt, Homo sapiens
acaaagugcuucccuuuagagugu

SEQ ID NO: 4279 - RNA, 24 nt, Homo sapiens
acacucuaaagggaagcacuuugu

SEQ ID NO: 4280 - RNA, 22 nt, Homo sapiens
aacgcacuucccuuuagagugu

SEQ ID NO: 4281 - RNA, 22 nt, Homo sapiens
acacucuaaagggaagugcguu

SEQ ID NO: 4282 - RNA, 22 nt, Homo sapiens
aaaaugguucccuuuagagugu

SEQ ID NO: 4283 - RNA, 22 nt, Homo sapiens
acacucuaaagggaaccauuuu

SEQ ID NO: 4284 - RNA, 22 nt, Homo sapiens
cucuagagggaagcgcuuucug

SEQ ID NO: 4285 - RNA, 22 nt, Homo sapiens
cagaaagcgcuucccucuagag

SEQ ID NO: 4286 - RNA, 23 nt, Homo sapiens
gaacgcgcuucccuauagagggu

SEQ ID NO: 4287 - RNA, 23 nt, Homo sapiens
acccucuauagggaagcgcguuc

SEQ ID NO: 4288 - RNA, 22 nt, Homo sapiens
cucuagagggaagcgcuuucug

SEQ ID NO: 4289 - RNA, 22 nt, Homo sapiens
cagaaagcgcuucccucuagag

SEQ ID NO: 4290 - RNA, 21 nt, Homo sapiens
gaaggcgcuucccuuuggagu

SEQ ID NO: 4291 - RNA, 21 nt, Homo sapiens
acuccaaagggaagcgccuuc

SEQ ID NO: 4292 - RNA, 20 nt, Homo sapiens
cugcaaagggaagcccuuuc

SEQ ID NO: 4293 - RNA, 20 nt, Homo sapiens
gaaagggcuucccuuugcag

SEQ ID NO: 4294 - RNA, 22 nt, Homo sapiens
ccucccacacccaaggcuugca

SEQ ID NO: 4295 - RNA, 22 nt, Homo sapiens
ugcaagccuugggugugggagg

SEQ ID NO: 4296 - RNA, 22 nt, Homo sapiens
caugccuugaguguaggaccgu

SEQ ID NO: 4297 - RNA, 22 nt, Homo sapiens
acgguccuacacucaaggcaug

SEQ ID NO: 4298 - RNA, 22 nt, Homo sapiens
aucauacaaggacaauuucuuu

SEQ ID NO: 4299 - RNA, 22 nt, Homo sapiens
aaagaaauuguccuuguaugau

SEQ ID NO: 4300 - RNA, 22 nt, Homo sapiens
ggagaaauuauccuuggugugu

SEQ ID NO: 4301 - RNA, 22 nt, Homo sapiens
acacaccaaggauaauuucucc

SEQ ID NO: 4302 - RNA, 22 nt, Homo sapiens
uggugggcacagaaucuggacu

SEQ ID NO: 4303 - RNA, 22 nt, Homo sapiens
aguccagauucugugcccacca

SEQ ID NO: 4304 - RNA, 25 nt, Homo sapiens
aaaggauucugcugucggucccacu

SEQ ID NO: 4305 - RNA, 25 nt, Homo sapiens
agugggaccgacagcagaauccuuu

SEQ ID NO: 4306 - RNA, 23 nt, Homo sapiens
ucggggaucaucaugucacgaga

SEQ ID NO: 4307 - RNA, 23 nt, Homo sapiens
ucucgugacaugaugauccccga

SEQ ID NO: 4308 - RNA, 22 nt, Homo sapiens
aaacauucgcggugcacuucuu

SEQ ID NO: 4309 - RNA, 22 nt, Homo sapiens
aagaagugcaccgcgaauguuu

SEQ ID NO: 4310 - RNA, 22 nt, Homo sapiens
auucugcauuuuuagcaaguuc

SEQ ID NO: 4311 - RNA, 22 nt, Homo sapiens
gaacuugcuaaaaaugcagaau

SEQ ID NO: 4312 - RNA, 22 nt, Homo sapiens
accugagguugugcauuucuaa

SEQ ID NO: 4313 - RNA, 22 nt, Homo sapiens
uuagaaaugcacaaccucaggu

SEQ ID NO: 4314 - RNA, 22 nt, Homo sapiens
ucagcaaacauuuauugugugc

SEQ ID NO: 4315 - RNA, 22 nt, Homo sapiens
gcacacaauaaauguuugcuga

SEQ ID NO: 4316 - RNA, 22 nt, Homo sapiens
ucaguaaauguuuauuagauga

SEQ ID NO: 4317 - RNA, 22 nt, Homo sapiens
ucaucuaauaaacauuuacuga

SEQ ID NO: 4318 - RNA, 22 nt, Homo sapiens
agcuacaguuacuuuugcacca

SEQ ID NO: 4319 - RNA, 22 nt, Homo sapiens
uggugcaaaaguaacuguagcu

SEQ ID NO: 4320 - RNA, 20 nt, Homo sapiens
uaaaaacugcaauuacuuuc

SEQ ID NO: 4321 - RNA, 20 nt, Homo sapiens
gaaaguaauugcaguuuuua

SEQ ID NO: 4322 - RNA, 23 nt, Homo sapiens
ugcaaaaguaauugcaguuuuug

SEQ ID NO: 4323 - RNA, 23 nt, Homo sapiens
caaaaacugcaauuacuuuugca

SEQ ID NO: 4324 - RNA, 22 nt, Homo sapiens
aaagaccgugacuacuuuugca

SEQ ID NO: 4325 - RNA, 22 nt, Homo sapiens
ugcaaaaguagucacggucuuu

SEQ ID NO: 4326 - RNA, 22 nt, Homo sapiens
agaaguaacuacgguuuuugca

SEQ ID NO: 4327 - RNA, 22 nt, Homo sapiens
ugcaaaaaccguaguuacuucu

SEQ ID NO: 4328 - RNA, 19 nt, Homo sapiens
aaaaaccacaauuacuuuu

SEQ ID NO: 4329 - RNA, 19 nt, Homo sapiens
aaaaguaauugugguuuuu

SEQ ID NO: 4330 - RNA, 19 nt, Homo sapiens
aaaaguaauugcggucuuu

SEQ ID NO: 4331 - RNA, 19 nt, Homo sapiens
aaagaccgcaauuacuuuu

SEQ ID NO: 4332 - RNA, 22 nt, Homo sapiens
caaaaacugcaauuacuuuugc

SEQ ID NO: 4333 - RNA, 22 nt, Homo sapiens
gcaaaaguaauugcaguuuuug

SEQ ID NO: 4334 - RNA, 22 nt, Homo sapiens
gaaaguaauugcuguuuuugcc

SEQ ID NO: 4335 - RNA, 22 nt, Homo sapiens
ggcaaaaacagcaauuacuuuc

SEQ ID NO: 4336 - RNA, 21 nt, Homo sapiens
uaaaacugcaguuauuuuugc

SEQ ID NO: 4337 - RNA, 21 nt, Homo sapiens
gcaaaaauaacugcaguuuua

SEQ ID NO: 4338 - RNA, 21 nt, Homo sapiens
aaaaguaauugcaguuuuugc

SEQ ID NO: 4339 - RNA, 21 nt, Homo sapiens
gcaaaaacugcaauuacuuuu

SEQ ID NO: 4340 - RNA, 22 nt, Homo sapiens
uaaaacccacaauuauguuugu

SEQ ID NO: 4341 - RNA, 22 nt, Homo sapiens
acaaacauaauuguggguuuua

SEQ ID NO: 4342 - RNA, 22 nt, Homo sapiens
aaaaguaauugcggguuuugcc

SEQ ID NO: 4343 - RNA, 22 nt, Homo sapiens
ggcaaaacccgcaauuacuuuu

SEQ ID NO: 4344 - RNA, 21 nt, Homo sapiens
caaaaccgcaguaacuuuugu

SEQ ID NO: 4345 - RNA, 21 nt, Homo sapiens
acaaaaguuacugcgguuuug

SEQ ID NO: 4346 - RNA, 22 nt, Homo sapiens
aaaaguuauugcgguuuuggcu

SEQ ID NO: 4347 - RNA, 22 nt, Homo sapiens
agccaaaaccgcaauaacuuuu

SEQ ID NO: 4348 - RNA, 21 nt, Homo sapiens
uggcaguuacuuuugcaccag

SEQ ID NO: 4349 - RNA, 21 nt, Homo sapiens
cuggugcaaaaguaacugcca

SEQ ID NO: 4350 - RNA, 21 nt, Homo sapiens
aaaaguaauugcgguuuuugc

SEQ ID NO: 4351 - RNA, 21 nt, Homo sapiens
gcaaaaaccgcaauuacuuuu

SEQ ID NO: 4352 - RNA, 20 nt, Homo sapiens
aaaacugcaguuacuuuugc

SEQ ID NO: 4353 - RNA, 20 nt, Homo sapiens
gcaaaaguaacugcaguuuu

SEQ ID NO: 4354 - RNA, 18 nt, Homo sapiens
aaaaguacuugcggauuu

SEQ ID NO: 4355 - RNA, 18 nt, Homo sapiens
aaauccgcaaguacuuuu

SEQ ID NO: 4356 - RNA, 20 nt, Homo sapiens
gugcaaaagucaucacgguu

SEQ ID NO: 4357 - RNA, 20 nt, Homo sapiens
aaccgugaugacuuuugcac

SEQ ID NO: 4358 - RNA, 22 nt, Homo sapiens
gcuggugcaaaaguaauggcgg

SEQ ID NO: 4359 - RNA, 22 nt, Homo sapiens
ccgccauuacuuuugcaccagc

SEQ ID NO: 4360 - RNA, 22 nt, Homo sapiens
aaaaguaaucacuguuuuugcc

SEQ ID NO: 4361 - RNA, 22 nt, Homo sapiens
ggcaaaaacagugauuacuuuu

SEQ ID NO: 4362 - RNA, 20 nt, Homo sapiens
agugccugagggaguaagag

SEQ ID NO: 4363 - RNA, 20 nt, Homo sapiens
cucuuacucccucaggcacu

SEQ ID NO: 4364 - RNA, 22 nt, Homo sapiens
ugucuuacucccucaggcacau

SEQ ID NO: 4365 - RNA, 22 nt, Homo sapiens
augugccugagggaguaagaca

SEQ ID NO: 4366 - RNA, 23 nt, Homo sapiens
agugccugagggaguaagagccc

SEQ ID NO: 4367 - RNA, 23 nt, Homo sapiens
gggcucuuacucccucaggcacu

SEQ ID NO: 4368 - RNA, 21 nt, Homo sapiens
gcgacccacucuugguuucca

SEQ ID NO: 4369 - RNA, 21 nt, Homo sapiens
uggaaaccaagagugggucgc

SEQ ID NO: 4370 - RNA, 22 nt, Homo sapiens
uuagcuuaaggaguaccagauc

SEQ ID NO: 4371 - RNA, 22 nt, Homo sapiens
gaucugguacuccuuaagcuaa

SEQ ID NO: 4372 - RNA, 21 nt, Homo sapiens
uaugguacuccuuaagcuaac

SEQ ID NO: 4373 - RNA, 21 nt, Homo sapiens
guuagcuuaaggaguaccaua

SEQ ID NO: 4374 - RNA, 19 nt, Homo sapiens
ugagcugcuguaccaaaau

SEQ ID NO: 4375 - RNA, 19 nt, Homo sapiens
auuuugguacagcagcuca

SEQ ID NO: 4376 - RNA, 22 nt, Homo sapiens
cacauaugaagugagccagcac

SEQ ID NO: 4377 - RNA, 22 nt, Homo sapiens
gugcuggcucacuucauaugug

SEQ ID NO: 4378 - RNA, 22 nt, Homo sapiens
ugcuggcucauuucauaugugu

SEQ ID NO: 4379 - RNA, 22 nt, Homo sapiens
acacauaugaaaugagccagca

SEQ ID NO: 4380 - RNA, 22 nt, Homo sapiens
uuccaugccuccuagaaguucc

SEQ ID NO: 4381 - RNA, 22 nt, Homo sapiens
ggaacuucuaggaggcauggaa

SEQ ID NO: 4382 - RNA, 22 nt, Homo sapiens
agccuuccaggagaaauggaga

SEQ ID NO: 4383 - RNA, 22 nt, Homo sapiens
ucuccauuucuccuggaaggcu

SEQ ID NO: 4384 - RNA, 22 nt, Homo sapiens
uaaaacuuuaagugugccuagg

SEQ ID NO: 4385 - RNA, 22 nt, Homo sapiens
ccuaggcacacuuaaaguuuua

SEQ ID NO: 4386 - RNA, 22 nt, Homo sapiens
uaggcacacuuaaaguuauagc

SEQ ID NO: 4387 - RNA, 22 nt, Homo sapiens
gcuauaacuuuaagugugccua

SEQ ID NO: 4388 - RNA, 22 nt, Homo sapiens
gaauauggguauauuaguuugg

SEQ ID NO: 4389 - RNA, 22 nt, Homo sapiens
ccaaacuaauauacccauauuc

SEQ ID NO: 4390 - RNA, 22 nt, Homo sapiens
aaacuaauauacccauauucug

SEQ ID NO: 4391 - RNA, 22 nt, Homo sapiens
cagaauauggguauauuaguuu

SEQ ID NO: 4392 - RNA, 22 nt, Homo sapiens
uaguucuucccuuugcccaauu

SEQ ID NO: 4393 - RNA, 22 nt, Homo sapiens
aauugggcaaagggaagaacua

SEQ ID NO: 4394 - RNA, 22 nt, Homo sapiens
cagggaaaugggaagaacuaga

SEQ ID NO: 4395 - RNA, 22 nt, Homo sapiens
ucuaguucuucccauuucccug

SEQ ID NO: 4396 - RNA, 22 nt, Homo sapiens
cugaauagcugggacuacaggu

SEQ ID NO: 4397 - RNA, 22 nt, Homo sapiens
accuguagucccagcuauucag

SEQ ID NO: 4398 - RNA, 22 nt, Homo sapiens
ugaaguaccagcuacucgagag

SEQ ID NO: 4399 - RNA, 22 nt, Homo sapiens
cucucgaguagcugguacuuca

SEQ ID NO: 4400 - RNA, 22 nt, Homo sapiens
cagagugacaagcugguuaaag

SEQ ID NO: 4401 - RNA, 22 nt, Homo sapiens
cuuuaaccagcuugucacucug

SEQ ID NO: 4402 - RNA, 22 nt, Homo sapiens
uauccagcuuguuacuauaugc

SEQ ID NO: 4403 - RNA, 22 nt, Homo sapiens
gcauauaguaacaagcuggaua

SEQ ID NO: 4404 - RNA, 21 nt, Homo sapiens
gccccgggcagugugaucauc

SEQ ID NO: 4405 - RNA, 21 nt, Homo sapiens
gaugaucacacugcccggggc

SEQ ID NO: 4406 - RNA, 18 nt, Homo sapiens
auggucaccuccgggacu

SEQ ID NO: 4407 - RNA, 18 nt, Homo sapiens
agucccggaggugaccau

SEQ ID NO: 4408 - RNA, 19 nt, Homo sapiens
aagucccacuaaugccagc

SEQ ID NO: 4409 - RNA, 19 nt, Homo sapiens
gcuggcauuagugggacuu

SEQ ID NO: 4410 - RNA, 21 nt, Homo sapiens
acuggcauuagugggacuuuu

SEQ ID NO: 4411 - RNA, 21 nt, Homo sapiens
aaaagucccacuaaugccagu

SEQ ID NO: 4412 - RNA, 23 nt, Homo sapiens
ugcacauggcaaccuagcuccca

SEQ ID NO: 4413 - RNA, 23 nt, Homo sapiens
ugggagcuagguugccaugugca

SEQ ID NO: 4414 - RNA, 21 nt, Homo sapiens
ggcugggugcucuugugcagu

SEQ ID NO: 4415 - RNA, 21 nt, Homo sapiens
acugcacaagagcacccagcc

SEQ ID NO: 4416 - RNA, 21 nt, Homo sapiens
uaaaguaaauaugcaccaaaa

SEQ ID NO: 4417 - RNA, 21 nt, Homo sapiens
uuuuggugcauauuuacuuua

SEQ ID NO: 4418 - RNA, 21 nt, Homo sapiens
aauaaaguucauguauggcaa

SEQ ID NO: 4419 - RNA, 21 nt, Homo sapiens
uugccauacaugaacuuuauu

SEQ ID NO: 4420 - RNA, 21 nt, Homo sapiens
uugccauacauagacuuuauu

SEQ ID NO: 4421 - RNA, 21 nt, Homo sapiens
aauaaagucuauguauggcaa

SEQ ID NO: 4422 - RNA, 21 nt, Homo sapiens
auacccauagcuuagcuccca

SEQ ID NO: 4423 - RNA, 21 nt, Homo sapiens
ugggagcuaagcuauggguau

SEQ ID NO: 4424 - RNA, 21 nt, Homo sapiens
ugggagcuaagcuauggguau

SEQ ID NO: 4425 - RNA, 21 nt, Homo sapiens
auacccauagcuuagcuccca

SEQ ID NO: 4426 - RNA, 22 nt, Homo sapiens
caaaguuuaagauccuugaagu

SEQ ID NO: 4427 - RNA, 22 nt, Homo sapiens
acuucaaggaucuuaaacuuug

SEQ ID NO: 4428 - RNA, 22 nt, Homo sapiens
aucaaggaucuuaaacuuugcc

SEQ ID NO: 4429 - RNA, 22 nt, Homo sapiens
ggcaaaguuuaagauccuugau

SEQ ID NO: 4430 - RNA, 20 nt, Homo sapiens
aaaguagcuguaccauuugc

SEQ ID NO: 4431 - RNA, 20 nt, Homo sapiens
gcaaaugguacagcuacuuu

SEQ ID NO: 4432 - RNA, 19 nt, Homo sapiens
aggcacggugucagcaggc

SEQ ID NO: 4433 - RNA, 19 nt, Homo sapiens
gccugcugacaccgugccu

SEQ ID NO: 4434 - RNA, 19 nt, Homo sapiens
gggcgccugugaucccaac

SEQ ID NO: 4435 - RNA, 19 nt, Homo sapiens
guugggaucacaggcgccc

SEQ ID NO: 4436 - RNA, 23 nt, Homo sapiens
aguauguucuuccaggacagaac

SEQ ID NO: 4437 - RNA, 23 nt, Homo sapiens
guucuguccuggaagaacauacu

SEQ ID NO: 4438 - RNA, 22 nt, Homo sapiens
gagaaaugcuggacuaaucugc

SEQ ID NO: 4439 - RNA, 22 nt, Homo sapiens
gcagauuaguccagcauuucuc

SEQ ID NO: 4440 - RNA, 22 nt, Homo sapiens
agaaaggguggcaauaccucuu

SEQ ID NO: 4441 - RNA, 22 nt, Homo sapiens
aagagguauugccacccuuucu

SEQ ID NO: 4442 - RNA, 22 nt, Homo sapiens
agguauugccacccuuucuagu

SEQ ID NO: 4443 - RNA, 22 nt, Homo sapiens
acuagaaaggguggcaauaccu

SEQ ID NO: 4444 - RNA, 22 nt, Homo sapiens
guagcaccuugcaggauaaggu

SEQ ID NO: 4445 - RNA, 22 nt, Homo sapiens
accuuauccugcaaggugcuac

SEQ ID NO: 4446 - RNA, 24 nt, Homo sapiens
uacagaugcagauucucugacuuc

SEQ ID NO: 4447 - RNA, 24 nt, Homo sapiens
gaagucagagaaucugcaucugua

SEQ ID NO: 4448 - RNA, 20 nt, Homo sapiens
aacucuagccugagcaacag

SEQ ID NO: 4449 - RNA, 20 nt, Homo sapiens
cuguugcucaggcuagaguu

SEQ ID NO: 4450 - RNA, 22 nt, Homo sapiens
acagcccagcaguuaucacggg

SEQ ID NO: 4451 - RNA, 22 nt, Homo sapiens
cccgugauaacugcugggcugu

SEQ ID NO: 4452 - RNA, 21 nt, Homo sapiens
uaucguaucguauuguauugu

SEQ ID NO: 4453 - RNA, 21 nt, Homo sapiens
acaauacaauacgauacgaua

SEQ ID NO: 4454 - RNA, 22 nt, Homo sapiens
uuagaacguuuuagggucaaau

SEQ ID NO: 4455 - RNA, 22 nt, Homo sapiens
auuugacccuaaaacguucuaa

SEQ ID NO: 4456 - RNA, 22 nt, Homo sapiens
uaacaaacaccuguaaaacagc

SEQ ID NO: 4457 - RNA, 22 nt, Homo sapiens
gcuguuuuacagguguuuguua

SEQ ID NO: 4458 - RNA, 22 nt, Homo sapiens
agcauacaccuguaguccuaga

SEQ ID NO: 4459 - RNA, 22 nt, Homo sapiens
ucuaggacuacagguguaugcu

SEQ ID NO: 4460 - RNA, 21 nt, Homo sapiens
aguuaaugaauccuggaaagu

SEQ ID NO: 4461 - RNA, 21 nt, Homo sapiens
acuuuccaggauucauuaacu

SEQ ID NO: 4462 - RNA, 21 nt, Homo sapiens
ucagcuacuaccucuauuagg

SEQ ID NO: 4463 - RNA, 21 nt, Homo sapiens
ccuaauagagguaguagcuga

SEQ ID NO: 4464 - RNA, 22 nt, Homo sapiens
uugcucugagcuccgagaaagc

SEQ ID NO: 4465 - RNA, 22 nt, Homo sapiens
gcuuucucggagcucagagcaa

SEQ ID NO: 4466 - RNA, 22 nt, Homo sapiens
caaauaauaccacagugggugu

SEQ ID NO: 4467 - RNA, 22 nt, Homo sapiens
acacccacugugguauuauuug

SEQ ID NO: 4468 - RNA, 20 nt, Homo sapiens
aauaauaucacaguaggugu

SEQ ID NO: 4469 - RNA, 20 nt, Homo sapiens
acaccuacugugauauuauu

SEQ ID NO: 4470 - RNA, 22 nt, Homo sapiens
aauaauaucacaguagguguac

SEQ ID NO: 4471 - RNA, 22 nt, Homo sapiens
guacaccuacugugauauuauu

SEQ ID NO: 4472 - RNA, 22 nt, Homo sapiens
gcaguggcucugaaaugaacuc

SEQ ID NO: 4473 - RNA, 22 nt, Homo sapiens
gaguucauuucagagccacugc

SEQ ID NO: 4474 - RNA, 21 nt, Homo sapiens
cagaucaugggacugucucag

SEQ ID NO: 4475 - RNA, 21 nt, Homo sapiens
cugagacagucccaugaucug

SEQ ID NO: 4476 - RNA, 22 nt, Homo sapiens
acuccaagaagaaucuagacag

SEQ ID NO: 4477 - RNA, 22 nt, Homo sapiens
cugucuagauucuucuuggagu

SEQ ID NO: 4478 - RNA, 22 nt, Homo sapiens
cucauuuaaguagucugaugcc

SEQ ID NO: 4479 - RNA, 22 nt, Homo sapiens
ggcaucagacuacuuaaaugag

SEQ ID NO: 4480 - RNA, 22 nt, Homo sapiens
ucaaguaguuucaugauaaagg

SEQ ID NO: 4481 - RNA, 22 nt, Homo sapiens
ccuuuaucaugaaacuacuuga

SEQ ID NO: 4482 - RNA, 22 nt, Homo sapiens
ugggggagugcagugauugugg

SEQ ID NO: 4483 - RNA, 22 nt, Homo sapiens
ccacaaucacugcacuccccca

SEQ ID NO: 4484 - RNA, 22 nt, Homo sapiens
uccugucuuuccuuguuggagc

SEQ ID NO: 4485 - RNA, 22 nt, Homo sapiens
gcuccaacaaggaaagacagga

SEQ ID NO: 4486 - RNA, 22 nt, Homo sapiens
uaaugcauuaaauuauugaagg

SEQ ID NO: 4487 - RNA, 22 nt, Homo sapiens
ccuucaauaauuuaaugcauua

SEQ ID NO: 4488 - RNA, 19 nt, Homo sapiens
uuauugucacguucugauu

SEQ ID NO: 4489 - RNA, 19 nt, Homo sapiens
aaucagaacgugacaauaa

SEQ ID NO: 4490 - RNA, 22 nt, Homo sapiens
ugagucagcaacauaucccaug

SEQ ID NO: 4491 - RNA, 22 nt, Homo sapiens
caugggauauguugcugacuca

SEQ ID NO: 4492 - RNA, 18 nt, Homo sapiens
aggagaagucgggaaggu

SEQ ID NO: 4493 - RNA, 18 nt, Homo sapiens
accuucccgacuucuccu

SEQ ID NO: 4494 - RNA, 22 nt, Homo sapiens
cgaaaacagcaauuaccuuugc

SEQ ID NO: 4495 - RNA, 22 nt, Homo sapiens
gcaaagguaauugcuguuuucg

SEQ ID NO: 4496 - RNA, 22 nt, Homo sapiens
uuaggccaucaucccauuaugc

SEQ ID NO: 4497 - RNA, 22 nt, Homo sapiens
gcauaaugggaugauggccuaa

SEQ ID NO: 4498 - RNA, 23 nt, Homo sapiens
uguuucggggcucauggccugug

SEQ ID NO: 4499 - RNA, 23 nt, Homo sapiens
cacaggccaugagccccgaaaca

SEQ ID NO: 4500 - RNA, 22 nt, Homo sapiens
aaagguaauugcaguuuuuccc

SEQ ID NO: 4501 - RNA, 22 nt, Homo sapiens
gggaaaaacugcaauuaccuuu

SEQ ID NO: 4502 - RNA, 22 nt, Homo sapiens
uucuggauaacaugcugaagcu

SEQ ID NO: 4503 - RNA, 22 nt, Homo sapiens
agcuucagcauguuauccagaa

SEQ ID NO: 4504 - RNA, 22 nt, Homo sapiens
acguuugaaugcuguacaaggc

SEQ ID NO: 4505 - RNA, 22 nt, Homo sapiens
gccuuguacagcauucaaacgu

SEQ ID NO: 4506 - RNA, 20 nt, Homo sapiens
augagcgacugugccugacc

SEQ ID NO: 4507 - RNA, 20 nt, Homo sapiens
ggucaggcacagucgcucau

SEQ ID NO: 4508 - RNA, 19 nt, Homo sapiens
gagccaguuggacaggagc

SEQ ID NO: 4509 - RNA, 19 nt, Homo sapiens
gcuccuguccaacuggcuc

SEQ ID NO: 4510 - RNA, 23 nt, Homo sapiens
uucauuugguauaaaccgcgauu

SEQ ID NO: 4511 - RNA, 23 nt, Homo sapiens
aaucgcgguuuauaccaaaugaa

SEQ ID NO: 4512 - RNA, 22 nt, Homo sapiens
uugagaaugaugaaucauuagg

SEQ ID NO: 4513 - RNA, 22 nt, Homo sapiens
ccuaaugauucaucauucucaa

SEQ ID NO: 4514 - RNA, 23 nt, Homo sapiens
uuacaguuguucaaccaguuacu

SEQ ID NO: 4515 - RNA, 23 nt, Homo sapiens
aguaacugguugaacaacuguaa

SEQ ID NO: 4516 - RNA, 21 nt, Homo sapiens
caaagaggaaggucccauuac

SEQ ID NO: 4517 - RNA, 21 nt, Homo sapiens
guaaugggaccuuccucuuug

SEQ ID NO: 4518 - RNA, 22 nt, Homo sapiens
ucaguuccaggccaaccaggcu

SEQ ID NO: 4519 - RNA, 22 nt, Homo sapiens
agccugguuggccuggaacuga

SEQ ID NO: 4520 - RNA, 22 nt, Homo sapiens
uuaugguuugccugggacugag

SEQ ID NO: 4521 - RNA, 22 nt, Homo sapiens
cucagucccaggcaaaccauaa

SEQ ID NO: 4522 - RNA, 19 nt, Homo sapiens
ugggcguaucuguaugcua

SEQ ID NO: 4523 - RNA, 19 nt, Homo sapiens
uagcauacagauacgccca

SEQ ID NO: 4524 - RNA, 20 nt, Homo sapiens
agaccauggguucucauugu

SEQ ID NO: 4525 - RNA, 20 nt, Homo sapiens
acaaugagaacccauggucu

SEQ ID NO: 4526 - RNA, 22 nt, Homo sapiens
uugugucaauaugcgaugaugu

SEQ ID NO: 4527 - RNA, 22 nt, Homo sapiens
acaucaucgcauauugacacaa

SEQ ID NO: 4528 - RNA, 19 nt, Homo sapiens
ugucucugcugggguuucu

SEQ ID NO: 4529 - RNA, 19 nt, Homo sapiens
agaaaccccagcagagaca

SEQ ID NO: 4530 - RNA, 25 nt, Homo sapiens
aggcaccagccaggcauugcucagc

SEQ ID NO: 4531 - RNA, 25 nt, Homo sapiens
gcugagcaaugccuggcuggugccu

SEQ ID NO: 4532 - RNA, 21 nt, Homo sapiens
gaagugugccguggugugucu

SEQ ID NO: 4533 - RNA, 21 nt, Homo sapiens
agacacaccacggcacacuuc

SEQ ID NO: 4534 - RNA, 21 nt, Homo sapiens
aagccugcccggcuccucggg

SEQ ID NO: 4535 - RNA, 21 nt, Homo sapiens
cccgaggagccgggcaggcuu

SEQ ID NO: 4536 - RNA, 20 nt, Homo sapiens
guugugucaguuuaucaaac

SEQ ID NO: 4537 - RNA, 20 nt, Homo sapiens
guuugauaaacugacacaac

SEQ ID NO: 4538 - RNA, 22 nt, Homo sapiens
uggucuaggauuguuggaggag

SEQ ID NO: 4539 - RNA, 22 nt, Homo sapiens
cuccuccaacaauccuagacca

SEQ ID NO: 4540 - RNA, 22 nt, Homo sapiens
cacacacugcaauuacuuuugc

SEQ ID NO: 4541 - RNA, 22 nt, Homo sapiens
gcaaaaguaauugcagugugug

SEQ ID NO: 4542 - RNA, 25 nt, Homo sapiens
aggggugguguugggacagcuccgu

SEQ ID NO: 4543 - RNA, 25 nt, Homo sapiens
acggagcugucccaacaccaccccu

SEQ ID NO: 4544 - RNA, 21 nt, Homo sapiens
ugagcuaaaugugugcuggga

SEQ ID NO: 4545 - RNA, 21 nt, Homo sapiens
ucccagcacacauuuagcuca

SEQ ID NO: 4546 - RNA, 23 nt, Homo sapiens
gcgaggaccccucggggucugac

SEQ ID NO: 4547 - RNA, 23 nt, Homo sapiens
gucagaccccgagggguccucgc

SEQ ID NO: 4548 - RNA, 25 nt, Homo sapiens
gcugggcagggcuucugagcuccuu

SEQ ID NO: 4549 - RNA, 25 nt, Homo sapiens
aaggagcucagaagcccugcccagc

SEQ ID NO: 4550 - RNA, 20 nt, Homo sapiens
gggaaaaggaagggggagga

SEQ ID NO: 4551 - RNA, 20 nt, Homo sapiens
uccucccccuuccuuuuccc

SEQ ID NO: 4552 - RNA, 20 nt, Homo sapiens
gcggaaggcggagcggcgga

SEQ ID NO: 4553 - RNA, 20 nt, Homo sapiens
uccgccgcuccgccuuccgc

SEQ ID NO: 4554 - RNA, 18 nt, Homo sapiens
gugaaggcccggcggaga

SEQ ID NO: 4555 - RNA, 18 nt, Homo sapiens
ucuccgccgggccuucac

SEQ ID NO: 4556 - RNA, 19 nt, Homo sapiens
ugagggagugggugggagg

SEQ ID NO: 4557 - RNA, 19 nt, Homo sapiens
ccucccacccacucccuca

SEQ ID NO: 4558 - RNA, 19 nt, Homo sapiens
acuggaauuggagucaaaa

SEQ ID NO: 4559 - RNA, 19 nt, Homo sapiens
uuuugacuccaauuccagu

SEQ ID NO: 4560 - RNA, 19 nt, Homo sapiens
ugagggaguuggguguaua

SEQ ID NO: 4561 - RNA, 19 nt, Homo sapiens
uauacacccaacucccuca

SEQ ID NO: 4562 - RNA, 19 nt, Homo sapiens
ugagggaguggauuguaug

SEQ ID NO: 4563 - RNA, 19 nt, Homo sapiens
cauacaauccacucccuca

SEQ ID NO: 4564 - RNA, 19 nt, Homo sapiens
ggcuggucagaugggagug

SEQ ID NO: 4565 - RNA, 19 nt, Homo sapiens
cacucccaucugaccagcc

SEQ ID NO: 4566 - RNA, 19 nt, Homo sapiens
agcagggcuggggauugca

SEQ ID NO: 4567 - RNA, 19 nt, Homo sapiens
ugcaauccccagcccugcu

SEQ ID NO: 4568 - RNA, 19 nt, Homo sapiens
ugagggaggagguugggua

SEQ ID NO: 4569 - RNA, 19 nt, Homo sapiens
uacccaaccuccucccuca

SEQ ID NO: 4570 - RNA, 19 nt, Homo sapiens
ugaggugguaggauguaga

SEQ ID NO: 4571 - RNA, 19 nt, Homo sapiens
ucuacauccuaccaccuca

SEQ ID NO: 4572 - RNA, 22 nt, Homo sapiens
uccgagccugggucucccucuu

SEQ ID NO: 4573 - RNA, 22 nt, Homo sapiens
aagagggagacccaggcucgga

SEQ ID NO: 4574 - RNA, 22 nt, Homo sapiens
ggggguccccggugcucggauc

SEQ ID NO: 4575 - RNA, 22 nt, Homo sapiens
gauccgagcaccggggaccccc

SEQ ID NO: 4576 - RNA, 22 nt, Homo sapiens
agucauuggaggguuugagcag

SEQ ID NO: 4577 - RNA, 22 nt, Homo sapiens
cugcucaaacccuccaaugacu

SEQ ID NO: 4578 - RNA, 19 nt, Homo sapiens
cagcaggaggugaggggag

SEQ ID NO: 4579 - RNA, 19 nt, Homo sapiens
cuccccucaccuccugcug

SEQ ID NO: 4580 - RNA, 22 nt, Homo sapiens
acucaaaacccuucagugacuu

SEQ ID NO: 4581 - RNA, 22 nt, Homo sapiens
aagucacugaaggguuuugagu

SEQ ID NO: 4582 - RNA, 22 nt, Homo sapiens
agacuucccauuugaagguggc

SEQ ID NO: 4583 - RNA, 22 nt, Homo sapiens
gccaccuucaaaugggaagucu

SEQ ID NO: 4584 - RNA, 23 nt, Homo sapiens
aaacucuacuuguccuucugagu

SEQ ID NO: 4585 - RNA, 23 nt, Homo sapiens
acucagaaggacaaguagaguuu

SEQ ID NO: 4586 - RNA, 21 nt, Homo sapiens
ggcuagcaacagcgcuuaccu

SEQ ID NO: 4587 - RNA, 21 nt, Homo sapiens
agguaagcgcuguugcuagcc

SEQ ID NO: 4588 - RNA, 21 nt, Homo sapiens
acagucugcugagguuggagc

SEQ ID NO: 4589 - RNA, 21 nt, Homo sapiens
gcuccaaccucagcagacugu

SEQ ID NO: 4590 - RNA, 23 nt, Homo sapiens
aucccuugcaggggcuguugggu

SEQ ID NO: 4591 - RNA, 23 nt, Homo sapiens
acccaacagccccugcaagggau

SEQ ID NO: 4592 - RNA, 22 nt, Homo sapiens
gugagucucuaagaaaagagga

SEQ ID NO: 4593 - RNA, 22 nt, Homo sapiens
uccucuuuucuuagagacucac

SEQ ID NO: 4594 - RNA, 21 nt, Homo sapiens
ucuaguaagaguggcagucga

SEQ ID NO: 4595 - RNA, 21 nt, Homo sapiens
ucgacugccacucuuacuaga

SEQ ID NO: 4596 - RNA, 22 nt, Homo sapiens
augcugacauauuuacuagagg

SEQ ID NO: 4597 - RNA, 22 nt, Homo sapiens
ccucuaguaaauaugucagcau

SEQ ID NO: 4598 - RNA, 22 nt, Homo sapiens
guucucccaacguaagcccagc

SEQ ID NO: 4599 - RNA, 22 nt, Homo sapiens
gcugggcuuacguugggagaac

SEQ ID NO: 4600 - RNA, 21 nt, Homo sapiens
uggguuuacguugggagaacu

SEQ ID NO: 4601 - RNA, 21 nt, Homo sapiens
aguucucccaacguaaaccca

SEQ ID NO: 4602 - RNA, 19 nt, Homo sapiens
gugucugcuuccuguggga

SEQ ID NO: 4603 - RNA, 19 nt, Homo sapiens
ucccacaggaagcagacac

SEQ ID NO: 4604 - RNA, 23 nt, Homo sapiens
cuaauaguaucuaccacaauaaa

SEQ ID NO: 4605 - RNA, 23 nt, Homo sapiens
uuuauugugguagauacuauuag

SEQ ID NO: 4606 - RNA, 23 nt, Homo sapiens
ugugcuugcucgucccgcccgca

SEQ ID NO: 4607 - RNA, 23 nt, Homo sapiens
ugcgggcgggacgagcaagcaca

SEQ ID NO: 4608 - RNA, 25 nt, Homo sapiens
agggaucgcgggcggguggcggccu

SEQ ID NO: 4609 - RNA, 25 nt, Homo sapiens
aggccgccacccgcccgcgaucccu

SEQ ID NO: 4610 - RNA, 21 nt, Homo sapiens
augauccaggaaccugccucu

SEQ ID NO: 4611 - RNA, 21 nt, Homo sapiens
agaggcagguuccuggaucau

SEQ ID NO: 4612 - RNA, 19 nt, Homo sapiens
aguguggcuuucuuagagc

SEQ ID NO: 4613 - RNA, 19 nt, Homo sapiens
gcucuaagaaagccacacu

SEQ ID NO: 4614 - RNA, 19 nt, Homo sapiens
ucuaggcugguacugcuga

SEQ ID NO: 4615 - RNA, 19 nt, Homo sapiens
ucagcaguaccagccuaga

SEQ ID NO: 4616 - RNA, 19 nt, Homo sapiens
aagcagcugccucugaggc

SEQ ID NO: 4617 - RNA, 19 nt, Homo sapiens
gccucagaggcagcugcuu

SEQ ID NO: 4618 - RNA, 21 nt, Homo sapiens
guggcugcacucacuuccuuc

SEQ ID NO: 4619 - RNA, 21 nt, Homo sapiens
gaaggaagugagugcagccac

SEQ ID NO: 4620 - RNA, 21 nt, Homo sapiens
aggaggcagcgcucucaggac

SEQ ID NO: 4621 - RNA, 21 nt, Homo sapiens
guccugagagcgcugccuccu

SEQ ID NO: 4622 - RNA, 21 nt, Homo sapiens
aauggcgccacuaggguugug

SEQ ID NO: 4623 - RNA, 21 nt, Homo sapiens
cacaacccuaguggcgccauu

SEQ ID NO: 4624 - RNA, 25 nt, Homo sapiens
caacccuaggagagggugccauuca

SEQ ID NO: 4625 - RNA, 25 nt, Homo sapiens
ugaauggcacccucuccuaggguug

SEQ ID NO: 4626 - RNA, 22 nt, Homo sapiens
auaauacaugguuaaccucuuu

SEQ ID NO: 4627 - RNA, 22 nt, Homo sapiens
aaagagguuaaccauguauuau

SEQ ID NO: 4628 - RNA, 21 nt, Homo sapiens
aauauuauacagucaaccucu

SEQ ID NO: 4629 - RNA, 21 nt, Homo sapiens
agagguugacuguauaauauu

SEQ ID NO: 4630 - RNA, 25 nt, Homo sapiens
ggcggagggaaguagguccguuggu

SEQ ID NO: 4631 - RNA, 25 nt, Homo sapiens
accaacggaccuacuucccuccgcc

SEQ ID NO: 4632 - RNA, 24 nt, Homo sapiens
ugccugggucucuggccugcgcgu

SEQ ID NO: 4633 - RNA, 24 nt, Homo sapiens
acgcgcaggccagagacccaggca

SEQ ID NO: 4634 - RNA, 22 nt, Homo sapiens
aggcggggcgccgcgggaccgc

SEQ ID NO: 4635 - RNA, 22 nt, Homo sapiens
gcggucccgcggcgccccgccu

SEQ ID NO: 4636 - RNA, 22 nt, Homo sapiens
gguggcccggccgugccugagg

SEQ ID NO: 4637 - RNA, 22 nt, Homo sapiens
ccucaggcacggccgggccacc

SEQ ID NO: 4638 - RNA, 20 nt, Homo sapiens
accaggaggcugaggccccu

SEQ ID NO: 4639 - RNA, 20 nt, Homo sapiens
aggggccucagccuccuggu

SEQ ID NO: 4640 - RNA, 20 nt, Homo sapiens
gucccugaguguauguggug

SEQ ID NO: 4641 - RNA, 20 nt, Homo sapiens
caccacauacacucagggac

SEQ ID NO: 4642 - RNA, 21 nt, Homo sapiens
uccgguucucagggcuccacc

SEQ ID NO: 4643 - RNA, 21 nt, Homo sapiens
gguggagcccugagaaccgga

SEQ ID NO: 4644 - RNA, 23 nt, Homo sapiens
aggaagcccuggaggggcuggag

SEQ ID NO: 4645 - RNA, 23 nt, Homo sapiens
cuccagccccuccagggcuuccu

SEQ ID NO: 4646 - RNA, 20 nt, Homo sapiens
cuguaugcccucaccgcuca

SEQ ID NO: 4647 - RNA, 20 nt, Homo sapiens
ugagcggugagggcauacag

SEQ ID NO: 4648 - RNA, 23 nt, Homo sapiens
uggugcggagagggcccacagug

SEQ ID NO: 4649 - RNA, 23 nt, Homo sapiens
cacugugggcccucuccgcacca

SEQ ID NO: 4650 - RNA, 22 nt, Homo sapiens
caacuagacugugagcuucuag

SEQ ID NO: 4651 - RNA, 22 nt, Homo sapiens
cuagaagcucacagucuaguug

SEQ ID NO: 4652 - RNA, 23 nt, Homo sapiens
aaggagcuuacaaucuagcuggg

SEQ ID NO: 4653 - RNA, 23 nt, Homo sapiens
cccagcuagauuguaagcuccuu

SEQ ID NO: 4654 - RNA, 22 nt, Homo sapiens
gggacccagggagagacguaag

SEQ ID NO: 4655 - RNA, 22 nt, Homo sapiens
cuuacgucucucccuggguccc

SEQ ID NO: 4656 - RNA, 22 nt, Homo sapiens
gcagagugcaaacaauuuugac

SEQ ID NO: 4657 - RNA, 22 nt, Homo sapiens
gucaaaauuguuugcacucugc

SEQ ID NO: 4658 - RNA, 20 nt, Homo sapiens
cggcucugggucugugggga

SEQ ID NO: 4659 - RNA, 20 nt, Homo sapiens
uccccacagacccagagccg

SEQ ID NO: 4660 - RNA, 22 nt, Homo sapiens
gcagcagggugaaacugacaca

SEQ ID NO: 4661 - RNA, 22 nt, Homo sapiens
ugugucaguuucacccugcugc

SEQ ID NO: 4662 - RNA, 21 nt, Homo sapiens
uggaggagaaggaaggugaug

SEQ ID NO: 4663 - RNA, 21 nt, Homo sapiens
caucaccuuccuucuccucca

SEQ ID NO: 4664 - RNA, 23 nt, Homo sapiens
ucugcucauaccccaugguuucu

SEQ ID NO: 4665 - RNA, 23 nt, Homo sapiens
agaaaccaugggguaugagcaga

SEQ ID NO: 4666 - RNA, 23 nt, Homo sapiens
ugcaccaugguugucugagcaug

SEQ ID NO: 4667 - RNA, 23 nt, Homo sapiens
caugcucagacaaccauggugca

SEQ ID NO: 4668 - RNA, 23 nt, Homo sapiens
cugggaucuccggggucuugguu

SEQ ID NO: 4669 - RNA, 23 nt, Homo sapiens
aaccaagaccccggagaucccag

SEQ ID NO: 4670 - RNA, 22 nt, Homo sapiens
ugagaccucuggguucugagcu

SEQ ID NO: 4671 - RNA, 22 nt, Homo sapiens
agcucagaacccagaggucuca

SEQ ID NO: 4672 - RNA, 23 nt, Homo sapiens
uccaguaccacgugucagggcca

SEQ ID NO: 4673 - RNA, 23 nt, Homo sapiens
uggcccugacacgugguacugga

SEQ ID NO: 4674 - RNA, 22 nt, Homo sapiens
ggagacugaugaguucccggga

SEQ ID NO: 4675 - RNA, 22 nt, Homo sapiens
ucccgggaacucaucagucucc

SEQ ID NO: 4676 - RNA, 21 nt, Homo sapiens
gcaggaacuugugagucuccu

SEQ ID NO: 4677 - RNA, 21 nt, Homo sapiens
aggagacucacaaguuccugc

SEQ ID NO: 4678 - RNA, 22 nt, Homo sapiens
cugcccuggcccgagggaccga

SEQ ID NO: 4679 - RNA, 22 nt, Homo sapiens
ucggucccucgggccagggcag

SEQ ID NO: 4680 - RNA, 21 nt, Homo sapiens
ccuggaaacacugagguugug

SEQ ID NO: 4681 - RNA, 21 nt, Homo sapiens
cacaaccucaguguuuccagg

SEQ ID NO: 4682 - RNA, 22 nt, Homo sapiens
uauaccucaguuuuaucaggug

SEQ ID NO: 4683 - RNA, 22 nt, Homo sapiens
caccugauaaaacugagguaua

SEQ ID NO: 4684 - RNA, 22 nt, Homo sapiens
uggugguuuacaaaguaauuca

SEQ ID NO: 4685 - RNA, 22 nt, Homo sapiens
ugaauuacuuuguaaaccacca

SEQ ID NO: 4686 - RNA, 22 nt, Homo sapiens
uggauuucuuugugaaucacca

SEQ ID NO: 4687 - RNA, 22 nt, Homo sapiens
uggugauucacaaagaaaucca

SEQ ID NO: 4688 - RNA, 21 nt, Homo sapiens
uccucuucucccuccucccag

SEQ ID NO: 4689 - RNA, 21 nt, Homo sapiens
cugggaggagggagaagagga

SEQ ID NO: 4690 - RNA, 20 nt, Homo sapiens
guagaggagauggcgcaggg

SEQ ID NO: 4691 - RNA, 20 nt, Homo sapiens
cccugcgccaucuccucuac

SEQ ID NO: 4692 - RNA, 22 nt, Homo sapiens
gugaacgggcgccaucccgagg

SEQ ID NO: 4693 - RNA, 22 nt, Homo sapiens
ccucgggauggcgcccguucac

SEQ ID NO: 4694 - RNA, 22 nt, Homo sapiens
gacugacaccucuuugggugaa

SEQ ID NO: 4695 - RNA, 22 nt, Homo sapiens
uucacccaaagaggugucaguc

SEQ ID NO: 4696 - RNA, 21 nt, Homo sapiens
uacucaaaaagcugucaguca

SEQ ID NO: 4697 - RNA, 21 nt, Homo sapiens
ugacugacagcuuuuugagua

SEQ ID NO: 4698 - RNA, 21 nt, Homo sapiens
uuaauaucggacaaccauugu

SEQ ID NO: 4699 - RNA, 21 nt, Homo sapiens
acaaugguuguccgauauuaa

SEQ ID NO: 4700 - RNA, 22 nt, Homo sapiens
auccgcgcucugacucucugcc

SEQ ID NO: 4701 - RNA, 22 nt, Homo sapiens
ggcagagagucagagcgcggau

SEQ ID NO: 4702 - RNA, 20 nt, Homo sapiens
gugagucaggguggggcugg

SEQ ID NO: 4703 - RNA, 20 nt, Homo sapiens
ccagccccacccugacucac

SEQ ID NO: 4704 - RNA, 22 nt, Homo sapiens
ugcccuuaaaggugaacccagu

SEQ ID NO: 4705 - RNA, 22 nt, Homo sapiens
acuggguucaccuuuaagggca

SEQ ID NO: 4706 - RNA, 22 nt, Homo sapiens
ucuucucuguuuuggccaugug

SEQ ID NO: 4707 - RNA, 22 nt, Homo sapiens
cacauggccaaaacagagaaga

SEQ ID NO: 4708 - RNA, 22 nt, Homo sapiens
aaauuauuguacaucggaugag

SEQ ID NO: 4709 - RNA, 22 nt, Homo sapiens
cucauccgauguacaauaauuu

SEQ ID NO: 4710 - RNA, 22 nt, Homo sapiens
uucaacggguauuuauugagca

SEQ ID NO: 4711 - RNA, 22 nt, Homo sapiens
ugcucaauaaauacccguugaa

SEQ ID NO: 4712 - RNA, 22 nt, Homo sapiens
cuauacaacuuacuacuuuccc

SEQ ID NO: 4713 - RNA, 22 nt, Homo sapiens
gggaaaguaguaaguuguauag

SEQ ID NO: 4714 - RNA, 22 nt, Homo sapiens
ugagguaguaaguuguauuguu

SEQ ID NO: 4715 - RNA, 22 nt, Homo sapiens
aacaauacaacuuacuaccuca

SEQ ID NO: 4716-4733 - skipped (18 entries)

SEQ ID NO: 4734 - DNA, 3131 bp, Adeno-associated virus
gcggccgcgaattcgcccttggctgcgtcaactggaccaatgagaactttcccttcaatgattgcgtcgacaagatggtgatctggtgggaggagggcaagatgacggccaaggtcgtggagtccgccaaggccattctcggcggcagcaaggtgcgcgtggaccaaaagtgcaagtcgtccgcccagatcgaccccacccccgtgatcgtcacctccaacaccaacatgtgcgccgtgattgacgggaacagcaccaccttcgagcaccagcagcctctccaggaccggatgtttaagttcgaactcacccgccgtctggagcacgactttggcaaggtgacaaagcaggaagtcaaagagttcttccgctgggccagtgatcacgtgaccgaggtggcgcatgagttttacgtcagaaagggcggagccagcaaaagacccgcccccgatgacgcggataaaagcgagcccaagcgggcctgcccctcagtcgcggatccatcgacgtcagacgcggaaggagctccggtggactttgccgacaggtaccaaaacaaatgttctcgtcacgcgggcatgcttcagatgctgtttccctgcaaaacgtgcgagagaatgaatcggaatttcaacatttgcttcacacacggggtcagagactgctcagagtgtttccccggcgtgtcagaatctcaaccggtcgtcagaaagaggacgtatcggaaactccgtgcgattcatcatctgctggggcgggctcccgagattgcttgctcggcctgcgatctggtcaacgtggacctggatgactgtgtttctgagcaataaatgacttaaaccaggtatggctgccgatggttatcttccagattggctcgaggacaacctctctgagggcattcgcgagtggtgggcgctgaaacctggagccccgaagcccaaagccaaccagcaaaagcaggacgacggccggggtctggtgcttcctggctacaagtacctcggacccttcaacggactcgacaagggggagcccgtcaacgcggcggacgcagcggccctcgagcacgacaaggcttacgaccagcagctgcaggcgggtgacaatccgtacctgcggtataaccacgccgacgccgagtttcaggagcgtctgcaagaagatacgtcttttgggggcaacctcgggcgagcagtcttccaggccaagaagcgggttctcgaacctctcggtctggttgaggaaggcgctaagacggctcctggaaagaagagaccggtagagccatcaccccagcgttctccagactcctctacgggcatcggcaagaaaggccaacagcccgccagaaaaagactcaattttggtcagactggcgactcagagtcagttccagaccctcaacctctcggagaacctccagcagcgccctctggtgtgggacctaatacaatggctgcaggcggtggcgcaccaatggcagacaataacgaaggcgccgacggagtgggtagttcctcgggaaattggcattgcgattccacatggctgggcgacagagtcatcaccaccagcacccgaacctgggccctgcccacctacaacaaccacctctacaagcaaatctccaacgggacatcgggaggagccaccaacgacaacacctacttcggctacagcaccccctgggggtattttgactttaacagattccactgccacctttcaccacgtgactggcagcgactcatcaacaacaactggggattccgacccaagagactcagcttcaagctcttcaacatccaggtcaaggaggtcacgcagaatgaaggcaccaagaccatcgccaataacctcaccagcaccatccaggtgtttacggactcggagtaccagctgccgtacgttctcggctctgtccaccagggctgcctgcctccgttcccggcggacgtgttcatgattccccagtacggctacctaacactcaacaacggtagtcaggccgtgggacgctcctccttctactgcctggaatactttccttcgcagatgctgagaaccggcaacaacttccagtttacttacaccttcgaggacgtgcctttccacagcagctacgcccacagctagagcttggaccggctgatgaatcctctgattgaccagtacctgtactacttgtctcggactcaaacaacaggaggcacggcaaatacgcagactctgggcttcagccaaggtgggcctaatacaatggccaatcaggcaaagaactggctgccaggaccctgttaccgccaacaacgcgtctcaacgacaaccgggcaaaacaacaatagcaactttgcctggactgctgggaccaaataccatctgaatggaagaaattcattggctaatcctggcatcgctatggcaacacacaaagacgacgaggagcgtttttttcccagtaacgggatcctgatttttggcaaacaaaatgctgccagagacaatgcggattacagcgatgtcatgctcaccagcgaggaagaaatcaaaaccactaaccctgtggctacagaggaatacggtatcgtggcagataacttgcagcagcaaaacacggctcctcaaattggaactgtcaacagccagggggccttacccggtatggtctggcagaaccgggacgtgtacctgcagggtcccatctgggccaagattcctcacacggacggcaacttccacccgtctccgctgatgggcggctttggcctgaaacatcctccgcctcagatcctgatcaagaacacgcctgtacctgcggatcctccgaccaccttcaaccagtcaaagctgaactctttcatcacgcaatacagcaccggacaggtcagcgtggaaattgaatgggagctgcagaaggaaaacagcaagcgctggaaccccgagatccagtacacctccaactactacaaatctataagtgtggactttgctgttaatacagaaggcgtgtactctgaaccccgccccattggcacccgttacctcacccgtaatctgtaattgcctgttaatcaataaaccggttgattcgtttcagttgaactttggtctctgcgaagggcgaattc

SEQ ID NO: 4735 - protein, 728 aa, Adeno-associated virus
MAADGYLPDWLEDNLSEGIREWWDLKPGAPKPKANQQKQDDGRGLVLPGYKYLGPFNGLDKGEPVNEADAAALEHDKAYDKQLEQGDNPYLKYNHADAEFQERLQEDTSFGGNLGRAVFQAKKRVLEPLGLVEEGAKTAPGKKRPIESPDSSTGIGKKGQQPAKKKLNFGQTGDSESVPDPQPLGEPPAAPSGLGSGTMAAGGGAPMADNNEGADGVGNASGNWHCDSTWLGDRVITTSTRTWALPTYNNHLYKQISSQSGATNDNHFFGYSTPWGYFDFNRFHCHFSPRDWQRLINNNWGFRPRKLRFKLFNIQVKEVTTNDGVTTIANNLTSTIQVFSDSEYQLPYVLGSAHQGCLPPFPADVFMIPQYGYLTLNNGSQSMGRSSFYCLEYFPSQMLRTGNNFEFSYTFEEVPFHSSYAHSQSLDRLMNPLIDQYLYYLARTQSTTGSTRELQFHQAGPNTMAEQSKNWLPGPCYRQQRLSKNIDSNNNSNFAWTGATKYHLNGRNSLTNPGVAMATNKDDEGQFFPINGVLVFGKTGAANKTTLENVLMTSEEEIKTTNPVATEEYGVVSSNLQSSTAGPQTQTVNSQGALPGMVWQNRDVYLQGPIWAKIPHTDGNFHPSPLMGGFGLKHPPPQILIKNTPVPANPPGVFTPALFASFITQYSTGQVSVEIEWELQKENSKRWNPEIQYTSNYAKSNNVEFAVNNEGVYTEPRPIGTRYLTRNL

SEQ ID NO: 4736 - protein, 644 aa, Adeno-associated virus
  MOD_RES (434)..(434): Any amino acid
KAYDQQLKAGDNPYLRYNHADAEFQERLQEDTSFGGNLGRAVFQAKKRVLEPLGLVETPAKTAPGKKRPVDSPDSTSGIGKKGQQPAKKRLNFGQTGDSESVPDPQPIGEPPAGPSGLGSGTMAAGGGAPMADNNEGADGVGNASGNWHCDSTWLGDRVITTSTRTWALPTYNNHLYKQISSQSAGSTNDNVYFGYSTPWGYFDFNRFHCHFSPRDWQRLINNNWGFRPKKLNFKLFNIQVKEVTTNDGVTTIANNLTSTVQVFSDSEYQLPYVLGSAHQGCLPPFPADVFMIPQYGYLTLNNGSQSVGRSSFYCLEYFPSQMLRTGNNFTFSYTFEDVPFHSSYAHSQSLDRLMNPLIDQYLYYLARTQSNAGGTAGNRELQFYQGGPTTMAEQAKNWLPGPCFRQQRVSKTLDQNNNSNFAWTGATKYHLNXRNSLVNPGVAMATHKDDEERFFPSSGVLIFGKTGAANKTTLENVLMTNEEEIRPTNPVATEEYGIVSSNLQAASTAAQTQVVNNQGALPGMVWQNRDVYLQGPIWAKIPHTDGNFHPSPLMGGFGLKHPPPQILIKNTPVPANPPEVFTPAKFASFITQYSTGQVSVEIEWELQKENSKRWNPEIQYTSNFDKQTGVDFAVDSQGVYSEP

SEQ ID NO: 4737 - DNA, 1933 bp, Adeno-associated virus
caaggcctacgaccagcagctcaaagcgggtgacaatccgtacctgcggtataaccacgccgacgccgagtttcaggagtgtcttcaagaagatacgtcttttgggggcaacctcgggcgagcagtcttccaggccaaaaagcgggttctcgaacctcttggtctggttgagacgccagctaagacggcacctggaaagaagcgaccggtagactcgccagactccacctcgggcatcggcaagaaaggccagcagcccgcgaaaaagagactcaactttgggcagactggcgactcagagtcagtccccgaccctcaaccaatcggagaaccaccagcaggcccctctggtctgggatctggtacaatggttgcaggcggtggcgcaccaatggctgacaataacgagggcgccgacggagtgggtaatgcctcaggaaattggcattgcgattccacatggctgggcgacagagtcatcaccaccagcacccgaacctgggccctgcccacctacaacaaccacctctacaagcaaatctccagtcagtcagcagggagcaccaacgataacgtctatttcggctacagcaccccctgggggtattttgacttcaacagattccattgccacttctcaccacgtgactggcagcgacttatcaacaacaactggggattccggcccaagaagctcaacttcaagctcttcaacatccaggtcaaggaggtcacgacgaatgacggtgtcacaaccatcgctaataaccttaccagcacggttcaggtcttttcggactcggaatatcaactgccgtacgtcctcggctccgcgcaccagggctgcctgcctccgttcccggcagacgtgttcatgattccgcagtacggatacctgactctgaacaatggcagccaatcggtaggccgttcctccttctactgcctggagtactttccttctcagatgctgagaacgggcaacaacttcacctttagctacaccttcgaggacgtgcctttccacagcagctacgcgcacagccagagtctggaccggctgatgaatcccctcatcgaccagtacctgtactacttggccagaacacagagcaacgcaggaggtactgctggcaatcgggaactgcagttttatcagggcggacctaccaccatggccgaacaagcaaagaactggctgcccggaccttgcttccggcaacagagagtatccaagacgctggatcaaaataacaacagcaactttgcctggactggtgccacaaaataccatttaaatggaagaaattcattggttaatcccggtgtcgccatggcaacccacaaggacgacgaggaacgcttctccccttcgagcggagttctaatttttggcaaaactggagcagctaataaaactacattagaaaacgtgctcatgacaaatgaagaagaaattcgtcctaccaacccggtagctaccgaggaatacgggattgtaagcagcaacttgcaggcggctagcaccgcagcccagacacaagttgttaacaaccagggagccttacctggcatggtctggcagaaccgggacgtgtacctgcaaggtcccatttgggccaagattcctcacacggacggcaactttcacccgtctcctctaatgggtggctttggactgaaacacccgcctccccagatcctgatcaaaaacacgccggtacctgctaatcctccagaagtgtttactcctgccaagtttgcttccttcatcacgcagtacagcaccgggcaagtcagcgttgagatcgagtgggagctgcagaaagagaacagcaagcgctggaacccagagattcagtacacctccaactttgacaaacagactggagtggactttgctgttgacagccagggtgtttactctgagcct

SEQ ID NO: 4738 - protein, 644 aa, Adeno-associated virus
KAYDQQLKAGDNPYLRYNHADAEFQECLQEDTSFGGNLGRAVFQAKKRVLEPLGLVETPAKTAPGKKRPVDSPDSTSGIGKKGQQPAKKRLNFGQTGDSESVPDPQPIGEPPAGPSGLGSGTMVAGGGAPMADNNEGADGVGNASGNWHCDSTWLGDRVITTSTRTWALPTYNNHLYKQISSQSAGSTNDNVYFGYSTPWGYFDFNRFHCHFSPRDWQRLINNNWGFRPKKLNFKLFNIQVKEVTTNDGVTTIANNLTSTVQVFSDSEYQLPYVLGSAHQGCLPPFPADVFMIPQYGYLTLNNGSQSVGRSSFYCLEYFPSQMLRTGNNFTFSYTFEDVPFHSSYAHSQSLDRLMNPLIDQYLYYLARTQSNAGGTAGNRELQFYQGGPTTMAEQAKNWLPGPCFRQQRVSKTLDQNNNSNFAWTGATKYHLNGRNSLVNPGVAMATHKDDEERFSPSSGVLIFGKTGAANKTTLENVLMTNEEEIRPTNPVATEEYGIVSSNLQAASTAAQTQVVNNQGALPGMVWQNRDVYLQGPIWAKIPHTDGNFHPSPLMGGFGLKHPPPQILIKNTPVPANPPEVFTPAKFASFITQYSTGQVSVEIEWELQKENSKRWNPEIQYTSNFDKQTGVDFAVDSQGVYSEP

SEQ ID NO: 4739 - DNA, 1933 bp, Adeno-associated virus
caaggcctacgaccagcagctcaaagcgggtgacaatccgtacctgcggtataaccacgccgacgccgagtttcaggagcgtcttcaagaagatacgtcttttgggggcaacctcgggcgagcagtcttccaggccaaaaagcgggttctcgaacctcttggtctggttgagacgccagctaagacggcacctggaaagaagcgaccggtagactcgccagactccacctcgggcatcggcaagaaaggccagcagcccgcgaaaaagagactcaactttgggcagactggcgactcagagccagtccccgaccctcaaccaatcggagaaccaccagcaggcccctctggtctgggatctggtacaatggctgcaggcggtggcgcaccaatggctgacaataacgagggcgccgacggagtgggtaatgcctcaggaaattggcattgcgattccacacggctgggcgacagagtcatcaccaccagcacccgaacctgggccctgcccacctacaacaaccacctctacaagcaaatctccagtcagtcagcagggagcaccaacgataacgtctatttcggctacagcaccccctgggggtattttgacttcaacagattccattgccacttctcaccacgtgactggcagcgacttatcaacaacaactggggattccggcccaagaagctcaacttcaagctcttcaacatccaggtcaaggaggtcacgacgaatgacggcgtcacaaccatcgctaataaccttaccagcacggttcaggtcttttcggactcggaatatcaactgccgtacgtcctcggctccgcgcaccagggctgcctgcctccgttcccggcagacgtgttcatgattccgcagtacggatacctgactctgaacaatggcagccaatcggtaggccgttcctccttctactgcctggagtactttccttctcagatgctgagaacgggcaacaacttcacctttagctacaccttcgaggacgtgcctttccacagcagctacgcgcacagccagagtctgggccggctgatgaatcccctcatcgaccagtacctgtactacttggccagaacacagagcaacgcaggaggtactgctggcaatcgggaactgcagttttatcagggcggacctaccaccatggccgaacaagcaaagaactggctgcccggaccttgcttccggcaacagagagtatccaagacgctggatcaaaataacaacagcaactttgcctggactggtgccacaaaataccatttaaatggaagaaattcattggttaatcccggtgtcgccatggcaacccacaaggacgacgaggaacgcttcttcccttcgagcggagttctaatttttggcaaaactggagcagctaataaaactacattagaaaacgtgctcatgacaaatgaagaagaaattcgtcctaccaacccggtagctaccgaggaatacgggattgtaagcagcaacttgcaggcggctagcaccgcagcccagacacaagttgttaacaaccagggagccttacctggcatggtctggcagaaccgggacgtgtacctgcaaggtcccatttgggccaagattcctcacacggacggcaactttcacccgtctcctctaatgggtggctttggactgaaacacccgcctccccagatcctgatcaaaaacacaccggtacctgctaatcctccagaagtgtttactcctgccaagtttgcttccttcatcacgcagtacagcaccgggcaagtcagcgttgagatcgaatgggagctgcagaaagagaacagcaagcgctggaacccagagattcagtacacctccaactttgacaaacagactggagtggactttgctgttgacagccagggtgtttactctgagcct

SEQ ID NO: 4740 - protein, 644 aa, Adeno-associated virus
KAYDQQLKAGDNPYLRYNHADAEFQERLQEDTSFGGNLGRAVFQAKKRVLEPLGLVETPAKTAPGKKRPVDSPDSTSGIGKKGQQPAKKRLNFGQTGDSEPVPDPQPIGEPPAGPSGLGSGTMAAGGGAPMADNNEGADGVGNASGNWHCDSTRLGDRVITTSTRTWALPTYNNHLYKQISSQSAGSTNDNVYFGYSTPWGYFDFNRFHCHFSPRDWQRLINNNWGFRPKKLNFKLFNIQVKEVTTNDGVTTIANNLTSTVQVFSDSEYQLPYVLGSAHQGCLPPFPADVFMIPQYGYLTLNNGSQSVGRSSFYCLEYFPSQMLRTGNNFTFSYTFEDVPFHSSYAHSQSLGRLMNPLIDQYLYYLARTQSNAGGTAGNRELQFYQGGPTTMAEQAKNWLPGPCFRQQRVSKTLDQNNNSNFAWTGATKYHLNGRNSLVNPGVAMATHKDDEERFFPSSGVLIFGKTGAANKTTLENVLMTNEEEIRPTNPVATEEYGIVSSNLQAASTAAQTQVVNNQGALPGMVWQNRDVYLQGPIWAKIPHTDGNFHPSPLMGGFGLKHPPPQILIKNTPVPANPPEVFTPAKFASFITQYSTGQVSVEIEWELQKENSKRWNPEIQYTSNFDKQTGVDFAVDSQGVYSEP

SEQ ID NO: 4741 - DNA, 1933 bp, Adeno-associated virus; identical to SEQ ID NO: 4739

SEQ ID NO: 4742 - protein, 644 aa, Adeno-associated virus; identical to SEQ ID NO: 4740

SEQ ID NO: 4743 - DNA, 1933 bp, Adeno-associated virus
caaggcctacgaccagcagctcaaagcgggtgacaatccgtacctgcggtataaccacgccgacgccgagtttcaggagcgtcttcaagaagatacgtcttttgggggcaacctcgggcgagcagtcttccaggccaaaaagcgggttctcgaacctcttggtctggttgagacgccagctaagacggcacctggaaagaagcgaccggtagactcgccagactccacctcgggcatcggcaagaaaggccagcagcccgcgaaaaagagactcaactttgggcagactggcgactcagagtcagtccccgaccctcaaccaatcggagaaccaccagcaggcccctctggtctgggatctggtacaatggctgcaggcggtggcgcaccaatggctgacaatagcgagggcgccgacggagtgggtaatgcctcaggaaattggcattgcgattccacatggctgggcgacagagtcatcaccaccagcacccgaacctgggccctgcccacctacaacaaccacctctacaagcaaatctccagtcagtcagcagggagcaccaacgataacgtctatttcggctacagcaccccctgggggtattttgacttcaacagattccattgccacttctcaccacgtgactggcagcgacttatcaacaacaactggggattccggcccaagaagctcaacttcaagctcttcaacatccaggtcaaggaggtcacgacgaatgacggtgtcacaaccatcgctaataaccttaccagcacggttcaggtcttttcggactcggaatatcaactgccgtacgtcctcggctccgcgcaccagggctgcctgcctccgttcccggcagacgtgttcatgattccgcagtacggatacctgactctgaacaatggcagccaatcggtaggccgttcctccttctactgcctggagtactttccttctcagatgctgagaacgggcaacaacttcacctttagctacaccttcgaggacgtgcctttccacagcagctacgcgcacagccagagtctggaccggctgatgaatcccctcatcgaccagtacctgtactacttggccagaacacagagcaacgcaggaggtactgctggcaatcgggaactgcagttttatcagggcggacctaccaccatggccgaacaagcaaagaactggctgcccggaccttgcttccggcaacagagagtatccaagacgctggatcaaaataacaacagcaactttgcctggactggtgccacaaaataccatttaaatggaagaaattcattggttaatcccggtgtcgccatggcaacccacaaggacgacgaggaacgcttcttcccttcgagcggagttctaatttttggcaaaactggagcagctaataaaactacattagaaaacgtgctcatgacaaatgaagaagaaattcgtcctaccaacccggtagctaccgaggaatacgggattgtaagcagcaacttgcaggcggctagcaccgcagcccagacacaagttgttaacaaccagggagccttacctggcatggtctggcagaaccgggacgtgtacctgcaaggtcccatttgggccaagattcctcacacggacggcaactttcacccgtctcctctaatgggtggctttggactgaaacacccgcctccccagatcctgatcaaaaacacaccggtacctgctaatcctccagaagtgtttactcctgccaagcttgcttccttcatcacgcagtacagcaccgggcaagtcagcgttgagatcgagtgggagctgcagaaagagaacagcaagcgctggaacccagagattcagtacacctccaactttgacaaacagactggagtggactttgctgttgacagccagggtgtttactctgagcct

SEQ ID NO: 4744 - protein, 644 aa, Adeno-associated virus
KAYDQQLKAGDNPYLRYNHADAEFQERLQEDTSFGGNLGRAVFQAKKRVLEPLGLVETPAKTAPGKKRPVDSPDSTSGIGKKGQQPAKKRLNFGQTGDSESVPDPQPIGEPPAGPSGLGSGTMAAGGGAPMADNSEGADGVGNASGNWHCDSTWLGDRVITTSTRTWALPTYNNHLYKQISSQSAGSTNDNVYFGYSTPWGYFDFNRFHCHFSPRDWQRLINNNWGFRPKKLNFKLFNIQVKEVTTNDGVTTIANNLTSTVQVFSDSEYQLPYVLGSAHQGCLPPFPADVFMIPQYGYLTLNNGSQSVGRSSFYCLEYFPSQMLRTGNNFTFSYTFEDVPFHSSYAHSQSLDRLMNPLIDQYLYYLARTQSNAGGTAGNRELQFYQGGPTTMAEQAKNWLPGPCFRQQRVSKTLDQNNNSNFAWTGATKYHLNGRNSLVNPGVAMATHKDDEERFFPSSGVLIFGKTGAANKTTLENVLMTNEEEIRPTNPVATEEYGIVSSNLQAASTAAQTQVVNNQGALPGMVWQNRDVYLQGPIWAKIPHTDGNFHPSPLMGGFGLKHPPPQILIKNTPVPANPPEVFTPAKLASFITQYSTGQVSVEIEWELQKENSKRWNPEIQYTSNFDKQTGVDFAVDSQGVYSEP

SEQ ID NO: 4745 - DNA, 1933 bp, Adeno-associated virus
caaggcctacgaccagcagctcaaagcgggtgacaatccgtacctgcggtataaccacgccgacgccgagtttcaggagcgtcttcaagaagatacgtcttttgggggcaacctcgggcgagcagtcttccaggccaaaaagcgggttctcgaacctcttggtctggttgagacgccagctaagacggcacctggaaagaagcgaccggtagactcgccagactccacctcgggcatcggcaagaaaggccagcagcccgcgaaaaagagactcaactttgggcagactggcgactcagagtcagtccccgaccctcaaccaatcggagaaccaccagcaggcccctctggtctgggatctggtacaatggctgcaggcggtggcgcaccaatggctgacaataacgagggcgccgacggagtgggtaatgcctcaggaaattggcattgcgattccacatggctgggcgacagagtcatcaccaccagcacccgaacctgggccctgcccacctacaacaaccacctctacaagcaaatctccagtcagtcagcagggagcaccaacgataacgtctatttcggctacagcaccccctgggggtattttgacttcaacagattccattgccacttctcaccacgtgactggcagcgacttatcaacaacaactggggattccggcccaagaagctcaacttcaagctcttcaacatccaggtcaaggaggtcacgacgaatgacggcgtcacaaccatcgctaataaccttaccagcacggttcaggtcttttcggacccggaatatcaactgccgtacgtcctcggctccgcgcaccagggctgcctgcctccgttcccggcagacgtgttcatgattccgcagtacggatacctgactctgaacaatggcagccaatcggtaggccgttcctccttctactgcctggagtactttccttctcagatgctgagaacgggcaacaacttcacctttagctacaccttcgaggacgtgcctttccacagcagctacgcgcacagccagagtctggaccggctgatgaatcccctcatcgaccagtacctgtactacttggccagaacacagagcaacgcaggaggtactgctggcaatcgggaactgcagttttatcagggcggacctaccaccatggccgaacaagcaaagaactggctgcccggaccttgcttccggcaacagagagtatccaagacgctggatcaaaataacaacagcaactttgcctggactggtgccacaaaataccatttaaatggaagaaattcattggttaatcccggtgtcgccatggcaacccacaaggacgacgaggaacgcttcttcccttcgagcggagttctaatttttggcaaaactggagcagctaataaaactacattagaaaacgtgctcatgacaaatgaagaagaaattcgtcctaccaacccggtagctaccgaggaatacgggattgtaagcagcaacttgcaggcggctagcaccgcagcccagacacaagttgttaacaaccagggagccttacctggcatggtctggcagaaccgggacgtgtacctgcaaggtcccatttgggccaagattcctcacacggacggcaactttcacccgtctcctctaatgggtggctttggactgaaacacccgcctccccagatcctgatcaaaaacacaccggtacctgctaatcctccagaagtgtttactcctgccaagattgcttccttcatcacgcagtacagcaccgggcaagtcagcgttgagatcgagtgggagctgcagaaagagaacagcaagcgctggaacccagagattcagtacacctccaactttgacaaacagactggagtggactttgctgttgacagccagggtgtttactctgagcct

SEQ ID NO: 4746 - protein, 644 aa, Adeno-associated virus
KAYDQQLKAGDNPYLRYNHADAEFQERLQEDTSFGGNLGRAVFQAKKRVLEPLGLVETPAKTAPGKKRPVDSPDSTSGIGKKGQQPAKKRLNFGQTGDSESVPDPQPIGEPPAGPSGLGSGTMAAGGGAPMADNNEGADGVGNASGNWHCDSTWLGDRVITTSTRTWALPTYNNHLYKQISSQSAGSTNDNVYFGYSTPWGYFDFNRFHCHFSPRDWQRLINNNWGFRPKKLNFKLFNIQVKEVTTNDGVTTIANNLTSTVQVFSDPEYQLPYVLGSAHQGCLPPFPADVFMIPQYGYLTLNNGSQSVGRSSFYCLEYFPSQMLRTGNNFTFSYTFEDVPFHSSYAHSQSLDRLMNPLIDQYLYYLARTQSNAGGTAGNRELQFYQGGPTTMAEQAKNWLPGPCFRQQRVSKTLDQNNNSNFAWTGATKYHLNGRNSLVNPGVAMATHKDDEERFFPSSGVLIFGKTGAANKTTLENVLMTNEEEIRPTNPVATEEYGIVSSNLQAASTAAQTQVVNNQGALPGMVWQNRDVYLQGPIWAKIPHTDGNFHPSPLMGGFGLKHPPPQILIKNTPVPANPPEVFTPAKIASFITQYSTGQVSVEIEWELQKENSKRWNPEIQYTSNFDKQTGVDFAVDSQGVYSEP

SEQ ID NO: 4747 - protein, 728 aa, Adeno-associated virus
MAADGYLPDWLEDNLSEGIREWWDLKPGAPKPKANQQKQDDGRGLVLPGYKYLRPFNGLDKGEPVNEADAAALEHDKAYDKQLEQGDNPYLKYNHADAEFQERLQEDTSFGGNLGRAVFQAKKRVLEPLGLVEEVAKTAPGKKRPIESPDSSTGIGKKGQQPAKKKLNFGQTGDSESVPDPQPLGEPPAAPSGLGSGTMAAGGGAPMADNNEGADGVGNASGNWHCDSTWLGDRVITTSTRTWALPTYNNHLYKQISSQSGATNDNHFFSYSTPWGYFDFNRFHCHFSPRDWQRLINNNWGFRPRKLRFKLFNIQVKEVTTNDGVTTIANNLTSTIQVFSDSEYQLPYVLGSAHQGCLPPFPADVFMIPQYGYLTLNNGSQSVGRSSFYCLEYFPSQMLRTGNNFEFSYTFEEVPFHSSYVHSQSLDRLMNPLIDQYLYYLARTQSTTGSTRELQFHQAGPNTMAEQSKNWLPGPCYRQQRLSKNIDSNNNSNFAWTGATKYHLNGRNSLTNPGVAMATNKDDEDQFFPINGVLVFGKTGAANKTTLENVLMTSEEEIKTTNPVATEEYGVVSSNLQSSTAGPQTQTVNSQGALPGMVWQNRDVCLQGPIWAKIPHTDGNFHPSPLMGGFGLKHPPPQILIKNTPVPANPPEVFTPAKFASFITQYSTGQVSVEIEWELQKENSKRWNPEIQYTSNYAKSNNVEFAVNNEGVYTEPRPIGTRYLTRNL

SEQ ID NO: 4748 - protein, 728 aa, Adeno-associated virus
MAADGYLPDWLEDNLSEGIREWWDLKPGAPKPKANQQKQDDGRGLVLPGYKYLGPFNGLDKGEPVNEADAAALEHDKAYDKQLEQGDNPYLKYNHADAEFQERLQEDTSFGGNLGRAVFQAKKRVLEPLGLVEEGAKTASGKKRPIESPDSSTGIGKKGQQPAKKKLNFGQTGDSESVPDPQPLGEPPAAPSGLGSGTMAAGGGAPMADNNEGADGVGNASGNWHCDSTWLGDRVITTSTRTWALPTYNNHLYKQISSQSGATNDNHFFGYSTPWGYFDFNRFHCHFSPRDWQRLINNNWGFRPRKLRFKLFNIQVKEVTTNDGVTTIANNLTSTIQVFSDSEYQLPYVLGSAHQGCLPPFPADVFMIPQYGYLTLNNGSQSVGRSSFCCLEYFPSQMLRTGNNFEFSYTFEEVPFHSSYAHSQSLDRLMNPLIDQYLYYLARTQSTTGSTRELQFHQAGPNTVAEQSKNWLPGPCYRQQRLSKNIDSNNNSNFAWTGATKYHLNGRNSLTNPGVAMATNKDDEDQFLPINGVLVFGKTGAANKTTLENVLMTSEEEIKTTNPVATEEYGVVSSNLQSSTAGPRTQTVNSQGALPGMVWQNRDVYLQGPIWAEIPHTDGNFHPSPLMGGFGLKHPPPQILIKNTPVPANPPEVFTPAKFASFITQYSTGQVSVEIEWELQKENSKRWNPEIQYTSNYAKSNNVEFAVNNEGVYTEPRPIGTRYLTRNL

SEQ ID NO: 4749 - protein, 738 aa, Adeno-associated virus
MAADGYLPDWLEDNLSEGIREWWALKPGAPKPKANQQKQDDGRGLVLPGYKYLGPFNGLDKGEPVNAADAAALEHDKAYDQQLKAGDNPYLRYNHADAEFQERLQEDTSFGGNLGRAVFQAKKRVLEPLGLVEEGAKTAPGKKRPVEPSPQRSPDSTTGIGKKGQQPAKKRLNFGQTGDSESVPDPQPIGEPPAGPSGLGSGTMAAGGGAPMADNNEGADGVGSSSGNWHCDSTWLGDRVITTSTRTWALPTYNNHLYKQISNGTSGGSTNDNTYFGYSTPWGYFDFNRFHCHFSPRDWQRLINNNWGFRPKRLNFKLFNIQVKEVTQNEGTKTIANNLTSTIQVFTDSEYQLPYVLGSARQGCLPPFPADVFMIPQYGYLTLNNGSQAVGRSSFYCLEYFPSQMLRTGNNFEFSYQFEDVPFHSSYAHSQSLDRLMNPLIDQYLYYLSRTQSTGGTAGTQQLLFSQAGPNNMSAQAKNWLPGPCYRQQRVSTTLSQNNNSNFAWTGATKYHLNGRDSLVNPGVAMATHKDDEERFFPSSGVLMFGKQGAGKGNVDYSSVMLTSEEEIKTTNPVATEQYGVVADNLQQQNAAPIVGAVNSQGALPGMVWQNRDVYLQGPIWAKIPHTDGNFHPSPLMGGFGLKHPPPQILIKNTPVPADPPTTFSQAKLASFITQYSTGQVSVEIEWELQKENSKRWNPEIQYTSNYYKSTNVDFAVNTDGTYSEPRPIGTRYLTRNL

SEQ ID NO: 4750 - DNA, 3121 bp, Adeno-associated virus
gaattcgcccttcgcagagaccaaagttcaactgaaacgaatcaaccggtttattgattaacaagcaattacagattacgggtgaggtaacgggtgccgatggggcgaggctcagaataagtgccatctgtgttaacagcaaagtccacatttgtagatttgtagtagttggaagtgtattgaatctctgggttccagcgtttgctgttttctttctgcagctcccattcaatttccacgctgacctgtccggtgctgtactgcgtgatgaacgacgccagcttagcttgactgaaggtagttggaggatccgcgggaacaggtgtattcttaatcaggatctgaggaggcgggtgtttcagtccaaagccccccatcagcggcgagggatgaaagtttccgtccgtgtgaggaatcttggcccagataggaccctgcaggtacacgtcccggttctgccagaccatgccaggtaaggctccttgactgttgacggcccctacaataggagcggcgttttgctgttgcaggttatcggccaccacgccgtactgttctgtggccactgggttggtggttttaatttcttcctcactggttagcataacgctgctatagtccacgttgccttttccagctccctgtttcccaaacattaagactccgctggacggaaaaaatcgctcttcgtcgtccttgtgggttgccatagcgacaccgggatttaccagagagtctctgccattcagatgatacttggtggcaccggtccaggcaaagttgctgttgttattttgcgacagtgtcgtggagacgcgttgctgccggtagcagggcccgggtagccagtttttggcctgagccgacatgttattaggcccggcctgagaaaatagcaactgctgagttcctgcggtacctcccgtggactgagtccgagacaggtagtacaggtactggtcgatgagggggttcatcagccggtccaggctttggctgtgcgcgtagctgctgtgaaaaggcacgtcctcaaactggtagctgaactcaaagttgttgcccgttctcagcatttgagaaggaaagtactccaggcagtagaaggaggaacggcccacggcctgactgccattgttcagagtcaggtacccgtactgaggaatcatgaagacgtccgccgggaacggaggcaggcagccctggcgcgcagagccgaggacgtacgggagctggtattccgagtccgtaaagacctgaatcgtgctggtaaggttattggcgatggtcttggtgccttcattctgcgtgacctccttgacctggatgttgaagagcttgaagttgagtctcttgggccggaatccccagttgttgttgatgagtcgctgccagtcacgtggtgagaagtggcagtggaatctgttaaagtcaaaatacccccagggggtgctgtagccgaagtaggtgttgtcgttggtgcttcctcccgaagtcccgttggagatttgcttgtagaggtggttgttgtaggtggggagggcccaggttcgggtgctggtggtgatgactctgtcgcccagccatgtggaatcgcaatgccaatttcctgaggaactacccactccgtcggcgccttcgttattgtctgccattggagcgccaccgcctgcagccattgtaccagatcccagaccagaggggcctgcggggggttctccgattggttgagggtcgggcactgactctgagtcgccagtctgcccaaagttgagtctctttttcgcgggctgctggcctttcttgccgatgcccgtagtggagtctggagaacgctggggtgatggctctaccggtctcttctttccaggagccgtcttagcgccttcctcaaccagaccgagaggttcgagaacccgcttcttggcctggaagactgctcgtccgaggttgcccccaaaagacgtatcttcttgcagacgctcctgaaactcggcgtcggcgtggttataccgcaggtacggattgtcacccgctttgagctgctggtcgtaggccttgtcgtgctcgagggccgctgcgtccgccgcgttgacgggctcccccttgtcgagtccgttgaagggtccgaggtacttgtagccaggaagcaccagaccccggccgtcgtcctgcttttgctggttggctttgggcttcggggctccaggtttcagcgcccaccactcgcgaatgccctcagagaggttgtcctcgagccaatctggaagataaccatcggcagccatacctgatctaaatcatttattgttcaaagatgcagtcatccaaatccacattgaccagatcgcaggcagtgcaagcgtctggcacctttcccatgatatgatgaatgtagcacagtttctgatacgcctttttgacgacagaaacgggttgagattctgacacgggaaagcactctaaacagtctttctgtccgtgagtgaagcagatatttgaattctgattcattctctcgcattgtctgcagggaaacagcatcagattcatgcccacgtgacgagaacatttgttttggtacctgtccgcgtagttgatcgaagcttccgcgtctgacgtcgatggctgcgcaactgactcgcgcacccgtttgggctcacttatatctgcgtcactgggggcgggtcttttcttggctccaccctttttgacgtagaattcatgctccacctcaaccacgtgatcctttgcccaccggaaaaagtctttgacttcctgcttggtgaccttcccaaagtcatgatccagacggcgggtgagttcaaatttgaacatccggtcttgcaacggctgctggtgttcgaaggtcgttgagttcccgtcaatcacggcgcacatgttggtgttggaggtgacgatcacgggagtcgggtctatctgggccgaggacttgcatttctggtccacgcgcaccttgcttcctccgagaatggctttggccgactccacgaccttggcggtcatcttcccctcctcccaccagatcaccatcttgtcgacacagtcgttgaagggaaagttctcattggtccagttgacgcagccgtagaagggcgaattc

SEQ ID NO: 4751 - DNA, 3121 bp, Adeno-associated virus
gaattcgcccttctacggctgcgtcaactggaccaatgagaactttcccttcaacgactgtgtcgacaagatggtgatctggtgggaggaggggaagatgaccgccaaggtcgtggagtcggccaaagccattctcggaggaagcaaggtgcgcgtggaccagaaatgcaagtcctcggcccagatagacccgactcccgtgatcgtcacctccaacaccaacatgtgcgccgtgattgacgggaactcaacgaccttcgaacaccagcagccgttgcaagaccggatgttcaaatttgaactcacccgccgtctggatcatgactttgggaaggtcaccaagcaggaagtcaaagactttttccggtgggcaaaggatcacgtggttgaggtggagcacgaattctacgtcaaaaagggtggagccaagaaaagacccgcccccagtgacgcagatataagtgagcccaaacgggtgcgcgagtcagttgcgcagccatcgacgtcagacgcggaagcttcgatcaactacgcagacaggtaccaaaacaaatgttctcgtcacgcgggcatgaatctgatgctgtttccctgcagacaatgcgagagaatgaatcagaattcaaatatctgcttcactcacggacagaaagactgtttagagtgctttcccgtgtcagaatctcaacccgtttctgtcgtcaaaaaggcgtatcagaaactgtgctacattcatcatatcatgggaaaggtgccagacgcttgcactgcctgcgatctggtcgatgtggatttggatgactgcatctttgaacaataaatgatttaaatcaggtatggctgccgatggttatcttccagattggctcgaggacaacctctctgagggcattcgcgagtggtgggcgctgaaacctggagccccgaagcccaaagccaaccagcaaaagcaggacggcggccggggtctggtgcttcctggctacaagtacctcggacccttcaacggactcgacaagggggagcccgtcaacgcggcggacgcagcggccctcgagcacgacaaggcctacgaccagcagctcaaagcgggtgacaatccgtacctgcggtataaccacgccgacgccgagtttcaggagcgtctgcaagaagatacgtcttttgggggcaacctcgggcgagcagtcttccaggccaagaagcgggttctcgaacctctcggtctggttgaggaaggcgctaagacggctcctggaaagaagagaccggtagagccatcaccccagcgttctccagactcctctacgggcatcggcaagaaaggccagcagcccgcgaaaaagagactcaactttgggcagactggcgactcagagtcagtgcccgaccctcaaccaatcggagaaccccccgcaggcccctctggtctgggatctggtacaatggctgcaggcggtggcgctccaatggcagacaataacgaaggcgccgacggagtgggtagttcctcaggaaattggcattgcgattccacatggctgggcgactgagtcatcaccaccagcacccgaacctgggccctccccacctacaacaaccacctctacaagcaaatctccaacgggacttcgggaggaagcaccaacgacaacacctacttcggctacagcaccccctgggggtattttgactttaacagattccactgccacttctcaccacgtgactggcagcgactcatcaacaacaactggggattccggcccaagagactcaacttcaagctcttcaacatccaggtcaaggaggtcacgcagaatgaaggcaccaagaccatcgccaataaccttaccagcacgattcaggtctttacggactcggaataccagctcccgtacgtcctcggctctgcgcaccagggctgcctgcctccgttcccggcggacgtcttcatgattcctcagtacgggtacctgactctgaacaatggcagtcaggccgtgggccgttcctccttctactgcctggagtactttccttctcaaatgctgagaacgggcaacaactttgagttcagctaccagtttgaggacgtgccttttcacagcagctacgcgcacagccaaagcctggaccggctgatgaaccccctcatcgaccagtacctgtactacctgtctcggactcagtccacgggaggtaccgcaggaactcagcagttgctattttctcaggccgggcctaataacatgtcggctcaggccaaaaactggctacccgggccctgctaccggcagtaacgcgtctccacgacactgtcgcaaaataacaacagcaactttgtctggaccggtgccaccaagtatcatctgaatggcagagactctctggtagatcccggtgtcgctatggcaacccacaaggacgacgaagagcgattttttccgtccagcggagtcataatgtttgggaaacagggagctggaaaagacaacgtggactatagcagcgtcatgctaaccagtgaggaagaaattaaaaccaccaacccagtggccacagaacagtacggcgtggtggccgataacctgcaacagcaaaacgccgctcctattgtaggggccgtcaacagtcaaggagccttacctggcatggtctggcagaaccgggacgtgtacctgcagggtcctacctgggccaagattcctcacacggacggaaactttcatccctcgccgctgatgggaggctttggactgaaacacccgcctcctcagatcctgattaagaatacacctgttcccgcggatcctccaactaccttcagtcaagctaagctggcgtcgttcatcacgcagtacagcaccggacaggtcagcgtggaaattgaatgggagctgcaggaagaaaacagcaaacgctggaacccagagattcaatacacttccaactactacaaatctacaaatgtggactttgctgttaacacagatggcacttattctgagcctcgccccatcggcacccgttacctcacccgtaatctgtaattgcttgttaatcaataaaccggttgattcgtttcagttgaactttggtctctgcgaagggcgaattc

SEQ ID NO: 4752 - protein, 738 aa, Adeno-associated virus
MAADGYLPDWLEDNLSEGIREWWALKPGAPKPKANQQKQDDGRGLVLPGYKYLGPFNGLDKGEPVNAADAAALEHDKAYDQQLKAGDNPYLRYNHADAEFQERLQEDTSFGGNLGRAVFQAKKRVLEPLGLVEEGAKTAPGKKRPVEPSPQRSPDSSTGIGKKGQQPAKKRLNFGQTGDSESVPDPQPIGEPPAGPSGLGSGTMAAGGGAPMADNNEGADGVGSSSGNWHCDSTWLGDGVITTSTRTWALPTYNNHLYKQISNGTSGGSTNDNTYFGYSTPWGYFDFNRFHCHFSPRDWQRLINNNWGFRPKSLNFKLFNIQVKEVTQNEGTKTIANNLTSTIQVFTDSEYQLPYVLGSAHQGCLPPFPADVFMIPQYGYLTLNNGSQAVGRSSFYCLEYFPSQMLRTGNNFEFSYQFEDVPFHSSYAHSQSLDRLMNPLIDQYLYYLSRTQSTGGTAGTQQLLFSQAGPNNMSAQAKNWLPGPCYRQQRVSTTLSQNDNSNFAWTGATKYHLNGRDSLVNPGVAMATHKDDEERFFPSSGVLMFGKQGAGKDNVDYSSVMLTSEEEIKTTNPVATEQYGVVADNLQQQNAAPIVGAVNSQGALPGMVWQNRDVYLQGPIWAKIPHTDGNFHPSPLMGGFGLKHPPPQILIKNTPVPADPPTTFSQAKLASFITQYSTGQVSVEIEWELQKENSKRWNPEIQYTSNYYKSTNVDFAVNTDGTYSEPRPIGTRYLTRNL

SEQ ID NO: 4753 - DNA, 3121 bp, Adeno-associated virus
gaattcgcccttcgcgagaccaaagttcaactgaaacgaatcaaccggtttattgattaacaagcaattacagattacgggtgaggtaacgggtgccgatggggcgaggctcagaataagtgccatctgtgttaacagcaaagtccacatttgtagatttgtagtagttggaagtgtattgaatctctgggttccagcgtttgctgttttctttctgcagctcccattcaatttccacgctgacctgtccggtgctgtactgcgtgatgaacgacgccagcttagcttgactgaaggtagttggaggatccgcgggaacaggtgtattcttaatcaggatctgaggaggcgggtgtttcagtccaaagcctcccatcagcggcgagggatgaaagtttccgtccgtgtgaggaatcttggcccagataggaccctgcaggtacacgtcccggttctgccagaccatgccaggtaaggctccttgactgttgacggcccctacaataggagcggcgttttgctgttgcaggttatcggccaccacgccgtactgttctgtggccactgggttggtggttttaatttcttcctcactggttagcataacgctgctatagtccacgttgtcttttccagctccctgtttcccaaacattaagactccgctggacggaaaaaatcgctcttcgtcgtccttgtgggttgccatagcgacaccgggatttaccagagagtctctgccattcagatgatacttggtggcaccggtccaggcaaagttgctgttgtcattttgcgacagtgtcgtggagacgcgttgctgccggtagcagggcccgggtagccagtttttggcctgagccgacatgttattaggcccggcctgagaaaatagcaactgctgagttcctgcggtacctcccgtggactgagtccgagacaggtagtacaggtactggtcgatgagggggttcatcagccggtccaggctttggctgtgcgcgtagctgctgtgaaaaggcacgtcctcaaactggtagctgaactcaaagttgttgcccgttctcagcatttgagaaggaaagtactccaggcagtagaaggaggaacggcccacggcctgactgccattgttcagagtcaggtacccgtactgaggaatcatgaagacgtccgccgggaacggaggcaggcagccctggtgcgcagagccgaggacgtacgggagctggtattccgagtccgtaaagacctgaatcgtgctggtaaggttattggcgatggtcttggtgccttcattctgcgtgacctccttgacctggatgttgaagagcttgaagttgaggctcttgggccggaatccccagttgttgttgatgagtcgctgccagtcacgtggtgagaagtggcagtggaatctgttaaagtcaaaatacccccagggggtgctgtagccgaagtaggtgttgtcgttggtgcttcctcccgaagtcccgttggagatttgcttgtagaggtggttgttgtaggtggggagggcccaggttcgggtgctggtggtgatgactccgtcgcccagccatgtggaatcgcaatgccaatttcctgaggaactacccactccgtcggcgccttcgttattgtctgccattggagcgccaccgcctgcagccattgtaccagatcccagaccagaggggcctgcggggggttctccgattggttgagggtcgggcactgactctgagtcgccagtctgcccaaagttgagtctctttttcgcgggctgctggcctttcttgccgatgcccgtagaggagtctggagaacgctggggtgatggctctaccggtctcttctttccaggagccgtcttagcgccttcctcaaccagaccgagaggttcgagaacccgcttcttggcctggaagactgctcgcccgaggttgcccccaaaagacgtatcttcttgcagacgctcctgaaactcggcgtcggcgtggttataccgcaggtacggattgtcacccgctttgagctgctggtcgtaggccttgtcgtgctcgagggccgctgcgtccgccgcgttgacgggctcccccttgtcgagtccgttgaagggtccgaggtacttgtagccaggaagcaccagaccccggccgtcgtcctgcttttgctggttggctttgggcttcggggctccaggtttcagcgcccaccactcgcgaatgccctcagagaggttgtcctcgagccaatctggaagataaccatcggcagccatacctgatttaaatcatttattgttcaaagatgcagtcatccaaatccacattgaccagatcgcaggcagtgcaagcgtctggcacctttcccatgatatgatgaatgtagcacagtttctgatacgcctttttgacgacagaaacgggttgagattctgacacgggaaagcactctaaacagtctttctgtccgtgagtgaagcagatatttgaattctgattcattctctcgcattgtctgcagggaaacagcatcagattcatgcccacgtgacgagaacatttgttttggtacctgtctgcgtagttgatcgaagcttccgcgtctgacgtcgatggctgcgcaactgactcgcgcacccgtttgggctcacttatatctgcgtcactgggggcgggtcttttcttggctccaccctttttgacgtagaattcatgctccacctcaaccacgtgatcctttgcccaccggaaaaagtctttgacttcctgcttggtgaccttcccaaagtcatgatccagacggcgggtgagttcaaatttgaacatccggtcttgcaacggctgctggtgttcgaaggtcgttgagttcccgtcaatcacggcgcacatgttggtgttggaggtgacgatcacgggagtcgggtctatctgggccgaggacttgcatttctggtccacgcgcaccttgcttcctccgagaatggctttggccgactccacgaccttggcggtcatcttcccctcctcccaccagatcaccatcttgtcgacacagtcgttgaagggaaagttctcattggtccagttgacgcagccgtagaaagggcgaattc

SEQ ID NO: 4754 - DNA, 2211 bp, Adeno-associated virus
atggctgctgacggttatcttccagattggctcgaggacaacctttctgaaggcattcgtgagtggtgggctctgaaacctggagtccctcaacccaaagcgaaccaacaacaccaggacaaccgtcggggtcttgtgcttccgggttacaaatacctcggacccggtaacggactcgacaaaggagagccggtcaacgaggcggacgcggcagccctcgaacacgacaaagcttacgaccagcagctcaaggccggtgacaacccgtacctcaagtacaaccacgccgacgccgagtttcaggagcgtcttcaagaagatacgtcttttgggggcaaccttggcagagcagtcttccaggccaaaaagaggatccttgagcctcttggtctggttgaggaagcagctaaaacggctcctggaaagaagggggctgtagatcagtctcctcaggaaccggactcatcatctggtgttggcaaatcgggcaaacagcctgccagaaaaagactaaatttcggtcagactggagactcagagtcagtcccagaccctcaacctctcggagaaccaccagcagcccccacaagtttgggatctaatacaatggcttcaggcggtggcgcaccaatggcagacaataacgagggtgccgatggagtgggtaattcctcaggaaattggcattgcgattcccaatggctgggcgacagagtcatcaccaccagcaccagaacctgggccctgcccacttacaacaaccatctctacaagcaaatctccagccaatcaggagcttcaaacgacaaccactactttggctacagcaccccttgggggtattttgactttaacagattccactgccacttctcaccacgtgactggcagcgactcattaacaacaactggggattccggcccaagaaactcagcttcaagctcttcaacatccaagttagaggggtcacgcagaacgatggcacgacgactattgccaataaccttaccagcacggttcaagtgtttacggactcggagtatcagctcccgtacgtgctcgggtcggcgcaccaaggctgtctcccgccgtttccagcggacgtcttcatggtccctcagtatggatacctcaccctgaacaacggaagtcaagcggtgggacgctcatccttttactgcctggagtacttcccttcgcagatgctaaggactggaaataacttccaattcagctataccttcgaggatgtaccttttcacagcagctacgctcacagccagagtttggatcgcttgatgaatcctcttattgatcagtatctgtactacctgaacagaacgcaaggaacaacctctggaacaaccaaccaatcacggctgctttttagccaggctgggcctcagtctatgtctttgcaggccagaaattggctacctgggccctgctaccggcaacagagactttcaaagactgctaacgacaacaacaacagtaactttccttggacagcggccagcaaatatcatctcaatggccgcgactcgctggtgaatccaggaccagctatggccagtcacaaggacgatgaagaaaaatttttccctatgcacggcaatctaatatttggcaaagaagggacaacggcaagtaacgcagaattagataatgtaatgattacggatgaagaagagattcgtaccaccaatcctgtggcaacagagcagtatggaactgtggcaaataacttgcagagctcaaatacagctcccacgactggaactgtcaatcatcagggggccttacctggcatggtgtggcaagatcgtgacgtgtaccttcaaggacctatctgggcaaagattcctcacacggatggacactttcatccttctcctctgatgggaggctttggactgaaacatccgcctcctcaaatcatgatcaaaaatactccggtaccggcaaatcctccgacgactttcagcccggccaagtttgcttcatttatcactcagtactccactggacaggtcagcgtggaaattgagtgggagctacagaaagaaaacagcaaacgttggaatccagagattcagtacacttccaactacaacaagtctgttaatgtggactttactgtagacactaatggtgtttatagtgaacctcgccctattggaacccggtatctcacacgaaacttgtga

SEQ ID NO: 4755 - protein, 737 aa, Adeno-associated virus
MAADGYLPDWLEDNLSEGIREWWDLKPGAPKPKANQQKQDNGRGLVLPGYKYLGPFNGLDKGEPVNAADAAALEHDKAYDQQLNAGDNPYLRYNHADAEFQERLQEDTSFGGNLGRAVFQAKKRVLEPLGLVEEGAKTAPAKKRPVEPSPQRSPDSSTGIGKKGQQPARKRLNFGQTGDSESVPDPQPLGEPPAAPSSVGSGTVAAGGGAPMADNNEGADGVGNASGNWHCDSTWLGDRVITTSTRTWALPTYNNHLYEQISSETAGSTNDNTYFGYSTPWGYFDFNRFHCHFSPRDWQRLINNNWGFRPKKLRFKLFNIQVKEVTTNDGVTTIANNLTSTIQVFSDSEYQLPYVLGSAHQGCLPPFPADVFMIPQYGYLTLNNGSQSVGRSSFYCLEYFPSQMLRTGNNFEFSYSFEDVPFHSSYAHSQSLDRLMNPLIDQYLYYLARTQSDPGGTAGNRELQFYQGGPSTMAEQAKNWLPGPCFRQQRVSKTLDQNNNSNFAWTGATKYHLNGRNSLVNPGVAMATHKDDEDRFFPSSGVLIFGKTGATNKTTLENVLMTNEEEIRPTNPVATEEYGIVSSNLQAANTAAQTQVVNNQGALPGMVWQNRDVYLQGPIWAKIPHTDGNFHPSPLMGGFGLKHPPPQILIKNTPVPANPPEVFTPAKFASFITQYSTGQVSVEIEWELQKENSKRWDPEIQYTSNFEKQTGVDFAVDSQGVYSEPRPIGTRYLTRNL

SEQ ID NO: 4756 - DNA, 2211 bp, Adeno-associated virus
atggctgctgacggttatcttccagattggctcgaggacaacctttctgaaggcattcgtgagtggtgggctctgaaacctggagtccctcaacccaaagcgaaccaacaacaccaggacaaccgtcggggtcttgtgcttccgggttacaaatacctcggacccggtaacggactcgacaaaggagagccggtcaacgaggcggacgcggcagccctcgaacacgacaaagcttacgaccagcagctcaaggccggtgacaacccgtacctcaagtacaaccacgccgacgccgagtttcaggagcgtcttcaagaagatacgtcttttgggggcaaccttggcagagcagtcttccaggccaaaaagaggatccttgagcctcttggtctggttgaggaagcagctaaaacggctcctggaaagaagggggctgtagatcagtctcctcaggaaccggactcatcatctggtgttggcaaatcgggcaaacagcctgccagaaaaagactaaatttcggtcagactggagactcagagtcagtcccagaccctcaacctctcggagaaccaccagcagcccccacaagtttgggatctaatacaatggcttcaggcggtggcgcaccaatggcagacaataacgagggtgccgatggagtgggtaattcctcaggaaattggcattgcgattcccaatggctgggcgacagagtcatcaccaccagcaccagaacctgggccctgcccacttacaacaaccatctctacaagcaaatctccagccaatcaggagcttcaaacgacaaccactactttggctacagcaccccttgggggtattttgactttaacagattccactgccacttctcaccacgtgactggcagcgactcattaacaacaactggggattccggcccaagaaactcagcttcaagctcttcaacatccaagttagaggggtcacgcagaacgatggcacgacgactattgccaataaccttaccagcacggttcaagtgtttacggactcggagtatcagctcccgtacgtgctcgggtcggcgcaccaaggctgtctcccgccgtttccagcggacgtcttcatggtccctcagtatggatacctcaccctgaacaacggaagtcaagcggtgggacgctcatccttttactgcctggagtacttcccttcgcagatgctaaggactggaaataacttccaattcagctataccttcgaggatgtaccttttcacagcagctacgctcacagccagagtttggatcgcttgatgaatcctcttattgatcagtatctgtactacctgaacagaacgcaaggaacaacctctggaacaaccaaccaatcacggctgctttttagccaggctgggcctcagtctatgtctttgcaggccagaaattggctacctgggccctgctaccggcaacagagactttcaaagactgctaacgacaacaacaacagtaactttccttggacagcggccagcaaatatcatctcaatggccgcgactcgctggtgaatccaggaccagctatggccagtcacaaggacgatgaagaaaaatttttccctatgcacggcaatctaatatttggcaaagaagggacaacggcaagtaacgcagaattagataatgtaatgattacggatgaagaagagattcgtaccaccaatcctgtggcaacagagcagtatggaactgtggcaaataacttgcagagctcaaatacagctcccacgactggaactgtcaatcatcagggggccttacctggcatggtgtggcaagatcgtgacgtgtaccttcaaggacctatctgggcaaagattcctcacacggatggacactttcatccttctcctctgatgggaggctttggactgaaacatccgcctcctcaaatcatgatcaaaaatactccggtaccggcaaatcctccgacgactttcagcccggccaagtttgcttcatttatcactcagtactccactggacaggtcagcgtggaaattgagtgggagctacagaaagaaaacagcaaacgttggaatccagagattcagtacacttccaactacaacaagtctgttaatgtggactttactgtagacactaatggtgtttatagtgaacctcgccctattggaacccggtatctcacacgaaacttgtaa

SEQ ID NO: 4757 - protein, 736 aa, Adeno-associated virus
MAADGYLPDWLEDNLSEGIREWWALKPGVPQPKANQQHQDNRRGLVLPGYKYLGPGNGLDKGEPVNEADAAALEHDKAYDQQLKAGDNPYLKYNHADAEFQERLQEDTSFGGNLGRAVFQAKKRILEPLGLVEEAAKTAPGKKGAVDQSPQEPDSSSGVGKSGKQPARKRLNFGQTGDSESVPDPQPLGEPPAAPTSLGSNTMASGGGAPMADNNEGADGVGNSSGNWHCDSQWLGDRVITTSTRTWALPTYNNHLYKQISSQSGASNDNHYFGYSTPWGYFDFNRFHCHFSPRDWQRLINNNWGFRPKKLSFKLFNIQVRGVTQNDGTTTIANNLTSTVQVFTDSEYQLPYVLGSAHQGCLPPFPADVFMVPQYGYLTLNNGSQAVGRSSFYCLEYFPSQMLRTGNNFQFSYTFEDVPFHSSYAHSQSLDRLMNPLIDQYLYYLNRTQGTTSGTTNQSRLLFSQAGPQSMSLQARNWLPGPCYRQQRLSKTANDNNNSNFPWTAASKYHLNGRDSLVNPGPAMASHKDDEEKFFPMHGNLIFGKEGTTASNAELDNVMITDEEEIRTTNPVATEQYGTVANNLQSSNTAPTTGTVNHQGALPGMVWQDRDVYLQGPIWAKIPHTDGHFHPSPLMGGFGLKHPPPQIMIKNTPVPANPPTTFSPAKFASFITQYSTGQVSVEIEWELQKENSKRWNPEIQYTSNYNKSVNVDFTVDTNGVYSEPRPIGTRYLTRNL

SEQ ID NO: 4758 - protein, 728 aa, Adeno-associated virus
MAADGYLPDWLEDNLSEGIREWWDLKPGAPKPKANQQKQDDGRGLVLPGYKYLGPFNGLDKGEPVNEADAAALEHDKAYDKQLEQGDNPYLKYNHADAEFQERLQEDTSFGGNLGRAVFQAKKRVLEPLGLVEEGAKTAPGKKRPIESPDSSTGIGRKGQQPAKKKLNFGQTGDSESVPDPQPIGEPPAGPSGLGSGTMAAGGGAPMADNNEGADGVGNASGNWHCDSTWLGDRVITTSTRTWALPTYNNHLYKQISSQSGATNDNHFFGYSTPWGYFDFNRFHCHFSPRDWQRLINNNWGFRPRKLRFKLFNIQVKEVTTNDGVTTIANNLTSTIQVFSDSEYQLPYVLGSAHQGCLPPFPADVFMIPQYGYLTLNNGSQSVGRSSFYCLEYFPSQMLRTGNNFEFSYTFEEVPFHSSYAHSQSLDRLMNPLIDQYLYYLARTQSTTGSTRELQFHQAGPNTMAEQSKNWLPGPCYRQQRLSKNIDSNNNSNFAWTGATKYHLNGRNSLTNPGVAMATNKDDEDQFFPINGVLVFGKTGAANKTTLENVLMTSEEEIKTTNPVATEEYGVVSSNLQSSTAGPQTQTVNSQGALPGMVWQNRDVYLQGPIWAKIPHTDGNFHPSPLMGGFGLKHPPPQILIKNTPVPANPPEVFTPAKFASFITQYSTGQVSVEIEWELQKENSKRWNPEIQYTSNYAKSNNVEFAVNNEGVYTEPRPIGTRYLTRNL

SEQ ID NO: 4759 - protein, 728 aa, Adeno-associated virus
MAADGYLPDWLEDNLSEGIREWWDLKPGAPKPKANQQKQDDGRGLVLPGYKYLGPFNGLDKGEPVNAADAAALEHDKAYDQQLKAGDNPYLRYNHADAEFQERLQEDTSFGGNLGRAVFQAKKRVLEPLGLVEEGAKTAPGKKRPIESPDSSTGIGKKGQQPAKKKLNFGQTGDSESVPDPQPIGEPPAGPSGLGSGTMAAGGGAPMADNNEGADGVGNASGNWHCDSTWLGDRVITTSTRTWALPTYNNHLYKQISSQSGATNDNHFFGYSTPWGYFDFNRFHCHFSPRDWQRLINNNWGFRPRKLRFKLFNIQVKEVTTNDGVTTIANNLTSTIQVFSDSEYQLPYVLGSAHQGCLPPFPADVFMIPQYGYLTLNNGSQSVGRSSFYCLEYFPSQMLRTGNNFEFSYTFEEVPFHSSYAHSQSLDRLMNPLIDQYLYYLARTQSTTGSTRELQFHQAGPNTMAEQSKNWLPGPCYRRQRLSKDIDSNNNSNFAWTGATKYHLNGRNSLTNPGVAMATNKDDEDQFFPINGVLVFGKTGAANKTTLENVLMTSEEEIKTTNPVATEEYGVVSSNLQSSTAGPQTQTVNSQGALPGMVWQNRDVYLQGPIWAKIPHTDGNFHPSPLMGGFGLKHPPPQILIKNTPVPANPPEVFTPAKFASFITQYSTGQVSVEIEWELQKENSKRWNPEIQYTSNYAKSNNVEFAVNNEGVYTEPRPIGTRYLTRNL

SEQ ID NO: 4760 - protein, 685 aa, Adeno-associated virus
MAADGYLPDWLEDNLSEGIREWWDLKPGAPKPKANQQKQDDGRGLVLPGYKYLGPFNGLDKGEPVNEADAAALEHDKAYDKQLEQGDNPYLKYNHADAEFQERLQEDTSFGGNLGRAVFQAKKRVLEPLGLVEEGAKTAPGKKRPVEPSPQRSPDSSTGIGKTGQQPAKKRLNFGQTGDSESVPDPQPIGEPPAGPSGLGSGTMAAGGGAPMADNNEGADGVGSSSGNWHCDSTWLGDRVITTSTRTWALPTYNNHLYKQISNGTSGGSTNDNTYFGYSTPWGYFDFNRFHCHFSPRDWQRLINNNWGFRPKRLNFKLFNIQVKEVTQNEGTKTIANNLTSTIQVFTDSEYQLPYVLGSAHQGCLPPFPADVFMIPQYGYLTLNNGSQAVGRSSFYCLEYFPSQMLRTGNNFEFSYQFEDVPFHSSYAHSQSLDRLTNPLIDQYLYYLARTQSTTGSTRGLQFHQAGPNTMAEQSKNWLPGPCYRQQRLSKNIDSNNNSNFAWTGATKYHLNGRNSLTNPGVAMATNKDDEDQFFPINGVLVFGKTGAANKTTLENVLMTSEEEIKTTNPVATEEYGVVSSNLQSSTAGPQTQTVNSQGALPGMVWQNRDVYLQGPIWAKIPHTDGNFHPSPLMGGFGLKHPPPQILIKYTSNYYKSTNVDFAVNTEGTYSEPRPIGTRYLTRNL

SEQ ID NO: 4761 - protein, 733 aa, Adeno-associated virus
MAADGYLPDWLEDNLSEGIREWWDLKPGAPKPKANQQKQDDGRGLVLPGYKYLGPFNGLDKGEPVNAADAAALEHDKAYDQQLKAGDNPYLRYNHADAEFQERLQEDTSFGGNLGRAVFQAKKRVLEPLGLVEEGAKTAPGKKRPIESPDSSTGIGKKGQQPAKKKLNFGQTGDSESVPDPQPIGEPPAGPSGLGSGTMAAGGGAPMADNNEGADGVGSSSGNWHCDSTWLGDRVITTSTRTWALPTYNNHLYKQISNGTSGGSTNDNTYFGYSTPWGYFDFNRFHCHFSPRDWQRLINNNWGFRPKRLNFKLFNIQVKEVTQNEGTKTIANNLTSTIQVFTDSEYQLPYVLGSAHQGCLPPFPADVFMIPQYGYLTLNNGSQAVGRSSFYCLEYFPSQMLRTGNNFEFSYQFEDVPFHSSYAHSQSLDRLMNPLIDQYLYYLSRTQSTGGTAGTQQLLFSQAGPNNMSAQAKNWLPGPCYRQQRVSTTVSQNNNSNFAWTGATKYHLNGRDSLVNPGVAMATHKGDEERFFPSSGVLMFGKQGAGKDNVDYSSVMLTSEEEIKTTNPVATEQYGVVADNLQQQNAAPIVGAVNSQGALPGMVWQNRDVYLQGPIWAKIPHTDGNFHPSPLMGGFGLKHPPPQILIKNTPVPADPPTTFSQAKLASFITQYSTGQVSVEIEWELQKENSKRWNPEIQYTSNYYKSTNVDFAVNTEGTYSEPRPIGTRYLTRSL

SEQ ID NO: 4762 - protein, 738 aa, Adeno-associated virus
MAADGYLPDWLEDNLSEGIREWWDLKPGAPKPKANQQKQDDGRGLVLPGYKYLGPFNGLDKGEPVNAADAAALEHDKAYDQQLKAGDNPYLRYNHADAEFQERLQEDTSFGGNLGRAVFQAKKRVLEPLGLVEEGAKTAPGKKRPVEPSPQRSPDSSTGIGKTGQQPAKKRLNFGQTGDSESVPDPQPIGEPPAGPSGLGSGTMAAGGGAPMADNNEGADGVGSSSGNWHCDSTWLGDRVITTSTRTWALPTYNNHLYKQISNGTSGGSTNDNTYFGYSTPWGYFDFNRFHCHFSPRDWQRLINNNWGFRPKRLNFKLFNIQVKEVTQNEGTKTIANNLTSTIQVFTDSEYQLPYVLGSAHQGCPPPFPADVFMIPQYGYLTLNNGSQAVGRSSFYCLEYFPSQMRRTGNNFEFSYQFEDVPFHSSYAHSQSLDRLMNPLIDQYLYYLSRTQSTGGTAGTQQLLFSQAGPNNMSAQAKNWLPGPCYRQQRVSTTLSQNNNSNFAWTGATKYHLNGRDSLVNPGVAMATHKDDEERFFPSSGVLMFGKQGAGKDNVDYSSVMLTSEEEIKTTNPVATEQYGVVADNLQQQNAAPIVGAVNSQGALPGMVWQNRDVYLQGPIWAKIPHTDGNFHPSPLMGGFGLKHPPPQILIKNTPVPADPPTTFSQAKLASFITQYSTGQVSVEIEWELQKENSKRWNPEIQYTSNYYKSTNVDFAVNTEGTYSEPRPIGTRYLTRNL

SEQ ID NO: 4763 - protein, 733 aa, Adeno-associated virus
MAADGYLPDWLEDNLSEGIREWWDLRPGAPKPKANQQKQDDGRGLVLPGYKYLGPFNGLDKGEPVNEADAAALEHDKAYDKQLEQGDNPYLKYNHADAEFQERLQEDTSFGGNLGRAVFQAKKRVLEPLGLVEEGAKTAPGKKRPIESPDSSTGIGKKGQQPAKKRLNFGQTGDSESVPDPQPIGEPPAGPSGLGSGTMAAGGGAPMADNNEGADGVGSSSGNWHCDSTWLGDRVITTSTRTWALPTYNNHLYKQISNGTSGGSTNDNTYFGYSTPWGYFDFNRFHCHFSPRDWQRLINNNWGFRPKRLNFKLFNIQVKEVTQNEGTKTIANNLTSTIQVFTDSEYQLPYVLGSAHQGCLPPFPADVFMIPQYGYLTLNNGSQAVGRSSFYCLEYFPSQMLRTGNNFEFSYQFEDVPFHSSYAHSQSLDRLMNPLIDQYLYYLSRTQSTGGTAGTQQLLFSQAGPNNMSAQAKNWLPGPCYRQQRVSTTVSQNNNSNFAWTGATKYHLNGRDSLVNPGVAMATHKGDEERFFPSSGVLMFGKQGAGKDNVDYSSVMLTSEEEIKTTNPVATEQYGVVADNLQQQNAAPIVGAVNSQGALPGMVWQNRDVYLQGPIWAKIPHTDGNFHPSPLMGGFGLKHPPPQILIKNTPVPADPPTTFSQAKLASFITQYSTGQVSVEIEWELQKENSKRWNPEIQYTSNYYKSTNVDFAVNTEGTYSEPRPIGTRYLTRNL

SEQ ID NO: 4764 - DNA, 3098 bp, Adeno-associated virus
gaattcgccctttctacggctgcgtcaactggaccaatgagaactttcccttcaacgattgcgtcgacaagatggtgatctggtgggaggagggcaagatgacggccaaggtcgtggagtccgccaaggccattctcggcggcagcaaggtgcgcgtggaccaaaagtgcaagtcttccgcccagatcgatcccacccccgtgatcgtcacttccaacaccaacatgtgcgctgtgattgacgggaacagcaccaccttcgagcaccagcagccgttacaagaccggatgttcaaatttgaactcacccgccgtctggagcacgactttggcaaggtgacaaagcaggaagtcaaagagttcttccgctgggcgcaggatcacgtgaccgaggtggcgcatgagttctacgtcagaaagggtggagccaacaagagacccgcccccgatgacgcggataaaagcgagcccaagcgggcctgcccctcagtcgcggatccatcgacgtcagacgcggaaggagctccggtggactttgccgacaggtaccaaaacaaatgttctcgtcacgcgggcatgcttcagatgctgtttccctgcaagacatgcgagagaatgaatcagaatttcaacatttgcttcacgcacgggaccagagactgttcagaatgtttccccggcgtgtcagaatctcaaccggtcgtcagaaagaggacgtatcggaaactctgtgccattcatcatctgctggggcgggctcccgagattgcttgctcggcctgcgatctggtcaacgtggacctggatgaccgtgtttctgagcaataaatgacttaaaccaggtatggctgccgatggttatcttccagattggctcgaggacaacctctctgagggcattcgcgagtggtgggacttgaaacctggagccccgaaacccaaagccaaccagcaaaagcaggacgacggccggggtctggtgcttcctggctacaagtacctcggacccttcaacggactcgacaagggagagccggtcaacgaggcagacgccgcggccctcgagcacgacaaggcctacgacaagcagctcgagcagggggacaacccgtacctcaagtacaaccacgccgacgccgagtttcaggagcgtcttcaagaagatacgtcttttgggggcaacctcgggcgagcagtcttccaggccaagaagcgggttctcgaacctctcggtctggttgaggaaggcgctaagacggctcctggaaagaagagacccatagaatcccccgactcctccacgggcatcggcaagaaaggccagcagcccgctaaaaagaagctcaactttgggcagactggcgactcagagtcagtgcccgacccccaacctctcggagaacctcccgccgcgccctcaggtctgggatctggtacaatggctgcaggcggtggcgcaccaatggcagacaataacgaaggcgccgacggagtgggtaatgcctccggaaattggcattgcgattccacatggctgggcgacagagtcatcaccaccagcacccgcacctgggccctgcccacctacaacaaccacctctacaagcagatatcaagtcagagcggggctaccaacgacaaccacttcttcggctacagcaccccctggggctattttgacttcaacagattccactgccacttctcaccacgtgactggcagcgactcatcaacaacaactggggattccggcccagaaagctgcggttcaagttgttcaacatccaggtcaaggaggtcacgacgaacgacggcgttacgaccatcgctaataaccttaccagcacgattcaggtcttctcggactcggagtaccaactgccgtacgtcctcggctctgcgcaccagggctgcctccctccgttccctgcggacgtgttcatgattcctcagtacggatatctgactctaaacaacggcagtcagtctgtgggacgttcctccttctactgcctggagtactttccttctcagatgctgagaacgggcaataactttgaattcagctacacctttgaggaagtgcctttccacagcagctatgcgcacagccagagcctggaccggctgatgaatcccctcatcgaccagtacctgtactacctggcccggacccagagcactacggggtccacaagggagctgcagttccatcaggctgggcccaacaccatggccgagcaatcaaagaactggctgcccggaccctgttatcggcagcagagactgtcaaaaaacatagacagcaacaacaacagtaactttgcctggaccggggccactaaataccatctgaatggtagaaattcattaaccaacccgggcgtagccatggccaccaacaaggacgacgaggaccagttctttcccatcaacggagtgctggtttttggcgaaacgggggctgccaacaagacaacgctggaaaacgtgctaatgaccagcgaggaggagatcaaaaccaccaatcccgtggctacagaagaatacggtgtggtctccagcaacctgcaatcgtctacggccggaccccagacacagactgtcaacagccagggggctctgcccggcatggtctggcagaaccgggacgtgtacctgcagggtcccatctgggccaaaattcctcacacggacggcaactttcacccgtctcccctgatgggcggatttggactcaaacacccgcctcctcaaattctcatcaaaaacaccccggtacctgctaatcctccagaggtgtttactcctgccaagtttgcctcatttatcacgcagtacagcaccggccaggtcagcgtggagatcgagtgggaactgcagaaagaaaacagcaaacgctggaatccagagattcagtacacctcaaattatgccaagtctaataatgtggaatttgctgtcaacaacgaaggggtttatactgagcctcgccccattggcacccgttacctcacccgtaacctgtaattgcctgttaatcaataaaccggttaattcgtttcagttgaactttggtctctgcgaagggcgaattc

SEQ ID NO: 4765 - protein, 728 aa, Adeno-associated virus
MAADGYLPDWLEDNLSEGIREWWDLKPGAPKPKANQQKQDDGRGLVLPGYKYLGPFNGLDKGEPVNEADAAALEHDKAYDKQLEQGDNPYLKYNHADAEFQERLQEDTSFGGNLGRAVFQAKKRVLEPLGLVEEGAKTAPGKKRPIESPDSSTGIGKKGQQPAKKKLNFGQTGDSESVPDPQPLGEPPAAPSGLGSGTMAAGGGAPMADNNEGADGVGNASGNWHCDSTWLGDRVITTSTRTWALPTYNNHLYKQISSQSGATNDNHFFGYSTPWGYFDFNRFHCHFSPRDWQRLINNNWGFRPRKLRFKLFNIQVKEVTTNDGVTTIANNLTSTIQVFSDSEYQLPYVLGSAHQGCLPPFPADVFMIPQYGYLTLNNGSQSVGRSSFYCLEYFPSQMLRTGNNFEFSYTFEEVPFHSSYAHSQSLDRLMNPLIDQYLYYLARTQSTTGSTRELQFHQAGPNTMAEQSKNWLPGPCYRQQRLSKNIDSNNNSNFAWTGATKYHLNGRNSLTNPGVAMATNKDDEDQFFPINGVLVFGETGAANKTTLENVLMTSEEEIKTTNPVATEEYGVVSSNLQSSTAGPQTQTVNSQGALPGMVWQNRDVYLQGPIWAKIPHTDGNFHPSPLMGGFGLKHPPPQILIKNTPVPANPPEVFTPAKFASFITQYSTGQVSVEIEWELQKENSKRWNPEIQYTSNYAKSNNVEFAVNNEGVYTEPRPIGTRYLTRNL

SEQ ID NO: 4766 - protein, 733 aa, Adeno-associated virus
MAADGHLPDWLEDNLSEGIREWWDLKPGAPKPKANQQKQDDGRGLVLPGYKYLGPFNGLDKGEPVNAADAAALEHDKAYDQQLKAGDNPYLRYNHADAEFQERLQEDTSFGGNLGRAVFQAKKRVLEPLGLVEEGAKTAPGKKRPIESPDSSTGIGKKGQQPAKKKLNFGQTGDSESVPDPQPIGEPPAGPSGLGSGTMAAGGGAPMADNNEGADGVGSSSGNWHCDSTWLGDRVITTSTRTWALPTYNNHLYKQISNGTSGGSTNDNTYFGYSTPWGYFDFNRFHCHFSPRDWQRLINNSWGFRPKRLNFKLFNIQVKEVTQNEGTKTIANNLTSTIQVFTDSEYQLPYVLGSAHQGCLPPFPADVFMIPQYGYLTLNNGSQAVGRSSFYCLEYFPSQMLRTGNNFEFSYQFEDVPFHSSYAHSQSLDRLMNPLIDQYLYYLSRTQSTGGTAGTQQLLFSQAGPNNMSAQAKNWLPGPCYRQQRVSTTLSQNNNSNFAWTGATKYHLNGRDSLVNPGVAMATHKDDEERFFPSSGVLMFGKQGAGKDNVDYSSVMLTSEEEIKTTNPVATEQYGVVADNLQQQNAAPIVGAVNSQGALPGMVWQNRDVYLQGPIWAKIPHTDGNFHPSPLMGGFGLKHPPPQILIKNTPVPADPPTTFSQAKLASFITQYSTGQVSVEIEWELQKENSKRWNPEIQYTSNYYKSTNVDFAVNTEGTYSEPRPIGTRYLTRNL

SEQ ID NO: 4767 - DNA, 2495 bp, Adeno-associated virus
gaattcgccctttctacggctgcgtcaactagaccaatgagaactttcccttcaacgattgcgtcgacaagatggtgatctggtgggaggagggcaagatgacggccaaggtcgtggagtccgccaaggccattcatcatctgctggggcgggctcccgagattgcttgctcggcctgcgatctggtcaacgtggacctggatgactgtgtttctgagcaataaatgacttaaaccaggtatggctgccgatggttatcttccagattggctcgaggacaacctctctgagggcattcgcgagtggtgggacttgaaacctggagccccgaaacccaaagccaaccagcaaaagcaggacgacggccggggtctggtgcttcctggctacaagtacctcggacccttcaacggactcgacaagggagagccggtcaacgaggcagacgccgcggccctcgagcacgacaaggcctacgacaagcagctcgagcagggggacaacccgtacctcaagtacaaccacgccgacgccgagtttcaggagcgtcttcaagaagatacgtcttttgggggcaacctcgggcgagcagtcttccaggccaagaagcgggttctcgaacctctcggtctggttgaggaaggcgctaagacggctcctggaaagaagagacccatagaatcccccgactcctccacgggcatcggcaagaaaggccagcagcccgctaaaaagaagctcaactttgggcagactggcgactcagagtcagtgcccgaccctcaaccaatcggagaaccccccgcaggcccctctggtctgggatctggtacaatggctgcaggcggtggcgctccaatggcagacaataacgaaggcgccgacggagtgggtaatgcctccggaaattggcattgcgattccacatggctgggcgacagagtcatcaccaccagcacccgcacctgggccctgcccacctacaacaaccacctctacaagcagatatcaagtcagagcggggctaccaacgacaaccacttcttcggctacagcaccccctggggctattttgacttcaacagattccactgccacttctcaccacgtgactggcagcgactcatcaacaacaactggggattccggcccagaaagctgcggttcaagttgttcaacatccaggtcaaggaggtcacgacgaacgacggcgttacgaccatcgctaataaccttaccagcacgattcaggtcttctcggactcggagtaccaactgccgtacgtcctcggctctgcgcaccagggctgcctccctccgttccctgcggacgtgttcatgattcctcagtacggatatctgactctaaacaacggcagtcagtctgtgggacgttcctccttctactgcctggagtactttccttctcagatgctgagaacgggcaataactttgaattcagctacacctttgaggaagtgcctttccacagcagctatgcgcacagccagagcctggaccggctgatgaatcccctcatcgaccagtacctgtactacctggcccggacccagagcactacggggtccacaagggagctgcagttccatcaggctgggcccaacaccatggccgagcaatcaaagaactggctgcccggaccctgttatcggcagcagagactgtcaaaaaacatagacagcaacaacaccagtaactttgcctggaccggggccactaaataccatctgaatggtagaaattcattaaccaacccgggcgtagccatggccaccaacaaggacgacgaggaccagttctttcccatcaacggagtgctggtttttggcaaaacgggggctgccaacaagacaacgctggaaaacgtgctaatgaccagcgaggaggagatcaaaaccaccaatcccgtggctacagaacagtacggtgtggtctccagcaacctgcaatcgtctacggccggaccccagacacagactgtcaacagccagggggctctgcccggcatggtctggcagaaccgggacgtgtacctgcagggtcccatctgggccaaaattcctcacacggacggcaactttcacccgtctcccctgatgggcggatttggactcaaacacccgcctcctcaaattctcatcaaaaacaccccggtacctgctaatcctccagaggtgtttactcctgccaagtttgcctcatttatcacgcagtacagcaccggccaggtcagcgtggagatcgagtgggaactgcagaaagaaaacagcaaacgctggaatccagagattcagtacacctcaaattatgccaagtctaataatgtggaatttgctgtcaacaacgaaggggtttatactgagcctcgccccattggcacccgttacctcacccgtaacctgtaattgcctgttaatcaataaaccggttaattcgtttcagttgaactttggtctctgcgaagggcgaattc

SEQ ID NO: 4768 - protein, 728 aa, Adeno-associated virus
MAADGYLPDWLEDNLSEGIREWWDLKPGAPKPKANQQKQDDGRGLVLPGYKYLGPFNGLDKGEPVNEADAAALEHDKAYDKQLEQGDNPYLKYNHADAEFQERLQEDTSFGGNLGRAVFQAKKRVLEPLGLVEEGAKTAPGKKRPIESPDSSTGIGKKGQQPAKKKLNFGQTGDSESVPDPQPIGEPPAGPSGLGSGTMAAGGGAPMADNNEGADGVGNASGNWHCDSTWLGDRVITTSTRTWALPTYNNHLYKQISSQSGATNDNHFFGYSTPWGYFDFNRFHCHFSPRDWQRLINNNWGFRPRKLRFKLFNIQVKEVTTNDGVTTIANNLTSTIQVFSDSEYQLPYVLGSAHQGCLPPFPADVFMIPQYGYLTLNNGSQSVGRSSFYCLEYFPSQMLRTGNNFEFSYTFEEVPFHSSYAHSQSLDRLMNPLIDQYLYYLARTQSTTGSTRELQFHQAGPNTMAEQSKNWLPGPCYRQQRLSKNIDSNNTSNFAWTGATKYHLNGRNSLTNPGVAMATNKDDEDQFFPINGVLVFGKTGAANKTTLENVLMTSEEEIKTTNPVATEQYGVVSSNLQSSTAGPQTQTVNSQGALPGMVWQNRDVYLQGPIWAKIPHTDGNFHPSPLMGGFGLKHPPPQILIKNTPVPANPPEVFTPAKFASFITQYSTGQVSVEIEWELQKENSKRWNPEIQYTSNYAKSNNVEFAVNNEGVYTEPRPIGTRYLTRNL

SEQ ID NO: 4769 - DNA, 2504 bp, Adeno-associated virus
gaattcgccctttctacggctgcgtcaactggaccaatgagaactttcccttcaacgattgcgtcgacaagatggtgatctggtgggaggagggcaagatgacggccaaggtcgtggagtccgccaaggccattcatcatctgctggggcgggctcccgagattgcttgctcggcctgcgatctggtcaacgtggacctggatgactgtgtttctgagcaataaatgacttaaaccaggtatggctgccgatggttatcttccagattggctcgaggacaacctctctgagggcattcgcgagtggtgggacttgaaacctggagccccgaaacccaaagccaaccagcaaaagcaggacgacggccggggtctggtgcttcctggctacaagtacctcggacccttcaacggactcgacaagggagagccggtcaacgaggcagacgccgcggccctcgagcacgacaaggcctacgacaagcagctcgagcagggggacaacccgtacctcaagtacaaccacgccgacgccgagtttcaggagcgtcttcaagaagatacgtcttttgggggcaacctcgggcgagcagtcttccaggccaagaagcgggttctcgaacctctcggtctggttgaggaaggcgctaagacggctcctggaaagaagagacccatagaatcccccgactcctccacgggcatcggcaagaaaggccagcagcccgctaaaaagaagctcaactttgggcagactggcgactcagagtcagtgcccgaccctcaaccaatcggagaaccccccgcaggcccctctggtctgggatctggtacaatggctgcaggcggtggcgctccaatggcagacaataacgaaggcgccgacggagtgggtaatgcctccggaaattggcattgcgattccacatggctgggcgacagagtcatcaccaccagcacccgcacctgggccctgcccacctacaacaaccacctctacaagcagatatcaagtcagagcggggctaccaacgacaaccacttcttcggctacagcaccccctggggctattttgacttcaacagattccactgccacttctcatcacgtgactggcagcgactcatcaacaacaactggggattccggcccaagagactcaacttcaagctcttcaacatccaggtcaaggaggtcacgcagaatgaaggcaccaagaccatcgccaataaccttaccagcacgattcaggtctttacggactcggaataccggctcccgtacgtcctcggctctgcgcaccagggctgcctgcctccgttcccggcggacgtcttcatgattcctcagtacgggtacctgactctgaacaacggcagtcaggccgtgggccgttcctccttctactgcctggagtactttccttctcaaatgctgagaacgggcaacaactttgagttcagctaccagtttgaggacgtgccttttcacagcagctacgcgcacagccaaagcctggaccggctgatgaaccccctcatcgaccagtacctgtactacctgtctcggactcagtccacgggaggtaccgcaggaactcagcagttgctattttctcaggccgggcctaataacatgtcggctcaggccaaaaactggctacccgggccctgctaccggcagcaacgcgtctccacgacactgtcgcaaaataacaacagcaactttgcttggaccggtgccaccaagtatcatctgaatggcagagactctctggtaaatcccggtgtcgctatggcaacgcacaaggacgacgaagagcgattttttccatccagcggagtcttgatgtttgggaaacagggagctggaaaagacaacgtggactatagcagcgttatgctaaccagtgaggaagaaatcaaaaccaccaacccagtggccacagaacagtacggcgtggtggccgataacctgcaacagcaaaacgccgctcctattgtaggggccgtcaacagtcaaggagccttacctggcatggtctggcagaaccgggacgtgtacctgcagggtcctatctgggccaagattcctcacacggacggcaactttcatccttcgccgctgatgggaggctttggactgaaacacccgcctcctcagatcctgattaagaatacacctgttcccgcggatcctccaactaccttcagtcaagccaagccggcgtcgttcatcacgcagtacagcaccggacaggtcagcgtggaaattgaatgggagctgcagaaagagaacagcaagcgctggaacccagagattcagtatacttccaactactacaaatctacaaatgtggactttgctgtcaatactgagggtacttattcagagcctcgccccattggcacccgttacctcacccgtaacctgtaattgcctgttaatcaataaaccggttaattcgtttcagttgaactttggtctctgcgaagggcgaattc

SEQ ID NO: 4770 - protein, 731 aa, Adeno-associated virus
MAADGYLPDWLEDNLSEGIREWWDLKPGAPKPKANQQKQDDGRGLVLPGYKYLGPFNGLDKGEPVNEADAAALEHDKAYDKQLEQGDNPYLKYNHADAEFQERLQEDTSFGGNLGRAVFQAKKRVLEPLGLVEEGAKTAPGKKRPIESPDSSTGIGKKGQQPAKKKLNFGQTGDSESVPDPQPIGEPPAGPSGLGSGTMAAGGGAPMADNNEGADGVGNASGNWHCDSTWLGDRVITTSTRTWALPTYNNHLYKQISSQSGATNDNHFFGYSTPWGYFDFNRFHCHFSSRDWQRLINNNWGFRPKRLNFKLFNIQVKEVTQNEGTKTIANNLTSTIQVFTDSEYRLPYVLGSAHQGCLPPFPADVFMIPQYGYLTLNNGSQAVGRSSFYCLEYFPSQMLRTGNNFEFSYQFEDVPFHSSYAHSQSLDRLMNPLIDQYLYYLSRTQSTGGTAGTQQLLFSQAGPNNMSAQAKNWLPGPCYRQQRVSTTLSQNNNSNFAWTGATKYHLNGRDSLVNPGVAMATHKDDEERFFPSSGVLMFGKQGAGKDNVDYSSVMLTSEEEIKTTNPVATEQYGVVADNLQQQNAAPIVGAVNSQGALPGMVWQNRDVYLQGPIWAKIPHTDGNFHPSPLMGGFGLKHPPPQILIKNTPVPADPPTTFSQAKPASFITQYSTGQVSVEIEWELQKENSKRWNPEIQYTSNYYKSTNVDFAVNTEGTYSEPRPIGTRYLTRNL

SEQ ID NO: 4771 - protein, 731 aa, Adeno-associated virus
MAADGYLPDWLEDNLSEGIREWWDLKPGAPKPKANQQKQDDGRGLVLPGYKYLGPFNGLDKGEPVNEADAAALEHDKAYDKQLEQGDNPYLKYNHADAEFQERLQEDTSFGGNLGRAVFRAKKRVLEPLGLVEEGAKTAPGKKRPIESPDSSTGIGKKGQQPAKKKLNFGQTGDSESVPDPQPLGEPPAAPSGLGSGTMAAGGGAPMADNNEGADGVGNASGNWHCDSTWLGDRVITTSTRTWALPTYNNHLYKQISSQSGATNDNHFFGYSTPWGYFDFNRFHCHFSPRDWQRLINNNRGFRPRKLRFKLFNIQVKEVTTNDGVTTIANNLTSTIQVFSDSEYQLPYVLGSAHQGCLPPFPADVFMIPQYGYLTLNNGSQSVGRSSFYCLEYFPSQMLRTGNNFEFSYQFEDVPFHSSYAHSQSLDRLMNPLIDQYLYYLSRTQSTGGTAGTQQLLFSQAGPNNMSAQAKNWLPGPCYRQQRVSTTLSQNNNSNFAWTGATKYHLNGRDSLVNPGVAMATHKDDEERFFPSSGVLMFGKQGAGKDNVDYSSVMLTSEEEIKTTNPVATEQYGVVADNLQQQNAAPIVGAVNSQGALPGMAWQNRDVYLQGPIWAKIPHTDGNFHPSPLMGGFGLKHPPPQILIKNTPVPADPPTTFSQAKLASFITQYSTGQVSVEIEWELQKENSKRWNPEIQYTSNYYKSTNVDFAVNTEGTYSEPRPIGTRYLTRNL

SEQ ID NO: 4772 - protein, 738 aa, Adeno-associated virus
MAADGYLPDWLEDNLSEGIREWWDLKPGAPKPKANQQKQDDGRGLVLPGYKYLGPFNGLDKGEPVNEADAAALEHDKAYDKQLEQGDNPYLKYNHADAEFQERLQEDTSFGGNLGRAVFQAKKRVLEPLGLVEEGAKTAPGKKRPVEPSPQRSPDSSTGIGKTGQQPAKKRLNFGQTGDSESVPDPQPIGEPPAGPSGLGSGTMAAGGGAPMADNNEGADGVGSSSGNWHCDSTWLGDRVITTSTRTWALPTYNNHLYKQISNGTSGGSTNDNTYFGYSTPWGYFDFNRFHCHFSPRDWQRLINNNWGFRPKRLNFKLFNIQVKEVTQNEGTKTIANNLTSTIQVFTDSEYQLPYVLGSAHQGCLPPFPADVFMIPQYGYLTLNNGSQAVGRSSFYCLEYFPSQMLRTGNNFEFSYQFEDVPFHSSYAHSQSLDRLMNPLIDQYLYYLSRTQSTGGTAGTQQLLFSQAGPNNMSAQAKNWLPGPCYRQQRVSTTLSQNNNSNFAWTGATKYHLNGRDSLVNPGVAMATHKDDEERFFPSSGVLMFGKQGAGKDNVDYSSVMLTSEEEIKTTNPVATEQYGVVADNLQQQNAAPIVGAVNSQGALPGMVWQNRDVYLQGPIWAKIPHTDGNFHPSPLMGGFGLKHPPPQILIKNTPVPADPPTTFSQAKLASFITQYSTGQVSVEIEWELQKENSKRWNPEIQYTSNYYKSTNVDFAVNTEGTYSEPRPIGTRYLTRNL

SEQ ID NO: 4773 - protein, 735 aa, Adeno-associated virus
MAADGYLPDWLEDNLSEGIREWWDLKPGAPKPKANQQKQDDGRGLVLPGYKYLGPFNGLDKGEPVNEADAAALEHDKAYDKQLEQGDNPYLKYNHADAEFQERLQEDTSFGGNLGRAVFQAKKRVLEPLGLVEEGAKTAPGKKRPVEPSPQRSPDSSTGIGKTGQQPAKKRLNFGQTGDSESVPDPQPIGEPPAGPSGLGSGTMAAGGGAPMADNNEGADGVGSSSGNWHCDSTWLGDRVITTSTRTWALPTYNNHLYKQISNGTSGGSTNDNTYFGYSTPWGYFDFNRFHCHFSPRDWQRLINNNWGFRPRKLRFKLFNIQVKEVTTDDGVTTIANNLTSTIQVFSDSEYQLPYVLGSAHQGCLPPFPADVFMIPQYGYLTLNNGSQSVGRSSFYCLEYFPSQMLRTGNNFEFSYTFEEVPFHSSYAHSQSLDRLMNPLIDQYLYYLARTQSTTGSTRELQFHQAGPNTMAEQSKNWLPGPCYRQQRLSKNIDSNNNSNFAWTGATKYHLNGRNSLTNPGVAMATNKDDEDQFFPINGVLVFGKTGAANKTTLENVLMTSEEEIKTTNPVATEEYGVVSSNLQSSTAGPQTQTVNSQGALPGMVWQNRDVYLQGPIWAKIPHTDGNFHPSPLMDGFGLKHPPPQILIKNTPVPANPPEVFTPAKFASFITQYSTGQVSVEIEWELQKENSKRWNPEIQYTSNYAKSNNVEFAVNNEGVYTEPRPIGTRYLTRNL

SEQ ID NO: 4774 - DNA, 3128 bp, Adeno-associated virus
gaattcgccctttctacggctgcgtcaactggaccaatgagaactttcccttcaacgattgcgtcgacaagatggtgatctggtgggaggagggcaagatgacggccaaggtcgtggagtccgccaaggccattctcggcggcagcaaggtgcgcgtggaccaaaagtgcaagtcttccgcccagatcgatcccacccccgtgatcgtcacttccaacaccaacatgtgcgccgtgattgacgggaacagcaccaccttcgagcaccagcagccgttacaagaccggatgttcaaatttgaactcacccgccgtctggagcacgactttggcaaggtgacaaagcaggaagtcaaagagttcttccgctgggcgcaggatcacgtgaccgaggtggcgcatgagttctacgtcagaaagggtggagccaacaagagacccgcccccgatgacgcggataaaagcgagcccaagcgggcctgcccctcagtcgcggatccatcgacgtcagacgcggaaggagctccggtggactttgccgacaggtaccaaaacaaatgttctcgtcacgcgggcatgcttcagatgctgtttccctgcaagacatgcgagagaatgaatcagaatttcaacatttgcttcacgcacgggaccagagactgttcagaatgtttccccggcgtgtcagaatctcaaccggtcgtcagaaagaggacgtatcggaaactctgtgccattcatcatctgctagggcgggctcccgagattgcttgctcggcctgcgatctggtcaacgtggacctggatgactgtgtttctgagcaataaatgacttaaaccaggtatggctgccgatggttatcttccagattggctcgaggacaacctctctgagggcattcgcgagtggtgggacttgaaacctggagccccgaaacccaaagccaaccagcaaaagcaggacgacggccggggtctggtgcttcctggctacaagtacctcggacccttcaacggactcgacaagggggagcccgtcaacgcggcggacgcagcggccctcgagcacgacaaggcctacgaccagcagctcaaagcgggtgacaatccgtacctgcggtataaccacgccgacgccgagtttcaggagcgtctgcaagaagatacgtcttttgggggcaacctcgggcgagcagtcttccaggccaagaagcgggttctcgaacctctcggtctggttgaggaaggcgctaagacggctcctggaaagaagagaccggtagagccatcaccccagcgttctccagactcctctacgggcatcggcaagacaggccagcagcccgcgaaaaagagactcaactttgggcagactggcgactcagagtcagtgcccgaccctcaaccaatcggagaaccccccgcaggcccctctggtctgggatctggtacaatggctgcaggcggtggcgctccaatggcagacaataacgaaggcgccgacggagtgggtagttcctcaggaaattggcattgcgattccacatggctgggcgacagagtcatcaccaccagcacccgaacctgggccctccccacctacaacaaccacctctacaagcaaatctccaacgggacatcgggaggaagcaccaacgacaacacctacttcggctacagcaccccctgggggtattttgactttaacagattccactgccacttctcaccacgtgactggcagcgactcatcaacaacaactggggattccggcccaagagactcaacttcaagctcttcaacatccaggtcaaggaggtcacgcagaatgaaggcaccaagaccatcgccaataaccttaccagcacgattcaggtctttacggactcggaataccagctcccgtacgtcctcggctctgcgcaccagggctgcctgcctccgttcccggcggacgtcttcatgattcctcagtacgggtacctgactctgaacaacggcagtcaggccgtgggccgttcctccttctactgcctggagtactttccttctcaaatgctgagaacgggcaacaactttgagttcagctaccagtttgaggacgtgccttttcacagcagctacgcgcacagccaaagcctggaccggctgatgaaccccctcatcgaccagtacctgtactacctgtctcggactcagtccacgggaggtaccgcaggaactcagcagttgctattttctcaggccgggcctaataacatgtcggctcaggccaaaaactggctacccgggccctgctaccggcagcaacgcgtctccacgacactgtcgcaaaataacaacagcaactttgcttggaccggtgccaccaagtatcatctgaatggcagagactctctggtaaatcccggtgtcgctatggcaacgcacaaggacgacgaagagcgattttttccatccagcggagtcttgatgtttgggaaacagggagctggaaaagacaacgtggactatagcagcgttatgctaaccagtgaggaagaaatcaaaaccaccaacccagtggccacagaacagtacggcgtggtggccgataacctgcaacagcaaaacgccgctcctattgtaggggccgtcaacagtcaaggagccttacctggcatggtctggcagaaccgggacgtgtacctgcagggtcctatctgggccaagattcctcacacggacggcaactttcatccttcgccgctgatgggaggctttggactgaaacacccgcctcctcagatcctgattaagaatacacctgttcccgcggatcctccaactaccttcagtcaagccaagctggcgtcgttcatcacgcagtacagcaccggacaggtcagcgtggaaattgaatgggagctgcagaaagagaacagcaagcgctggaacccagagattcagtatacttccaactactacaaatctacaaatgtggactttgctgtcaatactgagggtacttattcagagcctcgccccattggcacccgttacctcacccgtaacctgtaattgcctgttaatcaataaaccggctaattcgtttcagttgaactttggtctctgcgaagggcgaattc

SEQ ID NO: 4775 - protein, 738 aa, Adeno-associated virus
MAADGYLPDWLEDNLSEGIREWWDLKPGAPKPKANQQKQDDGRGLVLPGYKYLGPFNGLDKGEPVNAADAAALEHDKAYDQQLKAGDNPYLRYNHADAEFQERLQEDTSFGGNLGRAVFQAKKRVLEPLGLVEEGAKTAPGKKRPVEPSPQRSPDSSTGIGKTGQQPAKKRLNFGQTGDSESVPDPQPIGEPPAGPSGLGSGTMAAGGGAPMADNNEGADGVGSSSGNWHCDSTWLGDRVITTSTRTWALPTYNNHLYKQISNGTSGGSTNDNTYFGYSTPWGYFDFNRFHCHFSPRDWQRLINNNWGFRPKRLNFKLFNIQVKEVTQNEGTKTIANNLTSTIQVFTDSEYQLPYVLGSAHQGCLPPFPADVFMIPQYGYLTLNNGSQAVGRSSFYCLEYFPSQMLRTGNNFEFSYQFEDVPFHSSYAHSQSLDRLMNPLIDQYLYYLSRTQSTGGTAGTQQLLFSQAGPNNMSAQAKNWLPGPCYRQQRVSTTLSQNNNSNFAWTGATKYHLNGRDSLVNPGVAMATHKDDEERFFPSSGVLMFGKQGAGKDNVDYSSVMLTSEEEIKTTNPVATEQYGVVADNLQQQNAAPIVGAVNSQGALPGMVWQNRDVYLQGPIWAKIPHTDGNFHPSPLMGGFGLKHPPPQILIKNTPVPADPPTTFSQAKLASFITQYSTGQVSVEIEWELQKENSKRWNPEIQYTSNYYKSTNVDFAVNTEGTYSEPRPIGTRYLTRNL

SEQ ID NO: 4776 - DNA, 3084 bp, Adeno-associated virus
gaattcgccctttctacggctgcatcaactggaccaatgagaactttcccttcaacgattgcgtcgacaagatggtgatctggtgggaggagggcaagatgacggccaaggtcgtggagtccgccaaggccattctcggcggcagcaaggtgcgcgtggaccaaaagtgcaagtcgtccgcccagatcgaccccacccccgtgatcgtcacctccaacaccaacatgtgcgccgtgattgacgggaacagcaccaccttcgagcaccagcagccgttgcaggaccggatgttcaagttcgaactcacccgccgtctggagcacgactttggcaaggtgaccaagcaggaagtcaaagagttcttccgctgggcgcaggatcacgtgaccgaggtggcgcatgagttctacgtcagaaagggcggagccagcaaaagacccgcccccgatgacgcggatataagcgagcccaagcgggcctgcccctcagtcgcggatccatcgacgtcagacgcggaaggagctccggtggactttgccgacaggtaccaaaacaaatgttctcgtcacgcgggcatgcttcagatgctgtttccctgcaaaacgtgcgagaaaatgaatcagaatttcaacatttgcttcacgcacggggtcagagactgctcagaatgtttccccggtgcatcagaatctcaaccggtcgtcagaaaaaaaacgtatcagaaactgtgtgccattcatcatctgctggggcgggcacccgagattgcttgctcggcctgcgatctggtcaacgtggacctggacgactgtgtttctgagcaataaatgacttaaaccaggtatggctgccgatggttatcttccagattggcttgaggacaacctctctgagggcattcgcgagtggtgggacctgaaacctggagccccgaaacccaaagccaaccagcaaaagcaggacgacggccggggtctggtgcttcctggctacaagtacctcggacccttcaacggactcgacaagggggagcccgtcaacgcggcggacgcagcggccctcgagcacgacaaggcctacgaccagcagctcaaagcgggtgacaatccgtacctgcggtataaccacgccgacgccgagtttcaggagcgtctgcaagaagatacgtcttttgggggcaacctcgggcgagcagtcttccaggccaagaagcgggttctcgaacctctcggtctggttgaggaaggcgctaagacggctcctggaaagaagagaccggtagagccatcacctcagcgttcccccgactcctccacgggcatcggcaagaaaggccaccagcccgcgagaaagagactgaactttgggcagactggcgactcggagtcagtccccgaccctcaaccaatcggagaaccaccagcaggcccctctggtctgggatctggtacaatggctgcaggcggtggcgctccaatggcagacaataacgaaggcgccgacggagtgggtagttcctcaggaaattggcattgcgattccacatggctgggcgacagagtcatcaccaccagcacccgaacctgggccctgcccacctacaacaaccatctctacaagcaaatctccaacgggacatcgggaggaagcactaacgacaacacctactttggctacagcaccccctgggggtattttgacttcaacagattccactgccacttctcaccacgtgactggcagcgactcatcaacaataactggggattccggcccaagagactcaacttcaagctcttcaacatccaggtcaaggaggtcacgcagaatgaaggcaccaagaccatcgccaataaccttaccagcacgattcaggtgtttacggactcggaataccagctcccgtacgtccccggctctgcgcaccagggctgcctccctccgttcccggcggacgtcttcatgattcctcagtacgggtatctgaccctaaacaatggcagtcaggctgtgggccgttcctccttctactgcctggaatacttcccttctcaaatgctgaggacgggcaacaactttgaattcagctacaccttcgaggacgtgcctttccacagcagctacgcgcacagccagagcctggaccggctgatgaaccctctcatcgaccagtacctgtattacttatccagaactcagtccacaggaggaactcaaggtactcagcaattgttattttctcaagccgggcccgcaaacatgtcggctcaggccaagaactggctacctggaccgtgttaccgtcagcaacgagtttccacgacactgtcgcaaaacaacaacagcaattttgcttggaccggtgccaccaagtatcacctgaatggcagagactccctggttaatcccggcgttgccatggctacccacaaggacgacgaggagcgcttcttcccgtcaagcggagttctaatgtttggcaagcagggggctggaaaagacaatgtggactacagcagcgtgatgctcaccagcgaagaagaaattaaaactactaacccagtggctacagagcagtatggtgtggtggcagacaacctgcagcagaccaacggagctcccattgtgggaactgtcaacagccagggggccttacctggtatggtctggcaaaaccgggacgtgtacctgcagggccccatctgggccaaaattcctcacacggacggcaactttcatccttcgccgctgatgggaggctttggactgaaacacccgcctcctcagatcctggtgaaaaacactcctgttcctgcggatcctccgaccaccttcagccaggccaagctggcttcttttatcacgcagtacagcaccggacaggtcagcgtggaaatcgaatgggagctgcagaaagaaaacagcaagcgctggaacccagagattcagtatacttccaactactacaaatctacaaatgtggactttgctgtcaatactgagggtacttattcagagcctcgccccattggcactcgttatctcacccgtaatctgtaattgcttgttaatcaataaaccggt

SEQ ID NO: 4777 - protein, 738 aa, Adeno-associated virus
MAADGYLPDWLEDNLSEGIREWWDLKPGAPKPKANQQKQDDGRGLVLPGYKYLGPFNGLDKGEPVNAADAAALEHDKAYDQQLKAGDNPYLRYNHADAEFQERLQEDTSFGGNLGRAVFQAKKRVLEPLGLVEEGAKTAPGKKRPVEPSPQRSPDSSTGIGKKGHQPARKRLNFGQTGDSESVPDPQPIGEPPAGPSGLGSGTMAAGGGAPMADNNEGADGVGSSSGNWHCDSTWLGDRVITTSTRTWALPTYNNHLYKQISNGTSGGSTNDNTYFGYSTPWGYFDFNRFHCHFSPRDWQRLINNNWGFRPKRLNFKLFNIQVKEVTQNEGTKTIANNLTSTIQVFTDSEYQLPYVPGSAHQGCLPPFPADVFMIPQYGYLTLNNGSQAVGRSSFYCLEYFPSQMLRTGNNFEFSYTFEDVPFHSSYAHSQSLDRLMNPLIDQYLYYLSRTQSTGGTQGTQQLLFSQAGPANMSAQAKNWLPGPCYRQQRVSTTLSQNNNSNFAWTGATKYHLNGRDSLVNPGVAMATHKDDEERFFPSSGVLMFGKQGAGKDNVDYSSVMLTSEEEIKTTNPVATEQYGVVADNLQQTNGAPIVGTVNSQGALPGMVWQNRDVYLQGPIWAKIPHTDGNFHPSPLMGGFGLKHPPPQILVKNTPVPADPPTTFSQAKLASFITQYSTGQVSVEIEWELQKENSKRWNPEIQYTSNYYKSTNVDFAVNTEGTYSEPRPIGTRYLTRNL

SEQ ID NO: 4778 - DNA, 3123 bp, Adeno-associated virus
gaattcgcccttggctgcgtcaactggaccaatgagaactttcccttcaacgattgcgtcgacaagatggtgatctggtgggaggagggcaagatgacggccaaggtcgtggagtccgccaaggccattctcggcggcagcaaggtgcgcgtggaccaaaagtgcaagtcgtccgcccagatcgaccccacccccgtgatcgtcacctccaacaccaacatgtgcgccgtgattgacgggaacagcaccaccttcgagcaccagcagccgttgcaggaccggatgttcaagttcgaactcacccgccgtctggagcacgactttggcaaggtgaccaagcaggaagtcaaagagttcttccgctgggcgcaggatcacgtgaccgaggtggcgcatgagttctacgtcagaaagggcggagccagcaaaagacccgcccccgatgacgcggatataagcgagcccaagcgggcctgcccctcagtcgcggatccatcgacgtcagacgcggaaggagctccggtggactttgccgacaggtaccaaaacaaatgttctcgtcacgcgggcatgctccagatgctgtttccctgcaaaacgtgcgagagaatgaatcagaatttcaacatttgcttcacgcacggggtcagagactgctcagaatgtttccccggtgcatcagaatctcaaccggtcgtcagaaaaaaaacgtatcagaaactgtgtgccattcatcatctgctggggcgggcacccgagattgcttgctcggcctgcgatctggtcaacgtggacctggacgactgtgtttctgagcaataaatgacttaaaccaggtatggctgccgatggttatcttccagattggcttgaggacaacctctctgagggcattcgcgagtggtgggacctgaaacctggagccccgaaacccaaagccaaccagcaaaagcaggacgacggccggggtctggtgcttcctggctacaagtacctcggacccttcaacggactcgacaagggggagcccgtcaacgcggcggacgcagcggccctcgagcacgacaaggcctacgaccagcagctcaaagcgggtgacaatccgtacctgcggtataaccacgccgacgccgagtttcaggagcgtctgcaagaagatacgtcttttgggggcaacctcgggcgagcagtcttccaggccaagaagcgggttctcgaacctctcggtctggttgaggaaggcgctaagacggctcctggaaagaagagaccggtagagccatcacctcagcgttcccccgactcctccacgggcatcggcaagaaaggccaccagcccgcgagaaagagactgaactttgggcagactggcgactcggagtcagtccccgaccctcaaccaatcggagaaccaccagcaggcccctctggtctgggatctggtacaatggctgcaggcggtggcgctccaatggcagacaataacgaaggcgccgacggagtgggtagttcctcaggaaattggcattgcgattccacatggctgggcgacagagtcatcaccaccagcacccgaacctgggccctgcccacctacaacaaccatctctacaagcaaatctccaacgggacatcgggaggaagcactaacgacaacacctactttggctacagcaccccctgggggtattttgacttcaacagattccactgccacttctcaccacgtgactggcagcgactcatcaacaataactggggattccggcccaagagactcaacttcaagctcttcaacatccaggtcaaggaggtcacgcagaatgaaggcaccaagaccatcgccaataaccttaccagcacgattcaggtgtttacggactcggaataccagctcccgtacgtcctcggctctgcgcaccagggctgcctccctccgttcccggcggacgtcttcatgattcctcagtacgggtatctgaccctaaacaatggcagtcaggctgtgggccgttcctccttctactgcctggaatacttcccttctcaaatgctgaggacgggcaacaactttgaattcagctacaccttcgaggacgtgcctttccacagcagctacgcgcacagccagagcctggaccggctgatgaaccctctcatcgaccagtacctgtattacttatccagaactcagtccacaggaggaactcaaggtactcagcaattgttattttctcaagccgggcccgcaaacatgtcggctcaggccaagaactggctacctggaccgtgttaccgtcagcaacgagtttccacgacactgtcgcaaaacaacaacagcaattttgcttggaccggtgccaccaagtatcacctgaatggcagagactccctggttaatcccggcgttgccatggctacccacaaggacgacgaggagcgcttcttcccgtcaagcggagttctaatgtttggcaagcagggggctggaaaagacaatgtggactacagcagcgtgatgctcaccagcgaagaagaaattaaaactactaacccagtggctacagagcagtatggtgtggtggcagacaacctgcagcagaccaacggagctcccattgtgggaactgtcaacagccagggggccttacctggtatggtctggcaaaaccgggacgtgtacctgcagggccccatctgggccaaaattcctcacacggacggcaactttcatccttcgccgctgatgggaggctttggactgaaacacccgcctcctcagatcctggtgaaaaacactcctgttcctgcggatcctccgaccaccttcagccaggccaagctggcttcttttatcacgcagtacagcaccggacaggtcagcgtggaaatcgaatgggagctgcagaaagaaaacagcaagcgctggaacccagagattcagtatacttccaactactacaaatctacaaatgtggactttgctgtcaatactgagggtacttattcagagcctcgccccattggcactcgttatctcacccgtaatctgtaattgcttgttaatcaataaaccggttaattcgtttcagttgaactttggtctctgcgaagggcgaattc

SEQ ID NO: 4779 - protein, 738 aa, Adeno-associated virus
MAADGYLPDWLEDNLSEGIREWWDLKPGAPKPKANQQKQDDGRGLVLPGYKYLGPFNGLDKGEPVNAADAAALEHDKAYDQQLKAGDNPYLRYNHADAEFQERLQEDTSFGGNLGRAVFQAKKRVLEPLGLVEEGAKTAPGKKRPVEPSPQRSPDSSTGIGKKGHQPARKRLNFGQTGDSESVPDPQPIGEPPAGPSGLGSGTMAAGGGAPMADNNEGADGVGSSSGNWHCDSTWLGDRVITTSTRTWALPTYNNHLYKQISNGTSGGSTNDNTYFGYSTPWGYFDFNRFHCHFSPRDWQRLINNNWGFRPKRLNFKLFNIQVKEVTQNEGTKTIANNLTSTIQVFTDSEYQLPYVLGSAHQGCLPPFPADVFMIPQYGYLTLNNGSQAVGRSSFYCLEYFPSQMLRTGNNFEFSYTFEDVPFHSSYAHSQSLDRLMNPLIDQYLYYLSRTQSTGGTQGTQQLLFSQAGPANMSAQAKNWLPGPCYRQQRVSTTLSQNNNSNFAWTGATKYHLNGRDSLVNPGVAMATHKDDEERFFPSSGVLMFGKQGAGKDNVDYSSVMLTSEEEIKTTNPVATEQYGVVADNLQQTNGAPIVGTVNSQGALPGMVWQNRDVYLQGPIWAKIPHTDGNFHPSPLMGGFGLKHPPPQILVKNTPVPADPPTTFSQAKLASFITQYSTGQVSVEIEWELQKENSKRWNPEIQYTSNYYKSTNVDFAVNTEGTYSEPRPIGTRYLTRNL

SEQ ID NO: 4780 - DNA, 3122 bp, Adeno-associated virus
gaattcgccctttctacggctgcgtcaactggaccaatgagaactttcccttcaacgattgcgtcgacaagatggtgatctggtgggaggagggcaagatgacggccaaggtcgtggagtccgccaaggccattctcggcggcagcaaggtgcgtgtggaccaaaagtgcaagtcttccgcccagatcgatcccacccccgtgatcgtcacctccaacaccaacatgtgcgccgtgattgacgggaacagcgccaccttcgagcaccagcagccgttgcaggaccggatgttcaaatttgaactcacccgccgtctggagcatgactttggcaaggtgacgaagcaggaagtcaaagagttcttccgctgggcgcaggatcacgtgaccgaggtggcgcatgagttccacgtcagaaagggtggagccaacaagagacccgcccccgatgacgcggatataagcgagcccaagcgggcctgcccctcagtcgcggatccatcgacgtcagacgcggaaggagctccggtggactttgccgacaggtaccaaaacaaatgttctcgtcacgcgggcatgcttcagatgctgtttccctgcaagacatgcgagagaatgaatcagaatttcaacatttgcttcacgcacgggaccagagactgttcagaatgtttccccggcgtgtcagaatctcaaccggtcgtcagaaagaggacgtatcggaaactctgtgcgattcatcatctgctggggcgggctcccgagattgcttgctcggcctgcgatctggtcaacgtggacctggatgactgtgtttctgagcaataaatgacttaaaccaggtatggctgccgatggttatcttccagattggctcgaggacaacctctctgagggcattcgcgagtggtgggacttgaaacctggagccccgaaacccaaagccaaccagcaaaagcaggacgacggccggggtctggtgcttcctggctacaagtacctcggacccttcaacggactcgacaagggggagcccgtcaacgcggcggacgcagcggccctcgagcacgacaaagcctacgaccagcagctcaaagcgggtgacaatccgtacctgcggtataatcacgccgacgccgagtttcaggagcgtctgcaagaagatacgtcttttgggggcaacctcgggcgagcagtcttccaggccaagaagcgggttctcgaacctctcggtctggttgaggaaggcgctaagacggctcctggaaagaagagactggtagagcagtcgccacaagagccagactcctcctcgggcatcggcaagacaggccagcagcccgctaaaaagagactcaattttggtcagactggcgactcagagtcagtccccgacccacaacctctcggagaacctccagcagccccctcaggtctgggacctaatacaatggcttcaggcggtggcgctccaatggcagacaataacgaaggcgccgacggagtgggtaattcctcgggaaattggcattgcgattccacatggctgggggacagagtcatcaccaccagcacccgaacctgggccctgcccacctacaacaaccacctctacaagcaaatctccaacggcacctcgggaggaagcaccaacgacaacacctattttggctacagcaccccctgggggtattttgacttcaacagattccactgtcacttttcaccacgtgactggcaacgactcatcaacaacaattggggattccggcccaaaagactcaacttcaagctgttcaacatccaggtcaaggaagtcacgacgaacgaaggcaccaagaccatcgccaataatctcaccagcaccgtgcaggtctttacggactcggagtaccagttaccgtacgtgctaggatccgctcaccagggatgtctgcctccgttcccggcggacgtcttcacggttcctcagtacggctatttaactttaaacaatggaagccaagccctgggacgttcctccttctactgtctggagtatttcccatcgcagatgctgagaaccggcaacaactttcagttcagctacaccttcgaggacgtgcctttccacagcagctacgcgcacagccagagcctggacaggctgatgaatcccctcatcgaccagtacctgtactacctggtcagaacgcaaacgactggaactggagggacgcagactctggcattcagccaagcgggtcctagctcaatggccaaccaggctagaaattgggtgcccggaccttgctaccggcagcagcgcgtctccacgacaaccaaccagaacaacaacagcaactttgcctggacgggagctgccaagtttaagctgaacggccgagactctctaatgaatccgggcgtggcaatggcttcccacaaggatgacgacgaccgcttcttcccttcgagcggggtcctgatttttggcaagcaaggagccgggaacgatggagtggattacagccaagtgctgattacagatgaggaagaaatcaaggctaccaaccccgtggccacagaagaatatggagcagtggccatcaacaaccaggccgccaatacgcaggcgcagaccggactcgtgcacaaccagggggtgattcccggcatggtgtggcagaatagagacgtgtacctgcagggtcccatctgggccaaaattcctcacacggacggcaactttcacccgtctcccctgatgggcggctttggactgaagcacccgcctcctcaaattctcatcaagaacacaccggttccagcggacccgccgcttaccttcaaccaggccaagctgaactctttcatcacgcagtacagcaccggacaggtcagcgtggaaatcgagtgggagctgcagaaagaaaacagcaaacgctggaatccagagattcaatacacttccaactactacaaatctacaaatgtggactttgctgtcaacacggaaggagtttatagcgagcctcgccccattggcacccgttacctcacccgcaacctgtaattacatgttaatcaataaaccggttaattcgtttcagttgaactttggtctctgcgaagggcgaattc

SEQ ID NO: 4781 - protein, 736 aa, Adeno-associated virus
MAADGYLPDWLEDNLSEGIREWWDLKPGAPKPKANQQKQDDGRGLVLPGYKYLGPFNGLDKGEPVNAADAAALEHDKAYDQQLKAGDNPYLRYNHADAEFQERLQEDTSFGGNLGRAVFQAKKRVLEPLGLVEEGAKTAPGKKRLVEQSPQEPDSSSGIGKTGQQPAKKRLNFGQTGDSESVPDPQPLGEPPAAPSGLGPNTMASGGGAPMADNNEGADGVGNSSGNWHCDSTWLGDRVITTSTRTWALPTYNNHLYKQISNGTSGGSTNDNTYFGYSTPWGYFDFNRFHCHFSPRDWQRLINNNWGFRPKRLNFKLFNIQVKEVTTNEGTKTIANNLTSTVQVFTDSEYQLPYVLGSAHQGCLPPFPADVFTVPQYGYLTLNNGSQALGRSSFYCLEYFPSQMLRTGNNFQFSYTFEDVPFHSSYAHSQSLDRLMNPLIDQYLYYLVRTQTTGTGGTQTLAFSQAGPSSMANQARNWVPGPCYRQQRVSTTTNQNNNSNFAWTGAAKFKLNGRDSLMNPGVAMASHKDDDDRFFPSSGVLIFGKQGAGNDGVDYSQVLITDEEEIKATNPVATEEYGAVAINNQAANTQAQTGLVHNQGVIPGMVWQNRDVYLQGPIWAKIPHTDGNFHPSPLMGGFGLKHPPPQILIKNTPVPADPPLTFNQAKLNSFITQYSTGQVSVEIEWELQKENSKRWNPEIQYTSNYYKSTNVDFAVNTEGVYSEPRPIGTRYLTRNL

SEQ ID NO: 4782 - DNA, 3117 bp, Adeno-associated virus
gaattcgcccttggctgcgtcaactggaccaatgagaactttcccttcaacgattgcgtcgacaagatggtgatctggtgggaggagggcaagatgacggccaaggtcgtggagtccgccaaggccattctcggcggcagcaaggtgcgtgtggaccaaaagtgcaagtcttccgcccagatcgatcccacccccgtgatcgtcacctccaacaccaacatgtgcgccgtgattgacgggaacagcaccaccttcgagcaccagcagccgttgcaggaccggatgttcaaatttgaactcacccgccgtctggagcatgactttggcaaggtgacgaagcaggaagtcaaagagttcttccgctgggcgcaggatcacgtgaccgaggtggcgcatgagttccacgtcagaaagggtggagccaacaagagacccgcccccgatgacgcggatataagcgagcccaagcgggcctgcccctcagtcgcggatccatcgacgtcagacgcggaaggagctccggtggactttgccgacaggtaccaaaacaaatgttctcgtcacgcgggcatgcttcagatgctgtttccctgcaagacatgcgagagaatgaatcagaatttcaacatttgcttcacgcacgggaccagagactgttcagaatgtttccccggcgtgtcagaatctcaaccggtcgtcagaaagaggacgtatcggaaactctgtgcgattcatcatctgctggggcgggctcccgagattgcttgctcggcctgcgatctggtcaacgtggacctggatgactgtgtttctgagcaataaatgacttaaaccaggtatggctgccgatggttatcttccagattggctcgaggacaacctctctgagggcattcgcgagtggtgggacttgaaacctggagccccgaaacccaaagccaaccagcaaaagcaggacgacggccggggtctggtgcttcctggctacaagtacctcggacccttcaacggactcgacaagggggagcccgtcaacgcggcggacgcagcggccctcgagcacgacaaagcctacgaccagcagctcaaagcgggtgacaatccgtacctgcggtataatcacgccgacgccgagtttcaggagcgtctgcaagaagatacgtcttttgggggcaacctcgggcgagcagtcttccaggccaagaagcgggttctcgaacctctcggtctggttgaggaaggcgctaagacggctcctggaaagaagagaccggtagagcagtcgccacaagagccagactcctcctcgggcatcggcaagacaggccagcagcccgctaaaaagagactcaattttggtcagactggcgactcagagtcagtccccgacccacaacctctcggagaacctccagcagccccctcaggtctgggacctaatacaatggcttcaggcggtggcgctccaatggcagacaataacgaaggcgccgacggagtgggtaattcctcgggaaattggcattgcgattccacatggctgggggacagagtcatcaccaccagcacccgaacctgggccctgcccacctacaacaaccacctctacaagcaaatctccaacggcacctcgggaggaagcaccaacgacaacacctattttggctacagcaccccctgggggtattttgacttcaacagattccactgtcacttttcaccacgtgactggcaacgactcatcaacaacaattggggattccggcccaaaagactcaacttcaagctgttcaacatccaggtcaaggaagtcacgacgaacgaaggcaccaagaccatcgccaataatctcaccagcaccgtgcgggtctttacggactcggagtaccagttaccgtacgtgctaggatccgctcaccagggatgtctgcctccgttcccggcggacgtcttcatggttcctcagtacggctatttaactttaaacaatggaagccaagccctgggacgttcctccttctactgtctggagtatttcccatcgcagatgctgagaaccggcaacaactttcagttcagctacaccttcgaggacgtgcctttccacagcagctacgcgcacagccagagcctggacaggctgatgaatcccctcatcgaccagtacctgtactacctggtcagaacgcaaacgactggaactggagggacgcagactctggcattcagccaagcgggtcctagctcaatggccaaccaggctagaaattgggtgcccggaccttgctaccggcagcagcgcgtctccacgacaaccaaccagagcaacaacagcaactttgcctggacgggagctgccaagtttaagctgaacggccgagactctctaatgaatccgggcgtggcaatggcttcccacaaggatgacgacgaccgcttcttcccttcgagcggggtcctgatttttggcaagcaaggagccgggaacgatggagtggattacagccaagtgctgattacagatgaggaagaaatcaaggctaccaaccccgtggccacagaagaatatggagcagtggccatcaacaaccaggccgccaatacgcaggcgcagaccggactcgtgcacaaccagggggtgattcccggcatggtgtggcagaatagagacgtgtacctgcagggtcccatctgggccaaaattcctcacacggacggcaactttcacccgtctcccctgatgggcggctttggactgaagcacccgcctcctcaaattctcatcaagaacacaccggttccagcggacccgccgcttaccttcaaccaggccaagctgaactctttcatcacgcagtacagcaccggacaggtcagcgtggaaatcgagtgggagctgcagaaagaaaacagcaaacgctggaatccagagattcaatacacttccaactactacaaatctacaaatgtggactttgctgtcaacacggaaggagtttatagcgagcctcgccccattggcacccgttacctcacccgcaacctgtaattacatgttaatcaataaaccggttaattcgtttcagttgaactttggtctctgcgaagggcgaattc

SEQ ID NO: 4783 - protein, 736 aa, Adeno-associated virus
MAADGYLPDWLEDNLSEGIREWWDLKPGAPKPKANQQKQDDGRGLVLPGYKYLGPFNGLDKGEPVNAADAAALEHDKAYDQQLKAGDNPYLRYNHADAEFQERLQEDTSFGGNLGRAVFQAKKRVLEPLGLVEEGAKTAPGKKRPVEQSPQEPDSSSGIGKTGQQPAKKRLNFGQTGDSESVPDPQPLGEPPAAPSGLGPNTMASGGGAPMADNNEGADGVGNSSGNWHCDSTWLGDRVITTSTRTWALPTYNNHLYKQISNGTSGGSTNDNTYFGYSTPWGYFDFNRFHCHFSPRDWQRLINNNWGFRPKRLNFKLFNIQVKEVTTNEGTKTIANNLTSTVRVFTDSEYQLPYVLGSAHQGCLPPFPADVFMVPQYGYLTLNNGSQALGRSSFYCLEYFPSQMLRTGNNFQFSYTFEDVPFHSSYAHSQSLDRLMNPLIDQYLYYLVRTQTTGTGGTQTLAFSQAGPSSMANQARNWVPGPCYRQQRVSTTTNQSNNSNFAWTGAAKFKLNGRDSLMNPGVAMASHKDDDDRFFPSSGVLIFGKQGAGNDGVDYSQVLITDEEEIKATNPVATEEYGAVAINNQAANTQAQTGLVHNQGVIPGMVWQNRDVYLQGPIWAKIPHTDGNFHPSPLMGGFGLKHPPPQILIKNTPVPADPPLTFNQAKLNSFITQYSTGQVSVEIEWELQKENSKRWNPEIQYTSNYYKSTNVDFAVNTEGVYSEPRPIGTRYLTRNL

SEQ ID NO: 4784 - DNA, 3121 bp, Adeno-associated virus
gaattcgcccttctacggctgcgtcaactggaccaatgagaactttcccttcaacgattgcgtcgacaagatggtgatctggtgggaggagggcaagatgacggccaaggtcgtggagtccgccaaggccattctcggcggcagcaaggtgcgtgtggaccaaaagtgcaagtcttccgcccagatcgatcccacccccgtgatcgtcacctccaacaccaacatgtgcgccgtgattgacgggaacagcaccaccttcgagcaccagcagccgttgcaggaccggatgttcaaatttgaactcacccgccgtctggagcatgactttggcaaggtgacgaagcaggaagtcaaagagttcttccgctgggcgcaggatcacgtgaccgaggtggcgcatgagttccacgtcagaaagggtggcgccaacaagagacccgcccccgatgacgcggatataagcgagcccaagcgggcctgcccctcagtcgcggatccatcgacgtcagacgcggaaggagctccggtggactttgccgacaggtaccaaaacaaatgttctcgtcacgcgggcatgcttcagatgctgtttccctgcaagacatgcgagagaatgaatcagaatttcaacatttgcttcacgcacgggaccagagactgttcagaatgtttccccggcgtgtcagaatctcaaccggtcgtcagaaagaggacgtatcggaaactctgtgcgattcatcatctgctggggcgggctcccgagattgcttgctcggcctgcgatctggtcaacgtggacctggatgactgtgtttctgagcaataaatgacttaaaccaggtatggctgccgatggttatcttccagattggctcgaggacaacctctctgagggcattcgcgagtggtgggacttgaaacctggagccccgaaacccaaagccaaccagcaaaagcaggacgacggccggggtctggtgcttcctggctacaagtacctcggacccttcaacggactcgacaagggggagcccgtcaacgcggcggacgcagcggccctcgagcacgacaaagcctacgaccagcagctcaaagcgggtgacaatccgtacctgcggtataatcacgccgacgccgagtttcaggagcgtctgcaagaagatacgtcctttgggggcaacctcgggcgagcagtcttccaggccaagaagcgggttctcgaacctctcggtctggttgaggaaggcgctaagacggctcctggaaagaagagaccggtagagcagtcgccacaagagccagactcctcctcgggcatcggcaagacaggccagcagcccgctaaaaagagactcaattttggtcagactggcgactcagagtcagtccccgacccacaacctctcggagaacctccagcagccccctcaggtctgggacctaatacaatggcttcaggcggtggcgctccaatggcagacaataacgaaggcgccgacggagtgggtaattcctcgggaaattggcattgcgattccacatggctgggggacagagtcatcaccaccagcacccgaacctgggccctgcccacctacaacaaccacctctacaagcaaatctccaacggcacctcgggaggaagcaccaacgacaacacctattttggctacagcaccccctgggggtattttgacttcaacagattccactgtcacttttcaccacgtgactggcaacgactcatcaacaacaattggggattccggcccaaaagactcaacttcaagctgttcaacatccaggtcaaggaagtcacgacgaacgaaggcaccaagaccatcgccaataatctcaccagcaccgtgcaggtctttacggacttggagtaccagttaccgtacgtgctaggatccgctcaccagggatgtctgcctccgttcccggcggacgtcttcatggttcctcagtacggctatttaactttaaacaatggaagccaagccctgggacgttcctccttctactgtctggagtatttcccatcgcagatgccgagaaccggcaacaactttcagttcagctacaccttcgaggacgtgcctttccacagcagctacgcgcacagccagagcctggacaggctgatgaatcccctcatcgaccagtacctgtactacctggtcagaacgcaaacgactggaactggagggacgcagactctggcattcagccaagcgggtcctagctcaatggccaaccaggctagaaattgggtgcccggaccttgctaccggcagcagcgcgtctccacgacaaccaaccagaacaacaacagcaactttgcctggacgggagctgccaagtttaagctgaacggccgagactctctaatgaatccgggcgtggcaatggcttcccacaaggatgacgacgaccgcttcttcccttcgagcggggtcctgatttttggcaagcaaggagccgggaacgatggagtggattacagccaagtgctgattacagatgaggaagaaatcaaggctaccaaccccgtggccacagaagaatatggagcagtggccatcaacaaccaggccgccaatacgcaggcgcagaccggactcgtgcacaaccagggggtgattcccggcatggtgtggcagaatagagacgtgtacctgcagggtcccatctgggccaaaattcctcacacggacggcaactttcacccgtctcccctgatgggcggctttggactgaagcacccgcctcctcaaattctcatcaagaacacaccggttccagcggacccgccgcttaccttcaaccaggccaagctgaactctttcatcacgcagtacagcaccggacaggtcagcgtggaaatcgagtgggagctgcagaaagaaaacagcaaacgctggaatccagagattcaatacacttccaactactacaaatctacaaatgtggactttgctgtcaacacggaaggagtttatagcgagcctcgccccattggcacccgttacctcacccgcaacctgtaattacatgttaatcaataaaccggttaattcgtttcagttgaactttggtctctgcgaagggcgaattc

SEQ ID NO: 4785 - protein, 736 aa, Adeno-associated virus
MAADGYLPDWLEDNLSEGIREWWDLKPGAPKPKANQQKQDDGRGLVLPGYKYLGPFNGLDKGEPVNAADAAALEHDKAYDQQLKAGDNPYLRYNHADAEFQERLQEDTSFGGNLGRAVFQAKKRVLEPLGLVEEGAKTAPGKKRPVEQSPQEPDSSSGIGKTGQQPAKKRLNFGQTGDSESVPDPQPLGEPPAAPSGLGPNTMASGGGAPMADNNEGADGVGNSSGNWHCDSTWLGDRVITTSTRTWALPTYNNHLYKQISNGTSGGSTNDNTYFGYSTPWGYFDFNRFHCHFSPRDWQRLINNNWGFRPKRLNFKLFNIQVKEVTTNEGTKTIANNLTSTVQVFTDLEYQLPYVLGSAHQGCLPPFPADVFMVPQYGYLTLNNGSQALGRSSFYCLEYFPSQMPRTGNNFQFSYTFEDVPFHSSYAHSQSLDRLMNPLIDQYLYYLVRTQTTGTGGTQTLAFSQAGPSSMANQARNWVPGPCYRQQRVSTTTNQNNNSNFAWTGAAKFKLNGRDSLMNPGVAMASHKDDDDRFFPSSGVLIFGKQGAGNDGVDYSQVLITDEEEIKATNPVATEEYGAVAINNQAANTQAQTGLVHNQGVIPGMVWQNRDVYLQGPIWAKIPHTDGNFHPSPLMGGFGLKHPPPQILIKNTPVPADPPLTFNQAKLNSFITQYSTGQVSVEIEWELQKENSKRWNPEIQYTSNYYKSTNVDFAVNTEGVYSEPRPIGTRYLTRNL

SEQ ID NO: 4786 - DNA, 3122 bp, Adeno-associated virus
gaattcgccctttctacggctgcgtcaactggaccaatgagaactttcccttcaacgattgcgtcgacaagatggtgatctggtgggaggagggcaagatgacggccaaggtcgtggagtccgccaaggccattctcggcggcagcaaggtgcgtgtggaccaaaagtgcaagtcttccgcccagatcgatcccacccccgtgatcgtcacctccaacaccaacatgtgcgccgtgattgacgggaacagcaccaccttcgagcaccagcagccgttgcaggaccggatgttcaaatttgaactcacccgccgtctggagcatgactttggcaaggtgacgaagcaggaagtcaaagggttcttccgctgggcgcaggatcacgtgaccgaggtggcgcatgagttccacgtgcgagcccaagcgggcctgcccctcagtcgcggatccatcgacgtcagaccagaaagggtggagccaacaagagacccgcccccgatgacgcggatataagcggaaggagctccggtggactttgccgacaggtaccaaaacaaatgttctcgtcacgcgggcatgcttcagatgctgtttccctgcaagacatgcgagagaatgaatcagaatttcaacatttgcttcacgcacgggaccagagactgttcagaatgtttccccggcgtgtcagaatctcaaccggtcgtcagaaagaggacgtatcggaaactctgtgcgattcatcatctgctggggcgggctcccgagattgcttgctcggcctgcgatctggtcaacgtggacctggatgactgtgtttctgagcaataaatgacttaaaccaggtatggctgccgatggttatcttccagattggctcgaggacaacctctctgagggcattcgcgagtggtgggacttgaaacctggagccccgaaacccaaagccaaccagcaaaagcaggacgacggccggggtctggtgcttcctggctacaagtacctcggacccttcaacggactcgacaagggggagcccgtcaacgcggcggacgcagcggccctcgagcacgacaaagcctacgaccagcagctcaaagcgggtgacaatccgtacctgcggtataatcacgccgacgccgagtttcaggagcgtctgcaagaagatacgtcttttgggggcaacctcgggcgagcagtcttccaggccaagaagcgggttctcgaacctctcggtctggttgaggaaggcgctaagacggctcctggaaagaagagaccggtagagcagtcgccacaagagccagactcctcctcgggcatcggcaagacaggccagcagcccgctaaaaagagactcaattttggtcagactggcgactcagagtcagtccccgacccacaacctctcggagaacctccagcagccccctcaggtctgggacctaatacaatggcttcaggcggtggcgctccaatggcagacaataacgaaggcgccgacggagtgggtaattcctcgggaaattggcattgcgattccacatggctgggggacagagtcatcaccaccagcacccgaacctgggccctgcccacctacaacaaccacctctacaagcaaatctccaacggcacctcgggaggaagcaccaacgacaacacctattttggctacagcaccccctgggggtattttgacttcaacagattccactgtcacttttcaccacgtgactggcaacgactcatcaacaacaattggggattccggcccaaaagactcaacttcaagctgttcaacatccaggtcaaggaagtcacgacgaacgaaggcaccaagaccatcgccaataatctcaccagcaccgtgcaggtctttacggactcggagtaccagttaccgtacgtgctaggatccgctcaccagggatgtctgcctccgttcccggcggacgtcttcatggttcctcagtacggctatttaactttaaacaatggaagccaagccctgggacgttcctccttctactgtctggagtatttcccatcgcagatgctgagaaccggcaacaactttcagttcagctacaccttcgaggacgtgcctttccacagcagctacgcgcacagccagagcctggacaggctgatgaatcccctcatcgaccagtacctgtactacctggtcagaacgcaaacgactggaactggagggacgcagactctggcattcagccaagcgggtcctagctcaatggccaaccaggctagaaattgggtgcccggaccttgctaccggcagcagcgcgtctccacgacaaccaaccagaacaacaacagcaactttgcctggacgggagctgccaagtttaagctgaacggccgagactctctaatgaatccgggcgtggcaatggcttcccacaaggatgacgacgaccgcttcttcccttcgagcggggtcctgatttttggcaagcaaggagccgggaacgatggagtggattacagccaagtgctgattacagatgaggaagaaatcaaggctaccaaccccgtggccacagaagaatatggagcagtggccatcaacaaccaggccgccaatacgcaggcgcagaccggactcgtgcacaaccagggggtgattcccggcatggtgtggcagaatagagacgtgtacctgcagggtcccatctgggccaaaattcctcacacggacggcaactttcacccgtctcccctgatgggcggctttggactgaagcacccgcctcctcaaattctcatcaagaacacaccggttccagcggacccgccgcttaccttcaaccaggccaagctgaactctttcatcacgcagtacagcaccggacaggtcagcgtggaaatcgagtgggagctgcagaaagaaaacagcaaacgctggaatccagagattcaatacacttccaactactacaaatctacaaatgtggactttgctgtcaacacggagggggtttatagcgagcctcgccccattggcacccgttacctcacccgcaacctgtaattacatgttaatcaataaaccggttaattcgtttcagttgaactttggtctctgcgaagggcgaattc

SEQ ID NO: 4787 - protein, 736 aa, Adeno-associated virus
MAADGYLPDWLEDNLSEGIREWWDLKPGAPKPKANQQKQDDGRGLVLPGYKYLGPFNGLDKGEPVNAADAAALEHDKAYDQQLKAGDNPYLRYNHADAEFQERLQEDTSFGGNLGRAVFQAKKRVLEPLGLVEEGAKTAPGKKRPVEQSPQEPDSSSGIGKTGQQPAKKRLNFGQTGDSESVPDPQPLGEPPAAPSGLGPNTMASGGGAPMADNNEGADGVGNSSGNWHCDSTWLGDRVITTSTRTWALPTYNNHLYKQISNGTSGGSTNDNTYFGYSTPWGYFDFNRFHCHFSPRDWQRLINNNWGFRPKRLNFKLFNIQVKEVTTNEGTKTIANNLTSTVQVFTDSEYQLPYVLGSAHQGCLPPFPADVFMVPQYGYLTLNNGSQALGRSSFYCLEYFPSQMLRTGNNFQFSYTFEDVPFHSSYAHSQSLDRLMNPLIDQYLYYLVRTQTTGTGGTQTLAFSQAGPSSMANQARNWVPGPCYRQQRVSTTTNQNNNSNFAWTGAAKFKLNGRDSLMNPGVAMASHKDDDDRFFPSSGVLIFGKQGAGNDGVDYSQVLITDEEEIKATNPVATEEYGAVAINNQAANTQAQTGLVHNQGVIPGMVWQNRDVYLQGPIWAKIPHTDGNFHPSPLMGGFGLKHPPPQILIKNTPVPADPPLTFNQAKLNSFITQYSTGQVSVEIEWELQKENSKRWNPEIQYTSNYYKSTNVDFAVNTEGVYSEPRPIGTRYLTRNL

SEQ ID NO: 4788 - DNA, 2370 bp, Adeno-associated virus
gaattcgccctttctacggctgcgtcaactggaccaatgagaactttcccttcaacgattgcgtcgacaagatggtgatctggtgggaggagggcaagatgacggccaaggtcgtggagtccgccaaggccattctcggcggcagcaaggtgcgcgtggaccaaaagtgcaagtcgtccgcccagatcgaccccacccccgtgatcgtcacctccaacaccaacatgtgcgccgtgattgacgggaacagcaccaccttcgagcaccagcagccgttgcaggaccggatgttcaagttcgaactcacccgccgtctggagcacgactttggcaaggtgaccaagcaggaagtcaaagagttcttccgctgggcgcaggatcacgtgaccgaggtggcgcatgagttctacgtcagaaagggcggagccagcaaaagacccgcccccgatgacgcggatataagcgagcccaagcgggcctgcccctcagtcgcggatccatcgacgtcagacgcggaaggagctccggtggactttgccgacaggtaccaaaacaaatgttctcgtcacgcgggcatgcttcagacgctgtttccctgcaaaacgtgcgagagaatgaatcagaatttcaacatttgcttcacgcacggggtcagagactgctcagaatgtttccccggtgcatcagaatctcaaccggtcgtcagaaaaaaaacgtatcagaaactgtgtgccattcatcatctgctggggcgggcacccgagattgcttgctcggcctgcgatctggtcaacgtggacctggacgactgtgtttctgagcaataaatgacttaaaccaggtatggctgccgatggttatcttccagattggcttgaggacaacctctctgagggcattcgcgagtggtgggacctgaaacctggagccccgaaacccaaagccaaccagcaaaagcaggacgacggccggggtctggtgcttcctggctacaagtacctcggacccttcaacggactcgacaagggggagcccgtcaacgcggcggacgcagcggccctcgagcacgacaaggcctacgaccagcagctcaaagcgggtgacaatccgtacctgcggtataaccacgccgacgccgagtttcaggagcgtctgcaagaagatacgtcttttgggggcaacctcgggcgagcagtcttccaggccaagaagcgggttctcgaacctctcggtctggttgaggaaggcgctaagacggctcctggaaagaagagaccggtagagccatcacctcagcgttcccccgactcctccacgggcatcggcaagaaaggccaccagcccgcgagaaagagactgaactttgggcagactggcgactcggagtcagtccccgaccctcaaccaatcggagaaccaccagcaggcccctctggtctgggatctggtacaatggctgcaggcggtggcgctccaatggcagacaataacgaaggcgccgacggagtgggtagttcctcaggaaattggcattgcgattccacatggctgggcgacagagtcatcaccaccagcacccgaacctgggccctgcccacctacaacaaccatctctacaagcaaatctccaacgggacatcgggaggaagcactaacgacaacacctactttggctacagcaccccctgggggtattttgacttcaacagattccactgccacttctcaccacgtgactggcagcgactcatcaacaataactggggattccggcccaagagactcaacttcaagctcttcaacatccaggtcaaggaggtcacgcagaatgaaggcaccaagaccatcgccaataaccttaccagcacgattcaggtgtttacggactcggaataccagctcccgtacgtcctcggctctgcgcaccagggctgcctccctccgttcccggcggacgtcttcatgattcctcagtacgggtatctgaccctaaacaatggcagtcaggctgtgggccgttcctccttctactgcctggaatacttcccttctcaaatgctgaggacgggcaacaactttgaattcagctacaccttcgaggacgtgcctttccacagcagctacgcgcacagccagagcctggaccggctgatgaaccctctcatcgaccagtacctgtattacttatccagaactcagtccacaggaggaactcaaggtactcagcaattgttattttctcaagccgggcccgcaaacatgtyggctcaggccaagaactggctacctggaccgtgttaccgtcagcaacgagtttccacgacactgtcgcaaaacaacaacagcaattttgctggaccggtgccacca

SEQ ID NO: 4789 - protein, 738 aa, Adeno-associated virus; identical to SEQ ID NO: 4779

SEQ ID NO: 4790 - DNA, 2205 bp, Adeno-associated virus
atgactgacggttaccttccagattggctagaggacaacctctctgaaggcgttcgagagtggtgggcgctgcaacctggagcccctaaacccaaggcaaatcaacaacatcaggacaacgctcggggtcttgtgcttccgggttacaaatacctcggacccggcaacggactcgacaagggggaacccgtcaacgcagcggacgcggcagccctcgagcacgacaaggcctacgaccagcagctcaaggccggtgacaacccctacctcaagtacaaccacgccgacgcggagttccagcagcggcttcagggcgacacatcgtttgggggcaacctcggcagagcagtcttccaggccaaaaagagggttcttgaacctcttggtctggttgagcaagcgggtgagacggctcctggaaagaagagaccgttgattgaatccccccagcagcccgactcctccacgggtatcggcaaaaaaggcaagcagccggctaaaaagaagctcgttttcgaagacgaaactggagcaggcgacggaccccctgagggatcaacttccggagccatgtctgatgacagtgagatgcgtgcagcagctggcggagctgcagtcgagggcggacaaggtgccgatggagtgggtaatgcctcgggtgattggcattgcgattccacctggtctgagggccacgtcacgaccaccagcaccagaacctgggtcttgcccacctacaacaaccacctctacaagcgactcggagagagcctgcagtccaacacctacaacggattctccaccccctggggatactttgacttcaaccgcttccactgccacttctcaccacgtgactggcagcgactcatcaacaacaactggggcatgcgacccaaagccatgcgggtcaaaatcttcaacatccaggtcaaggaggtcacgacgtcgaacggcgagacaacggtggctaataaccttaccagcacggttcagatctttgcggactcgtcgtacgaactgccgtacgtgatggatgcgggtcaagagggcagcctgcctccttttcccaacgacgtctttatggtgccccagtacggctactgtggactggtgaccggcaacacttcgcagcaacagactgacagaaatgccttctactgcctggagtactttccttcgcagatgctgcggactggcaacaactttgaaattacgtacagttttgagaaggtgcctttccactcgatgtacgcgcacagccagagcctggaccggctgatgaaccctctcatcgaccagtacctgtggggactgcaatcgaccaccaccggaaccaccctgaatgccgggactgccaccaccaactttaccaagctgcggcctaccaacttttccaactttaaaaagaactggctgcccgggccttcaatcaagcagcagggcttctcaaagactgccaatcaaaactacaagatccctgccaccgggtcagacagtctcatcaaatacgagacgcacagcactctggacggaagatggagtgccctgacccccggacctccaatggccacggctggacctgcggacagcaagttcagcaacagccagctcatctttgcggggcctaaacagaacggcaacacggccaccgtacccgggactctgatcttcacctctgaggaggagctggcagccaccaacgccaccgatacggacatgtggggcaacctacctggcggtgaccagagcaacagcaacctgccgaccgtggacagactgacagccttgggagccgtgcctggaatggtctggcaaaacagagacatttactaccagggtcccatttgggccaagattcctcataccgatggacactttcacccctcaccgctgattggtgggtttgggctgaaacacccgcctcctcaaatttttatcaagaacaccccggtacctgcgaatcctgcaacgaccttcagctctactccggtaaactccttcattactcagtacagcactggccaggtgtcggtgcagattgactgggagatccagaaggagcggtccaaacgctggaaccccgaggtccagtttacctccaactacggacagcaaaactctctgttgtgggctcccgatgcggctgggaaatacactgagcctagggctatcggtacccgctacctcacccaccacctgtaa

SEQ ID NO: 4791 - protein, 734 aa, Adeno-associated virus
MTDGYLPDWLEDNLSEGVREWWALQPGAPKPKANQQHQDNARGLVLPGYKYLGPGNGLDKGEPVNAADAAALEHDKAYDQQLKAGDNPYLKYNHADAEFQQRLQGDTSFGGNLGRAVFQAKKRVLEPLGLVEQAGETAPGKKRPLIESPQQPDSSTGIGKKGKQPAKKKLVFEDETGAGDGPPEGSTSGAMSDDSEMRAAAGGAAVEGGQGADGVGNASGDWHCDSTWSEGHVTTTSTRTWVLPTYNNHLYKRLGESLQSNTYNGFSTPWGYFDFNRFHCHFSPRDWQRLINNNWGMRPKAMRVKIFNIQVKEVTTSNGETTVANNLTSTVQIFADSSYELPYVMDAGQEGSLPPFPNDVFMVPQYGYCGLVTGNTSQQQTDRNAFYCLEYFPSQMLRTGNNFEITYSFEKVPFHSMYAHSQSLDRLMNPLIDQYLWGLQSTTTGTTLNAGTATTNFTKLRPTNFSNFKKNWLPGPSIKQQGFSKTANQNYKIPATGSDSLIKYETHSTLDGRWSALTPGPPMATAGPADSKFSNSQLIFAGPKQNGNTATVPGTLIFTSEEELAATNATDTDMWGNLPGGDQSNSNLPTVDRLTALGAVPGMVWQNRDIYYQGPIWAKIPHTDGHFHPSPLIGGFGLKHPPPQIFIKNTPVPANPATTFSSTPVNSFITQYSTGQVSVQIDWEIQKERSKRWNPEVQFTSNYGQQNSLLWAPDAAGKYTEPRAIGTRYLTHHL

SEQ ID NO: 4792 - DNA, 3128 bp, Adeno-associated virus
gaattcgccctttctacggctgcgtcaactggaccaatgagaactttcccttcaacgattgcgtcgacaagatgttgatctggtgggaggagggcaagatgacggccaaggtcgtggagtccgccaaggccattctcggcggcagcaaagtgcgcgtggaccaaaagtgcaagccgtccgcccagatcgaccccacccccgtgatcgtcacctccaacaccaacatgtgcgccgtgattgacgggaacagcaccaccttcgagcaccagcagccgttgcgggaccggatgttcaagtttgaactcacccgccgtctggagcacgactttggcaaggtgacaaagcaggaagtcagagagttcttccgctgggcgcaggatcacgtgaccgaggtggcgcacgagttctacgtcagaaagggtggagccaacaagagacccgcccccgatgacgcggataaaagcgagcccaagcgggcctgcccctcagtcgcggatccatcgacgtcagacgcggaaggagctccggtggactttgccgacaggtaccaaaacaaatgttctcgtcacgcgggcatgcttcagatgctgtttccctgcaaaacatgcgagagaatgaatcagaatttcaacatttgcttcacgcacgggaccagagactgttcagaatgtttccccggcgtgtcagaatctcaaccggtcgtcagaaaaaagacgtatcggaaactctgtgcgattcatcatctgctggggcgggcacccgagattgcttgctcggcctgcgatctggtcaacgtggacctagatgactgtgtttctgagcaataaatgacttaaaccaggtatggctgccgatggttatcttccagattggctcgaggacaacctctctgagggcattcgcgagtggtgggacttgaaacctggagccccgaaacccaaagccaaccagcaaaagcaggacgacggccggggtctggtgcttcctggctacaagtacctcggacccttcaacggactcgacaagggggagcccgtcaacgcggcggacgcagcggccctcgagcacgacaaggcctacgaccagcagctcaaagcgggtgacaatccgtacctgcggtataaccacgccgacgccgagtttcaggagcgtctgcaagaagatacgtcttttgggggcaacctcgggcgagcagtcttccaggccaagaagcgggttctcgaacctctcggtctggttgaggaaggcgctaagacggctcctggaaagaagagaccggtagagccatcaccccagcgttctccagactcctctacgggcatcggcaagaaaggccagcagcccgcgaaaaagagactcaactttgggcagactggcgactcagagtcagtgcccgaccctcaaccaatcggagaaccccccgcaggcccctctggtctgggatctggtacaatggctgcaggcggtggcgctccaatggcagacaataacgaaggcgccgacggagtgggtagttcctcaggaaattggcattgcgattccacatggctgggcgacagagtcatcaccaccagcacccgaacctgggccctccccacctacaacaaccacctctacaagcaaatctccaacgggacttcgggaggaagcaccaacgacaacacctacttcggctacagcaccccctgggggtattttgactttaacagattccactgccacttctcaccacgtgactggcagcgactcatcaacaacaactggggattccggcccaagagactcaacttcaagctcttcaacatccaggtcaaggaggtcacgcagaatgaaggcaccaagaccatcgccaataaccttaccagcacgattcaggtctttacggactcggaataccagctcccgtacgtcctcggctctgcgcaccagggctgcctgcctccgttcccggcggacgtcttcatgattcctcagtacgggtacctgactctgaacaatggcagtcaggccgtgggccgttcctccttctactgcctggagtactttccttctcaaatgctgagaacgggcaacaactttgagttcagctaccagtttgaggacgtgccttttcacagcagctacgcgcacagccaaagcctggaccggctgatgaaccccctcatcgaccagtacctgtactacctgtctcggactcagtccacgggaggtaccgcaggaactcagcagttgctattttctcaggccgggcctaataacatgtcggctcaggccaaaaactggctacccgggccctgctaccggcagcaacgcgtctccacgacactgtcgcaaaataacaacagcaactgtaaatcccggtgtcgctatggcaacccacaaggacgacgaagagcgattttgcctggaccggtgccaccaagtatcatctgaatggcagagactctctgttttccgtccagcggagtcttaatgtttgggaaacagggagctggaaaagacaacgtggactatagcagcgttatgctaaccagtgaggaagaaattaaaaccaccaacccagtggccacggaacagtacggcgtggtggccgataacctgcaacagcaaaacgccgctcctattgtaggggccgtcaacagtcaaggagccttacctggcatggtctggcagaaccgggacgtgtacctgcagggtcctatctgggccaagattcctcacacggacggaaactttcatccctcgccgctgatgggaggctttggactgaaacacccgcctcctcagatcctgattaagaatacacctgttcccgcggatcctccaactaccttcagtcaagctaagctggcgtcgttcatcacgcagtacagcaccggacaggtcagcgtggaaattgaatgggagctgcagaaagaaaacagcaaacgctggaacccagagattcaatacacttccaactactacaaatctacaaatgtggacttcgctgttaacacagatggcacttattctgagcctcgccccattggcacccgttacctcacccgtaatctgtaattgctcgttaatcaataaaccggttgattcgtttcagttgaactttggtctctgcgaagggcgaattc

SEQ ID NO: 4793 - protein, 738 aa, Adeno-associated virus
MAADGYLPDWLEDNLSEGIREWWDLKPGAPKPKANQQKQDDGRGLVLPGYKYLGPFNGLDKGEPVNAADAAALEHDKAYDQQLKAGDNPYLRYNHADAEFQERLQEDTSFGGNLGRAVFQAKKRVLEPLGLVEEGAKTAPGKKRPVEPSPQRSPDSSTGIGKKGQQPAKKRLNFGQTGDSESVPDPQPIGEPPAGPSGLGSGTMAAGGGAPMADNNEGADGVGSSSGNWHCDSTWLGDRVITTSTRTWALPTYNNHLYKQISNGTSGGSTNDNTYFGYSTPWGYFDFNRFHCHFSPRDWQRLINNNWGFRPKRLNFKLFNIQVKEVTQNEGTKTIANNLTSTIQVFTDSEYQLPYVLGSAHQGCLPPFPADVFMIPQYGYLTLNNGSQAVGRSSFYCLEYFPSQMLRTGNNFEFSYQFEDVPFHSSYAHSQSLDRLMNPLIDQYLYYLSRTQSTGGTAGTQQLLFSQAGPNNMSAQAKNWLPGPCYRQQRVSTTLSQNNNSNFAWTGATKYHLNGRDSLVNPGVAMATHKDDEERFFPSSGVLMFGKQGAGKDNVDYSSVMLTSEEEIKTTNPVATEQYGVVADNLQQQNAAPIVGAVNSQGALPGMVWQNRDVYLQGPIWAKIPHTDGNFHPSPLMGGFGLKHPPPQILIKNTPVPADPPTTFSQAKLASFITQYSTGQVSVEIEWELQKENSKRWNPEIQYTSNYYKSTNVDFAVNTDGTYSEPRPIGTRYLTRNL

SEQ ID NO: 4794 - DNA, 3129 bp, Adeno-associated virus
gaattcgccctttctacggctgcgtcaactggaccaatgagaactttcccttcaacgattgcgtcgacaagatggtgatctggtgggaggagggcaagatgacggccaaggtcgtggagtccgccaaggccattctcggcggcagcaaagtgcgcgtggaccaaaagtgcaagtcgtccgcccagatcgaccccacccccgtgatcgtcacctccaacaccaacatgtgcgccgtgattgacgggaacagcaccaccttcgagcaccagcagccgttgcaggaccggatgttcaagtttgaactcacccgccgtctggagcacgactttggcaaggtgacaaagcaggaagtcagagagttcttccgctgggcgcaggatcacgtgaccgaggtggcgcacgagttctacgtcagaaagggtggagccaacaagagacccgcccccgatgacgcggataaaagcgagcccaagcgggcctgcccctcagtcgcggatccatcgacgtcagacgcggaaggagctccggtggactttgccgacaggtaccaaaacaaatgttctcgtcacgcgggcatgcttcagatgctgtttccctgcaaaacatgcgagagaatgaatcagaatttcaacatttgcttcacgcacgggaccagagactgttcagaatgtttccccggcgtgtcagaatctcaaccggtcgtcagaaaaaagacgtatcggaaactctgtgcgattcatcatctgctgggggcgggcacccgagattgcttgctcggcctgcgatctggtcaacgtggacctagatgactgtgtttctgagcaataaatgacttaaaccaggtatggctgccgatggttatcttccagattggctcgaggacaacctctctgagggcattcgcgagtggtgggacttgaaacctggagccccgaaacccaaagccaaccagcaaaagcaggacgacggccggggtctggtgcttcctggctacaagtacctcggacccttcaacggactcgacaagggggagcccgtcaacgcggcggacgcagcggccctcgagcacgacaaggcctacgaccagcagctcaaagcgggtgacaatccgtacctgcggtataaccacgccgacgccgagtttcaggagcgtctgcaagaagatacgtcttttgggggcaacctcgggcgagcagtcttccaggccaagaagcgggttctcgaacctctcggtctggttgaggaaggcgctaagacggctcctggaaagaagagaccggtagagccatcaccccagcgttctccagactcctctacgggcatcggcaagaaaggccagcagcccgcgaaaaagagactcaactttgggcagactggcgactcagagtcagtgcccgaccctcaaccaatcggagaaccccccgcaggcccctctggtctgggatctggtacaatggctgcaggcggtggcgctccaatggcagacaataacgaaggcgccgacggagtgggtagttcctcaggaaattggcattgcgattccacatggctgggcgacagagtcatcaccaccagcacccgaacctgggccctccccacctacaacaaccacctctacaagcaaatctccaacgggacttcgggaggaagcaccaacgacaacacctacttcggctacagcaccccctgggggtattttgactttaacagattccactgccacttctcaccacgtgactggcagcgactcatcaacaacaactggggattccggcccaagagactcaacttcaagctcttcaacatccaggtcaaggaggtcacgcagaatgaaggcaccaagaccatcgccaataaccttaccagcacgattcaggtctttacggactcggaataccagctcccgtacgtcctcggctctgcgcaccagggctgcctgcctccgttcccggcggacgtcttcatgattcctcagtacgggtacctgactctgaacaatggcagtcaggccgtgggccgttcctccttctactgcctggagtactttccttctcaaatgctgagaacgggcaacaactttgagttcagctaccagtttgaggacgtgccttttcacagcagctacgcgcacagccaaagcctggaccggctgatgaaccccctcatcgaccagtacctgtactacctgtctcggactcagtccacgggaggtaccgcaggaactcagcagttgctattttctcaggccgggcctaataacatgtcggctcaggccaaaaactggctacccgggccctgctaccggcagcaacgcgtctccacgacactgtcgcaaaataacaacagcaactttgcctggaccggtgccaccaagtatcatctgaatggcagagactctctggtaaatcccggtgtcgctatggcaacccacaaggacgacgaagagcgattttttccgtccagcggagtcttaatgtttgggaaacagggagctggaaaagacaacgtggactatagcagcgttatgctaaccagtgaggaagaaattaaaaccaccaacccagtggccacagaacagtacggcgtggtggccgataacctgcaacagcaaaacgccgctcctattgtaggggccgtcaacagtcaaggagccttacctggcatggtctggcagaaccgggacgtgtacctgcagggtcctatctgggccaagattcctcacacggacggaaactttcatccctcgccgctgatgggaggctttggactgaaacacccgcctcctcagatcctgattaagaatacacctgttcccgcggatcctccaactaccttcagtcaagctaagctggcgtcgttcatcacgcagtacagcaccggacaggtcagcgtggaaattgaatgggagctgcagaaagaaaacagcaaacgctggaacccagagattcaatacacttccaactactacaaatctacaaatgtggactttgctgttaacacagatggcacttattctgagcctcgccccatcggcacccgttacctcacccgtaatctgtaattgcttgttaatcaataaaccggttgattcgtttcagttgaactttggtctctgcgaagggcgaattc

SEQ ID NO: 4795 - DNA, 3128 bp, Adeno-associated virus
gaattcgccctttctacggctgcgtcaactggaccaatgagaactttcccttcaacgattgcgtcgacaagatggtgatctggtgggaggagggcaagatgacggccaaggtcgtggagtccgccaaggccattctcggcggcagcaaagtgcgcgtggaccaaaagtgcaagtcgtccgcccagatcgaccccacccccgtgatcgtcacctccaacaccaacatgtgcgccgtgattgacgggaacagcaccaccttcgagcaccagcagccgttgcaggaccggatgttcaagtttgaactcacccgccgtctggagcacgactttggcaaggtgacaaagcaggaagtcagagagttcttccgctgggcgcaggatcacgtgaccgaggtggcgcacgagttctacgtcagaaagggtggagccaacaagagacccgcccccgatgacgcggataaaagcgagcccaagcgggcctgcccctcagtcgcggatccatcgacgtcagacgcggaaggagctccggtggactttgccgacaggtaccaaaacaaatgttctcgtcacgcgggcatgcttcagatgctgtttccctgcaaaacatgcgagagaatgaatcagaatttcaacatttgcttcacgcacgggaccagagactgttcagaatgtttccccggcgtgtcagaatctcaaccggttgtcagaaaaaagacgtatcggaaactctgtgcgattcatcatctgctggggcgggcacccgagattgcttgctcggcctgcgatctggtcaacgtggacctagatgactgtgtttctgagcaataaatgacttaaaccaggtatggctgccgatggttatcttccagattggctcgaggacaacctctctgagggcattcgcgagtggtgggacttgaaacctggagccccgaaacccaaagccaaccagcaaaagcaggacgacggccggggtctggtgcttcctggctacaagtacctcggacccttcaacggactcgacaagggggagcccgtcaacgcggcggacgcagcggccctcgagcacgacaaggcctacgaccagcagctcaaagcgggtgacaatccgtacctgcggtataaccacgccgacgccgagtttcaggagcgtctgcaagaagatacgtcttttgggggcaacctcgggcgagcagtcttccaggccaagaagcgggttctcgaacctctcggtctggttgaggaaggcgctaagacggctcctggaaagaagagaccggtagagccatcaccccagcgttctccagactcctctacgggcatcggcaagaaaggccagcagcccgcgaaaaagagactcaactttgggcagactggcgactcagagtcagtgcccgaccctcaaccaatcggagaaccccccgcaggcccctctggtctgggatctggtacaatggctgcaggcggtggcgctccaatggcagacaataacgaaggcgccgacggagtgggtagttcctcaggaaattggcattgcgattccacatggctgggcgacagagtcatcaccaccagcacccgaacctgggccctccccacctacaacaaccacctctacaagcaaatctccaacgggacttcgggaggaagcaccaacgacaacacctacttcggctacagcaccccctgggggtattttgactttaacagattccactgccacttctcaccacgtgactggcagcgactcatcaacaacaactggggattccggcccaagagacccaacttcaagctcttcaacatccaggtcaaggaggtcacgcagaatgaaggcaccaagaccatcgccaataaccttaccagcacgattcaggtctttacggactcggaataccagctcccgtacgtcctcggctctgcgcaccagggctgcctgcctccgttcccggcggacgtcttcatgattcctcagtacgggtacctgactctgaacaatggcagtcaggccgtgggccgttcctccttctactgcctggagtactttccttctcaaatgctgagaacgggcaacaactttgagttcagctaccagtttgaggacgtgccttttcacagcagctacgcgcacagccaaagcctggaccggctgatgaaccccctcatcgaccagtacctgtactacctgtctcggactcagtccacgggaggtaccgcaggaactcagcagttgctattttctcaggccgggcctaataacatgtcggctcaggccaaaaactggctacccgggccctgctaccggcagcaacgcgtctccacgacactgtcgcaaaataacaacagcaactttgcctggaccggtgccaccaagtatcatctgaatggcagagactctctggtaaatcccggtgtcgctatggcaacccacaaggacgacgaagagcgattttttccgtccagcggagtcttaatgtttgggaaacagggagctggaaaagacaacgtggactatagcagcgttatgctaaccagtgaggaagaaattaaaaccaccaacccagtggccacagaacagtacggcgtggtggccgataacctgcaacagcaaaacgccgctcctattgtaggggccgtcaacagtcaaggagccttacctggcatggtctggcagaaccgggacgtgtacctgcagggtcctatctgggccaagattcctcacacggacggaaactttcatccctcgccgctgatgggaggctttggactgaaacacccgcctcctcagatcctgattaagaatacacctgttcccgcggatcctccaactaccttcagtcaagctaagctggcgtcgttcatcacgcagtacagcaccggacaggtcagcgtggaaattgaatgggagctgcagaaagaaaacagcaaacgctggaacccagagattcaatacacttccaactactacaaatctacaaatgtggactttgctgttaacacagatggcacttattctgagcctcgccccattggcacccgttacctcacccgtaatctgtaattgcttgttaatcaataaaccggttgattcgtttcagttgaactttggtctctgcgaagggcgaattc

SEQ ID NO: 4796 - protein, 738 aa, Adeno-associated virus
MAADGYLPDWLEDNLSEGIREWWDLKPGAPKPKANQQKQDDGRGLVLPGYKYLGPFNGLDKGEPVNAADAAALEHDKAYDQQLKAGDNPYLRYNHADAEFQERLQEDTSFGGNLGRAVFQAKKRVLEPLGLVEEGAKTAPGKKRPVEPSPQRSPDSSTGIGKKGQQPAKKRLNFGQTGDSESVPDPQPIGEPPAGPSGLGSGTMAAGGGAPMADNNEGADGVGSSSGNWHCDSTWLGDRVITTSTRTWALPTYNNHLYKQISNGTSGGSTNDNTYFGYSTPWGYFDFNRFHCHFSPRDWQRLINNNWGFRPKRPNFKLFNIQVKEVTQNEGTKTIANNLTSTIQVFTDSEYQLPYVLGSAHQGCLPPFPADVFMIPQYGYLTLNNGSQAVGRSSFYCLEYFPSQMLRTGNNFEFSYQFEDVPFHSSYAHSQSLDRLMNPLIDQYLYYLSRTQSTGGTAGTQQLLFSQAGPNNMSAQAKNWLPGPCYRQQRVSTTLSQNNNSNFAWTGATKYHLNGRDSLVNPGVAMATHKDDEERFFPSSGVLMFGKQGAGKDNVDYSSVMLTSEEEIKTTNPVATEQYGVVADNLQQQNAAPIVGAVNSQGALPGMVWQNRDVYLQGPIWAKIPHTDGNFHPSPLMGGFGLKHPPPQILIKNTPVPADPPTTFSQAKLASFITQYSTGQVSVEIEWELQKENSKRWNPEIQYTSNYYKSTNVDFAVNTDGTYSEPRPIGTRYLTRNL

SEQ ID NO: 4797 - protein, 738 aa, Adeno-associated virus
MAADGYLPDWLEDNLSEGIREWWDLKPGAPKPKANQQKQDDGRGLVLPGYKYLGPFNGLDKGEPVNAADAAALEHDKAYDQQLKAGDNPYLRYNHADAEFQERLQEDTSFGGNLGRAVFQAKKRVLEPLGLVEEAAKTAPGKKRPVEPSPQRSPDSSTGIGKKGQQPAKKRLNFGQTGDSESVPDPQPIGEPPAGPSGLGSGTMAAGGGAPMADNNEGADGVGSSSGNWHCDSTWLGDRVITTSTRTWALPTYNNHLYKQISNGTSGGSTNDNTYFGYSTPWGYFDFNRFHCHFSPRDWQRLINNNWGFRPKRLSFKLFNIQVKEVTQNEGTKTIANNLTSTIQVFTDSEYQLPYVLGSAHQGCLPPFPADVFMIPQYGYLTLNNGSQAVGRSSFYCLEYFPSQMLRTGNNFEFSYTFEDVPFHSSYAHSQSLDRLMNPLIDQYLYYLSRTQSTGGTQGTQQLLFSQAGPANMSAQAKNWLPGPCYRQQRVSTTLSQNNNSNFAWTGATKYHLNGRDSLVNPGVAMATHKDDEERFFPSSGVLMFGKQGAGRDNVDYSSVMLTSEEEIKTTNPVATEQYGVVADNLQQTNTGPIVGNVNSQGALPGMVWQNRDVYLQGPIWAKIPHTDGNFHPSPLMGGFGLKHPPPQILIKNTPVPADPPTTFSQAKLASFITQYSTGQVSVEIEWELQKENSKRWNPEIQYTSNYYKSTNVDFAVNTEGTYSEPRPIGTRYLTRNL

SEQ ID NO: 4798 - protein, 720 aa, Adeno-associated virus
MSFVDHPPDWLEEVGEGLREFLGLEAGPPKPKPNQQHQDQARGLVLPGYNYLGPGNGLDRGEPVNRADEVAREHDISYNEQLEAGDNPYLKYNHADAEFQEKLADDTSFGGNLGKAVFQAKKRVLEPFGLVEEGAKTAPTGKRIDDHFPKRKKARTEEDSKPSTSSDAEAGPSGSQQLQIPAQPASSLGADTMSAGGGGPLGDNNQGADGVGNASGDWHCDSTWMGDRVVTKSTRTWVLPSYNNHQYREIKSGSVDGSNANAYFGYSTPWGYFDFNRFHSHWSPRDWQRLINNYWGFRPRSLRVKIFNIQVKEVTVQDSTTTIANNLTSTVQVFTDDDYQLPYVVGNGTEGCLPAFPPQVFTLPQYGYATLNRDNTENPTERSSFFCLEYFPSKMLRTGNNFEFTYNFEEVPFHSSFAPSQNLFKLANPLVDQYLYRFVSTNNTGGVQFNKNLAGRYANTYKNWFPGPMGRTQGWNLGSGVNRASVSAFATTNRMELEGASYQVPPQPNGMTNNLQGSNTYALENTMIFNSQPANPGTTATYLEGNMLITSESETQPVNRVAYNVGGQMATNNQSSTTAPATGTYNLQEIVPGSVWMERDVYLQGPIWAKIPETGAHFHPSPAMGGFGLKHPPPMMLIKNTPVPGNITSFSDVPVSSFITQYSTGQVTVEMEWELKKENSKRWNPEIQYTNNYNDPQFVDFAPDSTGEYRTTRPIGTRYL

SEQ ID NO: 4799 - protein, 736 aa, Adeno-associated virus
MAADGYLPDWLEDNLSEGIREWWDLKPGAPKPKANQQKQDDGRGLVLPGYKYLGPFNGLDKGEPVNAADAAALEHDKAYDQQLKAGDNPYLRYNHADAEFQERLQEDTSFGGNLGRAVFQAKKRVLEPFGLVEEGAKTAPGKKRPVEQSPQEPDSSSGIGKTGQQPAKKRLNFGQTGDSESVPDPQPLGEPPATPAAVGPTTMASGGGAPMADNNEGADGVGNASGNWHCDSTWLGDRVITTSTRTWALPTYNNHLYKQISSASTGASNDNHYFGYSTPWGYFDFNRFHCHFSPRDWQRLINNNWGFRPKRLNFKLFNIQVKEVTTNDGVTTIANNLTSTVQVFSDSEYQLPYVLGSAHQGCLPPFPADVFMIPQYGYLTLNNGSQAVGRSSFYCLEYFPSQMLRTGNNFTFSYTFEDVPFHSSYAHSQSLDRLMNPLIDQYLYYLNRTQNQSGSAQNKDLLFSRGSPAGMSVQPKNWLPGPCYRQQRVSKTKTDNNNSNFTWTGASKYNLNGRESIINPGTAMASHKDDKDKFFPMSGVMIFGKESAGASNTALDNVMITDEEEIKATNPVATERFGTVAVNLQSSSTDPATGDVHVMGALPGMVWQDRDVYLQGPIWAKIPHTDGHFHPSPLMGGFGLKHPPPQILIKNTPVPANPPAEFSATKFASFITQYSTGQVSVEIEWELQKENSKRWNPEVQYTSNYAKSANVDFTVDNNGLYTEPRPIGTRYLTRPL

SEQ ID NO: 4800 - protein, 736 aa, Adeno-associated virus
MAADGYLPDWLEDNLSEGIREWWDLKPGAPKPKANQQKQDDGRGLVLPGYKYLGPFNGLDKGEPVNAADAAALEHDKAYDQQLKAGDNPYLRYNHADAEFQERLQEDTSFGGNLGRAVFQAKKRVLEPFGLVEEGAKTAPGKKRPVEQSPQEPDSSSGIGKTGQQPAKKRLNFGQTGDSESVPDPQPLGEPPATPAAVGPTTMASGGGAPMADNNEGADGVGNASGNWHCDSTWLGDRVITTSTRTWALPTYNNHLYKQISSASTGASNDNHYFGYSTPWGYFDFNRFHCHFSPRDWQRLINNNWGFRPKRLNFKLFNIQVKEVTTNDGVTTIANNLTSTVQVFSDSEYQLPYVLGSAHQGCLPPFPADVFMIPQYGYLTLNNGSQAVGRSSFYCLEYFPSQMLRTGNNFTFSYTFEDVPFHSSYAHSQSLDRLMNPLIDQYLYYLNRTQNQSGSAQNKDLLFSRGSPAGMSVQPKNWLPGPCYRQQRVSKTKTDNNNSNFTWTGASKYNLNGRESIINPGTAMASHKDDEDKFFPMSGVMIFGKESAGASNTALDNVMITDEEEIKATNPVATERFGTVAVNLQSSSTDPATGDVHVMGALPGMVWQDRDVYLQGPIWAKIPHTDGHFHPSPLMGGFGLKHPPPQILIKNTPVPANPPAEFSATKFASFITQYSTGQVSVEIEWELQKENSKRWNPEVQYTSNYAKSANVDFTVDNNGLYTEPRPIGTRYLTRPL

SEQ ID NO: 4801 - protein, 736 aa, Adeno-associated virus
MAADGYLPDWLEDNLSEGIREWWDLKPGAPKPKANQQKQDDGRGLVLPGYKYLGPFNGLDKGEPVNAADAAALEHDKAYDQQLKAGDNPYLRYNHADAEFQERLQEDTSFGGNLGRAVFQAKKRVLEPLGLVEEGAKTAPGKKRPVEQSPQEPDSSSGIGKTGQQPAKKRLNFGQTGDSESVPDPQPLGEPPATPAAVGPTTMASGGGAPMADNNEGADGVGNASGNWHCDSTWLGDRVITTSTRTWALPTYNNHLYKQISSASTGASNDNHYFGYSTPWGYFDFNRFHCHFSPRDWQRLINNNWGFRPKRLNFKLFNIQVKEVTTNDGVTTIANNLTSTVQVFSDSEYQLPYVLGSAHQGCLPPFPADVFMIPQYGYLTLNNGSQAVGRSSFYCLEYFPSQMLRTGNNFTFSYTFEDVPFHSSYAHSQSLDRLMNPLIDQYLYYLNRTQNQSGSAQNKDLLFSRGSPAGMSVQPKNWLPGPCYRQQRVSKTKTDNNNSNFTWTGASKYNLNGRESIINPGTAMASHKDDEDKFFPMSGVMIFGKESAGASNTALDNVMITDEEEIKATNPVATERFGTVAVNLQSSSTDPATGDVHVMGALPGMVWQDRDVYLQGPIWAKIPHTDGHFHPSPLMGGFGLKHPPPQILIKNTPVPANPPAEFSATKFASFITQYSTGQVSVEIEWELQKENSKRWNPEVQYTSNYAKSANVDFTVDNNGLYTEPRPIGTRYLTRPL

SEQ ID NO: 4802 - protein, 736 aa, Adeno-associated virus
MAADGYLPDWLEDNLSEGIREWWDLKPGAPKPKANQQKQDDGRGLVLPGYKYLGPFNGLDKGEPVNAADAAALEHDKAYDQQLKAGDNPYLRYNHADAEFQERLQEDTSFGGNLGRAVFQAKKRVLEPLGLVEEGAKTAPGKKRPVEQSPQEPDSSSGIGKTGQQPAKKRLNFGQTGDSESVPDPQPLGEPPATPAAVGPTTMASGGGAPMADNNEGADGVGNASGNWHCDSTWLGDRVITTSTRTWALPTYNNHLYKQISSASTGASNDNHYFGYSTPWGYFDFNRFHCHFSPRDWQRLINNNWGFRPKRLNFKLFNIQVKEVTTNDGVTTIANNLTSTVQVFSDSEYQLPYVLGSAHQGCLPPFPADVFMIPQYGYLTLNNGSQAVGRSSFYCLEYFPSQMLRTGNNFTFSYTFEDVPFHSSYAHSQSLDRLMNPLIDQYLYYLNRTQNQSGSAQNKDLLFSRGSPAGMSVQPKNWLPGPCYRQQRVSKTKTDNNNSNFTWTGASKYNLNGRESIINPGTAMASHKDDKDKFFPMSGVMIFGKESAGASNTALDNVMITDEEEIKATNPVATERFGTVAVNLQSSSTDPATGDVHVMGALPGMVWQDRDVYLQGPIWAKIPHTDGHFHPSPLMGGFGLKHPPPQILIKNTPVPANPPAEFSATKFASFITQYSTGQVSVEIEWELQKENSKRWNPEVQYTSNYAKSANVDFTVDNNGLYTEPRPIGTRYLTRPL

SEQ ID NO: 4803 - protein, 728 aa, Adeno-associated virus
MAADGYLPDWLEGNLSEGIREWWDLKPGAPKPKANQQKQDDGRGLVLPGYRYLGPFNGLDKGEPVNEADAAALEHDKAYDKQLEQGDNPYLKYNHADAEFQERLQEDTSFGGNLGRAVFQAKKRVLEPLGLVEEGAKTAPGKKRPIESPDSSTGIGKNGQPPAKKKLNFGQTGDSESVPDPQPLGEPPAAPSGLGSGTMAAGGGAPMADNNEGADGVGNASGNWHCDSTWLGDRVITTSTRTWALPTYNNHLYKQISSQSGATNDNHFFGYSTPWGYFDFNRFHCHFSPRDWQRLINNNWGFRPRKLRFKLFNIQVKEVTTNDGVTTIANNLTSTIQVFSDSEYQLPYVLGSAHQGCLPPFPADVFMIPQYGYLTLNNGSQSVGRSSFYCLEYFPSQMLRTGDNFEFSYTFEEVPFHSSYAHSQSLDRLMNPLIDQYLYYLARTQSTTGSTRELQFHQAGPNTMAEQSKNWLPGPCYRQQRLSKNIDSNNNSNFAWTGATKYHLNGRNSLTNPGVAMATNKDDEDQFFPINGVLVFGKTGAANKTTLENVLMTSEEEIKTTNPVATEEYGVVSSNLQSSTAGPQTQTVNSQGALPGMVWQNRDVYLQGPIWAKIPHTDGNFHPSPLMGGFGLKHPPPQILIKNTPVPANPPEVFTPAKFASFITQYSTGQVSVEIEWELQKENSKRWNPEIQYTSNYAKSNNVEFAVNNEGVYTEPRPIGTRYLTRNL

SEQ ID NO: 4804 - DNA, 2211 bp, Adeno-associated virus
atggctgccgatggttatcttccagattggctcgaggacaaccttagtgaaggaattcgcgagtggtgggctttgaaacctggagcccctcaacccaaggcaaatcaacaacatcaagacaacgctcgaggtcttgtgcttccgggttacaaataccttggacccggcaacggactcgacaagggggagccggtcaacgcagcagacgcggcggccctcgagcacgacaaggcctacgaccagcagctcaaggccggagacaacccgtacctcaagtacaaccacgccgacgccgagttccaggagcggctcaaagaagatacgtcttttgggggcaacctcgggcgagcagtcttccaggccaaaaagaggcttcttgaacctcttggtctggttgaggaagcggctaagacggctcctggaaagaagaggcctgtagagcagtctcctcaggaaccggactcctccgcgggtattggcaaatcgggtgcacagcccgctaaaaagagactcaatttcggtcagactggcgacacagagtcagtcccagaccctcaaccaatcggagaacctcccgcagccccctcaggtgtgggatctcttacaatggcttcaggtggtggcgcaccagtggcagacaataacgaaggtgccgatggagtgggtagttcctcgggaaattggcattgcgattcccaatggctgggggacagagtcatcaccaccagcacccgaacctgggccctgcccacctacaacaatcacctctacaagcaaatctccaacagcacatctggaggatcttcaaatgacaacgcctacttcggctacagcaccccctgggggtattttgacttcaacagattccactgccacttctcaccacgtgactggcagcgactcatcaacaacaactggggattccggcctaagcgactcaacttcaagctcttcaacattcaggtcaaagaggttacggacaacaatggagtcaagaccatcgccaataaccttaccagcacggtccaggtcttcacggactcagactatcagctcccgtacgtgctcgggtcggctcacgagggctgcctcccgccgttcccagcggacgttttcatgattcctcagtacgggtatctgacgcttaatgatggaagccaggccgtgggtcgttcgtccttttactgcctggaatatttcccgtcgcaaatgctaagaacgggtaacaacttccagttcagctacgagtttgagaacgtacctttccatagcagctacgctcacagccaaagcctggaccgactaatgaatccactcatcgaccaatacttgtactatctctcaaagactattaacggttctggacagaatcaacaaacgctaaaattcagtgtggccggacccagcaacatggctgtccagggaagaaactacatacctggacccagctaccgacaacaacgtgtctcaaccactgtgactcaaaacaacaacagcgaatttgcttggcctggagcttcttcttgggctctcaatggacgtaatagcttgatgaatcctggacctgctatggccagccacaaagaaggagaggaccgtttctttcctttgtctggatctttaatttttggcaaacaaggaactggaagagacaacgtggatgcggacaaagtcatgataaccaacgaagaagaaattaaaactactaacccggtagcaacggagtcctatggacaagtggccacaaaccaccagagtgcccaagcacaggcgcagaccggctgggttcaaaaccaaggaatacttccgggtatggtttggcaggacagagatgtgtacctgcaaggacccatttgggccaaaattcctcacacggacggcaactttcacccttctccgctgatgggagggtttggaatgaagcacccgcctcctcagatcctcatcaaaaacacacctgtacctgcggatcctccaacggccttcaacaaggacaagctgaactctttcatcacccagtattctactggccaagtcagcgtggagatcgagtgggagctgcagaaggaaaacagcaagcgctggaacccggagatccagtacacttccaactattacaagtctaataatgttgaatttgctgttaatactgaaggtgtatatagtgaaccccgccccattggcaccagatacctgactcgtaatctgtaa

SEQ ID NO: 4805 - protein, 736 aa, Adeno-associated virus
MAADGYLPDWLEDNLSEGIREWWALKPGAPQPKANQQHQDNARGLVLPGYKYLGPGNGLDKGEPVNAADAAALEHDKAYDQQLKAGDNPYLKYNHADAEFQERLKEDTSFGGNLGRAVFQAKKRLLEPLGLVEEAAKTAPGKKRPVEQSPQEPDSSAGIGKSGAQPAKKRLNFGQTGDTESVPDPQPIGEPPAAPSGVGSLTMASGGGAPVADNNEGADGVGSSSGNWHCDSQWLGDRVITTSTRTWALPTYNNHLYKQISNSTSGGSSNDNAYFGYSTPWGYFDFNRFHCHFSPRDWQRLINNNWGFRPKRLNFKLFNIQVKEVTDNNGVKTIANNLTSTVQVFTDSDYQLPYVLGSAHEGCLPPFPADVFMIPQYGYLTLNDGSQAVGRSSFYCLEYFPSQMLRTGNNFQFSYEFENVPFHSSYAHSQSLDRLMNPLIDQYLYYLSKTINGSGQNQQTLKFSVAGPSNMAVQGRNYIPGPSYRQQRVSTTVTQNNNSEFAWPGASSWALNGRNSLMNPGPAMASHKEGEDRFFPLSGSLIFGKQGTGRDNVDADKVMITNEEEIKTTNPVATESYGQVATNHQSAQAQAQTGWVQNQGILPGMVWQDRDVYLQGPIWAKIPHTDGNFHPSPLMGGFGMKHPPPQILIKNTPVPADPPTAFNKDKLNSFITQYSTGQVSVEIEWELQKENSKRWNPEIQYTSNYYKSNNVEFAVNTEGVYSEPRPIGTRYLTRNL

SEQ ID NO: 4806 - DNA, 2460 bp, Adeno-associated virus
ggtaattcctccggaaattggcattgcgattccacatggctgggcgaccgagtcattaccaccagcacccggacttgggccctgcccacctacaacaaccacctctacaagcaaatctccagccaatcgggtgccaccaacgacaaccactacttcggctacagcaccccttgggggtattttgatttcaacagattccactgccatttctcaccacgtgactggcagcgactcatcaacaacaactggggattcatggctgccgatggttatcttccagattggctcgaggacactctctctgaaggaatcagacagtggtggaagctcaaacctggcccaccaccgccgaaacctaaccaacaacaccgggacgacagtaggggtcttgtgcttcctgggtacaagtacctcggacccttcaacggactcgacaaaggagagccggtcaacgaggcagacgccgcggccctcgagcacgacaaagcctacgaccaccagctcaagcaaggggacaacccgtacctcaaatacaaccacgcggacgctgaatttcaggagcgtcttcaagaagatacgtctttcgggggcaacctcgggcgagcagtcttccaggccaaaaagagggtactcgagcctcttggtctggttgaggaagctgttaagacggctcctggaaaaaagagacctatagagcagtctcctgcagaaccggactcttcctcgggcatcggcaaatcaggccagcagcccgctaagaaaagactcaattttggtcagactggcgacacagagtcagtcccagaccctcaaccaatcggagaaccccccgcagccccctctggtgtgggatctaatacaatggcttcaggcggtggggcaccaatggcagacaataacgaaggcgccgacggagtgggtaattcctcgggaaattggcattgcgattccacatggatgggcgacagagttatcaccaccagcacaagaacctgggccctccccacctacaataatcacctctacaagcaaatctccagcgaatcgggagccaccaacgacaaccactacttcggctacagcaccccctgggggtattttgactttaacagattccactgtcacttctcaccacgtgactggcagcgactcatcaacaacaactggggatttagacccaagaaactcaatttcaagctcttcaacatccaagtcaaggaggtcacgcagaatgatggaaccacgaccatcgccaataaccttaccagcacggtgcaggtcttcacagactctgagtaccagctgccctacgtcctcggttcggctcaccagggctgccttccgccgttcccagcagacgtcttcatgattcctcagtacggctacttgactctgaacaatggcagccaagcggtaggacgttcttcattctactgtctagagtattttccctctcagatgctgaggacgggaaacaacttcaccttcagctacacttttgaagacgtgcctttccacagcagctacgcgcacagccagagtctggatcggctgatgaatcctctcattgaccagtacctgtattacctgagcaaaactcagggtacaagtggaacaacgcagcaatcgagactgcagttcagccaagctgggcctagctccatggctcagcaggccaaaaactggctaccgggacccagctaccgacagcagcgaatgtctaagacggctaatgacaacaacaacagtgaatttgcttggactgcagccaccaaatattacctgaatggaagaaattctctggtcaatcccgggcccccaatggccagtcacaaggacgatgaggaaaagtatttccccatgcacggaaatctcatctttggaaaacaaggcacaggaactaccaatgtggacattgaatcagtgcttattacagacgaagaagaaatcagaacaactaatcctgtggctacagaacaatacggacaggttgccaccaaccatcagagtcagaacaccacagcttcctatggaagtgtggacagccagggaatcttacctggaatggtgtggcaggaccgcgatgtctatcttcaaggtcccatttgggccaaaactcctcacacggacggacactttcatccttctccgctcatgggaggctttggactgaaacaccctcctccccagatcctgatcaaaaacacacctgtgccagcgaatcccgcgaccactttcactcctggaaagtttgcttcgttcattacccagtattccaccggacaggtcagcgtggaaatagagtgggagctgcagaaagaaaacagcaaacgctggaacccagaaattcagtacacctccaactacaacaagtcggtgaatgtggagtttaccgtggacgcaaacggtgtttattctgaaccccgccctattggcactcgttaccttacccggaacttg

SEQ ID NO: 4807 - DNA, 3123 bp, Adeno-associated virus
gaattcgccctttctacggctgcgtcaactggaccaatgaaaactttcccttcaacgattgcgtcgacaagatggtgatctggtgggaggagggaaagatgaccgccaaggtcgtggaatctgccaaagccattctgggtggaggcaaggttcgtgtggaccagaaatgcaagtcttcggcccagatcgacccgactccggtgattgtcacctctaacaccaacatgtgcgccgtgattgacggaaactcgaccaccttcgagcaccagcagccgttgcaagaccggatgttcaaatttgaacttacccgccgtttggatcatgactttgggaaggtcaccaagcaggaagtcaaagactttttccggtgggctcaagatcacgtgactgaggtggagcatgagttctacgtcaaaaagggtggagccaagaaaaggcccgcccccgatgatgtatatataaatgagcccaagcgggcgcgcgagtcagttgcgcagccatcgacgtcagacgcggaagcttcgataaactacgcggacaggtaccaaaacaaatgttctcgtcacgtgggcatgaatctgatgctgtttccctgtcgacaatgcgaaagaatgaatcagaattcaaatatctgcttcacacacgggcaaaaagactgtttggaatgctttcccgtgtcagaatctcaacccgtttctgtcgtcagaaaaacgtatcagaaactttgttacattcatcatatcatgggaaaagtaccagacgcctgcactgcctgcgacctggtaaatgtggacttggatgactgtatttctgagcaataaatgacttaaatcaggtatggctgctgacggttatcttccagattggctcgaggacactctctctgaaggaatcagacagtggtggaagctcaaacctggcccaccaccgccgaaacctaaccaacaacaccgggacgacagtaggggtcttgtgcttcctgggtacaagtacctcggacccttcaacggactcgacaaaggagagccggtcaacgaggcagacgccgcggccctcgagcacgacaaagcctacgaccaccagctcaagcaaggggacaacccgtacctcaaatacaaccacgcggacgctgaatttcaggagcgtcttcaagaagatacgtctttcgggggcaacctcgggcgagcagtcttccaggccaaaaagagggtactcgagcctcttggtctggttgaggaagctgttaagacggctcctggaaaaaagagacctatagagcagtctcctgcagaaccggactcttcctcgggcatcggcaaatcaggccagcagcccgctaagaaaagactcaattttggtcagactggcgacacagagtcagtcccaggccctcaaccaatcggagaaccccccgcagccccctctggtgtgggatctaatacaatggcttcaggcggtggggcaccaatggcagacaataacgaaggcgccgacggagtgggtaattcctcgggaaattggcattgcgattccacatggatgggcgacagagttatcaccaccagcacaagaacctgggccctccccacctacaataatcacctctacaagcaaatctccagcgaatcgggagccaccaacgacaaccactacttcggctacagcaccccctgggggtattttgactttaacagattccactgtcacttctcaccacgtgactggcagcgactcatcaacaacaactggggatttagacccaagaaactcaatttcaagctcttcaacatccaagtcaaggaggtcacgcagaatgatggaaccacgaccatcgccaataaccttaccagcgcggtgcaggtcttcacagactctgagtaccagctgccctacgtcctcggttcggctcaccagggctgccttccgccgttcccagcagacgtcttcatgattcctcagtacggctacttgactctgaacaatggcagccaagcggtaggacgttcttcattctactgtctagagtattttccctctcagatgctgaggacgggaaacaacttcaccttcagctacacttttgaagacgtgcctttccacagcagctacgcgcacagccagagtctggatcggctgatgaatcctctcattgaccagtacctgtattacctgagcaaaactcagggtacaagtggaacaacgcagcaatcgagactgcagttcagccaagctgggcctagctccatggctcagcaggccaaaaactggctaccgggacccagctaccgacagcagcgaatgtctaagacggctaatgacaacaacaacagtgaatttgcttggactgcagccaccaaatattacctgaatggaagaaattctctggtcaatcccgggcccccagtggccagtcacaaggacgatgaggaaaagtatttccccatgcacggaaatctcatctttggaaaacaaggcacaggaactaccaatgtggacattgaatcagtgcttattacagacgaagaagaaatcagaacaactaatcctgtggctacagaacaatacggacaggttgccaccaaccatcagagtcagaacaccacagcttcctatggaagtgtggacagccagggaatcttacctggaatggtgtggcaggaccgcgatgtctatcttcaaggtcccatttgggccaaaactcctcacacggacggacactttcatccttctccgctcatgggaggctttggactgaaacaccctcctccccagatcctgatcaaaaacacacctgtgccagcgaatcccgcgaccactttcactcctggaaagtttgcttcgttcattacccagtattccacctgacaggtcagcgtggaaatagagtgggagctgcagaaagaaaacagcaaacgctggaacccagaaattcagtacacctccaactacaacaagtcggtgaatgtggagtttaccgtggacgcaaacggtgtttattctgaaccccgccctattggcactcgttaccttacccggaacttgtaatttcctgttaatgaataagccgatttatgcgtttcagttgaactttggtctctgcgaagggcgaattcgtttaaacct

SEQ ID NO: 4808 - protein, 735 aa, Adeno-associated virus
MAADGYLPDWLEDTLSEGIRQWWKLKPGPPPPKPNQQHRDDSRGLVLPGYKYLGPFNGLDKGEPVNEADAAALEHDKAYDHQLKQGDNPYLKYNHADAEFQERLQEDTSFGGNLGRAVFQAKKRVLEPLGLVEEAVKTAPGKKRPIEQSPAEPDSSSGIGKSGQQPAKKRLNFGQTGDTESVPGPQPIGEPPAAPSGVGSNTMASGGGAPMADNNEGADGVGNSSGNWHCDSTWMGDRVITTSTRTWALPTYNNHLYKQISSESGATNDNHYFGYSTPWGYFDFNRFHCHFSPRDWQRLINNNWGFRPKKLNFKLFNIQVKEVTQNDGTTTIANNLTSAVQVFTDSEYQLPYVLGSAHQGCLPPFPADVFMIPQYGYLTLNNGSQAVGRSSFYCLEYFPSQMLRTGNNFTFSYTFEDVPFHSSYAHSQSLDRLMNPLIDQYLYYLSKTQGTSGTTQQSRLQFSQAGPSSMAQQAKNWLPGPSYRQQRMSKTANDNNNSEFAWTAATKYYLNGRNSLVNPGPPVASHKDDEEKYFPMHGNLIFGKQGTGTTNVDIESVLITDEEEIRTTNPVATEQYGQVATNHQSQNTTASYGSVDSQGILPGMVWQDRDVYLQGPIWAKTPHTDGHFHPSPLMGGFGLKHPPPQILIKNTPVPANPATTFTPGKFASFITQYSTGQVSVEIEWELQKENSKRWNPEIQYTSNYNKSVNVEFTVDANGVYSEPRPIGTRYLTRNL

SEQ ID NO: 4809 - DNA, 3123 bp, Adeno-associated virus
gaattcgccctttctacggctgcgtcaactggaccaatgaaaactttcccttcaacgattgcgtcgacaagatggtgatctggtgggaggagggaaagatgaccgccaaggtcgtggaatctgccaaagccattctgggtggaagcaaggttcgtgtggaccagaaatgcaagtcttcggcccagatcgacccgactccggtgattgtcacctctaacaccaacatgtgcgccgtgattgacggaaactcgaccaccttcgagcaccagcagccgttgcaagaccggatgttcaaatttgaacttacccgccgtttggatcatgactttgggaaggtcaccaagcaggaagtcaaagactttttccggtgggctcaagatcacgtgactgaggtggagcatgagttctacgtcaaaaagggtggagccaagaaaaggcccgcccccgatgatgtatatataaatgagcccaagcgggcgcgcgagtcagttgcgcagccatcgacgtcagacgcggaagcttcgataaactacgcgggcaggtaccaaaacaaatgttctcgtcacgtgggcatgaatctgatgctgtttccctgtcgacaatgcgaaagaatgaatcagaattcaaatatctgcttcacacacgggcaaaaagactgtttggaatgctttcccgtgtcagaatctcaacccgtttctgtcgtcagaaaaacgtatcagaaactttgttacattcatcatatcatgggaaaagaaccagacgcctgcactgcctgcgacctggtaaatgtggacttggatgactgtatttctgagcaataaatgacttaaatcaggtatggctgctgacggttatcttccagattggctcgaggacactctctctgaaggaatcagacagtggtggaagctcaaacctggcccaccaccgccgaaacctaaccaacaacaccgggacgacagtaggggtcttgtgcttcctgggtacaagtacctcggacccttcaacggactcgacaaaggagagccggtcaacgaggcagacgccgcggccctcgagcacgacaaagcctacgaccaccagctcaagcaaggggacaacccgtacctcaaatacaaccacgcggacgctgaatttcaggagcgtcttcaagaagatacgtctttcgggggcaacctcgggcgagcagtcttccaggccaaaaagagggtactcgagcctcttggtctggttgaggaagctgttaagacggctcctggaaaaaagagacctatagagcagtctcctgcagaaccggactcttcctcgggcatcggcgaatcaggccagcagcccgctaagaaaagactcaattttggtcagactggcgacacagagtcagtcccagaccctcaaccaatcggagaaccccccgcagccccctctggtgtgggatctaatacaatggcttcaggcggtggggcaccaatggcagacgataacgaaggcgccgacggagtgggtaattcctcgggaaattggcattgcgattccacatggatgggcgacagagttatcaccaccagcacaagaacctgggccctccccacctacaataatcacctctacaagcaaatctccagcgaatcgggagccaccaacgacaaccactacttcggctacagcaccccctgggggtattttgactttaacagattccactgtcacttctcaccacgtgactggcagcgactcatcaacaacaactggggatttagacccaagaaactcaatttcaagctcttcaacatccaagtcaaggaggtcacgcagaatgatggaaccacgaccatcgccaataaccttaccagcacggtgcaggtcttcacagactctgagtaccagctgccctacgtcctcggttcggctcaccagggctgccttccgccgttcccagcagacgtcttcatgattcctcagtacggctacttgactctgaacaatggcagccaagcggtaggacgttcttcattctactgtctagagtattttccctctcagatgctgaggacgggaaacaacttcaccttcagctacacttttgaagacgtgcctttccacagcagctacgcgcacagccagagtctggatcggctgatgaatcctctcattgaccagtacctgtattacctgagcaaaactcagggtacaagtggaacaacgcagcaatcgagactgcagttcagccaagctgggcctagctccatggctcagcaggccaaaaactggctaccgggacccagctaccgacagcagcgaatgtctaagacggctaatgacaacaacaacagtgaatttgcttggactgcagccaccaaatattacctgaatggaagaaattctctggtcaatcccgggcccccaatggccagtcacaaggacgatgaggaaaagtatttccccatgcacggaaatctcatctttggaaaacaaggcacaggaactaccaatgtggacattgaatcagtgcttattacagacgaagaagaaatcagaacaactaatcctgtggctacagaacaatacggacaggttgccaccaaccatcagagtcaggacaccacagcttcctatggaagtgtggacagccagggaatcttacctggaatggtgtggcaggaccgcgatgtctatcttcaaggtcccatttgggccaaaactcctcacacggacggacactttcatccttctccgctcatgggaggctttggactgaaacaccctcctccccagatcctgatcaaaaacacacctgtgccagcgaatcccgcgaccactttcactcctggaaagtttgcttcgttcattacccagtattccaccggacaggtcagcgtggaaatagagtgggagctgcagaaagaaaacagcaaacgctggaacccagaaattcagtacacctccaactacaacaagtcggtgaatgtggagtttaccgtggacgcaaacggtgtttattctgaaccccgccctattggcactcgttaccttacccggaacttgtaatttcctgttaatgaataaaccgatttatgcgtttcagttgaactttggtctctgcgaagggcgaattcgcggccgcta

SEQ ID NO: 4810 - protein, 735 aa, Adeno-associated virus
MAADGYLPDWLEDTLSEGIRQWWKLKPGPPPPKPNQQHRDDSRGLVLPGYKYLGPFNGLDKGEPVNEADAAALEHDKAYDHQLKQGDNPYLKYNHADAEFQERLQEDTSFGGNLGRAVFQAKKRVLEPLGLVEEAVKTAPGKKRPIEQSPAEPDSSSGIGESGQQPAKKRLNFGQTGDTESVPDPQPIGEPPAAPSGVGSNTMASGGGAPMADDNEGADGVGNSSGNWHCDSTWMGDRVITTSTRTWALPTYNNHLYKQISSESGATNDNHYFGYSTPWGYFDFNRFHCHFSPRDWQRLINNNWGFRPKKLNFKLFNIQVKEVTQNDGTTTIANNLTSTVQVFTDSEYQLPYVLGSAHQGCLPPFPADVFMIPQYGYLTLNNGSQAVGRSSFYCLEYFPSQMLRTGNNFTFSYTFEDVPFHSSYAHSQSLDRLMNPLIDQYLYYLSKTQGTSGTTQQSRLQFSQAGPSSMAQQAKNWLPGPSYRQQRMSKTANDNNNSEFAWTAATKYYLNGRNSLVNPGPPMASHKDDEEKYFPMHGNLIFGKQGTGTTNVDIESVLITDEEEIRTTNPVATEQYGQVATNHQSQDTTASYGSVDSQGILPGMVWQDRDVYLQGPIWAKTPHTDGHFHPSPLMGGFGLKHPPPQILIKNTPVPANPATTFTPGKFASFITQYSTGQVSVEIEWELQKENSKRWNPEIQYTSNYNKSVNVEFTVDANGVYSEPRPIGTRYLTRNL

SEQ ID NO: 4811 - DNA, 3113 bp, Adeno-associated virus
gaattcgccctttctacggctgcgtcaactggaccaatgaaaactttcccttcaacgattgcgtcgacaagatggtgatctggtgggaggagggaaagatgaccgccaaggtcgtggaatctgccaaagccattctgggtggaagcaaggttcgtgtggaccagaaatgcaagtcttcggcccagatcgacccgactccggtgattgtcacctctaacaccaacatgtgcgccgtgattgacggaaactcgaccaccttcgagcaccagcagccgttgcaagaccggatgttcaaatttgaacttacccgccgtttggatcatgactttgggaaggtcaccaagcaggaagtcaaagactttttccggtgggctcaagatcacgtgactgaggtggagcatgagttctacgtcaaaaagggtggagccaagaaaaggcccgcccccgatgatgtatatataaatgagcccaagcgggcgcgcgagtcagttgcgcagccatcgacgtcagacgcggaagcttcgataaactacgcggacaggtaccaaaacaaatgttctcgtcacgtgggcatgaatctgatgctgtttccctgtcgacaatgcgaaagaatgaatcagaattcaaatatctgcttcacacacgggcaaaaagactgtttggaatgctttcccgtgtcagaatctcaacccgttcctgtcgtcagaaaaacgtatcagaaactttgttacattcatcatatcatgggaaaagtaccagacgcctgcactgcctgcgacctggtaaatgtggacttggatgactgtatttctgagcaataaatgacttaaatcaggtatggctgctgacggttatcttccagattggctcgaggacactctctctgaaggaatcagacagtggtggaagctcaaacctggcccaccaccgccgaaacctaaccaacaacaccgggacgacagtaggggtcttgtgcttcctgggtacaagtacctcggacccttcaacggactcgacaaaggagagccggtcaacgaggcagacgccgcggccctcgagcacgacaaagcctacgaccaccagctcaagcaaggggacaacccgtacctcaaatacaaccacgcggacgctgaatttcaggagcgtcttcaagaagatacgtctttcgggggcaacctcgggcgagcagtcttccaggccaaaaagagggtactcgagcctcttggtctggttgaggaagctgttaagacggctcctggaaaaaagagacctatagagcagtctcctgcagaaccggactcttcctcgggcatcggcaaatcaggccagcagcccgctaagaaaagactcaattttggtcagactggcgacacagagtcagtcccagaccctcaaccaatcggagaaccccccgcagccccctctggtgtgggatctaatacaatggcttcaggcggtggggcaccaatggcagacaataacgaaggcgccgacggagtgggtaattcctcgggaaattggcattgcgattccacatggatgggcgacagagttatcaccaccagcacaagaacctgggccctccccacctacaataatcacctctacaagcaaatctccagcgaatcgggagccaccaacgacaaccactacttcggctacagcaccccctgggggtattttgactttaacagattccactgtcacttctcaccacgtgactggcagcgactcatcaataacaactggggatttagacccaagaaactcaatttcaagctcttcaacatccaagtcaaggaggtcacgcagaatgatggaaccacgaccatcgccaataaccttaccagcacggtgcaggtcttcacagactctgagtaccagctgccctacgtcctcggttcggctcaccagggctgccttccgccgttcccagcagacgtcttcatgattcctcagtacggctacttgactctgaacaatggcagccaagcggtaggacgttcttcattctactgtctagagtattttccctctcagatgctgaggacgggaaacaacttcaccttcagctacacttttgaagacgtgcctttccacagcagctacgcgcacagccagagtctggatcggctgatgaatcctctcattgaccagtacctgtattacctgagcaaaactcagggtacaagtggaacaacgcagcaatcgagactgcagttcaaccaagctgggcctagctccatggctcagcaggccaaaaactggctaccgggacccagctaccgacagcagcgaatgtctaagacggctaatgacaacaacaacagtgaatttgcttggactgcagccaccaaatattacccgaatggaagaaattctctggtcaatcccgggcccccaatggccagtcacaaggacgatgaggaaaagtatttccccatgcacggaaatctcatctttggaaaacaaggcacaggaactaccaatgtggacattgaatcagtgcttattacagacgaagaagaaatcagaacgactaatcctgtggctacagaacaatacggacaggttgccaccaaccgtcagagtcagaacaccacagcttcctatggaagtgtggacagccagggaatcttacctggaatggtgtggcaggaccgcgatgtctatcttcaaggtcccatttgggccaaaactcctcacacggacggacactttcatccttctccgctcatgggaggctttggactgaaacaccctcctccccagatcctgatcaaaaacacacctgtgccagcgaatcccgcgaccactttcactcctggaaagtttgcttcgttcattacccagtattccaccggacaggtcagcgtggaaatagagtgggagctgcagaaagaaaacagcaaacgctggaacccggaaattcagtacacctccaactacaacaagtcggtgaatgtggagtttaccgtggacgcaaacggtgtttattctgaaccccgccctattggcactcgttaccttacccggaacttgtaatttcctgttaatgaataaaccgatttatgcgtttcagttgaactttggtctctgcgaagggcgaattc

SEQ ID NO: 4812 - protein, 735 aa, Adeno-associated virus
MAADGYLPDWLEDTLSEGIRQWWKLKPGPPPPKPNQQHRDDSRGLVLPGYKYLGPFNGLDKGEPVNEADAAALEHDKAYDHQLKQGDNPYLKYNHADAEFQERLQEDTSFGGNLGRAVFQAKKRVLEPLGLVEEAVKTAPGKKRPIEQSPAEPDSSSGIGKSGQQPAKKRLNFGQTGDTESVPDPQPIGEPPAAPSGVGSNTMASGGGAPMADNNEGADGVGNSSGNWHCDSTWMGDRVITTSTRTWALPTYNNHLYKQISSESGATNDNHYFGYSTPWGYFDFNRFHCHFSPRDWQRLINNNWGFRPKKLNFKLFNIQVKEVTQNDGTTTIANNLTSTVQVFTDSEYQLPYVLGSAHQGCLPPFPADVFMIPQYGYLTLNNGSQAVGRSSFYCLEYFPSQMLRTGNNFTFSYTFEDVPFHSSYAHSQSLDRLMNPLIDQYLYYLSKTQGTSGTTQQSRLQFNQAGPSSMAQQAKNWLPGPSYRQQRMSKTANDNNNSEFAWTAATKYYPNGRNSLVNPGPPMASHKDDEEKYFPMHGNLIFGKQGTGTTNVDIESVLITDEEEIRTTNPVATEQYGQVATNRQSQNTTASYGSVDSQGILPGMVWQDRDVYLQGPIWAKTPHTDGHFHPSPLMGGFGLKHPPPQILIKNTPVPANPATTFTPGKFASFITQYSTGQVSVEIEWELQKENSKRWNPEIQYTSNYNKSVNVEFTVDANGVYSEPRPIGTRYLTRNL

SEQ ID NO: 4813 - DNA, 3122 bp, Adeno-associated virus
agcggccgcgaattcgccctttctacggctgcgtcaactggaccaatgaaaactttcccttcaacgattgcgtcgacaagatggtgatctggtgggaggagggaaagatgaccgccaaggtcgtggaatctgccaaagccattctgggtggaagcaaggttcgtgtggaccagaaatgcaggtcttcggcccagatcgacccgactccggtgattgtcacctctaacaccaacatgtgcgccgtgattgacggaaactcgaccaccttcgagcaccagcagccgttgcaagaccggatgttcaaatttgaacttacccgccgtttggatcatgactttgggaaggtcaccaagcaggaagtcaaagactttttccggtgggctcaagatcacgtgactgaggtggagcatgagttctacgtcaaaaagggtggagccaagaaaaggcccgcccccgatgatgtatatataaatgagcccaagcgggcgcgcgagtcagttgcgcagccatcgacgtcagacgcggaagcttcgataaactacgcggacaggtaccaaaacaaatgttctcgtcacgtgggcatgaatctgatgctgtttccctgtcgacaatgcgaaagaatgaatcagaattcaaatatctgcttcacacacgggcaaaaagactgtttggaatgctttcccgtgtcagaatctcaacccgtttctgtcgtcagaaaaacgtatcagaaactttgttacattcatcatatcatgggaaaagtaccagacgcctgcactgcctgcgacctggtaaatgtggacttggatgactgtatttctgagcaataaatgacttaaatcaggtatggctgctgacggttatcttccagattggctcgaggacactctctctgaaggaatcagacagtggtggaagctcaaacctggcccaccaccgccgaaacctaaccaacaacaccgggacgacagtaggggtcttgtgcttcctgggtacaagtacctcggacccttcaacggactcgacaaaggagagccggtcaacgaggcagacgccgcggccctcgagcacgacaaagcctacgaccaccagctcaagcaaggggacaacccgtacctcaaatacaaccacgcggacgctgaatttcaggagcgtcttcaagaagatacgtctttcgggggcaacctcgggcgagcagtcttccaggccaaaaagagggtactcgagcctcttggtctggttgaggaagctgttaagacggctcctggaaaaaagagacctatagagcagtctcctgcagaaccggactcttcctcgggcatcggcaaatcaggccagcagcccgctaagaaaagactcaattttggtcagactggcgacacagagtcagtcccagaccctcaaccaatcggagaaccccccgcagccccctctggtgtgggatctaatacaatggcttcaggcggtggggcaccaatggcagacaataacgaaggcgccgacggagtgggtaattcctcgggaaattggcattgcgattccacatggatgggcgacagagttatcaccaccagcacaagaacctgggccctccccacctacaataatcgcctctacaagcaaatctccagcgaatcgggagccaccaacgacaaccactacttcggctacagcaccccctgggggtattttgactttaacagattccactgtcacttctcaccacgtgactggcagcgactcatcaacaacaactggggatttagacccaagaaactcaatttcaagctcttcaacatccaagtcaaggaggtcacgcagaatgatggaaccacgaccatcgccaataaccttaccagcacggtgcaggtcttcacagactctgagtaccagctgccctacgtcctcggttcggctcaccagggctgccttccgccgttcccagcagacgtcttcatgattcctcagtacggctacttgactctgaacaatggcagccaagcggtaggacgttcttcattctactgtctagagtattttccctctcagatgctgaggacgggaaacaacttcaccttcagctacacttttgaagacgtgcctttccacagcagctacgcgcacagccagagtctggatcggctgatgaatcctctcattgaccagtacctgtattacctgagcaaaactcagggtacaagtggaacaacgcagcaatcgagactgcagttcagccaagctgggcctagctccatggctcagcaggccaaaaactggctaccgggacccagctaccgacagcagcgaatgtctaagacggctaatgacaacaacaacagtgaatttgcttggactgcagccaccaaatattacctgaatggaagaaattctctggtcaatcccgggcccccaatggccagtcacaaggacgatgaggaaaagtatttccccatgcacggaaatctcatctttggaaaacaaggcacaggaactaccaatgtggacattgaatcagtgcttattacagacgaagaagaaatcagaacaactaatcctgtggctacagaacaatacggacaggttgccaccaaccatcagagtcagaacaccacagcttcctatggaagtgtggacagccagggaatcttacctggaatggtgtggcaggaccgcgatgtctatcttcaaggtcccatttgggccaaaactcctcacacggacggacactttcatccttctccgctcatgggaggctttggactgaaacaccctcctccccagatcctgatcaaaaacacacctgtgccagcgaatcccgcgaccactttcactcctggaaagtttgcttcgttcattacccagtattccaccggacaggtcagcgtggaaatagagtgggagctgcagaaagaaaacagcaaacgctggaacccagaaattcagtacacctccaactacaacaagtcggtgaatgtggagtttaccgtggacgcaaacggtgtttattctgaaccccgccctattggcactcgttaccttacccggaacttgtaatttcctgttaatgaataaaccgatttatgcgtttcagttgaactttggtctctgcgaagggcgaattc

SEQ ID NO: 4814 - protein, 735 aa, Adeno-associated virus
MAADGYLPDWLEDTLSEGIRQWWKLKPGPPPPKPNQQHRDDSRGLVLPGYKYLGPFNGLDKGEPVNEADAAALEHDKAYDHQLKQGDNPYLKYNHADAEFQERLQEDTSFGGNLGRAVFQAKKRVLEPLGLVEEAVKTAPGKKRPIEQSPAEPDSSSGIGKSGQQPAKKRLNFGQTGDTESVPDPQPIGEPPAAPSGVGSNTMASGGGAPMADNNEGADGVGNSSGNWHCDSTWMGDRVITTSTRTWALPTYNNRLYKQISSESGATNDNHYFGYSTPWGYFDFNRFHCHFSPRDWQRLINNNWGFRPKKLNFKLFNIQVKEVTQNDGTTTIANNLTSTVQVFTDSEYQLPYVLGSAHQGCLPPFPADVFMIPQYGYLTLNNGSQAVGRSSFYCLEYFPSQMLRTGNNFTFSYTFEDVPFHSSYAHSQSLDRLMNPLIDQYLYYLSKTQGTSGTTQQSRLQFSQAGPSSMAQQAKNWLPGPSYRQQRMSKTANDNNNSEFAWTAATKYYLNGRNSLVNPGPPMASHKDDEEKYFPMHGNLIFGKQGTGTTNVDIESVLITDEEEIRTTNPVATEQYGQVATNHQSQNTTASYGSVDSQGILPGMVWQDRDVYLQGPIWAKTPHTDGHFHPSPLMGGFGLKHPPPQILIKNTPVPANPATTFTPGKFASFITQYSTGQVSVEIEWELQKENSKRWNPEIQYTSNYNKSVNVEFTVDANGVYSEPRPIGTRYLTRNL

SEQ ID NO: 4815 - protein, 733 aa, Adeno-associated virus
MAADGYLPDWLEDNLSEGIREWWDLKPGAPKPKANQQKQDDGRGLVLPGYKYLGPFNGLDKGEPVNAADAAALEHDKAYDQQLKAGDNPYLRYNHADAEFQERLQEDTSFGGNLGRAVFQAKKRVLEPLGLVEEGAKTAPGKKRPLESPQEPDSSSGIGKKGKQPAKKRLNFEEDTGAGDGPPEGSDTSAMSSDIEMRAAPGGNAVDAGQGSDGVGNASGDWHCDSTWSEGKVTTTSTRTWVLPTYNNHLYLRLGTTSNSNTYNGFSTPWGYFDFNRFHCHFSPRDWQRLINNNWGLRPKAMRVKIFNIQVKEVTTSNGETTVANNLTSTVQIFADSSYELPYVMDAGQEGSLSPFPNDVFMVPQYGYCGIVTGENQNQTDRNAFYCLEYFPSQMLRTGNNFEMAYNFGKVPFHSMYAYSQSPDRLMNPLLDQYLWHLQSTTSGETLNQGNAATTFGKIRSGDFAFYRKNWLPGPCVKQQRLSKTASQNYKIPASGGNALLKYDTHYTLNNRWSNIAPGPPMATAGPSDGDFSNAQLIFPGPSVTGNTTTSANNLLFTSEEEIAATNPRDTDMFGQIADNNQNATTAPITGNVTAMGVLPGMVWQNRDIYYQGPIWAKIPHADGHFHPSPLIGGFGLKHPPPQIFIKNTPVPANPATTFTAARVDSFITQYSTGQVAVQIEWEIEKERSKRWNPEVQFTSNYGNQSSMLWAPDTTGKYTEPRVIGSRYLTNHL

SEQ ID NO: 4816 - protein, 733 aa, Adeno-associated virus
MAADGYLPDWLEDNLSEGIREWWDLKPGAPKLKANQQKQDDGRGLVLPGYKYLGPFHGLDKGEPVNAADAAALEHDKAYDQQLKAGDNPYLRYNHADAEFQERLQEDTSFGGNLGRAVFQAKKRVLEPLGLVEEGAKTAPGKKRPLESPQEPDSSSGIGKKGKQPAKKRLNFEEDTGAGDGPPEGSDTSAMSSDIEMRAAPGGNAVDAGQGSDGVGNASGDWHCDSTWSEGKVTTTSTRTWVLPTYNNHLYLRLGTTSNSNTYNGFSTPWGYFDFNRFHCHFSPRDWQRLINNNWGLRPKAMRVKIFNIQVKEVTTSNGETTVANNLTSTVQIFADSSYELPYVMDAGQEGSLPPFPNDVFMVPQYGYCGIVTGENQNQTDRNAFYCLEYFPSQMLRTGNNFEMAYNFEKVPFHSMYAHSQSLDRLMNPLLDQYLWHLQSTTSGETLNQGNAATTFGKIRSGDFAFYRKNWLPGPCVKQQRFSKTASQNYKIPASGGNALLKYDTHYTLNNRWSNIAPGPPMATAGPSDGDFSNAQLIFPGPSVTGNTTTSANNLLFTSEGEIAATNPRDTDMFGQIADNNQNATTAPITGNVTAMGVLPGMVWQNRDIYYQGPIWAKIPHADGHFHPSPLIGGFGLKHPPPQIFIKNTPVPANPATTFTAARVDSFITQYSTGQVAVQIEWEIEKERSKRRNPEVQFTSNYGNQSSMLWAPDTTGKYTEPRVIGSRYLTNHL

SEQ ID NO: 4817 - protein, 733 aa, Adeno-associated virus
MAADGYLPDWLEDNLSEGIREWWDLKPGAPKPKANQQKQDDGRGLVLPGYEYLGPFNGLDKGEPVNAADAAALEHDKAYDQQLKAGDNPYLRYNHADAEFQERLQEDTSFGGNLGRAVFQAKKRVLEPLGLVEEGAKTAPGKKRPLESPQEPDSSSGIGKKGKQPAKKRLNFEEDTGAGDGPPEGSDTSAMSSDIEMRAAPGGNAVDAGQGSDGVGNASGDWHCDSTWSEGKVTTTSTRTWVLPTYNNHLYLRLGTTSNSNTYNGFSTPWGYFDFNRFHCHFSPRDWQRLINNNWGLRPKAMRVKIFNIQVKEVTTSNGETTVANNLTSTVQIFADSSYELPYVMDAGQEGSLPPFPNDVFMVPQYGYCGIVTGENQNQTDRNAFYCLEYFPSQMLRTGNNFETAYNFEKVPFHSMYAHSQSLDGLMNPLLDQYLWHLQSTTSGETLNQGNAATTFGKIRSGDFAFYRKNWLPGPCVKQQRFSKTASQNYKIPASGGNALLKYDTHYTLNNRWSNIAPGPPMATAGPSDGDFSNAQLIFPGPSVTGNTTTSANNLLFTSEEEIAATNPRDTDMFGQIADNNQNATTAPITGNVTAMGVLPGMVWQNRDIYYQGPIWAKIPHADGHFHPSPLIGGFGLKHPPPQIFIKNTPVPAYPATTFTAARVDSFITQYSTGQVAVQIEWEIEKERSKRWNPEVQFTSNCGNQSSMLWAPDTTGKYTEPRVIGSRYLTNHL

SEQ ID NO: 4818 - protein, 735 aa, Adeno-associated virus
MAADGYLPDWLEDTLSEGIRQWWKLKPGPPPPKPNQQHRDDSRGLVLPGYKYLGPFNGLDKGEPVNEADAAALEHDKAYDHQLKQGDNPYLKYNHADAEFQERLQEDTSFGGNLGRAVFQAKKRVLEPLGLVEEAVKTAPGKKRPIEQSPAEPDSSSGIGKSGQQPAKKRLNFGQTGDTESVPDPQPIGEPPAAPSGVGSNTMASGGGAPMADNNEGADGVGNSSGNWHCDSTWMGDRVITTSTRTWALPTYNNHLYKQISSESGATNDNHYFGYSTPWGYFDFNRFHCHFSPRDWQRLINNNWGFRPKKLNFKLFNIQVKEVTQNDGTTTIANNLTSTVQVFTDSEYQLPYVLGSAHQGCLPPFPADVFMIPQYGYLTLNNGSQAVGRSSFYCLEYFPSQMLRTGNNFTFSYTFEDVPFHSSYAHSQSLDRLMNPLIDQYLYYLSKTQGTSGTTQQSRLQFSQAGPSSMAQQAKNWLPGPSYRQQRMSKTANDNNNSEFAWTAATKYYLNGRNSLVNPGPPMASHKDDEEKYFPMHGNLIFGKQGTGTTNVDIESVLITDEEEIRTTNPVATEQYGQVATNHQSQNTTASYGSVDSQGILPGMVWQDRDVYLQGPIWAKIPHTDGHFHPSPLMGGFGLKHPPPQILIKNTPVPANPATTFTPGKFASFITQYSTGQVSVEIEWELQKENSKRWNPEIQYTSNYNKSVNVEFTVDANGVYSEPRPIGTRYLTRNL

SEQ ID NO: 4819 - DNA, 3127 bp, Adeno-associated virus
gcggccgcgaattcgcccttcgcagagaccaaagttcaactgaaacgaatcaaccggtttattgattaacatgcaattacagattacgggtgaggtaacgagtgccaatagggcgaggctcagagtaaacaccctggctgtcaacggcaaagtccacaccagtctgcttttcaaagttggaggtgtactgaatctccgggtcccagcgcttgctgttttccttctgcagctcccactcgatttccacgctgacttgtccggtgctgtactgtgtgatgaacgaagcaaacttggcaggagtaaacacctccggaggattagcgggaacgggagtgttcttgatcaggatctgaggaggcggatgtttaagtccaaagccgcccatcaaaggagacgggtgaaagttgccatccgtgtgaggaatcttggcccagatgggaccctgcaggtacacgtcccggttctgccagaccatgccaggtaaggctccctggttgttgacaacttgtgtctgggctgcagtattagccgcttgtaagttgctgctgactatcccgtattcttccgtggctacaggattagtaggacgaatttcttcttcatttgtcattaacacattttccaatgtagttttgttagttgctccagtttttccaaaaatcaggactccgctggatgggaaaaagcggtcctcgtcgtccttgtgagttgccatggcgacgccgggattaaccaacgagtttctgccgttcaggtgatatttggtggcaccagtccaagcaaagttgctgttgttgttttgatccagcgttttggagaccctttgttgccggaagcagggtccaggtaaccaattcttggcttgttcggccatagttgaaggcccgccctggtaaaactgcagttcccgattgccagctgtgcctcctgggtcactctgtgttctggccaggtagtacaagtactggtcgatgaggggattcatcagccggtccaggctctggctgtgtgcgtagctgctgtggaaaggcacgtcctcgaagctgtagctgaactcaaagttgttgcccgttctcagcatctgagaggggaagtactccaggcagtagaaggaggaacgtcccacagactgactgccattgttgagagtcaggtagccgtactgaggaatcatgaagacgtccgccgggaacggaggcaggcagccctggtgcgcagagccgaggacgtacggcagctggtattccgagtccgagaatacctgaatcgtgctggtaaggttattagcgatggtcgtaacgccgtcattcgtcgtgacctccttgacctggatgttgaagagcttgaaccgcagcttcttgggccggaatccccagttgttgttgatgagtcgctgccagtcacgtggtgagaagtggcagtggaatctgttaaagtcaaaatacccccagggggtgctgtagccgaagtaggtgttgtcgttggtactacctgcagtttcactggagatttgctcgtagaggtggttgttgtaggtgggcagggcccaggttcgggtgctggtggtaatgactctgtcgcccagccatgtggaatcgcaatgccaatttcctgaggcattacccactccgtcggcaccttcgttattgtctgccattggtgcgccaccgcctgcagccactgtaccagatcccacactagagggcgctgctggaggttctccgagaggttgagggtcggggactgactctgagtcgccagtctgaccgaaattgagtctctttctggcgggctgctggcccttcttgccgatgcccgtggaggagtcgggggaacgctgaggtgacggctctaccggtctcttctttgcaggagccgtcttagcgccttcctcaaccagaccgagaggttcgagaacccgcttcttggcctggaagactgctcgcccgaggttgcccccaaatgacgtatcttcttgcagacgctcctgaaactcggcgtcggcgtggttataccgcaggtacgggttgtcacccgcattgagctgctggtcgtaggccttgtcgtgctcgagggccgctgcgtccgccgcgttgacgggctcccccttgtcgagtccgttgaagggtccgaggtacttgtagccaggaagcaccagaccccggccgttgtcctgcttttgctggttggctttgggtttcggggctccaggtttcaggtcccaccactcgcgaatgccctcagagaggttgtcctcgagccaatctggaagataaccatcggcagccatacctgatttaaatcatttattgttcaaagatgcagtcatccaaatccacattgaccagatcgcaggcagtgcaagcgtctggcacctttcccatgatatgatgaatgtagcacagtttctgatacgcctttttgacgacagaaacgggtttagattctgacacgggaaagcactctaaacagtctttctgtccgtgagtgaagcagatatttgaattctgattcattctctcgcattgtctgcagggaaacagcatcagattcatgcccacgtgacgagaacatttgttttggtacctgtctgcgtagttgatcgaagcttccgcgtctgacgtcgatggctgcgcaactgactcgcgcacccgtttgggctcacttatatctgcgtcactgggggcgggtcttttcttggctccaccctttttgacgtagaattcatgctccacctcaaccacgtaatcctttgcccaccggaaaaagtctttgacttcctgcttggtgaccttcccaaagtcatgatccagacggcgggtgagttcaaatttgaacatccggtcttgcaacggctgctggtgttcgaaggtcgttgagttcccgtcgatcacggcgcacatgttggtgttggagatgacgatcgcgggagtcgggtctatctgggccgaggacttgcatttctggtccacgcgcaccttgcttcctccgagaatggctttggccgactccacgaccttggcggtcatcttcccctcctcccaccagatcaccatcttgtcgacacagtcgttgaagggaaagttctcattggtccagttgacgcagccgtagaaagggcgaattc

SEQ ID NO: 4820 - DNA, 3106 bp, Adeno-associated virus
gcggccgcgaattcgcccttcgcagagaccaaagttcaactgaaacgaatcaaccggtttattgattaacaagtaattacaggttacgggtgaggtaacgggtgccaatggggcgaggctcagtataaaccccttcgttgttgacagcaaattccacattattagacttggcataatttgaggtgtactgaatctctggattccagcgtttgctgttttctttctgcagttcccactcgatctccacgctgacctggccggtgctgtactgcgtgataaatgaggcaaacttggcaggagtaaacacctctggaggattagcaggtaccggggtgtttttgatgagaatttgaggaggcgggtgtttgagtccaaatccgcccatcaggggagacgggtgaaagttgccgtccgtgtgaggaattttggcccagatgggaccctgcaggcacacgtcccggttctgccagaccatgccgggcagagccccctggctgttgacagtctgtgtctggggtccggccgtagacgattgcaggttgctggagaccacaccgtattcttctgtagccacgggattggtggttttgatctcctcctcgctggtcattagcacgttttccagcgttgtcttgttggcagcccccgttttgccaaaaaccagcactccgttgatgggaaagaactggtcctcgtcgtccttgttggtggccatggctacgcccgggttggttaatgaatttctaccattcagatggtatttagtggccccggtccaggcaaagttactgttgttgttgctgtctatgttttttgacagtctctgctgccgataacagggtccgggcagccagttctttgattgctcggccatggtgttgggcccagcctgatggaactgcagctcccttgtggaccccgtagtgctctgggtccgggccaggtagtacaggtactggtcgatgaggggattcatcagccggtctaggctctggctgtgcacatagctgctgtggaaaggcacttcctcaaaggtgtagctgaattcaaagttattgcccgttctcagcatctgagaaggaaagtactccaggcagtagaaggaggaacgtcccacagactgactgccgttgtttagagtcagatatccgtactgaggaatcatgaacacgtccgcagggaacggagggaggcagccctggtgcgcagagccgaggacgtacggcagttggtactccgagtccgagaagacctgaatcgtgctggtaaggttattagcgatggtcgtaacgccgtcgttcgtcgtgacctccttgacctggatgttgaacaacttgaaccgcagctttctgggccggaatccccagttgttgttgatgagtcgctgccagtcacgtggtgagaagtggcagtggaatctgttgaagtcaaaatagccccagggggtgctgtagctgaagaagtggttgtcgttggtagccccgctctgacttgatatctgcttgtagaggtggttgttgtaggtgggcagggcccaggtgcgggtgctggtggtgatgactctgtcgcccagccatgtggaatcgcaatgccaatttccggaggcattacccactccgtcggcgccttcgttattgtctgccattggtgcgccaccgcctgcagccattgtaccagatcccagacctgagggcgcggcgggaggttctccgagaggttgggggtcgggcactgactctgagtcgccagtctgcccaaagttgagcttctttttagcgggctgctggcctttcttgccgatgcccgtggaggagtcgggggattctatgggtctcttctttccaggagccgtcttagcgacttcctcaaccagaccgagaggttcgagaacccgcttcttggcctggaagactgctcgcccgaggttgcccccaaaagacgtatcttcttgaagacgctcctgaaactcggcgtcggcgtggttgtacttgaggtacgggttgtccccctgctcgagctgcttgtcgtaggccttgtcgtgctcgagggccgcggcgtctgcctcgttgaccggctctcccttgtcgagtccgttgaagggtctgaggtacttgtagccaggaagcaccagaccccggccgtcgtcctgcttttgctggttggctttgggtttcggggctccaggtttcaagtcccaccactcgcgaatgccctcagagaggttgtcctcgagccaatctggaagataaccatcggcagccatacctggtttaagtcatttattgctcagaaacacagtcatccaggtccacgttgaccagatcgcaggccgagcaagcaatctcgggagcccgccccagcagatgatgaatggcacagagtttccgatacgtcctctttctgacgaccggttgagattctgacacgccggggaaacattctgaacagtctctggtcccgtgcgtgaagcaaatgttgaaattctgattcactctctcgcatgtcttgcagggaaacagcatctgaagcatgcccgcgtgacgagaacatttgttttggtacctgtcggcaaagtccaccggagctccttccgcgtctgacgtcgatggattcgcgactgaggggcaggcccgcttgggctcgcttttatccgcgtcatcgggggcgggtctcttgttggccccaccctttctgacgtagaacccatgcgccacctcggtcacgtgatcctgcgcccagcggaagaaccttttgacttcctgctttgtcaccttgccaaagttatgctccagacggcgggtgggttcaaatttgaacatccggtcctgcaacggctgctggtgctcgaaggtggcgctgttcccgtcaatcacggcgcacatgttggtgttggaggtgacggtcacgggggtggggtcgatctgggcggacgacttgcacttttggtccacgcgcaccttgctgccgccgagaatggccttggcggactccacgaccttggccgtcatcttgccctcctcccaccagatcaccatcttgtcggcgcaatcgttgaagggaaagttctcattggtccagttgacgcagccgtagaaagggcgaattc

SEQ ID NO: 4821 - DNA, 3102 bp, Adeno-associated virus
gcggccgcgaattcgcccttcgcagagaccaaagttcaactgaaacgaatcaaccggtttattgattaacaagtaattacaggttacgggtgaggtaacgggtgccaatggggcgaggctcagtataaaccccttcgttgttgacagcaaattccacattattagacttggcataatttgaggtgtactgaatctctggattccagcgtttgctgttttctttctgcagttcccactcgatctccacgctgacctggccggtgctgtactgcgtgataaatgaggcaaacttggcaggagtaaacacctctggaggattagcaggtaccggggtgtttttgatgagaatttgaggaggcgggtgtttgagtccaaatccgcccatcaggggagacgggtgaaagttgccgtccgtgtgaggaatttcggcccagatgggaccctgcaggtacacgtcccggttctgccagaccatgccgggcagagccccctggctgttgacagtctgtgtccggggtccggccgtagacgattgcaggttgctggagaccacaccgtattcttctgtagccacgggattggtggttttgatctcctcctcgctggtcattagcacgttttccagcgttgtcttgttggcagcccccgttttgccaaaaaccagcactccgttgatgggaaggaactggtcctcgtcgtccttgttggtggccatggctacgcccgggttggttaatgaatttctaccattcagatggtatttagtggccccggtccaggcaaagttactgttgttgttgctgtctatgttttttgacagtctctgctgccgataacagggtccgggcagccagttctttgattgctcggccacggtgttgggcccagcctgatggaactgcagctcccttgtggaccccgtagtgctctgggtccgggccaggtagtacaggtactggtcgatgaggggattcatcagccggtccaggctctggctgtgcgcatagctgctgtggaaaggcacttcctcaaaggtgtagctgaattcaaagttattgcccgttctcagcatctgagaaggaaagtactccaggcagcagaaggaggaacgtcccacagactgactgccgttgtttagagtcagatatccgtactgaggaatcatgaacacgtccgcagggaacggagggaggcagccctggtgcgcagagccgaggacgtacggcagttggtactccgagtccgagaagacctgaatcgtgctggtaaggttattagcgatggtcgtaacgccgtcgttcgtcgtgacctccttgacctggatgttgaacaacttgaaccgcagctttctgggccggaatccccagttgttgttgatgagtcgctgccagtcacgtggtgagaagtggcagtggaatctgttgaagtcaaaatagccccagggggtgctgtagccgaagaagtggttgtcgttggtagccccgctctgacttgatatctgcttgtagaggtggttgttgtaggtgggcagggcccaggtgcgggtgctggtggtgatgactctgtcgcccagccatgtggaatcgcaatgccaatttccggaggcattacccactccgtcggcgccttcgttattgtctgccattggtgcgccaccgcctgcagccattgtaccagatcccagacctgagggcgcggcgggaggttctccgagaggttgggggtcgggcactgactctgagtcgccagtctgcccaaagttgagcttctttttagcgggctgctggcctttcttgccgatgcccgtggaggagtcgggggattctatgggtctcttctttccggaagccgtcttagcgccttcctcaaccagaccgagaggttcgagaacccgcttcttggcctggaagactgctcgcccgaggttgcccccaaaagacgtatcttcttgaagacgctcctgaaactcggcgtcggcgtggttgtacttgaggtacgggttgtccccctgctcgagctgcttgtcgtaggccttgtcgtgctcgagggccgcggcgtctgcctcgttgaccggctctcccttgtcgagtccgttgaagggtccgaggtacttgtagccaggaagcaccagaccccggccgtcgtcctgcttttgctggttggctttgggtttcggggctccaggtttcaagtcccaccactcgcgaatgccctcagagaggttgtcctcgagccaatctggaagataaccatcggcagccatacctggtttaagtcatttattgctcagaaacacagtcatccaggtccacgttgaccagatcgcaggccgagcaagcaatctcgggagcccgccccagcagatgatgaatggcacagagtttccgatacgtcctctttctgacgaccggttgagattctgacacgccggggaaacattctgaacagtctctggtcccgtgcgtgaagcaaatgttgaaattctgattcattctctcgcatgtcttgcagggaaacagcatctgaagcatgcccgcgtgacgagaacatttgttttggtacctgtcggcaaagtccaccggagctccttccgcgtctgacgtcgatggatccgcgactgaggggcaagcccgcttgggctcgcttttatccgcgtcatcgggggcgggtctcttgttggctccaccctttctgacgtagaactcatgcgccacctcggtcacgtgatcctgcgcccagcggaagaactctttgacttcctgctttgtcaccttgccaaagtcatgctccagacggcgggtgagttcaaatttgaacatccggtcttgtaacggctgctggtgctcgaaggtggtgctgttcccgtcaatcacggcgcacatgttggtgttggaagtgacgatcacgggggtgggatcgatctgggcggacgacttgcacttttggtccacgcgcaccttgctgccgccgagaatggccttggcggactccacgaccttggccgtcatcttgccctcctcccaccagatcaccatcttgtcgacgcaatcgttgaagggaaagttctcattggtccagttgacgcagccgaagggcgaattc

SEQ ID NO: 4822 - protein, 728 aa, Adeno-associated virus
MAADGYLPDWLEDNLSEGIREWWDLKPGAPKPKANQQKQDDGRGLVLPGYRYLGPFNGLDKGEPVNEADAAALEHDKAYDKQLEQGDNPYLKYNHADAEFQERLQEDTSFGGNLGRAVFQAKKRVLEPLGLVEEGAKTAPGKKRPIESPDSSTGIGKNGQPPAKKKLNFGQTGDSESVPDPQPLGEPPAAPSGLGSGTMAAGGGAPMADNNEGADGVGNASGNWHCDSTWLGDRVITTSTRTWALPTYNNHLYKQISSQSGATNDNHFFGYSTPWGYFDFNRFHCHFSPRDWQRLINNNWGFRPRKLRFKLFNIQVKEVTTNDGVTTIANNLTSTIQVFSDSEYQLPYVLGSAHQGCLPPFPADVFMIPQYGYLTLNNGSQSVGRSSFYCLEYFPSQMLRTGNNFEFSYTFEEVPFHSSYAHSQSLDRLMNPLIDQYLYYLARTQSTTGSTRELQFHQAGPNTMAEQSKNWLPGPCYRQQRLSKNIDSNNNSNFAWTGATKYHLNGRNSLTNPGVAMATNKDDEDQFFPINGVLVFGKTGAANKTTLENVLMTSEEEIKTTNPVATEEYGVVSSNLQSSTAGPQTQTVNSQGALPGMVWQNRDVYLQGPIWAKIPHTDGNFHPSPLMGGFGLKHPPPQILIKNTPVPANPPEVFTPAKFASFITQYSTGQVSVEIEWELQKENSKRWNPEIQYTSNYAKSNNVEFAVNNEGVYTEPRPIGTRYLTRNL

SEQ ID NO: 4823 - DNA, 2187 bp, Adeno-associated virus
atggctgccgatggttatcttccagattggctcgagggcaacctctctgagggcattcgcgagtggtgggacttgaaacctggagccccgaaacccaaagccaaccagcaaaagcaggacgacggccggggtctggtgcttcctggctacaggtacctcggacccttcaacggactcgacaagggagagccggtcaacgaggcagacgccgcggccctcgagcacgacaaggcctacgacaagcagctcgagcagggggacaacccgtacctcaagtacaaccacgccgacgccgagtttcaggagcgtcttcaagaagatacgtcttttgggggcaacctcgggcgagcagtcttccaggccaagaagcgggttctcgaacctctcggtctggttgaggaaggcgctaagacggctcctggaaagaagagacccatagaatcccccgactcctccacgggcatcggcaagaacggccagccgcccgctaaaaagaagctcaactttgggcagactggcgactcagagtcagtgcccgacccccaacctctcggagaacctcccgccgcgccctcaggtctgggatctggtacaatggctgcaggcggtggcgcaccaatggcagacaataacgaaggcgccgacggagtgggtaatgcctccggaaattggcattgcgattccacatggctgggcgacagagtcatcaccaccagcacccgcacctgggccctgcccacctacaacaaccacctctacaagcagatatcaagtcagagcggggctaccaacgacaaccacttcttcggctacagcaccccctggggctattttgacttcaacagattccactgccacttctcaccacgtgactggcagcgactcatcaacaacaactggggattccggcccagaaagctgcggttcaagttgttcaacatccaggtcaaggaggtcacgacgaacgacggcgttacgaccatcgctaataaccttaccagcacgattcaggtcttctcggactcggagtaccaactgccgtacgtcctcggctctgcgcaccagggctgcctccctccgttccctgcggacgtgttcatgattcctcagtacggatatctgactctaaacaacggcagtcagtctgtgggacgttcctccttctactgcctggagtactttccttctcagatgctgagaacgggcgataactttgaattcagctacacctttgaggaagtgcctttccacagcagctatgcgcacagccagagcctggaccggctgatgaatcccctcatcgaccagtacctgtactacctggcccggacccagagcactacggggtccacaagggagctgcagttccatcaggctgggcccaacaccatggccgagcaatcaaagaactggctgcccggaccctgttatcggcagcagagactgtcaaaaaacatagacagcaacaacaacagtaactttgcctggaccggggccactaaataccatctgaatggtagaaattcattaaccaacccgggcgtagccatggccaccaacaaggacgacgaggaccagttctttcccatcaacggagtgctggtttttggcaaaacgggggctgccaacaagacaacgctggaaaacgtgctaatgaccagcgaggaggagatcaaaaccaccaatcccgtggctacagaagaatacggtgtggtctccagcaacctgcaatcgtctacggccggaccccagacacagactgtcaacagccagggggctctgcccggcatggtctggcagaaccgggacgtgtacctgcagggtcccatctgggccaaaattcctcacacggacggcaactttcacccgtctcccctgatgggcggatttggactcaaacacccgcctcctcaaattctcatcaaaaacaccccggtacctgctaatcctccagaggtgtttactcctgccaagtttgcctcatttatcacgcagtacagcaccggccaggtcagcgtggagatcgagtgggaactgcagaaagaaaacagcaaacgctggaatccagagattcagtacacctcaaattatgccaagtctaataatgtggaatttgctgtcaacaacgaaggggtttatactgagcctcgccccattggcacccgttacctcacccgtaacctgtaa

SEQ ID NO: 4824 - protein, 728 aa, Adeno-associated virus; identical to SEQ ID NO: 4803

SEQ ID NO: 4825 - DNA, 3106 bp, Adeno-associated virus
gcggccgcgaattcgcccttcgcagagaccaaagttcaactgaaacgaatcagccggtttattgattaacaagtaattacaggttacgggtgaggtaacgggtgccaatggggcgaggctcagtataaaccccttcgttgttgacagcaaattccacattattagacttggcataatttgaggtgtactgaatctctggattccagcgtttgctgttttctttctgcagttcccactcgatctccacgctgacctggccggtgctgtactgcgtgataaatgaggcaaacttggcaggagtaaacacctctggaggattagcaggtaccggggtgtttttgatgagaatttgaggaggcgggtgtttgagtccaaatccgcccatcaggggagacgggtgaaagttgccgtccgtgtgaggaattttggcccagatgggaccctgcaggtacacgtcccggttctgccagaccatgccgggcagagccccctggctgttgacagtctgtgtctggggtccggccgtagacgattgcaggttgctggagaccacaccgtattcttctgtagccacgggattggtggttttgatctcctcctcgctggtcattagcacgttttccagcgttgtcttgttggcagcccccgttttgccaaaaaccagcactccgttgatgggaaagaactggtcctcgtcgtccttgttggtggccatggctacgcccgggttggttaatgaatttctaccattcagatggtatttagtggccccggtccaggcaaagttactgttgttgttgctgtctatgttttttgacagtctctgctgccgataacagggtccgggcagccagttctttgattgctcggccatggtgttgggcccagcctgatggaactgcagctcccttgtggaccccgtagtgctctgggtccgggccaggtagtacaggtactggtcgatgaggggattcatcagccggtccaggctctggctgtgcgcatagctgctgtggaaaggcacttcctcaaaggtgtagctgaattcaaagttatcgcccgttctcagcatctgagaaggaaagtactccaggcagtagaaggaggaacgtcccacagactgactgccgttgtttagagtcagatatccgtactgaggaatcatgaacacgtccgcagggaacggagggaggcagccctggtgcgcagagccgaggacgtacggcagttggtactccgagtccgagaagacctgaatcgtgctggtaaggttattagcgatggtcgtaacgccgtcgttcgtcgtgacctccttgacctggatgttgaacaacttgaaccgcagctttctgggccggaatccccagttgttgttgatgagtcgctgccagtcacgtggtgagaagtggcagtggaatctgttgaagtcaaaatagccccagggggtgctgtagccgaagaagtggttgtcgttggtagccccgctctgacttgatatctgcttgtagaggtggttgttgtaggtgggcagggcccaggtgcgggtgctggtggtgatgactctgtcgcccagccatgtggaatcgcaatgccaatttccggaggcattacccactccgtcggcgccttcgttattgtctgccattggtgcgccaccgcctgcagccattgtaccagatcccagacctgagggcgcggcgggaggttctccgagaggttgggggtcgggcactgactctgagtcgccagtctgcccaaagttgagcttctttttagcgggcggctggccgttcttgccgatgcccgtggaggagtcgggggattctatgggtctcttctttccaggagccgtcttagcgccttcctcaaccagaccgagaggttcgagaacccgcttcttggcctggaagactgctcgcccgaggttgcccccaaaagacgtatcttcttgaagacgctcctgaaactcggcgtcggcgtggttgtacttgaggtacgggttgtccccctgctcgagctgcttgtcgtaggccttgtcgtgctcgagggccgcggcgtctgcctcgttgaccggctctcccttgtcgagtccgttgaagggtccgaggtacctgtagccaggaagcaccagaccccggccgtcgtcctgcttttgctggttggctttgggtttcggggctccaggtttcaagtcccaccactcgcgaatgccctcagagaggttgccctcgagccaatctggaagataaccatcggcagccatacctggtttaagtcatttattgctcagaaacacagtcatccaggtccacgttggccagatcgcaggccgagcaagcaatctcgggagcccgccccagcagatgatgaatggcacagagtttccgatacgtcctctttctgacgaccggttgagattctgacacgccggggaaacattctgaacagtctctggtcccgtgcgtgaagcaaatgttgaaattctgattcattctctcgcatgtcttgcaggggaacagcatctgaagcatgcccgcgtgacgagaacatttgttttggtacctgtcggcaaagtccaccggagctccttccgcgtctgacgtcgatggatccgcgactgaggggcaggcccgcttgggctcgcttttatccgcgtcatcgggggcgggtctcttgttggctccaccctttctgacgtagaactcatacgccacctcggtcacgtgatcctgcgcccagcggaagaactctttgacttcctgctttgtcaccttgccaaagtcatgctccagacggcgggtgagttcaaatttgaacatccggtcttgtaacggctgctggtgctcgaaggtggtgctgttcccgtcaatcacggcgcacatgttggtgttggaagtgacgatcacgggggtgggatcgatctgggcggacgacttgcacttttggtccacgcgcaccttgctgccgccgagaatggccttggcggactccacgaccttggccgtcatcctgccctcctcccaccagatcaccatcttgtcgacgcaatcgttgaagggaaagttctcattggtccagttgacgcagccgtagaaagggcgaattc

SEQ ID NO: 4826 - protein, 728 aa, Adeno-associated virus
MAADGYLPDWLEDNLSEGIREWWDLKPGAPKPKANQQKQDDGRGLVLPGYRYLGPFNGLDKGEPVNEADAAALEHDKAYDKQLEQGDNPYLKYNHADAEFQERLQEDTSFGGNLGRAVFQAKKRVLEPLGLVEEGAKTAPGKKRPIESPDSSTGIGKNGQPPAKKKLNFGQTGDSESVPDPQPLGEPPAAPSGLGSGTMAAGGGAPMADNNEGADGVGNASGNWHCDSTWLGDRVITTSTRTWALPTYNNHLYKQISSQSGATNDNHFFGYSTPWGYFDFNRFHCHFSPRDWQRLINNNWGFRPRKLRFKLFNIQVKEVTTNDGVTTIANNLTSTIQVFSDSEYQLPYVLGSAHQGCLPPFPADVFMIPQYGYLTLNNGSQSVGRSSFYCLEYFPSQMLRTGDNFEFSYTFEEVPFHSSYAHSQSLDRLMNPLIDQYLYYLARTQSTTGSTRELQFHQAGPNTMAEQSKNWLPGPCYRQQRLSKNIDSNNNSNFAWTGATKYHLNGRNSLTNPGVAMATNKDDEDQFFPINGVLVFGKTGAANKTTLENVLMTSEEEIKTTNPVATEEYGVVSSNLQSSTAGPQTQTVNSQGALPGMVWQNRDVYLQGPIWAKIPHTDGNFHPSPLMGGFGLKHPPPQILIKNTPVPANPPEVFTPAKFASFITQYSTGQVSVEIEWELQKENSKRWNPEIQYTSNYAKSNNVEFAVNNEGVYTEPRPIGTRYLTRNL

SEQ ID NO: 4827 - protein, 728 aa, Adeno-associated virus; identical to SEQ ID NO: 4822

SEQ ID NO: 4828 - protein, 728 aa, Adeno-associated virus
MAADGYLPDWLEDNLSEGIREWWDLKPGAPKPKANQQKQDDGRGLVLPGYKYLGPFNGLDKGEPVNEADAAALEHDKAYDKQLEQGDNPYLKYNHADAEFQERLQEDTSFGGNLGRAVFQAKKRVLEPLGLVEEGAKTAPGKKRPIESPDSSTGIGKNGQPPAKKKLNFGQTGDSESVPDPQPLGEPPAAPSGLGSGTMAAGGGAPMADNNEGADGVGNASGNWHCDSTWLGDRVITTSTRTWALPTYNNHLYKQISSQSGATNDNHFFGYSTPWGYFDFNRFHCHFSPRDWQRLINNNWGFRPRKLRFKLFNIQVKEVTTNDGVTTIANNLTSTIQVFSDSEYQLPYVLGSAHQGCLPPFPADVFMIPQYGYLTLNNGSQSVGRSSFYCLEYFPSQMLRTGNNFEFSYTFEEVPFHSSYAHSQSLDRLMNPLIDQYLYYLARTQSTTGSTRELQFHQAGPNTMAEQSKNWLPGPCYRQQRLSKNIDSNNNSNFAWTGATKYHLNGRNSLTNPGVAMATNKDDEDQFFPINGVLVFGKTGAANKTTLENVLMTSEEEIKTTNPVATEEYGVVSSNLQSSTAGPQTQTVNSQGALPGMVWQNRDVYLQGPIWAKIPHTDGNFHPSPLMGGFGLKHPPPQILIKNTPVPANPPEVFTPAKFASFITQYSTGQVSVEIEWELQKENSKRWNPEIQYTSNYAKSNNVEFAVNNEGVYTEPRPIGTRYLTRNL

SEQ ID NO: 4829 - protein, 728 aa, Adeno-associated virus
MAADGYLPDWLEDNLSEGIREWWDLKPGAPKPKANQQKQDDGRGLVLPGYKYLGPFNGLDKGEPVNEADAAALEHDKAYDKQLEQGDNPYLKYNHADAEFQERLQEDTSFGGNLGRAVFQAKKRVLEPLGLVEEGAKTAPGKKRPIESPDSSTGIGKKGQQPAKKKLNFGQTGDSESVPDPQPLGEPPAAPSGLGSGTMAAGGGAPMADNNEGADGVGNASGNWHCDSTWLGDRVITTSTRTWALPTYNNHLYKQISSQSGATNDNHFFGYSTPWGYFDFNRFHCHFSPRDWQRLINNNWGFRPRKLRFKLFNIQVKEVTTNDGVTTIANNLTSTIQVFSDSEYQLPYVLGSAHQGCLPPFPADVFMIPQYGYLTLNNGSQSVGRSSFYCLEYFPSQMLRTGNNFEFSYTFEEVPFHSSYAHSQSLDRLMNPLIDQYLYYLARTQSTTGSTRELQFHQAGPNTMAEQSKNWLPGPCYRQQRLSKNIDSNNNSNFAWTGATKYHLNGRNSLTNPGVAMATNKDDEDQFFPINGVLVFGKTGAANKTTLENVLMTSEEEIKTTNPVATEEYGVVSSNLQSSTAGPQTQTVNSQGALPGMVWQNRDVYLQGPIWAKIPHTDGNFHPSPLMGGFGLKHPPPQILIKNTPVPANPPEVFTPAKFASFITQYSTGQVSVEIEWELQKENSKRWNPEIQYTSNYAKSNNVEFAVNNEGVYTEPRPIGTRYLTRNL

SEQ ID NO: 4830 - DNA, 3098 bp, Adeno-associated virus
gaattcgcccttcgcagagaccaaagttcaactgaaacgaatcaaccggtttattgattaacaagtaattacaggttacgggtgaggtaacgggtgccaatggggcgaggctcagtataaaccccttcgttgttgacagcaaattccacattattagacttggcataatttgaggtgtactgaatctctggattccagcgtttgctgttttctttctgcagttcccactcgatctccacgctgacctggccggtgctgtactgcgtgataaatgaggcaaactaggcaggagtaaacacccctggaggattagcaggtaccggggtgtttttgatgagaatttgaggaggcgggtgtttgagtccaaatccgcccatcaggggagacgggtgaaagttgccgtccgtgtgaggaattttggcccagatgggaccctgcaggtacacgtcccggttctgccagaccatgccgggcagagccccctggctgttgacagtctgtgtctggggtccggccgtagacgattgcaggttgctggagaccacaccgtattcttctgtagccacgggattggtggttttgatctcctcctcgctggtcattagcacgttttccagcgttgtcttgttggcagcccccgttttgccaaaaaccagcactccgttgatgggaaagaactggccctcgtcgtccttgttggtggccatggctacgcccgggttggttaatgaatttctaccattcagatggtatttagtggccccggtccaggcaaagttactgttgttgttgctgtctatgttttttgacagtctctgctgccgataacagggtccgggcagccagttctttgattgctcggccatggtgttgggcccagcctgatggaactgcagctcccttgtggaccccgtagtgctctgggtccgggccaggtagtacaggtactggtcgatgaggggattcatcagccggtccaggctctggctgtgcgcatagctgctgtggaaaggcacttcctcaaaggtgtagctgaattcaaagttattgcccgttctcagcatctgagaaggaaagtactccaggcagtagaaggaggaacgtcccatagactgactgccgttgtttagagtcagatatccgtactgaggaatcatgaacacgtccgcagggaacggagggaggcagccctggtgcgcagagccgaggacgtacggcagttggtactccgagtccgagaagacctgaatcgtgctggtaaggttattagcgatggtcgtaacgccgtcgttcgtcgtgacctccttgacctggatgttgaacaacttgaaccgcagctttctgggccggaatccccagttgttgttgatgagtcgctgccagtcacgtggtgagaagtggcagtggaatctgttgaagtcaaaatagccccagggggtgctgtagccgaagaagtggttgtcgttggtagccccgctctgacttgatatctgcttgtagaggtggttgttgtaggtgggcagggcccaggtgcgggtgctggtggtgatgactctgtcgcccagccatgtggaatcgcaatgccaatttccggaggcattacccactccgtcggcgccttcgttattgtctgccattggtgcgccaccgcctgcagccattgtaccagatcccagacctgagggcgcggcgggaggttctccgagaggttgggggtcgggcactgactctgagtcgccagtctgcccaaagttgagcttctttttagcgggctgctggcctttcttgccgatgcccgtggaggagtcgggggattctatgggtctcttctttccaggagccgtcttagcgccttcctcaaccagaccgagaggttcgagaacccgcttcttggcctggaagactgctcgcccgaggttgcccccaaaagacgtatcttcttgaagacgctcctgaaactcagcgtcggcgtggttgtacttgaggtacgggttgtccccctgctcgagctgcttgtcgtaggccttgtcgtgctcgagggccgcggcgtctgcctcgttgaccggctctcccttgtcgagtccgttgaagggtccgaggtacttgtagccaggaagcaccagaccccggccgtcgtcctgcttttgctggttggctttgggtttcggggctccaggtttcaagtcccaccactcgcgaatgccctcagagaggttgtcctcgagccaatctggaagataaccatcggcagccatacctggtttaagtcatttattgctcagaaacacagtcatccaggtccacgttgaccagatcgcaggccgagcaagcaatctcgggagcccgccccagcagatgatgaatggcacagagtttccgatacgtcctctttctgacgaccggttgagattctgacacgccggggaaacattctgaacagtctctggtcccgtgcgtgaagcaaatgttgaaattctgattcattctctcgcatgtcttgcagggaaacagcatctgaagcatgcccgcgtgacgagaacatttgttttggtacctgtcggcaaagtccaccggagctccttccgcgtctgacgtcgatggatccgcgactgaggggcaggcccgcttgggctcgcttttatccgcgtcatcgggggcgggcctcttgttggctccaccctttctgacgtagaactcatgcgccacctcggtcacgtgatcctgcgcccagcggaagaactctttgacttcctgctttgtcaccttgccaaagtcctgctccagacggcgggtgagttcaaatttgaacatccggtcttgtaacggctgctggtgctcgaaggtggtgctgttcccgtcaatcacggcgcacatgttggtgttggaagtgacgatcacgggggtgggatcgatctgggcggacgacttgcacttttggtccacgcgcaccttgctgccgccgagaatggccttggcggactccacgaccttggccgtcatcttgccctcctcccaccagatcaccatcttgtcgacgcaatcgttgaagggaaagttctcattggtccagttgacgcagccgtagaaagggcgaattc

SEQ ID NO: 4831 - protein, 729 aa, Adeno-associated virus
MAADGYLPDWLEDNLSEGIREWWDLKPGAPKPKANQQKQDDGRGLVLPGYKYLGPFNGLDKGEPVNAADAAALEHDKAYDQQLKAGDNPYLRYNHADAEFQERLQEDTSFGGNLGRAVFQAKKRVLEPLGLVEEGAKTAPGKKRPIDSPDSSTGIGKKGQQPAKKKLNFGQTGDSESVPDPQPLGEPPAAPSSVGSGTMAAGGGAPMADNNEGADGVGNASGNWHCDSTWLGDRVITTSTRTWALPTYNNHLYKQISSSSSGATNDNHYFGYSTPWGYFDFNRFHCHFSPRDWQRLINNNWGFRPKKLRFKLFNIQVKEVTTNDGVTTIANNLTSTVQVFSDSEYQLPYVLGSAHQGCLPPFPADVFMIPQYGYLTLNNGSQSVGRSSFYCLEYFPSQMLRTGNNFEFSYSFEDVPFHSSYAHSQSLDRLMNPLIDQYLYYLARTQSTTGSTRELQFHQAGPNTMAEQSKNWLPGPCYRQQGLSKNLDFNNNSNFAWTAATKYHLNGRNSLTNPGIPMATNKDDEDQFFPINGVLVFGKTGAANKTTLENVLMTSEEEIKTTNPVATEEYGVVSSNLQPSTAGPQSQTINSQGALPGMVWQNRDVYLQGPIWAKIPHTDGNFHPSPLMGGFGLKHPPPQILIKNTPVPANPPEVFTPAKFASFITQYSTGQVSVEIEWELQKENSKRWNPEIQYTSNYAKSNNVEFAVNPDGVYTEPRPIGTRYLPRNL

SEQ ID NO: 4832 - protein, 1458 aa, Adeno-associated virus
MAADGYLPDWLEDNLSEGIREWWDLKPGAPKPKANQQKQDDGRGLVLPGYKYLGPFNGLDKGEPVNAADAAALEHDKAYDQQLKAGDNPYLRYNHADAEFQERLQEDTSFGGNLGRAVFQAKKRVLEPLGLVEEGAKTAPGKKRPIDSPDSSTGIGKKGQQPAKKKLNFGQTGDSESVPDPQPLGEPPAAPSSVGSGTMAAGGGAPTADNNEGADGVGNASGNWHCDSTWLGDRVITTSTRTWALPTYNNHLYKQISSSSSGATNDNHYFGYSTPWGYFDFNRFHCHFSPRDWQRLINNNWGFRPKKLRFKLFNIQVKEVTTNDGVTTIANNLTSTVQVFSDSEYQLPYVLGSAHQGCLPPFPADVFMIPQYGYLTLNNGSQSVGRSSFYCLEYFPSQMLRTGNNFEFSYSFEDVPFHSSYAHSQSLDRLMNPLIDQYLYYLARTQSTTGSTRELQFHQAGPNTMAEQSKNWLPGPCYRQQRLSKNLDFNNNSNFAWTAATKYHLNGRNSLTNPGIPMATNKDDEDQFFPINGVLVFGKTGAANKTTLENVLMTSEEEIKTTNPVATEEYGVVSSNLQSSTAGPQSQTINSQGALPGMVWQNRDVYLQGPIWAKIPHTDGNFHPSPLMGGFGLEHPPPQILIKNTPVPANPPEVFTPAKFASFITQYSTGQVSVEIEWELQKENSKRWNPEIQYTSNYAKSNNVEFAVNPDGVYTEPRPIGTRYLTRNLMAADGYLPDWLEDNLSEGIREWWDLKPGAPKPKANQQKQDDGRGLVLPGYKYLGPFNGLDKGEPVNAADAAALEHDKAYDQQLKAGDNPYLRYNHADAEFQERLQEDTSFGGNLGRAVFQAKKRVLEPLGLVEEGAKTAPGKKRPIGSPDSSTGIGKKGQQPAKKKLNFGQTGDSESVPDPQPLGEPPAAPSSVGSGTMAAGGGAPMADNNEGADGVGNASGNWHCDSTWLGDRVITTSTRTWALPTYNNHLYKQISSSSSGATNDNHYFGYSTPWGYFDFNRFHCHFSPRDWQRLINNNWGFRPKKLRFKLLNIQVKEVTTNDGVTTIANNLTSTVQVFSDSEYQLPYVLGSAHQGCLPPFPADVFMIPQYGYLTLDNGSQSVGRSSFYCLEYFPSQMLRTGNNFEFSYSFEDVPFHSSYAHSQSLDRLMNPLIDQYLYYLARTQSTTGSTRELQFHQAGPNTMAEQSKNWLPGPCYRQQRLSKNLDFNNNSNFAWTAATKYHLNGRNSLTNPGIPMATNKDDEDQFFPINGVLVFGKTGAANKTTLENVLMTSEEEIKTTNPVATEEYGVVSSNLQSSTAGPQSQTINSQGALPGMVWQNRDVYLQGPIWAKIPHTDGNFHPSPLMGGFGLKHPPPQILIKNTPVPANPPEVFTPAKFASFITQYSTGQVSVEIEWELQKENSKRWNPEIQYTSNYAKSNNVEFAVNPDGVYTEPRPIGTRYLTRNL

SEQ ID NO: 4833 - protein, 729 aa, Adeno-associated virus
MAADGYLPDWLEDNLSEGIREWWDLKPGAPKPKANQQKQDDGRGLVLPGYKYLGPFNGLDKGEPVNAADAAALEHDKAYDQQLKAGDNPYLRYNHADAEFQERLQEDTSFGGNLGRAVFQAKKRVLEPLGLVEEGAKTAPGKKRPIDSPDSSTGIGKKGQQPAKKKLNFGQTGDSESVPDPQPLGEPPAAPSSVGSGTMAAGGGAPTADNNEGADGVGNASGNWHCDSTWLGDRVITTSTRTWALPTYNNHLYKQISSSSSGATNDNHYFGYSTPWGYFDFNRFHCHFSPRDWQRLINNNWGFRPKKLRFKLFNIQVKEVTTNDGVTTIANNLTSTVQVFSDSEYQLPYVLGSAHQGCLPPFPADVFMIPQYGYLTLNNGSQSVGRSSFYCLEYFPSQMLRTGNNFEFSYSFEDVPFHSSYAHSQSLDRLMNPLIDQYLYYLARTQSTTGSTRELQFHQAGPNTMAEQSKNWLPGPCYRQQRLSKNLDFNNNSNFAWTAATKYHLNGRNSLTNPGIPMATNKDDEDQFFPINGVLVFGKTGAANKTTLENVLMTSEEEIKTTNPVATEEYGVVSSNLQSSTAGPQSQTINSQGALPGMVWQNRDVYLQGPIWAKIPHTDGNFHPSPLMGGFGLEHPPPQILIKNTPVPANPPEVFTPAKFASFITQYSTGQVSVEIEWELQKENSKRWNPEIQYTSNYAKSNNVEFAVNPDGVYTEPRPIGTRYLTRNL

SEQ ID NO: 4834 - DNA, 3075 bp, Adeno-associated virus
tgagaactttcctttcaacgattgcgtcggacaagatggtgatctggtgggaggaggggaagatgaccgccaaggtcgtggagtcggccaaagccattcttggaggaagcaaggtgcgtgtggaccagaaatgcaagtcctcggcccagatagacccgactcccgtgatcgtcacctccaacaccaacatgtgcgccgtgattgacgggaactcaacgaccttcgagcaccagcagccgttgcaagaccggatgttcaaatttgaacttacccgccgtctggatcatgactttggaaaggtcaccaagcaggaagtgaaagactttttccggtgggcaaaggatcacgtggttgaggtggagcatgaattctacgtcaaaaagggtggagctaagaaaagacccgcccccagtgacgcagatataagtgagcccaaacgggcgcgcgagtcagttgcgcagccatcaacgtcagacgcggaagcttcgatcaactacgcggacaggtaccaaaaacaaatgttctcgtcacgtgggcatgaatctgatgctgtttccctgcagacaatgcgagagaatgaatcagaattcaaatatctgcttcactcacggacagaaagactgtttagagtgctttcccgtgtcagaatctcaacccgtttctgtcgtcaaaaaggcgtatcagaaactgtgctacattcatcatatcatgggaaaggtgccagacgcttgcactgcctgcgatctggtcaatgtggatttggatgactgcatctctgaacaataaatgatttaaatcaggtatggctgccgatggttatcctccagattggctcgaggacactctctctgaagggataagacagtggtggaagctcaaacctggcccaccaccaccaaagcccgcagagcggcataaggacgacagcaggggtcttgtgcttcctgggtacaagtacctcggacccttcaacggactcgacaagggggagccggtcaacgaggcagacgccgcggccctcgagcacgacaaggcctacgaccggcagctcgacagcggagacaacccgtacctcaagtacaaccacgccgacgcagagtttcaggagcgccttaaagaagatacgtcttttgggggcaacctcggacgagcagtcttccaggcgaaaaagagggttcttgaacctctgggcctggttgaggaacctgttaagacggctccgggaaaaaagaggccggtagagcactctcctgtggagccagactcctcctcgggaaccggaaaagcgggccagcggcctgcaagaaaaagattaaattttggtcagactggagacgcagactccgtacctgacccccagcctctcggacagccaccagcagccccctctggtctgggatctactacaatggctacaggcagtggcgcaccaatggcagacaataacgagggtgccgatggagtgggtaattcctcaggaaattggcattgcgattcccaatggctgggcgacagagtcatcaccaccagcacccgaacctgggccctgcccacatacaacaaccacctctacaagcaaatctccagccaatcaggagccagcaacgacaaccactactttggctacagcaccccctgggggtattttgacttcaacagattccactgccacttttcaccacgtgactggcaaagactcatcaacaacaactggggattccggcccaaaagactcaacttcaagctctttaatattcaagtcaaagaggtcacgcagaatgacggtacgacgacgattgccaataaccttaccagcacggttcaggtgtttactgactcggagtaccagctcccgtacgtcctgggctcggcgcatcaaggatgcctcccgccgtttccagcggacgtcttcatggtcccacagtatggatacctcaccctgaacaacgggagtcaggcggtaggacgctcttccttttactgcctggagtactttccttctcagatgctgcgtactggaaacaactttcagttcagctacacttttgaagacgtgcctttccacagcagctacgctcacagccagagtctggatcggctgatgaatcctctgatcgaccagtacctgtattatctgaacaagacacaaacaaatagtggaactcttcagcagtctcggctactgtttagccaagctggaccaaccaacatgtctcttcaagctaaaaactggctgcctggaccttgctacagacagcagcgtctgtcaaaacaggcaaacgacaacaacaacagcaactttccctggactgcagctacaaagtatcatctaaatggccgggactcgttggttaatccaggaccagctatggccagtcacaaggatgacgaagaaaagtttttccccatgcatggaaccctgatatttggtaaacaaggaacaaatgccaacgacgcggatttggaaaatgtcatgattacagatgaagaagaaatcagggccaccaatcccgtggctacggagcagtacgggactgtgtcaaataatttgcaaaactcaaacactggtccaactactggaactgtcaatcgccaaggagcgttacctggtatggtgtggcaggatcgagacgtgtacctgcagggacccatttgggccaagattcctcacaccgatggacactttcatccttctccactgatgggaggttttggactcaaacacccgcctcctcagatcatgatcaaaaacactcccgttccagccaatcctcccacaaacttcagttctgccaagtttgcttctttcatcacacagtattccacgggacaggtcagcgtggagatcgagtgggagctgcagaaggagaacagcaaacgctggaatcccgaaattcagtacacttccaactacaacaagtctgttaatgtggactttactgtggacactaatggtgtgtattcagagcctcgccccattggcaccagatacctgactcgtaatctgtaattgcttgttaatcaataaaccgtttaattcgtttcagttgaactttggtctctgcgaagggcgaa

SEQ ID NO: 4835 - DNA, 3142 bp, Adeno-associated virus
aaaacgacgggccagtgattgtaatacgactcactatagggcgaaattgaaattagcggccgcgaattcgcctttcgcagagaccaaagttcaactgaaacgaattaaacggtttattgattaacaagcaattacagattacgagtcaggtatctggtgccaatggggcgaggctctgaatacacaccattagtgtccacagtaaagtccacattaacagacttgttgtagttggaagtgtactgaatttcgggattccagcgtttgctgttctccttctgcagctcccactcgatctccacgctgacctgtcccgtggaatactgtgtgatgaaagaagcaaacttggcagaactgaagtttgtgggaggattggctggaacgggagtgtttttgatcatgatctgaggaggcgggtgtttgagtccaaaacctcccatcagtggagaaggatgaaagtgtccatcggtgtgaggaatcttggcccaaatgggtccctgcaggtacacgtctcgatcctgccacaccataccaggtaacgctccttggtgattgacagttccagtagttggaccagtgtttgagttttgcaaattatttgacacagtcccgtactgctccgtagccacgggattggtggccctgatttcttcttcatctgtaatcatgacattttccaaatccgcgtcgttggcatttgttccttgtttaccaaatatcagggttccatgcatggggaaaaacttttcttcgtcatccttgtgactggccatagctggtcctggattaaccaacgagtcccggccatttagatgatactttgtagctgcagtccagggaaagttgctgttgttgttgtcgtttgcctgttttgacagacgctgctgtctgtagcaaggtccaggcagccagtttttagcttgaagagacatgttggttggtccagcttggctaaacagtagccgagactgctgaagagttccactatttgtttgtgtcttgttcagataatacaggtactggtcgatcagaggattcatcagccgatccagactctggctgtgagcgtagctgctgtggaaaggcacgtcttcaaaagtgtagctgaactgaaagttgtttccagtacgcagcatctgagaaggaaagtactccaggcagtaaaaggaagagcgtcctaccgcctgactcccgttgttcagggtgaggtatccatactgtgggaccatgaagacgtccgctggaaacggcgggaggcatccttgatgcgccgagcccaggacgtacgggagctggtactccgagtcagtaaacacctgaaccgtgctggtaaggttattggcaatcgtcgtcgtaccgtcattctgcgtgacctctttgacttgaatattaaagagcttgaagttgagtcttttgggccggaatccccggttgttgttgacgagtctttgccagtcacgtggtgaaaagtggcagtggaatctgttgaagtcaaaatacccccagggggtgctgtagccaaagtagtggttgtcgttgctggctcctgattggctggagatttgcttgtagaggtggttgttgtatgtgggcagggcccaggttcgggtgctggtggtgatgactctgtcgcccagccattgggaatcgcaatgccaatttcctgaggaattacccactccatcggcaccctcgttattgtctgccattggtgcgccactgcctgtagccattgtagtagatcccagaccagagggggctgctggtggctgtccgagaggctgggggtcaggtacggagtctgcgtctccagtctgaccaaaatttaatctttttcttgcaggctgctggcccgcttttccggttcccgaggaggagtctggctccacaggagagtgctctaccggcctcttttttcccggagccgtcttaacaggctcctcaaccaggcccagaggttcaagaaccctctttttcgcctggaagactgctcgtccgaggttgcccccaaaagacgtatcttctttaaggcgctcctgaaactctgcgtcggcgtggttgtacttgaggtacgggttgtctccgctgtcgagctgccggtcgtaggccttgtcgtgctcgagggccgcggcgtctgcctcgttgaccggctcccccttgtcgagtccgttgaagggtccgaggtacttgtacccaggaagcacaagacccctgctgtcgtccttatgccgctctgcgggctttggtggtggtgggccaggtttgagcttccaccactgtcttattccttcagagagagtgtcctcgagccaatctggaagataaccatcggcagccatacctgatttaaatcatttattgttcagagatgcagtcatccaaatccacattgaccagatcgcaggcagtgcaagcgtctggcacctttcccatgatatgatgaatgtagcacagtttctgatacgcctttttgacgacagaaacgggttgagattctgacacgggaaagcactctaaacagtctttctgtccgtgagtgaagcagatatttgaattctgattcattctctcgcattgtctgcagggaaacagcatcagattcatgcccacgtgacgagaacatttgttttggtacctgtccgcgtagttgatcgaagcttccgcgtctgacgtcgatggctgcgcaactgactcgcgcgcccgtttgggctcacttatatctgcgtcactgggggcgggtcttttcttagctccaccctttttgacgtagaattcatgctccacctcaaccacgtgatcctttgcccaccggaaaaagtctttcacttcctgcttggtgacctttccaaagtcatgatccagacggcgggtaagttcaaatttgaacatccggtcttgcaacggctgctggtgctcgaaggtcgttgagttcccgtcaatcacggcgcacatgttggtgttggaggtgacgatcacgggagtcgggtctatctgggccgaggacttgcatttctggtccacacgcaccttgcttcctccaagaatggctttggccgactccacgaccttggcggtcatcttcccctcctcccaccagatcaccatcttgtcgacgcaatggtaaaaggaaagttctcattgg

SEQ ID NO: 4836 - DNA, 2208 bp, Adeno-associated virus
atggctgccgatggttatcttccagattggctcgaggacactctctctgaaggaataagacagtggtggaagctcaaacctggcccaccaccaccaaagcccgcagagcggcataaggacgacagcaggggtcttgtgcttcctgggtacaagtacctcggacccttcaacggactcgacaagggggagccggtcaacgaggcagacgccgcggccctcgagcacgacaaggcctacgaccggcagctcgacagcggagacaacccgtacctcaagtacaaccacgccgacgcagagtttcaggagcgccttaaagaagatacgtcttttgggggcaacctcggacgagcagtcttccaggcgaaaaagagggttcttgaacctctgggcctggttgaggaacctgttaagacggctccgggaaaaaagaggccggtagagcactctcctgtggagccagactcctcctcgggaaccggaaaagcgggccagcagcctgcaagaaaaagattaaattttggtcagactggagacgcagactccgtacctgacccccagcctctcggacagccaccagcagccccctctggtctgggatctactacaatggctacaggcagtggcgcaccaatggcagacaataacgagggtgccgatggagtgggtaattcctcaggaaattggcattgcgattcccaatggctgggcgacagagtcatcaccaccagcacccgaacctgggccctgcccacatacaacaaccacctctacaagcaaatctccagccaatcaggagccagcaacgacaaccactactttggctacagcaccccctgggggtattttgacttcaacagattccactgccacttttcaccacgtgactggcaaagactcatcaacaacaactggggattccggcccaaaagactcaacttcaagctctttaatattcaagtcaaagaggtcacgcagaatggcggtacgacgacgattgccaataaccttaccagcacggttcaggtgtttactgactcggagtaccagctcccgtacgtcctgggctcggcgcatcaaggatgcctcccgccgtttccagcggacgtcttcatggtcccacagtatggatacctcaccctgaacaacgggagtcaggcggtaggacgctcttccttttactgcctggagtactttccttctcagatgctgcgtactggaaacaactttcagttcagctacacttttgaagacgtgcctttccacagcagctacgctcacagccagagtctggatcggctgatgaatcctctgatcgaccagtacctgtattatctgaacaagacacaaacaaatagtggaactcttcagcagtctcggctactgtttagccaagctggaccaaccaacatgtctcttcaagctaaaaactggctgcctggaccttgctacagacagcagcgtctgtcaaaacaggcaaacggcaacaacaacagcaactttccctggactgcagctacaaagtatcatctaaatggccgggactcgttggttaatccaggaccagctatggccagtcacaaggatgacgaagaaaagtttttccccatgcatggaaccctgatatttggtaaacaaggaacaaatgccaacgacgcggatttggaaaatgtcatgattacagatgaagaagaaatcagggccaccaatcccgtggctacggagcagtacgggactgtgtcaaataatttgcaaaactcaaacactggtccaactactggaactgtcaatcaccaaggagcgttacctggtatggtgtggcaggatcgagacgtgtacctgcagggacccatttgggccaagattcctcacaccgatggacactttcatccttctccactgacgggaggttttggactcaaacacccgcctcctcagatcatgatcaaaaacactcccgttccagccaatcctcccacaaacttcagttctgccaagtttgcttctttcatcacacagtattccacgggacaggtcagcgtggagatcgagtgggagctgcagaaggagaacagcaaacgctggaatcccgaaattcagtacacttccaactacaacaagtctgttaatgtggactttactgtggacactaatggtgtgtattcagagcctcgccccattggcaccagatacctgactcgtaatctgtaa

SEQ ID NO: 4837 - protein, 735 aa, Adeno-associated virus
MAADGYLPDWLEDTLSEGIRQWWKLKPGPPPPKPAERHKDDSRGLVLPGYKYLGPFNGLDKGEPVNEADAAALEHDKAYDRQLDSGDNPYLKYNHADAEFQERLKEDTSFGGNLGRAVFQAKKRVLEPLGLVEEPVKTAPGKKRPVEHSPVEPDSSSGTGKAGQQPARKRLNFGQTGDADSVPDPQPLGQPPAAPSGLGSTTMATGSGAPMADNNEGADGVGNSSGNWHCDSQWLGDRVITTSTRTWALPTYNNHLYKQISSQSGASNDNHYFGYSTPWGYFDFNRFHCHFSPRDWQRLINNNWGFRPKRLNFKLFNIQVKEVTQNGGTTTIANNLTSTVQVFTDSEYQLPYVLGSAHQGCLPPFPADVFMVPQYGYLTLNNGSQAVGRSSFYCLEYFPSQMLRTGNNFQFSYTFEDVPFHSSYAHSQSLDRLMNPLIDQYLYYLNKTQTNSGTLQQSRLLFSQAGPTNMSLQAKNWLPGPCYRQQRLSKQANGNNNSNFPWTAATKYHLNGRDSLVNPGPAMASHKDDEEKFFPMHGTLIFGKQGTNANDADLENVMITDEEEIRATNPVATEQYGTVSNNLQNSNTGPTTGTVNHQGALPGMVWQDRDVYLQGPIWAKIPHTDGHFHPSPLTGGFGLKHPPPQIMIKNTPVPANPPTNFSSAKFASFITQYSTGQVSVEIEWELQKENSKRWNPEIQYTSNYNKSVNVDFTVDTNGVYSEPRPIGTRYLTRNL

SEQ ID NO: 4838 - DNA, 2208 bp, Adeno-associated virus
atggctgccgatggttatcttccagattggctcgaggacactctctctgaaggaataagacagtggtggaagctcaaacctggcccaccaccaccaaagctcgcagagcggcatcaggacgacagcaggggtcttgtgcttcctgggtacaagtacctcggacccttcaacggactcgacaaaggagagccggtcaacgaggcagacgccgcggccctcgagcacgacaaggcctacgaccggcagctcgacagcggagacaacccgtacctcaagtacaaccacgccgacgcggagtttcaggagcgtcttaaagaagatacgtcttttgggggcaacctcggacgagcagtcttccaggcgaaaaagagggttcttgaacctctgggcctggttgaggaacctgttaagacggctccgggaaaaaagaggccggtagagcactctcctgtggagccagactcctcctcgggaaccggaaaggcgggccatcagcctgcgagaaagagattgaattttggtcagactggagacgcagactccgtacctgacccccagcctctcggacagccaccagcagcccccacaagtctgggatctactacaatggctacaggcagtggcgcaccaatggcagacaataacgagggtgccgatggagtgggtaattcctcaggaaattggcattgcgattcccaatggctgggcgacagagtcatcaccaccagcacccgaacctgggccctgcccacctacaacaaccacctctacaagcaaatctccagccaatcaggagcctcgaacgacaaccactactttggctacagcaccccctgggggtattttgacttcaacagattccactgtcacttctccccacgtgattggcaaagactcatcaacaacaactggggattccgacccaagagactcaacttcaagctctttaacattcaagtcaaagaggtcacgcagaatgacggtacgacgacgattgccaataaccttaccagcacggttcaggtgtttactgactcggagtaccagctcccgtacgtcctcggctcggcgcatcaaggatgcctcccgccgtttccagcggacgtcttcacggtcccacagtatggatacctcaccctgaacaacgggagtcaggcggtaggacgctcttccttttactgcctggagtactttccttctcagatgctgcgtactggaaacaaccttaccttcagctacacctttgaggacgttcctttccacagcagctacgctcacagccagagtttggaccggctgatgaatcctctgatcgaccagtatctatattatctgaacaggacacaatcaaatagtggaactcttcagcagtctaggctactgtttagccaagctggacccaccagcatgtctcttcaagctaaaaactggctgcctggaccttgctacagacagcagcgtctttcaaagcaggcaaacgacaacaacaacagcaactttccctggactgcggctacaaagtatcatctaaatggccgggactcgttggttaatccaggaccagctatggccagccacaaagacgatgaagaaaagtttttccccatgcatggaaccctgatatttggtaaacaaggaacaaatgctaacgacgcggatttggagcatgttatgattacagatgaagaagaaatcaggaccaccaatcctgtggctacagagcagtacggaaacgtgtcaaataatttgcaaaactcaaatactggtccaactacagaaaatgtcaatcaccagggagcgttacctggtatggtgtggcaggatcgagacgtgtacctgcagggacccatttgggccaagattcctcacaccgacggacactttcacccttctccactgatgggaggttttggactcaaacacccgcctcctcaaatcatgatcaaaaacactcccgttccagccaatcctcccacaaactacagttctgccaagtttgcttctttcatcacacagtattccacgggccaggtcagcgtggagattgagtgggagctgcggaaggagaacagcaaacgctggaaccccgagatccagtatacttccaactacaacaaatctgttaatgtggactttactgtggacactaatggtgtgtattcagagcctcgccccattggcaccagatacctgactcgtaatctgtaa

SEQ ID NO: 4839 - protein, 735 aa, Adeno-associated virus
MAADGYLPDWLEDTLSEGIRQWWKLKPGPPPPKLAERHQDDSRGLVLPGYKYLGPFNGLDKGEPVNEADAAALEHDKAYDRQLDSGDNPYLKYNHADAEFQERLKEDTSFGGNLGRAVFQAKKRVLEPLGLVEEPVKTAPGKKRPVEHSPVEPDSSSGTGKAGHQPARKRLNFGQTGDADSVPDPQPLGQPPAAPTSLGSTTMATGSGAPMADNNEGADGVGNSSGNWHCDSQWLGDRVITTSTRTWALPTYNNHLYKQISSQSGASNDNHYFGYSTPWGYFDFNRFHCHFSPRDWQRLINNNWGFRPKRLNFKLFNIQVKEVTQNDGTTTIANNLTSTVQVFTDSEYQLPYVLGSAHQGCLPPFPADVFTVPQYGYLTLNNGSQAVGRSSFYCLEYFPSQMLRTGNNLTFSYTFEDVPFHSSYAHSQSLDRLMNPLIDQYLYYLNRTQSNSGTLQQSRLLFSQAGPTSMSLQAKNWLPGPCYRQQRLSKQANDNNNSNFPWTAATKYHLNGRDSLVNPGPAMASHKDDEEKFFPMHGTLIFGKQGTNANDADLEHVMITDEEEIRTTNPVATEQYGNVSNNLQNSNTGPTTENVNHQGALPGMVWQDRDVYLQGPIWAKIPHTDGHFHPSPLMGGFGLKHPPPQIMIKNTPVPANPPTNYSSAKFASFITQYSTGQVSVEIEWELRKENSKRWNPEIQYTSNYNKSVNVDFTVDTNGVYSEPRPIGTRYLTRNL

SEQ ID NO: 4840 - DNA, 2208 bp, Adeno-associated virus
atggctgccgatggttatcttccagattggctcgaggacactctctctgaaggaataagacagtggtggaagctcaaacctggcccaccaccaccaaagcccgcagagcggcatcaggacgacagcaggggtcttgtgcttcctgggtacaagtacctcggacccttcaacggactcgacaaaggagagccggtcaacgaggcagacgccgcggccctcgagcacgacaaggcctacgaccggcagctcgacagcggagacaacccgtacctcaagtacaaccacgccgacgcggagtttcaggagcgtcttaaagaagatacgtcttttgggggcaacctcggacgagcagtcttccaggcgaaaaagagggttcttgaacctctgggcctggttgaggaacctgttaagacggctccgggaaaaaagaggccggtagagcactctcctgtggagccagactcctcctcgggaaccggaaaagcgggccatcagcctgcgagaaagagattgaattttggtcagactggagacgcagactccgtacctgacccccagcctctcggacagccaccagcagcccccacaagtttgggatctactacaatggctacaggcagtggcgcaccaatggcagacaataacgagggtgccgatggagtgggtaattcctcaggaaattggcattgcgattcccaatggctgggcgacagagtcatcaccaccagcacccgaacctgggccctgcccacctacaacaaccacctctacaagcaaatctccagccaatcaggagcctcgaacgacaaccactactttggctacagcaccccctgggggtattttgacttcaacagattccactgtcacttctccccacgtgattggcaaagactcatcaacaacaactggggattccgacccaagagactcaacttcaagctctttaacattcaagtcaaggaggtcacgcagaatgacggtacgacgacgattgccaataaccttaccagcacggttcaggtgtttactgactcggagtaccagctcccgtacgtcctcggctcggcgcatcaaggatgcctcccgccgtttccagcggacgtcttcatggtcccacagtatggatacctcaccctgaacaacgggagtcaggcggtaggacgctcttccttttactgcctggagtactttccttctcagatgctgcgtactggaaacaactttaccttcagctacacctttgaggacgttcctttccacagcagctacgctcacagccagagtttggaccggctgatgaatcctctgatcgaccagtatctatattatctgaacaggacacaatcaaatagtggaactcttcagcagtctaggctactgtttagccaagctggacccaccagcatgtctcttcaagctaaaaactggctgcctggaccttgctacagacagcagcgtctttcaaagcaggcaaacgacaacaacaacagcaactttccctggactgcggctacaaagtatcgtctaaatggccgggactcgttggttaatccaggaccagctatggccagccacaaagacgatgaagaaaagtttttccccatgcatggaaccctgatatttggtaaacaaggaacaaatgctaacgacgcggatttggagcatgttatgattacagatgaagaagaaatcaggaccaccaatcctgtggctacagagcagtacggaaacgtgtcaaataatttgcaaaactcaaatactggtccaactacagaaaatgtcaatcaccagggagcgttacctggtatggtgtggcaggatcgagacgtgtacctgcagggacccatttgggccaagattcctcacaccgacggacactttcacccttctccactgatgggaggttttggactcaaacacccgcctcctcaaatcatgatcaaaaacactcccgttccagccaatcctcccacaaacttcagttctgccaagtttgcttctttcatcacacagtattccacgggccaggtcagcgtggagattgagtgggagctgcagaaggagaacagcaaacgctggaaccccgagatccagtatacttccaactacaacaaatctgttaatgtggactttactgtggacactaatggtgtgtattcagagcctcgccccattggcaccagatacctgactcgtaatctgtaa

SEQ ID NO: 4841 - protein, 735 aa, Adeno-associated virus
MAADGYLPDWLEDTLSEGIRQWWKLKPGPPPPKPAERHQDDSRGLVLPGYKYLGPFNGLDKGEPVNEADAAALEHDKAYDRQLDSGDNPYLKYNHADAEFQERLKEDTSFGGNLGRAVFQAKKRVLEPLGLVEEPVKTAPGKKRPVEHSPVEPDSSSGTGKAGHQPARKRLNFGQTGDADSVPDPQPLGQPPAAPTSLGSTTMATGSGAPMADNNEGADGVGNSSGNWHCDSQWLGDRVITTSTRTWALPTYNNHLYKQISSQSGASNDNHYFGYSTPWGYFDFNRFHCHFSPRDWQRLINNNWGFRPKRLNFKLFNIQVKEVTQNDGTTTIANNLTSTVQVFTDSEYQLPYVLGSAHQGCLPPFPADVFMVPQYGYLTLNNGSQAVGRSSFYCLEYFPSQMLRTGNNFTFSYTFEDVPFHSSYAHSQSLDRLMNPLIDQYLYYLNRTQSNSGTLQQSRLLFSQAGPTSMSLQAKNWLPGPCYRQQRLSKQANDNNNSNFPWTAATKYRLNGRDSLVNPGPAMASHKDDEEKFFPMHGTLIFGKQGTNANDADLEHVMITDEEEIRTTNPVATEQYGNVSNNLQNSNTGPTTENVNHQGALPGMVWQDRDVYLQGPIWAKIPHTDGHFHPSPLMGGFGLKHPPPQIMIKNTPVPANPPTNFSSAKFASFITQYSTGQVSVEIEWELQKENSKRWNPEIQYTSNYNKSVNVDFTVDTNGVYSEPRPIGTRYLTRNL

SEQ ID NO: 4842 - DNA, 2208 bp, Adeno-associated virus
atggctgccgatggttatcttccagattggctcgaggacactctctctgaaggaataagacagtggtggaagctcaaacctggcccaccaccaccaaagcccgcagagcggcatcaggacgacagcaggggtcttgtgcttcctgggtacaagtacctcggacccttcaacggactcgacaaaggagagccggtcaacgaggcagacgccgcggccctcgagcacgacaaggcctacgaccggcagctcgacagcggagacaacccgtacctcaagtacaaccacgccgacgcggagtttcaggagcgtcttaaagaagatacgtcttttgggggcaacctcggacgagcagtcttccaggcgaaaaagagggttcttgaacctctgggcctggttgaggaacctgttaagacggctccgggaaaaaagaggccggtagagcactctcctgtggagccagactcctcctcgggaaccggaaaagcgggccatcagcctgcgagaaagagattgaattttggtcagactggagacgcagactccgtacctgacccccagcctctcggacagccaccagcagcccccacaagtttgggatctactacaatggctacaggcagtggcgcaccaatggcagacaataacgagggtgccgatggagtgggtaattcctcaggaaattggcattgcgattcccaatggctgggcgacagagtcatcaccaccagcacccgaacctgggccctgcccacctacaacaaccacctctacaagcaaatctccagccaatcaggagcctcgaacgacaaccactactttggctacagcaccccctgggggtattttgacttcaacagattccactgtcacttctccccacgtgattggcaaagactcatcaacaacaactggggattccgacccaagagactcaacttcaagctctttaacattcaagtcaaagaggtcacgcagaatgacggtacgacgacgattgccaataaccttaccagcacggttcaggtgtttactgactcggagtaccagctcccgtacgtcctcggctcggcgcatcaaggatgcctcccgccgtttccagcggacgtcttcatggtcccacagtatggatacctcaccctgaacaacgggagtcaggcggtaggacgcccttccttttactgcctggagtactttccttctcagatgctgcgtactggaaacaactttaccttcagctacacctttgaggacgttcctttccacagcagctacgctcacagccagagtttggaccggctgatgaatcctctgatcgaccagtatctatattatctgaacaggacacaatcaaatagtggaactcttcagcagtctaggctactgtttagccaagctggacccaccagcatgtctcttcaagctaaaaactggctgcctggaccttgctacagacagcagcgtctttcaaagcaggcaaacgacaacaacaacagcaactttccctggactgcggctacaaagtatcatctaaatggccgggactcgttggttaatccaggaccagctatggccagccacaaagacgatgaagaaaagtttttccccatgcatgggaccctgatatttggtaaacaaggaacaaatgctaacgacgcggatttggagcatgttatgattacagatgaagaagaaatcaggaccaccaatcctgtggctacagagcagtacggaaacgtgtcaaataatttgcaaaactcaaatactggtccaactacagaaaatgtcaatcaccagggagcgttacctggtatggtgtggcaggatcgagacgtgtacctgcagggacccatttgggccaagattcctcacaccgacggacactttcacccttctccactgatgggaggttttggactcaaacacccgcctcctcaaatcatgatcaaaaacactcccgttccagccaatcctcccacaaacttcagttctgccaagtttgcttctttcatcacacagtattccacgggccaggtcagcgtggagattgagtgggagctgcagaaggagaacagcaaacgctggaaccccgagatccagtatacttccaactacaacaaatctgttaatgtggactttactgtggacactaatggtgtgtattcagagcctcgccccattggcaccagatacctgactcgtaatctgtaa

SEQ ID NO: 4843 - protein, 735 aa, Adeno-associated virus
MAADGYLPDWLEDTLSEGIRQWWKLKPGPPPPKPAERHQDDSRGLVLPGYKYLGPFNGLDKGEPVNEADAAALEHDKAYDRQLDSGDNPYLKYNHADAEFQERLKEDTSFGGNLGRAVFQAKKRVLEPLGLVEEPVKTAPGKKRPVEHSPVEPDSSSGTGKAGHQPARKRLNFGQTGDADSVPDPQPLGQPPAAPTSLGSTTMATGSGAPMADNNEGADGVGNSSGNWHCDSQWLGDRVITTSTRTWALPTYNNHLYKQISSQSGASNDNHYFGYSTPWGYFDFNRFHCHFSPRDWQRLINNNWGFRPKRLNFKLFNIQVKEVTQNDGTTTIANNLTSTVQVFTDSEYQLPYVLGSAHQGCLPPFPADVFMVPQYGYLTLNNGSQAVGRPSFYCLEYFPSQMLRTGNNFTFSYTFEDVPFHSSYAHSQSLDRLMNPLIDQYLYYLNRTQSNSGTLQQSRLLFSQAGPTSMSLQAKNWLPGPCYRQQRLSKQANDNNNSNFPWTAATKYHLNGRDSLVNPGPAMASHKDDEEKFFPMHGTLIFGKQGTNANDADLEHVMITDEEEIRTTNPVATEQYGNVSNNLQNSNTGPTTENVNHQGALPGMVWQDRDVYLQGPIWAKIPHTDGHFHPSPLMGGFGLKHPPPQIMIKNTPVPANPPTNFSSAKFASFITQYSTGQVSVEIEWELQKENSKRWNPEIQYTSNYNKSVNVDFTVDTNGVYSEPRPIGTRYLTRNL

SEQ ID NO: 4844 - DNA, 2208 bp, Adeno-associated virus
atggctgccgatggttatcttccagattggctcgaggacactctctctgaaggaataagacagtggtggaagctcaaacctggcccaccaccaccaaagcccgcagagcggcataaggacgacagcaggggtcttgtgcttcctgggtacaagtacctcggacccttcaacggactcgacaagggagagccggtcaacgaggcagacgccgcggccctcgagcacgacaaggcctacgaccggcagctcgacagcggagacaacccgtacctcaagtacaaccacgccgacgcggagtttcaggagcgccttaaagaagatacgtcttttgggggcaacctcggacgagcagtcttccaggcaaaaaagagggttcttgaacctctgggcctggttgaggagcctgttaaaacggctccgggaaaaaagaggccggtagagcactctcctgcggagccagactcctcctcgggaaccggaaaagcgggccagcagcctgcaagaaaaagattgaatttcggtcagactggagacgcagactccgtacctgacccccagcctctcggacagccaccagcagccccctctggtctgggaactaatacgatggcttcaggcagtggcgcaccaatggcagacaataacgagggcgccgacggagtgggtaattcctcgggaaattggcattgcgattccacatggatgggcgacagagtcatcaccaccagcacccgaacttgggccctgcccacctacaacaaccatctctacaagcaaatctccagccaatcaggagccagcaacgacaaccactactttggctacagcaccccttgggggtattttgacttcaacagattccactgccacttttcaccacgtgactggcaaagactcatcaacaacaactggggattccggcccaagagactcaacttcaagctctttaacattcaagtcaaagaggtcacgcagaatgacggtacgacgacgattgccaataaccttaccagcacggttcaggtgtttactgactcggagtaccagctcccgtacgtcctcggctcggcgcatcaaggatgcctcccgccgttcccagcagacgtcttcatggtgccacagtatggatacctcaccctgaacaacgggagtcaggcagtaggacgctcttcattttactgcctggagtactttccttctcagatgctgcgtaccggaaacaactttaccttcagctacacctttgaggacgttcctttccacagcagctacgctcacagccagagtttggaccgtctcatgaatcctctcatcgaccagtacctgtattacttgagcagaacaaacactccaagcggaaccaccacgcagtccaggcttcagttttctcaggccggagcaagtgacattcgggaccagtctaggaactggcttcctggaccctgttaccgccagcagcgagtatcaaagacatctgcggataacaacaacagtgaatactcgtggactggagctaccaagtaccacctcaatggcagagactctctggtgaatccgggcccggccatggccagccacaaggacgatgaagaaaagttttttcctcagagcggggttctcatctttgggaagcaaggctcagagaaaacaaatgtggacattgaaaaggtcatgattacagacgaagaggaaatcaggaccaccaatcccgtggctacggagcagtatggttctgtatctaccaacctgcagggcggcaacacacaagcagctaccgcagatgtcaacacacaaggcgttcttccaggcatggtctggcaggacagagacgtgtacctgcaggggcccatctgggcaaagattccacacacggacggacattttcacccctctcccctcatgggcggattcggacttaaacaccctcctccacagattctcatcaagaacaccccggtacctgcgaatccttcgaccaccttcagtgcggcaaagtttgcttctttcatcacacagtattccacggggcaggtcagcgtggagatcgagtgggagctgcagaaggagaacagcaaacgctggaatcccgagatccagtacacttccaactacaacaaatctgttaatgtggactttactgttgacactaatggcgtgtattcagagcctcgccccattggcaccagatacctgactcgtaatctgtaa

SEQ ID NO: 4845 - protein, 735 aa, Adeno-associated virus
MAADGYLPDWLEDTLSEGIRQWWKLKPGPPPPKPAERHKDDSRGLVLPGYKYLGPFNGLDKGEPVNEADAAALEHDKAYDRQLDSGDNPYLKYNHADAEFQERLKEDTSFGGNLGRAVFQAKKRVLEPLGLVEEPVKTAPGKKRPVEHSPAEPDSSSGTGKAGQQPARKRLNFGQTGDADSVPDPQPLGQPPAAPSGLGTNTMASGSGAPMADNNEGADGVGNSSGNWHCDSTWMGDRVITTSTRTWALPTYNNHLYKQISSQSGASNDNHYFGYSTPWGYFDFNRFHCHFSPRDWQRLINNNWGFRPKRLNFKLFNIQVKEVTQNDGTTTIANNLTSTVQVFTDSEYQLPYVLGSAHQGCLPPFPADVFMVPQYGYLTLNNGSQAVGRSSFYCLEYFPSQMLRTGNNFTFSYTFEDVPFHSSYAHSQSLDRLMNPLIDQYLYYLSRTNTPSGTTTQSRLQFSQAGASDIRDQSRNWLPGPCYRQQRVSKTSADNNNSEYSWTGATKYHLNGRDSLVNPGPAMASHKDDEEKFFPQSGVLIFGKQGSEKTNVDIEKVMITDEEEIRTTNPVATEQYGSVSTNLQGGNTQAATADVNTQGVLPGMVWQDRDVYLQGPIWAKIPHTDGHFHPSPLMGGFGLKHPPPQILIKNTPVPANPSTTFSAAKFASFITQYSTGQVSVEIEWELQKENSKRWNPEIQYTSNYNKSVNVDFTVDTNGVYSEPRPIGTRYLTRNL

SEQ ID NO: 4846 - DNA, 3161 bp, Adeno-associated virus
gattgaatttagcggccgcgaattcgcccttgctgcgtcaactggaccaatgagaactttccattcaatgattgcgtcgacaagatggtgatctggtgggaggagggaaagatgaccgccaaggtcatggagtcggccaaagccattctcggaggaagcaaggtgcgcgtggaccagaaatgtaagtcctcggcccagatagacccgactcccgtgattgtcacctccaacaccaacatgtgcgccgtgattgacgggaactcaacgaccttcgagcaccagcagccgttgcaagaccggatgttcaaatttgaactcacccgccgtctggatcatgactttgggaaggtcaccaagcaggaagtcaaagactttttccggtgggcaaaggatcacgtggttgaggtggagcatgaattctacgtcaaaaagggtggagccaagaaaagacccgcccccagtgacgcagatataagtgagcccaaacgggcgcgcgggtcagttgcgcagccatcgacgtcagacgcggaagcttcgatcaactacgcggacaggtaccaaaacaaatgttctcgtcacgtgggcatgaatctgatgctgtttccctgcagacaatgcgagagaatgaatcaaaattcaaatatctgcttcactcacggacagaaggactgtttagagtgctttcccgtgtcagaatctcaacccgtttctgtcgtcaaaaaggcgtatcagaaactttgctacattcatcatatcatgggaaaggtgccagacgcttgcactgcctgcgatctggtcaatgtggatttggatgactgcatctctgaacaataaatgatttaaatcaggtatggctgccgatggttatcttccagattggctcaaggacactctctctgaaggaataagacagtggtggaagctcaaacctggcccaccaccaccaaagcccgcagagcggcataaggacgacagcgggggtcttgtgcttcctgggtacaagtacctcggacccttcaacggactcgacaagggagagccggtcaacgaggcagacgccgcggccctcgagtacgacaaggcctacgaccggcagctcgacagcggagacaacccgtacctcaagtacaaccacgccgacgcggagtttcaggagcgccttaaagaagatacgtcttttgggggcaacctcggacgagcagtcttccaggcgaaaaagagggttcttgaacctctgggcctggttgaggaacctgttaagacggctccgggaaaaaagaggccggtagagcactctcctgtggagccagactcctcctcgggaacaggaaaagcgggccagcagcctgcgagaaagagattgaattttggtcagactggagacgcagactccgtacctgacccccagcctctcggacagccaccagcagccccctctggtctgggaactaatacgatggctacaggcagtggcgcaccaatggcagacaataacgagggcgccgacggagtgggtaattcctcgggaagttggcattgcgattccacatggatgggcgacagagtcatcaccaccagcacccgaacctgggctctgcccacctacaacaaccatctgtacaagcagatctccagccaatcaggagccagcaacgacaaccactactttggctacagcaccccttgggggtattttgacttcaacagattccactgccacttttcaccacgtgactggcaaagactcatcaacaacaactggggattccggcccaagagactcaacttcaagctctttaacattcaagtcaaggaggtcacgcagaatgacggtacgacgacgattgccaataaccttaccagcacggttcaggtgtttactgactcggagtaccagctcccgtacgtccccggctcggcgcatcaaggatgcctcccgccgttcccagcagacgtcttcatggtgccacagtatggatacctcaccctgaacaacgggagtcaggcagtaggacgctcttcattttactgcctggagtactttccttctcagatgcttcgtaccggaaacaactttaccttcagctacacctttgaggatgttcctttccacagcagctacgctcacagccagagtttggaccgtctcatgaatcctctcatcgaccagtacctgtattacttgagcagaacaaacactccaagcggaaccaccacgcagtccaggcttcagttttctcaggccggagcaagtgacattcgggaccagtctaggaactggcttcctggaccctgttaccgccagcagcgagtatcaaagacagctgcggacaacaacaacagtgaatactcgtggactggagctaccaagtaccacctcaatggcagagactctctggtgaatccgggcccggccatggccagccacaaggacgatgaagaaaagttttttcctcaaagcggggttctcatctttgggaagcaaggctcagagaaaacaaatgtggacattgaaaaggtcatgattacagacgaagaggaaatcagaaccaccaatcccgtggccacggagcagtatggttctgtatctaccaacctccagagcggcaacacacaagcagctactgcagatgtcaacacacaaggcgttcttccaggcatggtctggcaggacagagacgtgcacctgcaggggcctatctgggcaaagattccacacacggacggacattttcacccctctcccctcatgggcggatttggacttaaacaccctcctccacagattctcatcaagaacaccccggtacctgcaaatccttcgaccaccttcagtgcggcaaagtttgcttccttcatcacacagtattccacagggcaggtcagcgtggagatcgagtgggagctgcagaaggagaacagcaaacgctggaaccccgagatccagtacacttccaactacaacaaatctgttaatgtggactttactgtggacactaatggtgtgtattcagagcctcgccccattggcaccagatacctgactcgtaatctgtaattgcttgttaatcaataaaccgtttaattcgtttcagttgaactttggtctctgcgaagggcgaattcgtttaaaccctgcaggactagtccctttagtgagg

SEQ ID NO: 4847 - DNA, 3162 bp, Adeno-associated virus
gaattgaatttagcggccgcgaattcgcccttcgcagagaccaaagttcaactgaaacgaattaaacggtttattgattaacaagcaattacagattacgagtcaggtatctggtgccaatggggcgaggctctgaatacacgccattagtgtccacagtaaagtccacattaacagacttgttgtagttggaagtgtactgaatttcgggattccagcgtttgctgttttccttctgcagctcccactcgatctccacgctgacctgtcccgtggagtactgtgtgatgaaggaagcaaactttgccgcactgaaggtggtcgaaggattcgcaggtaccggggtgttcttgatgagaatctgtggaggagggtgtttaagtccgaatccacccatgaggggagaggggtgaaaatgtccgtccgtgtgtggaatctttgcccagatgggcccctgaaggtacacatctctgtcctgccagaccatgcctggaagaacgccttgtgtgttgacatctgcggtagctgcttgtctgttgcctctctggaggttggtagatacagaaccgtactgctccgtagccacgggattggttgtcctgatttcctcttcgtctgtaatcatgaccttttcaatgtccacatttgttttctctgagccttgcttcccaaagatgagaaccccgctctgaggaaaaaacttttcttcattgtccttgtggcttgccatggccgggcccggattcaccagagagtctctgccattgaggtggtacttggtagctccagtccacgagtattcactgttgttgttatccgcagatgtctttgatactcgctgctggcggtaacagggtccaggaagccagttcctagactggtcccgaatgtcactcgctccggcctgagaaaactgaagccttgactgcgtggtggttccacttggagtgtttgttgtgctcaagtaatacaggtactggtcgatgagaggattcatgagacggtccagactctggctgtgagcgtagccgctgtggaaaggaacgtcctcaaaagtgtagctgaaggtaaagttgtttccggtacgcagcatctgagaaggaaagtactccaggcagtaaaatgaagagcgtcctactgcctgactcccgttgttcagggtgaggtatccatactgtggcaccatgaagacgtctgctgggaacggcgggaggcatccttgatgcgccgagccgaggacgtacgggagctggtactccgagtcagtaaacacctgaaccgtgctggtaaggttattggcaatcgtcgtcgtaccgtcattctgcgtgacctctttgacttgaatgttaaagagcttgaagttgagtctcttgggtcggaatccccagttgttgttgatgagtctttgccagtcacgtggtgaaaagtggcagtggaatctgttgaagtcaaaatacccccaaggggtgctgtagccaaagtagtgattgtcgttcgaggctcctgattggctggaaatttgtttgtagaggtggttgttgtaggtgggcagggcccaggttcgggtgctggtggtgatgactctgtcgcccatccatgtggaatcgcaatgccaatttcccgaggaattacccactccgtcggcgccctcgttattgtctgccattggtgcgccactgcctgtagccatcgtattagttcccagaccagagggggctgctggtggctgtccgagaggctgggggtcaggtactgagtctgcgtctccagtctgaccaaaattcaatctttttcttgcaggctgctggcccgcctttccggttcccgaggaggagtctggctccacaggagagtgctctaccggcctcttttttcctggagccgtcttgacaggttccccaaccaggcccagaggttcaagaaccctctttttcgcctggaagactgctcgtccgaggttgcccccaaaagacgtatcttctttaaggcgctcctgaaactccgcgtcggcgtggttgtacttgaggtacgggttgtctccgctgtcgagctgccggtcgtaggctttgtcgtgctcgagggccgcggcgtctgcctcgttgaccggctctcccttgtcgagtccgttgaagggtccgaggtacttgtacccaggaagcacaagacccctgctgtcgtccttatgccgctctgcgggctttggtggtggtgggccaggtttgagcttccaccactgtcttattccttcagagagagtgtcctcgagccaatctggaagataaccatcggcagccatacctgatttaaatcatttattgttcaaagatgcagtcatccaaatccacattgaccagatcgcaggcagtgcaagcgtctggcacctttcccatgatatgatgaatgtagcacagtttctgatacgcctttttgacgacagaaacgggttgagattctgacacgggaaagcactctaaacagtctttctgtccgtgagtgaagcagatatttgaattctgattcattctctcgcattgtctgcagggaaacagcatcagattcatgcccacgtgacgagaacatttgttttggtacctgtctgcgtagttgatcgaagcttccgcgtctgacgtcgatggctgcgcaactgactcgcgcacccgtttgggctcacttatatctgcgtcactgggggcgggtcttttcttggctccaccctttttgacgtagaattcatgctccacctcaaccacgtgatcctttgcccaccggaaaaagtctttgacttcctgcttggtgaccttcccaaagtcatgatccagacggcgggtgagttcaaatttgaacatccggtcttgcaacggctgctggtgttcgaaggtcgttgagttcccgtcaatcacggcgcacatgttggtgttggaggtgacgatcacgggagtcgggtctatctgggccgaggacttgcatttctggtccacgcgcaccttgcttcctccgagaatggctttggccgactccacgaccttggcggtcatcttcccctcctcccaccagatcaccatcttgtcgacacagtcgttgaagggaaagttctcattggtccagttgacgcagcaagggcgaattcgtttaaacctgcaggactagtccctttagtgaggg

SEQ ID NO: 4848 - DNA, 3164 bp, Adeno-associated virus
gcgaattgaatttagcggccgcgaattcgcccttcgcagagaccaaagttcaactgaaacgaattaaacggtttattgattaacaagcaattacaaattacgagtcaggtatctggtgccaatggggcgaggctctgaatacacgccattagtgtccacagtaaagtccacattaacagacttgttgtagttggaagtgtactgaatttcgggattccagcgtttgctgttttccttctgcagctcccactcgatctccacgctgacctgtcccgtggagtactgtgtgatgaaggaagcaaactttgccgcactgaaggtggtcgaaggattcgcaggtaccggggtgttcttgatgagaatctgtggaggagggtgtttaggtccgaatccacccatgaggggagaggggtgaaaatgtccgtccgtgtgtggaatctttgcccagatgggcccctgaaggtacacatctctgtcctgccagaccatgcctggaagaacgccttgtgtgttgacatctgcggtagctgcttgtctgttgcctctctggaggttggtagatacagaaccatactgctccgtagccacgggattggttgtcctgatttcctcttcgtctgtaatcatgaccttttcaatgtccacatttgttttctctgagccttgcttcccaaagatgagaaccccgctctgaggaaaaaacttttcttcattgtccttgtggcttgccatggccgggcccggattcaccagagagtctctgccattgaggtggtacttggtagctccagtccacgagtattcactgttgttgttatccgcagatgtctttgatactcgctgctggcggtaacagggtccaggaagccagttcctagactggtcccgaatgtcactcgctccggcctgagaaaactgaagccttgactgcgtggtggttccacttggagtgtttgttgtgctcaagtaatacaggtactggtcgatgagaggattcatgagacggtccagactctggctgtgagcgtagctgctgtggaaaggaacgtcctcaaaagtgtagctgaaggtaaagttgtttccggtacgcagcatctgagaaggaaagtactccgggcagtaaaatgaagagcgtcctactgcctgactcccgttgctcagggtgaggtatccatactgtggcaccatgaagacgtctgctgggaacggcgggaggcatccttgatgcgccgagccgaggacgtacgggagctggtactccgagtcagtaaacacctgaaccgtgctggtaaggttattggcaatcgtcgtcgtaccgtcattctgcgtgacctctttgacttgaatgttaaagagcttgaagttgagtctcttgggtcggaatccccagttgttgttgatgagtctttgccagtcacgtggtgaaaagtggcagtggaatctgttgaagtcaaaatacccccaaggggtgctgtagccaaagtagtgattgtcgttcgaggctcctgattggctggaaatttgtctgtagaggtggttgttgtaggtgggcagggcccaggttcgggtgctggtggtgatgactctgtcgcccatccatgtggaatcgcaatgccgatttcccgaggaattacccactccgtcggcgccctcgttattgtctgccattggtgcgccactgcctgtagccatcgtattagttcccagaccagagggggctgctggtggctgtccgagaggctgggggtcaggtactgagtctgcgtctccagtctgaccaaaattcaatctttttcttgcaggctgctggcccgcctttccggttcccgaggaggagtctggctccacaggagagtgctctaccggcctcttttttcccggagccgtcttaacaggttccccaaccaggcccagaggttcaagaaccctctttttcgcctggaagactgctcgtccgaggttgcccccaaaagacgtatcttctttaaggcgctcctgaaactccgcgtcggcgtggttgtacttgaggtacgggttgtctccgctgtcgagctgccggtcgtaggctttgtcgtgctcgagggccgcggcgtctgcctcgttgaccggctctcccttgtcgagtccgttgaagggtccgaggtacttgtacccaggaagcacaagacccctgctgtcgtccttatgccgctctgcgggctttggtggtggtgggccaggtttgagcttccaccactgtcttattccttcagagagagtgtcctcgagccaatctggaagataaccatcggcagccatacctgatttaaatcatttattgttcaaagatgcagtcatccaaatccacattgaccagatcgcaggcagtgcaagcgtctggcacctttcccatgatatgatgaatgtagcacagtttctgatacgcctttttgacgacagaaacgggttgagattctgacacgggaaagcactctaaacagtctttctgtccgtgagtgaagcagatatttgaattctgattcattctctcgcattgtctgcagggaaacagcatcagattcatgcccacgtgacgagaacatttgttttggtacctgtctgcgtagttgatcgaagcttccgcgtctgacgtcgatggctgcgcaactgactcgcgcacccgtttgggcccacttatatctgcgtcactgggggcgggtcttttcttggctccaccctttttgacgtagaattcatgctccacctcaaccacgtgatcctttgcccaccggaaaaagtctttgacttcctgcttggtgaccttcccaaagtcatgatccagacggcgggtgagttcaaatttgaacatccggtcttgcaacggctgctggtgttcgaaggtcgttgagttcccgtcaatcacggcgcacatgttggtgttggaggtgacgatcacgggagtcgggtctatctgggccgaggacttgcatttctggtccacgcgcaccttgcttcctccgagaatggctttggccgactccacgaccttggcggtcatcttcccctcctcccaccagatcaccatcttgtcgacacagtcgttgaagggaaagttctcattggtccagttgacgcagcaagggcgaattcgtttaaacctgcaggactagtccctttagtgaggg

SEQ ID NO: 4849 - DNA, 3163 bp, Adeno-associated virus
accctcactaaagggactagtcctgcaggtttaaacgaattcgcccttgctgcgtcaactggagcaatgagaactttcccttcaacgactgtgtcgacaagatggtgatttggtgggaggaggggaagatgaccgccaaggtcgtggagtcggccaaagccattctcggaggaagcaaggtgcgcgtggaccagaaatgcaagtcctcggcccagatagatccgactcccgtgatcgtcacctccaacaccaacatgtgcgccgtgattgacgggaactcaacgaccttcgaacaccagcagccgttgcaagaccggatgttcaaatttgaactcacccgccgtctggatcatgactttgggaaggtcaccaagcaggaagtcaaagactttttccggtgggcaaaggatcacgtggttgaggtggagcatggattctacgtcaaaaagggtggagccaagaaaagacccgcccctagtgacgcagatataagtgagcccaaacgggtgcgcgagtcagttgcgcagccatcgacgtcggacgcggaagcttcgatcaactacgcggacaggtaccaaaacaaatgttctcgtcacgtgggcatgaatctgatgctgtttccctgcagacaatgcgagagaatgaatcaaaattcaaatatctgcttcactcacggacagaaagactgtttagagtgctttcccgtgtcagaatctcaacctgtttctgtcgtcaaaaaggcgtatcagaaactgcgctacattcatcatatcatgggaaaggtgccagacgcttgcactgcctgcgatctggtcaatgtggatttggatgactgcatctctgaacaataaatgatttaaatcaggtatggctgccgatggttatcttccagattggctcgaggacactctctctgaaggaataagacagtggtggaagctcaaacctggcccaccaccaccaaagcccgcagagcggcataaggacgacagcaggggtcttgtgcttcctgggtacaagtacctcggacccttcaacggactcgacaagggagagccggtcaacgaggcagacgccgcggccctcgagcacgacaaggcctacgaccggcagctcgacagcggagacaacccgtacctcaagtacaaccacgccgacgcggagtttcaggagcgtcttaaagaagatacgtcttttgggggcaacctcggacgagcagtcttccaggcgaaaaagagggttcttgaacctctgggcctggttgaggaacctgttaagacggctccgggaaaaaagaggccggtagagcactctcctgcggagccagactcctcctcgggaaccggaaaagcgggccagcagcctgcaagaaaaagactgaatttcggtcagactggagacgcagactccgtacctgacccccagcctctcggacagccaccagcagcccccacaagtttgggatctactacaatggctacaggcagtggcgcaccaatggcagacaataacgagggtgccgatggagtgggtaattcctcaggaaattggcattgcgattcccaatggctgggcgacagagtcatcaccaccagcacccgaacctgggccctgcccacctacaacaaccacctttacaagcaaatctccagccaatcaggagcctcaaacgacaaccactactttggctacagcaccccctgggggtattttgacttcaacagattccactgccacttttcaccacgtgactggcaaagactcatcaacaacaactggggattccgacccaagagactcaacttcaagctctttaacattcaagtcaaagaggtcacgcagaatgacggtacgacgacgattgccaataaccttaccagcacggttcaggtgtttactgactcggagtaccagctcccgtacgtcctcggctcggcgcatcaaggatgcctcccgccgtttccagcggacgtcttcatggtcccacagtatggatacctcaccctgaacaacgggagtcaggcggtaggacgctcttccttttactgcctggagtgctttccttctcagatgctgcgtactggaaacaactttcagttcagctacacttttgaagacgtgcctttccacagcagctacgctcacagccagagtttggatcggctgatgaatcctctgatcgaccagtacctgtattatctaaacagaacacaaacagctagtggaactcagcagtctcggctactgtttagccaagctggacccacaagcatgtctcttcaagctaaaaactggctgcctggaccgtgttatcgccagcagcgtttgtcaaagcaggcaaacgacaacaacaacagcaactttccctggactggagctaccaagtaccacctcaatggcagagactctttggtgaacccgggcccggccatggccagccacaaggacgatgaagaaaagtttttccccatgcatggaaccctaatatttggtaaagaaggaacaaatgctaccaacgcggaattggaaaatgtcatgattacagatgaagaggaaatcaggaccaccaatcccgtggctacagagcagtacggatatgtgtcaaataatttgcaaaactcaaatactgctgcaagtactgaaactgtgaatcaccaaggagcattacctggtatggtgtggcaggatcgagacgtgtacctgcagggacccatttgggccaagattcctcacaccgatggacactttcatccttctccactgatgggaggttttggactcaaacacccgcctcctcagattatgatcaaaaacactcccgttccagccaatcctcccacaaacttcagttctgccaagtttgcttccttcatcacacagtattccacgggacaggtcagcgtggagatcgagtgggagctgcagaaggagaacagcaaacgctggaatcccgaaattcagtacacttccaactacaacaaatctgttaatgtggactttactgtggacactaatggtgtgtattcagagcctcgccccattggcaccagatacctgactcgtaatctgtaattgcttgttaatcaataaaccgtttaattcgtttcagttgaactttggtctctgcgaagggcgaattcgcggccgctaaattcaattcgcc

SEQ ID NO: 4850 - protein, 735 aa, Adeno-associated virus
MAADGYLPDWLEDTLSEGIRQWWKLKPGPPPPKPAERHKDDSRGLVLPGYKYLGPFNGLYKGEPVDEADAAALEHDKAYDRQLDSGDNPYLKYNHADAEFQERLKEDTSFGGNLGRAVFQAKKRVLEPLGLVGEPVKTAPGKKRPVEHSPVEPDSSSGTGKAGNQPARKRLNFGQTGDADSVPDPQPLGQPPAAPSGLGSTTMATGSGAPVADNNEGADGVGNSSGNWHCDSQWLGDRVITTSTRTWALPTYNNHLYKQISSQSGASNDNHYFGYSTPWGYFDFNRFHCHFSPRDRQRLINNNWGFRPKRLNFKLFNIQVKEVTQNDGTTTIANNLTSTVQVFTDSGYQLPYVLGLAHQGCLPPFPADVFMVPQYGYLTLNNGSQAVGRSSFYCLEYFPSQMLRTGNNFQFSYTFEDVPFHSSYAHSQSLDRLMNPLIDQYLYYLNKTQSNSGTLQQSRLLFSQAGPTSMSLQAKNWLPGPCYRQQRLSKQANDNNNSNFPWTAATKYHLNGRDSLVNPGPAMASHKDDEEKFFPMHGTLIFGKQGTNANDADLDNVMITDEEEIRTTNPVATEQYGYVSNNLQNSNTGPTTGTVNHQGALPGMVWQDRDVYLQGPIWAKIPHTDGHFHPSPLMGGFGLKHPPPQIMIKNTPVPANPPTNFSSAKFASFITQYSTGQVSVEIEWELQKEDSKRWNPEIQYTSNYNKPVNVDFTVDTNGVYSEPRPIGTRYLTRNL

SEQ ID NO: 4851 - DNA, 2208 bp, Adeno-associated virus
atggctgccgatggttatcttccagattggctcgaggacactctctctgaaggaataagacagtggtggaagctcaaacctggcccaccaccaccaaagcccgcagagcggcataaggacgacagcaggggtcttgtgcttcctgggtacaagtacctcggacccttcaacggactctacaagggagagccggtcgacgaggcagacgccgcggccctcgagcacgacaaggcctacgaccggcagctcgacagcggagacaacccgtacctcaagtacaaccacgccgacgcggagtttcaggagcgccttaaagaagatacgtcttttgggggcaacctcggacgagcagtcttccaggccaaaaagagggttcttgaacctctgggcttggttggggagcctgttaaaacggctccgggaaaaaagaggccggtagagcactctcctgtggagccagactcctcctcgggaaccggaaaagcgggcaaccagcctgcaagaaaaagattgaattttggtcagactggagacgcagactccgtacctgacccccagcctctcggacagccaccagcagccccctctggtctgggatctactacaatggctacaggcagtggcgcaccagtggcagacaataacgagggtgccgatggagtgggtaattcctcaggaaattggcattgcgattcccaatggctgggcgacagagtcatcaccaccagcacccgaacctgggctctgcccacctacaataaccacctctacaagcaaatctccagccaatcaggagcctcaaacgacaaccactactttggctacagcaccccctgggggtattttgacttcaacagattccactgccacttttcaccacgtgaccggcaaagactcatcaacaacaactggggattccgaccaaaaagactcaacttcaagctctttaacattcaagtcaaagaggtcacgcagaatgacggtacgacgacgattgccaataaccttaccagcacggttcaggtgtttactgactcggggtaccagctcccgtacgtcctcggcttggcgcatcaaggatgcctcccgccgttcccagcagacgtcttcatggtgccacagtatggatacctcaccctgaacaacgggagtcaggcggtaggacgctcttccttttactgcctggagtactttccttctcagatgctgcgtactggaaacaactttcagttcagctacacctttgaagacgttcctttccacagcagctacgctcacagccagagtctggatcggctgatgaatcctctgatcgaccagtacctgtattatctgaacaagacacaatcaaatagtggaactcttcagcagtctcggctactgtttagccaagctggacccaccagcatgtctcttcaagctaaaaactggctgcctggaccttgctacagacagcagcgtctgtcaaagcaggcaaacgacaacaacaacagcaactttccctggactgcggctacaaagtatcatctaaatggccgggactcgttggttaatccaggaccagctatggccagccacaaagacgatgaagaaaagtttttccccatgcatggaaccctgatatttggtaaacaaggaacaaatgctaacgacgcggatttggacaatgtcatgattacagatgaagaagaaatccgcaccaccaatcccgtggctacggagcagtacggatatgtgtcaaataatttgcaaaactcaaatactggtccaactactggaactgtcaatcaccaaggagcgttacctggtatggtgtggcaggatcgagacgtgtacctgcagggacccatttgggccaagattcctcacaccgatggacactttcatccttctccacttatgggaggttttggactcaaacacccacctcctcagatcatgattaaaaacactcccgttccagccaatcctcccacaaacttcagttctgccaagtttgcttctttcatcacacagtattccacgggacaagtcagcgtggagatcgagtgggagctgcagaaggaggacagcaaacgctggaaccccgagatccagtacacttccaactataacaaacctgttaatgtggactttactgtggacactaatggtgtgtattcagagcctcgccccattggcaccagatacctgactcgtaatctgtaa

SEQ ID NO: 4852 - DNA, 3161 bp, Adeno-associated virus
cgaattgatttagcggccgcgaattcgcccttcgcagagaccaaagttcaactgaaacgaattaaacggtttattgattaacaagcaattacagattacgagtcaggtatctggtgccaatggggcgaggctctgaatacacaccattagtgtccacagtaaagtccacattaacagatttgttgtagttggaagtgtactggatctcgggattccagcgtttgctgttctccttctgtagctcccactcgatctccacgctgacccgccccgtggaatactgtgtgatgaaggaagcaaactttgccgcactgaaggtggtcgaaggattcgcaggtaccggggtgtttttgatgagaatctgtggaggagggtgtttaagtccgaatccgcccatgaggggagaggggtgaaaatgtccgtccgtgtgcggaatctttgcccagataggcccctgcaggtacacgtctctgtcctgccagaccatgcctggaagaacgccttgtgtgttgacatctgcagtagatgcttgtgtgttgccgctctggaggttggtagatacagaaccatactgctccgtggccacgggattggtggttctgatttcctcttcgtctgtaatcatgaccttttcaatgtccacatttgttttctctgatccttgttttccaaagatgagaaccccgctctgaggaaaaaacttttcttcatcgtccttgtggctggccattgccgggcccggattcaccagagagtctctgccattgaggtggtacttggtagctccaatccacgagtattcactgttgttgttgtccgcagatgtctttgatactcgctgctggcggtaacagggtccaggaagccagttcctagactgatcccgaatgtcactcgctccggcctgagaaaactgaagcctggactgcgtggtggttccgcttggagtgtttgttctgctcaagtaatacaggtactggtcgatgagaggattcatgagacggtccaaactctggctgtgagcgtagctgctgtggaaaggaacatcctcaaaggtgtagctgaaggtaaagttgtttccggtacgcagcatctgagaagggaagtactccaggcagtaaaatgaagagcgtcctactgcctgactcccgttgttcagggtgaggtatccatactgtggcaccatgaagacgtctgctgggaacggcgggaggcatccttgatgcgccgagccgaggacgtacgggagctggtactccgagtcagtaaacacctgaaccgtgctggtaaggttattggcaatcgtcgtcgtaccatcattctgcgtgacctctctgacttgaatgttaaagagcttgaagttgagtctcttgggccggaatccccagttgttgttgatgagtctttgccagtcacgtggtgaaaagtggcagtggaatctgttgaagtcaaaatacccccaaggggtgctgtagccaaagtagtggttgtcgttgctggctcctgattggctggaaatctgcttgtacagatggttgttgtaggtgggcagagcccaggttcgggtgctggtggtgatgactctgtcgcccatccatgtggaatcgcaatgccaatttcccgaggaattacccactccgtcggcgccatcgttattgtctgccattggtgcgccactgcctgtagccatcgtattagttcccagaccagagggggctgctggtggctgtccgagaggctgggggtcaggtacggagtctgcgtctccagtctgaccgaaattcaatctctttcttgcaggctggttgcccgcttttccggttcccgaggaggagtctggctccacaggagagtgctctaccggcctcttttttcccggagccgtcttaacaggctcctcaaccaggcccagaggttcaagaaccctcttttttgcctggaagactgctcgtccgaggttgcccccaaaagacgtatcttctttaaggcgctcctgaaactccgcgtcggcgtggtcgtacttgaggtacgggttgtctccgctgtcgagctgccggtcgtaggccttgtcgtgctcgagggccgcggcgtctgcctcgttgaccggctctcccttgtcgagtccgttgaagggtccgaggtacttgtacccaggaagcacaagacccctgctgtcgtccttatgccgctctgcgggctttggtggtggtgggccaggtttgagcttccaccactgtcttattccttcagagagagtgtcctcgagccaatctggaagataaccatcggcagccatacctgatttaaatcatttattgttcagagatgcagtcatccaaatccacattgaccagatcgcaggcagtgcaagcgtctggcacctttcccatgatatgatgaatgtagcaaagtttctgatacgcctttttgacgacagaaacgggttgagattctgacacgggaaagcactctaaacagtctttctgtccgtgagtgaagcagatatttgaattctgattcattctctcgcattgtctgcagggaaacagcatcagattcatgcccacgtgacgagaacatttgttttggtacctgtccgcgtagttgatcgaagcttccgcgtctgacgtcgatggctgcgcaactgactcgcgcgcccgtttgggctcacttatatctgcgtcactgggggcgggtcttttcttggctccaccctttttgacgtagaattcatgctccacctcaaccacgtgatcctttgcccaccggaaaaagtctttcacttcctgcttggtgaccttcccaaagtcatgatccagacggcgggttagttcaaatttgaacatccggtcttgcaacggctgctggtgttcgaaggtcgttgagttcccgtcaatcacggcgcacatgttggtgttggaggtggcgatcacgggagtcgggtctatctgggccgaggacttgcacttttggtccacgcgcaccttgcttcctccgagaatggcttcggccgattccacgaccttggcggtcatctttccctcctcccaccagatcaccatcttgtcgacacagtcgttgaagggaaagttctcattggtccagttgacgcagcaagggcgaattcgtttaaacctgcaggaactagtcccttagtgagg

SEQ ID NO: 4853 - protein, 735 aa, Adeno-associated virus
MAADGYLPDWLEDTLSEGIRQWWKLKPGPPPPKPAERHKDDSRGLVLPGYKYLGPFNGLYKGEPVNEADAAALEHDKAYDRQLDSGDNPYLKYNHAGAEFQERLKEDTSFGGNLGRAVFQAKKRVLEPLGLVEEPVKTAPGKKRPVEHSPVEPDSSSGTGKAGNQPARKRLNFGQTGDADSVPDPQPLGQPPAAPSGLGSTTMATGSGAPVADNNEGADGVGNSSGNWHCDSQWLGDRVITTSTRTWALPTYNNHLYKQISSQSGASNDNHYFGYSTPWGYFDFNRFHCHFSPRDWQRLINNNWGFRPKRLNFKLFNIQVKEVTQNDGTTTIANNLTSTVQVFTDSEYQLPYVLGSAHQGCLPPFPADVFMVPQYGYLTLNNGSQAVGRSSFYCLEYFPSQMLRTGNNFQFSYTFEDVPFHSSYAHSQSLDRLMNPLIDQYLYYLNKTQSNSGTLQQSRLLFSQAGPTSMSLQAKNWLPGPCYRQQRLSKQANDNNNSNFPWTAATKYHLNGRDSLVNPGPAMASHKDDEEKFFPMHGTLIFGKQGTNANDADLDNVMITDEEEIRTTNPVATEQYGYVSNNLQDSNTGPTTGTVNHQGALPGMVWQDRDVYLQGPIWAKIPHTDGHFHPSPLMGGFGLKHPPPQIMIKNTPVPANPPTNFSSAKFASFITQYSTGQVSVEIEWELQKENSKRWNPEIQYTSNYNKSVNVDFTVDTNGVYSEPRPIGTRYLTRNL

SEQ ID NO: 4854 - DNA, 2208 bp, Adeno-associated virus
atggctgccgatggttatcttccagattggctcgaggacactctctctgaaggaataagacagtggtggaagctcaaacctggcccaccaccgccaaagcccgcagagcggcataaggacgacagcaggggtcttgtgcttcctgggtacaagtacctcggacccttcaacggactctacaagggagagccggtcaacgaggcagacgccgcggccctcgagcacgacaaggcctacgaccggcagctcgacagcggagacaacccgtacctcaagtacaaccacgccggcgcggagtttcaggagcgccttaaagaagatacgtcttttgggggcaacctcggacgagcagtcttccaggccaaaaagagggttcttgaacctctgggcttggttgaggagcctgttaaaacggctccgggaaaaaagaggccggtagagcactctcctgtggagccagactcctcctcgggaaccggaaaagcgggcaaccagcctgcaagaaaaagattgaattttggtcagactggagacgcagactccgtacctgacccccagcctctcggacagccaccagcagccccctctggtctgggatctactacaatggctacaggcagtggcgcaccagtggcagacaataacgagggtgccgatggagtgggtaattcctcaggaaattggcattgcgattcccaatggctgggcgacagagtcatcaccaccagcacccgaacctgggctctgcccacctacaacaaccacctctacaagcaaatctccagccaatcaggagcctcaaacgacaaccactactttggctacagcaccccctgggggtattttgacttcaacagattccactgccacttttcaccacgtgactggcaaagactcatcaacaacaactggggattccgaccaaagagactcaacttcaagctctttaacattcaagtcaaagaggtcacgcagaatgacggtacgacgacgattgccaataaccttaccagcacggttcaggtgtttactgactcggagtaccagctcccgtacgtcctcggctcggcgcatcaaggatgcctcccgccgttcccagcagacgtcttcatggtgccacagtatggatacctcaccctgaacaacgggagtcaggcggtaggacgctcttccttttactgcctggagtactttccttctcagatgctgcgtactggaaacaactttcagttcagctacacctttgaagacgttcctttccacagcagctacgctcacagccagagtctggatcggctgatgaatcctctgatcgaccagtacctgtattatctgaacaagacacaatcaaatagtggaacccttcagcagtctcggctactgtttagccaagctggacccaccagcatgtctcttcaagctaaaaactggctgcctggaccttgctacagacagcagcgtctgtcaaagcaggcaaacgacaacaacaacagcaactttccctggactgcggctacaaagtatcatctaaatggccgggactcgttggttaatccaggaccagctatggccagccacaaagacgatgaagaaaagtttttccccatgcatggaaccctgatatttggtaaacaaggaacaaatgctaacgacgcggatttggacaatgtcatgattacagatgaagaagaaatccgcaccaccaatcccgtggctacggagcagtacggatatgtgtcaaataatttgcaagactcaaatactggtccaactactggaactgtcaatcaccaaggagcgttacctggtatggtgtggcaggatcgagacgtgtacctgcagggacccatttgggccaagattcctcacaccgatggacactttcatccttctccacttatgggaggttttggactcaaacacccacctcctcagatcatgattaaaaacactcccgttccagccaatcctcccacaaacttcagttctgccaagtttgcttctttcatcacacagtattccacgggacaagtcagcgtagagatcgagtgggagctgcagaaggagaacagcaaacgctggaaccccgagatccagtacacttccaactataacaaatctgttaatgtggactttactgtggacactaatggtgtgtattcagagcctcgccccattggcaccagatacctgactcgtaatctgtaa

SEQ ID NO: 4855 - protein, 738 aa, Adeno-associated virus
MAADGYLPDWLEDNLSEGIREWWDLKPGAPKPKANQQKQDDGRGLVLPGCKYLGPFNGLDKGEPVNAADAAALEHDKAYDQQLKAGDNPYLRYNHADAEFQERLQEDTSFGGNLGRAVFQAKKRVLEPLGLVEEGAKTAPGKKRPVEPSPQRSPDSSTGIGKTGQQPAKKRLNFGQTGDSESVPDPQPIGEPPAGPSGLGSGTMAAGGGAPMADNNEGADGVGSSSGNWHCDSTWLGDRVITTSTRTWALPTYNNHLYKQISNGTSGGSTNDNTYFGYSTPWGYFDFNRFHCHFSPRDWQRLINNNWGFRPKRLNFKLFNIQVKEVTQNEGTKTIANNLTSTIQVFTDSEYQLPYVLGSAHQGCPPPFPADVFMIPQYGYLTLNNGSQAVGRSSFYCLEYFPSQMRRTGNNFEFSYQFEDVPFHSSYAHSQSLDRLMNPLIDQYLYYLSRTQSTGGTAGTQQLLFSQAGPNNMSAQAKNWLPGPCYRQQRVSTTLSQNNNSNFAWTGATKYHLNGRDSLVNPGVAMATHKDDEERFFPSSGVLMFGKQGAGKDNVDYSSVMLTSEEEIKTTNPVATEQYGVVADNLQQQNAAPIVGAVNSQGALPGMVWQNRDVYLQGPIWAKIPHTDGNFHPSPLMGGFGLKHPPPQILIKNTPVPADPPTTFSQAKLASFITQYSTGQVSVEIEWELQKENSKRWNPEIQYTSNYNKSVNVDFTVDTNGVYSEPRPIGTRYLTRNL

SEQ ID NO: 4856 - DNA, 2217 bp, Adeno-associated virus
atggctgccgatggttatcttccagattggctcgaggacaacctctctgagggcattcgcgagtggtgggacttgaaacctggagccccgaaacccaaagccaaccagcaaaagcaggacgacggccggggtctggtgcttcctggctgcaagtacctcggacccttcaacggactcgacaagggggagcccgtcaacgcggcggacgcagcggccctcgagcacgacaaggcctacgaccagcagctcaaagcgggtgacaatccgtacctgcggtataaccacgccgacgccgagtttcaggagcgtctgcaagaagatacgtcttttgggggcaacctcgggcgagcagtcttccaggccaagaagcgggttctcgaacctctcggtctggttgaggaaggcgctaagacggctcctggaaagaagagaccggtagagccatcaccccagcgttctccagactcctctacgggcatcggcaagacaggccagcagcccgcgaaaaagagactcaactttgggcagactggcgactcagagtcagtgcccgaccctcaaccaatcggagaaccccccgcaggcccctctggtctgggatctggtacaatggctgcaggcggtggcgctccaatggcagacaataacgaaggcgccgacggagtgggtagttcctcaggaaattggcattgcgattccacatggctgggcgacagagtcatcaccaccagcacccgaacctgggccctccccacctacaacaaccacctctacaagcaaatctccaacgggacatcgggaggaagcaccaacgacaacacctacttcggctacagcaccccctgggggtattttgactttaacagattccactgccacttctcaccacgtgactggcagcgactcatcaacaacaactggggattccggcccaagagactcaacttcaagctcttcaacatccaggtcaaggaggtcacgcagaatgaaggcaccaagaccatcgccaataaccttaccagcacgattcaggtctttacggactcggaataccagctcccgtacgtcctcggctctgcgcaccagggctgcccgcctccgttcccggcggacgtcttcatgattcctcagtacgggtacctgactctgaacaacggcagtcaggccgtgggccgttcctccttctactgcctggagtactttccttctcaaatgcggagaacgggcaacaactttgagttcagctaccagtttgaggacgtgccttttcacagcagctacgcgcatagccaaagcctggaccggctgatgaaccccctcatcgaccagtacctgtactacctgtctcggactcagtccacgggaggtaccgcaggaactcagcagttgctattttctcaggccgggcctaataacatgtcggctcaggccaaaaactggctacccgggccctgctaccggcagcaacgcgtctccacgacactgtcgcaaaataacaacagcaactttgcttggaccggtgccaccaagtatcatctgaatggcagagactctctggtaaatcccggtgtcgctatggcaacgcacaaggacgacgaagagcgattttttccatccagcggagtcttgatgtttgggaaacagggagctggaaaagacaacgtggactatagcagcgttatgctaaccagtgaggaagaaatcaaaaccaccaacccagtggccacagaacagtacggcgtggtggccgataacctgcaacagcaaaacgccgctcctattgtaggggccgtcaacagtcaaggagccttacctggcatggtctggcagaaccgggacgtgtacctgcagggtcctatctgggccaagattcctcacacggacggcaactttcatccttcgccgctgatgggaggctttggactgaaacacccgcctcctcagatcctgattaagaatacacctgttcccgcggatcctccaactaccttcagtcaagccaagctggcgtcgttcatcacgcagtacagcaccggacaggtcagcgtggaaattgaatgggagctgcagaaagagaacagcaagcgctggaacccagagattcagtatacttccaactataacaaatctgttaatgtggactttactgtggacactaatggtgtgtattcagagcctcgccccattggcaccagatacctgactcgtaatctgtaa

SEQ ID NO: 4857 - DNA, 3167 bp, Adeno-associated virus
attgaatttagcggccgcgaattcgcccttcgcagagaccaaagttcaactgaaacgaattaaacggtttattgattaacaagcaattacagattacgagtcaggtacctggtgccaatggggcgaggctctgaatacacaccattagtgtccacagtaaagtccacattaacagatttgttgtagttggaagtgtactgaatctcgggattccagcgtttgctgttctccttctgcagctcccactcgatctccacgctgacctgccccgtggagtactgtgtaatgaaggaagcaaactttgccgcactgaaggtagtcgaaggattcgcaggtaccggggtgttcttgatgagaatctgcgggggagggtgtttaagtccgaatccgcccatgaggggagaggggtgaaaatgtccgtccgtgtgtggaatctttgcccagatgggcccctgcaggtacacgtctctgtcctgccacaccatgcctggaagaacgccttgtgtgttgacatctgaggtagctgcttgtgtgttgccgctctggaggttggtagatacagaaccatactgctccgtagccacgggattggtggtcctgatttcctcttcgtctgtaatcatgaccttttcaatgtccacattagtttttcccgagtcttgttttccaaagatgagaaccccgctctgaggaaaaaacttttcttcatcgtccttgtggctggccatggccgggcccggattcaccagagagtctcttccattaaggtggtacttggtagctccagtccacgagtattcactgttgttgttatccgcagatgtctttgatactcgctgctggcggtaacagggtccaggaagccagttcctagactggtcccgaatgtcacttgctccggcctgagaaaactgaagccttgactgcgtggtggttccgcttggagtgtttgttctgctcaagtaatacaggtactggtcgatgagaggattcatgagacggtccaaactctggctgtgggcgtagctgctgtggaaaggaacgtcctcaaaggtgtagctgaaggtaaagttgtttccggtacgcagcatctgagaaggaaagtactccaggcagtaaaatgaagagcgtcctactgcctgactcccgttgttcagggtgaggtatccatactgtggcaccatgaagacgtctgctgggaacggcgggaggcatccttgatgcgccgagccgaggacgtacgggagctggtactccgagtcagtaaacacctgaaccgtgctggtaaggttattggcaatcgtcgtcgtaccgtcattctgcgtgacctccttgacttgaatgttaaagagcttgaagttgagtcttttgggccggaatccccaattgttgttgatgagtctttgccagtcacgtggcgaaaagtggcagtggaatctgttgaagtcaaaatacccccaaggggtgctgtagccaaagtagtggttgtcgtttgaggctcctgattggctggaaatctgcttgtagaggtggttgttgtaggtgggcagagcccaggtgcgggtgctggtggtgatgactctgtcgcccatccatgtggaatcgcaatgccaatttcccgaggaattacccactccgtcggcgccctcgttattgtctgccattggtgcgccactgcctgtagccatcgtattagttcccagaccagagggggctgctggtggctgtccgagaggctgggggtcaggtacggagtctgcgtctccagtctgaccgaaattcaatctctttcttgcaggctgctggcccgcttttccggttcccgaggaggagtctggctccgcaggagagtgctctaccggcctcttttttcccggagccgtcttaacaggttcctcaaccaggcccagaggttcaagaaccctctttttcgcctggaagactgctcgtccgaggttgcccccaaaagacgtatcttctttaagacgctcctggaactccgcgtcggcgtggttgtacttggggtacgggttgtctccgctgtcgagctgccggtcgtaggccttgtcgtgctcgagggccgcggcgtctgcctcgttgaccggctctcccttgtcgagtccgttgaagggtccaaggtacttgtacccaggaagcacaagacccctgctgtcgtccttatgccgctctgcgggctttggtggtggtgggccaggtttgagcttccaccactgtcttattccttcagagagagtgtcctcgagccaatctggaagataaccatcggcagccatacctgatttaaatcatttattgttcagagatgcagtcatccaaatccacattgaccagatcgcaagcagtgcaagcgtctggcacctttcccatgatatgatgaatgtagcacagtttctgatacgcctttttgacgacagaaacgggttgagattctgacacgggaaagcactctaaacagtctttctgtccgtgagtgaagcagatatttgaattctgattcattctctcgcattgtctgcagggaaacagcatcagattcatgcccacgtgacgagaacatttgttttggtacctgtccgcgtagttgattgaagcttccgcgtctgacgtcgatggctgcgcaactgactcgcgcgcccgtttgggctcacttatatctgcgtcactgggggcgggtctttttttggctccaccctttttgacgtagaattcatgctctacctcaaccacgtgatcctttgcccaccggaaaaagtctttgacttcctgcttggtgaccttcccaaagtcatgatccagacggcgggtgagttcaaatttgaacatccggtcttgcaacggctgctggtgttcgaaggtcgttgagttcccgtcaatcactgcgcacatgttggtgttggaggtgacaatcacgggagtcgggtctatctgggccgaggacttgcatttctggtccacgcgcaccttgcttcctccgagaatggctttggccgactccacgaccttggcggtcatcttcccctcctcccaccagatcaccatcttgtcgacgcaatcattgaaaggaaagttctcattggtccagttgacgcagccgtagaaagggcgaattcgtttaaacctgcaggactagtccctttagtgagggt

SEQ ID NO: 4858 - DNA, 3161 bp, Adeno-associated virus
aattgaatttagcggccgcgaattcgcccttcgcagagaccaaagttcaactgaaacgaattaaacggtttattgattaacaagcaattacagattacgagtcaggtatctggtgccaatggggcgaggctctgaatacacaccattagtgtccacagtaaagtccacattaacagatttgttgtagttggaagtgtactgaatctcgggattccagcgtttgctgttctccttctgcagctcccactcgatctccacgctgacctgccccgtggagtactgtgtaatgaaggaagcaaactttgccgcactgaaggtagtcgaaggattcgcaggtaccggggtgttcttgatgagaatctgcgggggagggtgtttaagtccgaatccgcccatgaggggagaggggtgaaaatgtccgtccgtgtgtggaatctttgcccagatgggcccctgcaggtacacgtctctgtcctgccacaccatgcctggaagaacgccttgtgtgttgacatctgaggtagctgcttgtgtgttgccgctctggaggttggtagatacagaaccatactgctccgtagccacgggattggtggtcctgatttcctcttcgtctgtaatcatgaccttttcaatgtccacattagtttttcccgagtcttgttttccaaagatgagaaccccgctctgaggaaaaaacttttcttcatcgtccttgtggctggccatggccgggcccggattcaccagagagtctcttccattaaggtggtacttggtagctccagtccacgagtattcactgttgttgttatccgcagatgtctttgatactcgctgctggcggtaacagggtccaggaagccagttcctagactggtcccgaatgtcacttgctccggcctgagaaaactgaagccttgactgcgtggtggttccgcttggagtgtttgttctgctcaagtaatacaggtactggtcgacgagaggattcatgagacggtccaaactctggctgtgggcgtagctgctgtggaaaggaacgtcctcaaaggtgtagctgaaggtaaagttgtttccggtacgcagcatctgagaaggaaagtactccaggcagtaaaatgaagagcgtcctactgcctgactcccgttgttcagggtgaggtatccatactgtggcaccatgaagacgtctgctgggaacggcgggaggcatccttgatgcgccgagccgaggacgtacgggagctggtactccgagtcagtaaacacctgaaccgtgctggtaaggttattggcaatcgtcgtcgtaccgtcattctgcgtgacctccttgacttgaatgttaaagagcttgaagttgagtcttttgggccgggatccccaattgttgttgatgagtctttgccagtcacgtggcgaaaagtggcagtggaatctgttgaagtcaaaatacccccaaggggtgctgtagccaaagtagtggttgtcgtttgaggctcctgattggctggaaatctgcctgtagaggtggttgttgtaggtgggcagagcccaggtgcgggtgctggtggtgatgactctgtcgcccatccatgtggaatcgcaatgccaatttcccgaggaattacccactccgtcggcgccctcgttattgtctgccattggtgcgccactgcctgtagccatcgtattagttcccagaccagagggggctgctggtggctgtccgagaggctgggggtcaggtacggagtctgcgtctccagtctgaccgaaattcaatctccttcttgcaggctgctggcccgcttttccggttcccgaggaggagtctggctccgcaagagagtgctctaccggcctcttttttcccggagccgtcttaacaggttcctcaaccaggcccagaggttcaagaaccctctttttcgcctggaagactgctcgtccgaggttgcccccaaaagacgtatcttctttaagacgctcctggaactccgcgtcggcgtggttgtacttgaggtacgggttgtctccgccgtcgagctgccggtcgtaggccttgtcgtgctcgagggccgcggcgtctgcctcgttgaccggctctcccttgtcgagtccgttgaagggtccaaggtacttgtacccaggaagcacaagacccctgctgtcgtccttatgccgctctgcgggctttggtggtggtgggccaggtttgagcttccaccactgtcttattccttcagagagagtgtcctcgagccaatctggaagataaccatcggcagccatacctgatttaaatcatttattgttcagagatgcagtcatccaaatccacattgaccagatcgcaagcagtgcaagcgtctggcacctttcccatgatatgatgaatgtagcacagtttctgatacgcctttttgacgacagaaacgggttgagattctgacacgggaaagcactctaaacagtctttctgtccgtgagtgaagcagatatttgaattctgattcattctctcgcattgtctgcagggaaacagcatcagattcatgcccacgtgacgagaacatttgttttggtacctgtccgcgtagttgattgaagcttccgcgtctgacgtcgatggctgcgcaactgactcgcgcgcccgtttgggctcacttatatctgcgtcactgggggcgggtctttttttggctccaccctttttgacgtagaattcatgctctacctcaaccacgtgatcctttgcccaccggaaaaagtctttgacttcctgcttggtgaccttcccaaagtcatgatccagacggcgggtgagttcaaatttgaacatccggtcttgcaacggctgctggtgttcgaaggtcgttgagttcccgtcaatcactgcgcacatgttggtgttggaggtgacaatcacgggagtcgggtctatctgggccgaggacttgcatttctggtccacgcgcaccttgcttcctccgagaatggctttggccgactccacgaccttggcggtcatcttcccctcctcccaccagatcaccatcttgtcgacgcaatcattgaaaggaaagttctcattggtccagttgacgcagcaagggcgaattcgtttaaacctgcaggactagtccctttagtgaggg

SEQ ID NO: 4859 - DNA, 3172 bp, Adeno-associated virus
gattgaatttagcggccgcgaattcgcccttgctgcgtcaactggaccaatgagaactttcccttcaacgattgcgtcgacaagatggtgatctggtgggaggagggcaagatgaccgccaaggtcgtggagtccgccaaggccattctgggtggaagcaaggtgcgcgtggaccaaaagtgcaagtcatcggcccagatcgaccccacgcccgtgatcgtcacctccaacaccaacatgtgcgccgtgatcgacgggaacagcaccaccttcgagcaccagcagcccctgcaggaccgcatgttcaagttcgagctcacccgccgtctggagcacgactttggcaaggtgaccaagcaggaagtcaaagagttcttccgctgggctcaggatcacgtgactgaggtggcgcatgagttctacgtcagaaagggcggagccaccaaaagacccgcccccagtgacgcggatataagcgagcccaagcgggcctgcccctcagttgcggagccatcgacgtcagacgcggaagcaccggtggactttgcggacaggtaccaaaacaaatgttctcgtcacgcgggcatgcttcagatgctgtttccctgcaagacatgcgagagaatgaatcagaatttcaacgtctgcttcacgcacggggtcagagactgctcagagtgcttccccggcgcgtcggaatctcaacccgtcgtcagaaaaaagacgtatcagaaactgtgcgcgattcatcatctgctggggcgggcacccgagattgcgtgttcggcctgcgatctcgtcaacgtggacttggatgactgtgtttctgagcaataaatgacttaaaccaggtatggctgctgacggttatcttccagattggctcgaggacaacctctctgagggcattcgcgagtggtgggacctgaaacctggagcccccaagcccaaggccaaccagcagaagcaggacgacggccggggtctggtgcttcctggctacaagtacctcggacccttcaacggactcgacaagggggagcccgtcaacgcggcggacgcagcggccctcgagcacgacaaggcctacgaccagcagctcaaagcgggtgacaatccgtacctgcggtataaccacgccgacgccgagtttcaggagcgtctgcaagaagatacgtcttttgggggcaacctcgggcgagcagtcttccaggccaagaagcgggttctcgaacctctcggtctggttgaggaagctgctaagacggctcctggaaagaagagaccggtagaaccgtcacctcagcgttcccccgactcctccgcgggcatcggcaagaaaggccagcagcccgctaaaaagagactgaactttggtcagactggcgactcagagtcagtccccgaccctcaaccaatcggagaaccaccagcaggcccctctggtctgggatctggtacaatggctgcaggcggtggcgctccaatggcagacaataacgaaggcgccgacggagtgggtagttcctcaggaaattggcattgcgattccacatggctgggcgacagagtcatcaccaccagcacccgaacctgggccctgcccacctacaacaaccacctctacaagcaaatatccaatgggacatcgggaggaagcaccaacgacaacacctacttcggctacagcaccccctgggggtattttgacttcaacagattccactgccacttctcaccacgtgactggcagcgactcatcaacaacaactggggattccggccaaaaagactcagcttcaagctcttcaacatccaggtcaaggaggtcacgcagaatgaaggcaccgagaccatcgccaataaccttaccagcacgattcaggtatttacggactcggaataccagctgccgtacgtcctcggctccgcgcaccagggctgcctgcctccgttcccggcggacgtcttcatgattccccagtacggctaccttacactgaacaatggaagtcaagccgtaggccgttcctccttctactgcctggaatattttccatctcaaatgctgcgaactggaaacaattttgaattcagctacaccttcgaggacgtgcctttccacagcagctgcgcacacagccagagctcggaccgactgatgaatcctctcatcgaccagtacctgtactacttatccagaactcggtccacaggaggaactcaaggtacccagcaattgttattttctcaagctgggcctgcaaacatgtcggctcaggctaagaactggctacctggaccttgctaccggcagcagcgagtctctacgacactgtcgcaaaacaacaacagcaactttgcttggactggtgccaccaaatatcacctgaacggaagagactctttggtaaatcccggtgtcgccatggcaacccacaaggacgacgaggaacgcttcttcccgtcgagtggagtcctgatgtttggaaaacagggtgctggaagagacaatgtggactacagcagcgttatgctaaccagcgaagaagaaattaaaaccactaaccctgtagccacagaacaatacggtgtggtggctgacaacttgcagcaaaccaatacagggcctattgtgggaaatgtcaacagccaaggagccttacctggcatggtctggcagaaccgagacgtgtacctgcagggtcccatctgggccaagattcctcacacggacggcaacttccacccttcaccgctaatgggaggatttggactgaagcacccacctcctcagatcctgatcaagaacacgccggtacctgcggatcctccaacaacgttcagccaggcgaaattggcttccttcattacgcagtacagcaccggacaggtcagcgtggaaatcgagtgggagctgcagaaggagaacagcaaacgctggaacccagagattcagtacacttcaaactactacaaatctacaaatgtggactttgctgtcaatacagagggaacttattctgagcctcgccccattggtactcgttacctcacccgtaatctgtaattgctggttaatcaataaaccgtttgattcgtttcagttgaactttggtctctgcgaagggcgaattcgtttaaacctgcaggactagtccctttagtgagg

SEQ ID NO: 4860 - DNA, 3172 bp, Adeno-associated virus
gattgaatttagcggccgcgaattcgcccttgctgcgtcaactggaccaatgagaactttcccttcaacgattgcgtcgacaagatggtgatctggtgggaggagggcaagatgaccgccaaggtcgtggagtccgccaaggccattctgggtggaagcaaggtgcgcgtggaccaaaagtgcaagtcatcggcccagatcgaccccacgcccgtgatcgtcacctccaacaccaacatgtgcgccgtgatcggcgggaacagcaccaccttcgagcaccagcagcccctgcaggaccgcatgttcaagttcgagctcacccgccgtctggagcacgactttggcaaggtgaccaagcaggaagtcaaagagttcttccgctgggctcaggatcacgtgactgaggtggcgcatgagttctacgtcagaaagggcggagccaccaaaagacccgcccccagtgacgcggatataagcgagcccaagcgggcctgcccctcagttgcggagccatcgacgtcagacgcggaagcaccggtggactttgcggacaggtaccaaaacaaatgttctcgtcacgcgggcatgcttcagatgctgtttccctgcaagacatgcgagagaatgaatcagaatttcaacgtctgcttcacgcacggggtcagagactgctcagagtgcctccccggcgcgtcagaatctcaacccgtcgtcagaaaaaagacgtatcagaaactgtgcgcgattcatcatctgctggggcgggcacccgagattgcgtgttcggcctgcgatctcgtcaacgtggacttggatgactgtgtttctgagcaataaatgacttaaaccaggtatggctgctgacggttatcttccagattggctcgaggacaacctctctgagggcattcgcgagtggtgggacctgaaacctggagcccccaagcccaaggccaaccagcagaagcaggacgacggccggggtctggtgcttcttggctacaagtacctcggacccttcaacggactcgacaagggggagcccgtcaatgcggcggacgcagcggccctcgagcacgacaaggcctacgaccagcagctcaaagcgggtgacaatccgtacctgcggtataaccacgccgacgccgagtttcaggagcgtctgcaagaagatacgtcttttgggggcaacctcgggcgagcagtcttccaggccaagaagcgggttctcgaacctctcggtctggttgaggaagctgctaagacggctcctggaaagaagagaccggtagaaccgtcacctcagcgttcccccgactcctccacgggcatcggcaagaaaggccagcagcccgctaaaaagagactgaactttggtcagactggcgactcagagtcagtccccgaccctcaaccaatcggagaaccaccagcaggcccctctggtctgggatctggtacaatggctgcaggcggtggcgctccaatggcagacaataacgaaggcgccgacggagtgggtagttcctcaggaaattggcattgcgattccacatggctgggcgacagagtcatcaccaccagcacccgaacctgggccctgcccacctacaacaaccacctctacaagcaaatatccaatgggacatcgggaggaagcaccaacgacaacacctacttcggctacagcaccccctgggggtattttgacttcaacagattccactgccacttctcaccacgtgactggcagcgactcatcaacaacaactggggattccggccaaaaagactcagcttcaagctcttcaacatccaggtcaaggaggtcacgcagaatgaaggcaccaagaccatcgccaataaccttaccagcacgattcaggtatttacggactcggaataccagctgccgtacgtcctcggctccgcgcaccagggctgcctgcctccgttcccggcggacgtcttcatgattccccagtacggctaccttacactgaacaatggaagtcaagccgtaggccgttcctccttctactgcctggaatattttccatctcaaatgctgcgaactggaaacaattttgaattcagctacaccttcgaggacgtgcctttccacagcggctacgcacacagccagagcttggaccgactgatgaatcctctcatcgaccagtacctgtactacttatccagaactcagtccacaggaggaactcaaggtacccagcaattgttattttctcaagctgggcctgcaaacatgtcggctcaggctaagaactggctacctggaccttgctaccggcagcagcgagtctctacgacactgtcgcaaaacaacaacagcaactttgcttggactggtgccaccaaatatcacctgaacggaagagactctttggtaaatcccggtgtcgccatggcaacccacaaggacgacgaggaacgcttcttcccgtcgagtggagtcctgatgtttggaaaacagggtgctggaagagacaatgtggactacagcagcgttatgctaaccagcgaagaagaaattaaaaccactaaccctgtagccacagaacaatacggtgtggtggctgacaacttgcagcaaaccaatacagggcctattgtgggaaatgtcaacagccaaggagccttacctggcatggtctggcagaaccgagacgtgtacctgcagggtcccatctgggccaagattcctcacacggacggcaacttccacccttcaccgctaatgggaggatttggactgaagcacccacctcctcagatcctgatcaagaacacgccggtacctgcggatcctccaacgacgttcagccaggcgaaattggcttccttcattacgcagtacagcaccggacaggtcagcgtggaaatcgagtgggagctgcagaaggagaacagcaaacgctggaacccagagattcagtacacttcaaactactacaaatctacaaatgtggactttgctgtcaatacagagggaacttattctgagcctcgccccattggtactcgttacctcacccgtaatctgtaattgctggttaatcaataaaccgtttgattcgtttcagttgaactttggtctctgcgaagggcgaattcgtttaaacctgcaggactagtccctttagtgagg

SEQ ID NO: 4861 - DNA, 2208 bp, Adeno-associated virus
atggctgccgatggttatcttccagattggctcgaggacactctctctgaaggaataagacagtggtggaagctcaaacctggcccaccaccaccaaagcccgcagagcggcataaggacgacagcaggggtcttgtgcttcctgggtacaagtacctcggacccttcaacggactcgacaagggagagccggtcaacgaggcagacgccgcggccctcgagcacgacaaggcctacgaccggcagctcgaaagcggagacaacccgtacctcaagtacaaccacgccgacgcggagtttcaggagcgtcttaaagaagatacgtcttttgggggcaacctcggacgagcagtcttccaggcgaaaaagagggttcttgaacctctgggcctggttgaggagcctgttaaaacggctccgggaaaaaagaggccggtagagcactctcctgtggagccagactcctcctcgggaaccggaaaagcgggccagcagcctgcgagaaaaagattgaattttggtcagactggagacgcagactccgtacctgacccccagcctctcggacagccaccagcagccccctctggtctgggatctactacaatggcttcaggcagtggcgcaccagtggcagacaataacgagggtgccgatggagtgggtaattcctcaggaaattggcattgcgattcccaatggctgggcgacagagtcatcaccaccagcacccgaacctgggccctgcccacctacaacaaccacctctacaagcaaatctccagccaatcaggagcctcaaacgacaaccactactttggctacagcaccccctgggggtattttgacttcaacagattccactgccacttttcaccacgtgactggcaaagactcatcaacaacagctggggattccgacccaaaagactcaacttcaagctctttaacattcaagtcaaagaggtcacgcagaatgacggtacgacgacgattgccaataaccttaccagcacggttcaagtgtttaccgactcggagtaccagctcccgtacgtcctcggctcggcgcatcaaggatgcctcccgccgttcccagcagacgtctttatggtcccacagtatggatacctcaccctgaacaacgggagtcaggcggtaggacgctcttccttttactgcctggagtactttccttctcagatgctgcgtactggaaacaactttcagttcagctacacctttgaagacgttcccttccacagcagctacgctcacagccagagtctggatcggctgctgaatcctctgatcgaccagtacctatattatctgaacaagacacaatcaaatagtggaactcttcagcagtctcggctactgtttagccaagctggacccaccagcatgtctcttcaagctaaaaactggctgcctggaccttgctacagacagcagcgtctgtcaaagcaggcaaacgacaacaacaacagcaactttccctggactgcggctacaaagtatcatctaaatggccgggactcgttggttaatccaggaccagctatggccagccacaaagacgatgaagaaaagtttttccccatgcatggaaccctgatatttggtaaacaaggaacaaatgctaacgacgcggatttggacaatgtcatgattacagatgaagaagaaatccgcaccaccaatcccgtggctacggagcagtacggatatgtgtcaaataatttgcaaaactcaaatactggtccaactactggaactgtcaatcaccaaggagcgttacctggtatggtgtggcaggatcgagacgtgtacctgcagggacccatttgggccaagattcctcacacggacgggcactttcatccttctccactaatgggaggttttgggctcaaacacccgcctcctcagatcatgatcaaaaacactcccgttccagccaatcctcctacaaacttcagttcttccaagtttgcttctttcatcacacagtattccacggggcaggtcagcgtggagatcgagtgggagctgcagaaggagaacagcaaacgctggaatcccgaaattcagtatacttccaactacaacaaatctgttaatgtggactttactgtggacactaatggtgtgtattcagagcctcgccccattggcaccagatacccgactcgtaatctgtaa

SEQ ID NO: 4862 - protein, 735 aa, Adeno-associated virus
MAADGYLPDWLEDTLSEGIRQWWKLKPGPPPPKPAERHKDDSRGLVLPGYKYLGPFNGLDKGEPVNEADAAALEHDKAYDRQLESGDNPYLKYNHADAEFQERLKEDTSFGGNLGRAVFQAKKRVLEPLGLVEEPVKTAPGKKRPVEHSPVEPDSSSGTGKAGQQPARKRLNFGQTGDADSVPDPQPLGQPPAAPSGLGSTTMASGSGAPVADNNEGADGVGNSSGNWHCDSQWLGDRVITTSTRTWALPTYNNHLYKQISSQSGASNDNHYFGYSTPWGYFDFNRFHCHFSPRDWQRLINNSWGFRPKRLNFKLFNIQVKEVTQNDGTTTIANNLTSTVQVFTDSEYQLPYVLGSAHQGCLPPFPADVFMVPQYGYLTLNNGSQAVGRSSFYCLEYFPSQMLRTGNNFQFSYTFEDVPFHSSYAHSQSLDRLLNPLIDQYLYYLNKTQSNSGTLQQSRLLFSQAGPTSMSLQAKNWLPGPCYRQQRLSKQANDNNNSNFPWTAATKYHLNGRDSLVNPGPAMASHKDDEEKFFPMHGTLIFGKQGTNANDADLDNVMITDEEEIRTTNPVATEQYGYVSNNLQNSNTGPTTGTVNHQGALPGMVWQDRDVYLQGPIWAKIPHTDGHFHPSPLMGGFGLKHPPPQIMIKNTPVPANPPTNFSSSKFASFITQYSTGQVSVEIEWELQKENSKRWNPEIQYTSNYNKSVNVDFTVDTNGVYSEPRPIGTRYPTRNL

SEQ ID NO: 4863 - DNA, 2208 bp, Adeno-associated virus
atggctgccgatggttatcttccagattggctcgaggacactctctctgaaggaataagacagtggtggaagctcaaacctggcccaccaccaccaaagcccgcagagcggcataaggacgacagcaggggtcttgtgcttcctgggtacaagtacctcggacccttcaacggactcgacaagggagagccggtcaacgaggcagacgccgcggccctcgagcacgacaaggcctacgaccggcagctcgacagcggagacaacccgtacctcaagtacaaccacgccgacgcggagtttcaggagcgtcttaaagaagatacgtcttttgggggcaacctcggacgagcagtcttccaggccaaaaagaggattcttgaacctctgggcctggttgaggaacctgttaagacggctccgggagaaaagaggccggtagagcactctcctgcggagccagactcctcctcgggaaccggaaaagcgggccagcagcctgcaagaaagagattgaattttggccagactggagacgcagactcagtacctgacccccagcctctcggacagccaccagcagccccctctggtctgggaactaatacgatggcttcaggcagtggcgcaccaatggcagacaataacgagggcgccgacggagtgggtaattcctcgggaaattggtattgcgattccacatggatgggcgacagagtcatcaccaccagcacccgcacctgggccctgcccacctacaacaaccatctgtacaagcaaatctccagccagtctggagccagcaacgacaaccactactttggctacagcaccccctgggggtattttgacttcaacagattccactgccacttctccccacgtgactggcaaagactcatcaacaacaactggggattccggcccaagagactcagcttcaagctctttaacattcaagtcaaagaggtcacgcagaatgacggtacgacgacgattgccaataaccttaccagcacggttcaggtgtttactgactcggagtaccagctcccgtacgtcctcggctcggcgcatcaaggatgcctcccgccgttcccagcagacgtcttcatggtgccacagtatggatacctcaccctgaacaacggcagtcaggcggtaggacgctcttccttttactgcctggagtactttccttctcagatgcttcgtaccggaaacaactttaccttcagctacacctttgaagacgttcctttccatagcagctacgctcacagccaaagtctggaccgtctcatgaatcctctcatcgaccagtacctgtattacttgagcagaacaaacactccaagcggaaccaccacgatgtccaggcttcagttttctcaggccggagcaagtgacattcgggaccagtctagaaactggcttcctggaccctgttaccgccagcagcgagtatcaaagacagctgcggacaacaacaacagtgattactcgtggactggagctaccaagtaccacctcaatggaagagactctctggtgaatccgggcccagctatggccagccacaaggacgatgaagaaaaatattttcctcagagcggggttctcatctttggaaaacaagactcgggaaaaactaatgtggacattgaaaaggttatgattacagacgaagaggaaatcaggaccaccaatcccgtggctacggagcagtatggttctgtatctaccaacctccagagcggcaacacacaagcagctacctcagatgtcaacacacaaggcgttcttccaggcatggtctggcaggacagagacgtgtacctgcaggggcccatctgggcaaagattccacacacggacggacattttcacccctctcccctcgtgggcggattcggacttaaacaccctcctccacaaattctcatcaagaacaccccggtacctgcgaatccttcgaccactttcagtgcggcaaagtttgcttccttcatcacacagtactccacggggcaggtcagcgtggagatcgagtgggagctgcagaaggagaacagcaaacgctggaatcccgaaattcagtacacttccaactacaacaaatctgttaatgtggactttactgtggacactaatggtgtgtattcagagcctcgccccattggcaccagatacctgactcgtaatctgtaa

SEQ ID NO: 4864 - protein, 735 aa, Adeno-associated virus
MAADGYLPDWLEDTLSEGIRQWWKLKPGPPPPKPAERHKDDSRGLVLPGYKYLGPFNGLDKGEPVNEADAAALEHDKAYDRQLDSGDNPYLKYNHADAEFQERLKEDTSFGGNLGRAVFQAKKRILEPLGLVEEPVKTAPGEKRPVEHSPAEPDSSSGTGKAGQQPARKRLNFGQTGDADSVPDPQPLGQPPAAPSGLGTNTMASGSGAPMADNNEGADGVGNSSGNWYCDSTWMGDRVITTSTRTWALPTYNNHLYKQISSQSGASNDNHYFGYSTPWGYFDFNRFHCHFSPRDWQRLINNNWGFRPKRLSFKLFNIQVKEVTQNDGTTTIANNLTSTVQVFTDSEYQLPYVLGSAHQGCLPPFPADVFMVPQYGYLTLNNGSQAVGRSSFYCLEYFPSQMLRTGNNFTFSYTFEDVPFHSSYAHSQSLDRLMNPLIDQYLYYLSRTNTPSGTTTMSRLQFSQAGASDIRDQSRNWLPGPCYRQQRVSKTAADNNNSDYSWTGATKYHLNGRDSLVNPGPAMASHKDDEEKYFPQSGVLIFGKQDSGKTNVDIEKVMITDEEEIRTTNPVATEQYGSVSTNLQSGNTQAATSDVNTQGVLPGMVWQDRDVYLQGPIWAKIPHTDGHFHPSPLVGGFGLKHPPPQILIKNTPVPANPSTTFSAAKFASFITQYSTGQVSVEIEWELQKENSKRWNPEIQYTSNYNKSVNVDFTVDTNGVYSEPRPIGTRYLTRNL

SEQ ID NO: 4865 - DNA, 2209 bp, Adeno-associated virus
atggctgccgatggttatcctccagattggctcgaggacactctctctgaagggataagacagtggtggaagctcaaacctggcccaccaccaccaaagcccgcagagcggcataaggacgacagcaggggtcttgtgcttcctgggtacaagtacctcggacccttcaacggactcgacaagggggagccggtcaacgaggcagacgccgcggccctcgagcacgacaaggcctacgaccggcagctcgacagcggagacaacccgtacctcaagtacaaccacgccgacgcagagtttcaggagcgccttaaagaagatacgtcttttgggggcaacctcggacgagcagtcttccaggcgaaaaagagggttcttgaacctctgggcctggttgaggaacctgttaagacggctccgggaaaaaagaggccggtagagcactctcctgtggagccagactcctcctcgggaaccggaaaagcgggccagcggcctgcaagaaaaagattaaattttggtcagactggagacgcagactccgtacctgacccccagcctctcggacagccaccagcagccccctctggtctgggatctactacaatggctacaggcagtggcgcaccaatggcagacaataacgagggtgccgatggagtgggtaattcctcaggaaattggcattgcgattcccaatggctgggcgacagagtcatcaccaccagcacccgaacctgggccctgcccacatacaacaaccacctctacaagcaaatctccagccaatcaggagccagcaacgacaaccactactttggctacagcaccccctgggggtattttgacttcaacagattccactgccacttttcaccacgtgactggcaaagactcatcaacaacaactggggattccggcccaaaagactcaacttcaagctctttaatattcaagtcaaagaggtcacgcagaatgacggtacgacgacgattgccaataaccttaccagcacggttcaggtgtttactgactcggagtaccagctcccgtacgtcctgggctcggcgcatcaaggatgcctcccgccgtttccagcggacgtcttcatggtcccacagtatggatacctcaccctgaacaacgggagtcaggcggtaggacgctcttccttttactgcctggagtactttccttctcagatgctgcgtactggaaacaactttcagttcagctacacttttgaagacgtgcctttccacagcagctacgctcacagccagagtctggatcggctgatgaatcctctgatcgaccagtacctgtattatctgaacaagacacaaacaaatagtggaactcttcagcagtctcggctactgtttagccaagctggaccaaccaacatgtctcttcaagctaaaaactggctgcctggaccttgctacagacagcagcgtctgtcaaaacaggcaaacgacaacaacaacagcaactttccctggactgcagctacaaagtatcatctaaatggccgggactcgttggttaatccaggaccagctatggccagtcacaaggatgacgaagaaaagtttttccccatgcatggaaccctgatatttggtaaacaaggaacaaatgccaacgacgcggatttggaaaatgtcatgattacagatgaagaagaaatcagggccaccaatcccgtggctacggagcagtacgggactgtgtcaaataatttgcaaaactcaaacactggtccaactactggaactgtcaatcgccaaggagcgttacctggtatggtgtggcaggatcgagacgtgtacctgcagggacccatttgggccaagattcctcacaccgatggacactttcatccttctccactgatgggaggttttggactcaaacacccgcctcctcagatcatgatcaaaaacactcccgttccagccaatcctcccacaaacttcagttctgccaagtttgcttctttcatcacacagtattccacgggacaggtcagcgtggagatcgagtgggagctgcagaaggagaacagcaaacgctggaatcccgaaattcagtacacttccaactacaacaagtctgttaatgtggactttactgtggacactaatggtgtgtattcagagcctcgccccattggcaccagatacctgactcgtaatctgtaat

SEQ ID NO: 4866 - protein, 735 aa, Adeno-associated virus
MAADGYPPDWLEDTLSEGIRQWWKLKPGPPPPKPAERHKDDSRGLVLPGYKYLGPFNGLDKGEPVNEADAAALEHDKAYDRQLDSGDNPYLKYNHADAEFQERLKEDTSFGGNLGRAVFQAKKRVLEPLGLVEEPVKTAPGKKRPVEHSPVEPDSSSGTGKAGQRPARKRLNFGQTGDADSVPDPQPLGQPPAAPSGLGSTTMATGSGAPMADNNEGADGVGNSSGNWHCDSQWLGDRVITTSTRTWALPTYNNHLYKQISSQSGASNDNHYFGYSTPWGYFDFNRFHCHFSPRDWQRLINNNWGFRPKRLNFKLFNIQVKEVTQNDGTTTIANNLTSTVQVFTDSEYQLPYVLGSAHQGCLPPFPADVFMVPQYGYLTLNNGSQAVGRSSFYCLEYFPSQMLRTGNNFQFSYTFEDVPFHSSYAHSQSLDRLMNPLIDQYLYYLNKTQTNSGTLQQSRLLFSQAGPTNMSLQAKNWLPGPCYRQQRLSKQANDNNNSNFPWTAATKYHLNGRDSLVNPGPAMASHKDDEEKFFPMHGTLIFGKQGTNANDADLENVMITDEEEIRATNPVATEQYGTVSNNLQNSNTGPTTGTVNRQGALPGMVWQDRDVYLQGPIWAKIPHTDGHFHPSPLMGGFGLKHPPPQIMIKNTPVPANPPTNFSSAKFASFITQYSTGQVSVEIEWELQKENSKRWNPEIQYTSNYNKSVNVDFTVDTNGVYSEPRPIGTRYLTRNL

SEQ ID NO: 4867 - DNA, 2208 bp, Adeno-associated virus
atggctgccgatggttatcttccagattggctcgaggacactctctctgaaggaataagacagtggtggaagctcaaacctggcccaccaccaccaaagcccgcagagcggcataaggacgacagcaggggtcttgtgcttcctgggtacaggtacctcggacccttcaacggactcgacaagggagagccggtcaacgaggcagacgccgcggccctcgagcacgacaaggcctacgaccggcagctcgacagcggagacaacccgtacctcaagtacaaccacgtcgacgcggagtttcaggagcgtcttaaagaagatacgtcttttgggggcaacctcggacgagcagtcttccaggccaaaaagaggattcttgaacctctgggcctggttgaggaacctgttaaggcggctccgggagaaaagaggccggtagagcactctcctgcggagccagactcctcctcgggaaccggaaaagcgggccagcagcctgcaagaaagagattgaattttggtcagactggagacgcagactcagtacctgacccccagcctctcggacagccaccagcagccccctctggtctgggaactaatacgatggcttcaggcagtggcgcaccaatggcagacaataacgagggcgccgacggagtgggtaattcctcgggaaattggcattgcgattccacatggatgggcgacagagtcatcaccaccagcacccgcacctgggccctgcccacctacaacaaccatctgtacaagcaaatctccagccagtctggagccagcaacgacaaccactactttggctacagcaccccctgggggcattttgacttcaacagattccactgccacttctccccacgtgactggcaaagactcatcaacaacaactggggattccggcccaagagactcagcttcaagctctttaacattcaagtcaaagaggtcacgcagaatgacggtacgacgacgattgccaataaccttaccagcacggttcaggtgtttactgactcggagtaccagctcccgtacgtcctcggctcggcgcatcaaggatgcctcccgccgttcccagcagacgtcttcatggtgccacagtatggatacctcaccctgaacaacggcagtcaggcggtaggacgctcttccttttactgcctggagtactttccttctcagatgcttcgtaccggaaacaactttaccttcagctacacctttgaagacgttcctttccatagcagctacgctcacagccaaagtctggaccgtctcatgaatcctctcatcgaccagtacctgtattacttgagcagaacaaacactccaagcggaaccaccacgatgtccaggcttcagttttctcaggccggagcaagtgacattcgggaccagtctagaaactggcttcctggaccctgttaccgccagcagcgagtatcaaagacagctgcggacaacaacaacagtgattactcgtggactggagctaccaagtaccacctcaatggaagagactctctggtgaatccgggcccagctatggccagccacaaggacgatgaagaaaaatattttcctcagagcggggttctcatctttggaaaacaagactcgggaaaaactaatgtggacattgaaaaggttatgattacagacgaagaggaaatcaggaccaccaatcccgtggctacggagcagtatggttctgtatctaccaacctccagagcggcaacacacaagcagctacctcagatgtcaacacacaaggcgttcttccaggcatggtctggcaggacagagacgtgtacctgcaggggcccatctgggcaaagattccacacacggacggacattttcacccctctccccccatgggcggattcggacttaaacaccctcctccacaaattctcatcaagaacaccccggtacctgcgaatccttcgaccactttcagtgcggcaaagtttgcttccttcatcacacagtactccacggggcaggtcagcgtggagatcgagtgggagctgcagaaggagaacagcaaacgctggaatcccgaaattcagtacacttccaactacaacaaatctgttaatgtggactttactgtggacactaatggtgtgtattcagagcctcgccccattggcgccagatacctgactcgtaatctgtaa

SEQ ID NO: 4868 - protein, 735 aa, Adeno-associated virus
MAADGYLPDWLEDTLSEGIRQWWKLKPGPPPPKPAERHKDDSRGLVLPGYRYLGPFNGLDKGEPVNEADAAALEHDKAYDRQLDSGDNPYLKYNHVDAEFQERLKEDTSFGGNLGRAVFQAKKRILEPLGLVEEPVKAAPGEKRPVEHSPAEPDSSSGTGKAGQQPARKRLNFGQTGDADSVPDPQPLGQPPAAPSGLGTNTMASGSGAPMADNNEGADGVGNSSGNWHCDSTWMGDRVITTSTRTWALPTYNNHLYKQISSQSGASNDNHYFGYSTPWGHFDFNRFHCHFSPRDWQRLINNNWGFRPKRLSFKLFNIQVKEVTQNDGTTTIANNLTSTVQVFTDSEYQLPYVLGSAHQGCLPPFPADVFMVPQYGYLTLNNGSQAVGRSSFYCLEYFPSQMLRTGNNFTFSYTFEDVPFHSSYAHSQSLDRLMNPLIDQYLYYLSRTNTPSGTTTMSRLQFSQAGASDIRDQSRNWLPGPCYRQQRVSKTAADNNNSDYSWTGATKYHLNGRDSLVNPGPAMASHKDDEEKYFPQSGVLIFGKQDSGKTNVDIEKVMITDEEEIRTTNPVATEQYGSVSTNLQSGNTQAATSDVNTQGVLPGMVWQDRDVYLQGPIWAKIPHTDGHFHPSPPMGGFGLKHPPPQILIKNTPVPANPSTTFSAAKFASFITQYSTGQVSVEIEWELQKENSKRWNPEIQYTSNYNKSVNVDFTVDTNGVYSEPRPIGARYLTRNL

SEQ ID NO: 4869 - DNA, 2208 bp, Adeno-associated virus
atggctgccgatggttatcttccagattggctcgaggacaccctctctgaaggaataagacagtggtggaagctcaaacctggcccaccaccaccaaagcccgcagagcggcataaggacgacagcaggggtcttgtgcttcctgggtacaagtacctcggacccttcaacggactcgacaagggagagccggtcaacgaggcagacgccgcggccctcgagcacgacaaggcctacgaccggcagctcgacagcggagataacccgtacctcaagtacaaccacgccgacgcggagtttcaggagcgccttaaagaggatacgtcttttgggggcaacctcggacgagcagtcttccaggccaaaaagaggattcttgaacctctgggcctggttgaggaacctgttaagacggctccgggaaaaaagaggccggtagagcactctcctgcggagccagactcctcctcgggaaccggaaaagcgggccagcagcctgcaagaaagagattgaattttggtcagactggagacgcagactcagtacctgacccccggcctctcggacagccaccagcagccccctctggtctgggaactaatacgatggcttcaggcagtggcgcaccaatggcagacaataacgagggcgccgacggagtgggtaattcctcgggaaattggcattgcgattccacatggatgggcgacagagtcatcaccaccagcacccgcacctgggccctgcccacctacaacaaccatctgtacaagcaaatctccagccagtctggagccagcaacgacaaccactactttggctacagcaccccctgggggtattttgacttcaacagattccactgccacttctccccacgtgactggcaaagactcatcaacaacaactggggattccggcccaagagactcagcttcaagctctttaacattcaagtcaaagaggtcacgcagaatgacggtacgacgacgattgccaataaccttaccagcacggttcaggtgtttactgactcggagtaccagctcccgtacgtcctcggctcggcgcatcaaggatgcctcccgccgttcccagcagacgtcttcatggtgccacagtatggatacctcaccctgaacaacggcagtcaggcggtaggacgctcttccttttactgcctggagtactttccttctcagatgcttcgtaccggaaacaactttaccttcagctacacctttgaagacgttcctttccatagcagctacgctcacagccaaagtctggaccgtctcatgaatcctctcatcgaccagtacctgtattacttgagcagaacaaacactccaagcggaaccaccacgatgtccaggcttcagttttctcaggccggagcaagtgacattcgggaccagtctagaaactggcttcctggaccctgttaccgccagcagcgagtatcaaagacagctgcggacaacaacaacagtgattactcgtggactggagctaccaagtaccacctcaatggaagagactctctggtgaatccgggcccagctatggccagccacaaggacgatgaagaaaaatattttcctcagagcggggttctcatctttggaaaacaagactcgggaaaaactaatgtggacattgaaaaggttatgattacagacgaagaggaaatcaggaccaccaatcccgtggctacggagcagtatggttctgtatctaccaacctccagagcggcaacacacaagcagctacctcagatgtcaacacacaaggcgttcttccaggcatggtctggcaggacagagacgtgtacctgcaggggcccatctgggcaaagattccacacacggacggacattttcacccctctcccctcatgggcggattcggacttaaacaccctcctccacaaattctcatcaagaacaccccggtacctgcgaatccttcgaccactttcagtgcggcaaagtttgcttccttcatcacacagtactccacggggcaggtcagcgtggagatcgagtgggagctgcagaaggagaacagcaaacgctggaatcccgaaattcagtacacttccaactacaacaaatctgttaatgtggactttactgtggacactaatggtgtgtattcagagcctcgccccattggcaccagatacctgactcgtaatctgtaa

SEQ ID NO: 4870 - protein, 735 aa, Adeno-associated virus
MAADGYLPDWLEDTLSEGIRQWWKLKPGPPPPKPAERHKDDSRGLVLPGYKYLGPFNGLDKGEPVNEADAAALEHDKAYDRQLDSGDNPYLKYNHADAEFQERLKEDTSFGGNLGRAVFQAKKRILEPLGLVEEPVKTAPGKKRPVEHSPAEPDSSSGTGKAGQQPARKRLNFGQTGDADSVPDPRPLGQPPAAPSGLGTNTMASGSGAPMADNNEGADGVGNSSGNWHCDSTWMGDRVITTSTRTWALPTYNNHLYKQISSQSGASNDNHYFGYSTPWGYFDFNRFHCHFSPRDWQRLINNNWGFRPKRLSFKLFNIQVKEVTQNDGTTTIANNLTSTVQVFTDSEYQLPYVLGSAHQGCLPPFPADVFMVPQYGYLTLNNGSQAVGRSSFYCLEYFPSQMLRTGNNFTFSYTFEDVPFHSSYAHSQSLDRLMNPLIDQYLYYLSRTNTPSGTTTMSRLQFSQAGASDIRDQSRNWLPGPCYRQQRVSKTAADNNNSDYSWTGATKYHLNGRDSLVNPGPAMASHKDDEEKYFPQSGVLIFGKQDSGKTNVDIEKVMITDEEEIRTTNPVATEQYGSVSTNLQSGNTQAATSDVNTQGVLPGMVWQDRDVYLQGPIWAKIPHTDGHFHPSPLMGGFGLKHPPPQILIKNTPVPANPSTTFSAAKFASFITQYSTGQVSVEIEWELQKENSKRWNPEIQYTSNYNKSVNVDFTVDTNGVYSEPRPIGTRYLTRNL

SEQ ID NO: 4871 - DNA, 2208 bp, Adeno-associated virus
atggctgccgatggttatcttccagattggctcgaggacactctctctgaaggaataagacagtggtggaagctcaaacctggcccaccaccaccaaagcccgcagagcggcataaggacgacagcaggggtcttgtgcttcctgggtacaagtacctcggacccttcaacggactcgacaagggagagccggtcaacgaggcagacgccgcggccctcgagcacgacaaggcctacgaccggcagctcgacagcggagacaacccgtacctcaagtacaaccacgccgacgcggagtttcaggagcgccttaaaggagatacgtcttttgggggcaacctcggacgagcagtcttccaggccaaaaagaggattcttgaacctctgggcctggttgaggaacctgttaagacggctccgggaaaaaagaggccggtagagcactctcctgcggagccagactcctcctcgggaaccggaaaagcgggccagcagcctgcaagaaagagattgaattttggtcagactggagacgcagactcagtacctgacccccagcctctcggacagccaccagcagccccctctggtctgggaactaatacgatggcttcaggcagtggcgcaccaatggcagacaataacgagggcgccgacggagtgggtaattcctcgggaaattggcattgcgattccacatggatgggcggcagagtcatcaccaccagcacccgcacctgggccctgcccacctacaacaaccatctgtacaagcaaatctccagccagtctggagccagcaacgacaaccactactttggctacagcaccccctgggggtattttgacttcaacagattccactgccacttctccccacgtgactggcaaagactcatcaacaacaactggggattccggcccaagagactcagcttcaagctctttaacattcaagtcaaagaggtcacgcagaatgacggtacgacgacgattgccaataaccttaccagcacggttcaggtgtttactgactcggagtaccagctcccgtacgtcctcggctcggcgcatcaaggatgcctcccgccgttcccagcagacgtcttcatggtgccacagtatggatacctcaccctgaacaacggcagtcaggcggtaggacgctcttccttttactgcctggagtactttccttctcagacgcttcgtaccggaaacaactttaccttcagctacacctttgaagacgttcctttccatagcagctacgctcacagccaaagtctggaccgtctcatgaatcctctcatcgaccagtacctgtattacttgagcagaacaaacactccaagcggaaccaccacgatgtccaggcttcagttttctcaggccggagcaagtgacattcgggaccagtctagaaactggcttcctggaccctgttaccgccagcagcgagtatcaaagacagctgcggacaacaacaacagtgattactcgtggactggagctaccaagtaccacctcaatggaagagactctctggtgaatccgggcccagctatggccagccacaaggacgatgaagaaaaatattttcctcagagcggggttctcatctttggaaaacaagactcgggaaaaactaatgtggacattgaaaaggttatgattacagacgaagaggaaatcaggaccaccaatcccgtggctacggagcagtatggttctgtatctaccaacctccagagcggcaacacacaagcagctacctcagatgtcaacacacaaggcgttcttccaggcatggtctggcaggacagagacgtgtacctgcaggggcccatctgggcaaagattccacacacggacggacattttcacccctctcccctcatgggcggattcggacttaaacaccctcctccacaaattctcatcaagaacaccccggtacctgcgaatccttcgaccactttcagtgcggcaaagtttgcttccttcatcacacagtactccacggggcaggtcagcgtggagatcgagtgggagctgcagaaggagaacagcaaacgctggaatcccgaaattcagtacacttccaactacaacaaatctgttaatgtggactttactgtggacactaatggtgtgtattcagagcctcgccccattggcaccagatacctgactcgtaatctgtaa

SEQ ID NO: 4872 - protein, 735 aa, Adeno-associated virus
MAADGYLPDWLEDTLSEGIRQWWKLKPGPPPPKPAERHKDDSRGLVLPGYKYLGPFNGLDKGEPVNEADAAALEHDKAYDRQLDSGDNPYLKYNHADAEFQERLKGDTSFGGNLGRAVFQAKKRILEPLGLVEEPVKTAPGKKRPVEHSPAEPDSSSGTGKAGQQPARKRLNFGQTGDADSVPDPQPLGQPPAAPSGLGTNTMASGSGAPMADNNEGADGVGNSSGNWHCDSTWMGGRVITTSTRTWALPTYNNHLYKQISSQSGASNDNHYFGYSTPWGYFDFNRFHCHFSPRDWQRLINNNWGFRPKRLSFKLFNIQVKEVTQNDGTTTIANNLTSTVQVFTDSEYQLPYVLGSAHQGCLPPFPADVFMVPQYGYLTLNNGSQAVGRSSFYCLEYFPSQTLRTGNNFTFSYTFEDVPFHSSYAHSQSLDRLMNPLIDQYLYYLSRTNTPSGTTTMSRLQFSQAGASDIRDQSRNWLPGPCYRQQRVSKTAADNNNSDYSWTGATKYHLNGRDSLVNPGPAMASHKDDEEKYFPQSGVLIFGKQDSGKTNVDIEKVMITDEEEIRTTNPVATEQYGSVSTNLQSGNTQAATSDVNTQGVLPGMVWQDRDVYLQGPIWAKIPHTDGHFHPSPLMGGFGLKHPPPQILIKNTPVPANPSTTFSAAKFASFITQYSTGQVSVEIEWELQKENSKRWNPEIQYTSNYNKSVNVDFTVDTNGVYSEPRPIGTRYLTRNL

SEQ ID NO: 4873 - DNA, 2208 bp, Adeno-associated virus
atggctgccgatggttatcttccagattggctcgaggacactctctctgaaggaataagacagtggtggaagctcaaacctggcccaccaccaccaaagcccgcagagcggcataaggacgacagcaggggtcttgtgcttcctgggtacaagtacctcggacccttcaacggactcgacaagggagagccggtcaacgaggcagacgccgcggccctcgagcacgacaaggcctacgaccggcagctcgacagcggagacaacccgtacctcaagtacaaccacgccgacgcggagtttcaggagcgtcttaaagaagatacgtcttttgggggcaacctcggacgagcagtcttccaggccaaaaagaggattcttgaacctctgggcctggttgaggaacctgttaagacggctccgggaaaaaagaggccggtagagcactctcctgcggagccagactcctcctcgggaaccggaaaagcgggccagcagcctgcaagaaagagattgaattttggtcagactggagacgcagactcagtacctgacccccagcctctcggacagccaccagcagccccctctggtctgggaactaatacgatggcttcaggcagtggcgcaccaatggcagacaataacgagggcgccgacggagtgggtaattcctcgggaaattggcattgcgattccacatggatgggcgacagagtcatcaccaccagcacccgcacctgggccctgcccacctgcaacaaccatctgtacaagcaaatctccagccagtctggagccagcaacgacaaccactactttggctacagcaccccctgggggtattttgacttcaacagattccactgccacttctccccacgtgactggcaaagactcatcaacaacaactggggattccggcccaagagactcagcttcaagctctttaacattcaagtcaaagaggtcacgcagaatgacggtacgacgacgattgccaataaccttaccagcacggttcaggtgtttactgactcggagtaccagctcccgtacgtcctcggctcggcgcatcaaggatgcctcccgccgttcccagcagacgtcttcatggtgccacagtatggatacctcaccctgaacaacggcagtcaggcggtaggacgctcttccttttactgcctggagtattttccttctcagatgcttcgtaccggaaacaactttaccttcagctacacctttgaagacgttcctttccatagcagctacgctcacagccaaagtctggaccgtctcatgaatcctctcatcgaccagtacctgtattacttgagcagaacaaacactccaagcggaaccaccacgatgtccaggcttcagttttctcaggccggagcaagtgacattcgggaccagtctagaaactggcttcctggaccctgttaccgccagcagcgagtatcaaagacagctgcggacaacaacaacagtgattactcgtggactggagctaccaagtaccacctcaatggaagagactctctggtgaatccgggcccagctatggccagccacaaggacgatgaagaaaaatattttcctcagagcggggttctcatctttggaaaacaagactcgggaaaaactaatgtggacattgaaaaggttatgattacagacgaagaggaaatcaggaccaccaatcccgtggctacggagcagtatggttctgtatctacctacctccagagcggcaacacacaagcagctacctcagatgtcaacacacaaggcgttcttccaggcatggtctggcaggacagagacgtgtacctgcgggggcccatctgggcaaagattccacacacggacggacattttcacccctctcccctcatgggcggatttggacttaaacaccctcctccacaaattctcatcaagaacaccccggtacctgcgaatccttcgaccactttcagtgcggcaaagtttgcttccttcatcacacagtactccacggggcaggtcagcgtggagatcgagtgggagctgcagaaggagaacagcaaacgctggaatcccgaaattcagtacacttccaactacaacaaatctgttaatgtggactttactgtggacactaatggtgtgtattcagagcctcgccccattggcaccagatacctgactcgtaatctgtaa

SEQ ID NO: 4874 - protein, 735 aa, Adeno-associated virus
MAADGYLPDWLEDTLSEGIRQWWKLKPGPPPPKPAERHKDDSRGLVLPGYKYLGPFNGLDKGEPVNEADAAALEHDKAYDRQLDSGDNPYLKYNHADAEFQERLKEDTSFGGNLGRAVFQAKKRILEPLGLVEEPVKTAPGKKRPVEHSPAEPDSSSGTGKAGQQPARKRLNFGQTGDADSVPDPQPLGQPPAAPSGLGTNTMASGSGAPMADNNEGADGVGNSSGNWHCDSTWMGDRVITTSTRTWALPTCNNHLYKQISSQSGASNDNHYFGYSTPWGYFDFNRFHCHFSPRDWQRLINNNWGFRPKRLSFKLFNIQVKEVTQNDGTTTIANNLTSTVQVFTDSEYQLPYVLGSAHQGCLPPFPADVFMVPQYGYLTLNNGSQAVGRSSFYCLEYFPSQMLRTGNNFTFSYTFEDVPFHSSYAHSQSLDRLMNPLIDQYLYYLSRTNTPSGTTTMSRLQFSQAGASDIRDQSRNWLPGPCYRQQRVSKTAADNNNSDYSWTGATKYHLNGRDSLVNPGPAMASHKDDEEKYFPQSGVLIFGKQDSGKTNVDIEKVMITDEEEIRTTNPVATEQYGSVSTYLQSGNTQAATSDVNTQGVLPGMVWQDRDVYLRGPIWAKIPHTDGHFHPSPLMGGFGLKHPPPQILIKNTPVPANPSTTFSAAKFASFITQYSTGQVSVEIEWELQKENSKRWNPEIQYTSNYNKSVNVDFTVDTNGVYSEPRPIGTRYLTRNL

SEQ ID NO: 4875 - DNA, 2208 bp, Adeno-associated virus; identical to SEQ ID NO: 4869

SEQ ID NO: 4876 - protein, 735 aa, Adeno-associated virus; identical to SEQ ID NO: 4870

SEQ ID NO: 4877 - DNA, 2208 bp, Adeno-associated virus
atggctgccgatggttatcttccagattggctcgaggacactctctctgaaggaataagacagtggtggaagctcaaacctggcccaccaccaccaaagcccgcagagcggcataaggacggcagcaggggtcttgtgcttcctgggtacaagtacctcggacccttcaacggactcgacaagggagagccggtcaacgaggcagacgccgcggccctcgagcacgacaaggcctacgaccggcagctcaacagcggagacaacccgtacctcaagtacaaccacgccgacgcggagtttcaggagcgccttaaagaagatacgtcttttgggggcaacctcggacgagcagtcttccaggcaaaaaagagggttcttgaacctctgggcctggttgaggagcctgttaaaacggctccgggaaaaaagagaccggtagagcactctcctgcggagccagactcctcctcgggaaccggaaaagcgggccagcagcctgcaagaaagagattgaattttggtcagactggagacgcagactccgtacctgacccccagcctctcggacagccaccagcagccccctctggtctgggatctactacaatggctacaggcagtggcgcaccaatggcagacaataacgagggtgccgatggagtgggtaattcctcaggaaattggcattgcgattcccaatggctgggcgacagagtcatcaccacaagcactcgaacctgggccctgcccacctacaacaaccacctctacaagcaaatctccagccaatcaggagcctcaaacgacaaccactattttggctacagcaccccttgggggtattttgacttcaacagattccactgccacttttcaccacgtgactggcaaagactcatcaacaacaactggggattccgacccaagagactcaacttcaagctctttaacattcaagtcaaagaggtcacgcagaatgacggtacgacgacgattgccaataaccttaccagcacggttcaggtgtttactgactcggagtaccagctcccgtacgtcctcggctcggcgcatcaaggatgcctcccgccgttcccagcggacgtcttcatggtcccacagtatggatacctcaccctgaacaacgggagtcaggcggtaggacgctctcccttttactgcctggagtactttccttctcagatgctgcgtactggaaacaactttcagttcagctacacttttgaagacgtgcctttccacagcagctacgctcacagccagagtctggatcggctgatgaatcctctgatcgaccagtacctgtattatctgaacaagacacaaacaaatagtggaactcttcagcagtctcggctactgtttagccaagctggacccaccaacatgtctcttcaagctaaaaactggctgcctggaccttgctacagacagcagcgtctgtcaaagcaggcaaacgacaacaacaacagcaactttccctggactgcagctacaaagtatcatctaaatggccgggactcgttggttaatccaggaccagctatggccagtcacaaggatgacgaagaaaagtttttccccatgcatggaaccctgatatttggtaaacaaggaacaaatgccaacgacgcggatttggaaaatgtcatgattacagatgaagaagaaatcaggaccaccaatcccgtggctacggagcagtacgggactgtgtcaaataatttgcaaaactcaaacactggtccaactactggaactgtcaatcaccaaggagcgttacctggtatggtgtggcaggatcgagatgtgtaccttcagggacccatttgggccaagattcctcacaccgatggacactttcatccttctccactgatgggaggttttggactcaaacacccgcctcctcagattatgatcaaaaacactcccgttccagccaatcctcctacaaacttcagttctgccaagtttgcttctttcatcacacagtattccacggggcaggtcagcgtggagatcgagtgggagctgcagaaggagaacagcaaacgctggaatcccgaaattcagtacacttccaactacaacaaatctgttaatgtggactttactgtggacaataatggcgtgtactcagagcctcgccccattggcaccagatacctgactcgtaatctgtaa

SEQ ID NO: 4878 - protein, 735 aa, Adeno-associated virus
MAADGYLPDWLEDTLSEGIRQWWKLKPGPPPPKPAERHKDGSRGLVLPGYKYLGPFNGLDKGEPVNEADAAALEHDKAYDRQLNSGDNPYLKYNHADAEFQERLKEDTSFGGNLGRAVFQAKKRVLEPLGLVEEPVKTAPGKKRPVEHSPAEPDSSSGTGKAGQQPARKRLNFGQTGDADSVPDPQPLGQPPAAPSGLGSTTMATGSGAPMADNNEGADGVGNSSGNWHCDSQWLGDRVITTSTRTWALPTYNNHLYKQISSQSGASNDNHYFGYSTPWGYFDFNRFHCHFSPRDWQRLINNNWGFRPKRLNFKLFNIQVKEVTQNDGTTTIANNLTSTVQVFTDSEYQLPYVLGSAHQGCLPPFPADVFMVPQYGYLTLNNGSQAVGRSPFYCLEYFPSQMLRTGNNFQFSYTFEDVPFHSSYAHSQSLDRLMNPLIDQYLYYLNKTQTNSGTLQQSRLLFSQAGPTNMSLQAKNWLPGPCYRQQRLSKQANDNNNSNFPWTAATKYHLNGRDSLVNPGPAMASHKDDEEKFFPMHGTLIFGKQGTNANDADLENVMITDEEEIRTTNPVATEQYGTVSNNLQNSNTGPTTGTVNHQGALPGMVWQDRDVYLQGPIWAKIPHTDGHFHPSPLMGGFGLKHPPPQIMIKNTPVPANPPTNFSSAKFASFITQYSTGQVSVEIEWELQKENSKRWNPEIQYTSNYNKSVNVDFTVDNNGVYSEPRPIGTRYLTRNL

SEQ ID NO: 4879 - DNA, 2208 bp, Adeno-associated virus
atggctgccgatggttatcttccagattggctcgaggacactctctctgaaggaataagacagtggtggaagctcaaacctggcccaccaccaccaaagcccgcagagcggcataaggacgacagcaggggtcttgtgcttcctgggtacaagtacctcggacccttcaacggactcgacaagggagagccggtcaacgaggcagacgccgcggccctcgagcacgacaaggcctacgaccggcagctcgacagcggagacaacccgtacctcaagtacaaccacgccgacgcggagtttcaggagcgtcttaaagaagatacgtcttttgggggcaacctcggacgagcagtcttccaggccaaaaagaggattcttgaacctctgggcctggttgaggaacctgttaagacggctccgggaaaaaagaggccggtagagcactctcctgcggagccagactcctcctcgggaaccggaaaagcgggccagcagcctgcaagaaagagattgaattttggtcagactggagacgcagactcagtacctgacccccagcctctcggacagccaccagcagccccctctggtctgggaactaatacgatggcttcaggcagtggcgcaccaatggcagacaataacgagggcgccgacggagtgggtaattcctcgggaaattggcattgcgattccacatggatgggcgacagagtcatcaccaccagcacccgcacctgggccctgcccacctacaacaaccatctgtacaagcaaatctccagccagtctggagccagcaacgacaaccactactttggctacagcaccccctgggggtattttgacttcaacagattccactgccacttctccccacgtgactggcaaagactcatcaacaacaactggggattccggcccaagagactcagcttcaagctctttaacattcaagtcaaagaggtcacgcagaatgacggtacgacgacgattgccaataaccttaccagcacggttcaggtgtttactgactcggagtaccagctcccgtacgtcctcggctcggcgcatcaaggatgcctcccgccgttcccagcagacgtcttcatggtgccacagtatggatacctcaccctgaacaacggcagtcaggcggtaggacgctcttccttttactgcctggagtactttccttctcagatgcttcgtaccggaaacaactttaccttcagctacacctttgaagacgttcctttccatagcagctacgctcacagccaaagtctggaccgtctcatgaatcctctcatcgaccagtacctgtattacttgagcagaacaaacactccaagcggaaccaccacgatgtccaggcttcagttttctcaggccggagcaagtgacattcgggaccagtctagaaactggcttcctggaccctgttaccgccagcagcgagtatcaaagacagctgcggacaacaacaacagtgattactcgtggactggagctaccaagtaccacctcaatggaagagactctctggtgaatccgggcccagctatggccagccacaaggacgatgaagaaaaatattttcctcagagcggggttctcatctttggaaaacaagactcgggaaaaactaatgtggacattgaaaaggttatgattacagacgaagaggaaatcaggaccaccaatcccgtggctacggagcagtatggttctgtatctaccaacctccagagcggcaacacacaagcagctacctcagatgtcaacacacaaggcgttcttccaggcatggtctggcaggacagagacgtgtacctgcaggggcccatctgggcaaagattccacacacggacggacattttcacccctctcccctcatgggcggattcggacttaaacaccctcctccacaaattctcatcaagaacaccccggtacctgcgaatccttcgaccactttcagtgcggcaaagtttgcttccttcatcacacagtactccacggggcaggtcagcgtggagatcgagtgggagctgcagaaggagaacagcaaacgctggaatcccgaaattcagtacacttccaactacaacaaatctgttaatgtggactttactgtggacactaatggtgtgtattcagagcctcgccccattggcaccagatacctgactcgtaatctgtaa

SEQ ID NO: 4880 - protein, 735 aa, Adeno-associated virus
MAADGYLPDWLEDTLSEGIRQWWKLKPGPPPPKPAERHKDDSRGLVLPGYKYLGPFNGLDKGEPVNEADAAALEHDKAYDRQLDSGDNPYLKYNHADAEFQERLKEDTSFGGNLGRAVFQAKKRILEPLGLVEEPVKTAPGKKRPVEHSPAEPDSSSGTGKAGQQPARKRLNFGQTGDADSVPDPQPLGQPPAAPSGLGTNTMASGSGAPMADNNEGADGVGNSSGNWHCDSTWMGDRVITTSTRTWALPTYNNHLYKQISSQSGASNDNHYFGYSTPWGYFDFNRFHCHFSPRDWQRLINNNWGFRPKRLSFKLFNIQVKEVTQNDGTTTIANNLTSTVQVFTDSEYQLPYVLGSAHQGCLPPFPADVFMVPQYGYLTLNNGSQAVGRSSFYCLEYFPSQMLRTGNNFTFSYTFEDVPFHSSYAHSQSLDRLMNPLIDQYLYYLSRTNTPSGTTTMSRLQFSQAGASDIRDQSRNWLPGPCYRQQRVSKTAADNNNSDYSWTGATKYHLNGRDSLVNPGPAMASHKDDEEKYFPQSGVLIFGKQDSGKTNVDIEKVMITDEEEIRTTNPVATEQYGSVSTNLQSGNTQAATSDVNTQGVLPGMVWQDRDVYLQGPIWAKIPHTDGHFHPSPLMGGFGLKHPPPQILIKNTPVPANPSTTFSAAKFASFITQYSTGQVSVEIEWELQKENSKRWNPEIQYTSNYNKSVNVDFTVDTNGVYSEPRPIGTRYLTRNL

SEQ ID NO: 4881 - DNA, 2208 bp, Adeno-associated virus
atggctgccgatggttatcttccagattggctcgaggacactctctctgaaggaataagacagtggtggaagctcaaacctggcccaccaccaccaaagcccgcagagcggcataaggacgacagcaggggtcttgtgcttcctgggtacaagtacctcggacccttcaacggactcgacaagggagagccggtcaacgaggcagacgccgcggccctcgagcacgacaaggcctacgaccggcagctcgacagcggagacaacccgtacctcaagtacaaccacgccgacgcggagtttcaggagcgtcttaaagaagatacgtcttttgggggcaacctcggacgagcagtcttccaggccaaaaagaggattcttgaacctctgggcctggttgaggaacctgttaagacggctccgggaaaaaagaggccggtagagcactctcctgcggagccagactcctcctcgggaaccggaaaagcgggccagcagcctgcaagaaagagattgaattttggtcagactggagacgcagactcagtacctgacccccagcctctcggacagccaccagcagccccctctggtctgggaactaatacgatggcttcaggcagtggcgcaccaatggcagacaataacgagggcgccgacggagtgggtaattcctcgggaaattggcattgcgattccacatggatgggcgacagagtcatcaccaccagcacccgcacctgggccctgcccacctacaacaaccatctgtacaagcaaatctccagccagtctggagccagcaacgacaaccactactttggctacagcaccccctgggggtatttcgacttcaacagattccactgccacttctccccacgtgactggcaaagactcatcaacaacaactggggattccggcccaagagactcagcttcaagctctttaacattcaagtcaaagaggtcacgcagaatgacggtacgacgacgattgccaataaccttaccagcacggttcaggtgtttactgactcggggtaccagctcccgtacgtcctcggctcggcgcatcaaggatgccttccgccgttcccagcagacgtcttcatggtgccacagtatggatacctcaccctgaacaacggcagtcaggcggtaggacgctcttccttttactgcctggagtactttccttctcagatgcttcgtaccggaaacaactttaccttcagctacacctttgaagacgttcctttccatagcagctacgctcacggccaaagtctggaccgtctcatgaatcctctcatcgaccagtacctgtattacttgagcagaacaaacactccaagcggaaccaccacgatgtccaggcttcagttttctcaggccggagcaagtgacgttcgggaccagtctagaaactggcttcctggaccctgttaccgccagcagcgagtatcaaagacagctgcggacaacaacaacagtgattactcgtggactggagctaccaagtaccacctcaatggaagagactctctggtgaatccgggcccagctatggccagccacaaggacgatgaagaaaaatattttcctcagagcggggttctcgtctttggaaaacaagactcgggaaaaactaatgtggacattgaaaaggttatgattacagacgaagaggaaatcaggaccaccaatcccgcggctacggagcagtatggttctgtatctaccaacctccagagcggcaacacacaagcagctacctcagatgtcaacacacaaggcgttcttccaggcatggtctggcaggacagagacgtgtacctgcaggggcccatctgggcaaagattccacacacggacggacattttcacccctctcccctcatgggcggattcggacttaaacaccctcctccacaaattctcatcaagaacaccccggtacctgcgaatccttcgaccactttcagtgcggcaaagtttgtttccttcatcacacagtactccacggggcaggtcagcgtggagatcgagtgggagctgcagaaggagaacagcaaacgctggaatcccgaaattcagtacacttccaactacaacaaatctgttaatgtggactttactgtggacactaatggtgtgtattcagagcctcgccccattggcaccagatacctgactcgtaatctgtaa

SEQ ID NO: 4882 - protein, 735 aa, Adeno-associated virus
MAADGYLPDWLEDTLSEGIRQWWKLKPGPPPPKPAERHKDDSRGLVLPGYKYLGPFNGLDKGEPVNEADAAALEHDKAYDRQLDSGDNPYLKYNHADAEFQERLKEDTSFGGNLGRAVFQAKKRILEPLGLVEEPVKTAPGKKRPVEHSPAEPDSSSGTGKAGQQPARKRLNFGQTGDADSVPDPQPLGQPPAAPSGLGTNTMASGSGAPMADNNEGADGVGNSSGNWHCDSTWMGDRVITTSTRTWALPTYNNHLYKQISSQSGASNDNHYFGYSTPWGYFDFNRFHCHFSPRDWQRLINNNWGFRPKRLSFKLFNIQVKEVTQNDGTTTIANNLTSTVQVFTDSGYQLPYVLGSAHQGCLPPFPADVFMVPQYGYLTLNNGSQAVGRSSFYCLEYFPSQMLRTGNNFTFSYTFEDVPFHSSYAHGQSLDRLMNPLIDQYLYYLSRTNTPSGTTTMSRLQFSQAGASDVRDQSRNWLPGPCYRQQRVSKTAADNNNSDYSWTGATKYHLNGRDSLVNPGPAMASHKDDEEKYFPQSGVLVFGKQDSGKTNVDIEKVMITDEEEIRTTNPAATEQYGSVSTNLQSGNTQAATSDVNTQGVLPGMVWQDRDVYLQGPIWAKIPHTDGHFHPSPLMGGFGLKHPPPQILIKNTPVPANPSTTFSAAKFVSFITQYSTGQVSVEIEWELQKENSKRWNPEIQYTSNYNKSVNVDFTVDTNGVYSEPRPIGTRYLTRNL

SEQ ID NO: 4883 - DNA, 2208 bp, Adeno-associated virus
atggctgccgatggttatcttccagattggctcgaggacactctctctgaaggaataagacagtggtggaaactcaaacctggcccaccaccaccaaagcccgcagagcggcataaggacgacagcaggggtcttgtgcttcctgggtacaagtacctcggacccttcaacggactcgacaagggagagccggtcaacgaggcagacgccgcggccctcgagcacgacaaggcctacgaccggcagctcgacagcggagacaacccgtacctcaagtacaaccacgccgacgcggagtttcaggagcgccttaaagaagatacgtcttttgggggcaacctcggacgagcagtcttccaggcaaaaaagagggttctggaacctctgagcctggttgaggagcctgttaagacggctccgggaaaaaagaggccggtagagcactctcccgcagagccagattcctcctccggaactggaaagtcgggcaaccagcctgcaagaaagagattgaatttcggtcagactggagactcagactccgtacctgacccccagcctctcggacagccaccagcagccccctctggtctgggaactaatacgatggctacaggcagtggcgcaccaatggcagacaataacgagggcgccgacggagtgggtaattcctcgggaaattggcattgcgattccacatggatgggcgacagagtcatcaccaccagcacccgaacctgggccctgcccacctacaacaaccatctgtacaagcaaatatccagccagtctggagccagcaacgacaatcactactttggctacagcaccccctgggggtattttgacttcaacagattccactgccacttttcaccacgtgactggcaaagactcatcaacaacaactggggattccgacccaagagactcaacttcaagctctttaacattcaagtcaaagaggtcacgcagaatgacggtacgacgacgattgccaataaccttaccagcacggttcaggtgtttactgactcggagtaccagctcccgtacgtcctcggctcggcgcatcaaggatgcctcccgccgttcccagcagacgtcttcatggtgccacagtatggatacctcaccctgaacaacgggagtcaggcagtaggacgctcttcattttactgcctagagtactttccttctcagatgctgcgtaccggaaacaactttaccttcagctacacctttgaggacgttcctttccacagcagctacgctcacagccagagtttggaccgtctcatgaatcctctcatcgaccagtacctgtattacttgagcagaacaaacactccaagcggaaccaccacgcagtccaggcttcagttttctcaggccggagcgagtgacattcaggaccagtctaggaactggcttcctggaccctgttaccgtcagcagcgagtatcaaagacatctgcggataacaacaacagtgaatactcgtggactggagctaccaagtaccacctcaatggcagagactctctggtgaatccgggcccggccatggccagccacaaagacgatgaagaaaagttttttcctcagagcggggttcttatctttgggaagcaaggctcagagaaaacaaatgtggatattgaaaaggtcatgattacagacgaagaggaaatcaggaccaccaatcccgtggctacggagcagtatggttctgtatctaccaacctccagagcggcaacacacaagcagctaccgcagatgtcaacacacaaggcgttcttccaggcatggtcgggcaagacagagacgtgtacctgcaggggcctacttgggcaaagattccacacacggacggacattttcacccctctcccctcatgggcggatttggacttaaacaccctcctccacagattctcatcaagaacaccccggtacctgcgaatccttcgaccaccttcagtgcggcaaagtttgcttccttcattacacagtactccacggggcaggtcagcgtggagatcgagtgggagctgcagaaggagaacagcaaacgctggaatcccgagatccagtacacttccaactacaacaagtctgttaatgtggactttactgtggacactaatggcgtgtattcagagcctcgccccattggcaccagatacctgactcgtaatctgtaa

SEQ ID NO: 4884 - protein, 735 aa, Adeno-associated virus
MAADGYLPDWLEDTLSEGIRQWWKLKPGPPPPKPAERHKDDSRGLVLPGYKYLGPFNGLDKGEPVNEADAAALEHDKAYDRQLDSGDNPYLKYNHADAEFQERLKEDTSFGGNLGRAVFQAKKRVLEPLSLVEEPVKTAPGKKRPVEHSPAEPDSSSGTGKSGNQPARKRLNFGQTGDSDSVPDPQPLGQPPAAPSGLGTNTMATGSGAPMADNNEGADGVGNSSGNWHCDSTWMGDRVITTSTRTWALPTYNNHLYKQISSQSGASNDNHYFGYSTPWGYFDFNRFHCHFSPRDWQRLINNNWGFRPKRLNFKLFNIQVKEVTQNDGTTTIANNLTSTVQVFTDSEYQLPYVLGSAHQGCLPPFPADVFMVPQYGYLTLNNGSQAVGRSSFYCLEYFPSQMLRTGNNFTFSYTFEDVPFHSSYAHSQSLDRLMNPLIDQYLYYLSRTNTPSGTTTQSRLQFSQAGASDIQDQSRNWLPGPCYRQQRVSKTSADNNNSEYSWTGATKYHLNGRDSLVNPGPAMASHKDDEEKFFPQSGVLIFGKQGSEKTNVDIEKVMITDEEEIRTTNPVATEQYGSVSTNLQSGNTQAATADVNTQGVLPGMVGQDRDVYLQGPTWAKIPHTDGHFHPSPLMGGFGLKHPPPQILIKNTPVPANPSTTFSAAKFASFITQYSTGQVSVEIEWELQKENSKRWNPEIQYTSNYNKSVNVDFTVDTNGVYSEPRPIGTRYLTRNL

SEQ ID NO: 4885 - DNA, 2208 bp, Adeno-associated virus
atggctgccgatggttatcttccagattggctcgaggacactctctctgaaggaataagacagtggtggaagctcaaacctggcccaccaccaccaaagcccgcagagcggcataaggacgacagcaggggtcttgtgcttcctgggtacaagtacctcggacccttcaacggactcgacaagggagagccggtcaacgaggcagacgccgcggccctcgagcacgacaaggcctacgaccggcagctcgacagcggagacaacccgtacctcaagtacaaccacgccgacgcagagtttcaggagcgccttaaagaagatacgtcttttgggggcaacctcggacgagcagtcttccaggcaaaaaagagggttctggaacctctgggcctggttgaggagcctgttaagacggctccgggaaaaaagaggccggtagagcactctcctgcagagccagattcctcctccggaactggaaagtcgggcaaccagcctgcaagaaagagattgaatttcggtcagactggagactcagactccgtacctgacccccagcctctcggacagccaccagcagccccctctggtctgggaactaatacgatggctacaggcagtggcgcaccaatggcagacaataacgagggcgccgacggagtgggtaattcctcgggaaattggcattgcgattccacatggatgggcgacagagtcatcaccaccagcacccgaacctgggccctgcccacctacaacaaccatctgtacaagcaaatatccagccagtctggagccagcaacgacaatcactactttggctacagcaccccctgggggtattttgacttcaacagattccactgccacttttcaccacgtgactggcaaagactcatcaacaacaactggggattccgacccaagagactcaacttcaagctctttaacattcaagtcaaagaggtcacgcagaatgacggtacgacgacgattgccaataaccttaccagcacggttcaggtgtttactgactcggagtaccagctcccgtacgtcctcggctcggcgcatcaaggatgcctcccgccgttcccagcagacgtcttcatggtgccacagtatggatacctcaccctgaacaacgggagtcaggcagtaggacgctcttcattttactgcctagggtactttccttctcagatgctgcgtaccggaaacaactttaccttcagctacacctttgaggacgttcctttccacagcagctacgctcacagccagagtttggaccgtctcatgaatcctctcatcgaccagtacctgtattacttgagcagaacaaacactccaagcggaaccaccacgcagtccaggcttcagttttctcaggccggagcgagtgacattcgggaccagtctaggaactggcttcctggaccctgttaccgtcagcagcgagtatcaaagacatctgcggataacaacaacagtgaatactcgtggactggagctaccaagtaccacctcaatggcagagactctctggtgaatccgggcccggccatggccagccacaaagacgatgaagaaaagttttttcctcagagcggggttcttatctttgggaagcaaggcccagagaaaacaaatgtggatattgaaaaggtcatgattacagacgaagaggaaatcaggaccaccaatcccgtggctacggagcagtatggttctgtatctaccaacctccagagcggcaacacacaagcagctaccgcagatgtcaacacacaaggcgttcttccaggcatggtctggcaagacagagacgtgtacctgcaggggcctatttgggcaaagattccacacacggacggacattttcacccctctcccctcatgggcggatttggacttaaacaccctcctccacagattctcatcaagaacaccccggtacctgcgaatccttcgaccaccttcagtgcggcaaagtttgcttccttcattacacagtactccacggggcaggtcagcgtggagatcgagtgggagctgcagaaggagaacagcaaacgctggaatcccgagatccagtacacttccaactacaacaagtctgttaatgtggactttactgtggacactaatggcgtgtattcagagcctcgccccattggcaccagatacctgactcgtaatctgtaa

SEQ ID NO: 4886 - protein, 735 aa, Adeno-associated virus
MAADGYLPDWLEDTLSEGIRQWWKLKPGPPPPKPAERHKDDSRGLVLPGYKYLGPFNGLDKGEPVNEADAAALEHDKAYDRQLDSGDNPYLKYNHADAEFQERLKEDTSFGGNLGRAVFQAKKRVLEPLGLVEEPVKTAPGKKRPVEHSPAEPDSSSGTGKSGNQPARKRLNFGQTGDSDSVPDPQPLGQPPAAPSGLGTNTMATGSGAPMADNNEGADGVGNSSGNWHCDSTWMGDRVITTSTRTWALPTYNNHLYKQISSQSGASNDNHYFGYSTPWGYFDFNRFHCHFSPRDWQRLINNNWGFRPKRLNFKLFNIQVKEVTQNDGTTTIANNLTSTVQVFTDSEYQLPYVLGSAHQGCLPPFPADVFMVPQYGYLTLNNGSQAVGRSSFYCLGYFPSQMLRTGNNFTFSYTFEDVPFHSSYAHSQSLDRLMNPLIDQYLYYLSRTNTPSGTTTQSRLQFSQAGASDIRDQSRNWLPGPCYRQQRVSKTSADNNNSEYSWTGATKYHLNGRDSLVNPGPAMASHKDDEEKFFPQSGVLIFGKQGPEKTNVDIEKVMITDEEEIRTTNPVATEQYGSVSTNLQSGNTQAATADVNTQGVLPGMVWQDRDVYLQGPIWAKIPHTDGHFHPSPLMGGFGLKHPPPQILIKNTPVPANPSTTFSAAKFASFITQYSTGQVSVEIEWELQKENSKRWNPEIQYTSNYNKSVNVDFTVDTNGVYSEPRPIGTRYLTRNL

SEQ ID NO: 4887 - protein, 735 aa, Adeno-associated virus
MAADGYLPDWLEDTLSEGIRQWWKLKPGPPPPKPAERHKDDSRGLVLPGYKYLGPFNGLDKGEPVNEADAAALEHDKAYDRQLDSGDNPYLKYNHADAEFQERLKEDTSFGGNLGRAVFQAKKRVLEPLGLVEEPVKTAPGKKRPVEHSPAEPDSSSGTGKSGNQPARKRLNFGQTGDSDSVPDPQPLGQPPAAPSGLGTNTMATGSGAPMADNNEGADGVGNSSGNWHCDSTWMGDRVITTSTRTWALPTYNNHLYKQISSQSGASNDNHYFGYSTPWGYFDFNRFHCHFSPRDWQRLINNNWGFRPKRLNFKLFNIQVKEVTQNDGTTTIANNLTSTVQVFTDSEYQLPYVLGSAHQGCLPPFPADVFMVPQYGYLTLNNGSQAVGRSSFYCLEYFPSQMLRTGNNFTFSYTFEDVPFHSSYAHSQSLDRLMNPLIDQYLYYLSRTNTPSGTTTQSRLQFSQAGASDIRDQSRNWLPGPCYRQQRVSKTSADNNNSEYSWTGATKYHLNGRDSLVNPGPAMASHKDDEEKFFPQSGVLIFGKQGPEKTNVDIEKVMITDEEEIRTTNPVATEQYGSVSTNLQSGNTQAATADVNTQGVLPGMVWQDRDVYLQGPIWAKIPHTDGHFHPSPLMGGFGLKHPPPQILIKNTPVPANPSTTFSAAKFASFITQYSTGQVSVEIEWELQKENSKRWNPEIQYTSNYNKSVNVDFTVDTNGVYSEPRPIGTRYLTRNL

SEQ ID NO: 4888 - protein, 735 aa, Adeno-associated virus; identical to SEQ ID NO: 4887

SEQ ID NO: 4889 - DNA, 2211 bp, Adeno-associated virus
atggctgccgatggttatcttccagattggctcgaggacactctctctgaaggaataagacagtggtggaagctcaaacctggcccaccaccaccaaagcccgcagagcggcataaggacgacagcaggggtcttgtgcttcctgggtacaagtacctcggacccttcaacggactcgacaagggggagccggtcaacgaggcagacgccgcggccctcgagcacgacaaggcctacgaccggcagctcgacagcggagacaacccgtacctcaagtacaaccacgccgacgcagagtttcaggagcgccttaaagaagatacgtcttttgggggcaacctcggacgagcagtcttccaggcgaaaaagagggttcttgaacctctgcggcctggtttgaggaaacctgttaagacggctccgggaaaaaagaggccggtagagcactctcctgtggagccagactcctcctcgggaaccggaaaagcgggccagcagcctgcaagaaaaagattaaattttggtcagactggagacgcagactccgtacctgacccccagcctctcggacagccaccagcagccccctctggtctgggatctactacaatggctacaggcagtggcgcaccaatggcagacaataacgagggtgccgatggagtgggtaattcctcaggaaattggcattgcgattcccaatggctggacgacagagtcatcgccaccagcacccgaacctgggccctgcccacatacaacaaccacctctacaagcaaatctccagccaatcaggagcctgcaacgacaaccactactttggctacagcaccccctgggggtattttgacttcaacagattccactgccacttttcaccacgtgactggcaaagactcatcaacagcaactggggattccggcccaaaagactcaacttcaagctctttaatattcaagtcaaagaggtcacgcagaatgacggtacgacgacgattgccaataaccttaccagcacggttcaggtgtttactgactcggagtaccagctcccgtacgtcccgggctcggcgcatcaaggatgcctcccgccgtttccagcggacgtcttcatggtcccacagtatggatacctcaccctgaacaacgggagtcaggcggtaggacgctcttccttttactgcctggagtactttccttctcagatgctgcgtactggaaacaactttcagttcagctacacttttgaagacgtgcctttccacagcagctacgctcactgccagagtctggatcggctgatgaatcctctgatcgaccagtacctgtattatctgaacaagacacaaacaaatagtggaactcttcagcagtctcggctactgtttagccaagctggaccaaccaacatgtctcttcaagctaaaaactggctgcctggaccttgctacagacagcagcgtctgtcaaaacaggcaaacgacaataacaactgcaactttccctggactgcagctacaaagtatcatctaaatggccgggactcgttggttaatccaggaccagctatggccagtcacaaggatgacgaagaaaagtttttccccatgcatggaaccctgatatttggtaaacaaggaacaaatgccaacgacgcggatttggaaaatgtcatgattacagatgaagaagaaatcaggcccaccaatcccgtggctacggagcagtacgggactgtgtcaaataatttgcaaaactcaaacactggtccaactacaggaactgtcaatcaccaaggagcgttacctggtatggtgtggcaggatcgagacgtgtacctgcagggacccatttgggccaagattcctcacaccgatggacactttcatccttctccactgatgggaggttttggactcaaacacccgcctcctcagatcatgatcaaaagcactcccgttccagccaatcctcccacaaacttcagttctgccaagtttgcttcttccatcacacagtattccacgggacaggtcagcgtggagatcgagtgggagctgcagaaggagaacagcaaacgctggaatcccgaaattcagtacacttccaactacaacaagtctgttaatgtggactttactgtggacactaatggtgtgtattcagagcctcgccccattggcaccagatacctgactcgtaatctgtaa

SEQ ID NO: 4890 - protein, 736 aa, Adeno-associated virus
MAADGYLPDWLEDTLSEGIRQWWKLKPGPPPPKPAERHKDDSRGLVLPGYKYLGPFNGLDKGEPVNEADAAALEHDKAYDRQLDSGDNPYLKYNHADAEFQERLKEDTSFGGNLGRAVFQAKKRVLEPLRPGLRKPVKTAPGKKRPVEHSPVEPDSSSGTGKAGQQPARKRLNFGQTGDADSVPDPQPLGQPPAAPSGLGSTTMATGSGAPMADNNEGADGVGNSSGNWHCDSQWLDDRVIATSTRTWALPTYNNHLYKQISSQSGACNDNHYFGYSTPWGYFDFNRFHCHFSPRDWQRLINSNWGFRPKRLNFKLFNIQVKEVTQNDGTTTIANNLTSTVQVFTDSEYQLPYVPGSAHQGCLPPFPADVFMVPQYGYLTLNNGSQAVGRSSFYCLEYFPSQMLRTGNNFQFSYTFEDVPFHSSYAHCQSLDRLMNPLIDQYLYYLNKTQTNSGTLQQSRLLFSQAGPTNMSLQAKNWLPGPCYRQQRLSKQANDNNNCNFPWTAATKYHLNGRDSLVNPGPAMASHKDDEEKFFPMHGTLIFGKQGTNANDADLENVMITDEEEIRPTNPVATEQYGTVSNNLQNSNTGPTTGTVNHQGALPGMVWQDRDVYLQGPIWAKIPHTDGHFHPSPLMGGFGLKHPPPQIMIKSTPVPANPPTNFSSAKFASSITQYSTGQVSVEIEWELQKENSKRWNPEIQYTSNYNKSVNVDFTVDTNGVYSEPRPIGTRYLTRNL

SEQ ID NO: 4891 - DNA, 2208 bp, Adeno-associated virus
atggctgccgatggttatcttccagattggctcgaggacactctctctgaaggaataagacagtggtggaagctcaaacctggcccaccaccaccaaagcccgcagagcggcataaggacgacagcaggggtcttgtgcttcctgggtacaagtacctcggacccttcaacggactcgacaagggagagccggtcaacgaggcagacgccgcggccctcgagcacgacaaggcctacgaccggcagctcgacagcggagacaacccgtacctcaagtacaaccacgccgacgcggagtttcaggagcgccttaaagaggatacgtcttttgggggcaacctcggacgagcagtcttccaggcaaaaaagagggttctggaacctctgggcctggttgaggagcctgttaagacggctccgggaaaaaagaggccggtagagcactctcctgcagagccagattcctcctccggaactggaaagtcgggcaaccagcctgcaagaaagagattgaatttcggtcagactggagactcagactccgtacctgacccccagcctctcggacagccaccagcagccccctctggtctgggaactaatacgatggctacaggcagtggcgcaccaatggcagacaataacgagggcgccgacggagtgggtaattcctcgggaaattggcattgcgattccacatggatgggcgacagagtcatcaccaccagcacccgaacctgggccctgcccacctacaacaaccatctgtacaagcaaatatccagccagtctggagccagcaacgacaatcactactttggctacagcaccccctgggggtattttgacttcaacagattccactgccacttttcaccacgtgactggcaaagactcatcaacaacaactggggattccgacccaagagactcaacttcaagctctttaacattcaagtcaaagaggtcacgcagaatgacggtacgacgacgattgccaataaccttaccagcacggttcaggtgtttactgactcggagtaccagctcccgtacgtcctcggctcggcgcatcaaggatgcctcccgccgttcccagcagacgtcttcatggtgccacagtatggatacctcaccctgaacaacgggagtcaggcagtaggacgctcttcattttactgcctagagtactttccttctcagatgctgcgtaccggaaacagctttaccttcagctacacctttgaggacgttcctttccacagcagctacgctcacagccagagtttggaccgtctcatgaatcctctcatcgaccagtacctgtattacttgagcagaacaaacactccaagcggaaccaccacgcagtccaggcttcagttttctcaggccggagcgagtgacattcgggaccagtctaggaactggcttcctggaccctgttaccgtcagcagcgagtatcaaagacatctgcggataacaacaacagtgaatactcgtggactggagctaccaagtaccacctcaatggcagagactctctggtgaatccgggcccggccatggccagccacaaagacgatgaagaaaagttctttcctcagagcggggttcttatctttgggaagcaaggctcagagaaaacaaatgtggatattgaaaaggtcatgattacagacgaagaggaaatcaggaccaccaatcccgtggctacggagcagtatggttctgtatctaccaacctccagagcggcaacacacaagcagctaccgcagatgtcaacacacaaggcgttcttccaggcatggtctggcaagacagagacgtgtacctgcaggggcctatttgggcaaagattccacacacggacggacattttcacccctctcccctcatgggcggatttggacttaaacaccctcctccacagattctcatcaagaacaccccggtacctgcgaatccttcgaccaccttcagtgcggcaaagtttgcttccttcattacacagtactccacggggcaggtcagcgtggagatcgagtgggagctgcagaaggagaacagcaaacgctggaatcccgagatccagtacacttccaactacaacaagtctgttaatgtggactttactgtggacactaatggcgtgtattcagagcctcgccccattggcaccagatacctgactcgtaatctgtaa

SEQ ID NO: 4892 - protein, 735 aa, Adeno-associated virus
MAADGYLPDWLEDTLSEGIRQWWKLKPGPPPPKPAERHKDDSRGLVLPGYKYLGPFNGLDKGEPVNEADAAALEHDKAYDRQLDSGDNPYLKYNHADAEFQERLKEDTSFGGNLGRAVFQAKKRVLEPLGLVEEPVKTAPGKKRPVEHSPAEPDSSSGTGKSGNQPARKRLNFGQTGDSDSVPDPQPLGQPPAAPSGLGTNTMATGSGAPMADNNEGADGVGNSSGNWHCDSTWMGDRVITTSTRTWALPTYNNHLYKQISSQSGASNDNHYFGYSTPWGYFDFNRFHCHFSPRDWQRLINNNWGFRPKRLNFKLFNIQVKEVTQNDGTTTIANNLTSTVQVFTDSEYQLPYVLGSAHQGCLPPFPADVFMVPQYGYLTLNNGSQAVGRSSFYCLEYFPSQMLRTGNSFTFSYTFEDVPFHSSYAHSQSLDRLMNPLIDQYLYYLSRTNTPSGTTTQSRLQFSQAGASDIRDQSRNWLPGPCYRQQRVSKTSADNNNSEYSWTGATKYHLNGRDSLVNPGPAMASHKDDEEKFFPQSGVLIFGKQGSEKTNVDIEKVMITDEEEIRTTNPVATEQYGSVSTNLQSGNTQAATADVNTQGVLPGMVWQDRDVYLQGPIWAKIPHTDGHFHPSPLMGGFGLKHPPPQILIKNTPVPANPSTTFSAAKFASFITQYSTGQVSVEIEWELQKENSKRWNPEIQYTSNYNKSVNVDFTVDTNGVYSEPRPIGTRYLTRNL

SEQ ID NO: 4893 - DNA, 2211 bp, Adeno-associated virus; identical to SEQ ID NO: 4804

SEQ ID NO: 4894 - protein, 736 aa, Adeno-associated virus
MAADGYLPDWLEDTLSEGIRQWWKLKPGPPPPKPAERHKDDSRGLVLPGYKYLGPGNGLDKGEPVNAADAAALEHDKAYDQQLKAGDNPYLKYNHADAEFQERLKEDTSFGGNLGRAVFQAKKRLLEPLGLVEEAAKTAPGKKRPVEQSPQEPDSSAGIGKSGSQPAKKKLNFGQTGDTESVPDPQPIGEPPAAPSGVGSLTMASGGGAPVADNNEGADGVGSSSGNWHCDSQWLGDRVITTSTRTWALPTYNNHLYKQISNSTSGGSSNDNAYFGYSTPWGYFDFNRFHCHFSPRDWQRLINNNWGFRPKRLNFKLFNIQVKEVTDNNGVKTIANNLTSTVQVFTDSDYQLPYVLGSAHEGCLPPFPADVFMIPQYGYLTLNDGGQAVGRSSFYCLEYFPSQMLRTGNNFQFSYEFENVPFHSSYAHSQSLDRLMNPLIDQYLYYLSKTINGSGQNQQTLKFSVAGPSNMAVQGRNYIPGPSYRQQRVSTTVTQNNNSEFAWPGASSWALNGRNSLMNPGPAMASHKEGEDRFFPLSGSLIFGKQGTGRDNVDADKVMITNEEEIKTTNPVATESYGQVATNHQSAQAQAQTGWVQNQGILPGMVWQDRDVYLQGPIWAKIPHTDGNFHPSPLMGGFGMKHPPPQILIKNTPVPADPPTAFNKDKLNSFITQYSTGQVSVEIEWELQKENSKRWNPEIQYTSNYYKSNNVEFAVSTEGVYSEPRPIGTRYLTRNL

SEQ ID NO: 4895 - DNA, 2211 bp, Adeno-associated virus
atggctgccgatggttatcttccagattggctcgaggacactctctctgaaggaataagacagtggtggaagctcaaacctggcccaccaccaccaaagcccgcagagcggcataaggacgacagcaggggtcttgtgcttcctgggtacaagtacctcggacccggcaacggactcgacaagggggagccggtcaacgcagcagacgcggcggccctcgagcacgacaaggcctacgaccagcagctcaaggccggagacaacccgtacctcaagtacaaccacgccgacgccgagttccaggagcggctcaaagaagatacgtcttttgggggcaacctcgggcgagcagtcttccaggccaaaaagaggcttcttgaacctcttggtctggttgaggaagcggctaagacggctcctggaaagaagaggcctgtagagcagtctcctcaggaaccggactcctccgcgggtattggcaaatcgggttcacagcccgctaaaaagaaactcaatttcggtcagactggcgacacagagtcagtccccgaccctcaaccaatcggagaacctcccgcagccccctcaggtgtgggatctcttacaatggcttcaggtggtggcgcaccagtggcagacaataacgaaggtgccgatggagtgggtagttcctcgggaaattggcattgcgattcccaatggctgggggacagagtcatcaccaccagcacccgaacctgggccctgcccacctacaacaatcacctctacaagcaaatctccaacagcacatctggaggatcttcaaatgacaacgcctacttcggctacagcaccccctgggggtattttgacttcaacagattccactgccacttctcaccacgtgactggcagcgactcatcaacaacaactggggattccggcctaagcgactcaacttcaagctcttcaacattcaggtcaaagaggttacggacaacaatggagtcaagaccatcgccaataaccttaccagcacggtccaggtcttcacggactcagactatcagctcccgtacgtgctcgggtcggctcacgagggctgcctcccgccgttcccagcggacgttttcatgattcctcagtacgggtatctgacgcttaatgatgggagccaggccgtgggtcgttcgtccttttactgcctggaatatttcccgtcgcaaatgctaagaacgggtaacaacttccagttcagctacgagtttgagaacgtacctttccatagcagctacgctcacagccaaagcctggaccgactaatgaatccactcatcgaccaatacttgtactatctctcaaagactattaacggttctggacagaatcaacaaacgctaaaattcagcgtggccggacccagcaacatggctgtccagggaagaaactacatacctggacccagctaccgacaacaacgtgtctcaaccactgtgactcaaaacaacaacagcgaatttgcttggcctggagcttcttcttgggctctcaatggacgtaatagcttgatgaatcctggacctgctatggccagccacaaagaaggagaggaccgtttctttcctttgtctggatctttaatttttggcaaacaaggaactggaagagacaacgtggatgcggacaaagtcatgataaccaacgaagaagaaattaaaactactaacccggtagcaacggagtcctatggacaagtggccacaaaccaccagagtgcccaagcacaggcgcagaccggctgggttcaaaaccaaggaatacttccgggtatggtttggcaggacagagatgtgtacctgcaaggacccatttgggccaaaattcctcacacggacggcaactttcacccttctccgctaatgggagggtttggaatgaagcacccgcctcctcagatcctcatcaaaaacacacctgtacctgcggatcctccaacggctttcaataaggacaagctgaactctttcatcacccagtattctactggccaagtcagcgtggagattgagtgggagctgcagaaggaaaacagcaagcgctggaacccggagatccagtacacttccaactattacaagtctaataatgttgaatttgctgttaatactgaaggtgtatatagtgaaccccgccccattggcaccagatacctgactcgtaatctgtaa

SEQ ID NO: 4896 - protein, 736 aa, Adeno-associated virus
MAADGYLPDWLEDTLSEGIRQWWKLKPGPPPPKPAERHKDDSRGLVLPGYKYLGPGNGLDKGEPVNAADAAALEHDKAYDQQLKAGDNPYLKYNHADAEFQERLKEDTSFGGNLGRAVFQAKKRLLEPLGLVEEAAKTAPGKKRPVEQSPQEPDSSAGIGKSGSQPAKKKLNFGQTGDTESVPDPQPIGEPPAAPSGVGSLTMASGGGAPVADNNEGADGVGSSSGNWHCDSQWLGDRVITTSTRTWALPTYNNHLYKQISNSTSGGSSNDNAYFGYSTPWGYFDFNRFHCHFSPRDWQRLINNNWGFRPKRLNFKLFNIQVKEVTDNNGVKTIANNLTSTVQVFTDSDYQLPYVLGSAHEGCLPPFPADVFMIPQYGYLTLNDGSQAVGRSSFYCLEYFPSQMLRTGNNFQFSYEFENVPFHSSYAHSQSLDRLMNPLIDQYLYYLSKTINGSGQNQQTLKFSVAGPSNMAVQGRNYIPGPSYRQQRVSTTVTQNNNSEFAWPGASSWALNGRNSLMNPGPAMASHKEGEDRFFPLSGSLIFGKQGTGRDNVDADKVMITNEEEIKTTNPVATESYGQVATNHQSAQAQAQTGWVQNQGILPGMVWQDRDVYLQGPIWAKIPHTDGNFHPSPLMGGFGMKHPPPQILIKNTPVPADPPTAFNKDKLNSFITQYSTGQVSVEIEWELQKENSKRWNPEIQYTSNYYKSNNVEFAVNTEGVYSEPRPIGTRYLTRNL

SEQ ID NO: 4897 - DNA, 2208 bp, Adeno-associated virus
atggctgccgatggttatcttccagattggctcgaggacactctctctgaaggaataagacagcggtggaagctcaaacctggcccaccaccaccagagcccgcagagcggcataaggacgacagcaggggtcttgtgcttcctgggtacaagtacctcggacccttcaacggactcgacaagggagagccggtcaacgaggcagacgccgcggccctcgagcacgacaaagcctacgaccggcagctcgacagcggagacaacccgtacctcaagtacaaccacgccgacgcggagtttcaggagcgccttaaagaagatacgtcttttgggggcaacctcggacgagcagtcttccaggcgaaaaagagggtacttgaacctctgggcctggttgaggaacctgttaagacggctccgggaaaaaagaggccggtagagcactctcctgtggagccagactcctcctcgggaaccggaaaggcgggccagcagcctgcaagaaaaagattgaattttggtcagactggagacgcagactcagtacctgacccccagcctctcggacagccaccagcagccccctctggtctgggaactaatacgatggctacaggcagtggcgcaccaatggcagacaataacgagggcgccgacggagtgggtaattcctcgggaaattggcattgcgattccacatggatgggcgacagagtcatcaccaccagcacccgaacctgggccctgcccacctacaacaaccacctctacaaacaaatttccagccaatcaggagcctcgaacgacaatcactactttggctacagcaccccttgggggtattttgacttcaacagattccactgccacttttcaccacgtgactggcaaagactcatcaacaacaactggggattccgacccaagagactcaacttcaagctctttaacattcaagtcaaagaggtcacgcagaatgacggtacgacgacgattgccaataaccttaccggcacggttcaggtgtttactgactcggagtaccagctcccgtacgtcctcggctcggcgcatcaaggatgcctcccgccgttcccagcagacgtcttcatggtgccacagtatggatacctcaccctgaacaacgggagtcaggcagtaggacgctcttcattttactgcctggagtactttccttctcagatgctgcgtaccggaaacaactttaccttcagctacacttttgaggacgttcctttccacagcagctacgctcacagccagagtctgggccgtctcatgaatcctctcatcgaccagtacctgtattacttgagcagaacaaacactccaagtggaaccaccacgcagtcaaggcttcagttttctcaggccggagcgagtgacattcgggaccagtctaggaactggcttcctggaccctgttaccgccagcagcgagtatcaaagacatctgcggataacaacaacagtgaatactcgtggactggagctaccaagtaccacctcaatggcagagactctctggtgaatccgggcccggccatggcaagccacaaggacgatgaagaaaagttttttcctcagagcggggttctcatctttgggaagcaaggctcagagaaaacaaatgtggacattgaaaaggtcatgattacagacgaagaggaaatcaggacaaccaatcccgtggctacggagcagtatggttctgtatctaccaacctccagagaggcaacagacaagcagctaccgcagatgtcaacacacaaggcgttcttccaggcatggtctggcaggacagagatgtgtaccttcaggggcccatctgggcaaagattccacacacggacggacattttcacccctctcccctcatgggtggattcggacttaaacaccctcctccacagattctcatcaagaacaccccggtacctgcgaatccttcgaccaccttcagtgcggcaaagtttgcttccttcatcacacagtactccacgggacaggtcagcgtggagatcgagtgggagctgcagaaggaaaacagcaaacgctggaatcccgaaattcagtacacttccaactacaacaagtctgttaatgtggactttactgtggacactaatggcgtgtattcagagcctcgccccattggcaccagatacctgactcgtaatctgtaa

SEQ ID NO: 4898 - protein, 735 aa, Adeno-associated virus
MAADGYLPDWLEDTLSEGIRQRWKLKPGPPPPEPAERHKDDSRGLVLPGYKYLGPFNGLDKGEPVNEADAAALEHDKAYDRQLDSGDNPYLKYNHADAEFQERLKEDTSFGGNLGRAVFQAKKRVLEPLGLVEEPVKTAPGKKRPVEHSPVEPDSSSGTGKAGQQPARKRLNFGQTGDADSVPDPQPLGQPPAAPSGLGTNTMATGSGAPMADNNEGADGVGNSSGNWHCDSTWMGDRVITTSTRTWALPTYNNHLYKQISSQSGASNDNHYFGYSTPWGYFDFNRFHCHFSPRDWQRLINNNWGFRPKRLNFKLFNIQVKEVTQNDGTTTIANNLTGTVQVFTDSEYQLPYVLGSAHQGCLPPFPADVFMVPQYGYLTLNNGSQAVGRSSFYCLEYFPSQMLRTGNNFTFSYTFEDVPFHSSYAHSQSLGRLMNPLIDQYLYYLSRTNTPSGTTTQSRLQFSQAGASDIRDQSRNWLPGPCYRQQRVSKTSADNNNSEYSWTGATKYHLNGRDSLVNPGPAMASHKDDEEKFFPQSGVLIFGKQGSEKTNVDIEKVMITDEEEIRTTNPVATEQYGSVSTNLQRGNRQAATADVNTQGVLPGMVWQDRDVYLQGPIWAKIPHTDGHFHPSPLMGGFGLKHPPPQILIKNTPVPANPSTTFSAAKFASFITQYSTGQVSVEIEWELQKENSKRWNPEIQYTSNYNKSVNVDFTVDTNGVYSEPRPIGTRYLTRNL

SEQ ID NO: 4899 - DNA, 2208 bp, Adeno-associated virus
atggctgccgatggttatcttccagattggctcgaggacactctctctgaaggaataagacagcggtggaagctcaaacctggcccaccaccaccagagcccgcagagcggcataaggacgacagcaggggtcttgtgcttcctgggtacaagtacctcggacccttcaacggactcgacaagggagagccggtcaacgaggcagacgccgcggccctcgagcacgacaaagcctacgaccggcagctcgacagcggagacaacccgtacctcaagtacaaccacgccgacgcggagtttcaggagcgccttaaagaagatacgtcctttgggggcaacctcggacgagcagtcttccaggcgaaaaagagggtacttgaacctctgggcctggttgaggaacctgttaagacggctccgggaaaaaagaggccggtagagcactctcctgtggagccagactcctcctcgggaaccggaaaggcgggccagcagcctgcaagaaaaagattgaattttggtcagactggagacgcagactcagtacctgacccccagcctctcggacagccaccagcagccccctctggtctgggaactaatacgatggctacaggcagtggcgcaccaatggcagacaataacgagggcgccgacggagtgggtaattcctcgggaaattggcattgcgattccacatggatgggcgacagagtcatcaccaccagcacccgaacctgggccctgcccacctacaacaaccacctctacaaacaaatttccagccaatcaggagcctcgaacgacaatcactactttggctacagcaccccttgggggtattttgacttcaacagattccactgccacttttcaccacgtgactggcaaagactcatcaacaacaactggggattccgacccaagagactcaacttcaagctctttaacattcaagtcaaagaggtcacgcagaatgacggtacgacgacgattgccaataaccttaccagcacggttcaggtgtttactgactcggagtaccagctcccgtacgtcctcggctcggcgcatcaaggatgcctcccgccgttcccagcagacgtcttcatggtgccacagtatggatacctcaccctgaacaacgagagtcaggcagtaggacgctcttcattttactgcctggagtactttccttctcagatgctgcgtaccggaaacaactttaccttcagctacacttttgaggacgttcctttccacagcagctacgctcacagccagagtctgggccgtctcatgaatcctctcatcgaccagtacctgtattacttgagcagaacaaacactccaagtggaaccaccacgcagtcaaggcttcagttttctcaggccggagcgagtgacattcgggaccagtctaggaactggcttcctggaccctgttaccgccagcagcgagtatcaaagacatctgcggataacaacaacagtgaatactcgtggactggagctaccaagtaccacctcaatggcagagactctctggtgaatccgggcccggccatggcaagccacaaggacgatgaagaaaagttttttcctcagagcggggttctcatctttgggaagcaaggctcagagaaaacaaatgtggacattgaaaaggtcatgattacagacgaagaggaaatcaggacaaccaatcccgtggctacggagcagtatggttctgtatctaccaacctccagagaggcaacagacaagcagctaccgcagatgtcaacacacaaggcgttcttccaggcatggtctggcaggacagagatgtgtaccttcaggggcccatctgggcaaagattccacacacggacggacattttcacccctctcccctcatgggtggattcggacttaaacaccctcctccacagattctcatcaagaacaccccggtacctgcgaatccttcgaccaccttcagtgcggcaaagtttgcttccttcatcacacagtactccacgggacaggtcagcgtggagatcgagtgggagctgcagaaggaaaacagcaaacgctggaatcccgaaattcagtacacttccaactacaacaagtctgttaatgtggactttactgtggacactaatggcgtgtattcagagcctcgccccattggcaccagatacctgactcgtaatctgtaa

SEQ ID NO: 4900 - protein, 735 aa, Adeno-associated virus
MAADGYLPDWLEDTLSEGIRQRWKLKPGPPPPEPAERHKDDSRGLVLPGYKYLGPFNGLDKGEPVNEADAAALEHDKAYDRQLDSGDNPYLKYNHADAEFQERLKEDTSFGGNLGRAVFQAKKRVLEPLGLVEEPVKTAPGKKRPVEHSPVEPDSSSGTGKAGQQPARKRLNFGQTGDADSVPDPQPLGQPPAAPSGLGTNTMATGSGAPMADNNEGADGVGNSSGNWHCDSTWMGDRVITTSTRTWALPTYNNHLYKQISSQSGASNDNHYFGYSTPWGYFDFNRFHCHFSPRDWQRLINNNWGFRPKRLNFKLFNIQVKEVTQNDGTTTIANNLTSTVQVFTDSEYQLPYVLGSAHQGCLPPFPADVFMVPQYGYLTLNNESQAVGRSSFYCLEYFPSQMLRTGNNFTFSYTFEDVPFHSSYAHSQSLGRLMNPLIDQYLYYLSRTNTPSGTTTQSRLQFSQAGASDIRDQSRNWLPGPCYRQQRVSKTSADNNNSEYSWTGATKYHLNGRDSLVNPGPAMASHKDDEEKFFPQSGVLIFGKQGSEKTNVDIEKVMITDEEEIRTTNPVATEQYGSVSTNLQRGNRQAATADVNTQGVLPGMVWQDRDVYLQGPIWAKIPHTDGHFHPSPLMGGFGLKHPPPQILIKNTPVPANPSTTFSAAKFASFITQYSTGQVSVEIEWELQKENSKRWNPEIQYTSNYNKSVNVDFTVDTNGVYSEPRPIGTRYLTRNL

SEQ ID NO: 4901 - DNA, 2208 bp, Adeno-associated virus
atggctgccgatggttatcttccagattggctcgaggacactctctctgaaggaataagacagcggtggaagctcaaacctggcccaccaccaccagagcccgcagagcggcataaggacgacagcaggggtcttgtgcttcctgggtacaagtacctcggacccttcaacggactcgacaagggagagccggtcaacgaggcagacgccgcggccctcgagcacgacaaagcctacgaccggcagctcgacagcggagacaacccgtacctcaagtacaaccacgccgacgcggagtttcaggagcgccttaaagaagatacgtcttttgggggcaacctcggacgagcagtcttccaggcgaaaaagagggtacttgaacctctgggcctggttgaggaacctgttaagacggctccgggaaaaaagaggccggtagagcactctcctgtggagccagactcctcctcgggaaccggaaaggcgggccagcagcctgcaagaaaaagattgaattttggtcagactggagacgcagactcagtacctgacccccagcctctcggacagccaccagcagccccctctggtctgggaactaatacgatggctacaggcagtggcgcaccaatggcagacaataacgagggcgccgacggagtgggtaattcctcgggaaattggcattgcgattccacatggatgggcgacagagtcatcaccaccagcacccgaacctgggccctgcccacctacaacaaccacctctacaaacaaatttccagccaatcaggagcctcgaacgacaatcactactttggctacagcaccccttgggggtattttgacttcaacagattccactgccacttttcaccacgtgactggcaaagactcatcaacaacaactggggattccgacccaagagactcaacttcaagctctttaacattcaagtcaaagaggtcacgcagaatgacggtacgacgacgattgccaataaccttaccagcacggttcaggtgtttactgactcggagtaccagctcccgtacgtcctcggctcggcgcatcaaggatgcctcccgccgttcccagcagacgtcttcatggtaccacagtatggatacctcaccctgaacaacgggagtcaggcagtaggacgctcttcattttactgcctggagtactttccttctcagatgctgcgtaccggaaacaactttaccttcagctacacttttgaggacgttcctttccacagcagctacgctcacagccagagtctgggccgtctcatgaatcctctcatcgaccagtacctgtattacttgagcagaacaaacactccaagtggaaccaccacgcagtcaaggcttcagttttctcaggccggagcgagtgacattcgggaccagtctaggaactggcttcctggaccctgttaccgccagcagcgagtatcaaagacatctgcggataacaacaacagtgaatactcgtggactggagctaccaagtaccacctcaatggcagagactctctggtgaatccgggcccggccatggcaagccacaaggacgatgaagaaaagttttttcctcagagcggggttctcatctttgggaagcaaggctcagagaaaacaaatgtggacattgaaaaggtcatgattacagacgaagaggaaatcaggacaaccaatcccgtggctacggagcagtatggttctgtatctaccaacctccagagaggcaacagacaagcagctaccgcagatgtcaacacacaaggcgttcttccaggcatggtctggcaggacagagatgtgtaccttcaggggcccatctgggcaaagattccacacacggacggacattttcacccctctcccctcatgggtggattcggacttaaacaccctcctccacagattctcatcaagaacaccccggtacctgcgaatccttcgaccaccttcagtgcggcaaagtttgcttccttcatcacacagtactccacgggacaggtcagcgtggagatcgagtgggagctgcagaaggaaaacagcaaacgctggaatcccgaaattcagtacacttccaactacaacaagtctgttaatgtggactttactgtggacactaatggcgtgtattcagagcctcgccccattggcaccagatacctgactcgtaatctgtaa

SEQ ID NO: 4902 - protein, 735 aa, Adeno-associated virus
MAADGYLPDWLEDTLSEGIRQRWKLKPGPPPPEPAERHKDDSRGLVLPGYKYLGPFNGLDKGEPVNEADAAALEHDKAYDRQLDSGDNPYLKYNHADAEFQERLKEDTSFGGNLGRAVFQAKKRVLEPLGLVEEPVKTAPGKKRPVEHSPVEPDSSSGTGKAGQQPARKRLNFGQTGDADSVPDPQPLGQPPAAPSGLGTNTMATGSGAPMADNNEGADGVGNSSGNWHCDSTWMGDRVITTSTRTWALPTYNNHLYKQISSQSGASNDNHYFGYSTPWGYFDFNRFHCHFSPRDWQRLINNNWGFRPKRLNFKLFNIQVKEVTQNDGTTTIANNLTSTVQVFTDSEYQLPYVLGSAHQGCLPPFPADVFMVPQYGYLTLNNGSQAVGRSSFYCLEYFPSQMLRTGNNFTFSYTFEDVPFHSSYAHSQSLGRLMNPLIDQYLYYLSRTNTPSGTTTQSRLQFSQAGASDIRDQSRNWLPGPCYRQQRVSKTSADNNNSEYSWTGATKYHLNGRDSLVNPGPAMASHKDDEEKFFPQSGVLIFGKQGSEKTNVDIEKVMITDEEEIRTTNPVATEQYGSVSTNLQRGNRQAATADVNTQGVLPGMVWQDRDVYLQGPIWAKIPHTDGHFHPSPLMGGFGLKHPPPQILIKNTPVPANPSTTFSAAKFASFITQYSTGQVSVEIEWELQKENSKRWNPEIQYTSNYNKSVNVDFTVDTNGVYSEPRPIGTRYLTRNL

SEQ ID NO: 4903 - DNA, 2208 bp, Adeno-associated virus
atggctgccgatggttatcttccagattggctcgaggacactctctctgaaggaataagacagcggtggaagctcaaacctggcccaccaccaccagagcccgcagagcggcataaggacgacagcaggggtcttgtgcttcctgggtacaagtacctcggacccttcaacggactcgacaagggagagccggtcaacgaggcagacgccgcggccctcgagcacgacaaagcctacgaccggcagctcgacagcggagacaacccgtacctcaagtacaaccacgccgacgcggagtttcaggagcgccttaaagaagatacgtcttttgggggcaacctcggacgagcagtcttccaggcgaaaaagagggtactcgaacctctgggcctggttgaggaacctgttaagacggctccgggaaaaaagaggccggtagagcactctcctgtggagccagactcctcctcgggaaccggaaaggcgggccagcagcctgcaagaaaaagattgaattttggtcagactggagacgcagactcagtacctgacccccagcctctcggacagccaccagcagccccctctggtctgggaactaatacgatggctacaggcagtggcgcaccaatggcagacaataacgagggcgccgacggagtgggtaattcctcgggaaattggcattgcgattccacatggatgggcgacagagtcatcaccaccagcacccgaacctgggccctgcccacctacaacaaccacctctacaaacaaatttccagccaatcaggagcctcgaacgacaatcactactttggctacagcaccccttgggggtattttgacttcaacagattccactgccacttttcaccacgtgactggcaaagactcatcaacaacaactggggattccgacccaagagactcaacttcaagctctttaacattcaagtcaaagaggtcacgcagaatgacggtacgacgacgattgccaataaccttaccagcacggttcaggtgtttactgactcggagtaccagctcccgtacgtcctcggctcggcgcatcaaggatgcctcccgccgttcccagcagacgtcttcatggtgccacagtatggatacctcaccctgaacaacgggagtcaggcagcaggacgctcttcattttactgcctggagtactttccttctcagatgctgcgtaccggaaacaactttaccttcagctacacttttgaggacgttcctttccacagcagctacgctcacagccagagtctgggccgtctcatgaatcctctcatcgaccagtacctgtattacttgagcagaacaaacactccaagtggaaccaccacgcagtcaaggcttcagttttctcaggccggagcgagtgacattcgggaccagtctaggaactggcttcctggaccctgttaccgccagcagcgagtatcaaagacatctgcggataacaacaacagtgaatactcgtggactggagctaccaagtaccacctcaatggcagagactctctggtgaatccgggcccggccatggcaagccacaaggacgatgaagaaaagttttttcctcagagcggggttctcatctttgggaagcaaggctcagagaaaacaaatgtggacattgaaaaggtcatgattacagacgaagaggaaatcaggacaaccaatcccgtggctacggagcagtatggttctgtatctaccaacctccagagaggcaacagacaagcagctaccgcagatgtcaacacacaaggcgttcttccaggcatggtctggcaggacagagatgtgtaccttcaggggcccatctgggcaaagattccacacacggacggacattttcacccctctcccctcatgggtggattcggacttaaacaccctcctccacagattctcatcaagaacaccccggtacctgcgaatccttcgaccaccttcagtgcggcaaagtttgcttccttcatcacacagtactccacgggacaggtcagcgtggagatcgagtgggagctgcagaaggaaaacagcaaacgctggaatcccgaaattcagtacacttccaactacaacaagtccgttaatgtggactttactgtggacactaatggcgtgtattcagagcctcgccccattggcaccagatacctgactcgtaatctgtaa

SEQ ID NO: 4904 - protein, 735 aa, Adeno-associated virus
MAADGYLPDWLEDTLSEGIRQRWKLKPGPPPPEPAERHKDDSRGLVLPGYKYLGPFNGLDKGEPVNEADAAALEHDKAYDRQLDSGDNPYLKYNHADAEFQERLKEDTSFGGNLGRAVFQAKKRVLEPLGLVEEPVKTAPGKKRPVEHSPVEPDSSSGTGKAGQQPARKRLNFGQTGDADSVPDPQPLGQPPAAPSGLGTNTMATGSGAPMADNNEGADGVGNSSGNWHCDSTWMGDRVITTSTRTWALPTYNNHLYKQISSQSGASNDNHYFGYSTPWGYFDFNRFHCHFSPRDWQRLINNNWGFRPKRLNFKLFNIQVKEVTQNDGTTTIANNLTSTVQVFTDSEYQLPYVLGSAHQGCLPPFPADVFMVPQYGYLTLNNGSQAAGRSSFYCLEYFPSQMLRTGNNFTFSYTFEDVPFHSSYAHSQSLGRLMNPLIDQYLYYLSRTNTPSGTTTQSRLQFSQAGASDIRDQSRNWLPGPCYRQQRVSKTSADNNNSEYSWTGATKYHLNGRDSLVNPGPAMASHKDDEEKFFPQSGVLIFGKQGSEKTNVDIEKVMITDEEEIRTTNPVATEQYGSVSTNLQRGNRQAATADVNTQGVLPGMVWQDRDVYLQGPIWAKIPHTDGHFHPSPLMGGFGLKHPPPQILIKNTPVPANPSTTFSAAKFASFITQYSTGQVSVEIEWELQKENSKRWNPEIQYTSNYNKSVNVDFTVDTNGVYSEPRPIGTRYLTRNL

SEQ ID NO: 4905 - protein, 738 aa, Adeno-associated virus; identical to SEQ ID NO: 4797

SEQ ID NO: 4906 - DNA, 2217 bp, Adeno-associated virus
atggctgctgacggttatcttccagattggctcgaggacaacctctctgagggcattcgcgagtggtgggacctgaaacctggagcccccaagcccaaggccaaccagcagaagcaggacgacggccggggtctggtgcttcctggctacaagtacctcggacccttcaacggactcgacaagggggagcccgtcaacgcggcggacgcagcggccctcgagcacgacaaggcctacgaccagcagctcaaagcgggtgacaatccgtacctgcggtataaccacgccgacgccgagtttcaggagcgtctgcaagaagatacgtcttttgggggcaacctcgggcgagcagtcttccaggccaagaagcgggttctcgaacctctcggtctggttgaggaagctgctaagacggctcctggaaagaagagaccggtagaaccgtcacctcagcgttcccccgactcctccacgggcatcggcaagaaaggccagcagcccgctaaaaagagactgaactttggtcagactggcgactcagagtcagtccccgaccctcaaccaatcggagaaccaccagcaggcccctctggtctgggatctggtacaatggctgcaggcggtggcgctccaatggcagacaataacgaaggcgccgacggagtgggtagttcctcaggaaattggcattgcgattccacatggctgggcgacagagtcatcaccaccagcacccgaacctgggccctgcccacctacaacaaccacctctacaagcaaatatccaatgggacatcgggaggaagcaccaacgacaacacctacttcggctacagcaccccctgggggtattttgacttcaacagattccactgccacttctcaccacgtgactggcagcgactcatcaacaacaactggggattccggccaaaaagactcagcttcaagctcttcaacatccaggtcaaggaggtcacgcagaatgaaggcaccaagaccatcgccaataaccttaccagcacgattcaggtatttacggactcggaataccagctgccgtacgtcctcggctccgcgcaccagggctgcctgcctccgttcccggcggacgtcttcatgattccccagtacggctaccttacactgaacaatggaagtcaagccgtaggccgttcctccttctactgcctggaatattttccatctcaaatgctgcgaactggaaacaattttgaattcagctacaccttcgaggacgtgcctttccacagcagctacgcacacagccagagcttggaccgactgatgaatcctctcatcgaccagtacctgtactacttatccagaactcagtccacaggaggaactcaaggtacccagcaattgttattttctcaagctgggcctgcaaacatgtcggctcaggctaagaactggctacctggaccttgctaccggcagcagcgagtctctacgacactgtcgcaaaacaacaacagcaactttgcttggactggtgccaccaaatatcacctgaacggaagagactctttggtaaatcccggtgtcgccatggcaacccacaaggacgacgaggaacgcttcttcccgtcgagtggagtcctgatgttcggaaaacagggtgctggaagagacaatgtggactacagcagcgttatgctaaccagcgaagaagaaattaaaaccactaaccccgtagccacagaacaatacggtgtggtggctgacaacttgcagcaaaccaatacagggcctattgtgggaaatgtcaacagccaaggagccttacctggcatggtctggcagaaccgagacgtgtacctgcagggtcccatctgggccaagattcctcacacggacggcaacttccacccttcaccgctaatgggaggatttggactgaagcacccacctcctcagatcctgatcaagaacacgccggtacctgcggatcctccaacaacgttcagccaggcgaaattggcttccttcattacgcagtacagcaccggacaggtcagcgtggaaatcgagtgggagctgcagaaggagaacagcaaacgctggaacccagagattcagtacacttcaaactactacaaatctacaaatgtggactttgctgtcaatacagagggaacttattctgagcctcgccccattggtactcgttacctcacccgtaatctgtaa

SEQ ID NO: 4907 - protein, 738 aa, Adeno-associated virus
MAADGYLPDWLEDNLSEGIREWWDLKPGAPKPKANQQKQDDGRGLVLPGYKYLGPFNGLDKGEPVNAADAAALEHDKAYDQQLKAGDNPYLRYNHADAEFQERLQEDTSFGGNLGRAVFQAKKRVLEPLGLVEEAAKTAPGKKRPVEPSPQRSPDSSTGIGKKGQQPAKKRLNFGQTGDSESVPDPQPIGEPPAGPSGLGSGTMAAGGGAPMADNNEGADGVGSSSGNWHCDSTWLGDRVITTSTRTWALPTYNNHLYKQISNGTSGGSTNDNTYFGYSTPWGYFDFNRFHCHFSPRDWQRLINNNWGFRPKRLSFKLFNIQVKEVTQNEGTKTIANNLTSTIQVFTDSEYQLPYVLGSAHQGCLPPFPADVFMIPQYGYLTLNNGSQAVGRSSFYCLEYFPSQMLRTGNNFEFSYTFEDVPFHSSYAHSQSLDRLMNPLIDQYLYYLSRTQSTGGTQGTQQLLFSQAGPANMSAQAKNWLPGPCYRQQRVSTTLSQNNNSNFAWTGATKYHLNGRDSLVNPGVAMATHKDDEERFFPSSGVLMFGKQGAGRDNVDYSSVMLTSEEEIKTTNPVATEQYGVVADNLQQTNTGPIVGNVNSQGALPGMVWQNRDVYLQGPIWAKIPHTDGNCHPSPLMGGFGLKHPPPQILIKNTPVPADPPTTFSQAKLASFITQYSTGQVSVEIEWELQKENSKRWNPEIQYTSNYYKSTNVDFAVNTEGTYSEPRPIGTRYLTRNL

SEQ ID NO: 4908 - protein, 738 aa, Adeno-associated virus
MAADGYLPDWLEDNLSEGIREWWDLKPGAPKPKANQQKQDDGRGLVLPGYKYLGPFNGLDKGEPVNAADAAALEHDKAYDQQLKAGDNPYLRYNHADAEFQERLQEDTSFGGNLGRAVFQAKKRVLEPLGLVEEGAKTAPGKKRPVEPSPQRSPDSSTGIGKKGQQPARKRLNFGRTGDSESVPDPQPIGEPPAAPSSVGSGTMAAGGGAPMADNNEGADGVGSSSGNWHCDSTWLGDRVITTSTRTWALPTYNNHLYKQISNGTSGGSTNDNTYFGYSTPWGYLDFNRFHCHFSPRDWQRLINNNWGFRPKRLSFKLFNIQVKEVTQNEGTKTIANNLASTIQVFTDSEYQPPYVLGSAHQGCLPPFPADVFMIPQYGYLTLNNGSQAVGRSSFYCLEYFPSQMLRTGNNFSFSYTFEDVPFHSSYAHSQSLDRLMNPLIDQYLYYLSRTQSTGGTAGTQQLLFSRAGPSNMSAQARNWLPGPCYRQQRVSTTLSQNNNSNFAWTGATKYHLNGRDSLVNPGVAMATNKDDEDRFFPSSGILMFGKQGAGKDNVDYSNVMLTSEEEIKTTNPVATEQYGVVADNLQQQNTAPTVGAVNSQGALPGMVWQNRDVYLQGPIWAKIPHTDGNFHPSPLMGGFGLKHPPPQILIKNTPVPADPPTAFNQAKLNSFIAQYSTGQVSVEIEWELQKENSKRWNPEIQYTSNYYKSTNADFAVNTEGVYSEPRPIGTRYLTRNL

SEQ ID NO: 4909 - DNA, 2217 bp, Adeno-associated virus
atggctgccgatggttatcttccagattggctcgaggacaacctctctgagggcattcgcgagtggtgggacctgaaacctggagccccgaaacccaaagccaaccagcaaaagcaggacgacggccggggtctggtgcttcctggctacaagtacctcggacccttcaacggactcgacaagggggagcccgtcaacgcggcggacgcagcggccctcgagcacgacaaggcctacgaccagcagctcaaagcgggtgacaatccgtacctgcggtataatcacgccgacgccgagtttcaggagcgtctgcaagaagatacgtcttttgggggcaacctcgggcgagcagtcttccaggccaagaagcgggttctcgaacctctcggtctggttgaggaaggcgctaagacggctcctggaaagaagagaccggtagagccgtcaccacagcgttcccccgactcctccacgggcatcggcaagaaaggccagcagcccgccagaaagagactcaatttcggtcggactggcgactcagagtcagtccccgaccctcaacctatcggagaacctccagcagcgccctctagtgtgggatctggtacaatggctgcaggcggtggcgcaccaatggcagacaataacgaaggtgccgacggagtgggtagttcctcgggaaattggcattgcgattccacatggctgggcgacagagttatcaccaccagcacccgaacctgggccctgcccacctacaacaaccacctctacaagcaaatctccaacgggacctcgggaggcagcaccaacgacaacacctactttggctacagcaccccctgggggtatcttgactttaacagattccactgccacttctcaccacgtgactggcagcgactcatcaacaacaactggggattccggcccaagagactcagcttcaagctcttcaacatccaggtcaaagaggtcacgcagaatgaaggcaccaagaccatcgccaataacctcgccagcaccatccaggtgtttacggactcggaataccagccgccgtacgtcctcggctctgcccaccagggctgcctgcctccgttcccggcggacgtcttcatgattcctcagtacggctacctgactctcaacaacggtagtcaggccgtgggacgttcctccttctactgcctggagtacttcccctctcagatgctgagaacgggcaacaacttttccttcagctacactttcgaggacgtgcctttccacagcagctacgcgcacagccagagtttggacaggctgatgaatcctctcatcgaccagtacctgtactacctgtcaagaacccagtctacgggaggcacagcgggaacccagcagttgctgttttctcgggccgggcctagcaacatgtcggctcaggccagaaactggctgcctggaccctgctacagacagcagcgcgtctccacgacactgtcgcaaaacaacaacagcaactttgcctggactggtgccaccaagtatcatctgaacggcagagactctctggtgaatccgggcgtcgccatggcaaccaacaaggacgacgaggaccgcttcttcccatccagcggcatcctcatgtttggcaagcagggagctggaaaagacaacgtggactatagcaacgtgatgctaaccagcgaggaagaaatcaagaccaccaaccccgtggccacagaacagtatggcgtggtggctgataacctacagcagcaaaacaccgctcctactgtgggggccgtcaacagccagggagccttacctggcatggtctggcagaaccgggacgtgtacctgcagggtcctatttgggccaagattcctcacacagatggcaactttcacccgtctcctttaatgggcggctttggacttaaacatccgcctcctcagatcctcatcaaaaacactcctgttcctgcggatcctccaacagcgttcaaccaggccaagctgaattctttcatcgcgcagtacagcaccggacaagtcagcgtggagatcgagtgggagctgcagaaggagaacagcaagcgctggaacccagagattcagtatacttccaactactacaaatctacaaatgcggactttgctgttaatactgagggtgtttactctgagcctcgccccattggcactcgttacctcacccgtaatctgtaa

SEQ ID NO: 4910 - DNA, 2208 bp, Adeno-associated virus
atggctgccgatggttatcttccagattggctcgaggacactctctctgaaggaataagacagtggtggaagctcaaacctggcccaccaccaccaaagcccgcagagcggcataaggacgacagcaggggtcttgtgcttcctgggtacaagtacctcggacccttcaacggactcgacaagggggagccggtcaacgaggcagacgccgcggccctcgagcacgacaaggcctacgaccggcagctcgacagcggagacaacccgtacctcaagtacaaccacgccgacgcagagtttcaggagcgccttaaagaagatacgtcttttgggggcaacctcggacgagcagtcttccaggcgaaaaagagggttcttgaacctctgggcctggttgaggagcctgttaagacggctccgggaaaaaagaggccggtagagcactctcctgtggagccagactcctcctcgggaaccggaaaagcgggccagcagcctgcaagaaaaagattaaattttggtcagactggagacgcagactccgtacctgacccccagcctctcggacagccaccagcagccccctctggtctgggatctactacaatggctacaggcagtggcgcaccaatggcagacaataacgagggtgccgatggagtgggtaattcctcaggaaattggcattgcgattcccaatggctgggcgacagagtcatcaccaccagcacccgaacctgggccctgcccacatacaacaaccacctctacaagcaaatctccagccaatcaggagccagcaacgacaaccactactttggctacagcaccccctgggggtattttgacttcaacagattccactgccacttttcaccacgtgactggcaaagactcgtcaacaacaaccggggattccggcccaaaagactcaacttcaagctctttaatattcaagtcaaagaggtcacgcagaatgacggtacgacgacgattgccaataaccttaccagcacggttcaggtgtttactgactcggagtaccagctcccgtacgtcctgggctcggcgcatcaaggatgcctcccgccgtttccagcggacgtcttcatggtcccacagtatggatacctcaccctgaacaacgggagtcaggcggtaggacgctcttccttttactgcctggagtactttccttctcagatgctgcgtactggaaacaactttcagttcagctacacttttgaagacgtgcctttccacagcagctacgctcacagccagagtctggatcggctgatgaatcctctgatcgaccagtacctgtattatctgaacaagacacaaacaaatagtggaactcttcagcagtctcggctactgtttagccaagctggaccaaccaacatgtctcttcaagctaaaaactggctgcctggaccttgctacagacagcagcgtctgtcaaaacaggcaaacgacaacaacaacagcaactttccctggactgcagctacaaagtatcatctaaatggccgggactcgttggttaatccaggaccagctatggccagtcacaaggatgacgaagaaaagtttttccccatgcatggaaccctgatatttggtaaacaaggaacaaatgccaacgacgcggatttggaaaatgtcatgattacagatgaagaagaaatcagggccaccaatcccgtggctacggagcagtacgggactgtgtcaaataatttgcaaaactcaaacactggtccaactactggaactgtcaatcaccaaggagcgttacctggtatggtgtggcaggatcgagacgtgtacctgcagggacccatttgggccaagattcctcacaccgatggacactttcatccttctccactgatgggaggttttggactcaaacacccgcctcctcagatcatgatcaaaaacactcccgttccagccaatcctcccacaaacttcagttctgccaagtttgcttctttcatcacacagtattccacgggacaggtcagcgtggagatcgagtgggagctgcagaaggagaacagcaaacgctggaatcccgaaattcagtacacttccaactacaacaagtctgttaatgtggactttactgtggacactaatggtgtgtattcagagcctcgccccattggcaccagatacctgactcgtaatctgtaa

SEQ ID NO: 4911 - protein, 735 aa, Adeno-associated virus
MAADGYLPDWLEDTLSEGIRQWWKLKPGPPPPKPAERHKDDSRGLVLPGYKYLGPFNGLDKGEPVNEADAAALEHDKAYDRQLDSGDNPYLKYNHADAEFQERLKEDTSFGGNLGRAVFQAKKRVLEPLGLVEEPVKTAPGKKRPVEHSPVEPDSSSGTGKAGQQPARKRLNFGQTGDADSVPDPQPLGQPPAAPSGLGSTTMATGSGAPMADNNEGADGVGNSSGNWHCDSQWLGDRVITTSTRTWALPTYNNHLYKQISSQSGASNDNHYFGYSTPWGYFDFNRFHCHFSPRDWQRLVNNNRGFRPKRLNFKLFNIQVKEVTQNDGTTTIANNLTSTVQVFTDSEYQLPYVLGSAHQGCLPPFPADVFMVPQYGYLTLNNGSQAVGRSSFYCLEYFPSQMLRTGNNFQFSYTFEDVPFHSSYAHSQSLDRLMNPLIDQYLYYLNKTQTNSGTLQQSRLLFSQAGPTNMSLQAKNWLPGPCYRQQRLSKQANDNNNSNFPWTAATKYHLNGRDSLVNPGPAMASHKDDEEKFFPMHGTLIFGKQGTNANDADLENVMITDEEEIRATNPVATEQYGTVSNNLQNSNTGPTTGTVNHQGALPGMVWQDRDVYLQGPIWAKIPHTDGHFHPSPLMGGFGLKHPPPQIMIKNTPVPANPPTNFSSAKFASFITQYSTGQVSVEIEWELQKENSKRWNPEIQYTSNYNKSVNVDFTVDTNGVYSEPRPIGTRYLTRNL

SEQ ID NO: 4912 - protein, 738 aa, Adeno-associated virus
MAADGYLPDWLEDNLSEGIREWWDLKPGAPKPKANQQKQDDGRGLVLPGYKYLGPFNGLDKGEPVNAADAAALEHDKAYDQQLKAGDNPYLRYNHADAEFQERLQEDTSFGGNLGRAVFQAKKRVLEPLGLVEEAAKTAPGKKRPVEPSPQRSPDSSTGIGKKGQQPAKKRLSFGQTGDSESVPDPQPIGEPPAGPSGLGSGTMAAGGGAPMADNNEGADGVGSSSGNWHCDSTWLGDRVITTSTRTWALPTYNNHLYKQISNGTSGGSTNDNTYFGYSTPWGYFDFNRFHCHFSPRDWQRLINNNWGFRPKRLSFKLFNIQVKEVTQNEGTKTIANNLTSTIQVFTDSEYQLPYVLGSAHQGCLPPFPADVFMIPQYGYLTLNNGSQAVGRSSFYCLEYFPSQMLRTGNNSEFSYTFEDVPFHSSYAHSQSLDRLMNPLIDQYLYYLSRTQSTGGTQGTQQLLFSQAGPANMSAQAKNWLPGPCYRQQRVSTTLSQNNNSNFAWTGATKYHLNGRDSLVNPGVAMATHKDDEERFFPSSGVLMFGKQGAGRDNVDYSSVMLTSEEEIKTTNPVATEQYGVVADNLQQTNTGPIVGNVNSQGALPGMVWQNRDVYLQGPIWAKIPHTDGNFHPSPLMGGFGLKHPPPQILIKNTPVPADPPTTFSQAKLASFITQYSTGQVSVEIEWELQKENSKRWNPEIQYTSNYYKSTNVDFAVNTEGTYSEPRPIGTRYLTRNL

SEQ ID NO: 4913 - DNA, 2217 bp, Adeno-associated virus
atggctgctgacggttatcttccagattggctcgaggacaacctctctgagggcattcgcgagtggtgggacctgaaacctggagcccccaagcccaaggccaaccagcagaagcaggacgacggccggggtctggtgcttcctggctacaagtacctcggacccttcaacggactcgacaagggggagcccgtcaacgcggcggacgcagcggccctcgagcacgacaaggcctacgaccagcagctcaaagcgggtgacaatccgtacctgcggtataaccacgccgacgccgagtttcaggagcgtctgcaagaagatacgtcttttgggggcaacctcgggcgagcagtcttccaggccaagaagcgggttctcgaacctctcggtctggttgaggaagctgctaagacggctcctggaaagaagagaccggtagaaccgtcacctcagcgttcccccgactcctccacgggcatcggcaagaaaggccagcagcccgctaaaaagagactgagctttggtcagactggcgactcagagtcagtccccgaccctcaaccaatcggagaaccaccagcaggcccctctggtctgggatctggtacaatggctgcaggcggtggcgctccaatggcagacaataacgaaggcgccgacggagtgggtagttcctcaggaaattggcattgcgattccacatggctgggcgacagagtcatcaccaccagcacccgaacctgggccctgcccacctacaacaaccacctctacaagcaaatatccaatgggacatcgggaggaagcaccaacgacaacacctacttcggctacagcaccccctgggggtattttgacttcaacagattccactgccacttctcaccacgtgactggcagcgactcatcaacaacaactggggattccggccaaaaagactcagcttcaagctcttcaacatccaggtcaaggaggtcacgcagaatgaaggcaccaagaccatcgccaataaccttaccagcacgattcaggtatttacggactcggaataccagctgccgtacgtcctcggctccgcgcaccagggctgcctgcctccgttcccggcggacgtcttcatgattccccagtacggctaccttacactgaacaatggaagtcaagccgtaggccgttcctccttctactgcctggaatattttccatctcaaatgctgcgaactggaaacaattctgaattcagctacaccttcgaggacgtgcctttccacagcagctacgcacacagccagagcttggaccgactgatgaatcctctcatcgaccagtacctgtactacttatccagaactcagtccacaggaggaactcaaggtacccagcaattgttattttctcaagctgggcctgcaaacatgtcggctcaggctaagaactggctacctggaccttgctaccggcagcagcgagtctctacgacactgtcgcaaaacaacaacagcaactttgcttggactggtgccaccaaatatcacctgaacggaagagactctttggtaaatcccggtgtcgccatggcaacccacaaggacgacgaggaacgcttcttcccgtcgagtggagtcctgatgtttggaaaacagggtgctggaagagacaatgtggactacagcagcgttatgctaaccagcgaagaagaaattaaaaccactaaccctgtagccacagaacaatacggtgtggtggctgacaacttgcagcaaaccaatacagggcctattgtgggaaatgtcaacagccaaggagccttacctggcatggtctggcagaaccgagacgtgtacctgcagggtcccatctgggccaagattcctcacacggacggcaacttccacccttcaccgctaatgggaggatttggactgaagcacccacctcctcagatcctgatcaagaacacgccggtacctgcggatcctccaacaacgttcagccaggcgaaattggcttccttcattacgcagtacagcaccggacaggtcagcgtggaaatcgagtgggagctgcagaaggagaacagcaaacgctggaacccagagattcagtacacttcaaactactacaaatctacaaatgtggactttgctgtcaatacagagggaacttattctgagcctcgccccattggtactcgttacctcacccgtaatctgtaa

SEQ ID NO: 4914 - protein, 738 aa, Adeno-associated virus
MAADGYLPDWLEDNLSEGIREWWDLKPGAPKPKANQQKQDDGRGLVLPGYKYLGPFNGLDKGEPVNAADAAALEHDKAYDQQLKAGDNPYLRYNHADAEFQERLQEDTSFGGNLGRAVFQAKKRVLEPLGPVEEAAKTAPGKKRPVEPPPQRSPDSSTGIGKKGQQPAKKRLNFGQTGDSESVPDPQPIGEPPAGPSGLGSGTMAAGGGAPMADNNEGADGVGSSSGNWHCDSTWLGDRVITTSTRTWALPTYNNHLYKQISNGTSGGSTNDNTYFGYSTPWGYFDFNRFHCHFSPRDWQRLINNNWGFRPKRLSFKLFNIQVKEVTQNEGTKTVANNLTSTIQVFTDSEYQLPYVLGSAHQGCLPPFPADVFMIPQYGYLTLNNGSQAVGRSSFYCLEYFPSQMLRTGNNFEFSYTFEDVPFHSSYAHSQSLDRLMNPLIDQYLYYLSRTQSTGGTQGTQQLLFSQAGPANMSAQAKNWLPGPCYRQQRVSTTLSQNNNSNFAWTGATKYHLNGRDSLVNPGVAMATHKDDEERFFPSSGVLMFGKQGAGRDNVDYSSVMLTSEEEIKTTNPVATEQYGVVADNLQQTNTGPIVGNVNSQGALPGMVWQNRDVYLQGPIWAKIPHTDGNFHPSPLMGGFGLKHPPPQILIKNTPVPADPPTTFSQAKLASFITQYSTGQVSVEIEWELQKENSKRWNPEIQYTSNYYKSTNVDFAVNTEGTYSEPRPIGTRYLTRNL

SEQ ID NO: 4915 - DNA, 2217 bp, Adeno-associated virus
atggctgctgacggttatcttccagattggctcgaggacaacctctctgagggcattcgcgagtggtgggacctgaaacctggagcccccaagcccaaggccaaccagcagaagcaggacgacggccggggtctggtgcttcctggctacaagtacctcggacccttcaacggactcgacaagggggagcccgtcaacgcggcggacgcagcggccctcgagcacgacaaggcctacgaccagcagctcaaagcgggtgacaatccgtacctgcggtataaccacgccgacgccgagtttcaggagcgtctacaagaagatacgtcttttgggggcaacctcgggcgagcagtcttccaggccaagaagcgggttctcgaacctctcggtccggttgaggaagctgctaagacggctcctggaaagaagagaccggtagaaccgccacctcagcgttcccccgactcctccacgggcatcggcaagaaaggccagcagcccgctaaaaagagactgaactttggtcagactggcgactcagagtcagtccccgaccctcaaccaatcggagaaccaccagcaggcccctctggtctgggatctggtacaatggctgcaggcggtggcgctccaatggcagacaataacgaaggcgccgacggagtgggtagttcctcaggaaattggcattgcgattccacatggctgggcgacagagtcatcaccaccagcacccgaacctgggccctgcccacctacaacaaccacctctacaagcaaatatccaatgggacatcgggaggaagcaccaacgacaacacctacttcggctacagcaccccctgggggtattttgacttcaacagattccactgccacttctcaccacgtgactggcagcgactcatcaacaacaactggggattccggccaaaaagactcagcttcaagctcttcaacatccaggtcaaggaggtcacgcagaatgaaggcaccaagaccgtcgccaataaccttaccagcacgattcaggtatttacggactcggaataccagctgccgtacgtcctcggctccgcgcaccagggctgcctgcctccgttcccggcggacgtcttcatgattccccagtacggctaccttacactgaacaatggaagtcaagccgtaggccgttcctccttctactgcctggaatattttccatctcaaatgctgcgaactggaaacaattttgaattcagctacaccttcgaggacgtgcctttccacagcagctacgcacacagccagagcttggaccgactgatgaatcctctcatcgaccagtacctgtactacttatccagaactcagtccacaggaggaactcaaggtacccagcaattgttattttctcaagctgggcctgcaaacatgtcggctcaggctaagaactggctacctggaccttgctaccggcagcagcgagtctctacgacactgtcgcaaaacaacaacagcaactttgcttggactggtgccaccaaatatcacctgaacggaagagactctttggtaaatcccggtgtcgccatggcaacccacaaggacgacgaggaacgcttcttcccgtcgagtggagtcctgatgtttggaaaacagggtgctggaagagacaatgtggactacagcagcgttatgctaaccagcgaagaagaaattaaaaccactaaccctgtagccacagaacaatacggtgtggtggctgacaacttgcagcaaaccaatacagggcctattgtgggaaatgtcaacagccaaggagccttacctggcatggtctggcagaaccgagacgtgtacctgcagggtcccatctgggccaagattcctcacacggacggcaacttccacccttcaccgctaatgggaggatttggactgaagcacccacctcctcagatcctgatcaagaacacgccggtacctgcggatcctccaacaacgttcagccaggcgaaattggcttccttcattacgcagtacagcaccggacaggtcagcgtggaaatcgagtgggagctgcagaaggagaacagcaaacgttggaacccagagattcagtacacttcaaactactacaaatctacaaatgtggactttgctgtcaatacagagggaacttattctgagcctcgccccattggtactcgttacctcacccgtaatctgtaa

SEQ ID NO: 4916 - protein, 738 aa, Adeno-associated virus
MAADGYLPDWLEDNLSEGIREWWDLKPGAPKPKANQQKQDDGRGLVLPGYKYLGPFNGLDKGEPVNAADAAALEHDKAYDQQLKAGDNPYLRYNHADAEFQERLQEDTSFGGNLGRAVFQAKKRVLEPLGLVEEAAKTAPGKKRPVEPSPQRSPDSSTGIGKKGQQPAKKRLNFGQTGDSESVPDPQPIGEPPAGPSGLGSGTMAAGGGAPMADNNEGADGVGSSSGNWHCDSTWLGDRVITTSTRTWALPTYNNHLYKQISNGTSGGSTNDNTYFGYSTPWGYFDFNRFHCHFSPRDWQRLINNNWGFRPKRLSFKLFNIQVKEVTQNEGTKTIANNLTSTIQVFTDSEYQLPYVLGSAHQGCLPPFPADVFMIPQYGYLTLNNGSQAVGRSSFYCLEYFPSQMLRTGNNFEFSYTFEDVPFHSSYAHSQSLDRLMNPLIDQYLYYLSRTQSTGGTQGTQQLLFSQAGPANMSAQAKNWLPGPCYRQQRVSTTLSQSNNSNFAWTGATKYHLNGRDSLVNPGVAMATHKDDEERFFPSSGVLMFGKQGAGRDNVDYSSVMLTSEEEIKTTNPVATEQYGVVADNLQQTNTGPIVGNVNSQGALPGMVWQNRDVYLQGPIWAKIPHTDGNFHPSPLMGGLGLKHPPPQILIKNTPVPADPPTTFSQAKLASFITQYSTGQVSVEIEWELQKENSKRWNPEIQYTSNYYKSTNVDFAVNTEGTYSEPRPIGTRYLTRNL

SEQ ID NO: 4917 - DNA, 2217 bp, Adeno-associated virus
atggctgctgacggttatcttccagattggctcgaggacaacctctctgagggcattcgcgagtggtgggacctgaaacctggagcccccaagcccaaggccaaccagcagaagcaggacgacggccggggtctggtgcttcctggctacaagtacctcggacccttcaacggactcgacaagggggagcccgtcaacgcggcggacgcagcggccctcgagcacgacaaggcctacgaccagcagctcaaagcgggtgacaatccgtacctgcggtataaccacgccgacgccgagtttcaggagcgtctgcaagaagatacgtcttttgggggcaacctcgggcgagcagtcttccaggccaagaagcgggttctcgaacctctcggtctggttgaggaagcggctaagacggctcctggaaagaagagaccggtagaaccgtcacctcagcgttcccccgactcctccacgggcatcggcaagaaaggccagcagcccgctaaaaagagactgaactttggtcagactggcgactcagagtcagtccccgaccctcaaccaatcggagaaccaccagcaggcccctctggtctgggatctggtacaatggctgcaggcggtggcgctccaatggcagacaataacgaaggcgccgacggagtgggtagttcctcaggaaattggcattgcgattccacatggctgggcgacagagtcatcaccaccagcacccgaacctgggccctgcccacctacaacaaccacctctacaagcaaatatccaatgggacatcgggaggaagcaccaacgacaacacctacttcggctacagcaccccctgggggtattttgacttcaacagattccactgccacttctcaccacgtgactggcagcgactcatcaacaacaactggggattccggccaaaaagactcagcttcaagctcttcaacatccaggtcaaggaggtcacgcagaatgaaggcaccaagaccatcgccaataaccttaccagcacgattcaggtatttacggactcggaataccagctgccgtacgtcctcggctccgcgcaccagggctgcctgcctccgttcccggcggacgtcttcatgattccccagtacggctaccttacactgaacaatggaagtcaagccgtaggccgttcctccttctactgcctggaatattttccatctcaaatgctgcgaactggaaacaattttgaattcagctacaccttcgaggacgtgcctttccacagcagctacgcacacagccagagcttggaccgactgatgaatcctctcatcgaccagtacctgtactacttatccagaactcagtccacaggaggaactcaaggtacccagcaattgttattttctcaagctgggcctgcaaacatgtcggctcaggctaagaactggctacctggaccttgctaccggcagcagcgagtctctacgacactgtcgcaaagcaacaacagcaactttgcttggactggtgccaccaaatatcacctgaacggaagagactctttggtaaatcccggtgtcgccatggcaacccacaaggacgacgaggaacgcttcttcccgtcgagtggagtcctgatgtttggaaaacagggtgctggaagagacaatgtggactacagcagcgttatgctaaccagcgaagaagaaattaaaaccactaaccctgtagccacagaacaatacggtgtggtggctgacaacttgcagcaaaccaatacagggcctattgtgggaaatgtcaacagccaaggagccttacctggcatggtctggcagaaccgagacgtgtacctgcagggtcccatctgggccaagattcctcacacggacggcaacttccacccttcaccgctaatgggaggacttggactgaagcacccacctcctcagatcctgatcaagaacacgccggtacctgcggatcctccaacaacgttcagccaggcgaaattggcttccttcattacgcagtacagcaccggacaggtcagcgtggaaatcgagtgggagctgcagaaggagaacagcaaacgctggaacccagagattcagtacacttcaaactactacaaatctacaaatgtggactttgctgtcaatacagagggaacttattctgagcctcgccccattggtactcgttacctcacccgtaatctgtaa

SEQ ID NO: 4918 - protein, 737 aa, Adeno-associated virus
MAADGYLPDWLEDNLSEGIREWWDLKPGAPKPKANQQKQDDGRGLVLPGYKYLGPFNGLDKGEPVNAADAAALEHDKAYDQQLKAGDNPYPRYNHADAEFQERLQEDTPFGGNLGRAVFQAKKRVLEPLGLVEEAAKTAPGKKRPVEPSPQRSPDSSTGIGKKGQQPAKKRLNFGQTGDSESVPDPQPIGEPPAGPSGLGSGTMAAGGGAPMADNNEGADGVGNASGNWHCDSTWLGDRVITTSTRTWALPTYNNHLYKQISSASTGASNDNHYFGYSTPWGYFDFNRFHCHFSPRDWQRLINNNWGFRPKRLNFKLFNIQVKEVTTNDGVTTIANNLTSTVQVFSDSEYQLPYVLGSAHQGCLPPFPADVFMIPQYGYLTLNNGSQAVGRSSFYCLEYFPSQMLRTGNNFTFSYTFEEVPLHSSYAHSQSLDRLMNPLIVQYLYYLNRTQNQSGSAQNKDLLFSRGSPAGMSVQPKNWLPGPCYRQQRVSKTKTDNNNSNFTWTGASKYNLNGRESIINPGTAMASHKDDEDKFFPMSGVMIFGKESAGASNTALDNVMITDEEEIKATNPVATERFGTVAVNFQSSSTDPATGDVHAMGALPGMVWQDRDVYLQGPIWAKIPHTDGHFHPSPLMGGFGLKNPPPQILIKNTPVPANPPAEFSATKFASFITQYSTGQVSVEIEWELQKENSKRWNPEVQYTSNYAKSASVDFTVDNNGLYTEPRPIGTRYLTRPL

SEQ ID NO: 4919 - protein, 737 aa, Adeno-associated virus
MAADGYLPDWLEDNLSEGIREWWDLKPGAPKPKANQQKQDDGRGLVLPGYKYLGPFNGLDKGEPVNAADAAALEHDKAYDQQLKAGDNPYPRYNHADAEFQERLQEDTSFGGNLGRAVFQAKKRVLEPLGLVEEAAKTAPGKKRPVEPSPQRSPDSSTGIGKKGQQPAKKRLNFGQTGDSESVPDPQPIGEPPAGPSGLGSGTMAAGGGAPMADNNEGADGVGNASGNWHCDSTWLGDRVITTSTRTWALPTYNNHLYKQISSASTGASNDNHYFGYSTPWGYFDFNRFHCHFSPRDWQRLINNNWGFRPKRLNFKLFNIQVKEVTTNDGVTTIANNLTSTVQVFSDSEYQLPYVLGSAHQGCLPPFPADVFMIPQYGYLTLNNGSQAVGRSSFYCLEYFPSQMLRTGNNFTFSYTFEEVPLHSSYAHSQSLDRLMNPLIDQYLYYLNRTQNQSGSAQNKDLLFSRGSPAGMSVQPKNWLPGPCYRQQRVSKTKTDNNNSNFTWTGASKYNLNGRESIINPGTAMASHKDDEDKFFPMSGVMIFGKESAGASNTALDNVMITDEEEIKATNPVATERFGTVAVNFQSSSTDPATGDVHAMGALPGMVWQDRDVYLQGPIWAKIPHTDGHFHPSPLMGGFGLKNPPPQILIKNTPVPANPPAEFSATKFASFITQYSTGQVSVEIEWELQKENSKRWNPEVQYTSNYAKSASVDFTVDNNGLYTEPRPIGTRYLTRPL

SEQ ID NO: 4920 - DNA, 2214 bp, Adeno-associated virus
atggctgctgacggttatcttccagattggctcgaggacaacctctctgagggcattcgcgagtggtgggacctgaaacctggagcccccaagcccaaggccaaccagcagaagcaggacgacggccggggtctggtgcttcctggctacaagtacctcggacccttcaacggactcgacaagggggagcccgtcaacgcggcggacgcagcggccctcgagcacgacaaggcctacgaccagcagctcaaagcgggtgacaatccgtacccgcggtataaccacgccgacgccgagtttcaggagcgtctgcaagaagatacgccttttgggggcaacctcgggcgagcagtcttccaggccaagaagcgggttctcgaacctctcggtctggttgaggaagctgctaagacggctcctggaaagaagagaccggtagaaccgtcacctcagcgttcccccgactcctccacgggcatcggcaagaaaggccagcagcccgctaaaaagagactgaactttggtcagactggcgactcagagtcagtccccgaccctcaaccaatcggagaaccaccagcaggcccctctggtctgggatctggtacaatggctgcaggcggtggcgctccaatggcagacaataacgaaggcgccgacggagtgggtaatgcctcaggaaattggcattgcgattccacatggctgggcgacagagtcatcaccaccagcacccgcacctgggccttgcccacctacaataaccacctctacaagcaaatctccagtgcttcaacgggggccagcaacgacaaccactacttcggctacagcaccccctgggggtattttgatttcaacagattccactgccacttttcaccacgtgactggcagcgactcatcaacaacaattggggattccggcccaagagactcaacttcaaactcttcaacatccaagtcaaggaggtcacgacgaatgatggcgtcacaaccatcgctaataaccttaccagcacggttcaagtcttctcggactcggagtaccagcttccgtacgtcctcggctctgcgcaccagggctgcctccctccgttcccggcggacgtgttcatgattccgcaatacggctacctgacgctcaacaatggcagccaagccgtgggacgttcatccttttactgcctggaatatttcccttctcagatgctgagaacgggcaacaactttaccttcagctacacctttgaggaagtgcctctccacagcagctacgcgcacagccagagcctggaccggctgatgaatcctctcatcgtccaatacctgtattacctgaacagaactcaaaatcagtccggaagtgcccaaaacaaggacttgctgttcagccgtgggtctccagctggcatgtctgttcagcccaaaaactggctacctggaccctgttatcggcagcagcgcgtttctaaaacaaaaacagacaacaacaacagcaattttacctggactggtgcttcaaaatataacctcaatgggcgtgaatccatcatcaaccctggcactgctatggcctcacacaaagacgacgaagacaagttctttcccatgagcggtgtcatgatttttggaaaagagagcgccggagcttcaaacactgcattggacaatgtcatgattacagacgaagaggaaattaaagccactaaccctgtggccaccgaaagatttgggaccgtggcagtcaatttccagagcagcagcacagaccctgcgaccggagatgtgcatgctatgggagcattacctggcatggtgtggcaagatagagacgtgtacctgcagggtcccatttgggccaaaattcctcacacagatggacactttcacccgtctcctcttatgggcggctttggactcaagaacccgcctcctcagatcctcatcaaaaacacgcctgttcctgcgaatcctccggcggagttttcagctacaaagtttgcttcattcatcacccaatactccacaggacaagtgagtgtggaaattgaatgggagctgcagaaagaaaacagcaagcgctggaatcccgaagtgcagtacacatccaattatgcaaaatctgccagcgttgattttactgtggacaacaatggactttatactgagcctcgccccattggcacccgttaccttacccgtcccctgtaa

SEQ ID NO: 4921 - protein, 736 aa, Adeno-associated virus
MAADGYLPDWLEDTLSEGIRQWWKLRPGPPPPKPAERHKDDSRGLVLPGYKYLGPFNGLDKGEPVNEADAAALEHDKAYDRQLDSGDNPYLKYNHADAEFQERLKEDTSFGGNLGRAVFQAKKRVLEPLGLVEEGAETAPGKKRPVEQSPQGPDSSSGIGKTGQQPAKKRLNFGQTGDSESVPDPQPLGEPPATPAAVGPTTMASGGGAPMADNNEGADGVGNASGNWHCDSTWLGDRVITTSTRTWALPTYNNHLYKQISSASTGASNDNHYFGYSTPWGYFDFNRFHCHFSPRDWQRLINNNWGFRPKRLNFKLFNIQVKEVTTNDGVTTIANNLTSTVQVFSDSEYQLPYVLGSAHQGCLPPFPADVFMIPQYGYLTLNNGSQAVGRSSFYCLEYFPSQMLRTGNNFTFSYTFEEVPFHSSYAHSQSLDRLMNPLIDQYLYYPNRTQNQSGSAQNKDLLFSRGSPAGMSVQPKNWLPGPCYRQQRVSKTKTDNNNSNFTWTGASKYNLNGRESIINPGTAMASHKDDEDKFFPMSGVMIFGKESAGASNTALDNVMITDEEEIKATNPVATERFGTVAVNFQSSSTDPATGDVHAMGALPGMVWQGRDVYLQGPIWAKIPHTDGHFHPSPLMGGFGLKNPPPQILIKNTPVPANPPAEFSATKFASFITQYSTGQVSVEIEWELQKENSKRWNPEVQYTSNYAKSANVDFTVDNNGLYTEPRPIGTRYLTRPL

SEQ ID NO: 4922 - DNA, 2211 bp, Adeno-associated virus
atggctgccgatggttatcttccagattggctcgaggacactctctctgaaggaataagacagtggtggaagctcagacctggcccaccaccaccaaagcccgcagagcggcataaggacgacagcaggggtcttgtgcttcctgggtacaagtacctcggacccttcaacggactcgacaagggagagccggtcaacgaggcagacgccgcggccctcgagcacgacaaagcctacgaccggcagctcgacagcggagacaacccgtacctcaagtacaaccacgccgacgcggagtttcaggagcgccttaaagaagatacgtcttttgggggcaacctcgggcgagcagtcttccaggccaagaagcgggttctcgaacctctcggtctggttgaggaaggcgctgagacggctcctggaaagaaacgtccggtagagcagtcgccacaagggccagactcctcctcgggcatcggcaagacaggccagcagcccgctaaaaagagactcaattttggtcagactggcgactcagagtcagtccccgatccacaacctctcggagaacctccagcaacccccgctgctgtgggacctactacaatggcttcaggcggtggcgcaccaatggcagacaataacgaaggcgccgacggagtgggtaatgcctcaggaaattggcattgcgattccacatggctgggcgacagagtcatcaccaccagcacccgcacctgggccttgcccacctacaataaccacctctacaagcaaatctccagtgcttcaacgggggccagcaacgacaaccactacttcggctacagcaccccctgggggtattttgatttcaacagattccactgccacttttcaccacgtgactggcagcgactcatcaacaacaattggggattccggcccaagagactcaacttcaaactcttcaacatccaagtcaaggaggtcacgacgaatgatggcgtcacaaccatcgctaataaccttaccagcacggttcaagtcttctcggactcggagtaccagcttccgtacgtcctcggctctgcgcaccagggctgcctccctccgttcccggcggacgtgttcatgattccgcaatacggctacctgacgctcaacaatggcagccaagccgtgggacgttcatccttttactgcctggaatatttcccttctcagatgctgagaacgggcaacaactttaccttcagctacacctttgaggaagtgcctttccacagcagctacgcgcacagccagagcctggaccggctgatgaatcctctcatcgaccaatacctgtattacccgaacagaactcaaaatcagtccggaagtgcccaaaacaaggacttgctgtttagccgtgggtctccagctggcatgtctgttcagcccaaaaactggctacctggaccctgttatcggcagcagcgcgtttctaaaacaaaaacagacaacaacaacagcaattttacctggactggtgcttcaaaatataacctcaatgggcgtgaatccatcatcaaccctggcactgctatggcctcacacaaagacgacgaagacaagttctttcccatgagcggtgtcatgatttttggaaaagagagcgccggagcttcaaacactgcattggacaatgtcatgattacagacgaagaggaaattaaagccactaaccctgtggccaccgaaagatttgggaccgtggcagtcaatttccagagcagcagcacagaccctgcgaccggagatgtgcatgctatgggagcattacctggcatggtgtggcaaggtagagacgtgtacctgcagggtcccatttgggccaaaattcctcacacagatggacactttcacccgtctcctcttatgggcggctttggactcaagaacccgcctcctcagatcctcatcaaaaacacgcctgttcctgcgaatcctccggcggagttttcagctacaaagtttgcttcattcatcacccaatactccacaggacaagtgagtgtggaaattgaatgggagctgcagaaagaaaacagcaagcgctggaatcccgaagtgcagtacacatccaattatgcaaaatctgccaacgttgattttactgtggacaacaatggactttatactgagcctcgccccattggcacccgttaccttacccgtcccctgtaa

SEQ ID NO: 4923 - protein, 736 aa, Adeno-associated virus
MAADGYLPDWLEDTLSEGIRQWWKLRPGPPPPKPAERHKDDSRGLVLPGYKYLGPFNGLDKGEPVNEADAAALEHDKAYDRQLDSGDNPYLKYNHADAEFQERLKEDTSFGGNLGRAVFQAKKRVLEPLGLVEEGAKTAPGKKRPVEQSPQGPDSSSGIGKTGQQPAKKRLNFGQTGDSESVPDPQPLGEPPATPAAVGPTTMASGGGAPMADNNEGADGVGNASGNWHCDSTWLGDRVITTSTRTWALPTYNNHLYKQISSASTGASNDNHYFGYSTPWGYFDFNRFHCHFSPRDWQRLINNNWGFRPKRLNFKLFNIQVKEVTTNDGVTTIANNLTSTVQVFSDSEYQLPYVLGSAHQGCLPPFPADVFMIPQYGYLTLNNGSQAVGRSSFYCLEYFPSQMLRTGNNFTFSYTFEEVPFHSSYAHSQSLDRLMNPLIDQYLYYPNRTQNQSGSAQNKDLLFSRGSPAGMSVQPKNWLPGPCYRQQRVSKTKTDNNNSNFTWTGASKYNLNGRESIINPGTAMASHKDDEDKFFPMSGVMIFGKESAGASNTALDNVMITDEEEIKATNPVATERFGTVAVNFQSSSTDPATGDVHAMGALPGMVWQGRDVYLQGPIWAKIPHTDGHFHPSPLMGGFGLKNPPPQILIKNTPVPANPPAEFSATKFASFITQYSTGQVSVEIEWELQKENSKRWNPEVQYTSNYAKSANVDFTVDNNGLYTEPRPIGTRYLTRPL

SEQ ID NO: 4924 - protein, 736 aa, Adeno-associated virus
MAADGYLPDWLEDTLSEGIRQWWKLRPGPPPPKPAERHKDDSRGLVLPGYKYLGPFNGLDKGEPVNEADAAALEHDKAYDRQLDSGDNPYLKYNHADAEFQERLKEDTSFGGNLGRAVFQAKKRVLEPLGLVEEGAKTAPGKKRPVEQSPQGPDSSSGIGKTGQQPAKKRLNFGQTGDSESVPDPQPLGEPPATPAAVGPTTMASGGGAPMADNNEGADGVGNASGNWHCDSTWLGDRVITTSTRTWALPTYNNHLYKQISSASTGASNDNHYFGYSTPWGYFDFNRFHCHFSPRDWQRLINNNWGFRPKRLNFKLFNIQVKEVTTNDGVTTIANNLTSTVQVFSDSEYQLPYVLGSAHQGCLPPFPADVFMIPQYGYLTLNNGSQAVGRSSFYCLEYFPSQMLRTGNNFTFSYTFEEVPFHSSYAHSQSLDRLMNPLIDQYLYYLNRTQNQSGSAQNKDLLFSRGSPAGMSVQPKNWLPGPCYRQQRVSKTKTDNNNSNFTWTGASKYNLNGRESIINPGTAMASHKDDEDKFFPMSGVMIFGKESAGASNTALDNVMITDEEEIKATNPVATERFGTVAVNFQSSSTDPATGDVHAMGALPGMVWQGRDVYLQGPIWAKIPHTDGHFHPSPLMGGFGLKNPPPQILIKNTPVPANPPAEFSATKFASFITQYSTGQVSVEIEWELQKENSKRWNPEVQYTSNYAKSANVDFTVDNNGLYTEPRPIGTRYLTRPL

SEQ ID NO: 4925 - protein, 736 aa, Adeno-associated virus
MAADGYLPDWLEDTLSEGIRQWWKLRPGPPPPKPAERHKDDSRGLVLPGYKYLGPFNGLDKGEPVNEADAAALEHDKAYDRQLDSGDNPYLKYNHADAEFQERLKEDTSFGGNLGRAVFQAKKRVLEPLGLVEEGAKTAPGKKRPVEQSPQGPDSSSGIGKTGQQPAKKRLNFGQTGDSESVPDPQPLGEPPATPAAVGPTTMASGGGAPMADNNEGADGVGNASGNWHCDSTWLGDRVITTSTRTWALPTYNNHLYKQISSASTGASNDNHYFGYSTPWGYFDFNRFHCHFSPRDWQRLINNNWGFRPKRLNFKLFNIQVKEVTTNDGVTTIANNLTSTVQVFSDSEYQLPYVLGSAHQGCLPPFPADVFMIPQYGYLTLNNGSQAVGRSSFYCLEYFPSQMLRTGNNFTFSYTFEEVPFHSSYAHSQSLDRLMNPLIDQYLYYLNRTQNQSGSAQNKDLLFSRGSPAGMSVQPKNWLPGPCYRQQRVSKTKTDNNNSNFTWTGASKYNLNGRESIINPGTAMASHKDDEDKFFPMSGVMIFGKESAGASNTALDNVMITDEEEIKATNPVATERFGTVAVNFQSSSTDPATGDVHAMGALPGMVWQDRDVYLQGPIWAKIPHTDGHFHPSPLMGGFGLKNPPPQILIKNTPVPANPPAEFSATKFASFITQYSTGQVSVEIEWELQKENSKRWNPEVQYTSNYAKSANVDFTVDNNGLYTEPRPIGTRYLTRPL

SEQ ID NO: 4926 - DNA, 2208 bp, Adeno-associated virus
atggctgccgatggctatcttccagattggctcgaggacactctctctgaaggaataagacagtggtggaagctcaaacctggcccaccaccaccaaagcccgcagagcggcatagggacgacagcaggggtcttgtgcttcctgggtacaagtacctcggacccttcaacggactcgacaagggagagccggtcaacgaggcagacgccgcggccctcgagcacgacaaagcctacgaccggcagctcgacagcggagacaacccgtacctcaagtacaaccacgccgacgcggagtttcaggagcgccttaaagaagatacgtcttttgggggcaacctcggacgagcagtcttccaggcgaaaaagagggttcttgaacctctgggcctggttgaggaacctgttaagacggctccgggaaaaaagaggccggtagagcactctcctgtggagccagactcctcctcgggaaccggaaaggcgggccagcagcctgcaagaaaaagattgaattttggtcagactggagacgcagactcagtacctgacccccagcctctcggacagccaccagcagccccctctggtctgggaactaatacgatggctacaggcagtggcgcaccaatggcagacaataacgagggcgccgacggagtgggtaattcctcgggaaattggcattgcgattccacatggatgggcgacagagtcatcaccaccagcacccgaacctgggccctgcccacctacaacaaccacctctacaaacaaatttccagccaatcaggagcctcgaacgacaatcactactttggctacagcaccccttgggggtattttgacttcaacagattccactgccacttttcaccacgtgactggcaaagactcatcaacaacaactggggattccgacccaagagactcaacttcaagctctttaacattcaagtcaaagaggtcacgcagaatgacggtacgacgacgattgccaataaccttaccagcacggttcaggtgtttactgactcggggtaccagctcccgtacgtcctcggctcggcgcatcaaggatgcctcccgccgttcccagcagacgtcttcatggtgccacagtatggataccccaccctgaacaacgggagtcaggcagtaggacgctcttcattttactgcctggagtactttccttctcagatgctgcgtaccggaaacaactttaccttcagctacacttttgaggacgttcctttccacagcagctacgctcacagccagagtctggaccgtctcatgaatcctctcatcgaccagtacctgtattacttgagcacaacaaacactccaagtggaaccaccacgcagtcaaggcttcagttttctcaggccggagcgagtgacattcgggaccagtctaggaactggcttcctggaccctgttaccgccagcagcgagtatcaaagacatctgcggataacaacaacagtgaatactcgtggactggagctaccaagtaccacctcaatggcagagactctctggtgaatccgggcccggccgtggcaagccacaaggacgatgaagaaaagttttttcctcagagcggggttctcatctttgggaagcaaggctcagagaaaacaaatgtggacattgaaaaggtcatgattacagacgaagaggaaatcaggacaaccaatcccgtggctacggagcagtatggttctgtatctaccaacctccagagaggcaacagacaagcagctaccgcagatgtcaacacacaaggcgttcttccaggcatggtctggcaggacagagatgtgtaccttcaggggcccatctgggcaaagattccacacacggacggacattttcacccctctcccctcatgggtggattcggacttaaacaccctcctccacagattctcatcaagaacaccccggtacctgcgaatccttcgaccaccttcagtgcggcaaagtttgcttccttcatcacacagtactccacgggacaggtcagcgtggagatcgagtgggagctgcagaaggaaaacagcaaacgctggaatcccgaaattcagtacacttccaactacaacaagtctgttaatgtggactttactgtggacactaatggcgtgtattcagagcctcgccccattggcaccagatacctgactcgtaatctgtaa

SEQ ID NO: 4927 - protein, 735 aa, Adeno-associated virus
MAADGYLPDWLEDTLSEGIRQWWKLKPGPPPPKPAERHRDDSRGLVLPGYKYLGPFNGLDKGEPVNEADAAALEHDKAYDRQLDSGDNPYLKYNHADAEFQERLKEDTSFGGNLGRAVFQAKKRVLEPLGLVEEPVKTAPGKKRPVEHSPVEPDSSSGTGKAGQQPARKRLNFGQTGDADSVPDPQPLGQPPAAPSGLGTNTMATGSGAPMADNNEGADGVGNSSGNWHCDSTWMGDRVITTSTRTWALPTYNNHLYKQISSQSGASNDNHYFGYSTPWGYFDFNRFHCHFSPRDWQRLINNNWGFRPKRLNFKLFNIQVKEVTQNDGTTTIANNLTSTVQVFTDSGYQLPYVLGSAHQGCLPPFPADVFMVPQYGYPTLNNGSQAVGRSSFYCLEYFPSQMLRTGNNFTFSYTFEDVPFHSSYAHSQSLDRLMNPLIDQYLYYLSTTNTPSGTTTQSRLQFSQAGASDIRDQSRNWLPGPCYRQQRVSKTSADNNNSEYSWTGATKYHLNGRDSLVNPGPAVASHKDDEEKFFPQSGVLIFGKQGSEKTNVDIEKVMITDEEEIRTTNPVATEQYGSVSTNLQRGNRQAATADVNTQGVLPGMVWQDRDVYLQGPIWAKIPHTDGHFHPSPLMGGFGLKHPPPQILIKNTPVPANPSTTFSAAKFASFITQYSTGQVSVEIEWELQKENSKRWNPEIQYTSNYNKSVNVDFTVDTNGVYSEPRPIGTRYLTRNL

SEQ ID NO: 4928 - DNA, 2211 bp, Adeno-associated virus
atggctgccgacggttatcttccagattggctcgaggacactctctctgaaggaataagacagtggtggaagctcaaacctggcccaccaccaccaaagcccgcagagcggcataaggacgacagcaggggtcttgtgcttcctgggtacaagtacctcggacccttcaacggactcgacaagggagagccggtcaacgaggcagacgccgcggccctcgagcacgacaaagcctacgaccggcagctcgacagcggagacaacccgtacctcaagtacaaccacgccgacgcggagtttcaggagcgccttaaagaagatacgtcttttgggggcaacctcgggcgggcagtcttccaggccaagaagcgggttctcgaacctctcggtctggttgaggaaggcgctaagacggctcctggaaagaaacgtccggtagagcagtcgccacaagagccagactccccctcgggcatcggcaagacaggccagcagcccgctaaaaagagactcaattttggtcagactggcgactcagagtcagtccccgatccacaacctctcggagaacctccagcaacccccgctgctgtgggacctactacaatggcttcaggcggtggcgcaccaatggcagacaataacgaaggcgccgacggagtgggtaatgcctcaggaaattggcactgcgattccacatggctgggcgacagagtcatcaccaccagcacccgcacctgggccttgcccacctacaataaccacctctacaagcaaatctccagtgcttcaacgggggccagcaacgacaaccactacttcggctacagcaccccctgggggtattttgatttcaacagattccactgccacttttcaccacgtgactggcagcgactcatcaacaacaattggggattccggcccaagagactcaacttcaaactcttcaacatccaagtcaaggaggtcacgacgaatgatggcgtcacaaccatcgctaataaccttaccagcacggttcaagtcttctcggactcggagtaccagcttccgtacgtcctcggctctgcgcaccagggccgcctccctccgttcccggcggacgtgttcatgattccgcaatacggctacctgacgctcaacaatggcagccaagccgtgggacgttcatcctcttactgcctggaatatttcccttctcagatgctgagaacgggcaacaactttaccttcagctacacctttgaggaagtgcctctccacagcagctgcgcgcacagccagagcctggaccggctgatgaatcctctcatcgaccaatacctgtattacctgaacagaactcaaaatcagtccggaagtgcccaaaacagggacttgctgttcagccgtgggtctccagctggcatgtctgttcagcccaaaaactggctacctggaccctgttatcggcagcagcgcgtttctaaaacaaaaacagacaacaacaacagcaattttacctggactggtgcttcaaaatataacctcaatgggcgtgaatccatcatcaaccctggcactgctatggcctcacacaaagacgacgaagacaagttctttcccatgagcggtgtcatgatttttggaaaagagagcgccggagcttcaaacactgcattggacaatgtcatgattacagacgaagaggaaattaaagccactaaccctgtggccaccgaaagatttgggaccgtggcagtcaatttccagagcagcagcacagaccctgcgaccggagatgtgcatgctatgggagcattacctggcatggtgtggcaagatagagacgtgtacctgcagggtcccatttgggccaaaattcctcacacagatggacactttcacccgtctcctcttatgggcggctttggactcaagaacccgcctcctcagatcctcatcaaaaacacgcctgttcctgcgaatcctccggcggagttttcagctacaaagtttgcttcattcatcacccaatactccgcaggacaagtgagtgtggaaattgaatgggagctgcagaaagaaaacagcaagcgctggaatcccgaagtgcagtacacatccaattatgcaaaatctgccaacgttgattttactgtggacaacaatggactttatactgagcctcgccccattggcacccgttaccttacccgtcccctgtaa

SEQ ID NO: 4929 - protein, 736 aa, Adeno-associated virus
MAADGYLPDWLEDTLSEGIRQWWKLKPGPPPPKPAERHKDDSRGLVLPGYKYLGPFNGLDKGEPVNEADAAALEHDKAYDRQLDSGDNPYLKYNHADAEFQERLKEDTSFGGNLGRAVFQAKKRVLEPLGLVEEGAKTAPGKKRPVEQSPQEPDSPSGIGKTGQQPAKKRLNFGQTGDSESVPDPQPLGEPPATPAAVGPTTMASGGGAPMADNNEGADGVGNASGNWHCDSTWLGDRVITTSTRTWALPTYNNHLYKQISSASTGASNDNHYFGYSTPWGYFDFNRFHCHFSPRDWQRLINNNWGFRPKRLNFKLFNIQVKEVTTNDGVTTIANNLTSTVQVFSDSEYQLPYVLGSAHQGRLPPFPADVFMIPQYGYLTLNNGSQAVGRSSSYCLEYFPSQMLRTGNNFTFSYTFEEVPLHSSCAHSQSLDRLMNPLIDQYLYYLNRTQNQSGSAQNRDLLFSRGSPAGMSVQPKNWLPGPCYRQQRVSKTKTDNNNSNFTWTGASKYNLNGRESIINPGTAMASHKDDEDKFFPMSGVMIFGKESAGASNTALDNVMITDEEEIKATNPVATERFGTVAVNFQSSSTDPATGDVHAMGALPGMVWQDRDVYLQGPIWAKIPHTDGHFHPSPLMGGFGLKNPPPQILIKNTPVPANPPAEFSATKFASFITQYSAGQVSVEIEWELQKENSKRWNPEVQYTSNYAKSANVDFTVDNNGLYTEPRPIGTRYLTRPL

SEQ ID NO: 4930 - protein, 736 aa, Adeno-associated virus
MAADGYLPDWLEDTLSEGIRQWWKLKPGPPPPKPAERHKDDSRGLVLPGYKYLGPFNGLDKGEPVNEADAAALEHDKAYDRQLDSGDNPYLKYNHADAEFQERLKEDTSFGGNLGRAVFQAKKRVLEPLGLVEEGAKTAPGKKRPVEQSPQEPDSSSGIGKTGQQPAKKRLNFGQTGDSESVPDPQPLGEPPATPAAVGPTTMASGGGAPMADNNEGADGVGNASGNWHCDSTWLGDRVITTSTRTWALPTYNNHLYKQISSASTGASNDNHYFGYSTPWGYFDFNRFHCHFSPRDWQRLINNNWGFRPKRLNFKLFNIQVKEVTTNDGVTTIANNLTSTVQVFSDSEYQLPYVLGSAHQGCLPPFPADVFMIPQYGYLTLNNGSQAVGRSSFYCLEYFPSQMLRTGNNFTFSYTFEEVPLHSSCAHSQSLDRLMNPLIDQYLYYLNRTQNQSGSAQNRDLLFSRGSPAGMSVQPKNWLPGPCYRQQRVSKTKTDNNNSNFTWTGASKYNLNGRESIINPGTAMASHKDDEDKFFPMSGVMIFGKESAGASNTALDNVMITDEEEIKATNPVATERFGTVAVNFQSSSTDPATGDVHAMGALPGMVWQDRDVYLQGPIWAKIPHTDGHFHPSPLMGGFGLKNPPPQILIKNTPVPANPPAEFSATKFASFITQYSTGQVSVEIEWELQKENSKRWNPEVQYTSNYAKSANVDFTVDNNGLYTEPRPIGTRYLTRPL

SEQ ID NO: 4931 - DNA, 2208 bp, Adeno-associated virus
atggctgccgatggctatcttccagattggctcgaggacactctctctgaaggaataagacagtggtggaagctcaaacctggcccaccaccaccaaagcccgcagagcggcatagggacgacagcaggggtcttgtgcttcctgggtacaagtacctcggacccttcaacggactcgacaagggagagccggtcaacgaggcagacgccgcggccctcgagcacgacaaagcctacgaccggcagctcgacagcggagacaacccgtacctcaagtacaaccacgccgacgcggagtttcaggagcgccttaaagaagatacgtcttttgggggcaacctcggacgagcagtcttccaggcgaaaaagagggttcttgaacctctgggcctggttggggaacctgttaagacggctccgggaaaaaagaggccggtagagcactctcctgtggagccagactcctcctcgggaaccggaaaggcgggccagcagcctgcaagaaaaagattgaattttggtcagactggagacgcagactcagtacctgacccccagcctctcggacagccaccagcagccccctctggtctgggaactaatacgatggctacaggcagtggcgcaccaatggcagacaataacgagggcgccgacggagtgggtaattcctcgggaaattggcattgcgattccacatggatgggcgacagagtcatcaccaccagcacccgaacctgggccctgcccacctacaacaaccacctctacaaacaaatttccagccaatcaggagcctcgaacgacagtcactactttggctacagcaccccttgggggtattttgacttcaacagattccactgccacttttcaccacgtgactggcaaagactcatcaacaacaactggggattccgacccaagagactcaacttcaagctctttaacattcaagtcaaagaggtcacgcagaatgacggtacgacgacgattgccaataaccttaccagcacggttcaggtgtttactgactcggagtaccagctcccgtacgtcctcggctcggcgcatcaaggatgcctcccgccgttcccagcagacgtcttcatggtgccacagtatggatacctcaccctgaacaacgggagtcaggcagtaggacgctcttcattttactgcctggagtactttccttctcagatgctgcgtaccggaaacaactttaccttcagctacacttttgaggacgttcctttccacagcagctacgctcacagccagagtctggaccgtctcatgaatcctctcatcgaccagtacctgtattacttgagcacaacaaacactccaagtggaaccaccacgcagtcaaggctccagttttctcaggccggagcgagtgacattcgggaccagtctaggaactggcttcctggaccctgttaccgccagcagcgagtatcaaagacatctgcggataacaacaacagtgaatactcgtggactggagctaccaagtaccacctcaatggcagagactctctggtgaatccgggcccggccatggcaagccacaaggacaatgaagaaaagttttttcctcagagcggggttctcatctttgggaagcaaggctcagagaaaacaaatgtggacattgaaaaggtcatgattacagacgaagaggaaatcaggacaaccaatcccgtggctacggagcagtatggttctgtatctaccaacctccagagaggcaacagacaagcagctaccgcagatgtcaacacacaaggcgttcttccaggcatggtctggcaggacagagatgtgtaccttcaggggcccatctgggcaaagattccacacacggacggacattttcacccctctcccctcatgggtggattcggacttaaacaccctcctccacagattctcatcaagaacaccccggtacctgcgaatccttcgaccaccttcagtgcggcaaagtttgcttccttcatcacacagtactccacgggacaggtcagcgtggagatcgagtgggagctgcagaaggaaaacagcaaacgctggaatcccgaaattcagtacacttccaactacaacaagtctgttaatgtggactttactgtggacactaatggcgtgtattcagagcctcgccccattggcaccagatacctgactcgtaatctgtaa

SEQ ID NO: 4932 - protein, 735 aa, Adeno-associated virus
MAADGYLPDWLEDTLSEGIRQWWKLKPGPPPPKPAERHRDDSRGLVLPGYKYLGPFNGLDKGEPVNEADAAALEHDKAYDRQLDSGDNPYLKYNHADAEFQERLKEDTSFGGNLGRAVFQAKKRVLEPLGLVGEPVKTAPGKKRPVEHSPVEPDSSSGTGKAGQQPARKRLNFGQTGDADSVPDPQPLGQPPAAPSGLGTNTMATGSGAPMADNNEGADGVGNSSGNWHCDSTWMGDRVITTSTRTWALPTYNNHLYKQISSQSGASNDSHYFGYSTPWGYFDFNRFHCHFSPRDWQRLINNNWGFRPKRLNFKLFNIQVKEVTQNDGTTTIANNLTSTVQVFTDSEYQLPYVLGSAHQGCLPPFPADVFMVPQYGYLTLNNGSQAVGRSSFYCLEYFPSQMLRTGNNFTFSYTFEDVPFHSSYAHSQSLDRLMNPLIDQYLYYLSTTNTPSGTTTQSRLQFSQAGASDIRDQSRNWLPGPCYRQQRVSKTSADNNNSEYSWTGATKYHLNGRDSLVNPGPAMASHKDNEEKFFPQSGVLIFGKQGSEKTNVDIEKVMITDEEEIRTTNPVATEQYGSVSTNLQRGNRQAATADVNTQGVLPGMVWQDRDVYLQGPIWAKIPHTDGHFHPSPLMGGFGLKHPPPQILIKNTPVPANPSTTFSAAKFASFITQYSTGQVSVEIEWELQKENSKRWNPEIQYTSNYNKSVNVDFTVDTNGVYSEPRPIGTRYLTRNL

SEQ ID NO: 4933 - protein, 737 aa, Adeno-associated virus
RMAADGYLPDWLEDNLSEGIREWWDLKPGAPKPKANQQKQDDGRGLVLPGYKYLGPFNGLDKGEPVNAADAAALEHDKAYDQQLKAGDNPYLRYNHADAEFQERLQEDTSFGGNLGRAVFQAKKRVLEPLGLVEEGAKTAPGKKRPVEQSPQEPDSSSGIGKTGQQPAKKRLNFGQTGDSESVPDPQPLGEPPATPAAVGPTTMASGGGAPMADNNEGADGVGNASGNWHCDSTWLGDRVITTSTRTWALPTYNNHLYKQISSTSTGASNDNHYFGYGTPWGYFDFNRFHCHFSPRDWQRLINNNWGFRPKRLNFKLFNIQVEEVTTNDGVTTIANNLTSTVQVFSDSEYQLPYVLGSAHQGCLPPFPADVFMIPQYGYLTLNNGSQAVGRSSFYCLEYFPSQMLRTGNNFTFSYTFEEVPFHSSYAHSQSLDRLMNPLIDQYLYYLNRTQNQSGSAQNKDLLFSRGSPAGMSVQPKNWLPGPCYRQQRVSKTKTDNNNSNFTWTGASKYNLNGRESIINPGTAVASHKDDEDKFFPMSGVMIFGKESAGASSTALDNVMITDEEEIKATNPVATERFGTVAVNFQSSSTDPATGDVHAMGALPGMVWQDRDVYLQGPIWAKIPHTDGHFHPSPLMGGFGLKNPPPQILIKNTPVPANPPAEFSATKFASFITQYSTGQVSVEIEWELQKENSKRWNPEVQYTSNYAKSANVDFTVDNNGLYTEPRPIGTRYLTRPL

SEQ ID NO: 4934 - protein, 736 aa, Adeno-associated virus
MAADGYLPDWLEDNLSEGIREWWDLKPGAPKPKANQQKQDDGRGLVLPGYKYLGPFNGLDKGEPVNAADAAALEHDKAYDQQLKAGDNPYLRYNHADAEFQERLQEDTSFGGNLGRAVFQAKKRVLEPLGLVEEGAKTAPGKKRPVEQSPQEPDSSSGIGKTGQQPAKKRLNFGQTGDSESVPDPQPLGEPPATPAAVGPTTMASGGGAPMADNNEGADGVGNASGNWHCDSTWLGDRVITTSTRTWALPTYNNHLYKQISSTSTGASNDNHYFGYGTPWGYFDFNRFHCHFSPRDWQRLINNNWGFRPKRLNFKLFNIQVEEVTTNDGVTTIANNLTSTVQVFSDSEYQLPYVLGSAHQGCLPPFPADVFMIPQYGYLTLNNGSQAVGRSSFYCLEYFPSQMLRTGNNFTFSYTFEEVPFHSSYAHSQSLDRLMNPLIDQYLYYLNRTQNQSGSAQNKDLLFSRGSPAGMSVQPKNWLPGPCYRQQRVSKTKTDNNNSNFTWTGASKYNLNGRESIINPGTAVASHKDDEDKFFPMSGVMIFGKESAGASSTALDNVMITDEEEIKATNPVATERFGTVAVNFQSSSTDPATGDVHAMGALPGMVWQDRDVYLQGPIWAKIPHTDGHFHPSPLMGGFGLKNPPPQILIKNTPVPANPPAEFSATKFASFITQYSTGQVSVEIEWELQKENSKRWNPEVQYTSNYAKSANVDFTVDNNGLYTEPRPIGTRYLTRPL

SEQ ID NO: 4935 - DNA, 2211 bp, Adeno-associated virus
atggctgccgatggttatcttccagattggctcgaggacaacctctctgagggcattcgcgagtggtgggacttgaaacctggagccccgaagcccaaagccaaccagcaaaagcaggacgacggccggggtctggtgcttcctggctacaagtacctcggacccttcaacggactcgacaagggggagcccgtcaacgcggcggacgcagcggccctcgagcacgacaaggcctacgaccagcagctcaaagcgggtgacaatccgtacctgcggtataaccacgccgacgccgagtttcaggagcgtctgcaagaagatacgtcttttgggggcaacctcgggcgagcagtcttccaggccaagaagcgggttctcgaacctctcggtctggttgaggaaggcgctaagacggctcctggaaagaaacgtccggtagagcagtcgccacaagagccagactcctcctcgggcatcggcaagacaggccagcagcccgctaaaaagagactcaattttggccagactggcgactcagagtcagtccccgatccacaacctctcggagaacctccagcaacccccgctgctgtgggacctactacaatggcttcaggcggtggcgcaccaatggcagacaataacgaaggcgccgacggagtgggtaatgcctcaggaaattggcattgcgattccacatggctgggcgacagagtcatcaccaccagcacccgcacctgggccttgcccacctacaataaccacctctacaagcaaatctccagtacttcaacgggggccagcaacgacaaccactacttcggctacggcaccccctgggggtattttgatttcaacagattccactgccacttttcaccacgtgactggcagcgactcatcaacaacaattggggattccggcccaagagactcaacttcaaactcttcaacatccaagtcgaggaggtcacgacgaatgatggcgtcacaaccatcgctaataaccttaccagcacggttcaagtcttctcggactcggagtaccagcttccgtacgtcctcggctctgcgcaccagggctgcctccctccgttcccggcggacgtgttcatgattccgcaatacggctacctgacgctcaacaatggcagccaagccgtgggacgttcatccttttactgcctggaatatttcccttctcagatgctgagaacgggcaacaactttaccttcagctacacctttgaggaagtgcctttccacagcagctacgcgcacagccagagcctggaccggctgatgaatcctctcatcgaccaatacctgtattacctgaacagaacacaaaatcagtccggaagtgcccaaaacaaggacttgctgtttagccgtgggtctccagctggcatgtctgttcagcccaaaaactggctacctggaccctgttatcggcagcagcgcgtttctaaaacaaaaacagacaacaacaacagcaattttacctggactggtgcttcaaaatataacctcaatgggcgtgaatccatcatcaaccctggcaccgctgtggcctcacacaaagacgacgaagacaagttctttcccatgagcggtgtcatgatttttggaaaagagagcgccggagcttcaagcactgcattggacaatgtcatgattacagacgaagaggaaattaaagccactaaccctgtggccaccgaaagatttgggaccgtggcagtcaatttccagagcagcagcacagaccctgcgaccggagatgtgcatgctatgggagcattacctggcatggtgtggcaagatagagacgtgtacctgcagggtcccatttgggccaaaattcctcacacagatggacactttcacccgtctcctcttatgggcggctttggactcaagaacccgcctcctcagatcctcatcaaaaacacgcctgttcctgcgaatcctccggcggagttttcagctacaaagtttgcttcattcatcacccaatactccacaggacaagtgagtgtggaaattgaatgggagctgcagaaagaaaacagcaagcgctggaatcccgaagtgcagtacacatccaattatgcaaaatctgccaacgttgattttactgtggacaacaatggactttatactgagcctcgccccattggcacccgttaccttacccgtcccctgtaa

SEQ ID NO: 4936 - protein, 737 aa, Adeno-associated virus
RMAADGYLPDWLEDNLSEGIREWWDLKPGAPKPKANQQKQDDGRGLVLPGYKYLGPFNGLDKGEPVNAADAAALEHDKAYDQQLKAGDNPYLRYNHADAEFQERLQEDTSFGGNLGRAVFQAKKRVLEPLGLVEEGAKTAPGKKRPVEQSPQEPDSSSGIGKTGQQPAKKRLNFGQTGDSESVPDPQPLGEPPATPAAVGPTTMASGGGAPMADNNEGADGVGNASGNWHCDSTWLGDRVITTSTRTWALPTYNNHLYKQISSTSTGASNDNHYFGYSTPWGYFDFNRFHCHFSPRDWQRLINNNWGFRPKRLNFKLFNIQVEEVTTNDGVTTIANNLTSTVQVFSDSEYQLPYVLGSAHQGCLPPFPADVFMIPQYGYLTLNNGSQAVGRSSFYCLEYFPSQMLRTGNNFTFSYTFEEVPFHSSYAHSQSLDRLMNPLIDQYLYYLNRTQNQSGSAQNKDLLFSRGSPAGMSVQPKNWLPGPCYRQQRVSKTKTDNNNSNFTWTGASKYNLNGRESIINPGTAVASHKDDEDKFFPMSGVMIFGKESAGASSTALDNVMITDEEEIKATNPVATERFGTVAVNFQSSSTDPATGDVHAMGALPGMVWQDRDVYLQGPIWAKIPHTDGHFHPSPLMGGFGLKNPPPQILIKNTPVPANPPAEFSATKFASFITQYSTGQVSVEIEWELQKENSKRWNPEVQYTSNYAKSANVDFTVDNNGLYTEPRPIGTRYLTRPL

SEQ ID NO: 4937 - protein, 737 aa, Adeno-associated virus
RMAADGYLPDWLEDNLSEGIREWWDLKPGAPKPKANQQKQDDGRGLVLPGYKYLGPFNGLDKGEPVNAADAAALEHDKAYDQQLKAGDNPYLRYNHADAEFQERLQEDTSFGGNLGRAVFQAKKRVLEPLGLVEEGAKTAPGKKRPVEQSPQEPDSSSGIGKTGQQPAKKRLNFGQTGDSESVPDPQPLGEPPATPAAVGPTTMASGGGAPMADNNEGADGVGNASGNWHCDSTWLGDRVITTSTRTWALPTYNNHLYKQISSTSTGASNDNHYFGYSTPWGYFDFNRFHCHFSPRDWQRLINNNWGFRPKRLNFKLFNIQVKEVTTNDGVTTIANNLTSTVQVFSDSEYQLPYVLGSAHQGCLPPFPADVFMIPQYGYLTLNNGSQAVGRSSFYCLEYFPSQMLRTGNNFTFSYTFEEVPFHSSYAHSQSLDRLMNPLIDQYLYYLNRTQNQSGSAQNKDLLFSRGSPAGMSVQPKNWLPGPCYRQQRVSKTKTDNNNSNFTWTGASKYNLNGRESIINPGTAVASHKDDEDKFFPMSGVMIFGKESAGASSTALDNVMITDEEEIKATNPVATERFGTVAVNFQSSSTDPATGDVHAMGALPGMVWQDRDVYLQGPIWAKIPHTDGHFHPSPLMGGFGLKNPPPQILIKNTPVPANPPAEFSATKFASFITQYSTGQVSVEIEWELQKENSKRWNPEVQYTSNYAKSANVDFTVDNNGLYTEPRPIGTRYLTRPL

SEQ ID NO: 4938 - protein, 737 aa, Adeno-associated virus
RMAADGYLPDWLEDNLSEGIREWWDLKPGAPKPKANQQKQDDGRGLVLPGYKYLGPFNGLDKGEPVNAADAAALEHDKAYDQQLKAGDNPYLRYNHADAEFQERLQEDTSFGGNLGRAVFQAKKRVLEPLGLVEEGAKTAPGKKRPVEQSPQEPDSSSGIGKTGQQPAKKRLNFGQTGDSESVPDPQPLGEPPATPAAVGPTTMASGGGAPMADNNEGADGVGNASGNWHCDSTWLGDRVITTSTRTWALPTYNNHLYKQISSTSTGASNDNHYFGYSTPWGYFDFNRFHCHFSPRDWQRLINNNWGFRPKRLNFKLFNIQVKEVTTNDGVTTIANNLTSTVQVFSDSEYQLPYVLGSAHQGCLPPFPADVFMIPQYGYLTLNNGSQAVGRSSFYCLEYFPSQMLRTGNNFTFSYTFEEVPFHSSYAHSQSLDRLMNPLIDQYLYYLNRTQNQSGSAQNKDLLFSRGSPAGMSVQPKNWLPGPCYRQQRVSKTKTDNNNSNFTWTGASKYNLNGRESIINPGTAVASHKDDEDKFFPMSGVMIFGKESAGANSTALDNVMITDEEEIKATNPVATERFGTVAVNFQSSSTDPATGDVHAMGALPGMVWQDRDVYLQGPIWAKIPHTDGHFHPSPLMGGFGLKNPPPQILIKNTPVPANPPAEFSATKFASFITQYSTGQVSVEIEWELQKENSKRWNPEVQYTSNYAKSANVDFTVDNNGLYTEPRPIGTRYLTRPL

SEQ ID NO: 4939 - DNA, 2208 bp, Adeno-associated virus
atggctgccgatggttatcttccagattggctcaaggacactctctctgaaggaataagacagtggtggaagctcaaacctggcccaccaccaccaaagcccgcagagcggcataaggacgacagcgggggtcttgtgcttcctgggtacaagtacctcggacccttcaacggactcgacaagggagagccggtcaacgaggcagacgccgcggccctcgagtacgacaaggcctacgaccggcagctcgacagcggagacaacccgtacctcaagtacaaccacgccgacgcggagtttcaggagcgccttaaagaagatacgtcttttgggggcaacctcggacgagcagtcttccaggcgaaaaagagggttcttgaacctctgggcctggttgaggaacctgttaagacggctccgggaaaaaagaggccggtagagcactctcctgtggagccagactcctcctcgggaacaggaaaagcgggccagcagcctgcgagaaagagattgaattttggtcagactggagacgcagactccgtacctgacccccagcctctcggacagccaccagcagccccctctggtctgggaactaatacgatggctacaggcagtggcgcaccaatggcagacaataacgagggcgccgacggagtgggtaattcctcgggaagttggcattgcgattccacatggatgggcgacagagtcatcaccaccagcacccgaacctgggctctgcccacctacaacaaccatctgtacaagcagatctccagccaatcaggagccagcaacgacaaccactactttggctacagcaccccttgggggtattttgacttcaacagattccactgccacttttcaccacgtgactggcaaagactcatcaacaacaactggggattccggcccaagagactcaacttcaagctctttaacattcaagtcaaggaggtcacgcagaatgacggtacgacgacgattgccaataaccttaccagcacggttcaggtgtttactgactcggagtaccagctcccgtacgtccccggctcggcgcatcaaggatgcctcccgccgttcccagcagacgtcttcatggtgccacagtatggatacctcaccctgaacaacgggagtcaggcagtaggacgctcttcattttactgcctggagtactttccttctcagatgcttcgtaccggaaacaactttaccttcagctacacctttgaggatgttcctttccacagcagctacgctcacagccagagtttggaccgtctcatgaatcctctcatcgaccagtacctgtattacttgagcagaacaaacactccaagcggaaccaccacgcagtccaggcttcagttttctcaggccggagcaagtgacattcgggaccagtctaggaactggcttcctggaccctgttaccgccagcagcgagtatcaaagacagctgcggacaacaacaacagtgaatactcgtggactggagctaccaagtaccacctcaatggcagagactctctggtgaatccgggcccggccatggccagccacaaggacgatgaagaaaagttttttcctcaaagcggggttctcatctttgggaagcaaggctcagagaaaacaaatgtggacattgaaaaggtcatgattacagacgaagaggaaatcagaaccaccaatcccgtggccacggagcagtatggttctgtatctaccaacctccagagcggcaacacacaagcagctactgcagatgtcaacacacaaggcgttcttccaggcatggtctggcaggacagagacgtgcacctgcaggggcctatctgggcaaagattccacacacggacggacattttcacccctctcccctcatgggcggatttggacttaaacaccctcctccacagattctcatcaagaacaccccggtacctgcaaatccttcgaccaccttcagtgcggcaaagtttgcttccttcatcacacagtattccacagggcaggtcagcgtggagatcgagtgggagctgcagaaggagaacagcaaacgctggaaccccgagatccagtacacttccaactacaacaaatctgttaatgtggactttactgtggacactaatggtgtgtattcagagcctcgccccattggcaccagatacctgactcgtaatctgtaa

SEQ ID NO: 4940 - protein, 735 aa, Adeno-associated virus
MAADGYLPDWLKDTLSEGIRQWWKLKPGPPPPKPAERHKDDSGGLVLPGYKYLGPFNGLDKGEPVNEADAAALEYDKAYDRQLDSGDNPYLKYNHADAEFQERLKEDTSFGGNLGRAVFQAKKRVLEPLGLVEEPVKTAPGKKRPVEHSPVEPDSSSGTGKAGQQPARKRLNFGQTGDADSVPDPQPLGQPPAAPSGLGTNTMATGSGAPMADNNEGADGVGNSSGSWHCDSTWMGDRVITTSTRTWALPTYNNHLYKQISSQSGASNDNHYFGYSTPWGYFDFNRFHCHFSPRDWQRLINNNWGFRPKRLNFKLFNIQVKEVTQNDGTTTIANNLTSTVQVFTDSEYQLPYVPGSAHQGCLPPFPADVFMVPQYGYLTLNNGSQAVGRSSFYCLEYFPSQMLRTGNNFTFSYTFEDVPFHSSYAHSQSLDRLMNPLIDQYLYYLSRTNTPSGTTTQSRLQFSQAGASDIRDQSRNWLPGPCYRQQRVSKTAADNNNSEYSWTGATKYHLNGRDSLVNPGPAMASHKDDEEKFFPQSGVLIFGKQGSEKTNVDIEKVMITDEEEIRTTNPVATEQYGSVSTNLQSGNTQAATADVNTQGVLPGMVWQDRDVHLQGPIWAKIPHTDGHFHPSPLMGGFGLKHPPPQILIKNTPVPANPSTTFSAAKFASFITQYSTGQVSVEIEWELQKENSKRWNPEIQYTSNYNKSVNVDFTVDTNGVYSEPRPIGTRYLTRNL

SEQ ID NO: 4941 - DNA, 2208 bp, Adeno-associated virus
atggctgccgatggttatcttccagattggctcgaggacactctctctgaaggaataagacagtggtggaagctcaaacctggcccaccaccaccaaagcccgcagagcggcataaggacgacagcaggggtcttgtgcttcctgggtacaagtacctcggacccttcaacggactcgacaagggggagccggtcaacgaggcagacgccgcggccctcgagcacgacaaggcctacgaccggcagctcgacagcggagacaacccgtacctcaagtacaaccacgccgacgcagagtttcaggagcgccttaaagaagatacgtcttttgggggcaacctcggacgagcagtcttccaggcgaaaaagagggttcttgaacctctgggcctggttgaggaacctgttaagacggctccgggaaaaaagaggccggtagagcactctcctgtggagccagactcctcctcgggaaccggaaaagcgggccagcagcctgcaagaaaaagattaaattttggtcagactggagacgcagactccgtacctgacccccagcctctcggacagccaccagcagccccctctggtctgggatctactacaatggctacaggcagtggcgcaccaatggcagacaataacgagggtgccgatggagtgggtaattcctcaggaaattggcattgcgattcccaatggctgggcgacagagtcatcaccaccagcacccgaacctgggccctgcccacatacaacaaccacctctacaagcaaatctccagccaatcaggagccagcaacgacaaccactactttggctacagcaccccctgggggtattttgacttcaacagattccactgccacttttcaccacgtgactggcaaagactcatcaacaacaactggggattccggcccaaaagactcaacttcaagctctttaatattcaagtcaaagaggtcacgcagaatgacggtacgacgacgattgccaataaccttaccagcacggttcaggtgtttactgactcggagtaccagctcccgtacgtcctgggctcggcgcatcaaggatgcctcccgccgtttccagcggacgtcttcatggtcccacagtatggatacctcaccctgaacaacgggagtcaggcggtaggacgctcttccttttactgcctggagtactttccttctcagatgctgcgtactggaaacaactttcagttcagctacacttttgaagacgtgcctttccacagcagctacgctcacagccagagtctggatcggctgatgaatcctctgatcgaccagtacctgtattatctgaacaagacacaaacaaatagtggaactcttcagcagtctcggctactgtttagccaagctggaccaaccaacatgtctcttcaagctaaaaactggctgcctggaccttgctacagacagcagcgtctgtcaaaacaggcaaacgacaacaacaacagcaactttccctggactgcagctacaaagtatcatctaaatggccgggactcgttggttaatccaggaccagctatggccagtcgcaaggatgacgaagaaaagtttttccccatgcatggaaccctgatatttggtaaacaaggaacaaatgccaacgacgcggatttggaaaatgtcatgattacagatgaagaagaaatcagggccaccaatcccgtggctacggagcagtacgggactgtgtcaaataatttgcaaaactcaaacactggtccaactactggaactgtcaatcaccaaggagcgttacctggtatggtgtggcaggatcgagacgtgtacctgcagggacccatttgggccaagattcctcacaccgatggacactttcatccttctccactgatgggaggttttggactcaaacacccgcctcctcagatcatgatcaaaaacactcccgttccagccaatcctcccacaaacttcagttctgccaagtttgcttctttcatcacacagtattccacgggacaggtcagcgtggagatcgagtgggagctgcagaaggagaacagcaaacgctggaatcccgaaattcagtacacttccaactacaacaagtctgttaatgtggactttactgtggacactaatggtgtgtattcagagcctcgccccattggcaccagatacctgactcgtaatctgtaa

SEQ ID NO: 4942 - protein, 735 aa, Adeno-associated virus
MAADGYLPDWLEDTLSEGIRQWWKLKPGPPPPKPAERHKDDSRGLVLPGYKYLGPFNGLDKGEPVNEADAAALEHDKAYDRQLDSGDNPYLKYNHADAEFQERLKEDTSFGGNLGRAVFQAKKRVLEPLGLVEEPVKTAPGKKRPVEHSPVEPDSSSGTGKAGQQPARKRLNFGQTGDADSVPDPQPLGQPPAAPSGLGSTTMATGSGAPMADNNEGADGVGNSSGNWHCDSQWLGDRVITTSTRTWALPTYNNHLYKQISSQSGASNDNHYFGYSTPWGYFDFNRFHCHFSPRDWQRLINNNWGFRPKRLNFKLFNIQVKEVTQNDGTTTIANNLTSTVQVFTDSEYQLPYVLGSAHQGCLPPFPADVFMVPQYGYLTLNNGSQAVGRSSFYCLEYFPSQMLRTGNNFQFSYTFEDVPFHSSYAHSQSLDRLMNPLIDQYLYYLNKTQTNSGTLQQSRLLFSQAGPTNMSLQAKNWLPGPCYRQQRLSKQANDNNNSNFPWTAATKYHLNGRDSLVNPGPAMASRKDDEEKFFPMHGTLIFGKQGTNANDADLENVMITDEEEIRATNPVATEQYGTVSNNLQNSNTGPTTGTVNHQGALPGMVWQDRDVYLQGPIWAKIPHTDGHFHPSPLMGGFGLKHPPPQIMIKNTPVPANPPTNFSSAKFASFITQYSTGQVSVEIEWELQKENSKRWNPEIQYTSNYNKSVNVDFTVDTNGVYSEPRPIGTRYLTRNL

SEQ ID NO: 4943 - DNA, 2208 bp, Adeno-associated virus
atggctgccgatggttatcttccagattggctcgaggacactctctctgaaggaataagacagtggtggaagctcaaacctggcccaccaccaccaaagcccgcagagcggcataaggacgacagcaggggtcttgtgcttcctgggtacaagtacctcggacccttcaacggactcgacaagggagagccggtcaacgaggcagacgccgcggccctcgagcacgacaaagcctacgaccggcagctcgacagcggagacaacccgtacctcaagtacaaccacgccgacgcggagtttcaggagcgccttaaagaagatacgtcttttgggggcaacctcggacgagcagtcttccaggcgaaaaagagggttcttgaacctctgggcctggttggggaacctgtcaagacggctccaggaaaaaagaggccggtagagcactctcctgtggagccagactcctcctcgggaaccggaaaggcgggccagcagcctgcaagaaaaagattgaattttggtcagactggagacgcagactcagtacctgacccccagcctctcggacagccaccagcagccccctctggtctgggaactaatacgatggctacaggcagtggcgcaccaatggcagacaataacgagggcgccgacggagtgggtaattcctcgggaaattggcattgcgattccacatggatgggcgacagagtcatcaccaccagcacccgaacctgggccctgcccacctacaacaaccacctctacaaacaaatttccagccaatcaggagcctcgaacgacaatcactactttggctacagcaccccttgggggtattttgacttcaacagattccactgccacttttcaccacgtgactggcaaagactcatcaacaacaactggggattccgacccaagagactcaacttcaagctctttaacattcaagtcaaagaggtcacgcagaatgacggtacgacgacgattgccaataaccttaccagcacggttcaggtgtttactgactcggagtaccagctcccgtacgtcctcggctcggcgcatcaaggatgcctcccgccgttcccagcagacgtcttcatggtgccacagtatggatacctcaccctgaacaacgggagtcaggcagtaggacgctcttcattttactgcctggagtactttccttctcagatgctgcgtaccggaaacaactttaccttcagctacacttttgaggacgttcctttccacagcggctacgctcacagccagagtctggaccgtctcatgaatcctctcatcgaccagtacctgtattacttgagcacaacaaacactccaagtggaaccaccacgcagtcaaggcttcagttttctcaggccggagcgagtgacattcgggaccagtctaggaactggcttcctggaccctgttaccgccagcagcgagtatcaaagacatctgcggataacaacaacagtgaatactcgtggactggagctaccaagtaccacctcaatggcagagactctctggtgaatccgggcccggccatggcaagccacaaggacaatgaagaaaagttttttcctcagagcggggttctcatctttgggaagcaaggctcagagaaaacaaatgtggacattgaaaaggtcatgattacagacgaagaggaaatcaggacaaccaatcccgtggctacggagcagtacggttctgtatctaccaacctccagagaggcaacagacaagcagctaccgcagatgtcaacacacaaggcgttcttccaggcatggtctggcaggacagagatgtgtaccttcaggggcccatctgggcaaagattccacacacggacggacattttcacccctctcccctcatgggtggattcggacttaaacaccctcctccacagattctcatcaagaacaccccggtacctgcgaatccttcgaccaccttcagtgcggcaaagtttgcttccttcatcacacagtactccacgggacaggtcagcgtggagatcgagtgggagctgcagaaggaaaacagcaaacgctggaatcccgaaattcagtacacttccaactacaacaagtctgttaatgtggactttactgtggacactaatggcgtgtattcagagcctcgccccattggcaccagatacctgactcgtaatctgtaa

SEQ ID NO: 4944 - protein, 735 aa, Adeno-associated virus
MAADGYLPDWLEDTLSEGIRQWWKLKPGPPPPKPAERHKDDSRGLVLPGYKYLGPFNGLDKGEPVNEADAAALEHDKAYDRQLDSGDNPYLKYNHADAEFQERLKEDTSFGGNLGRAVFQAKKRVLEPLGLVGEPVKTAPGKKRPVEHSPVEPDSSSGTGKAGQQPARKRLNFGQTGDADSVPDPQPLGQPPAAPSGLGTNTMATGSGAPMADNNEGADGVGNSSGNWHCDSTWMGDRVITTSTRTWALPTYNNHLYKQISSQSGASNDNHYFGYSTPWGYFDFNRFHCHFSPRDWQRLINNNWGFRPKRLNFKLFNIQVKEVTQNDGTTTIANNLTSTVQVFTDSEYQLPYVLGSAHQGCLPPFPADVFMVPQYGYLTLNNGSQAVGRSSFYCLEYFPSQMLRTGNNFTFSYTFEDVPFHSGYAHSQSLDRLMNPLIDQYLYYLSTTNTPSGTTTQSRLQFSQAGASDIRDQSRNWLPGPCYRQQRVSKTSADNNNSEYSWTGATKYHLNGRDSLVNPGPAMASHKDNEEKFFPQSGVLIFGKQGSEKTNVDIEKVMITDEEEIRTTNPVATEQYGSVSTNLQRGNRQAATADVNTQGVLPGMVWQDRDVYLQGPIWAKIPHTDGHFHPSPLMGGFGLKHPPPQILIKNTPVPANPSTTFSAAKFASFITQYSTGQVSVEIEWELQKENSKRWNPEIQYTSNYNKSVNVDFTVDTNGVYSEPRPIGTRYLTRNL

SEQ ID NO: 4945 - DNA, 2208 bp, Adeno-associated virus
atggctgccgatggttatcttccagattggctcgaggacactctctctgaaggaataagacagtggtggaagctcaaacctggcccaccaccaccaaagcccgcagagcggcataaggacgacagcaggggtcttgtgcttcctgggtacaagtacctcggacccttcaacggactcgacaagggagagccggtcaacgaggcagacgccgcggccctcgagcacgacaaagcctacgaccggcagctcgacagcggagacaacccgtacctcaagtacaaccacgccgacgcggagtttcaggagcgccttaaagaagatacgtcttttgggggcaacctcggacgagcagtcttccaggcgaaaaagagggttcttgaacctctgggcctggttggggaacctgttaagacggctccgggaaaaaagaggccggtagagcactctcctgtggagccagactcctcctcgggaaccggaaaggcgggccagcagcctgcaagaaaaagattgaattttggtcagactggagacgcagactcagtacctgacccccagcctctcggacagccaccagcagccccctctggtctgggaactaatacgatggctacaggcagtggcgcaccaatggcagacaataacgagggcgccgacggagtgggtaattcctcgggaaatcggcattgcgattccacatggatgggcgacagagtcatcaccaccagcacccgaacctgggccctgcccacctacaacaaccacctctacagacaaatttccagccaatcaggagcctcgaacgacaatcactactttggctacagcaccccttgggggtattttgacttcaacagattccactgccacttttcaccacgtgactggcaaagactcatcaacaacaactggggattccgacccaagagactcaacttcaagctctttaacattcaagtcaaagaggtcacgcagaatgacggtacgacgacgattgccaataaccttaccagcacggttcaggtgtttactgactcggagtaccagctcccgtacgtcctcggctcggcgcatcaaggatgcctcccgccgttcccagcagacgtcttcatggtgccacagtatggatacctcaccctgagcaacgggagtcaggcagtaggacgctcttcattttactgcccggagtactttccttctcagatgctgcgtaccggaaacaactttaccttcagctacacttttgaggacgttcctttccacagcagctacgctcacagccagagtctggaccgtctcatgaatcctctcatcgaccagtacctgtattacttgagcacaacaaacactccaagtggaaccaccacgcagtcaaggcttcagttttctcaggccggagcgagtgacattcgggaccagtctaggaactggcttcctggaccctgttaccgccagcagcgagtatcaaagacatctgcggataacaacaacagtgaatactcgtggactggagctaccaagtaccacctcaatggcagagactctctggtgaatccgggcccggccatggcaagccacaaggacaatgaagaaaagttttttcctcagagcggggttctcatctttgggaagcaaggctcagagaaaacaaatgtggacattgaaaaggtcatgattacagacgaagaggaaatcaggacaaccaatcccgtggctacggagcagtatggttctgtatctaccaacctccagagaggcaacagacaagcagctaccgcagatgtcaacacacaaggcgttcttccaggcatggtctggcaggacagagatgtgtaccttcaggggcccatctgggcaaagattccacacacggacggacattttcacccctctcccctcatgggtggattcggacctaaacaccctcctccacagattctcatcaagaacaccccggtacctgcgaatccttcgaccaccttcagtgcggcaaagtttgcttccttcatcacacagtactccacgggacaggtcagcgtggagatcgagtgggagctgcagaaggaaaacagcaaacgctggaatcccgaaattcagtacacttccaactacaacaagtctgttaatgtggactttactgtggacactaatggcgtgtattcagagcctcgccccattggcaccagatacctgactcgtaatttgtaa

SEQ ID NO: 4946 - protein, 735 aa, Adeno-associated virus
MAADGYLPDWLEDTLSEGIRQWWKLKPGPPPPKPAERHKDDSRGLVLPGYKYLGPFNGLDKGEPVNEADAAALEHDKAYDRQLDSGDNPYLKYNHADAEFQERLKEDTSFGGNLGRAVFQAKKRVLEPLGLVGEPVKTAPGKKRPVEHSPVEPDSSSGTGKAGQQPARKRLNFGQTGDADSVPDPQPLGQPPAAPSGLGTNTMATGSGAPMADNNEGADGVGNSSGNRHCDSTWMGDRVITTSTRTWALPTYNNHLYRQISSQSGASNDNHYFGYSTPWGYFDFNRFHCHFSPRDWQRLINNNWGFRPKRLNFKLFNIQVKEVTQNDGTTTIANNLTSTVQVFTDSEYQLPYVLGSAHQGCLPPFPADVFMVPQYGYLTLSNGSQAVGRSSFYCPEYFPSQMLRTGNNFTFSYTFEDVPFHSSYAHSQSLDRLMNPLIDQYLYYLSTTNTPSGTTTQSRLQFSQAGASDIRDQSRNWLPGPCYRQQRVSKTSADNNNSEYSWTGATKYHLNGRDSLVNPGPAMASHKDNEEKFFPQSGVLIFGKQGSEKTNVDIEKVMITDEEEIRTTNPVATEQYGSVSTNLQRGNRQAATADVNTQGVLPGMVWQDRDVYLQGPIWAKIPHTDGHFHPSPLMGGFGPKHPPPQILIKNTPVPANPSTTFSAAKFASFITQYSTGQVSVEIEWELQKENSKRWNPEIQYTSNYNKSVNVDFTVDTNGVYSEPRPIGTRYLTRNL

SEQ ID NO: 4947 - DNA, 2205 bp, Adeno-associated virus
atggctgccgatggttatcttccagattggctcgaggacactctctctgaaggaataagacagtggtggaagctcaaacctggcccaccaccaccaaagcccgcagagcggcataaggacgacagcaggggtcttgtgcttcctgggtacaagtacctcggacccttcaacggactcgacaagggagagccggtcaacgaggcagacgccgcggccctcgagcacgacaaggcctacgaccggcagctcgacagcggagacaacccgtacctcaagtacaaccacgccgacgcggagtttcaggagcgtcttaaagaagatacgtcttttgggggcaacctcggacgagcagtcttccaggcgaaaaagagggttcttgaacctctgggcctggttgaggaacctgttaagacggctccgggaaaaaagaggccggtagagcactctcctgcggagccagactcctcctcgggaaccggaaaagcgggccagcagcctgcaagaaaaagactgaatttcggtcagactggagacgcagactccgtacctgacccccagcctctcagacagccaccagcagcccccacaagtttgggatctactacaatggctacaggcagtggcgcaccaatggcagacaataacgagggtgccgatggagtgggtaattcctcaggaaattggcattgcgattcccaatggctgggcgacagagtcatcaccaccagcacccgaacctgggccctgcccacctacaacaaccacctttacaagcaaatctccagccaatcaggagcctcaaacgacaaccactactttggctacagcaccccctgggggtattttgacttcaacagattccactgccacttttcaccacgtgactggcaaagactcatcaacaacaactggggattccgacccaagagactcaacttcaagctctttaacattcaagtcaaagaggtcacgcagaatgacggtacgacgacgattgccaataaccttaccagcacggttcaggtgtttactgactcggagtaccagctcccgtacgtcctcggctcggcgcatcaaggatgcctcccgccgtttccagcggacgtcttcatggtcccacagtatggatacctcaccctgaacaacgggagtcaggcggtaggacgctcttccttttactgcctggagtactttccttctcagatgctgcgtactggaaacaactttcagttcagctacacttttgaagacgtgcctttccacagcagctacgctcacagccagagtttggatcggctgatgaatcctctgatcgaccagtacctgtattatctaaacagaacacaaacagctagtggaactcagcagtctcggctactgtttagccaagctggacccacaagcatgtctcttcaagctaaaaactggctgcctggaccgtgttatcgccagcagcgtttgtcaaagcaggcaaacgacaacaacaacagcaactttccctggactggagctaccaagtactacctcaatggcagagactctttggtgaacccgggcccggccatggccagccacaaggacgatgaagaaaagtttttccccatgcatggaaccctaatatttggtaaagaaggaacaaatgctaccaacgcggaattggaaaatgtcatgattacagatgaagaggaaatcaggaccaccaatcccgtggctacagagcagtacggatatgtgtcaaataatttgcaaaactcaaatactgctgcaagtactgaaactgtgaatcaccaaggagcattacctggtatggtgtggcaggatcgagacgtgtacctgcagggacccatttgggccaagattcctcacaccgatggacactttcatccttctccactgatgggaggttttggactcaaacacccgcctcctcagattatgatcaaaaacactcccgttccagccaatcctcccacaaacttcagttctgccaagtttgcttccttcatcacacagtattccacgggacaggtcagcgtggagatcgagtgggagctgcagaaggagaacagcaaacgctggaatcccgaaattcagtacacttccaactacaacaaatctgttaatgtggactttactgtggacactaatggtgtgtattcagagcctcgccccattggcaccagatacctgactcgtaatctgtaa

SEQ ID NO: 4948 - protein, 734 aa, Adeno-associated virus
MAADGYLPDWLEDTLSEGIRQWWKLKPGPPPPKPAERHKDDSRGLVLPGYKYLGPFNGLDKGEPVNEADAAALEHDKAYDRQLDSGDNPYLKYNHADAEFQERLKEDTSFGGNLGRAVFQAKKRVLEPLGLVEEPVKTAPGKKRPVEHSPAEPDSSSGTGKAGQQPARKRLNFGQTGDADSVPDPQPLRQPPAAPTSLGSTTMATGSGAPMADNNEGADGVGNSSGNWHCDSQWLGDRVITTSTRTWALPTYNNHLYKQISSQSGASNDNHYFGYSTPWGYFDFNRFHCHFSPRDWQRLINNNWGFRPKRLNFKLFNIQVKEVTQNDGTTTIANNLTSTVQVFTDSEYQLPYVLGSAHQGCLPPFPADVFMVPQYGYLTLNNGSQAVGRSSFYCLEYFPSQMLRTGNNFQFSYTFEDVPFHSSYAHSQSLDRLMNPLIDQYLYYLNRTQTASGTQQSRLLFSQAGPTSMSLQAKNWLPGPCYRQQRLSKQANDNNNSNFPWTGATKYYLNGRDSLVNPGPAMASHKDDEEKFFPMHGTLIFGKEGTNATNAELENVMITDEEEIRTTNPVATEQYGYVSNNLQNSNTAASTETVNHQGALPGMVWQDRDVYLQGPIWAKIPHTDGHFHPSPLMGGFGLKHPPPQIMIKNTPVPANPPTNFSSAKFASFITQYSTGQVSVEIEWELQKENSKRWNPEIQYTSNYNKSVNVDFTVDTNGVYSEPRPIGTRYLTRNL

SEQ ID NO: 4949 - DNA, 3160 bp, Adeno-associated virus
acccttcactaaagggactagtcctgcaggtttaaacgaattcgcccttgctgcgtcaactggaccaatgagaactttcccttcaacgactgtgtcgacaagatggtgatttggtgggaggaggggaagatgaccgccaaggtcgtggagtcggccaaagccattctcggaggaagcaaggtgcgcgtggaccagaaatgcaagtcctcggcccagatagatccgactcccgtgatcgtcacctccaacaccaacatgtgcgccgtgattgacgggaactcaacgaccttcgaacaccagcagccgttgcaagaccggatgttcaaatttgaactcacccgccgtctggatcatgactttgggaaggtcaccaagcgggaagtcaaagactttttccggtgggcaaaggatcacgtggttgaggtggagcatgaattctacgtcaaaaagggtggagccaagaaaagacccgcccctagtgacgcagatataagtgagcccaaacgggtgcgcgagtcagttgcgcagccatcgacgtcagacgcggaagcttcgatcaactacgcggacaggtaccaaaacaaatgttctcgtcacgtgggcatgaatctgatgctgtttccctgcagacaatgcgagagaatgaatcaaaattcaaatatctgcttcactcacggacagaaagactgtttagagtgctttcccgtgtcagaatctcaacctgtttctgtcgtcaaaaaggcgtatcagaaactgtgctacattcatcatatcatgggaaaggtgccagacgcttgcactgcctgcgatctggtcaatgtggatttggatgactgcatctctgaacaataaatgatttaaatcaggtatggctgccgatggttatcttccagattggctcgaggacactctctctgaaggaataagacagtggtggaagctcaaacctggcccaccaccaccaaagcccgcagagcggcataaggacgacagcaggggtcttgtgcttcctgggtacaagtacctcggacccttcaacggactcgacaagggagagccggtcaacgaggcagacgccgcggccctcgagcacgacaaggcctacgaccggcagctcgacagcggagacaacccgtacctcaagtacaaccacgccgacgcggagtttcaggagcgtcttaaagaagatacgtcttttgggggcaacctcggacgagcagtcttccaggcgaaaaagagggttcttgaacctctgggcctggttgaggaacctgttaagacggctccgggaaaaaagaggccggtagagcactctcctgcggagccagactcctcctcgggaaccggaaaagcgggccagcagcctgcaagaaaaagactgaatttcggtcagactggagacgcagactccgtacctgacccccagcctctcagacagccaccagcagcccccacaagtttgggatctactacaatggctacaggcagtggcgcaccaatggcagacaataacgagggtgccgatggagtgggtaattcctcaggaaattggcattgcgattcccaatggctgggcgacagagtcatcaccaccagcacccgaacctgggccctgcccacctacaacaaccacctttacaagcaaatctccagccaatcaggagcctcaaacgacaaccactactttggctacagcaccccctgggggtattttgacttcaacagattccactgccacttttcaccacgtgactggcaaagactcatcaacaacaactggggattccgacccaagagactcaacttcaagctctttaacattcaagtcaaagaggtcacgcagaatgacggtacgacgacgattgccaataaccttaccagcacggttcaggtgtttactgactcggagtaccagctcccgtacgtcctcggctcggcgcatcaaggatgcctcccgccgtttccagcggacgtcttcatggtcccacagtatggatacctcaccctgaacaacgggagtcaggcggtaggacgctcttccttttactgcctggagtactttccttctcagatgctgcgtactggaaacaactttcagttcagctacacttttgaagacgtgcctttccacagcagctacgctcacagccagagtttggatcggctgatgaatcctctgatcgaccagtacctgtattatctaaacagaacacaaacagctagtggaactcagcagtctcggctactgtttagccaagctggacccacaagcatgtctcttcaagctaaaaactggctgcctggaccgtgttatcgccagcagcgtttgtcaaagcaggcaaacgacaacaacaacagcaactttccctggactggagctaccaagtactacctcaatggcagagactctttggtgaacccgggcccggccatggccagccacaaggacgatgaagaaaagtttttccccatgcatggaaccctaatatttggtaaagaaggaacaaatgctaccaacgcggaattggaaaatgtcatgattacagatgaagaggaaatcaggaccaccaatcccgtggctacagagcagtacggatatgtgtcaaataatttgcaaaactcaaatactgctgcaagtactgaaactgtgaatcaccaaggagcattacctggtatggtgtggcaggatcgagacgtgtacctgcagggacccatttgggccaagattcctcacaccgatggacactttcatccttctccactgatgggaggttttggactcaaacacccgcctcctcagattatgatcaaaaacactcccgttccagccaatcctcccacaaacttcagttctgccaagtttgcttccttcatcacacagtattccacgggacaggtcagcgtggagatcgagtgggagctgcagaaggagaacagcaaacgctggaatcccgaaattcagtacacttccaactacaacaaatctgttaatgtggactttactgtggacactaatggtgtgtattcagagcctcgccccattggcaccagatacctgactcgtaatctgtaattgcttgttaatcaataaaccgtttaattcgtttcagttgaactttggtctctgcgaagggcgaattcgcggccgctaaatcaatcg

SEQ ID NO: 4950 - protein, 734 aa, Adeno-associated virus
MAADGYLPDWLEDTLSEGIRQWWKLKPGPPPPKPAERHKDDSRGLVLPGYKYLGPFNGLDKGEPVNEADAAALEHDKAYDRQLDSGDNPYLKYNHADAEFQERLKEDTSFGGNLGRAVFQAKKRVLEPLGLVEEPVKTAPGKKRPVEHSPAEPDSSSGTGKAGQQPARKRLNFGQTGDADSVPDPQPLGQPPAAPTSLGSTTMATGSGAPMADNNEGADGVGNSSGNWHCDSQWLGDRVITTSTRTWALPTYNNHLYKQISSQSGASNDNHYFGYSTPWGYFDFNRFHCRFSPRDWQRLINNNWGFRPKRLNFKLFNIQVKEVTQNDGTTTIANNLTSTVQVFTDSEYQLPYVLGSAHQGCLPPFPADVFMVPQYGYLTLNNGSQAVGRSSFYCLEYFPSQMLRTGNNFQFSYTFEDVPFHSSYAHSQGLDRLMNPLIDQYLYYLNRTQTASGTQQSRLLFSQAGPTSMSLQAKNWLPGPCYRQQRLSKQANDNNNSNFPWTGATKYHLNGGDSLVNPGPAMASHKDDEEKFFPMHGTLIFGKEGTNATNAELENVMITDEEEIRTTNPVATEQYGYVSNNLQNSNTAASTETVNHQGALPGMVWQDRDVYLRGPIWAKIPHADGHFHPSPLMGGFGLKHPPPQIMIKNTPVPANPPTNFSSAKFASFITQYSTGQVSVEIEWELQKENSKRWNPEIQYTSNYNKSVNVDFTVDTNGVYSEPRPIGTRYLTRNL

SEQ ID NO: 4951 - DNA, 3157 bp, Adeno-associated virus
ctcactaagggactagtcctgcaggtttaaacgaattcgcccttgctgcgtcaactggaccaatgagaactttcccttcaacgactgtgtcgacaagatggtgatttggtgggaggaggggaagatgaccgccaaggtcgtggagtcggccaaagccactctcggaggaagcaaggtgcgcgtggaccagaaacgcaagtcctcggcccagatagatccgactcccgtgatcgtcacctccaacaccaacatgtgcgccgtgattgacgggaactcaacgaccttcgaacaccagcagccgttgcaagaccgaatgttcaaatttgaactcacccgccgtctggatcatgacttcgggaaggtcaccaagcaggaagtcaaagactttttccggtgggcaaaggatcacgtggttgaggtggagcatgaattctacgtcaaaaagggtggagccaagaaaagacccgcccctagtgacgcagatataagtgagcccaaacgggtgcgcgagtcagttgcgcagccatcgacgtcagacgcggaagcttcgatcaactacgcggacaggtaccaaaacaaatgttctcgtcacgtgggcatgaatctgatgctgtttccctgcagacaatgcgagagaatgaatcaaaattcaaatatctgcttcactcacggacagaaagactgtttagagtgctttcccgtgtcagaatctcaacctgtttctgtcgtcaaaaaggcgtatcagaaactgtgctacattcatcatatcatgggaaaggtgccagacgcttgcactgcctgcgatctggtcaatgtggatttggatgactgcatctctgaacaataaatgatttaaatcaggtatggctgccgatggttatcttccagattggctcgaggacactctctctgaaggaataagacagtggtggaagctcaaacctggcccaccaccaccaaagcccgcagagcggcataaggacgacagcaggggtcttgtgcttcctgggtacaagtacctcggacccttcaacggactcgacaagggagagccggtcaacgaggcagacgccgcggctctcgagcacgacaaggcctacgaccggcagctcgacagcggagacaacccgtacctcaagtacaaccacgccgacgcggagtttcaggagcgtcttaaagaagatacgtcttttgggggcaacctcggacgagcagtcttccaggcgaaaaagagggttcttgaacctctgggcctggttgaggaacctgttaagacggctccgggaaaaaagaggccggtagagcactctcctgcggagccagactcctcctcgggaaccggaaaagcgggccagcagcctgcaagaaaaagactgaatttcggtcagactggagacgcagactccgtacctgacccccagcctctcggacagccaccagcagcccccacaagtttgggatctactacaatggctacaggcagtggcgcaccaatggcagacaataacgagggtgccgatggagtgggtaattcctcaggaaattggcattgcgattcccaatggctgggcgacagagtcatcaccaccagcacccgaacctgggccctgcccacctacaacaaccacctttacaagcaaatctccagccaatcaggagcctcaaacgacaaccactactttggctacagcaccccctgggggtattttgacttcaacagattccactgccgcttttcaccacgtgactggcaaagactcatcaacaacaactggggattccgacccaagagactcaacttcaagctctttaacattcaagtcaaagaggtcacgcagaatgacggtacgacgacgattgccaataaccttaccagcacggttcaggtgtttactgactcggagtaccagctcccgtacgtcctcggctcggcgcatcaaggatgcctcccgccgtttccagcggacgtcttcatggtcccacagtatggatacctcaccctgaacaacgggagtcaggcggtaggacgctcttccttttactgcctggagtactttccttctcagatgctgcgtactggaaacaactttcagttcagctacacttttgaagacgtgcctttccacagcagctacgctcacagccagggtttggatcggctgatgaatcctctgatcgaccagtacctgtattatctaaacagaacacaaacagctagtggaactcagcagtctcggctactgtttagccaagctggacccacaagcatgtctcttcaagctaaaaactggctgcctggaccgtgttatcgccagcagcgtttgtcaaagcaggcaaacgacaacaacaacagcaactttccctggactggagctaccaagtaccacctcaatggcggagactctttggtgaacccgggcccggccatggccagccacaaggacgatgaagaaaagtttttccccatgcatggaaccctaatatttggtaaagaaggaacaaatgctaccaacgcggaattggaaaatgtcatgattacagatgaagaggaaatcaggaccaccaatcccgtggctacagagcagtacggatatgtgtcaaataatttgcaaaactcaaatactgctgcaagtactgaaactgtgaatcaccaaggagcattacctggtatggtgtggcaggatcgagacgtgtacctgcggggacccatttgggccaagattcctcacgccgatggacactttcatccttctccactgatgggaggttttggactcaaacacccgcctcctcagattatgatcaaaaacactcccgttccagccaatcctcccacaaacttcagttctgccaagtttgcttccttcatcacacagtattccacgggacaggtcagcgtggagatcgagtgggagctgcagaaggagaacagcaaacgctggaatcccgaaattcagtacacttccaactacaacaaatctgttaatgtggactttactgtggacactaatggtgtgtattcagagcctcgccccattggcaccagatacctgactcgtaatctgtaattgcttgttaatcaataaaccgtttaattcgtttcagttgaactttggtctctgcgaagggcgaattcgcggccgctaaattcaattcg

SEQ ID NO: 4952 - protein, 734 aa, Adeno-associated virus
MAADGYLPDWLEDTLSEGIRQWWKLKPGPPPPKPAERHKDDSRGLVLPGYKYLGPFNGLDKGEPVNEADAAALEHDKAYDRQLDSGDNPYLKYNHADAEFQERLKEDTSFGGNLGRAVFQAKKRVLEPLGLVEEPVKTAPGKKRPVEHSPAEPDSSSGTGKAGQQPARKRLNFGQTGDADSVPDPQPLGQPPAAPTSLGSTTMATGSGAPMADNNEGADGVGNSSGNWHCDSQWLGDRVITTSTRTWALPTYNNHLYKQISSQSGASNDNHYFGYSTPWGYFDFNRFHCHFSPRDWQRLINNNWGFRPKRLNFKLFNIQVKEVTQNDGTTTIANNLTSTVQVFTDSEYQLPYVLGSAHQGCLPPFPADVFMVPQYGYLTLNNGSQAVGRSSFYCLECFPSQMLRTGNNFQFSYTFEDVPFHSSYAHSQSLDRLMNPLIDQYLYYLNRTQTASGTQQSRLLFSQAGPTSMSLQAKNWLPGPCYRQQRLSKQANDNNNSNFPWTGATKYHLNGRDSLVNPGPAMASHKDDEEKFFPMHGTLIFGKEGTNATNAELENVMITDEEEIRTTNPVATEQYGYVSNNLQNSNTAASTETVNHQGALPGMVWQDRDVYLQGPIWAKIPHTDGHFHPSPLMGGFGLKHPPPQIMIKNTPVPANPPTNFSSAKFASFITQYSTGQVSVEIEWELQKENSKRWNPEIQYTSNYNKSVNVDFTVDTNGVYSEPRPIGTRYLTRNL

SEQ ID NO: 4953 - DNA, 2208 bp, Adeno-associated virus
atggctgccgatggttatcttccagattggctcgaggacactctctctgaaggaataagacagtggtggaagctcaaacctggcccaccaccaccaaagcccgcagagcggcataaggacgacagcaggggtcttgtgcttcctggatacaagtacctcggacccttcaacggactcgacaagggagagccggtcaacgaggcagacgccgcggccctcgagcacgacaaggcctacgaccggcagctcgacagcggagacaacccgtacctcaagtacaaccacgccgacgcggagtttcaggagcgccttaaagaagatacgtcttttgggggcaacctcggacgagcagtcttccaggcgaaaaagagggttcttgaacctctgggcctggttgaggaacctgttaagacggctccgggaaaaaagaggccggtagagcactctcctgtggagccagactcctcctcgggaaccggaaaagcgggcaaccagcctgcaagaaaaagattgaatttcggtcagactggagacgcagactccgtacctgacccccagcctctcggacagccaccagcatccccctctggtctgggaactaatacgatggctacaggcagtggcgcaccaatggcagacaataacgagggcgccgacggagtgggtaattcctcgggaaattggcattgcgattccacatggatgggcgacagagtcgtcaccaccagcacccgcacctgggccctgcccacctacaacaaccacctctacaagcagatttccagccaatcaggagccagcaacgacaaccactactttggctacagcaccccttgggggtattttgacttcaacagattccactgccacttttcgccacgcgactggcagagactcatcaacaacaactggggattccggcccaaaagactcaacttcaagctgtttaacattcaagtcaaggaggtcacgcagaatgacggtacgacgacgattgccaataaccttaccagcacggttcaggtgtttactgacttggagtaccagctcccgtacgtcctcggctcggcgcatcaaggatgcctcccgccgttcccagcagacgtcttcatggtgccacagtatggatacctcaccctgaacaacgggagtcaggcggtaggacgctcttccttttactgcctggagtactttccttctcagatgcttcgcaccggaaacaactttaccttcagctacacttttgaagacgttcctttccacagcagctacgctcacagtcaaagtctggaccgtctcatgaatcctctcatcgaccagtacctgtattacttgagcagaacaaacactccaagcggaaccactacgcagtccaggcttcagttttctcaggccggagcgagtgacattcgggaccagtctaggaactggcttcctggaccctgttaccgccagcagcgagtatcaaagacagctgcggataacaacaacagtgaatactcgtggactggagctaccaagtaccacctcaatggcagagactctctggtgaatccgggcccggccatggccagccacaaggacgatgaagaaaagttttttcctcaaagcggggttctcatctttgggaagcaaggctcagagaaaacaaatgtggacattgaaaaggtcatgattacagacgaagaggaaatcaggaccaccaatcccgtggctacggagcagtatggttctgtatctaccaacctccagagcggcaacacacaagcagctacctcagatgtcaacacacaaggcgttcttccaggcatggtctggcaggacagagacgtgtacctgcaggggcccatctgggcaaaaattccacacacggacggacattttcacccctctcccctcatgggcggatttggacttaaacaccctcctccacagattctcattaagaataccccggtacctgcgaatccttcgaccaccttcagcgcggcaaagtttgcttccttcatcacacagtattccacggggcaggtcagcgtggagatcgagtgggagctgcagaaggagaacagcaaacgctggaatcccgaaattcagtacacttccaactacaacaaatctgttaatgtggactttactgtggacactaatggggtgtattcagagcctcgccctattggcaccagatacctgactcgtaatctgtaa

SEQ ID NO: 4954 - DNA, 3159 bp, Adeno-associated virus
gattgatttagcggccgcgaattcgcccttgctgcgtcaactggaccaatgagaactttcccttcaacgattgcgtcgacaagatggtgatctggtgggaggagggaaagatgaccgccaaggtcgtggagtcggccaaagccattctcggaggaagcaaggtgcgtgtggaccaaaagtgcaagtcttcggcccagatcgacccgactcccgtgatcgtcacctccaacaccaacatgtgcgccgtgattgatggaaactcaacgaccttcgagcaccagcagccgttgcaagaccggatgttcaaatttgaacttacccgccgtctggatcatgactttggaaaggtcaccaagcaggaagtgaaagactttttccggtgggcaaaggatcacgtggttgaggtggagcatgagttctacgtcaaaaagggtggagccaaaaaaagacccgcccccagtgacgcagatataagtgagcccaaacgggcgcgcgagtcagttgcgcagccatcgacgtcagacgcggaagcttcgatcaactacgcggacaggtaccaaaacaaatgttctcgtcacgtgggcatgaatctgatgctgtttccctgcagacaatgcgagagaatgaatcagaattcaaatatctgcttcactcacggacagaaagactgtccatagtgctttcccgtgtcagaatctcaacccgtttctgtcgtcaaaaaggcgtatcagaaactgtgctacattcatcacatcatgggaaaggtgccagacgcttgcactgcttgcgacctggtcaatgtggatttggatgactgcatctctgaacaataaatgatttaaatcaggtatggctgccgatggttatcttccagattggctcgaggacactctctctgaaggaataagacagtggtggaagctcaaacctggcccaccaccaccaaagcccgcagagcggcataaggacgacagcaggggtcttgtgcttcctggatacaagtacctcggacccttcaacggactcgacaagggagagccggtcaacgaggcagacgccgcggccctcgagcacgacaaggcctacgaccggcagctcgacagcggagacaacccgtacctcaagtacaaccacgccgacgcggagtttcaggagcgccttaaagaagatacgtcttttgggggcaacctcggacgagcagtcttccaggcgaaaaagagggttcttgaacctctgggcctggttgaggaacctgttaagacggctccgggaaaaaagaggccggtagagcactctcctgtggagccagactcctcctcgggaaccggaaaagcgggcaaccagcctgcaagaaaaagattgaatttcggtcagactggagacgcagactccgtacctgacccccagcctctcggacagccaccagcatccccctctggtctgggaactaatacgatggctacaggcagtggcgcaccaatggcagacaataacgagggcgccgacggagtgggtaattcctcgggaaattggcattgcgattccacatggatgggcgacagagtcgtcaccaccagcacccgcacctgggccctgcccacctacaacaaccacctctacaagcagatttccagccaatcaggagccagcaacgacaaccactactttggctacagcaccccttgggggtattttgacttcaacagattccactgccacttttcgccacgcgactggcagagactcatcaacaacaactggggattccggcccaaaagactcaacttcaagctgtttaacattcaagtcaaggaggtcacgcagaatgacggtacgacgacgattgccaataaccttaccagcacggttcaggtgtttactgacttggagtaccagctcccgtacgtcctcggctcggcgcatcaaggatgcctcccgccgttcccagcagacgtcttcatggtgccacagtatggatacctcaccctgaacaacgggagtcaggcggtaggacgctcttccttttactgcctggagtactttccttctcagatgcttcgcaccggaaacaactttaccttcagctacacttttgaagacgttcctttccacagcagctacgctcacagtcaaagtctggaccgtctcatgaatcctctcatcgaccagtacctgtattacttgagcagaacaaacactccaagcggaaccactacgcagtccaggcttcagttttctcaggccggagcgagtgacattcgggaccagtctaggaactggcttcctggaccctgttaccgccagcagcgagtatcaaagacagctgcggataacaacaacagtgaatactcgtggactggagctaccaagtaccacctcaatggcagagactctctggtgaatccgggcccggccatggccagccacaaggacgatgaagaaaagttttttcctcaaagcggggttctcatctttgggaagcaaggctcagagaaaacaaatgtggacattgaaaaggtcatgattacagacgaagaggaaatcaggaccaccaatcccgtggctacggagcagtatggttctgtatctaccaacctccagagcggcaacacacaagcagctacctcagatgtcaacacacaaggcgttcttccaggcatggtctggcaggacagagacgtgtacctgcaggggcccatctgggcaaaaattccacacacggacggacattttcacccctctcccctcatgggcggatttggacttaaacaccctcctccacagattctcattaagaataccccggtacctgcgaatccttcgaccaccttcagcgcggcaaagtttgcttccttcatcacacagtattccacggggcaggtcagcgtggagatcgagtgggagctgcagaaggagaacagcaaacgctggaatcccgaaattcagtacacttccaactacaacaaatctgttaatgtggactttactgtggacactaatggggtgtattcagagcctcgccctattggcaccagatacctgactcgtaatctgtaattgcttgttaatcaataaaccgtttaattcgtttcagttgaactttggtctctgcgaagggcgaattcgtttaaacctgcaggactagtccctttagtgagg

SEQ ID NO: 4955 - protein, 735 aa, Adeno-associated virus
MAADGYLPDWLEDTLSEGIRQWWKLKPGPPPPKPAERHKDDSRGLVLPGYKYLGPFNGLDKGEPVNEADAAALEHDKAYDRQLDSGDNPYLKYNHADAEFQERLKEDTSFGGNLGRAVFQAKKRVLEPLGLVEEPVKTAPGKKRPVEHSPVEPDSSSGTGKAGNQPARKRLNFGQTGDADSVPDPQPLGQPPASPSGLGTNTMATGSGAPMADNNEGADGVGNSSGNWHCDSTWMGDRVVTTSTRTWALPTYNNHLYKQISSQSGASNDNHYFGYSTPWGYFDFNRFHCHFSPRDWQRLINNNWGFRPKRLNFKLFNIQVKEVTQNDGTTTIANNLTSTVQVFTDLEYQLPYVLGSAHQGCLPPFPADVFMVPQYGYLTLNNGSQAVGRSSFYCLEYFPSQMLRTGNNFTFSYTFEDVPFHSSYAHSQSLDRLMNPLIDQYLYYLSRTNTPSGTTTQSRLQFSQAGASDIRDQSRNWLPGPCYRQQRVSKTAADNNNSEYSWTGATKYHLNGRDSLVNPGPAMASHKDDEEKFFPQSGVLIFGKQGSEKTNVDIEKVMITDEEEIRTTNPVATEQYGSVSTNLQSGNTQAATSDVNTQGVLPGMVWQDRDVYLQGPIWAKIPHTDGHFHPSPLMGGFGLKHPPPQILIKNTPVPANPSTTFSAAKFASFITQYSTGQVSVEIEWELQKENSKRWNPEIQYTSNYNKSVNVDFTVDTNGVYSEPRPIGTRYLTRNL

SEQ ID NO: 4956 - DNA, 2205 bp, Adeno-associated virus
atggctgccgatggttatcttccagattggctcgaggacactctctctgaaggaataagacagtggtggaagctcaaacctggcccaccaccaaagcccgcagagcggcataaggacgacagcaggggtcttgtgcttcctggatacaagtacctcggacccttcaacggactcgacaagggagagccggtcaacgaggcagacgccgcggccctcgagcacgacaaggcctacgaccggcagctcgacagcggagacaacccgtacctcaagtacaaccacgccgacgcggagtttcaggagcgccttaaagaagatacgtcttttgggggcaacctcggacgagcagtcttccaggcgaaaaagagggttcttgaacctctgggcctggttgaggaacctgttaagacggctccgggaaaaaagaggcccgtagagcactctcctgtggagccagactcctcctcgggaaccggaaaagcgggcaaccagcctgcaagaaaaagattgaatttcggtcagactggagacgcagactccgtacctgacccccagcctctcggacagccaccagcagccccctctggtctgggaactaatacgatggctacaggcagtggcgcaccaatggcagacaataacgagggcgccgacggagtgggtaattcctcgggagattggcattgcgattccacatggatgggcgacagagtcatcaccaccagcacccgcacctgggccctgcccacctacaacaaccacctctacaagcagatttccagccaatcaggagccagcaatgacaaccactactttggctacagcaccccttgggggtattttgacttcaacagattccactgccacttttcgccacgcgactggcagagactcatcaacaacaactggggattccggcccaaaagactcaacctcaagctgtttaacattcaagtcaaggaggtcacgcagaatgacggtacgacgacgattgccaataaccttaccagcacggttcaggtgtttactgacttggagtaccagctcccgtacgtcctcggctcggcgcatcaaggatgcctcccgccgttcccagcagacgtcttcatggtgccacagtatggatacctcaccctgaacaacgggagtcaggcggtaggacgctcttccttttactgcctggagtactttccttctcagatgcttcgtaccggaaacaactttaccttcagctacacttttgaagacgttcctttccacagcagctacgctcacagtcaaagtctggaccgtctcatgaatcctctcatcgaccagtacctgtattacttgagcagaacaaacactccaagcggaaccactacgcagtccaggcttcagttttctcaggccggagcgagtgacattcgggaccagtctaggaactggcttcctggaccctgttaccgccagcagcgagtatcaaagacagctgcggataacaacaacggtgaatactcgtggactggagctaccaagtaccacctcaatggcagagactctctggtgaatccgggcccggccatggccagccacaaggacgatgaagaaaagttttttcctcaaagcggggttctcatctttgggaagcaaggctcagagaaaacaaatgtggacattgaaaaggtcatgattacagacgaagaggaaatcaggaccaccaatcccgtggctacggagcagtatggttctgtatctaccaacctccagagcggcaacacacgagcagctacctcagatgtcaacacacaaggcgttcttccaggcatggtctggcaggacagagacgtgtacctgcaggggcccatctgggcaaaaattccacacacggacggacattttcacccctctcccctcatgggcggatttggacttaaacaccctcctccacagattctcattaagaataccccggtacctgcgaatccttcgaccaccttcagcgcggcaaagtttgcttccttcatcacacagtattccacggggcaggtcagcgtggagatcgagtgggagctgcagaaggagaacagcaaacgctggaatcccgaaattcagtacacttccaactacaacaaatctgttaatgtggactttactgtggacactaatggggtgtattcagagcctcgccctattggcaccagatacctgactcgtaatctgtaa

SEQ ID NO: 4957 - DNA, 3156 bp, Adeno-associated virus
cgattgaatttagcggccgcgaattcgcccttgctgcgtcaacggaccaatgagaactttcccttcaacgattgcgtcgacaagatggtgatctggtgggaggagggaaagatgaccgccaaggtcgtggagtcggccaaagccattctcggaggaagcaaggtgcgtgtggaccaaaagtgcaagtcttcggcccagatcgacccgactcccgtgatcgtcacctccaacaccaacatgtgcgccgtgattgatggaaactcaacgaccttcgagcaccagcagccgttgcaagaccggatgttcaaatttgaacttacccgccgtctggatcatgactttggaaaggtcaccaagcaggaagtgaaagactttttccggtgggcaaaggatcacgtggttgaggtggagcatgagttctacgtcaaaaagggtggagccaaaaaaagacccgcccccagtgacgcagatataagtgagcccaaacgggcgcgcgagtcagttgcgcagccatcgacgtcagacgcggaagcttcgatcaactacgcggacaggtaccaaaacaaatgttctcgtcacgtgggcatgaatctgatgctgtttccctgcagacaatgcgagcgaatgaatcagaattcaaatatctgcttcactcacggacagaaagactgtttagagtgctttcccgtgtcagaatctcaacccgtttctgtcgtcaaaaaggcgtatcagaaactgtgctacattcatcacatcatgggaaaggtgccagacgcttgcactgcttgcgacctggtcaatgtggatttggatgactgcatctctgaacaataaatgatttaaatcaggtatggctgccgatggttatcttccagattggctcgaggacactctctctgaaggaataagacagtggtggaagctcaaacctggcccaccaccaaagcccgcagagcggcataaggacgacagcaggggtcttgtgcttcctggatacaagtacctcggacccttcaacggactcgacaagggagagccggtcaacgaggcagacgccgcggccctcgagcacgacaaggcctacgaccggcagctcgacagcggagacaacccgtacctcaagtacaaccacgccgacgcggagtttcaggagcgccttaaagaagatacgtcttttgggggcaacctcggacgagcagtcttccaggcgaaaaagagggttcttgaacctctgggcctggttgaggaacctgttaagacggctccgggaaaaaagaggcccgtagagcactctcctgtggagccagactcctcctcgggaaccggaaaagcgggcaaccagcctgcaagaaaaagattgaatttcggtcagactggagacgcagactccgtacctgacccccagcctctcggacagccaccagcagccccctctggtctgggaactaatacgatggctacaggcagtggcgcaccaatggcagacaataacgagggcgccgacggagtgggtaattcctcgggagattggcattgcgattccacatggatgggcgacagagtcatcaccaccagcacccgcacctgggccctgcccacctacaacaaccacctctacaagcagatttccagccaatcaggagccagcaatgacaaccactactttggctacagcaccccttgggggtattttgacttcaacagattccactgccacttttcgccacgcgactggcagagactcatcaacaacaactggggattccggcccaaaagactcaacctcaagctgtttaacattcaagtcaaggaggtcacgcagaatgacggtacgacgacgattgccaataaccttaccagcacggttcaggtgtttactgacttggagtaccagctcccgtacgtcctcggctcggcgcatcaaggatgcctcccgccgttcccagcagacgtcttcatggtgccacagtatggatacctcaccctgaacaacgggagtcaggcggtaggacgctcttccttttactgcctggagtactttccttctcagatgcttcgtaccggaaacaactttaccttcagctacacttttgaagacgttcctttccacagcagctacgctcacagtcaaagtctggaccgtctcatgaatcctctcatcgaccagtacctgtattacttgagcagaacaaacactccaagcggaaccactacgcagtccaggcttcagttttctcaggccggagcgagtgacattcgggaccagtctaggaactggcttcctggaccctgttaccgccagcagcgagtatcaaagacagctgcggataacaacaacggtgaatactcgtggactggagctaccaagtaccacctcaatggcagagactctctggtgaatccgggcccggccatggccagccacaaggacgatgaagaaaagttttttcctcaaagcggggttctcatctttgggaagcaaggctcagagaaaacaaatgtggacattgaaaaggtcatgattacagacgaagaggaaatcaggaccaccaatcccgtggctacggagcagtatggttctgtatctaccaacctccagagcggcaacacacgagcagctacctcagatgtcaacacacaaggcgttcttccaggcatggtctggcaggacagagacgtgtacctgcaggggcccatctgggcaaaaattccacacacggacggacattttcacccctctcccctcatgggcggatttggacttaaacaccctcctccacagattctcattaagaataccccggtacctgcgaatccttcgaccaccttcagcgcggcaaagtttgcttccttcatcacacagtattccacggggcaggtcagcgtggagatcgagtgggagctgcagaaggagaacagcaaacgctggaatcccgaaattcagtacacttccaactacaacaaatctgttaatgtggactttactgtggacactaatggggtgtattcagagcctcgccctattggcaccagatacctgactcgtaatctgtaattgcttgttaatcaataaaccgtttaattcgtttcagttgaactttggtctctgcgaagggcgaattcgtttaaacctgcaggactagtccctttagtgag

SEQ ID NO: 4958 - protein, 734 aa, Adeno-associated virus
MAADGYLPDWLEDTLSEGIRQWWKLKPGPPPKPAERHKDDSRGLVLPGYKYLGPFNGLDKGEPVNEADAAALEHDKAYDRQLDSGDNPYLKYNHADAEFQERLKEDTSFGGNLGRAVFQAKKRVLEPLGLVEEPVKTAPGKKRPVEHSPVEPDSSSGTGKAGNQPARKRLNFGQTGDADSVPDPQPLGQPPAAPSGLGTNTMATGSGAPMADNNEGADGVGNSSGDWHCDSTWMGDRVITTSTRTWALPTYNNHLYKQISSQSGASNDNHYFGYSTPWGYFDFNRFHCHFSPRDWQRLINNNWGFRPKRLNLKLFNIQVKEVTQNDGTTTIANNLTSTVQVFTDLEYQLPYVLGSAHQGCLPPFPADVFMVPQYGYLTLNNGSQAVGRSSFYCLEYFPSQMLRTGNNFTFSYTFEDVPFHSSYAHSQSLDRLMNPLIDQYLYYLSRTNTPSGTTTQSRLQFSQAGASDIRDQSRNWLPGPCYRQQRVSKTAADNNNGEYSWTGATKYHLNGRDSLVNPGPAMASHKDDEEKFFPQSGVLIFGKQGSEKTNVDIEKVMITDEEEIRTTNPVATEQYGSVSTNLQSGNTRAATSDVNTQGVLPGMVWQDRDVYLQGPIWAKIPHTDGHFHPSPLMGGFGLKHPPPQILIKNTPVPANPSTTFSAAKFASFITQYSTGQVSVEIEWELQKENSKRWNPEIQYTSNYNKSVNVDFTVDTNGVYSEPRPIGTRYLTRNL

SEQ ID NO: 4959 - DNA, 2208 bp, Adeno-associated virus
atggctgccgatggttatcttccagattggctcgaggacactctctctgaaggaataagacagtggtggaagctcaaacctggcccaccaccaccaaagcccgcagagcggcataaggacgacagcaggggtcttgtgcttcctgggtacaagtacctcggacccttcaacggactcgacaagggagagccggtcaacgaggcagacgccgcggccctcgagcacgacaaggcctacgaccggcagctcgacagcggagacaacccgtacctcaagtacgaccacgccgacgcggagtttcaggagcgccttaaagaagatacgtcttttgggggcaacctcggacgagcagtcttccaggcaaaaaagagggttcttgaacctctgggcctggttgaggagcctgttaagacggctccgggaaaaaagaggccggtagagcactctcctgtggagccagactcctcctcgggaaccggaaaagcgggcaaccagcctgcaagaaagagattgaatttcggtcagactggagacgcagactccgtacctgacccccagcctctcggacagccaccagcagccccctctggtctgggaactaatacgatggctacaggcagtggcgcaccaatggcagacaataacgatggcgccgacggagtgggtaattcctcgggaaattggcattgcgattccacatggatgggcgacagagtcatcaccaccagcacccgaacctgggctctgcccacctacaacaaccatctgtacaagcagatttccagccaatcaggagccagcaacgacaaccactactttggctacagcaccccttgggggtattttgacttcaacagattccactgccacttttcaccacgtgactggcaaagactcatcaacaacaactggggattccggcccaagagactcaacttcaagctctttaacattcaagtcagagaggtcacgcagaatgatggtacgacgacgattgccaataaccttaccagcacggttcaggtgtttactgactcggagtaccagctcccgtacgtcctcggctcggcgcatcaaggatgcctcccgccgttcccagcagacgtcttcatggtgccacagtatggatacctcaccctgaacaacgggagtcaggcagtaggacgctcttcattttactgcctggagtacttcccttctcagatgctgcgtaccggaaacaactttaccttcagctacacctttgaggatgttcctttccacagcagctacgctcacagccagagtttggaccgtctcatgaatcctctcatcgaccagtacctgtattacttgagcagaacaaacactccaagcggaaccaccacgcagtccaggcttcagttttctcaggccggagcgagtgacattcgggatcagtctaggaactggcttcctggaccctgttaccgccagcagcgagtatcaaagacatctgcggacaacaacaacagtgaatactcgtggattggagctaccaagtaccacctcaatggcagagactctctggtgaatccgggcccggcaatggccagccacaaggacgatgaagaaaagttttttcctcagagcggggttctcatctttggaaaacaaggatcagagaaaacaaatgtggacattgaaaaggtcatgattacagacgaagaggaaatcagaaccaccaatcccgtggccacggagcagtatggttctgtatctaccaacctccagagcggcaacacacaagcatctactgcagatgtcaacacacaaggcgttcttccaggcatggtctggcaggacagagacgtgtacctgcaggggcctatctgggcaaagattccgcacacggacggacattttcacccctctcccctcatgggcggattcggacttaaacaccctcctccacagattctcatcaaaaacaccccggtacctgcgaatccttcgaccaccttcagtgcggcaaagtttgcttccttcatcacacagtattccacggggcgggtcagcgtggagatcgagtgggagctacagaaggagaacagcaaacgctggaatcccgagatccagtacacttccaactacaacaaatctgttaatgtggactttactgtggacactaatggtgtgtattcagagcctcgccccattggcaccagatacctgactcgtaatctgtaa

SEQ ID NO: 4960 - protein, 735 aa, Adeno-associated virus
MAADGYLPDWLEDTLSEGIRQWWKLKPGPPPPKPAERHKDDSRGLVLPGYKYLGPFNGLDKGEPVNEADAAALEHDKAYDRQLDSGDNPYLKYDHADAEFQERLKEDTSFGGNLGRAVFQAKKRVLEPLGLVEEPVKTAPGKKRPVEHSPVEPDSSSGTGKAGNQPARKRLNFGQTGDADSVPDPQPLGQPPAAPSGLGTNTMATGSGAPMADNNDGADGVGNSSGNWHCDSTWMGDRVITTSTRTWALPTYNNHLYKQISSQSGASNDNHYFGYSTPWGYFDFNRFHCHFSPRDWQRLINNNWGFRPKRLNFKLFNIQVREVTQNDGTTTIANNLTSTVQVFTDSEYQLPYVLGSAHQGCLPPFPADVFMVPQYGYLTLNNGSQAVGRSSFYCLEYFPSQMLRTGNNFTFSYTFEDVPFHSSYAHSQSLDRLMNPLIDQYLYYLSRTNTPSGTTTQSRLQFSQAGASDIRDQSRNWLPGPCYRQQRVSKTSADNNNSEYSWIGATKYHLNGRDSLVNPGPAMASHKDDEEKFFPQSGVLIFGKQGSEKTNVDIEKVMITDEEEIRTTNPVATEQYGSVSTNLQSGNTQASTADVNTQGVLPGMVWQDRDVYLQGPIWAKIPHTDGHFHPSPLMGGFGLKHPPPQILIKNTPVPANPSTTFSAAKFASFITQYSTGRVSVEIEWELQKENSKRWNPEIQYTSNYNKSVNVDFTVDTNGVYSEPRPIGTRYLTRNL

SEQ ID NO: 4961 - DNA, 2217 bp, Adeno-associated virus
atggctgccgatggttatcttccagattggctcgaggacaacctctctgagggcattcgcgagtggtgggacttgaaacctggagccccgaaacccaaagccaaccagcaaaagcaggacgacggccggggtctggtgcttcctggctacaagtacctcggacccttcaacggactcgacaagggggagcccgtcaacgcggcggacgcagcggccctcgagcacgacaaggcctacgaccagcagctcaaagcgggtgacaatccgtacctgcggtataaccacgccgacgccgagtttcaggagcgtctgcaagaagatacgtcttttgggggcaacctcgggcgagcagtcttccaggccaagaagcgggttctcgaacctctcggtctggttgaggaaggcgctaagacggctcctggaaagaagagaccggtagagccatcaccccagcgttctccagactcctctacgggcatcggcaagacaggccagcagcccgcgaaaaagagactcaactttgggcagactggcgactcagagtcagtgcccgaccctcaaccaatcggagaaccccccgcaggcccctctggtctgggatctggtacaatggctgcaggcggtggcgctccaatggcagacaataacgaaggcgccgacggagtgggtagttcctcaggaaattggcattgcgattccgcatggctgggcgacagagtcatcaccaccagcacccgaccctgggccctccccacctacaacaaccacctctacaagcaaatctccaacgggacatcgggaggaagcaccaacgacaacacctacttcggctacagcaccccctgggggtattttgactttaacagattccactgccacttctcaccacgtgactggcagcgactcatcaacaacaactggggattccggcccaagagactcaacttcaagctcttcaacatccaggtcaaggaggtcacgcagaatgaaggcaccaagaccatcgccaataaccttaccagcacgattcaggtctttacggactcggaataccagctcccgtacgtcctcggctctgcgcaccagggctgcccgcctccgttcccggcggacgtcttcatgattcctcagtacgggtacctgactctgaacaacggcagtcaggccgtgggccgttcctccttctactgcctggagtactttccttctcaaatgcggagaacgggcaacaactttgagttcagctaccagtttgaggacgtgccttttcacagcagctacgcgcatagccaaagcctggaccggctgatgaaccccctcatcgaccagtacctgtactacctgtctcggactcagtccacgggaggtaccgcaggaactcagcagttgctattttctcaggccgggcctaataacatgtcggctcaggccaaaaactggctacccgggccctgctaccggcagcaacgcgtctccacgacactgtcgcaaaataacaacagcaactttgcttggaccggtgccaccaagtatcatctgaatggcagagactctctggtaaatcccggtgtcgctatggcaacgcacaaggacgacgaagagcgattttttccatccagcggagtcttgatgtttgggaaacagggagctggaaaagacaacgtggactatagcagcgttatgctaaccagtgaggaagaaatcaaaaccaccaacccagtggccacagaacagtacggcgtggtggccgataacctgcaacagcaaaacgccgctcctattgtaggggccgtcaacagtcaaggagccttacctggcatggtctggcagaaccgggacgtgtacctgcagggtcctatctgggccaagattcctcacacggacggcaactttcatccttcgccgctgatgggaggctttggactgaaacacccgcctcctcagatcctgattaagaatacacctgttcccgcggatcctccaactaccttcagtcaagccaagctggcgtcgttcatcacgcagtacagcaccggacaggtcagcgtggaaattgaatgggagctgcagaaagagaacagcaagcgctggaacccagagattcagtatacttccaactactacaaatctacaaatgtggactttgctgtcaatactgagggtacttattcagagcctcgccccattggcacccgttacctcacccgtaacctgtaa

SEQ ID NO: 4962 - protein, 738 aa, Adeno-associated virus
MAADGYLPDWLEDNLSEGIREWWDLKPGAPKPKANQQKQDDGRGLVLPGYKYLGPFNGLDKGEPVNAADAAALEHDKAYDQQLKAGDNPYLRYNHADAEFQERLQEDTSFGGNLGRAVFQAKKRVLEPLGLVEEGAKTAPGKKRPVEPSPQRSPDSSTGIGKTGQQPAKKRLNFGQTGDSESVPDPQPIGEPPAGPSGLGSGTMAAGGGAPMADNNEGADGVGSSSGNWHCDSAWLGDRVITTSTRPWALPTYNNHLYKQISNGTSGGSTNDNTYFGYSTPWGYFDFNRFHCHFSPRDWQRLINNNWGFRPKRLNFKLFNIQVKEVTQNEGTKTIANNLTSTIQVFTDSEYQLPYVLGSAHQGCPPPFPADVFMIPQYGYLTLNNGSQAVGRSSFYCLEYFPSQMRRTGNNFEFSYQFEDVPFHSSYAHSQSLDRLMNPLIDQYLYYLSRTQSTGGTAGTQQLLFSQAGPNNMSAQAKNWLPGPCYRQQRVSTTLSQNNNSNFAWTGATKYHLNGRDSLVNPGVAMATHKDDEERFFPSSGVLMFGKQGAGKDNVDYSSVMLTSEEEIKTTNPVATEQYGVVADNLQQQNAAPIVGAVNSQGALPGMVWQNRDVYLQGPIWAKIPHTDGNFHPSPLMGGFGLKHPPPQILIKNTPVPADPPTTFSQAKLASFITQYSTGQVSVEIEWELQKENSKRWNPEIQYTSNYYKSTNVDFAVNTEGTYSEPRPIGTRYLTRNL

SEQ ID NO: 4963 - protein, 735 aa, Adeno-associated virus
MAADGYLPDWLEDTLSEGIRQWWKLKPGPPPPKPAERHKDDSRGLVLPGYKYLGPFNGLDKGEPVNEADAAALEHDKAYDRQLDSGDNPYLKYNHADAEFQERLKEDTSFGGNLGRAVFQAKKRVLEPLGLVEEPVKTAPGKKRPVEHSPVEPDSSSGTGKAGQQPARKRLNFGQTGDADSVPDPQPLGQPPAAPSGLGSTTMATGSGAPMADNNEGADGVGNSSGNWHCDSQWLGDRVITTSTRTWALPTYNNHLYKQISSQSGASNDNHYFGYSTPWGYFDFNRFHCHFSPRDWQRLINNNWGFRPKRLNFKLFNIQVKEVTQNDGTTTIANNLTSTVQVFTDSEYQLPYVLGSAHQGCLPPFPADVFMVPQYGYLTLNNGSQAVGRSSFYCLEYFPSQMLRTGNNFQFSYTFEDVPFHSSYAHSQSLDRLMNPLVDQYLYYLNKTQTNSGTLQQSRLLFSQAGPTNMSLQAKNWLPGPCYRQQRLSKQANDNNNSNFPWTAATKYHLNGRDSLVNPGPAMASHKDDEEKFFPMHGTLIFGKQGTNANDADLENVMITDEEEIRTTNPVATEQYGTVSNNLQNSNTGPTTGTVNHQGALPGMVWQDRDVYLQGPIWAKIPHTDGHFHPSPLMGGFGLKHPPPQIMIKNTPVPANPPTNFSSAKFASFITQYSTGQVSVEIEWELQKENSKRWNPEIQYTSNYNKSVNVDFTVDTNGVYSEPRPIGTRYLTRNL

SEQ ID NO: 4964 - DNA, 3158 bp, Adeno-associated virus
gattgaatttagcggccgcgaattcgcccttgctgcgtcaactggaccaatgagaactttcctttcaatgattgcgtcgacaagatggtgatctggtgggaggagggaaagatgaccgccaaggtcgtggagtcggccaaagccattctcggaggaagcaaggtgcgcgcggaccagaaatgcaagtcctcggcccagatagacccgactcccgtgattgtcacctccaacaccaacatgtgcgccgtgattgacgggaactcaacgaccttcgaacaccagcagccgttgcaagaccggatgttcaaatttgaactcacccgccgtctggatcatgactttgggaaggtcaccaagcaggaagtcaaagactttttccggtgggcaaaggatcacgtggttgaggtggagcatgaattctacgtcaaaaagggtggagctaagaaaagacccgcccccagtgacgcagatataagtgagcccaaacgggcgcgcgagtcagttgcgcagccatcgacgtcagacgcggaagcttcgatcaactacgcgggcaggtaccaaaacaaatgttctcgtcacgtgggcatgaatctgatgctgtttccctgcagacaatgcgagagaatgaatcagaattcaaatatctgcttcactcacggacagaaagactgtttagagtgctttcccgtgtcagaatctcaacccgtttctgtcgtcaaaaaggcgtatcagaaactttgctacattcatcatatcatgggaaaggtgccagacgcttgcactgcctgcgatctggtcaatgtggatttggatgactgcatctctgaacaataaatgatttaaatcaggtatggctgccgatggttatcttccagattggctcgaggacactctctctgaaggaataagacagtggtggaagctcaaacctggcccaccaccaccaaagcccgcagagcggcataaggacgacagcaggggtcttgtgcttcctgggtacaagtacctcggacccttcaacggactcgacaagggggagccggtcaacgaggcagacgccgcggccctcgagcacgacaaggcctacgaccggcagctcgacagcggagacaacccgtacctcaagtacaaccacgccgacgcggagtttcaggagcgccttaaagaagatacgtcttttgggggcaacctcggacgagcagtcttccaggcaaaaaagagggttcttgaacctctgggcctggttgaggaacctgttaaaacggctccgggaaaaaagaggccggtagagcactctcctgtggagccagactcctcctcgggaaccggaaaagcgggccagcagcctgcaagaaaaagattgaatttcggtcagactggagacgcagactccgtacctgacccccagcctctcggacagccaccagcagccccctctggtctgggatctactacaatggctacaggcagtggcgcaccaatggcagacaataacgagggtgccgatggagtgggtaattcctcgggaaattggcattgcgattcccaatggctgggcgacagagtcatcaccaccagcacccgcacctgggccctgcccacctacaacaaccacctctacaagcaaatctccagccaatcaggagcctcaaacgacaaccactactttggctacagcaccccctgggggtattttgacttcaacagattccactgccacttttcaccacgtgactggcaaagactcatcaacaacaactggggattccgacccaagagactcaacttcaagctctttaacattcaagtcaaagaggtcacgcagaatgacggtacgacgacgattgccaataaccttaccagcacggttcaggtgtttactgactcggagtaccagctcccgtacgtcctcggctcggcgcatcaaggatgcctcccgccgtttccagcggacgtcttcatggtcccacagtatggatacctcaccctgaacaacgggagtcaggcagtaggacgctcttcattttactgcctggagtactttccttctcagatgctgcgtaccggaaacaactttcaattcagctacacttttgaagacgtgcctttccacagcagctacgctcacagccagagtctggatcggctgatgaatcctctggtcgaccagtacctgtattatctgaacaagacacaaacaaatagtggaactcttcagcagtctcggctactgtttagccaagctggacccaccaacatgtctcttcaagctaaaaactggctgcctggaccttgctacagacagcagcgtctgtcaaagcaggcaaacgacaacaacaacagcaactttccctggactgcagctacaaagtatcatctaaatggccgggactcgttggttaatccaggaccagctatggccagtcacaaggatgacgaagaaaagtttttccccatgcatggaacccttatatttggtaaacaaggaacaaatgccaacgacgcggatttggaaaatgtcatgattacagatgaagaagaaatcaggaccaccaatcccgtggctacggagcagtacggaactgtatcaaataatttgcaaaactcaaacactggtccaactactggaactgtcaatcaccaaggagcgttacctggtatggtgtggcaggatcgagacgtgtacctgcagggacccatttgggccaagattcctcacaccgatggacactttcatccttctccactgatgggaggttttggactcaaacacccacctcctcaaatcatgatcaaaaacactcccgttccagccaatcctcccacaaacttcagttctgccaagtttgcttctttcatcacacagtattccacggggcaggtcagcgtggagatcgagtgggagctgcagaaggagaacagcaaacgctggaatcccgaaattcagtacacttccaactacaacaaatctgttaatgtggactttactgtggacactaatggtgtgtattcagagcctcgccccattggcaccagatacctgactcgtaatctgtaattgcttgttaatcaataaaccgtttaattcgtttcagttgaactttggtctctgcgaagggcgaattcgtttaaacctgcaggactagtccctttagtga

SEQ ID NO: 4965 - protein, 735 aa, Adeno-associated virus
MAADGYLPDWLEDTLSEGIRQWWKLKPGPPPPKPAERHKDDSRGLVLPGYKYLGPFNGLDKGEPVNEADAAALEHDKAYDRQLDSGDNPYLKYNHADAEFQERLKEDTSFGGNLGRAVFQAKKRVLEPLGLVEEPVKTAPGKKRPVEHPPVEPDSSSGTGKAGQQPARKRLNFGQTGDADSVPDPQPLGQPPAAPSGLGSTTMATGSGAPMADNNEGADGVGNSSGNWHCDSQWLGDRVITTSTRTWALPTYNNHLYKQISSQSGASNDNHYFGYSTPWGYFDFNRFHCHFSPRDWQRLINNNWGFRPKRLNFKLFNIQVKEVTQNDGTTTIANNLTSTVQVFTDSEYQLPYVLGSAHQGCLPPFPADVFMVPQYGYLTLNNGSQAVGRSSFYCLEYFPSQMLRTGNNFQFSYTFEDVPFHSSYAHSQSLDRLMNPLIDQYLYYLNKTQTNSGTLQQSRLLFSQAGPTNMSLQAKNRLPGPCYRQQRLSKQANDNNNSNFPWTAATKYHLNGRDSLVNPGPAMASHKDDEEKFFPMHGTLIFGKQGTNANDADLENVMITDEEEIRTTNPVATEQYGTVSNNLQNSNTGPTTGTVNHQGALPGMVWQDRDVYLQGPIWAKIPHTDGHFHPSPLVGGFGLKHPPPQIMIKNTPVPANPPTNFSSAKFASFITQYSTGQVSVEIEWELQKENSKRWNPEIQYTSNYNKSVNVDFTVDTNGVYSEPRPIGTRYLTRNL

SEQ ID NO: 4966 - DNA, 3159 bp, Adeno-associated virus
gattgaatttagcggccgcgaattcgcccttgctgcgtcaactggaccaatgagaactttcctttcaatgattgcgtcgacaagatggtgatctggtgggaggagggaaagatgaccgccaaggtcgtggagtcggccaaagccattctcggaggaagcaaggtgcgcgtggaccagaaatgcaagtcctcggcccagatagacccgactcccgtgattgtcacctccaacaccgacatgtgcgccgtgattgacgggaactcaacgaccttcgaacaccagcagccgttgcaagaccggatgttcaaatttgaactcacccgccgtctggatcatgactttgggaaggtcaccaagcaggaagtcaaagactttttccggtgggcaaaggatcacgtggttgaggtggagcatgaattctacgtcaaaaagggtggagctaagaaaagacccgcccccagtgacgcagatataagtgagcccaaacgggcgcgcgagtcagttgcgcagccatcgacgtcagacgcggaagcttcgatcaactacgcggacaggtaccaaaacaaatgttctcgtcacgtgggcatgaatctgatgctgtttccctgcagacaatgcgagagaatgaatcagaattcaaatatctgcttcactcacggacagaaagactgtttagagtgctttcccgtgtcagaatctcaacccgtttctgtcgtcaaaaaggcgtatcagaaactttgctacattcatcatatcatgggaaaggtgccagacgcttgcactgcctgcgatctggtcaatgtggatttggatgactgcatctctgaacaataaatgatttaaatcaggtatggctgccgatggttatcttccagattggctcgaggacactctctctgaaggaataagacagtggtggaagctcaaacctggcccaccaccaccaaagcccgcagagcggcataaggacgacagcaggggtcttgtgcttcctgggtacaagtacctcggacccttcaacggactcgacaagggggagccggtcaacgaggcagacgccgcggccctcgagcacgacaaggcctacgaccggcagctcgacagcggagacaacccgtacctcaagtacaaccacgccgacgcggagtttcaggagcgccttaaagaagatacgtcttttgggggcaacctcggacgagcagtcttccaggcaaaaaagagggttcttgaacctctgggcctggttgaggaacctgttaaaacggctccgggaaaaaagaggccggtagagcaccctcctgtggagccagactcctcctcgggaaccggaaaagcgggccagcagcctgcaagaaaaagattgaatttcggtcagactggagacgcagactccgtacctgacccccagcctctcggacagccaccagcagccccctctggtctgggatctactacaatggctacaggcagtggcgcaccaatggcagacaataacgagggtgccgatggagtgggtaattcctcgggaaattggcattgcgattcccaatggctgggcgacagagtcatcaccaccagcacccgcacctgggccctgcccacctacaacaaccacctctacaagcaaatctccagccaatcaggagcctcaaacgacaaccactactttggctacagcaccccctgggggtattttgacttcaacagattccactgccacttttcaccacgtgactggcaaagactcatcaacaacaactggggattccgacccaagagactcaacttcaagctctttaacattcaagtcaaagaggtcacgcagaatgacggtacgacgacgattgccaataaccttaccagcacggttcaggtgtttactgactcggagtaccagctcccgtacgtcctcggctcggcgcatcaaggatgcctcccgccgtttccagcggacgtcttcatggtcccacagtatggatacctcaccctgaacaacgggagtcaggcagtaggacgctcttcattttactgcctggagtactttccttctcagatgctgcgtaccggaaacaactttcagttcagctacacttttgaagacgtgcctttccacagcagctacgctcacagccagagtctggatcggctgatgaatcctctgatcgaccagtacctgtattatctgaacaagacacaaacaaatagtggaactcttcagcagtctcggctactgtttagccaagctggacccaccaacatgtctcttcaagctaaaaaccggctgcctggaccttgctacagacagcagcgtctgtcaaagcaggcaaacgacaacaacaacagcaactttccctggaccgcagctacaaagtatcatctaaatggccgggactcgttggttaatccaggaccagctatggccagtcacaaggatgacgaagaaaagtttttccccatgcatggaacccttatatttggtaaacaaggaacaaatgccaacgacgcggatttggaaaatgtcatgattacagatgaagaagaaatcaggaccaccaatcccgtggctacggagcagtacggaactgtatcaaataatttgcaaaactcaaacactggtccaactactggaactgtcaatcaccaaggagcgttacctggtatggtgtggcaggatcgagacgtgtacctgcagggacccatttgggccaagattcctcacaccgatggacactttcatccttctccactggtgggaggttttggactcaaacacccacctcctcaaatcatgatcaaaaacactcccgttccagccaatcctcccacaaacttcagttctgccaagtttgcttctttcatcacacagtattccacggggcaggtcagcgtggagatcgagtgggagctgcagaaggagaacagcaaacgctggaatcccgaaattcagtacacttccaactacaacaaatctgttaatgtggactttactgtggacactaatggtgtgtattcagagcctcgccccattggcaccagatacctgactcgtaatctgtaattgcttgttaatcaataaaccgtttaattcgtttcagttgaactttggtctctgcgaagggcgaattcgtttaaacctgcaggactagtccctttagtgag

SEQ ID NO: 4967 - DNA, 2208 bp, Adeno-associated virus
atggctgccgatggttatcttccagattggctcgaggacactctctctgaaggaataagacagtggtggaagctcaaacctggcccaccaccaccaaagcccgcagagcggcataaggacgacagcaggggtcttgtgcttcctgggtacaagtaccttggacccttcaacggactcgacaagggagagccggtcaacgaggcagacgccgcggccctcgagcacgacaaggcctacgaccggcagctcgacagcggagacaacccgtaccccaagtacaaccacgccgacgcggagttccaggagcgtcttaaagaagatacgtcttttgggggcaacctcggacgagcagtcttccaggcgaaaaagagggttcttgaacctctgggcctggttgaggaacctgttaagacggctccgggaaaaaagaggccggtagagcactctcctgcggagccagactcctcctcgggaaccggaaaagcgggccagcagcctgcaagaaagagattgaatttcggtcagactggagacgcagactccgtacctgacccccagcctctcggacagccaccagcagccccctctggtctgggaactaatacgatggctacaggcagtggcgcaccaatggcagacaataacgagggcgccgacggagtgggtaattcctcgggaaattggcattgcgattccacatggatgggcgacagagtcatcaccaccagcacccgcacctgggctctgcccacctacaacaaccacctctacaagcagatttccagccaatcaggagcctcaaacgacaaccactactttggctacagcaccccttgggggtattttgacttcaacagattccactgccacttttcgccacgtgactggcaaagactcatcaacaacaattggggattccggcccaaaagactcaacttcaagctctttaacattcaagtcaaggaggtcacgcagaatgacggtacgacgacgattgccaataaccttaccagcacggttcaggtgtttactgactcggagtaccagctcccgtacgtcctcggctcggcgcatcaaggatgcctcccgccgttcccagcagacgtcttcatggtgccacagtatggatacctcaccctgaacaacgggagtcaggcagtaggacgctcttcattttactgcctggagtactttccttctcagatgctgcgtaccggaaacaactttaccttcagctacacctttgaggacgttcctttccacagcagctacgcccacagccagagtttggaccgtctcatgaatcctctcatcgaccagtacctgtattacttgagcagaacaaacactccaagcggaaccaccacgcagtcaaggcttcagttttctcaggccggagcaagtgacattcgggaccagtctaggaactggcttcctggaccctgttaccgccagcagcgagtatcaaagacatctgcggataacaacaacagtgaatactcgtggactggagctaccaagtaccaccttaatggaagagactctctggtgaatccgggcccggccatggccagccacaaggacgatgaagaaaagttttttcctcagagcggggttctcatctttggaaaacaagactcgggaaaaactaatgtggacattgaaaaggtcatgattacagacgaagaggaaatcaggaccaccaatcccgtggctacggagcagtatggttctgtatctaccaacctccagagcggcaacacacaagcagctacctcagatgtcaacacacaaggcgttcttccaggcatggtgtggcaggacagagacgtgtacctgcaggggcccatctgggcaaagattccacacacggacggacattttcacccctctcccctcatgggcggattcggacttaaacaccctcccccgcagattctcatcaagaacaccccggtacctgcgaatccttcgactaccttcagtgcggcaaagtttgcttccttcattacacagtactccacggggcaggtcagcgtggagatcgagtgggagctgcagaaggagaacagcaaacgctggaatcccgagattcagtacacttccaactacaacaaatctgttaatgtggactttactgtggacactaatggtgtgtattcagagcctcgccccattggcaccaggtacctgactcgtaatctgtaa

SEQ ID NO: 4968 - protein, 735 aa, Adeno-associated virus
MAADGYLPDWLEDTLSEGIRQWWKLKPGPPPPKPAERHKDDSRGLVLPGYKYLGPFNGLDKGEPVNEADAAALEHDKAYDRQLDSGDNPYPKYNHADAEFQERLKEDTSFGGNLGRAVFQAKKRVLEPLGLVEEPVKTAPGKKRPVEHSPAEPDSSSGTGKAGQQPARKRLNFGQTGDADSVPDPQPLGQPPAAPSGLGTNTMATGSGAPMADNNEGADGVGNSSGNWHCDSTWMGDRVITTSTRTWALPTYNNHLYKQISSQSGASNDNHYFGYSTPWGYFDFNRFHCHFSPRDWQRLINNNWGFRPKRLNFKLFNIQVKEVTQNDGTTTIANNLTSTVQVFTDSEYQLPYVLGSAHQGCLPPFPADVFMVPQYGYLTLNNGSQAVGRSSFYCLEYFPSQMLRTGNNFTFSYTFEDVPFHSSYAHSQSLDRLMNPLIDQYLYYLSRTNTPSGTTTQSRLQFSQAGASDIRDQSRNWLPGPCYRQQRVSKTSADNNNSEYSWTGATKYHLNGRDSLVNPGPAMASHKDDEEKFFPQSGVLIFGKQDSGKTNVDIEKVMITDEEEIRTTNPVATEQYGSVSTNLQSGNTQAATSDVNTQGVLPGMVWQDRDVYLQGPIWAKIPHTDGHFHPSPLMGGFGLKHPPPQILIKNTPVPANPSTTFSAAKFASFITQYSTGQVSVEIEWELQKENSKRWNPEIQYTSNYNKSVNVDFTVDTNGVYSEPRPIGTRYLTRNL

SEQ ID NO: 4969 - DNA, 2208 bp, Adeno-associated virus
atggctgccgatggttatcttccagattggctcgaggacactctctctgaaggaataagacagtggtggaagctcaaacctggcccaccaccaccaaagcccgcagagcggcataaggacgacagcaggggtcttgtgcttcctgggtacaagtaccttggacccttcaacggactcgacaagggagagccggtcaacgaggcagacgccgcggccctcgagcacgacaaggcctacgaccggcagctcgacggcggagacaacccgtacctcaagtacaaccacgccgacgcggagttccaggagcgtcttaaagaagatacgtcttttgggggcaacctcggacgagcagtcttccaggcgaaaaagagggttcttgaacctctgggcctggttgaggaacctgttaagacggctccgggaaaaaagaggccggtagagcactctcttgcggagccagactcctcctcgggaaccggaaaagcgggccagcagcctgcaagaaggagattgaatttcggtcagactggagacgcagactccgtacctgacccccagcctctcggacagccaccagcagccccctctggtctgggaactaatacgatggctacaggcagtggcgcaccaatggcagacaataacgagggcgccgacggagtgggtaattcctcgggaaattggcattgcgattccacatggatgggcgacagagtcatcaccaccagcacccgcacctgggctctgcccacctacaacaaccacctctacaggcagatttccagccaatcaggagcctcaaacgacaaccactactttggctacagcaccccttgggggtattttgacttcaacagattccactgccacttttcgccacgtgactggcaaagactcatcaacaacaattggggatcccggcccaaaagactcaacttcaagctctttaacattcaagtcaaggaggtcacgcagaatgacggtacgacgacgattgccaataaccttaccagcacggttcaggtgtttactgactcggagtaccagctcccgtacgtcctcggctcggcgcatcaaggatgcctcccgccgttcccagcagacgtcttcatggtgccacagtatggatacctcaccctgaacaacgggagtcaggcagtaggacgctcttcattttactgcctggagtactttccttctcagatgctgcgtaccggaaacaactttaccttcagctacacctttgaggacgttcctttccacagcagctacgcccacagccagagtttggaccgtctcatgaatcctctcgtcgaccagtacctgtattacttgagcagaacaaacactccaagcggaaccaccacgcagtcaaggcttcagttttctcaggccggagcaagtgacattcgggaccagtctaggaactggcttcctggaccctgttaccgccagcagcgagtatcaaagacatctgcggataacaacaacagtgaatactcgtggactggagctaccaagtaccaccttaatggaagagactctctggtgaatccgggcccggccatggccagccacaaggacgatgaagaaaagttttttcctcagagcggggttctcatctttggaaaacaagactcgggaaaaactaatgtggacattgaaaaggtcatgattacagacgaagaggaaatcaggaccaccaatcccgtggctacggagcagtatggttctgtatctaccaacctccagagcggcaacacacaagcagctacctcagatgtcaacacacaaggcgttcttccaggcatggtgtggcaggacagagacgtgtacctgcaggggcccatctgggcaaagattccacacacggacggacattttcacccctctcccctcatgggcggattcggacttaaacaccctcccccgcagattctcatcaagaacaccccggtacctgcgaatccttcgactaccttcagtgcggcaaagtttgcttccttcattacacagtactccacggggcaggtcagcgtggagatcgagtgggagctgcagaaggagaacagcaaacgctggaatcccgagattcagtacacttccaactacaacaaatctgttaatgtggactttactgtggacactaatggtgtgtattcagagcctcgccccattggcaccagatacctgactcgtaatctgtaa

SEQ ID NO: 4970 - protein, 735 aa, Adeno-associated virus
MAADGYLPDWLEDTLSEGIRQWWKLKPGPPPPKPAERHKDDSRGLVLPGYKYLGPFNGLDKGEPVNEADAAALEHDKAYDRQLDGGDNPYLKYNHADAEFQERLKEDTSFGGNLGRAVFQAKKRVLEPLGLVEEPVKTAPGKKRPVEHSLAEPDSSSGTGKAGQQPARRRLNFGQTGDADSVPDPQPLGQPPAAPSGLGTNTMATGSGAPMADNNEGADGVGNSSGNWHCDSTWMGDRVITTSTRTWALPTYNNHLYRQISSQSGASNDNHYFGYSTPWGYFDFNRFHCHFSPRDWQRLINNNWGSRPKRLNFKLFNIQVKEVTQNDGTTTIANNLTSTVQVFTDSEYQLPYVLGSAHQGCLPPFPADVFMVPQYGYLTLNNGSQAVGRSSFYCLEYFPSQMLRTGNNFTFSYTFEDVPFHSSYAHSQSLDRLMNPLVDQYLYYLSRTNTPSGTTTQSRLQFSQAGASDIRDQSRNWLPGPCYRQQRVSKTSADNNNSEYSWTGATKYHLNGRDSLVNPGPAMASHKDDEEKFFPQSGVLIFGKQDSGKTNVDIEKVMITDEEEIRTTNPVATEQYGSVSTNLQSGNTQAATSDVNTQGVLPGMVWQDRDVYLQGPIWAKIPHTDGHFHPSPLMGGFGLKHPPPQILIKNTPVPANPSTTFSAAKFASFITQYSTGQVSVEIEWELQKENSKRWNPEIQYTSNYNKSVNVDFTVDTNGVYSEPRPIGTRYLTRNL

SEQ ID NO: 4971 - protein, 738 aa, Adeno-associated virus
MAADGYLPDWLEDNLSEGIREWWDLKPGAPKPKANQQKQDDGRGLVLPGYKYLGPFNGLDKGEPVNAADAAALEHDKAYDQQLKAGDNPYLRYNHADAEFQERLQEDTSFGGNLGRAVFQAKKRVLEPLGLVEEAAKTAPGKKRPVEPSPQRSPDSSAGIGKKGQQPAKKRLNFGQTGDSESVPDPQPIGEPPAGPSGLGSGTMAAGGGAPMADNNEGADGVGSSSGNWHCDSTWLGDRVITTSTRTWALPTYNNHLYKQISNGTSGGSTNDNTYFGYSTPWGYFDFNRFHCHFSPRDWQRLINNNWGFRPKRLSFKLFNIQVKEVTQNEGTETIANNLTSTIQVFTDSEYQLPYVLGSAHQGCLPPFPADVFMIPQYGYLTLNNGSQAVGRSSFYCLEYFPSQMLRTGNNFEFSYTFEDVPFHSSCAHSQSSDRLMNPLIDQYLYYLSRTRSTGGTQGTQQLLFSQAGPANMSAQAKNWLPGPCYRQQRVSTTLSQNNNSNFAWTGATKYHLNGRDSLVNPGVAMATHKDDEERFFPSSGVLMFGKQGAGRDNVDYSSVMLTSEEEIKTTNPVATEQYGVVADNLQQTNTGPIVGNVNSQGALPGMVWQNRDVYLQGPIWAKIPHTDGNFHPSPLMGGFGLKHPPPQILIKNTPVPADPPTTFSQAKLASFITQYSTGQVSVEIEWELQKENSKRWNPEIQYTSNYYKSTNVDFAVNTEGTYSEPRPIGTRYLTRNL

SEQ ID NO: 4972 - DNA, 2217 bp, Adeno-associated virus
atggctgctgacggttatcttccagattggctcgaggacaacctctctgagggcattcgcgagtggtgggacctgaaacctggagcccccaagcccaaggccaaccagcagaagcaggacgacggccggggtctggtgcttcttggctacaagtacctcggacccttcaacggactcgacaagggggagcccgtcaatgcggcggacgcagcggccctcgagcacgacaaggcctacgaccagcagctcaaagcgggtgacaatccgtacctgcggtataaccacgccgacgccgagtttcaggagcgtctgcaagaagatacgtcttttgggggcaacctcgggcgagcagtcttccaggccaagaagcgggttctcgaacctctcggtctggttgaggaagctgctaagacggctcctggaaagaagagaccggtagaaccgtcacctcagcgttcccccgactcctccacgggcatcggcaagaaaggccagcagcccgctaaaaagagactgaactttggtcagactggcgactcagagtcagtccccgaccctcaaccaatcggagaaccaccagcaggcccctctggtctgggatctggtacaatggctgcaggcggtggcgctccaatggcagacaataacgaaggcgccgacggagtgggtagttcctcaggaaattggcattgcgattccacatggctgggcgacagagtcatcaccaccagcacccgaacctgggccctgcccacctacaacaaccacctctacaagcaaatatccaatgggacatcgggaggaagcaccaacgacaacacctacttcggctacagcaccccctgggggtattttgacttcaacagattccactgccacttctcaccacgtgactggcagcgactcatcaacaacaactggggattccggccaaaaagactcagcttcaagctcttcaacatccaggtcaaggaggtcacgcagaatgaaggcaccaagaccatcgccaataaccttaccagcacgattcaggtatttacggactcggaataccagctgccgtacgtcctcggctccgcgcaccagggctgcctgcctccgttcccggcggacgtcttcatgattccccagtacggctaccttacactgaacaatggaagtcaagccgtaggccgttcctccttctactgcctggaatattttccatctcaaatgctgcgaactggaaacaattttgaattcagctacaccttcgaggacgtgcctttccacagcggctacgcacacagccagagcttggaccgactgatgaatcctctcatcgaccagtacctgtactacttatccagaactcagtccacaggaggaactcaaggtacccagcaattgttattttctcaagctgggcctgcaaacatgtcggctcaggctaagaactggctacctggaccttgctaccggcagcagcgagtctctacgacactgtcgcaaaacaacaacagcaactttgcttggactggtgccaccaaatatcacctgaacggaagagactctttggtaaatcccggtgtcgccatggcaacccacaaggacgacgaggaacgcttcttcccgtcgagtggagtcctgatgtttggaaaacagggtgctggaagagacaatgtggactacagcagcgttatgctaaccagcgaagaagaaattaaaaccactaaccctgtagccacagaacaatacggtgtggtggctgacaacttgcagcaaaccaatacagggcctattgtgggaaatgtcaacagccaaggagccttacctggcatggtctggcagaaccgagacgtgtacctgcagggtcccatctgggccaagattcctcacacggacggcaacttccacccttcaccgctaatgggaggatttggactgaagcacccacctcctcagatcctgatcaagaacacgccggtacctgcggatcctccaacgacgttcagccaggcgaaattggcttccttcattacgcagtacagcaccggacaggtcagcgtggaaatcgagtgggagctgcagaaggagaacagcaaacgctggaacccagagattcagtacacttcaaactactacaaatctacaaatgtggactttgctgtcaatacagagggaacttattctgagcctcgccccattggtactcgttacctcacccgtaatctgtaa

SEQ ID NO: 4973 - protein, 738 aa, Adeno-associated virus
MAADGYLPDWLEDNLSEGIREWWDLKPGAPKPKANQQKQDDGRGLVLLGYKYLGPFNGLDKGEPVNAADAAALEHDKAYDQQLKAGDNPYLRYNHADAEFQERLQEDTSFGGNLGRAVFQAKKRVLEPLGLVEEAAKTAPGKKRPVEPSPQRSPDSSTGIGKKGQQPAKKRLNFGQTGDSESVPDPQPIGEPPAGPSGLGSGTMAAGGGAPMADNNEGADGVGSSSGNWHCDSTWLGDRVITTSTRTWALPTYNNHLYKQISNGTSGGSTNDNTYFGYSTPWGYFDFNRFHCHFSPRDWQRLINNNWGFRPKRLSFKLFNIQVKEVTQNEGTKTIANNLTSTIQVFTDSEYQLPYVLGSAHQGCLPPFPADVFMIPQYGYLTLNNGSQAVGRSSFYCLEYFPSQMLRTGNNFEFSYTFEDVPFHSGYAHSQSLDRLMNPLIDQYLYYLSRTQSTGGTQGTQQLLFSQAGPANMSAQAKNWLPGPCYRQQRVSTTLSQNNNSNFAWTGATKYHLNGRDSLVNPGVAMATHKDDEERFFPSSGVLMFGKQGAGRDNVDYSSVMLTSEEEIKTTNPVATEQYGVVADNLQQTNTGPIVGNVNSQGALPGMVWQNRDVYLQGPIWAKIPHTDGNFHPSPLMGGFGLKHPPPQILIKNTPVPADPPTTFSQAKLASFITQYSTGQVSVEIEWELQKENSKRWNPEIQYTSNYYKSTNVDFAVNTEGTYSEPRPIGTRYLTRNL

SEQ ID NO: 4974 - protein, 735 aa, Adeno-associated virus
MAADGYLPDWLEDTLSEGIRQWWKLKPGPPPPKPAERHKDDSRGLVLPGYKYLGPFNGLDKGEPVNEADAAALEHDKAYDRQLDSGDNPYLKYNHADAEFQERLKEDTSFGGNLGRAVFQAKKRVLEPLGLVEPPVKTAPGKKRPVEHSPAEPDSSSGTGKAGQQPARKRLNFGQTGDADSVPDPQPLGQPPAAPSGLGSTTMATGSGAPMADNNEGADGVGNSSGNWHCDSQWLGDRVITTSTRTWALPTYNNHLYKQISSQSGASNDNHYFGYSTPWGYFDFNRFHCHFSPRDWQRLINNNWGFRPKRLNFKLFNIQVKEVTQNDGTTTIANNLTSTVQVFTDSEYQLPYVLGSAHQGCLPPFPADVFMVPQYGYLTLNNGSQAVGRSSFYCLEYFPSQMLRTGNNFQFSYTFEDVPFHSSYAHSQSLDRLMNPLIDQYLYYLNKTQSNSGTLQQSRLLFSQAGPTSMSLQAKNWLPGPCYRQQRLSKQANDNNNSNFPWTAATKYHLNGRDSLVNPGPAMASHKDDEEKFFPMHGTLIFGKQGTNANDADLDNVMITDEEEIRTTNPVATEQYGYVSNNLQNSNTGPTTGTVNHQGALPGMVWQDRDVYLQGPIWAKIPHTDGHFHPSPLMGGFGLKHPPPQIMIKNTPVPANPPTNFSSAKFASFITQYSTGQVSVEIEWELQKENSKRWNPEIQYTSNYNKSVNVDFTVDTNGVYSEPRPIGTRYLTRNL

SEQ ID NO: 4975 - protein, 735 aa, Adeno-associated virus
MAADGYLPDWLEDTLSEGIRQWWKLKPGPPPPKPAERHKDDSRGLVLPGYKYLGPFNGLDKGEPVNEADAAALEHDKAYDRQLDSGDNPYLKYNHADAEFQERLKEDTSFGGNLGRAVFQAKKRVLEPLGLVEGPVKTAPGKKRPVEHSPAEPDSSSGTGKAGQQPARKRLNFGQTGDADSVPDPQPLGQPPAAPSGLGSTTMATGSGAPMADNNEGADGVGNSSGNWHCDSQWLGDRVITTSTRTWALPTYNNHLYKQISSQSGASNDNHYFGYSTPWGYFDFNRFHCHFSPRDWQRLINNNWGFRPKRLNFKLFNIQVKEVTQNDGTTTIANNLTSTVQVFTDSEYQLPYVLGSAHQGCLPPFPADVFMVPQYGYLTLNNGSQAVGRSSFYCLEYFPSQMLRTGNNFQFSYTFEDVPFHSSYAHSQSLDRLMNPLIDQYLYYLNKTQSNSGTLQQSRLLFSQAGPTSMSLQAKNWLPGPCYRQQRLSKQANDNNNSNFPWTAATKYHLNGRDSLVNPGPAMASHKDDEEKFFPMHGTLIFGKQGTNANDADLDNVMITDEEEIRTTNPVATEQYGYVSNNLQNSNTGPTTGTVNHQGALPGMVWQDRDVYLQGPIWAKIPHTDGHFHPSPLMGGFGLKHPPPQIMIKNTPVPANPPTNFSSAKFASFITQYSTGQVSVEIEWELQKENSKRWNPEIQYTSNYNKSVNVDFTVDTNGVYSEPRPIGTRYLTRNL

SEQ ID NO: 4976 - DNA, 2208 bp, Adeno-associated virus
atggctgccgatggttatcttccagattggctcgaggacactctctctgaaggaataagacagtggtggaagctcaaacctggcccaccaccaccaaagcccgcagagcggcataaggacgacagcaggggtcttgtgcttcctgggtacaagtacctcggacccttcaacggactcgacaagggggagccggtcaacgaggcagacgccgcggccctcgagcacgacaaggcctacgaccggcagctcgacagcggagacaacccgtacctcaagtacaaccacgccgacgcggagtttcaggagcgtcttaaagaagatacgtcttttgggggcaacctcggacgagcagtcttccaggcgaaaaagagggttcttgaacctctgggcctggttgagggacctgttaagacggctccgggaaaaaagaggccggtagagcactctcctgcggagccagactcctcctcgggaaccggaaaagcgggccagcagcctgcaagaaaaagattgaattttggtcagactggagacgcagactccgtacctgacccccagcctctcggacagccaccagcagccccctctggtttgggatctactacaatggctacaggcagtggcgcaccaatggcagacaataacgagggtgccgatggagtgggtaattcctcaggaaattggcattgcgattcccaatggctgggcgacagagtcatcaccaccagcacccgaacctgggccctgcccacctacaacaaccacctctacaagcaaatctcaagccaatcaggagcctcaaacgacaaccactactttggctacagcaccccttgggggtattttgacttcaacagattccactgccacttttcaccacgtgactggcaaagactcatcaacaacaactggggattccgacccaagagactcaacttcaagctctttaacattcaagtcaaagaggtcacgcagaatgacggtacgacgacgattgccaataaccttaccagcacggttcaggtgtttactgactcggagtaccagctcccgtacgtcctcgggtcggcgcatcaaggatgcctcccgccgtttccagcggacgtcttcatggtcccacagtatggatacctcaccctgaacaacgggagtcaggcggtaggacgctcttccttttactgcctggagtactttccttctcagatgcttcgtactggaaacaactttcagttcagctacacctttgaagacgttcctttccacagcagctacgctcacagccagagtctggatcggctgatgaatcctctgatcgaccagtacctgtattatctgaacaaaacacaatcaaatagtggaactcttcagcagtctcggctactgtttagtcaagctggacccaccagcatgtctcttcaagctaaaaactggctacctggaccttgctacagacagcagcgtctgtcaaagcaggcaaacgacaacaacaacagcaactttccctggactgcggctacaaagtatcacctaaatggccgggactcgttggttaatccaggaccagctatggccagtcacaaagacgatgaagaaaagtttttccccatgcatggaaccctgatatttggtaaacaaggaacaaatgctaacgacgcggatttggacaatgtcatgattacagatgaagaagaaatccgcaccaccaatcccgtggctacggagcagtacggatatgtgtcaaataatttgcaaaactcaaatactggtccaactactggaactgtcaatcaccaaggagcgttacctggcatggtgtggcaggatcgagacgtgtacctgcagggacccatttgggccaagattcctcacaccgatggacactttcatccttctccactgatgggaggttttgggctcaaacacccgcctcctcagatcatgatcaaaaacactcccgttccagccaatcctcccacaaacttcagttctgccaagtttgcttctttcatcacacagtattccacggggcaggtcagcgtggagatcgagtgggagctgcagaaagagaacagcaaacgctggaatcccgaaattcagtacacttccaactacaacaaatctgttaatgtggactttactgtggacactaatggcgtgtattcagagcctcgccccattggcaccagatacctgactcgtaatctgtaa

SEQ ID NO: 4977 - DNA, 2211 bp, Adeno-associated virus
atggctgccgatggttatcttccagattggctcgaggacaacctctctgagggcattcgcgagtggtgggacttgaaacctggagccccgaagcccaaagccaaccagcaaaagcaggacgacggccggggtctggtgcttcctggctacaagtacctcggacccttcaacggactcgacaagggggagcccgtcaacgcggcggacgcagcggccctcgagcacgacaaggcctacgaccagcagctcaaagcgggtgacaatccgtacctgcggtataaccacgccgacgccgagtttcaggagcgtctgcaagaagatacgtcttttgggggcaacctcgggcgagcagtcttccaggccaagaagcgggttctcgaacctctcggtctggttgaggaaggcgctaagacggctcctggaaagaaacgtccggtagagcagtcgccacaagagccagactcctcctcgggcatcggcaagacaggccagcagcccgctaaaaagagactcaattttggtcagactggcgactcagagtcagtccccgatccacaacctctcggagaacctccagcaacccccgctgctgtgggacctactacaatggcttcaggcggtggcgcaccaatggcagacaataacgaaggcgccgacggagtgggtaatgcctcaggaaattggcattgcgattccacatggctgggcgacagagtcatcaccaccagcacccgcacctgggccttgcccacctacaataaccacctctacaagcaaatctccagtgcttcaacgggggccagcaacgacaaccactacttcggctacagcaccccctgggggtattttgatttcaacagattccactgccacttttcaccacgtgactggcagcgactcatcaacaacaattggggattccggcccaagagactcaacttcaaactcttcaacatccaagtcaaggaggtcacgacgaatgatggcgtcacaaccatcgctaataaccttaccagcacggttcaagtcttctcggactcggagtaccagcttccgtacgtcctcggctctgcgcaccagggctgcctccctccgttcccggcggacgtgttcatgattccgcaatacggctacctgacgctcaacaatggcagccaagccgtgggacgttcatccttttactgcctggaatatttcccttctcagatgctgagaacgggcaacaactttaccttcagctacacctttgaggaagtgcctttccacagcagctacgcgcacagccagagcctggaccggctgatgaatcctctcatcgaccaatacctgtattacctgaacagaactcaaaatcagtccggaagtgcccaaaacaaggacttgctgtttagccgtgggtctccagctggcatgtctgttcagcccaaaaactggctacctggaccctgttatcggcagcagcgcgtttctaaaacaaaaacagacaacaacaacagcaattttacctggactggtgcttcaaaatataacctcaatgggcgtgaatccatcatcaaccctggcactgctatggcctcacacaaagacgacgaagacaagttctttcccatgagcggtgtcatgatttttggaaaagagagcgccggagcttcaaacactgcattggacaatgtcatgattacagacgaagaggaaattaaagccactaaccctgtggccaccgaaagatttgggaccgtggcagtcaatttccagagcagcagcacagaccctgcgaccggagatgtgcatgctatgggagcattacctggcatggtgtggcaagatagagacgtgtacctgcagggtcccatttgggccaaaattcctcacacagatggacactttcacccgtctcctcttatgggcggctttggactcaagaacccgcctcctcagatcctcatcaaaaacacgcctgttcctgcgaatcctccggcggagttttcagctacaaagtttgcttcattcatcacccaatactccacaggacaagtgagtgtggaaattgaatgggagctgcagaaagaaaacagcaagcgctggaatcccgaagtgcagtacacatccaattatgcaaaatctgccaacgttgattttactgtggacaacaatggactttatactgagcctcgccccattggcacccgttaccttacccgtcccctgtaa

SEQ ID NO: 4978 - DNA, 2208 bp, Adeno-associated virus
atggctgccgatggttatcttccagattggctcgaggacactctctctgaaggaacaagacagtggtggaagctcaaacctggcccaccaccaccaaagcccgcagagcggcataaggacgacagcaggggtcttgtgcttcctgggtacaagtacctcggacccttcaacggactcgacaagggggagccggtcaacgaggcagacgccgcggccctcgagcacgacaaggcctacgaccggcagctcgacagcggagacaacccgtacctcaagtacaaccacgccgacgcggagtttcaggagcgtcttaaagaagatacgtcttttgggggcaacctcggacgagcagtcttccaggcgaaaaagagggttcttgaacctctgggcctggttgaggaacctgttaagacggctccgggaaaaaagaggccggtagagcactctcctgcggagccagactcctcctcgggaaccggaaaagcgggccagcagcctgcaagaaaaagattgaattttggtcagactggagacgcagactccgtacctgacccccagcctctcggacagccaccagcagccccctctggtttgggatctactacaatggctacaggcagtggcgcaccaatggcagacaataacgagggtgccgatggagtgggtaattcctcaggaaattggcattgcgattcccaatggctgggcgacagagtcatcaccaccagcacccgaacctgggccctgcccacctacaacaaccacctctacaagcaaatctcaagccaatcaggagcctcaaacgacaaccactactttggctacagcaccccttgggggtattttgacttcaacagattccactgccacttttcaccacgtgactggcaaagactcatcaacaacaactggggattccgacccaagagactcaacttcaagctctttaacattcaagtcaaagaggtcacgcagaatgacggtacgacgacgattgccaataaccttaccagcacggttcaggtgtttactgactcggagtaccagctcccgtacgtcctcgggtcggcgcatcaaggatgcctcccgccgtttccagcggacgtcttcatggtcccacagtatggatacctcaccctgaacaacgggagtcaggcggtaggacgctcttccttttactgcctggagtactttccttctcagatgcttcgtactggaaacaactttcagttcagctacacctttgaagacgttcctttccacagcagctacgctcacagccagagtctggatcggctgatgaatcctctgatcgaccagtacctgtattatctgaacaaaacacaatcaaatagtggaactcttcagcagtctcggctactgtttagtcaagctggacccaccagcatgtctcttcaagctaaaaactggctacctggaccttgctacagacagcagcgtctgtcaaagcaggcaaacgacaacaacaacagcaactttccctggactgcggctacaaagtaccacctaaatggccgggactcgttggttaatccaggaccagctatggccagtcacaaagacgatgaagaaaagtttttccccatgcatggaaccctgatatttggtaaacaaggaacaaatgctaacgacgcggatttggacaatgtcatgattacagatgaagaagaaatccgcaccaccaatcccgtggctacggagcagtacggatatgtgtcaaataatttgcaaaactcaaatactggtccaactactggaactgtcaatcaccaaggagcgttacctggcatggtgtggcaggatcgagacgtgtacctgcagggacccatttgggccaagattcctcacaccgatggacactttcatccttctccactgatgggaggttttgggctcaaacacccgcctcctcagatcatgatcaaaaacactcccgttccagccaatcctcccacaaacttcagttctgccaagtttgcttctttcatcacacagtattccacggggcaggtcagcgtggagatcgagtgggagctgcagaaagagaacagcaaacgctggaatcccgaaattcagtacacttccaactacaacaaatctgttaatgtggactttactgtggacactaatggcgtgtattcagagcctcgccccattggcaccagatacctgactcgtaatctgtaa

SEQ ID NO: 4979 - DNA, 2217 bp, Adeno-associated virus
atggctgctgacggttatcttccagattggctcgaggacaacctctctgagggcattcgcgagtggtgggacctgaaacctggagcccccaagcccaaggccaaccagcagaagcaggacgacggccggggtctggtgcttcctggctacaagtacctcggacccttcaacggactcgacaagggggagcccgtcaacgcggcggacgcagcggccctcgagcacgacaaggcctacgaccagcagctcaaagcgggtgacaatccgtacctgcggtataaccacgccgacgccgagtttcaggagcgtctgcaagaagatacgtcttttgggggcaacctcgggcgagcagtcttccaggccaagaagcgggttctcgaacctctcggtctggttgaggaagctgctaagacggctcctggaaagaagagaccggtagaaccgtcacctcagcgttcccccgactcctccacgggcatcggcaagaaaggccagcagcccgctaaaaagagactgaactttggtcagactggcgactcagagtcagtccccgaccctcaaccaatcggagaaccacctgcaggcccctctggtctgggatctggtacaatggctgcaggcggtggcgctccaatggcagacaataacgaaggcgccgacggagtgggtagttcctcaggaaattggcattgcgattccacatggctgggcgacagagtcatcaccaccagcacccgaacctgggccctgcccacctacaacaaccacctctacaagcaaatatccaatgggacatcgggagggagcaccaacgacaacacctacttcggctacagcaccccctgggggtattttgacttcaacagattccactgccacttctcaccacgtgactggcagcgactcatcaacaacaactggggattccggccaaaaagactcagcttcaagctcttcaacatccaggtcaaggaggtcacgcagaatgaaggcaccaagaccatcgccaataaccttaccagcacgattcaggtatttacggactcggaataccagctgccgtacgtcctcggctccgcgcaccagggctgcctgcctccgttcccggcggacgtcttcatgattccccagtacggctaccttacactgaacaatggaagtcaagccgtaggccgttcctccttctactgcctggaatattttccatctcaaatgctgcgaactggaaacaattttgaattcagctacaccttcgaggacgtgcctttccacagcagctacgcacacagccagagcttggaccgactgatgaatcctctcatcgaccagtacctgtactacttatccagaactcagtccacaggaggaactcaaggtacccagcaattgttattttctcaagctgggcctgcaaacatgtcggctcaggctaagaactggctacctggaccttgctaccggcagcagcgagtctctacgacactgtcgcaaaacaacaacagcaactttgcttggactggtgccaccaaatatcacctgaacggaagagactctttggtaaatcccggtgtcgccatggcaacccacaaggacgacgaggaacgcttcttcccgtcgagtggagtcctgatgtttggaaaacagggtgctggaagagacaatgtggactacagcagcgttatgctaaccagcgaagaagaaattaaaaccactaaccctgtagccacagaacaatacggtgtggtggctgacaacttgcagcaaaccaatacagggcctattgtgggaaatgtcaacagccaaggagccttacctggcatggtctggcagaaccgagacgtgtacctgcagggtcccatctgggccaagattcctcacacggacggcaactgccacccttcaccgctaatgggaggatttggactgaagcacccacctcctcagatcctgatcaagaacacgccggtacctgcggatcctccaacaacgttcagccaggcgaaattggcttccttcattacgcagtacagcaccggacaggtcagcgtggaaatcgagtgggagctgcagaaggagaacagcaaacgctggaacccagagattcagtacacttcaaactactacaaatctacaaatgtggactttgctgtcaatacagagggaacttattctgagcctcgccccattggtactcgttacctcacccgtaatctgtaa

SEQ ID NO: 4980 - protein, 735 aa, Adeno-associated virus
MAADGYLPDWLEDTLSEGTRQWWKLKPGPPPPKPAERHKDDSRGLVLPGYKYLGPFNGLDKGEPVNEADAAALEHDKAYDRQLDSGDNPYLKYNHADAEFQERLKEDTSFGGNLGRAVFQAKKRVLEPLGLVEEPVKTAPGKKRPVEHSPAEPDSSSGTGKAGQQPARKRLNFGQTGDADSVPDPQPLGQPPAAPSGLGSTTMATGSGAPMADNNEGADGVGNSSGNWHCDSQWLGDRVITTSTRTWALPTYNNHLYKQISSQSGASNDNHYFGYSTPWGYFDFNRFHCHFSPRDWQRLINNNWGFRPKRLNFKLFNIQVKEVTQNDGTTTIANNLTSTVQVFTDSEYQLPYVLGSAHQGCLPPFPADVFMVPQYGYLTLNNGSQAVGRSSFYCLEYFPSQMLRTGNNFQFSYTFEDVPFHSSYAHSQSLDRLMNPLIDQYLYYLNKTQSNSGTLQQSRLLFSQAGPTSMSLQAKNWLPGPCYRQQRLSKQANDNNNSNFPWTAATKYHLNGRDSLVNPGPAMASHKDDEEKFFPMHGTLIFGKQGTNANDADLDNVMITDEEEIRTTNPVATEQYGYVSNNLQNSNTGPTTGTVNHQGALPGMVWQDRDVYLQGPIWAKIPHTDGHFHPSPLMGGFGLKHPPPQIMIKNTPVPANPPTNFSSAKFASFITQYSTGQVSVEIEWELQKENSKRWNPEIQYTSNYNKSVNVDFTVDTNGVYSEPRPIGTRYLTRNL

SEQ ID NO: 4981 - DNA, 2208 bp, Adeno-associated virus
atggctgccgatggttatcttccagattggctcgaggacactctctctgaaggaataagacagtggtggaagctcaaacctggcccaccaccaccaaagcccgcagagcggcatcaggacaacagcaggggtcttgtgcttcctgggtacaagtacctcggaccctccaacggactcgacaaaggagagccggtcaacgaggcagacgccgcggccctcgagcacgacaaggcctacgaccggcagctcgacagcggagacaacccgtacctcaagtacaaccacgccgacgcggagtttcaggagcgtcttaaagaagatacgtcttttgggggcaacctcggacgagcagtcttccaggcgaaaaagagggttcttgaacctctgggcctggttgaggaacctgttaagacggctccgggaaaaaagaggccggtagagcactctcctgtggagccagactcctcctcgggaaccggaaaagcgggccatcagcctgcgagaaagagattgaattttggtcagactggagacgcagactccgtacctgacccccagcctctcggacagccaccagcagcccccacaagtttgggatctactacaatggctacaggcagtggcgcaccaatggcagacaataacgagggtgccgatggagtgggtaattcctcaggaaattggcattgcgattcccaatggctgggcgacagagtcatcaccaccagcacccgaacctgggccctgcccacctacaacaaccacctctacaagcaaatctccagccaatcaggagcctcgaacgacaaccactactttggctgcagcaccccctgggggtattttgacttcaacagattccactgtcacttctccccacgtgattggcaaagactcatcaacaacaactggggattccgacccaagagactcaacttcaagctctttaacattcaagtcaaagaggtcacgcagaatgacggtacgacgacgattgccaataaccttaccagcacggttcaggtgtttactgactcggagtacccgctcccgtacgtcctcggctcggcgcatcaaggatgcctcccgccgtttccagcggacgtcttcatggtcccacagtatggatacctcaccctgaacaacgggagtcaggcggtaggacgctcttccttttactgcctggagtactttccttctcagatgctgcgtaccggaaacaactttaccttcagctacacctttgaggacgttcctttccacagcagctacgctcacagccagagtttggaccggctgatgaatcctctgatcgaccagtatctatattatctgaacaggacacaatcaaatagtggaactcttcagcagtctaggctactgtttagccaagctggacccaccagcatgtctcttcaagctaaaaactggctgcctggaccttgctacagacagcagcgtctttcaaagcaggcaaacgacaacaacaacagcaactttccctggactgcggctacaaagtatcatctaaatggccgggactcgttggttaatccaggaccagctatggccagccacaaagacgatgaagaaaagtttttccccatgcatggaaccctgatatttggtaaacaaggaacaaatgctaacgacgcggatttggagcatgttatgattacagatgaagaagaaatcaggaccaccaatcctgtggctacagagcagtacggaaacgtgtcaaataatttgcaaaactcaaatactggtccaactacagaaaatgtcaatcaccagggagcgttacctggtatggtgtggcaggatcgagacgtgtacctgcagggacccatttgggccaagattcctcacaccgacggacactttcacccttctccactgatgggaggttttggactcaaacacccgcctcctcaaatcatgatcaaaaacactcccgttccagccaatcctcccacaaacttcagttctgccaagtttgcttctttcatcacacagtattccacgggccaggtcagcgtggagattgagtgggagctgcagaaggagaacagcaaacgctggaaccccgagatccagtatacttccaactacaacaaatctgttaatgtggactttactgtggacactaatggtgtgtattcagagccttgccccattggcaccagatacctgactcgtaatctgtaa

SEQ ID NO: 4982 - protein, 735 aa, Adeno-associated virus
MAADGYLPDWLEDTLSEGIRQWWKLKPGPPPPKPAERHQDNSRGLVLPGYKYLGPSNGLDKGEPVNEADAAALEHDKAYDRQLDSGDNPYLKYNHADAEFQERLKEDTSFGGNLGRAVFQAKKRVLEPLGLVEEPVKTAPGKKRPVEHSPVEPDSSSGTGKAGHQPARKRLNFGQTGDADSVPDPQPLGQPPAAPTSLGSTTMATGSGAPMADNNEGADGVGNSSGNWHCDSQWLGDRVITTSTRTWALPTYNNHLYKQISSQSGASNDNHYFGCSTPWGYFDFNRFHCHFSPRDWQRLINNNWGFRPKRLNFKLFNIQVKEVTQNDGTTTIANNLTSTVQVFTDSEYPLPYVLGSAHQGCLPPFPADVFMVPQYGYLTLNNGSQAVGRSSFYCLEYFPSQMLRTGNNFTFSYTFEDVPFHSSYAHSQSLDRLMNPLIDQYLYYLNRTQSNSGTLQQSRLLFSQAGPTSMSLQAKNWLPGPCYRQQRLSKQANDNNNSNFPWTAATKYHLNGRDSLVNPGPAMASHKDDEEKFFPMHGTLIFGKQGTNANDADLEHVMITDEEEIRTTNPVATEQYGNVSNNLQNSNTGPTTENVNHQGALPGMVWQDRDVYLQGPIWAKIPHTDGHFHPSPLMGGFGLKHPPPQIMIKNTPVPANPPTNFSSAKFASFITQYSTGQVSVEIEWELQKENSKRWNPEIQYTSNYNKSVNVDFTVDTNGVYSEPCPIGTRYLTRNL

SEQ ID NO: 4983 - DNA, 2196 bp, Adeno-associated virus
atggctgctgacggttatcttccagattggctcgaggacaacctctctgagggcattcgcgagtggtgggcgctgaaacctggagccccgcaacccaaagccaaccagcaaaagcaggacgacggccggggtctggtgcttcctggctacaagtacctcggacccttcaacggactcgacaagggggagcccgtcaacgaggcggacgccgcggccctcgagcacgacaaggcctacgaccagcagctcaaagcgggtgacaatccgtacctgcggtataatcacgccgacgccgagtttcaagagcgtctgcaagaagatacgtcctttgggggcaacctcgggcgagcagtcttccaggccaaaaagagggtactcgagcctctgggtctggttgaggaaggcgctaagacggctcctggaaagaagcggccagtagaaccggactccagctcgggcatcggcaagtcaggccagcagcccgcgaaaaagagactgaattttgggcagactggcgactcagagtcagtgcctgacccccaacctctctcagaaccacccgcaggtccctctggtctgggatctggtacaatggctgctggcggtggcgctccaatggcagacaataacgaaggcgccgacggagtgggtaatgtctcaggaaattggcattgcgattccacatggctgggcgaccgagtcatcaccaccagcactcggacctgggccctccccacctacaacaaccacctctacaagcaaatctccaacgggacctcgggaggcagcagcaacgacaacacctactttggctacagcaccccctgggggtattttgactttaacagattccactgccacttttcaccacgtgactggcagcgactcatcaacaacaactgggggttccggcccaagaagctcaacttcaagctcttcaacatccaggtcaaggaggtcacccagaatgaaggcaccaagaccatcgccaataacctcaccagcacggtgcaggtctttacggactcggagtaccagctcccgtacgtgctcggctctgcccaccagggctgcctgcctccgttcccggcggacgtgttcatgattccgcagtacgggtacctgacgctgaacaacgggagccaggccgtggggcgatcctccttctactgcctggagtactttccctcgcagatgctgagaacgggcaacaactttaccttcagctacaccttcgaggacgtgcccttccacagcagctacgcgcacagccagagcctggaccggctgatgaacccgctgattgaccagtacctgtactacctgtctcggactcagaccaacgggaccaatgccacgcagactctgttgtttgctcaggccgggcctcagaacatgtcggctcaggccaagaactggctgcctggtccttgctatcggcagcagcgcgtctctacgacagtgtcgcaaaacaacaacagcaactttacctggaccggggcgaccaagtaccacctgaacggccgagactccctggtgagccccggtgtcgccatggcaacgcacaaggacgacgaggagcgcttcttcccgagcagcggggtcctgatgtttggcaagcagggcgctggaaaggacaatgtcgagtacaccaacgtgatgctcaccagcgaggaggagatcaagaccaccaaccctgtggccacggagcagtacggcgtggtggctgacaatctgcagcagaccaactcagctcccattgtgggggcagtcaacagccagggggccttacccggtatggtctggcagaaccgggacgtgtacctgcagggtcccatctgggccaagatcccgcatacggacggcaactttcacccgtctcctctcatgggcggctttggactgaaacacccgcctccccagatcctgatcaaaaacacgccggtacctgcggatcccccggtgaactttacggacgctaagctggcgagtttcatcacgcagtacagcaccgggcaggtcagcgtggagattgagtgggagctgcagaaggagaacagcaagcgctggaatcccgagattcagtacacttccaattattataaatcagctaatgtggactttgccgtcaatgcagatggtgtatatagtgaaccccgccccattggcactcgttacctcacccgtaatctgtaa

SEQ ID NO: 4984 - protein, 731 aa, Adeno-associated virus
MAADGYLPDWLEDNLSEGIREWWALKPGAPQPKANQQKQDDGRGLVLPGYKYLGPFNGLDKGEPVNEADAAALEHDKAYDQQLKAGDNPYLRYNHADAEFQERLQEDTSFGGNLGRAVFQAKKRVLEPLGLVEEGAKTAPGKKRPVEPDSSSGIGKSGQQPAKKRLNFGQTGDSESVPDPQPLSEPPAGPSGLGSGTMAAGGGAPMADNNEGADGVGNVSGNWHCDSTWLGDRVITTSTRTWALPTYNNHLYKQISNGTSGGSSNDNTYFGYSTPWGYFDFNRFHCHFSPRDWQRLINNNWGFRPKKLNFKLFNIQVKEVTQNEGTKTIANNLTSTVQVFTDSEYQLPYVLGSAHQGCLPPFPADVFMIPQYGYLTLNNGSQAVGRSSFYCLEYFPSQMLRTGNNFTFSYTFEDVPFHSSYAHSQSLDRLMNPLIDQYLYYLSRTQTNGTNATQTLLFAQAGPQNMSAQAKNWLPGPCYRQQRVSTTVSQNNNSNFTWTGATKYHLNGRDSLVSPGVAMATHKDDEERFFPSSGVLMFGKQGAGKDNVEYTNVMLTSEEEIKTTNPVATEQYGVVADNLQQTNSAPIVGAVNSQGALPGMVWQNRDVYLQGPIWAKIPHTDGNFHPSPLMGGFGLKHPPPQILIKNTPVPADPPVNFTDAKLASFITQYSTGQVSVEIEWELQKENSKRWNPEIQYTSNYYKSANVDFAVNADGVYSEPRPIGTRYLTRNL

SEQ ID NO: 4985 - DNA, 2196 bp, Adeno-associated virus
atggctgctgacggttatcttccagattggctcgaggacaacctctctgagggcattcgcgagtggtgggcgctgaaacctggagccccgcaacccaaagccaaccagcaaaagcaggacgacggccggggtctggtgcttcctggctacaagtacctcggacccttcaacggactcgacaagggggagcccgtcaacgaggcggacgccgcggccctcgagcacgacaaggcctacgaccagcagctcaaagcgggtgacaatccgtacctgcggtataatcacgccgacgccgagtttcaagagcgtctgcaagaagatacgtcctttgggggcaacctcgggcgagcagtcttccaggccaaaaagagggtactcgagcctctgggtctggttgaggaaggcgctaagacggctcctggaaagaagcggccagtagaaccggactccagctcgggcatcggcaagtcaggccggcagcccgcgaaaaagagactgaattttgggcagactggcgactcagagtcagtgcctgacccccaacctctctcagaaccacccgcaggtccctctggtctgggatctggtacaatggctgcaggcggtggcgctccaatggcagacaataacgaaggcgccgacggagtgggtaatgcctcaggaaattggcattgcgattccacatggctgggcgaccgagtcatcaccaccagcactcggacctgggccctccccacctacaacaaccacctctacaagcaaatctccaacgggacctcgggaggcagcagcaacgacaacacctactttggctacagcaccccctgggggtattttgactttaacagattccactgccacttttcaccacgtgactggcagcgactcatcaacaacaactggggattccggcccaagaggctcaacttcaagctcttcaacatccaggtcaaggaggtcacccagaatgaaggcaccaagaccatcgccaataacctcaccagcacggtgcaggtctttacggactcgaagtaccagctcccgtacgtgctcggctctgcccaccagggctgcctgcctccgttcccggcggacgtgttcatgattccgcagtacgggtacctgacgctgaacaacgggagccaggccgtggggcgatcctccttctactgcctggagtactttccctcgcagatgctgagaacgggcaacaactttaccttcagctacaccttcgaggacgtgcccttccacagcagctacgcgcacagccagagcctggaccggctgatgaacccgctgattgaccagtacctgtactacctgtctcggactcagaccaacgggaccaatgccacgcagactctgttgtttgctcaggccgggcctcagaacatgtcggctcaggccaagaactggctgcctggtccttgctatcggcagcagcgcgtctctacgacagtgtcgcaaaacaacaacagcaactttacctggaccggggcgaccaagtaccacctgaacggccgagactccctggtgaaccccggtgtcgccatggcaacgcacaaggacgacgaggagcgcttcttcccgagcagcggggtcctgatgtttggcaagcagggcgctggaaaggacaatgtcgagtacaccaacgtgatgctcaccagcgaggaggagatcaagaccaccaaccctgtggccacggagcagtacggtgtggtggctgacaatctgcagcagaccaactcggctcccattgtgggggcagtcaacagccagggggccttacccggtatggtctggcagaaccgggacgtgtacctgcagggtcccatctgggccaagatcccgcatacggacggcaactttcacccgtctcctctcatgggcggctttggactgaaacacccgcctccccagatcctgatcaaaaacacgccggtacctgcggatcccccggtgaactttacggacgctaagctggcgagtttcatcacgcagtacagcaccgggcaggtcagcgtggagattgagtgggagctgcagaaggagaacagcaagcgctggaatcccgagattcagtacacttccaattattataaatcagctaatgtggactttgccgtcaatgcagatggtgtatatagtgaaccccgccccattggcactcgttacctcacccgtaatctgtaa

SEQ ID NO: 4986 - protein, 731 aa, Adeno-associated virus
MAADGYLPDWLEDNLSEGIREWWALKPGAPQPKANQQKQDDGRGLVLPGYKYLGPFNGLDKGEPVNEADAAALEHDKAYDQQLKAGDNPYLRYNHADAEFQERLQEDTSFGGNLGRAVFQAKKRVLEPLGLVEEGAKTAPGKKRPVEPDSSSGIGKSGRQPAKKRLNFGQTGDSESVPDPQPLSEPPAGPSGLGSGTMAAGGGAPMADNNEGADGVGNASGNWHCDSTWLGDRVITTSTRTWALPTYNNHLYKQISNGTSGGSSNDNTYFGYSTPWGYFDFNRFHCHFSPRDWQRLINNNWGFRPKRLNFKLFNIQVKEVTQNEGTKTIANNLTSTVQVFTDSKYQLPYVLGSAHQGCLPPFPADVFMIPQYGYLTLNNGSQAVGRSSFYCLEYFPSQMLRTGNNFTFSYTFEDVPFHSSYAHSQSLDRLMNPLIDQYLYYLSRTQTNGTNATQTLLFAQAGPQNMSAQAKNWLPGPCYRQQRVSTTVSQNNNSNFTWTGATKYHLNGRDSLVNPGVAMATHKDDEERFFPSSGVLMFGKQGAGKDNVEYTNVMLTSEEEIKTTNPVATEQYGVVADNLQQTNSAPIVGAVNSQGALPGMVWQNRDVYLQGPIWAKIPHTDGNFHPSPLMGGFGLKHPPPQILIKNTPVPADPPVNFTDAKLASFITQYSTGQVSVEIEWELQKENSKRWNPEIQYTSNYYKSANVDFAVNADGVYSEPRPIGTRYLTRNL

SEQ ID NO: 4987 - DNA, 2196 bp, Adeno-associated virus
atggctgctgacggttatcttccagattggctcgaggacaacctctctgagggcattcgcgagtggtgggcgctgaaacctggagccccgcaacccaaagccaaccagcaaaagcaggacgacggccggggtctggtgcttcctggctacaagtacctcggacccttcaacggactcgacaagggggagcccgtcaacgaggcggacgccgcggccctcgagcacgacaaggcctacgaccagcagctcaaagcgggtgacaatccgtacctgcggtataatcacgccgacgccgagtttcaagagcgtctgcaagaagatacgtcctttgggggcaacctcgggcgagcagtcttccaggccaaaaagagggtactcgagcctctgggtctggttgaggaaggcgctaagacggctcctggaaagaagcggccagtagaaccggactccagctcgggcatcggcaagtcaggccagcagcccgcgaaaaagagactgaattttgggccgactggcgactcagagtcagtgcctgacccccaacctctctcagaaccacctgcaggtccctctggtctgggatctggtacaatggctgcaggcggtggcgctccaatggcagacaataacgaaggcgccgacggagtgggtaatgtctcaggaaattggcattgcgattccacatggctgggcgaccgagtcatcaccaccagcactcggacctgggccctccccacctacaacaaccacctctacaagcaaatctccaacgggacctcgggaggcagcagcaacgacaacacctactttggctacagcaccccctgggggtattttgactttaacagattccactgccacttttcaccacgcgactggcagcgactcatcaacaacaactggggattccggcccaagaagctcaacttcaagctcttcaacatccaggtcaaggaggtcacccagaatgaaggcaccaagaccaccgccaataacctcaccagcacggtgcaggtctttacggactcggagtaccagctcccgtacgtgctcggctctgcccaccagggctgcctgcctccgttcccggcggacgtgttcatgattccgcagtacgggtacctgacgctgaacaacgggagccaggccgtggggcgatcctccttctactgcctggagtactttccctcgcagatgctgagaacgggcaacaactttaccttcagctacaccttcgaggacgtgcccttccacagcagctacgcgcacagccagagcctggaccggctgatgaacccgctgattgaccagtacctgtactacctgtctcggactcagaccaacgggaccaatgccacgcagactctgttgtttgctcaggccgggcctcagaacatgtcggctcaggccaagaactggctgcctggtccttgctatcggcagcagcgcgtctctacggcagtgtcgcaaaacaacaacagcaactttacctggaccggggcgaccaagtaccacctgaacggccgagactccctggtgaaccccggtgtcgccatggcaacgcacaaggacgacgaggagcgcttcttcccgagcagcggggtcctgatgtttggcaagcagggcgctggaaaggacaatgtcgagtacaccaacgtgatgctcaccagcgaggaggagatcaagaccaccaaccctgtggccacggagcagtacggtgtggtggctgacaatctgcagcagaccaactcggctcccattgtgggggcagtcaacagccagggggccttacccggtatggtctggcagaaccgggacgtgtacctgcagggtcccatctgggccaagatcccgcatacggacggcaactttcacccgtctcctctcatgggcggctttggactgaaacacccgcctccccagatcctgatcaaaaacacgccggtacctgcggatcccccggtgaactttacggacgctaagctggcgagtttcatcacgcagtacagcaccgggcaggtcagcgtggagattgagtgggagctgcagaaggagaacagcaagcgctggaatcccgagattcagtacacttccaattattataaatcagctaatgtggactttgccgtcaatgcagatggtgtatatagcgaaccccgccccattggcactcgttacctcacccgtaatctgtaa

SEQ ID NO: 4988 - protein, 731 aa, Adeno-associated virus
MAADGYLPDWLEDNLSEGIREWWALKPGAPQPKANQQKQDDGRGLVLPGYKYLGPFNGLDKGEPVNEADAAALEHDKAYDQQLKAGDNPYLRYNHADAEFQERLQEDTSFGGNLGRAVFQAKKRVLEPLGLVEEGAKTAPGKKRPVEPDSSSGIGKSGQQPAKKRLNFGPTGDSESVPDPQPLSEPPAGPSGLGSGTMAAGGGAPMADNNEGADGVGNVSGNWHCDSTWLGDRVITTSTRTWALPTYNNHLYKQISNGTSGGSSNDNTYFGYSTPWGYFDFNRFHCHFSPRDWQRLINNNWGFRPKKLNFKLFNIQVKEVTQNEGTKTTANNLTSTVQVFTDSEYQLPYVLGSAHQGCLPPFPADVFMIPQYGYLTLNNGSQAVGRSSFYCLEYFPSQMLRTGNNFTFSYTFEDVPFHSSYAHSQSLDRLMNPLIDQYLYYLSRTQTNGTNATQTLLFAQAGPQNMSAQAKNWLPGPCYRQQRVSTAVSQNNNSNFTWTGATKYHLNGRDSLVNPGVAMATHKDDEERFFPSSGVLMFGKQGAGKDNVEYTNVMLTSEEEIKTTNPVATEQYGVVADNLQQTNSAPIVGAVNSQGALPGMVWQNRDVYLQGPIWAKIPHTDGNFHPSPLMGGFGLKHPPPQILIKNTPVPADPPVNFTDAKLASFITQYSTGQVSVEIEWELQKENSKRWNPEIQYTSNYYKSANVDFAVNADGVYSEPRPIGTRYLTRNL

SEQ ID NO: 4989 - DNA, 4404 bp, Adeno-associated virus
atggctgccgatggttatcttccagattggctcgagggcaacctctctgagggcattcgcgagtggtgggacttgaaacctggagccccgaaacccaaagccaaccagcaaaagcaggacgacggccggggtctggtgcttcctggctacaggtacctcggacccttcaacggactcgacaagggagagccggtcaacgaggcagacgccgcggccctcgagcacgacaaggcctacgacaagcagctcgagcagggggacaacccgtacctcaagtacaaccacgccgacgccgagtttcaggagcgtcttcaagaagatacgtcttttgggggcaacctcgggcgagcagtcttccaggccaagaagcgggttctcgaacctctcggtctggttgaggaaggcgctaagacggctcctggaaagaagagacccatagaatcccccgactcctccacgggcatcggcaagaacggccagccgcccgctaaaaagaagctcaactttgggcagactggcgactcagagtcagtgcccgacccccaacctctcggagaacctcccgccgcgccctcaggtctgggatctggtacaatggctgcaggcggtggcgcaccaatggcagacaataacgaaggcgccgacggagtgggtaatgcctccggaaattggcattgcgattccacatggctgggcgacagagtcatcaccaccagcacccgcacctgggccctgcccacctacaacaaccacctctacaagcagatatcaagtcagagcggggctaccaacgacaaccacttcttcggctacagcaccccctggggctattttgacttcaacagattccactgccacttctcaccacgtgactggcagcgactcatcaacaacaactggggattccggcccagaaagctgcggttcaagttgttcaacatccaggtcaaggaggtcacgacgaacgacggcgttacgaccatcgctaataaccttaccagcacgattcaggtcttctcggactcggagtaccaactgccgtacgtcctcggctctgcgcaccagggctgcctccctccgttccctgcggacgtgttcatgattcctcagtacggatatctgactctaaacaacggcagtcagtctgtgggacgttcctccttctactgcctggagtactttccttctcagatgctgagaacgggcgataactttgaattcagctacacctttgaggaagtgcctttccacagcagctatgcgcacagccagagcctggaccggctgatgaatcccctcatcgaccagtacctgtactacctggcccggacccagagcactacggggtccacaagggagctgcagttccatcaggctgggcccaacaccatggccgagcaatcaaagaactggctgcccggaccctgttatcggcagcagagactgtcaaaaaacatagacagcaacaacaacagtaactttgcctggaccggggccactaaataccatctgaatggtagaaattcattaaccaacccgggcgtagccatggccaccaacaaggacgacgaggaccagttctttcccatcaacggagtgctggtttttggcaaaacgggggctgccaacaagacaacgctggaaaacgtgctaatgaccagcgaggaggagatcaaaaccaccaatcccgtggctacagaagaatacggtgtggtctccagcaacctgcaatcgtctacggccggaccccagacacagactgtcaacagccagggggctctgcccggcatggtctggcagaaccgggacgtgtacctgcagggtcccatctgggccaaaattcctcacacggacggcaactttcacccgtctcccctgatgggcggatttggactcaaacacccgcctcctcaaattctcatcaaaaacaccccggtacctgctaatcctccagaggtgtttactcctgccaagtttgcctcatttatcacgcagtacagcaccggccaggtcagcgtggagatcgagtgggaactgcagaaagaaaacagcaaacgctggaatccagagattcagtacacctcaaattatgccaagtctaataatgtggaatttgctgtcaacaacgaaggggtttatactgagcctcgccccattggcacccgttacctcacccgtaacctgtaaatggctgccgatggttatcttccagattggctcgaggacaacctctctgagggcattcgcgagtggtgggacttgaaacctggagccccgaaacccaaagccaaccagcaaaagcaggacgacggccggggtctggtgcttcctggctacaagtacctcggacccttcaacggactcgacaagggggagcccgtcaacgcggcggacgcagcggccctcgagcacgacaaggcctacgaccagcagctcaaagcgggtgacaatccgtacctgcggtataaccacgccgacgccgagtttcaggagcgtctgcaagaagatacgtcttttgggggcaacctcgggcgagcagtcttccaggccaagaagcgggttctcgaacctctcggtctggttgaggaaggcgctaagacggctcctggaaagaagagaccggtagagccatcaccccagcgttctccagactcctctacgggcatcggcaagaaaggccagcagcccgcgaaaaagagactcaactttgggcagactggcgactcagagtcagtgcccgaccctcaaccaatcggagaaccccccgcaggcccctctggtctgggatctggtacaatggctgcaggcggtggcgctccaatggcagacaataacgaaggcgccgacggagtgggtagttcctcaggaaattggcattgcgattccacatggctgggcgacagagtcatcaccaccagcacccgaacctgggccctccccacctacaacaaccacctctacaagcaaatctccaacgggacttcgggaggaagcaccaacgacaacacctacttcggctacagcaccccctgggggtattttgactttaacagattccactgccacttctcaccacgtgactggcagcgactcatcaacaacaactggggattccggcccaagagactcaacttcaagctcttcaacatccaggtcaaggaggtcacgcagaatgaaggcaccaagaccatcgccaataaccttaccagcacgattcaggtctttacggactcggaataccagctcccgtacgtcctcggctctgcgcaccagggctgcctgcctccgttcccggcggacgtcttcatgattcctcagtacgggtacctgactctgaacaatggcagtcaggccgtgggccgttcctccttctactgcctggagtactttccttctcaaatgctgagaacgggcaacaactttgagttcagctaccagtttgaggacgtgccttttcacagcagctacgcgcacagccaaagcctggaccggctgatgaaccccctcatcgaccagtacctgtactacctgtctcggactcagtccacgggaggtaccgcaggaactcagcagttgctattttctcaggccgggcctaataacatgtcggctcaggccaaaaactggctacccgggccctgctaccggcagcaacgcgtctccacgacactgtcgcaaaataacaacagcaactttgcctggaccggtgccaccaagtatcatctgaatggcagagactctctggtaaatcccggtgtcgctatggcaacccacaaggacgacgaagagcgattttttccgtccagcggagtcttaatgtttgggaaacagggagctggaaaagacaacgtggactatagcagcgttatgctaaccagtgaggaagaaattaaaaccaccaacccagtggccacagaacagtacggcgtggtggccgataacctgcaacagcaaaacgccgctcctattgtaggggccgtcaacagtcaaggagccttacctggcatggtctggcagaaccgggacgtgtacctgcagggtcctatctgggccaagattcctcacacggacggaaactttcatccctcgccgctgatgggaggctttggactgaaacacccgcctcctcagatcctgattaagaatacacctgttcccgcggatcctccaactaccttcagtcaagctaagctggcgtcgttcatcacgcagtacagcaccggacaggtcagcgtggaaattgaatgggagctgcagaaagaaaacagcaaacgctggaacccagagattcaatacacttccaactactacaaatctacaaatgtggactttgctgttaacacagatggcacttattctgagcctcgccccatcggcacccgttacctcacccgtaatctgtaa

SEQ ID NO: 4990 - protein, 738 aa, Adeno-associated virus; identical to SEQ ID NO: 4793

SEQ ID NO: 4991 - protein, 738 aa, Adeno-associated virus; identical to SEQ ID NO: 4793

SEQ ID NO: 4992 - DNA, 2501 bp, Adeno-associated virus
gaattcgcccttggctgcgtcaactggaccaatgagaactttcccttcaacgattgcgtcgacaagatggtgatctggtgggaggagggcaagatgacggccaaggtcgtggagtccgccaaggccattcatcatctgctggggcgggctcccgagattgcttgctcggcctgcgatctggtcaacgtggacctggatgactgtgtttctgagcaataaatgacttaaaccaggtatggctgccgatggttatcttccagattggctcgaggacaacctctctgagggcattcgcgagtggtgggacttgagacctggagccccgaaacccaaagccaaccagcaaaagcaggacgacggccggggtctggtgcttcctggctacaagtacctcggacccttcaacggactcgacaagggagagccggtcaacgaggcagacgccgcggccctcgagcacgacaaggcctacgacaagcagctcgagcagggggacaacccgtacctcaagtacaaccacgccgacgccgagtttcaggagcgtcttcaagaagatacgtcttttgggggcaacctcgggcgagcagtcttccaggccaagaagcgggttctcgaacctctcggtctggttgaggaaggcgctaagacggctcctggaaagaagagacccatagaatcccccgactcctccacgggcatcggcaagaaaggccagcagcccgctaaaaagagactcaactttgggcagactggcgactcagagtcagtgcccgaccctcaaccaatcggagaaccccccgcaggcccctctggtctgggatctggcacaatggctgcaggcggtggcgctccaatggcagacaataacgaaggcgccgacggagtgggtagttcctcaggaaattggcattgcgattccacatggctgggcgacagagtcatcaccaccagcacccgaacctgggccctccccacctacaacaaccacctctacaagcaaatctccaacgggacatcgggaggaagcaccaacgacaacacctacttcggctacagcaccccctgggggtattttgactttaacagattccactgccacttctcaccacgtgactggcagcgactcatcaacaacaactggggattccggcccaagagactcaacttcaagctcttcaacatccaggtcaaggaggtcacgcagaatgaaggcaccaagaccatcgccaataaccttaccagcacgattcaggtctttacggactcggaataccagctcccgtacgtcctcggctctgcgcaccagggctgcctgcctccgttcccggcggacgtcttcatgattcctcagtacgggtacctgactctgaacaacggcagtcaggccgtgggccgttcctccttctactgcctggagtactttccttctcaaatgctgagaacgggcaacaactttgagttcagctaccagtttgaggacgtgccttttcacagcagctatgcgcacagccaaagcctggaccggctgatgaaccccctcatcgaccagtacctgtactacctgtctcggactcagtccacgggaggtaccgcaggaactcagcagttgctattttctcaggccgggcctaataacatgtcggctcaggccaaaaactggctacccgggccctgctaccggcagcaacgcgtctccacgacagtgtcgcaaaataacaacagcaactttgcttggaccggtgccaccaagtatcatctgaatggcagagactctctggtaaatcccggtgtcgctatggcaacgcacaagggcgacgaagagcgattttttccatccagcggagtcttgatgtttgggaaacagggagctggaaaagacaacgtagactatagcagcgttatgctaaccagtgaggaagaaatcaaaaccaccaacccagtggccacagaacagtacggcgtggtggccgataacctgcaacagcaaaacgccgctcctattgtaggggccgtcaacagtcaaggagccttacctggcatggtctggcagaaccgggacgtgtacctgcagggtcctatctgggccaagattcctcacacggacggcaactttcatccttcgccgctgatgggaggctttggactgaaacacccgcctcctcagatcctgattaagaatacacctgttcccgcggatcctccaactaccttcagtcaagccaagctggcgtcgttcatcacgcagtacagcaccggacaggtcagcgtggaaattgaatgggagctgcagaaagagaacagcaagcgctggaacccagagattcagtatacttccaactactacaaatctacaaatgtggactttgctgtcaatactgagggtacttattcagagcctcgccccattggcacccgttacctcacccgtaacctgtaattgcctgttaatcaataaaccggttgattcgtttcagttgaactttggtctcaagggcgaattc

SEQ ID NO: 4993 - DNA, 2187 bp, Adeno-associated virus
atggctgccgatggttatcttccagattggctcgaggacaacctctctgagggcattcgcgagtggtgggacttgaaacctggagccccgaaacccaaagccaaccagcaaaagcaggacgacggccggggtctggtgcttcctggctacaagtacctcggacccttcaacggactcgacaagggagagccggtcaacgaggcagacgccgcggccctcgagcacgacaaggcctacgacaagcagctcgagcagggggacaacccgtacctcaagtacaaccacgccgacgccgagtttcaggagcgtcttcaagaagatacgtcttttgggggcaacctcgggcgagcagtcttccaggccaagaagcgggttctcgaacctctcggtctggttgaggaaggcgctaagacggctcctggaaagaagagacccatagaatcccccgactcctccacgggcatcggcaagaaaggccagcagcccgctaaaaagaagctcaactttgggcagactggcgactcagagtcagtgcccgacccccaacctctcggagaacctcccgccgcgccctcaggtctgggatctggtacaatggctgcaggcggtggcgcaccaatggcagacaataacgaaggcgccgacggagtgggtaatgcctccggaaattggcattgcgattccacatggctgggcgacagagtcatcaccaccagcacccgcacctgggccctgcccacctacaacaaccacctctacaagcagatatcaagtcagagcggggctaccaacgacaaccacttcttcggctacagcaccccctggggctattttgacttcaacagattccactgccacttctcaccacgtgactggcagcgactcatcaacaacaactggggattccggcccagaaagctgcggttcaagttgttcaacatccaggtcaaggaggtcacgacgaacgacggcgttacgaccatcgctaataaccttaccagcacgattcaggtcttctcggactcggagtaccaactgccgtacgtcctcggctctgcgcaccagggctgcctccctccgttccctgcggacgtgttcatgattcctcagtacggatatctgactctaaacaacggcagtcagtctgtgggacgttcctccttctactgcctggagtactttccttctcagatgctgagaacgggcaataactttgaattcagctacacctttgaggaagtgcctttccacagcagctatgcgcacagccagagcctggaccggctgatgaatcccctcatcgaccagtacctgtactacctggcccggacccagagcactacggggtccacaagggagctgcagttccatcaggctgggcccaacaccatggccgagcaatcaaagaactggctgcccggaccctgttatcggcagcagagactgtcaaaaaacatagacagcaacaacaacagtaactttgcctggaccggggccactaaataccatctgaatggtagaaattcattaaccaacccgggcgtagccatggccaccaacaaggacgacgaggaccagttctttcccatcaacggagtgctggtttttggcgaaacgggggctgccaacaagacaacgctggaaaacgtgctaatgaccagcgaggaggagatcaaaaccaccaatcccgtggctacagaagaatacggtgtggtctccagcaacctgcaatcgtctacggccggaccccagacacagactgtcaacagccagggggctctgcccggcatggtctggcagaaccgggacgtgtacctgcagggtcccatctgggccaaaattcctcacacggacggcaactttcacccgtctcccctgatgggcggatttggactcaaacacccgcctcctcaaattctcatcaaaaacaccccggtacctgctaatcctccagaggtgtttactcctgccaagtttgcctcatttatcacgcagtacagcaccggccaggtcagcgtggagatcgagtgggaactgcagaaagaaaacagcaaacgctggaatccagagattcagtacacctcaaattatgccaagtctaataatgtggaatttgctgtcaacaacgaaggggtttatactgagcctcgccccattggcacccgttacctcacccgtaacctgtaa

SEQ ID NO: 4994 - protein, 728 aa, Adeno-associated virus; identical to SEQ ID NO: 4765

SEQ ID NO: 4995 - protein, 728 aa, Adeno-associated virus; identical to SEQ ID NO: 4829

SEQ ID NO: 4996 - protein, 728 aa, Adeno-associated virus; identical to SEQ ID NO: 4829

SEQ ID NO: 4997 - DNA, 3113 bp, Adeno-associated virus
gaattcgccctttctacggctgcgtcaactggaccaatgagaactttcccttcaacgattgcgtcgacaagatggtgatctggtgggaggagggcaagatgacggccaaggtcgtggagtccgccaaggccattctcggcggcagcaaggtgcgcgtggaccaaaagtgcaagtcgtccgcccagatcgatcccacccccgtgatcgtcacttccaacaccaacatgtgcgccgtgattgacgggaacagcaccaccttcgagcaccagcagccgttacaagaccggatgttcaaatttgaactcacccgccgtctggagcatgactttggcaaggtgacaaagcaggaagtcaaagagttcttccgctgggcgcaggatcacgtgaccgaggtggcgcatgagttctacgtcagaaagggtggagccaacaagagacccgcccccgatgacgcggataaaagcgagcccaagcgggcctgcccctcagtcgcggatccatcgacgtcagacgcggaaggagctccggtggactttgccgacaggtaccaaaacaaatgttctcgtcacgcgggcatgcttcagatgctgcttccctgcaagacatgcgagagaatgaatcagaatttcagcatttgcttcacgcacgggaccagagactgttcagaatgtttccccggcgtgtcagaatctcaaccggtcgtcagaaagaggacgtatcggaaactctgtgccattcatcatctgctggggcgggctcccgagattgcttgctcggcctgcgatctggtcaacgtggacctggatgactgtgtttctgagcaataaatgacttaaaccaggtatggctgccgatggtcatcttccagattggctcgaggacaacctctctgagggcattcgcgagtggtgggacttgaaacctggagccccgaaacccaaagccaaccagcaaaagcaggacgacggccggggtctggtgcttcctggctacaagtacctcggacccttcaacggactcgacaagggggagcccgtcaacgcggcggacgcagcggccctcgagcacgacaaggcctacgaccagcagctcaaagcgggtgacaatccgtacctgcggtataaccacgccgacgccgagtttcaggagcgtcttcaagaagatacgtcttttgggggcaacctcgggcgagcagtcttccaggccaagaagcgggttctcgaacctctcggtctggttgaggaaggcgctaagacggctcctggaaagaagagacccatagaatcccccgactcctccacgggcatcggcaagaaaggccagcagcccgctaaaaagaagctcaactttgggcagactggcgactcagagtcagtgcccgaccctcaaccaatcggagaaccccccgcaggcccctctggtctgggatctggtacaatggctgcaggcggtggcgctccaatggcagacaataacgaaggcgccgacggagtgggtagttcctcaggaaattggcattgcgattccacatagctgggcgacagagtcatcaccaccagcacccgaacctgggccctccccacctacaacaaccacctctacaagcaaatctccaacgggacatcgggaggaagcaccaacgacaacacctacttcggctacagcaccccctgggggtattttgactttaacagattccactgccacttctcaccacgtgactggcagcgactcatcaacaacagctggggattccggcccaagagactcaacttcaagctcttcaacatccaggtcaaggaggtcacgcagaatgaaggcaccaagaccatcgccaataaccttaccagcacgattcaggtctttacggactcggaataccagctcccgtacgtcctcggctctgcgcaccagggctgcctgcctccgttcccggcggacgtcttcatgattcctcagtacgggtacctgactctgaacaacggcagtcaggccgtgggccgttcctccttctactgcctggagtactttccttctcaaatgctgagaacgggcaacaactttgagttcagctaccagtttgaggacgtgccttttcacagcagctacgcgcacagccaaagcctggaccggctgatgaaccccctcatcgaccagtacctgtactacctgtctcggactcagtccacgggaggtaccgcaggaactcagcagttgctattttctcaggccgggcctaataacatgtcggctcaggccaaaaactggctacccgggccctgctaccggcagcaacgcgtctccacgacactgtcgcaaaataacaacagcaactttgcttggaccggtgccaccaagtatcatctgaatggcagagactctctggtaaatcccggtgtcgctatggcaacgcacaaggacgacgaagagcgattttttccatccagcggagtcttgatgtttgggaaacagggagctggaaaagacaacgtggactatagcagcgttatgctaaccagtgaggaagaaatcaaaaccaccaacccagtggccacagaacagtacggcgtggtggccgataacctgcaacagcaaaacgccgctcctattgtaggggccgtcaacagtcaaggagccttacctggcatggtctggcagaaccgggacgtgtacctgcagggtcctatctgggccaagattcctcacacggacggcaactttcatccttcgccgctgatgggaggctttggactgaaacacccgcctcctcagatcctgattaagaatacacctgttcccgcggatcctccaactaccttcagtcaagccaagctggcgtcgttcatcacgcagtacagcaccggacaggtcagcgtggaaattgaatgggagctgcagaaagagaacagcaagcgctggaacccagagattcagtatacttccaactactacaaatctacaaatgtggactttgctgtcaatactgagggtacttattcagagcctcgccccattggcacccgttacctcacccgtaacctgtaattgcctgttaatcaataaaccggttaattcgtttcagttgaactttggtctctgcgaagggcgaattc

SEQ ID NO: 4998 - DNA, 3106 bp, Adeno-associated virus
gaattcgcccttctacggctgcgtcaactggaccaatgagaactttcccttcaacgattgcgtcgacaagatggtgatctggtgggaggagggcaagatgacggccaaggtcgtggagtccgccaaggccattctcggcggcagcaaggtgcgcgtggaccaaaagtgcaagtcgtccgcccagatcgaccccacccccgtgatcgtcacctccaacaccaacatgtgcgccgtgattgacgggaacagcaccaccttcgagcaccagcagccgttgcaggaccggatgttcaaatttgaactcacccgccgtctggagcatgactttggcaaggcgacaaagcaggaagtcaaagagttcttccgctgggcgcaggatcacgtgaccgaggtggcgcatgagttctacgtcagaaagggtggagccaacaagagacccgcccccgatgacgcggataaaagcgagcccaagcgggcccgcccctcagtcgcggatccatcgacgtcagacgcggaaggagctccggtggactttgccgacaggtaccaaaacaaatgttctcgtcacgcgggcatgcttcagatgctgtttccctgcaaaacatgcgagagaatgaatcagaatttcaacatttgcttcacgcacgggaccagagactgttcagaatgtttccccggcgtgtcagaatctcaaccggtcgtcagaaagaggacgtatcggaaactctgtgccattcatcatctgctggggcgggctcccgagattgcttgctcggcctgcgatctggtcaacgtggacctggatgactgtgtttctgagcaataaatgacttaaaccaggtatggctgccgatggttatcttccagattggctcgaggacaacctctctgagggcattcgcgagtggtgggacttgaaacctggagccccgaaacccaaagccaaccagcaaaagcaggacgacggccggggtctggtgcttcctggctacaagtacctcggacccttcaacggactcgacaagggagagccggtcaacgaggcagacgccgcggccctcgagcacgacaaggcctacgacaagcagctcgagcagggggacaacccgtacctcaagtacaaccacgccgacgccgagtttcaggagcgtcttcaagaagatacgtcttttgggggcaacctcgggcgagcagtcttccgggccaagaagcgggttctcgaacctctcggtctggttgaggaaggcgctaagacggctcctggaaagaagagacccatagaatcccccgactcctccacgggcatcggcaagaaaggccagcagcccgctaaaaagaagctcaactttgggcagactggcgactcagagtcagtgcccgacccccaacctctcggagaacctcccgccgcgccctcaggtctgggatctggtacaatggctgcaggcggtggcgcaccaatggcagacaataacgaaggcgccgacggagtgggtaatgcctccggaaattggcattgcgattccacatggctgggcgacagagtcatcaccaccagcacccgcacctgggccctgcccacctacaacaaccacctctacaagcagatatcaagtcagagcggggctaccaacgacaaccacttcttcggctacagcaccccctggggctattttgacttcaacagattccactgccacttctcaccacgtgactggcagcgactcatcaacaacaaccggggattccggcccagaaagctgcggttcaagttgttcaacatccaggtcaaggaggtcacgacgaacgacggcgttacgaccatcgctaataaccttaccagcacgattcaggtcttctcggactcggagtaccaactgccgtacgtcctcggctctgcgcaccagggctgcctccctccgttccctgcggacgtgttcatgattcctcagtacggatatctgactctaaacaacggcagtcagtctgtgggacgttcctccttctactgcctggagtactttccttctcagatgctgagaacgggcaataactttgaattcagctaccagtttgaggacgtgccctttcacagcagctacgcgcacagccaaagcctggaccggctgatgaaccccctcatcgaccagtacctgtactacctgtctcggactcagtccacgggaggtaccgcaggaactcagcagttgctattttctcaggccgggcctaataacatgtcggctcaggccaaaaactggctacccgggccctgctaccggcagcaacgcgtctccacgacactgtcgcaaaataacaacagcaactttgcttggaccggtgccaccaagtatcatctgaatggcagagactctctggtaaatcccggtgtcgctatggcaacgcacaaggacgacgaagagcgattttttccatccagcggagtcttgatgtttgggaaacagggagctggaaaagacaacgtggactatagcagcgttatgctaaccagtgaggaagaaatcaaaaccaccaacccagtggccacagaacagtacggcgtggtggccgataacctgcaacagcaaaacgccgctcctattgtaggggccgtcaacagtcaaggagccttacctggcatggcctggcagaaccgggacgtgtacctgcagggtcctatctgggccaagattcctcacacggacggcaactttcatccttcgccgctgatgggaggctttggactgaaacacccgcctcctcagatcctgattaagaatacacctgttcccgcggatcctccaactaccttcagtcaagccaagctggcgtcgttcatcacgcagtacagcaccggacaggtcagcgtggaaattgaatgggagctgcagaaagagaacagcaagcgctggaacccagagattcagtatacttccaactactacaaatctacaaatgtggactttgctgtcaatactgagggtacttattcagagcctcgccccattggcacccgttacctcacccgtaacctgtaattgcctgttaatcaataaaccggttaattcgtttcagttgaactttggtctctgcgaagggcgaattc

SEQ ID NO: 4999 - DNA, 3197 bp, Adeno-associated virus
gaattcgccctttctacggctgcgtcaactggaccaatgagaactttcccttcaacgattgcgtcgacaagatggtgatctggtgggaggagggcaagatgacggccaaggtcgtggagtccgccaaggccattctcggcggcagcaaggtgcgcgtggaccaaaagtgcaagtcgtccgcccagatcgaccccacccccgtgatcgtcacctccaacaccaacatgtgcgccgtgattgacgggaacagcaccaccttcgagcaccagcagccgttacaagaccggatgttcaaatttgaactcacccgccgtctggagcacgactttggcaaggtgacaaagcaggaagtcaaagagttcttccgctgggcgcaggatcacgtgaccgaggtggcgcatgagttctacgtcagaaagggtggagccaacaagagacccgcccccgatgacgcggataaaagcgagcccaagcgggcctgcccctcagtcgcggatccatcgacgtcagacgcggaaggagctccggtggactttgccgacaggtaccaaaacaaatgttctcgtcacgcgggcatgcttcagatgctgtttccctgcaagacatgcgagagaatgaatcagaatttcaacatttgcttcacgcacgggaccagagactgttcagaatgtttccccggcgtgtcagaatctcaaccggtcgtcagaaagaggacgtatcggaaactctgtgccattcatcatctgctggggcgggctcccgagattgcttgctcggcctgcgatctggtcaacgtggacctggatgactgtgtttctgagcaataaatgacttaaaccaggtatggctgccgatggttatcttccagattggctcgaggacaacctctctgagggcattcgcgagtggtgggacttgaaacctggagccccgaaacccaaagccaaccagcaaaagcaggacgacggccggggtctggtgcttcctggctacaagtacctcggacccttcaacggactcgacaagggagagccggtcaacgaggcagacgccgcggccctcgagcacgacaaggcctacgacaagcagctcgagcagggggacaacccgtacctcaagtacaaccacgccgacgccgagtttcaggagcgtcttcaagaagatacgtcttttgggggcaacctcgggcgagcagtcttccaggccaagaagcgggttctcgaacctctcggtctggttgaggaaggcgctaagacggctcctggaaagaagagaccggtagagccatcaccccagcgttctccagactcctctacgggcatcggcaagacaggccagcagcccgcgaaaaagagactcaactttgggcagactggcgactcagagtcagtgcccgaccctcaaccaatcggagaaccccccgcaggcccctctggtctgggatctggtacaatggctgcaggcggtggcgctccaatggcagacaataacgaaggcgccgacggagtgggtagttcctcaggaaattggcattgcgattccacatggctgggcgacagagtcatcaccaccagcacccgaacctgggccctccccacctacaacaaccacctctacaagcaaatctccaacgggacatcgggaggaagcaccaacgacaacacctacttcggctacagcaccccctgggggtattttgactttaacagattccactgccacttctcaccacgtgactggcagcgactcatcaacaacaactggggattccggcccaagagactcaacttcaagctcttcaacatccaggtcaaggaggtcacgcagaatgaaggcaccaagaccatcgccaataaccttaccagcacgattcaggtctttacggactcggaataccagctcccgtacgtcctcggctctgcgcaccagggctgcctgcctccgttcccggcggacgtcttcatgattcctcagtacgggtacctgactctgaacaacggcagtcaggccgtgggccgttcctccttctactgcctggagtactttccttctcaaatgctgagaacgggcaacaactttgagttcagctaccagtttgaggacgtgccttttcacagcagctacgcgcacagccaaagcctggaccggctgatgaaccccctcatcgaccagtacctgtactacctgtctcggactcagtccacgggaggtaccgcaggaactcagcagttgctattttctcaggccgggcctaataacatgtcggctcaggccaaaaactggctacccgggccctgctaccggcagcaacgcgtctccacgacactgtcgcaaaataacaacagcaactttgcttggaccggtgccaccaagtatcatctgaatggcagagactctctggtaaatcccggtgtcgctatggcaacgcacaaggacgacgaagagcgattttttccatccagcggagtcttgatgtttgggaaacagggagctggaaaagacaacgtggactatagcagcgttatgctaaccagtgaggaagaaatcaaaaccaccaacccagtggccacagaacagtacggcgtggtggccgataacctgcaacagcaaaacgccgctcctattgtaggggccgtcaacagtcaaggagccttacctggcatggtctggcagaaccgggacgtgtacctgcagggtcctatctgggccaagattcctcacacggacggcaactttcatccttcgccgctgatgggaggctttggactgaaacacccgcctcctcagatcctgattaagaatacacctgttcccgcggatcctccaactaccttcagtcaagccaagctggcgtcgttcatcacgcagtacagcaccggacaggtcagcgtggaaattgaatgggagctgcagaaagagaacagcaagcgctggaacccagagattcagtatacttccaactactacaaatctacaaatgtggactttgctgtcaatactgagggtacttattcagagcctcgccccattggcacccgttacctcacccgtaacctgtaattgcctgttaatcaataaaccggttaattcgtttcagttgaactttggtctctgcgaagggcgaattcgtttaaacctgcaggactagtccctttagtgagggttaattctgagcttggcgtaatcatgggtcatag

SEQ ID NO: 5000 - DNA, 3276 bp, Adeno-associated virus
gaattcgcccttcgcagagaccaaagttcaactgaaacgaattaaccggtttattgattaacaggcaattacaggttacgggtgaggtaacgggtgccaatggggcgaggctcagtataaaccccttcgttgttgacagcaaattccacattattagacttggcataatttgaggtgtactgaatctctggattccagcgtttgctgttttctttctgcagttcccactcgatctccacgctgacctggccggtgctgtactgcgtgataaatgaggcaaacttggcaggagtaaacacctctggaggattagcaggtaccggggtgtttttgatgagaatttgaggaggcgggtgtttgagtccaaatccgtccatcaggggagacgggtgaaagttgccgtccgtgtgaggaattttggcccagatgggaccctgcaggtacacgtcccggttctgccagaccatgccgggcagagccccctggctgttgacagtctgtgtctggggtccggccgtagacgattgcaggttgctggagaccacaccgtattcttctgtagccacgggattggtggttttgatctcctcctcgctggtcattagcacgttttccagcgttgtcttgttggcagcccccgttttgccaaaaaccagcactccgttgatgggaaagaactggtcctcgtcgtccttgttggtggccatggctacgcccgggttggttaatgaatttctaccattcagatggtatttagtggccccggtccaggcaaagttactgttgttgttgctgtctatgttttttgacagtctctgctgccgataacagggtccgggcagccagttctttgattgctcggccatggtgttgggcccagcctgatggaactgcagctcccttgtggaccccgtagtgctctgggtccgggccaggtagtacaggtactggtcgatgaggggattcatcagccggtccaggctctggctatgcgcatagctgctgtggaaaggcacttcctcaaaggtgtagctgaattcaaagttattgcccgttctcagcatctgagaaggaaagtactccaggcagtagaaggaggaacgtcccacagactgactgccgttgtttagagtcagatatccgtactgaggaatcatgaacacgtccgcagggaacggagggaggcagccctggtgcgcagagccgaggacgtacggcagttggtactccgagtccgagaagacctgaatcgtgctggtaaggttattagcgatggtcgtaacgccgtcgtccgtcgtgacctccttgacctggatgttgaacaacttgaaccgcagctttctgggccggaatccccagttgttgttgatgagtcgctgccagtcacgtggtgagaagtggcagtggaatctgttaaagtcaaaatacccccagggggtgctgtagccgaagtaggtgttgtcgttggtgcttcctcccgatgtcccgttggagatttgcttgtagaggtggttgttgtaggtggggagggcccaggttcgggtgctggtggtgatgactctgtcgcccagccatgtggaatcgcaatgccaatttcctgaggaactacccactccgtcggcgccttcgttattgtctgccattggagcgccaccgcctgcagccattgtaccagatcccagaccagaggggcctgcggggggttctccgattggttgagggtcgggcactgactctgagtcgccagtctgcccaaagttgagtctctttttcgcgggctgctggcctgtcttgccgatgcccgtagaggagtctggagaacgctggggtgatggctctaccggtctcttctttccaggagccgtcttagcgccttcctcaaccagaccgagaggttcgagaacccgcttcttggcctggaagactgctcgcccgaggttgcccccaaaagacgtatcttcttgaagacgctcctgaaactcggcgtcggcgtggttgtacttgaggtacgggttgtccccctgctcgagctgcttgtcgtaggccttgtcgtgctcgagggccgcggcgtctgcctcgttgaccggctctcccttgtcgagtccgttgaagggtccgaggtacttgtagccaggaagcaccagaccccggccgtcgtcctgcttttgctggttggctttgggtttcggggctccaggtttcaagtcccaccactcgcgaatgccctcagagaggttgtcctcgagccaatctggaagataaccatcggcagccatacctggtttaagtcatttattgctcagaaacacagtcatccaggtccacgttgaccagatcgcaggccgagcaagcaatctcgggagcccgccccagcagatgatgaatggcacagagtttccgatacgtcctctttctgacgaccggttgagattctgacacgccggggaaacattctgaacagtctctggtcccgtgcgtgaagcaaatgttgaaattctgattcattctctcgcatgtcttgcagggaaacagcatctgaagcatgcccgcgtgacgagaacacttgttttggtacctgtcggcaaagtccaccggagctccttccgcgtctgacgtcgatggatgcaaaatgtcgcaaaagcactcacgtgacagctaatacaggaccactcccctatgacgtgatttacgtcagcgctatgcccgcgtgacgagaacatttgttttggtacctgtcggcaaagtccaccggagctccttccgcgtctgacgtcgatggatccgcgactgaggggcaggcccgcttgggctcgcttttatccgcgtcatcgggggcgggtctcttgttggctccaccctttctgacgtagaactcatgcgccacctcggtcacgtgatcctgcgcccagcggaagaactctttgacttcctgctttgtcaccttgccaaagtcatgctccagacggcgggtgagttcaaatttgaacatccggtcctgcaacggctgctggtgctcgaaggtggtgctgttcccgtcaatcacggcgcacatgttggtgttggaagtgacgatcacgggggtgggatcgatctgggcggaagacttgcacttttggtccacgcgcaccttgctgccgccgagaatggccttggcggactccacgaccttggccgtcatcttgccctcctcccaccagatcaccatcttgtcgacgcaatcgttgaagggaaagttctcattggtccagttgacgcagccgtagaaagggcgaattc

SEQ ID NO: 5001 - protein, 738 aa, Adeno-associated virus; identical to SEQ ID NO: 4777

SEQ ID NO: 5002 - protein, 738 aa, Adeno-associated virus
MAADGYLPDWLEDNLSEGIREWWDLKPGAPKPKANQQKQDDGRGLVLPGYKYLGPFNGLDKGEPVNAADAAALEHDKAYDQQLKAGDNPYLRYNHADAEFQERLQEDTSFGGNLGRAVFQAKKRVLEPLGLVEEGAKTAPGKKRPVEPSPQRSPDSSTGIGKKGHQPARKRLNFGQTGDSESVPDPQPIGEPPAGPSGLGSGTMAAGGGAPMADNNEGADGVGSSSGNWHCDSTWLGDRVITTSTRTWALPTYNNHLYKQISNGTSGGSTNDNTYFGYSTPWGYFDFNRFHCHFSPRDWQRLINNNWGFRPKRLNFKLFNIQVKEVTQNEGTKTIANNLTSTIQVFTDSEYQLPYVPGSAHQGCLPPFPADVFMIPQYGYLTLNNGSQAVGRSSFYCLEYFPSQMLRTGNNFEFSYTFEDVPFHSSYAHSQSLDRLMNPLIDQYLYYLSRTQSTGGTQGTQQLLFSQAGPANMSAQAKNWLPGPCYRQQRVSTTLSQNNNSNFAWTGATKYHLNGRDSLVNPGVAMATHKDDEERFFPSSGVLMFGKQGAGKDNVDYSSVMLTSEEEIKTTNPVATEQYGVVADNLQQTNGAPIVGTVNSQGALPGMVWQNRDVYLQGPIWAKIPHTDGNFHPSPLMGGFGLKHPPPQILIKNTPVPADPPTTFSQAKLASFITQYSTGQVSVEIEWELQKENSKRWNPEIQYTSNYYKSTNVDFAVNTEGTYSEPRPIGTRYLTRNL

SEQ ID NO: 5003 - protein, 738 aa, Adeno-associated virus; identical to SEQ ID NO: 4775

SEQ ID NO: 5004 - DNA, 2489 bp, Adeno-associated virus
gaattcgccctttctacggctgcgtcaactggaccaatgagaactttcccttcaacgattgcgtcgacaagatggtgatctggtgggaggagggcaagatgacggccaaggtcgtgaagtccgccaaggccattcatcatctgctggggcgggctcccgagattgcttgctcggcctgcgatctggtcaacgtggacctggatgactgtgtttctgagcaataaatgacttaaaccaggtatggctgccgatggttatcttccagattggctcgaggacaacctctctgagggcattcgcgagtggtgggacttgaaacctggagccccgaaacccaaagccaaccagcaaaagcaggacgacggccggggtctggtgcttcctggctacaagtacctcggacccttcaacggactcgacaagggagagccggtcaacgaggcagacgccgcggccctcgagcacgacaaggcctacgacaagcagctcgagcagggggacaacccgtacctcaagtacaaccacgccgacgccgagtttcaggagcgtcttcaagaagatacgtcttttgggggcaacctcgggcgagcagtcttccaggccaagaagcgggttctcgaacctctcggtctggttgaggaaggcgctaagacggctcctggaaagaagagacccatagaatcccccgactcctccacgggcatcggcaggaaaggccagcagcccgctaaaaagaagctcaactttgggcagactggcgactcagagtcagtgcccgaccctcaaccaatcggagaaccccccgcaggcccctctggtctgggatctggtacaatggctgcaggcggtggcgctccaatggcagacaataacgaaggcgccgacggagtgggtaatgcctccggaaattggcattgcgattccacatggctgggcgacagagtcatcaccaccagcacccgcacctgggccctgcccacctacaacaaccacctctacaagcagatatcaagtcagagcggggctaccaacgacaaccacttcttcggctacagcaccccctggggctattttgacttcaacagattccactgccacttctcaccacgtgactggcagcgactcatcaacaacaactggggattccggcccagaaagctgcggttcaagttgttcaacatccaggtcaaggaggtcacgacgaacgacggcgttacgaccatcgccaataaccttaccagcacgattcaggtcttctcggactcggagtaccaactgccgtacgtcctcggctctgcgcaccagggctgcctccctccgttccctgcggacgtgttcatgattcctcagtacggatatctgactctaaacaacggcagtcagtctgtgggacgttcctccttctactgcctggagtactttccttctcagatgctgagaacgggcaataactttgaattcagctacacctttgaggaagtgcctttccacagcagctatgcgcacagccagagcctggaccggctgatgaatcccctcatcgaccagtacctgtactacctggcccggacccagagcactacggggtccacaagggagctgcagttccatcaggctgggcccaacaccatggccgagcaatcaaagaactggctgcccggaccctgttatcggcagcagagactgtcaaaaaacatagacagcaacaacaacagtaactttgcctggaccggggccactaaataccatctgaatggtagaaattcattaaccaacccgggcgtagccatggccaccaacaaggacgacgaggaccagttctttcccatcaacggagtgctggtttttggcaaaacgggggctgccaacaagacaacgctggaaaacgtgctaatgaccagcgaggaggagatcaaaaccaccaatcccgtggctacagaagaatacggtgtggtctccagcaacctgcaatcgtctacggccggaccccagacacagactgtcaacagccagggggctctgcccggcatggtctggcagaaccgggacgtgtacctgcagggtcccatctgggccaaaattcctcacacggacggcaactttcacccgtctcccctgatgggcggatttggactcaaacacccgcctcctcaaattctcatcaaaaacaccccggtacctgctaatcctccagaggtgtttactcctgccaagtttgcctcatttatcacgcagtacagcaccggccaggtcagcgtggagatcgagtgggaactgcagaaagaaaacagcaaacgctggaatccagagattcagtacacctcaaattatgccaagtctaataatgtggaatttgctgtcaacaacgaaggggtttatactgagcctcgccccattggcacccgttacctcacccgtaacctgtaattgcctgttaatcaataaaccggttaattcgtttcagttgaactttggtcaagggcgaattc

SEQ ID NO: 5005 - DNA, 3098 bp, Adeno-associated virus
gaattcgccctttctacggctgcgtcaactggaccaatgagaactttcccttcaacgattgcgtcgacaagatggtgatctggtgggaggagggcaagatgacggccaaggtcgtggagtccgccaaggccattctcggcggcagcaaggtgcgcgtggaccaaaagtgcaagtcttccgcccagatcgatcccacccccgtgatcgtcacttccaacaccaacatgtgcgccgtgattgacgggaacagcaccaccttcgagcaccagcagccgttacaagaccggatgttcaaatttgaactcacccgccgtctggagcacgactttggcaaggtgacaaagcaggaagtcaaagagttcttccgctgggcgcaggatcacgtgaccgaggtggcgcatgagttctacgtcagaaagggtggagccaacaagagacccgcccccgatgacgcggataaaagcgagcccaagcgggcctgcccctcagtcgcggatccatcgacgtcagacgcggaaggagctccggtggactttgccgacaggtaccaaaacaaatgttctcgtcacgcgggcatgcttcagatgctgtttccctgcaagacatgcgagagaatgaatcagaatttcaacatttgcttcacgcacgggaccggagactgttcagaatgtttccccggcgtgtcagaatctcaaccggtcgtcagaaagaggacgtatcggaaactctgtgccattcatcatctgctggggcgggctcccgagattgcttgctcggcctgcgatctggtcaacgtggacctggatgactgtgtttctgagcaataaatgacttaaaccaggtatggctgccgatggttatcttccagattggctcgaggacaacctctctgagggcattcgcgagtggtgggacttgaaacctggagccccgaaacccaaagccaaccagcaaaagcaggacgacggccggggtctggtgcttcctggctacaagtacctcggacccttcaacggactcgacaagggagagccggtcaacgcggcggacgcagcggccctcgagcacgacaaggcctacgaccagcagctcaaagcgggtgacaatccgtacctgcggtataaccacgccgacgccgagtttcaggagcgtcttcaagaagatacgtcttttgggggcaacctcgggcgagcagtcttccaggccaagaagcgggttctcgaacctctcggtctggttgaggaaggcgctaagacggctcctggaaagaagagacccatagaatcccccgactcctccacgggcatcggcaagaaaggccagcagcccgctaaaaagaagctcaactttgggcagactggcgactcagagtcagtgcccgaccctcaaccaatcggagaaccccccgcaggcccctctggtctgggatctggtacaatggctgcaggcggtggcgctccaatggcagacaataacgaaggcgccgacggagtgggtaatgcctccggaaattggcattgcgattccacatggctgggcgacagagtcatcaccaccagcacccgcacctgggccctgcccacctacaacaaccacctctacaagcagatatcaagtcagagcggggctaccaacgacaaccacttcttcggctacagcaccccctggggctattttgacttcaacagattccactgccacttctcaccacgtgactggcagcgactcatcaacaacaactggggattccggcccagaaagctgcggttcaagttgttcaacatccaggtcaaggaggtcacgacgaacgacggcgttacgaccatcgctaataaccttaccagcacgattcaggtcttctcggactcggagtaccaactgccgtacgtcctcggctctgcgcaccagggctgcctccctccgttccctgcggacgtgttcatgattcctcagtacggatatctgactctaaacaacggcagtcagtctgtgggacgttcctccttctactgcctggagtactttccttctcagatgctgagaacgggcaataactttgaattcagctacacctttgaggaagtgcctttccacagcagctatgcgcacagccagagcctggaccggctgatgaatcccctcatcgaccagtacctgtactacctggcccggacccagagcactacggggtccacaagggagctgcagttccatcaggctgggcccaacaccatggccgagcaatcaaagaactggctgcccggaccctgttatcggcggcagagactgtcaaaagacatagacagcaacaacaacagtaactttgcctggaccggggccactaaataccatctgaatggtagaaattcattaaccaacccgggcgtagccatggccaccaacaaggacgacgaggaccagttctttcccatcaacggagtgctggtttttggcaaaacgggggctgccaacaagacaacgctggaaaacgtgctaatgaccagcgaggaggagatcaaaaccaccaatcccgtggctacagaagaatacggtgtggtctccagcaacctgcaatcgtctacggccggaccccagacacagactgtcaacagccagggggctctgcccggcatggtctggcagaaccgggacgtgtacctgcagggtcccatctgggccaaaattcctcacacggacggcaactttcacccgtctcccctgatgggcggatttggactcaaacacccgcctcctcaaattctcatcaaaaacaccccggtacctgctaatcctccagaggtgtttactcctgccaagtttgcctcatttatcacgcagtacagcaccggccaggtcagcgtggagatcgagtgggaactgcagaaagagaacagcaaacgctggaatccagagattcagtacacctcaaattatgccaagtctaataatgtggaatttgctgtcaacaacgaaggggtttatactgagcctcgccccattggcacccgttacctcacccgtaacctgtaattacttgttaatcaataaaccggttgattcgtttcagttgaactttggtctctgcgaagggcgaattc

SEQ ID NO: 5006 - DNA, 2969 bp, Adeno-associated virus
gaattcgccctttctacggctgcgtcaactggaccaatgagaactttcccttcaacgattgcgtcgacaagatggtgatctggtgggaggagggcaagatgacggccaaggtcgtggagtccgccaaggccattctcggcggcagcaaggtgcgcgtggaccaaaagtgcaagtcgtccgcccagatcgaccccacccccgtgatcgtcacctccaacaccaacatgtgcgccgtgattgacgggaacagcaccaccttcgagcaccagcagccgttacaagaccggatgttcaaatttgaactcacccgccgtctggagcacgactttggcaaggtgacaaagcaggaagtcaaagagttcttccgctgggcgcaggatcacgtgaccgaggtggcgcatgagttctacgtcagaaagggtggagccaacaagagacccgcccccgatgacgcggataaaagcgagcccaagcgggcctgcccctcagtcgcggatccatcgacgtcagacgcggaaggagctccggtggactttgccgacaggtaccaaaacaaatgttctcgtcacgcgggcatgcttcagatgctgtttccctgcaagacatgcgagagaatgaatcagaatttcaacatttgcttcacgcacgggaccagagactgttcagaatgtttccccggcgtgtcagaatctcaaccggtcgtcagaaagaggacgtatcggaaactctgtgccattcatcatctgctggggcgggctcccgagattgcttgctcggcctgcgatctggtcaacgtggacctggatgactgtgtttctgagcaataaatgacttaaaccaggtatggctgccgatggttatcttccagattggctcgaggacaacctctctgagggcatccgcgagtggtgggacttgaaacctggagccccgaaacccaaagccaaccagcaaaagcaggacgacggccggggtctggtgcttcctggctacaagtacctcggacccttcaacggactcgacaagggagagccggtcaacgaggcagacgccgcggccctcgagcacgacaaggcctacgacaagcagctcgagcagggggacaacccgtacctcaagtacaaccacgccgacgccgagtttcaggagcgtcttcaagaagatacgtcttttgggggcaacctcgggcgagcagtcttccaggccaagaagcgggttctcgaacctctcggtctggttgaggaaggcgctaagacggctcctggaaagaagagaccggtagagccatcaccccagcgttctccagactcctctacgggcatcggcaagacaggccagcagcccgcgaaaaagagactcaactttgggcagactggcgactcagagtcagtgcccgaccctcaaccaatcggagaaccccccgcaggcccctctggtctgggatctggtacaatggctgcaggcggtggcgctccaatggcagacaataacgaaggcgccgacggagtgggtagttcctcaggaaattggcattgcgattccacatggctgggcgacagagtcatcaccaccagcacccgaacctgggccctccccacctacaacaaccacctctacaagcaaatctccaacgggacatcgggaggaagcaccaacgacaacacctacttcggctacagcaccccctgggggtattttgactttaacagattccactgccacttctcaccacgtgactggcagcgactcatcaacaacaactggggattccggcccaagagactcaacttcaagctcttcaacatccaggtcaaggaggtcacgcagaatgaaggcaccaagaccatcgccaataaccttaccagcacgattcaggtctttacggactcggaataccagctcccgtacgtcctcggctctgcgcaccagggctgcctgcctccgttcccggcggacgtcttcatgattcctcagtacgggtacctgactctgaacaacggcagtcaggccgtgggccgttcctccttctactgcctggagtactttccttctcaaatgctgagaacgggcaacaactttgagttcagctaccagtttgaggacgtgccttttcacagcagctacgcgcacagccaaagcctggaccggctgacgaaccccctcatcgaccagtacctgtactacctggcccggacccagagcactacggggtccacaagggggctgcagttccatcaggctgggcccaacaccatggccgagcaatcaaagaactggctgcccggaccctgttatcggcagcagagactgtcaaaaaacatagacagcaacaacaacagtaactttgcctggaccggggccactaaataccatctgaatggtagaaattcattaaccaacccgggcgtagccatggccaccaacaaggacgacgaggaccagttctttcccatcaacggagtgctggtttttggcaaaacgggggctgccaacaagacaacgctggaaaacgtgctaatgaccagcgaggaggagatcaaaaccaccaatcccgtggctacagaagaatacggtgtggtctccagcaacctgcaatcgtctacggccggaccccagacacagactgtcaacagccagggggctctgcccggcatggtctggcagaaccgggacgtgtacctgcagggtcccatctgggccaaaattcctcacacggacggcaactttcacccgtctcccctgatgggcggatttggactcaaacacccgcctcctcaaattctcatcaagtatacttccaactactacaaatctacaaatgtggactttgctgtcaatactgagggtacttattcagagcctcgccccattggcacccgttacctcacccgtaacctgtaattgcctgttaatcaataaaccggttaattcgtttcagttgaactttggtctctgcgaagggcgaattc

SEQ ID NO: 5007 - DNA, 3113 bp, Adeno-associated virus
gaattcgccctttctacggctgcgtcaactggaccaatgagaactttcccttcaacgattgcgtcgacaagatggtgatctggtgggaggagggcaagatgacggccaaggtcgtggagtccgccaaggccattctcggcggcagcaaggtgcgcgtggaccaaaagtgcaagtcgtccgcccagatcgatcccacccccgtgatcgtcacttccaacaccaacatgtgcgccgtgattgacgggaacagcaccaccttcgagcaccagcagccgttacaagaccggatgttcaaatttgaactcacccgccgtctggagcatgactttggcaaggtgacaaagcaggaagtcaaagagttcttccgctgggcgcaggatcacgtgaccgaggtggcgcatgagttctacgtcagaaagggtggagccaacaagagacccgcccccgatgacgcggataaaagcgagcccaagcgggcctgcccctcagtcgcggatccatcgacgtcagacgcggaaggagctccggtggactttgccgacaggtaccaaaacaaatgttctcgtcacgcgggcatgcttcagatgctgtttccctgcaagacatgcgagagaatgaatcagaatttcaacatttgcttcacgcacgggaccagagactgttcagaatgtttccccggcgtgtcagaatctcaaccggtcgtcagaaagaggacgtatcggaaactctgtgccattcatcatctgctggggcgggctcccgagattgcttgctcggcctgcgatctggtcaacgtggacctggatgactgtgtttctgagcaataaatgacttaaaccaggtatggctgccgatggttatcttccagattggctcgaggacaacctctctgagggcattcgcgagtggtgggacttgaaacctggagccccgaaacccaaagccaaccagcaaaagcaggacgacggccggggtctggtgcttcctggctacaagtacctcggacccttcaacggactcgacaagggggagcccgtcaacgcggcggacgcagcggccctcgagcacgacaaggcctacgaccagcagctcaaagcgggtgacaatccgtacctgcggtataaccacgccgacgccgagtttcaggagcgtcttcaagaagatacgtcttttgggggcaacctcgggcgagcagtcttccaggccaagaagcgggttctcgaacctctcggtctggttgaggaaggcgctaagacggctcctggaaagaagagacccatagaatcccccgactcctccacgggcatcggcaagaaaggccagcagcccgctaaaaagaagctcaactttgggcagactggcgactcagagtcagtgcccgaccctcaaccaatcggagaaccccccgcaggcccctctggtctgggatctggtacaatggctgcaggcggtggcgctccaatggcagacaataacgaaggcgccgacggagtgggtagttcctcaggaaattggcattgcgattccacatggctgggcgacagagtcatcaccaccagcacccgaacctgggccctccccacctacaacaaccacctctacaagcaaatctccaacgggacatcgggaggaagcaccaacgacaacacctacttcggctacagcaccccctgggggtattttgactttaacagattccactgccacttctcaccacgtgactggcagcgactcatcaacaacaactggggattccggcccaagagactcaacttcaagctcttcaacatccaggtcaaggaggtcacgcagaatgaaggcaccaagaccatcgccaataaccttaccagcacgattcaggtctttacggactcggaataccagctcccgtacgtcctcggctctgcgcaccagggctgcctgcctccgttcccggcggacgtcttcatgattcctcagtacgggtacctgactctgaacaacggcagtcaggccgtgggccgttcctccttctactgcctggagtactttccttctcaaatgctgagaacgggcaacaactttgagttcagctaccagtttgaggacgtgccttttcacagcagctatgcgcacagccaaagcctggaccggctgatgaaccccctcatcgaccagtacctgtactacctgtctcggactcagtccacgggaggtaccgcaggaactcagcagttgctattttctcaggccgggcctaataacatgtcggctcaggccaaaaactggctacccgggccctgctaccggcagcaacgcgtctccacgacagtgtcgcaaaataacaacagcaactttgcttggaccggtgccaccaagtatcatctgaatggcagagactctctggtaaatcccggtgtcgctatggcaacgcacaagggcgacgaagagcgattttttccatccagcggagtcttgatgtttgggaaacagggagctggaaaagacaacgtggactatagcagcgttatgctaaccagtgaggaagaaatcaaaaccaccaacccagtggccacagaacagtacggcgtggtggccgataacctgcaacagcaaaacgccgctcctattgtaggggccgtcaacagtcaaggagccttacctggcatggtctggcagaaccgggacgtgtacctgcagggtcctatctgggccaagattcctcacacggacggcaactttcatccttcgccgctgatgggaggctttggactgaaacacccgcctcctcagatcctgattaagaatacacctgttcccgcggatcctccaactaccttcagtcaagccaagctggcgtcgttcatcacgcagtacagcaccggacaggtcagcgtggaaattgaatgggagctgcagaaagagaacagcaagcgctggaacccagagattcagtatacttccaactactacaaatctacaaatgtggactttgctgtcaatactgagggtacttattcagagcctcgccccattggcacccgttacctcacccgtagcctgtaattgcctgttaatcaataaaccggttgattcgtttcagttgaactttggtctctgcgaagggcgaattc

SEQ ID NO: 5008 - DNA, 3128 bp, Adeno-associated virus
gaattcgccctttctacggctgcgtcaactggaccaatgagaactttcccttcaacgattgcgtcgacaagatggtgatctggtgggaggagggcaagatgacggccaaggtcgtggagtccgccaaggccattctcggcggcagcaaggtgcgcgtggaccaaaagtgcaagtcgtccgcccagatcgaccccacccccgtgatcgtcacctccaacaccaacatgtgcgccgtgattgacgggaacagcaccaccttcgagcaccagcagccgttgcaggaccggatgttcaaatttgaactcacccgccgtctggagcatgactttggcaaggtgacaaagcaggaagtcaaagagttcttccgctgggcgcaggatcacgtgaccgaggtggcgcatgagttctacgtcagaaagggtggagccaacaagagacccgcccccgatgacgcggataaaagcgagcccaagcgggcctgcccctcagtcgcggatccatcgacgtcagacgcggaaggagctccggtggactttgccgacaggtaccaaaacaaatgttctcgtcacgcgggcatgcttcagatgctgtttccctgcaagacatgcgagagaatgaatcagaatttcaacatttgcttcacgcgcgggaccagagactgttcagaatgtttcccgggcgtgtcagaatctcaaccggtcgtcagaaagaggacgtatcggaaactctgtgccattcatcatctgctggggcgggctcccgagattgcttgctcggcctgcgatctggtcaacgtggacctggatgactgtgtttctgagcaataaatgacttaaaccaggtatggctgccgatggttatcttccagattggctcgaggacaacctctctgagggcattcgcgagtggtgggacttgaaacctggagccccgaaacccaaagccaaccagcaaaagcaggacgacggccggggtctggtgcttcctggctacaagtacctcggacccttcaacggactcgacaagggggagcccgtcaacgcggcggacgcagcggccctcgagcacgacaaggcctacgaccagcagctcaaagcgggtgacaatccgtacctgcggtataaccacgccgacgccgagtttcaggagcgtctgcaagaagatacgtcttttgggggcaacctcgggcgagcagtcttccaggccaagaagcgggttctcgaacctctcggtctggttgaggaaggcgctaagacggctcctggaaagaagagaccggtagagccatcaccccagcgttctccagactcctctacgggcatcggcaagacaggccagcagcccgcgaaaaagagactcaactttgggcagactggcgactcagagtcagtgcccgaccctcaaccaatcggagaaccccccgcaggcccctctggtctgggatctggtacaatggctgcaggcggtggcgctccaatggcagacaataacgaaggcgccgacggagtgggtagttcctcaggaaattggcattgcgattccacatggctgggcgacagagtcatcaccaccagcacccgaacctgggccctccccacctacaacaaccacctctacaagcaaatctccaacgggacatcgggaggaagcaccaacgacaacacctacttcggctacagcaccccctgggggtattttgactttaacagattccactgccacttctcaccacgtgactggcagcgactcatcaacaacaactggggattccggcccaagagactcaacttcaagctcttcaacatccaggtcaaggaggtcacgcagaatgaaggcaccaagaccatcgccaataaccttaccagcacgattcaggtctttacggactcggaataccagctcccgtacgtcctcggctctgcgcaccagggctgcccgcctccgttcccggcggacgtcttcatgattcctcagtacgggtacctgactctgaacaacggcagtcaggccgtgggccgttcctccttctactgcctggagtactttccttctcaaatgcggagaacgggcaacaactttgagttcagctaccagtttgaggacgtgccttttcacagcagctacgcgcatagccaaagcctggaccggctgatgaaccccctcatcgaccagtacctgtactacctgtctcggactcagtccacgggaggtaccgcaggaactcagcagttgctattttctcaggccgggcctaataacatgtcggctcaggccaaaaactggctacccgggccctgctaccggcagcaacgcgtctccacgacactgtcgcaaaataacaacagcaactttgcttggaccggtgccaccaagtatcatctgaatggcagagactctctggtaaatcccggtgtcgctatggcaacgcacaaggacgacgaagagcgattttttccatccagcggagtcttgatgtttgggaaacagggagctggaaaagacaacgtggactatagcagcgttatgctaaccagtgaggaagaaatcaaaaccaccaacccagtggccacagaacagtacggcgtggtggccgataacctgcaacagcaaaacgccgctcctattgtaggggccgtcaacagtcaaggagccttacctggcatggtctggcagaaccgggacgtgtacctgcagggtcctatctgggccaagattcctcacacggacggcaactttcatccttcgccgctgatgggaggctttggactgaaacacccgcctcctcagatcctgattaagaatacacctgttcccgcggatcctccaactaccttcagtcaagccaagctggcgtcgttcatcacgcagtacagcaccggacaggtcagcgtggaaattgaatgggagctgcagaaagagaacagcaagcgctggaacccagagattcagtatacttccaactactacaaatctacaaatgtggactttgctgtcaatactgagggtacttattcagagcctcgccccattggcacccgttacctcacccgtaacctgtaattgcctgttaatcaataaaccggttaattcgtttcagttgaactttggtctctgcgaagggcgaattc

SEQ ID NO: 5009 - protein, 738 aa, Adeno-associated virus; identical to SEQ ID NO: 5002

SEQ ID NO: 5010 - DNA, 1933 bp, Adeno-associated virus
  modified_base (1302)..(1302): a, c, t or g
caaggcctacgaccagcagctcaaagcgggtgacaatccgtacctgcggtataaccacgccgacgccgagtttcaggagcgtcttcaagaagatacgtcttttgggggcaacctcgggcgagcagtcttccaggccaaaaagcgggttctcgaacctcttggtctggttgagacgccagctaagacggcacctggaaagaagcgaccggtagactcgccagactccacctcgggcatcggcaagaaaggccagcagcccgcgaaaaagagactcaactttgggcagactggcgactcagagtcagtccccgaccctcaaccaatcggagaaccaccagcaggcccctctggtctgggatctggtacaatggctgcaggcggtggcgcaccaatggctgacaataacgagggcgccgacggagtgggtaatgcctcaggaaattggcattgcgattccacatggctgggcgacagagtcatcaccaccagcacccgaacctgggccctgcccacctacaacaaccacctctacaagcaaatctccagtcagtcagcagggagcaccaacgataacgtctatttcggctacagcaccccctgggggtattttgacttcaacagattccattgccacttctcaccacgtgactggcagcgacttatcaacaacaactggggattccggcccaagaagctcaacttcaagctcttcaacatccaggtcaaggaggtcacgacgaatgacggtgtcacaaccatcgctaataaccttaccagcacggttcaggtcttttcggactcggaatatcaactgccgtacgtcctcggctccgcgcaccagggctgcctgcctccgttcccggcagacgtgttcatgattccgcagtacggatacctgactctgaacaatggcagccaatcggtaggccgttcctccttctactgcctggagtactttccttctcagatgctgagaacgggcaacaacttcacctttagctacaccttcgaggacgtgcctttccacagcagctacgcgcacagccagagtctggaccggctgatgaatcccctcatcgaccagtacctgtactacttggccagaacacagagcaacgcaggaggtactgctggcaatcgggaactgcagttttatcagggcggacctaccaccatggccgaacaagcaaagaactggctgcccggaccttgcttccggcaacagagagtatccaagacgctggatcaaaataacaacagcaactttgcctggactggtgccacaaaataccatttaaatgnaagaaattcattggttaatcccggtgtcgccatggcaacccacaaggacgacgaggaacgcttcttcccttcgagcggagttctaatttttggcaaaactggagcagctaataaaactacattagaaaacgtgctcatgacaaatgaagaagaaattcgtcctaccaacccggtagctaccgaggaatacgggattgtaagcagcaacttgcaggcggctagcaccgcagcccagacacaagttgttaacaaccagggagccttacctggcatggtctggcagaaccgggacgtgtacctgcaaggtcccatttgggccaagattcctcacacggacggcaactttcacccgtctcctctaatgggtggctttggactgaaacacccgcctccccagatcctgatcaaaaacacaccggtacctgctaatcctccagaagtgtttactcctgccaagtttgcttccttcatcacgcagtacagcaccgggcaagtcagcgttgagatcgagtgggagctgcagaaagagaacagcaagcgctggaacccagagattcagtacacctccaactttgacaaacagactggagtggactttgctgttgacagccagggtgtttactctgagcct

SEQ ID NO: 5011 - DNA, 3105 bp, Adeno-associated virus
gaattcgcccttgctgcgtcaactggaccaatgagaactttcccttcaacgattgcgtcgacaagatggtgatctggtgggaggagggcaagatgaccgccaaggtcgtggagtccgccaaggccattctgggcggaagcaaggtgcgcgtggaccaaaagtgcaagtcatcggcccagatcgaccccacgcccgtgatcgtcacctccaacaccaacatgtgcgccgtgatcgacgggaacagcaccaccttcgagcaccagcagccgctgcaggaccgcatgttcaagttcgagctcacccgccgtctggagcacgactttggcaaggtgaccaagcaggaagtcaaagagttcttccgctgggctcaggatcacgtgactgaggtggcgcatgagttctacgtcagaaagggcggagccaccaaaagacccgcccccagtgacgcggatataagcgagcccaagcgggcctgcccctcagttgcggagccatcgacgtcagacgcggaagcaccggtggactttgcggacaggtaccaaaacaaatgttctcgtcacgcgggcatgcttcagatgctgtttccctgcaagacatgcgagagaatgaatcagaatttcaacgtctgcttcacgcacggggtcagagactgctcagagtgcttccccggcgcgtcagaatctcaacccgtcgtcagaaaaaagacgtatcagaaactgtgcgcgattcatcatctgctggggcgggcacccgagattgcgtgttcggcccgcgatctcgtcaacgtggacttggatgactgtgtttctgagcaataaatgacttaaaccaggtatggctgctgacggttatcttccagattggctcgaggacaacctctctgagggcattcgcgagtggtgggacctgaaacctggagcccccaagcccaaggccaaccagcagaagcaggacgacggccggggtctggtgcttcctggctacaagtacctcggacccttcaacggactcgacaagggggagcccgtcaacgcggcggacgcagcggccctcgagcacgacaaggcctacgaccagcagctcaaagcgggtgacaatccgtacctgcggtataaccacgccgacgccgagtttcaggagcgtctgcaagaagatacgtcttttgggggcaacctcgggcgagcagtcttccaggccaagaagagggtactcgaacctctgggcctggttgaagaaggtgctaagacggctcctggaaagaagagaccgttagagtcaccacaagagcccgactcctcctcaggaatcggcaaaaaaggcaaacaaccagccaaaaagagactcaactttgaagaggacactggagccggagacggaccccctgaaggatcagataccagcgccatgtcttcagacattgaaatgcgtgcagcaccgggcggaaatgctgtcgatgcgggacaaggttccgatggagtgggtaatgcctcgggtgattggcattgcgattccacctggtctgagggcaaggtcacaacaacctcgaccagaacctgggtcttgcccacctacaacaaccacttgtacctgcggctcggaacaacatcaaacagcaacacctacaacggattctccaccccctggggatactttgactttaacagattccactgtcacttctcaccacgtgactggcaaagactcatcaacaacaactggggactacgaccaaaagccatgcgcgttaaaatcttcaatatccaagttaaggaggtcacaacgtcgaacggcgagactacggtcgctaataaccttaccagcacggttcagatatttgcggactcgtcgtatgagctcccgtacgtgatggacgctggacaagagggaagtctgtctcctttccccaatgacgtcttcatggtgcctcaatatggctactgtggcattgtgactggcgaaaatcagaaccagacggacagaaatgctttctactgcctggagtattttccttcacaaatgctgagaactggcaataactttgaaatggcttacaactttgggaaggtgccgttccactcaatgtatgcttacagccagagcccggacagactgatgaatcccctcctggaccagtacctgtggcacttacagtcgaccacctctggagagactctgaatcaaggcaatgcagcaaccacatttggaaaaatcaggagtggagactttgccttttacagaaagaactggctgcctgggccttgtgttaaacagcagagactctcaaaaactgccagtcaaaattacaagattcctgccagcgggggcaacgctctgttaaagtatgacacccactataccttaaacaaccgctggagcaacatagcgcctggacctccaatggcaacagctggaccttcagatggggacttcagcaacgcccagctcatcttccctggaccatcagtcaccggaaacacaacaacctcagcaaacaatctgttgtttacatcagaagaagaaattgctgccaccaacccaagagacacggacatgtttggtcagattgctgacaataatcagaatgctacaactgctcccataaccggcaacgtgactgctatgggagtgcttcctggcatggtgtggcaaaacagagacatttactaccaagggccaatttgggccaagatcccacacgcggacggacattttcatccttcaccgctaattggcggttttggactgaaacatccgcctccccagatatttatcaaaaacacccccgtacctgccaatcctgcgacaaccttcactgcagccagagtggactctttcatcacacaatacagcaccggccaggtcgctgttcagattgaatgggaaatcgaaaaggaacgctccaaacgctggaatcctgaagtgcagtttacttcaaactatgggaaccagtcttctatgttgtgggctcccgatacaactgggaagtatacagagccgcgggttattggctctcgttatttgactaatcatttgtaactgcctagttaatcaataaaccgtgtgattcgtttcagttgaactttggtctctgcgaagggcgaattc

SEQ ID NO: 5012 - protein, 733 aa, Adeno-associated virus
MAADGYLPDWLEDNLSEGIREWWDLKPGAPKPKANQQKQDDGRGLVLPGYKYLGPFNGLDKGEPVNAADAAALEHDKAYDQQLKAGDNPYLRYNHADAEFQERLQEDTSFGGNLGRAVFQAKKRVLEPLGLVEEGAKTAPGKKRPLESPQEPDSSSGIGKKGKQPAKKRLNFEEDTGAGDGPPEGSDTSAMSSDIEMRAAPGGNAVDAGQGSDGVGNASGDWHCDSTWSEGKVTTTSTRTWVLPTYNNHLYLRLGTTSNSNTYNGFSTPWGYFDFNRFHCHFSPRDWQRLINNNWGLRPKAMRVKIFNIQVKEVTTSNGETTVANNLTSTVQIFADSSYELPYVMDAGQEGSLPPFPNDVFMVPQYGYCGIVTGENQNQTDRNAFYCLEYFPSQMLRTGNNFEMAYNFEKVPFHSMYAHSQSLDRLMNPLLDQYLWHLQSTTSGETLNQGNAATTFGKIRSGDFAFYRKNWLPGPCVKQQRFSKTASQNYKIPASGGNALLKYDTHYTLNNRWSNIAPGPPMATAGPSDGDFSNAQLIFPGPSVTGNTTTSANNLLFTSEEEIAATNPRDTDMFGQIADNNQNATTAPITGNVTAMGVLPGMVWQNRDIYYQGPIWAKIPHADGHFHPSPLIGGFGLKHPPPQIFIKNTPVPANPATTFTAARVDSFITQYSTGQVAVQIEWEIEKERSKRWNPEVQFTSNYGNQSSMLWAPDTTGKYTEPRVIGSRYLTNHL

SEQ ID NO: 5013 - DNA, 3105 bp, Adeno-associated virus
gaattcgcccttgctgcgtcaactggaccaatgagaactttcccttcaacgattgcgtcgacaagatggtgatctggtgggaggagggcaagatgaccgccaaggtcgtggagtccgccaaggccattctgggcggaagcaaggtgcgcgtggaccaaaagtgcaagtcatcggcccagatcgaccccacgcccgtgatcgtcacctccaacaccaacatgtgcgccgtgatcgacgggaacagcaccaccttcgagcaccagcagccgctgcaggaccgcatgttcaagttcgagctcacccgccgtctggagcacgactttggcaaggtgaccaagcaggaagtcaaagagttcttccgctgggctcaggatcacgtgactgaggtggcgcatgagttctacgtcagaaagggcggagccaccaaaagacccgcccccagtgacgcggatataagcgagcccaagcgggcctgcccctcagttgcggagccatcgacgtcagacgcggaagcaccggtggactttgcggacaggtaccaaaacaaatgttctcgtcacgcgggcatgcttcagatgctgtttccctgcaagacatgcgagagaatgaatcagaatttcaacgtctgcttcacgcacggggtcagagactgctcagagtgcttccccggcgcgtcagaatctcaacccgtcgtcagaaaaaagacgtatcagaaactgtgcgcgattcatcatctgctggggcgggcacccgagattgcgtgttcggcctgcgatctcgtcaacgtggacttggatgactgtgtttctgagcaataaatgacttaaaccaggtatggctgctgacggttatcttccagattggctcgaggacaacctctctgagggcattcgcgagtggtgggacctgaaacctggagcccccaagctcaaggccaaccagcagaagcaggacgacggccggggtctggtgcttcctggctacaagtacctcggacccttccacggactcgacaagggggagcccgtcaacgcggcggacgcagcggccctcgagcacgacaaggcctacgaccagcagctcaaagcgggtgacaatccgtacctgcggtataaccacgccgacgccgagtttcaggagcgtctgcaagaagatacgtcttttgggggcaacctcgggcgagcagtcttccaggccaagaagagggtactcgaaccactgggcctggttgaagaaggtgctaagacggctcctggaaagaagagaccgttagagtcaccacaagagcccgactcctcctcaggaatcggcaaaaaaggcaaacaaccagccaaaaagagactcaactttgaagaggacactggagccggagacggaccccctgaaggatcagataccagcgccatgtcttcagacattgaaatgcgtgcagcaccgggcggaaatgctgtcgatgcgggacaaggttccgatggagtgggtaatgcctcgggtgattggcattgcgattccacctggtctgagggcaaggtcacaacaacctcgaccagaacctgggtcttgcccacctacaacaaccacttgtacctgcggctcggaacaacatcaaacagcaacacctacaacggattctccaccccctggggatactttgactttaacagattccactgtcacttctcaccacgtgactggcaaagactcatcaacaacaactggggactacgaccaaaagccatgcgcgttaaaatcttcaatatccaagttaaggaggtcacaacgtcgaacggcgagactacggtcgctaataaccttaccagcacggttcagatatttgcggactcgtcgtatgagctcccgtacgtgatggacgctggacaagagggaagtctgcctcctttccccaatgacgtcttcatggtgcctcaatatggctactgtggcattgtgactggcgaaaatcagaaccagacggacagaaatgctttctactgcctggagtattttccttcacaaatgctgagaactggcaataactttgaaatggcttacaactttgagaaggtgccgttccactcaatgtatgctcacagccagagcctggacagactgatgaatcccctcctggaccagtacctgtggcacttacagtcgaccacctctggagagactctgaatcaaggcaatgcagcaaccacatttggaaaaatcaggagtggagactttgccttttacagaaagaactggctgcctgggccttgtgttaaacagcagagattctcaaaaactgccagtcaaaattacaagattcctgccagcgggggcaacgctctgttaaagtatgacacccactataccttaaacaaccgctggagcaacatagcgcctggacctccaatggcaacagctggaccttcagatggggacttcagcaacgcccagctcatcttccctggaccatcagtcaccggaaacacaacaacctcagcaaacaatctgttgtttacatcagaaggagaaattgctgccaccaacccaagagacacggacatgtttggtcagattgctgacaataatcagaatgctacaactgctcccataaccggcaacgtgactgctatgggagtgcttcctggcatggtgtggcaaaacagagacatttactaccaagggccaatttgggccaagatcccacacgcggacggacattttcatccttcaccgctaattggcggttttggactgaaacatccgcctccccagatatttatcaaaaacacccccgtacctgccaatcctgcgacaaccttcactgcagccagagtggactctttcatcacacaatacagcaccggccaggtcgctgttcagattgaatgggaaatcgaaaaggaacgctccaaacgccggaatcctgaagtgcagtttacttcaaactatgggaaccagtcttctatgttgtgggctcccgatacaactgggaagtatacagagccgcgggttattggctctcgttatttgactaatcatttgtaactgcctagttaatcaataaaccgtgtgattcgtttcagttgaactttggtctctgcgaagggcgaattc

SEQ ID NO: 5014 - DNA, 3105 bp, Adeno-associated virus
gaattcgcccttcgcagagaccaaagttcaactgaaacgaatcacacggtttattgattaactaggcagttacaaatgattagtcaaataacgagagccaataacccgcggctctgtatacttcccagttgtatcgggagcccacaacatagaagactggttcccacagtttgaagtaaactgcacttcaggattccagcgtttggagcgttccttttcgatttcccattcaatctgaacagcgacctggccggtgctgtattgtgtgatgaaagagtccactctggctgcagtgaaggttgtcgcaggataggcaggtacgggggtgtttttgataaatatctggggaggcggatgtttcagtccaaaaccgccaattagcggtgaaggatgaaaatgtccgtccgcgtgtgggatcttggcccaaattggcccttggtagtaaatgtctctgttttgccacaccatgccaggaagcactcccatagcagtcacgttgccggttatgggagcagttgtagcattctgattattgtcagcaatctgaccaaacatgtccgtgtctcttgggttggtggcagcaatttcttcttctgatgtaaacaacagattgtttgctgaggttgttgtgtttccggtgactgatggtccagggaagatgagctgggcgttgctgaagtccccatctgaaggtccagctgttgccattggaggtccaggcgctatgttgctccagcggttgtttaaggtatagtgggtgtcatactttaacagagcgttgcccccgctggcaggaatcttgtaattttgactggcagtttttgagaatctctgctgtttaacacaaggcccaggcagccagttctttctgtaaaaggcaaagtctccactcctgatttttccaaatgtggttgctgcattgccttgattcagagtctctccagaggtggtcgactgtaagtgccacaggtactggtccaggaggggattcatcagtccgtccaggctctggctgtgagcatacattgagtggaacggcaccttctcaaagttgtaagccgtttcaaagttattgccagttctcagcatttgtgaaggaaaatactccaggcagtagaaagcatttctgtccgtctggttctgattttcgccagtcacaatgccacagtagccatattgaggcaccatgaagacgtcattggggaaaggaggcagacttccctcttgtccagcgtccatcacgtacgggagctcatacgacgagtccgcaaatatctgaaccgtgctggtaaggttattagcgaccgtagtctcgccgttcgacgttgtgacctccttaacttggatattgaagattttaacgcgcatggcttttggtcgtagtccccagttgttgttgatgagtctttgccagtcacgtggtgagaagtgacagtggaatctgttaaagtcaaagtatccccagggggtggagaatccgttgtaggtgttgctgtttgatgttgttccgagccgcaggtacaagtggttgttgtaggtgggcaagacccaggttctggtcgaggttgttgtgaccttgccctcagaccaggtggaatcgcaatgccaatcacccgaggcattacccactccatcggaaccttgtcccgcatcgacagcatttccgcccggtgctgcacgcatttcaatgtctgaagacatggcgctggtatctgatccttcagggggtccgtctccggctccagtgtcctcttcaaagttgagtctctttttggctggttgtttgccttttttgccgattcctgaggaggagtcgggctcttgtggtgactctaacggtctcttctttccaggagccgtcttagcaccttcttcaaccaggcccagaggttcgagtaccctcttcttggcctggaagactgctcgcccgaggttgcccccaaaagacgtatcttcttgcagacgctcctgaaactcggcgtcggcgtggttataccgcaggtacggattgtcacccgctttgagctgctggtcgtaggccttgtcgtgctcgagggccgctgcgtccgccgcgttgacgggctcccccttgtcgagtccgttgaagggtccgaggtactcgtagccaggaagcaccagaccccggccgtcgtcctgcttctgctggttggccttgggcttgggggctccaggtttcaggtcccaccactcgcgaatgccctcagagaggttgtcctcgagccaatctggaagataaccgtcagcagccatacctggtttaagtcatttattgctcagaaacacagtcatccaagtccacgttgacgagatcgcaggccgaacacgcaatctcgggtgcccgccccagcagatgatgaatcgcgcacagtttctgatacgtcttttttctgacgacgggttgagattctgacgcgccggggaagcactctgagcagtctctgaccccgtgcgtgaagcagacgttgaaattctgattcattctctcgcatgtcttgcagggaaacagcatctgaagcatgcccgcgtgacgagaacatttgttttggtacctgtccgcaaggtccaccggtgcttccgcgtctgacgtcgatggctccgcaactgaggggcaggcccgcttgggctcgcttatatccgcgtcactgggggcgggtcttttggtggctccgccctttctgacgtagaactcatgcgccacctcagtcacgtgatcctgagcccagcggaagaactctttgacttcctgcttggtcaccttgccaaagtcgtgctccagacggcgggtgagctcgaacttgaacatgcggtcctgcagcggctgctggtgctcgaaggtggtgctgttcccgtcgatcacggcgcacatgttggtgttggaggtgacgatcacgggcgtggggtcgatctgggccgatgacttgcacttttggtccacgcgcaccttgcttccgcccagaatggccttggcggactccacgaccttggcggtcatcttgccctcctcccaccagatcaccatcttgtcgacgcaatcgttgaagggaaagttctcattggtccagttgacgcagcaagggcgaattc

SEQ ID NO: 5015 - DNA, 3094 bp, Adeno-associated virus
gaattcgcccttgctgcgtcaactggaccaagagaactttcccttcaacgattgcgtcgacaagatggtgatctggtgggaggagggcaagatgacggccaaggtcgtggagtccgccaaagccattctgggcggaagcaaggtgcgcgtcgaccaaaagtgcaagtcctcggcccagatcgatcccacccccgtgatcgtcacctccaacaccaacatgtgcgccgtgatcgacgggaacagcaccaccttcgagcaccagcagccgttgcaggaccggatgttcaaatttgaactcacccgccgtctggaacacgactttggcaaggtgaccaagcaggaagtcaaagagttcttccgctgggctagtgatcacgtgactgaggtgacgcatgagttctacgtcagaaagggcggagccagcaaaagacccgcccccgatgacgcggatataagcgagcccaagcgggcctgtccctcagtcacggacccatcgacgtcagacgcggaaggagctccggtggactttgccgacaggtaccaaaacaaatgttctcgtcacgcgggcatgcttcagatgctgtttccctgcaaaacgtgcgagagaatgaatcagaatttcaacatttgcttcacgcacggggtcagagactgtttagaatgtttccccggcgtgtcagaatctcaaccggtcgtcagaaaaaagacgtatcggaagctgtgtgcgattcatcatctgctggggcgggcacccgagattgcttgctcggcctgcgacctggtcaacgtggacctggacgactgtgtttctgagcaataaatgacttaaaccgggtatggctgccgatggttatcttccagattggctcgaggacaacctctctgagggcattcgcgagtggtgggacctgaaacctggagccccgaaacccaaagccaaccagcaaaagcaggacgacggccggggtctggtgcttcctggctacaagtacctcggacccttcaacggactcgacaagggggagcccgtcaacgcggcggacgcagcggccctcgagcacgacaaggcctacgaccagcagctcaaagcgggtgacaatccgtacctgcggtataaccacgccgacgccgagtttcaggagcgtctgcaagaagatacgtcatttgggggcaacctcgggcgagcagtcttccaggccaagaagcgggttctcgaacctctcggtctggttgaggaaggcgctaagacggctcctggaaagaagagacccatagactctccagactcctccacgggcatcggcaaaaaaggccagcagcccgctaaaaagaagctcaattttggtcagactggcgactcagagtcagtccccgaccctcaacctcttggagaacctccagcagcgccctctagtgtgggatctggtacaatggctgcaggcggtggcgcaccaatggcagacaataacgaaggtgccgacggagtgggtaatgcctcaggaaattggcattgcgattccacatggctgggcgacagagtcatcaccaccagcaccagaacctgggccctccccacctacaacaaccacctctacaagcaaatctccagcagcagctcaggagccaccaatgacaaccactacttcggctacagcaccccctgggggtattttgactttaacagattccactgccacttctcaccacgtgactggcagcgactcatcaacaacaactggggattccggcccaagaagctgcggttcaagctcttcaacatccaggtcaaggaggtcacaacgaatgacggcgtcacgaccatcgctaataaccttaccagcacggttcaggtcttctcggactcggaataccagctgccgtacgtcctcggctctgcgcaccagggctgcctgcctccgttcccggcggacgtcttcatgattcctcagtacggctacctgactctgaacaacggcagccaatcggtgggccgttcctccttctactgcctggaatatttcccctctcaaatgctgagaacgggcaacaactttgagttcagttacagcttcgaggacgtgcctttccacagcagctacgcgcacagccagagcctagaccggctgatgaaccctctcatcgaccagtacctgtactacctggcccggacccagagcaccacgggttccaccagggaactgcaatttcatcaagctgggcccaatactatggccgagcagtcaaagaactggctgcctggaccctgctataggcaacagggactgtcaaagaacttggactttaacaacaacagcaattttgcctggactgctgccactaaatatcatctgaatggcagaaactctttgaccaatcctggcattcccatggcaaccaacaaggatgatgaggaccagttctttcccatcaacggggtactggtttttggcaagacgggagctgccaacaaaactacgctggaaaacgttctgatgaccagcgaggaggagatcaagaccactaaccctgtggctacagaagaatacggtgtggtctccagcaacctgcagccgtctacagccgggcctcaatcacagactatcaacagccagggagcactgcctggcatggtctggcagaaccgggacgtgtatctgcagggtcccatctgggccaaaattcctcacacggatggcaactttcacccgtctcctctgatgggcggttttggactcaaacacccgcctccacagatcctgatcaaaaacacacctgtacctgctaatcctccggaggtgtttactcctgccaagtttgcctccttcatcacgcagtacagcaccggacaagtcagcgtggaaatcgagtgggagctgcagaaagaaaacagcaagcgctggaacccagaaattcagtatacttccaattatgccaagtctaataatgttgaatttgctgtgaaccctgatggtgtttatactgagcctcgccccattggcactcgttacctcccccgtaatctgtaattgcttgttaatcaataaaccggttgattcgtttcagttgaactttggtctctgcgaagggcgaattc

SEQ ID NO: 5016 - DNA, 3095 bp, Adeno-associated virus
gaattcgcccttcgcagagaccaaagttcaactgaaacgaatcaaccggtttattgattaacaagcaattacagattacgggtgaggtaacgagtgccaatggggcgaggctcagtataaacaccatcagggttcacagcaaattcaacattattagacttggcataattggaagtatactgaatttctgggttccagcgcttgctgttttctttctgcagctcccactcgatttccacgctgacttgtccggtgctgtactgcgtgatgaaggaggcaaacttggcaggagtaaacacctccggaggattagcaggtacaggtgtgtttttgatcaggatctgtggaggcgggtgtttgagtccaaaaccgcccatcagaggagacgggtgaaagttgccatccgtgtgaggaattttggcccagatgggaccctgcagatacacgtcccggttctgccagaccatgccaggcagtgctccctggctgttgatagtctgtgattgaggcccggctgtagacgactgcaggttgctggagaccacaccgtattcttctgtagccacagggttagtggtcttgatctcctcctcgctggtcatcagaacgttttccagcgtagttttgttggcagctcccgtcttgccaaaaaccagtaccccgttgatgggaaagaactggtcctcatcatccttgttggttgccatgggaatgccaggattggtcaaagagtttctgccattcagatgatatttagtggcagcagtccaggcaaaattgctgttgttgttaaagtccaagttctttgacagtctctgttgcctatagcagggtccaggcagccagttctttgactgctcggccatagtattgggcccagcttgatgaaattgcagttccctggtggaacccgtggtgctctgggtccgggccaggtagtacaggtactggtcgatgagagggttcatcagccggtctaggctctggctgtgcgcgtagctgctgtggaaaggcacgtcctcgaagctgtaactgaactcaaagttgttgcccgttctcagcatttgagaggggaaatattccaggcagtagaaggaggaacggcccaccgattggctgccgttgtccagagtcaggtagccgtactgaggaatcatgaagacgtccgccgggaacggaggcaggcagccctggtgcgcagagccgaggacgtacggcagctggtattccgagtccgagaagacctgaaccgtgctggtaaggttattagcgatggtcgtgacgccgtcattcgttgtgacctccttgacctggatgttgaggagcttgaaccgcagcttcttgggccggaatccccagttgttgttgatgagtcgctgccagtcacgtggtgagaagtggcagtggaatctgttaaagtcaaaatacccccagggggtgctgtagccgaagtagtggttgtcattggtggctcctgagctgctgctggagatttgcttgtagaggtggttgttgtaggtggggagggcccaggttctggtgctggtggtgatgactctgtcgcccagccatgtggaatcgcaatgccaatttcctgaggcattacccactccgtcggcaccttcgttattgtctgccattggtgcgccaccgcctgcagccattgtaccagatcccacactagagggcgctgctggaggttctccaagaggttgagggtcggggactgactctgagtcgccagtctgaccaaaattgagcttctttttagcgggctgctggccttttttgccgatgcccgtggaggagtctggagagcctatgggtctcttctttccaggagccgtcttagcgccttcctcaaccagaccgagaggttcgagaacccgcttcttggcctggaagactgctcgcccgaggttgcccccaaatgacgtatcttcttgcagacgctcctgaaactcggcgtcggcgtggttataccgcaggtacggattgtcacccgctttgagctgctggtcgtaggccttgtcgtgctcgagggccgctgcgtccgccgcgttgacgggctcccccttgtcgagtccgttgaagggtccgaggtacttgtagccaggaagcaccagaccccggccgtcgtcctgcttttgctggttggctttgggtttcggggctccaggtttcaggtcccaccactcgcgaatgccctcagagaggttgtcctcgagccaatctggaagataaccatcggcagccatacctggtttaagtcatttattgctcagaaacacagtcgtccaggtccacgttgaccaggtcgcaggccgagcaagcaatctcgggtgcccgccccagcagatgatgaatcgcacacagcttccgatacgtcttttttctgacgaccggttgagattctgacacgccggggaaacattctaaacagtctctgaccccgtgcgtgaagcaaatgttgaaattctgattcattctctcgcacgttttgcagggaaacagcacctgaagcatgcccgcgtgacgagaacatttgttttggtacctgtcggcaaagtccaccggagctccttccgcgtctgacgtcgatgggtccgtgactgagggacgggcccgcttgggctcgcttatatccgcgtcatcgggggcgggtcttttgctggctccgccctttctgacgtagaactcatgcgtcacctcagtcacgtgatcactagcccagcggaagaactctttgacttcctgctttgtcaccttgccaaagtcgtgttccagacggcgggtgagttcaaatttgaacatccggtcctgcaacggttgctggtgctcgaaggtggtgctgttcccgtcgatcacggcgcacatgttggtgttggaggtgacgatcacgggggtgggatcgatctgggcggacgacttgcacttttggtccacgcgcaccttgctgccgccgagaatggccttggcggactccacgaccttggccgtcatcttgccctcctcccaccagatcaccatcttgtcgacgcaatcgttgaagggaaagttctcattggtccagttgacgcagcaagggcgaattc

SEQ ID NO: 5017 - DNA, 3095 bp, Adeno-associated virus
gaattcgcccttcgcagagaccaaagttcaactgaaacgaatcaaccggtttattgattaacaagcaattacagattacgggtgaggtaacgagtgccaatggggcgaggctcagtataaacaccatcagggttcacagcaaattcaacattattagacttggcataattggaagtatactgaatttctgggttccagcgcttgctgttttctttctgcagctcccactcgatttccacgctgacttgtccggtgctgtactgcgtgatgaaggaggcaaacttggcaggagtaaacacctccggaggattagcaggtacaggtgtgtttttgatcaggatctgtggaggcgggtgttcgagtccaaaaccgcccatcagaggagacgggtgaaagttgccatccgtgtgaggaattttggcccagatgggaccctgcagatacacgtcccggttctgccagaccatgccaggcagtgctccctggctgttgatagtctgtgattgaggcccggctgtagacgactgcaggttgctggagaccacaccgtattcttctgtagccacagggttagtggtcttgatctcctcctcgctggtcatcagaacgttttccagcgtagttttgttggcagctcccgtcttgccaaaaaccagtaccccgttgatgggaaagaactggtcctcatcatccttgttggttgccatgggaatgccaggattggtcaaagagtttctgccattcagatgatatttagtggcagcagtccaggcaaaattgctgttgttgttaaagtccaagttctttgacagtctctgttgcctatagcagggtccaggcagccagttctttgactgctcggccatagtattgggcccagcttgatgaaattgcagttccctggtggaacccgtggtgctctgggtccgggccaggtagtacaggtactggtcgatgagagggttcatcagccggtctaggctctggctgtgcgcgtagctgctgtggaaaggcacgtcctcgaagctgtaactgaactcaaagttgttgcccgttctcagcatttgagaggggaaatattccaggcagtagaaggaggaacggcccaccgattggctgccgttgttcagagtcaggtagccgtactgaggaatcatgaagacgtccgccgggaacggaggcaggcagccctggtgcgcagagccgaggacgtacggcagctggtattccgagtccgagaagacctgaaccgtgctggtaaggttattagcgatggtcgtgacgccgtcattcgttgtgacctccttgacctggatgttgaagagcttgaaccgcagcttcttgggccggaatccccagttgttgttgatgagtcgctgccagtcacgtggtgagaagtggcagtggaatctgttaaagtcaaaatacccccagggggtgctgtagccgaagtagtggttgtcattggtggctcctgagctgctgctggagatttgcttgtagaggtggttgttgtaggtggggagggcccaggttctggtgctggtggtgatgactctgtcgcccagccatgtggaatcgcaatgccaatttcctgaggcattacccactccgtcggcaccttcgttattgtctgccgttggtgcgccaccgcctgcagccattgtaccagatcccacactagagggcgctgctggaggttctccaagaggttgagggtcggggactgactctgagtcgccagtctgaccaaaattgagcttctttttagcgggctgctggccttttttgccgatgcccgtggaggagtctggagagtctatgggtctcttctttccaggagccgtcttagcgccttcctcaaccagaccgagaggttcgagaacccgcttcttggcctggaagactgctcgcccgaggttgcccccaaatgacgtatcttcttgcaggcgctcctgaaactcggcgtcggcgtggttataccgcaggtacggattgtcacccgctttgagctgctggtcgtaggccttgtcgtgctcgagggccgctgcgtccgccgcgttgacgggctcccccttgtcgagtccgttgaagggtccgaggtacttgtagccaggaagcaccagaccccggccgtcgtcctgcttttgctggttggctttgggtttcggggctccaggtttcaggtcccaccactcgcgaatgccctcagagaggttgtcctcgagccaatctggaagataaccatcggcagccatacctggtttaagccatttattgctcagaaacacagtcgtccaggtccacgttgaccaggtcgcaggccgagcaggcaatctcgggtgcccgccccagcagatgatgaatcgcacacagcttccgatacgtcttttttctgacgaccggttgagattctgacacgccggggaaacattctaaacagtctctgaccccgtgcgtgaagcaaatgttgaaattctgattcattctctcgcacgttttgcagggaaacagcatctgaagcatgcccgcgtggcgagaacatttgttttggtacctgtcggcaaagtccaccggagctccttccgcgtctgacgtcgatgggtccgtgactgagggacaggcccgcttgggctcgcttatatccgcgtcatcgggggcgggtcttttgctggctccgccctttctgacgtagaactcatgcgtcacctcagtcacgtgatcactagcccagcggaagaactctttgacttcctgctttgtcaccttgccaaagtcgtgttccagacggcgggtgagttcaaatttgaacatccggtcctgcaacggctgctggtgctcgaaggtggtgctgttcccgtcgatcacggcgcgcatgttggtgttggaggtgacgatcacgggggtgggatcgatctgggcggacgacttgcacttttggtccacgcgcaccttgctgccgccgagaatggccttggcggactccacgaccttggccgtcatcttgccctcctcccaccagatcaccatcttgtcgacgcaatcgttgaagggaaagttctcattggtccagttgacgcagcaagggcgaattc

SEQ ID NO: 5018 - protein, 729 aa, Adeno-associated virus; identical to SEQ ID NO: 4833

SEQ ID NO: 5019 - protein, 729 aa, Adeno-associated virus
MAADGYLPDWLEDNLSEGIREWWDLKPGAPKPKANQQKQDDGRGLVLPGYKYLGPFNGLDKGEPVNAADAAALEHDKAYDQQLKAGDNPYLRYNHADAEFQERLQEDTSFGGNLGRAVFQAKKRVLEPLGLVEEGAKTAPGKKRPIDSPDSSTGIGKKGQQPAKKKLNFGQTGDSESVPDPQPLGEPPAAPSSVGSGTMAAGGGAPTADNNEGADGVGNASGNWHCDSTWLGDRVITTSTRTWALPTYNNHLYKQISSSSSGATNDNHYFGYSTPWGYFDFNRFHCHFSPRDWQRLINNNWGFRPKKLRFKLFNIQVKEVTTNDGVTTIANNLTSTVQVFSDSEYQLPYVLGSAHQGCLPPFPADVFMIPQYGYLTLNNGSQSVGRSSFYCLEYFPSQMLRTGNNFEFSYSFEDVPFHSSYAHSQSLDRLMNPLIDQYLYYLARTQSTTGSTRELQFHQAGPNTMAEQSKNWLPGPCYRQQRLSKNLDFNNNSNFAWTAATKYHLNGRNSLTNPGIPMATNKDDEDQFFPINGVLVFGKTGAANKTTLENVLMTSEEEIKTTNPVATEEYGVVSSNLQSSTAGPQSQTINSQGALPGMVWQNRDVYLQGPIWAKIPHTDGNFHPSPLMGGFGLKHPPPQILIKNTPVPANPPEVFTPAKFASFITQYSTGQVSVEIEWELQKENSKRWNPEIQYTSNYAKSNNVEFAVNPDGVYTEPRPIGTRYLTRNL

SEQ ID NO: 5020 - protein, 729 aa, Adeno-associated virus
MAADGYLPDWLEDNLSEGIREWWDLKPGAPKPKANQQKQDDGRGLVLPGYKYLGPFNGLDKGEPVNAADAAALEHDKAYDQQLKAGDNPYLRYNHADAEFQERLQEDTSFGGNLGRAVFQAKKRVLEPLGLVEEGAKTAPGKKRPIDSPDSSTGIGKKGQQPAKKKLNFGQTGDSESVPDPQPLGEPPAAPSSVGSGTMAAGGGAPMADNNEGADGVGNASGNWHCDSTWLGDRVITTSTRTWALPTYNNHLYKQISSSSSGATNDNHYFGYSTPWGYFDFNRFHCHFSPRDWQRLINNNWGFRPKKLRFKLFNIQVKEVTTNDGVTTIANNLTSTVQVFSDSEYQLPYVLGSAHQGCLPPFPADVFMIPQYGYLTLNNGSQSVGRSSFYCLEYFPSQMLRTGNNFEFSYSFEDVPFHSSYAHSQSLDRLMNPLIDQYLYYLARTQSTTGSTRELQFHQAGPNTMAEQSKNWLPGPCYRQQRLSKNLDFNNNSNFAWTAATKYHLNGRNSLTNPGIPMATNKDDEDQFFPINGVLVFGKTGAANKTTLENVLMTSEEEIKTTNPVATEEYGVVSSNLQSSTAGPQSQTINSQGALPGMVWQNRDVYLQGPIWAKIPHTDGNFHPSPLMGGFGLKHPPPQILIKNTPVPANPPEVFTPAKFASFITQYSTGQVSVEIEWELQKENSKRWNPEIQYTSNYAKSNNVEFAVNPDGVYTEPRPIGTRYLTRNL

SEQ ID NO: 5021 - DNA, 2217 bp, Adeno-associated virus
atggctgctgacggttatcttccagattggctcgaggacaacctctctgagggcattcgcgagtggtgggacctgaaacctggagcccccaagcccaaggccaaccagcagaagcaggacgacggccggggtctggtgcttcctggctacaagtacctcggacccttcaacggactcgacaagggggagcccgtcaacgcggcggacgcagcggccctcgagcacgacaaggcctacgaccagcagctcaaagcgggtgacaatccgtacctgcggtataaccacgccgacgccgagtttcaggagcgtctacaagaagatacgtcttttgggggcaacctcgggcgagcagtcttccaggccaagaagcgggttctcgaacctctcggtctggttgaggaagctgctaagacggctcctggaaagaagagaccggtagaaccgtcacctcagcgttcccccgactcctccacgggcatcggcaagaaaggccagcggcccgctaaaaagagactgaactttggtcagactggcgactcagagtcagtccccgaccctcaaccaatcggagaaccaccagcaggcccctctggtctgggatctggtacaatggctgcaggcggtggcgctccaatggcagacaataacgaaggcgccgacggagtgggtagttcctcaggaaattggcattgcgattccacatggctgggcgacagagtcatcaccaccagcacccgaacctgggccctgcccacctacaacaaccacctctacaagcaaatatccaatgggacatcgggaggaagcaccaacgacaacacctacttcggctacagcaccccctgggggtattttgacttcaacagattccactgccacttctcaccacgtgactggcagcgactcatcaacaacaactggggattccggccaaaaagactcagcttcaagcccttcaacatccaggtcaaggaggtcacgcagaatgaaggcaccaagaccatcgccaataaccttaccagcacgattcaggtatttacggactcggaataccagctgccgtacgtcctcggctccgcgcaccagggctgcctgcctccgttcccggcggacgtcttcatgattccccagtacggctaccttacactgaacaatggaagtcaagccgtaggccgttcctccttctactgcctggaatattttccatctcaaatgctgcgaactggaaacaattttgaattcagctacaccttcgaggacgtgcctttccacagcagctacgcacacagccagagcttggaccgactgatgaatcctctcatcgaccagtacctgcactacttatccagaactcagtccacaggaggaactcaaggtacccagcaattgttattttctcaagctgggcctgcaaacatgtcggctcaggctaagaactggctacctggaccttgctaccggcagcagcgagtctctacgacactgtcgcaaaacaacaacagcaactttgcttggactggtgccaccaaatatcacctgaacggaagagactctttggtaaatcccggtgtcgccatggcaacccacaaggacgacgaggaacgcttcttcccgtcgagtggagtcctgatgtttggaaaacagggtgctggaagagacaatgtggactacagcagcgttatgctaaccagcgaagaagaaattaaaaccactaaccctgtagccacagaacaatacggtgtggtggctgacaacttgcagcaaaccaatacagggcctattgtgggaaatgtcaacagccaaggagccttacctggcatggtctggcagaaccgagacgtgtacctgcagggtcccatctgggccaagattcctcacacggacggcaacttccacccttcaccgctaatgggaggatttggactgaagcacccacctcctcagatcctgatcaagaacacgccggtacctgcggatcctccaacaacgttcagccaggcgaaattggcttccttcattacgcagtacagcaccggacaggtcagcgtggaaatcgagtgggagctgcagaaggagaacagcaaacgctggaacccagagattcagtacacttcaaactactacaaatctacaaatgtggactttgctgtcaatacagagggaacttattctgagcctcgccccattggtactcgctacctcacccgtaatctgtaa

SEQ ID NO: 5022 - protein, 738 aa, Adeno-associated virus
MAADGYLPDWLEDNLSEGIREWWDLKPGAPKPKANQQKQDDGRGLVLPGYKYLGPFNGLDKGEPVNAADAAALEHDKAYDQQLKAGDNPYLRYNHADAEFQERLQEDTSFGGNLGRAVFQAKKRVLEPLGLVEEAAKTAPGKKRPVEPSPQRSPDSSTGIGKKGQRPAKKRLNFGQTGDSESVPDPQPIGEPPAGPSGLGSGTMAAGGGAPMADNNEGADGVGSSSGNWHCDSTWLGDRVITTSTRTWALPTYNNHLYKQISNGTSGGSTNDNTYFGYSTPWGYFDFNRFHCHFSPRDWQRLINNNWGFRPKRLSFKPFNIQVKEVTQNEGTKTIANNLTSTIQVFTDSEYQLPYVLGSAHQGCLPPFPADVFMIPQYGYLTLNNGSQAVGRSSFYCLEYFPSQMLRTGNNFEFSYTFEDVPFHSSYAHSQSLDRLMNPLIDQYLHYLSRTQSTGGTQGTQQLLFSQAGPANMSAQAKNWLPGPCYRQQRVSTTLSQNNNSNFAWTGATKYHLNGRDSLVNPGVAMATHKDDEERFFPSSGVLMFGKQGAGRDNVDYSSVMLTSEEEIKTTNPVATEQYGVVADNLQQTNTGPIVGNVNSQGALPGMVWQNRDVYLQGPIWAKIPHTDGNFHPSPLMGGFGLKHPPPQILIKNTPVPADPPTTFSQAKLASFITQYSTGQVSVEIEWELQKENSKRWNPEIQYTSNYYKSTNVDFAVNTEGTYSEPRPIGTRYLTRNL

SEQ ID NO: 5023 - DNA, 2217 bp, Adeno-associated virus
atggctgctgacggttatcttccagattggctcgaggacaacctctctgagggcattcgcgagtggtgggacctgaaacctggagcccccaagcccaaggccaaccagcagaagcaggacgacggccggggtctggtgcttcctggctacaagtacctcggacccttcaacggactcgacaagggggagcccgtcaacgcggcggacgcagcggccctcgagcacgacaaggcctacgaccagcagctcaaagcgggtgacaatccgtacctgcggtataaccacgccgacgccgagtttcaggagcgtctgcaagaagatacgtcttttgggggcaacctcgggcgagcagtcttccaggccaagaagcgggttctcgaacctctcggtctggttgaggaagctgctaagacggctcctggaaagaagagaccggtagaaccgtcacctcagcgttcccccgactcctccacgggcatcggcaagaaaggccagcagcccgctaaaaagagactgaactttggtcagactggcgactcagagtcagtccccgaccctcaaccaatcggagaaccaccagcaggcccctctggtctgggatctggtacaatggctgcaggcggtggcgctccaatggcagacaataacgaaggcgccgacggagtgggtagttcctcaggaaattggcattgcgattccacatggctgggcgacagagtcatcaccaccagcacccgaacctgggccctgcccacctacaacaaccacctctacaagcaaatatccaatgggacatcgggaggaagcaccaacgacaacacctacttcggctacagcaccccctgggggtattttgacttcaacagattccactgccacttctcaccacgtgactggcagcgactcatcaacaacaactggggattccggccaaaaagactcagcttcaagctcttcaacatccaggtcaaggaggtcacgcagaatgaaggcaccaagaccatcgccaataaccttaccagcacgattcaggtatttacggactcggaataccagctgccgtacgtcctcggctccgcgcaccagggctgcctgcctccgttcccggcggacgtcttcatgattccccagtacggctaccttacactgaacaatggaagtcaagccgtaggccgttcctccttctactgcctggaatattttccatctcaaatgctgcgaactggaaacaattttgaattcagctacaccttcgaggacgtgcctttccacagcagctacgcacacagccagagcttggaccgactgatgaatcctctcatcgaccagtacctgtactacttatccagaactcagtccacaggaggaactcaaggtacccagcaattgttattttctcaagctgggcctgcaaacatgtcggctcaggctaagaactggctacctggaccttgctaccggcagcagcgagtctctacgacactgtcgcaaaacaacaacagcaactttgcttggactggtgccaccaaatatcacctgaacggaagagactctttggtaaatcccggtgtcgccatggcaacccacaaggacgacgaggaacgcttcttcccgtcgagtggagtcctgatgtttggaaaacagggtgctggaagagacaatgtggactacagcagcgttatgctaaccagcgaagaagaaattaaaaccactaaccctgtagccacagaacaatacggtgtggtggctgataacttgcagcaaaccaatacggggcctattgtgggaaatgtcaacagccaaggagccttacctggcatggtctggcagaaccgagacgtgtacctgcagggtcccatctgggccaagattcctcacacggacggcaacttccacccttcaccgctaatgggaggatttggactgaagcacccacctcctcagatcctgatcaagaacacgccggtacctgcggatcctccaacaacgttcagccaggcgaaattggcttccttcattacgcagtacagcaccggacaggtcagcgtggaaatcgagtgggagctgcagaaggagaacagcaaacgctggaacccagagattcagtacacttcaaactactacaaatctacaaatgtggactttgctgtcaatacagagggaacttattctgagcctcgccccattggtactcgttacctcacccgtaatctgtaa

SEQ ID NO: 5024 - protein, 738 aa, Adeno-associated virus; identical to SEQ ID NO: 4797

SEQ ID NO: 5025 - protein, 738 aa, Adeno-associated virus
MAADGYLPDWLEDNLSEGIREWWDLKPGAPKPKANQQKQDDGRGLVLPGYKYLGPFNGLDKGEPVNAADAAALEHDKAYDQQLKAGDNPYLRYNHADAEFQERLQEDTSFGGNLGRAVFQAKKRVLEPLGLVEEAAKTAPGKKRPVEPSPQRSPDSSTGIGKKGQQPAKKRLNFGQTGDSESVPDPQPIGEPPAGPSGLGSGTMAAGGGAPMADNNEGADGVGSSSGNWHCDSTWLGDRVITTSTRTWALPTYNNHLYKQISNGTSGGSTNDNTYFGYSTPWGYFDFNRFHCHFSPRDWQRLINNNWGFRPKRLSFKLFNIQVKEVTQDEGTKTIANNLTSTIQVFTDSEYQLPYVLGSAHQGCLPPFPADVFMIPQYGYLTLNNGSQAVGRSSFYCLEYFPSQMLRTGNNFEFSYTFEDVPFHSSYAHSQSLDRLMNPLIDQYLYYLSRTQSTGGTQGTQQLLFSQAGPANMSARAKNWLPGPCYRQQRVSTTLSQNNNSNFAWTGATKYHLNGRDSLVNPGVAMATHKDDEERFFPSSGVLMFGKQGAGRDNVDYSSVMLTSEEEIKTTNPVATEQYGVVADNLQQANTGPIVGNVNSQGALPGMVWQNRDVYLQGPIWAKIPHTDGNFHPSPLMGGFGLKHPPPQILIKNTPVPADPPTTFSQAKLASFITQYSTGQVSVEIEWELQKENSKRWNPEIQYTSNYYKSTNVDFAVNSEGTYSEPRPIGTRYLTRNL

SEQ ID NO: 5026 - DNA, 2217 bp, Adeno-associated virus
atggctgctgacggttatcttccagattggctcgaggacaacctctctgagggcattcgcgagtggtgggacctgaaacctggagcccccaagcccaaggccaaccagcagaagcaggacgacggccggggtctggtgcttcctggctacaagtacctcggacccttcaacggactcgacaagggggagcccgtcaacgcggcggacgcagcggccctcgagcacgacaaggcctacgaccagcagctcaaagcgggtgacaatccgtacctgcggtataaccacgccgacgccgagtttcaggagcgtctgcaagaagatacgtcttttgggggcaacctcgggcgagcagtcttccaggccaagaagcgggttctcgaacctctcggtctggttgaggaagctgctaagacggctcctggaaagaagagaccggtagaaccgtcacctcagcgttcccccgactcctccacgggcatcggcaagaaaggccagcagcccgctaaaaagagactgaactttggtcagactggcgactcagagtcagtccccgaccctcaaccaatcggagaaccaccagcaggcccctctggtctgggatctggtacaatggctgcaggcggtggcgctccaatggcagacaataacgaaggcgccgacggagtgggtagttcctcaggaaattggcattgcgattccacatggctgggcgacagagtcatcaccaccagcacccgaacctgggccctgcccacctacaacaaccacctctacaagcaaatatccaatgggacatcgggaggaagcaccaacgacaacacctacttcggctacagcaccccctgggggtattttgacttcaacagattccactgccacttctcaccacgtgactggcagcgactcatcaacaacaactggggattccggccaaaaagactcagcttcaagctcttcaacatccaggtcaaggaggtcacgcaggatgaaggcaccaagaccatcgccaataaccttaccagcacgattcaggtatttacggactcggaataccagctgccgtacgtcctcggctccgcgcaccagggctgcctgcctccgttcccggcggacgtcttcatgattccccagtacggctaccttacactgaacaatggaagtcaagccgtaggccgttcctccttctactgcctggaatattttccatctcaaatgctgcgaactggaaacaattttgaattcagctacaccttcgaggacgtgcctttccacagcagctacgcacacagccagagcttggaccgactgatgaatcctctcatcgaccagtacctgtactacttatccagaactcagtccacaggaggaactcaaggtacccagcaattgttattttctcaagctgggcctgcaaacatgtcggctcgggctaagaactggctacctggaccttgctaccggcagcagcgagtctctacgacactgtcgcaaaacaacaacagcaactttgcttggactggtgccaccaaatatcacctgaacggaagagactctttggtaaatcccggtgttgctatggcaacgcataaggacgacgaggaacgtttctttccatcgagcggagtcctgatgtttggaaaacagggtgctggaagagacaatgtggactatagcagcgttatgctaaccagcgaggaagaaattaaaaccactaaccctgtagccacagaacaatacggtgtggtggctgacaacttgcagcaagccaatacagggcctattgtgggaaatgtcaacagccaaggagccttacctggcatggtctggcagaaccgagacgtgtacctgcagggtcccatctgggccaaaattcctcacacggacggcaattttcacccgtctcctctgatgggcggctttggactgaagcacccacctccccagatcctgatcaagaatacgccggtacctgcggatcctccaacgacgttcagccaggcaaaattggcttccttcatcacgcagtacagcaccggccaggtcagcgtggagatcgagtgggagctgcagaaggagaacagcaagcgatggaacccagaaattcagtacacttccaactactacaaatctacaaatgtggactttgctgtcaattctgagggtacatattcagagcctcgccccattggtactcgttatctgacacgtaatctgtaa

SEQ ID NO: 5027 - DNA, 2211 bp, Adeno-associated virus
atggctgccgatggttatcttccagattggctcgaggacaacctctctgagggcattcgcgagtggtgggacttgaaacctggagccccgaaacccaaagccaaccagcaaaagcaggacgacggccggggcctggtgcttcctggctacaagtacctcggacccttcaacggactcgacaagggggagcccgtcaacgcggcggacgcagcggccctcgagcacgacaaggcctacgaccagcagctcgaagcgggtgacaatccgtacctgcggtataaccacgccgacgccgagtttcaggagcgtctgcaagaagatacgtcttttgggggcaacctcgggcgagcagtcttccaggccaagaagcgggttctcgaacctctcggtctggttgaggaaggcgctaagacggctcctggaaagaagagaccagtagagcagtcaccccaagaaccagactcctcctcgggcatcggcaagaaaggccaacagcccgccagaaaaagactcaattttggccagactggcgactcagagtcagttccagaccctcaacctctcggagaacctccagcagcgccctctggtgtgggacctaatacaatggctgcaggcggtggcgcaccaatggcagacaataacgaaggcgccgacggagtgggtagttcctcgggaaattggcattgcgattccacatggctgggcgacagagtcatcaccaccagcacccgaacctgggccctgcccacctacaacaaccacctctacaagcaaatctccaacgggacatcgggaggagccaccaacgacaacacctacttcggctacagcaccccctgggggtattttgactttaacagattccactgccacttttcaccacgtgactggcagcgactcatcaacaacaactggggattccggcccaagagactcagcttcaagctcttcaacatccaggtcaaggaggtcacgcagaatgaaggcaccaagaccatcgccaataacctcaccagcaccatccaggtgtttacggactcggagtaccagctgccgtacgttctcggctctgcccaccagggctgcctgcctccgttcccggcggacgtgttcatgattccccagtacggctacctaacactcaacaacggtagtcaggccgtgggacgctcctccttctactgcctggaatactttccttcgcagatgctgagaaccggcaacaacttccagtttacttacaccttcgaggacgtgcctttccacagcagctacgcccacagccagagcttggaccggctgatgaatcctctgattgaccagtacctgtactacttgtctcggactcaaacaacaggaggcacggcaaatacgcagactctgggcttcagccaaggtgggcctaatacaatggccaatcaggcaaagaactggctgccaggaccctgttaccgccaacaacgcgtctcaacgacaaccgggcaaaacaacaatagcaactttgcctggactgctgggaccaaataccatctgaatggaagaaattcattggctaatcctggcatcgctatggcaacacacaaagacgacgaggagcgttttttcccagtaacgggatcctgtttttggcaacaaaatgctgccagagacaatgcggattacagcgatgtcatgctcaccagcgaggaagaaatcaaaaccactaaccctgtggctacagaggaatacggtatcgtggcagataacttgcagcagcaaaacacggctcctcaaattggaactgtcaacagccagggggccttacccggtatggtctggcagaaccgggacgtgtacctgcagggtcccatctgggccaagattcctcacacggacggcaacttccacccgtctccgctgatgggcggctttggcctgaaacatcctccgcctcagatcctgatcaagaacacgcctgtacctgcggatcctccgaccaccttcaaccagtcaaagctgaactctttcatcacgcaatacagcaccggacaggtcagcgtggaaattgaatgggagctacagaaggaaaacagcaagcgctggaaccccgagatccagtacacctccaactactacaaatctacaagtgtggactttgctgttaatacagaaggcgtgtactctgaaccccgccccattggcacccgttacctcacccgtaatctgtaa

SEQ ID NO: 5028 - protein, 736 aa, Adeno-associated virus
MAADGYLPDWLEDNLSEGIREWWDLKPGAPKPKANQQKQDDGRGLVLPGYKYLGPFNGLDKGEPVNAADAAALEHDKAYDQQLEAGDNPYLRYNHADAEFQERLQEDTSFGGNLGRAVFQAKKRVLEPLGLVEEGAKTAPGKKRPVEQSPQEPDSSSGIGKKGQQPARKRLNFGQTGDSESVPDPQPLGEPPAAPSGVGPNTMAAGGGAPMADNNEGADGVGSSSGNWHCDSTWLGDRVITTSTRTWALPTYNNHLYKQISNGTSGGATNDNTYFGYSTPWGYFDFNRFHCHFSPRDWQRLINNNWGFRPKRLSFKLFNIQVKEVTQNEGTKTIANNLTSTIQVFTDSEYQLPYVLGSAHQGCLPPFPADVFMIPQYGYLTLNNGSQAVGRSSFYCLEYFPSQMLRTGNNFQFTYTFEDVPFHSSYAHSQSLDRLMNPLIDQYLYYLSRTQTTGGTANTQTLGFSQGGPNTMANQAKNWLPGPCYRQQRVSTTTGQNNNSNFAWTAGTKYHLNGRNSLANPGIAMATHKDDEERFFPVTGSCFWQQNAARDNADYSDVMLTSEEEIKTTNPVATEEYGIVADNLQQQNTAPQIGTVNSQGALPGMVWQNRDVYLQGPIWAKIPHTDGNFHPSPLMGGFGLKHPPPQILIKNTPVPADPPTTFNQSKLNSFITQYSTGQVSVEIEWELQKENSKRWNPEIQYTSNYYKSTSVDFAVNTEGVYSEPRPIGTRYLTRNL

SEQ ID NO: 5029 - DNA, 2214 bp, Adeno-associated virus
atggctgctgacggttatcttccagattggctcgaggacaacctctctgagggcattcgcgagtggtgggacctgaaacctggagcccccaagcccaaggccaaccagcagaagcaggacgacggccggggtctggtgcttcctggctacaagtacctcggacccttcaacggactcgacaagggggagcccgtcagcgcggcggacgcagcggccctcgagcacgacaaggcctgcgaccagcggctcaaagcgggtgacaatccgtacctgcggtataaccacgccgacgccgagtttcaggagcgtctgcaagaagatacgtcttttgggggcaacctcgggcgagcagtcttccaggccaagaagcgggttctcgaacctctcggtctggttgaggaagctgctaagacggctcctggaaagaagggaccggtagaaccgtcacctcagcgttcccccgactcctccacgggcatcggcaagaaaggccagcagcccgctagaaagagactgaactttgggcagactggcgactcagagtcagtccccgaccctcaaccaatcggagaaccaccagcaggcccctctggtctgggatctggtacaatggctgcaggcggtggcgcaccaatggctgacaataacgagggcgccgacggagtgggtaatgcctcaggaaattggcattgcgattccacatggctgggcgacagagtcatcaccaccagcacccgaacctgggctttgcccacctacaacaatcacctctacaagcaaatctccagtcagtcagcaggtagcaccaacgacaacgtctacttcggctacagcaccccctgggggtattttgacttcaacagattccactgtcacttctcaccacgtgactggcagcggctcatcaacaacaactggggattccggcccaagaagctcaacttcaagctgttcaacatccaggtcaaggaggtcacaacgaatgacggcgtcacgaccatcgccaataaccttaccagcacggttcaggtcttttcggactcggaataccagctgccctacgtcctcggctccgcacaccagggctgcctgcctccgttcccggcggacgtcttcatgattccccagtacggctacctgactctgaacaatggcagccaatcggtgggtcgttcctctttctactgcctggaatatttcccttctcaaatgctgagaacgggcaacaacttcaccttcagctacaccttcgaggacgttcccttccacagcagctacgcacacagccagagcctggaccggctgatgaatcctcttatcgaccagtacctgtattacctggccagaacacagagcaacgcaggaggcacagctggcaatcgggaactgcagttttatcagggcgggcctaccaccatggccgaacaagccaaaaactggctgcctggaccttgcttccggcaacaaagagtctccaagacgctggatcaaaacaacaacagcaactttgcttggactggtgccaccaaataccatctaaatggaagaaattcattggttaatcccggtgtcgccatggcaacccacaaggacgacgaggaacgcttcttcccttcgagcggagtcctgatttttggaaaaactggagcagctaataagactacactggaaaatgtgttaatgacaaatgaagaggaaattcgtcctaccaacccggtagccaccgaggaatacgggactgttagcagcaacctgcaggcggctaacactgcagcccagacacaagttgtcaacaaccagggagccttacctggtatggtctggcagaaccgggacgtgtacctgcagggtcccatctgggccaagattcctcacacggacggcaactttcacccgtctccgctgatgggcggctttggactgaagcatccgcctcctcagatcctgatcaaaaacactcctgttcctgctaatcccccggaggtgtttacgcctgccaagtttgcttctttcatcacacagtacagcaccggccaggtcagcgtggagatcgagtgggagctgcagaaggagaacagcaagcgctggaacccagagattcagtatacctccaattttgacgaacagactggtgtggactttgccgttgacagccagggtgtttattctgagcctcgccccattggtactcgttacctcacccgtaatctgtaa

SEQ ID NO: 5030 - protein, 737 aa, Adeno-associated virus
MAADGYLPDWLEDNLSEGIREWWDLKPGAPKPKANQQKQDDGRGLVLPGYKYLGPFNGLDKGEPVSAADAAALEHDKACDQRLKAGDNPYLRYNHADAEFQERLQEDTSFGGNLGRAVFQAKKRVLEPLGLVEEAAKTAPGKKGPVEPSPQRSPDSSTGIGKKGQQPARKRLNFGQTGDSESVPDPQPIGEPPAGPSGLGSGTMAAGGGAPMADNNEGADGVGNASGNWHCDSTWLGDRVITTSTRTWALPTYNNHLYKQISSQSAGSTNDNVYFGYSTPWGYFDFNRFHCHFSPRDWQRLINNNWGFRPKKLNFKLFNIQVKEVTTNDGVTTIANNLTSTVQVFSDSEYQLPYVLGSAHQGCLPPFPADVFMIPQYGYLTLNNGSQSVGRSSFYCLEYFPSQMLRTGNNFTFSYTFEDVPFHSSYAHSQSLDRLMNPLIDQYLYYLARTQSNAGGTAGNRELQFYQGGPTTMAEQAKNWLPGPCFRQQRVSKTLDQNNNSNFAWTGATKYHLNGRNSLVNPGVAMATHKDDEERFFPSSGVLIFGKTGAANKTTLENVLMTNEEEIRPTNPVATEEYGTVSSNLQAANTAAQTQVVNNQGALPGMVWQNRDVYLQGPIWAKIPHTDGNFHPSPLMGGFGLKHPPPQILIKNTPVPANPPEVFTPAKFASFITQYSTGQVSVEIEWELQKENSKRWNPEIQYTSNFDEQTGVDFAVDSQGVYSEPRPIGTRYLTRNL

SEQ ID NO: 5031 - DNA, 2214 bp, Adeno-associated virus
atggctgccgatggttatcttccagattggctcgaggacaacctctctgagggcattcgcgagtggtgggacctgaaacctggagccccgaaacccaaagccaaccagcaaaagcaggacgacggccggggtctggtgcttcctggctacaagtacctcggacccttcaacggactcgacaagggggagcccgtcaacgcggcggacgcagcggccctcgagcacgacaaggcctacgaccagcagctcaaagcgggtgacaatccgtacctgcggtataaccacgccgacgccgagtttcaggagcgtctgcaagaagatacgtcttttgggggcaacctcgggcgagcagtcttccaggccaagaagcgggttctcgaacctctcggtctggttgaggaagctgctaagacggctcctggaaagaagagaccggtagaaccgtcacctcagcgttcccccgactcctccacgggcatcggcaagaaaggccagcagcccgctagaaagagactgaactttgggcagactggcgactcagagtcagtccccgaccctcaaccaatcggagaaccaccagcaggcccctctggtctgggatctggtacaatggctgcaggcggtggcgctccaatggcagacaataacgaaggcgccgacggagtgggtaatgcctcaggaaattggcattgcgattccacatggctgggcgacagagtcatcaccaccagcacccgaacctgggctttgcccacctacaacaaccacctctacaagcaaatctccagtcagtcagcaggtagcaccaacgacaacgtctacttcggctacagcaccccctgggggtattttgacttcaacagattccactgtcacttctcaccacgtgactggcagcggctcatcaacaacaactggggattccggcccaagaagctcaacttcaagctgttcaacatccaggtcaaggaggtcacaacgaatgacggcgtcacgaccatcgccaataaccttaccagcacggttcaggtcttttcggactcggaataccagctgccctacgtcctcggctccgcacaccagggctgcctgcctccgttcccggcggacgtcttcatgattcctcagtacggctacctgactctcaacaacggtagtcaggccgtgggacgttcctccttctactgcctggagtacttcccctctcagatgctgagaacgggcaacaacttttccttcagctacactttcgaggacgtgcctttccacagcagctacgcgcacagccagagtttggacaggctgatgaatcctctcatcgaccagtacctgtactacctgtcaagaacccagtctacgggaggcacagcgggaacccagcagttgctgttttctcaggccgggcctagcaacatgtcgactcaggccagaaactggctgcctggaccctgctacagacagcagcgcgtctccacgacactgtcgcaaaacaacaacagcaactttgcctggactggtgccaccaagtatcatctgaacggcagagactctctggtgaatccgggcgtcgccatggcaaccaacaaggacgacgaggaccgcttcttcccatccagcggcatcctcatgtttggcaagcagggagctggaaaagacaacgtggactatagcaacgtgatgctaaccagcgaggaagaaatcaagaccaccaaccccgtggccacagaacagtatggcgtggtggctgataacctacagcagcaaaacaccgctcctattgtgggggccgtcaacagccagggagccttacctggcatggtctggcagaaccgggacgtgtacctgcagggtcctatttgggccaagattcctcacacagatggcaactttcacccgtctcctttaatgggcggctttggacttaaacatccgcctcctcagatccttatcaaaaacactcctgttcctgcggatcctccaacagcgttcaaccaggccaagctgaattctttcatcacgcagtacagcaccggacaagtcagcgtggagatcgagtgggagctgcagaaggagaacagcaagcgctggaacccagagattcagtatacttccaactactacaaatctacaaatgtggactttgctgttaatactgagggtgcttactctgagcctcgccccattggcactcgttacctcacccgtaatctgtaa

SEQ ID NO: 5032 - protein, 737 aa, Adeno-associated virus
MAADGYLPDWLEDNLSEGIREWWDLKPGAPKPKANQQKQDDGRGLVLPGYKYLGPFNGLDKGEPVNAADAAALEHDKAYDQQLKAGDNPYLRYNHADAEFQERLQEDTSFGGNLGRAVFQAKKRVLEPLGLVEEAAKTAPGKKRPVEPSPQRSPDSSTGIGKKGQQPARKRLNFGQTGDSESVPDPQPIGEPPAGPSGLGSGTMAAGGGAPMADNNEGADGVGNASGNWHCDSTWLGDRVITTSTRTWALPTYNNHLYKQISSQSAGSTNDNVYFGYSTPWGYFDFNRFHCHFSPRDWQRLINNNWGFRPKKLNFKLFNIQVKEVTTNDGVTTIANNLTSTVQVFSDSEYQLPYVLGSAHQGCLPPFPADVFMIPQYGYLTLNNGSQAVGRSSFYCLEYFPSQMLRTGNNFSFSYTFEDVPFHSSYAHSQSLDRLMNPLIDQYLYYLSRTQSTGGTAGTQQLLFSQAGPSNMSTQARNWLPGPCYRQQRVSTTLSQNNNSNFAWTGATKYHLNGRDSLVNPGVAMATNKDDEDRFFPSSGILMFGKQGAGKDNVDYSNVMLTSEEEIKTTNPVATEQYGVVADNLQQQNTAPIVGAVNSQGALPGMVWQNRDVYLQGPIWAKIPHTDGNFHPSPLMGGFGLKHPPPQILIKNTPVPADPPTAFNQAKLNSFITQYSTGQVSVEIEWELQKENSKRWNPEIQYTSNYYKSTNVDFAVNTEGAYSEPRPIGTRYLTRNL

SEQ ID NO: 5033 - DNA, 2217 bp, Adeno-associated virus
atggctgccgatggttatcttccagattggctcgaggacaacctctctgagggcattcgcgagtggtgggacctgaaacctggagccccgaaacccaaagccaaccagcaaaagcaggacgacggccggggtctggtgcttcctggctacaagtacctcggacccttcaacggactcgacaagggggagcccgtcaacgcggcggacgcagcggccctcgagcacgacaaggcctacgaccagcagctcaaagcgggtgacaatccgtacctgcggtataatcacgccgacgccgagtttcaggagcgtctgcaagaagatacgtcttttgggggcaacctcgggcgagcagtcttccaggccaagaagcgggttctcgaacctctcggtctggttgaggaaggcgctaagacggctcctggaaagaagagaccggtagagccgtcaccacagcgttcccccgactcctccacgggcatcggcaagaaaggccagcagcccgccagaaagagactcaatttcggtcagactggcgactcagagtcagtccccgaccctcaacctatcggagaacctccagcagcgccctctagtgtgggatctggtacaatggctgcaggcggtggcgcaccaatggcagacaataacgaaggtgccgacggagtgggtagttcctcgggaaattggcattgcgattccacatggctgggcgacagagtcatcaccaccagcacccgaacctgggccctgcccacctacaacaaccacctctacaagcaaatctccaacgggacctcgggaggcagcaccaacgacaacacctactttggctacagcaccccctgggggtattttgactttaacagattccactgccacttctcaccacgtgactggcagcgactcatcaacaacaactggggattccggcccaagagactcagcttcaagctcttcaacatccaggtcaaagaggtcacgcagaatgaaggcaccaagaccatcgccaataacctcaccagcaccatccaggtgtttacggactcggaataccagctgccgtacgtcctcggctctgcccaccagggctgcctgcctccgttcccggcggacgtcttcatgattcctcagtacggctacctgactctcaacaacggtagtcaggccgtgggacgttcctccttctactgcctggagtacttcccctctcagatgctgagaacgggcaacaacttttccttcagctacactttcgaggacgtgcctttccacagcagctacgcgcacagccagagtttggacaggctgatgaatcctctcatcgaccagtacctgtactacctgtcaagaacccagtctacgggaggcacagcgggaacccagcagttgctgttttctcaggccgggcctagcaacatgtcggctcaggccagaaactggctgcctggaccctgctacagacagcagcgcgtctccacgacactgtcgcaaaacaacaacagcaactttgcctggactggtgccaccaagtatcatctgaacggcagagactctctggtgaatccgggcgtcgccatggcaaccaacaaggacgacgaggaccgcttcttcccatccagcggcatcctcatgtttggcaagcagggagctggaaaagacaacgtggactatagcaacgtgatgctaaccagcgaggaagaaatcaaggccaccaaccccgtggccacagaacagtatggcgtggtggctgataacctacagcagcaaaacaccgctcctattgtgggggccgtcaacagccagggagccttacctggcatggtctggcagaaccgggacgtgtacctgcagggtcctatttgggccaagattcctcacacagatggcaactttcacccgtctcctttaatgggcggctttggacttaaacatccgcctcctcagatcctcatcaaaaacactcctgttcctgcggatcctccaacagcgttcaaccaggccaagctgaattctttcatcacgcagtacagcaccggacaagtcagcgtggagatcgagtgggagctgcagaaggagaacagcaagcgctggaacccagagattcagtatacttccaactactacaaatctacaaatgtggactttgctgttaatactgagggtgtttactctgagcctcgccccattggcactcgttacctcacccgtaatctgtaa

SEQ ID NO: 5034 - protein, 738 aa, Adeno-associated virus
MAADGYLPDWLEDNLSEGIREWWDLKPGAPKPKANQQKQDDGRGLVLPGYKYLGPFNGLDKGEPVNAADAAALEHDKAYDQQLKAGDNPYLRYNHADAEFQERLQEDTSFGGNLGRAVFQAKKRVLEPLGLVEEGAKTAPGKKRPVEPSPQRSPDSSTGIGKKGQQPARKRLNFGQTGDSESVPDPQPIGEPPAAPSSVGSGTMAAGGGAPMADNNEGADGVGSSSGNWHCDSTWLGDRVITTSTRTWALPTYNNHLYKQISNGTSGGSTNDNTYFGYSTPWGYFDFNRFHCHFSPRDWQRLINNNWGFRPKRLSFKLFNIQVKEVTQNEGTKTIANNLTSTIQVFTDSEYQLPYVLGSAHQGCLPPFPADVFMIPQYGYLTLNNGSQAVGRSSFYCLEYFPSQMLRTGNNFSFSYTFEDVPFHSSYAHSQSLDRLMNPLIDQYLYYLSRTQSTGGTAGTQQLLFSQAGPSNMSAQARNWLPGPCYRQQRVSTTLSQNNNSNFAWTGATKYHLNGRDSLVNPGVAMATNKDDEDRFFPSSGILMFGKQGAGKDNVDYSNVMLTSEEEIKATNPVATEQYGVVADNLQQQNTAPIVGAVNSQGALPGMVWQNRDVYLQGPIWAKIPHTDGNFHPSPLMGGFGLKHPPPQILIKNTPVPADPPTAFNQAKLNSFITQYSTGQVSVEIEWELQKENSKRWNPEIQYTSNYYKSTNVDFAVNTEGVYSEPRPIGTRYLTRNL

SEQ ID NO: 5035 - DNA, 2217 bp, Adeno-associated virus
atggctgccgatggttatcttccagattggctcgaggacaacctctctgagggcattcgcgagtggtgggacctgaaacctggagccccgaaacccaaagccaaccagcaaaagcaggacgacggccggggtctggtgcttcctggctacaagcacctcggacccttcaacggactcgacaagggggagcccgtcaacgcggcggacgcagcggccctcgagcacgacaaggcctacgaccagcagctcaaagcgggtgacaatccgtacctgcggtataatcacgctgacgccgagtttcaggagcgtctgcaagaagatacgtcttttgggggcaacctcgggcgagcagtcttccaggccaagaagcgggttctcgaacctctcggtctggttgaggaaggcgctaagacggctcctggaaagaagagaccggtagagccgtcaccacagcgttcccccgactcctccacgggcatcggcaagaaaggccagcagcccgccagaaagagactcaatttcggtcagactggcgactcagagtcagtccccgaccctcaacctatcggagaacctccagcagcgccctctagtgtgggatctggtacaatggctgcaggcggtggcgcaccaatggcagacaataacgaaggtgccgacggagtgggtagttcctcgggaaattggcattgcgattccacatggctgggcgacagagtcatcaccaccagcacccgaacctgggccctgcccacctacaacaaccacctctacaagcaaatctccaacgggacctcgggaggcagcaccaacgacaacacctactttggctacagcaccccctgggggtattttgactttaacagattccactgccacttctcaccacgtgactggcagcgactcatcaacaacaactggggattccggcccaagagactcagcttcaagctcttcaacatccaggtcaaagaggtcacgcagaatgaaggcaccaagaccatcgccaataaccttaccagcacggttcaggtcttttcggactcggaataccagctgccctacgtcctcggctccgcacaccagggctgcctgcctccgttcccggcggacgtcttcatgattccccagtacggctacctgactctgaacaatggcagccaatcggtgggtcgttcctctttctactgcctggaatatttcccttctcaaatgctgagaacgggcaacaacttcaccttcagctacaccttcgaggacgttcccttccacagcagctacgcacacagccagagcctggaccggctgatgaatcctcttatcgaccagtacctgtattacctggccagaacacagagcaacgcaggaggcacagctggcaatcgggaactgcagttttatcagggcgggcctaccaccatggccgaacaagccaaaaactggctgcctggaccttgcttccggcaacaaagagtctccaagacgctggatcaaaacaacaacagcaactttgcttggactggtgccaccaaataccatctaaatggaagaaattcattggttaatcccggtgtcgccatggcaacccacaaggacgacgaggaacgcttcttcccttcgagcggagtcctgatttttggaaaaactggagcagctaataagactacactggaaaatgtgttaatgacaaatgaagaggaaattcgtcctaccaacccggtagccaccgaggaatacgggactgttagcagcaacctgcaggcggctaacactgcagcccagacacaagttgtcaacaaccagggagccttacctggtatggtctggcagaaccgggacgtgtacctgcagggtcccatctgggccaagattcctcacacggacggcaactttcacccgtctccgctgatgggcggctttggactgaagcatccgcctcctcagatcctgatcaaaaacactcctgttcctgctaatcccccggaggtgtttacgcctgccaagtttgcttctttcatcacacagtacagcaccggccaggtcagcgtggagatcgagtgggagctgcagaaggagaacagcaagcgctggaacccagagattcagtatacctccaattttgacaaacagactggtgtggactttgccgttgacagccagggtgtttattctgagcctcgccccattggtactcgttacctcacccgtaatctgtaa

SEQ ID NO: 5036 - protein, 738 aa, Adeno-associated virus
MAADGYLPDWLEDNLSEGIREWWDLKPGAPKPKANQQKQDDGRGLVLPGYKHLGPFNGLDKGEPVNAADAAALEHDKAYDQQLKAGDNPYLRYNHADAEFQERLQEDTSFGGNLGRAVFQAKKRVLEPLGLVEEGAKTAPGKKRPVEPSPQRSPDSSTGIGKKGQQPARKRLNFGQTGDSESVPDPQPIGEPPAAPSSVGSGTMAAGGGAPMADNNEGADGVGSSSGNWHCDSTWLGDRVITTSTRTWALPTYNNHLYKQISNGTSGGSTNDNTYFGYSTPWGYFDFNRFHCHFSPRDWQRLINNNWGFRPKRLSFKLFNIQVKEVTQNEGTKTIANNLTSTVQVFSDSEYQLPYVLGSAHQGCLPPFPADVFMIPQYGYLTLNNGSQSVGRSSFYCLEYFPSQMLRTGNNFTFSYTFEDVPFHSSYAHSQSLDRLMNPLIDQYLYYLARTQSNAGGTAGNRELQFYQGGPTTMAEQAKNWLPGPCFRQQRVSKTLDQNNNSNFAWTGATKYHLNGRNSLVNPGVAMATHKDDEERFFPSSGVLIFGKTGAANKTTLENVLMTNEEEIRPTNPVATEEYGTVSSNLQAANTAAQTQVVNNQGALPGMVWQNRDVYLQGPIWAKIPHTDGNFHPSPLMGGFGLKHPPPQILIKNTPVPANPPEVFTPAKFASFITQYSTGQVSVEIEWELQKENSKRWNPEIQYTSNFDKQTGVDFAVDSQGVYSEPRPIGTRYLTRNL

SEQ ID NO: 5037 - protein, 737 aa, Adeno-associated virus
MAADGYLPDWLEDNLSEGIREWWDLKPGAPKPKANQQKQDDGRGLVLPGYKYLGPFNGLDKGEPVNAADAAALEHDKAYDQQLKAGDNPYLRYNHADAEFQERLQEDTSFGGNLGRAVFQAKKRVLEPLGLVEEAAKTAPGKKRPVEPSPQRSPDSSTGIGKKGQQPARKRLNFGQTGDSESVPDPQPIGEPPAGPSGLGSGTMAAGGGAPMADNNKGADGVGNASGNWHCDSTWLGDRVITTSTRTWALPTYNNHLYKQISSQSAGSTNDNVYFGYSTPWGYFDFNRFHCHFSPRDWQRLINSNWGFRPKKLNFKLFNIQVKEVTTNDGVTTIANNLTSTVQVFSDSEYQLPYVLGSAHQGCLPPFPADVFMIPQYGYLTLNNGSQSVGRSSFYCLEYFPSQMLRTGNNFTFSYTFEDVPFHSSYAHSQSLDRLMNPLIDQYLYYLARTQSNAGGTAGNRELQFYQGGPTTMAEQAKNWLPGPCFRQQRVSKTLDQNNNSNFAWTGATKYHLNGRNSLVNPGVAMATHKDDEERFFPSSGVLIFGKTGAANKTTLENVLMTNEEEIRPTNPVATEEYGTVSSNLQAANTAAQTQVVNNQGALPGMVWQNRDVYLQGPIWAKIPHTDGNFHPSPLMGGFGLKHPPPQILIKNTPVPANPPEVFTPAKFASFITQYSTGQVSVEIEWELQKENSKRWNPEIQYTSNFDKQTGVDFAVDSQGVYSEPRPIGTRYLTRNL

SEQ ID NO: 5038 - DNA, 2214 bp, Adeno-associated virus
atggctgctgacggttatcttccagattggctcgaggacaacctctctgagggcattcgcgagtggtgggacctgaaacctggagcccccaagcccaaggccaaccagcagaagcaggacgacggccggggtctggtgcttcctggctacaagtacctcggacccttcaacggactcgacaagggggagcccgtcaacgcggcggacgcagcggccctcgagcacgacaaggcctacgaccagcagctcaaagcgggtgacaatccgtacctgcggtataaccacgccgacgccgagtttcaggagcgtctgcaagaagatacgtcttttgggggcaacctcgggcgagcagtcttccaggccaagaagcgggttctcgaacctctcggtctggttgaggaagctgctaagacggctcctggaaagaagagaccggtagaaccgtcacctcagcgttcccccgactcctccacgggcatcggcaagaaaggccagcagcccgctagaaagagactgaactttgggcagactggcgactcagagtcagtccccgaccctcaaccaatcggagaaccaccagcaggcccctctggtctgggatctggtacaatggctgcaggcggtggcgcaccaatggctgacaataacaagggcgccgacggagtgggtaatgcctcaggaaattggcattgcgattccacatggctgggcgacagagtcatcaccaccagcacccgaacctgggctttgcccacctacaacaaccacctctacaagcaaatctccagtcagtcagcaggtagcaccaacgacaacgtctacttcggctacagcaccccctgggggtattttgacttcaacagattccactgtcacttctcaccacgtgactggcagcggctcatcaacagcaactggggattccggcccaagaagctcaacttcaagctgttcaacatccaggtcaaggaggtcacaacgaatgacggcgtcacgaccatcgccaataaccttaccagcacggttcaggtcttttcggactcggaataccagctgccctacgtcctcggctccgcacaccagggctgcctgcctccgttcccggcggacgtcttcatgattccccagtacggctacctgactctgaacaatggcagccaatcggtgggtcgttcctctttctactgcctggaatatttcccttctcaaatgctgagaacgggcaacaacttcaccttcagctacaccttcgaggacgttcccttccacagcagctacgcacacagccagagcctggaccggctgatgaatcctcttatcgaccagtacctgtattacctggccagaacacagagcaacgcaggaggcacagctggcaatcgggaactgcagttttatcagggcgggcctaccaccatggccgaacaagccaaaaactggctgcctggaccttgcttccggcaacaaagagtctccaagacgctggatcaaaacaacaacagcaactttgcttggactggtgccaccaaataccatctaaatggaagaaattcattggttaatcccggtgtcgccatggcaacccacaaggacgacgaggaacgcttcttcccttcgagcggagtcctgatttttggaaaaactggagcagctaataagactacactggaaaatgtgttaatgacaaatgaagaggaaattcgtcctaccaacccggtagccaccgaggaatacgggactgttagcagcaacctgcaggcggctaacactgcagcccagacacaagttgtcaacaaccagggagccttacctggtatggtctggcagaaccgggacgtgtacctgcagggtcccatctgggccaagattcctcacacggacggcaactttcacccgtctccgctgatgggcggctttggactgaagcatccgcctcctcagatcctgatcaaaaacactcctgttcctgctaatcccccggaggtgtttacgcctgccaagtttgcttctttcatcacacagtacagcaccggccaggtcagcgtggagatcgagtgggagctgcagaaggagaacagcaagcgctggaacccagagattcagtatacctccaattttgacaaacagactggtgtggactttgccgttgacagccagggtgtttattctgagcctcgccccattggtactcgttacctcacccgtaatctgtaa

SEQ ID NO: 5039 - protein, 737 aa, Adeno-associated virus
MAADGYLPDWLEDNLSEGIREWWDLKPGAPKPKANQQKQDDGRGLVLPGYKYLGPFNGLDKGEPVNAADAAALEHDKAYDQQLKAGDNPYLRYNHADAEFQERLQEDTSFGGNLGRAVFQAKKRVLEPLGLVEEAAKTAPGKKRPVEPSPQRSPDSSTGIGKKGQQPARKRLNFGQTGDSESVPDPQPIGEPPAGPSGLGSGTMAAGGGAPMADNNEGADGVGNASGNWHCDSTWLGDRVITTSTRTWALPTYNNHLYKQISSQSAGSTNDNVYFGYSTPWGYFDFNRFHCHFSPRDWQRLINSNWGFRPKKLNFKLFNIQVKEVTTNDGVTTIANNLTSTVQVFSDSEYQLPYVLGSAHQGCLPPFPADVFMIPQYGYLTLNNGSQSVGRSSFYCLEYFPSQMLRTGNNFTFSYTFEDVPFHSSYAHSQSLDRLMNPLIDQYLYYLARTQSNAGGTAGNRELQFYQGGPTTMAEQAKNWLPGPCFRQQRVSKTLDQNNNSNFAWTGATKYHLNGRNSLVNPGVAMATHKDDEERFFPSSGVLIFGKTGAANKTTLENVLMTNEEEIRPTNPVATEEYGTVSSNLQAANTAAQTQVVNNQGALPGMVWQNRDVYLQGPIWAKIPHTDGNFHPSPLMGGFGLKHPPPQILIKNTPVPANPPEVFTPAKFASFITQYSTGQVSVEIEWELQKENSKRWNPEIQYTSNFDKQTGVDFAVDSQGVYSEPRPIGTRYLTRNL

SEQ ID NO: 5040 - protein, 737 aa, Adeno-associated virus
MAADGYLPDWLEDNLSEGIREWWDLKPGAPKPKANQQKQDDGRGLVLPGYKYLGPFNGLDKGEPVNAADAAALEHDKAYDQQLKAGDNPYLRYNHADAEFQERLQEDTSFGGNLGRAVFQAKKRVLEPLGLVEEAAKTAPGKKRPVEPSPQRSPDSSTGIGKKGQQPARKRLNFGQTGDSESVPDPQPIGEPPAGPSGLGSGTMAAGGGAPMADNNEGADGVGNASGNWHCDSTWLGDRVITTSTRTWALPTYNNHLYKQISSQSAGSTNDNVYFGYSTPWGYFDFNRFHCHFSPRDWQRLINNNWGFRPKKLNFKLFNIQVKEVTTNDGVTTIANNLTSTVQVFSDSEYQLPYVLGSAHQGCLPPFPADVFMIPQYGYLTLNNGSQSVGRSSFYCLEYFPSQMLRTGNNFTFSYTFEDVPFHSSYAHSQSLDRLMNPLIDQYLYYLARTQSNAGGTAGNRELQFYQGGPTTMAEQAKNWLPGPCFRQQRVSKTLDQNNNSNFAWTGATKYHLNGRNSLVNPGVAMATHKDDEERFFPSSGVLIFGKTGAANKTTLENVLMTNEEEIRPTNPVATEEYGTVSSNLQAANTAAQTQVVNNQGALPGMVWQNRDVYLQGPIWAKIPHTDGNFHPSPLMGGFGLKHPPPQILIKNTPVPANPPEVFTPAKFASFITQYSTGQVSVEIEWELQKENSKRWNPEIQYTSNFDKQTGVDFAVDSQGVYSEPRPIGTRYLTRNL

SEQ ID NO: 5041 - protein, 737 aa, Adeno-associated virus
MAADGYLPDWLEDNLSEGIREWWDLKPGAPKPKANQQKQDDGRGLVLPGYKYLGPFNGLDKGEPVNAADAAALEHDKAYDQQLKAGDNPYLRYNHADAEFQERLQEDTSFGGNLGRAVFQAKKRVLEPLGLVEEAAKTAPGKKRPVEPSPQRSPDSSTGIGKKGQQPARKRLNFGQTGDSESVPDPQPIGEPPAGPSGLGSGTMAAGGGAPMADNNKGADGVGNASGNWHCDSTWLGDRVITTSTRTWALPTYNNHLYKQISSQSAGSTNDNVYFGYSTPWGYFDFNRFHCHFSPRDWQRLINNNWGFRPKKLNFKLFNIQVKEVTTNDGVTTIANNLTSTVQVFSDSEYQLPYVLGSAHQGCLPPFPADVFMIPQYGYLTLNNGSQSVGRSSFYCLEYFPSQMLRTGNNFTFSYTFEDVPFHSSYAHSQSLDRLMNPLIDQYLYYLARTQSNAGGTAGNRELQFYQGGPTTMAEQAKNWLPGPCFRQQRVSKTLDQNNNSNFAWTGATKYHLNGRNSLVNPGVAMATHKDDEERFFPSSGVLIFGKTGAANKTTLENVLMTNEEEIRPTNPVATEEYGTVSSNLQAANTAAQTQVVNNQGALPGMVWQNRDVYLQGPIWAKIPHTDGNFHPSPLMGGFGLKHPPPQILIKNTPVPANPPEVFTPAKFASFITQYSTGQVSVEIEWELQKENSKRWNPEIQYTSNFDKQTGVDFAVDSQGVYSEPRPIGTRYLTRNL

SEQ ID NO: 5042 - DNA, 2217 bp, Adeno-associated virus
atggctgccgatggttatcttccagattggctcgaggacaacctctctgagggcattcgcgagtggtgggacctgaaacctggagccccgaaacccaaagccaaccagcaaaagcaggacgacggccggggtctggtgcttcctggctacaagtacctcggacccttcaacggactcgacaagggggagcccgtcaacgcggcggacgcagcggccctcgagcacgacaaggcctacgaccagcagctcaaagcgggtgacaatccgcacctgcggtataatcacgccgacgccgagtttcaggagcgtctgcaagaagatacgtcttttgggggcaacctcgggcgagcagtcttccaggccaagaagcgggttctcgaacctctcggtctggttgaggaaggcgctaagacggctcctggaaagaagagaccggtagagccgtcaccacagcgttcccccgactcctccacgggcatcggcaagaaaggccagcagcccgccagaaagagactcaatttcggtcagactggcgactcagagtcagtccccgaccctcaacttatcggagaacctccagcagcgccctctagtgtgggatctggtacaatggctgcaggcggtggcgcaccaatggcagacaataacgaaggtgccgacggagtgggtagttcctcgggaaattggcattgcgattccacatggctgggcgacagagtcatcaccaccagcacccgaacctgggccctgcccacctacaacaaccacctctacaagcaaatctccaacgggacctcgggaggcagcaccaacgacaacacctactttggctacagcaccccctgggggtattttgactttaacagattccactgccacttctcaccacgtgactggcagcgactcatcaacaacaactggggattccggcccaagagactcagcttcaagctcttcaacatccaggtcaaagaggtcacgcagaatgaaggcaccaagaccatcgccaataacctcaccagcaccatccaggtgtttacggactcggagtaccagctgccgtacgtcctcggctctgcccaccagggctgcctgcctccgttcccggcggacgtcttcatgattcctcagtacggcaacctgactctcaacaacggtagtcaggccgtgggacgttcctccttctactgcctggagtacttcccctctcagatgctgagaacgggcaacaacttttccttcagctacactttcgaggacgtgcctttccacagcagctacgcgcacagccagagtttggacaggctgatgaatcctctcatcgaccagtacctgtactacctgtcaagaacccagtctacgggaggcacagcgggaacccagcagttgctgttttctcaggccgggcctagcaacatgtcggctcaggccagaaactggctgcctggaccctgctacagacagcagcgcgtctccacgacactgtcgcaaaacaacaacagcaactttgcctggactggtgccaccaagtatcatctgaacggcagagactctctggtgaatccgggcgtcgccatggcaaccaacaaggacgacgaggaccgcttcttcccatccagcggcatcctcatgtttggcaagcagggagctggaaaagacaacatgggctatagcaacgtgatgctaaccagcgaggaagaaatcaagaccaccaaccccgtggccacagaacagtatggcgtggtggctgataacctacagcagcaaaacaccgctcctattgtgggggccgtcaacagccagggagccttacctggcatggtctggcagaaccgggacgtgtacctgcagggtcctatttgggccaagattcctcacacagatggcaactttcacccgtctcctttaatgggcggctttggacttaaacatccgcctcctcagatcctcatcaaaaacactcctgttcctgcggatcctccaacagcgttcaaccaggccaagctgaattctttcatcacgcagtacggcaccggacaagtcagcgtggagatcgagtgggagctgcagaaggagaacagcaagcgctggaacccagagattcagtatacttccaactactacaaatctacaaatgtggactttgctgttaatactgagggtgtttactctgagcctcgccccattggcactcgttacctcacccgtaatctgtaa

SEQ ID NO: 5043 - protein, 738 aa, Adeno-associated virus
MAADGYLPDWLEDNLSEGIREWWDLKPGAPKPKANQQKQDDGRGLVLPGYKYLGPFNGLDKGEPVNAADAAALEHDKAYDQQLKAGDNPHLRYNHADAEFQERLQEDTSFGGNLGRAVFQAKKRVLEPLGLVEEGAKTAPGKKRPVEPSPQRSPDSSTGIGKKGQQPARKRLNFGQTGDSESVPDPQLIGEPPAAPSSVGSGTMAAGGGAPMADNNEGADGVGSSSGNWHCDSTWLGDRVITTSTRTWALPTYNNHLYKQISNGTSGGSTNDNTYFGYSTPWGYFDFNRFHCHFSPRDWQRLINNNWGFRPKRLSFKLFNIQVKEVTQNEGTKTIANNLTSTIQVFTDSEYQLPYVLGSAHQGCLPPFPADVFMIPQYGNLTLNNGSQAVGRSSFYCLEYFPSQMLRTGNNFSFSYTFEDVPFHSSYAHSQSLDRLMNPLIDQYLYYLSRTQSTGGTAGTQQLLFSQAGPSNMSAQARNWLPGPCYRQQRVSTTLSQNNNSNFAWTGATKYHLNGRDSLVNPGVAMATNKDDEDRFFPSSGILMFGKQGAGKDNMGYSNVMLTSEEEIKTTNPVATEQYGVVADNLQQQNTAPIVGAVNSQGALPGMVWQNRDVYLQGPIWAKIPHTDGNFHPSPLMGGFGLKHPPPQILIKNTPVPADPPTAFNQAKLNSFITQYGTGQVSVEIEWELQKENSKRWNPEIQYTSNYYKSTNVDFAVNTEGVYSEPRPIGTRYLTRNL

SEQ ID NO: 5044 - DNA, 2217 bp, Adeno-associated virus
atggctgccgatggttatcttccagattggctcgaggacaacctctctgagggcattcgcgagtggtgggacctgaaacctggagccccgaaacccaaagccaaccagcaaaagcaggacgacggccggggtctggtgcttcctggctacaagtacctcggacccttcaacggactcgacaagggggagcccgtcaacgcggcggacgcagcggccctcgagcacgacaaggcctacgaccagcagctcaaagcgggtgacaatccgtacctgcggtataatcacgccgacgccgagtttcaggagcgtctgcaagaagatacgtcttttgggggcaacctcgggcgagcagtcttccaggccaagaagcgggttctcgaacctctcggtctggttgaggaaggcgctaagacggctcctggaaagaagagaccggtagagccgtcaccacagcgttcccccgactcctccacgggcatcggcaagaaaggccagcagcccgccggaaagagactcaatttcggtcagactggcgactcagagtcagtccccgaccctcaacctatcggagaacctccagcagcgccctctagtgtgggatctggtacaatggctgcaggcggtggcgcaccaatggcagacaataacgaaggtgccgacggagtgggtagttcctcgggaaattggcattgcgattccacatggctgggcgacagagtcatcaccaccagcacccgaacctgggccctgcccacctacaacaaccacctctacaagcaaatctccaacgggacctcgggaggcagcaccaacgacaacacctactttggctacagcaccccctgggggtattttgactttaacagattccactgccacttctcaccacgtgactggcagcgactcatcaacaacaactggggattccggcccaagagactcagcttcaagctcttcaacatccaggtcaaagaggtcacgcagaatgaaggcaccaagaccatcgccaataacctcaccagcaccatccaggtgtttacggactcggaataccagctgccgtacgtcctcggctctgcccaccagggctgcctgcctccgttcccggcggacgtcttcatgattcctcagtacggctacctgactctcaacaacggtagtcaggccgtgggacgttcctccttctactgcctggagtacttcccctctcagatgctgagaacgggcaacaacttttccttcagctacactttcgaggacgtgcctttccacagcagctacgcgcacagccagagtttggacaggctgatgaatcctctcgtcgaccagtacctgtactacctgtcaagaacccagtctacgggaggcacagcgggaacccagcagttgctgttttctcaggccgggcctagcaacatgtcggctcaggccagaaactggctgcctggaccctgctacagacagcagcgcgtctccacgacactgtcgcaaaacaacaacagcaactttgcctggactggtgccaccaagtatcatctgaacggcagagactctctggtgaatccgggcgtcgccatggcaaccaacaaggacgacgaggaccgcttcttcccatccagcggcatcctcatgtttggcaagcagggagctggaaaagacaacgtggactatagcaacgtgatgctaaccagcgaggaagaaatcaagaccaccaaccccgtggccacagaacagtatggcgtggtggctgataacctacagcagcaaaacaccgctcctattgtgggggccgtcaacagccagggagccttacctggcatggtctggcagaaccgggacgtgtacctgcagggtcctatttgggccaagattcctcacacagatggcaactttcacccgtctcctttaatgggcggctttggacttaaacatccgcctcctcagatcctcatcaaaaacactcctgttcctgcggatcctccaacagcgttcaaccaggccaagctgaattctttcatcacgcagtacagcaccggacaagtcagcgtggagatcgagtgggagctgcagaaggagaacagcaagcgctggagcccagagattcagtatacttccaactactacaaatctacaaatgtggactttgctgttaatactgagggtgtttactctgagcctcgccccattggcactcgttacctcacccgtaatctgtaa

SEQ ID NO: 5045 - protein, 738 aa, Adeno-associated virus
MAADGYLPDWLEDNLSEGIREWWDLKPGAPKPKANQQKQDDGRGLVLPGYKYLGPFNGLDKGEPVNAADAAALEHDKAYDQQLKAGDNPYLRYNHADAEFQERLQEDTSFGGNLGRAVFQAKKRVLEPLGLVEEGAKTAPGKKRPVEPSPQRSPDSSTGIGKKGQQPAGKRLNFGQTGDSESVPDPQPIGEPPAAPSSVGSGTMAAGGGAPMADNNEGADGVGSSSGNWHCDSTWLGDRVITTSTRTWALPTYNNHLYKQISNGTSGGSTNDNTYFGYSTPWGYFDFNRFHCHFSPRDWQRLINNNWGFRPKRLSFKLFNIQVKEVTQNEGTKTIANNLTSTIQVFTDSEYQLPYVLGSAHQGCLPPFPADVFMIPQYGYLTLNNGSQAVGRSSFYCLEYFPSQMLRTGNNFSFSYTFEDVPFHSSYAHSQSLDRLMNPLVDQYLYYLSRTQSTGGTAGTQQLLFSQAGPSNMSAQARNWLPGPCYRQQRVSTTLSQNNNSNFAWTGATKYHLNGRDSLVNPGVAMATNKDDEDRFFPSSGILMFGKQGAGKDNVDYSNVMLTSEEEIKTTNPVATEQYGVVADNLQQQNTAPIVGAVNSQGALPGMVWQNRDVYLQGPIWAKIPHTDGNFHPSPLMGGFGLKHPPPQILIKNTPVPADPPTAFNQAKLNSFITQYSTGQVSVEIEWELQKENSKRWSPEIQYTSNYYKSTNVDFAVNTEGVYSEPRPIGTRYLTRNL

SEQ ID NO: 5046 - DNA, 2217 bp, Adeno-associated virus
atggttgccgatggttatcttccagattggctcgaggacaacctctctgagggcattcgcgagtggtgggacctgaaacctggagccccgaaacccaaagccaaccagcaaaagcagggcgacggccggggtctggtgcttcctggctacaagtacctcggacccttcaacggactcgacaagggggagcccgtcaacgcggcggacgcagcggccctcgagcacgacaaggcctacgaccagcagcttaaagcgggtgacaatccgtacctgcggtataatcacgccgacgccgagcttcaggagcgtctgcaagaagatacgtcttttgggggcaacctcgggcgagcagtcttccaggccaagaagcgggttctcgaacctctcggtctggttgaggaaggcgctaagacggctcctggaaagaagagaccggtagagccgtcaccacagcgttcccccgactcctccacgggcatcggcaagaaaggccagcagcccgccagaaagagactcaatttcggtcagactggcgactcagagtcagtccccgaccctcaacctatcggagaacctccagcagcgccctctagtgtgggatctggtacaatggctgcaggcggtggcgcgccaatggcagacaataacgaaggtgccgacggagtgggtagttcctcgggaaattggcattgcgattccacatggctgggcgacagagtcatcaccaccagcacccgaacctgggccctgcccacctacaacaaccacctctacaagcaaatctccaacgggacctcgggaggcagcaccaacgacaacacctactttggctacagcaccccctgggggtattttgactttaacagattccactgccacttctcaccacgtgactggcagcgactcatcaacaacaactggggattccggcccaagagactcagcttcaagctcttcaacatccaggtcaaagaggtcacgcagaatgaaggcaccaagaccatcgccaataacctcaccagcaccatccaggtgtttacggactcggaataccagctgccgtacgtcctcggctctgcccaccagggctgccagcctccgttcccggcggacgtcttcatgattcctcagtacggctacctgactctcaacaacggtagtcaggccgtgggacgttcctccttctactgcctggagtacttcccctctcagatgctgagaacgggcaacaacttttccttcagctacactttcgaggacgtgcctttccacagcagctacgcgcacagccagagtttggacaggctgatgaatcctctcatcgaccagtacctgtactacctgtcaagaacccagtctacgggaggcacagcgggaacccagcagttgctgttttctcaggccgggcctagcaacatgtcggctcaggccagaaactggctgcctggaccctgctacagacagcagcgcgtctccacgacactgtcgcaaaacaacaacagcaactttgcctggactggtgccaccaagtatcatctgaacggcagagactctctggtgaatccgggcgtcgccatggcaaccaacaaggacgacgaggaccgcttcttcccatccagcggcatcctcatgtttggcaagcagggagctggaaaagacaacgtggactatagcaacgtgatgctaaccagcgaggaagaaatcaagaccaccaaccccgtggccacagaacagtatggcgtggtggctgataacctacagcagcaaaacaccgctcctattgtgggggccgtcaacagccagggagccttacctggcatggtctggcagaaccgggacgtgtacctgcagggtcctatttgggccaagattcctcacacagatggcaactttcacccgtctcctttaatgggcggctttggacttaaacatccgcctcctcagatcctcatcaaaaacactcctgttcctgcggatcctccaacagcgttcaaccaggccaagctgaattctttcatcacgcagtacagcaccggacaagtcagcgtggagatcgagtgggagccgcagaaggagaacagcaagcgctggaacccagagattcagtatacttccaactactacaaatctacaaatgtggactttgctgttaatactgagggtgtttactctgagcctcgccccattggcactcgttacctcacccgtaatctgtaa

SEQ ID NO: 5047 - protein, 738 aa, Adeno-associated virus
MVADGYLPDWLEDNLSEGIREWWDLKPGAPKPKANQQKQGDGRGLVLPGYKYLGPFNGLDKGEPVNAADAAALEHDKAYDQQLKAGDNPYLRYNHADAELQERLQEDTSFGGNLGRAVFQAKKRVLEPLGLVEEGAKTAPGKKRPVEPSPQRSPDSSTGIGKKGQQPARKRLNFGQTGDSESVPDPQPIGEPPAAPSSVGSGTMAAGGGAPMADNNEGADGVGSSSGNWHCDSTWLGDRVITTSTRTWALPTYNNHLYKQISNGTSGGSTNDNTYFGYSTPWGYFDFNRFHCHFSPRDWQRLINNNWGFRPKRLSFKLFNIQVKEVTQNEGTKTIANNLTSTIQVFTDSEYQLPYVLGSAHQGCQPPFPADVFMIPQYGYLTLNNGSQAVGRSSFYCLEYFPSQMLRTGNNFSFSYTFEDVPFHSSYAHSQSLDRLMNPLIDQYLYYLSRTQSTGGTAGTQQLLFSQAGPSNMSAQARNWLPGPCYRQQRVSTTLSQNNNSNFAWTGATKYHLNGRDSLVNPGVAMATNKDDEDRFFPSSGILMFGKQGAGKDNVDYSNVMLTSEEEIKTTNPVATEQYGVVADNLQQQNTAPIVGAVNSQGALPGMVWQNRDVYLQGPIWAKIPHTDGNFHPSPLMGGFGLKHPPPQILIKNTPVPADPPTAFNQAKLNSFITQYSTGQVSVEIEWEPQKENSKRWNPEIQYTSNYYKSTNVDFAVNTEGVYSEPRPIGTRYLTRNL

SEQ ID NO: 5048 - DNA, 2217 bp, Adeno-associated virus
atggctgccgatggttatcttccagattggctcgaggacaacctctctgagggcattcgcgagtggtgggacctgaaacctggagccccgaaacccaaagccaaccagcaaaagcaggacgacggccggggtctggtgcttcctggctacaagtacctcggacccttcaacggactcgacaagggggagcccgtcaacgcggcggacgcagcggccctcgagcacgacaaggcctacgaccagcagctcaaagcgggtgacaatccgtacctgcggtataatcacgccgacgccgagtttcaggagcgtctgcaagaagatacgtcttttgggggcaacctcgggcgagcagtcttccaggccaagaagcgggttctcgaacctctcggtctggttgaggaaggcgctaagacggctcctggaaagaagagaccggtagagccgtcaccacagcgttcccccgactcctccacgggcatcggcaagaaaggccagcagcccgccagaaagagactcaatttcggtcagactggcgactcagagtcagtccccgaccctcaacctatcggagaacctccagcagcgccctctagtgtgggatctggtacaatggctgcaggcggtggcgcaccaatggcagacaataacgaaggtgccgacggagtgggtagttcctcgggaaattggcattgcgattccacatggctgggcgacagagtcatcaccaccagcacccgaacctgggccctgcccacctacaacaaccacctctacaagcaaatctccaacgggacctcgggaggcagcaccaacgacaacacctactttggctacagcaccccctgggggtattttgactttaacagattccactgccacttctcaccacgtgactggcagcgactcatcaacaacaactggggattccggcccaagagactcagcttcaagctcttcaacatccaggtcaaagaggtcacgcagaatgaaggcaccaagaccatcgccaatagcctcaccagcaccatccaggtgtttacggactcggaataccagctgccgtacgtcctcggctctgcccaccagggctgcctgcctccgttcccggcggacgtcttcatgattcctcagtacggctacctgactcccaacaacggtagtcaggccgtgggacgttcctccttctactgcctggagtacttcccctctcagatgctgagaacgggcaacaacttttccttcagctacactttcgaggacgtgcctttccacagcagctacgcgcacagccagagtttggacaggctgatgaatcctctcatcgaccagtacctgtactacctgtcaagaacccagtctacgggaggcacagcgggaacccagcagttgctgtcttctcaggccgggcctagcaacatgtcggctcaggccagaaactggctgcctggaccctgctacagacagcagcgcgtctccacgacactgtcgcaaaacaacaacagcaactttgcctggactggtgccaccaagtatcatctgaacggcagagactctctggtgaatccgggcgtcgccatggcaaccaacaaggacgacgaggaccgcttcttcccatccagcggcatcctcatgtttggcaagcagggagctggaaaagacaacgtggactatagcaacgtgatgctaaccagcgaggaagaaatcaagaccaccaaccccgtggccacagaacagtatggcgtggtggctgataacctacagcagcaaaacaccgctcctattgtgggggccgtcaacagccagggagccttacctggcatggtctggcagaaccgggacgtgtacttgcagggtcctatttgggccaagattcctcacacagatggcaactttcacccgtctcctttaatgggcggctttggacttaaacatccgcctcctcagatcctcatcaaaaacactcctgttcctgcggatcctccaacagcgttcaaccaggccaagctgaattctttcatcacgcagtacagcaccggacaagtcagcgtggagatcgagtgggagctgcagaaggagaacagcaagcgctggaacccagagattcagtatacttccaactactacaaatctacaaatgtggactttgctgttaatactgagggtgtttactctgagcctcgccccattggcactcgttacctcacccgtaatctgtaa

SEQ ID NO: 5049 - protein, 738 aa, Adeno-associated virus
MAADGYLPDWLEDNLSEGIREWWDLKPGAPKPKANQQKQDDGRGLVLPGYKYLGPFNGLDKGEPVNAADAAALEHDKAYDQQLKAGDNPYLRYNHADAEFQERLQEDTSFGGNLGRAVFQAKKRVLEPLGLVEEGAKTAPGKKRPVEPSPQRSPDSSTGIGKKGQQPARKRLNFGQTGDSESVPDPQPIGEPPAAPSSVGSGTMAAGGGAPMADNNEGADGVGSSSGNWHCDSTWLGDRVITTSTRTWALPTYNNHLYKQISNGTSGGSTNDNTYFGYSTPWGYFDFNRFHCHFSPRDWQRLINNNWGFRPKRLSFKLFNIQVKEVTQNEGTKTIANSLTSTIQVFTDSEYQLPYVLGSAHQGCLPPFPADVFMIPQYGYLTPNNGSQAVGRSSFYCLEYFPSQMLRTGNNFSFSYTFEDVPFHSSYAHSQSLDRLMNPLIDQYLYYLSRTQSTGGTAGTQQLLSSQAGPSNMSAQARNWLPGPCYRQQRVSTTLSQNNNSNFAWTGATKYHLNGRDSLVNPGVAMATNKDDEDRFFPSSGILMFGKQGAGKDNVDYSNVMLTSEEEIKTTNPVATEQYGVVADNLQQQNTAPIVGAVNSQGALPGMVWQNRDVYLQGPIWAKIPHTDGNFHPSPLMGGFGLKHPPPQILIKNTPVPADPPTAFNQAKLNSFITQYSTGQVSVEIEWELQKENSKRWNPEIQYTSNYYKSTNVDFAVNTEGVYSEPRPIGTRYLTRNL

SEQ ID NO: 5050 - protein, 738 aa, Adeno-associated virus
MAADGYLPDWLEDNLSEGIREWWDLKPGAPKPKANQQKQDDGRGLVLPGYKYLGPFNGLDKGEPVNAADAAALEHDKAYDQQLKAGDNPYLRYNHADAEFQERLQEDTSFGGNLGRAVFQAKKRVLEPLGLVEEGAKTAPGKKRPVEPSPQRSPDSSTGIGKKGQQPARKRLNFGQTGDSESVPDPQPIGEPPAAPSSVGSGTMAAGGGAPMADNNEGADGVGSSSGNWHCDSTWLGDRVITTSTRTWALPTYNNHLYKQISNGTSGGSTNDNTYFGYSTPWGYFDFNRFHCHFSPRDWQRLINNNWGFRPKRLSFKLFNIQVKEVTQNEGTKTIANNLTSTIQVFTDSEYQLPYVLGSAHQGCLPPFPADVFMIPQYGYLTLNNGSQAVGRSSFYCLEYFPSQMLRTGNNFSFSYTFEDVPFHSSYVHSQSLDRLMNPLIDQYLYYLSRTQSTGGTAGTQQLLFSQAGPSNMSAQARNWLPGPCYRQQRVSTTLSQNNNSNFAWTGATKYHLNGRDSLVNSGVAMATNKDDEDRFFPSSGILMFGKQGAGKDNVDYSNVMLTSEEEIKTTNPVATEQYGVVADNLQQQNTAPIVGAVNSQGALPGMVWQNRDVYLQGPIWAKIPHTDGNFHPSPLMGGFGLKHPPPQILIKNTPVPADPPTAFNQAKLNSFITQYSTGQVSVEIEWELQKENSKRWNPEIQYTSNYYKSTNVDFAVNTEGVYSEPRPIGTRYPTRNL

SEQ ID NO: 5051 - DNA, 2217 bp, Adeno-associated virus
atggctgccgatggttatcttccagattggctcgaggacaacctctctgagggcattcgcgagtggtgggacctgaaacctggagccccgaaacccaaagccaaccagcaaaagcaggacgacggccggggtctggtgcttcctggctacaagtacctcggacccttcaacggactcgacaagggggagcccgtcaacgcggcggacgcagcggccctcgagcacgacaaggcctacgaccagcagctcaaagcgggtgacaatccgtacctgcggtataatcacgccgacgccgagtttcaggagcgtctgcaagaagatacgtcttttgggggcaacctcgggcgagcagtcttccaggccaagaagcgggttctcgaacctctcggtctggttgaggaaggcgctaagacggctcctggaaagaagagaccggtagagccgtcaccacagcgttcccccgactcctccacgggcatcggcaagaaaggccagcagcccgccagaaagagactcaatttcggtcagactggcgactcagagtcagtccccgaccctcaacctatcggagaacctccagcagcgccctctagtgtgggatctggtacaatggctgcaggcggtggcgcaccaatggcagacaataacgaaggtgccgacggagtgggtagttcctcgggaaattggcattgcgattccacatggctgggcgacagagtcatcaccaccagcacccgaacctgggccctgcccacctacaacaaccacctctacaagcaaatctccaacgggacctcgggaggcagcaccaacgacaacacctactttggctacagcaccccctgggggtattttgactttaacagattccactgccacttctcaccacgtgactggcagcgactcatcaacaacaactggggattccggcccaagagactcagcttcaagctcttcaacatccaggtcaaagaggtcacgcagaatgaaggcaccaagaccatcgccaataacctcaccagcaccatccaggtgtttacggactcggaataccagctgccgtacgtcctcggctctgcccaccagggctgcctgcctccgttcccggcggacgtcttcatgattcctcagtacggctacctgactctcaacaacggtagtcaggccgtgggacgttcctccttctactgcctggagtacttcccctctcagatgctgagaacgggcaacaacttttccttcagctacactttcgaggacgtgcctttccacagcagctacgtgcacagccagagtttggacaggctgatgaatcctctcatcgaccagtacctgtactacctgtcaagaacccagtctacgggaggcacagcgggaacccagcagttgctgttttctcaggccgggcctagcaacatgtcggctcaggccagaaactggctgcctggaccctgctacagacagcagcgcgtctccacgacactgtcgcaaaacaacaacagcaactttgcctggactggtgccaccaagtatcatctgaacggcagagactctctggtgaattcgggcgtcgccatggcaaccaacaaggacgacgaggaccgcttcttcccatccagcggcatcctcatgtttggcaagcagggagctggaaaagacaacgtggactatagcaacgtgatgctaaccagcgaggaagaaatcaagaccaccaaccccgtggccacagaacagtatggcgtggtggctgataacctacagcagcaaaacaccgctcctattgtgggggccgtcaacagccagggagccttacctggcatggtctggcagaaccgggacgtgtacctgcagggtcctatttgggccaagattcctcacacagatggcaactttcacccgtctcctttaatgggcggctttggacttaaacatccgcctcctcagatcctcatcaaaaacactcctgttcctgcggatcctccaacagcgttcaaccaggccaagctgaattctttcatcacgcagtacagcaccggacaagtcagcgtggagatcgagtgggagctgcagaaggagaacagcaagcgctggaacccagagattcagtatacttccaactactacaaatctacaaatgtggactttgctgttaatactgagggtgtttactctgagcctcgccccattggcactcgttaccccacccgtaatctgtaa

SEQ ID NO: 5052 - protein, 734 aa, Adeno-associated virus; identical to SEQ ID NO: 4948

SEQ ID NO: 5053 - DNA, 2214 bp, Adeno-associated virus
atggctgctgacggttatcttccagattggctcgaggacaacctctctgagggcattcgcgagtggtgggacctgaaacctggagccccgaaacccaaagccaaccagcagaagcaggacgacggccggggtctggtgcttcctggctacaagtacctcggacccttcaacggactcgacaagggggagcccgtcaacgcggcggacgcagcggccctcgagcacgacaaggcctacgaccagcagctcaaagcgggtgacaatccgtacctgcggtataaccacgccgacgccgagtttcaggagcgtctgcaagaagatacgtcttttgggggcaacctcgggcgagcagtcttccaggccaagaagcgggttctcgaacctctcggtctggttgaggaagctgctaagacggctcctggaaagaagagaccggtagaaccgtcacctcagcgttcccccgactcctccacgggcatcggcaagaaaggccagcagcccgctagaaagagactgaactttgggcagactggcgactcagagtcagtccccgaccctcaacctctcggagaaccaccagcaggcccctctggtctgggatctggtacaatggctgcaggcggtggcgctccaatggcagacaataacgaaggcgccgacggagtgggtaatgcctcaggaaattggcattgcgattccacatggctgggcgacagagtcatcaccaccagcacccgaacctgggctttgcccacctacaacaaccacctctacaagcaaatctccagtcagtcagcaggtagcaccaacgacaacgtctacttcggctacagcaccccctgggggtattttgacttcaacagattccactgtcacttctcaccacgtgactggcagcgactcatcaacaacaactggggattccggcccaagaagctcaacttcaagctcttcaacatccaagtcaaggaggtcacgacgaatgacggcgtcacgaccatcgctaataaccttaccagcacggttcaggtcttttcggactcggagtaccagctgccgtacgtcctcggctctgcccaccagggctgcctgcctccgttcccggcggacgtcttcatgattcctcagtacggctacctgactctgaacaatggcagccaatcggtgggacgttcatccttctactgcctggaatacttcccttctcaggtgctgagaacgggtaacaacttcaccttcagttacaccttcgaggacgtgcctttccacagcagctacgcgcacagccagagcctagaccggctgatgaatcccctcatcgaccagtacctgtattacctggctagaacacagagtaacccaggaggcacatctggcaatcgggaactgcagttttaccagggcgggccttccaccatggccgaacaagccaagaactggttacctggaccttgcttccggcaacaaagagtttccaaaacactggatcaaaacaacaacagcaactttgcttggactggtgccaccaaatatcacctgaacggcagaaactcattggtgaatcctggtgtcgccatggcaactcacaaggacgacgaggaccgctttttcccatccagcggagtcctgatttttggaaaaactggagcaaccaacaagactacattggaaaacgtgttaatgacaaatgaagaagaaattcgtcctactaatcctgtggccacagaagaatacgggatagtcagcagcaatttacaagcggccaatactgcagcccagacacaagttgtcaacaaccagggagccttacctggcatggtctggcagaaccgggacgtgtacctgcagggtcccatctgggccaaaattcctcacacagacggcaactttcacccgtctccgctgatgggcggctttggactgaagcatccgcctcctcagatcctgatcaaaaacactcctgttcctgctaatcccccggaggtgtttacgcctgccaagtttgcttctttcatcacacagtacagcaccggccaggtcagcgtggagatcgagtgggagctgcagaaggagaacagcaagcgctggaacccagagattcagtatacctccaattttgacaaacagactggtgtggactttgccgttgacagccagggtgtttattctgagcctcgccccattggtactcgttacctcacccgtaatctgtaa

SEQ ID NO: 5054 - protein, 737 aa, Adeno-associated virus
MAADGYLPDWLEDNLSEGIREWWDLKPGAPKPKANQQKQDDGRGLVLPGYKYLGPFNGLDKGEPVNAADAAALEHDKAYDQQLKAGDNPYLRYNHADAEFQERLQEDTSFGGNLGRAVFQAKKRVLEPLGLVEEAAKTAPGKKRPVEPSPQRSPDSSTGIGKKGQQPARKRLNFGQTGDSESVPDPQPLGEPPAGPSGLGSGTMAAGGGAPMADNNEGADGVGNASGNWHCDSTWLGDRVITTSTRTWALPTYNNHLYKQISSQSAGSTNDNVYFGYSTPWGYFDFNRFHCHFSPRDWQRLINNNWGFRPKKLNFKLFNIQVKEVTTNDGVTTIANNLTSTVQVFSDSEYQLPYVLGSAHQGCLPPFPADVFMIPQYGYLTLNNGSQSVGRSSFYCLEYFPSQVLRTGNNFTFSYTFEDVPFHSSYAHSQSLDRLMNPLIDQYLYYLARTQSNPGGTSGNRELQFYQGGPSTMAEQAKNWLPGPCFRQQRVSKTLDQNNNSNFAWTGATKYHLNGRNSLVNPGVAMATHKDDEDRFFPSSGVLIFGKTGATNKTTLENVLMTNEEEIRPTNPVATEEYGIVSSNLQAANTAAQTQVVNNQGALPGMVWQNRDVYLQGPIWAKIPHTDGNFHPSPLMGGFGLKHPPPQILIKNTPVPANPPEVFTPAKFASFITQYSTGQVSVEIEWELQKENSKRWNPEIQYTSNFDKQTGVDFAVDSQGVYSEPRPIGTRYLTRNL

SEQ ID NO: 5055 - DNA, 2214 bp, Adeno-associated virus
atggctgccgatggttatcttccagattggctcgaggacaacctctctgagggcattcgcgagtggtgggacctgaaacctggagccccgaaacccaaagccaaccagcaaaagcaggacgacggccggggtctggtgcttcctggctacaagtacctcggacccttcaacggactcgacaagggggagcccgtcaacgcggcggacgcagcggccctcgagcacgacaaggcctacgaccagcagctcaaagcgggtgacaatccgtacctgcggtataatcacgccgacgccgagtttcaggagcgtctgcaagaagatacgtcttttgggggcaacctcgggcgagcagtcttccaggccaagaagcgggttctcgaacctctcggtctggttgaggaaggcgctaagacggctcctggaaagaagagaccggtagagccgtcaccacagcgttcccccgactcctccacgggcatcggcaagaaaggccagcagcccgccagaaagagactcaatttcggtcagactggcgactcagagtcagtccccgaccctcaacctatcggagaacctccagcagcgccctctagtgtgggatctggtacaatggctgcaggcggtggcgcaccaatggcagacaataacgaaggtgccgacggagtgggtagttcctcgggaaattggcattgcgattccacacggctgggcgacagagtcatcaccaccagcacccggacctgggctttgcccacctacaacaaccacctctacaagcaaatctccagtcagtcagcaggtagcaccaacgacaacgtctacttcggctacagcaccccctgggggtattttgacttcaacagattccactgtcacttctcaccacgtgactggcagcggctcatcaacaacaactggggattccggcccaagaagctcaacttcaagctgttcaacatccaggtcaaggaggtcacaacgaatgacggcgtcacgaccatcgccaataaccttaccagcacggttcaggtcttttcggactcggaataccagctgccctacgtcctcggctccgcacaccagggctgcctgcctccgttcccggcggacgtcttcatgattccccagtacggctacctgactctgaacaatggcagccaatcggtgggtcgttcctctttctactgcctggaatatttcccttctcaaatgctgagaacgggcaacaacttcaccttcagctacaccttcgaggacgttcccttccacagcagctacgcacacagccagagcctggaccggctgatgaatcctcttatcgaccagtacctgtattacctggccagaacacagagcaacgcaggaggcacagctggcaatcgggaactgcagttttatcagggcgggcctaccaccatggccgaacaagccaaaaactggctgcctggaccttgcttccggcaacgaagagtctccaagacgctggatcaaaacaacaacagcaactttgcttggactggtgccaccaaataccatctaaatggaagaaattcattggttaatcccggtgtcgccatggcaacccacaaggacgacgaggaacgcttcttcccttcgagcggagtcctgatttttggaaaaactggagcagctaataagactacactggaaaatgtgttaatgacaaatgaagaggaaattcgtcctaccaacccggtagccaccgaggaatacgggactgttagcagcaacctgcaggcggctaacactgcagcccagacacaagttgtcaacaaccagggagccttacctggtatggtctggcagaaccgggacgtgtacctgcagggtcccatctgggccaagattcctcacacggacggcaactttcacccgtctccgctgatgggcggctttggactgaagcatccgcctcctcagatcctgatcaaaaacactcctgttcctgctaatcccccggaggtgtttacgcctgccaagtttgcttctttcatcacacagtacagcaccggccaggtcagcgtggagatcgagtgggagctgcagaaggagaacagcaagcgctggaacccagagattcagtatacctccaattttgacaaacagactggtgtggactttgccgttgacagccagggtgtttattctgagcctcgccccattggtactcgttacctcacccgtaatctgtaa

SEQ ID NO: 5056 - protein, 737 aa, Adeno-associated virus
MAADGYLPDWLEDNLSEGIREWWDLKPGAPKPKANQQKQDDGRGLVLPGYKYLGPFNGLDKGEPVNAADAAALEHDKAYDQQLKAGDNPYLRYNHADAEFQERLQEDTSFGGNLGRAVFQAKKRVLEPLGLVEEGAKTAPGKKRPVEPSPQRSPDSSTGIGKKGQQPARKRLNFGQTGDSESVPDPQPIGEPPAAPSSVGSGTMAAGGGAPMADNNEGADGVGSSSGNWHCDSTRLGDRVITTSTRTWALPTYNNHLYKQISSQSAGSTNDNVYFGYSTPWGYFDFNRFHCHFSPRDWQRLINNNWGFRPKKLNFKLFNIQVKEVTTNDGVTTIANNLTSTVQVFSDSEYQLPYVLGSAHQGCLPPFPADVFMIPQYGYLTLNNGSQSVGRSSFYCLEYFPSQMLRTGNNFTFSYTFEDVPFHSSYAHSQSLDRLMNPLIDQYLYYLARTQSNAGGTAGNRELQFYQGGPTTMAEQAKNWLPGPCFRQRRVSKTLDQNNNSNFAWTGATKYHLNGRNSLVNPGVAMATHKDDEERFFPSSGVLIFGKTGAANKTTLENVLMTNEEEIRPTNPVATEEYGTVSSNLQAANTAAQTQVVNNQGALPGMVWQNRDVYLQGPIWAKIPHTDGNFHPSPLMGGFGLKHPPPQILIKNTPVPANPPEVFTPAKFASFITQYSTGQVSVEIEWELQKENSKRWNPEIQYTSNFDKQTGVDFAVDSQGVYSEPRPIGTRYLTRNL

SEQ ID NO: 5057 - DNA, 2208 bp, Adeno-associated virus
atggctgccgatggttatcttccagattggctcgaggacactctctctgaaggaataagacagtggtggaagctcaaacctggcccaccaccaccaaagcccgcagagcggcataaggacgacagcaggggtcttgtgcttcctgggtacaagtacctcggacccttcaacggactcgacaagggggagccggtcaacgaggcagacgccgcggccctcgagcacgacaaggcctacgaccggcagctcgacagcggagacaacccgtacctcaagtacaaccacgccgacgcggagtttcaggagcgtcttaaagaagatacgtcttttgggggcaacctcggacgagcagtcttccaggcgaaaaagagggttcttgaacctctgggcctggttgaggaacctgttaagacggctccgggaaaaaagaggccggtagagcactctcctgcggagccagactcctcctcgggaaccggaaaagcgggccagcagcctgcaagaaaaagattgaattttggtcagactggagacgcagactccgtacctgacccccagcctctcggacagccaccagcagccccctctggtttgggatctactacaatggctacaggcagtggcgcaccaatggcagacaataacgagggtgccgatggagtgggtaattcttcaggaaattggcattgcgattcccaatggctgggcgacagagtcatcaccaccagcacccgaacctgggcccagcccacctacaacaaccacctctacaagcaaatctcaagccaatcaggagcctcaaacgacaaccactactttggctacagcaccccttgggggtattttgacttcaacagattccactgccacttttcaccacgtgactggcaaagactcatcaacaacaactggggattccgacccaagagactcaacttcaagctctttaacattcaagtcaaagaggtcacgcagaatgacggtacgacgacgattgccaataaccttaccagcacggttcaggtgtttactgactcggagtaccagctcccgtacgtcctcgggtcggcgcatcaaggatgcctcccgccgtttccagcggacgtcttcatggtcccacagtatggatacctcaccctgaacaacgggagtcaggcggtaggacgctcttccttttactgcctggagtactttccttctcagatgcttcgtactggaaacaactttcagttcagctacacctttgaagacgttcctttccacagcagctacgctcacagccagagtctggatcggctgatgaatcctctgatcgaccagtacctgtattatctgaacaaaacacaatcaaatagtggagctcttcagcagtctcggctactgtttagtcaagctggacccaccagcatgtctcttcaagctaaaaactggctacctggaccttgctacagacagcagcgtctgtcaaagcaggcaaacgacaacaacaacagcaactttccctggactgcggctacaaagtaccacctaaatggccgggactcgttggttaatccaggaccagctatggccagtcacaaagacgatgaagaaaagtttttccccatgcatggaaccctgatatttggtaaacaaggaacaaatgctaacgacgcggatttggacaatgtcatgattacagatgaagaagaaatccgcaccaccaatcccgtggctacggagcagtacggatatgtgtcaaataatttgcaaaactcaaatactggtccaactactggaactgtcaatcaccgaggagcgttacctggcatggtgtggcaggatcgagacgtgtacctgcagggacccatttgggccaagattcctcacaccgatggacactttcatccttctccactgatgggaggttttgggctcaaacacccgcctcctcagatcatgatcaaaaacactcccgttccagccaatcctcccacaaacttcagttctgccaagtttgcttctttcatcacacagtattccacggggcaggtcagcgtggagatcgagtgggagctgcagaaagagaacagcaaacgctggaatcccgaaattcagtacacttccaactacaacaaatctgttaatgtggactttactgtggacactaatggcgtgtattcagagcctcgccccattggcaccagatacctgactcgtaatctgtaa

SEQ ID NO: 5058 - protein, 735 aa, Adeno-associated virus
MAADGYLPDWLEDTLSEGIRQWWKLKPGPPPPKPAERHKDDSRGLVLPGYKYLGPFNGLDKGEPVNEADAAALEHDKAYDRQLDSGDNPYLKYNHADAEFQERLKEDTSFGGNLGRAVFQAKKRVLEPLGLVEEPVKTAPGKKRPVEHSPAEPDSSSGTGKAGQQPARKRLNFGQTGDADSVPDPQPLGQPPAAPSGLGSTTMATGSGAPMADNNEGADGVGNSSGNWHCDSQWLGDRVITTSTRTWAQPTYNNHLYKQISSQSGASNDNHYFGYSTPWGYFDFNRFHCHFSPRDWQRLINNNWGFRPKRLNFKLFNIQVKEVTQNDGTTTIANNLTSTVQVFTDSEYQLPYVLGSAHQGCLPPFPADVFMVPQYGYLTLNNGSQAVGRSSFYCLEYFPSQMLRTGNNFQFSYTFEDVPFHSSYAHSQSLDRLMNPLIDQYLYYLNKTQSNSGALQQSRLLFSQAGPTSMSLQAKNWLPGPCYRQQRLSKQANDNNNSNFPWTAATKYHLNGRDSLVNPGPAMASHKDDEEKFFPMHGTLIFGKQGTNANDADLDNVMITDEEEIRTTNPVATEQYGYVSNNLQNSNTGPTTGTVNHRGALPGMVWQDRDVYLQGPIWAKIPHTDGHFHPSPLMGGFGLKHPPPQIMIKNTPVPANPPTNFSSAKFASFITQYSTGQVSVEIEWELQKENSKRWNPEIQYTSNYNKSVNVDFTVDTNGVYSEPRPIGTRYLTRNL

SEQ ID NO: 5059 - DNA, 2217 bp, Adeno-associated virus
atggctgccgatggttatcttccagattggctcgaggacaacctctctgagggcattcgcgagtggtgggcgctgaaacctggagccccgaagcccaaagccaaccagcaaaagcaggacgacggccggggtctggtgcttcctggctacaagtacctcggacccttcaacggactcgacaagggggagcccgtcaacgcggcggacgcagcggccctcgagcacgacaaggcctacgaccagcagctgcaggcgggtgacaatccgtacctgcggtataatcacgccgacgccgagtttcaggagcgtctgcaagaagatacgtcttttgggggcaacctcgggcgagcagtcttccaggccaagaagcgggttctcgaacctctcggtctggttgaggaaggcgctaagacggctcctggaaagaagagaccggtagagccgtcaccacagcgttcccccgactcctccacgggcatcggcaagaaaggccagcagcccgccagaaagagactcaatttcggtcagactggcgactcagagtcagtccccgaccctcaacctatcggagaacctccagcagcgccctctagtgtgggatctggtacaatggctgcaggcggtggcgcgccaatggcagacaataacgaaggtgccgacggagtgggtagttcctcgggaaattggcattgcgattccacatggctgggcgacagagtcatcaccaccagcacccgaacctgggccctgcccacctacaacaaccacctctacaagcaaacctccaacgggacctcgggaggcagcaccaacgacaacacctactttggctacagcaccccctgggggtattttgactttaacagattccactgccacttctcaccacgtgactggcagcgactcatcaacaacaactggggattccggcccaagagactcagcttcaagctcttcaacatccaggtcaaagaggtcacgcagaatgaaggcaccaagaccatcgccaataacctcaccagcaccatccaggtgtttacggactcggaataccagctgccgtacgtcctcggctctgcccaccagggctgcctgcctccgttcccggcggacgtcttcatgattcctcagtacggctacctgactctcaacaacggtagtcaggccgtgggacgttcctccttctactgcctggagtacttcccctctcagatgctgagaacgggcaacaacttttccttcagctacactttcgaggacgtgcctttccacagcagctacgcgcacagccagagtttggacaggctgatgaatcctctcatcgaccagtacctgtactacctgtcaagaacccagtctacgggaggcacagcgggaacccagcagttgctgttttctcaggccgggcctagcaacatgtcggctcaggccagaaactggctgcctggaccctgctacagacagcagcgcgtctccacgacactgtcgcaaaacaacaacagcaactttgcctggactggtgccaccaagtatcatctgaacggcagagactctctggtgaatccgggcgtcgccatggcaaccaacaaggacgacgaggaccgcttcttcccatccagcggcatcctcatgtttggcaagcagggagctggaaaagacaacgtggactatagcaacgtgatgctaaccagcgaggaagaaatcaagaccaccaaccccgtggccacagaacagtatggcgtggtggctgataacctacagcagcaaaacaccgctcctattgtgggggccgtcaacagccagggagccttacctggcatggtctggcagaaccgggacgtgtacctgcagggtcctatttgggccaagattcctcacacagatggcaactttcacccgtctcctttaatgggcggctttggacttaaacatccgcctcctcagatcctcatcaaaaacactcctgttcctgcggatcctccaacagcgttcaaccaggccaagctgaattctttcatcacgcagtacagcaccggacaagtcagcgcggagatcgagtgggagctgcagaaggagaacagcaagcgctggaacccagagattcagtatacttccaactactacaaatctacaaatgtggactttgctgttaatactgagggtgtttactctgagcctcgccccattggcactcgttacctcacccgtaatctgtaa

SEQ ID NO: 5060 - protein, 738 aa, Adeno-associated virus
MAADGYLPDWLEDNLSEGIREWWALKPGAPKPKANQQKQDDGRGLVLPGYKYLGPFNGLDKGEPVNAADAAALEHDKAYDQQLQAGDNPYLRYNHADAEFQERLQEDTSFGGNLGRAVFQAKKRVLEPLGLVEEGAKTAPGKKRPVEPSPQRSPDSSTGIGKKGQQPARKRLNFGQTGDSESVPDPQPIGEPPAAPSSVGSGTMAAGGGAPMADNNEGADGVGSSSGNWHCDSTWLGDRVITTSTRTWALPTYNNHLYKQTSNGTSGGSTNDNTYFGYSTPWGYFDFNRFHCHFSPRDWQRLINNNWGFRPKRLSFKLFNIQVKEVTQNEGTKTIANNLTSTIQVFTDSEYQLPYVLGSAHQGCLPPFPADVFMIPQYGYLTLNNGSQAVGRSSFYCLEYFPSQMLRTGNNFSFSYTFEDVPFHSSYAHSQSLDRLMNPLIDQYLYYLSRTQSTGGTAGTQQLLFSQAGPSNMSAQARNWLPGPCYRQQRVSTTLSQNNNSNFAWTGATKYHLNGRDSLVNPGVAMATNKDDEDRFFPSSGILMFGKQGAGKDNVDYSNVMLTSEEEIKTTNPVATEQYGVVADNLQQQNTAPIVGAVNSQGALPGMVWQNRDVYLQGPIWAKIPHTDGNFHPSPLMGGFGLKHPPPQILIKNTPVPADPPTAFNQAKLNSFITQYSTGQVSAEIEWELQKENSKRWNPEIQYTSNYYKSTNVDFAVNTEGVYSEPRPIGTRYLTRNL

SEQ ID NO: 5061 - DNA, 2217 bp, Adeno-associated virus
atggctgctgacggttatcttccagattggctcgaggacaacctctctgagggcattcgcgagtggtgggacctgaaacctggagcccccaagcccaaggccaaccagcagaagcaggacgacggccggggtctggtgcttcctggctacaagtacctcggacccttcaacggactcgacaagggggagcccgtcaacgcggcggacgcagcggccctcgagcacgacaaggcctacgaccagcagctcaaagcgggtgacaatccgtacctgcggtataatcacgccgacgccgagtttcaggagcgtctgcaagaagatacgtcttttgggggcaacctcgggcgagcagtcttccaggccaagaagcgggttctcgaacctctcggtctggttgaggaagctgctaagacggctcctggaaagaagagaccggtagaaccgtcacctcagcgttcccccgactcctccacgggcatcggcaagaaaggccagcagcccgctagaaagagactgaactttgggcagactggcgactcagagtcagtccccgaccctcaaccaatcggagaacctccagcagcgccctctagtgtgggatctggtacaatggccgcaggcggtggcgcaccaatggcagacaataacgaaggtgccgacggagtgggtagttcctcgggaaattggcattgcgattccacatggctgggcgacagagtcatcaccaccagcacccgaacctgggccctgcccacctacaacaaccacctctacaagcaaatctccaacgggacctcgggaggcagcaccaacgacaacacctactttggctacagcaccccctgggggtattttgactttaacagattccactgccacttctcaccacgtgactggcagcgactcatcaacaacaactggggattccggcccaagagactcagcttcaagctcttcaacatccaggtcaaagaggtcacgcagaatgaaggcaccaagaccatcgccaataacctcaccagcaccatccaggtgtttacggactcggaataccagctgccgtacgtcctcggctctgcccaccagggctgcctgcctccgttcccggcggacgtcttcatgattcctcagtacggctacctgactctcaacaacggtagtcaggccgtgggacgttcctccttctactgcctggagtacttcccctctcagatgctgagaacgggcaacaacttttccttcagctacactttcgaggacgtgcctttccacagcagctacgcgcacagccagagtttggacaggctgatgaatcctctcatcgaccagtacctgtactacctgtcaagaacccagtctacgggaggcacagcgggaacccagcagctgctgttttctcaggccgggcctagcaacatgtcggctcaggccagaaactggctgcctggaccctgctacagacagcagcgcgtctccacgacactgtcgcaaaacaacaacagcaactttgcctggactggtgccaccaagtatcatctgaacggcagagactctctggtgaatccgggcgtcgccatggcaaccaacaaggacgacgaggaccgcttcttcccatccagcggcatcctcatgtttggcaagcagggagctggaaaagacaacgtggactatagcaacgtgatgctaaccagcgaggaagaaatcaagaccaccaaccccgtggccacagaacagtatggcgtggtggctgataacctacagcagcaaaacaccgctcctattgtgggggccgtcaacagccagggagccttacctggcatggtctggcagaaccgggacgtgtacctgcagggtcctatttgggccaagattcctcacacagatggcaactttcacccgtctcctttaatgggcggctttggacttaaacatccgcctcctcagatcctcatcaaaagcactcctgttcctgcggatcctccaacagcgttcaaccaggccaagctgaattctttcatcacgcagtacagcaccggacaagtcagcgtggagatcgagtgggagctgcagaaggagaacagcaagtgctggaacccagagattcagtatacttccaactactacaaatctacaaatgtggactttgctgttaatactgagggtgtttactctgagcctcgccccattggcactcgttacctcacccgtaatctgtaa

SEQ ID NO: 5062 - protein, 738 aa, Adeno-associated virus
MAADGYLPDWLEDNLSEGIREWWDLKPGAPKPKANQQKQDDGRGLVLPGYKYLGPFNGLDKGEPVNAADAAALEHDKAYDQQLKAGDNPYLRYNHADAEFQERLQEDTSFGGNLGRAVFQAKKRVLEPLGLVEEAAKTAPGKKRPVEPSPQRSPDSSTGIGKKGQQPARKRLNFGQTGDSESVPDPQPIGEPPAAPSSVGSGTMAAGGGAPMADNNEGADGVGSSSGNWHCDSTWLGDRVITTSTRTWALPTYNNHLYKQISNGTSGGSTNDNTYFGYSTPWGYFDFNRFHCHFSPRDWQRLINNNWGFRPKRLSFKLFNIQVKEVTQNEGTKTIANNLTSTIQVFTDSEYQLPYVLGSAHQGCLPPFPADVFMIPQYGYLTLNNGSQAVGRSSFYCLEYFPSQMLRTGNNFSFSYTFEDVPFHSSYAHSQSLDRLMNPLIDQYLYYLSRTQSTGGTAGTQQLLFSQAGPSNMSAQARNWLPGPCYRQQRVSTTLSQNNNSNFAWTGATKYHLNGRDSLVNPGVAMATNKDDEDRFFPSSGILMFGKQGAGKDNVDYSNVMLTSEEEIKTTNPVATEQYGVVADNLQQQNTAPIVGAVNSQGALPGMVWQNRDVYLQGPIWAKIPHTDGNFHPSPLMGGFGLKHPPPQILIKSTPVPADPPTAFNQAKLNSFITQYSTGQVSVEIEWELQKENSKCWNPEIQYTSNYYKSTNVDFAVNTEGVYSEPRPIGTRYLTRNL

SEQ ID NO: 5063 - protein, 738 aa, Adeno-associated virus
MAADGYLPDWLEDNLSEGIREWWDLKPGAPKPKANQQKQDDGRGLVLPGYKYLGPFNGLDKGEPVNAADAAALEHDKAYDQQLKAGDNPYLRYNHADAEFQERLQEDTSFGGNLGRAVFQAKKRVLEPLGLVEEAAKTAPGKKRPVEPSPQRSPDSSTGIGKKGQQPARKRLNFGQTGDSESVPDPQPIGEPPAAPSSVGSGTMAAGGGAPMADNNEGADGVGSSSGNWHCDSTWLGDRVITTSTRTWALPTYNNHLYKQISNGTSGGSTNDNTYFGYSTPWGYFDFNRFHCHFSPRDWQRLINNNWGFRPKRLSFKLFNIQVKEVTQNEGTKTIANNLTSTIQVFTDSEYQLPYVLGSAHQGCLPPFPADVFMIPQYGYLTLNNGSQAVGRSSFYCLEYFPSQMLRTGNNFSFSYTFEDVPFHSSYAHSQSLDRLMNPLIDQYLYYLSRTQSTGGTAGTQQLLFSQAGPSNMSAQARNWLPGPCYRQQRVSTTLSQNNNSNFAWTGATKYHLNGRDSLVNPGVAMATNKDDEDRFFPSSGILMFGKQGAGKDNVDYSNVMLTSEEEIKTTNPVATEQYGVVADNLQQQNTAPIVGAVNSQGALPGMVWQNRDVYLQGPIWAKIPHTDGNFHPSPLMGGFGLKHPPPQILIKSTPVPADPPTAFNQAKLNSFITQYSTGQVSVEIEWELQKENSKRWNPEIQYTSNYYKSTNVDFAVNTEGVYSEPRPIGTRYLTRNL

SEQ ID NO: 5064 - DNA, 2217 bp, Adeno-associated virus
atggctgctgacggttatcttccagattggctcgaggacaacctctctgagggcattcgcgagtggtgggacctgaaacctggagcccccaagcccaaggccaaccagcagaagcaggacgacggccggggtctggtgcttcctggctacaagtacctcggacccttcaacggactcgacaagggggagcccgtcaacgcggcggacgcagcggccctcgagcacgacaaggcctacgaccagcagctcaaagcgggtgacaatccgtacctgcggtataaccacgccgacgccgagtttcaggagcgtctgcaagaagatacgtcttttgggggcaacctcgggcgagcagtcttccaggccaagaagcgggttctcgaacctctcggtctggttgaggaagctgctaagacggctcctggaaagaagagaccggtagaaccgtcacctcagcgttcccccgactcctccacgggcatcggcaagaaaggccagcagcccgctagaaagagactgaactttgggcagactggcgactcagagtcagtccccgaccctcaaccaatcggagaaccaccagcaggcccctctggtctgggatctggtacaatggctgcaggcggtggcgcaccaatggctgacaataacgagggcgccgacggagtgggtaatgcctcaggaaattggcattgcgattccacatggctgggcgacagagtcatcaccaccagcacccgaacctgggctttgcccacctacaacaaccacctctacaagcaaatctccagtcagtcagcaggtagcaccaacgacaacgtctacttcggctacagcaccccctgggggtattttgacttcaacagattccactgtcacttctcaccacgtgactggcagcggctcatcaacaacaactggggattccggcccaagaagctcaacttcaagctgttcaacatccaggtcaaggaggtcacaacgaatgacggcgtcacgaccatcgccaataaccctaccagcacggttcaggtcttttcggactcggaataccagctgccctacgtcctcggctccgcacaccagggctgcctgcctccgttcccggcggacgtcttcatgattccccagtacggctacctgactctgaacaatggcagccaatcggtgggtcgttcctctttctactgcctggaatatttcccttctcaaatgctgagaacgggcaacaacttcaccttcagctacaccttcgaggacgttcccttccacagcagctacgcacacagccagagcctggaccggctgatgaatcctcttatcgaccagtacctgtattacctggccagaacacagagcaacgcaggaggcacagctggcaatcgggaactgcagttttatcagggcgggcctaccaccatggccgaacaagccaaaaactggctgcctggaccctgctacagacagcagcgcgtctccacgacactgtcgcaaaacaacaacagcaactttgcctggactggtgccaccaagtatcatctgaacggcagagactctctggtgaatccgggcgtcgccatggcaaccaacaaggacgacgaggaccgcttcttcccatccagcggcatcctcatgtttggcaagcagggagctggaaaagacaacgtggactatagcaacgtgatgctaaccagcgaggaagaaatcaagaccaccaaccccgtggccacagaacagtatggcgtggtggctgataacctacagcagcaaaacaccgctcctattgtgggggccgtcaacagccagggagccttacctggcatggtctggcagaaccgggacgtgtacctgcagggtcctatttgggccaagattcctcacacagatggcaactttcacccgtctcctttaatgggcggctttggacttaaacatccgcctcctcagatcctcatcaaaaacactcctgttcctgcggatcctccaacagcgttcaaccaggccaagctgaattctttcatcacgcagtacagcaccggacaagtcagcgtggagatcgagtgggagctgcagaaggagaacagcaagcgctggaacccagagattcagtatacttccaactactacaaatctacaaatgtggactttgctgttaatactgagggtgtttactctgagcctcgccccattggcactcgttacctcacccgtaatctgtaa

SEQ ID NO: 5065 - protein, 738 aa, Adeno-associated virus
MAADGYLPDWLEDNLSEGIREWWDLKPGAPKPKANQQKQDDGRGLVLPGYKYLGPFNGLDKGEPVNAADAAALEHDKAYDQQLKAGDNPYLRYNHADAEFQERLQEDTSFGGNLGRAVFQAKKRVLEPLGLVEEAAKTAPGKKRPVEPSPQRSPDSSTGIGKKGQQPARKRLNFGQTGDSESVPDPQPIGEPPAGPSGLGSGTMAAGGGAPMADNNEGADGVGNASGNWHCDSTWLGDRVITTSTRTWALPTYNNHLYKQISSQSAGSTNDNVYFGYSTPWGYFDFNRFHCHFSPRDWQRLINNNWGFRPKKLNFKLFNIQVKEVTTNDGVTTIANNPTSTVQVFSDSEYQLPYVLGSAHQGCLPPFPADVFMIPQYGYLTLNNGSQSVGRSSFYCLEYFPSQMLRTGNNFTFSYTFEDVPFHSSYAHSQSLDRLMNPLIDQYLYYLARTQSNAGGTAGNRELQFYQGGPTTMAEQAKNWLPGPCYRQQRVSTTLSQNNNSNFAWTGATKYHLNGRDSLVNPGVAMATNKDDEDRFFPSSGILMFGKQGAGKDNVDYSNVMLTSEEEIKTTNPVATEQYGVVADNLQQQNTAPIVGAVNSQGALPGMVWQNRDVYLQGPIWAKIPHTDGNFHPSPLMGGFGLKHPPPQILIKNTPVPADPPTAFNQAKLNSFITQYSTGQVSVEIEWELQKENSKRWNPEIQYTSNYYKSTNVDFAVNTEGVYSEPRPIGTRYLTRNL

SEQ ID NO: 5066 - DNA, 2208 bp, Adeno-associated virus
atggctgccgatggttatcttccagattggctcgaggacaacctctctgagggcattcacgagtggtgggacccgaaacctggagccccgaaacccaaagccaaccagcaaaagcaggacgacggccggggtctggtgcttcctggctacaagtacctcggacccttcaacggactcgacaagggggagcccgtcaacgcggcggacgcagcggccctcgagcacgacaaggcctacgaccagcagctcaaagcgggtgacaatccgtacctgcggtataatcacgccgacgccgagtttcaggagcgtctgcaagaagatacgtcttttgggggcaacctcgggcgagcagtcttccaggccaagaagcgggttctcgaacctctcggtctggttgaggaaggcgctaagacggctcctggaaagaagagaccggtagagccgtcaccacagcgttcccccgactcctccacgggcatcggcaagaaaggccagcagcccgccagaaagagactcaatttcggtcagactggcgactcagagtcagtccccgaccctcaacctatcggagaacctccagcagcgccctctagtgtgggatctggtacaatggctgcaggcggtggcgcaccaatggcagacaataacgaaggtgccgacggagtgggtagttcctcgggaaattggcattgcgattccacatggctgggcgacagagtcatcaccaccagcacccgaacctgggccctgcccacccacaacaaccacctctacaagcaaatctccaacgggacctcgggaggcagcaccaacgacaacgtctacttcggctacagcaccccctgggggtattttgacttcaacagattccactgtcacttctcaccacgtgaccggcagcgactcatcaacaacaactggggattccggcccaagagactcagcttcaagctcttcaacatccaggtcaaagaggtcacgcagaatgaaggcaccaagaccatcgccaataacctcaccagcaccatccaggtgtttacggactcggaataccagctgccgtacgtcctcggctctgcccaccagggctgcctgcctccgttcccggcggacgtcttcatgattcctcagtacggctacctgactctcaacaacggtagtcaggccgtgggacgttcctccttctactgcctggagtacttcccctctcagatgctgagaacgggcaacaacttttccttcagctacactttcgaggacgtgcctttccacagcagctacgcgcacagccagagtttggacaggctgatgaatcctctcatcgaccagtacctgtactacctgtcaagaacccagtctacggaaggcacagcgggaacccagcagttgctgttttctcaggccgggcctagcaacatgtcggctcaggccagaaactggctgcctggaccctgctacagacagcagcgcgtctccacgacactgtcgcaaaacaacaacagcaactttgcctggactggtgccaccaagtatcatctgaacggcagagactctctggtgaatccgggcgtcgccatggcaacccacaaggacgacgaggaacgcttcttcccttcgagcggagtcctgatttttggaaaaactggagcagctaataagactacactggaaaatgtgttaatgacaaatgaagaggaaattcgtcctaccaacccggtagccaccgaggaatacgggactgttagcagcaacctgcaggcggctaacactgcagcccagacacaagttgtcaacaaccagggagccttacctggtatggtctggcagaaccgggacgtgtacctgcagggtcccatctgggccaagattcctcacacggacggcaactttcacccgtctccgctgatgggcggctttggactgaagcatcctcagatcctgatcaaaaacactcctgttcctgctaatcccccggaggtgtttacgcctgccaagtttgcttctttcatcacacagtacagcaccggccaggtcagcgtggagatcgagtgggagctgcagaaggagaacagcaagcgctggaacccagagattcagtatacctccaattttgacaaacagactggtgtggactttgccgttgacagccagggtgtttattctgagcctcgccccattggtactcgttacctcacccgtaatctgtaa

SEQ ID NO: 5067 - protein, 735 aa, Adeno-associated virus
MAADGYLPDWLEDNLSEGIHEWWDPKPGAPKPKANQQKQDDGRGLVLPGYKYLGPFNGLDKGEPVNAADAAALEHDKAYDQQLKAGDNPYLRYNHADAEFQERLQEDTSFGGNLGRAVFQAKKRVLEPLGLVEEGAKTAPGKKRPVEPSPQRSPDSSTGIGKKGQQPARKRLNFGQTGDSESVPDPQPIGEPPAAPSSVGSGTMAAGGGAPMADNNEGADGVGSSSGNWHCDSTWLGDRVITTSTRTWALPTHNNHLYKQISNGTSGGSTNDNVYFGYSTPWGYFDFNRFHCHFSPRDRQRLINNNWGFRPKRLSFKLFNIQVKEVTQNEGTKTIANNLTSTIQVFTDSEYQLPYVLGSAHQGCLPPFPADVFMIPQYGYLTLNNGSQAVGRSSFYCLEYFPSQMLRTGNNFSFSYTFEDVPFHSSYAHSQSLDRLMNPLIDQYLYYLSRTQSTEGTAGTQQLLFSQAGPSNMSAQARNWLPGPCYRQQRVSTTLSQNNNSNFAWTGATKYHLNGRDSLVNPGVAMATHKDDEERFFPSSGVLIFGKTGAANKTTLENVLMTNEEEIRPTNPVATEEYGTVSSNLQAANTAAQTQVVNNQGALPGMVWQNRDVYLQGPIWAKIPHTDGNFHPSPLMGGFGLKHPQILIKNTPVPANPPEVFTPAKFASFITQYSTGQVSVEIEWELQKENSKRWNPEIQYTSNFDKQTGVDFAVDSQGVYSEPRPIGTRYLTRNL

SEQ ID NO: 5068 - protein, 738 aa, Adeno-associated virus
MAADGYLPDWLEDNLSEGIREWWDLKPGAPKPKANQQKQDDGRGLVLPGYKYLGPFNGLDKGEPVNAADAAALEHDKAYDQQLKAGDNPYLRYNHADAEFQERLQEDTSFGGNLGRAVFQAKKRVLEPLGLVEEGAKTAPGKKRPVEPSPQRSPDSSTGIGKKGQQPARKRLNFGQTGDSESVPDPQPIGEPPAAPSSVGSGTMAAGGGAPMADNNEGADGVGSSSGNWHCDSTWLGDRVITTSTRTWALPTYNNHLYKQISNGTSGGSTNDNTYFGYSTPWGYFDFNRFHCHFSPRDWQRPINNNWGFRPKRLSFKLFNIQVKEVTQNEGTKTIANNLTSTIQVFTDSEYQLPYVLGSAHQGCLPPFPADVFMIPQYGYLTLNNGSQAVGRSSFYCLEYFPSQMLRTGNNFSFSYPFEDVPFHSSYAHSQSLDRLMNPLIDQYLYYLSRTQSTGGTAGTQQLLFSQAGPSNMSAQARNWLPGPCYRQQRVSTTLSQNNNSNFAWTGATKYHLNGRDSLVNPGVAMATNKDDEDRFFPSSGILMFGKQGAGKDNVDYSNVMLTSEEEIKTTNPVATEQYGVVADNLQQQDTAPIVGAVNSQGALPGMVWQNRDVYLQGPIWAKIPHTDGNFHPSPLMGGFGLKHPPPQVLIKNTPVPADPPTAFNQAKLNSFITQYSTGQVSVEIEWELQKENSKRWNPEIQYTSNYYKSTNVDFAVNTEGVYSEPRPIGTRYLTRNL

SEQ ID NO: 5069 - DNA, 2217 bp, Adeno-associated virus
atggctgccgatggttatcttccagattggctcgaggacaacctctctgagggcattcgcgagtggtgggacctgaaacctggagccccgaaacccaaggccaaccagcaaaagcaggacgacggccggggtctggtgcttcctggctacaagtacctcggacccttcaacggactcgacaagggggagcccgtcaacgcggcggacgcagcggccctcgagcacgacaaggcctacgaccagcagctcaaagcgggtgacaatccgtacctgcggtataatcacgccgacgccgagtttcaggagcgtctgcaagaagatacgtcttttgggggcaacctcgggcgagcagtcttccaggccaagaagcgggttctcgaacctctcggtctggttgaggaaggcgctaagacggctcctggaaagaagagaccggtagagccgtcaccacagcgttcccccgactcctccacgggcatcggcaagaaaggccagcagcccgccagaaagagactcaatttcggtcagactggcgactcagagtcagtccccgaccctcaacctatcggagaacctccagcagcgccctctagtgtgggatctggtacaatggctgcaggcggtggcgcaccaatggcagacaataacgaaggtgccgacggagtgggtagttcctcgggaaattggcattgcgattccacatggctgggcgacagagtcatcaccaccagcacccgaacctgggccctgcccacctacaacaaccacctctacaagcaaatctccaacgggacctcgggaggcagcaccaacgacaacacctactttggctacagcaccccctgggggtattttgactttaacagattccactgccacttctcaccacgtgactggcagcgacccatcaacaacaactggggattccggcccaagagactcagcttcaagctcttcaacatccaggtcaaagaggtcacgcagaatgaaggcaccaagaccatcgccaataacctcaccagcaccatccaggtgtttacggactcggaataccagctgccgtacgtcctcggctctgcccaccagggctgcctgcctccgttcccggcggacgtcttcatgattcctcagtacggctacctgactctcaacaacggtagtcaggccgtgggacgttcctccttctactgcctggagtacttcccctctcagatgctgagaacgggcaacaacttttccttcagctaccctttcgaggacgtgcctttccacagcagctacgcgcacagccagagtttggacaggctgatgaatcctctcatcgaccagtacctgtactacctgtcaagaacccagtctacgggaggcacagcgggaacccagcagttgctgttttctcaggccgggcctagcaacatgtcggctcaggccagaaactggctgcctggaccctgctacagacagcagcgcgtctccacgacactgtcgcaaaacaacaacagcaactttgcctggactggtgccaccaagtatcatctgaacggcagagactctctggtgaatccgggcgtcgccatggcaaccaacaaggacgacgaggaccgcttcttcccatccagcggcatcctcatgtttggcaagcagggagctggaaaagacaacgtggactatagcaacgtgatgctaaccagcgaggaagaaatcaagaccaccaaccccgtggccacagaacagtatggcgtggtggctgataacctacagcagcaagacaccgctcctattgtgggggccgtcaacagccagggagccttacctggcatggtctggcagaaccgggacgtgtacctgcagggtcctatttgggccaagattcctcacacagatggcaactttcacccgtctcctttaatgggcggctttggacttaaacatccgcctcctcaggtcctcatcaaaaacactcctgttcctgcggatcctccaacagcgttcaaccaggccaagctgaattctttcatcacgcagtacagcaccggacaagtcagcgtggagatcgagtgggagctgcagaaggagaacagcaagcgctggaacccagagattcagtatacttccaactactacaaatctacaaatgtggactttgctgttaatactgagggtgtttactctgagcctcgccccattggcactcgttacctcacccgtaatctgtaa

SEQ ID NO: 5070 - DNA, 2214 bp, Adeno-associated virus
atggctgctgacggttatcttccagattggctcgaggacaacctctctgagggcattcgcgagtggtgggacctgaaacctggagcccccaagcccaaggccaaccagcagaagcaggacgacggccggggtctggtgcttcctggctacaagtacctcggacccttcaacggactcgacaagggggagcccgtcaacgcggcggacgcagcggccctcgagcacgacaaggcctacgaccagcagctcaaagcgggtgacaatccgtacctgcggtataaccacgccgacgccgagttccaggagcgtctgcaagaagatacgtcttttgggggcaacctcgggcgagcagtcttccaggccaagaagcgggttctcgaacctctcggtctggctgaggaagctgctaagacggctcctggaaagaagagaccggtagaaccgtcacctcagcgttcccccgactcctccacgggcatcggcaagaaaggccagcagcccgctagaaagagactgaactttgggcagactggcgactcagagtcagtccccgaccctcaaccaatcggagagccaccagcaggcccctctggtctgggatctggtacaatggctgcaggcggtggcgcaccaatggctgacaataacaagggcgccgacggagtgggtaatgcctcaggaaattggcattgcgattccacatggctgggcgacagagtcatcaccaccagcacccgaacctgggctttgcccacctacaacaaccacctctacaagcaaatctccagtcagtcagcaggtagcaccaacgacaacgtctacttcggctacagcaccccctgggggtattttgacttcaacagattccactgtcacttctcaccacgtgactggcagcggctcatcaacaacaactggggattccggcccaagaagctcaacttcaagctgttcaacatccaggtcaaggaggtcacaacgggtgacggcgtcacgaccatcgccaataaccttaccagcacggttcaggtcttttcggactcggaataccagctgccctacgtcctcggctccgcacaccagggctgcctgcctccgttcccggcggacgtcttcatgattccccagtacggctacctgactctgaacaatgacagccaatcggtgggtcgttcctctttctactgcctggaatatttcccttctcaaatgctgagaacgggcaacaacttcaccttcagctacaccttcgaggacgttcccttccacagcagctacgcacacagccagagcctggaccggctgatgaatcctcttatcgaccagtacctgtattacctggccagaacacagagcaacgcaggaggcacagctggcaatcgggaactgcagttttatcagggcgggcctaccaccatggccgaacaagccaaaaactggctgcctggaccttgcttccggcaacaaagagtctccaagacgctggatcaaaacaacaacagcaactttgcttggactggtgccaccaaataccatctaaatggaagaaattcattggttaatcccggtgtcgccatggcaacccacaaggacgacgaggaacgcttcttcccttcgagcggagtcctgatttttggaaaaactggagcagctaataagactacactggaaaatgtgttaatgacaaatgaagaggaaattcgtcctaccaacccggtagccaccgaggaatacgggactgttagcagcaacctgcaggcggctaacactgcagcccagacacaagttgtcaacaaccagggagccttacctggtatggtctggcagaaccgggacgtgtacctgcagggtcccatctgggccaagattcctcacacggacggcaactttcacccgtctccgctgatgggcggctttggactgaagcatccgcctcctcagatcctgatcaaaaacactcctgttcctgctaatcccccggaggtgtttacgcctgccaagtttgcttctttcatcacacagtacagcaccggccaggtcagcgtggagatcgagtgggagctgcagaaggagaacagcaagcgctggaacccagagattcagtatacctccaattttgacaaacagactggtgtggactttgccgttgacagccagggtgtttattctgagcctcgccccattggtactcgttacctcacccgtaatctgtaa

SEQ ID NO: 5071 - protein, 737 aa, Adeno-associated virus
MAADGYLPDWLEDNLSEGIREWWDLKPGAPKPKANQQKQDDGRGLVLPGYKYLGPFNGLDKGEPVNAADAAALEHDKAYDQQLKAGDNPYLRYNHADAEFQERLQEDTSFGGNLGRAVFQAKKRVLEPLGLAEEAAKTAPGKKRPVEPSPQRSPDSSTGIGKKGQQPARKRLNFGQTGDSESVPDPQPIGEPPAGPSGLGSGTMAAGGGAPMADNNKGADGVGNASGNWHCDSTWLGDRVITTSTRTWALPTYNNHLYKQISSQSAGSTNDNVYFGYSTPWGYFDFNRFHCHFSPRDWQRLINNNWGFRPKKLNFKLFNIQVKEVTTGDGVTTIANNLTSTVQVFSDSEYQLPYVLGSAHQGCLPPFPADVFMIPQYGYLTLNNDSQSVGRSSFYCLEYFPSQMLRTGNNFTFSYTFEDVPFHSSYAHSQSLDRLMNPLIDQYLYYLARTQSNAGGTAGNRELQFYQGGPTTMAEQAKNWLPGPCFRQQRVSKTLDQNNNSNFAWTGATKYHLNGRNSLVNPGVAMATHKDDEERFFPSSGVLIFGKTGAANKTTLENVLMTNEEEIRPTNPVATEEYGTVSSNLQAANTAAQTQVVNNQGALPGMVWQNRDVYLQGPIWAKIPHTDGNFHPSPLMGGFGLKHPPPQILIKNTPVPANPPEVFTPAKFASFITQYSTGQVSVEIEWELQKENSKRWNPEIQYTSNFDKQTGVDFAVDSQGVYSEPRPIGTRYLTRNL

SEQ ID NO: 5072 - DNA, 2217 bp, Adeno-associated virus
atggctgccgatggttatcttccagattggctcgaggacaacctctctgagggcattcgcgagtggtgggacctgaaacctggagccccgaaacccaaagccaaccagcaaaagcaggacgacggccggggtctggtgcttcctggctacaagtacctcggacccttcaacggactcgacaagggggagcccgtcaacgcggcggacgcagcggccctcgagcacgacaaggcctacgaccagcagctcaaagcgggtgacaatccgtacctgcggtataatcacgccgacgccgagtttcaggagcgtctgcaagaagatacgtcttttgggggcaacctcgggcgagcagtcttccaggccaagaagcgggttctcgaacctctcggtctggttgaggaaggcgctaagacggctcctggaaagaagagaccggtagagccgtcaccacagcgttcccccgactcctccacgggcatcggcaagaaaggccagcagcccgccagaaagagactcaatttcggtcagactggcgactcagagtcagtccccgaccctcaacctatcggagaacctccagcagcgccctctagtgtgggatctggtacaatggctgcaggcggtggcgcaccaatggcagacaataacgaaggtgccgacggagtgggtagttcctcgggaaattggcattgcgattccacatggctgggcgacagagtcatcaccaccagcacccgaacctgggccctgcccacctacaacaaccacctctacaagcaaatctccaacgggacctcgggaggcagcaccaacgacaacacctactttggctacagcaccccctgggggtattttgactttaacagattccactgccacttctcaccacgtgactggcagcgactcatcaacaacaactggggattccggcccaagagactcagcttcaagctcttcaacatccaggtcaaagaggtcacgcagaatgaaggcaccaagaccatcgccaataacctcaccagcaccatccaggtgtttacggactcggaataccagctgccgtacgtcctcggctctgcccaccagggctgcctgcctccgttcccggcggacgtcttcatgattcctcagtacggctacctgactctcaacaacggtagtcaggccgtgggacgttcctccttctactgcctggagtacttcccctctcagatgctgagaacgggcaacaacttttccttcagctacactttcgaggacgtgcctttccacagcagctacgcgcacagccagagtttggacaggctgatgaatcctctcatcgaccagtacctgtactacctgtcaagaacccagtctacgggaggcacagcgggaacccagcagttgctgttttctcaggccgggcctagcaacatgtcggctcaggccagaaactggctgcctggaccctgctacagacagcagcgcgtctccacgacactgtcgcaaaacaacaacagcaactttgcctggactggtgccaccaagtatcatctgaacggcagagactctctggtgaatccgggcgtcgccatggcaaccaacaaggacgacgaggaccgcttcttcccatccagcggcatcctcatgtttggcaagcagggagctggaaaagacaacgtggactatagcaacgtgatgctaaccagcgaggaagaaatcaagaccaccaaccccgtggccacagaacagtatggcgtggtggctgataacctacagcagcaaaacaccgctcctattgtgggggccgtcaacagccagggagccttacctggcatggtctggcagaaccgggacgtgtacctgcagggtcctatttgggccaagattcctcacacagatggcaactttcacccgtctcctttaatgggcggctttggacttaaacatccgcctcctcagatcctcatcaaaaacactcctgttcctgcggatcctccaacagcgttcaaccaggccaagctgaattctttcatcacgcagtacagcaccggacaagtcagcgtggagatcgtgtgggagctgcagaaggagaacagcaagcgcaggaacccagagattcagtatacttccaactactacaaatctacaaatgtggactttgctgttaatactgagggtgtttactctgagcctcgccccattggcactcgttacctcacccgtaatctgtaa

SEQ ID NO: 5073 - protein, 738 aa, Adeno-associated virus
MAADGYLPDWLEDNLSEGIREWWDLKPGAPKPKANQQKQDDGRGLVLPGYKYLGPFNGLDKGEPVNAADAAALEHDKAYDQQLKAGDNPYLRYNHADAEFQERLQEDTSFGGNLGRAVFQAKKRVLEPLGLVEEGAKTAPGKKRPVEPSPQRSPDSSTGIGKKGQQPARKRLNFGQTGDSESVPDPQPIGEPPAAPSSVGSGTMAAGGGAPMADNNEGADGVGSSSGNWHCDSTWLGDRVITTSTRTWALPTYNNHLYKQISNGTSGGSTNDNTYFGYSTPWGYFDFNRFHCHFSPRDWQRLINNNWGFRPKRLSFKLFNIQVKEVTQNEGTKTIANNLTSTIQVFTDSEYQLPYVLGSAHQGCLPPFPADVFMIPQYGYLTLNNGSQAVGRSSFYCLEYFPSQMLRTGNNFSFSYTFEDVPFHSSYAHSQSLDRLMNPLIDQYLYYLSRTQSTGGTAGTQQLLFSQAGPSNMSAQARNWLPGPCYRQQRVSTTLSQNNNSNFAWTGATKYHLNGRDSLVNPGVAMATNKDDEDRFFPSSGILMFGKQGAGKDNVDYSNVMLTSEEEIKTTNPVATEQYGVVADNLQQQNTAPIVGAVNSQGALPGMVWQNRDVYLQGPIWAKIPHTDGNFHPSPLMGGFGLKHPPPQILIKNTPVPADPPTAFNQAKLNSFITQYSTGQVSVEIVWELQKENSKRRNPEIQYTSNYYKSTNVDFAVNTEGVYSEPRPIGTRYLTRNL

SEQ ID NO: 5074 - protein, 738 aa, Adeno-associated virus
MAADGYLPDWLEDNLSEGIREWWDLKPGAPKPKANQQKQDDGRGLVLPGYKYLGPFNGLDKGEPVNAADAAALEHDKAYDQQLKAGDNPYLRYNHADAEFQERLQEDTSFGGNLGRAVFQAKKRVLEPLGLVEEGAKTAPGKKRPVEPSPQRSPDSSTGIGKKGQQPARKRLNFGQTGDSESVPDPQPIGEPPAAPSSVGSGTMAAGGGAPMADNNEGADGVGSSSGNWHCDSTWLGDRVITTSTRTWALPTYNNHLYKQISNGTSGGSTNDNTYFGYSTPWGYFDFNRFHCHFSPRDWQRLINNNWGFRPKRLSFKLFNIQVKEVTQNEGTKTIANNLTSTIQVFTDSEYQLPYVLGSAHQGCLPPFPADVFMIPQYGYLTLNNGSQAVGRSSFYCLEYFPSQMLRTGNNFSFSYTFEDVPFHSSYAHSQSLDRLMNPLIDQYLYYLSRTQSTGGTAGTQQLLFSQAGPSNMSAQARNWLPGPCYRQQRVSTTLSQNNNSNFAWTGATKYHLNGRDSLVNPGVAMATNKDDEDRFFPSSGILMFGKQGAGKDNVDYSNVMLTSEEEIKTTNPVATEQYGVVADNLQQQNTAPIVGAVNSQGALPGMVWQNRDVYLQGPIWAKIPHTDGNFHPSPLMGGFGLKHPPPQILIKNTPVPADPPTAFNQAKLNSFITQYSTGQVSVEIEWELQKENSKRWNPEIQYTSNYYKSTNVDFAVNTEGVYSEPRPIGTRYLTRNL

SEQ ID NO: 5075 - protein, 738 aa, Adeno-associated virus
MAADGYLPDWLEDNLSEGIREWWDLKPGAPKPKANQQKQDDGRGLVLPGYKYLGPFNGLDKGEPVNAADAAALEHDKAYDQQLKAGDNPYLRYNHADAEFQERLQEDTSFGGNLGRAVFQAKKRVLEPLGLVEEGAKTAPGKKRPVEPSPQRSPDSSTGIGKKGQQPARKRLNFGQTGDSESVPDPQPIGEPPAAPSSVGSGTMAAGGGAPMADNNEGADGVGSSSGNWHCDSTWLGDRVITTSTRTWALPTYNNHLYKQISNGTSGGSTNDNTYFGYSTPWGYFDFNRFHCHFSPRDWQRLINNNWGFRPKRLSFKLFNIQVKEVTQNEGTKTIANNLTSTIQVFTDSEYQLPYVLGSAHQGCLPPFPADVFMIPQYGYLTLNNGSQAVGRSSFYCLEYFPSQMLRTGNNFSFSYTFEDVPFHSSYAHSQSLDRLMNPLIDQYLYYLSRTQSTGGTAGTQQLLFSQAGPSNMSAQARNWLPGPCYRQQRVSTTLSQNNNSNFAWTGATKYHLNGRDSLVNPGVAMATNKDDEDRFFPSSGILMFGKQGAGKDNVDYSNVMLTSEEEIKTTNPVATEQYGVVADNLQQQNTAPIVGAVNSQGALPGMVWQNRDVYLQGPIWAKIPHTDGNFHPSPLMGGFGLKHPPPQILIKNTPVPADPPTAFNQAKLNSFITQYSTGQVSVEIVWELQKENSKRWNPEIQYTSNYYKSTNVDFAVNTEGVYSEPRPIGTRYLTRNL

SEQ ID NO: 5076 - protein, 738 aa, Adeno-associated virus; identical to SEQ ID NO: 5074

SEQ ID NO: 5077 - DNA, 2214 bp, Adeno-associated virus
atggctgctgacggttatcttccagattggctcgaggacaacctctctgagggcattcgcgagtggtgggacctgaaacctggagcccccaagcccaaggccaaccagcagaagcaggacgacggccggggtctggtgcttcctggctacaagtacctcggacccttcaacggactcgacaagggggagcccgtcaacgcggcggacgcagcggccctcgagcacgacaaggcctacgaccagcagctcaaagcgggtgacaatccgtacctgcggtataaccacgccgacgccgagtttcaggagcgtctgcaagaagatacgtcttttgggggcaacctcgggcgagcagtcttccaggccaagaagcgggttctcgaacctctcggtctggttgaggaagctgctaagacggctcctggaaagaagagaccggtagaaccgtcacctcagcgttcccccgactcctccacgggcatcggcaagaaaggccagcagcccgctagaaagagactgaactttgggcagactggcgactcagagtcagtccccgaccctcaaccaatcggagaaccaccagcaggcccctctggtctgggatctggtacaatggctgcaggcggtggcgctccaatggcagacaataacgaaggcgccgacggagtgggtaatgcctcaggaaattggcattgcgattccacatggctgggcgacagagtcatcaccaccagcacccgaacctgggctttgcccacctacaacaaccacctctacaagcaaatctccagtcagtcagcaggtagcaccaacgacaacgtctacttcggctacagcaccccctgggggtattttgacttcaacagattccactgtcacttctcaccacgtgactggcagcggctcatcaacaacaactggggattccggcccaagaagctcaacttcaagctgttcaacatccaggtcaaggaggtcacaacgaatgacggcgtcacgaccatcgccaataaccttaccagcacggttcaggtcttttcggactcggaataccagctgccctacgtcctcggctccgcacaccagggctgcctgcctccgttcccggcggacgtcttcatgattccccagtacggctacctgactctgaacaatggcagccaatcggtgggtcgttcctctttctactgcctggaatatttcccttctcaaatgctgagaacgggcaacaacttcaccttcagctacaccttcgaggacgttcccttccacagcagctacgcacacagccagagcctggaccggctgatgaatcctcttatcgaccagtacctgtattacctggccagaacacagagcaacgcaggaggcacagctggcaatcgggaactgcagttttatcagggcgggcctaccaccatggccgaacaagccaaaaactggctgcctagaccttgcttccggcaacaaagagtctccaagacgctggatcaaaacaacaacagcaactttgcttggactggtgccaccaaataccatctaaatggaagaaattcattggttaatcccggtgtcgccatggcaacccacaaggacgacgaggaacgcttcttcccttcgagcggagtcctgatttttggaaaaactggagcagctaataagactacactggaaaatgtgttaatgacaaatgaagaggaaattcgtcctaccaacccggtagccaccgaggaatacgggactgttagcagcaacctgcaggcggctaacactgcagcccagacacaagttgtcaacaaccagggagccttacctggtatggtctggcagaaccgggacgtgtacctgcagggtcccatctgggccaagattcctcacacggacggcaactttcacccgtctccgctgatgggcggctttggactgaagcatccgcctcctcagatcctgatcaaaaacactcctgttcctgctaatcccccggaggtgtttacgcctgccaagtttgcttctttcatcacacagtacagcaccggccaggtcagcgtggagatcgagtgggagctgcagaaggagaacagcaagcgctggaacccagagattcagtatacctccaattttgacaaacagactggtgtggactttgccgttgacagccagggtgtttattctgagcctcgccccattggtactcgttacctcacccgtaatctgtaa

SEQ ID NO: 5078 - protein, 737 aa, Adeno-associated virus
MAADGYLPDWLEDNLSEGIREWWDLKPGAPKPKANQQKQDDGRGLVLPGYKYLGPFNGLDKGEPVNAADAAALEHDKAYDQQLKAGDNPYLRYNHADAEFQERLQEDTSFGGNLGRAVFQAKKRVLEPLGLVEEAAKTAPGKKRPVEPSPQRSPDSSTGIGKKGQQPARKRLNFGQTGDSESVPDPQPIGEPPAGPSGLGSGTMAAGGGAPMADNNEGADGVGNASGNWHCDSTWLGDRVITTSTRTWALPTYNNHLYKQISSQSAGSTNDNVYFGYSTPWGYFDFNRFHCHFSPRDWQRLINNNWGFRPKKLNFKLFNIQVKEVTTNDGVTTIANNLTSTVQVFSDSEYQLPYVLGSAHQGCLPPFPADVFMIPQYGYLTLNNGSQSVGRSSFYCLEYFPSQMLRTGNNFTFSYTFEDVPFHSSYAHSQSLDRLMNPLIDQYLYYLARTQSNAGGTAGNRELQFYQGGPTTMAEQAKNWLPRPCFRQQRVSKTLDQNNNSNFAWTGATKYHLNGRNSLVNPGVAMATHKDDEERFFPSSGVLIFGKTGAANKTTLENVLMTNEEEIRPTNPVATEEYGTVSSNLQAANTAAQTQVVNNQGALPGMVWQNRDVYLQGPIWAKIPHTDGNFHPSPLMGGFGLKHPPPQILIKNTPVPANPPEVFTPAKFASFITQYSTGQVSVEIEWELQKENSKRWNPEIQYTSNFDKQTGVDFAVDSQGVYSEPRPIGTRYLTRNL

SEQ ID NO: 5079 - DNA, 2214 bp, Adeno-associated virus
atggctgctgacggttatcttccagattggctcgaggacaacctctctgagggcattcgcgagtggtgggacctgaaacctggagcccccaagcccaaggccaaccagcagaagcaggacgacggccggggtctggtgcttcctggctacaagtacctcggacccttcaacggactcgacaagggggagcccgtcaacgcggcggacgcagcggccctcgagcacgacaaggcctacgaccagcagctcaaagcgggtgacaatccgtacctgcggtataaccatgccgacgccgagtttcaggagcgtctgcaagaagatacgtcttttgggggcaacctcgggcgagcagtcctccaggccaagaagcgggttctcgaacctctcggtctggttgaggaagctgctaagacggctcctggaaagaagagaccggtagaaccgtcacctcagcgttcccccgactcctccacgggcatcggcaagaaaggccagcagcccgctagaaagagactgaactttgggcagactggcgactcagagtcagtccccgaccctcaaccaatcggagaaccaccagcaggcccctctggtctgggatctggtacaatggctgcaggcggtggcgctccaatggcagacaataacgaaggcgccgacggagtgggtaatgcctcaggaaattggcattgcgattccacatggctgggcgacagagtcatcaccaccagcacccgaacctgggctttgcccacctacaacaaccacctctacaagcaaatctccagtcagtcagcaggtagcaccaacgacaacgtctacttcggctacagcaccccctgggggtattttgacttcaacagattccactgtcacttctcaccacgtgactggcagcggctcatcaacaacaactggggattccggcccaagaagctcaacttcaagctgttcaacatccaggtcaaggaggtcacaacgaatgacggcgtcacgaccatcgccaataaccttaccagcacggttcaggtcttttcggactcggaataccagctgccctacgtcctcggctccgcacaccagggctgcctgcctccgttcccggcggacgtcttcatgattccccagtacggctacctgactctgaacaatggcagccaatcggtgggtcgttcctctttctactgcctggaatatttcccttctcaaatgctgagaacgggcaacaacttcaccttcagctacaccttcgaggacgttcccttccacagcagctacgcacacagccagagcctggaccggctgatgaatcctcttatcgaccagtacctgtattacctggccagaacacagagcaacgcaggaggcacagctggcaatcgggaactgcagttttatcagggcgggcctaccaccatggccgaacaagccaaaaactggctgcctggaccttgcttccggcaacaaagagtctccaagacgctggatcaaaacaacaacagcaactttgcttggactggtgccaccaaataccatctaaatggaagaaattcattggttaatcccggtgtcgccatggcaacccacaaggacgacgaggaacgcttcttcccttcgagcggagtcctgatttttggaaaaactggagcagctaataagactacactggaaaatgtgttaatgacaaatgaagaggaaattcgtcctaccaacccggtagccaccgaggaatacgggactgttagcagcaacctgcaggcggctaacactgcagcccagacacaagttgtcaacaaccagggagccttacctggtatggtctggcagaaccgggacgtgtacctgcagggtcccatctgggccaagattcctcacacggacggcaactttcacccgtctccgctgatgggcggctttggactgaagcatccgcctcctcagatcctgatcaaaaacactcctgttcctgctaatcccccggaggtgtttacgcctgccaagtttgcttctttcatcacacagtacagcaccggccaggtcagcgtggagatcgagtgggagctgcagaaggagaacagcaagcgctggaacccagagattcagtatacctccaattttgacaaacagactggtgtggactttgccgttgacagccagggtgtttattctgagcctcgccccattggtactcgttacctcacccgtaatctgtaa

SEQ ID NO: 5080 - protein, 737 aa, Adeno-associated virus; identical to SEQ ID NO: 5040

SEQ ID NO: 5081 - protein, 737 aa, Adeno-associated virus
MAADGYLPDWLEDNLSEGIREWWDLKPGAPKPKANQQKQDDGRGLVLPGYKYLGPFNGLDKGEPVNAADAAALEHDKAYDQQLKAGDNPYLRYNHADAEFQERLQEDTSFGGNLGRAVLQAKKRVLEPLGLVEEAAKTAPGKKRPVEPSPQRSPDSSTGIGKKGQQPARKRLNFGQTGDSESVPDPQPIGEPPAGPSGLGSGTMAAGGGAPMADNNEGADGVGNASGNWHCDSTWLGDRVITTSTRTWALPTYNNHLYKQISSQSAGSTNDNVYFGYSTPWGYFDFNRFHCHFSPRDWQRLINNNWGFRPKKLNFKLFNIQVKEVTTNDGVTTIANNLTSTVQVFSDSEYQLPYVLGSAHQGCLPPFPADVFMIPQYGYLTLNNGSQSVGRSSFYCLEYFPSQMLRTGNNFTFSYTFEDVPFHSSYAHSQSLDRLMNPLIDQYLYYLARTQSNAGGTAGNRELQFYQGGPTTMAEQAKNWLPGPCFRQQRVSKTLDQNNNSNFAWTGATKYHLNGRNSLVNPGVAMATHKDDEERFFPSSGVLIFGKTGAANKTTLENVLMTNEEEIRPTNPVATEEYGTVSSNLQAANTAAQTQVVNNQGALPGMVWQNRDVYLQGPIWAKIPHTDGNFHPSPLMGGFGLKHPPPQILIKNTPVPANPPEVFTPAKFASFITQYSTGQVSVEIEWELQKENSKRWNPEIQYTSNFDKQTGVDFAVDSQGVYSEPRPIGTRYLTRNL

SEQ ID NO: 5082 - DNA, 2217 bp, Adeno-associated virus
atggctgccgatggttatcttccagattggctcgaggacaacctctctgagggcattcgcgagtggtgggacctgaaacctggagccccgaaacccaaagccaaccagcaaaagcaggacgacggccggggtctggtgcttcctggctacaagtacctcggacccttcaacggactcgacaagggggagcccgtcaacgcggcggacgcagcggccctcgagcacgacaaggcctacgaccagcagctcaaagcgggtgacaatccgtacctgcggtataatcacgccgacgccgagtttcaggagcgtctgcaagaagatacgtcttttgggggcaacctcgggcgagcagtcttccaggccaagaagcgggttctcgaacctctcggtctggttgaggaaggcgctaagacggctcctggaaagaagagaccggtagagccgtcaccacagcgttcccccgactcctccacgggcatcggcaagaaaggccagcagcccgccagaaagagactcaatttcggtcagactggcgactcagagtcagtccccgaccctcaacctatcggagaacctccagcagcgccctctagtgtgggatctggtacaatggctgcaggcggtggcgcaccaatggcagacaataacgaaggtgccgacggagtgggtagttcctcgggaaattggcattgcgattccacatggctgggcgacagagtcatcaccaccagcacccgaacctgggccctgcccacctacaacaaccacctctacaagcaaatctccaacgggacctcgggaggcagcaccaacgacaacacctactttggctacagcaccccctgggggtattttgactttaacagattccactgccacttctcaccacgtgactggcagcgactcatcaacaacaactggggattccggcccaagagactcagcttcaagctcttcaacatccaggtcaaagaggtcacgcagaatgaaggcaccaagaccatcgccaataacctcaccagcaccatccaggtgtttacggactcggaataccagctgccgtacgtcctcggctctgcccaccagggctgcctgcctccgttcccggcggacgtcttcatgattcctcagtacggctacctgactctcaacaacggtagtcaggccgtgggacgttcctccttctactgcctggagtacttcccctctcagatgctgagaacgggcaacaacttttccttcagctacactttcgaggacgtgcctttccacagcagctacgcgcacagccagagtttggacaggctgatgaatcctctcatcgaccagtacctgtactacctgtcaagaacccagtctacgggaggcacagcgggaacccagcagttgctgttttctcaggccgggcctagcaacatgtcggctcaggccagaaactggctgcctggaccctgctacagacagcagcgcgtctccacgacactgtcgcaaaacaacaacagcaactttgcctggactggtgccaccaagtatcatctgaacggcagagactctctggtgaatccgggcgtcgccatggcaaccaacaaggacgacgaggaccgcttcttcccacccagcggcatcctcatgtttggcaagcagggagctggaaaagacaacgtggactatagcaacgtgatgctaaccagcgaggaagaaatcaagaccaccaaccccgtggccacagaacagtatggcgtggtggctgataacctacagcagcaaaacaccgctcctattgtgggggccgtcaacagccagggagccttacctggcatggtctggcagaaccgggacgtgtacctgcagggtcctatttgggccaagattcctcacacagatggcaactttcacccgtctcctttaatgggcggctttggacttaaacatccgcctcctcagatcctcatcaaaaacactcctgttcctgcggatcctccaacagcgttcaaccaggccaagctgaattctttcatcacgcagtacagcaccggacaagtcagcgtggtgatcgagtgggagctgcagaaggagaacagcaagcgctggaacccagagattcagtatacttccaactactacaaatctacaaatgtggactttgctgttaatactgagggtgtttactctgagcttcgccccattggcactcgttacctcacccgtaatctgtaa

SEQ ID NO: 5083 - protein, 738 aa, Adeno-associated virus
MAADGYLPDWLEDNLSEGIREWWDLKPGAPKPKANQQKQDDGRGLVLPGYKYLGPFNGLDKGEPVNAADAAALEHDKAYDQQLKAGDNPYLRYNHADAEFQERLQEDTSFGGNLGRAVFQAKKRVLEPLGLVEEGAKTAPGKKRPVEPSPQRSPDSSTGIGKKGQQPARKRLNFGQTGDSESVPDPQPIGEPPAAPSSVGSGTMAAGGGAPMADNNEGADGVGSSSGNWHCDSTWLGDRVITTSTRTWALPTYNNHLYKQISNGTSGGSTNDNTYFGYSTPWGYFDFNRFHCHFSPRDWQRLINNNWGFRPKRLSFKLFNIQVKEVTQNEGTKTIANNLTSTIQVFTDSEYQLPYVLGSAHQGCLPPFPADVFMIPQYGYLTLNNGSQAVGRSSFYCLEYFPSQMLRTGNNFSFSYTFEDVPFHSSYAHSQSLDRLMNPLIDQYLYYLSRTQSTGGTAGTQQLLFSQAGPSNMSAQARNWLPGPCYRQQRVSTTLSQNNNSNFAWTGATKYHLNGRDSLVNPGVAMATNKDDEDRFFPPSGILMFGKQGAGKDNVDYSNVMLTSEEEIKTTNPVATEQYGVVADNLQQQNTAPIVGAVNSQGALPGMVWQNRDVYLQGPIWAKIPHTDGNFHPSPLMGGFGLKHPPPQILIKNTPVPADPPTAFNQAKLNSFITQYSTGQVSVVIEWELQKENSKRWNPEIQYTSNYYKSTNVDFAVNTEGVYSELRPIGTRYLTRNL

SEQ ID NO: 5084 - DNA, 2214 bp, Adeno-associated virus
atggctgctgacggttatcttccagattggctcgaggacaacctctctgagggcattcgcgagtggtgggacctgaaacctggagcccccaagcccaaggccaaccagcagaagcaggacgacggccggggtctggtgcttcctggctacaagtacctcggacccttcaacggactcgacaagggggagcccgtcaacgcggcggacgcagcggccctcgagcacgacaaggcctacgaccagcagctcaaagcgggtgacaatccgtacctgcggtataaccacgccgacgccgagtttcaggagcgtctgcaagaagatacgtcttttgggggcaacctcgggcgagcagtcttccaggccaagaagcgggttctcgaacctctcggtctggttgaggaagctgctaagacggctcctggaaagaagagaccggtagaaccgtcacctcagcgttcccccgactcctccacgggcatcggcaagaaaggccagcagcccgctagaaagagactgaactttgggcagactggcgactcagagtcagtccccgaccctcaaccaatcggagaaccaccagcaggcccctctggtctgggatctggtacaatggctgcaggcggtggcgccccaatggcagacaataacgaaggcgccgacggagtgggtaatgcctcaggaaattggcattgcgattccacatggctgggcgacagagtcatcaccaccagcacccgaacctgggctttgcccacctacaacaaccacctctacaagcaaatctccagtcagtcagcaggtagcaccaacgacaacgtctacttcggctacagcaccccctgggggtattttgacttcaacagattccactgtcacttctcaccacgtgactggcagcggctcatcaacaacaactggggattccggcccaagaagctcaacttcaagctgttcaacatccaggtcaaggaggtcacaacgaatgacggcgtcacgaccatcgccaataaccttaccagcacggttcaggtcttttcggactcggaataccagctgccctacgtcctcggctccgcacaccagggctgcctgcctccgttcccggcggacgtcttcatgattccccagtacggctacctgactctgaacaatggcagccaatcggtgggtcgttcctctttctactgcctggaatatttcccttctcaaatgctgagaacgggcaacaacttcaccatcagctacaccttcgaggacgttcccttccacagcagctacgcacacagccagagcctggaccggctgatgaatcctcttatcgaccagtacctgtattacctggccagaacacagagcaacgcaggaggcacagctggcaatcaggaactgcagttttatcagggcgggcctaccaccatggccgaacaagccaaaaactggctgcctggaccttgcttccggcaacaaagagtctccaagacgctggatcaaaacaacaacagcaactttgcttggactggtgccaccaaataccatctaaatggaagaaattcattggttaatcccggtgtcgccatggcaacccacaaggacgacgaggaacgcttcttcccttcgagcggagtcctgatttttggaaaaactggagcagctaataagactacactggaaaatgtgttaatgacaaatgaagaggaaattcgtcctaccaacccggtagccaccgaggaatacgggactgttagcagcaacctgcaggcggctaacactgcagcccagacacaagttgtcaacaaccagggagccttacctggtatggtctggcagaaccgggacgtgtacctgcagggtcccatctgggccaagattcctcacacagatggcaactttcacccgtctcctttaatgggcggctttggacttaaacatccgcctcctcagatcctcatcaaaaacactcctgttcctgcggatcctccaacagcgttcaaccaggccaagctgaattctttcatcacgcagtacagcaccggacaagtcagcgtggagatcgagtgggagctgcagaaggagaacagcaagcgctggaacccagagattcagtatacttccaactactacaaatctacaaatgtggactttgctgttaatactgagggtgtttactctgagcctcgccccattggcactcgttacctcacccgtaatctgtaa

SEQ ID NO: 5085 - protein, 737 aa, Adeno-associated virus
MAADGYLPDWLEDNLSEGIREWWDLKPGAPKPKANQQKQDDGRGLVLPGYKYLGPFNGLDKGEPVNAADAAALEHDKAYDQQLKAGDNPYLRYNHADAEFQERLQEDTSFGGNLGRAVFQAKKRVLEPLGLVEEAAKTAPGKKRPVEPSPQRSPDSSTGIGKKGQQPARKRLNFGQTGDSESVPDPQPIGEPPAGPSGLGSGTMAAGGGAPMADNNEGADGVGNASGNWHCDSTWLGDRVITTSTRTWALPTYNNHLYKQISSQSAGSTNDNVYFGYSTPWGYFDFNRFHCHFSPRDWQRLINNNWGFRPKKLNFKLFNIQVKEVTTNDGVTTIANNLTSTVQVFSDSEYQLPYVLGSAHQGCLPPFPADVFMIPQYGYLTLNNGSQSVGRSSFYCLEYFPSQMLRTGNNFTISYTFEDVPFHSSYAHSQSLDRLMNPLIDQYLYYLARTQSNAGGTAGNQELQFYQGGPTTMAEQAKNWLPGPCFRQQRVSKTLDQNNNSNFAWTGATKYHLNGRNSLVNPGVAMATHKDDEERFFPSSGVLIFGKTGAANKTTLENVLMTNEEEIRPTNPVATEEYGTVSSNLQAANTAAQTQVVNNQGALPGMVWQNRDVYLQGPIWAKIPHTDGNFHPSPLMGGFGLKHPPPQILIKNTPVPADPPTAFNQAKLNSFITQYSTGQVSVEIEWELQKENSKRWNPEIQYTSNYYKSTNVDFAVNTEGVYSEPRPIGTRYLTRNL

SEQ ID NO: 5086 - DNA, 2217 bp, Adeno-associated virus
atggctgccgatggttatcttccagattggctcgaggacaacctctctgagggcattcgcgagtggtgggacctgaaacctggagccccgaaacccaaagccaaccagcaaaagcaggacgacggccggggtctggtgcttcctggctacaagtacctcggacccttcaacggactcgacaagggggagcccgtcaacgcggcggacgcagcggccctcgagcacgacaaggcctacgaccagcagctcaaagcgggtgacaatccgtacctgcggtataatcacgccgacgccgagtttcaggagcgtctgcaagaagatacgtcttttgggggcaacctcgggcgagcagtcttccaggccaagaagcgggttctcgaacctctcggtctggttgaggaaggcgctaagacggctcctggaaagaagagaccggtagagccgtcaccacagcgttcccccgactcctccacgggcatcggcaagaaaggccagcagcccgccagaaagagactcaatttcggtcagactggcgactcagagtcagtccccgaccctcaacctatcggagaacctccagcagcgccctctagtgtgggatctggtacaatggctgcaggcggtggcgcaccaatggcagacaataacgaaggtgccgacggagtgggtagttcctcgggaaattggcattgcgattccacatggctgggcgacagagtcatcaccaccagcacccgaacctgggccctgcccgcctacaacaaccacctctacaagcaaatctccaacgggacctcgggaggcagcaccaacgacaacacctactttggctacagcaccccctgggggtattttgactttaacagattccactgccacttctcaccacgtgactggcagcgactcatcaacaacaactggggattccggcccaagagactcagcttcaagctcttcaacatccaggtcaaagaggtcacgcagaatgaaggcaccaagaccatcgccaataacctcaccagcaccatccaggtgtttacggactcggaataccagctgccgtacgtcctcggctctgcccaccagggctgcctgcctccgttcccggcggatgtcttcatgattcctcagtacggctacctgactctcaacaacggtagtcaggccgtgggacgttcctccttctactgcctggagtacttcccctctcagatgctgagaacgggcaacaacttttccttcagctacactttcgaggacgtgcctttccacagcagctacgcgcacagccagagtttggacaggctgatgaatcctctcatcgaccagtacctgtactacctgtcaagaacccagtctacgggaggcacagcgggaacccagcagttgctgttttctcaggccgggcctagcaacatgtcggctcaggccagaaactggctgcctggaccctgctacagacagcagcgcgtctccacgacactgtcgcaaaacaacaacagcaactttgcctggactggtgccaccaagtatcatctgagcggcagagactctctggtgaatccgggcgtcgccatggcaaccaacaaggacgacgaggaccgcttcttcccatccagcggcatcctcatgtttggcaagcagggagctggaaaagacaacgtggactatagcaacgtgatgctaaccagcgaggaagaaatcaagaccaccaaccccgtggccacagaacagtatggcgtggtggctgataacctacagcagcaaaacaccgctcctattgtgggggccgtcaacagccagggagccttacctggcatggtctggcagaaccgggacgtgtacctgcagggtcctatttgggccaagattcctcacacagatggcaactttcacccgtctcctttaatgggcggctttggacttaaacatccgcctcctcagatcctcatcaaaaacactcctgttcctgcggatcctccaacagcgttcaaccaggccaagctgaattcttccatcacgcagtacagcaccggacaagtcagcgtggagatcgagtgggagctgcagaaggagaacagcaagcgctggaacccagagattcagtatacttccaactactacaaatctacaaatgtggactttgctgttaatactgagggtgtttactctgagcctcgccccattggcactcgttacctcacccgtaatttgtaa

SEQ ID NO: 5087 - protein, 738 aa, Adeno-associated virus
MAADGYLPDWLEDNLSEGIREWWDLKPGAPKPKANQQKQDDGRGLVLPGYKYLGPFNGLDKGEPVNAADAAALEHDKAYDQQLKAGDNPYLRYNHADAEFQERLQEDTSFGGNLGRAVFQAKKRVLEPLGLVEEGAKTAPGKKRPVEPSPQRSPDSSTGIGKKGQQPARKRLNFGQTGDSESVPDPQPIGEPPAAPSSVGSGTMAAGGGAPMADNNEGADGVGSSSGNWHCDSTWLGDRVITTSTRTWALPAYNNHLYKQISNGTSGGSTNDNTYFGYSTPWGYFDFNRFHCHFSPRDWQRLINNNWGFRPKRLSFKLFNIQVKEVTQNEGTKTIANNLTSTIQVFTDSEYQLPYVLGSAHQGCLPPFPADVFMIPQYGYLTLNNGSQAVGRSSFYCLEYFPSQMLRTGNNFSFSYTFEDVPFHSSYAHSQSLDRLMNPLIDQYLYYLSRTQSTGGTAGTQQLLFSQAGPSNMSAQARNWLPGPCYRQQRVSTTLSQNNNSNFAWTGATKYHLSGRDSLVNPGVAMATNKDDEDRFFPSSGILMFGKQGAGKDNVDYSNVMLTSEEEIKTTNPVATEQYGVVADNLQQQNTAPIVGAVNSQGALPGMVWQNRDVYLQGPIWAKIPHTDGNFHPSPLMGGFGLKHPPPQILIKNTPVPADPPTAFNQAKLNSSITQYSTGQVSVEIEWELQKENSKRWNPEIQYTSNYYKSTNVDFAVNTEGVYSEPRPIGTRYLTRNL

SEQ ID NO: 5088 - protein, 736 aa, Adeno-associated virus
MAADGYLPDWLEDNLSEGIREWWDLKPGAPKPKANQQKQDDGRGLVLPGYKYLGPFNGLDKGEPVNAADAAALEHDKAYDQQLKAGDNPYLRYNHADAEFQERLQEDTSFGGNLGRAVFQAKKRVLEPLGLVEEGAKTAPGKKRPVEQSPQEPDSSSGIGKTGQQPAKKRLNFGQTGDSESVPDPQPLGEPPATPAAVGPTTMASGGGAPMADNNEGADGVGNASGNWHCDSTWLGDRVITTSTRTWALPTYNNHLYKQISSASTGASNDNHYFGYSTPWGYFDFNRFHCHFSPRDWQRLINNNWGFRPKRLNFKLFNIQVKEVTTNDGVTTIANNLTSTVQVFSDSEYQLPYVLGSAHQGCLPPFPADVFMIPQYGYLTLNNGSQAVGRSSFYCLEYFPSQMLRTGNNFTFSYTFEEVPFHSSYAHSQSLDRLMNPLIDQYLYYLNRTQNQSGSAQNKDLLFSRGSPAGMSVQPKNWLPGPCYRQQRVSKTKTDNNNSNFTWTGASKYNLNGRESIINPGTAMASHKDDEDKFFPMSGVMIFGKESAGASNTALDNVMITDEEEIKATNPVATERFGTVAVNFQSSSTDPATGDVHAMGALPGMVWQDRDVYLQGPIWAKIPHTDGHFHPSPLMGGFGLKNPPPQILIKNTPVPANPPAEFSATKFASFITQYSTGQVSVEIEWELQKENSKRWNPEVQYTSNYAKSANVDFTVDNNGLYTEPRPIGTRYLTRPL

SEQ ID NO: 5089 - DNA, 2217 bp, Adeno-associated virus
atggctgctgacggttatcttccagattggctcgaggacaacctctctgagggcattcgcgagtggtgggacctgaaacctggagcccccaagcccaaggccaaccagcagaagcaggacgacggccggggtctggtgcttcctggctacaagtacctcggacccttcaacggactcgacaagggggagcccgtcaacgcggcggacgcagcggccctcgagcacgacaaggcctacgaccagcagctcaaagcgggtgacaatccgtacctgcggtataaccacgccgacgccgagtttcaggagcgtctgcaagaagatacgtcttttgggggcaacctcgggcgagcagtcttccaggccaagaagcgggttctcgaacctctcggtctggttgaggaagctgctaagacggctcctggaaagaagagaccggtagaaccgtcacctcagcgttcccccgactcctccacgggcatcggcaagaaaggccagcagcccgctaaaaagagactgaactttggtcagactggcgactcagagtcagtccccgaccctcaaccaatcggagaaccaccagcaggcccctctggtctgggatctggtacaatggctgcaggcggtggcgctccaatggcagacaataacgaaggcgccgacggagtgggtagttcctcaggaaattggcattgcgattccacatggctgggcgacagagtcatcaccaccagcacccgaacctgggccctgcccacctacaacaaccacctctacaagcaaatatccaatgggacatcgggaggaagcaccaacgacaacacctacttcggctacagcaccccctgggggtattttgacttcaacagattccactgccacttctcaccacgtgactggcagcgactcatcaacaacaactggggattccggccaaaaagactcagcttcaagctcttcaacatccaggtcaaggaggtcacgcagaatgaaggcaccaagaccatcgccaataaccttaccagcacgattcaggtatttacggactcggaataccagctgccgtacgtcctcggctccgcgcaccagggctgcctgcctccgttcccggcggacgtcttcatgattccccagtacggctaccttacactgaacaatggaagtcaagccgtaggccgttcctccttctactgcctggaatattttccatctcaaatgctgcgaactggaaacaattttgaattcagctacaccttcgaggacgtgcctttccacagcagctacgcacacagccagagcttggaccgactgatgaatcctctcatcgaccagtacctgtactacttatccagaactcagtccacaggaggaactcaaggtacccagcaattgttattttctcaagctgggcctgcaaacatgtcggctcaggctaagaactggctacctggaccttgctaccggcagcagcgagtctctacgacactgtcgcaaaacaacaacagcaactttgcttggactggtgccaccaaatatcacctgaacggaagagactctttggtaaatcccggtgtcgccatggcaacccacaaggacgacgaggaacgcttcttcccgtcgagtggagtcctgatgtttggaaaacagggtgctggaagagacaatgtggactacagcagcgttatgctaaccagcgaagaagaaattaaaaccactaaccctgtagccacagaacaatacggtgtggtggctgacaacttgcagcaaaccaatacagggcctattgtgggaaatgtcaacagccaaggagccttacctggcatggtctggcagaaccgagacgtgtacctgcagggtcccatctgggccaagattcctcacacggacggcaacttccacccttcaccgctaatgggaggatttggactgaagcacccacctcctcagatcctgatcaagaacacgccggtacctgcggatcctccaacaacgttcagccaggcgaaattggcttccttcattacgcagtacagcaccggacaggtcagcgtggaaatcgagtgggagctgcagaaggagaacagcaaacgctggaacccagagattcagtacacttcaaactactacaaatctacaaatgtggactttgctgtcaatacagagggaacttattctgagcctcgccccattggtactcgttacctcacccgtaatctgtaa

SEQ ID NO: 5090 - protein, 738 aa, Adeno-associated virus
MAADGYLPDWLEDNLSEGIREWWDLKPGAPKPKANQQKQDDGRGLVLPGYKYLGPFNGLDKGEPVNAADAAALEHDKAYDQQLKAGDNPYLRYNHADAEFQERLQEDTSFGGNLGRAVFQAKKRVLEPLGLVEEGAKTAPGKKRPVEPSPQRSPDSSTGIGKKGQQPARKRLNFGQTGDSESVPDPQPLGEPPAAPSSVGSGTMAAGGGAPMADNNEGADGVGSSSGNWHCDSTWLGDRVITTSTRTWALPTYNNHLYKQISNGTSGGSTNDNTYFGYSTPWGYFDFNRFHCHFSPRDWQRLINNNWGFRPKRLSFKLFNIQVKEVTQNEGTKTIANNLTSTIQVFTDSEYQLPYVLGSAHQGCLPPFPADVFMIPQYGYLTLNNGSQAVGRSSFYCLEYFPSQMLRTGNNFSFSYTFEDVPFHSSYAHSQSLDRLMNPLIDQYLYYLSRTQSTGGTAGTQQLLFSQAGPSNMSAQARNWLPGPCYRQQRVSTTLSQNNNSNFAWTGATKYHLNGRDSLVNPGVAMATNKDDEDRFFPSSGILMFGKQGAGKDNVDYSNVMLTSEEEIKTTNPVATEQYGVVADNLQRQNTAPIVGAVNSQGALPGMVWQNRDVYLQGPIWAKIPHTDGNFHPSPLMGGFGLKHPPPQILIKNTPVPADPPTAFNQAKLNSFITQYSTGQVSVEIEWELQKENSKRWNPEIQYTSNYYKSTNVDFAVNTEGVYSEPRPIGTRYLTRNL

SEQ ID NO: 5091 - protein, 736 aa, Adeno-associated virus
MAADGYLPDWLEDNLSEGIREWLNLKPGAPQPKANQQKQDNARGLVLPGYKYLGPFNGLDKGDPVNEADAAALEHDKAYGQQLKAGDNPYLKYNHADAEFQERLQKDTSFGGNLGKAVFQAKKRILEPLGLVETPAKTAPGKKRPVDPSPQRSPDSSSGIGKKSPHPARKRLNFGQTGEAESVPDPQPIGEPPSDPSSVGSGTMAAGGGAPMADNNEGADGVGNSSGNWHCDSTWLGDRVITTSTRTWALPTYNNHLYKQISSQSGATNDNHYFGYSTPWGYFDFNRFHCHFSPRDWQRLINNNWGFRPKRLSFKLFNIQVKEVTQNDGTTTIANNLTSTVQVFTDSEYQLPYVLGSAHQGCLPPFPADVFMIPQYGYLTLNNGSQAVGRSSFYCLEYFPSQMLRTGNNFQFSYTFEDVPFHSSYAHSQSLDRLMNPLIDQYLYYLSKTQGTNATVQGAKLQFSQAGPSNMRDQARNWLPGPCYRQQRVSKTANDNNNSEYAWTGATKYHLNGRDSLVNPGPAMASHKDDEEKFFPMNGTLVFGKNGAGNSNVDIENVMITDEEEIRTTNPVATEQYGVVSDNLQSSNTRPITGDVDSQGVLPGMVWQDRDVYLQGPIWAKIPHTDGHFHPSPLMGGFGLKHPPPQILIKNTPVPANPATTFTPGKFASFITQYSTGQVSVQIEWELQKENSKRWNPEIQYTSNYNKSVNVDFTVDTNGVYSEPRPIGTRYLTRNL

SEQ ID NO: 5092 - protein, 736 aa, Adeno-associated virus; identical to SEQ ID NO: 4787

SEQ ID NO: 5093 - protein, 736 aa, Adeno-associated virus
MAADGYLPDWLEDNLSEGIREWWDLKPGAPKPKANQQKQDDGRGLVLPGYKYLGPFNGLDKGEPVNAADAAALEHDKAYDQQLKAGDNPYLRYNHADAEFQERLQEDTSFGGNLGRAVFQAKKRVLEPLGLVEEGAKTAPGKKRPVEQSPQEPDSSSGIGKTGQQPAKKRLNFGQTGDSESVPDPQPLGEPPAAPSGLGPNTMASGGGAPMADNNEGADGVGNSSGNWHCDSTWLGDRVITTSTRTWALPTYNNHLYKQISNGTSGGSTNDNTYFGYSTPWGYFDFNRFHCHFSPRDWQRLINNNWGFRPKRLNFKLFNIQVKEVTTNEGTKTIANNLTSTVQVFTDSEYQLPYVLGSAHQGCLPPFPADVFMVPQYGYLTLNNGSQALGRSSFYCLEYFPSQMLRTGNNFQFSYTFEDVPFHSSYAHSQSLDRLMNPLIDQYLYYLVRTQTTGTGGTQTLAFSQAGPSSMANQARNWVPGPCYRQQRVSTTTNQNNNSNFAWTGAAKFKLNGRDSLMNPGVAMASHKDDEDRFFPSSGVLIFGKQGAGNDGVDYSQVLITDEEEIKATNPVATEEYGAVAINNQAANTQAQTGLVHNQGVIPGMVWQNRDVYLQGPIWAKIPHTDGNFHPSPLMGGFGLKHPPPQILIKNTPVPADPPLTFNQAKLNSFITQYSTGQVSVEIEWELQKENSKRWNPEIQYTSNYYKSTNVDFAVNTEGVYSEPRPIGTRYLTRNL

SEQ ID NO: 5094 - DNA, 2211 bp, Adeno-associated virus 1; identical to SEQ ID NO: 4977

SEQ ID NO: 5095 - protein, 736 aa, Adeno-associated virus 1; identical to SEQ ID NO: 5088

SEQ ID NO: 5096 - DNA, 4718 bp, Adeno-associated virus 1
ttgcccactccctctctgcgcgctcgctcgctcggtggggcctgcggaccaaaggtccgcagacggcagagctctgctctgccggccccaccgagcgagcgagcgcgcagagagggagtgggcaactccatcactaggggtaatcgcgaagcgcctcccacgctgccgcgtcagcgctgacgtaaattacgtcataggggagtggtcctgtattagctgtcacgtgagtgcttttgcgacattttgcgacaccacgtggccatttagggtatatatggccgagtgagcgagcaggatctccattttgaccgcgaaatttgaacgagcagcagccatgccgggcttctacgagatcgtgatcaaggtgccgagcgacctggacgagcacctgccgggcatttctgactcgtttgtgagctgggtggccgagaaggaatgggagctgcccccggattctgacatggatctgaatctgattgagcaggcacccctgaccgtggccgagaagctgcagcgcgacttcctggtccaatggcgccgcgtgagtaaggccccggaggccctcttctttgttcagttcgagaagggcgagtcctacttccacctccatattctggtggagaccacgggggtcaaatccatggtgctgggccgcttcctgagtcagattagggacaagctggtgcagaccatctaccgcgggatcgagccgaccctgcccaactggttcgcggtgaccaagacgcgtaatggcgccggaggggggaacaaggtggtggacgagtgctacatccccaactacctcctgcccaagactcagcccgagctgcagtgggcgtggactaacatggaggagtatataagcgcctgtttgaacctggccgagcgcaaacggctcgtggcgcagcacctgacccacgtcagccagacccaggagcagaacaaggagaatctgaaccccaattctgacgcgcctgtcatccggtcaaaaacctccgcgcgctacatggagctggtcgggtggctggtggaccggggcatcacctccgagaagcagtggatccaggaggaccaggcctcgtacatctccttcaacgccgcttccaactcgcggtcccagatcaaggccgctctggacaatgccggcaagatcatggcgctgaccaaatccgcgcccgactacctggtaggccccgctccgcccgcggacattaaaaccaaccgcatctaccgcatcctggagctgaacggctacgaacctgcctacgccggctccgtctttctcggctgggcccagaaaaggttcgggaagcgcaacaccatctggctgtttgggccggccaccacgggcaagaccaacatcgcggaagccatcgcccacgccgtgcccttctacggctgcgtcaactggaccaatgagaactttcccttcaatgattgcgtcgacaagatggtgatctggtgggaggagggcaagatgacggccaaggtcgtggagtccgccaaggccattctcggcggcagcaaggtgcgcgtggaccaaaagtgcaagtcgtccgcccagatcgaccccacccccgtgatcgtcacctccaacaccaacatgtgcgccgtgattgacgggaacagcaccaccttcgagcaccagcagccgttgcaggaccggatgttcaaatttgaactcacccgccgtctggagcatgactttggcaaggtgacaaagcaggaagtcaaagagttcttccgctgggcgcaggatcacgtgaccgaggtggcgcatgagttctacgtcagaaagggtggagccaacaaaagacccgcccccgatgacgcggataaaagcgagcccaagcgggcctgcccctcagtcgcggatccatcgacgtcagacgcggaaggagctccggtggactttgccgacaggtaccaaaacaaatgttctcgtcacgcgggcatgcttcagatgctgtttccctgcaagacatgcgagagaatgaatcagaatttcaacatttgcttcacgcacgggacgagagactgttcagagtgcttccccggcgtgtcagaatctcaaccggtcgtcagaaagaggacgtatcggaaactctgtgccattcatcatctgctggggcgggctcccgagattgcttgctcggcctgcgatctggtcaacgtggacctggatgactgtgtttctgagcaataaatgacttaaaccaggtatggctgccgatggttatcttccagattggctcgaggacaacctctctgagggcattcgcgagtggtgggacttgaaacctggagccccgaagcccaaagccaaccagcaaaagcaggacgacggccggggtctggtgcttcctggctacaagtacctcggacccttcaacggactcgacaagggggagcccgtcaacgcggcggacgcagcggccctcgagcacgacaaggcctacgaccagcagctcaaagcgggtgacaatccgtacctgcggtataaccacgccgacgccgagtttcaggagcgtctgcaagaagatacgtcttttgggggcaacctcgggcgagcagtcttccaggccaagaagcgggttctcgaacctctcggtctggttgaggaaggcgctaagacggctcctggaaagaaacgtccggtagagcagtcgccacaagagccagactcctcctcgggcatcggcaagacaggccagcagcccgctaaaaagagactcaattttggtcagactggcgactcagagtcagtccccgatccacaacctctcggagaacctccagcaacccccgctgctgtgggacctactacaatggcttcaggcggtggcgcaccaatggcagacaataacgaaggcgccgacggagtgggtaatgcctcaggaaattggcattgcgattccacatggctgggcgacagagtcatcaccaccagcacccgcacctgggccttgcccacctacaataaccacctctacaagcaaatctccagtgcttcaacgggggccagcaacgacaaccactacttcggctacagcaccccctgggggtattttgatttcaacagattccactgccacttttcaccacgtgactggcagcgactcatcaacaacaattggggattccggcccaagagactcaacttcaaactcttcaacatccaagtcaaggaggtcacgacgaatgatggcgtcacaaccatcgctaataaccttaccagcacggttcaagtcttctcggactcggagtaccagcttccgtacgtcctcggctctgcgcaccagggctgcctccctccgttcccggcggacgtgttcatgattccgcaatacggctacctgacgctcaacaatggcagccaagccgtgggacgttcatccttttactgcctggaatatttcccttctcagatgctgagaacgggcaacaactttaccttcagctacacctttgaggaagtgcctttccacagcagctacgcgcacagccagagcctggaccggctgatgaatcctctcatcgaccaatacctgtattacctgaacagaactcaaaatcagtccggaagtgcccaaaacaaggacttgctgtttagccgtgggtctccagctggcatgtctgttcagcccaaaaactggctacctggaccctgttatcggcagcagcgcgtttctaaaacaaaaacagacaacaacaacagcaattttacctggactggtgcttcaaaatataacctcaatgggcgtgaatccatcatcaaccctggcactgctatggcctcacacaaagacgacgaagacaagttctttcccatgagcggtgtcatgatttttggaaaagagagcgccggagcttcaaacactgcattggacaatgtcatgattacagacgaagaggaaattaaagccactaaccctgtggccaccgaaagatttgggaccgtggcagtcaatttccagagcagcagcacagaccctgcgaccggagatgtgcatgctatgggagcattacctggcatggtgtggcaagatagagacgtgtacctgcagggtcccatttgggccaaaattcctcacacagatggacactttcacccgtctcctcttatgggcggctttggactcaagaacccgcctcctcagatcctcatcaaaaacacgcctgttcctgcgaatcctccggcggagttttcagctacaaagtttgcttcattcatcacccaatactccacaggacaagtgagtgtggaaattgaatgggagctgcagaaagaaaacagcaagcgctggaatcccgaagtgcagtacacatccaattatgcaaaatctgccaacgttgattttactgtggacaacaatggactttatactgagcctcgccccattggcacccgttaccttacccgtcccctgtaattacgtgttaatcaataaaccggttgattcgtttcagttgaactttggtctcctgtccttcttatcttatcggttaccatggttatagcttacacattaactgcttggttgcgcttcgcgataaaagacttacgtcatcgggttacccctagtgatggagttgcccactccctctctgcgcgctcgctcgctcggtggggcctgcggaccaaaggtccgcagacggcagagctctgctctgccggccccaccgagcgagcgagcgcgcagagagggagtgggcaa

SEQ ID NO: 5097 - DNA, 255 bp, Adeno-associated virus 10
ggtaattcctccggaaattggcattgcgattccacatggctgggcgacagagtcatcaccaccagcacccgaacctgggtcctgcccacctacaacaaccacatctacaagcaaatctccagcgagacaggagccaccaacgacaaccactacttcggctacagcaccccctgggggtattttgactttaacagattccactgccacttttcaccacgtgactggcagcgactcatcaacaacaactggggattc

SEQ ID NO: 5098 - protein, 738 aa, Adeno-associated virus 10
MAADGYLPDWLEDNLSEGIREWWDLKPGAPKPKANQQKQDDGRGLVLPGYKYLGPFNGLDKGEPVNAADAAALEHDKAYDQQLKAGDNPYLRYNHADAEFQERLQEDTSFGGNLGRAVFQAKKRVLEPLGLVEEAAKTAPGKKRPVEPSPQRSPDSSTGIGKKGQQPAKKRLNFGQTGESESVPDPQPIGEPPAGPSGLGSGTMAAGGGAPMADNNEGADGVGSSSGNWHCDSTWLGDRVITTSTRTWALPTYNNHLYKQISNGTSGGSTNDNTYFGYSTPWGYFDFNRFHCHFSPRDWQRLINNNWGFRPKRLSFKLFNIQVKEVTQNEGTKTIANNLTSTIQVFTDSEYQLPYVLGSAHQGCLPPFPADVFMIPQYGYLTLNNGSQAVGRSSFYCLEYFPSQMLRTGNNFEFSYTFEDVPFHSSYAHSQSLDRLMNPLIDQYLYYLSRTQSTGGTQGTQQLLFSQAGPANMSAQAKNWLPGPCYRQQRVSTTLSQNNNSNFAWTGATKYHLNGRDSLVNPGVAMATHKDDEERFFPSSGVLMFGKQGAGRDNVDYSSVMLTSEEEIKTTNPVATEQYGVVADNLQQANTGPIVGNVNSQGALPGMVWQNRDVYLQGPIWAKIPHTDGNFHPSPLMGGFGLKHPPPQILIKNTPVPADPPTTFSQAKLASFITQYSTGQVSVEIEWELQKENSKRWNPEIQYTSNYYKSTNVDFAVNTEGTYSEPRPIGTRYLTRNL

SEQ ID NO: 5099 - protein, 738 aa, Adeno-associated virus 10; identical to SEQ ID NO: 4793

SEQ ID NO: 5100 - DNA, 258 bp, Adeno-associated virus 11
ggtaattcctccggaaattggcattgcgattccacatggctgggcgacagagtcatcaccaccagcacccgaacctgggccctgccaacctacaacaaccacctctacaaacaaatctccagcgcttcaacgggggccagcaacgacaaccactactttggctacagcaccccctgggggtattttgactttaacagattccactgccacttctcaccacgtgactggcagcgactcatcaacaacaactggggattc

SEQ ID NO: 5101 - DNA, 255 bp, Adeno-associated virus 12
ggtaattcctccggaaattggcattgcgattccacatggctgggcgaccgagtcattaccaccagcacccggacttgggccctgcccacctacaacaaccacctctacaagcaaatctccagccaatcgggtgccaccaacgacaaccactacttcggctacagcaccccttgggggtattttgatttcaacagattccactgccatttctcaccacgtgactggcagcgactcatcaacaacaactggggattc

SEQ ID NO: 5102 - DNA, 2208 bp, Adeno-associated virus 2
atggctgccgatggttatcttccagattggctcgaggacactctctctgaaggaataagacagtggtggaagctcaaacctggcccaccaccaccaaagcccgcagagcggcataaggacgacagcaggggtcttgtgcttcctgggtacaagtacctcggacccttcaacggactcgacaagggagagccggtcaacgaggcagacgccgcggccctcgagcacgacaaagcctacgaccggcagctcgacagcggagacaacccgtacctcaagtacaaccacgccgacgcggagtttcaggagcgccttaaagaagatacgtcttttgggggcaacctcggacgagcagtcttccaggcgaaaaagagggttcttgaacctctgggcctggttgaggaacctgttaagacggctccgggaaaaaagaggccggtagagcactctcctgtggagccagactcctcctcgggaaccggaaaggcgggccagcagcctgcaagaaaaagattgaattttggtcagactggagacgcagactcagtacctgacccccagcctctcggacagccaccagcagccccctctggtctgggaactaatacgatggctacaggcagtggcgcaccaatggcagacaataacgagggcgccgacggagtgggtaattcctcgggaaattggcattgcgattccacatggatgggcgacagagtcatcaccaccagcacccgaacctgggccctgcccacctacaacaaccacctctacaaacaaatttccagccaatcaggagcctcgaacgacaatcactactttggctacagcaccccttgggggtattttgacttcaacagattccactgccacttttcaccacgtgactggcaaagactcatcaacaacaactggggattccgacccaagagactcaacttcaagctctttaacattcaagtcaaagaggtcacgcagaatgacggtacgacgacgattgccaataaccttaccagcacggttcaggtgtttactgactcggagtaccagctcccgtacgtcctcggctcggcgcatcaaggatgcctcccgccgttcccagcagacgtcttcatggtgccacagtatggatacctcaccctgaacaacgggagtcaggcagtaggacgctcttcattttactgcctggagtactttccttctcagatgctgcgtaccggaaacaactttaccttcagctacacttttgaggacgttcctttccacagcagctacgctcacagccagagtctggaccgtctcatgaatcctctcatcgaccagtacctgtattacttgagcagaacaaacactccaagtggaaccaccacgcagtcaaggcttcagttttctcaggccggagcgagtgacattcgggaccagtctaggaactggcttcctggaccctgttaccgccagcagcgagtatcaaagacatctgcggataacaacaacagtgaatactcgtggactggagctaccaagtaccacctcaatggcagagactctctggtgaatccgggcccggccatggcaagccacaaggacgatgaagaaaagttttttcctcagagcggggttctcatctttgggaagcaaggctcagagaaaacaaatgtggacattgaaaaggtcatgattacagacgaagaggaaatcaggacaaccaatcccgtggctacggagcagtatggttctgtatctaccaacctccagagaggcaacagacaagcagctaccgcagatgtcaacacacaaggcgttcttccaggcatggtctggcaggacagagatgtgtaccttcaggggcccatctgggcaaagattccacacacggacggacattttcacccctctcccctcatgggtggattcggacttaaacaccctcctccacagattctcatcaagaacaccccggtacctgcgaatccttcgaccaccttcagtgcggcaaagtttgcttccttcatcacacagtactccacgggacaggtcagcgtggagatcgagtgggagctgcagaaggaaaacagcaaacgctggaatcccgaaattcagtacacttccaactacaacaagtctgttaatgtggactttactgtggacactaatggcgtgtattcagagcctcgccccattggcaccagatacctgactcgtaatctgtaa

SEQ ID NO: 5103 - protein, 735 aa, Adeno-associated virus 2 [sequence omitted]

SEQ ID NO: 5104 - protein, 621 aa, Adeno-associated virus 2
MPGFYEIVIKVPSDLDGHLPGISDSFVNWVAEKEWELPPDSDMDLNLIEQAPLTVAEKLQRDFLTEWRRVSKAPEALFFVQFEKGESYFHMHVLVETTGVKSMVLGRFLSQIREKLIQRIYRGIEPTLPNWFAVTKTRNGAGGGNKVVDECYIPNYLLPKTQPELQWAWTNMEQYLSACLNLTERKRLVAQHLTHVSQTQEQNKENQNPNSDAPVIRSKTSARYMELVGWLVDKGITSEKQWIQEDQASYISFNAASNSRSQIKAALDNAGKIMSLTKTAPDYLVGQQPVEDISSNRIYKILELNGYDPQYAASVFLGWATKKFGKRNTIWLFGPATTGKTNIAEAIAHTVPFYGCVNWTNENFPFNDCVDKMVIWWEEGKMTAKVVESAKAILGGSKVRVDQKCKSSAQIDPTPVIVTSNTNMCAVIDGNSTTFEHQQPLQDRMFKFELTRRLDHDFGKVTKQEVKDFFRWAKDHVVEVEHEFYVKKGGAKKRPAPSDADISEPKRVRESVAQPSTSDAEASINYADRYQNKCSRHVGMNLMLFPCRQCERMNQNSNICFTHGQKDCLECFPVSESQPVSVVKKAYQKLCYIHHIMGKVPDACTACDLVNVDLDDCIFEQ

SEQ ID NO: 5105 - DNA, 4675 bp, Adeno-associated virus 2
ttggccactccctctctgcgcgctcgctcgctcactgaggccgggcgaccaaaggtcgcccgacgcccgggctttgcccgggcggcctcagtgagcgagcgagcgcgcagagagggagtggccaactccatcactaggggttcctggaggggtggagtcgtgacgtgaattacgtcatagggttagggaggtcctgtattagaggtcacgtgagtgttttgcgacattttgcgacaccatgtggtcacgctgggtatttaagcccgagtgagcacgcagggtctccattttgaagcgggaggtttgaacgcgcagccgccatgccggggttttacgagattgtgattaaggtccccagcgaccttgacgggcatctgcccggcatttctgacagctttgtgaactgggtggccgagaaggaatgggagttgccgccagattctgacatggatctgaatctgattgagcaggcacccctgaccgtggccgagaagctgcagcgcgactttctgacggaatggcgccgtgtgagtaaggccccggaggcccttttctttgtgcaatttgagaagggagagagctacttccacatgcacgtgctcgtggaaaccaccggggtgaaatccatggttttgggacgtttcctgagtcagattcgcgaaaaactgattcagagaatttaccgcgggatcgagccgactttgccaaactggttcgcggtcacaaagaccagaaatggcgccggaggcgggaacaaggtggtggatgagtgctacatccccaattacttgctccccaaaacccagcctgagctccagtgggcgtggactaatatggaacagtatttaagcgcctgtttgaatctcacggagcgtaaacggttggtggcgcagcatctgacgcacgtgtcgcagacgcaggagcagaacaaagagaatcagaatcccaattctgatgcgccggtgatcagatcaaaaacttcagccaggtacatggagctggtcgggtggctcgtggacaaggggattacctcggagaagcagtggatccaggaggaccaggcctcatacatctccttcaatgcggcctccaactcgcggtcccaaatcaaggctgccttggacaatgcgggaaagattatgagcctgactaaaaccgcccccgactacctggtgggccagcagcccgtggaggacatttccagcaatcggatttataaaattttggaactaaacgggtacgatccccaatatgcggcttccgtctttctgggatgggccacgaaaaagttcggcaagaggaacaccatctggctgtttgggcctgcaactaccgggaagaccaacatcgcggaggccatagcccacactgtgcccttctacgggtgcgtaaactggaccaatgagaactttcccttcaacgactgtgtcgacaagatggtgatctggtgggaggaggggaagatgaccgccaaggtcgtggagtcggccaaagccattctcggaggaagcaaggtgcgcgtggaccagaaatgcaagtcctcggcccagatagacccgactcccgtgatcgtcacctccaacaccaacatgtgcgccgtgattgacgggaactcaacgaccttcgaacaccagcagccgttgcaagaccggatgttcaaatttgaactcacccgccgtctggatcatgactttgggaaggtcaccaagcaggaagtcaaagactttttccggtgggcaaaggatcacgtggttgaggtggagcatgaattctacgtcaaaaagggtggagccaagaaaagacccgcccccagtgacgcagatataagtgagcccaaacgggtgcgcgagtcagttgcgcagccatcgacgtcagacgcggaagcttcgatcaactacgcagacaggtaccaaaacaaatgttctcgtcacgtgggcatgaatctgatgctgtttccctgcagacaatgcgagagaatgaatcagaattcaaatatctgcttcactcacggacagaaagactgtttagagtgctttcccgtgtcagaatctcaacccgtttctgtcgtcaaaaaggcgtatcagaaactgtgctacattcatcatatcatgggaaaggtgccagacgcttgcactgcctgcgatctggtcaatgtggatttggatgactgcatctttgaacaataaatgatttaaatcaggtatggctgccgatggttatcttccagattggctcgaggacactctctctgaaggaataagacagtggtggaagctcaaacctggcccaccaccaccaaagcccgcagagcggcataaggacgacagcaggggtcttgtgcttcctgggtacaagtacctcggacccttcaacggactcgacaagggagagccggtcaacgaggcagacgccgcggccctcgagcacgtacaaagcctacgaccggcagctcgacagcggagacaacccgtacctcaagtacaaccacgccgacgcggagtttcaggagcgccttaaagaagatacgtcttttgggggcaacctcggacgagcagtcttccaggcgaaaaagagggttcttgaacctctgggcctggttgaggaacctgttaagacggctccgggaaaaaagaggccggtagagcactctcctgtggagccagactcctcctcgggaaccggaaaggcgggccagcagcctgcaagaaaaagattgaattttggtcagactggagacgcagactcagtacctgacccccagcctctcggacagccaccagcagccccctctggtctgggaactaatacgatggctacaggcagtggcgcaccaatggcagacaataacgagggcgccgacggagtgggtaattcctccggaaattggcattgcgattccacatggatgggcgacagagtcatcaccaccagcacccgaacctgggccctgcccacctacaacaaccacctctacaaacaaatttccagccaatcaggagcctcgaacgacaatcactactttggctacagcaccccttgggggtattttgacttcaacagattccactgccacttttcaccacgtgactggcaaagactcatcaacaacaactggggattccgacccaagagactcaacttcaagctctttaacattcaagtcaaagaggtcacgcagaatgacggtacgacgacgattgccaataaccttaccagcacggttcaggtgtttactgactcggagtaccagctcccgtacgtcctcggctcggcgcatcaaggatgcctcccgccgttcccagcagacgtcttcatggtgccacagtatggatacctcaccctgaacaacgggagtcaggcagtaggacgctcttcattttactgcctggagtactttccttctcagatgctgcgtaccggaaacaactttaccttcagctacacttttgaggacgttcctttccacagcagctacgctcacagccagagtctggaccgtctcatgaatcctctcatcgaccagtacctgtattacttgagcagaacaaacactccaagtggaaccaccacgcagtcaaggcttcagttttctcaggccggagcgagtgacattcgggaccagtctaggaactggcttcctggaccctgttaccgccagcagcgagtatcaaagacatctgcggataacaacaacagtgaatactcgtggactggagctaccaagtaccacctcaatggcagagactctctggtgaatccggccatggcaagccacaaggacgatgaagaaaagttttttcctcagagcggggttctcatctttgggaagcaaggctcagagaaaacaaatgtgaacattgaaaaggtcatgattacagacgaagaggaaatcggaacaaccaatcccgtggctacggagcagtatggttctgtatctaccaacctccagagaggcaacagacaagcagctaccgcagatgtcaacacacaaggcgttcttccaggcatggtctggcaggacagagatgtgtaccttcaggggcccatctgggcaaagattccacacacggacggacattttcacccctctcccctcatgggtggattcggacttaaacaccctcctccacagattctcatcaagaacaccccggtacctgcgaatccttcgaccaccttcagtgcggcaaagtttgcttccttcatcacacagtactccacgggacacggtcagcgtggagatcgagtgggagctgcagaaggaaaacagcaaacgctggaatcccgaaattcagtacacttccaactacaacaagtctgttaatcgtggacttaccgtggatactaatggcgtgtattcagagcctcgccccattggcaccagatacctgactcgtaatctgtaattgcttgttaatcaataaaccgtttaattcgtttcagttgaactttggtctctgcgtatttctttcttatctagtttccatggctacgtagataagtagcatggcgggttaatcattaactacaaggaacccctagtgatggagttggccactccctctctgcgcgctcgctcgctcactgaggccgggcgaccaaaggtcgcccgacgcccgggctttgcccgggcggcctcagtgagcgagcgagcgcgcagagagggagtggccaa

SEQ ID NO: 5106 - DNA, 4679 bp, Adeno-associated virus 2
ttggccactccctctctgcgcgctcgctcgctcactgaggccgggcgaccaaaggtcgcccgacgcccgggctttgcccgggcggcctcagtgagcgagcgagcgcgcagagagggagtggccaactccatcactaggggttcctggaggggtggagtcgtgacgtgaattacgtcatagggttagggaggtcctgtattagaggtcacgtgagtgttttgcgacattttgcgacaccatgtggtcacgctgggtatttaagcccgagtgagcacgcagggtctccattttgaagcgggaggtttgaacgcgcagccgccatgccggggttttacgagattgtgattaaggtccccagcgaccttgacgggcatctgcccggcatttctgacagctttgtgaactgggtggccgagaaggaatgggagttgccgccagattctgacatggatctgaatctgattgagcaggcacccctgaccgtggccgagaagctgcagcgcgactttctgacggaatggcgccgtgtgagtaaggccccggaggcccttttctttgtgcaatttgagaagggagagagctacttccacatgcacgtgctcgtggaaaccaccggggtgaaatccatggttttgggacgtttcctgagtcagattcgcgaaaaactgattcagagaatttaccgcgggatcgagccgactttgccaaactggttcgcggtcacaaagaccagaaatggcgccggaggcgggaacaaggtggtggatgagtgctacatccccaattacttgctccccaaaacccagcctgagctccagtgggcgtggactaatatggaacagtatttaagcgcctgtttgaatctcacggagcgtaaacggttggtggcgcagcatctgacgcacgtgtcgcagacgcaggagcagaacaaagagaatcagaatcccaattctgatgcgccggtgatcagatcaaaaacttcagccaggtacatggagctggtcgggtggctcgtggacaaggggattacctcggagaagcagtggatccaggaggaccaggcctcatacatctccttcaatgcggcctccaactcgcggtcccaaatcaaggctgccttggacaatgcgggaaagattatgagcctgactaaaaccgcccccgactacctggtgggccagcagcccgtggaggacatttccagcaatcggatttataaaattttggaactaaacgggtacgatccccaatatgcggcttccgtctttctgggatgggccacgaaaaagttcggcaagaggaacaccatctggctgtttgggcctgcaactaccgggaagaccaacatcgcggaggccatagcccacactgtgcccttctacgggtgcgtaaactggaccaatgagaactttcccttcaacgactgtgtcgacaagatggtgatctggtgggaggaggggaagatgaccgccaaggtcgtggagtcggccaaagccattctcggaggaagcaaggtgcgcgtggaccagaaatgcaagtcctcggcccagatagacccgactcccgtgatcgtcacctccaacaccaacatgtgcgccgtgattgacgggaactcaacgaccttcgaacaccagcagccgttgcaagaccggatgttcaaatttgaactcacccgccgtctggatcatgactttgggaaggtcaccaagcaggaagtcaaagactttttccggtgggcaaaggatcacgtggttgaggtggagcatgaattctacgtcaaaaagggtggagccaagaaaagacccgcccccagtgacgcagatataagtgagcccaaacgggtgcgcgagtcagttgcgcagccatcgacgtcagacgcggaagcttcgatcaactacgcagacaggtaccaaaacaaatgttctcgtcacgtgggcatgaatctgatgctgtttccctgcagacaatgcgagagaatgaatcagaattcaaatatctgcttcactcacggacagaaagactgtttagagtgctttcccgtgtcagaatctcaacccgtttctgtcgtcaaaaaggcgtatcagaaactgtgctacattcatcatatcatgggaaaggtgccagacgcttgcactgcctgcgatctggtcaatgtggatttggatgactgcatctttgaacaataaatgatttaaatcaggtatggctgccgatggttatcttccagattggctcgaggacactctctctgaaggaataagacagtggtggaagctcaaacctggcccaccaccaccaaagcccgcagagcggcataaggacgacagcaggggtcttgtgcttcctgggtacaagtacctcggacccttcaacggactcgacaagggagagccggtcaacgaggcagacgccgcggccctcgagcacgacaaagcctacgaccggcagctcgacagcggagacaacccgtacctcaagtacaaccacgccgacgcggagtttcaggagcgccttaaagaagatacgtcttttgggggcaacctcggacgagcagtcttccaggcgaaaaagagggttcttgaacctctgggcctggttgaggaacctgttaagacggctccgggaaaaaagaggccggtagagcactctcctgtggagccagactcctcctcgggaaccggaaaggcgggccagcagcctgcaagaaaaagattgaattttggtcagactggagacgcagactcagtacctgacccccagcctctcggacagccaccagcagccccctctggtctgggaactaatacgatggctacaggcagtggcgcaccaatggcagacaataacgagggcgccgacggagtgggtaattcctccggaaattggcattgcgattccacatggatgggcgacagagtcatcaccaccagcacccgaacctgggccctgcccacctacaacaaccacctctacaaacaaatttccagccaatcaggagcctcgaacgacaatcactactttggctacagcaccccttgggggtattttgacttcaacagattccactgccacttttcaccacgtgactggcaaagactcatcaacaacaactggggattccgacccaagagactcaacttcaagctctttaacattcaagtcaaagaggtcacgcagaatgacggtacgacgacgattgccaataaccttaccagcacggttcaggtgtttactgactcggagtaccagctcccgtacgtcctcggctcggcgcatcaaggatgcctcccgccgttcccagcagacgtcttcatggtgccacagtatggatacctcaccctgaacaacgggagtcaggcagtaggacgctcttcattttactgcctggagtactttccttctcagatgctgcgtaccggaaacaactttaccttcagctacacttttgaggacgttcctttccacagcagctacgctcacagccagagtctggaccgtctcatgaatcctctcatcgaccagtacctgtattacttgagcagaacaaacactccaagtggaaccaccacgcagtcaaggcttcagttttctcaggccggagcgagtgacattcgggaccagtctaggaactggcttcctggaccctgttaccgccagcagcgagtatcaaagacatctgcggataacaacaacagtgaatactcgtggactggagctaccaagtaccacctcaatggcagagactctctggtgaatccgggcccggccatggcaagccacaaggacgatgaagaaaagttttttcctcagagcggggttctcatctttgggaagcaaggctcagagaaaacaaatgtggacattgaaaaggtcatgattacagacgaagaggaaatcaggacaaccaatcccgtggctacggagcagtatggttctgtatctaccaacctccagagaggcaacagacaagcagctaccgcagatgtcaacacacaaggcgttcttccaggcatggtctggcaggacagagatgtgtaccttcaggggcccatctgggcaaagattccacacacggacggacattttcacccctctcccctcatgggtggattcggacttaaacaccctcctccacagattctcatcaagaacaccccggtacctgcgaatccttcgaccaccttcagtgcggcaaagtttgcttccttcatcacacagtactccacgggacaggtcagcgtggagatcgagtgggagctgcagaaggaaaacagcaaacgctggaatcccgaaattcagtacacttccaactacaacaagtctgttaatgtggactttactgtggacactaatggcgtgtattcagagcctcgccccattggcaccagatacctgactcgtaatctgtaattgcttgttaatcaataaaccgtttaattcgtttcagttgaactttggtctctgcgtatttctttcttatctagtttccatggctacgtagataagtagcatggcgggttaatcattaactacaaggaacccctagtgatggagttggccactccctctctgcgcgctcgctcgctcactgaggccgggcgaccaaaggtcgcccgacgcccgggctttgcccgggcggcctcagtgagcgagcgagcgcgcagagagggagtggccaa

SEQ ID NO: 5107 - protein, 735 aa, Adeno-associated virus 2
MAADGYLPDWLEDTLSEGIRQWWKLKPGPPPPKPAERHKDDSRGLVLPGYKYLGPFNGLDKGEPVNEADAAALEHDKAYDRQLDSGDNPYLKYNHADAEFQERLKEDTSFGGNLGRAVFQAKKRVLEPLGLVEEPVKTAPGKKRPVEHSPVEPDSSSGTGKAGQQPARKRLNFGQTGDADSVPDPQPLGEPPATPAAVGPTTMASGGGAPMADNNEGADGVGNASGNWHCDSTWLGDRVITTSTRTWALPTYNNHLYKQISSASTGASNDNHYFGYSTPWGYFDFNRFHCHFSPRDWQRLINNNWGFRPKRLNFKLFNIQVKEVTQNDGTTTIANNLTSTVQVFTDSEYQLPYVLGSAHQGCLPPFPADVFMIPQYGYLTLNNGSQAVGRSSFYCLEYFPSQMLRTGNNFTFSYTFEDVPFHSSYAHSQSLDRLMNPLIDQYLYYLNRTQNQSGSAQDKALLFSRGSPAGMSVQPKNWLPGPCYRQQRVSKTKTDNNNSNFTWTGASKYNLNGRESIINPGTAMASHKDDKDKFFPMSGVMIFGKESAGASNTALDNVMITDEEEIKATNPVATERFGTVAVNFQSSSTDPATGDVHVMGALPGMVWQDRDVYLQGPIWAKIPHTDGHFHPSPLMGGFGLKHPPPQILIKNTPVPANPPAEFSATKFASFITQYSTGQVSVEIEWELQKENSKRWNPEVQYTSNYAKSANVDFTVDNNGLYTEPRPIGTRYLTRP

SEQ ID NO: 5108 - protein, 740 aa, Adeno-associated virus 2
MAADGYLPDWLEDTLSEGIRQWWKLKPGPPPPKPAERHKDDSRGLVLPGYKYLGPFNGLDKGEPVNAADAAALEHDKAYDRQLDSGDNPYLKYNHADAEFQERLKEDTSFGGNLGRAVFQAKKRVLEPLGLVEEPVKTAPGKKRPVEHSPVEPDSSSGTGKAGQQPARKRLNFGQTGDADSVPDPQPLGQPPAAPSGLGTNTMATGSGAPMADNNEGADGVGNSSGNWHCDSTWMGDRVITTSTRTWALPTYNNHLYKQISSQSGASNDNHYFGYSTPWGYFDFNRFHCHFSPRDWQRLINNNWGFRPKRLNFKLFNIQVKEVTQNDGTTTIANNLTSTVQVFTDSEYQLPYVLGSAHQGCLPPFPADVFMVPQYGYLTLNNGSQAVGRSSFYCLEYFPSQMLRTGNNFTFSYTFEDVPFHSSYAHSQSLDRLMNPLIDQYLYYLSRTNTPSGTTTQSGLQFSQAGASDIRDQSRNWLPGPCYRQQRVSKTSADNNNSEYSWTGATKYHLNGRDSLVNPGPAMASHKDDEEKFFPQSGVLIFGKQGSEKTNVDIEKVMITDEEEIRTTNPVATEQYGSVSTNLQRGNRQAATADVNTQGVLPGMVWQDRDVYLQGPIWAKIPHTDGHFHPSPLMGGFGLKHPPPQILIKNTPVPANPSTTFSAAKFASFITQYSTGQVSVEIEWELQKENSKRWNPEIQYTSNYNKSVNVDFTVDTNGVYSEPRPIGTRYLTRNLLLAAA

SEQ ID NO: 5109 - protein, 734 aa, Adeno-associated virus 2
MAADGYLPDWLEDTLSEGIRQWWKLKPGPPPPKPAERHKDDSRGLVLPGYKYLGPFNGLDKGEPVNEADAAALEHDKAYDRQLDSGDNPYLKYNHADAEFQERLKEDTSFGGNLGRAVFQAKKRVLEPLGLVEEPVKTAPGKKRPVEHSPVEPDSSSGTGKAGQQPARKRLNFGQTGDADSVPDPQPLGQPPAAPSGLGTNTMATGSGAPMADNNEGADGVGNSSGNWHCDSTWMGDRVITTSTRTWALPTYNNHLYKQISSQSGASNDNHYFGYSTPWGYFDFNRFHCHFSPRDWQRLINNNWGFRPKRLNFKLFNIQVKEVTQNDGTTTIANNLTSTVQVFTDSEYQLPYVLGSAHQGCLPPFPADVFMVPQYGYLTLNNGSQAVGRSSFYCLEYFPSQMLRTGNNFTFSYTFEDVPFHSSYAHSQSLDRLMNPLIDQYLYYLSRTNTPSGTTTQSGLQFSQAGASDIRDQSRNWLPGPCYRQQRVSKTSADNNNSEYSWTGATMYHLNGRDSLVNPGPAMASHKDDEEKFFPQSGVLIFGKQGSEKTNVDIEKVMITDEEEIRTTNPVATEQYGSVSTNLQRGNRQAATADVNTQGVLPGMVWQDRDVYLQGPIWAKIPHTDGHFHPSPLMGGFGLKHPPPQILIKNTPVPANPSTTFSAAKFASFITQYSTGQVSVEIEWELQKENSKRWNPEIQYTSNYNKSINVDFTVDTNGVYSEPRPIGTRYLTRN

SEQ ID NO: 5110 - protein, 734 aa, Adeno-associated virus 2
MAADGYLPDWLEDTLSEGIRQWWKLKPGPPPPKPAERHKDDSRGLVLPGYKYLGPFNGLDKGEPVNEADAAALEHDKAYDRQLDSGDNPYLKYNHADAEFQERLKEDTSFGGNLGRAVFQAKKRVLEPLGLVEEPVKTAPGKKRPVEHSPVEPDSSSGTGKAGQQPARKRLNFGQTGDADSVPDPQPLGQPPAAPSGLGTNTMATGSGAPMADNNEGADGVGNSSGNWHCDSTWMGDRVITTSTRTWALPTYNNHLYKQISSQSGASNDNHYFGYSTPWGYFDFNRFHCHFSPRDWQRLINNNWGFRPKRLNFKLFNIQVKEVTQNDGTTTIANNLTSTVQVFTDSEYQLPYVLGSAHQGCLPPFPADVFMVPQYGYLTLNNGSQAVGRSSFYCLEYFPSQMLRTGNNFTFSYTFEDVPFHSSYAHSQSLDRLMNPLIDQYLYYLSRTNTPSGTTTQSGLQFSQAGASDIRDQSRNWLPGPCYRQQRVSKTSADNNNSEYSWTGATKYHLNGRDSLVNPGPAMASHKDDEEKFFPQSGVLIFGKQGSEKTNVDIEKVMITDEEEIRTTNPVATEQYGSVSTNLQRGNRQAATADVNTQGVLPGMVWQDRDVYLQGPIWAKIPHTDGHFHPSPLMGGFGLKHPPPQILIKNTPVPANPSTTFSEAKFASFITQYSTGQVSVEIEWELQKENSKRWNPEIQYTSNYNKSVNVDFTVDTNGVYSEPRPIGTRYLTRN

SEQ ID NO: 5111 - protein, 739 aa, Adeno-associated virus 2
MAADGYLPDWLEDTLSEGIRQWWKLKPGPPPPKPAERHKDDSRGLVLPGYKYLGPFNGLDKGEPVNEADAAALEHDKAYDRQLDSGDNPYLKYNHADAEFQERLKEDTSFGGNLGRAVFQAKKRVLEPLGLVEEPVKTAPGKKRPVEHSPVEPDSSSGTGKAGQQPARKRLNFGQTGDADSVPDPQPLGQPPAAPSGLGTNTMATGSGAPMADNNEGADGVGNSSGNWHCDSTWMGDRVITTSTRTWALPTYNNHLYKQISSQSGASNDNHYFGYSTPWGYFDFNRFHCHFSPRDWQRLINNNWGFRPKRLNFKLFNIQVKEVTQNDGTTTIANNLTSTVQVFTDSEYQLPYVLGSAHQGCLPPFPADVFMVPQYGYLTLNNGSQAVGRSSFYCLEYFPSQMLRTGNNFTFSYTFEDVPFHSSYAHSQSLDRLMNPLIDQYLYYLSRTNTPSGTTTQSGLQFSQAGASDIRDQSRNWLPGPCYRQQRVSKTSADNNNSEYSWTGATKYHLNGRDSLVNPGPAMASHKDDEEKFFPQSGVLIFGKQGSEKTNVDIEKVMITDEEEIRTTNPVATEQYGSVSTNLQRGNRQAATADVNTQGVLPGMVWQDRDVYLQGPIWAKIPHTDGHFHPSPLMGGFGLKHPPPQILIKNTPVPANPSTTFSAAKFASFITQYSTGQVSVEIEWELQKENSKRWNPEIQYTSNYNKSVNVDFTVDTNGVYSEPRPIGTRYLTRNLLLAA

SEQ ID NO: 5112 - protein, 725 aa, Adeno-associated virus 2
MAADGYLPDWLEDTLSEGIRQWWKLKPGPPPPKPAERHKDDSRGLVLPGYKYLGPFNGLDKGEPVNEADAAALEHDKAYDRQLDSGDNPYLKYNHADAEFQERLKEDTSFGGNLGRAVFQAKKRVLEPLGLVEEPVKTAPGKKRPVEHSPVEPDSSSGTGKAGQQPARKRLNFGQTGDADSVPDPQPLGQPPAAPSGLGTNTMATGSGAPMADNNEGADGVGNSSGNWHCDSTWMGDRVITTSTRTWALPTYNNHLYKQISSQSGASNDNHYFGYSTPWGYFDFNRFHCHFSPRDWQRLINNNWGFRPKRLNFKLFNIQVKEVTQNDGTTTIANNLTSTVQVFTDSEYQLPYVLGSAHQGCLPPFPADVFMVPQYGYLTLNNGSQAVGRSSFYCLEYFPSQMLRTGNNFTFSYTFEDVPFHSSYAHSQSLDRLMNPLIDQYLYYLSRTNTPSGTTTQSGLQFSQAGASDIRDQSRNWLPGPCYRQQRVSKTSADNNNSEYSWTGATKYHLNGRDSLVNPGPAMASHKDDEEKFFPQSGVLIFGKQGSEKTNVDIEKVMITDEEEIRTTNPVATEQYGSVSTNLQRGNRQAATADVNTQGVLPGMVWQDRDVYLQGPIWAKIPHTDGHFHPSPLMGGFGLKHPPPQILIKNTPVPANPSTTFSAAKFASFITQYSTGQVSVEIEWELQKENSKRWNPEIQYTSNYNKSVNVDFTVDTNGVYSEPRP

SEQ ID NO: 5113 - protein, 707 aa, Adeno-associated virus 2
MAADGYLPDWLEDTLSEGIRQWWKLKPGPPPPKPAERHKDDSRGLVLPGYKYLGPFNGLDKGEPVNEADAAALEHDKAYDRQLDSGDNPYLKYNHADAEFQERLKEDTSFGGNLGRAVFQAKKRVLEPLGLVEEPVKTAPGKKRPVEHSPVEPDSSSGTGKAGQQPARKRLNFGQTGDADSVPDPQPLGQPPAAPSGLGTNTMATGSGAPMADNNEGADGVGNSSGNWHCDSTWMGDRVITTSTRTWALPTYNNHLYKQISSQSGASNDNHYFGYSTPWGYFDFNRFHCHFSPRDWQRLINNNWGFRPKRLNFKLFNIQVKEVTQNDGTTTIANNLTSTVQVFTDSEYQLPYVLGSAHQGCLPPFPADVFMVPQYGYLTLNNGSQAVGRSSFYCLEYFPSQMLRTGNNFTFSYTFEDVPFHSSYAHSQSLDRLMNPLIDQYLYYLSRTNTPSGTTTQSGLQFSQAGASDIRDQSRNWLPGPCYRQQRVSKTSADNNNSEYSWTGATKYHLNGRDSLVNPGPAMASHKDDEEKFFPQSGVLIFGKQGSEKTNVDIEKVMITDEEEIRTTNPVATEQYGSCIYQPPERQQTSSYRRCQHTRRSSRHGLAGQRCVPSGAHLGKDSTHGRTFSPLSPHGWIRTTPSSTDSHQEHPGTCESFDHLQCGKVCFLHHTVLHGTGQRGDRVRAAEGKQQTLESRNSVHFQLQQVC

SEQ ID NO: 5114 - protein, 739 aa, Adeno-associated virus 2; identical to SEQ ID NO: 5111

SEQ ID NO: 5115 - protein, 737 aa, Adeno-associated virus 2
MASDGYLPDWLEDNLSEGIREWWDLKPGAPKPKANQQKQDDGRGLVLPGYKYLGPFNGLDKGEPVNAADAAALEHDKAYDQQLKAGDNPYLRYNHADAEFQERLQEDTSFGGNLGRAVFQAKKRVLEPFGLVEEGAKTAPGKKRPVEQSPQEPDSSSGIGKTGQQPAKKRLNFGQTGDSESVPDPQPLGEPPATPAAVGPTTMASGGGAPMADNNEGADGVGNASGNWHCDSTWLGDRVITTSTRTWALPTYNNHLYKQISSASTGASNDNHYFGYSTPWGYFDFNRFHCHFSPRDWQRLINNNWGFRPKRLNFKLFNIQVKEVTTNDGTTTIANNLTSTVQVFTDSEYQLPYVLGSAHQGCLPPFPADVFMVPQYGYLTLNNGSQAVGRSSFYCLEYFPSQMLRTGNNFTFSYTFEDVPFHSSYAHSQSLDRLMNPLIDQYLYYLSRTNTPSGTTTQSGLQFSQAGASDIRDQSRNWLPGPCYRQQRVSKTSADNNNSEYSWTGATKYHLNGRDSLVNPGPAMASHKDDEEKFFPQSGVLIFGKQGSEKTNVDIEKVMITDEEEIRTTNPVATEQYGSVSTNLQRGNRQAATADVNTQGVLPGMVWQDRDVYLQGPIWAKIPHTDGHFHPSPLMGGFGLKHHPPQILIKNTPVPANPSTTFSAAKFASFITQYSTGQVSVEIEWELQKENSKRWNPEIQYTSNYNKSVNVDFTVDTNGVYSEPRPIGTRYLTRNLL

SEQ ID NO: 5116 - protein, 741 aa, Adeno-associated virus 2
MAADGYLPDWLEDTLSEGIREWWALKPGAPKPKANQQKQDDGRGLVLPGYKYLGPFNGLDKGEPVNEADAAALEHDKAYDQQLQAGDNPYLRYNHADAEFQERLQEDTSFGGNLGRAVFQAKKRVLEPLGLVEEPVKTAPGKKRPVEHSPVEPDSSSGTGKSGQQPARKRLNFGQTGDADSVPDPQPLGQPPAAPSGLGTNTMATGSGAPMADNNEGADGVGNSSGNWHCDSTWMGDRVITTSTRTWALPTYNNHLYKQISSQSGASNDNHYFGYSTPWGYFDFNRFHCHFSPRDWQRLINNNWGFRPKRLNFKLFNIQVKEVTQNDGTTTIANNLTSTVQVFTDSEYQLPYVLGSAHQGCLPPFPADVFMVPQYGYLTLNNGSQAVGRSSFYCLEYFPSQMLRTGNNFTFSYTFEDVPFHSSYAHSQSLDRLMNPLIDQYLYYLSRTNTPSGTTTQSGLQFSQAGASDIRDQSRNWLPGPCYRQQRVSKTSADNNNSEYSWTGATKYHLNGRDSLVNPGPAMASHKDDEEKFFPQSGVLIFGKQGSEKTNVDIEKVMITDEEEIRTTNPVATEQYGSVSTNLQRGNLANHNNTTNARQAATADVNTQGVLPGMVWQDRDVYLQGPIWAKIPHTDGHFHPSPLMGGFGLKHPPPQILIKNTPVPANPSTTFSAAKFASFITQYSTGQVSVEIEWELQKENSKRWNPEIQYTSNYNKSINVDFTVDTNGVYSEPRPIGTRYL

SEQ ID NO: 5117 - protein, 730 aa, Adeno-associated virus 2
MASDGYLPDWLEDNLSEGIREWWDLKPGAPKPKANQQKQDDGRGLVLPGYKYLGPFNGLDKGEPVNAADAAALEHDKAYDQQLKAGDNPYLRYNHADAEFQERLQEDTSFGGNLGRAVFQAKKRVLEPFGLVEEGAKTAPGKKRPVEQSPQEPDSSSGIGKTGQQPAKKRLNFGQTGDSESVPDPQPLGEPPATPAAVGPTTMASGGGAPMADNNEGADGVGNASGNWHCDSTWLGDRVITTSTRTWALPTYNNHLYKQISSASTGASNDNHYFGYSTPWGYFDFNRFHCHFSPRDWQRLINNNWGFRPKRLNFKLFNIQVKEVTTNDGVTTIANNLTSTVQVFSDSEYQLPYVLGSAHQGCLPPFPADVFMIPQYGYLTLNNGSQAVGRSSFYCLEYFPSQMLRTGNNFTFSYTFEDVPFHSSYAHSQSLDRLMNPLIDQYLYYLNRTQNQSGSAQNNDLLFSRGSPAGMSVQPKNWLPGPCYRQQRVSKTKTDNNNSNFTWTGASKYNLNGRESIINPGTAMASHKDDKDKFFPMSGVMIFGKESAGASNTALDNVMITDEEEIKATNPVATERFGTVAVNLQSSSTDPATGDVHVMGALPGMVWQDRDVYLQGPIWAKIPHTDGHFHPSPLMGGFGLKNPPPQILIKNTPVPANPPAEFSATKFASFITQYSTGQVSVEIEWELQKENSKRWNPEVQYTSNYAKSANVDFTVDNNGLYTEPRPIGTR

SEQ ID NO: 5118 - protein, 735 aa, Adeno-associated virus 2
  MOD_RES (239)..(239): Any amino acid
MASDGYLPDWLEDNLSEGIREWWDLKPGAPKPKANQQKQDDGRGLVLPGYKYLGPFNGLDKGEPVNAADAAALEHDKAYDQQLKAGDNPYLRYNHADAEFQERLQEDTSFGGNLGRAVFQAKKRVLEPFGLVEEGAKTAPGKKRPVEQSPQEPDSSSGIGKTGQQPAKKRLNFGQTGDSESVPDPQPLGEPPATPAAVGPTTMASGGGAPMADNNEGADGVGNASGNWHCDSTWLGDRXITTSTRTWALPTYNNHLYKQISSASTGASNDNHYFGYSTPWGYFDFNRFHCHFSPRDWQRLINNNWGFRPKRLNFKLFNIQVKEVTTNDGVTTIANNLTSTVQVFSDSEYQLPYVLGSAHQGCLPPFPADVFMIPQYGYLTLNNGSQAVGRSSFYCLEYFPSQMLRTGNNFTFSYTFEDVPFHSSYAHSQSLDRLMNPLIDQYLYYLNRTQNQSGSAQNNDLLFSRGSPAGMSVQPKNWLPGPCYRQQRVSKTKTDNNNSNFTWTGASKYNLNGRESIINPGTAMASHKDDKDKFFPMSGVMIFGKESAGASNTALDNVMITDEEEIKATNPVATERFGTVAVNLQSSSTDPATGDVHVMGALPGMVWQDRDVYLQGPIWAKIPHTDGHFHPSPLMGGFGLKNPPPQILIKNTPVPANPPAEFSATKFASFITQYSTGQVSVEIEWELQKENSKRWNPEVQYTSNYAKSANVDFTVDNNGLYTEPRPIGTRYLTRP

SEQ ID NO: 5119 - protein, 733 aa, Adeno-associated virus 2
MASDGYLPDWLEDNLSEGIREWWDLKPGAPKPKANQQKQDDGRGLVLPGYKYLGPFNGLDKGEPVNAADAAALEHDKAYDQQLKAGDNPYLRYNHADAEFQERLQEDTSFGGNLGRAVFLAKKRVLEPFGLVEEGAKTAPGKKRPVEQSPQEPDSSSGIGKTGQQPAKKRLNFGQTGDSESVPDPQPLGEPPATPAAVGPTTMASGGGAPMADNNEGADGVGNASGNWHCDSTWLGDRVITTSTRTWALPTYNNHLYKQISSASTGASNDNHYFGYSTPWGYFDFNRFHCHFSPRDWQRLINNNWGFRPKRLNFKLFNIQVKEVTTNDGVTTIANNLTSTVQVFSDSEYQLPYVLGSAHQGCLPPFPADVFMIPQYGYLTLNNGSQAVGRSSFYCLEYFPSQMLRTGNNFTFSYTFEDVPFHSSYAHSQSLDRLMNPLIDQYLYYLNRTQNQSGSAQNNDLLFSRGSPAGMSVQPKNWLPGPCYRQQRVSKTKTDNNNSNFTWTGASKYNLNGRESIINPGTAMASHKDDKDKFFPMSGVMIFGKESAGASNTALDNVMITDEEEIKATNPVATERFGTVAVNLQSSSTDPATGDVHVMGALPGMVWQDRDVYLQGPIWAKIPHTDGHFHPSPLMGGFGLKNPPPQILIKNTPVPANPPAEFSATKFASFITQYSTGQVSVEIEWELQKENSKRWNPEVQYTSNYAKSANVDFTVDNNGLYTEPRPIGTRYLT

SEQ ID NO: 5120 - protein, 734 aa, Adeno-associated virus 2
MAADGYLPDWLEDTLSEGIRQWWKLKPGPPPPKPAERHKDDSRGLVLPGCKYLGPFNGLDKGEPVNEADAAALEHDKAYDRQLDSGDNPYLKYNHADAEFQERLKEDTSFGGNLGRAVFQAKKRVLEPLGLVEEPVKTAPGKKRPVEHSPVEPDSSSGTGKAGQQPARKRLNFGQTGDADSVPDPQPLGQPPAAPSGLGTNTMATGSGAPMADNNEGADGVGNSSGNWHCDSTWMGDRVITTSTRTWALPTYNNHLYKQISSQSGASNDNHYFGYSTPWGYFDFNRFHCHFSPRDWQRLINNNWGFRPKRLNFKLFNIQVKEVTQNDGTTTIANNLTSTVQVFSDSEYQLPYVLGSAHQGCLPPFPADVFMIPQYGYLTLNNGSQAVGRSSFYCLEYFPSQMLRTGNNFTFNYTFEDVPFHSSYAHSQSLDRLMNPLIDQYLYYLNRTQNQSGSAQNNDLLFSRGSPAGMSVQPKNWLPGPCYRQQRVSKTKTDNNNSNFTWTGASKYNLNGRESIINPGTAMASHKDDKDKFFPMSGVMIFGKESAGASNTALDNVMITDEEEIKATNPVATERFGTVAVNLQSSSTDPATGDVHVMGALPGMVWQDRDVYLQGPIWAKIPHTDGHFHPSPLMGGFGLKNPPPQILIKNTPVPANPPAEFSATKFASFITQYSTGQVSVEIEWELQKENSKRWNPEVQYTSNYAKSANVDFTVDNNGLYTEPRPIGTRYLTRP

SEQ ID NO: 5121 - protein, 734 aa, Adeno-associated virus 2
MAADGYLPDWLEDTLSEGIRQWWKLKPGPPPPKPAERHKDDSRGLVLPGYKYLGPFNGLDKGEPVNEADAAALEHDKAYDRQLDSGDNPYLKYNHADAEFQERLKEDTSFGGNLGRAVFQAKKRVLEPLGLVEEPVKTAPGKKRPVEHSPVEPDSSSGTGKAGQQPARKRLNFGQTGDADSVPDPQPLGQPPAAPSGLGTNTMATGSGAPMADNNEGADGVGNSSGNWHCDSTWMGDRVITTSTRTWALSTYNNHLYKQISSQSGASNDNHYFGYSTPWGYFDFNRFHCHFSPRDWQRLINNNWGFRPKRLNFKLFNIQVKEVTQNDGTTTIANNLTSTVQVFTDSEYQLPYVLGSAHQGCLPPFPADVFMVPQYGYLTLNNGSQAVGRSSFYCLEYFPSQMLRTGNNFTFSYTFEDVPFHSSYAHSQSLDRLMNPLIDQYLYYLSRTNTPSGTTTQSRLQFSQAGASDIRDQSRNWLPGPCYRQQRVSKTSADNNNSEYSWTGATKYHLNGRDSLVNPGPAMASHKDDEEKFFPQSGVLIFGKQGSEKTNVDIEKVMITDEEEIRTTNPVATEQYGSVSTNLQRGNRQAATADVNTQGVLPGMVWQDRDVYLQGPIWAKIPHTDGHFHPSPLMGGFGLKHPPPQILIKNTPVPANPSTTFSAAKFASFITQYSTGQVSVEIEWELQKENSKRWNPEIQYTSNYNKSINVDFTVDTNGVYSEPRPIGTRYLTRN

SEQ ID NO: 5122 - protein, 738 aa, Adeno-associated virus 2
MAADGYLPDWLEDTLSEGIRQWWKLKPGPPPPKPAERHKDDSRGLVLPGYKYLGPFNGLDKGEPVNEADAAALEHDKAYDRQLDGGDNPYLKYNHADAEFQERLKEDTSFGGNLGRAVFQAKKRVLEPLGLVEEPVKTAPGKKRPVEHSPVEPDSSSGTGKAGQQPARKRLNFGQTGDADSVPDPQPLGQPPAAPSGLGTNTMATGSGAPMADNNEGADGVGNSSGNWHCDSTWMGDRVITTSTRTWALPTYNNHLYKQISSQSGASNDNHYFGYSTPWGYFDFNRFHCHFSPRDWQRLINNNWGFRPKRLNFKLFNIQVKEVTQNDGTTTIANNLTSTVQVFTDSEYQLPYVLGSAHQGCLPPFPADVFMVPQYGYLTLNNGSQAVGRSSFYCLEYFPSQMLRTGNNFTFSYTFEDVPFHSSYAHSQSLDRLMNPLIDQYLYYLSRTNTPSGTTTQSGLQFSQAGASDIRDQSRNWLPGPCYRQQRVSKTSADNNNSEYSWTGATKYHLNGRDSLVNPGPAMASHKDDEEKFFPQSGVLIFGKQGSEKTNVDIEKVMITDEEEIRTTNPVATEQYGSVSTNLQRGNRQAATADVNTQGVLPGMVWQDRDVYLQGPIWAKIPHTDGHFHPSPLMGGFGLKHPPPQILIKNTPVPANPSTTFSAAKFASFITQYSTGQVSVEIEWELQKENSKRWNPEIQYTSNYNKSVNVDFTVDTNGVYSEPRPIGTRYLTRNLLRP

SEQ ID NO: 5123 - protein, 736 aa, Adeno-associated virus 3; identical to SEQ ID NO: 4757

SEQ ID NO: 5124 - DNA, 4726 bp, Adeno-associated virus 3
ttggccactccctctatgcgcactcgctcgctcggtggggcctggcgaccaaaggtcgccagacggacgtgctttgcacgtccggccccaccgagcgagcgagtgcgcatagagggagtggccaactccatcactagaggtatggcagtgacgtaacgcgaagcgcgcgaagcgagaccacgcctaccagctgcgtcagcagtcaggtgacccttttgcgacagtttgcgacaccacgtggccgctgagggtatatattctcgagtgagcgaaccaggagctccattttgaccgcgaaatttgaacgagcagcagccatgccggggttctacgagattgtcctgaaggtcccgagtgacctggacgagcgcctgccgggcatttctaactcgtttgttaactgggtggccgagaaggaatgggacgtgccgccggattctgacatggatccgaatctgattgagcaggcacccctgaccgtggccgaaaagcttcagcgcgagttcctggtggagtggcgccgcgtgagtaaggccccggaggccctcttttttgtccagttcgaaaagggggagacctacttccacctgcacgtgctgattgagaccatcggggtcaaatccatggtggtcggccgctacgtgagccagattaaagagaagctggtgacccgcatctaccgcggggtcgagccgcagcttccgaactggttcgcggtgaccaaaacgcgaaatggcgccgggggcgggaacaaggtggtggacgactgctacatccccaactacctgctccccaagacccagcccgagctccagtgggcgtggactaacatggaccagtatttaagcgcctgtttgaatctcgcggagcgtaaacggctggtggcgcagcatctgacgcacgtgtcgcagacgcaggagcagaacaaagagaatcagaaccccaattctgacgcgccggtcatcaggtcaaaaacctcagccaggtacatggagctggtcgggtggctggtggaccgcgggatcacgtcagaaaagcaatggattcaggaggaccaggcctcgtacatctccttcaacgccgcctccaactcgcggtcccagatcaaggccgcgctggacaatgcctccaagatcatgagcctgacaaagacggctccggactacctggtgggcagcaacccgccggaggacattaccaaaaatcggatctaccaaatcctggagctgaacgggtacgatccgcagtacgcggcctccgtcttcctgggctgggcgcaaaagaagttcgggaagaggaacaccatctggctctttgggccggccacgacgggtaaaaccaacatcgcggaagccatcgcccacgccgtgcccttctacggctgcgtaaactggaccaatgagaactttcccttcaacgattgcgtcgacaagatggtgatctggtgggaggagggcaagatgacggccaaggtcgtggagagcgccaaggccattctgggcggaagcaaggtgcgcgtggaccaaaagtgcaagtcatcggcccagatcgaacccactcccgtgatcgtcacctccaacaccaacatgtgcgccgtgattgacgggaacagcaccaccttcgagcatcagcagccgctgcaggaccggatgtttgaatttgaacttacccgccgtttggaccatgactttgggaaggtcaccaaacaggaagtaaaggactttttccggtgggcttccgatcacgtgactgacgtggctcatgagttctacgtcagaaagggtggagctaagaaacgccccgcctccaatgacgcggatgtaagcgagccaaaacgggagtgcacgtcacttgcgcagccgacaacgtcagacgcggaagcaccggcggactacgcggacaggtaccaaaacaaatgttctcgtcacgtgggcatgaatctgatgctttttccctgtaaaacatgcgagagaatgaatcaaatttccaatgtctgttttacgcatggtcaaagagactgtggggaatgcttccctggaatgtcagaatctcaacccgtttctgtcgtcaaaaagaagacttatcagaaactgtgtccaattcatcatatcctgggaagggcacccgagattgcctgttcggcctgcgatttggccaatgtggacttggatgactgtgtttctgagcaataaatgacttaaaccaggtatggctgctgacggttatcttccagattggctcgaggacaacctttctgaaggcattcgtgagtggtgggctctgaaacctggagtccctcaacccaaagcgaaccaacaacaccaggacaaccgtcggggtcttgtgcttccgggttacaaatacctcggacccggtaacggactcgacaaaggagagccggtcaacgaggcggacgcggcagccctcgaacacgacaaagcttacgaccagcagctcaaggccggtgacaacccgtacctcaagtacaaccacgccgacgccgagtttcaggagcgtcttcaagaagatacgtcttttgggggcaaccttggcagagcagtcttccaggccaaaaagaggatccttgagcctcttggtctggttgaggaagcagctaaaacggctcctggaaagaagggggctgtagatcagtctcctcaggaaccggactcatcatctggtgttggcaaatcgggcaaacagcctgccagaaaaagactaaatttcggtcagactggagactcagagtcagtcccagaccctcaacctctcggagaaccaccagcagcccccacaagtttgggatctaatacaatggcttcaggcggtggcgcaccaatggcagacaataacgagggtgccgatggagtgggtaattcctcaggaaattggcattgcgattcccaatggctgggcgacagagtcatcaccaccagcaccagaacctgggccctgcccacttacaacaaccatctctacaagcaaatctccagccaatcaggagcttcaaacgacaaccactactttggctacagcaccccttgggggtattttgactttaacagattccactgccacttctcaccacgtgactggcagcgactcattaacaacaactggggattccggcccaagaaactcagcttcaagctcttcaacatccaagttagaggggtcacgcagaacgatggcacgacgactattgccaataaccttaccagcacggttcaagtgtttacggactcggagtatcagctcccgtacgtgctcgggtcggcgcaccaaggctgtctcccgccgtttccagcggacgtcttcatggtccctcagtatggatacctcaccctgaacaacggaagtcaagcggtgggacgctcatccttttactgcctggagtacttcccttcgcagatgctaaggactggaaataacttccaattcagctataccttcgaggatgtaccttttcacagcagctacgctcacagccagagtttggatcgcttgatgaatcctcttattgatcagtatctgtactacctgaacagaacgcaaggaacaacctctggaacaaccaaccaatcacggctgctttttagccaggctgggcctcagtctatgtctttgcaggccagaaattggctacctgggccctgctaccggcaacagagactttcaaagactgctaacgacaacaacaacagtaactttccttggacagcggccagcaaatatcatctcaatggccgcgactcgctggtgaatccaggaccagctatggccagtcacaaggacgatgaagaaaaatttttccctatgcacggcaatctaatatttggcaaagaagggacaacggcaagtaacgcagaattagataatgtaatgattacggatgaagaagagattcgtaccaccaatcctgtggcaacagagcagtatggaactgtggcaaataacttgcagagctcaaatacagctcccacgactggaactgtcaatcatcagggggccttacctggcatggtgtggcaagatcgtgacgtgtaccttcaaggacctatctgggcaaagattcctcacacggatggacactttcatccttctcctctgatgggaggctttggactgaaacatccgcctcctcaaatcatgatcaaaaatactccggtaccggcaaatcctccgacgactttcagcccggccaagtttgcttcatttatcactcagtactccactggacaggtcagcgtggaaattgagtgggagctacagaaagaaaacagcaaacgttggaatccagagattcagtacacttccaactacaacaagtctgttaatgtggactttactgtagacactaatggtgtttatagtgaacctcgccctattggaacccggtatctcacacgaaacttgtgaatcctggttaatcaataaaccgtttaattcgtttcagttgaactttggctcttgtgcacttctttatctttatcttgtttccatggctactgcgtagataagcagcggcctgcggcgcttgcgcttcgcggtttacaactgctggttaatatttaactctcgccatacctctagtgatggagttggccactccctctatgcgcactcgctcgctcggtggggcctggcgaccaaaggtcgccagacggacgtgctttgcacgtccggccccaccgagcgagcgagtgcgcatagagggagtggccaa

SEQ ID NO: 5125 - protein, 736 aa, Adeno-associated virus 3A; identical to SEQ ID NO: 4757

SEQ ID NO: 5126 - protein, 624 aa, Adeno-associated virus 3A
MPGFYEIVLKVPSDLDERLPGISNSFVNWVAEKEWDVPPDSDMDPNLIEQAPLTVAEKLQREFLVEWRRVSKAPEALFFVQFEKGETYFHLHVLIETIGVKSMVVGRYVSQIKEKLVTRIYRGVEPQLPNWFAVTKTRNGAGGGNKVVDDCYIPNYLLPKTQPELQWAWTNMDQYLSACLNLAERKRLVAQHLTHVSQTQEQNKENQNPNSDAPVIRSKTSARYMELVGWLVDRGITSEKQWIQEDQASYISFNAASNSRSQIKAALDNASKIMSLTKTAPDYLVGSNPPEDITKNRIYQILELNGYDPQYAASVFLGWAQKKFGKRNTIWLFGPATTGKTNIAEAIAHAVPFYGCVNWTNENFPFNDCVDKMVIWWEEGKMTAKVVESAKAILGGSKVRVDQKCKSSAQIEPTPVIVTSNTNMCAVIDGNSTTFEHQQPLQDRMFEFELTRRLDHDFGKVTKQEVKDFFRWASDHVTDVAHEFYVRKGGAKKRPASNDADVSEPKRECTSLAQPTTSDAEAPADYADRYQNKCSRHVGMNLMLFPCKTCERMNQISNVCFTHGQRDCGECFPGMSESQPVSVVKKKTYQKLCPIHHILGRAPEIACSACDLANVDLDDCVSEQ

SEQ ID NO: 5127 - protein, 736 aa, Adeno-associated virus 3B
MAADGYLPDWLEDNLSEGIREWWALKPGVPQPKANQQHQDNRRGLVLPGYKYLGPGNGLDKGEPVNEADAAALEHDKAYDQQLKAGDNPYLKYNHADAEFQERLQEDTSFGGNLGRAVFQAKKRILEPLGLVEEAAKTAPGKKRPVDQSPQEPDSSSGVGKSGKQPARKRLNFGQTGDSESVPDPQPLGEPPAAPTSLGSNTMASGGGAPMADNNEGADGVGNSSGNWHCDSQWLGDRVITTSTRTWALPTYNNHLYKQISSQSGASNDNHYFGYSTPWGYFDFNRFHCHFSPRDWQRLINNNWGFRPKKLSFKLFNIQVKEVTQNDGTTTIANNLTSTVQVFTDSEYQLPYVLGSAHQGCLPPFPADVFMVPQYGYLTLNNGSQAVGRSSFYCLEYFPSQMLRTGNNFQFSYTFEDVPFHSSYAHSQSLDRLMNPLIDQYLYYLNRTQGTTSGTTNQSRLLFSQAGPQSMSLQARNWLPGPCYRQQRLSKTANDNNNSNFPWTAASKYHLNGRDSLVNPGPAMASHKDDEEKFFPMHGNLIFGKEGTTASNAELDNVMITDEEEIRTTNPVATEQYGTVANNLQSSNTAPTTRTVNDQGALPGMVWQDRDVYLQGPIWAKIPHTDGHFHPSPLMGGFGLKHPPPQIMIKNTPVPANPPTTFSPAKFASFITQYSTGQVSVEIEWELQKENSKRWNPEIQYTSNYNKSVNVDFTVDTNGVYSEPRPIGTRYLTRNL

SEQ ID NO: 5128 - protein, 624 aa, Adeno-associated virus 3B
MPGFYEIVLKVPSDLDEHLPGISNSFVNWVAEKEWELPPDSDMDPNLIEQAPLTVAEKLQREFLVEWRRVSKAPEALFFVQFEKGETYFHLHVLIETIGVKSMVVGRYVSQIKEKLVTRIYRGVEPQLPNWFAVTKTRNGAGGGNKVVDDCYIPNYLLPKTQPELQWAWTNMDQYLSACLNLAERKRLVAQHLTHVSQTQEQNKENQNPNSDAPVIRSKTSARYMELVGWLVDRGITSEKQWIQEDQASYISFNAASNSRSQIKAALDNASKIMSLTKTAPDYLVGSNPPEDITKNRIYQILELNGYDPQYAASVFLGWAQKKFGKRNTIWLFGPATTGKTNIAEAIAHAVPFYGCVNWTNENFPFNDCVDKMVIWWEEGKMTAKVVESAKAILGGSKVRVDQKCKSSAQIEPTPVIVTSNTNMCAVIDGNSTTFEHQQPLQDRMFKFELTRRLDHDFGKVTKQEVKDFFRWASDHVTDVAHEFYVRKGGAKKRPASNDADVSEPKRQCTSLAQPTTSDAEAPADYADRYQNKCSRHVGMNLMLFPCKTCERMNQISNVCFTHGQRDCGECFPGMSESQPVSVVKKKTYQKLCPIHHILGRAPEIACSACDLANVDLDDCVSEQ

SEQ ID NO: 5129 - DNA, 4722 bp, Adeno-associated virus 3B
tggccactccctctatgcgcactcgctcgctcggtggggcctggcgaccaaaggtcgccagacggacgtgctttgcacgtccggccccaccgagcgagcgagtgcgcatagagggagtggccaactccatcactagaggtatggcagtgacgtaacgcgaagcgcgcgaagcgagaccacgcctaccagctgcgtcagcagtcaggtgacccttttgcgacagtttgcgacaccacgtggccgctgagggtatatattctcgagtgagcgaaccaggagctccattttgaccgcgaaatttgaacgagcagcagccatgccggggttctacgagattgtcctgaaggtcccgagtgacctggacgagcacctgccgggcatttctaactcgtttgttaactgggtggccgagaaggaatgggagctgccgccggattctgacatggatccgaatctgattgagcaggcacccctgaccgtggccgaaaagcttcagcgcgagttcctggtggagtggcgccgcgtgagtaaggccccggaggccctcttttttgtccagttcgaaaagggggagacctacttccacctgcacgtgctgattgagaccatcggggtcaaatccatggtggtcggccgctacgtgagccagattaaagagaagctggtgacccgcatctaccgcggggtcgagccgcagcttccgaactggttcgcggtgaccaaaacgcgaaatggcgccgggggcgggaacaaggtggtggacgactgctacatccccaactacctgctccccaagacccagcccgagctccagtgggcgtggactaacatggaccagtatttaagcgcctgtttgaatctcgcggagcgtaaacggctggtggcgcagcatctgacgcacgtgtcgcagacgcaggagcagaacaaagagaatcagaaccccaattctgacgcgccggtcatcaggtcaaaaacctcagccaggtacatggagctggtcgggtggctggtggaccgcgggatcacgtcagaaaagcaatggattcaggaggaccaggcctcgtacatctccttcaacgccgcctccaactcgcggtcccagatcaaggccgcgctggacaatgcctccaagatcatgagcctgacaaagacggctccggactacctggtgggcagcaacccgccggaggacattaccaaaaatcggatctaccaaatcctggagctgaacgggtacgatccgcagtacgcggcctccgtcttcctgggctgggcgcaaaagaagttcgggaagaggaacaccatctggctctttgggccggccacgacgggtaaaaccaacatcgcggaagccatcgcccacgccgtgcccttctacggctgcgtaaactggaccaatgagaactttcccttcaacgattgcgtcgacaagatggtgatctggtgggaggagggcaagatgacggccaaggtcgtggagagcgccaaggccattctgggcggaagcaaggtgcgcgtggaccaaaagtgcaagtcatcggcccagatcgaacccactcccgtgatcgtcacctccaacaccaacatgtgcgccgtgattgacgggaacagcaccaccttcgagcatcagcagccgctgcaggaccggatgtttaaatttgaacttacccgccgtttggaccatgactttgggaaggtcaccaaacaggaagtaaaggactttttccggtgggcttccgatcacgtgactgacgtggctcatgagttctacgtcagaaagggtggagctaagaaacgccccgcctccaatgacgcggatgtaagcgagccaaaacggcagtgcacgtcacttgcgcagccgacaacgtcagacgcggaagcaccggcggactacgcggacaggtaccaaaacaaatgttctcgtcacgtgggcatgaatctgatgctttttccctgtaaaacatgcgagagaatgaatcaaatttccaatgtctgttttacgcatggtcaaagagactgtggggaatgcttccctggaatgtcagaatctcaacccgtttctgtcgtcaaaaagaagacttatcagaaactgtgtccaattcatcatatcctgggaagggcacccgagattgcctgttcggcctgcgatttggccaatgtggacttggatgactgtgtttctgagcaataaatgacttaaaccaggtatggctgctgacggttatcttccagattggctcgaggacaacctttctgaaggcattcgtgagtggtgggctctgaaacctggagtccctcaacccaaagcgaaccaacaacaccaggacaaccgtcggggtcttgtgcttccgggttacaaatacctcggacccggtaacggactcgacaaaggagagccggtcaacgaggcggacgcggcagccctcgaacacgacaaagcttacgaccagcagctcaaggccggtgacaacccgtacctcaagtacaaccacgccgacgccgagtttcaggagcgtcttcaagaagatacgtcttttgggggcaaccttggcagagcagtcttccaggccaaaaagaggatccttgagcctcttggtctggttgaggaagcagctaaaacggctcctggaaagaagaggcctgtagatcagtctcctcaggaaccggactcatcatctggtgttggcaaatcgggcaaacagcctgccagaaaaagactaaatttcggtcagactggcgactcagagtcagtcccagaccctcaacctctcggagaaccaccagcagcccccacaagtttgggatctaatacaatggcttcaggcggtggcgcaccaatggcagacaataacgagggtgccgatggagtgggtaattcctcaggaaattggcattgcgattcccaatggctgggcgacagagtcatcaccaccagcaccagaacctgggccctgcccacttacaacaaccatctctacaagcaaatctccagccaatcaggagcttcaaacgacaaccactactttggctacagcaccccttgggggtattttgactttaacagattccactgccacttctcaccacgtgactggcagcgactcattaacaacaactggggattccggcccaagaaactcagcttcaagctcttcaacatccaagttaaagaggtcacgcagaacgatggcacgacgactattgccaataaccttaccagcacggttcaagtgtttacggactcggagtatcagctcccgtacgtgctcgggtcggcgcaccaaggctgtctcccgccgtttccagcggacgtcttcatggtccctcagtatggatacctcaccctgaacaacggaagtcaagcggtgggacgctcatccttttactgcctggagtacttcccttcgcagatgctaaggactggaaataacttccaattcagctataccttcgaggatgtaccttttcacagcagctacgctcacagccagagtttggatcgcttgatgaatcctcttattgatcagtatctgtactacctgaacagaacgcaaggaacaacctctggaacaaccaaccaatcacggctgctttttagccaggctgggcctcagtctatgtctttgcaggccagaaattggctacctgggccctgctaccggcaacagagactttcaaagactgctaacgacaacaacaacagtaactttccttggacagcggccagcaaatatcatctcaatggccgcgactcgctggtgaatccaggaccagctatggccagtcacaaggacgatgaagaaaaatttttccctatgcacggcaatctaatatttggcaaagaagggacaacggcaagtaacgcagaattagataatgtaatgattacggatgaagaagagattcgtaccaccaatcctgtggcaacagagcagtatggaactgtggcaaataacttgcagagctcaaatacagctcccacgactagaactgtcaatgatcagggggccttacctggcatggtgtggcaagatcgtgacgtgtaccttcaaggacctatctgggcaaagattcctcacacggatggacactttcatccttctcctctgatgggaggctttggactgaaacatccgcctcctcaaatcatgatcaaaaatactccggtaccggcaaatcctccgacgactttcagcccggccaagtttgcttcatttatcactcagtactccactggacaggtcagcgtggaaattgagtgggagctacagaaagaaaacagcaaacgttggaatccagagattcagtacacttccaactacaacaagtctgttaatgtggactttactgtagacactaatggtgtttatagtgaacctcgccctattggaacccggtatctcacacgaaacttgtaatcctggttaatcaataaaccgtttaattcgtttcagttgaactttggctcttgtgcacttcttatcttatcttgtttccatggctactgcgtagataagcagcggcctgcggcgcttgcgcttcgcggtttacaactgctggttaatatttaactctcgccatacctctagtgatggagttggccactccctctatgcgcactcgctcgctcggtggggccggacgtgcaaagcacgtccgtctggcgacctttggtcgccaggccccaccgagcgagcgagtgcgcatagagggagtggccaa

SEQ ID NO: 5130 - DNA, 1800 bp, Adeno-associated virus 4
  modified_base (342)..(342): a, c, t or g
acggctcctggaaagaagagaccgttgattgaatccccccagcagcccgactcctccacgggtatcggcaaaaaaggcaagcagccggctaaaaagaagctcgttttcgaagacgaaactggagcaggcgacggaccccctgagggatcaacttccggagccatgtctgatgacagtgagatgcgtgcagcagctggcggagctgcagtcgagggsggacaaggtgccgatggagtgggtaatgcctcgggtgattggcattgcgattccacctggtctgagggccacgtcacgaccaccagcaccagaacctgggtcttgcccacctacaacaaccacctntacaagcgactcggagagagcctgcagtccaacacctacaacggattctccaccccctggggatactttgacttcaaccgcttccactgccacttctcaccacgtgactggcagcgactcatcaacaacaactggggcatgcgacccaaagccatgcgggtcaaaatcttcaacatccaggtcaaggaggtcacgacgtcgaacggcgagacaacggtggctaataaccttaccagcacggttcagatctttgcggactcgtcgtacgaactgccgtacgtgatggatgcgggtcaagagggcagcctgcctccttttcccaacgacgtctttatggtgccccagtacggctactgtggactggtgaccggcaacacttcgcagcaacagactgacagaaatgccttctactgcctggagtactttccttcgcagatgctgcggactggcaacaactttgaaattacgtacagttttgagaaggtgcctttccactcgatgtacgcgcacagccagagcctggaccggctgatgaaccctctcatcgaccagtacctgtggggactgcaatcgaccaccaccggaaccaccctgaatgccgggactgccaccaccaactttaccaagctgcggcctaccaacttttccaactttaaaaagaactggctgcccgggccttcaatcaagcagcagggcttctcaaagactgccaatcaaaactacaagatccctgccaccgggtcagacagtctcatcaaatacgagacgcacagcactctggacggaagatggagtgccctgacccccggacctccaatggccacggctggacctgcggacagcaagttcagcaacagccagctcatctttgcggggcctaaacagaacggcaacacggccaccgtacccgggactctgatcttcacctctgaggaggagctggcagccaccaacgccaccgatacggacatgtggggcaacctacctggcggtgaccagagcaacagcaacctgccgaccgtggacagactgacagccttgggagccgtgcctggaatggtctggcaaaacagagacatttactaccagggtcccatttgggccaagattcctcataccgatggacactttcacccctcaccgctgattggtgggtttgggctgaaacacccgcctcctcaaatttttatcaagaacaccccggtacctgcgaatcctgcaacgaccttcagctctactccggtaaactccttcattactcagtacagcactggccaggtgtcggtgcagattgactgggagatccagaaggagcggtccaaacgctggaaccccgaggtccagtttacctccaactacggacagcaaaactctctgttgtgggctcccgatgcggctgggaaatacactgagcctagggctatcggtacccgctacctcacccaccacctgtaataa

SEQ ID NO: 5131 - DNA, 2208 bp, Adeno-associated virus 4
  modified_base (750)..(750): a, c, t or g
atgactgacggttaccttccagattggctagaggacaacctctctgaaggcgttcgagagtggtgggcgctgcaacctggagcccctaaacccaaggcaaatcaacaacatcaggacaacgctcggggtcttgtgcttccgggttacaaatacctcggacccggcaacggactcgacaagggggaacccgtcaacgcagcggacgcggcagccctcgagcacgacaaggcctacgaccagcagctcaaggccggtgacaacccctacctcaagtacaaccacgccgacgcggagttccagcagcggcttcagggcgacacatcgtttgggggcaacctcggcagagcagtcttccaggccaaaaagagggttcttgaacctcttggtctggttgagcaagcgggtgagacggctcctggaaagaagagaccgttgattgaatccccccagcagcccgactcctccacgggtatcggcaaaaaaggcaagcagccggctaaaaagaagctcgttttcgaagacgaaactggagcaggcgacggaccccctgagggatcaacttccggagccatgtctgatgacagtgagatgcgtgcagcagctggcggagctgcagtcgagggsggacaaggtgccgatggagtgggtaatgcctcgggtgattggcattgcgattccacctggtctgagggccacgtcacgaccaccagcaccagaacctgggtcttgcccacctacaacaaccacctntacaagcgactcggagagagcctgcagtccaacacctacaacggattctccaccccctggggatactttgacttcaaccgcttccactgccacttctcaccacgtgactggcagcgactcatcaacaacaactggggcatgcgacccaaagccatgcgggtcaaaatcttcaacatccaggtcaaggaggtcacgacgtcgaacggcgagacaacggtggctaataaccttaccagcacggttcagatctttgcggactcgtcgtacgaactgccgtacgtgatggatgcgggtcaagagggcagcctgcctccttttcccaacgacgtctttatggtgccccagtacggctactgtggactggtgaccggcaacacttcgcagcaacagactgacagaaatgccttctactgcctggagtactttccttcgcagatgctgcggactggcaacaactttgaaattacgtacagttttgagaaggtgcctttccactcgatgtacgcgcacagccagagcctggaccggctgatgaaccctctcatcgaccagtacctgtggggactgcaatcgaccaccaccggaaccaccctgaatgccgggactgccaccaccaactttaccaagctgcggcctaccaacttttccaactttaaaaagaactggctgcccgggccttcaatcaagcagcagggcttctcaaagactgccaatcaaaactacaagatccctgccaccgggtcagacagtctcatcaaatacgagacgcacagcactctggacggaagatggagtgccctgacccccggacctccaatggccacggctggacctgcggacagcaagttcagcaacagccagctcatctttgcggggcctaaacagaacggcaacacggccaccgtacccgggactctgatcttcacctctgaggaggagctggcagccaccaacgccaccgatacggacatgtggggcaacctacctggcggtgaccagagcaacagcaacctgccgaccgtggacagactgacagccttgggagccgtgcctggaatggtctggcaaaacagagacatttactaccagggtcccatttgggccaagattcctcataccgatggacactttcacccctcaccgctgattggtgggtttgggctgaaacacccgcctcctcaaatttttatcaagaacaccccggtacctgcgaatcctgcaacgaccttcagctctactccggtaaactccttcattactcagtacagcactggccaggtgtcggtgcagattgactgggagatccagaaggagcggtccaaacgctggaaccccgaggtccagtttacctccaactacggacagcaaaactctctgttgtgggctcccgatgcggctgggaaatacactgagcctagggctatcggtacccgctacctcacccaccacctgtaataa

SEQ ID NO: 5132 - DNA, 1872 bp, Adeno-associated virus 4
atgccggggttctacgagatcgtgctgaaggtgcccagcgacctggacgagcacctgcccggcatttctgactcttttgtgagctgggtggccgagaaggaatgggagctgccgccggattctgacatggacttgaatctgattgagcaggcacccctgaccgtggccgaaaagctgcaacgcgagttcctggtcgagtggcgccgcgtgagtaaggccccggaggccctcttctttgtccagttcgagaagggggacagctacttccacctgcacatcctggtggagaccgtgggcgtcaaatccatggtggtgggccgctacgtgagccagattaaagagaagctggtgacccgcatctaccgcggggtcgagccgcagcttccgaactggttcgcggtgaccaagacgcgtaatggcgccggaggcgggaacaaggtggtggacgactgctacatccccaactacctgctccccaagacccagcccgagctccagtgggcgtggactaacatggaccagtatataagcgcctgtttgaatctcgcggagcgtaaacggctggtggcgcagcatctgacgcacgtgtcgcagacgcaggagcagaacaaggaaaaccagaaccccaattctgacgcgccggtcatcaggtcaaaaacctccgccaggtacatggagctggtcgggtggctggtggaccgcgggatcacgtcagaaaagcaatggatccaggaggaccaggcgtcctacatctccttcaacgccgcctccaactcgcggtcacaaatcaaggccgcgctggacaatgcctccaaaatcatgagcctgacaaagacggctccggactacctggtgggccagaacccgccggaggacatttccagcaaccgcatctaccgaatcctcgagatgaacgggtacgatccgcagtacgcggcctccgtcttcctgggctgggcgcaaaagaagttcgggaagaggaacaccatctggctctttgggccggccacgacgggtaaaaccaacatcgcggaagccatcgcccacgccgtgcccttctacggctgcgtgaactggaccaatgagaactttccgttcaacgattgcgtcgacaagatggtgatctggtgggaggagggcaagatgacggccaaggtcgtagagagcgccaaggccatcctgggcggaagcaaggtgcgcgtggaccaaaagtgcaagtcatcggcccagatcgacccaactcccgtgatcgtcacctccaacaccaacatgtgcgcggtcatcgacggaaactcgaccaccttcgagcaccaacaaccactccaggaccggatgttcaagttcgagctcaccaagcgcctggagcacgactttggcaaggtcaccaagcaggaagtcaaagactttttccggtgggcgtcagatcacgtgaccgaggtgactcacgagttttacgtcagaaagggtggagctagaaagaggcccgcccccaatgacgcagatataagtgagcccaagcgggcctgtccgtcagttgcgcagccatcgacgtcagacgcggaagctccggtggactacgcggacaggtaccaaaacaaatgttctcgtcacgtgggtatgaatctgatgctttttccctgccggcaatgcgagagaatgaatcagaatgtggacatttgcttcacgcacggggtcatggactgtgccgagtgcttccccgtgtcagaatctcaacccgtgtctgtcgtcagaaagcggacgtatcagaaactgtgtccgattcatcacatcatggggagggcgcccgaggtggcctgctcggcctgcgaactggccaatgtggacttggatgactgtgacatggaacaataa

SEQ ID NO: 5133 - DNA, 1611 bp, Adeno-associated virus 4
atgccggggttctacgagatcgtgctgaaggtgcccagcgacctggacgagcacctgcccggcatttctgactcttttgtgagctgggtggccgagaaggaatgggagctgccgccggattctgacatggacttgaatctgattgagcaggcacccctgaccgtggccgaaaagctgcaacgcgagttcctggtcgagtggcgccgcgtgagtaaggccccggaggccctcttctttgtccagttcgagaagggggacagctacttccacctgcacatcctggtggagaccgtgggcgtcaaatccatggtggtgggccgctacgtgagccagattaaagagaagctggtgacccgcatctaccgcggggtcgagccgcagcttccgaactggttcgcggtgaccaagacgcgtaatggcgccggaggcgggaacaaggtggtggacgactgctacatccccaactacctgctccccaagacccagcccgagctccagtgggcgtggactaacatggaccagtatataagcgcctgtttgaatctcgcggagcgtaaacggctggtggcgcagcatctgacgcacgtgtcgcagacgcaggagcagaacaaggaaaaccagaaccccaattctgacgcgccggtcatcaggtcaaaaacctccgccaggtacatggagctggtcgggtggctggtggaccgcgggatcacgtcagaaaagcaatggatccaggaggaccaggcgtcctacatctccttcaacgccgcctccaactcgcggtcacaaatcaaggccgcgctggacaatgcctccaaaatcatgagcctgacaaagacggctccggactacctggtgggccagaacccgccggaggacatttccagcaaccgcatctaccgaatcctcgagatgaacgggtacgatccgcagtacgcggcctccgtcttcctgggctgggcgcaaaagaagttcgggaagaggaacaccatctggctctttgggccggccacgacgggtaaaaccaacatcgcggaagccatcgcccacgccgtgcccttctacggctgcgtgaactggaccaatgagaactttccgttcaacgattgcgtcgacaagatggtgatctggtgggaggagggcaagatgacggccaaggtcgtagagagcgccaaggccatcctgggcggaagcaaggtgcgcgtggaccaaaagtgcaagtcatcggcccagatcgacccaactcccgtgatcgtcacctccaacaccaacatgtgcgcggtcatcgacggaaactcgaccaccttcgagcaccaacaaccactccaggaccggatgttcaagttcgagctcaccaagcgcctggagcacgactttggcaaggtcaccaagcaggaagtcaaagactttttccggtgggcgtcagatcacgtgaccgaggtgactcacgagttttacgtcagaaagggtggagctagaaagaggcccgcccccaatgacgcagatataagtgagcccaagcgggcctgtccgtcagttgcgcagccatcgacgtcagacgcggaagctccggtggactacgcggacagattggctagaggacaacctctctga

SEQ ID NO: 5134 - DNA, 1872 bp, Adeno-associated virus 4; identical to SEQ ID NO: 5132

SEQ ID NO: 5135 - DNA, 1617 bp, Adeno-associated virus 4
  modified_base (162)..(162): a, c, t or g
atgcgtgcagcagctggcggagctgcagtcgagggsggacaaggtgccgatggagtgggtaatgcctcgggtgattggcattgcgattccacctggtctgagggccacgtcacgaccaccagcaccagaacctgggtcttgcccacctacaacaaccacctntacaagcgactcggagagagcctgcagtccaacacctacaacggattctccaccccctggggatactttgacttcaaccgcttccactgccacttctcaccacgtgactggcagcgactcatcaacaacaactggggcatgcgacccaaagccatgcgggtcaaaatcttcaacatccaggtcaaggaggtcacgacgtcgaacggcgagacaacggtggctaataaccttaccagcacggttcagatctttgcggactcgtcgtacgaactgccgtacgtgatggatgcgggtcaagagggcagcctgcctccttttcccaacgacgtctttatggtgccccagtacggctactgtggactggtgaccggcaacacttcgcagcaacagactgacagaaatgccttctactgcctggagtactttccttcgcagatgctgcggactggcaacaactttgaaattacgtacagttttgagaaggtgcctttccactcgatgtacgcgcacagccagagcctggaccggctgatgaaccctctcatcgaccagtacctgtggggactgcaatcgaccaccaccggaaccaccctgaatgccgggactgccaccaccaactttaccaagctgcggcctaccaacttttccaactttaaaaagaactggctgcccgggccttcaatcaagcagcagggcttctcaaagactgccaatcaaaactacaagatccctgccaccgggtcagacagtctcatcaaatacgagacgcacagcactctggacggaagatggagtgccctgacccccggacctccaatggccacggctggacctgcggacagcaagttcagcaacagccagctcatctttgcggggcctaaacagaacggcaacacggccaccgtacccgggactctgatcttcacctctgaggaggagctggcagccaccaacgccaccgatacggacatgtggggcaacctacctggcggtgaccagagcaacagcaacctgccgaccgtggacagactgacagccttgggagccgtgcctggaatggtctggcaaaacagagacatttactaccagggtcccatttgggccaagattcctcataccgatggacactttcacccctcaccgctgattggtgggtttgggctgaaacacccgcctcctcaaatttttatcaagaacaccccggtacctgcgaatcctgcaacgaccttcagctctactccggtaaactccttcattactcagtacagcactggccaggtgtcggtgcagattgactgggagatccagaaggagcggtccaaacgctggaaccccgaggtccagtttacctccaactacggacagcaaaactctctgttgtgggctcccgatgcggctgggaaatacactgagcctagggctatcggtacccgctacctcacccaccacctgtaa

SEQ ID NO: 5136 - DNA, 939 bp, Adeno-associated virus 4
atggagctggtcgggtggctggtggaccgcgggatcacgtcagaaaagcaatggatccaggaggaccaggcgtcctacatctccttcaacgccgcctccaactcgcggtcacaaatcaaggccgcgctggacaatgcctccaaaatcatgagcctgacaaagacggctccggactacctggtgggccagaacccgccggaggacatttccagcaaccgcatctaccgaatcctcgagatgaacgggtacgatccgcagtacgcggcctccgtcttcctgggctgggcgcaaaagaagttcgggaagaggaacaccatctggctctttgggccggccacgacgggtaaaaccaacatcgcggaagccatcgcccacgccgtgcccttctacggctgcgtgaactggaccaatgagaactttccgttcaacgattgcgtcgacaagatggtgatctggtgggaggagggcaagatgacggccaaggtcgtagagagcgccaaggccatcctgggcggaagcaaggtgcgcgtggaccaaaagtgcaagtcatcggcccagatcgacccaactcccgtgatcgtcacctccaacaccaacatgtgcgcggtcatcgacggaaactcgaccaccttcgagcaccaacaaccactccaggaccggatgttcaagttcgagctcaccaagcgcctggagcacgactttggcaaggtcaccaagcaggaagtcaaagactttttccggtgggcgtcagatcacgtgaccgaggtgactcacgagttttacgtcagaaagggtggagctagaaagaggcccgcccccaatgacgcagatataagtgagcccaagcgggcctgtccgtcagttgcgcagccatcgacgtcagacgcggaagctccggtggactacgcggacagattggctagaggacaacctctctga

SEQ ID NO: 5137 - DNA, 1197 bp, Adeno-associated virus 4
atggagctggtcgggtggctggtggaccgcgggatcacgtcagaaaagcaatggatccaggaggaccaggcgtcctacatctccttcaacgccgcctccaactcgcggtcacaaatcaaggccgcgctggacaatgcctccaaaatcatgagcctgacaaagacggctccggactacctggtgggccagaacccgccggaggacatttccagcaaccgcatctaccgaatcctcgagatgaacgggtacgatccgcagtacgcggcctccgtcttcctgggctgggcgcaaaagaagttcgggaagaggaacaccatctggctctttgggccggccacgacgggtaaaaccaacatcgcggaagccatcgcccacgccgtgcccttctacggctgcgtgaactggaccaatgagaactttccgttcaacgattgcgtcgacaagatggtgatctggtgggaggagggcaagatgacggccaaggtcgtagagagcgccaaggccatcctgggcggaagcaaggtgcgcgtggaccaaaagtgcaagtcatcggcccagatcgacccaactcccgtgatcgtcacctccaacaccaacatgtgcgcggtcatcgacggaaactcgaccaccttcgagcaccaacaaccactccaggaccggatgttcaagttcgagctcaccaagcgcctggagcacgactttggcaaggtcaccaagcaggaagtcaaagactttttccggtgggcgtcagatcacgtgaccgaggtgactcacgagttttacgtcagaaagggtggagctagaaagaggcccgcccccaatgacgcagatataagtgagcccaagcgggcctgtccgtcagttgcgcagccatcgacgtcagacgcggaagctccggtggactacgcggacaggtaccaaaacaaatgttctcgtcacgtgggtatgaatctgatgctttttccctgccggcaatgcgagagaatgaatcagaatgtggacatttgcttcacgcacggggtcatggactgtgccgagtgcttccccgtgtcagaatctcaacccgtgtctgtcgtcagaaagcggacgtatcagaaactgtgtccgattcatcacatcatggggagggcgcccgaggtggcctgctcggcctgcgaactggccaatgtggacttggatgactgtgacatggaacaa

SEQ ID NO: 5138 - DNA, 245 bp, Adeno-associated virus 4
ctccatcatctaggtttgcccactgacgtcaatgtgacgtcctagggttagggaggtccctgtattagcagtcacgtgagtgtcgtatttcgcggagcgtagcggagcgcataccaagctgccacgtcacagccacgtggtccgtttgcgacagtttgcgacaccatgtggtcaggagggtatataaccgcgagtgagccagcgaggagctccattttgcccgcgaattttgaacgagcagcagc

SEQ ID NO: 5139 - protein, 313 aa, Adeno-associated virus 4
  MOD_RES (313)..(313): Any amino acid
MELVGWLVDRGITSEKQWIQEDQASYISFNAASNSRSQIKAALDNASKIMSLTKTAPDYLVGQNPPEDISSNRIYRILEMNGYDPQYAASVFLGWAQKKFGKRNTIWLFGPATTGKTNIAEAIAHAVPFYGCVNWTNENFPFNDCVDKMVIWWEEGKMTAKVVESAKAILGGSKVRVDQKCKSSAQIDPTPVIVTSNTNMCAVIDGNSTTFEHQQPLQDRMFKFELTKRLEHDFGKVTKQEVKDFFRWASDHVTEVTHEFYVRKGGARKRPAPNDADISEPKRACPSVAQPSTSDAEAPVDYADRLARGQPLX

SEQ ID NO: 5140 - protein, 399 aa, Adeno-associated virus 4
MELVGWLVDRGITSEKQWIQEDQASYISFNAASNSRSQIKAALDNASKIMSLTKTAPDYLVGQNPPEDISSNRIYRILEMNGYDPQYAASVFLGWAQKKFGKRNTIWLFGPATTGKTNIAEAIAHAVPFYGCVNWTNENFPFNDCVDKMVIWWEEGKMTAKVVESAKAILGGSKVRVDQKCKSSAQIDPTPVIVTSNTNMCAVIDGNSTTFEHQQPLQDRMFKFELTKRLEHDFGKVTKQEVKDFFRWASDHVTEVTHEFYVRKGGARKRPAPNDADISEPKRACPSVAQPSTSDAEAPVDYADRYQNKCSRHVGMNLMLFPCRQCERMNQNVDICFTHGVMDCAECFPVSESQPVSVVRKRTYQKLCPIHHIMGRAPEVACSACELANVDLDDCDMEQ

SEQ ID NO: 5141 - protein, 623 aa, Adeno-associated virus 4
MPGFYEIVLKVPSDLDEHLPGISDSFVSWVAEKEWELPPDSDMDLNLIEQAPLTVAEKLQREFLVEWRRVSKAPEALFFVQFEKGDSYFHLHILVETVGVKSMVVGRYVSQIKEKLVTRIYRGVEPQLPNWFAVTKTRNGAGGGNKVVDDCYIPNYLLPKTQPELQWAWTNMDQYISACLNLAERKRLVAQHLTHVSQTQEQNKENQNPNSDAPVIRSKTSARYMELVGWLVDRGITSEKQWIQEDQASYISFNAASNSRSQIKAALDNASKIMSLTKTAPDYLVGQNPPEDISSNRIYRILEMNGYDPQYAASVFLGWAQKKFGKRNTIWLFGPATTGKTNIAEAIAHAVPFYGCVNWTNENFPFNDCVDKMVIWWEEGKMTAKVVESAKAILGGSKVRVDQKCKSSAQIDPTPVIVTSNTNMCAVIDGNSTTFEHQQPLQDRMFKFELTKRLEHDFGKVTKQEVKDFFRWASDHVTEVTHEFYVRKGGARKRPAPNDADISEPKRACPSVAQPSTSDAEAPVDYADRYQNKCSRHVGMNLMLFPCRQCERMNQNVDICFTHGVMDCAECFPVSESQPVSVVRKRTYQKLCPIHHIMGRAPEVACSACELANVDLDDCDMEQ

SEQ ID NO: 5142 - protein, 537 aa, Adeno-associated virus 4
  MOD_RES (537)..(537): Any amino acid
MPGFYEIVLKVPSDLDEHLPGISDSFVSWVAEKEWELPPDSDMDLNLIEQAPLTVAEKLQREFLVEWRRVSKAPEALFFVQFEKGDSYFHLHILVETVGVKSMVVGRYVSQIKEKLVTRIYRGVEPQLPNWFAVTKTRNGAGGGNKVVDDCYIPNYLLPKTQPELQWAWTNMDQYISACLNLAERKRLVAQHLTHVSQTQEQNKENQNPNSDAPVIRSKTSARYMELVGWLVDRGITSEKQWIQEDQASYISFNAASNSRSQIKAALDNASKIMSLTKTAPDYLVGQNPPEDISSNRIYRILEMNGYDPQYAASVFLGWAQKKFGKRNTIWLFGPATTGKTNIAEAIAHAVPFYGCVNWTNENFPFNDCVDKMVIWWEEGKMTAKVVESAKAILGGSKVRVDQKCKSSAQIDPTPVIVTSNTNMCAVIDGNSTTFEHQQPLQDRMFKFELTKRLEHDFGKVTKQEVKDFFRWASDHVTEVTHEFYVRKGGARKRPAPNDADISEPKRACPSVAQPSTSDAEAPVDYADRLARGQPLX

SEQ ID NO: 5143 - protein, 623 aa, Adeno-associated virus 4; identical to SEQ ID NO: 5141

SEQ ID NO: 5144 - protein, 544 aa, Adeno-associated virus 4
MSDDSEMRAAAGGAAVEGGQGADGVGNASGDWHCDSTWSEGHVTTTSTRTWVLPTYNNHLYKRLGESLQSNTYNGFSTPWGYFDFNRFHCHFSPRDWQRLINNNWGMRPKAMRVKIFNIQVKEVTTSNGETTVANNLTSTVQIFADSSYELPYVMDAGQEGSLPPFPNDVFMVPQYGYCGLVTGNTSQQQTDRNAFYCLEYFPSQMLRTGNNFEITYSFEKVPFHSMYAHSQSLDRLMNPLIDQYLWGLQSTTTGTTLNAGTATTNFTKLRPTNFSNFKKNWLPGPSIKQQGFSKTANQNYKIPATGSDSLIKYETHSTLDGRWSALTPGPPMATAGPADSKFSNSQLIFAGPKQNGNTATVPGTLIFTSEEELAATNATDTDMWGNLPGGDQSNSNLPTVDRLTALGAVPGMVWQNRDIYYQGPIWAKIPHTDGHFHPSPLIGGFGLKHPPPQIFIKNTPVPANPATTFSSTPVNSFITQYSTGQVSVQIDWEIQKERSKRWNPEVQFTSNYGQQNSLLWAPDAAGKYTEPRAIGTRYLTHHL

SEQ ID NO: 5145 - protein, 734 aa, Adeno-associated virus 4; identical to SEQ ID NO: 4791

SEQ ID NO: 5146 - protein, 598 aa, Adeno-associated virus 4
TAPGKKRPLIESPQQPDSSTGIGKKGKQPAKKKLVFEDETGAGDGPPEGSTSGAMSDDSEMRAAAGGAAVEGGQGADGVGNASGDWHCDSTWSEGHVTTTSTRTWVLPTYNNHLYKRLGESLQSNTYNGFSTPWGYFDFNRFHCHFSPRDWQRLINNNWGMRPKAMRVKIFNIQVKEVTTSNGETTVANNLTSTVQIFADSSYELPYVMDAGQEGSLPPFPNDVFMVPQYGYCGLVTGNTSQQQTDRNAFYCLEYFPSQMLRTGNNFEITYSFEKVPFHSMYAHSQSLDRLMNPLIDQYLWGLQSTTTGTTLNAGTATTNFTKLRPTNFSNFKKNWLPGPSIKQQGFSKTANQNYKIPATGSDSLIKYETHSTLDGRWSALTPGPPMATAGPADSKFSNSQLIFAGPKQNGNTATVPGTLIFTSEEELAATNATDTDMWGNLPGGDQSNSNLPTVDRLTALGAVPGMVWQNRDIYYQGPIWAKIPHTDGHFHPSPLIGGFGLKHPPPQIFIKNTPVPANPATTFSSTPVNSFITQYSTGQVSVQIDWEIQKERSKRWNPEVQFTSNYGQQNSLLWAPDAAGKYTEPRAIGTRYLTHHL

SEQ ID NO: 5147 - DNA, 129 bp, Adeno-associated virus 4
ttggccactccctctatgcgcgctcgctcactcactcggccctgcggccagaggccggcagtctggagacctttggtgtccagggcagggccgagtgagtgagcgagcgcgcatagagggagtggccaa

SEQ ID NO: 5148 - DNA, 125 bp, Adeno-associated virus 4
ttggccactccctctatgcgcgctcgctcactcactcggccctggagaccaaaggtctccagactgccggcctctggccggcagggccgagtgagtgagcgagcgcgcatagagggagtggccaa

SEQ ID NO: 5149 - DNA, 4768 bp, Adeno-associated virus 4
  modified_base (3009)..(3009): a, c, t or g
ttggccactccctctatgcgcgctcgctcactcactcggccctggagaccaaaggtctccagactgccggcctctggccggcagggccgagtgagtgagcgagcgcgcatagagggagtggccaactccatcatctaggtttgcccactgacgtcaatgtgacgtcctagggttagggaggtccctgtattagcagtcacgtgagtgtcgtatttcgcggagcgtagcggagcgcataccaagctgccacgtcacagccacgtggtccgtttgcgacagtttgcgacaccatgtggtcaggagggtatataaccgcgagtgagccagcgaggagctccattttgcccgcgaattttgaacgagcagcagccatgccggggttctacgagatcgtgctgaaggtgcccagcgacctggacgagcacctgcccggcatttctgactcttttgtgagctgggtggccgagaaggaatgggagctgccgccggattctgacatggacttgaatctgattgagcaggcacccctgaccgtggccgaaaagctgcaacgcgagttcctggtcgagtggcgccgcgtgagtaaggccccggaggccctcttctttgtccagttcgagaagggggacagctacttccacctgcacatcctggtggagaccgtgggcgtcaaatccatggtggtgggccgctacgtgagccagattaaagagaagctggtgacccgcatctaccgcggggtcgagccgcagcttccgaactggttcgcggtgaccaagacgcgtaatggcgccggaggcgggaacaaggtggtggacgactgctacatccccaactacctgctccccaagacccagcccgagctccagtgggcgtggactaacatggaccagtatataagcgcctgtttgaatctcgcggagcgtaaacggctggtggcgcagcatctgacgcacgtgtcgcagacgcaggagcagaacaaggaaaaccagaaccccaattctgacgcgccggtcatcaggtcaaaaacctccgccaggtacatggagctggtcgggtggctggtggaccgcgggatcacgtcagaaaagcaatggatccaggaggaccaggcgtcctacatctccttcaacgccgcctccaactcgcggtcacaaatcaaggccgcgctggacaatgcctccaaaatcatgagcctgacaaagacggctccggactacctggtgggccagaacccgccggaggacatttccagcaaccgcatctaccgaatcctcgagatgaacgggtacgatccgcagtacgcggcctccgtcttcctgggctgggcgcaaaagaagttcgggaagaggaacaccatctggctctttgggccggccacgacgggtaaaaccaacatcgcggaagccatcgcccacgccgtgcccttctacggctgcgtgaactggaccaatgagaactttccgttcaacgattgcgtcgacaagatggtgatctggtgggaggagggcaagatgacggccaaggtcgtagagagcgccaaggccatcctgggcggaagcaaggtgcgcgtggaccaaaagtgcaagtcatcggcccagatcgacccaactcccgtgatcgtcacctccaacaccaacatgtgcgcggtcatcgacggaaactcgaccaccttcgagcaccaacaaccactccaggaccggatgttcaagttcgagctcaccaagcgcctggagcacgactttggcaaggtcaccaagcaggaagtcaaagactttttccggtgggcgtcagatcacgtgaccgaggtgactcacgagttttacgtcagaaagggtggagctagaaagaggcccgcccccaatgacgcagatataagtgagcccaagcgggcctgtccgtcagttgcgcagccatcgacgtcagacgcggaagctccggtggactacgcggacaggtaccaaaacaaatgttctcgtcacgtgggtatgaatctgatgctttttccctgccggcaatgcgagagaatgaatcagaatgtggacatttgcttcacgcacggggtcatggactgtgccgagtgcttccccgtgtcagaatctcaacccgtgtctgtcgtcagaaagcggacgtatcagaaactgtgtccgattcatcacatcatggggagggcgcccgaggtggcctgctcggcctgcgaactggccaatgtggacttggatgactgtgacatggaacaataaatgactcaaaccagatatgactgacggttaccttccagattggctagaggacaacctctctgaaggcgttcgagagtggtgggcgctgcaacctggagcccctaaacccaaggcaaatcaacaacatcaggacaacgctcggggtcttgtgcttccgggttacaaatacctcggacccggcaacggactcgacaagggggaacccgtcaacgcagcggacgcggcagccctcgagcacgacaaggcctacgaccagcagctcaaggccggtgacaacccctacctcaagtacaaccacgccgacgcggagttccagcagcggcttcagggcgacacaccgtttgggggcaacctcggcagagcagtcttccaggccaaaaagagggttcttgaacctcttggtctggttgagcaagcgggtgagacggctcctggaaagaagagaccgttgattgaatccccccagcagcccgactcctccacgggtatcggcaaaaaaggcaagcagccggctaaaaagaagctcgttttcgaagacgaaactggagcaggcgacggaccccctgagggatcaacttccggagccatgtctgatgacagtgagatgcgtgcagcagctggcggagctgcagtcgagggsggacaaggtgccgatggagtgggtaatgcctcgggtgattggcattgcgattccacctggtctgagggccacgtcacgaccaccagcaccagaacctgggtcttgcccacctacaacaaccacctntacaagcgactcggagagagcctgcagtccaacacctacaacggattctccaccccctggggatactttgacttcaaccgcttccactgccacttctcaccacgtgactggcagcgactcatcaacaacaactggggcatgcgacccaaagccatgcgggtcaaaatcttcaacatccaggtcaaggaggtcacgacgtcgaacggcgagacaacggtggctaataaccttaccagcacggttcagatctttgcggactcgtcgtacgaactgccgtacgtgatggatgcgggtcaagagggcagcctgcctccttttcccaacgacgtctttatggtgccccagtacggctactgtggactggtgaccggcaacacttcgcagcaacagactgacagaaatgccttctactgcctggagtactttccttcgcagatgctgcggactggcaacaactttgaaattacgtacagttttgagaaggtgcctttccactcgatgtacgcgcacagccagagcctggaccggctgatgaaccctctcatcgaccagtacctgtggggactgcaatcgaccaccaccggaaccaccctgaatgccgggactgccaccaccaactttaccaagctgcggcctaccaacttttccaactttaaaaagaactggctgcccgggccttcaatcaagcagcagggcttctcaaagactgccaatcaaaactacaagatccctgccaccgggtcagacagtctcatcaaatacgagacgcacagcactctggacggaagatggagtgccctgacccccggacctccaatggccacggctggacctgcggacagcaagttcagcaacagccagctcatctttgcggggcctaaacagaacggcaacacggccaccgtacccgggactctgatcttcacctctgaggaggagctggcagccaccaacgccaccgatacggacatgtggggcaacctacctggcggtgaccagagcaacagcaacctgccgaccgtggacagactgacagccttgggagccgtgcctggaatggtctggcaaaacagagacatttactaccagggtcccatttgggccaagattcctcataccgatggacactttcacccctcaccgctgattggtgggtttgggctgaaacacccgcctcctcaaatttttatcaagaacaccccggtacctgcgaatcctgcaacgaccttcagctctactccggtaaactccttcattactcagtacagcactggccaggtgtcggtgcagattgactgggagatccagaaggagcggtccaaacgctggaaccccgaggtccagtttacctccaactacggacagcaaaactctctgttgtgggctcccgatgcggctgggaaatacactgagcctagggctatcggtacccgctacctcacccaccacctgtaataacctgttaatcaataaaccggtttattcgtttcagttgaactttggtctccgtgtccttcttatcttatctcgtttccatggctactgcgtacataagcagcggcctgcggcgcttgcgcttcgcggtttacaactgccggttaatcagtaacttctggcaaaccatgatgatggagttggccactccctctatgcgcgctcgctcactcactcggccctggagaccaaaggtctccagactgccggcctctggccggcagggccgagtgagtgagcgagcgcgcatagagggagtggccaa

SEQ ID NO: 5150 - protein, 725 aa, Adeno-associated virus 5
MAADGYLPDWLEDTLSEGIRQWWKLKPGPPPPKPAERHKDDSRGLVLPGYKYLGPFNGLDKGEPVNEADAAALEHDKAYDRQLDSGDNPYLKYNHADAEFQERLKEDTSFGGNLGRAVFQAKKRVLEPFGLVEEGAKTAPTGKRIDDHFPKRKKARTEEDSKPSTSSDAEAGPSGSQQLQIPAQPASSLGADTMSAGGGGPLGDNNQGADGVGNASGDWHCDSTWMGDRVVTKSTRTWVLPSYNNHQYREIKSGSVDGSNANAYFGYSTPWGYFDFNRFHSHWSPRDWQRLINNYWGFRPRSLRVKIFNIQVKEVTVQDSTTTIANNLTSTVQVFTDDDYQLPYVVGNGTEGCLPAFPPQVFTLPQYGYATLNRDNTENPTERSSFFCLEYFPSKMLRTGNNFEFTYNFEEVPFHSSFAPSQNLFKLANPLVDQYLYRFVSTNNTGGVQFNKNLAGRYANTYKNWFPGPMGRTQGWNLGSGVNRASVSAFATTNRMELEGASYQVPPQPNGMTNNLQGSNTYALENTMIFNSQPANPGTTATYLEGNMLITSESETQPVNRVAYNVGGQMATNNQSSTTAPTTGTYNLQEIVPGSVWMERDVYLQGPIWAKIPETGAHFHPSPAMGGFGLKHPPPMMLIKNTPVPGNITSFSDVPVSSFITQYSTGQVTVEMEWELKKENSKRWNPEIQYTNNYNDPQFVDFAPDSTGEYRTTRPIGTRYLTRPL

SEQ ID NO: 5151 - protein, 724 aa, Adeno-associated virus 5
MSFVDHPPDWLEEVGEGLREFLGLEAGPPKPKPNQQHQDQARGLVLPGYNYLGPGNGLDRGEPVNRADEVAREHDISYNEQLEAGDNPYLKYNHADAEFQEKLADDTSFGGNLGKAVFQAKKRVLEPFGLVEEGAKTAPTGKRIDDHFPKRKKARTEEDSKPSTSSDAEAGPSGSQQLQIPAQPASSLGADTMSAGGGGPLGDNNQGADGVGNASGDWHCDSTWMGDRVVTKSTRTWVLPSYNNHQYREIKSGSVDGSNANAYFGYSTPWGYFDFNRFHSHWSPRDWQRLINNYWGFRPRSLRVKIFNIQVKEVTVQDSTTTIANNLTSTVQVFTDDDYQLPYVVGNGTEGCLPAFPPQVFTLPQYGYATLNRDNTENPTERSSFFCLEYFPSKMLRTGNNFEFTYNFEEVPFHSSFAPSQNLFKLANPLVDQYLYRFVSTNNTGGVQFNKNLAGRYANTYKNWFPGPMGRTQGWNLGSGVNRASVSAFATTNRMELEGASYQVPPQPNGMTNNLQGSNTYALENTMIFNSQPANPGTTATYLEGNMLITSESETQPVNRVAYNVGGQMATNNQSSTTAPATGTYNLQEIVPGSVWMERDVYLQGPIWAKIPETGAHFHPSPAMGGFGLKHPPPMMLIKNTPVPGNITSFSDVPVSSFITQYSTGQVTVEMEWELKKENSKRWNPEIQYTNNYNDPQFVDFAPDSTGEYRTTRPIGTRYLTRPL

SEQ ID NO: 5152 - DNA, 2175 bp, Adeno-associated virus 5
atgtcttttgttgatcaccctccagattggttggaagaagttggtgaaggtcttcgcgagtttttgggccttgaagcgggcccaccgaaaccaaaacccaatcagcagcatcaagatcaagcccgtggtcttgtgctgcctggttataactatctcggacccggaaacggtctcgatcgaggagagcctgtcaacagggcagacgaggtcgcgcgagagcacgacatctcgtacaacgagcagcttgaggcgggagacaacccctacctcaagtacaaccacgcggacgccgagtttcaggagaagctcgccgacgacacatccttcgggggaaacctcggaaaggcagtctttcaggccaagaaaagggttctcgaaccttttggcctggttgaagagggtgctaagacggcccctaccggaaagcggatagacgaccactttccaaaaagaaagaaggctcggaccgaagaggactccaagccttccacctcgtcagacgccgaagctggacccagcggatcccagcagctgcaaatcccagcccaaccagcctcaagtttgggagctgatacaatgtctgcgggaggtggcggcccattgggcgacaataaccaaggtgccgatggagtgggcaatgcctcgggagattggcattgcgattccacgtggatgggggacagagtcgtcaccaagtccacccgaacctgggtgctgcccagctacaacaaccaccagtaccgagagatcaaaagcggctccgtcgacggaagcaacgccaacgcctactttggatacagcaccccctgggggtactttgactttaaccgcttccacagccactggagcccccgagactggcaaagactcatcaacaactactggggcttcagaccccggtccctcagagtcaaaatcttcaacattcaagtcaaagaggtcacggtgcaggactccaccaccaccatcgccaacaacctcacctccaccgtccaagtgtttacggacgacgactaccagctgccctacgtcgtcggcaacgggaccgagggatgcctgccggccttccctccgcaggtctttacgctgccgcagtacggttacgcgacgctgaaccgcgacaacacagaaaatcccaccgagaggagcagcttcttctgcctagagtactttcccagcaagatgctgagaacgggcaacaactttgagtttacctacaactttgaggaggtgcccttccactccagcttcgctcccagtcagaacctgttcaagctggccaacccgctggtggaccagtacttgtaccgcttcgtgagcacaaataacactggcggagtccagttcaacaagaacctggccgggagatacgccaacacctacaaaaactggttcccggggcccatgggccgaacccagggctggaacctgggctccggggtcaaccgcgccagtgtcagcgccttcgccacgaccaataggatggagctcgagggcgcgagttaccaggtgcccccgcagccgaacggcatgaccaacaacctccagggcagcaacacctatgccctggagaacactatgatcttcaacagccagccggcgaacccgggcaccaccgccacgtacctcgagggcaacatgctcatcaccagcgagagcgagacgcagccggtgaaccgcgtggcgtacaacgtcggcgggcagatggccaccaacaaccagagctccaccactgcccccgcgaccggcacgtacaacctccaggaaatcgtgcccggcagcgtgtggatggagagggacgtgtacctccaaggacccatctgggccaagatcccagagacgggggcgcactttcacccctctccggccatgggcggattcggactcaaacacccaccgcccatgatgctcatcaagaacacgcctgtgcccggaaatatcaccagcttctcggacgtgcccgtcagcagcttcatcacccagtacagcaccgggcaggtcaccgtggagatggagtgggagctcaagaaggaaaactccaagaggtggaacccagagatccagtacacaaacaactacaacgacccccagtttgtggactttgccccggacagcaccggggaatacagaaccaccagacctatcggaacccgataccttacccgacccctttaa

SEQ ID NO: 5153 - DNA, 2208 bp, Adeno-associated virus 6
atggctgccgatggttatcttccagattggctcgaggacaacctctctgagggcattcgcgagtggtgggacttgaaacctggagccccgaaacccaaagccaaccagcaaaagcaggacgacggccggggtctggtgcttcctggctacaagtacctcggacccttcaacggactcgacaagggggagcccgtcaacgcggcggatgcagcggccctcgagcacgacaaggcctacgaccagcagctcaaagcgggtgacaatccgtacctgcggtataaccacgccgacgccgagtttcaggagcgtctgcaagaagatacgtcttttgggggcaacctcgggcgagcagtcttccaggccaagaagagggttctcgaaccttttggtctggttgaggaaggtgctaagacggctcctggaaagaaacgtccggtagagcagtcgccacaagagccagactcctcctcgggcattggcaagacaggccagcagcccgctaaaaagagactcaattttggtcagactggcgactcagagtcagtccccgacccacaacctctcggagaacctccagcaacccccgctgctgtgggacctactacaatggcttcaggcggtggcgcaccaatggcagacaataacgaaggcgccgacggagtgggtaatgcctcaggaaattggcattgcgattccacatggctgggcgacagagtcatcaccaccagcacccgaacatgggccttgcccacctataacaaccacctctacaagcaaatctccagtgcttcaacgggggccagcaacgacaaccactacttcggctacagcaccccctgggggtattttgatttcaacagattccactgccatttctcaccacgtgactggcagcgactcatcaacaacaattggggattccggcccaagagactcaacttcaagctcttcaacatccaagtcaaggaggtcacgacgaatgatggcgtcacgaccatcgctaataaccttaccagcacggttcaagtcttctcggactcggagtaccagttgccgtacgtcctcggctctgcgcaccagggctgcctccctccgttcccggcggacgtgttcatgattccgcagtacggctacctaacgctcaacaatggcagccaggcagtgggacggtcatccttttactgcctggaatatttcccatcgcagatgctgagaacgggcaataactttaccttcagctacaccttcgaggacgtgcctttccacagcagctacgcgcacagccagagcctggaccggctgatgaatcctctcatcgaccagtacctgtattacctgaacagaactcagaatcagtccggaagtgcccaaaacaaggacttgctgtttagccgggggtctccagctggcatgtctgttcagcccaaaaactggctacctggaccctgttaccggcagcagcgcgtttctaaaacaaaaacagacaacaacaacagcaactttacctggactggtgcttcaaaatataaccttaatgggcgtgaatctataatcaaccctggcactgctatggcctcacacaaagacgacaaagacaagttctttcccatgagcggtgtcatgatttttggaaaggagagcgccggagcttcaaacactgcattggacaatgtcatgatcacagacgaagaggaaatcaaagccactaaccccgtggccaccgaaagatttgggactgtggcagtcaatctccagagcagcagcacagaccctgcgaccggagatgtgcatgttatgggagccttacctggaatggtgtggcaagacagagacgtatacctgcagggtcctatttgggccaaaattcctcacacggatggacactttcacccgtctcctctcatgggcggctttggacttaagcacccgcctcctcagatcctcatcaaaaacacgcctgttcctgcgaatcctccggcagagttttcggctacaaagtttgcttcattcatcacccagtattccacaggacaagtgagcgtggagattgaatgggagctgcagaaagaaaacagcaaacgctggaatcccgaagtgcagtatacatctaactatgcaaaatctgccaacgttgatttcactgtggacaacaatggactttatactgagcctcgccccattggcacccgttacctcacccgtcccctg

SEQ ID NO: 5154 - protein, 736 aa, Adeno-associated virus 6; identical to SEQ ID NO: 4799

SEQ ID NO: 5155 - protein, 623 aa, Adeno-associated virus 6
MPGFYEIVIKVPSDLDEHLPGISDSFVNWVAEKEWELPPDSDMDLNLIEQAPLTVAEKLQRDFLVQWRRVSKAPEALFFVQFEKGESYFHLHILVETTGVKSMVLGRFLSQIRDKLVQTIYRGIEPTLPNWFAVTKTRNGAGGGNKVVDECYIPNYLLPKTQPELQWAWTNMEEYISACLNLAERKRLVAHDLTHVSQTQEQNKENLNPNSDAPVIRSKTSARYMELVGWLVDRGITSEKQWIQEDQASYISFNAASNSRSQIKAALDNAGKIMALTKSAPDYLVGPAPPADIKTNRIYRILELNGYDPAYAGSVFLGWAQKRFGKRNTIWLFGPATTGKTNIAEAIAHAVPFYGCVNWTNENFPFNDCVDKMVIWWEEGKMTAKVVESAKAILGGSKVRVDQKCKSSAQIDPTPVIVTSNTNMCAVIDGNSTTFEHQQPLQDRMFKFELTRRLEHDFGKVTKQEVKEFFRWAQDHVTEVAHEFYVRKGGANKRPAPDDADKSEPKRACPSVADPSTSDAEGAPVDFADRYQNKCSRHAGMLQMLFPCKTCERMNQNFNICFTHGTRDCSECFPGVSESQPVVRKRTYRKLCAIHHLLGRAPEIACSACDLVNVDLDDCVSEQ

SEQ ID NO: 5156 - DNA, 4683 bp, Adeno-associated virus 6
ttggccactccctctctgcgcgctcgctcgctcactgaggccgggcgaccaaaggtcgcccgacgcccgggctttgcccgggcggcctcagtgagcgagcgagcgcgcagagagggagtggccaactccatcactaggggttcctggaggggtggagtcgtgacgtgaattacgtcatagggttagggaggtcctgtattagaggtcacgtgagtgttttgcgacattttgcgacaccatgtggtcacgctgggtatttaagcccgagtgagcacgcagggtctccattttgaagcgggaggtttgaacgcgcagcgccatgccggggttttacgagattgtgattaaggtccccagcgaccttgacgagcatctgcccggcatttctgacagctttgtgaactgggtggccgagaaggaatgggagttgccgccagattctgacatggatctgaatctgattgagcaggcacccctgaccgtggccgagaagctgcagcgcgacttcctggtccagtggcgccgcgtgagtaaggccccggaggccctcttctttgttcagttcgagaagggcgagtcctacttccacctccatattctggtggagaccacgggggtcaaatccatggtgctgggccgcttcctgagtcagattagggacaagctggtgcagaccatctaccgcgggatcgagccgaccctgcccaactggttcgcggtgaccaagacgcgtaatggcgccggaggggggaacaaggtggtggacgagtgctacatccccaactacctcctgcccaagactcagcccgagctgcagtgggcgtggactaacatggaggagtatataagcgcgtgtttaaacctggccgagcgcaaacggctcgtggcgcacgacctgacccacgtcagccagacccaggagcagaacaaggagaatctgaaccccaattctgacgcgcctgtcatccggtcaaaaacctccgcacgctacatggagctggtcgggtggctggtggaccggggcatcacctccgagaagcagtggatccaggaggaccaggcctcgtacatctccttcaacgccgcctccaactcgcggtcccagatcaaggccgctctggacaatgccggcaagatcatggcgctgaccaaatccgcgcccgactacctggtaggccccgctccgcccgccgacattaaaaccaaccgcatttaccgcatcctggagctgaacggctacgaccctgcctacgccggctccgtctttctcggctgggcccagaaaaggttcggaaaacgcaacaccatctggctgtttgggccggccaccacgggcaagaccaacatcgcggaagccatcgcccacgccgtgcccttctacggctgcgtcaactggaccaatgagaactttcccttcaacgattgcgtcgacaagatggtgatctggtgggaggagggcaagatgacggccaaggtcgtggagtccgccaaggccattctcggcggcagcaaggtgcgcgtggaccaaaagtgcaagtcgtccgcccagatcgatcccacccccgtgatcgtcacctccaacaccaacatgtgcgccgtgattgacgggaacagcaccaccttcgagcaccagcagccgttgcaggaccggatgttcaaatttgaactcacccgccgtctggagcatgactttggcaaggtgacaaagcaggaagtcaaagagttcttccgctgggcgcaggatcacgtgaccgaggtggcgcatgagttctacgtcagaaagggtggagccaacaagagacccgcccccgatgacgcggataaaagcgagcccaagcgggcctgcccctcagtcgcggatccatcgacgtcagacgcggaaggagctccggtggactttgccgacaggtaccaaaacaaatgttctcgtcacgcgggcatgcttcagatgctgtttccctgcaaaacatgcgagagaatgaatcagaatttcaacatttgcttcacgcacgggaccagagactgttcagaatgtttccccggcgtgtcagaatctcaaccggtcgtcagaaagaggacgtatcggaaactctgtgccattcatcatctgctggggcgggctcccgagattgcttgctcggcctgcgatctggtcaacgtggatctggatgactgtgtttctgagcaataaatgacttaaaccaggtatggctgccgatggttatcttccagattggctcgaggacaacctctctgagggcattcgcgagtggtgggacttgaaacctggagccccgaaacccaaagccaaccagcaaaagcaggacgacggccggggtctggtgcttcctggctacaagtacctcggacccttcaacggactcgacaagggggagcccgtcaacgcggcggatgcagcggccctcgagcacgacaaggcctacgaccagcagctcaaagcgggtgacaatccgtacctgcggtataaccacgccgacgccgagtttcaggagcgtctgcaagaagatacgtcttttgggggcaacctcgggcgagcagtcttccaggccaagaagagggttctcgaaccttttggtctggttgaggaaggtgctaagacggctcctggaaagaaacgtccggtagagcagtcgccacaagagccagactcctcctcgggcattggcaagacaggccagcagcccgctaaaaagagactcaattttggtcagactggcgactcagagtcagtccccgacccacaacctctcggagaacctccagcaacccccgctgctgtgggacctactacaatggcttcaggcggtggcgcaccaatggcagacaataacgaaggcgccgacggagtgggtaatgcctcaggaaattggcattgcgattccacatggctgggcgacagagtcatcaccaccagcacccgaacatgggccttgcccacctataacaaccacctctacaagcaaatctccagtgcttcaacgggggccagcaacgacaaccactacttcggctacagcaccccctgggggtattttgatttcaacagattccactgccatttctcaccacgtgactggcagcgactcatcaacaacaattggggattccggcccaagagactcaacttcaagctcttcaacatccaagtcaaggaggtcacgacgaatgatggcgtcacgaccatcgctaataaccttaccagcacggttcaagtcttctcggactcggagtaccagttgccgtacgtcctcggctctgcgcaccagggctgcctccctccgttcccggcggacgtgttcatgattccgcagtacggctacctaacgctcaacaatggcagccaggcagtgggacggtcatccttttactgcctggaatatttcccatcgcagatgctgagaacgggcaataactttaccttcagctacaccttcgaggacgtgcctttccacagcagctacgcgcacagccagagcctggaccggctgatgaatcctctcatcgaccagtacctgtattacctgaacagaactcagaatcagtccggaagtgcccaaaacaaggacttgctgtttagccgggggtctccagctggcatgtctgttcagcccaaaaactggctacctggaccctgttaccggcagcagcgcgtttctaaaacaaaaacagacaacaacaacagcaactttacctggactggtgcttcaaaatataaccttaatgggcgtgaatctataatcaaccctggcactgctatggcctcacacaaagacgacaaagacaagttctttcccatgagcggtgtcatgatttttggaaaggagagcgccggagcttcaaacactgcattggacaatgtcatgatcacagacgaagaggaaatcaaagccactaaccccgtggccaccgaaagatttgggactgtggcagtcaatctccagagcagcagcacagaccctgcgaccggagatgtgcatgttatgggagccttacctggaatggtgtggcaagacagagacgtatacctgcagggtcctatttgggccaaaattcctcacacggatggacactttcacccgtctcctctcatgggcggctttggacttaagcacccgcctcctcagatcctcatcaaaaacacgcctgttcctgcgaatcctccggcagagttttcggctacaaagtttgcttcattcatcacccagtattccacaggacaagtgagcgtggagattgaatgggagctgcagaaagaaaacagcaaacgctggaatcccgaagtgcagtatacatctaactatgcaaaatctgccaacgttgatttcactgtggacaacaatggactttatactgagcctcgccccattggcacccgttacctcacccgtcccctgtaattgtgtgttaatcaataaaccggttaattcgtgtcagttgaactttggtctcatgtcgttattatcttatctggtcaccatagcaaccggttacacattaactgcttagttgcgcttcgcgaatacccctagtgatggagttgcccactccctctatgcgcgctcgctcgctcggtggggccggcagagcagagctctgccgtctgcggacctttggtccgcaggccccaccgagcgagcgagcgcgcatagagggagtgggcaa

SEQ ID NO: 5157 - DNA, 2211 bp, Adeno-associated virus 6
atggctgccgatggttatcttccagattggctcgaggacaacctctctgagggcattcgcgagtggtgggacttgaaacctggagccccgaaacccaaagccaaccagcaaaagcaggacgacggccggggtctggtgcttcctggctacaagtacctcggacccttcaacggactcgacaagggggagcccgtcaacgcggcggatgcagcggccctcgagcacgacaaggcctacgaccagcagctcaaagcgggtgacaatccgtacctgcggtataaccacgccgacgccgagtttcaggagcgtctgcaagaagatacgtcttttgggggcaacctcgggcgagcagtcttccaggccaagaagagggttctcgaaccttttggtctggttgaggaaggtgctaagacggctcctggaaagaaacgtccggtagagcagtcgccacaagagccagactcctcctcgggcattggcaagacaggccagcagcccgctaaaaagagactcaattttggtcagactggcgactcagagtcagtccccgacccacaacctctcggagaacctccagcaacccccgctgctgtgggacctactacaatggcttcaggcggtggcgcaccaatggcagacaataacgaaggcgccgacggagtgggtaatgcctcaggaaattggcattgcgattccacatggctgggcgacagagtcatcaccaccagcacccgaacatgggccttgcccacctataacaaccacctctacaagcaaatctccagtgcttcaacgggggccagcaacgacaaccactacttcggctacagcaccccctgggggtattttgatttcaacagattccactgccatttctcaccacgtgactggcagcgactcatcaacaacaattggggattccggcccaagagactcaacttcaagctcttcaacatccaagtcaaggaggtcacgacgaatgatggcgtcacgaccatcgctaataaccttaccagcacggttcaagtcttctcggactcggagtaccagttgccgtacgtcctcggctctgcgcaccagggctgcctccctccgttcccggcggacgtgttcatgattccgcagtacggctacctaacgctcaacaatggcagccaggcagtgggacggtcatccttttactgcctggaatatttcccatcgcagatgctgagaacgggcaataactttaccttcagctacaccttcgaggacgtgcctttccacagcagctacgcgcacagccagagcctggaccggctgatgaatcctctcatcgaccagtacctgtattacctgaacagaactcagaatcagtccggaagtgcccaaaacaaggacttgctgtttagccgggggtctccagctggcatgtctgttcagcccaaaaactggctacctggaccctgttaccggcagcagcgcgtttctaaaacaaaaacagacaacaacaacagcaactttacctggactggtgcttcaaaatataaccttaatgggcgtgaatctataatcaaccctggcactgctatggcctcacacaaagacgacaaagacaagttctttcccatgagcggtgtcatgatttttggaaaggagagcgccggagcttcaaacactgcattggacaatgtcatgatcacagacgaagaggaaatcaaagccactaaccccgtggccaccgaaagatttgggactgtggcagtcaatctccagagcagcagcacagaccctgcgaccggagatgtgcatgttatgggagccttacctggaatggtgtggcaagacagagacgtatacctgcagggtcctatttgggccaaaattcctcacacggatggacactttcacccgtctcctctcatgggcggctttggacttaagcacccgcctcctcagatcctcatcaaaaacacgcctgttcctgcgaatcctccggcagagttttcggctacaaagtttgcttcattcatcacccagtattccacaggacaagtgagcgtggagattgaatgggagctgcagaaagaaaacagcaaacgctggaatcccgaagtgcagtatacatctaactatgcaaaatctgccaacgttgatttcactgtggacaacaatggactttatactgagcctcgccccattggcacccgttacctcacccgtcccctgtaa

SEQ ID NO: 5158 - DNA, 2214 bp, Adeno-associated virus 7
atggctgccgatggttatcttccagattggctcgaggacaacctctctgagggcattcgcgagtggtgggacctgaaacctggagccccgaaacccaaagccaaccagcaaaagcaggacaacggccggggtctggtgcttcctggctacaagtacctcggacccttcaacggactcgacaagggggagcccgtcaacgcggcggacgcagcggccctcgagcacgacaaggcctacgaccagcagctcaaagcgggtgacaatccgtacctgcggtataaccacgccgacgccgagtttcaggagcgtctgcaagaagatacgtcatttgggggcaacctcgggcgagcagtcttccaggccaagaagcgggttctcgaacctctcggtctggttgaggaaggcgctaagacggctcctgcaaagaagagaccggtagagccgtcacctcagcgttcccccgactcctccacgggcatcggcaagaaaggccagcagcccgccagaaagagactcaatttcggtcagactggcgactcagagtcagtccccgaccctcaacctctcggagaacctccagcagcgccctctagtgtgggatctggtacagtggctgcaggcggtggcgcaccaatggcagacaataacgaaggtgccgacggagtgggtaatgcctcaggaaattggcattgcgattccacatggctgggcgacagagtcattaccaccagcacccgaacctgggccctgcccacctacaacaaccacctctacaagcaaatctccagtgaaactgcaggtagtaccaacgacaacacctacttcggctacagcaccccctgggggtattttgactttaacagattccactgccacttctcaccacgtgactggcagcgactcatcaacaacaactggggattccggcccaagaagctgcggttcaagctcttcaacatccaggtcaaggaggtcacgacgaatgacggcgttacgaccatcgctaataaccttaccagcacgattcaggtattctcggactcggaataccagctgccgtacgtcctcggctctgcgcaccagggctgcctgcctccgttcccggcggacgtcttcatgattcctcagtacggctacctgactctcaacaatggcagtcagtctgtgggacgttcctccttctactgcctggagtacttcccctctcagatgctgagaacgggcaacaactttgagttcagctacagcttcgaggacgtgcctttccacagcagctacgcacacagccagagcctggaccggctgatgaatcccctcatcgaccagtacttgtactacctggccagaacacagagtaacccaggaggcacagctggcaatcgggaactgcagttttaccagggcgggccttcaactatggccgaacaagccaagaattggttacctggaccttgcttccggcaacaaagagtctccaaaacgctggatcaaaacaacaacagcaactttgcttggactggtgccaccaaatatcacctgaacggcagaaactcgttggttaatcccggcgtcgccatggcaactcacaaggacgacgaggaccgctttttcccatccagcggagtcctgatttttggaaaaactggagcaactaacaaaactacattggaaaatgtgttaatgacaaatgaagaagaaattcgtcctactaatcctgtagccacggaagaatacgggatagtcagcagcaacttacaagcggctaatactgcagcccagacacaagttgtcaacaaccagggagccttacctggcatggtctggcagaaccgggacgtgtacctgcagggtcccatctgggccaagattcctcacacggatggcaactttcacccgtctcctttgatgggcggctttggacttaaacatccgcctcctcagatcctgatcaagaacactcccgttcccgctaatcctccggaggtgtttactcctgccaagtttgcttcgttcatcacacagtacagcaccggacaagtcagcgtggaaatcgagtgggagctgcagaaggaaaacagcaagcgctggaacccggagattcagtacacctccaactttgaaaagcagactggtgtggactttgccgttgacagccagggtgtttactctgagcctcgccctattggcactcgttacctcacccgtaatctgtaa

SEQ ID NO: 5159 - protein, 738 aa, Adeno-associated virus 7
MAADGYLPDWLEDNLSEGIREWWALKPGAPKPKANQQKQDDGRGLVLPGYKYLGPFNGLDKGEPVNAADAAALEHDKAYDQQLQAGDNPYLRYNHADAEFQERLQEDTSFGGNLGRAVFQAKKRVLEPLGLVEEGAKTAPGKKRPVEPSPQRSPDSSTGIGKKGQQPARKRLNFGQTGDSESVPDPQPLGEPPAAPSGVGPNTMAAGGGAPMADNNEGADGVGSSSGNWHCDSTWLGDRVITTSTRTWALPTYNNHLYKQISNGTSGGATNDNTYFGYSTPWGYFDFNRFHCHFSPRDWQRLINNNWGFRPKRLSFKLFNIQVKEVTQNEGTKTIANNLTSTIQVFTDSEYQLPYVLGSAHQGCLPPFPADVFMIPQYGYLTLNNGSQAVGRSSFYCLEYFPSQMLRTGNNFQFTYTFEDVPFHSSYAHSQSLDRLMNPLIDQYLYYLSRTQTTGGTANTQTLGFSQGGPNTMANQAKNWLPGPCYRQQRVSTTTGQNNNSNFAWTAGTKYHLNGRNSLANPGIAMATHKDDEERFFPSNGILIFGKQNAARDNADYSDVMLTSEEEIKTTNPVATEEYGIVADNLQQQNTAPQIGTVNSQGALPGMVWQNRDVYLQGPIWAKIPHTDGNFHPSPLMGGFGLKHPPPQILIKNTPVPADPPTTFNQSKLNSFITQYSTGQVSVEIEWELQKENSKRWNPEIQYTSNYYKSTSVDFAVNTEGVYSEPRPIGTRYLTRNL

SEQ ID NO: 5160 - protein, 737 aa, Adeno-associated virus 7
MAADGYLPDWLEDNLSEGIREWWDLKPGAPKPKANQQKQDNGRGLVLPGYKYLGPFNGLDKGEPVNAADAAALEHDKAYDQQLKAGDNPYLRYNHADAEFQERLQEDTSFGGNLGRAVFQAKKRVLEPLGLVEEGAKTAPAKKRPVEPSPQRSPDSSTGIGKKGQQPARKRLNFGQTGDSESVPDPQPLGEPPAAPSSVGSGTVAAGGGAPMADNNEGADGVGNASGNWHCDSTWLGDRVITTSTRTWALPTYNNHLYKQISSETAGSTNDNTYFGYSTPWGYFDFNRFHCHFSPRDWQRLINNNWGFRPKKLRFKLFNIQVKEVTTNDGVTTIANNLTSTIQVFSDSEYQLPYVLGSAHQGCLPPFPADVFMIPQYGYLTLNNGSQSVGRSSFYCLEYFPSQMLRTGNNFEFSYSFEDVPFHSSYAHSQSLDRLMNPLIDQYLYYLARTQSNPGGTAGNRELQFYQGGPSTMAEQAKNWLPGPCFRQQRVSKTLDQNNNSNFAWTGATKYHLNGRNSLVNPGVAMATHKDDEDRFFPSSGVLIFGKTGATNKTTLENVLMTNEEEIRPTNPVATEEYGIVSSNLQAANTAAQTQVVNNQGALPGMVWQNRDVYLQGPIWAKIPHTDGNFHPSPLMGGFGLKHPPPQILIKNTPVPANPPEVFTPAKFASFITQYSTGQVSVEIEWELQKENSKRWNPEIQYTSNFEKQTGVDFAVDSQGVYSEPRPIGTRYLTRNL

SEQ ID NO: 5161 - protein, 623 aa, Adeno-associated virus 7
MPGFYEIVIKVPSDLDEHLPGISDSFVNWVAEKEWELPPDSDMDLNLIEQAPLTVAEKLQRDFLVQWRRVSKAPEALFFVQFEKGESYFHLHVLVETTGVKSMVLGRFLSQIREKLVQTIYRGVEPTLPNWFAVTKTRNGAGGGNKVVDECYIPNYLLPKTQPELQWAWTNMEEYISACLNLAERKRLVAQHLTHVSQTQEQNKENLNPNSDAPVIRSKTSARYMELVGWLVDRGITSEKQWIQEDQASYISFNAASNSRSQIKAALDNAGKIMALTKSAPDYLVGPSLPADIKTNRIYRILELNGYDPAYAGSVFLGWAQKKFGKRNTIWLFGPATTGKTNIAEAIAHAVPFYGCVNWTNENFPFNDCVDKMVIWWEEGKMTAKVVESAKAILGGSKVRVDQKCKSSAQIDPTPVIVTSNTNMCAVIDGNSTTFEHQQPLQDRMFKFELTRRLEHDFGKVTKQEVKEFFRWASDHVTEVAHEFYVRKGGASKRPAPDDADISEPKRACPSVADPSTSDAEGAPVDFADRYQNKCSRHAGMIQMLFPCKTCERMNQNFNICFTHGVRDCLECFPGVSESQPVVRKKTYRKLCAIHHLLGRAPEIACSACDLVNVDLDDCVSEQ

SEQ ID NO: 5162 - DNA, 4721 bp, Adeno-associated virus 7
ttggccactccctctatgcgcgctcgctcgctcggtggggcctgcggaccaaaggtccgcagacggcagagctctgctctgccggccccaccgagcgagcgagcgcgcatagagggagtggccaactccatcactaggggtaccgcgaagcgcctcccacgctgccgcgtcagcgctgacgtaaatcacgtcataggggagtggtcctgtattagctgtcacgtgagtgcttttgcgacattttgcgacaccacgtggccatttgaggtatatatggccgagtgagcgagcaggatctccattttgaccgcgaaatttgaacgagcagcagccatgccgggtttctacgagatcgtgatcaaggtgccgagcgacctggacgagcacctgccgggcatttctgactcgtttgtgaactgggtggccgagaaggaatgggagctgcccccggattctgacatggatctgaatctgatcgagcaggcacccctgaccgtggccgagaagctgcagcgcgacttcctggtccaatggcgccgcgtgagtaaggccccggaggccctgttctttgttcagttcgagaagggcgagagctacttccaccttcacgttctggtggagaccacgggggtcaagtccatggtgctaggccgcttcctgagtcagattcgggagaagctggtccagaccatctaccgcggggtcgagcccacgctgcccaactggttcgcggtgaccaagacgcgtaatggcgccggcggggggaacaaggtggtggacgagtgctacatccccaactacctcctgcccaagacccagcccgagctgcagtgggcgtggactaacatggaggagtatataagcgcgtgtttgaacctggccgaacgcaaacggctcgtggcgcagcacctgacccacgtcagccagacgcaggagcagaacaaggagaatctgaaccccaattctgacgcgcccgtgatcaggtcaaaaacctccgcgcgctacatggagctggtcgggtggctggtggaccggggcatcacctccgagaagcagtggatccaggaggaccaggcctcgtacatctccttcaacgccgcctccaactcgcggtcccagatcaaggccgcgctggacaatgccggcaagatcatggcgctgaccaaatccgcgcccgactacctggtggggccctcgctgcccgcggacattaaaaccaaccgcatctaccgcatcctggagctgaacgggtacgatcctgcctacgccggctccgtctttctcggctgggcccagaaaaagttcgggaagcgcaacaccatctggctgtttgggcccgccaccaccggcaagaccaacattgcggaagccatcgcccacgccgtgcccttctacggctgcgtcaactggaccaatgagaactttcccttcaacgattgcgtcgacaagatggtgatctggtgggaggagggcaagatgacggccaaggtcgtggagtccgccaaggccattctcggcggcagcaaggtgcgcgtggaccaaaagtgcaagtcgtccgcccagatcgaccccacccccgtgatcgtcacctccaacaccaacatgtgcgccgtgattgacgggaacagcaccaccttcgagcaccagcagccgttgcaggaccggatgttcaaatttgaactcacccgccgtctggagcacgactttggcaaggtgacgaagcaggaagtcaaagagttcttccgctgggccagtgatcacgtgaccgaggtggcgcatgagttctacgtcagaaagggcggagccagcaaaagacccgcccccgatgacgcggatataagcgagcccaagcgggcctgcccctcagtcgcggatccatcgacgtcagacgcggaaggagctccggtggactttgccgacaggtaccaaaacaaatgttctcgtcacgcgggcatgattcagatgctgtttccctgcaaaacgtgcgagagaatgaatcagaatttcaacatttgcttcacacacggggtcagagactgtttagagtgtttccccggcgtgtcagaatctcaaccggtcgtcagaaaaaagacgtatcggaaactctgcgcgattcatcatctgctggggcgggcgcccgagattgcttgctcggcctgcgacctggtcaacgtggacctggacgactgcgtttctgagcaataaatgacttaaaccaggtatggctgccgatggttatcttccagattggctcgaggacaacctctctgagggcattcgcgagtggtgggacctgaaacctggagccccgaaacccaaagccaaccagcaaaagcaggacaacggccggggtctggtgcttcctggctacaagtacctcggacccttcaacggactcgacaagggggagcccgtcaacgcggcggacgcagcggccctcgagcacgacaaggcctacgaccagcagctcaaagcgggtgacaatccgtacctgcggtataaccacgccgacgccgagtttcaggagcgtctgcaagaagatacgtcatttgggggcaacctcgggcgagcagtcttccaggccaagaagcgggttctcgaacctctcggtctggttgaggaaggcgctaagacggctcctgcaaagaagagaccggtagagccgtcacctcagcgttcccccgactcctccacgggcatcggcaagaaaggccagcagcccgccagaaagagactcaatttcggtcagactggcgactcagagtcagtccccgaccctcaacctctcggagaacctccagcagcgccctctagtgtgggatctggtacagtggctgcaggcggtggcgcaccaatggcagacaataacgaaggtgccgacggagtgggtaatgcctcaggaaattggcattgcgattccacatggctgggcgacagagtcattaccaccagcacccgaacctgggccctgcccacctacaacaaccacctctacaagcaaatctccagtgaaactgcaggtagtaccaacgacaacacctacttcggctacagcaccccctgggggtattttgactttaacagattccactgccacttctcaccacgtgactggcagcgactcatcaacaacaactggggattccggcccaagaagctgcggttcaagctcttcaacatccaggtcaaggaggtcacgacgaatgacggcgttacgaccatcgctaataaccttaccagcacgattcaggtattctcggactcggaataccagctgccgtacgtcctcggctctgcgcaccagggctgcctgcctccgttcccggcggacgtcttcatgattcctcagtacggctacctgactctcaacaatggcagtcagtctgtgggacgttcctccttctactgcctggagtacttcccctctcagatgctgagaacgggcaacaactttgagttcagctacagcttcgaggacgtgcctttccacagcagctacgcacacagccagagcctggaccggctgatgaatcccctcatcgaccagtacttgtactacctggccagaacacagagtaacccaggaggcacagctggcaatcgggaactgcagttttaccagggcgggccttcaactatggccgaacaagccaagaattggttacctggaccttgcttccggcaacaaagagtctccaaaacgctggatcaaaacaacaacagcaactttgcttggactggtgccaccaaatatcacctgaacggcagaaactcgttggttaatcccggcgtcgccatggcaactcacaaggacgacgaggaccgctttttcccatccagcggagtcctgatttttggaaaaactggagcaactaacaaaactacattggaaaatgtgttaatgacaaatgaagaagaaattcgtcctactaatcctgtagccacggaagaatacgggatagtcagcagcaacttacaagcggctaatactgcagcccagacacaagttgtcaacaaccagggagccttacctggcatggtctggcagaaccgggacgtgtacctgcagggtcccatctgggccaagattcctcacacggatggcaactttcacccgtctcctttgatgggcggctttggacttaaacatccgcctcctcagatcctgatcaagaacactcccgttcccgctaatcctccggaggtgtttactcctgccaagtttgcttcgttcatcacacagtacagcaccggacaagtcagcgtggaaatcgagtgggagctgcagaaggaaaacagcaagcgctggaacccggagattcagtacacctccaactttgaaaagcagactggtgtggactttgccgttgacagccagggtgtttactctgagcctcgccctattggcactcgttacctcacccgtaatctgtaattgcatgttaatcaataaaccggttgattcgtttcagttgaactttggtctcctgtgcttcttatcttatcggtttccatagcaactggttacacattaactgcttgggtgcgcttcacgataagaacactgacgtcaccgcggtacccctagtgatggagttggccactccctctatgcgcgctcgctcgctcggtggggcctgcggaccaaaggtccgcagacggcagagctctgctctgccggccccaccgagcgagcgagcgcgcatagagggagtggccaa

SEQ ID NO: 5163 - DNA, 2214 bp, Adeno-associated virus 7; identical to SEQ ID NO: 5158

SEQ ID NO: 5164 - protein, 737 aa, Adeno-associated virus 7; identical to SEQ ID NO: 5160

SEQ ID NO: 5165 - DNA, 2217 bp, Adeno-associated virus 8
atggctgccgatggttatcttccagattggctcgaggacaacctctctgagggcattcgcgagtggtgggcgctgaaacctggagccccgaagcccaaagccaaccagcaaaagcaggacgacggccggggtctggtgcttcctggctacaagtacctcggacccttcaacggactcgacaagggggagcccgtcaacgcggcggacgcagcggccctcgagcacgacaaggcctacgaccagcagctgcaggcgggtgacaatccgtacctgcggtataaccacgccgacgccgagtttcaggagcgtctgcaagaagatacgtcttttgggggcaacctcgggcgagcagtcttccaggccaagaagcgggttctcgaacctctcggtctggttgaggaaggcgctaagacggctcctggaaagaagagaccggtagagccatcaccccagcgttctccagactcctctacgggcatcggcaagaaaggccaacagcccgccagaaaaagactcaattttggtcagactggcgactcagagtcagttccagaccctcaacctctcggagaacctccagcagcgccctctggtgtgggacctaatacaatggctgcaggcggtggcgcaccaatggcagacaataacgaaggcgccgacggagtgggtagttcctcgggaaattggcattgcgattccacatggctgggcgacagagtcatcaccaccagcacccgaacctgggccctgcccacctacaacaaccacctctacaagcaaatctccaacgggacatcgggaggagccaccaacgacaacacctacttcggctacagcaccccctgggggtattttgactttaacagattccactgccacttttcaccacgtgactggcagcgactcatcaacaacaactggggattccggcccaagagactcagcttcaagctcttcaacatccaggtcaaggaggtcacgcagaatgaaggcaccaagaccatcgccaataacctcaccagcaccatccaggtgtttacggactcggagtaccagctgccgtacgttctcggctctgcccaccagggctgcctgcctccgttcccggcggacgtgttcatgattccccagtacggctacctaacactcaacaacggtagtcaggccgtgggacgctcctccttctactgcctggaatactttccttcgcagatgctgagaaccggcaacaacttccagtttacttacaccttcgaggacgtgcctttccacagcagctacgcccacagccagagcttggaccggctgatgaatcctctgattgaccagtacctgtactacttgtctcggactcaaacaacaggaggcacggcaaatacgcagactctgggcttcagccaaggtgggcctaatacaatggccaatcaggcaaagaactggctgccaggaccctgttaccgccaacaacgcgtctcaacgacaaccgggcaaaacaacaatagcaactttgcctggactgctgggaccaaataccatctgaatggaagaaattcattggctaatcctggcatcgctatggcaacacacaaagacgacgaggagcgtttttttcccagtaacgggatcctgatttttggcaaacaaaatgctgccagagacaatgcggattacagcgatgtcatgctcaccagcgaggaagaaatcaaaaccactaaccctgtggctacagaggaatacggtatcgtggcagataacttgcagcagcaaaacacggctcctcaaattggaactgtcaacagccagggggccttacccggtatggtctggcagaaccgggacgtgtacctgcagggtcccatctgggccaagattcctcacacggacggcaacttccacccgtctccgctgatgggcggctttggcctgaaacatcctccgcctcagatcctgatcaagaacacgcctgtacctgcggatcctccgaccaccttcaaccagtcaaagctgaactctttcatcacgcaatacagcaccggacaggtcagcgtggaaattgaatgggagctgcagaaggaaaacagcaagcgctggaaccccgagatccagtacacctccaactactacaaatctacaagtgtggactttgctgttaatacagaaggcgtgtactctgaaccccgccccattggcacccgttacctcacccgtaatctgtaa

SEQ ID NO: 5166 - DNA, 2213 bp, Adeno-associated virus 8
atggctgccgatggttatcttccagattggctcgaggacaacctctctgagggcattcgcgagtggtgggcgctgaaacctggagccccgaagcccaaagccaaccagcaaaagcaggacgacggccggggtctggtgcttcctggctacaagtacctcggacccttcaacggactcgacaagggggagcccgtcaacgcggcggacgcagcggccctcgagcacgacaaggcctacgaccagcagctgcaggcgggtgacaatccgtacctgcggtataaccacgccgacgccgagtttcaggagcgtctgcaagaagatacgtcttttgggggcaacctcgggcgagcagtcttccaggccaagaagcgggttctcgaacctctcggtctggttgaggaaggcgctaagacggctcctggaaagaagagaccggtagagccatcaccccagcgttctccagactcctctacgggcatcggcaagaaaggccaacagcccgccagaaaaagactcaattttggtcagactggcgactcagagtcagttccagaccctcaacctctcggagaacctccagcagcgccctctggtgtgggacctaatacaatggctgcaggcggtggcgcaccaatggcagacaataacgaaggcgccgacggagtgggtagttcctcgggaaattggcattgcgattccacatggctgggcgacagagtcatcaccaccagcacccgaacctgggccctgcccacctacaacaaccacctctacaagcaaatctccaacgggacatcgggaggagccaccaacgacaacacctacttcggctacagcaccccctgggggtattttgactttaacagattccactgccacttttcaccacgtgactggcagcgactcatcaacaacaactggggattccggcccaagagactcagcttcaagctcttcaacatccaggtcaaggaggtcacgcagaatgaaggcaccaagaccatcgccaataacctcaccagcaccatccaggtgtttacggactcggagtaccagctgccgtacgttctcggctctgcccaccagggctgcctgcctccgttcccggcggacgtgttcatgattccccagtacggctacctaacactcaacaacggtagtcaggccgtgggacgctcctccttctactgcctggaatactttccttcgcagatgctgagaaccggcaacaacttccagtttacttacaccttcgaggacgtgcctttccacagcagctacgcccacagccagagcttggaccggctgatgaatcctctgattgaccagtacctgtactacttgtctcggactcaaacaacaggaggcacggcaaatacgcagactctgggcttcagccaaggtgggcctaatacaatggccaatcaggcaaagaactggctgccaggaccctgttaccgccaacaacgcgtctcaacgacaaccgggcaaaacaacaatagcaactttgcctggactgctgggaccaaataccatctgaatggaagaaattcattggctaatcctggcatcgctatggcaacacacaaagacgacgaggagcgtttttttcccagtaacgggatcctgatttttggcaaacaaaatgctgccagagacaatgcggattacagcgatgtcatgctcaccagcgaggaagaaatcaaaaccactaaccctgtggctacagaggaatacggtatcgtggcagataacttgcagcagcaaaacacggctcctcaaattggaactgtcaacagccagggggccttacccggtatggtctggcagaaccgggacgtgtacctgcagggtcccatctgggccaagattcctcacacggacggcaacttccacccgtctccgctgatgggcggctttggcctgaaacatcctccgcctcagatcctgatcaagaacacgcctgtacctgcggatcctccgaccaccttcaaccagtcaaagctgaactctttcatcacgcaatacagcaccggacaggtcagcgtggaaattgaatgggagctgcagaaggaaaacagcaagcgctggaaccccgagatccagtacacctccaactactacaaatctacaagtgtggactttgctgtaatacagaaggcgtgtactctgaaccccgccccattggcacccgttacctcacccgtaatctg

SEQ ID NO: 5167 - DNA, 4393 bp, Adeno-associated virus 8
cagagagggagtggccaactccatcactaggggtagcgcgaagcgcctcccacgctgccgcgtcagcgctgacgtaaattacgtcataggggagtggtcctgtattagctgtcacgtgagtgcttttgcggcattttgcgacaccacgtggccatttgaggtatatatggccgagtgagcgagcaggatctccattttgaccgcgaaatttgaacgagcagcagccatgccgggcttctacgagatcgtgatcaaggtgccgagcgacctggacgagcacctgccgggcatttctgactcgtttgtgaactgggtggccgagaaggaatgggagctgcccccggattctgacatggatcggaatctgatcgagcaggcacccctgaccgtggccgagaagctgcagcgcgacttcctggtccaatggcgccgcgtgagtaaggccccggaggccctcttctttgttcagttcgagaagggcgagagctactttcacctgcacgttctggtcgagaccacgggggtcaagtccatggtgctaggccgcttcctgagtcagattcgggaaaagcttggtccagaccatctacccgcggggtcgagccccaccttgcccaactggttcgcggtgaccaaagacgcggtaatggcgccggcgggggggaacaaggtggtggacgagtgctacatccccaactacctcctgcccaagactcagcccgagctgcagtgggcgtggactaacatggaggagtatataagcgcgtgcttgaacctggccgagcgcaaacggctcgtggcgcagcacctgacccacgtcagccagacgcaggagcagaacaaggagaatctgaaccccaattctgacgcgcccgtgatcaggtcaaaaacctccgcgcgctatatggagctggtcgggtggctggtggaccggggcatcacctccgagaagcagtggatccaggaggaccaggcctcgtacatctccttcaacgccgcctccaactcgcggtcccagatcaaggccgcgctggacaatgccggcaagatcatggcgctgaccaaatccgcgcccgactacctggtggggccctcgctgcccgcggacattacccagaaccgcatctaccgcatcctcgctctcaacggctacgaccctgcctacgccggctccgtctttctcggctgggctcagaaaaagttcgggaaacgcaacaccatctggctgtttggacccgccaccaccggcaagaccaacattgcggaagccatcgcccacgccgtgcccttctacggctgcgtcaactggaccaatgagaactttcccttcaatgattgcgtcgacaagatggtgatctggtgggaggagggcaagatgacggccaaggtcgtggagtccgccaaggccattctcggcggcagcaaggtgcgcgtggaccaaaagtgcaagtcgtccgcccagatcgaccccacccccgtgatcgtcacctccaacaccaacatgtgcgccgtgattgacgggaacagcaccaccttcgagcaccagcagcctctccaggaccggatgtttaagttcgaactcacccgccgtctggagcacgactttggcaaggtgacaaagcaggaagtcaaagagttcttccgctgggccagtgatcacgtgaccgaggtggcgcatgagttttacgtcagaaagggcggagccagcaaaagacccgcccccgatgacgcggataaaagcgagcccaagcgggcctgcccctcagtcgcggatccatcgacgtcagacgcggaaggagctccggtggactttgccgacaggtaccaaaacaaatgttctcgtcacgcgggcatgcttcagatgctgtttccctgcaaaacgtgcgagagaatgaatcagaatttcaacatttgcttcacacacggggtcagagactgctcagagtgtttccccggcgtgtcagaatctcaaccggtcgtcagaaagaggacgtatcggaaactctgtgcgattcatcatctgctggggcgggctcccgagattgcttgctcggcctgcgatctggtcaacgtggacctggatgactgtgtttctgagcaataaatgacttaaaccaggtatggctgccgatggttatcttccagattggctcgaggacaacctctctgagggcattcgcgagtggtgggcgctgaaacctggagccccgaagcccaaagccaaccagcaaaagcaggacgacggccggggtctggtgcttcctggctacaagtacctcggacccttcaacggactcgacaagggggagcccgtcaacgcggcggacgcagcggccctcgagcacgacaaggcctacgaccagcagctgcaggcgggtgacaatccgtacctgcggtataaccacgccgacgccgagtttcaggagcgtctgcaagaagatacgtcttttgggggcaacctcgggcgagcagtcttccaggccaagaagcgggttctcgaacctctcggtctggttgaggaaggcgctaagacggctcctggaaagaagagaccggtagagccatcaccccagcgttctccagactcctctacgggcatcggcaagaaaggccaacagcccgccagaaaaagactcaattttggtcagactggcgactcagagtcagttccagaccctcaacctctcggagaacctccagcagcgccctctggtgtgggacctaatacaatggctgcaggcggtggcgcaccaatggcagacaataacgaaggcgccgacggagtgggtagttcctcgggaaattggcattgcgattccacatggctgggcgacagagtcatcaccaccagcacccgaacctgggccctgcccacctacaacaaccacctctacaagcaaatctccaacgggacatcgggaggagccaccaacgacaacacctacttcggctacagcaccccctgggggtattttgactttaacagattccactgccacttttcaccacgtgactggcagcgactcatcaacaacaactggggattccggcccaagagactcagcttcaagctcttcaacatccaggtcaaggaggtcacgcagaatgaaggcaccaagaccatcgccaataacctcaccagcaccatccaggtgtttacggactcggagtaccagctgccgtacgttctcggctctgcccaccagggctgcctgcctccgttcccggcggacgtgttcatgattccccagtacggctacctaacactcaacaacggtagtcaggccgtgggacgctcctccttctactgcctggaatactttccttcgcagatgctgagaaccggcaacaacttccagtttacttacaccttcgaggacgtgcctttccacagcagctacgcccacagccagagcttggaccggctgatgaatcctctgattgaccagtacctgtactacttgtctcggactcaaacaacaggaggcacggcaaatacgcagactctgggcttcagccaaggtgggcctaatacaatggccaatcaggcaaagaactggctgccaggaccctgttaccgccaacaacgcgtctcaacgacaaccgggcaaaacaacaatagcaactttgcctggactgctgggaccaaataccatctgaatggaagaaattcattggctaatcctggcatcgctatggcaacacacaaagacgacgaggagcgtttttttcccagtaacgggatcctgatttttggcaaacaaaatgctgccagagacaatgcggattacagcgatgtcatgctcaccagcgaggaagaaatcaaaaccactaaccctgtggctacagaggaatacggtatcgtggcagataacttgcagcagcaaaacacggctcctcaaattggaactgtcaacagccagggggccttacccggtatggtctggcagaaccgggacgtgtacctgcagggtcccatctgggccaagattcctcacacggacggcaacttccacccgtctccgctgatgggcggctttggcctgaaacatcctccgcctcagatcctgatcaagaacacgcctgtacctgcggatcctccgaccaccttcaaccagtcaaagctgaactctttcatcacgcaatacagcaccggacaggtcagcgtggaaattgaatgggagctgcagaaggaaaacagcaagcgctggaaccccgagatccagtacacctccaactactacaaatctacaagtgtggactttgctgttaatacagaaggcgtgtactctgaaccccgccccattggcacccgttacctcacccgtaatctgtaattgcctgttaatcaataaaccggttgattcgtttcagttgaactttggtctctgcg

SEQ ID NO: 5168 - protein, 738 aa, Adeno-associated virus 8; identical to SEQ ID NO: 5159

SEQ ID NO: 5169 - protein, 737 aa, Adeno-associated virus 8
MAADGYLPDWLEDNLSEGIREWWALKPGAPKPKANQQKQDDGRGLVLPGYKYLGPFNGLDKGEPVNAADAAALEHDKAYDQQLQAGDNPYLRYNHADAEFQERLQEDTSFGGNLGRAVFQAKKRVLEPLGLVEEGAKTAPGKKRPVEPSPQRSPDSSTGIGKKGQQPARKRLNFGQTGDSESVPDPQPLGEPPAAPSGVGPNTMAAGGGAPMADNNEGADGVGSSSGNWHCDSTWLGDRVITTSTRTWALPTYNNHLYKQISNGTSGGATNDNTYFGYSTPWGYFDFNRFHCHFSPRDWQRLINNNWGFRPKRLSFKLFNIQVKEVTQNEGTKTIANNLTSTIQVFTDSEYQLPYVLGSAHQGCLPPFPADVFMIPQYGYLTLNNGSQAVGRSSFYCLEYFPSQMLRTGNNFQFTYTFEDVPFHSSYAHSQSLDRLMNPLIDQYLYYLSRTQTTGGTANTQTLGFSQGGPNTMANQAKNWLPGPCYRQQRVSTTTGQNNNSNFAWTAGTKYHLNGRNSLANPGIAMATHKDDEERFFPSNGILIFGKQNAARDNADYSDVMLTSEEEIKTTNPVATEEYGIVADNLQQQNTAPQIGTVNSQGALPGMVWQNRDVYLQGPIWAKIPHTDGNFHPSPLMGGFGLKHPPPQILIKNTPVPADPPTTFNQSKLNSFITQYSTGQVSVEIEWELQKENSKRWNPEIQYTSNYYKSTSVDFAVIQKACTLNPAPLAPVTSPVI

SEQ ID NO: 5170 - DNA, 2217 bp, Adeno-associated virus 8; identical to SEQ ID NO: 5165

SEQ ID NO: 5171 - DNA, 4385 bp, Adeno-associated virus 9
cagagagggagtggccaactccatcactaggggtaatcgcgaagcgcctcccacgctgccgcgtcagcgctgacgtagattacgtcataggggagtggtcctgtattagctgtcacgtgagtgcttttgcgacattttgcgacaccacatggccatttgaggtatatatggccgagtgagcgagcaggatctccattttgaccgcgaaatttgaacgagcagcagccatgccgggcttctacgagattgtgatcaaggtgccgagcgacctggacgagcacctgccgggcatttctgactcttttgtgaactgggtggccgagaaggaatgggagctgcccccggattctgacatggatcggaatctgatcgagcaggcacccctgaccgtggccgagaagctgcagcgcgacttcctggtccaatggcgccgcgtgagtaaggccccggaggccctcttctttgttcagttcgagaagggcgagagctactttcacctgcacgttctggtcgagaccacgggggtcaagtccatggtgctaggccgcttcctgagtcagattcgggagaagctggtccagaccatctaccgcgggatcgagccgaccctgcccaactggttcgcggtgaccaagacgcgtaatggcgccggcggggggaacaaggtggtggacgagtgctacatccccaactacctcctgcccaagactcagcccgagctgcagtgggcgtggactaacatggaggagtatataagcgcgtgcttgaacctggccgagcgcaaacggctcgtggcgcagcacctgacccacgtcagccagacgcaggagcagaacaaggagaatctgaaccccaattctgacgcgcccgtgatcaggtcaaaaacctccgcgcgctacatggagctggtcgggtggctggtggaccggggcatcacctccgagaagcagtggatccaggaggaccaggcctcgtacatctccttcaacgccgcctccaactcgcggtcccagatcaaggccgcgctggacaatgccggcaagatcatggcgctgaccaaatccgcgcccgactacctggtaggcccttcacttccggtggacattacgcagaaccgcatctaccgcatcctgcagctcaacggctacgaccctgcctacgccggctccgtctttctcggctgggcacaaaagaagttcgggaaacgcaacaccatctggctgtttgggccggccaccacgggaaagaccaacatcgcagaagccattgcccacgccgtgcccttctacggctgcgtcaactggaccaatgagaactttcccttcaacgattgcgtcgacaagatggtgatctggtgggaggagggcaagatgacggccaaggtcgtggagtccgccaaggccattctcggcggcagcaaggtgcgcgtggaccaaaagtgcaagtcgtccgcccagatcgaccccactcccgtgatcgtcacctccaacaccaacatgtgcgccgtgattgacgggaacagcaccaccttcgagcaccagcagcctctccaggaccggatgtttaagttcgaactcacccgccgtctggagcacgactttggcaaggtgacaaagcaggaagtcaaagagttcttccgctgggccagtgatcacgtgaccgaggtggcgcatgagttttacgtcagaaagggcggagccagcaaaagacccgcccccgatgacgcggataaaagcgagcccaagcgggcctgcccctcagtcgcggatccatcgacgtcagacgcggaaggagctccggtggactttgccgacaggtaccaaaacaaatgttctcgtcacgcgggcatgcttcagatgctgcttccctgcaaaacgtgcgagagaatgaatcagaatttcaacatttgcttcacacacggggtcagagactgctcagagtgtttccccggcgtgtcagaatctcaaccggtcgtcagaaagaggacgtatcggaaactctgtgcgattcatcatctgctggggcgggctcccgagattgcttgctcggcctgcgatctggtcaacgtggacctggatgactgtgtttctgagcaataaatgacttaaaccaggtatggctgccgatggttatcttccagattggctcgaggacaacctctctgagggcattcgcgagtggtgggcgctgaaacctggagccccgaagcccaaagccaaccagcaaaagcaggacgacggccggggtctggtgcttcctggctacaagtacctcggacccttcaacggactcgacaagggggagcccgtcaacgcggcggacgcagcggccctcgagcacggcaaggcctacgaccagcagctgcaggcgggtgacaatccgtacctgcggtataaccacgccgacgccgagtttcaggagcgtctgcaagaagatacgtcttttgggggcaacctcgggcgagcagtcttccaggccaagaagcgggttctcgaacctctcggtctggttgaggaaggcgctaagacggctcctggaaagaagagaccggtagagccatcaccccagcgttctccagactcctctacgggcatcggcaagaaaggccaacagcccgccagaaaaagactcaattttggtcagactggcgactcagagtcagttccagaccctcaacctctcggagaacctccagcagcgccctctggtgtgggacctaatacaatggctgcaggcggtggcgcaccaatggcagacaataacgaaggcgccgacggagtgggtaattcctcgggaaattggcattgcgattccacatggctgggggacagagtcatcaccaccagcacccgaacctgggcattgcccacctacaacaaccacctctacaagcaaatctccaatggaacatcgggaggaagcaccaacgacaacacctactttggctacagcaccccctgggggtattttgacttcaacagattccactgccacttctcaccacgtgactggcagcgactcatcaacaacaactggggattccggccaaagagactcaacttcaagctgttcaacatccaggtcaaggaggttacgacgaacgaaggcaccaagaccatcgccaataaccttaccagcaccgtccaggtctttacggactcggagtaccagctaccgtacgtcctaggctctgcccaccaaggatgcctgccaccgtttcctgcagacgtcttcatggttcctcagtacggctacctgacgctcaacaatggaagtcaagcgttaggacgttcttctttctactgtctggaatacttcccttctcagatgctgagaaccggcaacaactttcagttcagctacactttcgaggacgtgcctttccacagcagctacgcacacagccagagtctagatcgactgatgaaccccctcatcgaccagtacctatactacctggtcagaacacagacaactggaactgggggaactcaaactttggcattcagccaagcaggccctagctcaatggccaatcaggctagaaactgggtacccgggccttgctaccgtcagcagcgcgtctccacaaccaccaaccaaaataacaacagcaactttgcgtggacgggagctgctaaattcaagctgaacgggagagactcgctaatgaatcctggcgtggctatggcatcgcacaaagacgacgaggaccgcttctttccatcaagtggcgttctcatatttggcaagcaaggagccgggaacgatggagtcgactacagccaggtgctgattacagatgaggaagaaattaaagccaccaaccctgtagccacagaggaatacggagcagtggccatcaacaaccaggccgctaacacgcaggcgcaaactggacttgtgcataaccagggagttattcctggtatggtctggcagaaccgggacgtgtacctgcagggccctatttgggctaaaatacctcacacagatggcaactttcacccgtctcctctgatgggtggatttggactgaaacacccacctccacagattctaattaaaaatacaccagtgccggcagatcctcctcttaccttcaatcaagccaagctgaactctttcatcacgcagtacagcacgggacaagtcagcgtggaaatcgagtgggagctgcagaaagaaaacagcaagcgctggaatccagagatccagtatacttcaaactactacaaatctacaaatgtggactttgctgtcaataccaaaggtgtttactctgagcctcgccccattggtactcgttacctcacccgtaatttgtaattgcctgttaatcaataaaccggttaattcgtttcagttgaactttggtctctgcg

SEQ ID NO: 5172 - DNA, 4382 bp, Adeno-associated virus 9
cagagagggagtggccaactccatcactaggggtaatcgcgaagcgcctcccacgctgccgcgtcagcgctgacgtagattacgtcataggggagtggtcctgtattagctgtcacgtgagtgcttttgcgacattttgcgacaccacatggccatttgaggtatatatggccgagtgagcgagcaggatctccattttgaccgcgaaatttgaacgagcagcagccatgccgggcttctacgagattgtgatcaaggtgccgagcgacctggacgagcacctgccgggcatttctgactcttttgtgaactgggtggccgagaaggaatgggagctgcccccggattctgacatggatcggaatctgatcgagcaggcacccctgaccgtggccgagaagctgtagcgcgacttcctggtccaatggcgccgcgtgagtaaggccccggaggccctcttctttgttcagttcgagaagggcgagagctactttcacctgcacgttctggtcgagaccacgggggtcaagtccatggtgctaggccgcttcctgagtcagattcgggagaagctggtccagaccatctaccgcgggatcgagccgaccctgcccaactggttcgcggtgaccaagacgcgtaatggcgccggcggggggaacaaggtggtggacgagtgctacatccccaactacctcctgcccaagactcagcccgagctgcagtgggcgtggactaacatggaggagtatataagcgcgtgcttgaacctggccgagcgcaaacggctcgtggcgcagcacctgacccacgtcagccagacgcaggagcagaacaaggagaatctgaaccccaattctgacgcgcccgtgatcaggtcaaaaacctccgcgcgctacatggagctggtcgggtggctggtggaccggggcatcacctccgagaagcagtggatccaggaggaccaggcctcgtacatctccttcaacgccgcctccaactcgcggtcccagatcaaggccgcgctggacaatgccggcaagatcatggcgctgaccaaatccgcgcccgactacctggtaggcccttcacttccggtggacattacgcagaaccgcatctaccgcatcctgcagctcaacggctacgaccctgcctacgccggctccgtctttctcggctgggcacaaaagaagttcgggaaacgcaacaccatctggctgtttgggccggccaccacgggaaagaccaacatcgcagaagccattgcccacgccgtgcccttctacggctgcgtcaactggaccaatgagaactttcccttcaacgattgcgtcgacaagatggtgatctggtgggaggagggcaagatgacggccaaggtcgtggagtccgccaaggccattctcggcggcagcaaggtgcgcgtggaccaaaagtgcaagtcgtccgcccagatcgaccccactcccgtgatcgtcacctccaacaccaacatgtgcgccgtgattgacgggaacagcaccaccttcgagcaccagcagcctctccaggaccggatgtttaagttcgaactcacccgccgtctggagcacgactttggcaaggtgacaaagcaggaagtcaaagagttcttccgctgggccagtgatcacgtgaccgaggtggcgcatgagttttacgtcagaaagggcggagccagcaaaagacccgcccccgatgacgcggataaaagcgagcccaagcgggcctgcccctcagtcgcggatccatcgacgtcagacgcggaaggagctccggtggactttgccgacaggtaccaaaacaaatgttctcgtcacgcgggcatgcttcagatgctgcttccctgcaaaacgtgcgagagaatgaatcagaatttcaacatttgcttcacacacggggtcagagactgctcagagtgtttccccggcgtgtcagaatctcaaccggtcgtcagaaagaggacgtatcggaaactctgtgcgattcatcatctgctggggcgggctcccgagattgcttgctcggcctgcgatctggtcaacgtggacctggatgactgtgtttctgagcaataaatgacttaaaccaggtatggctgccgatggttatcttccagattggctcgaggacaacctctctgagggcattcgcgagtggtgggacctgaaacctggagccccgaaacccaaagccaaccagcaaaagcaggacgacggccggggtctggtgcttcctggctacaagtacctcggacccttcaacggactcgacaagggggagcccgtcaacgcggcggacgcagcggccctcgagcacgacaaggcctacgaccagcagctcaaagcgggtgacaatccgtacctgcggtataaccacgccgacgccgagtttcaggagcgtctgcaagaagatacgtcttttgggggcaacctcgggcgagcagtcttccaggccaagaagcgggttctcgaacctctcggtctggttgaggaaggcgctaagacggctcctggaaagaagagaccggtagagcagtcaccccaagaaccagactcatcctcgggcatcggcaaatcaggccagcagcccgctaaaaagagactcaattttggtcagactggcgactcagagtcagtccccgacccacaacctctcggagaacctccagaagccccctcaggtctgggacctaatacaatggcttcaggcggtggcgctccaatggcagacaataacgaaggcgccgacggagtgggtaattcctcgggaaattggcattgcgattccacatggctgggggacagagtcatcaccaccagcacccgaacctgggcattgcccacctacaacaaccacctctacaagcaaatctccaatggaacatcgggaggaagcaccaacgacaacacctactttggctacagcaccccctgggggtattttgacttcaacagattccactgccacttctcaccacgtgactggcagcgactcatcaacaacaactggggattccggccaaagagactcaacttcaagctgttcaacatccaggtcaaggaggttacgacgaacgaaggcaccaagaccatcgccaataaccttaccagcaccgtccaggtctttacggactcggagtaccagctaccgtacgtcctaggctctgcccaccaaggatgcctgccaccgtttcctgcagacgtcttcatggttcctcagtacggctacctgacgctcaacaatggaagtcaagcgttaggacgttcttctttctactgtctggaatacttcccttctcagatgctgagaaccggcaacaactttcagttcagctacactttcgaggacgtgcctttccacagcagctacgcacacagccagagtctagatcgactgatgaaccccctcatcgaccagtacctatactacctggtcagaacacagacaactggaactgggggaactcaaactttggcattcagccaagcaggccctagctcaatggccaatcaggctagaaactgggtacccgggccttgctaccgtcagcagcgcgtctccacaaccaccaaccaaaataacaacagcaactttgcgtggacgggagctgctaaattcaagctgaacgggagagactcgctaatgaatcctggcgtggctatggcatcgcacaaagacgacgaggaccgcttctttccatcaagtggcgttctcatatttggcaagcaaggagccgggaacgatggagtcgactacagccaggtgctgattacagatgaggaagaaattaaagccaccaaccctgtagccacagaggaatacggagcagtggccatcaacaaccaggccgctaacacgcaggcgcaaactggacttgtgcataaccagggagttattcctggtatggtctggcagaaccgggacgtgtacctgcagggccctatttgggctaaaatacctcacacagatggcaactttcacccgtctcctctgatgggtggatttggactgaaacacccacctccacagattctaattaaaaatacaccagtgccggcagatcctcctcttaccttcaatcaagccaagctgaactctttcatcacgcagtacagcacgggacaagtcagcgtggaaatcgagtgggagctgcagaaagaaaacagcaagcgctggaatccagagatccagtatacttcaaactactacaaatctacaaatgtggactttgctgtcaataccgaaggtgtttactctgagcctcgccccattggtactcgttacctcacccgtaatttgtaattgcctgttaatcaataaaccggttaattcgtttcagttgaactttggtctctgcg

SEQ ID NO: 5173 - protein, 736 aa, Adeno-associated virus 9; identical to SEQ ID NO: 4805

SEQ ID NO: 5174 - protein, 736 aa, Adeno-associated virus 9
MAADGYLPDWLEDNLSEGIREWWDLKPGAPKPKANQQKQDDGRGLVLPGYKYLGPFNGLDKGEPVNAADAAALEHDKAYDQQLKAGDNPYLRYNHADAEFQERLQEDTSFGGNLGRAVFQAKKRVLEPLGLVEEGAKTAPGKKRPVEQSPQEPDSSSGIGKSGQQPAKKRLNFGQTGDSESVPDPQPLGEPPEAPSGLGPNTMASGGGAPMADNNEGADGVGNSSGNWHCDSTWLGDRVITTSTRTWALPTYNNHLYKQISNGTSGGSTNDNTYFGYSTPWGYFDFNRFHCHFSPRDWQRLINNNWGFRPKRLNFKLFNIQVKEVTTNEGTKTIANNLTSTVQVFTDSEYQLPYVLGSAHQGCLPPFPADVFMVPQYGYLTLNNGSQALGRSSFYCLEYFPSQMLRTGNNFQFSYTFEDVPFHSSYAHSQSLDRLMNPLIDQYLYYLVRTQTTGTGGTQTLAFSQAGPSSMANQARNWVPGPCYRQQRVSTTTNQNNNSNFAWTGAAKFKLNGRDSLMNPGVAMASHKDDEDRFFPSSGVLIFGKQGAGNDGVDYSQVLITDEEEIKATNPVATEEYGAVAINNQAANTQAQTGLVHNQGVIPGMVWQNRDVYLQGPIWAKIPHTDGNFHPSPLMGGFGLKHPPPQILIKNTPVPADPPLTFNQAKLNSFITQYSTGQVSVEIEWELQKENSKRWNPEIQYTSNYYKSTNVDFAVNTEGVYSEPRPIGTRYLTRNL

SEQ ID NO: 5175 - protein, 623 aa, Adeno-associated virus 9
MPGFYEIVIKVPSDLDEHLPGISDSFVNWVAEKEWELPPDSDMDRNLIEQAPLTVAEKLQRDFLVQWRRVSKAPEALFFVQFEKGESYFHLHVLVETTGVKSMVLGRFLSQIREKLVQTIYRGIEPTLPNWFAVTKTRNGAGGGNKVVDECYIPNYLLPKTQPELQWAWTNMEEYISACLNLAERKRLVAQHLTHVSQTQEQNKENLNPNSDAPVIRSKTSARYMELVGWLVDRGITSEKQWIQEDQASYISFNAASNSRSQIKAALDNAGKIMALTKSAPDYLVGPSLPVDITQNRIYRILQLNGYDPAYAGSVFLGWAQKKFGKRNTIWLFGPATTGKTNIAEAIAHAVPFYGCVNWTNENFPFNDCVDKMVIWWEEGKMTAKVVESAKAILGGSKVRVDQKCKSSAQIDPTPVIVTSNTNMCAVIDGNSTTFEHQQPLQDRMFKFELTRRLEHDFGKVTKQEVKEFFRWASDHVTEVAHEFYVRKGGASKRPAPDDADKSEPKRACPSVADPSTSDAEGAPVDFADRYQNKCSRHAGMLQMLLPCKTCERMNQNFNICFTHGVRDCSECFPGVSESQPVVRKRTYRKLCAIHHLLGRAPEIACSACDLVNVDLDDCVSEQ

SEQ ID NO: 5176 - DNA, 1797 bp, Artificial Sequence
  Description of Artificial Sequence: Synthetic polynucleotide
acggctccgaccggagacaagcggaaaggcgaagacgaacctcgtttgcccgacacttcttcacagactcccaagaaaaacaagaagcctcgcaaggaaagaccttccggcggggcagaagatccgggcgaaggcacctcttccaacgctggagcagcagcacccgcctctagtgtgggatcatctatcatggctgaaggaggtggcggcccagtgggcgatgcaggccagggtgccgatggagtgggcaattcctccggaaattggcattgcgattcccaatggctggaaaacggagtcgtcactcgaaccacccgaacctgggtcttgcccagctacaacaaccacctgtacaaacgaatccaaggacccagcggaggcgacaacaacaacaaattctttggattcagcaccccctggggatactttgactacaatcgattccactgccacttttccccgcgagactggcaacgactcatcaacaacaactggggcatccgtcccaaagcgatgcgctttagactctttaacatccaggttaaagaggtcacggtccaagacttcaacaccaccatcggcaacaacctcaccagtacggtccaggtctttgcggacaaggactaccaactgccgtacgtcctcggatcggctaccgaaggcaccttcccgccgttcccagcggatatctacacgatcccgcagtacgggtactgcacgctaaactacaacaacgaggcggtggatcgttcggccttctactgtctggactactttccctcagacatgctgcggacaggaaataactttgagtttacttacaccttcgaggacgttcctttccatagcatgtttgcccacaaccagacgctagaccggctgatgaatcccctcgtggatcagtacctctgggctttcagctccgtcagccaagcaggctcatctggacgagctcttcattactcgcgggcgactaaaaccaacatggcggctcaatataggaactggttacctgggcctttcttccgtgatcagcaaatctttacgggcgctagcaacatcactaaaaataacgtctttagcgtttgggaaaaaggcaagcaatgggaactcgacaatcggaccaacctaatgcagcccggtcctgcggcagcgaccacctttagcggagaacctgaccgtcaagccatgcaaaacacgctggcttttagcaggaccgtctacgatcaaacgaccgccacgaccgatcgtaaccagatactcatcaccaacgaagacgaaatcagacccaccaactcggtcggtatcgacgcgtggggagcagttcccaccaacaaccagtcgatcgtgacccccggcactcgcgcggccgtcaacaatcaaggggcgcttcccgggatggtgtggcaaaacagagacatttaccctacagggacccatttggccaaaattcccgacactgacaatcacttccatccgtccccgcttattgggcggtttggctgcaagcatccccctccccagattttcattaaaaacacacccgtccctgccaacccttcggaaacgttccagacggccaaagtggcctccttcatcaaccagtactcgaccggacagtgcaccgtcgaaatcttttgggaactcaagaaggaaacctccaagcgctggaaccccgaaatccagttcacctccaactttggcaacgcggccgacatccagtttgccgtctccgacacgggatcctattccgaacctcgtcccatcggtacccgttaccttaccaaacctctgtaa

SEQ ID NO: 5177 - DNA, 1989 bp, Artificial Sequence
  Description of Artificial Sequence: Synthetic polynucleotide
atgaggtcgtactacgaggtcatcgttcagctgcccaacgacgtcgagagtcaggtacctggaatctccgattcgttcgtcaactggattacgtcgcgagaatggacgttgcctgaggacgccgattgggatttggaccaggtcgatcaagttcaactgacgctcggcgacaaaatccaacgggagattcgaactcattgggggacgatggccaaagaaccggactttcactattttatccaactggaacaaggtgaggtgttctttcatttacacgtcctgctggaaacgtgttccgtaaagccgatggtactcggaagatatatccgacatattcaacaaaaaattgtgagtaaagtctactgcgccacgagcctacgatggaaggatggatgcgtggtgaccaagaccaaaaatttcgggggcgcgaacaaggtccgggccgagtcgtatattcccgcctacctgatcccgaaacagcaaccggaagtgcagtgggcgtggactaacgtgcccgagtatataaaagcgtgcttgcaccgagaactgcgtgccagtctcgcgcgacttcacttcgaggaggcgggcgtctcgcaatccaaggaaaatctcgcgagaactgcagacggcgctcccgtgatgccgacccgcgtcagcaaacgctacatggagctcgtggattggctcgtggagaaggggatcaccaccgagaaggaatggctgctggaaaacagagaaagctttcggagctttcaggcctcgagcaactcggcgcgtcagatcaagacggccctgcaaggcgccattcaggagatgcttctgaccaagacggcggaggactacctcgtcggaaaggatcccgtctcggacgacgacatccgtcagaaccgcatctacaagattctggaactgaaccactacgacccagcgtacgtggggagtattttggtcgggtggtgccagaagaaatggggcaagcgaaacacgctgtggctgttcggacatgcgaccaccggcaagaccaacatcgcggaggctattgcccatgctgtgccgttctatggatgcgttaactggaccaacgagaactttccgttcaacgactgcgtcgaaaaaatgattatctggtgggaggagggcaaaatgaccgccaaagtggtggaaacagccaaggcgattctgggaggatctcgggtgagagtggaccaaaaatgcaaagcttcggttccgatcgaaccgacgccggtcattattaccagtaacaccaacatgtgttatgtcatcgacgggaacacgaccacgttcgagcataagcagccgttggaggacaggatgtttaagctcgaattgctgactcggttgcctgatgactttggtaaggtgaccaaacaggaggtgcgtcaattcttcaggtggtctcaggatcacctgacccctgtgatcccagaattcctagtgcggaaggcggagtctcgcaaaagacccgccccttccggggaaggctatataagcccgacaaagcggcccgcgctcgcagagcagcagcaggcgtcggagagcgcggacccggttcccaccaggtatcgtatcaaatgctcgaaacattgcggtatggataaaatgttgtttccttgccaaatttgtgaatcgatgaacagagatattaatatttgtgctattcataaaacgaccgactgtaaagagtgtttccccgactacggggataaagatgatgtagaactacccccctgtacagaacacaacgtgtctcgttgttatcaatgtcattcgggcgaattgtatcgcgtgacttcggactctgacgagaaacctgcccccgagagtgatgaaggcaccgagccatcctatgctccctgcacgattcaccacctgatgggcaagagtcacgggttagtcacttgcgcggcgtgtcggttgaaaaatagtacgttgcatgatgacttggatgacggtgatctcgaacaataa

SEQ ID NO: 5178 - DNA, 1626 bp, Artificial Sequence
  Description of Artificial Sequence: Synthetic polynucleotide
atgaggtcgtactacgaggtcatcgttcagctgcccaacgacgtcgagagtcaggtacctggaatctccgattcgttcgtcaactggattacgtcgcgagaatggacgttgcctgaggacgccgattgggatttggaccaggtcgatcaagttcaactgacgctcggcgacaaaatccaacgggagattcgaactcattgggggacgatggccaaagaaccggactttcactattttatccaactggaacaaggtgaggtgttctttcatttacacgtcctgctggaaacgtgttccgtaaagccgatggtactcggaagatatatccgacatattcaacaaaaaattgtgagtaaagtctactgcgccacgagcctacgatggaaggatggatgcgtggtgaccaagaccaaaaatttcgggggcgcgaacaaggtccgggccgagtcgtatattcccgcctacctgatcccgaaacagcaaccggaagtgcagtgggcgtggactaacgtgcccgagtatataaaagcgtgcttgcaccgagaactgcgtgccagtctcgcgcgacttcacttcgaggaggcgggcgtctcgcaatccaaggaaaatctcgcgagaactgcagacggcgctcccgtgatgccgacccgcgtcagcaaacgctacatggagctcgtggattggctcgtggagaaggggatcaccaccgagaaggaatggctgctggaaaacagagaaagctttcggagctttcaggcctcgagcaactcggcgcgtcagatcaagacggccctgcaaggcgccattcaggagatgcttctgaccaagacggcggaggactacctcgtcggaaaggatcccgtctcggacgacgacatccgtcagaaccgcatctacaagattctggaactgaaccactacgacccagcgtacgtggggagtattttggtcgggtggtgccagaagaaatggggcaagcgaaacacgctgtggctgttcggacatgcgaccaccggcaagaccaacatcgcggaggctattgcccatgctgtgccgttctatggatgcgttaactggaccaacgagaactttccgttcaacgactgcgtcgaaaaaatgattatctggtgggaggagggcaaaatgaccgccaaagtggtggaaacagccaaggcgattctgggaggatctcgggtgagagtggaccaaaaatgcaaagcttcggttccgatcgaaccgacgccggtcattattaccagtaacaccaacatgtgttatgtcatcgacgggaacacgaccacgttcgagcataagcagccgttggaggacaggatgtttaagctcgaattgctgactcggttgcctgatgactttggtaaggtgaccaaacaggaggtgcgtcaattcttcaggtggtctcaggatcacctgacccctgtgatcccagaattcctagtgcggaaggcggagtctcgcaaaagacccgccccttccggggaaggctatataagcccgacaaagcggcccgcgctcgcagagcagcagcaggcgtcggagagcgcggacccggttcccaccagattggttggagcggttggtcaaaaagggagtgaatgctgcagctga

SEQ ID NO: 5179 - DNA, 1323 bp, Artificial Sequence
  Description of Artificial Sequence: Synthetic polynucleotide
atggagctcgtggattggctcgtggagaaggggatcaccaccgagaaggaatggctgctggaaaacagagaaagctttcggagctttcaggcctcgagcaactcggcgcgtcagatcaagacggccctgcaaggcgccattcaggagatgcttctgaccaagacggcggaggactacctcgtcggaaaggatcccgtctcggacgacgacatccgtcagaaccgcatctacaagattctggaactgaaccactacgacccagcgtacgtggggagtattttggtcgggtggtgccagaagaaatggggcaagcgaaacacgctgtggctgttcggacatgcgaccaccggcaagaccaacatcgcggaggctattgcccatgctgtgccgttctatggatgcgttaactggaccaacgagaactttccgttcaacgactgcgtcgaaaaaatgattatctggtgggaggagggcaaaatgaccgccaaagtggtggaaacagccaaggcgattctgggaggatctcgggtgagagtggaccaaaaatgcaaagcttcggttccgatcgaaccgacgccggtcattattaccagtaacaccaacatgtgttatgtcatcgacgggaacacgaccacgttcgagcataagcagccgttggaggacaggatgtttaagctcgaattgctgactcggttgcctgatgactttggtaaggtgaccaaacaggaggtgcgtcaattcttcaggtggtctcaggatcacctgacccctgtgatcccagaattcctagtgcggaaggcggagtctcgcaaaagacccgccccttccggggaaggctatataagcccgacaaagcggcccgcgctcgcagagcagcagcaggcgtcggagagcgcggacccggttcccaccaggtatcgtatcaaatgctcgaaacattgcggtatggataaaatgttgtttccttgccaaatttgtgaatcgatgaacagagatattaatatttgtgctattcataaaacgaccgactgtaaagagtgtttccccgactacggggataaagatgatgtagaactacccccctgtacagaacacaacgtgtctcgttgttatcaatgtcattcgggcgaattgtatcgcgtgacttcggactctgacgagaaacctgcccccgagagtgatgaaggcaccgagccatcctatgctccctgcacgattcaccacctgatgggcaagagtcacgggttagtcacttgcgcggcgtgtcggttgaaaaatagtacgttgcatgatgacttggatgacggtgatctcgaacaataa

SEQ ID NO: 5180 - DNA, 960 bp, Artificial Sequence
  Description of Artificial Sequence: Synthetic polynucleotide
atggagctcgtggattggctcgtggagaaggggatcaccaccgagaaggaatggctgctggaaaacagagaaagctttcggagctttcaggcctcgagcaactcggcgcgtcagatcaagacggccctgcaaggcgccattcaggagatgcttctgaccaagacggcggaggactacctcgtcggaaaggatcccgtctcggacgacgacatccgtcagaaccgcatctacaagattctggaactgaaccactacgacccagcgtacgtggggagtattttggtcgggtggtgccagaagaaatggggcaagcgaaacacgctgtggctgttcggacatgcgaccaccggcaagaccaacatcgcggaggctattgcccatgctgtgccgttctatggatgcgttaactggaccaacgagaactttccgttcaacgactgcgtcgaaaaaatgattatctggtgggaggagggcaaaatgaccgccaaagtggtggaaacagccaaggcgattctgggaggatctcgggtgagagtggaccaaaaatgcaaagcttcggttccgatcgaaccgacgccggtcattattaccagtaacaccaacatgtgttatgtcatcgacgggaacacgaccacgttcgagcataagcagccgttggaggacaggatgtttaagctcgaattgctgactcggttgcctgatgactttggtaaggtgaccaaacaggaggtgcgtcaattcttcaggtggtctcaggatcacctgacccctgtgatcccagaattcctagtgcggaaggcggagtctcgcaaaagacccgccccttccggggaaggctatataagcccgacaaagcggcccgcgctcgcagagcagcagcaggcgtcggagagcgcggacccggttcccaccagattggttggagcggttggtcaaaaagggagtgaatgctgcagctga

SEQ ID NO: 5181 - DNA, 1608 bp, Artificial Sequence
  Description of Artificial Sequence: Synthetic polynucleotide
atggctgaaggaggtggcggcccagtgggcgatgcaggccagggtgccgatggagtgggcaattcctccggaaattggcattgcgattcccaatggctggaaaacggagtcgtcactcgaaccacccgaacctgggtcttgcccagctacaacaaccacctgtacaaacgaatccaaggacccagcggaggcgacaacaacaacaaattctttggattcagcaccccctggggatactttgactacaatcgattccactgccacttttccccgcgagactggcaacgactcatcaacaacaactggggcatccgtcccaaagcgatgcgctttagactctttaacatccaggttaaagaggtcacggtccaagacttcaacaccaccatcggcaacaacctcaccagtacggtccaggtctttgcggacaaggactaccaactgccgtacgtcctcggatcggctaccgaaggcaccttcccgccgttcccagcggatatctacacgatcccgcagtacgggtactgcacgctaaactacaacaacgaggcggtggatcgttcggccttctactgtctggactactttccctcagacatgctgcggacaggaaataactttgagtttacttacaccttcgaggacgttcctttccatagcatgtttgcccacaaccagacgctagaccggctgatgaatcccctcgtggatcagtacctctgggctttcagctccgtcagccaagcaggctcatctggacgagctcttcattactcgcgggcgactaaaaccaacatggcggctcaatataggaactggttacctgggcctttcttccgtgatcagcaaatctttacgggcgctagcaacatcactaaaaataacgtctttagcgtttgggaaaaaggcaagcaatgggaactcgacaatcggaccaacctaatgcagcccggtcctgcggcagcgaccacctttagcggagaacctgaccgtcaagccatgcaaaacacgctggcttttagcaggaccgtctacgatcaaacgaccgccacgaccgatcgtaaccagatactcatcaccaacgaagacgaaatcagacccaccaactcggtcggtatcgacgcgtggggagcagttcccaccaacaaccagtcgatcgtgacccccggcactcgcgcggccgtcaacaatcaaggggcgcttcccgggatggtgtggcaaaacagagacatttaccctacagggacccatttggccaaaattcccgacactgacaatcacttccatccgtccccgcttattgggcggtttggctgcaagcatccccctccccagattttcattaaaaacacacccgtccctgccaacccttcggaaacgttccagacggccaaagtggcctccttcatcaaccagtactcgaccggacagtgcaccgtcgaaatcttttgggaactcaagaaggaaacctccaagcgctggaaccccgaaatccagttcacctccaactttggcaacgcggccgacatccagtttgccgtctccgacacgggatcctattccgaacctcgtcccatcggtacccgttaccttaccaaacctctgtaa

SEQ ID NO: 5182 - DNA, 2232 bp, Artificial Sequence
  Description of Artificial Sequence: Synthetic polynucleotide
atgtctctcatttctgatgcgattccagattggttggagcggttggtcaaaaagggagtgaatgctgcagctgatttctaccatttggaaagcggtcctcctcgtcctaaggcaaatcagcaaactcaagaatctcttgaaaaggacgattcgagaggtctcgtgttcccaggctacaattatctaggccctttcaacggtctagataaaggagaacccgtcaacgaggcagacgctgccgccttagaacacgacaaggcttacgacctcgaaatcaaggacgggcacaacccgtactttgagtacaacgaggccgacagacgtttccaggaacgtctcaaagacgatacctcctttggaggcaatttaggtaaagccatcttccaggccaaaaagagggttctcgaaccctttggtctggtggaagactcaaagacggctccgaccggagacaagcggaaaggcgaagacgaacctcgtttgcccgacacttcttcacagactcccaagaaaaacaagaagcctcgcaaggaaagaccttccggcggggcagaagatccgggcgaaggcacctcttccaacgctggagcagcagcacccgcctctagtgtgggatcatctatcatggctgaaggaggtggcggcccagtgggcgatgcaggccagggtgccgatggagtgggcaattcctccggaaattggcattgcgattcccaatggctggaaaacggagtcgtcactcgaaccacccgaacctgggtcttgcccagctacaacaaccacctgtacaaacgaatccaaggacccagcggaggcgacaacaacaacaaattctttggattcagcaccccctggggatactttgactacaatcgattccactgccacttttccccgcgagactggcaacgactcatcaacaacaactggggcatccgtcccaaagcgatgcgctttagactctttaacatccaggttaaagaggtcacggtccaagacttcaacaccaccatcggcaacaacctcaccagtacggtccaggtctttgcggacaaggactaccaactgccgtacgtcctcggatcggctaccgaaggcaccttcccgccgttcccagcggatatctacacgatcccgcagtacgggtactgcacgctaaactacaacaacgaggcggtggatcgttcggccttctactgtctggactactttccctcagacatgctgcggacaggaaataactttgagtttacttacaccttcgaggacgttcctttccatagcatgtttgcccacaaccagacgctagaccggctgatgaatcccctcgtggatcagtacctctgggctttcagctccgtcagccaagcaggctcatctggacgagctcttcattactcgcgggcgactaaaaccaacatggcggctcaatataggaactggttacctgggcctttcttccgtgatcagcaaatctttacgggcgctagcaacatcactaaaaataacgtctttagcgtttgggaaaaaggcaagcaatgggaactcgacaatcggaccaacctaatgcagcccggtcctgcggcagcgaccacctttagcggagaacctgaccgtcaagccatgcaaaacacgctggcttttagcaggaccgtctacgatcaaacgaccgccacgaccgatcgtaaccagatactcatcaccaacgaagacgaaatcagacccaccaactcggtcggtatcgacgcgtggggagcagttcccaccaacaaccagtcgatcgtgacccccggcactcgcgcggccgtcaacaatcaaggggcgcttcccgggatggtgtggcaaaacagagacatttaccctacagggacccatttggccaaaattcccgacactgacaatcacttccatccgtccccgcttattgggcggtttggctgcaagcatccccctccccagattttcattaaaaacacacccgtccctgccaacccttcggaaacgttccagacggccaaagtggcctccttcatcaaccagtactcgaccggacagtgcaccgtcgaaatcttttgggaactcaagaaggaaacctccaagcgctggaaccccgaaatccagttcacctccaactttggcaacgcggccgacatccagtttgccgtctccgacacgggatcctattccgaacctcgtcccatcggtacccgttaccttaccaaacctctgtaa

SEQ ID NO: 5183 - protein, 535 aa, Artificial Sequence
  Description of Artificial Sequence: Synthetic polypeptide
MAEGGGGPVGDAGQGADGVGNSSGNWHCDSQWLENGVVTRTTRTWVLPSYNNHLYKRIQGPSGGDNNNKFFGFSTPWGYFDYNRFHCHFSPRDWQRLINNNWGIRPKAMRFRLFNIQVKEVTVQDFNTTIGNNLTSTVQVFADKDYQLPYVLGSATEGTFPPFPADIYTIPQYGYCTLNYNNEAVDRSAFYCLDYFPSDMLRTGNNFEFTYTFEDVPFHSMFAHNQTLDRLMNPLVDQYLWAFSSVSQAGSSGRALHYSRATKTNMAAQYRNWLPGPFFRDQQIFTGASNITKNNVFSVWEKGKQWELDNRTNLMQPGPAAATTFSGEPDRQAMQNTLAFSRTVYDQTTATTDRNQILITNEDEIRPTNSVGIDAWGAVPTNNQSIVTPGTRAAVNNQGALPGMVWQNRDIYPTGTHLAKIPDTDNHFHPSPLIGRFGCKHPPPQIFIKNTPVPANPSETFQTAKVASFINQYSTGQCTVEIFWELKKETSKRWNPEIQFTSNFGNAADIQFAVSDTGSYSEPRPIGTRYLTKPL

SEQ ID NO: 5184 - protein, 440 aa, Artificial Sequence
  Description of Artificial Sequence: Synthetic polypeptide
MELVDWLVEKGITTEKEWLLENRESFRSFQASSNSARQIKTALQGAIQEMLLTKTAEDYLVGKDPVSDDDIRQNRIYKILELNHYDPAYVGSILVGWCQKKWGKRNTLWLFGHATTGKTNIAEAIAHAVPFYGCVNWTNENFPFNDCVEKMIIWWEEGKMTAKVVETAKAILGGSRVRVDQKCKASVPIEPTPVIITSNTNMCYVIDGNTTTFEHKQPLEDRMFKLELLTRLPDDFGKVTKQEVRQFFRWSQDHLTPVIPEFLVRKAESRKRPAPSGEGYISPTKRPALAEQQQASESADPVPTRYRIKCSKHCGMDKMLFPCQICESMNRDINICAIHKTTDCKECFPDYGDKDDVELPPCTEHNVSRCYQCHSGELYRVTSDSDEKPAPESDEGTEPSYAPCTIHHLMGKSHGLVTCAACRLKNSTLHDDLDDGDLEQ

SEQ ID NO: 5185 - protein, 319 aa, Artificial Sequence
  Description of Artificial Sequence: Synthetic polypeptide
MELVDWLVEKGITTEKEWLLENRESFRSFQASSNSARQIKTALQGAIQEMLLTKTAEDYLVGKDPVSDDDIRQNRIYKILELNHYDPAYVGSILVGWCQKKWGKRNTLWLFGHATTGKTNIAEAIAHAVPFYGCVNWTNENFPFNDCVEKMIIWWEEGKMTAKVVETAKAILGGSRVRVDQKCKASVPIEPTPVIITSNTNMCYVIDGNTTTFEHKQPLEDRMFKLELLTRLPDDFGKVTKQEVRQFFRWSQDHLTPVIPEFLVRKAESRKRPAPSGEGYISPTKRPALAEQQQASESADPVPTRLVGAVGQKGSECCS

SEQ ID NO: 5186 - protein, 662 aa, Artificial Sequence
  Description of Artificial Sequence: Synthetic polypeptide
MRSYYEVIVQLPNDVESQVPGISDSFVNWITSREWTLPEDADWDLDQVDQVQLTLGDKIQREIRTHWGTMAKEPDFHYFIQLEQGEVFFHLHVLLETCSVKPMVLGRYIRHIQQKIVSKVYCATSLRWKDGCVVTKTKNFGGANKVRAESYIPAYLIPKQQPEVQWAWTNVPEYIKACLHRELRASLARLHFEEAGVSQSKENLARTADGAPVMPTRVSKRYMELVDWLVEKGITTEKEWLLENRESFRSFQASSNSARQIKTALQGAIQEMLLTKTAEDYLVGKDPVSDDDIRQNRIYKILELNHYDPAYVGSILVGWCQKKWGKRNTLWLFGHATTGKTNIAEAIAHAVPFYGCVNWTNENFPFNDCVEKMIIWWEEGKMTAKVVETAKAILGGSRVRVDQKCKASVPIEPTPVIITSNTNMCYVIDGNTTTFEHKQPLEDRMFKLELLTRLPDDFGKVTKQEVRQFFRWSQDHLTPVIPEFLVRKAESRKRPAPSGEGYISPTKRPALAEQQQASESADPVPTRYRIKCSKHCGMDKMLFPCQICESMNRDINICAIHKTTDCKECFPDYGDKDDVELPPCTEHNVSRCYQCHSGELYRVTSDSDEKPAPESDEGTEPSYAPCTIHHLMGKSHGLVTCAACRLKNSTLHDDLDDGDLEQ

SEQ ID NO: 5187 - protein, 541 aa, Artificial Sequence
  Description of Artificial Sequence: Synthetic polypeptide
MRSYYEVIVQLPNDVESQVPGISDSFVNWITSREWTLPEDADWDLDQVDQVQLTLGDKIQREIRTHWGTMAKEPDFHYFIQLEQGEVFFHLHVLLETCSVKPMVLGRYIRHIQQKIVSKVYCATSLRWKDGCVVTKTKNFGGANKVRAESYIPAYLIPKQQPEVQWAWTNVPEYIKACLHRELRASLARLHFEEAGVSQSKENLARTADGAPVMPTRVSKRYMELVDWLVEKGITTEKEWLLENRESFRSFQASSNSARQIKTALQGAIQEMLLTKTAEDYLVGKDPVSDDDIRQNRIYKILELNHYDPAYVGSILVGWCQKKWGKRNTLWLFGHATTGKTNIAEAIAHAVPFYGCVNWTNENFPFNDCVEKMIIWWEEGKMTAKVVETAKAILGGSRVRVDQKCKASVPIEPTPVIITSNTNMCYVIDGNTTTFEHKQPLEDRMFKLELLTRLPDDFGKVTKQEVRQFFRWSQDHLTPVIPEFLVRKAESRKRPAPSGEGYISPTKRPALAEQQQASESADPVPTRLVGAVGQKGSECCS

SEQ ID NO: 5188 - protein, 743 aa, Artificial Sequence
  Description of Artificial Sequence: Synthetic polypeptide
MSLISDAIPDWLERLVKKGVNAAADFYHLESGPPRPKANQQTQESLEKDDSRGLVFPGYNYLGPFNGLDKGEPVNEADAAALEHDKAYDLEIKDGHNPYFEYNEADRRFQERLKDDTSFGGNLGKAIFQAKKRVLEPFGLVEDSKTAPTGDKRKGEDEPRLPDTSSQTPKKNKKPRKERPSGGAEDPGEGTSSNAGAAAPASSVGSSIMAEGGGGPVGDAGQGADGVGNSSGNWHCDSQWLENGVVTRTTRTWVLPSYNNHLYKRIQGPSGGDNNNKFFGFSTPWGYFDYNRFHCHFSPRDWQRLINNNWGIRPKAMRFRLFNIQVKEVTVQDFNTTIGNNLTSTVQVFADKDYQLPYVLGSATEGTFPPFPADIYTIPQYGYCTLNYNNEAVDRSAFYCLDYFPSDMLRTGNNFEFTYTFEDVPFHSMFAHNQTLDRLMNPLVDQYLWAFSSVSQAGSSGRALHYSRATKTNMAAQYRNWLPGPFFRDQQIFTGASNITKNNVFSVWEKGKQWELDNRTNLMQPGPAAATTFSGEPDRQAMQNTLAFSRTVYDQTTATTDRNQILITNEDEIRPTNSVGIDAWGAVPTNNQSIVTPGTRAAVNNQGALPGMVWQNRDIYPTGTHLAKIPDTDNHFHPSPLIGRFGCKHPPPQIFIKNTPVPANPSETFQTAKVASFINQYSTGQCTVEIFWELKKETSKRWNPEIQFTSNFGNAADIQFAVSDTGSYSEPRPIGTRYLTKPL

SEQ ID NO: 5189 - protein, 598 aa, Artificial Sequence
  Description of Artificial Sequence: Synthetic polypeptide
TAPTGDKRKGEDEPRLPDTSSQTPKKNKKPRKERPSGGAEDPGEGTSSNAGAAAPASSVGSSIMAEGGGGPVGDAGQGADGVGNSSGNWHCDSQWLENGVVTRTTRTWVLPSYNNHLYKRIQGPSGGDNNNKFFGFSTPWGYFDYNRFHCHFSPRDWQRLINNNWGIRPKAMRFRLFNIQVKEVTVQDFNTTIGNNLTSTVQVFADKDYQLPYVLGSATEGTFPPFPADIYTIPQYGYCTLNYNNEAVDRSAFYCLDYFPSDMLRTGNNFEFTYTFEDVPFHSMFAHNQTLDRLMNPLVDQYLWAFSSVSQAGSSGRALHYSRATKTNMAAQYRNWLPGPFFRDQQIFTGASNITKNNVFSVWEKGKQWELDNRTNLMQPGPAAATTFSGEPDRQAMQNTLAFSRTVYDQTTATTDRNQILITNEDEIRPTNSVGIDAWGAVPTNNQSIVTPGTRAAVNNQGALPGMVWQNRDIYPTGTHLAKIPDTDNHFHPSPLIGRFGCKHPPPQIFIKNTPVPANPSETFQTAKVASFINQYSTGQCTVEIFWELKKETSKRWNPEIQFTSNFGNAADIQFAVSDTGSYSEPRPIGTRYLTKPL

SEQ ID NO: 5190 - DNA, 4694 bp, Artificial Sequence
  Description of Artificial Sequence: Synthetic polynucleotide
tggccagtttccaagacaggctcgctcgctcactcgggccggggccccaaaggggcccctagcgaccgcttcgcggtcgcggcccgagtgagcgagcgagcctgtcttggaaactggccagcactccggtgaggtaatgccgtcacgtggtcgggaatgggaacgggaaatctcgcgagaacgtaaacaaatataagacggcgccacacggcgctgcgtcatacgcgcgcgcgcaccggcgagatgaggtcgtactacgaggtcatcgttcagctgcccaacgacgtcgagagtcaggtacctggaatctccgattcgttcgtcaactggattacgtcgcgagaatggacgttgcctgaggacgccgattgggatttggaccaggtcgatcaagttcaactgacgctcggcgacaaaatccaacgggagattcgaactcattgggggacgatggccaaagaaccggactttcactattttatccaactggaacaaggtgaggtgttctttcatttacacgtcctgctggaaacgtgttccgtaaagccgatggtactcggaagatatatccgacatattcaacaaaaaattgtgagtaaagtctactgcgccacgagcctacgatggaaggatggatgcgtggtgaccaagaccaaaaatttcgggggcgcgaacaaggtccgggccgagtcgtatattcccgcctacctgatcccgaaacagcaaccggaagtgcagtgggcgtggactaacgtgcccgagtatataaaagcgtgcttgcaccgagaactgcgtgccagtctcgcgcgacttcacttcgaggaggcgggcgtctcgcaatccaaggaaaatctcgcgagaactgcagacggcgctcccgtgatgccgacccgcgtcagcaaacgctacatggagctcgtggattggctcgtggagaaggggatcaccaccgagaaggaatggctgctggaaaacagagaaagctttcggagctttcaggcctcgagcaactcggcgcgtcagatcaagacggccctgcaaggcgccattcaggagatgcttctgaccaagacggcggaggactacctcgtcggaaaggatcccgtctcggacgacgacatccgtcagaaccgcatctacaagattctggaactgaaccactacgacccagcgtacgtggggagtattttggtcgggtggtgccagaagaaatggggcaagcgaaacacgctgtggctgttcggacatgcgaccaccggcaagaccaacatcgcggaggctattgcccatgctgtgccgttctatggatgcgttaactggaccaacgagaactttccgttcaacgactgcgtcgaaaaaatgattatctggtgggaggagggcaaaatgaccgccaaagtggtggaaacagccaaggcgattctgggaggatctcgggtgagagtggaccaaaaatgcaaagcttcggttccgatcgaaccgacgccggtcattattaccagtaacaccaacatgtgttatgtcatcgacgggaacacgaccacgttcgagcataagcagccgttggaggacaggatgtttaagctcgaattgctgactcggttgcctgatgactttggtaaggtgaccaaacaggaggtgcgtcaattcttcaggtggtctcaggatcacctgacccctgtgatcccagaattcctagtgcggaaggcggagtctcgcaaaagacccgccccttccggggaaggctatataagcccgacaaagcggcccgcgctcgcagagcagcagcaggcgtcggagagcgcggacccggttcccaccaggtatcgtatcaaatgctcgaaacattgcggtatggataaaatgttgtttccttgccaaatttgtgaatcgatgaacagagatattaatatttgtgctattcataaaacgaccgactgtaaagagtgtttccccgactacggggataaagatgatgtagaactacccccctgtacagaacacaacgtgtctcgttgttatcaatgtcattcgggcgaattgtatcgcgtgacttcggactctgacgagaaacctgcccccgagagtgatgaaggcaccgagccatcctatgctccctgcacgattcaccacctgatgggcaagagtcacgggttagtcacttgcgcggcgtgtcggttgaaaaatagtacgttgcatgatgacttggatgacggtgatctcgaacaataaatgattgaaatgtagccatgtctctcatttctgatgcgattccagattggttggagcggttggtcaaaaagggagtgaatgctgcagctgatttctaccatttggaaagcggtcctcctcgtcctaaggcaaatcagcaaactcaagaatctcttgaaaaggacgattcgagaggtctcgtgttcccaggctacaattatctaggccctttcaacggtctagataaaggagaacccgtcaacgaggcagacgctgccgccttagaacacgacaaggcttacgacctcgaaatcaaggacgggcacaacccgtactttgagtacaacgaggccgacagacgtttccaggaacgtctcaaagacgatacctcctttggaggcaatttaggtaaagccatcttccaggccaaaaagagggttctcgaaccctttggtctggtggaagactcaaagacggctccgaccggagacaagcggaaaggcgaagacgaacctcgtttgcccgacacttcttcacagactcccaagaaaaacaagaagcctcgcaaggaaagaccttccggcggggcagaagatccgggcgaaggcacctcttccaacgctggagcagcagcacccgcctctagtgtgggatcatctatcatggctgaaggaggtggcggcccagtgggcgatgcaggccagggtgccgatggagtgggcaattcctccggaaattggcattgcgattcccaatggctggaaaacggagtcgtcactcgaaccacccgaacctgggtcttgcccagctacaacaaccacctgtacaaacgaatccaaggacccagcggaggcgacaacaacaacaaattctttggattcagcaccccctggggatactttgactacaatcgattccactgccacttttccccgcgagactggcaacgactcatcaacaacaactggggcatccgtcccaaagcgatgcgctttagactctttaacatccaggttaaagaggtcacggtccaagacttcaacaccaccatcggcaacaacctcaccagtacggtccaggtctttgcggacaaggactaccaactgccgtacgtcctcggatcggctaccgaaggcaccttcccgccgttcccagcggatatctacacgatcccgcagtacgggtactgcacgctaaactacaacaacgaggcggtggatcgttcggccttctactgtctggactactttccctcagacatgctgcggacaggaaataactttgagtttacttacaccttcgaggacgttcctttccatagcatgtttgcccacaaccagacgctagaccggctgatgaatcccctcgtggatcagtacctctgggctttcagctccgtcagccaagcaggctcatctggacgagctcttcattactcgcgggcgactaaaaccaacatggcggctcaatataggaactggttacctgggcctttcttccgtgatcagcaaatctttacgggcgctagcaacatcactaaaaataacgtctttagcgtttgggaaaaaggcaagcaatgggaactcgacaatcggaccaacctaatgcagcccggtcctgcggcagcgaccacctttagcggagaacctgaccgtcaagccatgcaaaacacgctggcttttagcaggaccgtctacgatcaaacgaccgccacgaccgatcgtaaccagatactcatcaccaacgaagacgaaatcagacccaccaactcggtcggtatcgacgcgtggggagcagttcccaccaacaaccagtcgatcgtgacccccggcactcgcgcggccgtcaacaatcaaggggcgcttcccgggatggtgtggcaaaacagagacatttaccctacagggacccatttggccaaaattcccgacactgacaatcacttccatccgtccccgcttattgggcggtttggctgcaagcatccccctccccagattttcattaaaaacacacccgtccctgccaacccttcggaaacgttccagacggccaaagtggcctccttcatcaaccagtactcgaccggacagtgcaccgtcgaaatcttttgggaactcaagaaggaaacctccaagcgctggaaccccgaaatccagttcacctccaactttggcaacgcggccgacatccagtttgccgtctccgacacgggatcctattccgaacctcgtcccatcggtacccgttaccttaccaaacctctgtaaattaaacccttcaataaaccgtttatgcgtaactgtatttccgtctcctgtcgttattcagtcacatgatgcggcattacctcaccggagtgctggccagtttccaagacaggctcgctcgctcactcgggccggggccccaaaggggcccctagcgaccgcttcgcggtcgcggcccgagtgagcgagcgagcctgtcttggaaactggcca

SEQ ID NO: 5191 - DNA, 2211 bp, Artificial Sequence
  Description of Artificial Sequence: Synthetic polynucleotide
atggctgctgatggttatcttccagattggctcgaggacactctctctgaaggaataagacagtggtggaagctcaaacctggcccaccaccaccaaagcccgcagagcggcataaggacgacagcaggggtcttgtgcttcctgggtacaagtacctcggacccttcaacggactcgacaagggagagccggtcaacgaggcagacgcagcggccctcgagcacgacaaggcctacgaccagcagctcaaggccggtgacaacccctacctcaagtacaaccacgccgacgcggagttccagcagcggcttcagggcgacacatcgtttgggggcaacctcggcagagcagtcttccaggccaaaaagagggttcttgaacctcttggtctggttgagcaagcgggtgagacggctcctggaaagaagagaccgttgattgaatccccccagcagcccgactcctccacgggtatcggcaaaaaaggcaagcagccggctaaaaagagactcaattttggtcagactggcgactcagagtcagtccccgacccacaacctctcggagaacctccagcaacccccgctgctgtgggacctactacaatggcttcaggtggtggcgcaccaatggcagacaataacgaaggcgccgacggagtgggtaatgcctcaggaaattggcattgcgattccacatggctgggcgacagagtcatcaccaccagcacccgcacctgggccttgcccacctacaataaccacctctacaagcaaatctccagtgcttcaacgggggccagcaacgacaaccactacttcggctacagcaccccctgggggtattttgacttcaacagattccactgccacttttcaccacgtgactggcagcgactcatcaacaacaattggggattccggcccaagagactcaacttcaaactcttcaacatccaagtcaaggaggtcacgacgaatgatggcgtcacaaccatcgctaataaccttaccagcacggttcaagtcttctcggactcagactatcagctcccgtacgtgctcgggtcggctcacgagggctgcctcccgccgttcccagcagacgtcttcatggtgccacagtatggatacctcaccctgaacaacgggagtcaggcagtaggacgctcttcattttactgcctggagtactttccttctcagatgctgcgtaccggaaacaactttaccttcagctacacttttgaggacgttcctttccacagcagctacgctcacagccagagtctggaccgtctcatgaatcctctcatcgaccagtacctgtattacctgaacagaactcagaatcagtccggaagtgcccaaaacaaggacttgctgtttagccgggggtctccagctggcatgtctgttcagcccaaaaactggctacctggaccctgttatcggcagcagcgcgtttctaaaacaaaaacagacaacaacaacagcaactttacctggactggtgcttcaaaatataaccttaatgggcgtgaatctataatcaaccctggcactgctatggcctcacacaaagacgacaaagacaagttctttcccatgagcggtgtcatgatttttggaaaggagagcgccggagcttcaaacactgcattggacaatgtcatgatcacagacgaagaggaaatcaaagccactaaccccgtggccaccgaaagatttgggactgtggcagtcaatctccagagcagcagcacagaccctgcgaccggagatgtgcatgttatgggagccttacctggaatggtgtggcaagacagagacgtatacctgcagggtcccatttgggccaaaattcctcacacagatggacactttcacccgtctcctcttatgggcggctttggactcaagaacccgcctcctcagatcctcatcaaaaacacgcctgttcctgcgaatcctccggcggagttttcagctacaaagtttgcttcattcatcacccaatactccacaggacaagtgagtgtggaaattgaatgggagctgcagaaagaaaacagcaagcgctggaatcccgaagtgcagtacacatccaattatgcaaaatctgccaacgttgattttactgtggacaacaatggactttatactgagcctcgccccattggcacccgttacctcacccgtcccctgtaa

SEQ ID NO: 5192 - protein, 736 aa, Artificial Sequence
  Description of Artificial Sequence: Synthetic polypeptide
MAADGYLPDWLEDTLSEGIRQWWKLKPGPPPPKPAERHKDDSRGLVLPGYKYLGPFNGLDKGEPVNEADAAALEHDKAYDQQLKAGDNPYLKYNHADAEFQQRLQGDTSFGGNLGRAVFQAKKRVLEPLGLVEQAGETAPGKKRPLIESPQQPDSSTGIGKKGKQPAKKRLNFGQTGDSESVPDPQPLGEPPATPAAVGPTTMASGGGAPMADNNEGADGVGNASGNWHCDSTWLGDRVITTSTRTWALPTYNNHLYKQISSASTGASNDNHYFGYSTPWGYFDFNRFHCHFSPRDWQRLINNNWGFRPKRLNFKLFNIQVKEVTTNDGVTTIANNLTSTVQVFSDSDYQLPYVLGSAHEGCLPPFPADVFMVPQYGYLTLNNGSQAVGRSSFYCLEYFPSQMLRTGNNFTFSYTFEDVPFHSSYAHSQSLDRLMNPLIDQYLYYLNRTQNQSGSAQNKDLLFSRGSPAGMSVQPKNWLPGPCYRQQRVSKTKTDNNNSNFTWTGASKYNLNGRESIINPGTAMASHKDDKDKFFPMSGVMIFGKESAGASNTALDNVMITDEEEIKATNPVATERFGTVAVNLQSSSTDPATGDVHVMGALPGMVWQDRDVYLQGPIWAKIPHTDGHFHPSPLMGGFGLKNPPPQILIKNTPVPANPPAEFSATKFASFITQYSTGQVSVEIEWELQKENSKRWNPEVQYTSNYAKSANVDFTVDNNGLYTEPRPIGTRYLTRPL

SEQ ID NO: 5193 - DNA, 2211 bp, Artificial Sequence
  Description of Artificial Sequence: Synthetic polynucleotide
atggcttccgatggttatcttccagattggctcgaggacaacctctctgagggcatccgcgagtggtgggacttgaaacctggagccccgaaacccaaagccaaccagcaaaagcaggacgacggccggggtctggtgcttcctggctacaagtacctcggacccttcaacggactcgacaagggggagcccgtcaacgcggcggatgcagcggccctcgagcacgacaaggcctacgaccagcagctcagagcgggtgacaatccgtacctgcggtataaccacgccgacgccgagtttcaggagcgtctgcaagaagatacgtcttttgggggcaacctcgggcgagcagtcttccaggccaagaagagggttctcgaaccttttggtctggttgaggaaggtgctaagacggctcctggaaagaaacgtccggtagagcagtcgccacaagagccagactcctcctcgggcattggcaagacaggccagcagcccgctaaaaagagactcaattttggtcagactggcgactcagagtcagtccccgacccacaacctctcggagaacctccagcaacccccgctgctgtgggacctactacaatggcttcaggcggtggcgcaccaatggcagacaataacgaaggcgccgacggagtgggtaatgcctcaggaaattggcattgcgattccacatggctgggcgacagagtcatcaccaccagcacccgaacatgggccttgcccacctataacaaccacctctacaagcaaatctccagtgcttcaacgggggccagcaacgacaaccactacttcggctacagcaccccctgggggtattttgatttcaacagattccactgccatttctcaccacgtgactggcagcgactcatcaacaacaattggggattccggcccaagagactcaacttcaaactcttcaacatccaagtcaaggaggtcacgacgaatgatggcgtcacaaccatcgctaataaccttaccagcacggttcaagtcttctcggactcggagtaccagcttccgtacgtcctcggctctgcgcaccagggctgcctccctccgttcccggcggacgtgttcatgattccgcagtacggctacctaacgctcaacaatggcagccaggcagtgggacggtcatccttttactgcctggaatatttcccatcgcagatgctgagaacgggcaataactttaccttcagctacaccttcgaggacgtgcctttccacagcagctacgcgcacagccagagcctggaccggctgatgaatcctctcatcgaccagtacctgtattacctgaacagaactcagaatcagtccggaagtgcccaaaacaaggacttgctgtttagccgggggtctccagctggcatgtctgttcagcccaaaaactggctacctggaccctgttaccggcagcagcgcgtttctaaaacaaaaacagacaacaacaacagcaactttacctggactggtgcttcaaaatataaccttaatgggcgtgaatctataatcaaccctggcactgctatggcctcacacaaagacgacaaagacaagttctttcccatgagcggtgtcatgatttttggaaaggagagcgccggagcttcaaacactgcattggacaatgtcatgatcacagacgaagaggaaatcaaagccactaaccccgtggccaccgaaagatttgggactgtggcagtcaatctccagagcagcagcacagaccctgcgaccggagatgtgcatgttatgggagccttacctggaatggtgtggcaagacagagacgtatacctgcagggtcccatttgggccaaaattcctcacacagatggacactttcacccgtctcctcttatgggcggctttggacttaagcacccgcctcctcagatcctcatcaaaaacacgcctgttcctgcgaatcctccggcagagttttcggctacaaagtttgcttcattcatcacccagtattctactggccaagtcagcgtggagattgaatgggagctgcagaaagaaaacagcaaacgctggaatcccgaagtgcagtatacatctaactatgcaaaatctgccaacgttgatttcactgtggacaacaatggactttatactgagcctcgtcccattggcacccgttacctcacccgtcccctgtaa

SEQ ID NO: 5194 - protein, 736 aa, Artificial Sequence
  Description of Artificial Sequence: Synthetic polypeptide
MASDGYLPDWLEDNLSEGIREWWDLKPGAPKPKANQQKQDDGRGLVLPGYKYLGPFNGLDKGEPVNAADAAALEHDKAYDQQLRAGDNPYLRYNHADAEFQERLQEDTSFGGNLGRAVFQAKKRVLEPFGLVEEGAKTAPGKKRPVEQSPQEPDSSSGIGKTGQQPAKKRLNFGQTGDSESVPDPQPLGEPPATPAAVGPTTMASGGGAPMADNNEGADGVGNASGNWHCDSTWLGDRVITTSTRTWALPTYNNHLYKQISSASTGASNDNHYFGYSTPWGYFDFNRFHCHFSPRDWQRLINNNWGFRPKRLNFKLFNIQVKEVTTNDGVTTIANNLTSTVQVFSDSEYQLPYVLGSAHQGCLPPFPADVFMIPQYGYLTLNNGSQAVGRSSFYCLEYFPSQMLRTGNNFTFSYTFEDVPFHSSYAHSQSLDRLMNPLIDQYLYYLNRTQNQSGSAQNKDLLFSRGSPAGMSVQPKNWLPGPCYRQQRVSKTKTDNNNSNFTWTGASKYNLNGRESIINPGTAMASHKDDKDKFFPMSGVMIFGKESAGASNTALDNVMITDEEEIKATNPVATERFGTVAVNLQSSSTDPATGDVHVMGALPGMVWQDRDVYLQGPIWAKIPHTDGHFHPSPLMGGFGLKHPPPQILIKNTPVPANPPAEFSATKFASFITQYSTGQVSVEIEWELQKENSKRWNPEVQYTSNYAKSANVDFTVDNNGLYTEPRPIGTRYLTRPL

SEQ ID NO: 5195 - DNA, 2211 bp, Artificial Sequence
  Description of Artificial Sequence: Synthetic polynucleotide
atggctgctgatggttatcttccagattggctcgaggacactctctctgaaggaataagacagtggtggaagctcaaacctggcccaccaccaccaaagcccgcagagcggcataaggacgacagcaggggtcttgtgcttcctgggtacaagtacctcggacccttcaacggactcgacaagggagagccggtcaacgaggcagacgcagcggccctcgagcacgacaaggcctacgaccagcagctcaaggccggtgacaacccctacctcaagtacaaccacgccgacgcggagttccagcagcggcttcagggcgacacatcgtttgggggcaacctcggcagagcagtcttccaggccaaaaagagggttcttgaacctcttggtctggttgagcaagcgggtgagacggctcctggaaagaagagaccgttgattgaatccccccagcagcccgactcctccacgggtatcggcaaaaaaggcaagcagccggctaaaaagagactcaattttggtcagactggcgactcagagtcagtccccgacccacaacctctcggagaacctccagcaacccccgctgctgtgggacctactacaatggcttcaggtggtggcgcaccaatggcagacaataacgaaggcgccgacggagtgggtaatgcctcaggaaattggcattgcgattccacatggctgggcgacagagtcatcaccaccagcacccgcacctgggccttgcccacctacaataaccacctctacaagcaaatctccagtgcttcaacgggggccagcaacgacaaccactacttcggctacagcaccccctgggggtattttgacttcaacagattccactgccacttttcaccacgtgactggcagcgactcatcaacaacaattggggattccggcccaagagactcaacttcaaactcttcaacatccaagtcaaggaggtcacgacgaatgatggcgtcacaaccatcgctaataaccttaccagcacggttcaagtcttctcggactcagactatcagctcccgtacgtgctcgggtcggctcacgagggctgcctcccgccgttcccagcagacgtcttcatggtgccacagtatggatacctcaccctgaacaacgggagtcaggcagtaggacgctcttcattttactgcctggagtactttccttctcagatgctgcgtaccggaaacaactttaccttcagctacacttttgaggacgttcctttccacagcagctacgctcacagccagagtctggaccgtctcatgaatcctctcatcgaccagtacctgtattacctgaacagaactcagaatcagtccggaagtgcccaaaacaaggacttgctgtttagccgggggtctccaactggcatgtctgttcagcccaaaaactggctacctggaccctgttatcggcagcagcgcgtttctaaaacaaaaacagacaacaacaacagcaactttacctggactggtgcttcaaaatataaccttaatgggcgtgaatctataatcaaccctggcactgctatggcctcacacaaagacgacaaagacaagttctttcccatgagcggtgtcatgatttttggaaaggagagcgccggagcttcaaacactgcattggacaatgtcatgatcacagacgaagaggaaatcaaagccactaaccccgtggccactgaaagatttgggactgtggcagtcaatctccagagcagcagcacagaccctgcgaccggagatgtgcatgccatgggagccttacctggaatggtgtggcaagacagagacgtatacctgcagggtcctatttgggccaaaattcctcacacggatggacactttcacccgtctcctctcatgggcggctttggactcaagaacccgcctcctcagatcctcatcaaaaacacgcctgttcctgcgaatcctccggcggagttttcagctacaaagtttgcttcattcatcacccagtattccacaggacaagtgagcgtggagattgaatgggagctgcagaaagaaaacagcaaacgctggaatcccgaagtgcagtatacatctaactatgcaaaatctgccaacgttgatttcactgtggacaacaatggactttatactgagcctcgccccattggcacccgttacctcacccgtcccctgtaa

SEQ ID NO: 5196 - protein, 736 aa, Artificial Sequence
  Description of Artificial Sequence: Synthetic polypeptide
MAADGYLPDWLEDTLSEGIRQWWKLKPGPPPPKPAERHKDDSRGLVLPGYKYLGPFNGLDKGEPVNEADAAALEHDKAYDQQLKAGDNPYLKYNHADAEFQQRLQGDTSFGGNLGRAVFQAKKRVLEPLGLVEQAGETAPGKKRPLIESPQQPDSSTGIGKKGKQPAKKRLNFGQTGDSESVPDPQPLGEPPATPAAVGPTTMASGGGAPMADNNEGADGVGNASGNWHCDSTWLGDRVITTSTRTWALPTYNNHLYKQISSASTGASNDNHYFGYSTPWGYFDFNRFHCHFSPRDWQRLINNNWGFRPKRLNFKLFNIQVKEVTTNDGVTTIANNLTSTVQVFSDSDYQLPYVLGSAHEGCLPPFPADVFMVPQYGYLTLNNGSQAVGRSSFYCLEYFPSQMLRTGNNFTFSYTFEDVPFHSSYAHSQSLDRLMNPLIDQYLYYLNRTQNQSGSAQNKDLLFSRGSPTGMSVQPKNWLPGPCYRQQRVSKTKTDNNNSNFTWTGASKYNLNGRESIINPGTAMASHKDDKDKFFPMSGVMIFGKESAGASNTALDNVMITDEEEIKATNPVATERFGTVAVNLQSSSTDPATGDVHAMGALPGMVWQDRDVYLQGPIWAKIPHTDGHFHPSPLMGGFGLKNPPPQILIKNTPVPANPPAEFSATKFASFITQYSTGQVSVEIEWELQKENSKRWNPEVQYTSNYAKSANVDFTVDNNGLYTEPRPIGTRYLTRPL

SEQ ID NO: 5197 - DNA, 2211 bp, Artificial Sequence
  Description of Artificial Sequence: Synthetic polynucleotide
atggctgccgatggttatcttccagattggctcgaggacaacctctctgagggcattcgcgagtggtgggcgctgaaacctggagccccgaagcccaaagccaaccagcaaaagcaggacgacggccggggtctggtgcttcctggctacaagtacctcggacccttcaacggactcgacaagggggagcccgtcaacgcggcggatgcagcggccctcgagcacgacaaggcctacgaccagcagctcaaagcgggtgacaatccgtacctgcggtataaccacgccgacgccgagtttcaggagcgtctgcaagaagatacgtcttttgggggcaacctcgggcgagcagtcttccaggccaagaagcgggttctcgaacctctcggtctggttgaggaaggcgctaagacggctcctggaaagaaacgtccggtagagcaatcgccacaagagccagactcctcctcgggcatcggcaagacaggccagcagcccgctaaaaagagactcaattttggtcagactggcgactcagagtcagtccccgacccacaacctctcggagaacctccagcaacccccgctgctgtgggacctactacaatggcttcaggcggtggcgcaccaatggcagacaataacgaaggcgccgacggagtgggtaatgcctcaggaaattggcattgcgattccacatggctgggcgacagagtcatcaccaccagcacccgaacatgggccttgcccacctataacaaccacctctacaagcaaatctccagtgcttcgacgggggccagcaacgacaaccactacttcggctacagcaccccctgggggtattttgactttaacagattccactgccacttttcaccacgtgactggcagcgactcatcaacaacaactggggattccggcccaagagactcagcttcaagctcttcaacatccaggtcaaggaggtcacgacgaatgatggcgtcacaaccatcgctaataaccttaccagcacggttcaagtcttctcggactcggagtaccagcttccgtacgtcctcggctctgcgcaccagggctgcctccctccgttcccggcggacgtgttcatgattccgcaatacggctacctgacgctcaacaatggcagccaagccgtgggacgttcatccttttactgcctggaatatttcccttctcagatgctgagaacgggcaacaactttaccttcagctacacctttgaggaagtgcctttccacagcagctacgcgcacagccagagcctggaccggctgatgaatcctctcatcgatcaatacctgtattacctgaacagaactcaaaatcagtccggaagtgcccaaaacaaggacttgctgtttagccgtgggtctccagctggcatgtctgttcagcccaaaaactggctacctggaccctgttatcggcagcagcgcgtttctaaaacaaaaacagacaacaacaacagcaattttacctggactggtgcttcaaaatataacctcaatgggcgtgaatccatcatcaaccctggcactgctatggcctcacataaagacgacgaagacaagttctttcccatgagcggtgtcatgatttttggaaaagagagcgccggagcttcaaacactgcattggacaatgtcatgattacagacgaagaggaaattaaagccactaaccctgtggccaccgaaagatttgggaccgtggcagtcaatttccagagcagcagcacagaccctgcgaccggagatgtgcatgctatgggagcattacctggcatggtgtggcaagatagagacgtgtacctgcagggtcccatttgggccaaaattcctcacacagatggacactttcacccgtctcctcttatgggcggctttggactcaagaacccgcctcctcagatcctcatcaaaaacacgcctgttcctgcgaatcctccggcggagttttcagctacaaagtttgcttcattcatcacccaatactccacaggacaagtgagcgtggagattgaatgggagctgcagaaagaaaacagcaaacgctggaatcccgaagtgcagtatacatctaactatgcaaaatctgccaacattgatttcactgtggacaacaatggactttatactgagcctcgccccattggcacccgttacctcacccgtccccagtaa

SEQ ID NO: 5198 - protein, 736 aa, Artificial Sequence
  Description of Artificial Sequence: Synthetic polypeptide
MAADGYLPDWLEDNLSEGIREWWALKPGAPKPKANQQKQDDGRGLVLPGYKYLGPFNGLDKGEPVNAADAAALEHDKAYDQQLKAGDNPYLRYNHADAEFQERLQEDTSFGGNLGRAVFQAKKRVLEPLGLVEEGAKTAPGKKRPVEQSPQEPDSSSGIGKTGQQPAKKRLNFGQTGDSESVPDPQPLGEPPATPAAVGPTTMASGGGAPMADNNEGADGVGNASGNWHCDSTWLGDRVITTSTRTWALPTYNNHLYKQISSASTGASNDNHYFGYSTPWGYFDFNRFHCHFSPRDWQRLINNNWGFRPKRLSFKLFNIQVKEVTTNDGVTTIANNLTSTVQVFSDSEYQLPYVLGSAHQGCLPPFPADVFMIPQYGYLTLNNGSQAVGRSSFYCLEYFPSQMLRTGNNFTFSYTFEEVPFHSSYAHSQSLDRLMNPLIDQYLYYLNRTQNQSGSAQNKDLLFSRGSPAGMSVQPKNWLPGPCYRQQRVSKTKTDNNNSNFTWTGASKYNLNGRESIINPGTAMASHKDDEDKFFPMSGVMIFGKESAGASNTALDNVMITDEEEIKATNPVATERFGTVAVNFQSSSTDPATGDVHAMGALPGMVWQDRDVYLQGPIWAKIPHTDGHFHPSPLMGGFGLKNPPPQILIKNTPVPANPPAEFSATKFASFITQYSTGQVSVEIEWELQKENSKRWNPEVQYTSNYAKSANIDFTVDNNGLYTEPRPIGTRYLTRPQ

SEQ ID NO: 5199 - DNA, 2211 bp, Artificial Sequence
  Description of Artificial Sequence: Synthetic polynucleotide
atggctgccgatggttatcttccagattggctcgaggacaacctctctgagggcattcgcgagtggtgggacttgaaacctggagccccgaaacccaaagccaaccagcaaaagcaggacgacggccggggtctggtgcttcctggctacaagtacctcggacccttcaacggactcgacaagggggagcccgtcaacgcggcggatgcagcggccctcgagcacgacaaggcctacgaccagcagctcaaagcgggtgacaatccgtaccttcggtataaccacgccgacgccgagtttcaggagcgtctgcaagaagatacgtcttttgggggcaacctcgggcgagcagtcttccaggccaaaaagagggttctcgaacctctcggtctggttgaggaagcggctaagacggctcctggaaagaaacgtccggtagagcagtcgccacaagagccagactcctcctcgggcattggcaagacaggccagcagcccgctaaaaagagactcaattttggtcagactggcgactcagagtcagtccccgacccacaacctctcggagaacctcccgcagccccctcaggtgtgggatctcttacaatggcttcaggtggtggcgcaccaatggcagacaataacgaaggcgccgacggagtgggtaatgcctcaggaaattggcattgcgattccacatggctgggcgacagagtcatcaccaccagcacccgcacctgggccttgcccacctacaataaccacctctacaagcaaatctccagtgcttcaacgggggccagcaacgacaaccactacttcggctacagcaccccctgggggtattttgacttcaacagattccactgccacttttcaccacgtgactggcaaagactcatcaacaacaattggggattccggcccaagagactcaacttcaagctcttcaacatccaagtcaaggaggtcacgacgaatgatggcgtcacgaccatcgctaataaccttaccagcacggttcaagtcttctcggactcggagtaccagttgccgtacgtcctcggctctgcgcaccagggctgcctccctccgttcccggcggacgtgttcatgattccgcagtacggctacctaacgctcaacaatggcagccaggcagtgggacggtcatccttttactgcctggaatatttcccatcgcagatgctgagaacgggcaacaactttaccttcagctacacctttgaggaagtgcctttccacagcagctacgcgcacagccagagcctggaccggctgatgaatcctctcatcgaccagtacctgtattacctgaacagaactcaaaatcagtccggaagtgcccaaaacaaggacttgctgtttagccgtgggtctccagctggcatgtctgttcagcccaaaaactggctacctggaccctgttaccggcagcagtgcgtttctaaaacaaaaacagacaacaacaacagcaactttacctggactggtgcttcaaaatataaccttaatgggcgtgaatctataatcaaccctggcactgctatggcctcacacaaagacgacaaagacaagttctttcccatgagcggtgtcatgatttttggaaaggagagcgccggagcttcaaacactgcattggacaatgtcatgatcacagacgaagaggaaatcaaagccactaaccccgtggccaccgaaagatttgggactgtggcagtcaatctccagagcagcagcacagaccctgcgaccggagatgtgcatgttatgggagccttacctggaatggtgtggcaagacagagacgtatacctgcagggtcctatttgggccaaaattcctcacacagatggacactttcacccgtctcctcttatgggcggctttggactcaagaacccgcctcctcagatcctcatcaaaaacacgcctgttcctgcgaatcctccggcggagttttcagctacaaagtttgcttcattcatcacccaatactccacaggacaagtgagcgtggagattgaatgggagctgcagaaagaaaacagcaagcgctggaatcccgaagtgcagtacacatccaattatgcaaaatctgccaacgttgatttcactgtggacaacaatggactttatactgagcctcgccccattggcacccgttacctcacccgtcccctgtaa

SEQ ID NO: 5200 - protein, 736 aa, Artificial Sequence
  Description of Artificial Sequence: Synthetic polypeptide
MAADGYLPDWLEDNLSEGIREWWDLKPGAPKPKANQQKQDDGRGLVLPGYKYLGPFNGLDKGEPVNAADAAALEHDKAYDQQLKAGDNPYLRYNHADAEFQERLQEDTSFGGNLGRAVFQAKKRVLEPLGLVEEAAKTAPGKKRPVEQSPQEPDSSSGIGKTGQQPAKKRLNFGQTGDSESVPDPQPLGEPPAAPSGVGSLTMASGGGAPMADNNEGADGVGNASGNWHCDSTWLGDRVITTSTRTWALPTYNNHLYKQISSASTGASNDNHYFGYSTPWGYFDFNRFHCHFSPRDWQRLINNNWGFRPKRLNFKLFNIQVKEVTTNDGVTTIANNLTSTVQVFSDSEYQLPYVLGSAHQGCLPPFPADVFMIPQYGYLTLNNGSQAVGRSSFYCLEYFPSQMLRTGNNFTFSYTFEEVPFHSSYAHSQSLDRLMNPLIDQYLYYLNRTQNQSGSAQNKDLLFSRGSPAGMSVQPKNWLPGPCYRQQCVSKTKTDNNNSNFTWTGASKYNLNGRESIINPGTAMASHKDDKDKFFPMSGVMIFGKESAGASNTALDNVMITDEEEIKATNPVATERFGTVAVNLQSSSTDPATGDVHVMGALPGMVWQDRDVYLQGPIWAKIPHTDGHFHPSPLMGGFGLKNPPPQILIKNTPVPANPPAEFSATKFASFITQYSTGQVSVEIEWELQKENSKRWNPEVQYTSNYAKSANVDFTVDNNGLYTEPRPIGTRYLTRPL

SEQ ID NO: 5201 - DNA, 2211 bp, Artificial Sequence
  Description of Artificial Sequence: Synthetic polynucleotide
atggctgccgatggttatcttccagattggctcgaggacaacctctctgagggcattcgcgaatggtgggacttgaaacctggagccccgaaacccaaagtcaaccagcaaaagcaggacaacgctcggggtcttgtgcttccgggttacaaatacctcggacccttcaacggactcgacaagggggagcccgtcaacgcggcggacgcagcggccctcgagcacgacaaggcctacgaccagcagctcaaagcgggtgacaatccgtaccttcggtataaccacgccgacgccgagtttcaggagcgtctgcaagaagatacgtcttttgggggcaaccttggacgagcagtcttccaggccaagaagagggttctcgaaccttttggtctggttgaggaaggtgctaagacggctcctggaaagaaacgtccggtagagcagtcgccacaagagccagactcctcctcgggcattggcaagacaggccagcagcccgctaaaaagagactcaattttggtcagactggcgactcagagtcagtccccgacccacaacctctcggagaacctccagcaacccccgctgctgtgggacctactacaatggcttcaggcggtggcgcaccaatggcagacaataacgaaggcgccgacggagtgggtaatgcctcaggaaattggcattgcgattccacatggctgggcgacagagtcatcaccaccagcacccgcacctgggccttgcccacctacaataaccacctctacaagcaaatctccagtgcttcaacgggggccagcaacgacaaccactacttcggctacagcaccccctgggggtattttgacttcaacagattccactgccacttttcaccacgtgactggcaaagactcatcaacaacaattggggattccggcccaagagactcaacttcaagctcttcaacatccaagtcaaggaggtcacgacgaatgatggcgtcacgaccatcgctaataaccttaccagcacggttcaagtcttctcggactcggagtaccagttgccgtacgtcctcggctctgcgcaccagggctgcctccctccgttcccggcggacgtgttcatgattccgcaatacggctacctgacgctcaacaatggcagccaggcagtgggacggtcatccttttactgcctggaatatttcccatcgcagatgctgagaacgggcaataactttaccttcagctacacttttgaggacgttcctttccacagcagctacgctcacagccagagcctggaccggctgatgaatcctctcatcgaccagtacctgtattacctgaacagaactcagaatcagtccggaagtgcccaaaacaaggacttgctgtttagccgtgggtctccaactggcatgtctgttcagcccaaaaactggctacctggaccctgttatcggcagcagcgcgtttctaaaacaaaaacagacaacaacaacagcaactttacctggactggtgcttcaaaatataaccttaatgggcgtgaatctataatcaaccctggcactgctatggcctcacacaaagacgacgaagacaagttctttcccatgagcggtgtcatgatttttggaaaggagagcgccggagcttcaaacactgcattggacaatgtcatgatcacagacgaagaggaaatcaaagccactaaccccgtggccactgaaagatttgggactgtggcagtcaatctccagagcagcagcacagaccctgcgaccggagatgtgcatgccatgggagccttacctggaatggtgtggcaagacagagacgtatacctgcagggtcctatttgggccaaaattcctcacacggatggacactttcacccgtctcctctcatgggcggctttggacttaagcacccgcctcctcagatcctcatcaaaaacacgcctgttcctgcgaatcctccggcagagttttcggctacaaagtttgcttcattcatcacccagtattccacaggacaagtgagcgtggagattgaatgggagctgcagaaagaaaacagcaaacgctggaatcccgaagtgcagtatacatctaactatgcaaaatctgccaacgttgatttcactgtggacaacaatggactttatactgagcctcgccccattggcacccgttacctcacccgtcccctgtaa

SEQ ID NO: 5202 - protein, 736 aa, Artificial Sequence
  Description of Artificial Sequence: Synthetic polypeptide
MAADGYLPDWLEDNLSEGIREWWDLKPGAPKPKVNQQKQDNARGLVLPGYKYLGPFNGLDKGEPVNAADAAALEHDKAYDQQLKAGDNPYLRYNHADAEFQERLQEDTSFGGNLGRAVFQAKKRVLEPFGLVEEGAKTAPGKKRPVEQSPQEPDSSSGIGKTGQQPAKKRLNFGQTGDSESVPDPQPLGEPPATPAAVGPTTMASGGGAPMADNNEGADGVGNASGNWHCDSTWLGDRVITTSTRTWALPTYNNHLYKQISSASTGASNDNHYFGYSTPWGYFDFNRFHCHFSPRDWQRLINNNWGFRPKRLNFKLFNIQVKEVTTNDGVTTIANNLTSTVQVFSDSEYQLPYVLGSAHQGCLPPFPADVFMIPQYGYLTLNNGSQAVGRSSFYCLEYFPSQMLRTGNNFTFSYTFEDVPFHSSYAHSQSLDRLMNPLIDQYLYYLNRTQNQSGSAQNKDLLFSRGSPTGMSVQPKNWLPGPCYRQQRVSKTKTDNNNSNFTWTGASKYNLNGRESIINPGTAMASHKDDEDKFFPMSGVMIFGKESAGASNTALDNVMITDEEEIKATNPVATERFGTVAVNLQSSSTDPATGDVHAMGALPGMVWQDRDVYLQGPIWAKIPHTDGHFHPSPLMGGFGLKHPPPQILIKNTPVPANPPAEFSATKFASFITQYSTGQVSVEIEWELQKENSKRWNPEVQYTSNYAKSANVDFTVDNNGLYTEPRPIGTRYLTRPL

SEQ ID NO: 5203 - DNA, 2208 bp, Artificial Sequence
  Description of Artificial Sequence: Synthetic polynucleotide
  modified_base (955)..(955): a, c, t or g
  modified_base (971)..(972): a, c, t or g
  modified_base (981)..(981): a, c, t or g
  modified_base (986)..(986): a, c, t or g
  modified_base (1235)..(1235): a, c, t or g
  modified_base (1694)..(1696): a, c, t or g
  modified_base (1698)..(1698): a, c, t or g
  modified_base (1763)..(1765): a, c, t or g
  modified_base (1778)..(1778): a, c, t or g
  modified_base (2204)..(2204): a, c, t or g
atggctgccgatggttatcttccagattggctcgaggacaacctctctgagggcattcgcgaatggtgggacttgaaacctggagccccgaaacccaaagtcaaccagcaaaagcaggacaacgctcggggtcttgtgcttccgggttacaaatacctcggacccttcaacggactcgacaagggggagcccgtcaacgcggcggacgcagcggccctcgagcacgacaaggcctacgaccagcagctcaaagcgggtgacaatccgtaccttcggtataaccacgccgacgccgagtttcaggagcgtctgcaagaagatacgtcttttgggggcaaccttggacgagcagtcttccaggccaagaagagggttctcgaaccttttggtctggttgaggaaggtgctaagacggctcctggaaagaaacgtccggtagagcagtcgccacaagagccagactcctcctcgggcattggcaagacaggccagcagcccgctaaaaagagactcaattttggtcagactggcgactcagagtcagtccccgacccacaacctctcggagaacctccagcaacccccgctgctgtgggacctactacaatggcttcaggcggtggcgcaccaatggcagacaataacgaaggcgccgacggagtgggtaatgcctcaggaaattggcattgcgattccacatggctgggcgacagagtcatcaccaccagcacccgaacatgggccttgcccacctataacaaccacctctacaagcaaatctccagtgcttcaacgggggccagcaacgacaaccactacttcggctacagcaccccctgggggtattttgatttcaacagattccactgccacttttcaccacgtgactggcagcgactcatcaataacaattggggattccggcccaagagactcaacttcaaactcttcaacntccaagtcaaggaggnnacgacgaangatgncgtcacaaccatcgctaataaccttaccagcacggttcaagtcttctcggactcggagtaccagcttccgtacgtcctcggctctgcgcaccagggctgcctccctccgttcccggcggacgtgttcatgattccgcaatacggctacctgacgctcaacaatggcagccaggcagtgggacggtcatccttttactgcctggaatatttcccatcgcagatgctgagaacgggcaataactttacctncagctacacttttgaggacgttcctttccacagcagctacgctcacagccagagcctggaccggctgatgaatcctctcatcgaccagtacctgtattacctgaacagaactcagaatcagtccggaagtgcccaaaacaaggacttgctgtttagccgtgggtctccaactggcatgtctgttcagcccaaaaactggctacctggaccctgttatcggcagcagcgcgtttctaaaacaaaaacagacaacaacaacagcaactttacctggactggtgcttcaaaatataaccttaatgggcgtgaatctataatcaaccctggcactgctatggcctcacacaaagacgacgaagacaagttctttcccatgagcggtgtcatgatttttggaaaggagagcgccggagcttcaaacactgcattggacaatgtcatgatcacagacgaagagannncnaagccactaaccccgtggccactgaaagatttgggactgtggcagtcaatctccaagcagcacannnaccctgcgaccgnagatgtgcatgccatgggagccttacctggaatggtgtggcaagacagagacgtatacctgcagggtcctatttgggccaaaattcctcacacggatggacactttcacccgtctcctctcatgggcggctttggacttaagcacccgcctcctcagatcctcatcaaaaacacgcctgttcctgcgaatcctccggcagagttttcggctacaaagtttgcttcattcatcacccagtattccacaggacaagtgagcgtggagattgaatgggagctgcagaaagaaaacagcaaacgctggaatcccgaagtgcagtatacatctaactatgcaaaatctgccaacgttgatttcactgtggacaacaatggactttatactgagcctcgccccattggcacccgttacctcacccgtccccngtaa

SEQ ID NO: 5204 - protein, 723 aa, Artificial Sequence
  Description of Artificial Sequence: Synthetic polypeptide
MAADGYLPDWLEDNLSEGIREWWDLKPGAPKPKVNQQKQDNARGLVLPGYKYLGPFNGLDKGEPVNAADAAALEHDKAYDQQLKAGDNPYLRYNHADAEFQERLQEDTSFGGNLGRAVFQAKKRVLEPFGLVEEGAKTAPGKKRPVEQSPQEPDSSSGIGKTGQQPAKKRLNFGQTGDSESVPDPQPLGEPPATPAAVGPTTMASGGGAPMADNNEGADGVGNASGNWHCDSTWLGDRVITTSTRTWALPTYNNHLYKQISSASTGASNDNHYFGYSTPWGYFDFNRFHCHFSPRDWQRLINNNWGFRPKRLNFKLFNQVKETTDVTTIANNLTSTVQVFSDSEYQLPYVLGSAHQGCLPPFPADVFMIPQYGYLTLNNGSQAVGRSSFYCLEYFPSQMLRTGNNFTSYTFEDVPFHSSYAHSQSLDRLMNPLIDQYLYYLNRTQNQSGSAQNKDLLFSRGSPTGMSVQPKNWLPGPCYRQQRVSKTKTDNNNSNFTWTGASKYNLNGRESIINPGTAMASHKDDEDKFFPMSGVMIFGKESAGASNTALDNVMITDEEATNPVATERFGTVAVNLQSSPATDVHAMGALPGMVWQDRDVYLQGPIWAKIPHTDGHFHPSPLMGGFGLKHPPPQILIKNTPVPANPPAEFSATKFASFITQYSTGQVSVEIEWELQKENSKRWNPEVQYTSNYAKSANVDFTVDNNGLYTEPRPIGTRYLTRP

SEQ ID NO: 5205 - DNA, 2208 bp, Artificial Sequence
  Description of Artificial Sequence: Synthetic polynucleotide
atggctgccgatggttatcttccagattggctcgaggacactctctctgaaggaataagacagtggtggaagctcaaacctggcccaccaccaccaaagcccgcagagcggcataaggacgacagcaggggtcttgtgcttcctgggtacaagtacctcggacccttcaacggactcgacaagggagagccggtcaacgaggcagacgccgcggccctcgagcacgacaaagcctatgaccggcagctcgacagcggagacaacccgtacctcaagtacaaccacgccgacgcggagtttcaggagcgccttaaagaagatacgtcttttgggggcaacctcggacgagcagtcttccaggcgaaaaagagggttcttgaacctctgggcctggttgaggaacctgttaagacggctccgggaaaaaagaggccggtagagcactctcctgtggagccagactcctcctcgggaaccggaaaggcgggtcagcagcctgcaagaaaaagattgaattttggtcagactggagacgcagactcagtacctgacccccagcctctcggacagccaccagcagccccctctggtctgggaactaatacgatggctacaggcagtggcgcaccaatggcagacaataacgagggcgccgacggagtgggtaattcctcgggaaattggcattgcgattccacatggatgggcgacagagtcatcaccaccagcacccgaacctgggccctgcccacctacaacaaccacctctacaaacaaatttccagccaatcaggagcctcgaacgacaatcactactttggctacagcaccccttgggggtattttgacttcaacagattccactgccacttttcaccacgtgactggcaaagactcatcaacaacaactggggattccgacccaagagactcaagttcaagctctttaacattcaagtcaaagaggtcacgcagaatgacggtacgacgacgattgccaataaccttaccagcacggttcaggtgtttactgactcggagtaccagctcccgtacgtcctcggctcggcgcatcaaggatgcctcccgccgttcccagcagacgtcttcatggtgccacagtatggatacctcaccctgaacaacgggagtcaggcagtaggacgctcttcattttactgcctggagtactttccttctcagatgctgcgtaccggtaacaactttaccttcagctacacttttgaggacgttcctttccacagcagctacgctcacagccagagtctggaccgtctcatgaatcctctcatcgaccagtacctgtattacttgagcagaacagacgctccaagtggaaccaccacgcagtcaaggcttcagttttctcaggccggagcgagtgacattcgggaccagtctaggaactggcttcctggaccctgttaccgccagcagcgagtatcaaagacatctgcggataacaacaacagtgaatactcgtggactggagctaccaagtaccacctcaatggcagagactctctggtgaatccgggcccggccatggcaagccacaaggacgatgaagaaaagttttttcctcagagcggggttctcatctttgggaagcaaggctcagagaaaacaagtgtggacattgaaaaggtcatgattacagacgaagaggaaatcaggacaaccaatcccgtggctacggagcagtatggttctgtatctaccaacctccagagaggcaacagacaagcagctaccgcagatgtcaacacacaaggcgttcttccaggcatggtctggcaggacagagatgtgtaccttcaggggcccatctgggcaaagattccacacacggacggacattttcacccctctcccctcatgggtggattcggacttaaacaccctcctccacagattctcatcaagaacaccccggtacctgcgaatccttcgaccaccttcagtgcggcaaagtttgcttccttcatcacacagtactccacgggacaggtcagcgtggagatcgagtgggagctgcagaaggaaaacagcaaacgctggaatcccgaagttcagtacacttccaactacaacaagtctgttaatgtggactttactgtggacactaatggcgtgtattcagagcctcgccccattggcaccagatacctgactcgtaatctgtaa

SEQ ID NO: 5206 - protein, 735 aa, Artificial Sequence
  Description of Artificial Sequence: Synthetic polypeptide
MAADGYLPDWLEDTLSEGIRQWWKLKPGPPPPKPAERHKDDSRGLVLPGYKYLGPFNGLDKGEPVNEADAAALEHDKAYDRQLDSGDNPYLKYNHADAEFQERLKEDTSFGGNLGRAVFQAKKRVLEPLGLVEEPVKTAPGKKRPVEHSPVEPDSSSGTGKAGQQPARKRLNFGQTGDADSVPDPQPLGQPPAAPSGLGTNTMATGSGAPMADNNEGADGVGNSSGNWHCDSTWMGDRVITTSTRTWALPTYNNHLYKQISSQSGASNDNHYFGYSTPWGYFDFNRFHCHFSPRDWQRLINNNWGFRPKRLKFKLFNIQVKEVTQNDGTTTIANNLTSTVQVFTDSEYQLPYVLGSAHQGCLPPFPADVFMVPQYGYLTLNNGSQAVGRSSFYCLEYFPSQMLRTGNNFTFSYTFEDVPFHSSYAHSQSLDRLMNPLIDQYLYYLSRTDAPSGTTTQSRLQFSQAGASDIRDQSRNWLPGPCYRQQRVSKTSADNNNSEYSWTGATKYHLNGRDSLVNPGPAMASHKDDEEKFFPQSGVLIFGKQGSEKTSVDIEKVMITDEEEIRTTNPVATEQYGSVSTNLQRGNRQAATADVNTQGVLPGMVWQDRDVYLQGPIWAKIPHTDGHFHPSPLMGGFGLKHPPPQILIKNTPVPANPSTTFSAAKFASFITQYSTGQVSVEIEWELQKENSKRWNPEVQYTSNYNKSVNVDFTVDTNGVYSEPRPIGTRYLTRNL

SEQ ID NO: 5207 - DNA, 2208 bp, Artificial Sequence
  Description of Artificial Sequence: Synthetic polynucleotide
atggctgccgatggttatcttccagattggctcgaggacactctctctgaaggaataagacagtggtggaagctcaaacctggcccaccaccaccaaagcccgcagagcggcataaggacgacagcaggggtcttgtgcttcctgggtacaagtacctcggacccttcaacggactcgacaagggagagccggtcaacgaggcagacgccgcggccctcgagcacgacaaagcctatgaccggcagctcgacagcggagacaacccgtacctcaagtacaaccacgccgacgcggagtttcaggagcgccttaaagaagatacgtcttttgggggcaacctcggacgagcagtcttccaggcgaaaaagagggttcttgaacctctgggcctggttgaggaacctgttaagacggctccgggaaaaaagaggccggtagagcactctcctgtggagccagactcctcctcgggaaccggaaaggcgggccagcagcctgcaagaaaaagattgaattttggtcagactggagacgcaaactcagtacctgacccccagcctctcggacagccaccagcagccccctctggtctgggaactaatacgatggctacaggcagtggcgcaccaatggcagacaataacgagggcgccgacggagtgggtaattcctcgggaaattggcattgcgattccacatggatgggcgacagagtcatcaccaccagcacccgaacctgggccctgcccacctacaacaaccacctctacaaacaaatttccagccaatcaggagcctcgaacgacaatcactactttggctacagcaccccttgggggtattttgacttcaacagattccactgccacttttcaccacgtgactggcaaagactcatcaacaacaactggggattccgacccaagagactcaagttcaagctctttaacattcaagtcaaagaggtcacgcagaatgacggtacgacgacgattgccaataaccttaccagcacggttcaggtgtttactgactcggagtaccagctcccgtacgtcctcggctcggcgcatcaaggatgcctcccgccgttcccagcagacgtcttcatggtgccacagtatggatacctcaccctgaacaacgggagtcgggcagtaggacgctcttcattttactgcctggagtactttccttctcagatgctgcgtaccggtaacaactttaccttcagctacacttttgaggacgttcctttccacagcagctacgctcacagccagagtctggaccgtctcatgaatcctctcatcgaccagtacctgtattacttgagcagaacagacactccaagtggaaccaccacgcagtcaaggcttcagttttctcaggccggagcgagtgacattcgggaccagtctaggaactggcttcctggaccctgttaccgccagcagcgagtatcaaagacatctgcggataacaacaacagtgaatactcgtggactggagctaccaagtaccacctcaatggcagagactctctggtgaatccgggcccggccatggcaagccacaaggacgatgaagaaaagttttttcctcagagcggggttctcatctttgggaagcaaggctcagagaaaacaagtgtggacattgaaaaggtcatgattacagacgaagaggaaatcaggacgaccaatcccgtggctacggagcagtatggttctgtatctaccaacctccagagaggcaacagacaagcagctaccgcagatgtcaacacacaaggcgttcttccaggcatggtctggcaggacagagatgtgtaccttcaggggcccatctgggcaaagattccacacacggacggacattttcacccctctcccctcatgggtggattcggacttaaacaccctcctccacagattctcatcaagaacaccccggtacctgcgaatccttcgaccaccttcagtgcggcaaagtttgcttccttcatcacacagtactccacgggacaggtcagcgtggagatcgagtgggagctgcagaaggaaaacagcaaacgctggaatcccgaagttcagtacacttccaactacaacaagtctgttaatgtggactttactgtggacactaatggcgtgtatacagagcctcgccccattggcaccagatacctgactcgtaatctgtaa

SEQ ID NO: 5208 - protein, 735 aa, Artificial Sequence
  Description of Artificial Sequence: Synthetic polypeptide
MAADGYLPDWLEDTLSEGIRQWWKLKPGPPPPKPAERHKDDSRGLVLPGYKYLGPFNGLDKGEPVNEADAAALEHDKAYDRQLDSGDNPYLKYNHADAEFQERLKEDTSFGGNLGRAVFQAKKRVLEPLGLVEEPVKTAPGKKRPVEHSPVEPDSSSGTGKAGQQPARKRLNFGQTGDANSVPDPQPLGQPPAAPSGLGTNTMATGSGAPMADNNEGADGVGNSSGNWHCDSTWMGDRVITTSTRTWALPTYNNHLYKQISSQSGASNDNHYFGYSTPWGYFDFNRFHCHFSPRDWQRLINNNWGFRPKRLKFKLFNIQVKEVTQNDGTTTIANNLTSTVQVFTDSEYQLPYVLGSAHQGCLPPFPADVFMVPQYGYLTLNNGSRAVGRSSFYCLEYFPSQMLRTGNNFTFSYTFEDVPFHSSYAHSQSLDRLMNPLIDQYLYYLSRTDTPSGTTTQSRLQFSQAGASDIRDQSRNWLPGPCYRQQRVSKTSADNNNSEYSWTGATKYHLNGRDSLVNPGPAMASHKDDEEKFFPQSGVLIFGKQGSEKTSVDIEKVMITDEEEIRTTNPVATEQYGSVSTNLQRGNRQAATADVNTQGVLPGMVWQDRDVYLQGPIWAKIPHTDGHFHPSPLMGGFGLKHPPPQILIKNTPVPANPSTTFSAAKFASFITQYSTGQVSVEIEWELQKENSKRWNPEVQYTSNYNKSVNVDFTVDTNGVYTEPRPIGTRYLTRNL

SEQ ID NO: 5209 - DNA, 2211 bp, Artificial Sequence
  Description of Artificial Sequence: Synthetic polynucleotide
atggctgccgatggttatcttccagattggctcgaggacactctctctgaaggaataagacagtggtggaagctcaaacctggcccaccaccaccaaagcccgcagagcggcataaggacgacagcaggggtcttgtgcttcctgggtacaagtacctcggacccttcaacggactcgacaagggagagccggtcaacgaggcagacgccgcggccctcgagcacgacaaggcctacgaccagcagctcaaagcgggtgacaatccgtacctgcggtataaccacgccgacgccgagtttcaggagcgtctgcaagaagatacgtcttttgggggcaacctcgggcgagcagtcttccaggccaagaagcgggttctcgaacctctcggtctggttgaggaaggcgctaagacggctcctggaaagaaacgtccggtagagcagtcgccacaagagccagactcctcctcgggcatcggcaagacaggccagcagcccgctaaaaagagactcaattttggtcagactggcgactcagagtcagtccccgacccacaacctctcggagaacctccagcaacccccgctgctgtgggacctactacaatggcttcaggcggtggcgcaccaatggcagacaataacgaaggcgccgacggagtgggtaatgcctcaggaaattggcattgcgattccacatggctgggcgacagagtcatcaccaccagcacccgaacatgggccttgcccacctataacaaccacctctacaagcaaatctccagtgcttcgacgggggccagcaacgacaaccactacttcggctacagcaccccctgggggtattttgactttaacagattccactgccacttttcaccacgtgactggcagcgactcatcaacaataactggggattccggcccaagagactcagcttcaagctcttcaacatccaggtcaaggaggtcacgacgaatgatggcgtcacaaccatcgctaataaccttaccagcacggttcaagtcttctcggactcggagtaccagcttccgtacgtcctcggctctgcgcaccagggctgcctccctccgttcccggcggacgtgttcatgattccgcaatacggctacctgacgctcaacaatggcagccaagccgtgggacgttcatccttttactgcctggaatatttcccttctcagatgctgagaacgggcaacaactttaccttcagctacacctttgaggaagtgcctttccacagcagctacgcgcacagccagagcctggaccggctgatgaatcctctcatcgatcaatacctgtattacctgaacagaactcaaaatcagtccggaagtgcccaaaacaaggacttgctgtttagccgtgggtctccagctggcatgtctgttcagcccaaaaactggctacctggaccctgttatcggcagcagcgcgtttctaaaacaaaaacagacaacaacaacagcaattttacctggactggtgcttcaaaatataacctcaatgggcgtgaatccatcatcaaccctggcactgctatggcctcacacaaagacgacgaagacaagttctttcccatgagcggtgtcatgatttttggaaaagagagcgccggagcttcaaacactgcattggacaatgtcatgattacggacgaagaggaaattaaagccactaaccctgtggccaccgaaagatttgggaccgtggcagtcaatttccagagcagcagcacagaccctgcgaccggagatgtgcatgctatgggagcattacctggcatggtgtggcaagatagagacgtgtacctgcagggtcccatttgggccaaaattcctcacacagatggacactttcacccgtctcctcttatgggcggctttggactcaagaacccgcctcctcagatcctcatcaaaaacacgcctgttcctgcgaatcctccggcggagttttcagctacaaagtttgcttcattcatcactcaatactccacaggacaagtgagcgtggaaattgaatgggagctgcagaaagaaaacagcaaacgctggaatcccgaagtgcagtatacatctaactatgcaaaatctgccaacgttgatttcactgtggacaacaatggactttatactgagcctcgccccattggcacccgttacctcacccgtcccctgtaa

SEQ ID NO: 5210 - protein, 736 aa, Artificial Sequence
  Description of Artificial Sequence: Synthetic polypeptide
MAADGYLPDWLEDTLSEGIRQWWKLKPGPPPPKPAERHKDDSRGLVLPGYKYLGPFNGLDKGEPVNEADAAALEHDKAYDQQLKAGDNPYLRYNHADAEFQERLQEDTSFGGNLGRAVFQAKKRVLEPLGLVEEGAKTAPGKKRPVEQSPQEPDSSSGIGKTGQQPAKKRLNFGQTGDSESVPDPQPLGEPPATPAAVGPTTMASGGGAPMADNNEGADGVGNASGNWHCDSTWLGDRVITTSTRTWALPTYNNHLYKQISSASTGASNDNHYFGYSTPWGYFDFNRFHCHFSPRDWQRLINNNWGFRPKRLSFKLFNIQVKEVTTNDGVTTIANNLTSTVQVFSDSEYQLPYVLGSAHQGCLPPFPADVFMIPQYGYLTLNNGSQAVGRSSFYCLEYFPSQMLRTGNNFTFSYTFEEVPFHSSYAHSQSLDRLMNPLIDQYLYYLNRTQNQSGSAQNKDLLFSRGSPAGMSVQPKNWLPGPCYRQQRVSKTKTDNNNSNFTWTGASKYNLNGRESIINPGTAMASHKDDEDKFFPMSGVMIFGKESAGASNTALDNVMITDEEEIKATNPVATERFGTVAVNFQSSSTDPATGDVHAMGALPGMVWQDRDVYLQGPIWAKIPHTDGHFHPSPLMGGFGLKNPPPQILIKNTPVPANPPAEFSATKFASFITQYSTGQVSVEIEWELQKENSKRWNPEVQYTSNYAKSANVDFTVDNNGLYTEPRPIGTRYLTRPL

SEQ ID NO: 5211 - protein, 735 aa, Artificial Sequence
  Description of Artificial Sequence: Synthetic polypeptide
MAADGYLPDWLEDTLSEGIRQWWKLKPGPPPPKPAERHKDDSRGLVLPGYKYLGPFNGLDKGEPVNEADAAALEHDKAYDRQLDSGDNPYLKYNHADAEFQERLKEDTSFGGNLGRAVFQAKKRVLEPLGLVEEPVKTAPGKKRPVEHSPVEPDSSSGTGKAGQQPARKRLNFGQTGDADSVPDPQPLGQPPAAPSGLGTNTMATGSGAPMADNNEGADGVGNSSGNWHCDSTWMGDRVITTSTRTWALPTYNNHLYKQISSQSGASNDNHYFGYSTPWGYFDFNRFHCHFSPRDWQRLINNNWGFRPKRLKFKLFNIQVKEVTQNDGTTTIANNLTSTVQVFTDSEYQLPYVLGSAHQGCLPPFPADVFMVPQYGYLTLNNGSQAVGRSSFYCLEYFPSQMLRTGNNFTFSYTFEDVPFHSSYAHSQSLDRLMNPLIDQYLYYLSRTDTPSGTTTQSRLQFSQAGASDIRNQSRNWLPGPCYRQQRVSKTSADNNNSEYSWTGATKYHLNGRDSLVNPGPAMASHKDDEEKFFPQSGVLIFGKQGSEKTSVDIEKVMITDEEEIRTTNPVATEQYGSVSTNLQRGNRQAATADVNTQGVLPGMVWQDRDVYLQGPIWAKIPHTDGHFHPSPLMGGFGLKHPPPQILIKNTPVPANPSTTFSAAKFASFITQYSTGQVSVEIEWELQKENSKRWNPEVQYTSNYNKSVNVDFTVDTNGVYSEPRPIGTRYLTRNQ

SEQ ID NO: 5212 - DNA, 2208 bp, Artificial Sequence
  Description of Artificial Sequence: Synthetic polynucleotide
atggctgccgatggttatcttccagattggctcgaggacactctctctgaaggaataagacagtggtggaagctcaaacctggcccaccaccaccaaagcccgcagagcggcataaggacgacagcaggggtcttgtgcttcctgggtacaagtacctcggacccttcaacggactcgacaagggagagccggtcaacgaggcagacgccgcggccctcgagcacgacaaagcctatgaccggcagctcgacagcggagacaacccgtacctcaagtacaaccacgccgacgcggagtttcaggaacgccttaaagaagatacgtcttttgggggcaacctcggacgagcagtcttccaggcgaaaaagagggttcttgaacctctgggcctggttgaggaacctgttaagacggctccgggaaaaaagaggccggtagagcactctcctgtggagccagactcctcctcgggaaccggaaaggcgggccagcagcctgcaagaaaaagattgaattttggtcagactggagacgcagactcagtacctgacccccagcctctcggacagccaccagcagccccctctggtctgggaactaatacgatggctacaggcagtggcgcaccaatggcagacaataacgagggcgccgacggagtgggtaattcctcgggaaattggcattgcgattccacatggatgggcgacagagtcatcaccaccagcacccgaacctgggccctgcccacctacaacaaccacctctacaaacaaatttccagccaatcaggagcctcgaacgacaatcactactttggctacagcaccccttgggggtattttgacttcaacagattccactgccacttttcaccacgtgactggcaaagactcatcaacaacaactggggattccgacccaagagactcaagttcaagctctttaacattcaagtcaaagaggtcacgcagaatgacggtacgacgacgattgccaataaccttaccagcacggttcaggtgtttactgactcggagtaccagctcccgtacgtcctcggctcggcgcatcaaggatgcctcccgccgttcccagcagacgtcttcatggtgccacagtatggatacctcaccctgaacaacgggagtcaggcagtaggacgctcttcattttactgcctggagtactttccttctcagatgctgcgtaccggtaacaactttaccttcagctacacttttgaggacgttcctttccacagcagctacgctcacagccagagtctggaccgtctcatgaatcctctcatcgaccagtacctgtattacttgagcagaacagacactccaagtggaaccaccacgcagtcaaggcttcagttttctcaggccggagcgagtgacattcggaaccagtctaggaactggcttcctggaccctgttaccgccagcagcgagtatcaaagacatctgcggataacaacaacagtgaatactcgtggactggagctaccaagtaccacctcaatggcagagactctctggtgaatccgggcccggccatggcaagccacaaggacgatgaagaaaagttttttcctcagagcggggttctcatctttgggaagcaaggctcagagaaaacaagtgtggacattgaaaaggtcatgattacagacgaagaggaaatcaggacaaccaatcccgtggctacggagcagtatggttctgtatctaccaacctccagagaggcaacagacaagcagctaccgcagatgtcaacacacaaggcgttcttccaggcatggtctggcaggacagagatgtgtaccttcaggggcccatctgggcaaagattccacacacggacggacattttcacccctctcccctcatgggtggattcggacttaaacaccctcctccacagattctcatcaagaacaccccggtacctgcgaatccttcgaccaccttcagtgcggcaaagtttgcttccttcatcacacagtactccacgggacaggtcagcgtggagatcgagtgggagctgcagaaggaaaacagcaaacgctggaatcccgaagttcagtacacttccaactacaacaagtctgttaatgtggactttactgtggacactaatggcgtgtattcagagcctcgccccattggcaccagatacctgactcgtaatcagtaa

SEQ ID NO: 5213 - DNA, 2208 bp, Artificial Sequence
  Description of Artificial Sequence: Synthetic polynucleotide
atggctgccgatggttatcttccagattggctcgaggacactctctctgaaggaataagacagtggtggaagctcaaacctggcccaccaccaccaaagcccgcagagcggcataaggacgacagcaggggtcttgtgcttcctgggtacaagtacctcggacccttcaacggactcgacaagggagagccggtcaacgaggcagacgccgcggccctcgagcacgacaaagcctatgaccggcagctcgacagcggagacaacccgtacctcaagtacaaccacgccgacgcggagtttcaggagcgccttaaagaagatacgtcttttgggggcaacctcggacgagcagtcttccaggcgaaaaagagggttcttgaacctctgggcctggttgaggaacctgttaagacggctccgggaaaaaagaggccggtagagcactctcctgtggagccagactcctcctcgggaaccggaaaggcgggccagcagcctgcaagaaaaagattgaattttggtcagactggagacgcagactcagtacctgatccccagcctctcggacagccaccagcagccccctctggtctgggaactaatacgatggctacaggcagtggcgcaccaatggcagacaataacgagggcgccgacggagtgggtaattcctcgggaaattggcattgcgattccacatggatgggcgacagagtcatcaccaccagcacccgaacctgggccctgcccacctacaacaaccacctctacaaacaaatttccagccaatcaggagcctcgaacgacaatcactactttggctacagcaccccttgggggtattttgacttcaacagattccactgccacttttcaccacgtgactggcaaagactcatcaacaacaactggggattccgacccaagagactcaagttcaagctctttaacattcaagtcaaagaggtcacgcagaatgacggtacgacgacgattgccaataaccttaccagcacggttcaggtgtttactgactcggagtaccagctcccgtatgtcctcggctcggcgcatcaaggatgcctcccgccgttcccagcagacgtcttcatggtgccacagtatggatacctcaccctgaacaacgggagtcaggcagtaggacgctcttcattttactgcctggagtactttccttctcagatgctgcgtaccggtaacaactttaccttcagctacacttttgaggacgttcctttccacagcagctacgctcacagccagagtctggaccgtctcatgaatcctctcatcgaccagtacctgtattacttgagcagaacagacactccaagtggaaccaccacgcagtcaaggcttcagttttctcaggccggagcgagtgacattcgggaccagtctaggaactggcttcctggaccctgttaccgccagcagcgagtatcaaagacatctgcggataacaacaacagtgaatactcgtggactggagctaccaagtaccacctcaatggcagagactctctggtgaatccgggcccggccatggcaagccacaaggacgatgaagaaaagttttttcctcagagcggggttctcatctttgggaagcaaggctcagagaaaacaagtgtggacattgaaaaggtcatgattacagacgaagaggaaatcaggacaaccaatcccgtggctacggagcagtatggttctgtatctaccaacctccagagaggcaacagacaagcagctaccgcagatgtcaacacacaaggcgttcttccaggcatggtctggcaggacagagatgtgtaccttcaggggcccatctgggcaaagattccacacacggacggacattttcacccctctcccctcatgggtggattcggacttaaacaccctcctccacagattctcatcaagaacaccccggtacctgcgaatccttcgaccaccttcagtgcggcaaagtttgcttccttcatcacacagtactccacgggacaggtcagcgtggagatcgagtgggagctgcagaaggaaaacagcaaacgctggaatcccgaagttcagtacacttccaactacaacaagtctgttaatgtggactttactgtggacactaatggcgtgtattcagagcctcgccccattggcaccagatacctgactcgtaatctgtaa

SEQ ID NO: 5214 - protein, 735 aa, Artificial Sequence
  Description of Artificial Sequence: Synthetic polypeptide
MAADGYLPDWLEDTLSEGIRQWWKLKPGPPPPKPAERHKDDSRGLVLPGYKYLGPFNGLDKGEPVNEADAAALEHDKAYDRQLDSGDNPYLKYNHADAEFQERLKEDTSFGGNLGRAVFQAKKRVLEPLGLVEEPVKTAPGKKRPVEHSPVEPDSSSGTGKAGQQPARKRLNFGQTGDADSVPDPQPLGQPPAAPSGLGTNTMATGSGAPMADNNEGADGVGNSSGNWHCDSTWMGDRVITTSTRTWALPTYNNHLYKQISSQSGASNDNHYFGYSTPWGYFDFNRFHCHFSPRDWQRLINNNWGFRPKRLKFKLFNIQVKEVTQNDGTTTIANNLTSTVQVFTDSEYQLPYVLGSAHQGCLPPFPADVFMVPQYGYLTLNNGSQAVGRSSFYCLEYFPSQMLRTGNNFTFSYTFEDVPFHSSYAHSQSLDRLMNPLIDQYLYYLSRTDTPSGTTTQSRLQFSQAGASDIRDQSRNWLPGPCYRQQRVSKTSADNNNSEYSWTGATKYHLNGRDSLVNPGPAMASHKDDEEKFFPQSGVLIFGKQGSEKTSVDIEKVMITDEEEIRTTNPVATEQYGSVSTNLQRGNRQAATADVNTQGVLPGMVWQDRDVYLQGPIWAKIPHTDGHFHPSPLMGGFGLKHPPPQILIKNTPVPANPSTTFSAAKFASFITQYSTGQVSVEIEWELQKENSKRWNPEVQYTSNYNKSVNVDFTVDTNGVYSEPRPIGTRYLTRNL

SEQ ID NO: 5215 - DNA, 2172 bp, Artificial Sequence
  Description of Artificial Sequence: Synthetic polynucleotide
atgtcttttgttgatcaccctccagattggttggaagaagttggtgaaggtcttcgcgagtttttgggccttgaagcgggcccaccgaaaccaaaacccaatcagcagcatcaagatcaagcccgtggtcttgtgctgcctggttataactatctcggacccggaaacggtctcgatcgaggagagcctgtcaacagggcagacgaggtcgcgcgagagcacgacatctcgtacaacgagcagcttgaggcgggagacaacccctacctcaagtacaaccacgcggacgccgagtttcaggagaagctcgccgacgacacatccttcgggggaaacctcggaaaggcagtctttcaggccaagaaaagggttctcgaaccttttggcctggttgaagagggtgctaagacggcccctaccggaaagcggatagacgaccactttccaaaaagaaagaaggctcggaccgaagaggactccaagccttccacctcgtcagacgccgaagctggacccagcggatcccagcagctgcaaatcccagcccaaccagcctcaagtttgggagctgatacaatgtctgcgggaggtggcggcccattgggcgacaataaccaaggtgccgatggagtgggcaatgcctcgggagattggcattgcgattccacgtggatgggggacagagtcgtcaccaagtccacccgaacctgggtgctgcccagctacaacaaccaccagtaccgagagatcaaaagcggctccgtcgacggaagcaacgccaacgcctactttggatacagcaccccctgggggtactttgactttaaccgcttccacagccactggagcccccgagactggcaaagactcatcaacaactactggggcttcagaccccggtccctcagagtcaaaatcttcaacattcaagtcaaagaggtcacggtgcaggactccaccaccaccatcgccaacaacctcacctccaccgtccaagtgtttacggacgacgactaccagctgccctacgtcgtcggcaacgggaccgagggatgcctgccggccttccctccgcaggtctttacgctgccgcagtacggttacgcgacgctgaaccgcgacaacacagaaaatcccaccgagaggagcagcttcttctgcctagagtactttcccagcaagatgctgagaacgggcaacaactttgagtttacctacaactttgaggaggtgcccttccactccagcttcgctcccagtcagaacctgttcaagctggccaacccgctggtggaccagtacttgtaccgcttcgtgagcacaaataacactggcggagtccagttcaacaagaacctggccgggagatacgccaacacctacaaaaactggttcccggggcccatgggccgaacccagggctggaacctgggctccggggtcaaccgcgccagtgtcagcgccttcgccacgaccaataggatggagctcgagggcgcgagttaccaggtgcccccgcagccgaacggcatgaccaacaacctccagggcagcaacacctatgccctggagaacactatgatcttcaacagccagccggcgaacccgggcaccaccgccacgtacctcgagggcaacatgctcatcaccagcgagagcgagacgcagccggtgaaccgcgtggcgtacaacgtcggcgggcagatggccaccaacaaccagagctccaccactgcccccgcgaccggcacgtacaacctccaggaaatcgtgcccggcagcgtgtggatggagagggacgtgtacctccaaggacccatctgggccaagatcccagagacgggggcgcactttcacccctctccggccatgggcggattcggactcaaacacccaccgcccatgatgctcatcaagaacacgcctgtgcccggaaatatcaccagcttctcggacgtgcccgtcagcagcttcatcacccagtacagcaccgggcaggtcaccgtggagatggagtgggagctcaagaaggaaaactccaagaggtggaacccagagatccagtacacaaacaactacaacgacccccagtttgtggactttgccccggacagcaccggggaatacagaaccaccagacctatcggaacccgataccttacccgacccctt

SEQ ID NO: 5216 - DNA, 2214 bp, Artificial Sequence
  Description of Artificial Sequence: Synthetic polynucleotide
atggctgccgatggttatcttccagattggctcgaggacaacctctctgagggcattcgcgagtggtgggcgctgaaacctggagccccgaagcccaaagccaaccagcaaaagcaggacgacggccggggtctggtgcttcctggctacaagtacctcggacccttcaacggactcgacaagggggagcccgtcaacgcggcggacgcagcggccctcgagcacgacaaggcctacgaccagcagctgcaggcgggtgacaatccgtacctgcggtataaccacgccgacgccgagtttcaggagcgtctgcaagaagatacgtcttttgggggcaacctcgggcgagcagtcttccaggccaagaagcgggttctcgaacctctcggtctggttgaggaaggcgctaagacggctcctggaaagaagagaccggtagagccatcaccccagcgttctccagactcctctacgggcatcggcaagaaaggccaacagcccgccagaaaaagactcaattttggtcagactggcgactcagagtcagttccagaccctcaacctctcggagaacctccagcagcgccctctggtgtgggacctaatacaatggctgcaggcggtggcgcaccaatggcagacaataacgaaggcgccgacggagtgggtagttcctcgggaaattggcattgcgattccacatggctgggcgacagagtcatcaccaccagcacccgaacctgggccctgcccacctacaacaaccacctctacaagcaaatctccaacgggacatcgggaggagccaccaacgacaacacctacttcggctacagcaccccctgggggtattttgactttaacagattccactgccacttttcaccacgtgactggcagcgactcatcaacaacaactggggattccggcccaagagactcagcttcaagctcttcaacatccaggtcaaggaggtcacgcagaatgaaggcaccaagaccatcgccaataacctcaccagcaccatccaggtgtttacggactcggagtaccagctgccgtacgttctcggctctgcccaccagggctgcctgcctccgttcccggcggacgtgttcatgattccccagtacggctacctaacactcaacaacggtagtcaggccgtgggacgctcctccttctactgcctggaatactttccttcgcagatgctgagaaccggcaacaacttccagtttacttacaccttcgaggacgtgcctttccacagcagctacgcccacagccagagcttggaccggctgatgaatcctctgattgaccagtacctgtactacttgtctcggactcaaacaacaggaggcacggcaaatacgcagactctgggcttcagccaaggtgggcctaatacaatggccaatcaggcaaagaactggctgccaggaccctgttaccgccaacaacgcgtctcaacgacaaccgggcaaaacaacaatagcaactttgcctggactgctgggaccaaataccatctgaatggaagaaattcattggctaatcctggcatcgctatggcaacacacaaagacgacgaggagcgtttttttcccagtaacgggatcctgatttttggcaaacaaaatgctgccagagacaatgcggattacagcgatgtcatgctcaccagcgaggaagaaatcaaaaccactaaccctgtggctacagaggaatacggtatcgtggcagataacttgcctgagcggacggcgatgagtcttccgggaactgtcaacagccagggggccttacccggtatggtctggcagaaccgggacgtgtacctgcagggtcccatctgggccaagattcctcacacggacggcaacttccacccgtctccgctgatgggcggctttggcctgaaacatcctccgcctcagatcctgatcaagaacacgcctgtacctgcggatcctccgaccaccttcaaccagtcaaagctgaactctttcatcacgcaatacagcaccggacaggtcagcgtggaaattgaatgggagctgcagaaggaaaacagcaagcgctggaaccccgagatccagtacacctccaactactacaaatctacaagtgtggactttgctgttaatacagaaggcgtgtactctgaaccccgccccattggcacccgttacctcacccgtaatctg

SEQ ID NO: 5217 - protein, 738 aa, Artificial Sequence
  Description of Artificial Sequence: Synthetic polypeptide
MAADGYLPDWLEDNLSEGIREWWALKPGAPKPKANQQKQDDGRGLVLPGYKYLGPFNGLDKGEPVNAADAAALEHDKAYDQQLQAGDNPYLRYNHADAEFQERLQEDTSFGGNLGRAVFQAKKRVLEPLGLVEEGAKTAPGKKRPVEPSPQRSPDSSTGIGKKGQQPARKRLNFGQTGDSESVPDPQPLGEPPAAPSGVGPNTMAAGGGAPMADNNEGADGVGSSSGNWHCDSTWLGDRVITTSTRTWALPTYNNHLYKQISNGTSGGATNDNTYFGYSTPWGYFDFNRFHCHFSPRDWQRLINNNWGFRPKRLSFKLFNIQVKEVTQNEGTKTIANNLTSTIQVFTDSEYQLPYVLGSAHQGCLPPFPADVFMIPQYGYLTLNNGSQAVGRSSFYCLEYFPSQMLRTGNNFQFTYTFEDVPFHSSYAHSQSLDRLMNPLIDQYLYYLSRTQTTGGTANTQTLGFSQGGPNTMANQAKNWLPGPCYRQQRVSTTTGQNNNSNFAWTAGTKYHLNGRNSLANPGIAMATHKDDEERFFPSNGILIFGKQNAARDNADYSDVMLTSEEEIKTTNPVATEEYGIVADNLPERTAMSLPGTVNSQGALPGMVWQNRDVYLQGPIWAKIPHTDGNFHPSPLMGGFGLKHPPPQILIKNTPVPADPPTTFNQSKLNSFITQYSTGQVSVEIEWELQKENSKRWNPEIQYTSNYYKSTSVDFAVNTEGVYSEPRPIGTRYLTRNL

SEQ ID NO: 5218 - DNA, 2214 bp, Artificial Sequence
  Description of Artificial Sequence: Synthetic polynucleotide
atggctgccgatggttatcttccagattggctcgaggacaacctctctgagggcattcgcgagtggtgggcgctgaaacctggagccccgaagcccaaagccaaccagcaaaagcaggacgacggccggggtctggtgcttcctggctacaagtacctcggacccttcaacggactcgacaagggggagcccgtcaacgcggcggacgcagcggccctcgagcacgacaaggcctacgaccagcagctgcaggcgggtgacaatccgtacctgcggtataaccacgccgacgccgagtttcaggagcgtctgcaagaagatacgtcttttgggggcaacctcgggcgagcagtcttccaggccaagaagcgggttctcgaacctctcggtctggttgaggaaggcgctaagacggctcctggaaagaagagaccggtagagccatcaccccagcgttctccagactcctctacgggcatcggcaagaaaggccaacagcccgccagaaaaagactcaattttggtcagactggcgactcagagtcagttccagaccctcaacctctcggagaacctccagcagcgccctctggtgtgggacctaatacaatggctgcaggcggtggcgcaccaatggcagacaataacgaaggcgccgacggagtgggtagttcctcgggaaattggcattgcgattccacatggctgggcgacagagtcatcaccaccagcacccgaacctgggccctgcccacctacaacaaccacctctacaagcaaatctccaacgggacatcgggaggagccaccaacgacaacacctacttcggctacagcaccccctgggggtattttgactttaacagattccactgccacttttcaccacgtgactggcagcgactcatcaacaacaactggggattccggcccaagagactcagcttcaagctcttcaacatccaggtcaaggaggtcacgcagaatgaaggcaccaagaccatcgccaataacctcaccagcaccatccaggtgtttacggactcggagtaccagctgccgtacgttctcggctctgcccaccagggctgcctgcctccgttcccggcggacgtgttcatgattccccagtacggctacctaacactcaacaacggtagtcaggccgtgggacgctcctccttctactgcctggaatactttccttcgcagatgctgagaaccggcaacaacttccagtttacttacaccttcgaggacgtgcctttccacagcagctacgcccacagccagagcttggaccggctgatgaatcctctgattgaccagtacctgtactacttgtctcggactcaaacaacaggaggcacggcaaatacgcagactctgggcttcagccaaggtgggcctaatacaatggccaatcaggcaaagaactggctgccaggaccctgttaccgccaacaacgcgtctcaacgacaaccgggcaaaacaacaatagcaactttgcctggactgctgggaccaaataccatctgaatggaagaaattcattggctaatcctggcatcgctatggcaacacacaaagacgacgaggagcgtttttttcccagtaacgggatcctgatttttggcaaacaaaatgctgccagagacaatgcggattacagcgatgtcatgctcaccagcgaggaagaaatcaaaaccactaaccctgtggctacagaggaatacggtatcgtggcagataacttgagttttagtcgtgcggttctttgtgatggaactgtcaacagccagggggccttacccggtatggtctggcagaaccgggacgtgtacctgcagggtcccatctgggccaagattcctcacacggacggcaacttccacccgtctccgctgatgggcggctttggcctgaaacatcctccgcctcagatcctgatcaagaacacgcctgtacctgcggatcctccgaccaccttcaaccagtcaaagctgaactctttcatcacgcaatacagcaccggacaggtcagcgtggaaattgaatgggagctgcagaaggaaaacagcaagcgctggaaccccgagatccagtacacctccaactactacaaatctacaagtgtggactttgctgttaatacagaaggcgtgtactctgaaccccgccccattggcacccgttacctcacccgtaatctg

SEQ ID NO: 5219 - protein, 738 aa, Artificial Sequence
  Description of Artificial Sequence: Synthetic polypeptide
MAADGYLPDWLEDNLSEGIREWWALKPGAPKPKANQQKQDDGRGLVLPGYKYLGPFNGLDKGEPVNAADAAALEHDKAYDQQLQAGDNPYLRYNHADAEFQERLQEDTSFGGNLGRAVFQAKKRVLEPLGLVEEGAKTAPGKKRPVEPSPQRSPDSSTGIGKKGQQPARKRLNFGQTGDSESVPDPQPLGEPPAAPSGVGPNTMAAGGGAPMADNNEGADGVGSSSGNWHCDSTWLGDRVITTSTRTWALPTYNNHLYKQISNGTSGGATNDNTYFGYSTPWGYFDFNRFHCHFSPRDWQRLINNNWGFRPKRLSFKLFNIQVKEVTQNEGTKTIANNLTSTIQVFTDSEYQLPYVLGSAHQGCLPPFPADVFMIPQYGYLTLNNGSQAVGRSSFYCLEYFPSQMLRTGNNFQFTYTFEDVPFHSSYAHSQSLDRLMNPLIDQYLYYLSRTQTTGGTANTQTLGFSQGGPNTMANQAKNWLPGPCYRQQRVSTTTGQNNNSNFAWTAGTKYHLNGRNSLANPGIAMATHKDDEERFFPSNGILIFGKQNAARDNADYSDVMLTSEEEIKTTNPVATEEYGIVADNLSFSRAVLCDGTVNSQGALPGMVWQNRDVYLQGPIWAKIPHTDGNFHPSPLMGGFGLKHPPPQILIKNTPVPADPPTTFNQSKLNSFITQYSTGQVSVEIEWELQKENSKRWNPEIQYTSNYYKSTSVDFAVNTEGVYSEPRPIGTRYLTRNL

SEQ ID NO: 5220 - DNA, 2215 bp, Artificial Sequence
  Description of Artificial Sequence: Synthetic polynucleotide
atggctgccgatggttatcttccagattggctcgaggacactctctctgaaggaataagacagtggtggaagctcaaacctggcccaccaccaccaaagcccgcagagcggcataaggacgacagcaggggtcttgtgcttcctgggtacaagtacctcggacccttcaacggactcgacaagggagagccggtcaacgaggcagacgccgcggccctcgagcacgacaaagcctacgaccggcagctcgacagcggagacaacccgtacctcaagtacaaccacgccgacgccgagttccaggagcggctcaaagaagatacgtcttttgggggcaacctcgggcgagcagtcttccaggccaaaaagaggcttcttgaacctcttggtctggttgaggaagcggctaagacggctcctggaaagaagaggcctgtagagcactctcctgtggagccagactcctcctcgggaaccggaaaggcgggccagcagcctgcaagaaaaagattgaattttggtcagactggagacgcagactcagtcccagaccctcaaccaatcggagaacctcccgcagccccctcaggtgtgggatctcttacaatggctgcaggcggtggcgcaccaatggcagacaataacgagggcgccgacggagtgggtaattcctcgggaaattggcattgcgattccacatggatgggcgacagagtcatcaccaccagcacccgaacctgggccctgcccacctacaacaaccacctctacaagcaaatctccaacagcacatctggaggatcttcaaatgacaacgcctacttcggctacagcaccccctgggggtattttgactttaacagattccactgccacttttcaccacgtgactggcagcgactcatcaacaacaactggggattccggcccaagagactcagcttcaagctcttcaacatccaggtcaaggaggtcacgcagaatgaaggcaccaagaccatcgccaataacctcaccagcaccatccaggtgtttacggactcggagtaccagctgccgtacgttctcggctctgcccaccagggctgcctgcctccgttcccggcggacgtgttcatgattccccagtacggctacctaacactcaacaacggtagtcaggccgtgggacgctcctccttctactgcctggaatactttccttcgcagatgctgagaaccggcaacaacttccagtttacttacaccttcgaggacgtgcctttccacagcagctacgcccacagccagagcttggaccggctgatgaatcctctgattgaccagtacctgtactacttgtctcggactcaaacaacaggaggcacgacaaatacgcagactctgggcttcagccaaggtgggcctaatacaatggccaatcaggcaaagaactggctgccaggaccctgttaccgccagcagcgagtatcaaagacatctgcggataacaacaacagtgaatactcgtggactggagctaccaagtaccacctcaatggcagagactctctggtgaatccgggcccggccatggcaagccacaaggacgatgaagaaaagtttttttcctcagagcggggttctcatctttgggaagcaaggctcagagaaaacaaatgtggacattgaaaaggtcatgattacagacgaagaggaaatcaggacaaccaatcccgtggctacggagcagtatggttctgtatctaccaacctccagagaggcaacagacaagcagctaccgcagatgtcaacacacaaggcgttcttccaggcatggtctggcaggacagagatgtgtaccttcaggggcccatctgggcaaagattccacacacggacggacattttcacccctctcccctcatgggtggattcggacttaaacaccctccgcctcagatcctgatcaagaacacgcctgtacctgcggatcctccgaccaccttcaaccagtcaaagctgaactctttcatcacccagtattctactggccaagtcagcgtggagatcgagtgggagctgcagaaggaaaacagcaagcgctggaaccccgagatccagtacacctccaactactacaaatctacaagtgtggactttgctgttaatacagaaggcgtgtactctgaaccccgccccattggcacccgttacctcacccgtaatctgtaa

SEQ ID NO: 5221 - protein, 737 aa, Artificial Sequence
  Description of Artificial Sequence: Synthetic polypeptide
MAADGYLPDWLEDTLSEGIRQWWKLKPGPPPPKPAERHKDDSRGLVLPGYKYLGPFNGLDKGEPVNEADAAALEHDKAYDRQLDSGDNPYLKYNHADAEFQERLKEDTSFGGNLGRAVFQAKKRLLEPLGLVEEAAKTAPGKKRPVEHSPVEPDSSSGTGKAGQQPARKRLNFGQTGDADSVPDPQPIGEPPAAPSGVGSLTMAAGGGAPMADNNEGADGVGNSSGNWHCDSTWMGDRVITTSTRTWALPTYNNHLYKQISNSTSGGSSNDNAYFGYSTPWGYFDFNRFHCHFSPRDWQRLINNNWGFRPKRLSFKLFNIQVKEVTQNEGTKTIANNLTSTIQVFTDSEYQLPYVLGSAHQGCLPPFPADVFMIPQYGYLTLNNGSQAVGRSSFYCLEYFPSQMLKTGNNFQFTYTFEDVPFHSSYAHSQSLDRLMNPLIDQYLYYLSRTQTTGGTTNTQTLGFSQGGPNTMANQAKNWLPGPCYRQQRVSKTSADNNNSEYSWTGATKYHLNGRDSLVNPGPAMASHKDDEEKFFPQSGVLIFGKQGSEKTNVDIEKVMITDEEEIRTTNPVATEQYGSVSTNLQRGNRQAATADVNTQGVLPGMVWQDRDVYLQGPIWAKIPHTDGHFHPSPLMGGFGLKHPPPQILIKNTPVPADPPTTFNQSKLNSFITQYSTGQVSVEIEWELQKENSKRWNPEIQYTSNYYKSTSVDFAVNTEGVYSEPRPIGTRYLTRNL

SEQ ID NO: 5222 - protein, 737 aa, Artificial Sequence
  Description of Artificial Sequence: Synthetic polypeptide
MAADGYLPDWLEDTLSEGIRQWWKLKPGPPPPKPAERHKDDSRGLVLPGYKYLGPFNGLDKGEPVNEADAAALEHDKAYDRQLDSGDNPYLKYNHADAEFQERLKEDTSFGGNLGRAVFQAKKRLLEPLGLVEEAAKTAPGKKRPVEHSPVEPDSSSGTGKAGQQPARKRLNFGQTGDADSVPDPQPIGEPPAAPSGVGSLTMAAGGGAPMADNNEGADGVGNSSGNWHCDSTWMGDRVITTSTRTWALPTYNNHLYKQISNSTSGGSSNDNAYFGYSTPWGYFDFNRFHCHFSPRDWQRLINNNWGFRPKRLSFKLFNIQVKEVTQNEGTKTIANNLTSTIQVFTDSEYQLPYVLGSAHQGCLPPFPADVFMIPQYGYLTLNNGSQAVGRSSFYCLEYFPSQMLKTGNNFQFTYTFEDVPFHSSYAHSQSLDRLMNPLIDQYLYYLSRTQTTGGTTNTQTLGFSQGGPNTMANQAKNWLPGPCYRQQRVSKTSADNNNSEYSWTGATKYHLNGRDSLVNPGPAMASHKDDEEKFFPQSGVLIFGKQGSEKTNVDIEKVMITDEEEIRTTNPVATEQYGSVSTNLQQGNTQAATADVNTQGVLPGMVWQDRDVYLQGPIWAKIPHTDGHFHPSPLMGGFGLKHPPPQILIKNTPVPADPPTTFNQSKLNSFITQYSTGQVSVEIEWELQKENSKRWNPEIQYTSNYYKSTSVDFAVNTEGVYSEPRPIGTRYLTRNL

SEQ ID NO: 5223 - protein, 737 aa, Artificial Sequence
  Description of Artificial Sequence: Synthetic polypeptide
MAADGYLPDWLEDTLSEGIRQWWKLKPGPPPPKPAERHKDDSRGLVLPGYKYLGPFNGLDKGEPVNEADAAALEHDKAYDRQLDSGDNPYLKYNHADAEFQERLKEDTSFGGNLGRAVFQAKKRLLEPLGLVEEAAKTAPGKKRPVEHSPVEPDSSSGTGKAGQQPARKRLNFGQTGDADSVPDPQPIGEPPAAPSGVGSLTMAAGGGAPMADNNEGADGVGNSSGNWHCDSTWMGDRVITTSTRTWALPTYNNHLYKQISNSTSGGSSNDNAYFGYSTPWGYFDFNRFHCHFSPRDWQRLINNNWGFRPKRLSFKLFNIQVKEVTQNEGTKTIANNLTSTIQVFTDSEYQLPYVLGSAHQGCLPPFPADVFMIPQYGYLTLNNGSQAVGRSSFYCLEYFPSQMLRTGNNFQFTYTFEDVPFHSSYAHSQSLDRLMNPLIDQYLYYLSRTQTTGGTTNTQTLGFSQGGPNTMANQAKNWLPGPCYRQQRVSKTSADNNNSEYSWTGATKYHLNGRDSLVNPGPAMASHKDDEEKFFPQSGVLIFGKQGSEKTNVDIEKVMITDEEEIRTTNPVATEQYGSVSTNLQQGNTQAATADVNTQGVLPGMVWQDRDVYLQGPIWAKIPHTDGHFHPSPLMGGFGLKHPPPQILIKNTPVPADPPTTFNQSKLNSFITQYSTGQVSVEIEWELQKENSKRWNPEIQYTSNYYKSTSVDFAVNTEGVYSEPRPIGTRYLTRNL

SEQ ID NO: 5224 - DNA, 2214 bp, Artificial Sequence
  Description of Artificial Sequence: Synthetic polynucleotide
atggctgccgatggttatcttccagattggctcgaggacaaccttagtgaaggaattcgcgagtggtgggctttgaaacctggagcccctcaacccaaggcaaatcaacaacatcaagacaacgctcgaggtcttgtgcttccgggttacaaataccttggacccggcaacggactcgacaagggggagccggtcaacgcagcagacgcggcggccctcgagcacgacaaggcctacgaccagcagctgcaggcgggtgacaatccgtacctgcggtataaccacgccgacgccgagtttcaggagcgtctgcaagaagatacgtcttttgggggcaaccttggcagagcagtcttccaggccaaaaagaggatccttgagcctcttggtctggttgaggaagcagctaaaacggctcctggaaagaagaggcctgtagatcagtctcctcaggaaccggactcatcatctggtgttggcaaatcgggcaaacagcctgccagaaaaagactaaatttcggtcagactggcgactcagagtcagtcccagaccctcaacctctcggagaaccaccagcagcccccacaagtttgggatctaatacaatggcttcaggcggtggcgcaccaatggcagacaataacgagggtgccgatggggtgggtagttcctcgggaaattggcattgcgattcccaatggctgggggacagagtcatcaccaccagcacccgaacctgggccctgcccacctacaacaatcacctctacaagcaaatctccaacgggacatcgggaggagccaccaacgacaacacctacttcggctacagcaccccctgggggtattttgactttaacagattccactgccacttttcaccacgtgactggcagcgactcatcaacaacaactggggattccggcccaagagactcagcttcaagctcttcaacatccaggtcaaggaggtcacgcagaatgaaggcaccaagaccatcgccaataacctcaccagcaccatccaggtgtttacggactcggagtaccagctgccgtacgttctcggctctgcgcaccagggctgcctccctccgttcccggcggacgtgttcatgattccgcaatacggctacctgacgctcaacaatggcagccaagccgtgggacgttcatccttttactgcctggaatatttcccttctcagatgctgagaacgggcaacaactttaccttcagctacacctttgaggaagtgcctttccacagcagctacgcgcacagccagagcttggaccggctgatgaatcctctgattgaccagtacctgtactacttgtctcggactcaaacaacaggaggcacggcaaatacgcagactctgggcttcagccaaggtgggcctaatacaatggccaatcaggcaaagaactggctgccaggaccctgttaccgccaacaacgcgtctcaacgacaaccgggcaaaacaacaatagcaactttgcctggactgctgggaccaaataccatctgaatggaagaaattcattggctaatcctggcatcgctatggcaacacacaaagacgacgaggagcgtttttttcccagtaacgggatcctgatttttggcaaacaaaatgctgccagagacaatgcggattacagcgatgtcatgctcaccagcgaggaagaaatcaaaaccactaaccctgtggctacagaggaatacggtatcgtggcagataacttgcagcagcaaaacacggctcctcaaattggaactgtcaacagccagggggccttacccggtatggtctggcagaaccgggacgtgtacctgcagggtcccatctgggccaagattcctcacacggacggcaacttccacccgtctccgctgatgggcggctttggcctgaaacatcctccgcctcagatcctgatcaagaacacgcctgtacctgcggatcctccgaccaccttcaaccagtcaaagctgaactctttcatcacgcaatacagcaccggacaggtcagcgtggagatcgagtgggagctgcagaaggaaaacagcaagcgctggaacccggagatccagtacacttccaactattacaagtctaataatgttgaatttgctgttaatactgaaggtgtatatagtgaaccccgccccattggcaccagatacctgactcgtaatctgtaa

SEQ ID NO: 5225 - protein, 737 aa, Artificial Sequence
  Description of Artificial Sequence: Synthetic polypeptide
MAADGYLPDWLEDNLSEGIREWWALKPGAPQPKANQQHQDNARGLVLPGYKYLGPGNGLDKGEPVNAADAAALEHDKAYDQQLQAGDNPYLRYNHADAEFQERLQEDTSFGGNLGRAVFQAKKRILEPLGLVEEAAKTAPGKKRPVDQSPQEPDSSSGVGKSGKQPARKRLNFGQTGDSESVPDPQPLGEPPAAPTSLGSNTMASGGGAPMADNNEGADGVGSSSGNWHCDSQWLGDRVITTSTRTWALPTYNNHLYKQISNGTSGGATNDNTYFGYSTPWGYFDFNRFHCHFSPRDWQRLINNNWGFRPKRLSFKLFNIQVKEVTQNEGTKTIANNLTSTIQVFTDSEYQLPYVLGSAHQGCLPPFPADVFMIPQYGYLTLNNGSQAVGRSSFYCLEYFPSQMLRTGNNFTFSYTFEEVPFHSSYAHSQSLDRLMNPLIDQYLYYLSRTQTTGGTANTQTLGFSQGGPNTMANQAKNWLPGPCYRQQRVSTTTGQNNNSNFAWTAGTKYHLNGRNSLANPGIAMATHKDDEERFFPSNGILIFGKQNAARDNADYSDVMLTSEEEIKTTNPVATEEYGIVADNLQQQNTAPQIGTVNSQGALPGMVWQNRDVYLQGPIWAKIPHTDGNFHPSPLMGGFGLKHPPPQILIKNTPVPADPPTTFNQSKLNSFITQYSTGQVSVEIEWELQKENSKRWNPEIQYTSNYYKSNNVEFAVNTEGVYSEPRPIGTRYLTRNL

SEQ ID NO: 5226 - DNA, 2211 bp, Artificial Sequence
  Description of Artificial Sequence: Synthetic polynucleotide
atggctgccgatggttatcttccagattggctcgaggacaacctctctgagggcattcgcgagtggtgggacttgaaacctggagccccgaagcccaaagccaaccagcaaaagcaggacgacggccggggtctggtgcttcctggctacaagtacctcggacccttcaacggactcgacaagggggagcccgtcaacgcggcggacgcagcggccctcgagcacgacaaggcctacgaccagcagctcaaagcgggtgacaatccgtacctgcggtataaccacgccgacgccgagtttcaggagcgtctgcaagaagatacgtcttttgggggcaacctcgggcgagcagtcttccaggccaagaagcgggttctcgaacctctcggtctggttgaggaaggcgctaagacggctcctggaaagaaacgtccggtagagcagtcgccacaagagccagactcctcctcgggcatcggcaagacaggccagcagcccgctaaaaagagactcaattttggtcagactggcgactcagagtcagtccccgacccacaacctctcggagaacctccagcaacccccgctgctgtgggacctactacaatggcttcaggcggtggcgcaccaatggcagacaataacgaaggcgccgacggagtgggtaatgcctcaggaaattggcattgcgattccacatggctgggcgacagagtcatcaccaccagcacccgaacatgggccttgcccacctataacaaccacctctacaagcaaatctccagtgcttcaacgggggccagcaacgacaaccactacttcggctacagcaccccctgggggtattttgatttcaacagattccactgccatttctcaccacgtgactggcagcgactcatcaacaacaattggggattccggcccaagagactcaacttcaagctcttcaacatccaagtcaaggaggtcacgacgaatgatggcgtcacgaccatcgctaataaccttaccagcacggttcaagtcttctcggactcggagtaccagctgccgtacgttctcggctctgcccaccagggctgcctgcctccgttcccggcggacgtgttcatgattccccagtacggctacctaacactcaacaacggtagtcaggccgtgggacgctcctccttctactgcctggaatactttccttcgcagatgctgagaaccggcaacaacttccagtttacttacaccttcgaggacgtgcctttccacagcagctacgcccacagccagagcttggaccggctgatgaatcctctgattgaccagtacctgtactacttgtctcggactcaaacaacaggaggcacggcaaatacgcagactctgggcttcagccaaggtgggcctaatacaatggccaatcaggcaaagaactggctgccaggaccctgttaccgccaacaacgcgtctcaacgacaaccgggcaaaacaacaatagcaattttacctggactggtgcttcaaaatataacctcaatgggcgtgaatccatcatcaaccctggcactgctatggcctcacacaaagacgacgaagacaagttctttcccatgagcggtgtcatgatttttggaaaagagagcgccggagcttcaaacactgcattggacaatgtcatgattacagacgaagaggaaattaaagccactaaccctgtggccaccgaaagatttgggaccgtggcagtcaatttccagagcagcagcacagaccctgcgaccggagatgtgcatgctatgggagcattacctggcatggtgtggcaagatagagacgtgtacctgcagggtcccatttgggccaaaattcctcacacagatggacactttcacccgtctcctcttatgggcggctttggactcaagaacccgcctcctcagatcctcatcaaaaacacgcctgttcctgcgaatcctccggcggagttttcagctacaaagtttgcttcattcatcacccaatactccacaggacaagtgagtgtggaaattgaatgggagctgcagaaagaaaacagcaagcgctggaatcccgaagtgcagtacacatccaattatgcaaaatctgccaacgttgattttactgtggacaacaatggactttatactgagcctcgccccattggcacccgttacctcacccgtcccctgtaa

SEQ ID NO: 5227 - protein, 736 aa, Artificial Sequence
  Description of Artificial Sequence: Synthetic polypeptide
MAADGYLPDWLEDNLSEGIREWWDLKPGAPKPKANQQKQDDGRGLVLPGYKYLGPFNGLDKGEPVNAADAAALEHDKAYDQQLKAGDNPYLRYNHADAEFQERLQEDTSFGGNLGRAVFQAKKRVLEPLGLVEEGAKTAPGKKRPVEQSPQEPDSSSGIGKTGQQPAKKRLNFGQTGDSESVPDPQPLGEPPATPAAVGPTTMASGGGAPMADNNEGADGVGNASGNWHCDSTWLGDRVITTSTRTWALPTYNNHLYKQISSASTGASNDNHYFGYSTPWGYFDFNRFHCHFSPRDWQRLINNNWGFRPKRLNFKLFNIQVKEVTTNDGVTTIANNLTSTVQVFSDSEYQLPYVLGSAHQGCLPPFPADVFMIPQYGYLTLNNGSQAVGRSSFYCLEYFPSQMLRTGNNFQFTYTFEDVPFHSSYAHSQSLDRLMNPLIDQYLYYLSRTQTTGGTANTQTLGFSQGGPNTMANQAKNWLPGPCYRQQRVSTTTGQNNNSNFTWTGASKYNLNGRESIINPGTAMASHKDDEDKFFPMSGVMIFGKESAGASNTALDNVMITDEEEIKATNPVATERFGTVAVNFQSSSTDPATGDVHAMGALPGMVWQDRDVYLQGPIWAKIPHTDGHFHPSPLMGGFGLKNPPPQILIKNTPVPANPPAEFSATKFASFITQYSTGQVSVEIEWELQKENSKRWNPEVQYTSNYAKSANVDFTVDNNGLYTEPRPIGTRYLTRPL

SEQ ID NO: 5228 - DNA, 2211 bp, Artificial Sequence
  Description of Artificial Sequence: Synthetic polynucleotide
atggctgctgacggttatcttccagattggctcgaggacaacctttctgaaggcattcgagagtggtgggcgctgcaacctggagcccctaaacccaaggcaaatcaacaacatcaggacaacgctcggggtcttgtgcttccgggttacaaatacctcggacccggcaacggactcgacaagggggaacccgtcaacgcagcggacgcggcagccctcgagcacgacaaggcctacgaccagcagctcaaggccggtgacaacccctacctcaagtacaaccacgccgacgccgagttccaggagcggctcaaagaagatacgtcttttgggggcaacctcgggcgagcagtcttccaggccaaaaagaggcttcttgaacctcttggtctggttgaggaagcggctaagacggctcctggaaagaagaggcctgtagatcagtctcctcaggaaccggactcatcatctggtgttggcaaatcgggcaaacagcctgccagaaaaagactaaatttcggtcagactggcgactcagagtcagtcccagaccctcaacctctcggagaaccaccagcagcccccacaagtttgggatctaatacaatggcttcaggcggtggcgcaccaatggcagacaataacgagggtgccgatggagtgggtaattcctcaggaaattggcattgcgattcccaatggctgggcgacagagtcatcaccaccagcaccagaacctgggccctgcccacttacaacaaccatctctacaagcaaatctccagccaatcaggagcttcaaacgacaaccactactttggctacagcaccccttgggggtattttgactttaacagattccactgccacttctcaccacgtgactggcagcgactcattaacaacaactggggattccggcccaagaaactcagcttcaagctcttcaacatccaagttaaagaggtcacgcagaacgatggcacgacgactattgccaataaccttaccagcacggttcaagtgtttacggactcggagtatcagctcccgtacgtgctcgggtcggcgcaccaaggctgtctcccgccgtttccagcggacgtcttcatggtccctcagtatggatacctcaccctgaacaacggaagtcaagcggtgggacgctcatccttttactgcctggagtacttcccttcgcagatgctaaggactggaaataacttccaattcagctataccttcgaggatgtaccttttcacagcagctacgctcacagccagagtttggatcgcttgatgaatcctcttattgatcagtatctgtactacctgaacagaacgcaaggaacaacctctggaacaaccaaccaatcacggctgctttttagccaggctgggcctcagtctatgtctttgcaggccagaaattggctacctgggccctgctaccggcaacagagactttcaaagactgctaacgacaacaacaacagtaactttccttggacagcggccagcaaatatcatctcaatggccgcgactcgctggtgaatccaggaccagctatggccagtcacaaggacgatgaagaaaaatttttccctatgcacggcaatctaatatttggcaaagaagggacaacggcaagtaacgcagaattagataatgtaatgattacggatgaagaagagattcgtaccaccaatcctgtggcaacagagcagtatggaactgtggcaaataacttgcagagctcaaatacagctcccacgactagaactgtcaatgatcagggggccttacctggcatggtgtggcaagatcgtgacgtgtaccttcaaggacctatctgggcaaagattcctcacacggatggacactttcatccttctcctctgatgggaggctttggactgaaacatccgcctcctcaaatcatgatcaaaaatactccggtaccggcaaatcctccgacgactttcagcccggccaagtttgcttcatttatcactcagtactccactggacaggtcagcgtggaaattgagtgggagctacagaaagaaaacagcaaacgttggaatccagagattcagtacacttccaactacaacaagtctgttaatgtggactttactgtagacactaatggtgtttatagtgaacctcgccccattggcacccgttaccttacccgtcccctgtaa

SEQ ID NO: 5229 - protein, 736 aa, Artificial Sequence
  Description of Artificial Sequence: Synthetic polypeptide
MAADGYLPDWLEDNLSEGIREWWALQPGAPKPKANQQHQDNARGLVLPGYKYLGPGNGLDKGEPVNAADAAALEHDKAYDQQLKAGDNPYLKYNHADAEFQERLKEDTSFGGNLGRAVFQAKKRLLEPLGLVEEAAKTAPGKKRPVDQSPQEPDSSSGVGKSGKQPARKRLNFGQTGDSESVPDPQPLGEPPAAPTSLGSNTMASGGGAPMADNNEGADGVGNSSGNWHCDSQWLGDRVITTSTRTWALPTYNNHLYKQISSQSGASNDNHYFGYSTPWGYFDFNRFHCHFSPRDWQRLINNNWGFRPKKLSFKLFNIQVKEVTQNDGTTTIANNLTSTVQVFTDSEYQLPYVLGSAHQGCLPPFPADVFMVPQYGYLTLNNGSQAVGRSSFYCLEYFPSQMLRTGNNFQFSYTFEDVPFHSSYAHSQSLDRLMNPLIDQYLYYLNRTQGTTSGTTNQSRLLFSQAGPQSMSLQARNWLPGPCYRQQRLSKTANDNNNSNFPWTAASKYHLNGRDSLVNPGPAMASHKDDEEKFFPMHGNLIFGKEGTTASNAELDNVMITDEEEIRTTNPVATEQYGTVANNLQSSNTAPTTRTVNDQGALPGMVWQDRDVYLQGPIWAKIPHTDGHFHPSPLMGGFGLKHPPPQIMIKNTPVPANPPTTFSPAKFASFITQYSTGQVSVEIEWELQKENSKRWNPEIQYTSNYNKSVNVDFTVDTNGVYSEPRPIGTRYLTRPL

SEQ ID NO: 5230 - DNA, 2211 bp, Artificial Sequence
  Description of Artificial Sequence: Synthetic polynucleotide
atggctgccgatggttatcttccagattggctcgaggacaaccttagtgaaggaattcgcgagtggtgggctttgaaacctggagcccctcaacccaaggcaaatcaacaacatcaagacaacgctcgaggtcttgtgcttccgggttacaaataccttggacccggcaacggactcgacaagggggagccggtcaacgcagcagacgcggcggccctcgagcacgacaaggcctacgaccagcagctcaaggccggagacaacccgtacctcaagtacaaccacgccgacgccgagttccaggagcggctcaaagaagatacgtcttttgggggcaacctcgggcgagcagtcttccaggccaaaaagaggcttcttgaacctcttggtctggttgaggaagcggctaagacggctcctggaaagaagagaccggtagagccatcaccccagcgttctccagactcctctacgggcatcggcaagaaaggccaacagcccgctaaaaagagactcaattttggtcagactggcgactcagagtcagtccccgacccacaacctctcggagaacctccagcaacccccgctgctgtgggacctactacaatggcttcaggcggtggcgcaccaatggcagacaataacgagggtgccgatggagtgggtaattcctcaggaaattggcattgcgattcccaatggctgggcgacagagtcatcaccaccagcaccagaacctgggccctgcccacttacaacaaccatctctacaagcaaatctccagccaatcaggagcttcaaacgacaaccactactttggctacagcaccccttgggggtattttgactttaacagattccactgccacttttcaccacgtgactggcaaagactcatcaacaacaactggggattccgacccaagagactcaacttcaagctcttcaacatccaagtcaaggaggtcacgacgaatgatggcgtcacgaccatcgctaataaccttaccagcacggttcaagtcttctcggactcggagtaccagttgccgtacgtcctcggctctgcgcaccagggctgcctccctccgttcccggcggacgtgttcatgattccgcagtacggctacctaacgctcaacaatggcagccaagccgtgggacgttcatccttttactgcctggaatatttcccttctcagatgctgagaacgggcaacaactttaccttcagctacacttttgaggacgttcctttccacagcagctacgctcacagccagagtctggaccgtctcatgaatcctctcatcgaccagtacctgtattacttgagcagaacaaacactccaagtggaaccaccacgcagtcaaggcttcagttttctcaggccggagcgagtgacattcgggaccagtctaggaactggcttcctggaccctgttaccgccagcagcgcgtttctaaaacaaaaacagacaacaacaacagcaattttacctggactggtgcttcaaaatataaccttaatgggcgtgaatctataatcaaccctggcactgctatggcctcacacaaagacgacgaagacaagttctttcccatgagcggtgtcatgatttttggaaaagagagcgccggagcttcaaacactgcattggacaatgtcatgattacagacgaagaggaaattaaagccactaaccctgtggccaccgaaagatttgggaccgtggcagtcaatttccagagcagcagcacagaccctgcgaccggagatgtgcatgttatgggagccttacctggaatggtgtggcaagacagagacgtatacctgcagggtcctatttgggccaaaattcctcacacggatggacactttcacccgtctcctcttatgggcggctttggactcaagaacccgcctcctcagatcctcatcaaaaacacgcctgttcctgcgaatcctccggcggagttttcagctacaaagtttgcttcattcatcacccaatactccacaggacaagtgagtgtggaaattgaatgggagctgcagaaagaaaacagcaagcgctggaatcccgaagtgcagtacacatccaattatgcaaaatctgccaacgttgattttactgtggacaacaatggactttatactgagcctcgccccattggcacccgttaccttacccgtcccctgtaa

SEQ ID NO: 5231 - protein, 736 aa, Artificial Sequence
  Description of Artificial Sequence: Synthetic polypeptide
MAADGYLPDWLEDNLSEGIREWWALKPGAPQPKANQQHQDNARGLVLPGYKYLGPGNGLDKGEPVNAADAAALEHDKAYDQQLKAGDNPYLKYNHADAEFQERLKEDTSFGGNLGRAVFQAKKRLLEPLGLVEEAAKTAPGKKRPVEPSPQRSPDSSTGIGKKGQQPAKKRLNFGQTGDSESVPDPQPLGEPPATPAAVGPTTMASGGGAPMADNNEGADGVGNSSGNWHCDSQWLGDRVITTSTRTWALPTYNNHLYKQISSQSGASNDNHYFGYSTPWGYFDFNRFHCHFSPRDWQRLINNNWGFRPKRLNFKLFNIQVKEVTTNDGVTTIANNLTSTVQVFSDSEYQLPYVLGSAHQGCLPPFPADVFMIPQYGYLTLNNGSQAVGRSSFYCLEYFPSQMLRTGNNFTFSYTFEDVPFHSSYAHSQSLDRLMNPLIDQYLYYLSRTNTPSGTTTQSRLQFSQAGASDIRDQSRNWLPGPCYRQQRVSKTKTDNNNSNFTWTGASKYNLNGRESIINPGTAMASHKDDEDKFFPMSGVMIFGKESAGASNTALDNVMITDEEEIKATNPVATERFGTVAVNFQSSSTDPATGDVHVMGALPGMVWQDRDVYLQGPIWAKIPHTDGHFHPSPLMGGFGLKNPPPQILIKNTPVPANPPAEFSATKFASFITQYSTGQVSVEIEWELQKENSKRWNPEVQYTSNYAKSANVDFTVDNNGLYTEPRPIGTRYLTRPL

SEQ ID NO: 5232 - DNA, 2211 bp, Artificial Sequence
  Description of Artificial Sequence: Synthetic polynucleotide
atggctgccgatggttatcttccagattggctcgaggacaacctctctgagggcattcgcgagtggtgggacttgaaacctggagcccctaaacccaaggcaaatcaacaacatcaggacaacgctcgaggtcttgtgcttccgggttacaaataccttggacccggcaacggactcgacaagggggagccggtcaacgcagcagacgcggcggccctcgagcacgacaaggcctacgaccagcagctcaaggccggagacaacccgtacctcaagtacaaccacgccgacgccgagttccaggagcggctcaaagaagatacgtcttttgggggcaacctcgggcgagcagtcttccaggccaaaaagaggcttcttgaacctcttggtctggttgaggaagcggctaagacggctcctggaaagaagagaccggtagagccatcaccccagcgttctccagactcctctacgggcatcggcaagaaaggccaacagcccgctaaaaagagactcaattttggtcagactggcgactcagagtcagtccccgacccacaacctctcggagaacctccagcaacccccgctgctgtgggacctactacaatggcttcaggcggtggcgcaccaatggcagacaataacgagggtgccgatggagtgggtaattcctcaggaaattggcattgcgattcccaatggctgggcgacagagtcatcaccaccagcaccagaacctgggccctgcccacttacaacaaccatctctacaagcaaatctccagccaatcaggagcttcaaacgacaaccactactttggctacagcaccccttgggggtattttgactttaacagattccactgccacttttcaccacgtgactggcaaagactcatcaacaacaactggggattccgacccaagagactcaacttcaagctcttcaacatccaagtcaaggaggtcacgacgaatgatggcgtcacgaccatcgctaataaccttaccagcacggttcaagtcttctcggactcggagtaccagttgccgtacgtcctcggctctgcgcaccagggctgcctccctccgttcccggcggacgtgttcatgattccgcagtacggctacctaacgctcaacaatggcagccaagccgtgggacgttcatccttttactgcctggaatatttcccttctcagatgctgagaacgggcaacaactttaccttcagctacacttttgaggacgttcctttccacagcagctacgctcacagccagagtctggaccgtctcatgaatcccctcatcgaccagtacctgtattacttgagcagaacaaacactccaagtggaaccaccacgcagtcaaggcttcagttttctcaggccggagcgagtgacattcgggaccagtctaggaactggcttcctggaccctgttaccggcagcagcgcgtttctaaaacaaaaacagacaacaacaacagcaactttacctggactggtgcttcaaaatataaccttaatgggcgtgaatctataatcaaccctggcactgctatggcctcacacaaagacgacgaagacaagttctttcccatgagcggtgtcatgatttttggaaaggagagcgccggagcttcaaacactgcattggacaatgtcatgatcacagacgaagaggaaatcaaagccactaaccccgtggccaccgaaagatttgggactgtggcagtcaatctccagagcagcagcacagaccctgcgaccggagatgtgcatgttatgggagccttacctggaatggtgtggcaagacagagacgtgtacctgcagggtcctatttgggccaaaattcctcacacggatggacactttcacccgtctcctctcatgggcggctttggacttaagcacccgcctcctcagatcctcatcaaaaacacgcctgttcctgcgaatcctccggcagagttttcggctacaaagtttgcttcattcatcacccagtattccacaggacaagtgagtgtggaaattgaatgggagctgcagaaagaaaacagcaagcgctggaatcccgaagtgcagtacacatccaattatgcaaaatctgccaacgttgattttactgtggacaacaatggactttatactgagcctcgccccattggcacccgttacctcacccgtcccctgtaa

SEQ ID NO: 5233 - protein, 736 aa, Artificial Sequence
  Description of Artificial Sequence: Synthetic polypeptide
MAADGYLPDWLEDNLSEGIREWWDLKPGAPKPKANQQHQDNARGLVLPGYKYLGPGNGLDKGEPVNAADAAALEHDKAYDQQLKAGDNPYLKYNHADAEFQERLKEDTSFGGNLGRAVFQAKKRLLEPLGLVEEAAKTAPGKKRPVEPSPQRSPDSSTGIGKKGQQPAKKRLNFGQTGDSESVPDPQPLGEPPATPAAVGPTTMASGGGAPMADNNEGADGVGNSSGNWHCDSQWLGDRVITTSTRTWALPTYNNHLYKQISSQSGASNDNHYFGYSTPWGYFDFNRFHCHFSPRDWQRLINNNWGFRPKRLNFKLFNIQVKEVTTNDGVTTIANNLTSTVQVFSDSEYQLPYVLGSAHQGCLPPFPADVFMIPQYGYLTLNNGSQAVGRSSFYCLEYFPSQMLRTGNNFTFSYTFEDVPFHSSYAHSQSLDRLMNPLIDQYLYYLSRTNTPSGTTTQSRLQFSQAGASDIRDQSRNWLPGPCYRQQRVSKTKTDNNNSNFTWTGASKYNLNGRESIINPGTAMASHKDDEDKFFPMSGVMIFGKESAGASNTALDNVMITDEEEIKATNPVATERFGTVAVNLQSSSTDPATGDVHVMGALPGMVWQDRDVYLQGPIWAKIPHTDGHFHPSPLMGGFGLKHPPPQILIKNTPVPANPPAEFSATKFASFITQYSTGQVSVEIEWELQKENSKRWNPEVQYTSNYAKSANVDFTVDNNGLYTEPRPIGTRYLTRPL

SEQ ID NO: 5234 - DNA, 2214 bp, Artificial Sequence
  Description of Artificial Sequence: Synthetic polynucleotide
atggctgccgatggttatcttccagattggctcgaggacaaccttagtgaaggaattcgcgagtggtgggctttgaaacctggagcccctcaacccaaggcaaatcaacaacatcaagacaacgctcgaggtcttgtgcttccgggttacaaataccttggacccggcaacggactcgacaagggggagccggtcaacgcagcagacgcggcggccctcgagcacgacaaggcctacgaccagcagctgcaggcgggtgacaatccgtacctgcggtataaccacgccgacgccgagtttcaggagcgtctgcaagaagatacgtcttttgggggcaaccttggcagagcagtcttccaggccaaaaagaggatccttgagcctcttggtctggttgaggaagcagctaaaacggctcctggaaagaagaggcctgtagatcagtctcctcaggaaccggactcatcatctggtgttggcaaatcgggcaaacagcctgccagaaaaagactaaatttcggtcagactggcgactcagagtcagtcccagaccctcaacctctcggagaaccaccagcagcccccacaagtttgggatctaatacaatggcttcaggcggtggcgcaccaatggcagacaataacgagggtgccgatggggtgggtagttcctcgggaaattggcattgcgattcccaatgactgggggacagagtcatcaccaccagcacccgaacctgggccctgcccacctacaacaatcacctctacaagcaaatctccaacgggacatcgggaggagccaccaacgacaacacctacttcggctacagcaccccctgggggtattttgactttaacagattccactgccacttttcaccacgtgactggcagcgactcatcaacaacaactggggattccggcccaagagactcagcttcaagctcttcaacatccaggtcaaggaggtcacgcagaatgaaggcaccaagaccatcgccaataacctcaccagcaccatccaggtgtttacggactcggagtaccagctgccgtacgttctcggctctgcgcaccagggctgcctccctccgttcccggcggacgtgttcatgattccgcaatacggctacctgacgctcaacaatggcagccaagccgtgggacgttcatccttttactgcctggaatatttcccttctcagatgctgagaacgggcaacaactttaccttcagctacacctttgaggaagtgcctttccacagcagctacgcgcacagccagagcttggaccggctgatgaatcctctgattgaccagtacctgtactacttgtctcggactcaaacaacaggaggcacggcaaatacgcagactctgggcttcagccaaggtgggcctaatacaatggccaatcaggcaaagaactggctgccaggaccctgttaccgccaacaacgcgtctcaacgacaaccgggcaaaacaacaatagcaactttgcctggactgctgggaccaaataccatctgaatggaagaaattcattggctaatcctggcatcgctatggcaacacacaaagacgacgaggagcgtttttttcccagtaacgggatcctgatttttggcaaacaaaatgctgccagagacaatgcggattacagcgatgtcatgctcaccagcgaggaagaaatcaaaaccactaaccctgtggctacagaggaatacggtatcgtggcagataacttgcagcagcaaaacacggctcctcaaattggaactgtcaacagccagggggccttacccggtatggtctggcagaaccgggacgtgtacctgcagggtcccatctgggccaagattcctcacacggacggcaacttccacccgtctccgctgatgggcggctttggcctgaaacatcctccgcctcagatcctgatcaagaacacgcctgtacctgcggatcctccgaccaccttcaaccagtcaaagctgaactctttcatcacgcaatacagcaccggacaggtcagcgtggagatcgagtgggagctgcagaaggaaaacagcaagcgctggaacccggagatccagtacacttccaactattacaagtctaataatgttgaatttgctgttaatactgaaggtgtatatagtgaaccccgccccattggcaccagatacctgactcgtaatctgtaa

SEQ ID NO: 5235 - protein, 736 aa, Artificial Sequence
  Description of Artificial Sequence: Synthetic polypeptide
MAADGYLPDWLEDNLSEGIREWWALKPGAPQPKANQQHQDNARGLVLPGYKYLGPGNGLDKGEPVNAADAAALEHDKAYDQQLQAGDNPYLRYNHADAEFQERLQEDTSFGGNLGRAVFQAKKRILEPLGLVEEAAKTAPGKKRPVDQSPQEPDSSSGVGKSGKQPARKRLNFGQTGDSESVPDPQPLGEPPAAPTSLGSNTMASGGGAPMADNNEGADGVGSSSGNWHCDSQLGDRVITTSTRTWALPTYNNHLYKQISNGTSGGATNDNTYFGYSTPWGYFDFNRFHCHFSPRDWQRLINNNWGFRPKRLSFKLFNIQVKEVTQNEGTKTIANNLTSTIQVFTDSEYQLPYVLGSAHQGCLPPFPADVFMIPQYGYLTLNNGSQAVGRSSFYCLEYFPSQMLRTGNNFTFSYTFEEVPFHSSYAHSQSLDRLMNPLIDQYLYYLSRTQTTGGTANTQTLGFSQGGPNTMANQAKNWLPGPCYRQQRVSTTTGQNNNSNFAWTAGTKYHLNGRNSLANPGIAMATHKDDEERFFPSNGILIFGKQNAARDNADYSDVMLTSEEEIKTTNPVATEEYGIVADNLQQQNTAPQIGTVNSQGALPGMVWQNRDVYLQGPIWAKIPHTDGNFHPSPLMGGFGLKHPPPQILIKNTPVPADPPTTFNQSKLNSFITQYSTGQVSVEIEWELQKENSKRWNPEIQYTSNYYKSNNVEFAVNTEGVYSEPRPIGTRYLTRNL

SEQ ID NO: 5236 - DNA, 2214 bp, Artificial Sequence
  Description of Artificial Sequence: Synthetic polynucleotide
atggctgccgatggttatcttccagattggctcgaggacaaccttagtgaaggaattcgcgagtggtgggctttgaaacctggagcccctcaacccaaggcaaatcaacaacatcaagacaacgctcgaggtcttgtgcttccgggttacaaataccttggacccggcaacggactcgacaagggggagccggtcaacgcagcagacgcggcggccctcgagcacgacaaggcctacgaccagcagctgcaggcgggtgacaatccgtacctgcggtataaccacgccgacgccgagtttcaggagcgtctgcaagaagatacgtcttttgggggcaaccttggcagagcagtcttccaggccaaaaagaggatccttgagcctcttggtctggttgaggaagcagctaaaacggctcctggaaagaagaggcctgtagatcagtctcctcaggaaccggactcatcatctggtgttggcaaatcgggcaaacagcctgccagaaaaagactaaatttcggtcagactggcgactcagagtcagtcccagaccctcaacctctcggagaaccaccagcagcccccacaagtttgggatctaatacaatggcttcaggcggtggcgcaccaatggcagacaataacgagggtgccgatggggtgggtagttcctcgggaaattggcattgcgattcccaatggctgggggacagagtcatcaccaccagcacccgaacctgggccctgcccacctacaacaatcacctctacaagcaaatctccaacgggacatcgggaggagccaccaacgacaacacctacttcggctacagcaccccctgggggtattttgactttaacagattccactgccacttttcaccacgtgactggcagcgactcatcaacaacaactggggattccggcccaagagactcagcttcaagctcttcaacatccaggtcaaggaggtcacgcagaatgaaggcaccaagaccatcgccaataacctcaccagcaccatccaggtgtttacggactcggagtaccagctgccgtacgttctcggctctgcgcaccagggctgcctccctccgttcccggcggacgtgttcatgattccgcaatacggctacctgacgctcaacaatggcagccaagccgtgggacgttcatccttttactgcctggaatatttcccttctcagatgctgagaacgggcaacaactttaccttcagctacacctttgaggaagtgccttttcacagcagctacgcgcacagccagagcttggaccggctgatgaatcctctgattgaccagtacctgtactacttgtctcggactcaaacaacaggaggcacggcaaatacgcagactctgggcttcagccaaggtgggcctaatacaatggccaatcaggcaaagaactggctgccaggaccctgttaccgccaacaacgcgtctcaacgacaaccgggcaaaacaacaatagcaactttgcctggactgctgggaccaaataccatctgaatggaagaaattcattggctaatcctggcatcgctatggcaacacacaaagacgacgaggagcgtttttttcccagtaacgggatcctgatttttggcaaacaaaatgctgccagagacaatgcggattacagcgatgtcatgctcaccagcgaggaagaaatcaaaaccactaaccctgtggctacagaggaatacggtatcgtggcagataacttgcagcagcaaaacacggctcctcaaattggaactgtcaacagccagggggccttacccggtatggtctggcagaaccgggacgtgtacctgcagggtcccatctgggccaagattcctcacacggacggcaacttccacccgtctccgctgatgggcggctttggcctgaaacatcctccgcctcagatcctgatcaagaacacgcctgtacctgcggatcctccgaccaccttcaaccagtcaaagctgaactctttcatcacgcaatacagcaccggacaggtcagcgtggagatcgagtgggagctgcagaaggaaaacagcaagcgctggaacccggagatccagtacacttccaactattacaagtctaataatgttgaatttgctgttaatactgaaggtgtatatagtgaaccccgccccattggcaccagatacctgactcgtaatctgtaa

SEQ ID NO: 5237 - protein, 737 aa, Artificial Sequence; identical to SEQ ID NO: 5225
  Description of Artificial Sequence: Synthetic polypeptide

SEQ ID NO: 5238 - DNA, 2211 bp, Artificial Sequence
  Description of Artificial Sequence: Synthetic polynucleotide
atggctgccgatggttatcttccagattggctcgaggacaacctctctgagggcattcgcgagtggtgggacttgaaacctggagcccctaaacccaaggcaaatcaacaacatcaggacaacgctcgaggtcttgtgcttccgggttacaaataccttggacccggcaacggactcgacaagggggagccggtcaacgcagcagacgcggcggccctcgagcacgacaaggcctacgaccagcagctcaaggccggagacaacccgtacctcaagtacaaccacgccgacgccgagttccaggagcggctcaaagaagatacgtcttttgggggcaacctcgggcgagcagtcttccaggccaaaaagaggcttcttgaacctcttggtctggttgaggaagcggctaagacggctcctggaaagaagagaccggtagagccatcaccccagcgttctccagactcctctacgggcatcggcaagaaaggccaacagcccgctaaaaagagactcaattttggtcagactggcgactcagagtcagtccccgacccacaacctctcggagaacctccagcaacccccgctgctgtgggacctactacaatggcttcaggcggtggcgcaccaatggcagacaataacgagggtgccgatggagtgggtaattcctcaggaaattggcattgcgattcccaatggctgggcgacagagtcatcaccaccagcaccagaacctgggccctgcccacttacaacaaccatctctacaagcaaatctccagccaatcaggagcttcaaacgacaaccactactttggctacagcaccccttgggggtattttgactttaacagattccactgccacttttcaccacgtgactggcaaagactcatcaacaacaactggggattccgacccaagagactcaacttcaagctcttcaacatccaagtcaaggaggtcacgacgaatgatggcgtcacgaccatcgctaataaccttaccagcacggttcaagtcttctcggactcggagtaccagttgccgtacgtcctcggctctgcgcaccagggctgcctccctccgttcccggcggacgtgttcatgattccgcagtacggctacctaacgctcaacaatggcagccaagccgtgggacgttcatccttttactgcctggaatatttcccttctcagatgctgagaacgggcaacaactttaccttcagctacacttttgaggacgttcctttccacagcagctacgctcacagccagagtctggaccgtctcatgaatcctctcatcgaccagtacctgtattacttgagcagaacaaacactccaagtggaaccaccacgcagtcaaggcttcagttttctcaggccggagcgagtgacattcgggaccagtctaggaactggcttcctggaccctgttaccgccagcagcgcgtttctaaaacaaaaacagacaacaacaacagcaattttacctggactggtgcttcaaaatataaccttaatgggcgtgaatctataatcaaccctggcactgctatggcctcacacaaagacgacgaagacaagttctttcccatgagcggtgtcatgatttttggaaaagagagcgccggagcttcaaacactgcattggacaatgtcatgattacagacgaagaggaaattaaagccactaaccctgtggccaccgaaagatttgggaccgtggcagtcaatttccagagcagcagcacagaccctgcgaccggagatgtgcatgctatgggagcattacctggcatggtgtggcaagatagagacgtgtacctgcagggtcccatttgggccaaaattcctcacacagatggacactttcacccgtctcctcttatgggcggctttggactcaagaacccgcctcctcagatcctcatcaaaaacacgcctgttcctgcgaatcctccggcggagttttcagctacaaagtttgcttcattcatcacccaatactccacaggacaagtgagtgtggaaattgaatgggagctgcagaaagaaaacagcaagcgctggaatcccgaagtgcagtacacatccaattatgcaaaatctgccaacgttgattttactgtggacaacaatggactttatactgagcctcgccccattggcacccgttaccttacccgtcccctgtaa

SEQ ID NO: 5239 - protein, 736 aa, Artificial Sequence
  Description of Artificial Sequence: Synthetic polypeptide
MAADGYLPDWLEDNLSEGIREWWDLKPGAPKPKANQQHQDNARGLVLPGYKYLGPGNGLDKGEPVNAADAAALEHDKAYDQQLKAGDNPYLKYNHADAEFQERLKEDTSFGGNLGRAVFQAKKRLLEPLGLVEEAAKTAPGKKRPVEPSPQRSPDSSTGIGKKGQQPAKKRLNFGQTGDSESVPDPQPLGEPPATPAAVGPTTMASGGGAPMADNNEGADGVGNSSGNWHCDSQWLGDRVITTSTRTWALPTYNNHLYKQISSQSGASNDNHYFGYSTPWGYFDFNRFHCHFSPRDWQRLINNNWGFRPKRLNFKLFNIQVKEVTTNDGVTTIANNLTSTVQVFSDSEYQLPYVLGSAHQGCLPPFPADVFMIPQYGYLTLNNGSQAVGRSSFYCLEYFPSQMLRTGNNFTFSYTFEDVPFHSSYAHSQSLDRLMNPLIDQYLYYLSRTNTPSGTTTQSRLQFSQAGASDIRDQSRNWLPGPCYRQQRVSKTKTDNNNSNFTWTGASKYNLNGRESIINPGTAMASHKDDEDKFFPMSGVMIFGKESAGASNTALDNVMITDEEEIKATNPVATERFGTVAVNFQSSSTDPATGDVHAMGALPGMVWQDRDVYLQGPIWAKIPHTDGHFHPSPLMGGFGLKNPPPQILIKNTPVPANPPAEFSATKFASFITQYSTGQVSVEIEWELQKENSKRWNPEVQYTSNYAKSANVDFTVDNNGLYTEPRPIGTRYLTRPL

SEQ ID NO: 5240 - DNA, 2211 bp, Artificial Sequence
  Description of Artificial Sequence: Synthetic polynucleotide
atggctgccgatggttatcttccagattggctcgaggacaaccttagtgaaggaattcgcgagtggtgggcgctgaaacctggagccccgaagcccaaagccaaccagcaaaagcaggacgacggccggggtctggtgcttccgggttacaaatacctcggacccggtaacggactcgacaaaggagagccggtcaacgaggcggacgcggcagccctcgagcacgacaaggcctacgaccagcagctcaaagcgggtgacaatccgtacctgcggtataaccacgccgacgccgagtttcaggagcgtctgcaagaagatacgtcttttgggggcaacctcgggcgagcagtcttccaggccaagaagcgggttctcgaacctctcggtctggttgaggaaggcgctaagacggctcccggaaagaaacgtccggtagagcagtcgccacaagagccagactcctctacgggcatcggcaagaaaggccaacagcccgccagaaaaagactcaatttcggtcagactggcgactcagagtcagttccagaccctcaacctctcggagaacctccagcagcgccctctggtgtgggacctactacaatggcttcaggcggtggcgcaccaatggcagacaataacgaaggcgccgacggagtgggtaatgcctcaggaaattggcattgcgattccacatggctgggcgacagagtcatcaccaccagcacccgaacatgggccttgcccacctataacaaccacctctacaagcaaatctccagtgcttcaacgggggccagcaacgacaacacctacttcggctacagcaccccctgggggtattttgatttcaacagattccactgccatttctcaccacgtgactggcagcgactcatcaacaacaattggggattccggcccaagagactcaacttcaaactcttcaacatccaagtcaaggaggtcacgacgaatgatggcgtcacgaccatcgctaataaccttaccagcacggttcaagtcttctcggactcggagtaccagttgccgtacgtcctcggctctgcgcaccagggctgcctccctccgttcccggcggacgtgttcatgattccgcagtacggctacctaacgctcaacaatggcagccaggcagtgggacggtcatccttttactgcctggaatatttcccatcgcagatgctgagaacgggcaataactttaccttcagctacaccttcgaggacgtgcctttccacagcagctacgcgcacagccagagcctggaccggctgatgaatcctctcatcgaccagtacctgtattacctgaacagaactcagaatcagtccggaagtgcccaaaacaaggacttgctgtttagccgggggtctccagctggcatgtctgttcagcccaaaaactggctacctggaccctgttatcggcagcagcgcgtttctaaaacaaaaacagacaacaacaacagcaattttacctggactggtgcttcaaaatataacctcaatgggcgtgaatccatcatcaaccctggcactgctatggcctcacacaaagacgacgaagacaagttctttcccatgagcggtgtcatgatttttggaaaagagagcgccggagcttcaaacactgcattggacaatgtcatgattacagacgaagaggaaattaaagccactaaccctgtggccaccgaaagatttgggaccgtggcagtcaatttccagagcagcagcacagaccctgcgaccggagatgtgcatgttatgggagccttacctggaatggtgtggcaagacagagacgtatacctgcagggtcctatttgggccaaaattcctcacacagatggacactttcacccgtctcctcttatgggcggctttggactcaagaacccgcctcctcagatcctcatcaaaaacacgcctgttcctgcgaatcctccggcagagttttcggctacaaagtttgcttcattcatcacccagtattccacaggacaagtgagcgtggagattgaatgggagctgcagaaagaaaacagcaaacgctggaatcccgaagtgcagtatacatctaactatgcaaaatctgccaacgttgatttcactgtggacaacaatggactttatactgagcctcgccccattggcacccgttacctcacccgtcccctgtaa

SEQ ID NO: 5241 - protein, 736 aa, Artificial Sequence
  Description of Artificial Sequence: Synthetic polypeptide
MAADGYLPDWLEDNLSEGIREWWALKPGAPKPKANQQKQDDGRGLVLPGYKYLGPGNGLDKGEPVNEADAAALEHDKAYDQQLKAGDNPYLRYNHADAEFQERLQEDTSFGGNLGRAVFQAKKRVLEPLGLVEEGAKTAPGKKRPVEQSPQEPDSSTGIGKKGQQPARKRLNFGQTGDSESVPDPQPLGEPPAAPSGVGPTTMASGGGAPMADNNEGADGVGNASGNWHCDSTWLGDRVITTSTRTWALPTYNNHLYKQISSASTGASNDNTYFGYSTPWGYFDFNRFHCHFSPRDWQRLINNNWGFRPKRLNFKLFNIQVKEVTTNDGVTTIANNLTSTVQVFSDSEYQLPYVLGSAHQGCLPPFPADVFMIPQYGYLTLNNGSQAVGRSSFYCLEYFPSQMLRTGNNFTFSYTFEDVPFHSSYAHSQSLDRLMNPLIDQYLYYLNRTQNQSGSAQNKDLLFSRGSPAGMSVQPKNWLPGPCYRQQRVSKTKTDNNNSNFTWTGASKYNLNGRESIINPGTAMASHKDDEDKFFPMSGVMIFGKESAGASNTALDNVMITDEEEIKATNPVATERFGTVAVNFQSSSTDPATGDVHVMGALPGMVWQDRDVYLQGPIWAKIPHTDGHFHPSPLMGGFGLKNPPPQILIKNTPVPANPPAEFSATKFASFITQYSTGQVSVEIEWELQKENSKRWNPEVQYTSNYAKSANVDFTVDNNGLYTEPRPIGTRYLTRPL

SEQ ID NO: 5242 - DNA, 2205 bp, Artificial Sequence
  Description of Artificial Sequence: Synthetic polynucleotide
atggctgctgacggttatcttccagattggctcgaggacaacctttctgaaggcattcgtgagtggtgggctctgaaacctggagtccctcaacccaaagcgaaccaacaacaccaggacaaccgtcggggtcttgtgcttccgggttacaaatacctcggacccggtaacggactcgacaaaggagagccggtcaacgaggcggacgcggcagccctcgaacacgacaaggcctacgaccagcagctcaaggccggagacaacccgtacctcaagtacaaccacgccgacgccgagttccaggagcggctcaaagaagatacgtcttttgggggcaacctcgggcgagcagtcttccaggccaaaaagaggcttcttgaacctcttggtctggttgaggaagcggctaagacggctcctggaaagaagaggcctgtagagcagtctcctcaggaaccggactcctccgcgggtattggcaaatcgggtgcacagcccgctaaaaagagactcaatttcggtcagactggcgacacagagtcagtcccagaccctcaaccaatcggagaacctcccgcagccccctcaggtgtgggatctcttacaatggcttcaggtggtggcgcaccagtggcagacaataacgaaggtgccgatggagtgggtagttcctcgggaaattggcattgcgattcccaatggctgggggacagagtcatcaccaccagcacccgaacctgggccctgcccacctacaacaaccacctctacaaacaaatttccagccaatcaggagcctcgaacgacaatcactactttggctacagcaccccttgggggtattttgacttcaacagattccactgccacttttcaccacgtgactggcagcgactcatcaacaacaactggggattccggcccaagagactcagcttcaagctcttcaacatccaggtcaaagaggttacggacaacaatggagtcaagaccatcgccaataaccttaccagcacggtccaggtcttcacggactcagactatcagctcccgtacgtgctcgggtcggctcacgagggctgcctcccgccgttcccagcggacgttttcatgattcctcagtacgggtatctgacgcttaatgatggaagccaggccgtgggtcgttcgtccttttactgcctggaatatttcccgtcgcaaatgctaagaacgggtaacaacttccagttcagctacgagtttgagaacgtacctttccatagcagctacgctcacagccaaagcctggaccgactaatgaatccactcatcgaccaatacttgtactatctctcaaagactattaacggttctggacagaatcaacaaacgctaaaattcagtgtggccggacccagcaacatggctgtccagggaagaaactacatacctggacccagctaccgacaacaacgtgtctcaaccactgtgactcaaaacaacaacagcgaatttgcttggcctggagcttcttcttgggctctcaatggacgtaatagcttgatgaatcctggacctgctatggccagccacaaagaaggagaggaccgtttctttcctttgtctggatctttaatttttggcaaacaaggaactggaagagacaacgtggatgcggacaaagtcatgataaccaacgaagaagaaattaaaactactaacccggtagcaacggagtcctatggacaagtggccacaaaccaccagagtgcccaagcacaggcgcagaccggctgggttcaaaaccaaggaatacttccgggtatggtttggcaggacagagatgtgtacctgcaaggacccatctgggccaagattcctcacacggacggcaacttccacccgtctccgctgatgggcggctttggcctgaaacatcctccgcctcagatcctgatcaagaacacgcctgtacctgcggatcctccgaccaccttcaaccagtcaaagctgaactctttcatcacgcaatacagcaccggacaggtcagcgtggaaattgaatgggagctgcagaaggaaaacagcaagcgctggaatcccgaagtgcagtatacatctaactatgcaaaatctgccaacgttgatttcactgtggacaacaatggactttatactgagcctcgccccattggcacccgttacctcacccgtcccctgtaa

SEQ ID NO: 5243 - protein, 734 aa, Artificial Sequence
  Description of Artificial Sequence: Synthetic polypeptide
MAADGYLPDWLEDNLSEGIREWWALKPGVPQPKANQQHQDNRRGLVLPGYKYLGPGNGLDKGEPVNEADAAALEHDKAYDQQLKAGDNPYLKYNHADAEFQERLKEDTSFGGNLGRAVFQAKKRLLEPLGLVEEAAKTAPGKKRPVEQSPQEPDSSAGIGKSGAQPAKKRLNFGQTGDTESVPDPQPIGEPPAAPSGVGSLTMASGGGAPVADNNEGADGVGSSSGNWHCDSQWLGDRVITTSTRTWALPTYNNHLYKQISSQSGASNDNHYFGYSTPWGYFDFNRFHCHFSPRDWQRLINNNWGFRPKRLSFKLFNIQVKEVTDNNGVKTIANNLTSTVQVFTDSDYQLPYVLGSAHEGCLPPFPADVFMIPQYGYLTLNDGSQAVGRSSFYCLEYFPSQMLRTGNNFQFSYEFENVPFHSSYAHSQSLDRLMNPLIDQYLYYLSKTINGSGQNQQTLKFSVAGPSNMAVQGRNYIPGPSYRQQRVSTTVTQNNNSEFAWPGASSWALNGRNSLMNPGPAMASHKEGEDRFFPLSGSLIFGKQGTGRDNVDADKVMITNEEEIKTTNPVATESYGQVATNHQSAQAQAQTGWVQNQGILPGMVWQDRDVYLQGPIWAKIPHTDGNFHPSPLMGGFGLKHPPPQILIKNTPVPADPPTTFNQSKLNSFITQYSTGQVSVEIEWELQKENSKRWNPEVQYTSNYAKSANVDFTVDNNGLYTEPRPIGTRYLTRPL

SEQ ID NO: 5244 - DNA, 2211 bp, Artificial Sequence
  Description of Artificial Sequence: Synthetic polynucleotide
atggctgccgatggttatcttccagattggctcgaggacaacctctctgagggcattcgcgagtggtgggcgctgaaacctggagccccgaagcccaaagccaaccagcaaaagcaggacgacggccggggtctggtgcttcctggctacaagtacctcggacccttcaacggactcgacaagggggagcccgtcaacgcggcggacgcagcggccctcgagcacgacaaggcctacgaccagcagctgcaggcgggtgacaatccgtacctgcggtataaccacgccgacgccgagtttcaggagcgtctgcaagaagatacgtcttttgggggcaacctcgggcgagcagtcttccaggccaagaagtgggttctcgaacctctcggtctggttgaggaaggcgctaagacggctcctggaaagaaacgtccggtagagcagtcgccacaagagccagactcctcctcgggcatcggcaagacaggccagcagcccgctaaaaagagactcaattttggtcagactggcgactcagagtcagtccccgacccacaacctctcggagaacctccagcaacccccgctgctgtgggacctactacaatggcttcaggcggtggcgcaccaatggcagacaataacgaaggcgccgacggagtgggtaatgcctcaggaaattggcattgcgattccacatggctgggcgacagagtcatcaccaccagcacccgcacctgggccttgcccacctacaataaccacctctacaagcaaatctccagtgcttcaacgggggccagcaacgacaaccactacttcggctacagcaccccctgggggtattttgatttcaacagattccactgccatttctcaccacgtgactggcagcgactcatcaacaacaattggggattccggcccaagagactcaacttcaagctcttcaacatccaagtcaaggaggtcacgacgaatgatggcgtcacaaccatcgctaataaccttaccagcacggttcaagtcttctcggactcggagtaccagcttccgtacgtcctcggctctgcgcaccagggctgcctccctccgttcccggcggacgtgttcatgattccgcaatacggctacctgacgctcaacaatggcagccaagccgtgggacgttcatccttttactgcctggaatatttcccttctcagatgctgagaacgggcaacaactttaccttcagctacacctttgaggaagtgcctttccacagcagctacgcgcacagccagagcctggaccggctgatgaatcctctcatcgaccaatacctgtattacctgaacagaactcaaaatcagtccggaagtgcccaaaacaaggacttgctgtttagccgtgggtctccagctggcatgtctgttcagcccaaaaactggctacctggaccctgttatcggcagcagcgcgtttctaaaacaaaaacagacaacaacaacagcaattttacctggactggtgcttcaaaatataacctcaatgggcgtgaatccatcatcaaccctggcactgctatggcctcacacaaagacgacgaagacaagttctttcccatgagcggtgtcatgatttttggaaaggagagcgccggagcttcaaacactgcattggacaatgtcatgatcaccgacgaagaggaaatcaaagccactaaccccgtggccaccgaaagatttgggactgtggcagtcaatctccagagcagcagcacagaccctgcgaccggagatgtgcatgttatgggagccttacctggcatggtgtggcaagatagagacgtgtacctgcagggtcccatttgggccaaaattcctcacacagatggacactttcacccgtctcctcttatgggcggctttggactcaagaacccgcctcctcagatcctcatcaaaaacacgcctgttcctgcgaatcctccggcggagttttcagctacaaagtttgcttcattcatcacccaatactccacaggacaagtgagtgtggaaattgaatgggagctgcagaaagaaaacagcaagcgctggaatcccgaagtgcagtacacatccaattatgcaaaatctgccaacgttgattttactgtggacaacaatggactttatactgagcctcgccccattggcacccgttacctcacccgtcccctgtaa

SEQ ID NO: 5245 - protein, 736 aa, Artificial Sequence
  Description of Artificial Sequence: Synthetic polypeptide
MAADGYLPDWLEDNLSEGIREWWALKPGAPKPKANQQKQDDGRGLVLPGYKYLGPFNGLDKGEPVNAADAAALEHDKAYDQQLQAGDNPYLRYNHADAEFQERLQEDTSFGGNLGRAVFQAKKWVLEPLGLVEEGAKTAPGKKRPVEQSPQEPDSSSGIGKTGQQPAKKRLNFGQTGDSESVPDPQPLGEPPATPAAVGPTTMASGGGAPMADNNEGADGVGNASGNWHCDSTWLGDRVITTSTRTWALPTYNNHLYKQISSASTGASNDNHYFGYSTPWGYFDFNRFHCHFSPRDWQRLINNNWGFRPKRLNFKLFNIQVKEVTTNDGVTTIANNLTSTVQVFSDSEYQLPYVLGSAHQGCLPPFPADVFMIPQYGYLTLNNGSQAVGRSSFYCLEYFPSQMLRTGNNFTFSYTFEEVPFHSSYAHSQSLDRLMNPLIDQYLYYLNRTQNQSGSAQNKDLLFSRGSPAGMSVQPKNWLPGPCYRQQRVSKTKTDNNNSNFTWTGASKYNLNGRESIINPGTAMASHKDDEDKFFPMSGVMIFGKESAGASNTALDNVMITDEEEIKATNPVATERFGTVAVNLQSSSTDPATGDVHVMGALPGMVWQDRDVYLQGPIWAKIPHTDGHFHPSPLMGGFGLKNPPPQILIKNTPVPANPPAEFSATKFASFITQYSTGQVSVEIEWELQKENSKRWNPEVQYTSNYAKSANVDFTVDNNGLYTEPRPIGTRYLTRPL

SEQ ID NO: 5246 - DNA, 2214 bp, Artificial Sequence
  Description of Artificial Sequence: Synthetic polynucleotide
atggctgccgatggttatcttccagattggctcgaggacaaccttagtgaaggaattcgcgagtggtgggctttgaaacctggagcccctcaacccaaggcaaatcaacaacatcaagacaacgctcgaggtcttgtgcttccgggttacaaataccttggacccggcaacggactcgacaagggggagccggtcaacgcagcagacgcggcggccctcgagcacgacaaggcctacgaccagcagctgcaggcgggtgacaatccgtacctgcggtataaccacgccgacgccgagtttcaggagcgtctgcaagaagatacgtcttttgggggcaaccttggcagagcagtcttccaggccaaaaagaggatccttgagcctcttggtctggttgaggaagcagctaaaacggctcctggaaagaagaggcctgtagatcagtctcctcaggaaccggactcatcatctggtgttggcaaatcgggcaaacagcctgccagaaaaagactaaatttcggtcagactggcgactcagagtcagtcccagaccctcaacctctcggagaaccaccagcagcccccacaagtttgggatctaatacaatggcttcaggcggtggcgcaccaatggcagacaataacgagggtgccgatggggtgggtagttcctcgggaaattggcattgcgattcccaatggctgggggacagagtcatcaccaccagcacccgaacctgggccctgcccacctacaacaatcacctctacaagcaaatctccaacgggacatcgggaggagccaccaacgacaacacctacttcggctacagcaccccctgggggtattttgactttaacagattccactgccacttttcaccacgtgactggcagcgactcatcaacaacaactggggattccggcccaagagactcagcttcaagctcttcaacatccaggtcaaggaggtcacgcagaatgaaggcaccaagaccatcgccaataacctcaccagcaccatccaggtgtttacggactcggagtaccagctgccgtacgttctcggctcggcgcaccagggctgcctccctccgttcccggcggacgtcttcatggtgccacagtatggatacctgacgctcaacaatggcagccaagccgtgggacgttcatccttttactgcctggaatatttcccttctcagatgctgagaacgggcaacaactttaccttcagctacacctttgaggaagtgcctttccacagcagctacgcgcacagccagagcttggaccggctgatgaatcctctgattgaccagtacctgtactacttgtctcggactcaaacaacaggaggcacggcaaatacgcagactctgggcttcagccaaggtgggcctaatacaatggccaatcaggcaaagaactggctgccaggaccctgttaccgccaacaacgcgtctcaacgacaaccgggcaaaacaacaatagcaactttgcctggactgctgggaccaaataccatctgaatggaagaaattcattggctaatcctggcatcgctatggcaacacacaaagacgacgaggagcgtttttttcccagtaacgggatcctgatttttggcaaacaaaatgctgccagagacaatgcggattacagcgatgtcatgctcaccagcgaggaagaaatcaaaaccactaaccctgtggctacagaggaatacggtatcgtggcagataacttgcagcagcaaaacacggctcctcaaattggaactgtcaacagccagggggacttacccggtatggtctggcagaaccgggacgtgtacctgcagggtcccatctgggccaagattcctcacacggacggcaacttccacccgtctccgctgatgggcggctttggcctgaaacatcctccgcctcagatcctgatcaagaacacgcctgtacctgcggatcctccgaccaccttcaaccagtcaaagctgaactctttcatcacgcaatacagcaccggacaggtcagcgtggagatcgagtgggagctgcagaaggaaaacagcaagcgctggaacccggagatccagtacacttccaactattacaagtctaataatgttgaatttgctgttaatactgaaggtgtatatagtgaaccccgccccattggcaccagatacctgactcgtaatctgtaa

SEQ ID NO: 5247 - protein, 737 aa, Artificial Sequence
  Description of Artificial Sequence: Synthetic polypeptide
MAADGYLPDWLEDNLSEGIREWWALKPGAPQPKANQQHQDNARGLVLPGYKYLGPGNGLDKGEPVNAADAAALEHDKAYDQQLQAGDNPYLRYNHADAEFQERLQEDTSFGGNLGRAVFQAKKRILEPLGLVEEAAKTAPGKKRPVDQSPQEPDSSSGVGKSGKQPARKRLNFGQTGDSESVPDPQPLGEPPAAPTSLGSNTMASGGGAPMADNNEGADGVGSSSGNWHCDSQWLGDRVITTSTRTWALPTYNNHLYKQISNGTSGGATNDNTYFGYSTPWGYFDFNRFHCHFSPRDWQRLINNNWGFRPKRLSFKLFNIQVKEVTQNEGTKTIANNLTSTIQVFTDSEYQLPYVLGSAHQGCLPPFPADVFMVPQYGYLTLNNGSQAVGRSSFYCLEYFPSQMLRTGNNFTFSYTFEEVPFHSSYAHSQSLDRLMNPLIDQYLYYLSRTQTTGGTANTQTLGFSQGGPNTMANQAKNWLPGPCYRQQRVSTTTGQNNNSNFAWTAGTKYHLNGRNSLANPGIAMATHKDDEERFFPSNGILIFGKQNAARDNADYSDVMLTSEEEIKTTNPVATEEYGIVADNLQQQNTAPQIGTVNSQGDLPGMVWQNRDVYLQGPIWAKIPHTDGNFHPSPLMGGFGLKHPPPQILIKNTPVPADPPTTFNQSKLNSFITQYSTGQVSVEIEWELQKENSKRWNPEIQYTSNYYKSNNVEFAVNTEGVYSEPRPIGTRYLTRNL

SEQ ID NO: 5248 - DNA, 2205 bp, Artificial Sequence
  Description of Artificial Sequence: Synthetic polynucleotide
atggctgctgacggttatcttccagattggctcgaggacaacctttctgaaggcattcgtgagtggtgggctctgaaacctggagtccctcaacccaaagcgaaccaacaacaccaggacaactgtcggggtcttgtgcttccgggttacaaatacctcggacccggtaacggactcgacaaaggagagccggtcaacgaggcggacgcggcagccctcgaacacgacaaggcctacgaccagcagctcaaggccggagacaacccgtacctcaagtacaaccacgccgacgccgagttccaggagcggctcaaagaagatacgtcttttgggggcaacctcgggcgagcagtcttccagaccaaaaagaggcttcttgaacctcttggtctggttgaggaagcggctaagacggctcctggaaagaagaggcctgtagagcagtctcctcaggaaccggactcctccgcgggtattggcaaatcgggtgcacagcccgctaaaaagagactcaatttcggtcagactggcgacacagagtcagtcccagaccctcaaccaatcggagaacctcccgcagccccctcaggtgtgggatctcttacaatggcttcaggtggtggcgcaccagtggcagacaataacgaaggtgccgatggagtgggtagttcctcgggaaattggcattgcgattcccaatggctgggggacagagtcatcaccaccagcacccgaacctgggccctgcccacctacaacaaccacctctacaaacaaatttccagccaatcaggagcctcgaacgacaatcactactttggctacagcaccccttgggggtattttgacttcaacagattccactgccacttttcaccacgtgactggcagcgactcatcaacaacaactggggattccggcccaagagactcagcttcaagctcttcaacatccaggtcaaagaggttacggacaacaatggagtcaagaccatcgccaataaccttaccagcacggtccaggtcttcacggactcagactatcagctcccgtacgtgctcgggtcggctcacgagggctgcctcccgccgttcccagcggacgttttcatgattcctcagtacgggtatctgacgcttaatgatggaagccaggccgtgggtcgttcgtccttttactgcctggaatatttcccgtcgcaaatgctaagaacgggtaacaacttccagttcagctacgagtttgagaacgtacctttccatagcagctacgctcacagccaaagcctggaccgactaatgaatccactcatcgaccaatacttgtactatctctcaaagactattaacggttctggacagaatcaacaaacgctaaaattcagtgtggccggacccagcaacatggctgtccagggaagaaactacatacctggacccagctaccgacaacaacgtgtctcaaccactgtgactcaaaacaacaacagcgaatttgcttggcctggagcttcttcttgggctctcaatggacgtaatagcttgatgaatcctggacctgctatggccagccacaaagaaggagaggaccgtttctttcctttgtctggatctttaatttttggcaaacaaggaactggaagagacaacgtggatgcggacaaagtcatgataaccaacgaagaagaaattaaaactactaacccggtagcaacggagtcctatggacaagtggccacaaaccaccagagtgcccaagcacaggcgcagaccggctgggttcaaaaccaaggaatacttccgggtatggtttggcaggacagagatgtgtacctgcaaggacccatctgggccaagattcctcacacggacggcaacttccacccgtctccgctgatgggcggctttggcctgaaacatcctccgcctcagatcctgatcaagaacacgcctgttcctgcgaatcctccggcggagttttcagctacaaagtttgcttcattcatcacccagtactccacaggacaagtgagtgtggaaattgaatgggagctgcagaaagaaaacagcaagcgctggaatcccgaagtgcagtacacatccaattatgcaaaatctgccaacgttgattttactgtggacaacaatggactttatactgagcctcgccccattggcacccgttaccttaccaaacctctgtaa

SEQ ID NO: 5249 - protein, 734 aa, Artificial Sequence
  Description of Artificial Sequence: Synthetic polypeptide
MAADGYLPDWLEDNLSEGIREWWALKPGVPQPKANQQHQDNCRGLVLPGYKYLGPGNGLDKGEPVNEADAAALEHDKAYDQQLKAGDNPYLKYNHADAEFQERLKEDTSFGGNLGRAVFQTKKRLLEPLGLVEEAAKTAPGKKRPVEQSPQEPDSSAGIGKSGAQPAKKRLNFGQTGDTESVPDPQPIGEPPAAPSGVGSLTMASGGGAPVADNNEGADGVGSSSGNWHCDSQWLGDRVITTSTRTWALPTYNNHLYKQISSQSGASNDNHYFGYSTPWGYFDFNRFHCHFSPRDWQRLINNNWGFRPKRLSFKLFNIQVKEVTDNNGVKTIANNLTSTVQVFTDSDYQLPYVLGSAHEGCLPPFPADVFMIPQYGYLTLNDGSQAVGRSSFYCLEYFPSQMLRTGNNFQFSYEFENVPFHSSYAHSQSLDRLMNPLIDQYLYYLSKTINGSGQNQQTLKFSVAGPSNMAVQGRNYIPGPSYRQQRVSTTVTQNNNSEFAWPGASSWALNGRNSLMNPGPAMASHKEGEDRFFPLSGSLIFGKQGTGRDNVDADKVMITNEEEIKTTNPVATESYGQVATNHQSAQAQAQTGWVQNQGILPGMVWQDRDVYLQGPIWAKIPHTDGNFHPSPLMGGFGLKHPPPQILIKNTPVPANPPAEFSATKFASFITQYSTGQVSVEIEWELQKENSKRWNPEVQYTSNYAKSANVDFTVDNNGLYTEPRPIGTRYLTKPL

SEQ ID NO: 5250 - DNA, 2211 bp, Artificial Sequence
  Description of Artificial Sequence: Synthetic polynucleotide
atggctgccgatggttatcttccagattggctcgaggacaacctctctgagggcattcgcgagtggtgggacttgaaacctggagcccctaaacccaaggcaaatcaacaacatcaggacaacgctcgaggtcttgtgcttccgggttacaaataccttggacccggcaacggactcgacaagggggagccggtcaacgcagcagacgcggcggccctcgagcacgacaaggcctacgaccagcagctcaaggccggagacaacccgtacctcaagtacaaccacgccgacgccgagttccaggagcggctcaaagaagatacgtcttttgggggcaacctcgggcgagcagtcttccaggccaaaaagaggcttcttgaacctcttggtctggttgaggaagcggctaagacggctcctggaaagaagagaccggtagagccatcaccccagcgttctccagactcctctacgggcatcggcaagaaaggccaacagcccgctaaaaagagactcaattttggtcagactggcgactcagagtcagtccccgacccacaacctctcggagaacctccagcaacccccgctgctgtgggacctactacaatggcttcaggcggtggcgcaccaatggcagacaataacgagggtgccgatggagtgggtaattcctcaggaaattggcattgcgattcccaatggctgggcgacagagtcatcaccaccagcaccagaacctgggccctgcccacttacaacaaccatctctacaagcaaatctccagccaatcaggagcttcaaacgacaaccactactttggctacagcaccccttgggggtattttgactttaacagattccactgccacttttcaccacgtgactggcaaagactcatcaacaacaactggggattccgacccaagagactcaacttcaagctcttcaacatccaagtcaaggaggtcacgacgaatgatggcgtcacgaccatcgctaataaccttaccagcacggttcaagtcttctcggactcggagtaccagttgccgtacgtcctcggctctgcgcaccagggctgcctccctccgttcccggcggacgtgttcatgattccgcagtacggctacctaacgctcaacaatggcagccaagccgtgggacgttcatccttttactgcctggaatatttcccttctcagatgctgagaacgggcaacaactttaccttcagctacacttttgaggacgttcctttccacagcagctacgctcacagccagagtctggaccgtctcatgaatcctctcatcgaccagtacctgtattacttgagcagaacaaacactccaagtggaaccaccacgcagtcaaggcttcagttttctcaggccggagcgagtgacattcgggaccagtctaggaactggcttcctggaccctgttaccgccagcagcgcgtttctaaaacaaaaacagacaacaacaacagcaattttacctggactggtgcttcaaaatataaccttaatgggcgtgaatctataatcaaccctggcactgctatggcctcacacaaagacgacgaagacaagttctttcccatgagcggtgtcatgatttttggaaaagagagcgccggagcttcaaacactgcattggacaatgtcatgatcacagacgaagaggaaatcaaagccactaaccccgtggccaccgaaagatttgggactgtggcagtcaatctccagagcagcagcacagaccctgcgaccggagatgtgcatgttatgggagcattacctggcatggtgtggcaagatagagacgtgtacctgcagggtcccatttgggccaaaattcctcacacagatggacactttcacccgtctcctcttatgggcggctttggactcaagaacccgcctcctcagatcctcatcaaaaacacgcctgttcctgcgaatcctccggcggagttttcagctacaaagtttgcttcattcatcacccaatactccacaggacaagtgagtgtggaaattgaatgggagctgcagaaagaaaacagcaagcgctggaatcccgaagtgcagtacacatccaattatgcaaaatctgccaacgttgattttactgtggacaacaatggactttatactgagcctcgccccattggcacccgttaccttacccgtcccctgtaa

SEQ ID NO: 5251 - protein, 736 aa, Artificial Sequence
  Description of Artificial Sequence: Synthetic polypeptide
MAADGYLPDWLEDNLSEGIREWWDLKPGAPKPKANQQHQDNARGLVLPGYKYLGPGNGLDKGEPVNAADAAALEHDKAYDQQLKAGDNPYLKYNHADAEFQERLKEDTSFGGNLGRAVFQAKKRLLEPLGLVEEAAKTAPGKKRPVEPSPQRSPDSSTGIGKKGQQPAKKRLNFGQTGDSESVPDPQPLGEPPATPAAVGPTTMASGGGAPMADNNEGADGVGNSSGNWHCDSQWLGDRVITTSTRTWALPTYNNHLYKQISSQSGASNDNHYFGYSTPWGYFDFNRFHCHFSPRDWQRLINNNWGFRPKRLNFKLFNIQVKEVTTNDGVTTIANNLTSTVQVFSDSEYQLPYVLGSAHQGCLPPFPADVFMIPQYGYLTLNNGSQAVGRSSFYCLEYFPSQMLRTGNNFTFSYTFEDVPFHSSYAHSQSLDRLMNPLIDQYLYYLSRTNTPSGTTTQSRLQFSQAGASDIRDQSRNWLPGPCYRQQRVSKTKTDNNNSNFTWTGASKYNLNGRESIINPGTAMASHKDDEDKFFPMSGVMIFGKESAGASNTALDNVMITDEEEIKATNPVATERFGTVAVNLQSSSTDPATGDVHVMGALPGMVWQDRDVYLQGPIWAKIPHTDGHFHPSPLMGGFGLKNPPPQILIKNTPVPANPPAEFSATKFASFITQYSTGQVSVEIEWELQKENSKRWNPEVQYTSNYAKSANVDFTVDNNGLYTEPRPIGTRYLTRPL

SEQ ID NO: 5252 - DNA, 2214 bp, Artificial Sequence; identical to SEQ ID NO: 5224
  Description of Artificial Sequence: Synthetic polynucleotide

SEQ ID NO: 5253 - protein, 737 aa, Artificial Sequence; identical to SEQ ID NO: 5225
  Description of Artificial Sequence: Synthetic polypeptide

SEQ ID NO: 5254 - DNA, 2205 bp, Artificial Sequence
  Description of Artificial Sequence: Synthetic polynucleotide
atggctgctgacggttatcttccagattggctcgaggacaacctttctgaaggcattcgtgagtggtgggctctgaaacctggagtccctcaacccaaagcgaaccaacaacaccaggacaaccgtcggggtcttgtgcttccgggttacaaatacctcggacccggtaacggactcgacaaaggagagccggtcaacgaggcggacgcggcagccctcgaacacgacaaggcctacgaccagcagctcaaggccggagacaacccgtacctcaagtacaaccacgccgacgccgagttccaggagcggctcaaagaagatacgtcttttgggggcaacctcgggcgagcagtcttccaggccaaaaagaggcttcttgaacctcttggtctggttgaggaagcggctaagacggctcctggaaagaagaggcctgtagagcagtctcctcaggaaccggactcctccgcgggtattggcaaatcgggtgcacagcccgctaaaaagagactcaatttcggtcagactggcgacacagagtcagtcccagaccctcaaccaatcggagaacctcccgcagccccctcaggtgtgggatctcttacaatggcttcaggtggtggcgcaccagtggcagacaataacgaaggtgccgatggagtgggtagttcctcgggaaattggcattgcgattcccaatggctgggggacagagtcatcaccaccagcacccgaacctgggccctgcccacctacaacaaccacctctacaaacaaatttccagccaatcaggagcctcgaacgacaatcactactttggctacagcaccccttgggggtattttgacttcaacagattccactgccacttttcaccacgtgactggcagcgactcatcaacaacaactggggattccggcccaagagactcagcttcaagctcttcaacatccaggtcaaagaggttacggacaacaatggagtcaagaccatcgccaataaccttaccagcacggtccaggtcttcacggactcagactatcagctcccgtacgtgctcgggtcggctcacgagggctgcctcccgccgttcccagcggacgttttcatgattcctcagtacgggtatctgacgcttaatgatggaagccaggccgtgggtcgttcgtccttttactgcctggaatatttcccgtcgcaaatgctaagaacgggtaacaacttccagttcagctacgagtttgagaacgtacctttccatagcagctacgctcacagccaaagcctggaccgactaatgaatccactcatcgaccaatacttgtactatctctcaaagactattaacggttctggacagaatcaacaaacgctaaaattcagtgtggccggacccagcaacatggctgtccagggaagaaactacatacctggacccagctaccgacaacaacgtgtctcaaccactgtgactcaaaacaacaacagcgaatttgcttggcctggagcttcttcttgggctctcaatggacgtaatagcttgatgaatcctggacctgctatggccagccacaaagaaggagaggaccgtttctttcctttgtctggatctttaatttttggcaaacaaggaactggaagagacaacgtggatgcggacaaagtcatgataaccaacgaagaagaaattaaaactactaacccggtagcaacggagtcctatggacaagtggccacaaaccaccagagtgcccaagcacaggcgcagaccggctgggttcaaaaccaaggaatacttccgggtatggtttggcaggacagagatgtgtacctgcaaggacccatttgggccaaaattcctcacacggacggcaactttcacccttctccgctgatgggagggtttggaatgaaacacccgcctcctcagatcctcatcaaaaacacacctgtacctgcggatcctccaacggccttcaacaaggacaagctgaactctttcatcacccagtattctactggccaagtcagcgtggagatcgagtgggagctgcagaaggaaaacagcaagcgctggaaccccgagatccagtacacctccaactactacaaatctacaagtgtggactttgctgttaatacagaaggcgtgtactctgaaccccgccccattggcacccgttacctcacccgtaatctgtaa

SEQ ID NO: 5255 - protein, 734 aa, Artificial Sequence
  Description of Artificial Sequence: Synthetic polypeptide
MAADGYLPDWLEDNLSEGIREWWALKPGVPQPKANQQHQDNRRGLVLPGYKYLGPGNGLDKGEPVNEADAAALEHDKAYDQQLKAGDNPYLKYNHADAEFQERLKEDTSFGGNLGRAVFQAKKRLLEPLGLVEEAAKTAPGKKRPVEQSPQEPDSSAGIGKSGAQPAKKRLNFGQTGDTESVPDPQPIGEPPAAPSGVGSLTMASGGGAPVADNNEGADGVGSSSGNWHCDSQWLGDRVITTSTRTWALPTYNNHLYKQISSQSGASNDNHYFGYSTPWGYFDFNRFHCHFSPRDWQRLINNNWGFRPKRLSFKLFNIQVKEVTDNNGVKTIANNLTSTVQVFTDSDYQLPYVLGSAHEGCLPPFPADVFMIPQYGYLTLNDGSQAVGRSSFYCLEYFPSQMLRTGNNFQFSYEFENVPFHSSYAHSQSLDRLMNPLIDQYLYYLSKTINGSGQNQQTLKFSVAGPSNMAVQGRNYIPGPSYRQQRVSTTVTQNNNSEFAWPGASSWALNGRNSLMNPGPAMASHKEGEDRFFPLSGSLIFGKQGTGRDNVDADKVMITNEEEIKTTNPVATESYGQVATNHQSAQAQAQTGWVQNQGILPGMVWQDRDVYLQGPIWAKIPHTDGNFHPSPLMGGFGMKHPPPQILIKNTPVPADPPTAFNKDKLNSFITQYSTGQVSVEIEWELQKENSKRWNPEIQYTSNYYKSTSVDFAVNTEGVYSEPRPIGTRYLTRNL

SEQ ID NO: 5256 - DNA, 2217 bp, Artificial Sequence
  Description of Artificial Sequence: Synthetic polynucleotide
atggctgccgatggttatcttccagattggctcgaggacaacctctctgagggcattcgcgagtggtgggcgctgaaacctggagccccgaagcccaaagccaaccagcaaaagcaggacgacggccggggtctggtgcttcctggctacaagtacctcggacccttcaacggactcgacaagggggagcccgtcaacgcggcggacgcagcggccctcgagcacgacaaggcctacgaccagcagctgcaggcgggtgacaatccgtacctgcggtataaccacgccgacgccgagtttcaggagcgtctgcaagaagatacgtcttttgggggcaacctcgggcgagcagtcttccaggccaagaagcgggttctcgaacctctcggtctggttgaggaaggcgctaagacggctcctggaaagaagagaccggtagagccatcaccccagcgttctccagactcctctacgggcatcggcaagaaaggccaacagcccgccagaaaaagactcaattttggtcagactggcgactcagagtcagttccagaccctcaacctctcggagaacctccagcagcgccctctggtgtgggacctaatacaatggctgcaggcggtggcgcaccaatggcagacaataacgaaggcgccgacggagtgggtagttcctcgggaaattggcattgcgattccacatggctgggcgacagagtcatcaccaccagcacccgaacctgggccctgcccacctacaacaaccacctctacaagcaaatctccaacgggacatcgggaggagccaccaacgacaacacctacttcggctacagcaccccctgggggtattttgactttaacagattccactgccacttttcaccacgtgactggcagcgactcatcaacaacaactggggattccggcccaagagactcagcttcaagctcttcaacatccaggtcaaggaggtcacgcagaatgaaggcaccaagaccatcgccaataacctcaccagcaccatccaggtgtttacggactcggagtaccagctgccgtacgttctcggctctgcccaccagggctgcctgcctccgttcccggcggacgtgttcatgattccccagtacggctacctaacactcaacaacggtagtcaggccgtgggacgctcctccttctactgcctggaatactttccttcgcagatgctgagaaccggcaacaacttccagtttacttacaccttcgaggacgtgcctttccacagcagctacgcccacagccagagcttggaccggctgatgaatcctctgattgaccagtacctgtactacttgtctcggactcaaacaacaggaggcacggcaaatacgcagactctgggcttcagccaaggtgggcctaatacaatggccaatcaggcaaagaactggctgccaggaccctgttaccgccaacaacgcgtctcaacgacaaccgggcaaaacaacaatagcaactttgcctggactgctgggaccaaataccatctgaatggaagaaattcattggctaatcctggcatcgctatggcaacacacaaagacgacgaggagcgtttttttcccagtaacgggatcctgatttttggcaaacaaaatgctgccagagacaatgcggattacagcgatgtcatgctcaccagcgaggaagaaatcaaaaccactaaccctgtggctacagaggaatacggtatcgtggcagataacttgcagcagcaaaacacggctcctcaaattggaactgtcaacagccagggggccttacccggtatggtctggcagaaccgggacgtgtacctgcagggtcccatctgggccaagattcctcacacggacggcaacttccacccctctcccctcatgggtggattcggacttaaacatcctccgcctcagatcctgatcaagaacacgcctgtacctgcggatcctccgaccaccttcaaccagtcaaagctgaactctttcatcacgcaatacagcaccggacaggtcagcgtggaaattgaatgggagctgcagaaggaaaacagcaagcgctggaaccccgagatccagtacacctccaactactacaaatctacaagtgtggactttgctgttaatacagaaggcgtgtactctgaaccccgccccattggcacccgttacctcacccgtaatctgtaa

SEQ ID NO: 5257 - protein, 738 aa, Artificial Sequence; identical to SEQ ID NO: 5159
  Description of Artificial Sequence: Synthetic polypeptide

SEQ ID NO: 5258 - DNA, 2211 bp, Artificial Sequence
  Description of Artificial Sequence: Synthetic polynucleotide
atggctgctgacggttatcttccagattggctcgaggacaacctttctgaaggcattcgagagtggtgggcgctgcaacctggagcccctaaacccaaggcaaatcaacaacatcaggacaacgctcggggtcttgtgcttccgggttacaaatacctcggacccggcaacggactcgacaagggggaacccgtcaacgcagcggacgcggcagccctcgagcacgacaaggcctacgaccagcagctcaaggccggtgacaacccctacctcaagtacaaccacgccgacgccgagttccaggagcggctcaaagaagatacgtcttttgggggcaacctcgggcgagcagtcttccaggccaaaaagaggcttcttgaacctcttggtctggttgaggaagcggctaagacggctcctggaaagaagaggcctgtagatcagtctcctcaggaaccggactcatcatctggtgttggcaaatcgggcaaacagcctgccagaaaaagactaaatttcggtcagactggcgactcagagtcagtcccagaccctcaacctctcggagaaccaccagcagcccccacaagtttgggatctaatacaatggcttcaggcggtggcgcaccaatggcagacaataacgagggtgccgatggagtgggtaattcctcaggaaattggcattgcgattcccaatggctgggcgacagagtcatcaccaccagcaccagaacctgggccctgcccacttacaacaaccatctctacaagcaaatctccagccaatcaggagcttcaaacgacaaccactactttggctacagcaccccttgggggtattttgactttaacagattccactgccacttctcaccacgtgactggcagcgactcattaacaacaactggggattccggcccaagaaactcagcttcaagctcttcaacatccaagttaaagaggtcacgcagaacgatggcacgacgactattgccaataaccttaccagcacggttcaggtgtttacggactcggagtatcagctcccgtacgtgctcgggtcggcgcaccaaggctgtctcccgccgtttccagcggacgtcttcatggtccctcagtatggatacctcaccctgaacaacggaagtcaagcggtgggacgctcatccttttactgcctggagtacttcccttcgcagatgctaaggactggaaataacttccaattcagctataccttcgaggatgtaccttttcacagcagctacgctcacagccagagtttggatcgcttgatgaatcctcttattgatcagtatctgtactacctgaacagaacgcaaggaacaacctctggaacaaccaaccaatcacggctgctttttagccaggctgggcctcagtctatgtctttgcaggccagaaattggctacctgggccctgctaccggcaacagagactttcaaagactgctaacgacaacaacaacagtaactttccttggacagcggccagcaaatatcatctcaatggccgcgactcgctggtgaatccaggaccagctatggccagtcacaaggacgatgaagaaaaatttttccctatgcacggcaatctaatatttggcaaagaagggacaacggcaagtaacgcagaattagataatgtaatgattacggatgaagaagagattcgtaccaccaatcctgtggcaacagagcagtatggaactgtggcaaataacttgcagagctcaaatacagctcccacgactagaactgtcaatgatcagggggccttacctggcatggtgtggcaagatcgtgacgtgtaccttcaaggacctatctgggcaaagattcctcacacggatggacactttcatccttctcctctgatgggaggctttggactgaaacatccgcctcctcaaatcatgatcaaaaatactccggtaccggcaaatcctccgacgactttcagcccggccaagtttgcttcatttatcactcagtactccactggacaggtcagcgtggaaattgagtgggagctacagaaagaaaacagcaaacgttggaatccagagattcagtacacttccaactacaacaagtctgttaatgtggactttactgtagacactaatggtgtttatagtgaacctcgccccattggcacccgttaccttacccgtcccctgtaa

SEQ ID NO: 5259 - protein, 736 aa, Artificial Sequence; identical to SEQ ID NO: 5229
  Description of Artificial Sequence: Synthetic polypeptide

SEQ ID NO: 5260 - DNA, 2211 bp, Artificial Sequence; identical to SEQ ID NO: 5228
  Description of Artificial Sequence: Synthetic polynucleotide

SEQ ID NO: 5261 - protein, 736 aa, Artificial Sequence; identical to SEQ ID NO: 5229
  Description of Artificial Sequence: Synthetic polypeptide

SEQ ID NO: 5262 - DNA, 2211 bp, Artificial Sequence
  Description of Artificial Sequence: Synthetic polynucleotide
atggctgctgacggttatcttccagattggctcgaggacaacctttctgaaggcattcgtgagtggtgggctctgaaacctggagtccctcaacccaaagcgaaccaacaacaccaggacaaccgtcggggtcttgtgcttccgggttacaaatacctcggacccggtaacggactcgacaaaggagagcccgtcaacgcggcggatgcagcggccctcgagcacgacaaggcctacgaccagcagctcaaagcgggtgacaatccgtacctgcggtataaccacgccgacgccgagtttcaggagcgtctgcaagaagatacgtcttttgggggcaacctcgggcgagcagtcttccaggccaagaagagggttctcgaaccttttggtctggttgaggaaggtgctaagacggctcctggaaagaaacgtccggtagagcagtcgccacaagagccagactcctcctcgggcatcggcaagacaggccagcagcccgctaaaaagagactcaattttggtcagactggcgactcagagtcagtccccgacccacaacctctcggagaacctccagcaacccccgctgctgtgggacctactacaatggcttcaggcggtggcgcaccaatggcagacaataacgaaggcgccgacggagtgggtaatgcctcaggaaattggcattgcgattccacatggctgggcgacagagtcatcaccaccagcacccgcacctgggccttgcccacctacaataaccacctctacaagcaaatctccagtgcttcaacgggggccagcaacgacaaccactacttcggctacagcaccccctgggggtattttgatttcaacagattccactgccatttctcaccacgtgactggcagcgactcatcaacaacaattggggattccggcccaagagactcaacttcaagctcttcaacatccaagtcaaggaggtcacgacgaatgatggcgtcacgaccatcgctaataaccttaccagcacggttcaagtcttctcggactcggagtaccagcttccgtacgtcctcggctctgcgcaccagggctgcctccctccgttcccggcggacgtgttcatgattccgcaatacggctacctgacgctcaacaatggcagccaagccgtgggacgttcatccttttactgcctggaatatttcccttctcagatgctgagaacgggcaacaactttaccttcagctacacctttgaggaagtgcctttccacagcagctacgcgcacagccagagcctggaccggctgatgaatcctctcatcgaccaatacctgtattacctgaacagaactcaaaatcagtccggaagtgcccaaaacaaggacttgctgtttagccgtgggtctccagctggcatgtctgttcagcccaaaaactggctacctggaccctgttatcggcagcagcgcgtttctaaaacaaaaacagacaacaacaacagcaattttacctggactggtgcttcaaaatataacctcaatgggcgtgaatccatcatcaaccctggcactgctatggcctcacacaaagacgacgaagacaagttctttcccatgagcggtgtcatgatttttggaaaagagagcgccggagcttcaaacactgcattggacaatgtcatgattacagacgaagaggaaattaaagccactaaccctgtggccaccgaaagatttgggaccgtggcagtcaatttccagagcagcagcacagaccctgcgaccggagatgtgcatgttatgggagccttacctggaatggtgtggcaagacagagacgtatacctgcagggtcctatttgggccaaaattcctcacacggatggacactttcacccgtctcctctcatgggcggctttggacttaagcacccgcctcctcagatcctcatcaaaaacacgcctgttcctgcgaatcctccggcagagttttcggctacaaagtttgcttcattcatcacccagtattccacaggacaagtgagcgtggagattgaatgggagctgcagaaagaaaacagcaaacgctggaatcccgaagtgcagtatacatctaactatgcaaaatctgccaacgttgatttcactgtggacaacaatggactttatactgagcctcgccccattggcacccgttacctcacccgtcccctgtaa

SEQ ID NO: 5263 - protein, 736 aa, Artificial Sequence
  Description of Artificial Sequence: Synthetic polypeptide
MAADGYLPDWLEDNLSEGIREWWALKPGVPQPKANQQHQDNRRGLVLPGYKYLGPGNGLDKGEPVNAADAAALEHDKAYDQQLKAGDNPYLRYNHADAEFQERLQEDTSFGGNLGRAVFQAKKRVLEPFGLVEEGAKTAPGKKRPVEQSPQEPDSSSGIGKTGQQPAKKRLNFGQTGDSESVPDPQPLGEPPATPAAVGPTTMASGGGAPMADNNEGADGVGNASGNWHCDSTWLGDRVITTSTRTWALPTYNNHLYKQISSASTGASNDNHYFGYSTPWGYFDFNRFHCHFSPRDWQRLINNNWGFRPKRLNFKLFNIQVKEVTTNDGVTTIANNLTSTVQVFSDSEYQLPYVLGSAHQGCLPPFPADVFMIPQYGYLTLNNGSQAVGRSSFYCLEYFPSQMLRTGNNFTFSYTFEEVPFHSSYAHSQSLDRLMNPLIDQYLYYLNRTQNQSGSAQNKDLLFSRGSPAGMSVQPKNWLPGPCYRQQRVSKTKTDNNNSNFTWTGASKYNLNGRESIINPGTAMASHKDDEDKFFPMSGVMIFGKESAGASNTALDNVMITDEEEIKATNPVATERFGTVAVNFQSSSTDPATGDVHVMGALPGMVWQDRDVYLQGPIWAKIPHTDGHFHPSPLMGGFGLKHPPPQILIKNTPVPANPPAEFSATKFASFITQYSTGQVSVEIEWELQKENSKRWNPEVQYTSNYAKSANVDFTVDNNGLYTEPRPIGTRYLTRPL

SEQ ID NO: 5264 - DNA, 2217 bp, Artificial Sequence
  Description of Artificial Sequence: Synthetic polynucleotide
atggctgccgatggttatcttccagattggctcgaggacaacctctctgagggcattcgcgagtggtgggacttgaaacctggagccccgaaacccaaagccaaccagcaaaagcaggacgacggccggggtctggtgcttcctggctacaagtacctcggacccttcaacggactcgacaagggggagcccgtcaacgcggcggatgcaacggccctcgagcacgacaaggcctacgaccagcagctgcaggcgggtgacaatccgtacctgcggtataaccacgccgacgccgagtttcaggagcgtctgcaagaagatacgtcttttgggggcaacctcgggcgagcagtcttccaggccaagaagcgggttctcgaacctctcggtctggttgaggaaggcgctaagacggctcctggaaagaagagaccggtagagccatcaccccagcgttctccagactcctctacgggcatcggcaagaaaggccaacagcccgccagaaaaagactcaattttggtcagactggcgactcagagtcagttccagaccctcaacctctcggagaaccaccagcagcccccacaagtttgggatctaatacaatggcttcaggcggtggcgcaccaatggcagacaataacgagggtgccgatggagtgggtaattcctcaggaaattggcattgcgattcccaatggctgggcgacagagtcatcaccaccagcacccgcacctgggccttgcccacctacaataaccacctctacaagcaaatctccagtgcttcaacgggggccagcaacgacaaccactacttcggctacagcaccccctgggggtattttgactttaaccgcttccactgccacttctcgccaagagactggcaaagactcatcaacaacaattggggattccggcccaagagactcaacttcaaactcttcaacatccaagtcaaggaggtcacgacgaatgatggcgtcacgaccatcgccaataacctcaccagcaccatccaggtgtttacggactcggagtaccagctgccgtacgttctcggctctgcccaccagggctgcctgcctccgttcccggcggacgtgttcatgattccccagtatggatacctcaccctgaacaacggaagtcaagcggtgggacgctcatccttttactgcctggagtacttcccttcgcagatgctaaggactggaaataacttccaattcagctataccttcgaggatgtaccttttcacagcagctacgctcacagccagagtttggatcgcttgatgaatcctcttattgatcagtatctgtactacctgaacagaacgcaaggaacaacctctggaacaaccaaccaatcacggctgctttttagccaggctgggcctcagtctatgtctttgcaggccagaaattggctacctgggccctgctaccggcaacagagactttcaaagactgctaacgacaacaacaacagtaactttccttggacagcagccagcaaatatcatctcaatggccgcgactcgctggtgaatccaggaccagctatggccagtcacaaggacgatgaagaaaaatttttccctatgcacggcaatctaatatttggcaaagaagggacaacggcaagtaacgcagaattagataatgtaatgattacggatgaagaagagattcgtaccaccaatcctgtggcaacagagcagtatggaactgtggcaaataacttgcagagctcaaatacagctcccacgactagaactgtcaatgatcagggggccttacctggcatggtgtggcaagatcgtgacgtgtaccttcaggggcccatctgggcaaagattccacacacggacggacattttcacccctctcccctcatgggtggattcggacttaaacaccctcctccgcagattctcatcaagaacaccccggtacctgcgaatccttcgaccaccttcagtgcggcaaagtttgcttccttcatcacacagtactccacgggacaggtcagcgtggagatcgagtgggagctgcagaaggaaaacagcaagcgctggaacccggagatccagtacacttccaactattacaagtctaataatgttgaatttgctgttaatactgaaggtgtatatagtgaaccccgccccattggcaccagatacctgactcgtaatctgtaa

SEQ ID NO: 5265 - protein, 738 aa, Artificial Sequence
  Description of Artificial Sequence: Synthetic polypeptide
MAADGYLPDWLEDNLSEGIREWWDLKPGAPKPKANQQKQDDGRGLVLPGYKYLGPFNGLDKGEPVNAADATALEHDKAYDQQLQAGDNPYLRYNHADAEFQERLQEDTSFGGNLGRAVFQAKKRVLEPLGLVEEGAKTAPGKKRPVEPSPQRSPDSSTGIGKKGQQPARKRLNFGQTGDSESVPDPQPLGEPPAAPTSLGSNTMASGGGAPMADNNEGADGVGNSSGNWHCDSQWLGDRVITTSTRTWALPTYNNHLYKQISSASTGASNDNHYFGYSTPWGYFDFNRFHCHFSPRDWQRLINNNWGFRPKRLNFKLFNIQVKEVTTNDGVTTIANNLTSTIQVFTDSEYQLPYVLGSAHQGCLPPFPADVFMIPQYGYLTLNNGSQAVGRSSFYCLEYFPSQMLRTGNNFQFSYTFEDVPFHSSYAHSQSLDRLMNPLIDQYLYYLNRTQGTTSGTTNQSRLLFSQAGPQSMSLQARNWLPGPCYRQQRLSKTANDNNNSNFPWTAASKYHLNGRDSLVNPGPAMASHKDDEEKFFPMHGNLIFGKEGTTASNAELDNVMITDEEEIRTTNPVATEQYGTVANNLQSSNTAPTTRTVNDQGALPGMVWQDRDVYLQGPIWAKIPHTDGHFHPSPLMGGFGLKHPPPQILIKNTPVPANPSTTFSAAKFASFITQYSTGQVSVEIEWELQKENSKRWNPEIQYTSNYYKSNNVEFAVNTEGVYSEPRPIGTRYLTRNL

SEQ ID NO: 5266 - DNA, 2208 bp, Artificial Sequence
  Description of Artificial Sequence: Synthetic polynucleotide
atggctgccgatggttatcttccagattggctcgaggacaaccttagtgaaggaattcgcgagtggtgggacttgaaacctggagccccgaagcccaaagccaaccagcaaaagcaggacgacggccggggtctggtgcttcctggctacaagtacctcggacccttcaacggactcgacaagggggagcccgtcaacgcggcggacgcagcggccctcgagcacgacaaggcctacgaccagcagctcaaagcgggtgacaatccgtacctgcggtataaccacgccgacgccgagtttcaggagcgtctgcaagaagatacgtcttttgggggcaacctcgggcgagcagtcttccaggccaagaagcgggttctcgaacctctcggtctggttgaggaaggtgctaagacggctcctggaaagaaacgtccggtagagcagtcgccacaagagccagactcctcctcgggcattggcaagacaggccagcagcccgctaaaaagagactcaattttggtcagactggcgactcagagtcagtccccgacccacaacctctcggagaacctccagcaacccccgctgctgtgggacctactacaatggcttcaggcggtggcgcaccaatggcagacaataacgaaggcgccgacggagtgggtaatgcctcaggaaattggcattgcgattccacatggctgggcgacagagtcatcaccaccagcacccgaacctgggccctgcccacctacaacaaccacctctacaaacaaatttccagccaatcaggagcctcgaacgacaatcactactttggctacagcaccccttgggggtattttgatttcaacagattccactgccacttttcaccacgtgactggcagcgactcatcaacaacaattggggattccggcccaagagactcagcttcaagctcttcaacatccaggtcaaggaggtcacgcagaatgaaggcaccaagaccatcgccaataaccttaccagcacggttcaagtgtttacggactcggagtatcagctcccgtacgtgctcggctcggcgcatcaaggatgcctcccgccgttcccagcagacgtcttcatggtgccacagtatggatacctcaccctgaacaacgggagtcaggcagtaggacgctcttcattttactgcctggagtactttccttctcagatgctgcgtaccggaaacaactttaccttcagctacacttttgaggacgttcctttccacagcagctacgctcacagccagagtctggaccgtctcatgaatcctctgattgaccagtacctgtattacttgagcagaacaaacactccaagtggaaccaccacgcagtcaaggcttcagttttctcaggccggagcgagtgacattcgggaccagtctaggaactggcttcctggaccctgttaccgccagcagcgagtatcaaagacatctgcggataacaacaacagtgaatactcgtggactggagctaccaagtaccacctcaatggcagagactctctggtgaatccgggcccggccatggcaagccacaaggactatgaagaaaagttttttcctcagagcggggttctcatctttgggaagcaaggctcagagaaaacaaatgtggacattgaaaaggtcatgattacagacgaagaggaaatcaggacaaccaatcccgtggctacggagcagtatggttctgtatctaccaacctccagagaggcaacagacaagcagctaccgcagatgtcaacacacaaggcgttcttccaggcatggtctggcaggacagagatgtgtaccttcaggggcccatctgggcaaagattccacacacggacggacattttcacccgtctccgctgatgggcggctttggcctgaaacatcctccgcctcagatcctgatcaagaacacgcctgtacctgcggatcctccgaccaccttcaaccagtcaaagctgaactctttcatcactcagtattctactggccaagtcagcgtggagatcgagtgggagctgcagaaggaaaacagcaagcgctggaaccccgagatccagtacacctccaactactacaaatctacaagtgtggactttgctgttaatacagaaggcgtgtactctgaaccccgccccattggcacccgttacctcacccgtaatctgtaa

SEQ ID NO: 5267 - protein, 735 aa, Artificial Sequence
  Description of Artificial Sequence: Synthetic polypeptide
MAADGYLPDWLEDNLSEGIREWWDLKPGAPKPKANQQKQDDGRGLVLPGYKYLGPFNGLDKGEPVNAADAAALEHDKAYDQQLKAGDNPYLRYNHADAEFQERLQEDTSFGGNLGRAVFQAKKRVLEPLGLVEEGAKTAPGKKRPVEQSPQEPDSSSGIGKTGQQPAKKRLNFGQTGDSESVPDPQPLGEPPATPAAVGPTTMASGGGAPMADNNEGADGVGNASGNWHCDSTWLGDRVITTSTRTWALPTYNNHLYKQISSQSGASNDNHYFGYSTPWGYFDFNRFHCHFSPRDWQRLINNNWGFRPKRLSFKLFNIQVKEVTQNEGTKTIANNLTSTVQVFTDSEYQLPYVLGSAHQGCLPPFPADVFMVPQYGYLTLNNGSQAVGRSSFYCLEYFPSQMLRTGNNFTFSYTFEDVPFHSSYAHSQSLDRLMNPLIDQYLYYLSRTNTPSGTTTQSRLQFSQAGASDIRDQSRNWLPGPCYRQQRVSKTSADNNNSEYSWTGATKYHLNGRDSLVNPGPAMASHKDYEEKFFPQSGVLIFGKQGSEKTNVDIEKVMITDEEEIRTTNPVATEQYGSVSTNLQRGNRQAATADVNTQGVLPGMVWQDRDVYLQGPIWAKIPHTDGHFHPSPLMGGFGLKHPPPQILIKNTPVPADPPTTFNQSKLNSFITQYSTGQVSVEIEWELQKENSKRWNPEIQYTSNYYKSTSVDFAVNTEGVYSEPRPIGTRYLTRNL

SEQ ID NO: 5268 - DNA, 2214 bp, Artificial Sequence
  Description of Artificial Sequence: Synthetic polynucleotide
atggctgccgatggttatcttccagattggctcgaggacaacctctctgagggcattcgcgagtggtgggacttgaaacctggagccccgaaacccaaagccaaccagcaaaagcaggacgacggccggggtctggtgcttcctggctacaagtacctcggacccttcaacggactcgacaagggggagcccgtcaacgcggcggatgcagcggccctcgagcacgacaaggcctacgaccagcagctcaaagcgggtgacaatccgtacctgcggtataaccacgccgacgccgagtttcaggagcgtctgcaagaagatacgtcttttgggggcaacctcgggcgagcagtcttccaggccaagaagagggttctcgaaccttttggtctggttgaggaaggtgctaagacggctcctggaaagaaacgtccggtagagcagtcgccacaagagccagactcctcctcgggcattggcaagacaggccagcagcctgcaagaaaaagattgaattttggtcagactggagacgcagactcagtacctgacccccagcctctcggacagccaccagcagccccctctggtctgggaactaatacgatggctacaggcagtggcgcaccaatggcagacaataacgagggcgccgacggagtgggtaattcctcgggaaattggcattgcgattcccaatggctgggggacagagtcatcaccaccagcacccgaacctgggccctgcccacctacaacaatcacctctacaagcaaatctccaacagcacatctggaggatcttcaaatgacaacgcctacttcggctacagcaccccctgggggtattttgatttcaacagattccactgccatttctcaccacgtgactggcagcgactcatcaacaacaattggggattccggcccaagagactcaacttcaagctcttcaacatccaggtcaaggaggtcacgcagaatgaaggcaccaagaccatcgccaataacctcaccagcaccatccaggtgtttacggactcggagtaccagctgccgtacgttctcggctctgcccaccagggctgcctgcctccgttcccggcggacgtgttcatgattccccagtacggctacctaacactcaacaacggtagtcaggccgtgggacgctcctccttctactgcctggaatactttccttcgcagatgctgagaaccggcaacaacttccagtttacttacaccttcgaggacgtgcctttccacagcagctacgcccacagccagagcttggaccggctgatgaatcctctgattgaccagtacctgtactacttgtctcggactcaaacaacaggaggcacgacaaatacgcagactctgggcttcagccaaggtgggcctaatacaatggccaatcaggcaaagaactggctgccaggaccctgttaccgccagcagcgagtatcaaagacatttgcggataacaacaacagtgaatactcgtggactggagctaccaagtaccacctcaatggcagagactctctggtgaatccgggcccggccatggcaagccacaaggacgatgaagaaaagttttttcctcagagcggggttctcatctttgggaagcaaggctcagagaaaacaaatgtggacattgaaaaggtcatgattacagacgaagaggaaatcaggacaaccaatcccgtggctacggagcagtatggttctgtatctaccaacctccagagaggcaacagacaagcagctaccgcagatgtcaacacacaaggcgttcttccaggcatggtctggcaggacagagatgtgtaccttcaggggcccatctgggcaaagattccacacacggacggacattttcacccctctcccctcatgggtggattcggacttaaacaccctccgcctcagatcctgatcaagaacacgcctgtacccgcggatcctccgaccaccttcaaccagtcaaagctgaactctttcatcacccagtattctactggccaagtcagcgtggagatcgagtgggagctgcagaaggaaaacagcaagcgctggaaccccgagatccagtacacctccaactactacaaatctacaagtgtggactttgctgttaatacagaaggcgtgtactctgaaccccgccccattggcacccgttacctcacccgtaatctgtaa

SEQ ID NO: 5269 - protein, 737 aa, Artificial Sequence
  Description of Artificial Sequence: Synthetic polypeptide
MAADGYLPDWLEDNLSEGIREWWDLKPGAPKPKANQQKQDDGRGLVLPGYKYLGPFNGLDKGEPVNAADAAALEHDKAYDQQLKAGDNPYLRYNHADAEFQERLQEDTSFGGNLGRAVFQAKKRVLEPFGLVEEGAKTAPGKKRPVEQSPQEPDSSSGIGKTGQQPARKRLNFGQTGDADSVPDPQPLGQPPAAPSGLGTNTMATGSGAPMADNNEGADGVGNSSGNWHCDSQWLGDRVITTSTRTWALPTYNNHLYKQISNSTSGGSSNDNAYFGYSTPWGYFDFNRFHCHFSPRDWQRLINNNWGFRPKRLNFKLFNIQVKEVTQNEGTKTIANNLTSTIQVFTDSEYQLPYVLGSAHQGCLPPFPADVFMIPQYGYLTLNNGSQAVGRSSFYCLEYFPSQMLRTGNNFQFTYTFEDVPFHSSYAHSQSLDRLMNPLIDQYLYYLSRTQTTGGTTNTQTLGFSQGGPNTMANQAKNWLPGPCYRQQRVSKTFADNNNSEYSWTGATKYHLNGRDSLVNPGPAMASHKDDEEKFFPQSGVLIFGKQGSEKTNVDIEKVMITDEEEIRTTNPVATEQYGSVSTNLQRGNRQAATADVNTQGVLPGMVWQDRDVYLQGPIWAKIPHTDGHFHPSPLMGGFGLKHPPPQILIKNTPVPADPPTTFNQSKLNSFITQYSTGQVSVEIEWELQKENSKRWNPEIQYTSNYYKSTSVDFAVNTEGVYSEPRPIGTRYLTRNL

SEQ ID NO: 5270 - DNA, 2217 bp, Artificial Sequence
  Description of Artificial Sequence: Synthetic polynucleotide
atggctgccgatggttatcttccagattggctcgaggacactctctctgaaggaataagacagtggtgggcgctgaaacctggagccccgaagcccaaagccaaccagcaaaagcaggacgacggccggggtctggtgcttcctggctacaagtacctcggacccttcaacggactcgacaagggggagcccgtcaacgcggcggatgcagcggccctcgagcacgacaaggcctacgaccagcagctcaaagcgggtgacaatccgtacctgcggtataaccacgccgacgccgagtttcaggagcgtctgcaagaagatacgtcttttgggggcaacctcgggcgagcagtcttccaggccaagaagcgggttctcgaacctctcggtctggttgaggaaggcgctaagacggctcctggaaagaagagaccggtagagccatcaccccagcgttctccagactcctctacgggcatcggcaagaaaggccaacagcccgccagaaaaagactcaattttggtcagactggcgactcagagtcagttccagaccctcaacctctcggagaaccaccagcagcccccacaagtttgggatctaatacaatggcttcaggcggtggcgcaccaatggcagacaataacgagggtgccgatggagtgggtaattcctcaggaaattggcattgcgattcccaatggctgggcgacagagtcatcaccaccagcacccgcacctgggccttgcccacctacaataaccacctctacaagcaaatctccagtgcttcaacgggggccagcaacgacaaccactacttcggctacagcaccccctgggggtattttgactttaaccgcttccactgccacttctcgccaagagactggcaaagactcatcaacaacaattggggattccggcccaagagactcaacttcaaactcttcaacatccaagtcaaggaggtcacgacgaatgatggcgtcacgaccatcgccaataacctcaccagcaccatccaggtgtttacggactcggagtaccagctgccgtacgttctcggctctgcccaccagggctgcctgcctccgttcccggcggacgtgttcatgattccccagtatggatacctcaccctgaacaacggaagtcaagcggtgggacgctcatccttttactgcctggagtacttcccttcgcagatgctaaggactggaaataacttccaattcagctataccttcgaggatgtaccttttcacagcagctacgctcacagccagagtttggatcgcttgatgaatcctcttattgatcagtatctgtactacctgaacagaacgcaaggaacaacctctggaacaaccaaccaatcacggctgctttttagccaggctgggcctcagtctatgtctttgcaggccagaaattggctacctgggccctgctaccggcaacagagactttcaaagactgctaacgacaacaacaacagtaactttccttggacagcagccagcaaatatcatctcaatggccgcgactcgctggtgaatccaggaccagctatggccagtcacaaggacgatgaagaaaaatttttccctatgcacggcaatctaatatttggcaaagaagggacaacggcaagtaacgcagaattagataatgtaatgattacggatgaagaagagattcgtaccaccaatcctgtggcaacagagcagtatggaactgtggcaaataacttgcagagctcaaatacagctcccacgactagaactgtcaatgatcagggggccttacctggcatggtgtggcaagatcgtgacgtgtaccttcaggggcccatctgggcaaagattccacacacggacggacattttcacccctctcccctcatgggtggattcggacttaaacaccctcctccgcagattctcatcaagaacaccccggtacctgcgaatccttcgaccaccttcagtgcggcaaagtttgcttccttcatcacacagtactccacgggacaggtcagcgtggagatcgagtgggagctgcagaaggaaaacagcaagcgctggaacccggagatccagtacacttccaactattacaagtctaataatgttgaatttgctgttaatactgaaggtgtatatagtgaaccccgccccattggcaccagatacctgactcgtaatctgtaa

SEQ ID NO: 5271 - protein, 738 aa, Artificial Sequence
  Description of Artificial Sequence: Synthetic polypeptide
MAADGYLPDWLEDTLSEGIRQWWALKPGAPKPKANQQKQDDGRGLVLPGYKYLGPFNGLDKGEPVNAADAAALEHDKAYDQQLKAGDNPYLRYNHADAEFQERLQEDTSFGGNLGRAVFQAKKRVLEPLGLVEEGAKTAPGKKRPVEPSPQRSPDSSTGIGKKGQQPARKRLNFGQTGDSESVPDPQPLGEPPAAPTSLGSNTMASGGGAPMADNNEGADGVGNSSGNWHCDSQWLGDRVITTSTRTWALPTYNNHLYKQISSASTGASNDNHYFGYSTPWGYFDFNRFHCHFSPRDWQRLINNNWGFRPKRLNFKLFNIQVKEVTTNDGVTTIANNLTSTIQVFTDSEYQLPYVLGSAHQGCLPPFPADVFMIPQYGYLTLNNGSQAVGRSSFYCLEYFPSQMLRTGNNFQFSYTFEDVPFHSSYAHSQSLDRLMNPLIDQYLYYLNRTQGTTSGTTNQSRLLFSQAGPQSMSLQARNWLPGPCYRQQRLSKTANDNNNSNFPWTAASKYHLNGRDSLVNPGPAMASHKDDEEKFFPMHGNLIFGKEGTTASNAELDNVMITDEEEIRTTNPVATEQYGTVANNLQSSNTAPTTRTVNDQGALPGMVWQDRDVYLQGPIWAKIPHTDGHFHPSPLMGGFGLKHPPPQILIKNTPVPANPSTTFSAAKFASFITQYSTGQVSVEIEWELQKENSKRWNPEIQYTSNYYKSNNVEFAVNTEGVYSEPRPIGTRYLTRNL

SEQ ID NO: 5272 - DNA, 2208 bp, Artificial Sequence; identical to SEQ ID NO: 5102
  Description of Artificial Sequence: Synthetic polynucleotide

SEQ ID NO: 5273 - protein, 735 aa, Artificial Sequence [sequence omitted]

SEQ ID NO: 5274 - DNA, 2208 bp, Artificial Sequence
  Description of Artificial Sequence: Synthetic polynucleotide
atggctgccgatggttatcttccagattggctcgaggacaacctctctgagggcattcgcgagtggtgggcgctgaaacctggagccccgaagcccaaagccaaccagcaaaagcaggacgacggccggggtctggtgcttcctggctacaagtacctcggacccttcaacggactcgacaagggggagcccgtcaacgcggcggacgccgcggccctcgagcacgacaaggcctacgaccagcagctgcaggcgggtgacaatccgtacctgcggtataaccacgccgacgccgagtttcaggagcgtctgcaagaagatacgtcttttgggggcaacctcgggcgagcagtcttccaggccaaaaagaggcttcttgaacctcttggtctggttgaggaagcagctaaaacggctcctggaaagaagaggcctgtagagcagtctcctcaggaaccggactcctccgcgggtattggcaaatcgggtgcacagcccgccaaaaagagactcaatttcggtcagactggcgactcagagtcagtcccagaccctcaacctctcggagaaccaccagcagcccccacaagtttgggatctaatacaatggcttcaggcggtggcgcaccaatggcagacaataacgaaggcgccgacggagtgggtaatgcctcaggaaattggcattgcgattccacatggctgggcgacagagtcatcaccaccagcacccgcacctgggccttgcccacctacagcaaccatctctacaagcaaatctccagccaatcaggagcttcaaacgacaacgactactttggctacagcaccccttgggggtattttgatttcaacagattccactgccacttttcaccacgtgactggcaaagactcatcaacaacaactggggattccgacccaagagactcaacttcaagctctttaacattcaagtcaaagaggtcacgcagaatgacggtacgacgacgattgccaataaccttaccagcacggttcaggtgtttactgactcggagtaccagctcccgtacgtcctcggctcggcgcatcaaggatgcctcccgccgttcccagcagacgtcttcatggtgccacagtatggatacctcaccctgaacaacgggagtcaggcagtaggacgctcttcattttactgcctggagtactttccttctcagatgctgcgtaccggaaacaactttaccttcagctacacttttgaggacgttcctttccacagcagctacgctcacagccagagtctggaccgtctcatgaatcctctcatcgaccagtacctgtattacttgagcagaacaaacactccaagtggaaccaccacgcagtcaaggcttcagttttctcaggccggagcgagtgacattcgggaccagtctaggaactggcttcctggaccctgttaccgccagcagcgagtatcaaagacatctgaggataacaacaacagtgaatactcgtggactggagctaccaagtaccacctcaatggcagagactctctggtgaatccgggcccggccatggcaagccacaaggacgatgaagaaaagttttttcctcagagcggggttctcatctttgggaagcaaggctcagagaaaacaaatgtggacattgaaaaggtcatgattacagacgaagaggaaatcaggacaaccaatcccgtggctacggagcagtatggttctgtatctaccaacctccagagaggcaacagacaagcagctaccgcagatgtcaacacacaaggcgttcttccaggcatggtctggcaggacagagatgtgtaccttcaggggcccatctgggcaaagattccacacacggacggacattttcacccctctcccctcatgggtggattcggacttaaacaccctcctccacagattctcatcaagaacaccccggtacctgcgaatccttcgaccaccttcagtgcggcaaagtttgcttccttcatcacacagtactccacgggacaggtcagcgtggagatcgagtgggagctgcagaaggaaaacagcaaacgctggaatcccgaaattcagtacacttccaactacaacaagtctgttaatgtggactttactgtggacactaatggcgtgtattcagagcctcgccccattggcaccagatacctgactcgtaatctgtaa

SEQ ID NO: 5275 - protein, 735 aa, Artificial Sequence
  Description of Artificial Sequence: Synthetic polypeptide
MAADGYLPDWLEDNLSEGIREWWALKPGAPKPKANQQKQDDGRGLVLPGYKYLGPFNGLDKGEPVNAADAAALEHDKAYDQQLQAGDNPYLRYNHADAEFQERLQEDTSFGGNLGRAVFQAKKRLLEPLGLVEEAAKTAPGKKRPVEQSPQEPDSSAGIGKSGAQPAKKRLNFGQTGDSESVPDPQPLGEPPAAPTSLGSNTMASGGGAPMADNNEGADGVGNASGNWHCDSTWLGDRVITTSTRTWALPTYSNHLYKQISSQSGASNDNDYFGYSTPWGYFDFNRFHCHFSPRDWQRLINNNWGFRPKRLNFKLFNIQVKEVTQNDGTTTIANNLTSTVQVFTDSEYQLPYVLGSAHQGCLPPFPADVFMVPQYGYLTLNNGSQAVGRSSFYCLEYFPSQMLRTGNNFTFSYTFEDVPFHSSYAHSQSLDRLMNPLIDQYLYYLSRTNTPSGTTTQSRLQFSQAGASDIRDQSRNWLPGPCYRQQRVSKTSEDNNNSEYSWTGATKYHLNGRDSLVNPGPAMASHKDDEEKFFPQSGVLIFGKQGSEKTNVDIEKVMITDEEEIRTTNPVATEQYGSVSTNLQRGNRQAATADVNTQGVLPGMVWQDRDVYLQGPIWAKIPHTDGHFHPSPLMGGFGLKHPPPQILIKNTPVPANPSTTFSAAKFASFITQYSTGQVSVEIEWELQKENSKRWNPEIQYTSNYNKSVNVDFTVDTNGVYSEPRPIGTRYLTRNL

SEQ ID NO: 5276 - DNA, 2208 bp, Artificial Sequence
  Description of Artificial Sequence: Synthetic polynucleotide
atggctgccgatggttatcttccagattggctcgaggacaacctctctgagggcattcgcgagtggtgggcgctgaaacctggagccccgaagcccaaagccaaccagcaaaagcaggacgacggccggggtctggtgcttcctggctacaagtacctcggacccttcaacggactcgacaagggggagcccgtcaacgcggcggacgcagcggccctcgagcacgacaaggcctacgaccagcagctgcaggcgggtgacaatccgtacctgcggtataaccacgccgacgccgagttccaggagcgtctgcaagaagatacgtcttttgggggcaacctcgggcgagcagtcttccaggccaagaagagggttctcgaaccttttggtctggttgaggaaggtgctaagacggctcctggaaagaaacgtccggtagagcagtcgccacaagagccagactcctcctcgggcattggcaagacaggccagcagcccgctaaaaagagactcaattttggtcagactggcgactcagagtcagtcccagaccctcaacctctcggagaaccaccagcagcccccacaagtttgggatctaatacaatggcttcaggcggtggcgcaccaatggcagacaataacgagggcgccgacggagtgggtaattcctcgggaaattggcattgcgattccacatggatgggcgacagagtcatcaccaccagcacccgaacctgggccctgcccacctacaacaaccacctctacaaacaaatttccagccaatcaggagcttcaaacgacaaccactactttggctacagcaccccttgggggtattttgactttaacagattccactgccacttttcaccacgtgactggcagcgactcattaacaacaactggggattccggcccaagaaactcaacttcaagctctttaacatccaggtcaaggaggtcacgcagaatgaaggcaccaagaccatcgccaataacctcaccagcaccatccaggtgtttacggactcggagtaccagctgccgtacgttctcggctctgcccaccagggctgcctgcctccgttcccggcggacgtgttcatgattccccagtacggctacctaacactcaacaacggtagtcaggccgtgggacgctcctccttctactgcctggaatactttccttcgcagatgctgagaaccggcaacaacttccagtttacttacaccttcgaggacgtgcctttccacagcagctacgcccacagccagagcttggaccggctgatgaatcctctgattgaccagtacctgtattacttgtctcggactcaaacaacaggaggcacgacaaatacgcagactctgggcttcagccaaggtgggcctaatacaatggccaatcaggcaaagaactggctgcctggaccctgttaccgccagcagcgagtatcaaagacatctgcggataacaacaacagtgaatactcgtggactggagctaccaagtaccacctcaatggcagagactctctggtgaatccgggcccggccatggcaagccacaaggacgatgaagaaaagttttttcctcagagcggggttctcatctttgggaagcaaggctcagagaaaacaaatgtggacattgaaaaggttatgattacagacgaagaggaaatcaggacaaccaatcccgtggctacggagcagtatggttctgtatctaccaacctccagagaggcaacagacaagcagctaccgcagatgtcaacacacagggcgttcttccaggcatggtctggcaggacagagatgtgtaccttcagggtcccatttgggccaaaattcctcacacagatggacactttcacccgtcccctcttatgggcggctttggactcaagaacccgcctcctcagatcctcatcaaaaacacgcctgttcctgcgaatcctccggcagagttttcagctacaaagtttgcttcattcatcacccaatactccacaggacaagtgagtgtggaaattgaatgggagctgcagaaagaaaacagcaagcgctggaatcccgaagtgcagtacacatccaattatgcaaaatctgccaacgttgattttactgtggacactaatggcgtgtattcagagcctcgccccattggcaccagatacctcacccgtaatctgtaa

SEQ ID NO: 5277 - protein, 735 aa, Artificial Sequence
  Description of Artificial Sequence: Synthetic polypeptide
MAADGYLPDWLEDNLSEGIREWWALKPGAPKPKANQQKQDDGRGLVLPGYKYLGPFNGLDKGEPVNAADAAALEHDKAYDQQLQAGDNPYLRYNHADAEFQERLQEDTSFGGNLGRAVFQAKKRVLEPFGLVEEGAKTAPGKKRPVEQSPQEPDSSSGIGKTGQQPAKKRLNFGQTGDSESVPDPQPLGEPPAAPTSLGSNTMASGGGAPMADNNEGADGVGNSSGNWHCDSTWMGDRVITTSTRTWALPTYNNHLYKQISSQSGASNDNHYFGYSTPWGYFDFNRFHCHFSPRDWQRLINNNWGFRPKKLNFKLFNIQVKEVTQNEGTKTIANNLTSTIQVFTDSEYQLPYVLGSAHQGCLPPFPADVFMIPQYGYLTLNNGSQAVGRSSFYCLEYFPSQMLRTGNNFQFTYTFEDVPFHSSYAHSQSLDRLMNPLIDQYLYYLSRTQTTGGTTNTQTLGFSQGGPNTMANQAKNWLPGPCYRQQRVSKTSADNNNSEYSWTGATKYHLNGRDSLVNPGPAMASHKDDEEKFFPQSGVLIFGKQGSEKTNVDIEKVMITDEEEIRTTNPVATEQYGSVSTNLQRGNRQAATADVNTQGVLPGMVWQDRDVYLQGPIWAKIPHTDGHFHPSPLMGGFGLKNPPPQILIKNTPVPANPPAEFSATKFASFITQYSTGQVSVEIEWELQKENSKRWNPEVQYTSNYAKSANVDFTVDTNGVYSEPRPIGTRYLTRNL

SEQ ID NO: 5278 - DNA, 2214 bp, Artificial Sequence; identical to SEQ ID NO: 5268
  Description of Artificial Sequence: Synthetic polynucleotide

SEQ ID NO: 5279 - protein, 737 aa, Artificial Sequence; identical to SEQ ID NO: 5269
  Description of Artificial Sequence: Synthetic polypeptide

SEQ ID NO: 5280 - protein, 736 aa, Artificial Sequence; identical to SEQ ID NO: 5093
  Description of Artificial Sequence: Synthetic polypeptide

SEQ ID NO: 5281 - protein, 736 aa, Artificial Sequence
  Description of Artificial Sequence: Synthetic polypeptide
MAADGYLPDWLEDNLSEGIREWWDLKPGAPKPKANQQKQDDGRGLVLPGYKYLGPFNGLDKGEPVNAADAAALEHDKAYDQQLKAGDNPYLRYNHADAEFQERLQEDTSFGGNLGRAVFQAKKRVLEPLGLVEEGAKTAPGKKRPVEQSPQEPDSSSGIGKTGQQPAKKRLNFGQTGDSESVPDPQPLGEPPAAPSGLGPNTMASGGGAPMADNNEGADGVGNSSGNWHCDSTWLGDRVITTSTRTWALPTYNNHLYKQISNGTSGGSTNDNTYFGYSTPWGYFDFNRFHCHFSPRDWQRLINNNWGFRPKRLNFKLFNIQVKEVTTNEGTKTIANNLTSTVQVFTDSEYQLPYVLGSAHQGCLPPFPADVFMVPQYGYLTLNNGSQALGRSSFYCLEYFPSQMLRTGNNFQFSYTFEDVPFHSSYAHSQSLDRLMNPLIDQYLYYLVRTQTTGTGGTQTLAFSQAGPSSMANQARNWVPGPCYRQQRVSTTTNQNNNSNFAWTGAAKFKLNGRDSLMNPGVAMASHKDDEDRFFPSSGVLIFGKQGAGNDGVDYSQVLITDEEEIKATNPVATEEYGAVAINNQRANTQAQTGLVHNQGVIPGMVWQNRDVYLQGPIWAKIPHTDGNFHPSPLMGGFGLKHPPPQILIKNTPVPADPPLTFNQAKLNSFITQYSTGQVSVEIEWELQKENSKRWNPEIQYTSNYYKSTNVDFAVNTEGVYSEPRPIGTRYLTRNL

SEQ ID NO: 5282 - protein, 736 aa, Artificial Sequence
  Description of Artificial Sequence: Synthetic polypeptide
MAADGYLPDWLEDNLSEGIREWWDLKPGAPKPKANQQKQDDGRGLVLPGYKYLGPFNGLDKGEPVNAADAAALEHDKAYDQQLKAGDNPYLRYNHADAEFQERLQEDTSFGGNLGRAVFQAKKRVLEPLGLVEEGAKTAPGKKRPVEQSPQEPDSSSGIGKTGQQPAKKRLNFGQTGDSESVPDPQPLGEPPAAPSGLGPNTMASGGGAPMADNNEGADGVGNSSGNWHCDSTWLGDRVITTSTRTWALPTYNNHLYKQISNGTSGGSTNDNTYFGYSTPWGYFDFNRFHCHFSPRDWQRLINNNWGFRPKRLNFKLFNIQVKEVTTNEGTKTIANNLTSTVQVFTDSEYQLPYVLGSAHQGCLPPFPADVFMVPQYGYLTLNNGSQALGRSSFYCLEYFPSQMLRTGNNFQFSYTFEDVPFHSSYAHSQSLDRLMNPLIDQYLYYLVRTQTTGTGGTQTLAFSQAGPSSMANQARNWVPGPCYRQQRVSTTTNQNNNSNFAWTGAAKFKLNGRDSLMNPGVAMASHKDDEDAFFPSSGVLIFGKQGAGNDGVDYSQVLITDEEEIKATNPVATEEYGAVAINNQAANTQAQTGLVHNQGVIPGMVWQNRDVYLQGPIWAKIPHTDGNFHPSPLMGGFGLKHPPPQILIKNTPVPADPPLTFNQAKLNSFITQYSTGQVSVEIEWELQKENSKRWNPEIQYTSNYYKSTNVDFAVNTEGVYSEPRPIGTRYLTRNL

SEQ ID NO: 5283 - protein, 538 aa, Artificial Sequence
  Description of Artificial Sequence: Synthetic polypeptide
MRAAAGGNGGDAGQGAEGVGNASGDWHCDSTWSESHVTTTSTRTWVLPTYNNHLYLRLGSSNASDTFNGFSTPWGYFDFNRFHCHFSPRDWQRLINNHWGLRPKSMQVRIFNIQVKEVTTSNGETTVSNNLTSTVQIFADSTYELPYVMDAGQEGSLPPFPNDVFMVPQYGYCGLVTGGSSQNQTDRNAFYCLEYFPSQMLRTGNNFEMVYKFENVPFHSMYAHSQSLDRLMNPLLDQYLWELQSTTSGGTLNQGNSATNFAKLTKTNFSGYRKNWLPGPMMKQQRFSKTASQNYKIPQGRNNSLLHYETRTTLDGRWSNFAPGTAMATAANDATDFSQAQLIFAGPNITGNTTTDANNLMFTSEDELRATNPRDTDLFGHLATNQQNATTVPTVDDVDGVGVYPGMVWQDRDIYYQGPIWAKIPHTDGHFHPSPLIGGFGLKSPPPQIFIKNTPVPANPATTFSPARINSFITQYSTGQVAVKIEWEIQKERSKRWNPEVQFTSNYGAQDSLLWAPDNAGAYKEPRAIGSRYLTNHL

SEQ ID NO: 5284 - protein, 736 aa, Artificial Sequence
  Description of Artificial Sequence: Synthetic polypeptide
MSFVDHPPDWLESIGDGFREFLGLEAGPPKPKANQQKQDNARGLVLPGYKYLGPGNGLDKGDPVNFADEVAREHDLSYQKQLEAGDNPYLKYNHADAEFQEKLASDTSFGGNLGKAVFQAKKRILEPLGLVETPDKTAPAAKKRPLEQSPQEPDSSSGVGKKGKQPARKRLNFDDEPGAGDGPPPEGPSSGAMSTETEMRAAAGGNGGDAGQGAEGVGNASGDWHCDSTWSESHVTTTSTRTWVLPTYNNHLYLRLGSSNASDTFNGFSTPWGYFDFNRFHCHFSPRDWQRLINNHWGLRPKSMQVRIFNIQVKEVTTSNGETTVSNNLTSTVHIFADSTYELPYVMDAGQEGSLPPFPNDVFMVPQYGYCGLVTGGSSQNQTDRNAFYCLEYFPSQMLRTGNNFEMVYKFENVPFHSMYAHSQSLDRLMNPLLDQYLWELQSTTSGGTLNQGNSATNFAKLTNKNFSGYRKNWLPGPMMKQQRFSKTASQNYKIPQGGNNSLLHYETRTTLDRRWSNFAPGTAMATAANDATDFSQAQLIFAGPNITGNTTTDANNLMFTSEDELRATNPRDTDLFGHLATNQQNATTVPTVDDVDGVGVYPGMVWQDRDIYYQGPIWAKIPHTDGHFHPSPLIGGFGLKSPPPQIFIKNTPVPANPATTFSPARINSFITQYSTGQVAVKIEWEIQKERSKRWNPEVQFTSNYGAQDSLLWAPDNAGAYKEPRAIGSRYLTNHL

SEQ ID NO: 5285 - protein, 736 aa, Artificial Sequence
  Description of Artificial Sequence: Synthetic polypeptide
MSFVDHPPDWLESIGDGFREFLGLEAGPPKPKANQQKQDNARGLVLPGYKYLGPGNGLDKGDPVNFADEVAREHDLSYQKQLEAGDNPYLKYNHADAEFQEKLASDTSFGGNLGKAVFQAKKRILEPLGLVETPDKTAPAAKKRPLEQSPQEPDSSSGVGKKGKQPARKRLNFDDEPGAGDGPPPEGPSSGAMSTETEMRAAAGGNGGDAGQGAEGVGNASGDWHCDSTWSESHVTTTSTRTWVLPTYNNHLYLRLGSSNASDTFNGFSTPWGYFDFNRFHCHFSPRDWQRLINNHWGLRPKSMQVRIFNIQVKEVTTSNGETTVSNNLTSTVQIFADSTYELPYVMDAGQEGSLPPFPNDVFMVPQYGYCGLVTGGSSQNQTDRNAFYCLEYFPSQMLRTGNNFEMVYKFENVPFHSMYAHSQSLDRLMNPLLDQYLWELQSTTSGGTLNQGNSATNFAKLTKTNFSGYRKNWLPGPMMKQQRFSKTASQNYKIPQGRNNSLLHYETRTTLDGRWSNFAPGTAMATAANDATDFSQAQLIFAGPNITGNTTTDANNLMFTSEDELRATNPRDTDLFGHLATNQQNATTVPTVDDVDGVGVYPGMVWQDRDIYYQGPIWAKIPHTDGHFHPSPLIGGFGLKSPPPQIFIKNTPVPANPATTFSPARINSFITQYSTGQVAVKIEWEIQKERSKRWNPEVQFTSNYGAQDSLLWAPDNAGAYKEPRAIGSRYLTNHL

SEQ ID NO: 5286 - DNA, 2214 bp, Artificial Sequence
  Description of Artificial Sequence: Synthetic polynucleotide
atggctgccgatggttatcttccagattggctcgaggacactctctctgaaggaataagacagtggtggaagctcaaacctggcccaccaccaccaaagcccgcagagcggcataaggacgacagcaggggtcttgtgcttcctgggtacaagtacctcggacccttcaacggactcgacaagggagagccggtcaacgaggcagacgccgcggccctcgagcacgacaaagcctacgaccggcagctcgacagcggagacaacccgtacctcaagtacaaccacgccgacgcggagtttcaggagcgccttaaagaagatacgtcttttgggggcaacctcgggcgagcagtcttccaggccaaaaagaggcttcttgaacctcttggtctggttgaggaagcggctaagacggctcctggaaagaagaggcctgtagagcagtctcctcaggaaccggactcctcctcgggcatcggcaagacaggccagcagcccgctaaaaagagactcaatttcggtcagactggcgacacagagtcagtcccagaccctcaaccaatcggagaacctcccgcagccccctcaggtgtgggatctcttacaatggcttcaggtggtggcgcaccagtggcagacaataacgaaggtgccgatggagtgggtagttcctcgggaaattggcattgcgattcccaatggctgggggacagagtcatcaccaccagcacccgaacctgggccctgcccacctacaacaatcacctctacaagcaaatctccaacgggacatcgggaggagccaccaacgacaacacctacttcggctacagcaccccctgggggtattttgactttaacagattccactgccacttttcaccacgtgactggcagcgactcatcaacaacaactggggattccggcccaagagactcagcttcaagctcttcaacatccaggtcaaggaggtcacgcagaatgaaggcaccaagaccatcgccaataaccttaccagcacggtccaggtcttcacggactcggagtaccagctgccgtacgttctcggctctgcccaccagggctgcctgcctccgttcccggcggacgtgttcatgattccccagtacggctacctaacactcaacaacggtagtcaggccgtgggacgctcctccttctactgcctggaatactttccttcgcagatgctgagaaccggcaacaacttccagtttacttacaccttcgaggacgtgcctttccacagcagctacgcccacagccagagcttggaccggctgatgaatcctctgattgaccagtacctgtactacttgtctcggactcaaacaacaggaggcacggcaaatacgcagactctgggcttcagccaaggtgggcctaatacaatggccaatcaggcaaagaactggctgccaggaccctgttaccgccaacaacgcgtctcaacgacaaccgggcaaaacaacaatagcaactttgcctggactgctgggaccaaataccatctgaatggaagaaattcattggctaatcctggcatcgctatggcaacacacaaagacgacaaggagcgtttttttcccagtaacgggatcctgatttttggcaaacaaaatgctgccagagacaatgcggattacagcgatgtcatgctcaccagcgaggaagaaatcaaaaccactaaccctgtggctacagaggaatacggtatcgtggcagataacttgcagcagcaaaacacggctcctcaaattggaactgtcaacagccagggggccttacccggtatggtttggcagaaccgggacgtgtacctgcagggtcccatctgggccaagattcctcacacggacggcaacttccacccgtctccgctgatgggcggctttggcctgaaacatcctccgcctcagatcctgatcaagaacacgcctgtacctgcggatcctccgaccaccttcaaccagtcaaagctgaactctttcatcacgcaatacagcaccggacaggtcagcgtggaaattgaatgggagctgcagaaggaaaacagcaagcgctggaaccccgagatccagtacacctccaactactacaaatctacaagtgtggactttgctgttaatacagaaggcgtgtactctgaaccccaccccattggcacccgttacctcacccgtcccctgtaa

SEQ ID NO: 5287 - protein, 737 aa, Artificial Sequence
  Description of Artificial Sequence: Synthetic polypeptide
MAADGYLPDWLEDTLSEGIRQWWKLKPGPPPPKPAERHKDDSRGLVLPGYKYLGPFNGLDKGEPVNEADAAALEHDKAYDRQLDSGDNPYLKYNHADAEFQERLKEDTSFGGNLGRAVFQAKKRLLEPLGLVEEAAKTAPGKKRPVEQSPQEPDSSSGIGKTGQQPAKKRLNFGQTGDTESVPDPQPIGEPPAAPSGVGSLTMASGGGAPVADNNEGADGVGSSSGNWHCDSQWLGDRVITTSTRTWALPTYNNHLYKQISNGTSGGATNDNTYFGYSTPWGYFDFNRFHCHFSPRDWQRLINNNWGFRPKRLSFKLFNIQVKEVTQNEGTKTIANNLTSTVQVFTDSEYQLPYVLGSAHQGCLPPFPADVFMIPQYGYLTLNNGSQAVGRSSFYCLEYFPSQMLRTGNNFQFTYTFEDVPFHSSYAHSQSLDRLMNPLIDQYLYYLSRTQTTGGTANTQTLGFSQGGPNTMANQAKNWLPGPCYRQQRVSTTTGQNNNSNFAWTAGTKYHLNGRNSLANPGIAMATHKDDKERFFPSNGILIFGKQNAARDNADYSDVMLTSEEEIKTTNPVATEEYGIVADNLQQQNTAPQIGTVNSQGALPGMVWQNRDVYLQGPIWAKIPHTDGNFHPSPLMGGFGLKHPPPQILIKNTPVPADPPTTFNQSKLNSFITQYSTGQVSVEIEWELQKENSKRWNPEIQYTSNYYKSTSVDFAVNTEGVYSEPHPIGTRYLTRPL

SEQ ID NO: 5288 - protein, 736 aa, Artificial Sequence
  Description of Artificial Sequence: Synthetic polypeptide
MAADGYLPDWLEDNLSEGIREWWDLKPGAPKPKANQQKQDDGRGLVLPGYKYLGPFNGLDKGEPVNAADAAALEHDKAYDQQLKAGDNPYLRYNHADAEFQERLQEDTSFGGNLGRAVFQAKKRVLEPLGLVEEGAKTAPGKKRPVEQSPQEPDSSSGIGKTGQQPAKKRLNFGQTGDTESVPDPQPIGEPPAAPSGVGSLTMASGGGAPVADNNEGADGVGSSSGNWHCDSQWLGDRVITTSTRTWALPTYNNHLYKQISSASTGASNDNHYFGYSTPWGYFDFNRFHCHFSPRDWQRLINNNWGFRPKRLNFKLFNIQVKEVTDNNGVKTIANNLTSTVQVFTDSDYQLPYVLGSAHQGCLPPFPADVFMIPQYGYLTLNNGSQAVGRSSFYCLEYFPSQMLRTGNNFQFTYTFEDVPFHSSYAHSQSLDRLMNPLIDQYLYYLSRTQTTGGTANTQTLGFSQGGPNTMANQAKNWLPGPCYRQQRVSTTTGQNNNSNFAWTAGTKYHLNGRNSLANPGIAMATHKDDKERFFPSNGILIFGKQNAARDNADYSDVMLTSEEEIKTTNPVATEEYGIVADNLQQQNTAPQIGTVNSQGALPGMVWQNRDVYLQGPIWAKIPHTDGNFHPSPLMGGFGLKHPPPQILIKNTPVPADPPTTFNQSKLNSFITQYSTGQVSVEIEWELQKENSKRWNPEIQYTSNYYKSTSVDFAVNTEGVYSEPHPIGTRYLTRPL

SEQ ID NO: 5289 - protein, 736 aa, Artificial Sequence
  Description of Artificial Sequence: Synthetic polypeptide
MAADGYLPDWLEDTLSEGIRQWWKLKPGPPPPKPAERHKDDSRGLVLPGYKYLGPFNGLDKGEPVNEADAAALEHDKAYDRQLDSGDNPYLKYNHADAEFQERLQGDTSFGGNLGRAVFQAKKRVLEPLGLVEEGAKTAPGKKRPVEQSPQEPDSSSGIGETGQQPAKKRLNFGQTGDSESVPDPQPLGEPPATPAAVGPTTMASGGGAPMADNNEGADGVGSSSGNWHCDSQWLGDRVITTSTRTWALPTYNNHLYKQISSASTGASNDNHYFGYSTPWGYFDFNRFHCHFSPRDWQRLINNNWGFRPKRLSFKLFNIQVKEVTDNNGVKTIANNLTSTVQVFTDSEYQLPYVLGSAHQGCLPPFPADVFMIPQYGYLTLNNGSQAVGRSSFYCLEYFPSQMLRTGNNFTFSYTFEDVPFHSSYAHSQSLDRLMNPLIDQYLYYLSRTQTTGGTANTQTLGFSQGGPNTMANQAKNWLPGPCYRQQRVSTTTGQNNNSNFAWTAGTKYHLNGRNSLANPGIAMATHKDDKERFFPSNGILIFGKQNAARDNADYSDVMLTSEEEIKTTNPVATEEYGIVADNLQQQNTAPQIGTVNSQGALPGMVWQNRDVYLQGPIWAKIPHTDGNFHPSPLMGGFGLKHPPPQILIKNTPVPADPPTTFNQSKLNSFITQYSTGQVSVEIEWELQKENSKRWNPEIQYTSNYYKSTSVDFAVNTEGVYSEPHPIGTRYLTRPL

SEQ ID NO: 5290 - DNA, 2181 bp, Artificial Sequence
  Description of Artificial Sequence: Synthetic polynucleotide
atgtcttttgttgatcaccctccagattggttggaagaagttggtgaaggtcttcgcgagtttttgggccttgaagcgggcccaccgaaaccaaaacccaatcagcagcatcaagatcaagcccgtggtcttgtgctgcctggttataactatctcggacccggaaacggtctcgatcgaggagagcctgtcaacagggcagacgaggtcgcgcgagagcacgacatctcgtacaacgagcagcttgaggcgggagacaacccctacctcaagtacaaccacgcggacgccgagtttcaggagaagctcgccgacgacacatccttcgggggaaacctcggaaaggcagtctttcaggccaagaaaagggttctcgaaccttttggcctggttgaagagggtgctaagacggcccctaccggaaagcggatagacgaccactttccaaaaagaaagaaggctcggaccgaagaggactccaagccttccacctcgtcagacgccgaagctggacccagcggatcccagcagctgcaaatcccagcacaaccagcctcaagtttgggagctgatacaatgtctgcgggaggtggcggcccattgggcgacaataaccaaggtgccgatggagtgggcaatgcctcgggagattggcattgcgattccacgtggatgggggacagagtcgtcaccaagtccacccgcacctgggtgctgcccagctacaacaaccaccagtaccgagagatcaaaagcggctccgtcgacggaagcaacgccaacgcctactttggatacagcaccccctgggggtactttgactttaaccgcttccacagccactggagcccccgagactggcaaagactcatcaacaactattggggcttcagaccccggtctctcagagtcaaaatcttcaacatccaagtcaaagaggtcacggtgcaggactccaccaccaccatcgccaacaacctcacctccaccgtccaagtgtttacggacgacgactaccaactcccgtacgtcgtcggcaacgggaccgagggatgcctgccggccttccccccgcaggtctttacgctgccgcagtacggctacgcgacgctgaaccgagacaacggagacaacccgacagagcggagcagcttcttttgcctagagtactttcccagcaagatgctgaggacgggcaacaactttgagtttacctacagctttgaagaggtgcccttccactgcagcttcgccccgagccagaacctctttaagctggccaacccgctggtggaccagtacctgtaccgcttcgtgagcacctcggccacgggcgccatccagttccaaaagaacctggcgggcagatacgccaacacctacaaaaactggttcccggggcccatgggccgaacccagggctggaacacgagctctggggtcagcagcaccaacagagtcagcgtcaacaacttttccgtctcaaaccggatgaacctggagggggccagctaccaagtgaacccccagcccaacgggatgacaaacacgctccaaggcagcaaccgctacgcgctggaaaacaccatgatcttcaacgctcaaaacgccacgccgggaactacctcggtgtacccagaggacaatctactgctgaccagcgagagcgagactcagcccgtcaaccgggtggcttacaacacgggcggtcagatggccaccaacgcccagaacgccaccacggctcccacggtcgggacctacaacctccaggaagtgcttcctggcagcgtatggatggagagggacgtgtacctccaaggacccatctgggccaagatcccagagacgggggcgcactttcacccctctccggccatgggcggattcggactcaaacacccgccgcccatgatgctcatcaaaaacacgccggtgcccggcaacatcaccagcttctcggacgtgcccgtcagcagcttcatcacccagtacagcaccgggcaggtcaccgtggagatggaatgggagctcaaaaaggaaaactccaagaggtggaacccagagatccagtacaccaacaactacaacgacccccagtttgtggactttgctccagacggctccggcgaatacagaaccaccagagccatcggaacccgatacctcacccgacccctt

SEQ ID NO: 5291 - protein, 726 aa, Artificial Sequence
  Description of Artificial Sequence: Synthetic polypeptide
MSFVDHPPDWLEEVGEGLREFLGLEAGPPKPKPNQQHQDQARGLVLPGYNYLGPGNGLDRGEPVNRADEVAREHDISYNEQLEAGDNPYLKYNHADAEFQEKLADDTSFGGNLGKAVFQAKKRVLEPFGLVEEGAKTAPTGKRIDDHFPKRKKARTEEDSKPSTSSDAEAGPSGSQQLQIPAQPASSLGADTMSAGGGGPLGDNNQGADGVGNASGDWHCDSTWMGDRVVTKSTRTWVLPSYNNHQYREIKSGSVDGSNANAYFGYSTPWGYFDFNRFHSHWSPRDWQRLINNYWGFRPRSLRVKIFNIQVKEVTVQDSTTTIANNLTSTVQVFTDDDYQLPYVVGNGTEGCLPAFPPQVFTLPQYGYATLNRDNGDNPTERSSFFCLEYFPSKMLRTGNNFEFTYSFEEVPFHCSFAPSQNLFKLANPLVDQYLYRFVSTSATGAIQFQKNLAGRYANTYKNWFPGPMGRTQGWNTSSGSSTNRVSVNNFSVSNRMNLEGASYQVNPQPNGMTNTLQGSNRYALENTMIFNAQNATPGTTSVYPEDNLLLTSESETQPVNRVAYNTGGQMATNAQNATTAPTVGTYNLQEVLPGSVWMERDVYLQGPIWAKIPETGAHFHPSPAMGGFGLKHPPPMMLIKNTPVPGNITSFSDVPVSSFITQYSTGQVTVEMEWELKKENSKRWNPEIQYTNNYNDPQFVDFAPDGSGEYRTTRAIGTRYLTRPL

SEQ ID NO: 5292 - protein, 735 aa, Artificial Sequence
  Description of Artificial Sequence: Synthetic polypeptide
MAADGYLPDWLEDTLSEGIRQWWKLKPGPPPPKPAERHKDDSRGLVLPGYKYLGPFNGLDKGEPVNEADAAALEHDKAYDRQLDSGDNPYLKYNHADAEFQERLKEDTSFGGNLGRAVFQAKKRILEPLGLVEEPVKTAPGKKRPVEHSPAEPDSSSGTGKSGQQPARKRLNFGQTGDADSVPDPQPLGQPPAAPSGLGTNTMASGSGAPMADNNEGADGVGNSSGNWHCDSTWMGDRVITTSTRTWALPTYNNHLYKQISSQSGASNDNHYFGYSTPWGYFDFNRFHCHFSPRDWQRLINNNWGFRPKRLSFKLFNIQVKEVTQNDGTTTIANNLTSTVQVFTDSEYQLPYVLGSAHQGCLPPFPADVFMVPQYGYLTLNNGSQAVGRSSFYCLEYFPSQMLRTGNNFTFSYTFEDVPFHSSYAHSQSLDRLMNPLIDQYLYYLSRTNTPSGTTTMSRLQFSQAGASDIRDQSRNWLPGPCYRQQRVSKTAADNNNSDYSWTGATKYHLNGRDSLVNPGPAMASHKDDEEKYFPQSGVLIFGKQDSGKTNVDIEKVMITDEEEIRTTNPVATEQYGSVSTNLQSGNTQAATSDVNTQGVLPGMVWQDRDVYLQGPIWAKIPHTDGHFHPSPLMGGFGLKHPPPQILIKNTPVPANPSTTFSAAKFASFITQYSTGQVSVEIEWELQKENSKRWNPEIQYTSNYNKSVNVDFTVDTNGVYSEPRPIGTRYLTRNL

SEQ ID NO: 5293 - DNA, 1803 bp, Bovine adeno-associated virus
acggcgcctgcggcaaaaaagaggcctctagagcagagtcctcaagagccagactcctcgagcggagttggcaagaaaggcaaacagcctgccagaaagagactcaactttgacgacgaacctggagccggagacgggcctcccccagaaggaccatcttccggagctatgtctactgagactgaaatgcgtgcagcagctggcggaaatggtggcgatgcgggacaaggtgccgagggagtgggtaatgcctccggtgattggcattgcgattccacttggtcagagagccacgtcaccaccacctcaacccgcacctgggtcctgccgacctacaacaaccacctgtacctgcggctcggctcgagcaacgccagcgacaccttcaacggattctccaccccctggggatactttgactttaaccgcttccactgccacttctcgccaagagactggcaaaggctcatcaacaaccactggggactgcgccccaaaagcatgcaagtccgcatcttcaacatccaagttaaggaggtcacgacgtctaacggggagacgaccgtatccaacaacctcaccagcacggtccagatctttgcggacagcacgtacgagctcccgtacgtgatggatgcaggtcaggagggcagcttgcctcctttccccaacgacgtgttcatggtgcctcagtacgggtactgcggactggtaaccggaggcagctctcaaaaccagacagacagaaatgccttctactgtctggagtactttcccagccagatgctgagaaccggaaacaactttgagatggtgtacaagtttgaaaacgtgcccttccactccatgtacgctcacagccagagcctggataggctgatgaacccgctgctggaccagtacctgtgggagctccagtctaccacctctggaggaactctcaaccagggcaattcagccaccaactttgccaagctgaccaaaacaaacttttctggctaccgcaaaaactggctcccggggcccatgatgaagcagcagagattctccaagactgccagtcaaaactacaagattccccagggaagaaacaacagtctgctccattatgagaccagaactaccctcgacggaagatggagcaattttgccccgggaacggccatggcaaccgcagccaacgacgccaccgacttctctcaggcccagctcatctttgcggggcccaacatcaccggcaacaccaccacagatgccaataacctgatgttcacttcagaagatgaacttagggccaccaacccccgggacactgacctgtttggccacctggcaaccaaccagcaaaacgccaccaccgttcctaccgtagacgacgtggacggagtcggcgtgtacccgggaatggtgtggcaggacagagacatttactaccaagggcccatttgggccaaaattccacacacggatggacactttcacccgtctcctctcattggcggatttggactgaaaagcccgcctccacaaatattcatcaaaaacactcctgtacccgccaatcccgcaacgaccttctctccggccagaatcaacagcttcatcacccagtacagcaccggacaggtggctgtcaaaatagaatgggaaatccagaaggagcggtccaagagatggaacccagaggtccagttcacgtccaactacggagcacaggactcgcttctctgggctcccgacaacgccggagcctacaaagagcccagggccattggatcccgatacctcaccaaccacctctag

SEQ ID NO: 5294 - DNA, 1617 bp, Bovine adeno-associated virus
atgcgtgcagcagctggcggaaatggtggcgatgcgggacaaggtgccgagggagtgggtaatgcctccggtgattggcattgcgattccacttggtcagagagccacgtcaccaccacctcaacccgcacctgggtcctgccgacctacaacaaccacctgtacctgcggctcggctcgagcaacgccagcgacaccttcaacggattctccaccccctggggatactttgactttaaccgcttccactgccacttctcgccaagagactggcaaaggctcatcaacaaccactggggactgcgccccaaaagcatgcaagtccgcatcttcaacatccaagttaaggaggtcacgacgtctaacggggagacgaccgtatccaacaacctcaccagcacggtccagatctttgcggacagcacgtacgagctcccgtacgtgatggatgcaggtcaggagggcagcttgcctcctttccccaacgacgtgttcatggtgcctcagtacgggtactgcggactggtaaccggaggcagctctcaaaaccagacagacagaaatgccttctactgtctggagtactttcccagccagatgctgagaaccggaaacaactttgagatggtgtacaagtttgaaaacgtgcccttccactccatgtacgctcacagccagagcctggataggctgatgaacccgctgctggaccagtacctgtgggagctccagtctaccacctctggaggaactctcaaccagggcaattcagccaccaactttgccaagctgaccaaaacaaacttttctggctaccgcaaaaactggctcccggggcccatgatgaagcagcagagattctccaagactgccagtcaaaactacaagattccccagggaagaaacaacagtctgctccattatgagaccagaactaccctcgacggaagatggagcaattttgccccgggaacggccatggcaaccgcagccaacgacgccaccgacttctctcaggcccagctcatctttgcggggcccaacatcaccggcaacaccaccacagatgccaataacctgatgttcacttcagaagatgaacttagggccaccaacccccgggacactgacctgtttggccacctggcaaccaaccagcaaaacgccaccaccgttcctaccgtagacgacgtggacggagtcggcgtgtacccgggaatggtgtggcaggacagagacatttactaccaagggcccatttgggccaaaattccacacacggatggacactttcacccgtctcctctcattggcggatttggactgaaaagcccgcctccacaaatattcatcaaaaacactcctgtacccgccaatcccgcaacgaccttctctccggccagaatcaacagcttcatcacccagtacagcaccggacaggtggctgtcaaaatagaatgggaaatccagaaggagcggtccaagagatggaacccagaggtccagttcacgtccaactacggagcacaggactcgcttctctgggctcccgacaacgccggagcctacaaagagcccagggccattggatcccgatacctcaccaaccacctctag

SEQ ID NO: 5295 - DNA, 1173 bp, Bovine adeno-associated virus
atggcgctggtaagctggctggtggaacatggcatcacttccgagaagcagtggattcaggagaatcaggagagctacctgtccttcaactccacgggaaactctcggagccagattaaagccgcgcttgacaacgcgtcaaaaattatgagtctgaccaaatctgcctcagactatctcgtgggacagactgttccagaggacatttctgaaaacagaatctggcagatttttgatctcaacggctacgacccggcatacgcgggctctgttctctacggctggtgcactcgcgcctttggaaagaggaacaccgtctggctgtatggacccgcgaccaccggaaagaccaacatcgcggaagccatctctcacaccgtgcccttttatggctgtgtgaactggactaatgagaactttccctttaatgactgtgtggaaaaaatgttgatctggtgggaggagggaaagatgaccagcaaggtggtggaacccgccaaggccatcttgggggggtctagagtacgagtggatcaaaaatgtaaatcctctgtacaagtagactctaccccggtgattatcacctccaatactaacatgtgtgtggtggtggatgggaactccacgacctttgaacaccagcagccgctggaagaccgcatgttcagatttgaactcatgcggcggctcccgccagattttggcaagattaccaagcaggaagtcaaagacttttttgcttgggcaaaggtcaaccaggtgccggtgactcacgagtttatggttcccaagaaagtggcgggaactgagagggcggagacttctagaaaacgcccactggatgacgtcaccaataccaactataaaagtccggagaagcgggcccggctctcagttgttcctgagacgcctcgcagttcagacgtgcctgtagagcccgctcctctgcgacctctcaactggtcttccaggtatgaatgcagatgtgactatcatgctaaatttgactctgtaacgggggaatgtgacgagtgtgaatatttgaatcggggcaaaaatggctgtatctttcataatgctacacattgtcaaatttgtcacgctgttcctccatgggaaaaggaaaatgtgtcagattttaatgattttgatgactgtaataaagagcagtaa

SEQ ID NO: 5296 - DNA, 1833 bp, Bovine adeno-associated virus
atggctaccttctatgaagtcattgttcgcgttccatttgatgtggaagagcacctgcctggaatttctgacaactttgtagactgggtaactggtcaaatttgggagctgcctcccgagtcagatttgaatttgactctgattgagcagcctcagctgacggtggctgacagaattcgccgcgtgttcctgtacgagtggaacaaattttccaagcaggagagcaaattctttgtgcagtttgaaaagggatctgaatattttcatctgcacacgctcgtggagacctccggcatctcttctatggtccttggccgctacgtgagtcagattcgcgcccagctggtgaaggtggtgttccagaacattgagccgcggattaacgactgggtcgccatcaccaaggtaaagaagggcggagccaataaggtggtggattctgggtatattcccgcctacctgctgccgaaggtccaaccagagcttcagtgggcgtggactaacctcgaagagtataaattggccgccctcaatctggaggagcgcaaacggctcgtcgctcagtttcagcttgagtcctcgcagcgctcgcaagaggcatcttcccagagggacgtttcggctgacccggtcatcaagagcaagacttcccagaaatacatggcgctggtaagctggctggtggaacatggcatcacttccgagaagcagtggattcaggagaatcaggagagctacctgtccttcaactccacgggaaactctcggagccagattaaagccgcgcttgacaacgcgtcaaaaattatgagtctgaccaaatctgcctcagactatctcgtgggacagactgttccagaggacatttctgaaaacagaatctggcagatttttgatctcaacggctacgacccggcatacgcgggctctgttctctacggctggtgcactcgcgcctttggaaagaggaacaccgtctggctgtatggacccgcgaccaccggaaagaccaacatcgcggaagccatctctcacaccgtgcccttttatggctgtgtgaactggactaatgagaactttccctttaatgactgtgtggaaaaaatgttgatctggtgggaggagggaaagatgaccagcaaggtggtggaacccgccaaggccatcttgggggggtctagagtacgagtggatcaaaaatgtaaatcctctgtacaagtagactctaccccggtgattatcacctccaatactaacatgtgtgtggtggtggatgggaactccacgacctttgaacaccagcagccgctggaagaccgcatgttcagatttgaactcatgcggcggctcccgccagattttggcaagattaccaagcaggaagtcaaagacttttttgcttgggcaaaggtcaaccaggtgccggtgactcacgagtttatggttcccaagaaagtggcgggaactgagagggcggagacttctagaaaacgcccactggatgacgtcaccaataccaactataaaagtccggagaagcgggcccggctctcagttgttcctgagacgcctcgcagttcagacgtgcctgtagagcccgctcctctgcgacctctcaactggtcttccaggtatgaatgcagatgtgactatcatgctaaatttgactctgtaacgggggaatgtgacgagtgtgaatatttgaatcggggcaaaaatggctgtatctttcataatgctacacattgtcaaatttgtcacgctgttcctccatgggaaaaggaaaatgtgtcagattttaatgattttgatgactgtaataaagagcagtaa

SEQ ID NO: 5297 - DNA, 2211 bp, Bovine adeno-associated virus
atgtcttttgttgaccaccctccagattggttggaatcgatcggcgacggctttcgtgaatttctcggccttgaggcgggtcccccgaaacccaaggccaatcaacagaagcaagataacgctcgaggtcttgtgcttcctgggtacaagtatcttggtcctgggaacggccttgataagggcgatcctgtcaattttgctgacgaggttgcccgagagcacgacctctcctaccagaaacagcttgaggcgggcgataacccttacctcaagtacaaccacgcggacgcagagtttcaggagaaactcgcttctgacacttcttttgggggaaaccttgggaaggctgttttccaggctaaaaagaggattctcgaacctcttggcctggttgagacgccggataaaacggcgcctgcggcaaaaaagaggcctctagagcagagtcctcaagagccagactcctcgagcggagttggcaagaaaggcaaacagcctgccagaaagagactcaactttgacgacgaacctggagccggagacgggcctcccccagaaggaccatcttccggagctatgtctactgagactgaaatgcgtgcagcagctggcggaaatggtggcgatgcgggacaaggtgccgagggagtgggtaatgcctccggtgattggcattgcgattccacttggtcagagagccacgtcaccaccacctcaacccgcacctgggtcctgccgacctacaacaaccacctgtacctgcggctcggctcgagcaacgccagcgacaccttcaacggattctccaccccctggggatactttgactttaaccgcttccactgccacttctcgccaagagactggcaaaggctcatcaacaaccactggggactgcgccccaaaagcatgcaagtccgcatcttcaacatccaagttaaggaggtcacgacgtctaacggggagacgaccgtatccaacaacctcaccagcacggtccagatctttgcggacagcacgtacgagctcccgtacgtgatggatgcaggtcaggagggcagcttgcctcctttccccaacgacgtgttcatggtgcctcagtacgggtactgcggactggtaaccggaggcagctctcaaaaccagacagacagaaatgccttctactgtctggagtactttcccagccagatgctgagaaccggaaacaactttgagatggtgtacaagtttgaaaacgtgcccttccactccatgtacgctcacagccagagcctggataggctgatgaacccgctgctggaccagtacctgtgggagctccagtctaccacctctggaggaactctcaaccagggcaattcagccaccaactttgccaagctgaccaaaacaaacttttctggctaccgcaaaaactggctcccggggcccatgatgaagcagcagagattctccaagactgccagtcaaaactacaagattccccagggaagaaacaacagtctgctccattatgagaccagaactaccctcgacggaagatggagcaattttgccccgggaacggccatggcaaccgcagccaacgacgccaccgacttctctcaggcccagctcatctttgcggggcccaacatcaccggcaacaccaccacagatgccaataacctgatgttcacttcagaagatgaacttagggccaccaacccccgggacactgacctgtttggccacctggcaaccaaccagcaaaacgccaccaccgttcctaccgtagacgacgtggacggagtcggcgtgtacccgggaatggtgtggcaggacagagacatttactaccaagggcccatttgggccaaaattccacacacggatggacactttcacccgtctcctctcattggcggatttggactgaaaagcccgcctccacaaatattcatcaaaaacactcctgtacccgccaatcccgcaacgaccttctctccggccagaatcaacagcttcatcacccagtacagcaccggacaggtggctgtcaaaatagaatgggaaatccagaaggagcggtccaagagatggaacccagaggtccagttcacgtccaactacggagcacaggactcgcttctctgggctcccgacaacgccggagcctacaaagagcccagggccattggatcccgatacctcaccaaccacctctag

SEQ ID NO: 5298 - DNA, 4694 bp, Bovine adeno-associated virus
gtggcactcccccccctgtcgcgttcgctcgttcgctggctcgattgggggggtggcagctcaaagagctgccagacgacggccctctgggccgtcgcccccccaatcgagccagcgaacgagcgaacgcgacaggggggggagtgccacactctctagcaagggggttttgtaggtggtgatgtcattgttgatgtcattatagttgtcacgcgatagttaatgattaacagtcatgtgatgtgtgttatccaataggatgaaagcgcgcgaatgagatctcgcgagacttccggggtataaaaggggtgagtgaacgagcccgccgccattctctgctctggactgctagaggaccctcgctgccatggctaccttctatgaagtcattgttcgcgttccatttgatgtggaagagcacctgcctggaatttctgacaactttgtagactgggtaactggtcaaatttgggagctgcctcccgagtcagatttgaatttgactctgattgagcagcctcagctgacggtggctgacagaattcgccgcgtgttcctgtacgagtggaacaaattttccaagcaggagagcaaattctttgtgcagtttgaaaagggatctgaatattttcatctgcacacgctcgtggagacctccggcatctcttctatggtccttggccgctacgtgagtcagattcgcgcccagctggtgaaggtggtgttccagaacattgagccgcggattaacgactgggtcgccatcaccaaggtaaagaagggcggagccaataaggtggtggattctgggtatattcccgcctacctgctgccgaaggtccaaccagagcttcagtgggcgtggactaacctcgaagagtataaattggccgccctcaatctggaggagcgcaaacggctcgtcgctcagtttcagcttgagtcctcgcagcgctcgcaagaggcatcttcccagagggacgtttcggctgacccggtcatcaagagcaagacttcccagaaatacatggcgctggtaagctggctggtggaacatggcatcacttccgagaagcagtggattcaggagaatcaggagagctacctgtccttcaactccacgggaaactctcggagccagattaaagccgcgcttgacaacgcgtcaaaaattatgagtctgaccaaatctgcctcagactatctcgtgggacagactgttccagaggacatttctgaaaacagaatctggcagatttttgatctcaacggctacgacccggcatacgcgggctctgttctctacggctggtgcactcgcgcctttggaaagaggaacaccgtctggctgtatggacccgcgaccaccggaaagaccaacatcgcggaagccatctctcacaccgtgcccttttatggctgtgtgaactggactaatgagaactttccctttaatgactgtgtggaaaaaatgttgatctggtgggaggagggaaagatgaccagcaaggtggtggaacccgccaaggccatcttgggggggtctagagtacgagtggatcaaaaatgtaaatcctctgtacaagtagactctaccccggtgattatcacctccaatactaacatgtgtgtggtggtggatgggaactccacgacctttgaacaccagcagccgctggaagaccgcatgttcagatttgaactcatgcggcggctcccgccagattttggcaagattaccaagcaggaagtcaaagacttttttgcttgggcaaaggtcaaccaggtgccggtgactcacgagtttatggttcccaagaaagtggcgggaactgagagggcggagacttctagaaaacgcccactggatgacgtcaccaataccaactataaaagtccggagaagcgggcccggctctcagttgttcctgagacgcctcgcagttcagacgtgcctgtagagcccgctcctctgcgacctctcaactggtcttccaggtatgaatgcagatgtgactatcatgctaaatttgactctgtaacgggggaatgtgacgagtgtgaatatttgaatcggggcaaaaatggctgtatctttcataatgctacacattgtcaaatttgtcacgctgttcctccatgggaaaaggaaaatgtgtcagattttaatgattttgatgactgtaataaagagcagtaaataaagtgagtagtcatgtcttttgttgaccaccctccagattggttggaatcgatcggcgacggctttcgtgaatttctcggccttgaggcgggtcccccgaaacccaaggccaatcaacagaagcaagataacgctcgaggtcttgtgcttcctgggtacaagtatcttggtcctgggaacggccttgataagggcgatcctgtcaattttgctgacgaggttgcccgagagcacgacctctcctaccagaaacagcttgaggcgggcgataacccttacctcaagtacaaccacgcggacgcagagtttcaggagaaactcgcttctgacacttcttttgggggaaaccttgggaaggctgttttccaggctaaaaagaggattctcgaacctcttggcctggttgagacgccggataaaacggcgcctgcggcaaaaaagaggcctctagagcagagtcctcaagagccagactcctcgagcggagttggcaagaaaggcaaacagcctgccagaaagagactcaactttgacgacgaacctggagccggagacgggcctcccccagaaggaccatcttccggagctatgtctactgagactgaaatgcgtgcagcagctggcggaaatggtggcgatgcgggacaaggtgccgagggagtgggtaatgcctccggtgattggcattgcgattccacttggtcagagagccacgtcaccaccacctcaacccgcacctgggtcctgccgacctacaacaaccacctgtacctgcggctcggctcgagcaacgccagcgacaccttcaacggattctccaccccctggggatactttgactttaaccgcttccactgccacttctcgccaagagactggcaaaggctcatcaacaaccactggggactgcgccccaaaagcatgcaagtccgcatcttcaacatccaagttaaggaggtcacgacgtctaacggggagacgaccgtatccaacaacctcaccagcacggtccagatctttgcggacagcacgtacgagctcccgtacgtgatggatgcaggtcaggagggcagcttgcctcctttccccaacgacgtgttcatggtgcctcagtacgggtactgcggactggtaaccggaggcagctctcaaaaccagacagacagaaatgccttctactgtctggagtactttcccagccagatgctgagaaccggaaacaactttgagatggtgtacaagtttgaaaacgtgcccttccactccatgtacgctcacagccagagcctggataggctgatgaacccgctgctggaccagtacctgtgggagctccagtctaccacctctggaggaactctcaaccagggcaattcagccaccaactttgccaagctgaccaaaacaaacttttctggctaccgcaaaaactggctcccggggcccatgatgaagcagcagagattctccaagactgccagtcaaaactacaagattccccagggaagaaacaacagtctgctccattatgagaccagaactaccctcgacggaagatggagcaattttgccccgggaacggccatggcaaccgcagccaacgacgccaccgacttctctcaggcccagctcatctttgcggggcccaacatcaccggcaacaccaccacagatgccaataacctgatgttcacttcagaagatgaacttagggccaccaacccccgggacactgacctgtttggccacctggcaaccaaccagcaaaacgccaccaccgttcctaccgtagacgacgtggacggagtcggcgtgtacccgggaatggtgtggcaggacagagacatttactaccaagggcccatttgggccaaaattccacacacggatggacactttcacccgtctcctctcattggcggatttggactgaaaagcccgcctccacaaatattcatcaaaaacactcctgtacccgccaatcccgcaacgaccttctctccggccagaatcaacagcttcatcacccagtacagcaccggacaggtggctgtcaaaatagaatgggaaatccagaaggagcggtccaagagatggaacccagaggtccagttcacgtccaactacggagcacaggactcgcttctctgggctcccgacaacgccggagcctacaaagagcccagggccattggatcccgatacctcaccaaccacctctagcccaattctgttgcataccctcaataaaccgtgtattcgtttcagtaaaatactgcctcttgtggtcattcggcgtacaacagcttacaacaacaacaaaacccccttgctagagagtgtggcactcccccccctgtcgcgttcgctcgttcgctggctcgattgggggggtggcagctcaaagagctgccagacgacggccctctgggccgtcgcccccccaatcgagccagcgaacgagcgaacgcgacaggggggggagtgccac

SEQ ID NO: 5299 - protein, 390 aa, Bovine adeno-associated virus
MALVSWLVEHGITSEKQWIQENQESYLSFNSTGNSRSQIKAALDNASKIMSLTKSASDYLVGQTVPEDISENRIWQIFDLNGYDPAYAGSVLYGWCTRAFGKRNTVWLYGPATTGKTNIAEAISHTVPFYGCVNWTNENFPFNDCVEKMLIWWEEGKMTSKVVEPAKAILGGSRVRVDQKCKSSVQVDSTPVIITSNTNMCVVVDGNSTTFEHQQPLEDRMFRFELMRRLPPDFGKITKQEVKDFFAWAKVNQVPVTHEFMVPKKVAGTERAETSRKRPLDDVTNTNYKSPEKRARLSVVPETPRSSDVPVEPAPLRPLNWSSRYECRCDYHAKFDSVTGECDECEYLNRGKNGCIFHNATHCQICHAVPPWEKENVSDFNDFDDCNKEQ

SEQ ID NO: 5300 - protein, 610 aa, Bovine adeno-associated virus
MATFYEVIVRVPFDVEEHLPGISDNFVDWVTGQIWELPPESDLNLTLIEQPQLTVADRIRRVFLYEWNKFSKQESKFFVQFEKGSEYFHLHTLVETSGISSMVLGRYVSQIRAQLVKVVFQNIEPRINDWVAITKVKKGGANKVVDSGYIPAYLLPKVQPELQWAWTNLEEYKLAALNLEERKRLVAQFQLESSQRSQEASSQRDVSADPVIKSKTSQKYMALVSWLVEHGITSEKQWIQENQESYLSFNSTGNSRSQIKAALDNASKIMSLTKSASDYLVGQTVPEDISENRIWQIFDLNGYDPAYAGSVLYGWCTRAFGKRNTVWLYGPATTGKTNIAEAISHTVPFYGCVNWTNENFPFNDCVEKMLIWWEEGKMTSKVVEPAKAILGGSRVRVDQKCKSSVQVDSTPVIITSNTNMCVVVDGNSTTFEHQQPLEDRMFRFELMRRLPPDFGKITKQEVKDFFAWAKVNQVPVTHEFMVPKKVAGTERAETSRKRPLDDVTNTNYKSPEKRARLSVVPETPRSSDVPVEPAPLRPLNWSSRYECRCDYHAKFDSVTGECDECEYLNRGKNGCIFHNATHCQICHAVPPWEKENVSDFNDFDDCNKEQ

SEQ ID NO: 5301 - protein, 736 aa, Bovine adeno-associated virus; identical to SEQ ID NO: 5285

SEQ ID NO: 5302 - protein, 600 aa, Bovine adeno-associated virus
TAPAAKKRPLEQSPQEPDSSSGVGKKGKQPARKRLNFDDEPGAGDGPPPEGPSSGAMSTETEMRAAAGGNGGDAGQGAEGVGNASGDWHCDSTWSESHVTTTSTRTWVLPTYNNHLYLRLGSSNASDTFNGFSTPWGYFDFNRFHCHFSPRDWQRLINNHWGLRPKSMQVRIFNIQVKEVTTSNGETTVSNNLTSTVQIFADSTYELPYVMDAGQEGSLPPFPNDVFMVPQYGYCGLVTGGSSQNQTDRNAFYCLEYFPSQMLRTGNNFEMVYKFENVPFHSMYAHSQSLDRLMNPLLDQYLWELQSTTSGGTLNQGNSATNFAKLTKTNFSGYRKNWLPGPMMKQQRFSKTASQNYKIPQGRNNSLLHYETRTTLDGRWSNFAPGTAMATAANDATDFSQAQLIFAGPNITGNTTTDANNLMFTSEDELRATNPRDTDLFGHLATNQQNATTVPTVDDVDGVGVYPGMVWQDRDIYYQGPIWAKIPHTDGHFHPSPLIGGFGLKSPPPQIFIKNTPVPANPATTFSPARINSFITQYSTGQVAVKIEWEIQKERSKRWNPEVQFTSNYGAQDSLLWAPDNAGAYKEPRAIGSRYLTNHL

SEQ ID NO: 5303 - DNA, 114217 bp, Homo sapiens
gggaggagcttgcttctccattctggtgtgatccaggaacagctgtcttccagctctgaaagaggtgaaaatgtgttaagcgatgcaaaaattgtcttgaagttcgcgtgtgtatgtctgtgtgcatgtgcgtgtggtgggtggggggagagaaaagggggtgtcaattctgagggcaacgagaatcagaagtcagaaaggtgagtggtgtgtagcatctccctttcagaaggggctgaagaagaaattggatatgatggtccggtaggctaaatcacgctggatttgtctcccagataaagggaggtctgcaaagtaagtcccatttctagagcgaaaagccttaggaccgcttgttttagacggctggggaatatttattccttgttccactgatgggaaaatcagcgtctggcaggcgctgattggtggaaaggaaaatggtgatagtggcgtggaaagaggatttgctgagccttctcctgcctcctcaacctgtgactcttccttagtagtctccctttcaccctcaggaccctttccggctcttcctagattaagagcaaacgaaaaccttgaagatatttgaactaaagcgacccctaacgttgtaacctgtgaccgtgattaaatttcagcgatgcgagggcaaagcgctctcggcggtgcggtgtgagccacctcccggcgctgcctgtctcctccagcagctccccaagggataggctctgcccttggtggtcgaccctcaggccctcggctctcccagggcgactctgacgaggggtagggggtggtccccgggaggacccagaggaaaggcggggacaagaagggaggggaaggggaaagaggaagaggcatcatccctagcccaaccgctcccgatctccacaagagtgctcgtgaccctaaacttaacgtgaggcgcaaaagcgcccccactttcccgccttgcgcggccaggcaggcggctggagttgatggctcaccccgcgccccctgccccatccccatccgagatagggacgaggagcacgctgcagggaaagcagcgagcgccgggagaggggcgggcagaagcgctgacaaatcagcggtgggggcggagagccgaggagaaggagaaggaggaggactaggaggaggaggacggcgacgaccagaaggggcccaagagagggggcgagcgaccgagcgccgcgacgcggaagtgaggtgcgtgcgggctgcagcgcagaccccggcccggcccctccgagagcgtcctgggcgctccctcacgccttgccttcaagccttctgcctttccaccctcgtgagcggagaactgggagtggccattcgacgacaggttagcgggtttgcctcccactcccccagcctcgcgtcgccggctcacagcggcctcctctggggacagtcccccccgggtgccgcctccgcccttcctgtgcgctccttttccttcttctttcctattaaatattatttgggaattgtttaaattttttttttaaaaaaagagagaggcggggaggagtcggagttgtggagaagcagagggactcaggtaagtacctgtggatctaaacgggcgtctttggaaatcctggagaacgccggatgggagacgaatggtcgtgggcaccgggagggggtggtgctgccatgaggacccgctgggccaggtctctgggaggtgagtacttgtccctttggggagcctaaggaaagagacttgacctggctttcgtcctgcttctgatattcccttctccacaagggctgagagattaggctgcttctccgggatccgcttttccccgggaaacgcgaggatgctccatggagcgtgagcatccaacttttctctcacataaaatctgtctgcccgctctcttggtttttctctgtaaagtaagcaagctgcgtttggcaaataatgaaatggaagtgcaaggaggccaagtcaacaggtggtaacgggttaacaagtgctggcgcggggtccgctagggtggaggctgagaacgccccctcgggtggctggcgcggggttggagacggcccgcgagtgtgagcggcgcctgctcagggtagatagctgagggcgggggtggatgttggatggattagaaccatcacacttgggcctgctgtttgcctgagtttgaaccacaccccgagtgagcagttagttctgttgcctacgcctttccaccatcaacctgttagccttcttctgggattcatgttaaggatacccctgaccctaagcctccagcttccatgcttctaactcatactgttaccctttagaccccgggaatttaaaaaaggggttaatcttttcatgcaactccacttctgaaatgcagtaataacaactcagaggattcatcctaatccgtggttaggtggctagacttttactagccaagatggatgggagatgctaaatttttaatgccagagctaaaaatgtctgctttgtccaatggttaaatgagtgtacacttaaaagagtctcacactttggagggtttctcatgatttttcagtgttttttgtttatttttccccgaaagttctcattcaaagtgtattttatgttttccagtgtggtgtaaaggaattcattagccatggatgtattcatgaaaggactttcaaaggccaaggagggagttgtggctgctgctgagaaaaccaaacagggtgtggcagaagcagcaggaaagacaaaagagggtgttctctatgtaggtaggtaaaccccaaatgtcagtttggtgcttgttcatgagtgatgggttaggataatcaatactctaaatgctggtagttctctctcttgattcatttttgcatcattgcttgtcaaaaaggtggactgagtcagaggtatgtgtaggtaggtgaatgtgaacgtgtgtatttgagctaatagtaaaaaatgcgactgtttgcttttccagatttttaattttgccctaatatttatgactttttaaaaatgaatgtttctgtacctacataattctatttcagagaacagttttaaaaactcatagtcttttaaaaaataatcaagaatattcttaagaatcaaaatcattgatggatctgtgatttcttttaccatcatgaaaaatgtttgtcaattttaatccattctgatttttaaaatatgactttgatatgcccctgtgatgtgtataaagagacctatttgtggccctaaaatggaaagaacagattagtctttgatagagttacttcatgtgatcatttggtctctgtgaacactgaggacagagaaaagtgcttgagggctgctactaatctctcagaaacatttgtatagttcatccatcaaatgacacacatactaaaagaataaagaaattgatgcttattacctacttgttcctaaagttccaccttggggtatacacccaaactctgactctcttttctgtaacttgaactgtattcaattgagtgttattttacaaaccactttgaattccttggaaaagaatagacacacactctcatccacaggcatagacacacacactcaacacagacacattgcccattcttcctctcttctttctcctctgagctttttcacattctctggtggcaactatagcagtaagagtcacaggatgaacagtcaggtggaggatgaccacattgagttgcctagctgaaacatgtgctccgtctatgtctgcaaagtgaaagaaagctacactatctcttcaacatagatcagtgggggaaattttatacttgggatgatttatatgaatgcatctcatcaaagttcacaacacatttttttttcagttttttattttcagtttttagagtcagggccttgctctgtcgcccaggctggactgcagtgatgctatcatagctcactgcatccttgaattcctgggctcaagtcatgcccccacctcagcctcctgagtagccaggattataggcatgtgccactgcctcattatttagacttttcttatgttgacttaatcttcccacaaatcttcaattaaattactttttttctaccttaaaacatattttcagaaagtcattgaaatagggtgttacaagaggaaaaaattgatgagttaattttaaatattttatgaagtgtgaattatacctttttagatggaatttggaatactgaatcagtgacatgcagtttatcaatatctttccgtttgtcctcagatttccaagttctgcaagcacaagtttctttgacttagttaccttttaactgttcattgaaatcattttcaatgtctctcatggcatttaacacatagcacattctataaattttttattggttacattctgagttctaattgagagttgaacttacacacagaatttaagataaaaaatgaccatgtgaagacacaatagtatagtccagggattggcaaaattttgggtaaggaatcagatagcacgtattttaagccatgagatctatgtcttggccaggtgccgtggctcaggtctttaatcccagcactttgagagcccgaggctggtggatcacttgagcccaggggtttgagaccagcctgggccacatggtgaaaccctgtgtctacaaacaacgcaaaaattagccgggtatggtagcatgcatgtgtattgccagctacccaggaggctgaggtaggaggatggcttgagccatacagctcactgcagaggttgcagtgagctgagatcgagccactgcactccagcctgggtggcagagtgataccctgtctaaaaaaaagaaaaaaaaatctatgtctcaattctgctgttgaagtgtgaaggtagtcataaacaataactagtgtggctgtgtcccaataaaacttcatttatcaaaacaggtggtgggctggaattgtcttgtatgttgtagcttgctgactactgatagagtggaaagaacatgcactaatcacacaaaccaaagttttagttgagactacatcacttatcacctttagggtcttggggaagcgtacttaacatctctgagcatcacttccctgattagtaaaaaatatgatttagaaaactgcaactaccttgcagtttttgtgggaatgtcataataagacaggacatatgaataattgagcacacttttatatataggaaccatggttattattatcaaataaactctccaacggaataattactttgccaacacgttttccatttattcttttatccttcattacataactagtttgaaagattggaggcgaccaaagaccattttataatttcacttatggctgaagatgtttggtagaagcctcataagaaaagtaatctcattcctttataagaatatacttttaacaactactttttaactcattgaagaactaccttaatgatcagtgttatttttatgggttttgttccctccatttttgttatctgcgtacaccaattttcaatcaacatacttcaatttaatagacaaaaatttcttcaaatgactcagaaattaattagatctaaatccaaaagcagaaagatttaattatctttatataatgctcagtaatataaatgcaataaatacaagaaaatgatgatctttgagtgtcttccaatgccactctgctcaataagcagcagtggccatcagtgaaattgatagcaaattctcaagtcaaaatgtgcttcacctcactaagctgacaaagtcaacataacatgcacaacagggataactgagttctcaaaactctcaggtattacttctgaccttcttctccactctgtgctcttttgaggttgggaagacaagatagggtgtgtgtgggacacctccgctcagggaagccatcagctctggtgtccctacagcatttataccttgctagtcacataaccacttggcacctattttgtaggtgtacgttatcaattacagattactcataaattaaaggctaaccatcaattacagattattagtaaataattatgacctcaaagaacaactgattggtttgatacatggtaaccttatgaggactctcatttatctcgtttttttaagttatatacctatctctttggggttgcactacaaaaatataaaatatgttgcataagatatttataaaaaataattaattataagttctaatggtgtggtttagtggcattcttttttttttctttttttctgagatagggtctcaatctgtcatttcactccaggctgaagtgcagtggtgtgatctcggctcactgcaacctccgcctcctgggttcaagttattctcctgactcagcctcctgagtagctgaaattacaggcatgcaccaccatgcccggctaatttttgtatttttagtagagatggggtttcaccatgttagccaggatggtctcgaactcctgatctcatcatccccgacctcggcctcccaaaatgctgggattacaggcgtgagccattgcacccggcctagtggcattcttttttaaaaataaatttaattgtgtatatttagggtatgcaacatgatgctatcagatacattagacactaaaaaattactatattgaagcaaattaatatattcataatctctcatagttaccttttttgttgtttttgtggcaagggcagctaaaatccacttatttatcatgaatctcaaatatagtacaattttatcacctacagtcctcatacattagatctgtacactttttcatcttacacatctgctacttgcttggatcctatggcctatatgtccctattttctacctacttttccacccctattaaccctgttttttacgtagtctctgtatatttgaattttgtttcaagcttccacatatatgtgagataatgtaatatttttctttctgtgtttggcttatttcacttagcataattttgtctgggttcatccatgttgtaaatggtaggatcttgtttttttagggctgactgatattccattgtatctatgtaccacaatctttttatctacctatctatcagtagacactttagttgtggctattatgtttttctttttttcttttttggagacagggtcttgctgtcacccaggctgcaatggagtggtgttatcatagctcactgtaacctcaaacttctgggctcaagagatcctcctgccttggcctcccaagtagctgagactacaggcatacattaccatgcctggctaatttttaatattttttgtagatatagcatctcactctgttgcccagactggtctcaaactcctaattcaaatttagaatagagtatgacaattctgtaaaatataaaaaacatgtccactccgtataggaagttatacaatgagaagaagacaaacactatttacattactcttgataagttttttacaaagaaataaaacactttaatttctaatgttttaaattctggtttgctaaataaataaatattagttttagtgtttttaaaattccttatatagttataagtgatcttcctgcctcagcctcccaaagcactgggattccaagcaagagccactgtgttggggcccttggaaacagatatgctgaaatcttttcttgtggatctacacccagaagagggattgctgggtcatatgctactctatttttaatttttcttttatttttagtgaatatgtaataattgtatataattgtgggatccagaattatatttccatacatgtatacaatgtgtgataatcaaattagggtaattaacatatccattacctgaaacatttatcattcctttgtggtgggaacagtaaaaattaaaaattctctcttctagatttttgaacatatgcaataaactattgttaagtatatcaccctacagtactacagaatgctagaactcattcctcatatttggctccaatttcatattctttaaccaacctctccatatcctcccctccctcttaccgttgtcagcctctaataatcataattctactctctacttctatctcattgtctttgatttagaatatgtttcataatttaaccaaaggtcaaattcttaggtactgctaaggcaaagaacaaagatcgcattccagctgttagacatttcttactactagtcatttttaagacaacatggggtgcaggtggtgaggatgagagatagagattgaaacatattctcttaaatatcagctgttctcactctgcatagttccagcacaaacaaattccaggtactatggttagttaaataacaccagccactaacaacacaattcaaatttctgttaccacagtataccgaaagtcattgcataaagtacaaactttgctgctaactcttcagccttcaaatcattacataaataacagaaacccattataatcagtgacaaaaccacagcacttctttcaaagctttttggagattggttgcttcacatctgttatgcagttcatacagacagcaatgcccggacttgtgtggccacattgtctcccagtggtgagcccatgtgatgtttcacgaaaatgcgcaatcaaaagaggaaactggccagcaaagatgaaagagtagcaaacaaaggaagtgaaacattctggaagtaaaatttgaatcaaacataagttgatgtatacaggaagtagctaccctgaggatgttgtcactgctgcaattcaggagactctaaatatgcagtcagaggaacgtagtgaggtgaaggtatccgtataatggggaaagaggttgtgataaagagtgaaggtgtcccagaggaagtgttgctgaaaaatacaccttatgttaaatacactgtcagtatatcatgacattaaagtgcaaatgataacattttgtaaactgatccaaacttaaaaaggagtatgataattctgtaaaacataaaaatcatgccgattccataaattatacagtgtgaattacactgaaaaatccaacattagagaggatatgaatacaattttttacaagcataattttaataatacacataataattatttgtattcaagtttagtaatgttcaaggtttggaagaaattctgatcctgtgtagagaccctagtttgaatgtgcttatagcctattattacatgtgtaatgttacataaattacttaactcggatttttaatttcatcagctatttaaaatgggcataatataactatattaaatggctgttatgaagattaaataagatgatatgtaaaatgtgttttttgtttgtttgtttgtttgtctgtttgtttttttgagacagagtcttgctctgttacccaggctggagtgcagtggcacaatcttggctcactgcaagttctgcctcccgagttcatgccattctcctgcctcagcccctcccaagtagctgggactacaggcacccgccaccacgcctggctaattttttgtatttttggtagagatggggtttcaccatattagccaggatggtctcgatctcctgacctcgtgatctgcccacctcggcctcccaaattgctgggattacaggcatgagccactgcgcccagcctaaaatgttttttttacataatgggtgttcagcacatgttaaagccttctctccatccttcttcccttttgtttcatgggttgactgatctgtctctagtgctgtacttttaaagcttctacagttctgaattcaaaattatcttctcactgggccccggtgttatctcattcttttttctcctctgtaagttgacatgtgatgtgggaacaaaggggataaagtcattattttgtgctaaaatcgtaattggagaggacctcctgttagctgggctttcttctatttattgtggtggttactggagttccttcttctagttttaggatatatatatatatttttttctttccctgaagatataataatatatatacttctgaagattgagatttttaaattagttgtattgaaaactagctaatcagcaatttaaggctagcttgagacttatgtcttgaatttgtttttgtaggctccaaaaccaaggagggagtggtgcatggtgtggcaacaggtaagctccattgtgcttatatccaaagatgatatttaaagtatctagtgattagtgtggcccagtattcaagattcctatgaaattgtaaaacaatcactgagcattctaagaacatatcagtcttattgaaactgaattctttataaagtatttttaaataggtaaatattgattataaataaaaaatatacttgccaagaataatgagggctttgaattgataagctatgtttaatttatagtaagtgggcatttaaatattctgaccaaaaatgtattgacaaactgctgacaaaaataaaatgtgaatattgccataattttaaaaaaagtaaaatttctgttgattacagtaaaatattttgaccttaaattatgttgattacaatattcctttgataattcagagtgcatttcaggaaacacccttggacagtcagtaaaatgtttattgtatttatctttgtattgttatggtatagctatttgtacaaatattattgtgcaattattacatttctgattatattattcatttggcctaaatttaccgagaatttgaacaagtcaattaggtttacaatcaagaaatatcaaaaatgatgaaaaggatgataatcatcatcagatgttgaggaagatgaggatgagagtgccagaaatagagaaatcaaaggagaaccaaaatttaacaaattaaaagcccacagacttgctgtaattaagttttctgttgtaagtactccacgtttcctggcagatgtggtgaagcaaaagatataatcagaaatataatttatataatcggaaagcattaaacacaatagtgcctatacaaataaaatgttcctatcactgacttctaaaatggaaatgaggacaatgatatgggaatcttaatacagtgttgtggatatgactaaaaacacaggagtcagatcttcttggttcaacttcctgcttactccttaccagctgtgtgttttttgcaagattcttcacctctgtgtgatttagcttcctcatctataaaataattcagtgaattaatgtacacaaaacatctggaaaacaaaagcaaacaatatgtattttataagtgttacttatagttttatagtgaactttcttgtgcaacatttttacaactagtggagaaaaatatttctttaaatgaatacttttgatttaaaaatcagagtgtaaaaataaaacagactcctttgaaactagttctgttagaagttaattgtgcacctttaatgggctctgttgcaatccaacagagaagtagttaagtaagtggactatgatgccttctagggacctcctataaatatgatattgtgaagcatgattataataagaactagataacagacaggtggagactccactatctgaagacggtcaacctagatgaatggtgttccatttagtagttgaggaagaacccatgaggtttagaaagcagacaagcatgtggcaagttctggagtcagtggtaaaaattaaagaacccaactattactgtcacctgatgatctaatggagactgtggagatgggctgcatttttttagtcttttccagaatgccaaaatgtaaacacatatctgtgtgtgtgtgtgtgtgtgtgtgtgtgtgcgtgtgtgtgagagagagagagagactgaagtttgtacaattagacattttataaaatgttttctgaaggacagtggctcacaatcttaagtttctaacattgtacaatgttgggagactttgtatactttattttctctttagcgtattaaggaatctgagatgtcctacagtaaagaaatttgcattacatagttaaaatcagggttattcaaactttttgattattgaaaactttcttcattagttactagggttgaatgaaactagtgttccacagaaaactatgggaaatgttgctaggcagtaaggacatggtgatttcagcatgtgcaatatttacagcgattgcacccatggaccaccctggcagtagtgaaataaccaaaaatgctgtcataactagtatggctatgagaaacacattgggataaatcggctgctatcataatcattcctctcccacatcagataaatgaattaactttttgaatagggttatttaatataaagtgcttaagtctaattatgagaagaaataagataattacacttcaatggttaaagagagggagaataatttgcatattatgcctgatgtaaaatgtttattatgggtacatattaagtgctaactaattgttaattgttcttgctacaagtcttaatgcagggaaacaagaaattattacatagtacctaatattatcttctaatattaaagaaacaatttcccctaaattcatcccattagctttttttttttcggtggggcaggggagaaatacagacttcagtaaacttgggctgggaactttctacctacaaagttcaaataaaataaattatcctagttagataatatcaatgaaaaatccaccaacttaaatcctggctgtttgatctcaggaaattatttcagttatcaacttaatgcatcatattatagaaatatatgaaaatgtgtttaattaaacttactgaatgatatgttttttcaggtactttaaaaataaactatgatataaagttacctatttttcatgcaagtatagtataaagaaatttctaacactggagattttctgaaggttttgattcttataaatttattacatcataatgaacaaaactaattttcaacatattatgatttaaatttccttagtaaattgtttcaaatttattttctttaaatccatatttacatatgtatatttaaatatacatatttacttgtataacaattcaaaaccatatattaattttataattttgtttaatgtcaaaggttagatttggctatatctattctaaaagttggtatcacatttcctttttggaattttatttttaaagtagctaaagtcaaatataaacctattatttatattaatgcagacattagaggtagacactaaattcattttagtatattctaaattatttattatctactatgaaataatataaagaaaaataaagcagaatccctgatttcaaagaactcaattgccgaaaaacagttaccatttattagacccaaaatgtactaatatgagtgtgtctcttttccttttgttttgtcacccgtcatttggaatgtcagtgagtagagagatagtgtgaaaggccctcaaggggaaaaatagaggttaaaggtcagcagagaccctactagagaaatcagttctacagaaatgtttttaaatgtgtcgattattgctacatgtacactctgtcattttgtaatgtagccattttatttatgattataataataaaacaacaaaattataataatgtgtagagtacattttactgtgcagtgtattgcattaaaactagattaaaatttatacatatataaaaggctatctagatattataaaatttatggctggatctgtaaaaaattcaaaacctatttttaatctcgctttgagattttataacaagaaaatgttcgtttcaagcaaaattttcaattcacgtccttgaaaaggaaaaaaatgacaacttgaaacacataattgactatttttaaaggatcaacatttcagaaatgttttaaaacataagattttcagtacagcttttcgctggcatttaaatcgaactttgaattgtaaatagctcttgctcttaaggagacatcagccatatccttagaagtggcacggagttgttaggtagttgtacaaaattctagcctaaaagacaaatagggagcaacactactgtggaccgtttctggtcttgggctgtgtggctatgtcaggcttgcccacattgcctgtactaaggagaaagcctcttgtccttacagacccccttagcttacatagtctatttgaaaacaaattgctttgtccacaccatttaaatattggcttcaggccaggcgcggtggctcacgcctgttatcccagcactttgggaggctgaggcgggcagatcacgaggtcaggagatcgagaccatcctggctaacacggtgaaaccctgtctctactaaaaatataaaaaaattagccgggtgtggtggcgcgcacctgtagtcccagctgctggggaggctgaggcaggagaatggcctgaacccgggagtcggagtttgcagtgagccgacatcgtgccactgcactccagcctgggtgacagagcaagactccgtctcaaaataaataaataaataaataaataagtaaatattggcttcttcaactggtgagatgaaacctatacaatagtcatgtgaatagcactaaacagctgacatggtgtaactcctctcagactgaggcttatctggggagtacaaagcatgtcaagaaaatgtgccttcatttccttagatgagtgtccccatcctccactctcctccactgttctcctctctgcttctatgatatcaacttttctttttctttagattccacatgagtgagatcatgtggttgtttgcctttctgtttctggcttatttaactgaacaagaaagtttttgacatgaaattaaacttctgcttgtaaactcaattcaaactatttacactgtcttctcaaaaatgttaacttattttaataaatctactgaatgaccgtatctcattttgttttatgaaaagaaattgtaagggtgctcaatagcctcttcattttcatactgtctagctcctgtgctcctattaaaattactgcaaatttagctttttaagaaccctttgtttcactacctgaagttctataaaaagatccaagttccttcacaaccgtttcttatgctgttattcgtacatatgtgataataccacgtctgaacacgtagataataagtaggggctgggtgcggtggatcatgcctataatcctagcactttgggaggctaaggcgggtggatcacctgaggttaggagttcgagaccggcctggccaacatgatgaaaccctgtttctactaaaaatacaaataataataataataataattagccaggtgtggttgtgggcacctgtaatcccagctactcgggagactgaggcaggagaatagcttgaactcaggaggcggaggttgctgtgagctgagattgtgccattgcattccagcctgaacaacaagaatgaaactccatctcaaataaataaataaatagaagtatgtattgtgttgcttagaaggtgtggtggaaattaacttgctgagtgagatcaaaggattggcactgaattgaaataaagaaatattcatgctgagtctggttcaaatataactgcacctgtaagaattgctttctgtaaactttccatagtataaaccaaatccaaatcactcatggctttacattcctgatcgttaaacttgaagcactttttaatactgcatgactttagccaaaatatcttagccaagattcaatgtttggttgaaccacactcacttggacatcttggtggcttttgtttcttctgaccactcagttatctatggcatgtgtagatacaggtgtatggaagccgatggctagtggaagtggaatgattttaagtcactgttattctaccaccctttaatctgttgttgctctttatttgtaccagtggctgagaagaccaaagagcaagtgacaaatgttggaggagcagtggtgacgggtgtgacagcagtagcccagaagacagtggagggagcagggagcattgcagcagccactggctttgtcaaaaaggaccagttgggcaaggtatggctgtgtacgttttgtgttacatttataagctggtgagattacggttcattttcatgtgaggcctggaggcaggagcaagatacttactgtggggaacggctacctgaccctccccttgtgaaaaagtgctacctttatattggtcttgcttgtttcaggcattaacccagataaatgccatgcaaattttataattattatgattgtttcaatttctggaagaaagttaatgaaacaaaaaatgtagtaaaatgccaaaggaacagtgacatttcagaaagaatgagggctttcatgttaattgtaagtcttggaatttctcttccttggagtaacaaatccctttgtgcctaatttcctaatttccaaaataaagttcttttacttatttctttatagtgacatcatctcttattaaatggcatatctgcatattacataacagttcattgccaaatacatatttgtgggaaatgagagacttaaaatacataccaaccagagatatagttttgaggtagattttaaaattctgagaagaattttgactgaatttttttgacaaacatgggacacgaataagattataccaaagatattataactttcattttaaatatggaactaatacagtatgaggtgtcaacaacgttgaagtttcacaaacatcaccactacaacagcaaaataatttttgctttttccctgccacaatgacctccttgctatttcttgaataaatcaagcatacccttgccctgacacgttcttggggaggcctgccctaatctatataaaattggagccattcttctcacctctggtattcccagtctccctactttttttccttctttctttctttttctttttctttctttctttccttctttctctctttcctttctttcttttcccttccttccttcctttctcccttccttccttcctccctctctccctcccttccttcctccctttctttctttctcttttttctttcttgcttccttccttccttctttccttttctttctttttcctttctttgccaaagtgttattcacctttaaatataatacataatgtgcttactttaatgtatgatttttattttatttctcccttctagaatgtaggcaccatgagagtgaaatatatttattttgttcattgatatttcacaagtgtctgggagagtttccaacttacagtagacaattaacaaacatttattaaattaaggagggaaggaagtgagtaagcacaacaactttcatttctgggtcttttataatcatatgcttagtataagaacagtgctattcagctatccaaaagttacaatcaaaatgattttggatgaatatcttgaaaattgtgagaaagaagttttatttgctggcaaactattctgggttgtttccacttcatgtaatcctaagtagcagccttaccttgatagcccattaaaactctgataataaaaaggcagaacaaaaatatctgtgatatatttagatttactacatgtacttacatgtctagtgtctggtgcaatggatgctaatgatggcaaatccttactgggcttctagtgaagttcttcagctaatgtttgaatgcatggttggtcatggtggtacccctttgtacaaaatatgcttttcaaataatcttattagggataataattatattaattcctggtttccatctaaaattttaattctatttatagcttcgtaagatttcacaagttaagagggacctcagattaaattagtacacaggcaattaatcagttttgtgtctccgacccttttcacgggctaatagaagctatagaccctcttagcttcagaaaaatgcgcactcacatacgcacatcaaagagcttaatgggaagtccattgacagaccctctgttcagatcaatcttctgattgtagagatgaggaaacagaaatctacagaggaagtgggtagtccaagattgcacagtcatttggaatagactggacaccagtagtacttttccagccactatatcacttccccaagcacttcctcaaaacttaccttcctttgggtctttatacattcagttatggacaactagatttaactagaggattttattgcttcagaatattaagcaacagggaaacatgtaccgtcttttattcacctgcatttaaggcatacaatataaattgcaaatggagcatgaaagtgcttaatcttttacaaaactgggtttgctttccacccatctaaaaatacttctatttattttaatatttaaagcagaaatctaagtgatgtgacaaaattaatcatttggagatatttcccttataggtagtatagtttcttactgatttctaatatgaaaatgaagccatagaacctagaaattgcagcatagttgtggaaataaacattggactgagagtgaaaatggctagtcttcctctctgctcatacaccacctgactggataacctttcgcagatctcctaaaagtctttctcataaaatgaggaagctctactagaaaattgttgaagtctaatttagcaataaagttctgagtttctataataattcaaagaatactctaataaatgtctgcaattgtggtcacatctatgggatgctaaaaaatctggatggtttcaatgaaagtatttaatttgttcattatgaactttgaaataatttatttcattttttaaactttgatcaaaatgaccctggtaaatagaaataagcaaactctttttgcttgaaatgcttattaatgactgcattgagacactcattcatcattcaagaaagaatgtttgctcacactgtgccagaaacttggaggaagagggatgtgacaagtaggggtactggatgtctagcttgtagaagtggattaatggctctgcttttaagatcaggaacactgaaagggagtaatggcaccggttttcacctttcatgccctttgagggtatctggtccatcaccctctagttgatgagggagggaaagttccctctcccttcacaaataggtggaaattaaatgacataattctgaacaaccaataaatcgagagtaaatcaaagcagatacctgttttgttaatttgatcatatgaatgtagctgcccttagtaataatttctaagtataagactagttaaaggacaaatgagttatcttgaattataagattttgttttacagaacaatattaactcttgtgtttagtacattagaataatagatcttttgatccatatttttactcatgtgcacataagaagttatcagtcatacaattcatttcttgaagttcatacctttcattggcagagtagaaacaggttaaaagtgcacaggcagaaattttaagtgcaaagcaacagtgatgttatatagagaaaatttatatttcctacttctattgaagaagaaagatctgcttgttctaagaatattgtacaaagaaagtgacttgaatcagcgttattctgtaatgctactatgcgtgcagtgtggagtagccactagaacacttggtctatcccagctcctcaacagtgtcttgcttgtggctggtgctcaaataaatccttgctgaactaatgagcatctctttcatgccacatggaatgctctaaaagagttggatcctgaagtttttatatttttgtaattttctggagttttagagagcaaaagtcctgaataaactgtgaagccactgcctgacaaataatacagcagtcagcttcgttatcatatcccattgagacacgacttatctacatgatgattaatagttttcacgcaagaaataagcttgaaatgtctgttgccttggatacttaaaacatccaggttcagcgatgttatttattgttgttcaaaatcagaatgaagttcctaagcaatgccattttggaaaaattacatcaatatattatgaacaactttttttaaatcttgatttcaaatggattgacacgtgtatattctgtaataatcctgacttaattcataaaaggatagctagccagttgtgtgctagatgaataaaaaaaaagcaggttttaaaatgtcaggtttgacattgtgaatataatatctaagtatccttttactcatttcctttgacttactatggctgtcatgttgggcttcatgaaaatttatttttaaacacttgagtgttatggaccctctgattaaatgattaatcagatgatgtatgttgccatcagctgaatcatttaatgttgatttcacaaacaagcacaggtcacaggcaacatttcagatttctttgaagaagcacacacaggtcacaggcataatcttaaaataattttataacaaggtagtaataagagatgtcaggactggagaaatattttaatttatagtaagctttccccttaagtgtctaataattgttaatataatacattgcctcaaataattaaaagtttggttcttgtccttgtgcttgacttcagaagataaccagatgactattaggtatatttagacctaaattaaaagctttgagacacaatgaattgcctgatttgtatttgtgtttcgagtggcatatactattactggcactataatcttagattaaagcatactgtgattattaaagaaaaatttaagattgatttgtttctaaaggtatgtaacagtgacattttgcaatgtggtatgtaaaagttggtatttctcactcatatgagagcccactaatggtacataaactgtccccacttagaaacacaattattatggcctttctttgtatctgacaaaatttcactgggttcaagatggatgaatagtgaattctaatgacccttaatcctgtaaggttctaggtgggaaagtactctgtaattatgtataaaattataaggaaaataggcttactgctatgttttcattaaaaatcattaactgagtacttaatatgtgccagacactcagctgggcaccatgagaaatacaaaactgagtaacatatgggtggctcctgccttcaagaaatgggcagttcaggccgggagactgacatatttaccctgggaaaaagggagcagctgtggtctctgagaacaatatggtttgttacaagtatatatccatcatggaaaaaaagagatttatcttagaaatgagagaggctgatgctctcaataaatatcatacattaaattgtgtttttgtcagtagactgaaattacctcacatacacgcacagatagtagccatgatattttagctgcttagatatagagacaaatacttccacccaaatcttaggatcagtggttaatagtctgtaagcattacaatcccacaacatatgcatgactatacatccaattttaatattcaaagaactgattgcgatgatagttttgtttgtcaaagaaatgtattataggatgagtgggatagaactgcatcacgttacaccaacaaataggtttaaatcatatttgtgcacttcccttgttccttcataaatgtttaacatagcttaaaattctgtggactgcaacgtgagagcaatgaccacacttctgtgaacccatttttactgtgcatgtgctaacgtctattgttagtattccttcacttgcaaagatggcatgataattttgctggtttcattaatgagatactgttaaatgtaggatgacttcaaacttagttgtattgtaaaattatttttaattgtatacatttaagttgtacagcatgatgttttgagatacttatctttatttatatatatatataatatacacacgtatataaaagtgattcctacattgaagcaaattaacatacccatcatcatatggttatctttgcttttttactatcagtgcctaaaatctactttcttgaaaaattaccagtatgcactacaatattattaacaataatcttcatgttgtacattagatctttagacttactcatcttacatgacttaggtttgtttttacctctactaccatctgagccatatttccactttgtaatttgataataaacttggaaaaatagcacttatatgtttaggtgacgggcataaataggataagatgtgtttatatattattccatatatcttgtctccaactacaatgataaacaacctgtttgtccctaaaaagtaagaaataacttgacttttctgccccttcaagcataggctgttagcttttaagttttagggagacattgatgatgctatttgctttatcaagaggaaattgtcaaaagaggtcttttggttctcaaactattcaaagtatttaaaaatcaggacaaaatatgtttacgtgatattcaagggtacagaaatgaggtaaatgagatgccaattgtatttgtcatgcaaatatataattacgtgtatgagagttagatgatacatctcatcaatttaattgttcttctacaaggagaaaatgaacaatttgtcaactcgtatatgaagtaatttttataagaaattttattaaaacttttaacaacatttggatttttaagttgcaatttaaatatccccttctaccaggtgattctggaatcactaagcagttacttgtgaaaattccaaagtagcatttaattcttattaatgtcatagtgaatactaatgcaaagaatactgagccagaaattatgcttgttgaataaatagattatttattgaacaagtaagtgaaaaaatggaaataaagaacggatatatattttatcttcctgcttagatgtgggactgtcctacttttctctggtgttcacaacaacaatatgataaatctaattggaattcagttcataggaatgaattcagttacattatggattgtgatgaataatgtacacttttaatttaatgaaatcaaatagattttaactatctatgcttacaatggggtgacataagtctgacaatccttaatatcaagtcatctccaattcacatgtatacacactttttttctatttggctattgggaatcctcacaaaaatcgaaaattgccctttcagtgtacgttacggtatttcatgccacacagattttctgaggttgtacatacagctttgccttgaggttccaatttttgctcagtggattgagtatatattatttgctatatatcagaagaggcatgtgcttcctacttatgtcaggtaactttgggattaatataattgtcctacaaagcatagatagatagaaatacttcatccttaatttctaatattatgacatatctaaagtaggcacctttaaaagttaatctccactaaatactaatgactgcttatagtggcaattcatctttcatggtagtcctcctacaaaggtatactaacatttatgagtttgaaacaaaggcaattcacaagtgttctgctagagatggtctatatctgctgtttgatccagcatgatggccagctggccctcctgtgcatgacggctcgtggtttaactgcaccattttgtttggtcatatacagggaaaacatggcatggtgtggagggcatgggcttgaattcagggaacagagagttggtcttctctctctcactctactggatgatgtcatctcccctctctaagcatgagttttcttatctgtgaaataaaaatgttgaattaaatgagttcaaaatgctttcagtctgtgtttaatagcttgaatcttaagacaatgtattcaattatgcgttgccagatccctggcaactcatgtaacctttctaaaccatagctactcatctgtaactggccagccaactgcccagggttggagtgtgaatgaaataagataatgcagacaaaagatttttaaaaattgtagtgcattatacagttgtaatattttgccaagaacttacattttctctaagaagtgtgtcgatacatgatcacagaaaatcttttccatattcctttgtagtttgatgatattaagtaagtaaattgtataacacaaagagggaaaagcatcactgaacatgccgttttatttagctaaataaaatgtaatcactattagttttcctctgatttccccaaagtcatgtgattccattgagtattatgcacatggtataattagaatggattctctgctcaaataattttgggaaacatttaaattaacaaagtttaaaagtatctctgttaagctgaagcaaatctcaaaggccttaatattgtatgtaagaggaatagttaccatctttcctaatgcctctttgacgccaaacccatggagaatagttctaggtgttcagtaaaacacagatttgggatgccacaggttaattggaactgtcccctgcaatccttttctctttttcttaataatggctgattgcaggtcctagatgaaagacatttagagagattatcaggactcagcatcccatatcagaatccattcttttatagtcattttctgttacatttcttgggacaacaccaaagaaatgaccatcttcattcacataggctttgtaccaaatgctgacaaagatccttggtgacctagatgggggcaggtctaagtagattgcagctgtaaaattggctgatgaatgatctcagccccttttactcacactcaaaggcaggacagtccattaaggggaaggagggcagagtttttccttaggccaattccctatgccagaactttttagaatggaagcatttccagaggagaaacaaccccaagcacagttcaaagccccctcctcccaagttcatttgaaagtgggatggtttatctgcaaagggggaaaagatgagggatagggacgggaatatccctacccttcagagagtctggtttcatcctgcacttttactgcacagccacaaatgccttggggtgaatctacaatatgatacatcatatggtctaaacgtgcctggctgatcctctctaatacttcaggggtctaaaagggataacatgctctcctgttactcaccgactctgtccgccatatttcacccagccagccactgccttcacttccgtccgaggcctaatctgagcccatgggaaacctaagaacccctaccacaactgcctcaactcttgggaatcagggtgtatgggggtgacaggaagtgagcatacattctccaacttgatatgtcagcccccacgtctgtatgaatgtttgctcacactgtgactgccggccttgctcctcaggctgcatcctaccagggagtaagacccaagtccttcctgctttcagacaacaccaagcctcatgagtccccactcagaggaaggaccagagacaaactctaatgttccactaatacttcccttcttattactttccttgaaaatcccttctccctctttctttttatacttcgctaatgaaaggtaatgaaagggtctggcacttggaatttagaattgatacatggtttttaacccgcggacgtattccacaataacccttgcatcttctactaagatgtgggctaggaagggaccagccagttcccagggtcacagtgcctcagctgatgtttcatattttcagcaactttatgttagagatgtccatcaatcagaacaatatggttagagaataaactaataaaagtcatttttgaggacatgttggaagtctatcaaaagcattgaaattatgcatgctctgaccagtcgcatgtctaagaatttaaatatgatcataagtttaaatatgaagatgtttatcacagaattgattataaaacaaaattgaaaaaaatagtgctagaagtttgatcatagggacctcattaaatgcattatggttgatccatgcagtggtttgctgaacagccattaaaatgttgtagaataattattaatggtgtggaaggatgctattgttgcagtatgtgaaaagaacaaattacaaagcagtttgtgcagcataatatttttattttttaaaaacctgtatgtggcttatgtacatataaagacgtggaataaatgcacaaggtactcagtttttctcagtgaagcccattttgcattttgggctgggtaattcttcgctgtggagaactctcattcattgtaggatgtttacaagccctgggccttacctctttaacgccagtaggcacccccagcatggcaacaagcacaaaatggtctctctcatattgcccttgaggaaattttgcaactaagtaactattactgggtcctagattacagtctggattattgcgttcctttcttatttttattttctccaattccctttaataagcatgtactggattcataaaaaaacaacataaatggtaattacaatattccgcactggttaaaacttatgtaaataagcattctgctgctttagccacaattgcaatttatgctccttctctttcttaagttcccagttcccacgtacattcattcgactgattcaaaagtcattttagcttgatagactcttaaaagttagagttatcatttctgctatttattctttcaattatccatttgtccacccatccatctgatccattttgttgatgcatgctgtgtataaaatactacaccagcctggtgcggtggctcacgcctgtaattccaggactttgggaggccaaggcgggtggatcacctgaagtcaggtgtttgagaccagcctggccaacgtggaaaaaccctgtctctactaaaaatacaaaaattagccaggcatggtggcagacgactctaatcccagctacttaggaggctgaaccaggagaatcgctcgaacccaggagatggagtttgcagtgagctgagatcatgccaatacactccagcctgggtgacagagcaagactccgtctcaaaaacaaacaaaaaaaatacaatgccaagcatcataaaaaatatagtgatatataagacctatttgttgtgctctaggcattgacatctagctgtcaaccattaatatgtgtaggagtctatctatcaatattatggactgtgcttgaagacttcttccccaatctttttctcttcccattaagtttgaagtgaggttttctgagtgaagtatcatagtacatacagtctcattatttttcaaaaatctctggttatagtacatttctttcctttatcccctttgttcccaactatcaaaccattttggatatccagtattggtatccagtattattaaaaagcaaaacagagaactattaacaaaaaaatttgtaggagtaattggttgtatggtatccagtactattagatagtaaatcagaaaattattaacaaaaattttagacgaataatggattgtcttgcccaagtgaattgagtgatttagttgttctttcatttttagcaagtacagctgatcatttgaggccttactcattgtttgattttgcaaattcttactattataaatgttttgggctctgagaaagctgttgtcttaatctgtttgtgctgttataacaaaatacatgagactgggtaatttacaaacaacagaaatttatttctcatagctctggaggctgggaactccaagatcaaggcatttgtcttcaggttcagtatctggcgagggccggttctctactcccaagatggtgtcttgtcactgtatcctccagagggccaaatgctgtgttctcacatggtagagagatagaaagggccaactcactccctcaaggcctttcataatgttaccaattccacttgtcagggctctgcccccgtgactttattacctctgcaaggccccaccacttaatactatcacgttggttattacgatttatcacatgaatttcgaccatactagttgccatcctttcattttcatatatccttaaaactttgcctttctcattttaatgtactttatccacagtatgccaacttttcgatacttttgttaacctgtctgacgatatataggaaactgtaaaagtgcagtttttgatacactctttagctgcccgtttacttctactgtcgttagagaaccccatccatagtgcatgtgtttattttgtgtatgaacaaagactttatatatagtttgggtcatttttattcattagtgcttcccttataatctctgaataccattttattagtacatactgctattcttaatagtaactagcatgcctgatcatcccaaatgtctaggttcacattttaaaataagttatatctttgggcttaacagtttattgaaaggtaacaaggattgagtcatagttgtatgtttttggaagtagaattcaactgtaaatagaaattggttgtttagatctcactatatatgaaaaaatgaaggctttaggagaaaatctccccaaagtacccatttttcatgtgataaatatcatgaaatgatttgagaaaaaaatgtatatttgttacagctaacaaatatttgtgttttttattcttcatggagagaatgaaatttcttctcttctttacacatttctttttcttattagaaactaattggtgcctttataaaaattaactgcagagcactaacgtgtatatataagtattatgtagggtgtagggtatgttcagggtatggtgtgtgtgtgtgtgtgtgtgtgtgtgtgtgtgtgtagctgtgtgtgtatataatgaaatatatggtagtgttgtttcagaaatctgcttggtcttcccagagttcattcatcttataaattcatctacattgatctctatttttggaatccatgaaatgttttttggcagtacttcctttaatatagtgtgctggaaatctggaaatttctagccagattagttacaaaaaattagccagtggttttgcactctctatagaatcaaggcccaaggcctactcttgttactcagggccttgttttatctggcctctttcttttcagccatatagctctcaaatactcaacaaaattcttcattctaggtagacaagtatcttcaaaatacttcccaattatctaataactgtcttaccactaagaaggcttttatgtctcctgtctgaattttatccatgcaaaaaagtccagcccaagcctccagaactccaaaaagttatccctaactgctgaaacacagtaatttcactatgtgaaatttcactttggtctcctagcatttgcagatataccatacatatccttgatccttttcctttcataccttttatatctaacccttaagctaataattttacctacactgtaattcaaaatgtatccccagtcttaccatgtctcccttctctactgttaccaccctaggctaggccttcatcatttctcacctggactccttccctaacctctgaactgatctgcctgcttccacttagacacccaacctagtccattcttgagcagtcggaataattcttttaagaaagaaaccagatcacatccccctctgctcccaaccatccagtgacctcttatcatacatagaatgaaatgcaaatctttactgtgttttaaaggccctacattatctggacctcagtaacttcttacttcctatcccttttctccttgtatgccaccctccaactacactctaactacactgtctttttccctgttcttcagacctgccaaccatattttcactgctcaattaatatgtagaaaatgaattgtttgttaaatgtagactgtttccttcttaaagcaaagataaatgacattgtcttcaaaaacaactaactgcccagaattcctgattttaattttaaaaagacaaactgcaagaatgtgttaaacagtaaggaaacaattcactacttcagaattctatatgatttcactgcacgttagtaattttgtatattatagaatatgagggtattctaataaacttaactctatgctgtatacttatcatgatagctcattttcttatatgtttataacagcactacttattgtacatggatacgtgggaaataaattaattttctccttaagaacaaagcaaccatttcactcatgagataaatcttgaagatttaaaaactacttataattaattatacattattcatataatgttaagtattttcttagtaaaccacataatttagaatggcaattggacagatgggcagaaccacatgcatccactattaggcagttggtgagcataagatgccagaaagaagattaggaatatcaaggcagggagcttccgatcgctcttgaaaacattgacccttcactcctcactctccacgatgcatttcctttgaaaagtaatgccttccaaaacaaagttctctgttttatatctaaacttactcaatagtttctcatggttattgatatataaaaaataaagtaaaatgtttaggcagaccaaaagaagaatttccccctccctctgccttttatgccaaggtgacagctatgaaatgtacagtacgtttcctctgcaaggaatgtagcagtgttccattgcaagaagatgagagggagagaaaggttgcacgctgaggaatatagtgtcatttgtcactgcctagactcatcagctgtgtggaactctgagaggcaccaggcttctttatttatttcttcagaaacttcagcaaaaaagatttcattaggagcagagaaaaatgtgaaaaacgaattagcttttgtgatggggagtagtcatctctgaatattgatcaagattaagagggttgtcttcgtaacttcttttatccatagtctatactgatttaactagaaaactaatttcaggtggtatttcgggtgtggcagatctttatagtaaatgaagaatctagtcaaatctactgaaaaactctgcttactttaatgtttgatctggttgaaaccattttagcttaacaatccttcctctgaaacagggaatcaattgatatcctacagcaaaattatgtggaagggccattagcttcacatccaatgcaaattttgcctgtgtttactcttccccaatccaaaatatatcagatcctagatgccagtgaaatcgtttgagctagatggcttgagggtcatagcttttttcatttcctgttctcagacctcttataattgatagaataaaatcagaagagccctagagctgtcccacctattctgcctcacaaaagtagaagtaatggcaaccactatcatagggatcatgctcacctttttcttaccagacaaatttggatattagcttgaaattaataccttccttaaaatgttggaatttggttatatgcgaaattttgctctatttattcattatattttgtatggaattatttttgccctatattttcacttaagtgttctctacccaagattttaattgaacccaaatcagccagacacacagacatggattttgctgccaccaaggttaattcttcttttaaagttaacttttaaaatttggtaaaatatagctttgaaaatttgcattcgtctagtgtttgttatgtatttcccccttttgtttgattatatgtctatatttttcttgtagaaattgatttttaacctgctttttatgttagcttttatgagcttctgtctgaattctgaatatgtctttcttaatgtcttctaaatgtttctttctggattattaaaagatttattaggcttttaataattatatttgttaccttagggaatgtgtttgaaaatattttaaatggaattgccagttaacacagcattgaactttttcttgttagagatacattgttttctaggcattttattgggagagaagttagtatgatataatgtctttggctgatattaactcttctaagatgcattgtttctgagaacaccattgtctgatttcattcagggaaatttcacacaagccagtagagtcaatacttttttcaagacctgttaattgatatatataaaaacttgccattgtttacatgcccatttcagatcctttatgtgacctaagctagaaatgcattttaacagcatttgtttttccaaaaatatttatttatttatttattatagagatagcgtctctctatgttgcccaggctggcctcgaactcctgggctcaagcaattctcctgcctcggcctcccaacagtgctgggatacaggtgtgagccattgtgccaggcccttgtttttattttttttgaacattgtattttgaaaggggtttgaaggtgatccctagatagcaaccagtaatgattcgagcagcaaaacaatctaaaaagtaattttataagaaaatgcagaacataaatgagcccataaaaaattatattaggttctatttacattactaccttctttcacatgtaatatttcactaacatttaatgaatttctgtgcagtgccatataccattatgaattctaggatagaagaatgagtgagaaatgttcttaggccttaggaagaaggaacaagcatctctgtgtaatagttatttcaactcttcttttacacctcattcccatattaaatctcagaaaagctaaagtaatagctatcccagatctattttagactccagacacttacttcaatgtcttgttctccttatcagactggaatcattccaaacctcttaacttctgggcaaccatgataatgcgacagaaaggacactaaatctgtcgcaaatttatcttgatattctatccagtcttacttggtactgaaggtcacaagtaaaataaggtggttgttttttgtttgtttttttttttttgacagaagagaaaagaacactgtgagcacagagtgaatgtctaacattgattcttgagtagcaggaattctctatgcgagaggatctctatgcaaaaagatctcatattctagcacaatttaaggatctctatgcaaagatatcccatattttagcattatcaataagctatggggtaatatattgtatgtggtgtggcttgaattctagaaatttgatttctagaaatggtccctgtagttaaggatatataatgtggccgtctccagttttctatgaggaataggaaaatactatcattattagctgtgtgaccatggacaacttgcttcgttcttcagttgcatcatctgtataaaataagaataagaaaatttacatctgcaaggtgtgatggagatcacatgggataattgtggtcccagagcctggcacaaaagggcttaatatttataatcctccccatttctccgtatactctaaaggaagtttattgcttatcaaattgtgccgtggttagttgtacagcttccctgccaaattgtaaactccaacactaatgtgacgttacattttatatagtgctatgattttcaaattgtttgcataatttcaaatacacagtaaattgctttttattagtataattattgctattgtcaatattattattacaacagcttcacagtaagatgggcagaaaaaaatttaatttccattttacaaatgcacttttgaggctcacagaagtcaaatagaccaaagtcacagggctagtgagggacccagaagaaacaaattgtaattcactgattccaagttcagtggttgccttactgcatcataaaggctattacacaatccaggtgtatcatatgattcttgtctatatattcatacatatcagaaaaagtgttctactcaaaattgctagcaatcaacagatactgatagtcattagtacttaaatctttatcaaatgaaatattaatacccatgaaagagaggacaatgaaaggtttgtatcatttgtatgtcacaagtcaacttttttcaatcactcattattagtttaactgtaaaaaattatttacatttagcgtgaaactttcctgtattctcaacatatttccttcggtagaaaagcaaacctccagttctctgttctttgcttggatacttgccagtttgtaactcagctatcaaacagtaaagctcacaaaacacttattaaaatgactaaaatccaaaacaccaagagcacagcatgctggtgagatgtggagcaacaagaactttcattcattcactaatgctggcaatacaaaatggtacagtaactttggaagataggttgacaatttcttacgaagctaaactatacttaacatatatatttgtccattttcacagtgctaaaaagaagttcccgagactgggaaatttataaaggaaagaggtttatttaattgactcacagctcagcatggctgaggaggcctcagaaagcttataatcatggtggaaggagaaggggaagcaaggcacctacttcacaaggtgacaggaaggagaatgaatgcaggaggaactaccaaacacataaaaccattagctctcgtgagaactcactcgctatcatgagaacagcatgggggaaacagctctcatgatctagttacctccacctggtctctcccttgacatgtggggattatggggattataattcaagatgagatttgggtggggacacaaagcctaaccatatcaccatatgatccaaaatcatgctacatgatattcacccaaaggaaatgtaaactgtgtccacaccaaaacctgcacatgcacgtttatagcagctttattcataattgccaaaacttggaagcaaccaagatgttcctcaataggtgaatgaacaaaaagactggcacatgtactcaatggaatattattcagtgataaaaagaaatgagctatcaagccacaaaaacacatggagaaaacttaggtacgtaagccagtttgaaaggttgcattctatatgattccaatatatgacattctgaaagagacaaaattctggagacagtaaaaagatcagtgattgcctggggctctgagaaagtgcagagggatgaatgggtgaagcacatggcatgtttaggacagtgaaactattctctatgatactgtcatggtggatacatgaccttatacctttgttaaaactcagaattttacaatacagagtgaattctaatataaactatggactttagttgtaataaggtatcaatgttatttcataagttttaataatgtaccacactaatgcaaaattataataataggggaattgggggaagggtaatggagtatatgggaatgcactgtaatctcagtacaattattccacaaacctaaaacttctttcaaaaatacaagctattggtcaggtgtgatggcttataccagtaatctcagcactttgggaagtcaagaccctcagatcacttgaggccaggagttcgagaccagcctggccaacatggtgaaatcctgtctctactaaaaatacaaaaaaaaaaaaagaaagaaagaaaagaaagaaagaacagaagaaataaaagaaagaaaggaaagaaagaaagaagaaaagaaagaaagagaaagagagaaagaaagaaggaaagaaagaaacagaaagagagaaagaaagaaagaaaaagaaagaaagaaagaaagaaagaaaagaaagacagatgcggttgctcatgcttgtaatcacaactactcgggagactgaggcatgagaatcgcctgaactcagaaggtggaggttgcagtagggtgagattacgccactgcactccagcctgggtgacagagcaaggctctgtctcaaaaaaaaaaaaaaaaagctattaaaaatatgtaaagctcagtctagatacagtaccagaatagtaggaactttatttcacctgtcctacaaattatggttgtgtgccacttgggtaaaactcagaatccaaatatgtgaatgtaagatttatggggaaattatttgtatttcaaaataatccttaatgaatgcactccttctaaagtagccattaataaagcagttaatgtttcatttaattatagattaatgtacataagatatgccaggaatgcaattaggaactgggaagggggtgttattctaataacttccacatagcattgtgagacattttctgctttcttcaaatttcatttaattacattttaaacaaatatttttgtgagcctattatatagtccttcgctagcactgaggagacatgctttgtgaccttggtgatttcacattcaaatttccctttcacctacactcttccttgttttttcatgcctgtgtagattgtaaattcttcctcagattaagacattttattcacctttgtaacatccacagtatctagcacaatcagtgccttcaaaaacaattggcctcaagaattgattgactcaatgagtgactgaaagactaaattaataagtacacatctatttgtacttccctgcttacttataaggtatgacaatgaaatactgagacagttatacattacttacggactcaatctcatttctttacaatctctattcttcttttttgagtataatgttattttacaattccactaacttgtcactctttattataaattcatatctccatttcacctgagaataataaaggcaaggaagtattttaaatgatcttgttttttataactagcattcattgagcaaatcaaagtatgaaaataatataggtgtcagtgattattataaagttgtatgcacaaaacattccaatgattggggccaatacagagaaaacatctcaatatttggaattttgcttttctgtaaatactttgatatgtacttacatcatatcaattataactcctgctgaaaacaaacagtgcacacaaatttggtagttggaggagactttataaagggactaattacgaaggtttagaccgggttaggaaaaacacacggaatagtgcaatactttaggatggcaacagcgagcaccgttataaccactaggccaaaatgaactaaatgaacagggagattaccatttatcagaaaaagagggagaaaggaaggagagatgaccaagcaagtcctatgtgaagacggctgcctgacttgagctgtgtgatctttggactgataccacctgcctgcactggcctagcagggcgagaatagtcaatatctggaaaatggatcacctgaccttactttcctccctccctgtttcctctttgtggtgtttccactggccaaactcacagcgtagacaaaaggagtgcattgatgtagcagtggttctaatccagggccaattgtgctcccagggaacattagtggttatcacagctcaggggaggaagggagaggagtggagtgctactatgattcactgagggatttttttaaacatctacaatgcacaggacatccttccacaacaaagtatccagttaaaaaatgtcattactgccaaggttgaaaaaccgtggtgtagtcagtacaattcatcttctccaggcacagtgcaggagtggggtggagtgtctgaaggggaagaaggaagaaaccagcacaccccacaaaagtaaccaatgcaaataccaaataggaaaagacagcacttaaaatacaaaagtctcaggaatatatctgatagtgttttatggaatttattaaaatttagcctggagtgagtaatatttagcaagccaggtttgtctttagagaaatccttgtggggtttatacaaggatttattaacaaagggcacacacaatactcatattacagtcagtctggttatgtaaaacatgggcaagaatgtaataggacaatgtgatgtattcacaaaggattttaggactacacagataatcctctaatgctttcacttacgtactatgaaaggctatagtttgcatagtgatatagccacgtaagatagtaaacttgacattcatgcagctatacatgtttgcacacaccaggatgcatgccctttctacctggttgattttttattcttttattaatctctaatttattccccagaacactctccataaaaactttctcacaacttaaatctttaatctattgtgtggatttctgactcattctccaagcttttcctcttccctccgcaatgccttatagtcttatgactatttatccctttgcctacatttctagccagatctcttgcctgatacacactctcatatttctctttgcacgctacacatttttatttagatatcacactactactttgatttcaacaggtctcagtttaacttaatttttccttcaagcaaggagtcccttcatatcagttatcaccattggcaccagaatttttcttatgacttcccatgacctacaatataaaccatataaatcactgatgcctccatagttccctccctctcaaatttagccataagatgattttaggatccttgttttttccaatctctctttcattctctcccccatctcttccattatgaaggtttggataggacacaactcatgcctagattagtgcaatagatgctgagcctgtgcagcggtagtttagctttctctcctggttaactttaactgccacatatatcacttcacacgtcatttttcattcaaacgtatttaactggctcttcattcataagaagctggaatttgtcgtttgactgatattttaaagattttatattttttctccatcctcgttctaatgttgtatcttgtgtcatttgttcattcataaacttaagacttagctaaccactgagcatccaggaaattcagtatctatcatgtgaattctctaatactggttgatccattgtcaccagagcatagcaggcttctcctgcctttatgtatgtttgtcatatagttcatgcctaaaattctttcttaaatcttaaattcctaagatacacacttttgcccaagatcacagtaatctctgccataatctctgctggaatctgttcactgtgttgctcctgctaaacttcttacagatgactttttttctttttggtttccctggtatctagtataatttcttatataggtactcaataaatgtttcctgttgatctctacacctactctgtacaataccatagtgactagacacatgttgctatcaagcatttcaaaagtagctagcctgagttgagatataggggtaaaatacacaacagatttcaagacatattatgaaaaaaacccataaaatttctcagtaatttttttatagattacatgtagaaactataacattttgaataagttgtatcaaataaaatataaaattcacccggttctttttaatttgttaaatgtggtggctagaaaatttaaaattacataattggctcacagaataattataatggatggtattgctttagatcaagtttgtctaacccgtggcccatgggccacaagcggcccaggatggttttgaatgagatccaacacaaatgtgtgaacttccttaaaacattatgaattttttgtttgttttgtttttgtttttttctcatcagctatcatgagtgttagtgtattttatgcatggctcaagacaattaattcttcttcaaatatggcccagggaagccaaaagactggacaaccctgctttagatagtaaagcatatgagtagttaatgtgtactataagcagtgtgatctgatagactatttaatgttgtttgatggtacattattcaagtcgattattatgtctacctatgcagtttaacgacggtaatgagagagggcagcttgattacaggtcttatcttttgactaacttgctaggccacctgagaaggacccaaattatctgaatgcttaactcaactaatttgtattcacttgaagaatttcaaggatgtttatatgccatcaacttgctttaaattttttctctcagtgaaaatttttcttaaaatgagtatgtggtattcaaatttatccttgttttctatgattatcttttcatagcactgtggtttccaggaacctttttttttttgagatgcattctacatgtaactattgcacagtttgcatgtagtaaggttcattattcttctacttttccaaacacctggcatgtttacttgaggttggtacaccttgtatcccagattttgctgtttttaacttaaatattgaatattttgattaaacattatggaaagtttaaatgggtcaagaaaaatagcttttcttcccatgaagaacaatacggcataggagttaagagcatagatttaaagtcagaaaacctgtgctgcctacttgtgcaaagtcacttacatgctgtacttctgtttcttcatctgtaagttctacccctaggtatttacttaagattaatggaagcatatgttcatacaatgacttgtacagaattattcacgatagcattactcttaatagctctaactggtaacaacacaataatcaatcaacaattgtgctgtattcatacagcagaatactacttagcaacaaaaatggaatggactactgataacctcaacaacatggatgaatctcaaaactatcatgctgtgtgatgccaggcacaaatcagtacatactataattccagaaaagacaaatgtcatccatggtaacaacaagatccatgcttgctggaggtagaggcatcagttcagtcattcaggaagctgattccaagatggtgttagaattacaaccatccacaagagatttattgcaggcaatagctatgaaaggtagaaagagaacaggagaaaaaccaggcaaggaaaaaccacaatgtagttgtgatatcacttcaaagggaggcagaaggaaggagaattgggtaggaatagccacagattacagtgcagttacaagaaagtcttggcttccaacaaaggttacttgttgaggagtcatgcattaggcagacatgtctgggctgtagtttccttgctgctcccagtcattggctggaggccagtctgggttcctgtgctgtggtggatcccattgctgctgcagcaggaggccaatagcactcctggcagctaattggagagaaaagatccaagaggtgtaccttcatggctacccccatggggctggggtggaggtggaggagaaggagaaggaattaactagaaaaaggcacaaaggaaaattggggaaaataatgaagatatatgatttctcaattgtggtggtcgttacatgggtttattaatgcatcaaaactcaagaaatgtacatttaaaatgagtgcatatgattgtaagtgaattatacctcaatatagttaattttttaaaaatcatagatttctttatatttaatgcatgaacataaacctaagacactcctccactccaaaacttaattaccttgtgatcagcagagcagaaggtactttgtgatatataggtagagaagatgaagtcttgtgacatttaacaagggacaggaaaatggaccttgtcctaagttaccaaactgcaaaaatatcacctacaaaggctattcataacatacattttcaagggggttacaatatttgcctactataaaattttggatctgtaaaggggttaaattatttgtgcaggggaataaacatcaaagaaacattaagaggtccagagaagtaaaataggaagggtcttttggctagaggagatatttaactttcagaacatgtggaattaagttgtattgattatgatctgatcttcttccccctaaatttgatcctcttcctgtaatctattgtttccatcatcttcaactcttccctttccctctcccttgtccctcagttctagtcaatcacaaagtcctacagtttcactttctgtataccttatttctggaattcatctctagacttcaaaatatatatatatatatttttttttttgagatggagtctcgctctgttgcccaggctggagtgccgtggtgcaatctcagctcacagcagcctctgccacccaggttcaagcgattctcctagttcagcctcctgagtagctgggattacaggcatctgccaccacgcctggttaatttttgtattttcagtagagatggggtttcgccatgttggccaggctgatctcgaactcctgacctcaggtgatccacccgcgtcagcctcccaaagtgctggaattacaggtgtgagccactgcttccagcccaaaatatcttaagtagataattgcacgactaatctctgcttttctctcccagcagccttccaaattcatgtctcacagctgacagagttgttcctgccttcagattcatgacctggctctgtgttctagctcaggctttctctctcatatcacctcttgcctctctgttgcccccatattttcccctctggttggttggtgctcctttggaaccctctgcatatcttttcaagaatattatgacttattatgcctataaactttgtttaattatttatttctaaaatttgacagggaactttccgaaggcaggtattgtgtctttctcatttaaaagcaaattctcgcctggcatggtggctcatgcctgtaatcccacactttgggaggctaaggtggacagatcacttgagcctaggagttcatgaccagcctgggcaacacagttagaccaaaaaaaaaatatatacgaaaattagcctggcatggtggcacacccccgtagtctcagctagtctggtagctgaggtgagaggatcacttgagcctggatggttgaggttgcagtgagctgtgattgtatcactgcactccagcctgggcaaaaaagtaagatcctgtctcaaaaaaaaaaaaaaaaaaaattagtgaatcctcagtgtttaaaaagtccataaacatactaaacatagaagacctccaaatgaaattaatcaattattatttagtgggttgcttctcttttgttttaatatagttttaacaaagagtaaaagttatgatctttttatatgtaaaataaataatgccgggtttgacataaattttaggaaaactagagacgctacttcctaaaaattttctttctataatcttcctaaatatttttccataaagtacaaaataatagaaaaaaattaagagattgagtatcctttcaggaagtgatatgacaaatagggttcgagaactatttgaattctcaccacttttcataagggcagatctcaagttaaatttttctattcgaatttaaatgactttcactggaataccattacagaaaagcttctgtgtttagatggcaatatggagtttcttttcttggaatattaattgaaggagaagtcttaattttttaagtctatatctccgtatatatttgaacctattttatatgttagtccttctctttagtaaccttcatccacagtgaacaagatttacccttacctttaagcagtagcggctactttatgtgaagtgaacagctgctttttttatctgcatctagacatcaagtagtccagagtcctttctaacaccctagcaatagaagtaagaatattttgaccattccatgacttgatgatacttctagtaataatactgtattattaaaaacaaacaaacctttgtgcagtggtaattgaagcagttccttgggaacatgtattaagtactttttagcagttaagtccactctctgtaggttaaggaatatttaaataaaataatgtggcaaatgagttcaagatgataaatgcgatgagaactaaaacagctttaattttatgtgggaaataaatagaggaaaagtacattacagggctcctggacttatttctttcttcaaagtgtttctcctagcgaatattattactattttttctcttaagtaaaaaatacacaaagtatgaatctacacaggataataatattgaagttaaggatgatgtctcctccttcactctccaaaatactatttacttggcttcatggaaatctctctcactccaattccaccgtgtcaactgaggtcttctgttctttctctccctatagcatattcctgttacataaatcctaaactgtgtcgtgttagtcacacactgtaacctctagataagcgcctgtccagaggttctcaatcagagccttgcaaatatgtattaaatcaatgggtcatcttcagtgtctcagtgggcccttggatatgttttgcagactgctgtgagtatgtagggatgtccagtatcgagggaagtgtggatggctttcattggttcttatagggctgaagaacacatagagcagtaagcacttctactgtagggagagatcgagcttctcccatccccactgctggcaccaccaccaccctacaccccattttgagttctgaaagtgaatccttgagaaagaacacacaaaacaaccatcataatagtgggcacagctgtgggtggtagaataacattcccaagcttcttttcctacacatgattaatattaattcagcaaacatttattcagctcctacttttaaacaggcactattctaggtactaaagacatagaggcaaagcatacaagactctgcctttgtgaaacaattaagaaataagtaaaaagaaaagaaacagaaaaggcaatttggatagtgtcaggtgctataaagaaaacaaaatgccattttaataaataataataatacaatgttttcatactatgtgctagacactatgctagtaggtatttatagacataacctcaattaatcctcaaaatggcatgttgatatcaataccccaagtttacatatgagacttaagatgtctgagtatattcccccaggtaacaattaatatgcacaataaaactttttgctcattcatttattaacctatgttgattgagtacctattttgtgtcaggcatcattttaaggcacctggatatagttatgaacaaacaaataaaaatctctgccctcaaataattaatatctcacagaggttaggcaaaatataatcagaaaataagtataacgtataggatgccagatcatgaaagaagctatgaatggcatcaagaagctggaaaaggcaaggagacagattttctcctagagtctccaaaacagaacacagtcctgccgacaccttaactttaggctagtgagacccctattggacttcagacttacaatcccacaatgtaataaatttgtggtaattcagtaggggaacaatagaaaactaatacgatatcaaaacaaattatatcatagaacaagaaaatgtaattgtgacaaataatacctacaaaaatgttgtaaatgctaggcaaataatgtgtttaaagcacttaggccaatgttcaacgtaaagtaattcatgctataatatcatcatcatcattaccaatatttaggggctctaacaaatgatgtacgtgtaagcagatgtaagaaaatttccttgctgaagaggaggtattaatagagtatataacaatagataacaaattccaaataaaggcaaactaaatgttttattggattaaatttaattttaaaaactacaagaggccgggcgcggtggctcacgcctataatcccagcactttggaaggctgaggtgggtggatcacgaggtcaggagatcgagaccatcctggccaacatggtgaaacgctgtctctactaaaaatacaaaaattagctgggcctggtggcgcgtgcctgtaatctcagctatttgggaggctgaggcaagagaatcacttgaacaaccaaggagtcggaggttgcagtgagccaagattgtgccactgcactccagcctggcaacagagtgagatcccgtctcaacaacaacaacaacaacaacaacaacaacaacaacaacaacaacaaaactgtgagatccatggtgggcttttaagaggaaaatgcaagctaaggtttgtttagactctgagtactgcatgtgtaaaaataaaggcatgatgaaaagatcaagagattagagtgatactttttatctactagtgtcagagtcatgaccaggggattggctatgagaatacataagctgtgccaggagtaatccaaggagattgtttcaatttggaagagtgtccacagaatgattctcatactagacgttgggctattgtaaagaaagttggtaggtactccatcgctaggatcatatcagggagaaattgaacaggatggccctaatgaccctgttgtacccctagcttatggattaggcaagtcacttctactcgtataccctgtttccccatttgtaaataagaggatgtgttactctaaggatctctaagattctttgcagttgttaaattgcatagctctccactgattccatggtggaaatttgctattctattacaaatattctaaatgtatgagatatcagacatactcatttaaaaaacaaaatacaaaaaataagtattctacaaataaacacagataatgtttaaattctatatgtctttgtttctcttcagaagcatccaaaatacaaaccatctaagaggcaagaaaatgtcgtgatgttcctagtgcaagttaaaaagatttgctttcctcaagtcggaaagcccttctcatttttgaggtttttttcttcttttttttttcaagtgaaagcattttggaggagtcaatatccatctttaaaggtagccaggtcacatgtatacatatgtaactaacctgcacaatgtgcacatgtaccctaaaacttaaagtataatttaaaaaaaaagaatttaaataaaaaaagaaaatcagagagaaaaaaaaaaagatgcatgtgcaccctgatactaccatccatagtgatacggtttggctttgtgtccccacccaaatctcatcttgaattgtaacccccatgtgttgagggagggaccttatgggaggtgattggatcatgggggtagtttctccatgctgttctcatgatagtgaatgagttctcataagatctaatggtttaaaatcatggcacttccttttgctctctctttctcctgccatgtgaggtgtgccttgcttccccttccccttctgctatgattgtaagtttcctgaggcctcctcagctatgcagaacggtgagtcaattaaacttctttctttataaaaaaaaaaaaaaaaaaaaaggtagccaggtaaaaattacttgtttccaggacattttcacctgaaagaagcattgtcatataacatagaagcaagaaatccagtagtgggggttatttaaaaatagctggaaaatttcaatcagcatgagtttgaagcaacaatttatcatcaccttttatggtgggtggggttaagaacatttcagcgggcaaagtggtggtgatggggaagagacaccaggggaggtgattcccattgcattgctttgtaaacagaggcacaggttcttcatttttgtcacacaaaatcacagctatgcagaatttattaatttattcttctgagacaagaaaaaagccaccaaaggaaaccaacagcttgctcctctcacactgggggaaccatatgagagacttatctatccctgactttaattttgacctgaggagagctcctcttaaggaaaacaaattaattcaatgactatactacttaatcattgacctttatttaataagagatttttccataggatatgctgagctgtctcacttacatcagttgtgtctcctgaggtgggtgacaggagaccacaaatattgcatagcacacaaatcgttaatagcagctgtataccaaaccattacctaaatatgtagagtacaattcattctcactaatgtcagagagcatgctataaaatggtgaatccggacagctgaagatactgaataataacctctattttgaacaagtttacagtgttccaatcagtaattaaattgatacctgatgaatatatgtgtgtgtatgtattcatagcagagatggttttcctgagataaggattttgttattcggataggctgctgctggaattgtccttctacccttgtttctttgtccttagtcatcactcatacctctttccactcttctgccatcacttttgtcaccaaagtcatggtcctttccccgccgattgctgctgcaggtctagggcaccaagacttaggcagcactcaccatgtgccaagaactggaccacaggtaccatccagcattgctcatggagactctgtccctttctgtaggacaccctccttttagctagcaacccctccaccacctagagcctctggacctctcattttaatattaagaactaggaaaacttaccgctgagaataactagtacaactagaactggtagagaaatctgggtctcttgggaatggatttttaggctttattgattagaggtgtattaataatgcagtgttatagtttcatgacataacgaataaaaaagttcattttggacttgcctttcagctccctaggagctaaaagacgtatttaatgtaacttgtgtggtggaaataagttcttttttcaggcaaaagatgtgcaaacccatctggggaagaaacattaaaaactaaggagacagtgtcctagataactatgttcttttcctgttttagtctaaaataatgattagttttcttatatatcttcatttgtcttggttccttttagcccaatttaataatattattgcagatattgatgaaaacctttaccttcctcttaattcatcaaagtacttgataaaatttatacatagtacattaattgggaggtttttatgagattaattaatataatgaactgatgttgaaattatttaaaacctgaattattattgtattaagtaggacacttaatacagttaatcagttctgtctttattcatttgtgagaatttttggcaagctattgtgaatattcagggaagggaatgtatttttagcaggaatcttatacctcctacatagaaatgaagcatttactgaaacatccatgaaacaaaatgtttctgaatgtgtactatacacttgttataagccccttttcttctgtagctatattttggagaaaaatctttgctttgacaaaaaaaattatgttgacttacacatatattttataactaagcagtgtttggtttgtgataaaggatacaaaaatataaaaatgttcagcacacgtaagtaaggccttgttgacagtgtgagttatgctactggatactcaaaaggaacattcagtgttctcaggtggtctctagactgtctcaagcctaggaagatattttataagcaaaggaataagagaaggaagattcagatttaatccaagtgaagaattcagttttgtgtgccttatcctgttattttgagaggcagccaaaagatgctggtcagcaaggagaattgtaagttgggcagccaactctgatttctcaacctcttagctgttttcttaaactcagaatttttaatgaatttaaatgtccatatcaggtagactttggggatgcttttaccagtgattttcagaatgttactttctggcatttcttttcacgtagcattatattaaaaatgaattcattcatccaccttcccttgtccttactaattttccctcctactcccttcccccttgttcttgccatggggacatgcaaacactggtggttgatgtctgagcaaggctgctgacagggggaggaaggagatgtcaagcagaggtcaatggcagtgtgcccagcagcctaggaagtaggagggaaaagagagagagacagagatggtggatgaaagagaaagccaggatgattatggtggttatgatacttgtcatgctgaacacccaattgagcacccaataagcacataataatttaatcatcctctggcttggatggcagtgttctatcagtgttgacttcctggttgtgacagttttacagtgttagtgtagaagagaatccttgctttagagaggtacttactgaagtacttagggttaatgcaccattgtgctggaaaaagatacgcacacacacgcacacacacacacacacacactctcacacacacgcacaaatacatccatgtgttaggcagagggagcaaatgaggtaaaatgttaacaattaggaattctgggtgaagtggatagagggactctttgactgttcttgaaacttctctatacatttgatctgtttcaaattcttcagaaaatcaaactacaaaaacttaattcatttagtgaacatctactgaacatctgtatattaaatagtgttaaatgaatgtcaattaaaatgctcaaacacagtagaggttgattctcattcacataagtccatggtaggtgtttttggcaggtgggtgagtttctcccttagggagattgaggaacccagactcctcccaagttgcagccccaccgtcttctgaggggatgcatccatacccacttcgaagtagcatacattatttcctttctcattcctttggataccagccacaatttattcaaggtagacagaaaattgtagtatatagccatatgccctgacaaagaagggagaacagattttggtggacaactagcaaactctgatacaatctgttattaagcactgtgtgtggatagatgctaactagaaggagattatcttcccttcagcaaatataaactgaatgccgtttatttggttgaaactaagctagatcatgggagtatagaaattttataagaagacatagtcacttctgtcagtgagctcaagaagaattagtatgcggaatgtaatcatacctacagggggcttgtgccacttaagtaaaatgaaacattattttgagtacaatttagcaataaatgtactacgagatcattaaaaatcatgtttgaatgttattgtgtcaaggatgggaaaaagacttttgggttgtagacttgataattatagttaaaaacagtttttattcttgtttagtcttattttttatgtttaaacatatttatacttgctaacatttatacttgctaagtaaagactgtttttacaaccatgacaagaacaaaacatattagtaatgcaaatgccacatttcctacaatcaactaatcacactaacatatttgcatggaagaatcactgggattgatctggccacgtgtgtagtcatgcccaaaatgtgaagtccatctgttttgcaattttttttaaccactgttatccaaatgctccttggattttttttattagtggatatattttggaggtcagacaccctcttggctagatcatcacctttataacaaatatatatactattctcatggaaatatatttagacattgccctactgggaatttttttcaagtaattaatgtacagcttgtgcaacagcttgatcttggcttcatggaaataattcactcttagcagcatctaatgccacaaagcatttatggatgtcagctcagaacttacttttatttatctctgagttacttttttttttttttttttgagacagagtctcactctgtctttggcttgtccctaacctcttaacagacttaatattaagctccatttcactcagtcgttctgttgtcatataaatgagacattctacaagcatagtttttagtttctgccagagcatcatacaacattgtgagctatgatgaagataaagacctagagaagatatttaatatgaagttcattatctaatatttggtatgtgtggcaaaatagcaatctactgcttggttctgctgtaatctatttacccacccatcccatctttctttcaatttaaaaggataatgattttagtcacgattatacataaacccattaccataggcaataaacaatggggcaaaccattggtcccatagttggagtgtggtctgaagtgtgttttggtggagagagatctatgtctggagatagctaacatggatttggatcccagatctgctcctacctgttgctgtgcctgtgaccaaatcatgtgatctctctggtttcagtttacttgtgaataaagtaaataccttcatcaacacctgtttttgaatacaatgtttttctgtaatttttgcttcttataatgttataatgatcatccttacatctaaatcttggtttacattttcatcaattcttttggaaagattggagaagtaaattttggagatgtatgtcggctattaaaaatgtttaattttttaattaaaaattaaaacgttgaaaaatcctgatgcaaaataaatgcattatgcttagtgaactcttctcatttcgaagtttattcaccttcttgtttttgcaagtttcctgaaaaatgcatataaagtcactaagttagcagaactttataaaattatataactatatataatcttttgatatcagtgaagccagctgatcctatagaaataatgtaggaattataatcactagcacataatttaagagtcctgtggtcttattcatgttatttaccctctctgaatcttacatatagtaagagggttattatacataatatgtgtacatgtatacaggtaagtaagtatatatgcttatgtgtaaaagcagagttattgtgagagtcaaatggaaatgtgaaagtactttgtagttttttattactattattaatttttaataaaatggtaacattcatttaataatcattagttttaacttcagattgtactggatttcctctagtatttcttaagattagtgaataaagtatttctcctaataaatatattgactactgtctttcgatcaaacatattaggtatatttttacagtagcatcaggcagtgaaaatttgaagctctttatagaggactgatttatgatgaaaaggaataacatgaacaaatggaattatatgaagcttccccagaaatatctaagaggggccaattttaagaaatatctgacttctttttcatggacatttcaaaataaacctaactcatatggtacagtttttaagagggaaaagaaaaaaccatctgagaatctctggaattctgccgaaagtatcacttggcattttattctaccttctggatgcagttgattgacagtagtgttatgatgccaggggtatagtgactagaaaaagaaaaccagggaattcagtgttcttgctcatgaagaacagcttggttctttaaaaacaatgagattttgccaccccatctcacaaacctatgatttgtgagaacaatcccttttgtgttgcaagacttttacatttctcttcccacactatattagaagaataaacattgcttcataagtaccgattgatagtctcatttcatatttttaaaatagagttactttaaggttaaatttttcatgtagattaaaatgactaagtaaccattcacatatttcaaataaaatatatttttactacaaaaggaaaataactagattcttaagtgttatagtcaagtgtaattgagtaatatgaattctaaatgaatttctaagatctgctcagctttcactactttaggaaggaacaacttaagaaaaattttaataaagatatctcttcacacacatggcagtgttgtacttagagaacatgacccaaaattttttatgactgcatattgaattcctgatactcttgggaagctccaaaagcaccagtggagtttccagatgtaactgtggctgcagacccgccagtcccggtgttggaagggatcattataggctcttgtgtgcagactcatcttcagacccagaggaattaaataacttgcccaaagtcgcacaactttctcatggtaggttgggcactagaataaatattgctttttcttaagagttttagcctccgtattatgaaatcttctatgttctgctgatgatatctcctttcttcatctgttttctatttttaagcaatggaaatacaaacttgcaactccccatttccaacacaacttagaaaaaacaatatttaaagaaaaaattacaggcatctcatctcctttacctgacagatgcttgatagtaatggcctctagatagggatgacatctaatataaatgtgtcctttcaagtcaagctttctctgttcattagtagaaatattgtatatcaagtgtgcaaaaattttcttcaacagggagctttgtttccctccttttattataacaatctgagctttgtggtcccagggtctcctagtgcctgtctttaggtctgtttattcacatgaagaaagcatgtcatatagtattatctaagactcaggctgcttatgcatgatgacagaagggttcccaggcacaaacattcatccatgcattcatccatccacctattcatccattgatttggctgataattattgactactgttgagttgccctcagatttagtttctgtccttctgccatggggaaatatggggttaagccacaacatactcttctcttctttttctgcaccttcttagtatatttagttccattttgtctagccctgcctctgacttctttgttgtacttcaggttttttatcattgaaagttatttctggatcatagatcattctcttggtcactttgcttgttcacttataaaattaattcagaaaaaatgacccacagtaattaccgtaaatcacagaccataaactataatactgtatattgtattatagtacagaaatatttatactttaaaatgttttaaatatagatattataaaaagatatgtctcatataagtaatataaatacttttttattacctcttctctccctattctccaggccagtgttttaaaaatccatctttatatgtccatcctggaaaaaactcatgatcataaatgagtttctcaatagagtttataagcccacagttgaaacacaattgtcttagcatccatttagttgtcatacttttaagatttaatggcaaatattatgttttgtttcttcaaaagaaatattttaaaattttagtaaaggcagttagagaaggtagagataatggactgtttaatcctacttttcatcccacaagtgaacaaaaaaatgataaaacatttttcccaaaatgtagctttaactatacttaaatttggactaaaatgggagatatcttttctactattgaaaagccgtgtctgtagattaatgctaaaatcgggtgtaaaagcaaaatttgtttggcttgattgccaatggcccattcatttggctacagaaacaatagcacatagcaacagataatgatgtgagatcacctagctcaagtaagagtgtctgatccgtcaaaaatatatacatcaagattcaaaagaaatgtgtgttttctcaagtcatctctgtaaaaatacattaaatagaggaatagaagtttgactttgaaaatacattgcagacccaatccgtctttcctattttctggtgaaaagtatcaaatatgtggaacctggaactgctattctccttcttaaaaatctttcttaatattctattgataactggtgcaagcctaactttttgtcttacccgattcttctcacaccaaagtgataggaccttcaggtagcctttggatagaagataaataataatttaactattgatggaagttagtattagaattagacttggaagtctatggaataaaatgattctacaacaatttgtacttcagacattagtataacaaaacatgtttgcccgtgcatgcggaaacaaccaatttcatgtggatgcttatattcacaaaggagtaaccacctggggtttcccactgttgctccagagaaaactagcagcaggagaacttctctgaaggtatcaagacatctttaaaaaacacttgttaagtgttggttcagctaaagcagggagttttcagttagtaatggcttttaaaaattaaaacaagtttagcatgtaggtcattaaccttgaatcactgtcatgattattattaaccatctgttctcaaatcgaaagatatttttcttttctagatcacatttattctcacattgctcaatttcactatatatcaagacatgaaaactgtaaaaatcacaccttctacattattatttttattgaaaaattcctaatgaaacagtgcgctctgggatagagaaaggaactaactgacattttgcttcttaacttgtttttatgcaagttctaagtggtttctggccatgtacataaaagacaaatatctggaaaaaaaactagcagaagtcagttatttggctctatctactttgagaattatgttatataaatgttaggaaattttttgtaatattcttatttagaaatgaaatataaaaagttttaaaaatatctaaggacagtatacagtcctaaagtaaagctgttaggtaaatgctacacaatcctcttattacagagtcacttacctgagaatataagaagagggcctcttgtttaagagtaaatgtgagctgcaatcaggattctgcactcatttggacacttagttttgtttttccatgactggtgttgcctgttactgagacacctacctgtcatgtgaccacagcttatgttacaatgtgtctagtcagacttagagatgtgtgaaagagcagtacctagacgggaaactatgggtctataaaggttttgccttcttgggcggagttcaaactaggaagccacaaaacttccagttgcattttcacagattaatgaaatatattttacacttttcctgaaagatattttatttgtgcaaaccttgttacaaagtacagccagttgattaatcgatgaagtgatttgtagtggattcttatattttgtgtaagggtatatgtgaggccctatatatgaggctttctatataatgaagtataattcagttcagcatttcaattcagcaatcacttattgggcctctactcagttgccttcagggctttataatttaattgataaagggaggttaattaattaattataacaacagatcgcttaatagtgtaactactaatttaattaatgacaaataacaatacattaaaagaaatgcattaataaaaataatatattggtgttatagacaataattttctgattaactttattattattatttcaatagcttttggggagcaggtggtttttggttatatggagaagttgtttaggtatgatttctgagattttggtacactcataacctgagcagcatacactgcacccaatgtgtagtctttcattcctcaccttcctcccacccttcccctcaagtctccagagtccattatatcattcttatgcctttgcatcctttagtttaggtggcagttataaatgagaacatgtaatgtttggttttccactcctgagttacttcacttagaataatggtctccaactctatctacgtagctacaaatgccattattttgttcctttttatggctgagtagtattccatagcatccacacacacccccctatgctttatatatatatgtaaatatatcacattttctttatccactcattggttgatgggtatttaggctggttccatatttttgcaattgtgaattgtgcagctataaacatgcatgtgcaagtgtctttttcatataatgacttcttttcctctgggtagatacctaggagtgggatcgctggaacaaatgattgttctacttttagttctttaaggaatctccataacttttccatggtggttgtactagtttacattcctaccagcagtgtaaaaaaatgttccctttttaccacttccatgccaacgtttatttttttattttttaattatggcaattcttgcaggagtaaggtggtatcacattgtggttttgatttgcatttccctggtcattaaagatgttgagcattttttcatatgtttgttggctgtttgtctatcttcttttgagaattgtctattcatgtccttagcccactttttgataggattatttgttttttcttactgatttgtttgagttccttgtagattctggatattagtcctttgtcagatggatagtttgcagatatttctcccattctgtgggttgtctgtttactctgatgattatttcttttgctgtgcagaagctttatagttttaggtcccatctatttatcttttttgttgttgttgcatttgcttttggtttcttggtcatgaactctttgcttaagccagtgtctagaagagttttaccaatgttatcttctataatttttaaggttttgggtcttagatttaagtctttgatccatcttgagtggatttttgtataagttgagagatgaggatccagcttcattcttctacatgtggcttgccaattatcccaacaccatttgttgaataggatgtcctttccccaccttatgtttttgtttgctttgttgaagatcagttggctgtaagtatttagctttatttctggattttctattctgctccattgatctacatgtctatttttatagtagtaccatgctgttttcctaactatagtcttgtagtatagtttgaagttgggtaatctagtgcctccagatttgttattttttgcttagtcttgctttggctgtatgggctgttgttttgttccatgtgaattttaagattttttttcttgttctttgaagaatgatggtggcattttgatgggagtcgcattgaatttatagattgtttttggcagtgtgctcattttcacaatattgattctgccaatccatgaataagggatgtgttttcattagtttctgttgtctgtgatttctttcagcaatattttgtagttttcctgtagagatcttccacctctttggttaggtatattcctaagcattttttttttttgcagctgttgtaaaaaggctcaagttcttaatttgattctcagttttgttgctgttggtgtatagcactggtactgatttgtgtacattgattttgtatctggaaactttactgaattaacttatcagatctaggagctttttggatgagtctttaggttttctaggtatacaaacatatcatcggcaaagagcaacagtttgacttcctctttagcagtttggatgctctttatttctttctcttgtctgattgctctggctaggatttccagtactatgttgaatagaagtggtgaaagcaggcattcttgtcttattccagttctcgggggaaatgctttcaaattttcccccgttcaatataatgttggctgtgggtttgtcataagtggcttttattaccttaaggtgtgtatcttatatgccagttttgctgagggttttaatcataaagcaatactgaattttgtcaaatgctttttctgcatctattgagtttatcatatgatttttgtttttactcctgcttatatggtgtatcacatttattgacttgcatatgttaaagcaaccctgcatccccggtatgaaacccacctgatcatggtggattatctttttgatatgctgctggattcatttagctagtattttattgaggatttttacatctctgttcatcagggatattggtctgtagttttctttttttgttatgtccttttctggttttgatattagggtaatactggcttcatagaatgatttagggaggattccctctgtctctatcttttggaacagtttcaatagaatttgtaccaatttttctttgaatttctgatagcattcacctgtgaatccatctggtcctagactttttttgtttcctgacattttttctattattgtttcactctcactatgcattattggtctgttaataatttctatttcttcctgttttaatctaggaggtttgtatatatgcaggaatttgtccatctcttcttggttttctagtttgtgtacgtaaatgtgttcacagtagtcttgaataatcttttttatttctgtggtatcagttgtagtatctcccatttcatttctaattgagcttgtttagatcttttttcttgttttcttggttaatcttgccaatggtctattgattttgtttatcttttcaaagaagcaggtttttgtttcatttatcttttgtattgtattttgtgtttcaattttatttatttatttatttatttttatttttattttttgagatggagtctcactcttgttacccaggctggaatgcaacagtatgatcttggctcactgcaacatctgccttccaggttcaagtgattctcttgcctcagctgcccgagtagctgggactacaggtgcctgccaccacacctggctaatttttgtatttttagtagagacggggtttcaccatgttggccaggcaggtctcaaactcctgacttatggtgatccgcctgccttggcctcccaaagtgctgcgattacaggtgtgagccaccacactaagactcaattttatttatttctattctgatctttgttatttcttttcttctgctgggtttgggtttgctttgtcttgtttttccagttcctagaggtgtaagctcagattgtctatttgtgctctttcagactttttgatgtagatatttaatgctatgaactttgctcttaacatggcttttgctgtatcccagaggttgtgataggttttgtcattattattgttgaattcaaatatttttaaaattttcatctttcttgatttcattgttgacccaaagatcattcaggagcagattattcgatttccatgtatttgtatagttttgagggtttcttttggagttaatttttaattttattccactgtggtctgagagaatacttgatataattttgattttcttaaatttattgagacttgttcatatggtctgtcttggagaatattccatgtgttgatgaaaaggatgtagttgttgggtaggattttttgtaaatatctgttaagtccatttgttctagggtatagtttaagtccatgtttctttgttgactttctgtcttgatgacctgtctagtgctgtcagtggagtactgaagtcccccactattattgtgttgctgtctatctcatgtcttaggtctagtagtgattgctttataaatttgggagcccaagtgttagatgcatatacacttaagattgtaaatttttcctgttgaactaattattttatcattatataatgtctctctttgtcttttttaattgttgttgctttaaaatcttttttgtctgatataagaattgctattctttctcactttgagtttccatttgcatggaatatctttttccacccctttaccttaagtttatgtgagtccttacgtgttaggtgagtctcttgaagacagcagatacttggttgatggatttttatccattctgccattctgtatcttttaagtggagcatttaggccatttacattcaacattagtattgaggtatgaggtactgttctattcatcatgatagttgttgcctcaataccttcttgttgttgctgttgttaattgtgttattattttatgggtcctgttaaatttatgctttaaggaggttctattttgatgtattcaagttactgtttcaagatttagagctccttttagcatttctcagtgctggcttggtagtggcaaattcagcatttgtttgtctgaaaaagactttatctctctttcatttatgaagcttagtttcactggatacaaaattcttggctgataattattttgtttaagaggctaaatatagggcccaatctcttctggctagcagggtttatgctgagaaatctgctattaatctgctatgttttcttttataggatacctgatgcttttgcctcacagctcttaagattctttccttcatcttgactttagacaacctgatggctgtgtgcccaggtggtaatctttttgcattgaatttcccaggtgttctttgtgcttcttatatttggatatctagatctctagcaagactaggaagtttttcttgattattccctcaaataagtccttaatgaccccactatataacatgaaatatctgttattggtactgaggtgctggccacaaacaattctgtgtgtcctgaaaactcttcagaatattcgtcatctttagcacttgttatcttagtgtttgggcttggcttagagtgatacatctcataacagggcaacagaaagaaccaggaaccaagatttatataacataagtcagtaaaactagaggcaccagaggtttacatttacattaggttacattttctaacaggtagcaaagcacatgaatgaagttcagtggaaggccttcctcaggaatccagtaaaaaccaaacatacacacacacacacggacatccgtgaggcaggaagggatgtccactatagtacagacaagcatcctggaaggccatcaaggagtaggtgggtttcagttgcctcaggaatgtggcatggacccaaactaagtgagtacagatacttgtcattgaggagaagattcaaaatagcatcctaggtgtaaaaactgaggcacctggggcaggggaactaggtctctggaatgttggcttaaaagcacccctctcaggaaaggcctcatatgccatgcagggggttatatatgtgttgtgggacacagatggcaaggagataattctatgcaccaggctccactactaacaggtaaacagaccaacattaacagagacttaggtaaaaaggtaggtgcccagtggtcagttctcaggcacttccaagatgcacctaacagaaatgtaacttggtgtctattgtgtcctaggtctaacaactgaagagaagtgaattagtacctcttgtggacagagaaacaggggcagagacccattacaaagctgtctcagataggcatttgaagctgtttaagtatgtagaggcttaagtcaggctggttctgaaatgtgagagagggttaagcttcatgggaaatcagcagggtagtttgctattttttattataaccaatctcacaatagtttgggacatcaaatatcaaattgttgggaatatttatccatattagtctttttgccactaatatttaaaaatagtttacaatatacaacaaaaagttgtaaaatttccatctccacttaatcgatcttatgtaacccatacaatacatcaaatgtcctttccccactttatgtttttatttgctttgtcaaagatcacttggctgttagcatttgggtttatttctaggttctctattctgttttattggtctgtgtgcctatttttataccagtgccatgctgttttggtgactatggccttatagtatagtttgaaagcaggtaatgtgatgcctccagatttttctttttgcttaatcttgctttggctatgtgggctcttttttggttccatatgaattttaggattgttttttctagttctgtgaagaatgatggtggtattttgatgggaattgcatttaattgtagatttctcttggcagtattacccaggcttttcttattttggcaccctgtgctgctgtctccttttccttctttctgcttctcttaaccaactgttacctacacttcaatactttctgagggcaattcatcctccagtaagtctccctgaatcttctcttccttccctggcttattatatatccttcctcttggttcccatagcacctatgcacacttctgtcattgcacttgccaatttgttttataatgatctgctcatctgtctcctcacttagactatgagctcactgagagcaatggctgttgcattcaccttatatcctcaacaccattctgaaggcaagagaaagaatacccagaggtggagctgggaagctggttgtccaagtagtgaatgactctagtttgaattgaactctatagccagtgggcaatgtggatgtgttgacagttttttaacaggggactagtgaaaacacattttgggtttagaaaaaattgcaagtctgatgacatacataggagaagagattagagataggaatttcacttcagaaatttaaccacaagagcaagtgacagatcacggaagtctgaaccagactataaatgtgagaatagagaaaaaagttaacaatttgggtgtgaaagggcgagggagagaggtgtgaagaatgactaagtgtggatctgtttttaaggattgaatggaaatttgagcattttagctaatcaggcctaatattgagcaaagcaaaactcttgcaaattgttatttcaagtgtgggctgagaaaatgaaaaaatataaattctcacgttataacctcttccgtgtgtctgatttgatagaatccagccccattgcctccaaattccattgcatcttagaccagcaaacacaagtgaattctacttaaccccagaattctgtatgaaaatcttactgcctttttttttctaatcatgtgtcaaagtgtgggaagaacttttatttatgttttaataaattgtcagtataaccatttttacttgaaaatattataatttttcaagtaaacaaattgtttctctaagttgaaaattttatgatggaataaaagtatttttcctcaaaacacatagaaattttacaacaatattttagagttaactaaatgtttctttagtagtttagtcacttaaaaagtgatatgattatgaaaatacttaaactttgtcttttaactatttctaataatgctattggtataatttcatatttttatactgatcttttctccaaactttagtaaaacatacttctgtaaacccctgcccacaaaactgaagtccacatttacttctgaatgactgataagtttgtaaaagtatgcatgaatttcgttattaaattaaagtttttattatattttatgcacaatggtataaattattaaattaattttcaagcttatagaacattgataaagattgtcattagaaaaccctgagttgattgttatacattacataacctttcattggtggattagtgaatatgttatagggtgaccatgaatccaaagaatcaaagctggctacagcaaacagagggtcaaaaggatatggaactatgcatgatccagcaaaacactcaatatctgttttcctggaatgttaaaagacaaagaagaaaacttggggaacactagatgcatatagttctggttctttaagaataaaaatatgggccgggcccggtggctcatgcctgtaatcccagcactttgtgggaggccaaggcgggtggatcacaaggttaggagttcaagaccagccaggccaacatagtgaaaccctgtctctactaaaaatacaaaaaaaaattacaaaaaaaatacaaaaaaaaaaatagccaggtgtggtgacaggcacctgtattcccagctacttgggaggctgaggcaggagaatcacttgaacccgggaggcagaggttgcagtgagccaagatagtgccactgtgctccagcctgggtgacatagtgagactctgtctcaaaaaaaaaaaaaagaataaaaacaagaatggtcagagtcctagtaccttgtccagtgtagtgctgccttgagattgcattgcaatctgtctgagagatagtaaaagaaagtgataccttccttagccctgtttctctttagactatgctttcccctctccaagttaatatctctcagtctaaagcctgggaaaaggtgccaattttgtttttctttcttcctcacacctcctagaagttacactgggacactattacttttttccaggctttggccatgtgtattgttttggagagtcaacttccttttttctttcattctgcaaatagttttgagctgtcactctgtactaggtgctataaaacttacaggtgcattttacatgcctatttcctataggccacgatttaacaaaatgttcataaatgagaattaggagtgcatgtattgaatcaccacacattaactgaacagctttcattggccagagactatattgacagtggagattcaaagataaactagagaaatctcatgcttaaataactttctataataaattatataagagaagtaggttcagggatcttgggagctcagaagcaggatgagttaaacaaaagttggattttgcctttagcttggtttcattatcctgaaggaagagcctgaaatatagtgtagggtgcaagtagtatatgtgggtggcaatctcgggaaacaggagcatgtgatgaataaggagaaaaagccaatataaaggtactgcattgagggcaatgagggctctaattctctgcaccttctcaagcattgtgcagattggttttctggattatcagcctgaaggacaaaacgaagaaacagccattagctcctgtctcccattgtctgagagctgccactaggatattaacttcctgaaattctgcagaaatctcctcttactttggcactggagatgcccatacgcagaaagcaaaaaggcacagcatatttaaggaagctcataagaaacagtgcatccagaagtggcgagaattggaggaatggacatgagactctaagaaccagcgcctttgatgttccttttgatctgttatgtagctcttcttgtacacaggtgagcaaaggcatgctggacaaatggattcacatgtgctaaagcatggggcaaaaaccacatattaattcaggaaaagacaagatgcgtggccctctctgtctctgtctaagggtgaattaaagaggggatatatgtacagagtggcagggcaggacttgagataagaaggctaggtgggtgctctcatgctagtagcattatagtacaggtgatgagaagctcctgaagaatcatcttaacatttgtattttagagcaacagtattgagttctgacttagagacagcaaaactaaagacagaaagactattttgattattaatgatgtagatataagaatatcgtcaatgtgaactaaagcatgaagctacttatgatatatcattaaaaggatttaactgattggagacaaacgagagggatggggaaaagaattcatttgtttttagttgctctttttttcctacttattcctttgttccgagtgtgaataaactttgtaaacttttatactaaaacattctgctcattcatacttatttctttgatgaaacaaggaaacccttgtatagttataaacgtgtgaatcaatttaaatattaggaaatttttttaaataaagctagttttctgaaggggaaaaacttggttcaattttttgctggcaatctgctttgtgatttttgaacatgatatctacatctagactcatgttttgctagctggaattttttttcaaattaacgctaccattattatatgctttactatttagcttttgcagccttggaaatctatgattaatacaaataattctctatggcaattttaaaaatacatgtaaaagccttcaatctacattgctactgtgtcgtagcacaaaaaaagaaaatgtgatcaaattttaataaaatctacaatttattcccttctaaatacagtcctagctcaggagaaaggaagctatttgtatttttcagaatcaaatttccctaaatgaatatagagaaagaattataactgaaatattgttgaaacagtggtcatctcaaatctgaaggtcattccaaaaaagtttctgagttttcattgcctcaatctaaaagttggcctttttggtaatagatgaaagtaaaataattgaaagggtctgttgcagttttggaatatcttgaaaatatagtagagtgaagccttcttcccttaaataaaagacaagttgctgattgttttctttctagccagataagaataatgccttctttctcttgttagtcttaacacctcacttgttactatgtgtcagaaaggcgagacaccataaatggagatactactgatggaggtcatctgacatggggctggtaggcagtgggaagactggtatggacacaggtggcttaggggttggggaatgatatggaactaaggaaatgataattagcagaacccagtgtgcatgtgtgtgcattcgtgtgtccgtgtatgtgtgtactgtagcacaatgcaagaaagaaaaaacaaggcagacttttcataatttcagggataaataaatcctttatcacttcatgtagaatattggctacttggaggtatatctaaacgtaaatatataactatataactacatgctaattaaaaacatacaaagaagaagtgcctaaagaattacaacagaaagtggcatagtgattattagagttaatataatataaataaggccaggcatggtggctcatgcctataatcccagcacttttggaggtcaagttgcagggatcacttgaggacaggggatagagacaagcctagccaacatggtgaaacccatctctactaaaaatacagaaattagctgggtgtggtgatgggcgctggtaatcccagctactcaagaaactgaagcaggagaattgcttgaacccggaagctggggctgcagtgagccaagatcgcgcactgcactccagactgggtgacagagaaagacccggtctcaaaaaattaaaaaatagtataaataatatttcaaaacacaagtctgttaagataaaaggtacagaggaatggtgagatgacttttttatttgtgtgataagggactgttttctgtgattgtgagaaagaccaggagttaagaaaaagtggccatcaataaatcagccacttatggggaagaaccataaaccactctcagatgaaatacaaatgcagtcattatttaatattattggaatatttgtattagtttttggtatgtgctgctagtgctggtacattttagtagtcaattaatattttgttaatcttaatttctaactaaattccagagtgaaatggaaataataatgaaaaaattttatttacaaaacagattttgtttttttctgttaagaatgatacacagttgtccttcagtagccataggggattggtttcaggacctcccttgggtactaaaatctgcagatgcctaagcccctgttataaaatggcttagtatttgtatataacctatgcacatcctctcatatactttcaatcaggggtccccaaccccagggccatgaccagtactggtccatagcctgttaggctgttcgataccaggctgcacagcaagagctgagctcctcctcctgtcagctcagtggtggcattagattgccataggagcacgaaccctattgtgaactgcacatgtgagggatctaggttgtgcgctccttatgagaatctaatgataaatgtaatgtgcttgaatcatcccaaaaccattccccttcccctcaccatccctgtccgtggaaacatttcttccagaaaaccagtccctggtgccagaaaggttggggactgctgctttaaataatctctagattactgataatgcccaatacaatgtaaattctatgtaaatagtttttatactatattgtttagagaataatgaaaagaaaaagtctacatgttcagtttaagtgttgataagtgtgtagagaaaagggaacccttgtacattgttggtggaaatatagattggtgcagtcattatggacaatagtacggaggttcctaaagaaattaaaattagaattacctaagacccagcaatccctcctctggatgtacccaaaggaaataaaatcatcacctcataaagatatctgcactgctatattcattgcagcattatttacagtagccaagatatggaaaccacctaggtatgtgttggtgcatgaatggataaaagaaactgtggtatatgtatatacaatggaatattattcagccttaaaaaaggagaagaccctgtcatttgccacaacatgcatggacctggaggatattaagctgtgggaaataagtccaacacacatccacacacaaaattgcataatctcacttatatgtggaatctaaaaagaaaaagttcaaatataaagttagaataaaacagtggttaccggccggatgtggtagctcacgcctgtaatcctagccctttgggaagccgaggtgggtgaatcacctgaggtcaggagttcaagaccagcctgaccaacatggtgaaatcctgtttctactaaaagtacaaaaattagccgggcatagtggcaggtgcctgtaatcccagctactcaggcagttgagaaaggagaatcacttgaactcaggaggcataggttgcagtgagccgagatggcgccacttcactccagcctgggcaaaagagcaaaactctgtctcaaaataaaaaaacaaaaaacacagtccacacactggttaccatgagtgaggtggcagggaggagattgggagatgtagatctaaggatacaaagtagcagatatgtaggaggaactaaaaagctgacatgcaggatgacaactatagttagtaatagtgtattgtattcaggatttttgctaattgagtagattatagctgctcttgccacaggggaaaaagtgggtaactacgtgagatagacaatggatgtgttaatttttgtcactataataaccttttcaccatatacattcatcttataacagcatgttgtttactgtaaatatatacaataaaatttatttttaaatatctgagtatgatttgatgatttgtgaaaatagagtgaattataataattttaaatgtaagttaatgttattagaaaagaaacagaaagaacataccacacagaaagtctgtctgaaggatctttgttttctccaccaatacaagtgttcattgattcagaggtggattatgagatatgaccataaaacaaaaatttcaagggaaatatattttattcaatgaaaaattctcaacacaactgttatatgccagtaaacactatatcttttaaataacaggtcatatctattatatttaaaattcaaggagagactacattagagatgctattagatcaacttctaatttcaaagatttctaagatatggaacagttactccttatacaaattaaaaaagcaaatgctgaagaaattcagctacatggatacaccatgaggtggaaagatgctccataactcttagttaaactgcactaattacacataaaaggaaaatgtttcatttcactgtaatttggaaaccaaagaaagaaaagactgaatttttacatactgttaaagagattgcgtatctgttctaagtttaagacagaggcaaaatgtattttattcatttgtcctgcaccgtttagaaataaaattcaacttccttttaattttttttaagaataaaaaactcagtctaaggaaagtcttaaagttttcattttaagtgatccactgttctagaagtttaatattttgtttaaaatgtttatgttctgtattccaccaagtctagttttaaaacaaaacaaacaacaacaaaatacttctctaacttggagtttaaggtgaaagaaaccaattacgtggtttggaaatgtcacacttttcatctcttttttaaaaaaatttttaattcaggacagaaattgtatggatttagtgtaagtcttgggatctcacaagtgtcagtatttcactctcctccatatcttgatagcaataacttgaaataggatctcagtagctcaagcaatactgggctctgagagttggttaaaaattatttggctgagcgcctgttgctgagggaagaactaatctcgagcatatttttggagccaaataccaaattgtttgtgcttagcaacacagcaccaggcttgcccttcagaatgattctagaccaaatgccagaaatgctctggttctgactacagagttctattcacaaatgacaggaggcaagaggtcctcctcactttcagaagaaaggtcctttgctttcttagtcaatggtaggaaaaccattgtggttttcattgcattacataatttttaaggtgattacttcaataagaagtgctctgtgtatatgtgtgtttatagacgcattttttaaacactggagaatttctgaaagtagtacaaaccttgtaatgtcaagtagatgtgggaaaaagggagtttacaacattctctcctgacattgctctcctttggcatctgcatttttaaaatgttaaaaatgtttaaaaacgtgtgcttaacacttaatttggtgatagttgctgttaccaaggcaactctgtaactccacccagataaaaataaatcttgaagatgagtttctgtgtctctgagcaaatatttttgtgaatagtagaagcagagaaagttaaagatacctgagcttttgatctttactagttttatagatatgtttatagttatacatttttattcatacattttagataaataactttgtaaagcaattgattcttcttgtaaaaatcaagtatattcttaatagactgataaactttctttttttgagacagagtcttgctctattgcccaggctggaatacagtgccatgatcttggctcactgcaacctacctctgcctcctgggttcaagcaattctcctgcctcagcctcttgagtagctgagattacaggtgcatggtaccacaccccactaatttttgtattcttagtagagatggggttttgccattttggccaggctctgagaaactttttaaggtctcttttgcagccagctatttgtctaccttatttcattcttaatctcactagccaatattttttctgtttaagtgctttcagcaaatattaaatgcttgtgccttcagtcttatcctgtggaaacactggtaatgacaaaaacacatatttcaacctaatatacaatagaaacagaatgccagttattcatggaggagaagaatagacttctgtatttaaaataacattttgctctgtgttttaaaatcattcttccttcatcaattgtaagcatcttgactataatttatacacctaaagataaataattcagtagcaatgataactgaaaacaggacacatacaatgaactagctaaattaccatacattctcatccatttcaaaaatagctctgtacttttttcagattttgttagaagaatattcaatacaaatttttattcaatgaacacttcagatgtcaagattgttacccacatggacaacagtaacctaggtaaagattctgcagccaggcgtggtggctcacacctgtaatcccagcactttgggaggctgaggcgggcagatcatgaggtcaggagatcgagactatcctggctaacatggtgaaaccccatctctactaaaaatacaaaaaattagccaggtgtggtgtcatgtgcttgtagtcccagctgctcgggaggctaaggcaggagaatcgcttgaacccgggaggtggaggttgcggtgagccgagattgcaccactgcactccagcctgggtgacagagcgagactctgtctcaaaaaaaaaaaaaaaaaattttatacctgggctctgtgctcaccagcagaaggggtaacatggcttcttaggacaaccttacttgaccatttacttctttgacactaggggtattcttagatcagcaggtccttccctccacttatgcacatgaggctcacagagagtctgggaggcagggaatttatgattggaaacagtatactttttatctaagaaattattaatgtcactgcattcaagtgattaacaccatcaatatcttcaagactaaggggattacatgatgtgtaaaattagaaaactgtcatctactagtggctaggcactttaattatattaagcatgcaacaagagaactcttcaaatgaatccatctctcctctgtattatttccaacccttggatccccatctgtttctgcagacaacagctatgctgctgaatgtcttaatggtttgctgccccaactagcttcaagatactgcaggtcaagcatagcatcttactcttccctgcatctccagcacctctcagaatgttggtcacatagaagatgtttgctgaggagttgaataagaatatgtacaagggacacaattagcattgtttaaaaaagatgtaacaagatagggtaaaggaaagctttggaggataaatctttagaacaatcaataatatcttctcctctgttggttagttgcccttcaatctcagccactgaatcaaatacaacataattactattctgatatgttcttgaatcgaatatccaataataagatattcggatgcatagccatgtctaatatcaaagcccatgcttttcgctattattgtactccatacattagcttccaaatttatttgcaatccaaatattaaaagcaagtcataagcttagtatcgccaatgtgatactaagtatccacttactaaactttattttcaaaatgtggttttatctcagtttaatgaacacggcatgttttaatttacactttcatattatatagtaagggcgtggttacagatatgttaatttcctgtgctgcttcacaatgatggaacataatagcaaatgaaactgttaatttgcagatacccataggcctttggtgtctgaatagaaataaacacacctacaactgagagaggaagcatgtgaagcattccagtgaacagaggccatttattcagtcacagacacaggagaaaaacaacaattaaaaaaaaatctctgatgaaaagttcataaaaagttcactcagtttaagcatatgtcctataactacttaaaatagagttcttcttaaatatcattctttgctgtttttagatttcttctgcctgtatcaaattaatagaacacagcatacttttaatttgctctggtttcttagtggggcatttattaaacacattaaaacaatagtctcagggttttactgctgatgttaaagttctgctttcctacttaccaactgtgtcatcttaaggcacatactttgcctctctctcaaatctcccaaatggagaatgataagaatacgtacctcaattaaagaagctataacaagtagaatgtttggaaaagtgccgggtacaccataagcccactatgagtattggattgtattacctctgaaagctgcagaatggaattctcaaagttatatgtccctaaaatcctcttaagtgacagaaatggagaaattagcagtctgtctaagagagcttttctagagtctgggcatatgtttttaggacaagacagttcagcttcagcttaaaatgagagagcacgtctgtgtccttactcctgggtgccaggtttcttgtccccatcttaagacaaataattttggtggagaagaggcagtctctttgatttcgctctaaaaaccttttctggaggaggtagacactctccacccccgttttgagactcatgcagctgaggatgactggctgagtacaagcaattgttccttctaagcagtttcaattcttataacttgtggagatattcttaagtccaggggattttgtgtatggtggatttttattacaaagtcctgtacttcataggaacaaaataattcaaagtcaggaaccagatcaaagccacaactcagatatggcaccttgagaagttcatttgtatttcacttgcataaaaaccctcaccactgctatctgattttcacaaatcattcaacagctatccatgaagcacccactgtgtgtctggtctctgtgtcagtccctggcttcatgtgtctttccttctgtaccctgactccccaactcatgaacacatgaagtaaaaaaatgaaaatctttttctgacctctcttcaaaatcacttttttcaaaacaaacacctctcacctgctcatcctccagccagtaaatcacaggggcctagaaatgtcacttacaaatattttctgattctgtccctcccttcaagcttgccaacattatcacagtttagggcctgctcatctttcccccaatctccaattagatctctccacaatgcaattctgcacattccctgttacaacccttcaattatttcccagcccatccaaaataaaatctaagcctcttactaacacattcaggaactctgtggcctacggttttctacagactaattttccagcagttgacttccagtgcaagtgaaaacctagtgtcatgcctgcatgatagataaatttgaagctgaagagcccaaatgtatagaccatgccatgaaaggtttatagtcatgacacagtggccctatagtacagtgcttgaagctggctctctactgtcagacagaccacttgccagccatgagacctggggcaaaatgccttaatttttatgtgcctcaagttctcatgtgagatgagaataaaaattacccctatttcataagatttgataaagtgtttagcataatacctcataacaattgcaattcagtggtggttattattataaagaaaagatgattaactttatcttaatgtttaacttgttctgatagttattgatctatagctttgatatggaggtttgagaatgacctggaaagaattggccacaatgattgaagatagtgatacaagaataaaagatgactgcaaaatgtaaacctgcaataacagaaagaatgaagtcactggtctcatgggaactgatatgggagaaaaaaacagatcaaaaggctattcatgttttgggcctctttgtcaaaatggaaatgagaaactggggaataaaaattaaagcaattctagcatctggttttaacataattcttatccctaaaaagaatctataagaaactcccaaaatgacaggcagccgtgggtagcattgcatttcaagtaatcttttaattgttaaaatttaagtttccaacatgaacataaaattttcaacctaaaagaaatgagttccaaatctgagacaagtgaaaaaggataaagcctactagggggtaaattccatctctttagagatctagtacccaatttagcaatgtccaatcaagcctttaactactacatttgaacacctcatcatttcaaaatgttacttaatgatgccaattaactgtacaatgtctctgcatagcacatagccctaaaatgatttgtgcaatgttactgtcagtaaaactgaactacagggaatgctcatattctatgtcattatatacagaaatgcaatatcaataaagtgatatctgttggtattagaaaaaagtgaaaattttcatatctttctattttcttttttcctcaatgggatgctcttgttaaagatagctctgcatagtaaggtttgtataaacattatttagctaaagttaaaaggggtaacatactggttctagcacagatattaaaacaaattagtttgtaggtagggcagcaatcaattatattactaaccatagctttggtccttttatcctttcccatttgattttacacagtgggatgttaaaggttgaatgtctttggtatctataaacttaattgaaagctgttatttgtttgtttaagtctgttgatttttataatcataattttactcctatagatttcttgtaggagtactatatgaatttatgttgcactgaattttgttatgttatacaaattaataggcttttatttatggaaagctactattgatctgtcatttcttaaaaaattactaaaaagtgttaaaactttaaatgttggagagtttatattttaaaagttacatgctagaaaaacatgatgtctgagtatattagaagttatagataattcatctgtcaactataaaactctccaacactgcctttctttaatgaataatatgaaatttagcagtgaaaatgtgacaatgtacaatcctaaataaatcaacaaatttagagatgtacctctaaaaccattgtaaattcaacagtgtaattttccattggactttcacttattcattcattaaacaaatgtttgtgagtgcctgcaatgtatgagacattgtactgaagctaggcagtgtgagttatcatatgggattatcctttaaatacttctgagggcaaaaaaaaaaaaaaaaagaagagaaaaggtgtgaggaaagataaagggttaattcattaaaaaataacacttgaggactgttttctttgcaaggcataaagttatcaccctttcaaacagtagatatttcacatttaggatgcgagactccagttccaacaaagctcattgcacagctgctaccctgattaaactgctacatgaactctgagcaatgtagcatggtagccgcatgcttctgcttgcatgatggttaattccttccattctcattagtgattttctgagctttgaaattctgatggtacctaggatataaagcatatttatctaactgaaaaacagataattagatgtaacataaaatatgaatggctttgtcactttattgtagcagagaatgaatgtgggataaattaaagctgatgctagaacatatgcctattttttagctggaaaatttcaagatttatgtactttgggcttgagaaagaaatggagtttattttttatgcactgacatctctttttttttttttttggaagagctctcttaggaatgaatggtatgtaaatacagtaggaatgtaattatagattttcctgacccagttcctaaataatagatatcatttcagaagtgccccaatacctgaccttttgctccaagccatatcaaagcacacatctagtctacttttcactctcattcctagccactatgacaatactattcagataaaacttctagtcctctacttatgtgactcataccaacttgaccttacgatagtgactgggggtgcatatctaggttcatgctgtttgtccattattatggttttgtgagaaaaggcaaaatttctaggtaaagtgttatgaggacgaataatccaccaggcaaccaactgaccctttcatttgccatcttgtcacttcaaacagctctccagaacctgcagccagcacagaccaaagtcaggtttgtctcctcttctgttgatgaacaaaggttgattccatatcgtggctattgtgaatagtggcagtaaacatggcagtattgtatgaaaatatcacagatagcccttaaatatgtgcaactatgatgatctatcaaaattaaaaattaaaatttatttttaaaagttcagttagaaagcttgtagttcctggcaaactactacctttctcggcaaaagaatttgatatctcttaaatattttctgcctaatgctgatagattgtatttacatattccattaatgcaataaataaaattacaccaaaacatcagcattatttatttccaggggcatctctcaaaataaattcctccaaaattcacaaaaccaaaaccaatgtgaaattgtactcagggatgcaaatgtagcccagtgaagcatttgcccacttgtttggtattattgaagcacaattagaaaaatgtgcaatgtatgcccaaaaattctataataagggccaggcgcggtggctcacacctgtaatctcagcattttgggaggccaaggtgggcaaatcatgaggtcaggagatcgagaccatcctagctaacaccatgaaacccagtctttactaaaaatacaaaaaattggcccagacgtggtggcgggatcctgtagtcccagctactcgggaggctgaggcaggagaatggcatgaacccaggaggcagagtttgcactgagcctactctccagcctgaacgacagagcgagaccccatctcaaaaaaaaaaaccataataagaactttttaatatactatattataatgtaaaaagactagatgtcaaacaaattaggtgatgggaaggaattgagggagaattttagactaagcaattgagcagcacctgtttttcaccacaaatctgttacatgtattgctcaattgtgctgaatccatattgggtcctggtggctatgtaatagtctctttcttggataaatgtttgtcctctcttatggtttactaatggtgtacagaacagcattgaatagtggttatttcctatgacttcctagatatctctctcataatcctgaatgttttaaagatcattcttagatagagtacagctagacacgaaccatagtggaaatcaggtagacaaaatttaaaaggagtcttaattgaaggtcattttattgtcctcagtattaatcttacttaaaacaaacctgtcactgagcagaactcaaaacaccagagccctttgccaaatgtgattttttacaacaggagcgctggcagttgagaggagtattctgtcacacttgagagaattcgagtccctgaagatttatatgaatgcttagctattatcgaaccatctcttcacagatgacttagtaaatgtctgcctttgcatcagataatggcttacaagttaatctcctcttgctccctgttacacacatatacaccttcttcctaaacagctcataaggtgaaagaaagactcagatttctgactatgtaattgataatatcacacggactgcctgctcatcatctgctagtcacattggcagagttgacagttttggagacactgaagacagtgcatatattaggaaataagcagtttcctgatataaattttcttgtagtttataaattacatagcatttattattccctcatattttataacatttaataatagaactgacacatatattcattttaaactcaattgtgtataataactatcatagcaacccttcagtgcctaaatatcaaatcttccattcctcccatgaacatcttgaatatataggtactgtggttagctccaacaagcttttggttagaattcattgcactgatacatagacattgttttaaaggcaatttcaaatcaaagctgtcagctgtgaatcaagcacaccttaaaaagtgacacatttgtcactagattccagcctctcaaattactgacacgcatcctttttatgtaaagatgacattgttctttcctgatatattgcattcctcatgaatttcttatagtcatagaatttttataaaccatttcagaatcgctgaaataaacatcaatatttttaactttttcattctgtcaaaaatattgtatgcagagatattgctgtaagtgtgtatacctgtgcttaagagactagggctgaagagaagtaatcaaccgaaccactggtgtaaatgtgcgtcacatttttagtgactagaaattgaaataattccaacaaatttatgtgctttgggcttgagaattcagactgccttaggctaagataaaaatcttttcctggtactatataccttcttttattgaatgactacctggctctttctattatatatgcagattttgtacctctggtcatctttgtaaatggtgcctaaaagatatttgaagaataagtgaccagcaataagaacaaatgtctatacaaaagcaccctttagttggatgtaattcactactttgagttgttaataacctctaaggatgacagtagctattagttgaataaaccattatgtctattattagaacactagatagtttataagtccaaacaatgcataaaatacctatctcatgttaccattgtttaggttaccagataattgttctgtccaattattccacttaattttttgcttgcccattagctaaatggcaagataaaatttgtcaaacgggggggaatgtattgaaaatgctagacaactacacttaaaatgaaaacaggccaggcgcggtggctcaggcctgtaatcccagcactttgggaggccaaggcgggtggatcacctgaggtcgggagttcaagaccagcttgaccaacatggagaaactccatctctactaaaaatacaaaattagccgggcatggtggcacatacctgtaatcccaactactggggaggctgaggcagaagaatcgtttgaacccaggaggcggtggttgcagtgagccgagattgtgccactgtattctagcctaggcaacatgagcgaaactccatctcaaaaaaaaaaaaaaaaagaaagaaaagaaaacaaatgcataatttgcaaatattatttttatattgtatgttatctagggcttctaaatgcattcttcttataagcctaggtttgcaataacattcatttagaattgagtaattttaaatataatattttataaaataaaatataataatttctcttaattctttgaaaatattaaattaaaagggggttgcaaactctgcattccacatttccatcccaacatttaattttagcaattttgtagtctgcctaaaatgcaatccatcatttactgtttagaaaatagggaatgtacacaaaggcctttcagctttccctgaactccataaaaatctttttgcttctttactgcccccctttgtcaggagttctgaggaactgttttttatcttaagtctcacaaagcatttaggagaatatttaaacttaaattcttttaaaacttatgttcaggacaaagtaacattgtatgcattggtgtcatatgtatttaaattttgaaatttttaatactggcaaaatgaggtttcaattttaatataaattatttaacaatcttaaatcattaaatatattacttaatatatttaatatatctaaacagtcacaattttcccatactaataatcataaaaaatcttacccaatggtcatatagatatacttaatggagttttgggggggtatttttgtatattaaaaaattcatatatttgccttacttagaagaactgattaaatgaaagtataatattaacaaacatattgttattttatatttgcatttgtgataattatatttgaaacgttcaagattttccaatgaatttcttttgcatttgcgtatttgtgcctttttattataaaaataggtggctttttagttccactgcataagtttcaacataggtctacaaatagtgcatctttttgaagttaatcattataatcacaaattgaagttgcctgagctccaattggagtctaaatggatgactgaatcttattattcgaaacccactgttgctacacaatatggccacacaagagagtacacaagacccgtctgattcagcctcagtgccataaatattttaatggtttcgttggaatctggaaatggagctcaccacaggagatgcttcttcctttgactctcattattatttcctttacaaattaattaataaaaacttagatgctaaattagcacttgatgaaaacttatatagccttgacattttgattctgtgagtgaataaaaatacttggagaaataaaaatcctaatcatgttcaggaatacccacaaggtaacaagtacatttttaaactttaaaaacatttattattcatgataaaacatgttgtgtgatttaaatataaatttttattatttgctttaacttatttccggattaaaaagtaaatgtttacctagctgttctaaatggtaatcctcatgattaaaacagcaatttgtcatatttcagttacaaatgatcttttattattagttatagaacataagtttcttcattgactgaggcgatgtttcaagtagataaatctgttaaaaaaattgtggtcatattctgttaaattctcataccaggcaatttgtttgatattcaggaaaaacctagccactgaccaaaaactctacctgccttctcagttgtatcctcttggacttaaaggggactgggaaagttataagatggttcatgatagtccatcaacatcccaagaacaaaaacagatgttgtactgacagcatcatatgatcatatgcatgtaagagcacattcatattgccaaatcagttggaatttttcacggttgaaagttaaatgaaatgcttagatgtatgagtcatcggagttaaagacaattacagccagatttatggctgtgctaaaataaagctagttagaaaacagaccaaattccatgacgataccaagtctgactaatgattcaccttaaatttcggagcaacatttatcctcacttgtttgtttatttgacaatgtgcccttatccattaagtaactaggaggaagggaaaagcactacgtgggtgagtgacaagacactgacactgatttgtgactttggataattcctggatgctgttatctgttttggcatagagatggatctgtaactgctaataattgccgactgtgaccatcccagaggccatttacttaacccaggtatttcagacctgacagcccgaggataaacacgatttccctccatcactaacttcatctgcagggcctaagcctccttcacagtctctccagtgatttattggcatctccaagggtatctcacatgtgctgaagaacaaatctgctcactttcatctgcttggttttcccttttgaaatctgctgctttaaaattactaagggaggaatcatgcctgctgctacccttgccagtgaccttgcagtttgtgccctgattgttccaattaccacaatcaaaacagaagcgtttgcagttactgcagtgctctctctgtggatgtcaggtctgactcagagagccaggctggggaacagccatttccactcttgtacctctgcaaaaggacttccatgttccgtaaacagactcccacctctcattttccccccaagcaaagcatcataaattagagagcatgtaacgggaaagaaaatccattagccatttgggttcagtcagacaagccagctcatggaaagtttatacaggaaggtcacatttcaattgagatcaggagggtgaaagggtccagctgtgtgatgagagagagaatgttcgggaatgtggaacagaggtatccaaggcagaacaaactcgtatatgaaggctttaagggtgtgcaaatctagcatattttatgacataaaagagtcctgattagctagaatatgatgaatgtgagaagaggtgaaggctggagataggaaaaattattccagatcttataagctatagtaagaaatttgcatattatatatagacttgtgggaagccattggattttgtaagaaggagattaacattatcttatttatgttatttgtgatttataaccccaaatgtgccagatacaaacaaaccaaaaataataataataataataagaagaagaacaacaacagcaatggaactgtggtgatggttttggtcacaaaatgcatatatatctatttttcacaatgcaaaaatatttcattatttcaaattttaacataaatgtgggtatgcatgagcttacaaatcttgaagtttattggggaatattggtgagcatggtttttattgcatggtcacaacttactaatgggaaacatctgaatacctattgagttaatgcatgcacatttttattttcctggaatactgagaaaaaggttgctacataatgtcttgatagcttctaagtcatggctcaaaagtgaatgtggaatctgctaatcggaatggactcagattcagccaagttctcaaaaacatttgctttcatagatgtcttcaagaaacaaggagtcttgaatttaaattgtgaagtgtctatcttagaatagagagatttaaaatctgactgtattttgtttaaaaaagcctatataactgtattatataaaattatttatactacagttaaaaaaagaatcccatcctatttgtgcctaaataagtgcctgcttgtagcatgaaaactatttgttgagggtccttagatcctcagagcatgctgtgaaagtaggtacaattgttctttctatataagcctcttaagataacagataattgccagaaatacagcacacagtacaaaattaccttgttttacttttgccacaaaaaacaatttcttttggctttgagcaataaagtccaatgatttttttcctttcaaaatatcttcctccctctccataagttttatatttattcacgaaggaatattccaatatcggatgtttttgtctgtgtctcttcctggaacaaatgttaattaatctctttgggtttgtatgtcaagtggaggggtggggattggggacaggtgatagttgtctagggagttaacttcatctctataggagagtggatagacgctgtatacgaaaagctcttgaaaagggaaatacagcagccacttcctcagggcttccatggtggtcagactccttgattgctttagattaactctggcttttgtccttcggaggccaccagattgggtggatagacattgtccttgctgttcttttgacctacctacttgtactttaggggaaaaaaatgcctgtaataggttaaatgctttctcaaagatcaccaaagtatataacacatggcaaatagacagagaaatgagacagtataatcagtataatttataaaagtaccttacagcaggatcccatgggatatgggttttttttaaaaaaaatctacctaatcttttcattgaactcctattcaggattcattatattgaatatggctcagagacctggaaaattgtttccacctttttaatttattcaccatcatttatggaagttttcaaggacgtttacttacctacctcagttaacagattgtactacttgggaagtctataaatatgagcttaaagcattttctgagttttaaaataatttagattgtgtagaatgttaaaactaaaagaggaaaaaattattcagttcctcagttgaacctagcaatttatcttttcacagtgtgctcaagtatagtttttgaaaagtaaagaagatggtttttatacaaacataaacacatttcaaagattttattcaactaattaattagtagtggagccaataagctggtaagactggtttaaaggaatatctgaggaataaagatttatagaaacagtcaaagaaattctaaagagaattgactaatagatataaatctagtaaatatttgattaataatagcagtaacctatggaattatgttttctactgagcataaatgagcatgaatctctttgggtttgtatgtcaagtggaagggtggggattggggacaagtgatagttgtcaagggagttaacttcatctctataggagagtggatagatgctgtataagaaaagctcttgaaaagggaaataaagcagccactgcacatctgcacatataacctgtagatctgggggctctaataaaaaagttaatggcaatgtcaaaatctggtgttttatcttagataacttcatagtcattgattgagccccttaaaaataacatttaaaggacatgtagtcattctgtttctttattgccaagttttcagcaatttttctcatgagaatgagtgctaagaaacttttggtggagcgtggtggctcaagcctgcagtcttgcactttgggacgccaaggctggccaattacttgagatcagtagtttgagaccaccctggccaacatggtgaaaccttgtctctactaaaaatacaaaaaaaaaaaaaagtgggatgtggtggcatgcgcctgtaatcctggctactctggaggctgaggcacgagagtcacttgaacccgggaggcagaggttgcagtgagccgagatcctgccactgcactccagcctgggctacagagggagactccatctcaaacaaacaaacaaacaaaaaagaaacttttaaaatataacaatagagacattacataggcccacaaaaccacctccaaaaaagcattctatcacctgcaagaaagcatatatatatatctgcttttgtgtatatatatatatatatatatatctgcttttgtgtatatatatatacacacacacacacacatatgtgtgatatcagcatgtgtatttacacatatattttgtgcatgtatatttttaactaaaaatgtgctaggagttagatatgaactgattttggaggaggtgatatgctgtagagagagagaatgggagaatagcagtattataatctctctccattgtattcagtttttttctttgtctgaatttttaatagaagtcagccagaagatgttagtttctgggaaatgtgttgagatttacagtcaaatccagagagaactagaggcttatgagtaaataagtaaaggttatgcagagaaagtattctttttcctgtgtaaacttgaatattggccaggcgcggtggacacctgtaatccagcactttgggaggccaaggcgggtggatcgactgaggtcaggagttcatgaccagcctgtccaacatggtgaaacccattctctaccaaaaatacaaaaattagtgggtgtggtggcaggatcctgtaatcccagctactacggaggctgaggcaggagaattgctttaacctaggaggcggaggttgcagtgagctgagacagcgccattgcactatagctacggcgataagagtgagacttcatctaaaaaaaaaaaagaaaagaaaaccttgaatatttcttgtacttgtgttcaaatcatacagttatgaaagtttacccctagctgttacacttaaaatgtacttctgaaatatacagagagatgatacagactattaatgagttccactaaacttttaatggtttagaaaatacaaatattttcttatttttctggaattccagccattaatgtaaaacattggtttcaacataaataacacactggcatgcacatatgcctaagcatgggcccccacacatacagacattctgaaagaccactttttaaaaatattcagtaccgtatattgtgcattccttctttatccacatacttaagctgctgcaagcatcccattgataacaccagtaataaaagatgggaccatcagtaatgagatttgaaagccccttttgcaagaaagtaaggactagaaggtggaaatcactctgtcttagagtcatatggattggggctttgctagaagtgtgtgctctcagggaaagctgcctttttattttctccagagaaaagcctttttgtcagtaaaagaagatgtatcatccaatgcatatgtaaaattctaaacagcagataaaacaacattcactattaatctctgcaaaagaagatatattgaaaaaatcctcaagtgtccctctttgggtttctttgttatatattaaagcagttatctttagatgcatgagaatcacctgaagaccttatttttaaaattcagattcctgtcagttcactcccaaagattccgattcagtagttaagagacaaagcctaggaatgtgaatttacaatcaacacctcaggtgatagccatgcatgttcttaatgctctactactatctatgcataaaaggaagataaagttttaaaaacttgaaatgtggtataacagtttagtattgaataatatacatttttacttattgtaacaaattatgatatctacttggggcaacagtatcttttattttggatctgaatcctaattttggctaggtatcactgagggattcttagtctaaaacaattaaatggagttagtggttttttttagtaactcttgattttctgtttttttccattggcatcttacaaaatttattcattcatttttccctttttcacttggcattatttgttagacagtggacaaaagaactatagaaagtagagaagcatgtgatgttgtcctgctcttagattctcgcaactcaggagaggacattcgcttacaccaatcatctcaaaacatggcagtttatgctgaactcagtccaatgggagagcatttgactgagcacatagggagagaagttagctctgttgaaggataatcaacgaagaattcttaggaaaggtacagtcattcattgaatatttgctcggcacttactaggtgcatatgtgcactaagatctaaggatgggctgatgaagaacccaggtcccttttcttctagtggacatgcagactggcctaaaaaaaaaaaggtaactggaaaatggataaggaaactgagtcactcggtttatttattatcactcggtttatttgcttttgtttgtattttcattttgacacagcacagtgtcatcttaacgcatcctccaaagtgaaggatggggtggataacactttagttggcatttctgtagccaggagccaggatctttctcccataattgcattaacctgggaaggcaccctctaggtagatttgtatagcaccctggttaatcaattatcagtttacttcttgtctcactaagctttaacaccttacatttatgaagcagtgtaaatataactttagcatcttgatcacagcaagcacctgatttgtatttttttattagctcaagtgaaatcagatcagagaagtacattacaggtcataaaatatgtgcaaatttcataatgacctccttttaaaatgtgcaaaaataagattgttaaggcacattccagagccttggggggtgtgtgtgtgtgtgtgtgtgtgtgtgtgtgcgtgtgtgtgtgtgcttgtcttttgagaatatctgtatatcagaaaatttggctgagaagcaatcttcttcttagtggttctttttctcttttgaaaataaagtactaaaaatacttaaagatgcagaacagcaacctgttcccagtgagactctcgtttaattaatgtggtgatctatatagagaaaagggacaattgcaaaagtccctcaataattatctaaccacagtctttaggtaattacagcagaaagattttcaagacacaaaacaccctggaaaatttgacctcttattttgattcaggcctttcatttcttaaatattttctttaatgttgatgtttatgcttgacaaggtcagcctaatgccagatgaatccctggaactcaaaacattgctgaattcacagttgaaggattttaatataatataccagcttttaaaaatcctacagtgagaataacaggactgaataaaaaaattaagaaatgctcaggtagaaataaatagagaaatttagaaaaaaaataaaacgtattcaaaataagtattaagcattggcaaagaaaaaatagtagcagacaattacatgttccatttgtaaagatgattattaattagtggtcttgcaaaacattggagaaaatttgctgaaccatcacattcataaatattaaaaccacccattagtgaaaatctttttactaaacttcacaactgatagtcaaataatgttcagtttttctccattgcaataaaaaataaaggcttttgccttcagatcagtctctgggccttattaattcagtcagccagaagccacatggaaatattttgttttgttaaaagccagcttgccctcatgatcttttaaaatcttttaaaaatcttccatcagccctctccctgacttgaattatggcagtgctttctaaactggtaaactcaatctccttggtgtgcctcaagatagagtacataaaccctccttagaaattgagctctcaattctaaattgcactctccatgagagcaagcaagaatgctttgctttgtattaagtggtcacaatattaaatataaccatagacagcactgtattttctaaacaccttattttcttttaatgactgacataaattagatcataagtatacaaatgcatatctgttgtatttttcagcaccatgtgtttttttttcttttttctgagttattttcctgctttcggcagccttttctctcaggtgccttgtgatccacagtggtgtgtgttcacactaaccaaagcaatagtcttacctgccagaaatagctgtgacatttaaagagaggtccaggggaaggcacagtgcttaacatccaagtctgaagagctaatagtgaaattggggcatcagctacagagagatttaggggaagtaacaggcaggttaaatattttatggaaatgatttctgttctgtatatgattgcaattaacacatgtcaatctgtttcattaatttgttaactcatctattatgctatgccatgaagaaaataaaattggagttctttatttttttgagatggagtctcactctcttgcccaggctggagtgcagtggcaggatctcagctcactgcaatctccaccacccaggttcaagcgattcttctgcctcagccacctgagtaactgggactacaggtgcgtgcaaccatgcctggctaatttttgtatttttagtagagatggggtttcaccatgtgggccaggctggtcccaaactcctgacctcaagtgatccgcctgtcttggcctcccaaggtgctgggattacaggcgtgagccaccgcgccccgccacaaaactgaagttctaagcttcagtttagatgctcactaaatgcttgttttgcaatacctgactgtaactggcaggaatatgttttgaaagtcctcattttccaggtatgcagatgaaatataggggcattatctactatgtcaaattataatgatttatcagtggcacatgaaagtcgcctcacatttcttaatcagtgatataccattatgtcatgccaccttttaatgtaatatgtttacatctttctttagatgtaagcattcatttagttcatcacggtggctttcacacttactccaagaacgctatgagttcctttgatgtgctcaagtctcctgccccagggagaaagggagtggtgagcaggaatcgctttaatctatttacacagatattttcttttccatttattttaaaggaattttttttaacttaatgagtatgcagtgacggtggtgatgatgatgatactaaggtttaaatgattagatagtcaaatctgggctggaattgtaatactgttttgacttttaatcttagagaagctccagtctgcttattttctgggcataaacacatgagaacaataacacagttctgttatctgaatgttgttatattttgtttgaaacattcagtgactttcaaatattgtatttgcctaagaaaattcaacagagtcagacattctcttccaggttaaatttggtgagtctgctaggaaaataaattttgtgcactggtcattctgatctagtggacgttctaataaaagcacctttgtgctgcctacgtcttcactttaaagataagatacctgggtactcgacaccaaattatagtttgagatctcaaaaatgggatagggaaaccacagctcaaaaacaaaaatactagcactggaaaagatagaactagtgaagatgaatcattctctagactttaaattcagagatatcaaaattaagaaaaagtaggaggaataaaaaaagagggtaagcaaaacaatataagtttgtatagcaagagggtataaagcaaatacaatatttttcagaaaaattaaataaaaatagatttacataacattgtttttaatctcaaagatcaaatttcaattttcatctcattttaaaacccatatgcacagtctcctttatatacatcagttgggtgtcaaagtgacttttttcttgtttccaaatacagttatttttaaaatttaattgtatgatttaggaatttgaaagcaagccagtttgcacacacatatgttattatatgtgtgctttagacttggtttttagttaatgtaacatgacagggccacctgagttatttgtttacaaactagctggaaagccaccctggaggagaaacctggcaacaaaatggtctgcagctttgttattgttatctataggattggatgccattattgctgtaaaatagttcacaagaactcagtctatgggaaagactcaaaaattctttgcctgttaaagaaaaatcaggatattggactggttagtttaactaaaaagtgatgatactcagattctgcttggattcactgcttctcagcagttgttttgtttctttctaattgatattttatttttcagagaacccattataaaactcttcttcttcccttaaaatcacaaccacacaacagcaattaaaacatgctttgacgtaagactgatatggttttaaacccagcttgactatcgaattttttactttaggcaaaacacctctgacatttatgtcttatcgtcagtaaaaaggggtgattaacagttttacaagattattcaataaataaatataaattcctccttttccttcctttcctttcttcatcttcagcatctgcatgccataagctcattttagttctctggactcatgttaacatgtcccacctttcccaaattaaacatcatctctgttattggctccattcttttcctctcatttgagacaattctttatcaaccaacaccctctctgctctgtattgtgaaactctgctcctactacattaacagtctcttggtttctttaaaaagaagacaaaacaattaaagaacagaagcaaaaaatctactcaaatccccaattgttaccctcaaaattaattgtcccacccctagctttctcattgcacaactctttgtcaaaatgttttctaccatcacagccttcaatgatctttctggttcctttatctcctgaagtctgacttctacctccatctttttctggactattcaacacactttgagaaaaaacatacttttgttaaacaggtatgcatccctgaagcataaaatacatagtactgaaagtgcacatgtgtggttcttcccattttttttacagcacttgaaactgacaagtagtagtaccaattacttagtaaaagacctttttcatttcatttctgaaatattgttattttcctttttcatcttccatctctgactacacctccaattttacctctttgctgccttccttcctaagaaagttcttcatgcaatgccatcttgtttttcttcacttgcctctttttctcactttaattttatgaactctgatgacttacctctgtagtgtaactactcaaaatatgtatttctgaagtctcaactccaatctcatattttcaacttatatttatggaggcatctcagactcaacctacctaaaaaatggcttatctgccctaaaatctactttgttctttttttctctactgctaataattatcttcctagttggtcaagctcaaaacctaatcatttttactccttgtccctgtgtcagctgtccacattcaagcagcgtatcatttctgcacatttttcaagcaagtcagtaactgccttttgtttgggactgtcttttcatatagtgaacagccttggaagatagaaatcatttctccttctaaaacaaaaggcaggtgtgcttgcagccttggatagaggtagtgcctctttctaaagcaaagggacatctttactggccattataaaatatccatgtttcctgagctctgcgttcctcttttctaatgcaacccactgagcatgtaggtgtcacctgagcttttctgtgggaattgcggcttgaggaatcagtgcaagaaaatcatgatactcttgctaatgctattaatgtgagtagtaaagttaattgtctctgacccagcactattgtgtctttgcccagcactcaaaagactggcaggcttgcaagtaggacaaaatgttagatttttcacagttcttctgcttataagtacttgttaaaaccaattaaaacacaacttgtagtttgcacctataattttgtagcatttgcttcttatctatgtcactaggatgtgcttagtgacagacccatctatcatctattactcaagtttttggctgtattcctaggcaacagagagaaggggaacaaacaagaggacctgtgcacagtttgagaaaggcaaaacaccgagcttaattgcagacttgaatgtagctagcaaacgaagtaaggcaaaaggttccttttttttttttttagatggagtctcactctgtcgccagtctggagtgcagtggtgctgtctcggctcactgcaacctccgcctcctgggttccagcgattcttctgcctcagcctcccgagtagctgggactacaggcatgtgccaccatgcccagctaacttttgtatttttagtagagacggagtttcaccacgttggccaggatggtctcaatctcttgaccttgtgatccgcccattcggcctcccaaagtgctgagattataggtgtgagcctccgttcccggccaaaagtttccattttttaaatagttgggtttttagtttcgattctttccaaaaaaaggttttcttaaaaaaataaaattagcaataagatgaaatataacaacaatataatcttattaagacaatatatgatatacatttatcaaaatacttatattttcaaaagtgcttaaaataatctagcacatagtagatgctcagtaaatatttgatattatgactgtgcatgggtcattataggctactttatgtatatcatttcatttagtacaacatcactctgaaaaatgttttattgttaccgtttttcagttgaaacatttacgttgctcaagatctcactggtaccatctactattaggtcagtctgccaccaaatctcatgctcttaaatgccctttttctcctgagcttccaacaaatagtgtactgtatataattgttgaagggaggggactgtgagacaaaatatttagagtgaatgtgtagccacaatttcagttcctcaacaaagtgataaaattaggaatcatcctcaatatatattcttccaacacacacacacacatacacacacacacacacacaaataccacaagcccacttgaatgcaccccacctacacattgcaaccatagagacaattgcagcattaaatacagaatattctgtgtgttgtttgtttgttctccctttgctacaaaaatcagaatttctactcaataaacagcaaagggagatacaaatgaaccaaattaaagaaggaaaaaatgttgaaaaaattatatacagaactatgtattgatttattgagagttcagtaatgtaatccagaaataatggatgccttaaaagtaattaaaagaatgcaaataaacatttagtgccaattaaagaaaaagaaatacaacattagacaaaataaaagatattcatttgatgcaatgaggaaataatcttttattcctctttaaattctctgtggaataaggcatggttataaataaataaacatctgccccatggacttaatggatcgttatattttattgcgataatcataatgaaattgttgggagggattagtatctctagtgtaatgctaagaaagataaagcctgtgcccaggcaaaagctttcttggttggtcaaaaggtttgaagacatttcaaactattctaaaacaaacaaacaagcaaacaaacaaaaaacatacaatgtctttgccacatatttaggaaacaaaatgaacaatttatttctgacaacctcatagtctttgttctgtcagaacaataatggaaaggtctaaaccagaaaatgctatgcattgaatttataataaactattttttcctgtaacaaaaaattgataaacttgatatttgcagatttaatgattatgtgtttaaaaaaaatctggtttttgcccttgcaaaaaatcatatatatacacatagatatgtatgtgtgtgtgtgcatagtatatatatatgtatatacatatatatacacacatttatatatataaacatttcctttaacctcctattttattccaataaaaatattggtattagagatagttctgatatttcatcatgaatagttaacattgcatttggaaaggattaatttttttgaaacgtaattttaccttaataagtagcccagcgtaatattttagtaattacacagatttttttttcaagacatttgacaactaatattgcataatagttaagagtgtgggctttggagccagacttcctatctctgttcattcactgataaaatggagacagtagtaacttcctcaaagagttgttttttaagatcaaataatgcatataaaactcttgaaatggtaccaaatacagagtaagcaccaaataaacattaactgttattgttattccatgtccgaataacacagaaaagtaagaattttaatatttcatttgaatgaccttttaaggatacacctagcccattatctttcttgataatcttgtaagatgattccttttttatctccgatctgttgaggcatggatagaggttttcagagaaaacattttctaggtaactgaaagaaagtagcaacaacaaactgtgacaaaacttaacaatgagagaatttacaagatagaataattgcaactccttttgaaatcaaccactatggtcctctggctgggatagctaagcaaagatattccagcctgaaggttgagatctacttgaagagttttctatccagattgtgagggcccctcaaacttcacttagtatctgtttctattagtatggaaacttctggaaccttgtggtatcacattcacttgactactttattcctgctctagctatcttaaagcctttcttaatcttttatcttttagagaagatacttctaggttttaaatccaccgatcttgaagctattgccttcactctctgcttcagagcccatccttttgtatatgagtagtttgttttgcctaaagtactttctcccagtcagattttaagtccagtttctcatctgtttttgagagcaaactcctgggccttggctcactaacatcttgacagcatatttcttctttcctatgggcttttcagcattccctgggtttttctaaaatatgaaagcagactctttatctcttactttgtcaaagcctaccctccccactgatttctcacccagttgctagttttaagacctgcctctggccgggcgcagtggctcacgcctgtaatcccagcactttgggaggccaaggtaggtggatcacgaggtcaggagatcgagaccatcctggctaacacagtgaaaccctgtctctactaaaattacaaaaaaattagccaggcgtggtggtgagcgcctgtagtcccagctactcgggaggctgaagcaggagaatggcgtgatcccgtgaggcagagcttgcagtgagctgagatcgcgccactgcactccagcctgggcgacagagcgagactctgtctcaaaaaaaaaaaaaaaaaaaaaaaaaaaaaaagacctgcctccaaatatcattgtatttgcaaacatgaaatgacttattgattctgagctcagcacaagagcaaacctttctcagcttgacccatcttcacatcgttaatgtcttattcagtcactacccaaggggctgaccttcaagattctaatccatgaaagcttaaaatagtaaacaaatttgaatatagtttaacatacataataaattttatttctagaagaggaggatcagcccttagacatgaaaagtaaaaatagtttattcccagatttccctttgtgcattagtatattcaaccgagtctatccaagtaacaggacaaaaaaagctggcagttgttgctgcgctgtgaagtcttattaggtgagtcagctaattatatggcactaccataaatacagcaggcactgccctgcttgttaggcttgccaaggaaaataaggatttaaagcagcatactacctctttgctatataatgacattttcttcttaaaaatgattttgcaccaattcctgatttatccaccaattattttttaatttatggttgaatgtatttaaacctgaattcagagataaaactagtaaatagctccccaaaataaccccaaatatatttaatatattagctttactctctcctccactgccaaacctttaaaaactgaaataaattgtttttatttcatcttttctctttttctctctctctaaggtgattgccaagactaaagaaacagctagaagggcaaaagacaagaaaatcagtaagatagtaacagattatccaaagtagagcacggctcaggtgcagtggctcatgcctgtaatcccagcactttcggaggctgacgcaggaggatcacttgagtccaggagtttgagaccagcctgggcaacataatgaaacttcatctctataaaaaaaaaaaatttaaatagccgagcatggtggtgtaagcctatagtcccagctatttgggaggctgaggctggaggatcacttgggcccaggagttggagactacagtgagctatgattgtatcactgcattacagcctgggcaatagggcaagaccctgcctctaaacaaaagataaacaaagtagagcataaatggcttctaaatatatgttatttatgtgtaagactgggttctctaaaggtatcatttaattaaaatagatttgcattctcaatctgtaggtatggattatgtataatgtatttaagatatgacttacagcgttcaccaatgtgactattcccaagtgatccagatggctgatgacatagtaatttgtacatttgctgagacctgatctgagtaggtatgtaacataactgagggagagcaagtccatttgccgaaagaaagcctagcatatgacccaggagccacatcttcactcagccttgttgctaggtttggcttagcatatataatagcatagcatgtataatttatgacaaaaaattatactttgcactttttaattagaacattcaaaatgatctcaggaagtggcaccagagatcatcagtggtctactgtacttcgtgtgtatgtgtctgtgagtatgtatgtgtttgtgtgtgttcccacattctaaggcatgtcttttacaggttagtagaaaatgttgatagaaaattatagatttcaacatctaaaacacagtaggtcactacattgttaaaacttggaattttttatcttgttgtaaagtcaggccaaccaaacctaaaatactgctacattgaaatagtgcaaaatattcaaaatactatagttatagatttggtagtaggactgtaccagacctgtcactctatacaagacttatgccttgccctttcacttacctgttcccttttacatctatcttactagatgtaatgctataaattatatttctaatatattataatttatcatgtattataatgtatcaaatattacaaattatgttgcaactccccttacctttcgtctgcatattgcctcagaaagaacagatggatccaacagacttcaaccacaggcccttagtgacaaatagctcttaatgctgggcttgccactttgatgcatttctaaagttatagaatgttaaatgcaccaagtcctttggtcattttatttctaccttagatctaagccataactatactttcccaaaaattaaagtttgaattttaacttaaccatatataattggaaaaggaggttgggttcgttaagtgtaattttatcatgctttattatcctttgggcattggatacagcagaacatgccaatttctatggcttctcatgtgacagaatatacttactaggatgcaattaaatactcctcagagtatgtaaacaataaatgtaatcattacattatttttatattgttctttcttatgcataatagtaagactgaaaatatagtgttatttctgaaatatgcatattgttttgcttttgatgattaaataacattgtccaaagttttaggttttttgaaatcttatattttttaacaaaatatctagcctttccaaaacaagacctcaataattcgtttaagacccagagttgttcctctccacatagatctcttaaaaaggcagaggatttatgacctcaagagaaatcagagtatccaaagtttgctttaattcaatgttttaaaaataaaattccttagattttatcaaaaattgagattagtttgattttgaatcagatgccctttgctccccaccccaaaatggcattatgagcagactaggaattgataatagaaaattgaacatatgaaatatatctttaccttgctttttaacaaggtattcatgtctatcgccttcatttttaagtgcatcaataaaatacatggtaattctcttagtgaaatatactatctacactatgtacacactcccctgtctgaggtagagaagtagagaatattcacatttttgaaacgtctatgctatttttatttaaatacgagttctgggcttgatttcattttggaacacgggtgtgtgcttaagttgaacctttttttcctcttaagtcaaagttcttttttagtttcttcttttatctttttggctactatctctctccttcatcctcctggtgtgagttgttgagtgaaggtattaattccattatttgaggctaagtgacattgttcaataatgcagcaaaacaatggttctacccaaaatatcttcaagtgtaaaagcagtgggcaaaagagaaagtgcgcttctgctgctttgaatgtttaaggctgtgaaagttgatcacacaaattgggtcattcttgttatacccaactaaaacaatcaagaagcctgggaggaaaagcattcaagaaacatcacattgctccaaaagtgtaattttctacaagtccgcatgctgaggctgcctgttgtaacctgggaccaattttttctgtaactgctgaaaaaacttgctgcagctctaggactaattttgcccaccactgtcactcaccaattgaagcttactagctccccagaacctttctagtgccaatgaactttctcaaagagcagcgtgtatcatttctctttttcagaacacctccaacctcctctttgttctttgggtataccaaagaccaaccagccttgaatttcaatttttcttcccacataaaagttttaatttagaaatgtatctctacatttctaactttgacaaagcatagataccagataattgatgaaaccttgctattttaacgatcaccatggattacttcccagtgtcttcagataaccctcaacatttgccaacatttgatggacttcaaaatgagcatatcttttttaaaaaaaattattcacactgacagcaagtacattggtatactctatattaaattataccacagggtttacaaacaattggtgatgtcgggcagtggtttccaaggaacatacttaacaagacactcacaaggccctacaaacctgcatttttaacaagggccctagatgattctagaagagtgtggtttggaaagcaatttttgcctttattatgtgtcattttaaatatatttaaaattaaagttataagtcatagaattgaataaagataatttccttacagaaagtattactaggtatctaaatacaatatggttcaaaacaggaaatttaaaaagattatgtaaattctgtagttgtattcctaaagacagtagctgaaattttttcctacttctccttgtatcacttcccttttccttcactttcacttccctggaattgtacttcccaataagctattagcagtgaaggaagcttcgtctcatgatctgttttatagagcacttcagctgggacgagtacgaaatgataatcagttatatcagctattcaaccctacaggtttatttaaaaagaacttgaataagctttttagggagaaagaggtcagtctcagccatttctgtttcctaatatagcttttaagtctttccttattagcaatgagggtcattccattgtaattttttgataaccatttttctttctgtgtgtcaaatgcagatataagatactgaactgagtctatttcactgttcgtaaaacaatcccatttgaaaaaaaaaagtctacagctattccagggatagggcctagtagagagagaataaaaggtattttcttactatgtctctatatcctaccctgtaggttctcttattaagcatacaggcatataccaaaatccagacgtttttctcatttattttattgccctaacatattctgggttaatataatatcataatgaaaatttgagaaaaaattgattttttcaaaagtgtttaacatttgttatattggtagttttttttcttgtttgtggtaaaaataaatagaaggtgcacttcacaccttcaagtatgattatattttgaaaacaagtcatgaatactcataaaatgcaaattttaatgttctttttttgttacagccaaactatattaggcacagttgtaaattggagttgaaatttaatatttctttatagataacaatgtttttagaaataggtttatgaaacagtaaatatacaggtatagggataaaattgtgtctgatggtcatatgaagtgtttgttgttatattctccttggaatagctgccaaatattttagtatgcttaaaatctacgaatgtgatagagtcaacaaatttagatcacatattcagaaaaacatagttagagaactaactattgaaatgagcatacagcagtcttcctttatctacagggatacattctgaaacccccactaggacacctgaaattgcggatagtagcaaaccctacatatactgttttttccaatgcttatgtacctatgaaaaagtttaatttataaactaggcacagtaagagattaacaacaataactaataacaaaagagaacaattataataatatactgtaataaaagttatgtgggtatggtctcgctttctctttccctctctctctgtctctaaatatcttagtattttggggttgcaattggtggtgggcaactgaaaccatggaaaacaaaaccacggataaaaggagactactgtatatactttttaaaactgatgaaatattaaactcatgtttcttctatatcccacccatttcccccacccaaacctagatagatatcttatttgatctgtaaacatttaattaatttgtaaaagttaagaactttttgaagtaaaactgcaatatatcatcacacctaaagaaataaacaataattcttaaatatcaagtcagtgttcaaatttccccaactacctcatatgtgttttccatttgcttatgtagggttcccaatgagaatgaaataaagttcttaggttgcaattggctaatgctctctcacttctactttaagcggcaggttcccactaacttctttttagttgcaatttacttattgaaattagacgtattctttgtcttgtgtagtttctcacagtgcaaaatttgctgattgtagccactgttgtaagcaatgaacatgtttttcaccaccttatatttgctgtaagttgtcagtgatagttaaatgttaatcaaattcaaattcggatcacgtagggcttttctttttttgttttctttttctatttatatatttatttatttattttgagacggagtctcactccgtcaccaggctggagtgcaatggtgtgatctgggctcactgcaatctccacctcccgggttcaagtgattcccctggctcagtctcccgagtagctgggactataggagaaccaccacgcccggctaactttttgtattttagtagagatggggtttcaccatgttggccaggatgctatagatctcctgacctcaccgatcatgtaggacttcaattgtcgaacaaacgaacctttaatagcagttacaccattaggatgacctgatccaacatcgaggtcgtaaaccctattgtcgatttggactctagaataggattgtgctgtcatccctagtgtagcttgttcccacttgatgaagttattggatcagtgaacaatagcccacttaaactagtacagtcttagtttaagatggtgatgtgtatgtacttccatcagagggcacataatacagtaaatcctcacttaacttcatcaatagtttctggaaactgtgacttgaagcaaaacaacatataacaaaaccagttttaccattggctaattgatataagcaagaattaagtcctatggcaaatttctggacacaaaaacaccatcaaactcctaaataaagataaatcacttctgacattaaacattgaaattaatgtgagctatatatacgtttaagaaagattaatacaaacaagtcaaataacttacctaattatttcggtggaggccgcaggtggttggagcctatcctggcagctcagggagcaatatgggaacccaccccggacaggacgctgttccattactgcagggtgctcttgtacacacccactcacccaggctggaaccatgcagacacacacactcacctaacctacacatctgtgtacatccttcaaagttcagccaaataacatataaacaaatccagtaatatccatcagtcttagttccgtcataacaactcctttttgatcatcaaacaacaaacagggtaggtctgccatatttacttgtctggtccatatcaaaattttctaacaaattatattagaaaatcaaatctctgtcagtttcaaaatcatggaaaaaaatttgccttatttcccttatacttggatatcctaacagtaatctaaatattaatgagaaagttaatgatgtcgtttccttctccctgttgtaaagaaggttttgctgtcccgtttgatcactaagactaattgacactcagaaaaagcataggaaacttctcagcatcacaaaagctctgtcatctagagaagctaggacttgagctcaagtcctgtgacatggaaggccttgtgcctagccatcctgcagcagaggcgtatctaccaagaagtgaaacactacgaaaacagtatgtttactccacattttaaagtgaggtagtttggggtggttcatattttatttaatttatatattatttggattttttttagtttataaaaagggcattggcaagggcagaatgatctgtaagcttctctgcccacctaccataagcatgatctttagtgtgaccttttcttactgttagccattttcttatacttctgcgtccctgtcagtcacttccatgtgaagacatggggaagcttttttacatcagacatgttgttgaaaatcagccgcgttggctgagggattatttgatctctttctccaagtccctttaggctcacattgcctctctgttctttgaattttcacttacctttatcttcttataattactttgctgaaataaatgcaaagcaacaaaaggtatttagtgaagaataccaacaaagccatgaccatttcaggctgagttttgtagtattctttgtctaggaagagatacctagaaaaattttctgaccatgtatttgattattttccttcaatatgtatagtctcagtcttcaaatttcagaaaagaatttgtttcttcattgtcatttaaaattaatgtgttaaatatgtatgcttttacattataagtggttataaaagttaaacacttagaaaaaaagtcaaaataacatacatactatccaacaaaataactttcatattttattgtgttttcttccaaactttttacctttgcgtctgaattctgtgtaggttgtatctataatatagacaacactttatagcctgctaaatattataccataaataggtagttgttacataattctcaggtaatagtaatacaggtctttatcataatctactgagtagttgaatgataattttttttaagacaaggtctccctctgtcacccaggctagaatgcagtggcatgcacatggctcactgtagcctctacctcccaggctcaagtgatcctcctgcctcagcctcccaagtggctgggactgtaggcatgtgccaccatgcccagctatttatttgtatttttagtagagatggggtttcattgtaacagcccaggctggtcttgaactcctggactcaaatgatccacctgcctcagcctcccaaagtgctgaaatcacaggagtgaaccactgcacccagcaataattttttaactcttcattattcattgaacatttagttaacaattctaaaaattttgtttcctgctgtcattgatcttgtgaaaaatatctttggactatagctgtggattatttcctaaatagtaaattacttgagcaaaaagtttacatactttgagggttgataacccatgttgccgcaatgtttccccggaggcattgtggagtttagaatgccagtagtaatattaaggtgtgccattttcaagatccgtggccaacatccctatatgtaagatttttccaaaacatggttctgatttttaaaagtgaaaaatgctacttcatcatgttctttttgtgcttcttactttaaatattagaatgaagaaggagccccacaggaaggaattctggaagatatgcctgtggatcctgacaatgaggcttatgaaatgccttctgaggtaggagtccaagctgaatctttctaacaagacagtaccaaaaacctgtcattgtcacatttctctttcattagtgcttagtgagaatcatttgctctctacatgctcattacgtggacaacttgcaagttaagaatagtttttacatttttaaagggtccttaaaaaaaaagaggaggaggaagatgaagaagaggaagaaaggatgtaaaagaaatcatatgtagtccacatagcttaatatacttactacttgaccctttacaggaaaagtttactaacccctgcattagagaatatatttttagaaactttacattctaaaataaatttctaaatggaaagttagggaaatcaatggaatgccaaaggaaggttattattttttgccatacatgtccaatgggatgacgcatagtaaaataaaagttacccacacaagttatagaataaaaagataaatgcatgatttgcgacaattgatatattccagtataatgttttaaacaacacaatatgattgttaattttattttgattgaaaatgaaagtatctttaatagaaaatgtatcaaaagggaaattagaaaatactgttagatgaataaaactggcccaagaagaaacagtaaatctgaatagatttgtaacacagcgaatagattaaattagtaataaaaaaaaaaacctacctgcaaagaaaatcccaggccgagatggcatcactggtaaattctaccaaacatttaaagaggaattaatactaattagttaacaccaattaatatctcttacaaaacagaagaggagacatttcccaactaattttgtgagaccaatattaccctgataatcaaaaccaaatgaagatatcacaagaaaagaaactatataatggctccattaaaaattgagttcaagtatgttgtagtttggttatgtattattcctcacggcattattaaaaggcatgtcgaggatgggcacagcagttcacacctgtaatcccgcactttgtgagccaaagtggccaggttacttgaggccaggagttggagaccagtctggccaacatggtgaaaccccatctctactaaaaatacaaaaattagccgggcatggtggtacacgcctatggttccagctacttgggaggctgaggcatgagagtcacttgaacccaggaggcagaggttgcagtgagctgagatggcacccctgcactccaatcttggtaacagagcaagactgtctcacacagacacacgaaaggcatattgataataattcaacttatagaaattgagattaaattgtttgtttgcctaataagaatttccaatattttggggtcttttatgcaagacacagtactaaacacaatggaaaactatagagtaattgacattaccaggacataaggagtttacagtctggtaggtttgatgaaaaaaaatagaaattcattcattcatttcttcattatgattcctttaacaaacataattgattgtcttcgatgtaccaggcatcacaggagcaaaaatatataagacatactaaaaagtaaaacattttaaagatctgtttcaatcaatcaggagaagttttattgaggaggtaatgttgatctgggtgggaaaaggtaagagatatagtaggtcaaaacaaacagaggacattctggcacaagggaatatcagaagcaaaggcatgtatgtctgagcatgcaaatggatatgtctgagaacagtgaataattatgactcaagcttaggaacaaggaaaatggtgatagattgaatttgcagctatgggtcaaagacaagttatagagtattaggataatcttgtcatttcagcttgtattctattcagaaaacaacttgagttattgaagttatgcttatttgtttgtttttaagcagaatcctgatattattagagttgctctttaggaggaataatctgatccctttaattaaatccattaatatttgtgttgtggatgctatccagatactgtatggagagcttgaggtttgaaatacaagtaataattgaagccatagatgaagacgaaattttcaactgggagagtgaaagtagggaaaatgtatcttgccttcaaacatcttaatttccttctgagaattagagcatcttagtctggaaaaggctttatagacagcttgattttgttctcacattttacaggtgaagaaactgagaaccagacagtccaacttatttgtcctaccaaactaggtatatgatcattaaatggtgcatccggatcagaacctagatattttaactctgactactactgtaattcacttttatatcagacaagaaagacacaactattaaaaataagataatatttgctgcagaatatttgcaaaaacattgattgtaaattttagtgtaagtggggagccatttcctatctcattggctgtcagtgctgatgcgtaattgaaacttatactaacagtgtgtgctgtctttttgatttttctaatattaggaagggtatcaagactacgaacctgaagcctaagaaatatctttgctcccagtttcttgagatctgctgacagatgttccatcctgtacaagtgctcagttccaatgtgcccagtcatgacatttctcaaagtttttacagtgtatctcgaagtcttccatcagcagtgattgaagtatctgtacctgcccccactcagcatttcggtgcttccctttcactgaagtgaatacatggtagcagggtctttgtgtgctgtggattttgtggcttcaatctacgatgttaaaacaaattaaaaacacctaagtgactaccacttatttctaaatcctcactatttttttgttgctgttgttcagaagttgttagtgatttgctatcatatattataagatttttaggtgtcttttaatgatactgtctaagaataatgacgtattgtgaaatttgttaatatatataatacttaaaaatatgtgagcatgaaactatgcacctataaatactaaatatgaaattttaccattttgcgatgtgttttattcacttgtgtttgtatataaatggtgagaattaaaataaaacgttatctcattgcaaaaatattttatttttatcccatctcactttaataataaaaatcatgcttataagcaacatgaattaagaactgacacaaaggacaaaaatataaagttattaatagccatttgaagaaggaggaattttagaagaggtagagaaaatggaacattaaccctacactcggaattccctgaagcaacactgccagaagtgtgttttggtatgcactggttccttaagtggctgtgattaattattgaaagtggggtgttgaagaccccaactactattgtagagtggtctatttctcccttcaatcctgtcaatgtttgctttacgtattttggggaactgttgtttgatgtgtatgtgtttataattgttatacatttttaattgagccttttattaacatatattgttatttttgtctcgaaataattttttagttaaaatctattttgtctgatattggtgtgaatgctgtacctttctgacaataaataatattcgaccatgaataaaaaaaaaaaaaaagtgggttcccgggaactaagcagtgtagaagatgattttgactacaccctccttagagagccataagacacattagcacatattagcacattcaaggctctgagagaatgtggttaactttgtttaactcagcattcctcactttttttttttaatcatcagaaattctctctctctctctctctttttctctcgctctctttttttttttttttttacaggaaatgcctttaaacatcgttggaactaccagagtcaccttaaaggagatcaattctctagactgataaaaatttcatggcctcctttaaatgttgccaaatatatgaattctaggatttttccttaggaaaggtttttctctttcagggaagatctattaactccccatgggtgctgaaaataaacttgatggtgaaaaactctgtataaattaatttaaaaattatttggtttctctttttaattattctggggcatagtcatttctaaaagtcactagtagaaagtataatttcaagacagaatattctagacatgctagcagtttatatgtattcatgagtaatgtgatatatattgggcgctggtgaggaaggaaggaggaatgagtgactataaggatggttaccatagaaacttccttttttacctaattgaagagagactactacagagtgctaagctgcatgtgtcatcttacactagagagaaatggtaagtttcttgttttatttaagttatgtttaagcaaggaaaggatttgttattgaacagtatatttcaggaaggttagaaagtggcggttaggatatattttaaatctacctaaagcagcatattttaaaaatttaaaagtattggtattaaattaagaaatagaggacagaactagactgatagcagtgacctagaacaatttgagattaggaaagttgtgaccatgaatttaaggatttatgtggatacaaattctcctttaaagtgtttcttcccttaatatttatctgacggtaatttttgagcagtgaattactttatatatcttaatagtttatttgggaccaaacacttaaacaaaaagttctttaagtcatataagccttttcaggaagcttgtctcatattcactcccgagacattcacctgccaagtggcctgaggatcaatccagtcctaggtttattttgcagacttacattctcccaagttattcagcctcatatgactccacggtcggctttaccaaaacagttcagagtgcactttggcacacaattgggaacagaacaatctaatgtgtggtttggtattccaagtggggtctttttcagaatctctgcactagtgtgagatgcaaacatgtttcctcatctttctggcttatccagtatgtagctatttgtgacataataaatatatacatatatgaaaata

SEQ ID NO: 5304 - DNA, 124217 bp, Homo sapiens
gaccaaaaaaagcaaccctgcacatacaactttaacttcaatattttaatgacgaaatttaaggataatttaaatagaaatggactcagaaaagaatcagtaagacttagtgaaggatcattgtctattatagagaagttgatttaagattaacttattagtaatatttaacatatataaagaattattagactgggtatatagacaagcgttttattcttggaagacaaaaagaagaaaaattgaattcaaccgatgtatacgaaaataaaaagtaacagtaaattaaaaatagataattaaataaatatatgatacagtataacgttttatagccaagatgatgttacaaatccatatttattgacatggatatgtttttatactaaagtgtttatcaaatagccattaagagataacttctttgaataatttgctttctaaatttcttaactacataaatttccagctttatatggaacaccaagttttcaaaccattagtgatgtgctttttatatggtgttaaaaagtttctttctttcttttttctttttcccccaagatggagtcttgctctgtcgcccaggctggagcgcagtagtgcgatctcggctcagtgcaacaaccacctcctgggtacaagcaattctcctgcctcagccccccaagtagctgggattacaggcacctgccaccacgtccagctgatttttgtatttttagtagagacggggttttaccatcttggccaggctggtctctaactcctgacctcaggtaatctgcccacctcagcctcccaaagtgctgagattacaggcgtgagccaccatgcccgacctaaaaagtttcttaaacgtcactttatactctcaaattatctagaaaggaaaacgtattagattcctggatattttggatattgtaaggaacatacttatttgctgtatatactctgtttgtaacagtattgtaacttcagttcaaaacaatacacaaaacattacaagttcccgtgatattttaaaaattcatttattttcttcctttctgaatacaaatgctgttcagtctgttgattcttcactaatctgaaatattagggactgatttctgaattggatattcattctgaagcctttcagagccactggcacaaagggtctgtcaaacttggaacaccatttgttgtatcattttatttttttctcttggcaaatccacataattcatacaggactatgccagtgtcttttgaaagaaacaaggtttaagaaagtaaaaatgttaataaagatagtgaatgttaattctgtcattgttactgtatttcttcaagctgtggctgcaaactgctttgagtgatgttattgtaactcgcacattagggagagaaagagatgtttggtagatttttaattaatgatccctatcaatgctccttgagctttcccactctatctctccacaacttccatccctggttggaaattttttgcttacccatactaagtgagagttattgatgggaaggcatcagatatctcacgtgtgttgctggtgggatgggagactgtggaggatgggaacaggtggaaatctactgcaatggaaaaaaaaaaaaagcatgtcctaggacacccaaaacatggaggctagataataacaatagctacttgtactgagagcttccactctgcctggctctttgctatgagccacattattcattccttacaacaatcaaacaagacaagtaaaatatcatgcccattttttaatgagaaaactagagattagagaggttatagatacttgctctgagtcactagtaatgagtagtagagctttaataagtccctgaatttaggttgtatctagtacatttactcttagaagtctatcatgctcaccagagttgcagagttgcgtgtatttcttgggctcattaatgtgtttttttctttctaaaactaaagtcatttgaacttgttagattttgaaatatttaaatatcttttctatctggctttaacatctttaatcttggaatcttgcatgccttcatattcttaggaccacgaaaccacaggaatatttaaaatgatatctagtggaaacaatatgaagttggccatggggtcaaattagagaatctgaatactatgcttctccttgattgctcttcccatttcttcagagtaaccctattcccccatctcatgctcaccccctttccaaaatcatacataatgatctcccaacagtatgcattaggctttctctactctacccactatgaaattacacaagaagcctatcgcaatctcactacctcgtctctctcacaggtttacagaaggtgagaggaaggtgcagatagagaataagaagcaggtggctccagcatcaacattacatcaccccttgtgttcacaacaaatacggaatattatccaaagataataaacgttgtattttcttaacttaaacacattaaatcagtcctctctttaatcaattgttaatgggcagcatctttattttcatgccattctactctgctgtctttgctatagcacaagtttaccacataccatacctaaaaattcagttgttctatgggggtaaacaaagtctaggttaagcatatatttcatagaatgttaatctatagcaaaattaatgaattaaatccagataaaagaatcctattatggtctggtaaaatatttatatttcacttagcaaagagaaaacaaaacatgaatattgtagttatgaacagaatatgcatgttagtaatgcttccaaatatgttattacttcataacttcatatttcttatgaggtacaagccattcaattagtttaacgttatattcagagaggctaaagatttactgaagaccatgctgtccatcaataatgaaaagaaaaattaaaaaaactttattttaacttctagttcccttctttgtacttgagcagctttccctccttaagaatacagacctagaacatatgcaatatcactatcaatattatgtgtaattaaaagttcattggatgtttactgtgttcaaggcattttaaggagtgacaagagttaaacatatagttgtaattcaaaatgacaacgaaattagtttacagttttctttttttgtaggtagtaagaaatcatctccccctattgaggaataccaatatagaaaaggcaaaactttaaatatgaatgaactgtttcataataacataagttcttcttgatttccattgtcacatccaaatttgaaggctatttctaacacagctgggttctacctttttccttctcactctttaccacacccaatctgtgaggcttcagacacaaactgctaattcaggagacaattgtgccttctgtaacagtttctgctaaattgtctcagctctgccacttaaaatagctaggtgatctcagcatatcaccaaaactcttggagctcagtttctctgtctataaaagttacataaaatgtaattgatctgcttgttatgactaaataacatagtacattagtcctttgccaaaggactaacaaattaccaaataaaagtttggaatcatgttaaacgtttataagaagtgcaactgtccagaaataattctctcacattggtctgttgtaatgagacctaaaatatctcattttatttacctctttgacttaaagcactaggtctcaaggaggtcatggttatactataaatatgtcatgtgaaataatatattaaataattgttgtaatactctattgagatactagttgtaaagaggcacaatggaaaacttatactattaacagtagtaaaaagaaacaacaaaaagcaataaaaaacaaaacacccattcatgcaacgacatgaacgaacctcacaaatattatactgagtaaaagaagtcagacaaatataaaacaaagtttatactacgtgattagatctttatgacattctagaatatgcacatgaaggtacaaggtaactgtctggaatgatgaaaatgtcctgtgtcttcaaaatagtgtgggttacactaatgcatggctttttcaaaactgatttaaagggacacaacatctgagcatttccctaggtgtaaattacactgcaattttaaagaatcatctaatgatattgtggttatttttaaacagtccttaaattttgtggatgcatactgaatgtttacagctgaaaagatatatataaagcttgaatttggtaaaaaaaaaaaaaaaagagggaggattggtagtgataaagtgagtggacttatggatgagacatgatcagccatgcattgaaaaaatgtaaaagttggatgatcttcacatgagagtcctttattctgtctacttttgcatatgtttgaatatttcccataacaaaaagttgaaaatagagtgatcacatgagttaatctcctaatttacaaaaaagaaaactggaaacagaaggagaacaaaacttgttcaaggtctcaaagccagacagcaaactagctcccaagtccaaccttcttgctctggtcctaagcaaacaaaaaatattaatatgagctactgcattaaggaaagtctgcttttccaaagggcagaccaatagttcaaggaagagtttaaataataaatatttgtgatcttactttcatgcttttctattttccactgaacacatatgcattatcttctatatgtcttttatgtataatcatttgcttcctgttccttgtggttttaaagttgttttgtatgtttaaatttgattttactcaaatttcagaacccaaattagcgcaagaatcagacaaagcataactttctataaatataaaaacaattaaaaaaaaaacatacagcaaaaacgagttgttgtttcccccctcctcttccagtgcttaactaatcttccgaatccaggcacagaaagcaaaggctttctgctagtgggaggagcttgcttctccattctggtgtgatccaggaacagctgtcttccagctctgaaagaggtgaaaatgtgttaagcgatgcaaaaattgtcttgaagttcgcgtgtgtatgtctgtgtgcatgtgcgtgtggtgggtggggggagagaaaagggggtgtcaattctgagggcaacgagaatcagaagtcagaaaggtgagtggtgtgtagcatctccctttcagaaggggctgaagaagaaattggatatgatggtccggtaggctaaatcacgctggatttgtctcccagataaagggaggtctgcaaagtaagtcccatttctagagcgaaaagccttaggaccgcttgttttagacggctggggaatatttattccttgttccactgatgggaaaatcagcgtctggcaggcgctgattggtggaaaggaaaatggtgatagtggcgtggaaagaggatttgctgagccttctcctgcctcctcaacctgtgactcttccttagtagtctccctttcaccctcaggaccctttccggctcttcctagattaagagcaaacgaaaaccttgaagatatttgaactaaagcgacccctaacgttgtaacctgtgaccgtgattaaatttcagcgatgcgagggcaaagcgctctcggcggtgcggtgtgagccacctcccggcgctgcctgtctcctccagcagctccccaagggataggctctgcccttggtggtcgaccctcaggccctcggctctcccagggcgactctgacgaggggtagggggtggtccccgggaggacccagaggaaaggcggggacaagaagggaggggaaggggaaagaggaagaggcatcatccctagcccaaccgctcccgatctccacaagagtgctcgtgaccctaaacttaacgtgaggcgcaaaagcgcccccactttcccgccttgcgcggccaggcaggcggctggagttgatggctcaccccgcgccccctgccccatccccatccgagatagggacgaggagcacgctgcagggaaagcagcgagcgccgggagaggggcgggcagaagcgctgacaaatcagcggtgggggcggagagccgaggagaaggagaaggaggaggactaggaggaggaggacggcgacgaccagaaggggcccaagagagggggcgagcgaccgagcgccgcgacgcggaagtgaggtgcgtgcgggctgcagcgcagaccccggcccggcccctccgagagcgtcctgggcgctccctcacgccttgccttcaagccttctgcctttccaccctcgtgagcggagaactgggagtggccattcgacgacaggttagcgggtttgcctcccactcccccagcctcgcgtcgccggctcacagcggcctcctctggggacagtcccccccgggtgccgcctccgcccttcctgtgcgctccttttccttcttctttcctattaaatattatttgggaattgtttaaattttttttttaaaaaaagagagaggcggggaggagtcggagttgtggagaagcagagggactcaggtaagtacctgtggatctaaacgggcgtctttggaaatcctggagaacgccggatgggagacgaatggtcgtgggcaccgggagggggtggtgctgccatgaggacccgctgggccaggtctctgggaggtgagtacttgtccctttggggagcctaaggaaagagacttgacctggctttcgtcctgcttctgatattcccttctccacaagggctgagagattaggctgcttctccgggatccgcttttccccgggaaacgcgaggatgctccatggagcgtgagcatccaacttttctctcacataaaatctgtctgcccgctctcttggtttttctctgtaaagtaagcaagctgcgtttggcaaataatgaaatggaagtgcaaggaggccaagtcaacaggtggtaacgggttaacaagtgctggcgcggggtccgctagggtggaggctgagaacgccccctcgggtggctggcgcggggttggagacggcccgcgagtgtgagcggcgcctgctcagggtagatagctgagggcgggggtggatgttggatggattagaaccatcacacttgggcctgctgtttgcctgagtttgaaccacaccccgagtgagcagttagttctgttgcctacgcctttccaccatcaacctgttagccttcttctgggattcatgttaaggatacccctgaccctaagcctccagcttccatgcttctaactcatactgttaccctttagaccccgggaatttaaaaaaggggttaatcttttcatgcaactccacttctgaaatgcagtaataacaactcagaggattcatcctaatccgtggttaggtggctagacttttactagccaagatggatgggagatgctaaatttttaatgccagagctaaaaatgtctgctttgtccaatggttaaatgagtgtacacttaaaagagtctcacactttggagggtttctcatgatttttcagtgttttttgtttatttttccccgaaagttctcattcaaagtgtattttatgttttccagtgtggtgtaaaggaattcattagccatggatgtattcatgaaaggactttcaaaggccaaggagggagttgtggctgctgctgagaaaaccaaacagggtgtggcagaagcagcaggaaagacaaaagagggtgttctctatgtaggtaggtaaaccccaaatgtcagtttggtgcttgttcatgagtgatgggttaggataatcaatactctaaatgctggtagttctctctcttgattcatttttgcatcattgcttgtcaaaaaggtggactgagtcagaggtatgtgtaggtaggtgaatgtgaacgtgtgtatttgagctaatagtaaaaaatgcgactgtttgcttttccagatttttaattttgccctaatatttatgactttttaaaaatgaatgtttctgtacctacataattctatttcagagaacagttttaaaaactcatagtcttttaaaaaataatcaagaatattcttaagaatcaaaatcattgatggatctgtgatttcttttaccatcatgaaaaatgtttgtcaattttaatccattctgatttttaaaatatgactttgatatgcccctgtgatgtgtataaagagacctatttgtggccctaaaatggaaagaacagattagtctttgatagagttacttcatgtgatcatttggtctctgtgaacactgaggacagagaaaagtgcttgagggctgctactaatctctcagaaacatttgtatagttcatccatcaaatgacacacatactaaaagaataaagaaattgatgcttattacctacttgttcctaaagttccaccttggggtatacacccaaactctgactctcttttctgtaacttgaactgtattcaattgagtgttattttacaaaccactttgaattccttggaaaagaatagacacacactctcatccacaggcatagacacacacactcaacacagacacattgcccattcttcctctcttctttctcctctgagctttttcacattctctggtggcaactatagcagtaagagtcacaggatgaacagtcaggtggaggatgaccacattgagttgcctagctgaaacatgtgctccgtctatgtctgcaaagtgaaagaaagctacactatctcttcaacatagatcagtgggggaaattttatacttgggatgatttatatgaatgcatctcatcaaagttcacaacacatttttttttcagttttttattttcagtttttagagtcagggccttgctctgtcgcccaggctggactgcagtgatgctatcatagctcactgcatccttgaattcctgggctcaagtcatgcccccacctcagcctcctgagtagccaggattataggcatgtgccactgcctcattatttagacttttcttatgttgacttaatcttcccacaaatcttcaattaaattactttttttctaccttaaaacatattttcagaaagtcattgaaatagggtgttacaagaggaaaaaattgatgagttaattttaaatattttatgaagtgtgaattatacctttttagatggaatttggaatactgaatcagtgacatgcagtttatcaatatctttccgtttgtcctcagatttccaagttctgcaagcacaagtttctttgacttagttaccttttaactgttcattgaaatcattttcaatgtctctcatggcatttaacacatagcacattctataaattttttattggttacattctgagttctaattgagagttgaacttacacacagaatttaagataaaaaatgaccatgtgaagacacaatagtatagtccagggattggcaaaattttgggtaaggaatcagatagcacgtattttaagccatgagatctatgtcttggccaggtgccgtggctcaggtctttaatcccagcactttgagagcccgaggctggtggatcacttgagcccaggggtttgagaccagcctgggccacatggtgaaaccctgtgtctacaaacaacgcaaaaattagccgggtatggtagcatgcatgtgtattgccagctacccaggaggctgaggtaggaggatggcttgagccatacagctcactgcagaggttgcagtgagctgagatcgagccactgcactccagcctgggtggcagagtgataccctgtctaaaaaaaagaaaaaaaaatctatgtctcaattctgctgttgaagtgtgaaggtagtcataaacaataactagtgtggctgtgtcccaataaaacttcatttatcaaaacaggtggtgggctggaattgtcttgtatgttgtagcttgctgactactgatagagtggaaagaacatgcactaatcacacaaaccaaagttttagttgagactacatcacttatcacctttagggtcttggggaagcgtacttaacatctctgagcatcacttccctgattagtaaaaaatatgatttagaaaactgcaactaccttgcagtttttgtgggaatgtcataataagacaggacatatgaataattgagcacacttttatatataggaaccatggttattattatcaaataaactctccaacggaataattactttgccaacacgttttccatttattcttttatccttcattacataactagtttgaaagattggaggcgaccaaagaccattttataatttcacttatggctgaagatgtttggtagaagcctcataagaaaagtaatctcattcctttataagaatatacttttaacaactactttttaactcattgaagaactaccttaatgatcagtgttatttttatgggttttgttccctccatttttgttatctgcgtacaccaattttcaatcaacatacttcaatttaatagacaaaaatttcttcaaatgactcagaaattaattagatctaaatccaaaagcagaaagatttaattatctttatataatgctcagtaatataaatgcaataaatacaagaaaatgatgatctttgagtgtcttccaatgccactctgctcaataagcagcagtggccatcagtgaaattgatagcaaattctcaagtcaaaatgtgcttcacctcactaagctgacaaagtcaacataacatgcacaacagggataactgagttctcaaaactctcaggtattacttctgaccttcttctccactctgtgctcttttgaggttgggaagacaagatagggtgtgtgtgggacacctccgctcagggaagccatcagctctggtgtccctacagcatttataccttgctagtcacataaccacttggcacctattttgtaggtgtacgttatcaattacagattactcataaattaaaggctaaccatcaattacagattattagtaaataattatgacctcaaagaacaactgattggtttgatacatggtaaccttatgaggactctcatttatctcgtttttttaagttatatacctatctctttggggttgcactacaaaaatataaaatatgttgcataagatatttataaaaaataattaattataagttctaatggtgtggtttagtggcattcttttttttttctttttttctgagatagggtctcaatctgtcatttcactccaggctgaagtgcagtggtgtgatctcggctcactgcaacctccgcctcctgggttcaagttattctcctgactcagcctcctgagtagctgaaattacaggcatgcaccaccatgcccggctaatttttgtatttttagtagagatggggtttcaccatgttagccaggatggtctcgaactcctgatctcatcatccccgacctcggcctcccaaaatgctgggattacaggcgtgagccattgcacccggcctagtggcattcttttttaaaaataaatttaattgtgtatatttagggtatgcaacatgatgctatcagatacattagacactaaaaaattactatattgaagcaaattaatatattcataatctctcatagttaccttttttgttgtttttgtggcaagggcagctaaaatccacttatttatcatgaatctcaaatatagtacaattttatcacctacagtcctcatacattagatctgtacactttttcatcttacacatctgctacttgcttggatcctatggcctatatgtccctattttctacctacttttccacccctattaaccctgttttttacgtagtctctgtatatttgaattttgtttcaagcttccacatatatgtgagataatgtaatatttttctttctgtgtttggcttatttcacttagcataattttgtctgggttcatccatgttgtaaatggtaggatcttgtttttttagggctgactgatattccattgtatctatgtaccacaatctttttatctacctatctatcagtagacactttagttgtggctattatgtttttctttttttcttttttggagacagggtcttgctgtcacccaggctgcaatggagtggtgttatcatagctcactgtaacctcaaacttctgggctcaagagatcctcctgccttggcctcccaagtagctgagactacaggcatacattaccatgcctggctaatttttaatattttttgtagatatagcatctcactctgttgcccagactggtctcaaactcctaattcaaatttagaatagagtatgacaattctgtaaaatataaaaaacatgtccactccgtataggaagttatacaatgagaagaagacaaacactatttacattactcttgataagttttttacaaagaaataaaacactttaatttctaatgttttaaattctggtttgctaaataaataaatattagttttagtgtttttaaaattccttatatagttataagtgatcttcctgcctcagcctcccaaagcactgggattccaagcaagagccactgtgttggggcccttggaaacagatatgctgaaatcttttcttgtggatctacacccagaagagggattgctgggtcatatgctactctatttttaatttttcttttatttttagtgaatatgtaataattgtatataattgtgggatccagaattatatttccatacatgtatacaatgtgtgataatcaaattagggtaattaacatatccattacctgaaacatttatcattcctttgtggtgggaacagtaaaaattaaaaattctctcttctagatttttgaacatatgcaataaactattgttaagtatatcaccctacagtactacagaatgctagaactcattcctcatatttggctccaatttcatattctttaaccaacctctccatatcctcccctccctcttaccgttgtcagcctctaataatcataattctactctctacttctatctcattgtctttgatttagaatatgtttcataatttaaccaaaggtcaaattcttaggtactgctaaggcaaagaacaaagatcgcattccagctgttagacatttcttactactagtcatttttaagacaacatggggtgcaggtggtgaggatgagagatagagattgaaacatattctcttaaatatcagctgttctcactctgcatagttccagcacaaacaaattccaggtactatggttagttaaataacaccagccactaacaacacaattcaaatttctgttaccacagtataccgaaagtcattgcataaagtacaaactttgctgctaactcttcagccttcaaatcattacataaataacagaaacccattataatcagtgacaaaaccacagcacttctttcaaagctttttggagattggttgcttcacatctgttatgcagttcatacagacagcaatgcccggacttgtgtggccacattgtctcccagtggtgagcccatgtgatgtttcacgaaaatgcgcaatcaaaagaggaaactggccagcaaagatgaaagagtagcaaacaaaggaagtgaaacattctggaagtaaaatttgaatcaaacataagttgatgtatacaggaagtagctaccctgaggatgttgtcactgctgcaattcaggagactctaaatatgcagtcagaggaacgtagtgaggtgaaggtatccgtataatggggaaagaggttgtgataaagagtgaaggtgtcccagaggaagtgttgctgaaaaatacaccttatgttaaatacactgtcagtatatcatgacattaaagtgcaaatgataacattttgtaaactgatccaaacttaaaaaggagtatgataattctgtaaaacataaaaatcatgccgattccataaattatacagtgtgaattacactgaaaaatccaacattagagaggatatgaatacaattttttacaagcataattttaataatacacataataattatttgtattcaagtttagtaatgttcaaggtttggaagaaattctgatcctgtgtagagaccctagtttgaatgtgcttatagcctattattacatgtgtaatgttacataaattacttaactcggatttttaatttcatcagctatttaaaatgggcataatataactatattaaatggctgttatgaagattaaataagatgatatgtaaaatgtgttttttgtttgtttgtttgtttgtctgtttgtttttttgagacagagtcttgctctgttacccaggctggagtgcagtggcacaatcttggctcactgcaagttctgcctcccgagttcatgccattctcctgcctcagcccctcccaagtagctgggactacaggcacccgccaccacgcctggctaattttttgtatttttggtagagatggggtttcaccatattagccaggatggtctcgatctcctgacctcgtgatctgcccacctcggcctcccaaattgctgggattacaggcatgagccactgcgcccagcctaaaatgttttttttacataatgggtgttcagcacatgttaaagccttctctccatccttcttcccttttgtttcatgggttgactgatctgtctctagtgctgtacttttaaagcttctacagttctgaattcaaaattatcttctcactgggccccggtgttatctcattcttttttctcctctgtaagttgacatgtgatgtgggaacaaaggggataaagtcattattttgtgctaaaatcgtaattggagaggacctcctgttagctgggctttcttctatttattgtggtggttactggagttccttcttctagttttaggatatatatatatatttttttctttccctgaagatataataatatatatacttctgaagattgagatttttaaattagttgtattgaaaactagctaatcagcaatttaaggctagcttgagacttatgtcttgaatttgtttttgtaggctccaaaaccaaggagggagtggtgcatggtgtggcaacaggtaagctccattgtgcttatatccaaagatgatatttaaagtatctagtgattagtgtggcccagtattcaagattcctatgaaattgtaaaacaatcactgagcattctaagaacatatcagtcttattgaaactgaattctttataaagtatttttaaataggtaaatattgattataaataaaaaatatacttgccaagaataatgagggctttgaattgataagctatgtttaatttatagtaagtgggcatttaaatattctgaccaaaaatgtattgacaaactgctgacaaaaataaaatgtgaatattgccataattttaaaaaaagtaaaatttctgttgattacagtaaaatattttgaccttaaattatgttgattacaatattcctttgataattcagagtgcatttcaggaaacacccttggacagtcagtaaaatgtttattgtatttatctttgtattgttatggtatagctatttgtacaaatattattgtgcaattattacatttctgattatattattcatttggcctaaatttaccgagaatttgaacaagtcaattaggtttacaatcaagaaatatcaaaaatgatgaaaaggatgataatcatcatcagatgttgaggaagatgaggatgagagtgccagaaatagagaaatcaaaggagaaccaaaatttaacaaattaaaagcccacagacttgctgtaattaagttttctgttgtaagtactccacgtttcctggcagatgtggtgaagcaaaagatataatcagaaatataatttatataatcggaaagcattaaacacaatagtgcctatacaaataaaatgttcctatcactgacttctaaaatggaaatgaggacaatgatatgggaatcttaatacagtgttgtggatatgactaaaaacacaggagtcagatcttcttggttcaacttcctgcttactccttaccagctgtgtgttttttgcaagattcttcacctctgtgtgatttagcttcctcatctataaaataattcagtgaattaatgtacacaaaacatctggaaaacaaaagcaaacaatatgtattttataagtgttacttatagttttatagtgaactttcttgtgcaacatttttacaactagtggagaaaaatatttctttaaatgaatacttttgatttaaaaatcagagtgtaaaaataaaacagactcctttgaaactagttctgttagaagttaattgtgcacctttaatgggctctgttgcaatccaacagagaagtagttaagtaagtggactatgatgccttctagggacctcctataaatatgatattgtgaagcatgattataataagaactagataacagacaggtggagactccactatctgaagacggtcaacctagatgaatggtgttccatttagtagttgaggaagaacccatgaggtttagaaagcagacaagcatgtggcaagttctggagtcagtggtaaaaattaaagaacccaactattactgtcacctgatgatctaatggagactgtggagatgggctgcatttttttagtcttttccagaatgccaaaatgtaaacacatatctgtgtgtgtgtgtgtgtgtgtgtgtgtgtgcgtgtgtgtgagagagagagagagactgaagtttgtacaattagacattttataaaatgttttctgaaggacagtggctcacaatcttaagtttctaacattgtacaatgttgggagactttgtatactttattttctctttagcgtattaaggaatctgagatgtcctacagtaaagaaatttgcattacatagttaaaatcagggttattcaaactttttgattattgaaaactttcttcattagttactagggttgaatgaaactagtgttccacagaaaactatgggaaatgttgctaggcagtaaggacatggtgatttcagcatgtgcaatatttacagcgattgcacccatggaccaccctggcagtagtgaaataaccaaaaatgctgtcataactagtatggctatgagaaacacattgggataaatcggctgctatcataatcattcctctcccacatcagataaatgaattaactttttgaatagggttatttaatataaagtgcttaagtctaattatgagaagaaataagataattacacttcaatggttaaagagagggagaataatttgcatattatgcctgatgtaaaatgtttattatgggtacatattaagtgctaactaattgttaattgttcttgctacaagtcttaatgcagggaaacaagaaattattacatagtacctaatattatcttctaatattaaagaaacaatttcccctaaattcatcccattagctttttttttttcggtggggcaggggagaaatacagacttcagtaaacttgggctgggaactttctacctacaaagttcaaataaaataaattatcctagttagataatatcaatgaaaaatccaccaacttaaatcctggctgtttgatctcaggaaattatttcagttatcaacttaatgcatcatattatagaaatatatgaaaatgtgtttaattaaacttactgaatgatatgttttttcaggtactttaaaaataaactatgatataaagttacctatttttcatgcaagtatagtataaagaaatttctaacactggagattttctgaaggttttgattcttataaatttattacatcataatgaacaaaactaattttcaacatattatgatttaaatttccttagtaaattgtttcaaatttattttctttaaatccatatttacatatgtatatttaaatatacatatttacttgtataacaattcaaaaccatatattaattttataattttgtttaatgtcaaaggttagatttggctatatctattctaaaagttggtatcacatttcctttttggaattttatttttaaagtagctaaagtcaaatataaacctattatttatattaatgcagacattagaggtagacactaaattcattttagtatattctaaattatttattatctactatgaaataatataaagaaaaataaagcagaatccctgatttcaaagaactcaattgccgaaaaacagttaccatttattagacccaaaatgtactaatatgagtgtgtctcttttccttttgttttgtcacccgtcatttggaatgtcagtgagtagagagatagtgtgaaaggccctcaaggggaaaaatagaggttaaaggtcagcagagaccctactagagaaatcagttctacagaaatgtttttaaatgtgtcgattattgctacatgtacactctgtcattttgtaatgtagccattttatttatgattataataataaaacaacaaaattataataatgtgtagagtacattttactgtgcagtgtattgcattaaaactagattaaaatttatacatatataaaaggctatctagatattataaaatttatggctggatctgtaaaaaattcaaaacctatttttaatctcgctttgagattttataacaagaaaatgttcgtttcaagcaaaattttcaattcacgtccttgaaaaggaaaaaaatgacaacttgaaacacataattgactatttttaaaggatcaacatttcagaaatgttttaaaacataagattttcagtacagcttttcgctggcatttaaatcgaactttgaattgtaaatagctcttgctcttaaggagacatcagccatatccttagaagtggcacggagttgttaggtagttgtacaaaattctagcctaaaagacaaatagggagcaacactactgtggaccgtttctggtcttgggctgtgtggctatgtcaggcttgcccacattgcctgtactaaggagaaagcctcttgtccttacagacccccttagcttacatagtctatttgaaaacaaattgctttgtccacaccatttaaatattggcttcaggccaggcgcggtggctcacgcctgttatcccagcactttgggaggctgaggcgggcagatcacgaggtcaggagatcgagaccatcctggctaacacggtgaaaccctgtctctactaaaaatataaaaaaattagccgggtgtggtggcgcgcacctgtagtcccagctgctggggaggctgaggcaggagaatggcctgaacccgggagtcggagtttgcagtgagccgacatcgtgccactgcactccagcctgggtgacagagcaagactccgtctcaaaataaataaataaataaataaataagtaaatattggcttcttcaactggtgagatgaaacctatacaatagtcatgtgaatagcactaaacagctgacatggtgtaactcctctcagactgaggcttatctggggagtacaaagcatgtcaagaaaatgtgccttcatttccttagatgagtgtccccatcctccactctcctccactgttctcctctctgcttctatgatatcaacttttctttttctttagattccacatgagtgagatcatgtggttgtttgcctttctgtttctggcttatttaactgaacaagaaagtttttgacatgaaattaaacttctgcttgtaaactcaattcaaactatttacactgtcttctcaaaaatgttaacttattttaataaatctactgaatgaccgtatctcattttgttttatgaaaagaaattgtaagggtgctcaatagcctcttcattttcatactgtctagctcctgtgctcctattaaaattactgcaaatttagctttttaagaaccctttgtttcactacctgaagttctataaaaagatccaagttccttcacaaccgtttcttatgctgttattcgtacatatgtgataataccacgtctgaacacgtagataataagtaggggctgggtgcggtggatcatgcctataatcctagcactttgggaggctaaggcgggtggatcacctgaggttaggagttcgagaccggcctggccaacatgatgaaaccctgtttctactaaaaatacaaataataataataataataattagccaggtgtggttgtgggcacctgtaatcccagctactcgggagactgaggcaggagaatagcttgaactcaggaggcggaggttgctgtgagctgagattgtgccattgcattccagcctgaacaacaagaatgaaactccatctcaaataaataaataaatagaagtatgtattgtgttgcttagaaggtgtggtggaaattaacttgctgagtgagatcaaaggattggcactgaattgaaataaagaaatattcatgctgagtctggttcaaatataactgcacctgtaagaattgctttctgtaaactttccatagtataaaccaaatccaaatcactcatggctttacattcctgatcgttaaacttgaagcactttttaatactgcatgactttagccaaaatatcttagccaagattcaatgtttggttgaaccacactcacttggacatcttggtggcttttgtttcttctgaccactcagttatctatggcatgtgtagatacaggtgtatggaagccgatggctagtggaagtggaatgattttaagtcactgttattctaccaccctttaatctgttgttgctctttatttgtaccagtggctgagaagaccaaagagcaagtgacaaatgttggaggagcagtggtgacgggtgtgacagcagtagcccagaagacagtggagggagcagggagcattgcagcagccactggctttgtcaaaaaggaccagttgggcaaggtatggctgtgtacgttttgtgttacatttataagctggtgagattacggttcattttcatgtgaggcctggaggcaggagcaagatacttactgtggggaacggctacctgaccctccccttgtgaaaaagtgctacctttatattggtcttgcttgtttcaggcattaacccagataaatgccatgcaaattttataattattatgattgtttcaatttctggaagaaagttaatgaaacaaaaaatgtagtaaaatgccaaaggaacagtgacatttcagaaagaatgagggctttcatgttaattgtaagtcttggaatttctcttccttggagtaacaaatccctttgtgcctaatttcctaatttccaaaataaagttcttttacttatttctttatagtgacatcatctcttattaaatggcatatctgcatattacataacagttcattgccaaatacatatttgtgggaaatgagagacttaaaatacataccaaccagagatatagttttgaggtagattttaaaattctgagaagaattttgactgaatttttttgacaaacatgggacacgaataagattataccaaagatattataactttcattttaaatatggaactaatacagtatgaggtgtcaacaacgttgaagtttcacaaacatcaccactacaacagcaaaataatttttgctttttccctgccacaatgacctccttgctatttcttgaataaatcaagcatacccttgccctgacacgttcttggggaggcctgccctaatctatataaaattggagccattcttctcacctctggtattcccagtctccctactttttttccttctttctttctttttctttttctttctttctttccttctttctctctttcctttctttcttttcccttccttccttcctttctcccttccttccttcctccctctctccctcccttccttcctccctttctttctttctcttttttctttcttgcttccttccttccttctttccttttctttctttttcctttctttgccaaagtgttattcacctttaaatataatacataatgtgcttactttaatgtatgatttttattttatttctcccttctagaatgtaggcaccatgagagtgaaatatatttattttgttcattgatatttcacaagtgtctgggagagtttccaacttacagtagacaattaacaaacatttattaaattaaggagggaaggaagtgagtaagcacaacaactttcatttctgggtcttttataatcatatgcttagtataagaacagtgctattcagctatccaaaagttacaatcaaaatgattttggatgaatatcttgaaaattgtgagaaagaagttttatttgctggcaaactattctgggttgtttccacttcatgtaatcctaagtagcagccttaccttgatagcccattaaaactctgataataaaaaggcagaacaaaaatatctgtgatatatttagatttactacatgtacttacatgtctagtgtctggtgcaatggatgctaatgatggcaaatccttactgggcttctagtgaagttcttcagctaatgtttgaatgcatggttggtcatggtggtacccctttgtacaaaatatgcttttcaaataatcttattagggataataattatattaattcctggtttccatctaaaattttaattctatttatagcttcgtaagatttcacaagttaagagggacctcagattaaattagtacacaggcaattaatcagttttgtgtctccgacccttttcacgggctaatagaagctatagaccctcttagcttcagaaaaatgcgcactcacatacgcacatcaaagagcttaatgggaagtccattgacagaccctctgttcagatcaatcttctgattgtagagatgaggaaacagaaatctacagaggaagtgggtagtccaagattgcacagtcatttggaatagactggacaccagtagtacttttccagccactatatcacttccccaagcacttcctcaaaacttaccttcctttgggtctttatacattcagttatggacaactagatttaactagaggattttattgcttcagaatattaagcaacagggaaacatgtaccgtcttttattcacctgcatttaaggcatacaatataaattgcaaatggagcatgaaagtgcttaatcttttacaaaactgggtttgctttccacccatctaaaaatacttctatttattttaatatttaaagcagaaatctaagtgatgtgacaaaattaatcatttggagatatttcccttataggtagtatagtttcttactgatttctaatatgaaaatgaagccatagaacctagaaattgcagcatagttgtggaaataaacattggactgagagtgaaaatggctagtcttcctctctgctcatacaccacctgactggataacctttcgcagatctcctaaaagtctttctcataaaatgaggaagctctactagaaaattgttgaagtctaatttagcaataaagttctgagtttctataataattcaaagaatactctaataaatgtctgcaattgtggtcacatctatgggatgctaaaaaatctggatggtttcaatgaaagtatttaatttgttcattatgaactttgaaataatttatttcattttttaaactttgatcaaaatgaccctggtaaatagaaataagcaaactctttttgcttgaaatgcttattaatgactgcattgagacactcattcatcattcaagaaagaatgtttgctcacactgtgccagaaacttggaggaagagggatgtgacaagtaggggtactggatgtctagcttgtagaagtggattaatggctctgcttttaagatcaggaacactgaaagggagtaatggcaccggttttcacctttcatgccctttgagggtatctggtccatcaccctctagttgatgagggagggaaagttccctctcccttcacaaataggtggaaattaaatgacataattctgaacaaccaataaatcgagagtaaatcaaagcagatacctgttttgttaatttgatcatatgaatgtagctgcccttagtaataatttctaagtataagactagttaaaggacaaatgagttatcttgaattataagattttgttttacagaacaatattaactcttgtgtttagtacattagaataatagatcttttgatccatatttttactcatgtgcacataagaagttatcagtcatacaattcatttcttgaagttcatacctttcattggcagagtagaaacaggttaaaagtgcacaggcagaaattttaagtgcaaagcaacagtgatgttatatagagaaaatttatatttcctacttctattgaagaagaaagatctgcttgttctaagaatattgtacaaagaaagtgacttgaatcagcgttattctgtaatgctactatgcgtgcagtgtggagtagccactagaacacttggtctatcccagctcctcaacagtgtcttgcttgtggctggtgctcaaataaatccttgctgaactaatgagcatctctttcatgccacatggaatgctctaaaagagttggatcctgaagtttttatatttttgtaattttctggagttttagagagcaaaagtcctgaataaactgtgaagccactgcctgacaaataatacagcagtcagcttcgttatcatatcccattgagacacgacttatctacatgatgattaatagttttcacgcaagaaataagcttgaaatgtctgttgccttggatacttaaaacatccaggttcagcgatgttatttattgttgttcaaaatcagaatgaagttcctaagcaatgccattttggaaaaattacatcaatatattatgaacaactttttttaaatcttgatttcaaatggattgacacgtgtatattctgtaataatcctgacttaattcataaaaggatagctagccagttgtgtgctagatgaataaaaaaaaagcaggttttaaaatgtcaggtttgacattgtgaatataatatctaagtatccttttactcatttcctttgacttactatggctgtcatgttgggcttcatgaaaatttatttttaaacacttgagtgttatggaccctctgattaaatgattaatcagatgatgtatgttgccatcagctgaatcatttaatgttgatttcacaaacaagcacaggtcacaggcaacatttcagatttctttgaagaagcacacacaggtcacaggcataatcttaaaataattttataacaaggtagtaataagagatgtcaggactggagaaatattttaatttatagtaagctttccccttaagtgtctaataattgttaatataatacattgcctcaaataattaaaagtttggttcttgtccttgtgcttgacttcagaagataaccagatgactattaggtatatttagacctaaattaaaagctttgagacacaatgaattgcctgatttgtatttgtgtttcgagtggcatatactattactggcactataatcttagattaaagcatactgtgattattaaagaaaaatttaagattgatttgtttctaaaggtatgtaacagtgacattttgcaatgtggtatgtaaaagttggtatttctcactcatatgagagcccactaatggtacataaactgtccccacttagaaacacaattattatggcctttctttgtatctgacaaaatttcactgggttcaagatggatgaatagtgaattctaatgacccttaatcctgtaaggttctaggtgggaaagtactctgtaattatgtataaaattataaggaaaataggcttactgctatgttttcattaaaaatcattaactgagtacttaatatgtgccagacactcagctgggcaccatgagaaatacaaaactgagtaacatatgggtggctcctgccttcaagaaatgggcagttcaggccgggagactgacatatttaccctgggaaaaagggagcagctgtggtctctgagaacaatatggtttgttacaagtatatatccatcatggaaaaaaagagatttatcttagaaatgagagaggctgatgctctcaataaatatcatacattaaattgtgtttttgtcagtagactgaaattacctcacatacacgcacagatagtagccatgatattttagctgcttagatatagagacaaatacttccacccaaatcttaggatcagtggttaatagtctgtaagcattacaatcccacaacatatgcatgactatacatccaattttaatattcaaagaactgattgcgatgatagttttgtttgtcaaagaaatgtattataggatgagtgggatagaactgcatcacgttacaccaacaaataggtttaaatcatatttgtgcacttcccttgttccttcataaatgtttaacatagcttaaaattctgtggactgcaacgtgagagcaatgaccacacttctgtgaacccatttttactgtgcatgtgctaacgtctattgttagtattccttcacttgcaaagatggcatgataattttgctggtttcattaatgagatactgttaaatgtaggatgacttcaaacttagttgtattgtaaaattatttttaattgtatacatttaagttgtacagcatgatgttttgagatacttatctttatttatatatatatataatatacacacgtatataaaagtgattcctacattgaagcaaattaacatacccatcatcatatggttatctttgcttttttactatcagtgcctaaaatctactttcttgaaaaattaccagtatgcactacaatattattaacaataatcttcatgttgtacattagatctttagacttactcatcttacatgacttaggtttgtttttacctctactaccatctgagccatatttccactttgtaatttgataataaacttggaaaaatagcacttatatgtttaggtgacgggcataaataggataagatgtgtttatatattattccatatatcttgtctccaactacaatgataaacaacctgtttgtccctaaaaagtaagaaataacttgacttttctgccccttcaagcataggctgttagcttttaagttttagggagacattgatgatgctatttgctttatcaagaggaaattgtcaaaagaggtcttttggttctcaaactattcaaagtatttaaaaatcaggacaaaatatgtttacgtgatattcaagggtacagaaatgaggtaaatgagatgccaattgtatttgtcatgcaaatatataattacgtgtatgagagttagatgatacatctcatcaatttaattgttcttctacaaggagaaaatgaacaatttgtcaactcgtatatgaagtaatttttataagaaattttattaaaacttttaacaacatttggatttttaagttgcaatttaaatatccccttctaccaggtgattctggaatcactaagcagttacttgtgaaaattccaaagtagcatttaattcttattaatgtcatagtgaatactaatgcaaagaatactgagccagaaattatgcttgttgaataaatagattatttattgaacaagtaagtgaaaaaatggaaataaagaacggatatatattttatcttcctgcttagatgtgggactgtcctacttttctctggtgttcacaacaacaatatgataaatctaattggaattcagttcataggaatgaattcagttacattatggattgtgatgaataatgtacacttttaatttaatgaaatcaaatagattttaactatctatgcttacaatggggtgacataagtctgacaatccttaatatcaagtcatctccaattcacatgtatacacactttttttctatttggctattgggaatcctcacaaaaatcgaaaattgccctttcagtgtacgttacggtatttcatgccacacagattttctgaggttgtacatacagctttgccttgaggttccaatttttgctcagtggattgagtatatattatttgctatatatcagaagaggcatgtgcttcctacttatgtcaggtaactttgggattaatataattgtcctacaaagcatagatagatagaaatacttcatccttaatttctaatattatgacatatctaaagtaggcacctttaaaagttaatctccactaaatactaatgactgcttatagtggcaattcatctttcatggtagtcctcctacaaaggtatactaacatttatgagtttgaaacaaaggcaattcacaagtgttctgctagagatggtctatatctgctgtttgatccagcatgatggccagctggccctcctgtgcatgacggctcgtggtttaactgcaccattttgtttggtcatatacagggaaaacatggcatggtgtggagggcatgggcttgaattcagggaacagagagttggtcttctctctctcactctactggatgatgtcatctcccctctctaagcatgagttttcttatctgtgaaataaaaatgttgaattaaatgagttcaaaatgctttcagtctgtgtttaatagcttgaatcttaagacaatgtattcaattatgcgttgccagatccctggcaactcatgtaacctttctaaaccatagctactcatctgtaactggccagccaactgcccagggttggagtgtgaatgaaataagataatgcagacaaaagatttttaaaaattgtagtgcattatacagttgtaatattttgccaagaacttacattttctctaagaagtgtgtcgatacatgatcacagaaaatcttttccatattcctttgtagtttgatgatattaagtaagtaaattgtataacacaaagagggaaaagcatcactgaacatgccgttttatttagctaaataaaatgtaatcactattagttttcctctgatttccccaaagtcatgtgattccattgagtattatgcacatggtataattagaatggattctctgctcaaataattttgggaaacatttaaattaacaaagtttaaaagtatctctgttaagctgaagcaaatctcaaaggccttaatattgtatgtaagaggaatagttaccatctttcctaatgcctctttgacgccaaacccatggagaatagttctaggtgttcagtaaaacacagatttgggatgccacaggttaattggaactgtcccctgcaatccttttctctttttcttaataatggctgattgcaggtcctagatgaaagacatttagagagattatcaggactcagcatcccatatcagaatccattcttttatagtcattttctgttacatttcttgggacaacaccaaagaaatgaccatcttcattcacataggctttgtaccaaatgctgacaaagatccttggtgacctagatgggggcaggtctaagtagattgcagctgtaaaattggctgatgaatgatctcagccccttttactcacactcaaaggcaggacagtccattaaggggaaggagggcagagtttttccttaggccaattccctatgccagaactttttagaatggaagcatttccagaggagaaacaaccccaagcacagttcaaagccccctcctcccaagttcatttgaaagtgggatggtttatctgcaaagggggaaaagatgagggatagggacgggaatatccctacccttcagagagtctggtttcatcctgcacttttactgcacagccacaaatgccttggggtgaatctacaatatgatacatcatatggtctaaacgtgcctggctgatcctctctaatacttcaggggtctaaaagggataacatgctctcctgttactcaccgactctgtccgccatatttcacccagccagccactgccttcacttccgtccgaggcctaatctgagcccatgggaaacctaagaacccctaccacaactgcctcaactcttgggaatcagggtgtatgggggtgacaggaagtgagcatacattctccaacttgatatgtcagcccccacgtctgtatgaatgtttgctcacactgtgactgccggccttgctcctcaggctgcatcctaccagggagtaagacccaagtccttcctgctttcagacaacaccaagcctcatgagtccccactcagaggaaggaccagagacaaactctaatgttccactaatacttcccttcttattactttccttgaaaatcccttctccctctttctttttatacttcgctaatgaaaggtaatgaaagggtctggcacttggaatttagaattgatacatggtttttaacccgcggacgtattccacaataacccttgcatcttctactaagatgtgggctaggaagggaccagccagttcccagggtcacagtgcctcagctgatgtttcatattttcagcaactttatgttagagatgtccatcaatcagaacaatatggttagagaataaactaataaaagtcatttttgaggacatgttggaagtctatcaaaagcattgaaattatgcatgctctgaccagtcgcatgtctaagaatttaaatatgatcataagtttaaatatgaagatgtttatcacagaattgattataaaacaaaattgaaaaaaatagtgctagaagtttgatcatagggacctcattaaatgcattatggttgatccatgcagtggtttgctgaacagccattaaaatgttgtagaataattattaatggtgtggaaggatgctattgttgcagtatgtgaaaagaacaaattacaaagcagtttgtgcagcataatatttttattttttaaaaacctgtatgtggcttatgtacatataaagacgtggaataaatgcacaaggtactcagtttttctcagtgaagcccattttgcattttgggctgggtaattcttcgctgtggagaactctcattcattgtaggatgtttacaagccctgggccttacctctttaacgccagtaggcacccccagcatggcaacaagcacaaaatggtctctctcatattgcccttgaggaaattttgcaactaagtaactattactgggtcctagattacagtctggattattgcgttcctttcttatttttattttctccaattccctttaataagcatgtactggattcataaaaaaacaacataaatggtaattacaatattccgcactggttaaaacttatgtaaataagcattctgctgctttagccacaattgcaatttatgctccttctctttcttaagttcccagttcccacgtacattcattcgactgattcaaaagtcattttagcttgatagactcttaaaagttagagttatcatttctgctatttattctttcaattatccatttgtccacccatccatctgatccattttgttgatgcatgctgtgtataaaatactacaccagcctggtgcggtggctcacgcctgtaattccaggactttgggaggccaaggcgggtggatcacctgaagtcaggtgtttgagaccagcctggccaacgtggaaaaaccctgtctctactaaaaatacaaaaattagccaggcatggtggcagacgactctaatcccagctacttaggaggctgaaccaggagaatcgctcgaacccaggagatggagtttgcagtgagctgagatcatgccaatacactccagcctgggtgacagagcaagactccgtctcaaaaacaaacaaaaaaaatacaatgccaagcatcataaaaaatatagtgatatataagacctatttgttgtgctctaggcattgacatctagctgtcaaccattaatatgtgtaggagtctatctatcaatattatggactgtgcttgaagacttcttccccaatctttttctcttcccattaagtttgaagtgaggttttctgagtgaagtatcatagtacatacagtctcattatttttcaaaaatctctggttatagtacatttctttcctttatcccctttgttcccaactatcaaaccattttggatatccagtattggtatccagtattattaaaaagcaaaacagagaactattaacaaaaaaatttgtaggagtaattggttgtatggtatccagtactattagatagtaaatcagaaaattattaacaaaaattttagacgaataatggattgtcttgcccaagtgaattgagtgatttagttgttctttcatttttagcaagtacagctgatcatttgaggccttactcattgtttgattttgcaaattcttactattataaatgttttgggctctgagaaagctgttgtcttaatctgtttgtgctgttataacaaaatacatgagactgggtaatttacaaacaacagaaatttatttctcatagctctggaggctgggaactccaagatcaaggcatttgtcttcaggttcagtatctggcgagggccggttctctactcccaagatggtgtcttgtcactgtatcctccagagggccaaatgctgtgttctcacatggtagagagatagaaagggccaactcactccctcaaggcctttcataatgttaccaattccacttgtcagggctctgcccccgtgactttattacctctgcaaggccccaccacttaatactatcacgttggttattacgatttatcacatgaatttcgaccatactagttgccatcctttcattttcatatatccttaaaactttgcctttctcattttaatgtactttatccacagtatgccaacttttcgatacttttgttaacctgtctgacgatatataggaaactgtaaaagtgcagtttttgatacactctttagctgcccgtttacttctactgtcgttagagaaccccatccatagtgcatgtgtttattttgtgtatgaacaaagactttatatatagtttgggtcatttttattcattagtgcttcccttataatctctgaataccattttattagtacatactgctattcttaatagtaactagcatgcctgatcatcccaaatgtctaggttcacattttaaaataagttatatctttgggcttaacagtttattgaaaggtaacaaggattgagtcatagttgtatgtttttggaagtagaattcaactgtaaatagaaattggttgtttagatctcactatatatgaaaaaatgaaggctttaggagaaaatctccccaaagtacccatttttcatgtgataaatatcatgaaatgatttgagaaaaaaatgtatatttgttacagctaacaaatatttgtgttttttattcttcatggagagaatgaaatttcttctcttctttacacatttctttttcttattagaaactaattggtgcctttataaaaattaactgcagagcactaacgtgtatatataagtattatgtagggtgtagggtatgttcagggtatggtgtgtgtgtgtgtgtgtgtgtgtgtgtgtgtgtgtagctgtgtgtgtatataatgaaatatatggtagtgttgtttcagaaatctgcttggtcttcccagagttcattcatcttataaattcatctacattgatctctatttttggaatccatgaaatgttttttggcagtacttcctttaatatagtgtgctggaaatctggaaatttctagccagattagttacaaaaaattagccagtggttttgcactctctatagaatcaaggcccaaggcctactcttgttactcagggccttgttttatctggcctctttcttttcagccatatagctctcaaatactcaacaaaattcttcattctaggtagacaagtatcttcaaaatacttcccaattatctaataactgtcttaccactaagaaggcttttatgtctcctgtctgaattttatccatgcaaaaaagtccagcccaagcctccagaactccaaaaagttatccctaactgctgaaacacagtaatttcactatgtgaaatttcactttggtctcctagcatttgcagatataccatacatatccttgatccttttcctttcataccttttatatctaacccttaagctaataattttacctacactgtaattcaaaatgtatccccagtcttaccatgtctcccttctctactgttaccaccctaggctaggccttcatcatttctcacctggactccttccctaacctctgaactgatctgcctgcttccacttagacacccaacctagtccattcttgagcagtcggaataattcttttaagaaagaaaccagatcacatccccctctgctcccaaccatccagtgacctcttatcatacatagaatgaaatgcaaatctttactgtgttttaaaggccctacattatctggacctcagtaacttcttacttcctatcccttttctccttgtatgccaccctccaactacactctaactacactgtctttttccctgttcttcagacctgccaaccatattttcactgctcaattaatatgtagaaaatgaattgtttgttaaatgtagactgtttccttcttaaagcaaagataaatgacattgtcttcaaaaacaactaactgcccagaattcctgattttaattttaaaaagacaaactgcaagaatgtgttaaacagtaaggaaacaattcactacttcagaattctatatgatttcactgcacgttagtaattttgtatattatagaatatgagggtattctaataaacttaactctatgctgtatacttatcatgatagctcattttcttatatgtttataacagcactacttattgtacatggatacgtgggaaataaattaattttctccttaagaacaaagcaaccatttcactcatgagataaatcttgaagatttaaaaactacttataattaattatacattattcatataatgttaagtattttcttagtaaaccacataatttagaatggcaattggacagatgggcagaaccacatgcatccactattaggcagttggtgagcataagatgccagaaagaagattaggaatatcaaggcagggagcttccgatcgctcttgaaaacattgacccttcactcctcactctccacgatgcatttcctttgaaaagtaatgccttccaaaacaaagttctctgttttatatctaaacttactcaatagtttctcatggttattgatatataaaaaataaagtaaaatgtttaggcagaccaaaagaagaatttccccctccctctgccttttatgccaaggtgacagctatgaaatgtacagtacgtttcctctgcaaggaatgtagcagtgttccattgcaagaagatgagagggagagaaaggttgcacgctgaggaatatagtgtcatttgtcactgcctagactcatcagctgtgtggaactctgagaggcaccaggcttctttatttatttcttcagaaacttcagcaaaaaagatttcattaggagcagagaaaaatgtgaaaaacgaattagcttttgtgatggggagtagtcatctctgaatattgatcaagattaagagggttgtcttcgtaacttcttttatccatagtctatactgatttaactagaaaactaatttcaggtggtatttcgggtgtggcagatctttatagtaaatgaagaatctagtcaaatctactgaaaaactctgcttactttaatgtttgatctggttgaaaccattttagcttaacaatccttcctctgaaacagggaatcaattgatatcctacagcaaaattatgtggaagggccattagcttcacatccaatgcaaattttgcctgtgtttactcttccccaatccaaaatatatcagatcctagatgccagtgaaatcgtttgagctagatggcttgagggtcatagcttttttcatttcctgttctcagacctcttataattgatagaataaaatcagaagagccctagagctgtcccacctattctgcctcacaaaagtagaagtaatggcaaccactatcatagggatcatgctcacctttttcttaccagacaaatttggatattagcttgaaattaataccttccttaaaatgttggaatttggttatatgcgaaattttgctctatttattcattatattttgtatggaattatttttgccctatattttcacttaagtgttctctacccaagattttaattgaacccaaatcagccagacacacagacatggattttgctgccaccaaggttaattcttcttttaaagttaacttttaaaatttggtaaaatatagctttgaaaatttgcattcgtctagtgtttgttatgtatttcccccttttgtttgattatatgtctatatttttcttgtagaaattgatttttaacctgctttttatgttagcttttatgagcttctgtctgaattctgaatatgtctttcttaatgtcttctaaatgtttctttctggattattaaaagatttattaggcttttaataattatatttgttaccttagggaatgtgtttgaaaatattttaaatggaattgccagttaacacagcattgaactttttcttgttagagatacattgttttctaggcattttattgggagagaagttagtatgatataatgtctttggctgatattaactcttctaagatgcattgtttctgagaacaccattgtctgatttcattcagggaaatttcacacaagccagtagagtcaatacttttttcaagacctgttaattgatatatataaaaacttgccattgtttacatgcccatttcagatcctttatgtgacctaagctagaaatgcattttaacagcatttgtttttccaaaaatatttatttatttatttattatagagatagcgtctctctatgttgcccaggctggcctcgaactcctgggctcaagcaattctcctgcctcggcctcccaacagtgctgggatacaggtgtgagccattgtgccaggcccttgtttttattttttttgaacattgtattttgaaaggggtttgaaggtgatccctagatagcaaccagtaatgattcgagcagcaaaacaatctaaaaagtaattttataagaaaatgcagaacataaatgagcccataaaaaattatattaggttctatttacattactaccttctttcacatgtaatatttcactaacatttaatgaatttctgtgcagtgccatataccattatgaattctaggatagaagaatgagtgagaaatgttcttaggccttaggaagaaggaacaagcatctctgtgtaatagttatttcaactcttcttttacacctcattcccatattaaatctcagaaaagctaaagtaatagctatcccagatctattttagactccagacacttacttcaatgtcttgttctccttatcagactggaatcattccaaacctcttaacttctgggcaaccatgataatgcgacagaaaggacactaaatctgtcgcaaatttatcttgatattctatccagtcttacttggtactgaaggtcacaagtaaaataaggtggttgttttttgtttgtttttttttttttgacagaagagaaaagaacactgtgagcacagagtgaatgtctaacattgattcttgagtagcaggaattctctatgcgagaggatctctatgcaaaaagatctcatattctagcacaatttaaggatctctatgcaaagatatcccatattttagcattatcaataagctatggggtaatatattgtatgtggtgtggcttgaattctagaaatttgatttctagaaatggtccctgtagttaaggatatataatgtggccgtctccagttttctatgaggaataggaaaatactatcattattagctgtgtgaccatggacaacttgcttcgttcttcagttgcatcatctgtataaaataagaataagaaaatttacatctgcaaggtgtgatggagatcacatgggataattgtggtcccagagcctggcacaaaagggcttaatatttataatcctccccatttctccgtatactctaaaggaagtttattgcttatcaaattgtgccgtggttagttgtacagcttccctgccaaattgtaaactccaacactaatgtgacgttacattttatatagtgctatgattttcaaattgtttgcataatttcaaatacacagtaaattgctttttattagtataattattgctattgtcaatattattattacaacagcttcacagtaagatgggcagaaaaaaatttaatttccattttacaaatgcacttttgaggctcacagaagtcaaatagaccaaagtcacagggctagtgagggacccagaagaaacaaattgtaattcactgattccaagttcagtggttgccttactgcatcataaaggctattacacaatccaggtgtatcatatgattcttgtctatatattcatacatatcagaaaaagtgttctactcaaaattgctagcaatcaacagatactgatagtcattagtacttaaatctttatcaaatgaaatattaatacccatgaaagagaggacaatgaaaggtttgtatcatttgtatgtcacaagtcaacttttttcaatcactcattattagtttaactgtaaaaaattatttacatttagcgtgaaactttcctgtattctcaacatatttccttcggtagaaaagcaaacctccagttctctgttctttgcttggatacttgccagtttgtaactcagctatcaaacagtaaagctcacaaaacacttattaaaatgactaaaatccaaaacaccaagagcacagcatgctggtgagatgtggagcaacaagaactttcattcattcactaatgctggcaatacaaaatggtacagtaactttggaagataggttgacaatttcttacgaagctaaactatacttaacatatatatttgtccattttcacagtgctaaaaagaagttcccgagactgggaaatttataaaggaaagaggtttatttaattgactcacagctcagcatggctgaggaggcctcagaaagcttataatcatggtggaaggagaaggggaagcaaggcacctacttcacaaggtgacaggaaggagaatgaatgcaggaggaactaccaaacacataaaaccattagctctcgtgagaactcactcgctatcatgagaacagcatgggggaaacagctctcatgatctagttacctccacctggtctctcccttgacatgtggggattatggggattataattcaagatgagatttgggtggggacacaaagcctaaccatatcaccatatgatccaaaatcatgctacatgatattcacccaaaggaaatgtaaactgtgtccacaccaaaacctgcacatgcacgtttatagcagctttattcataattgccaaaacttggaagcaaccaagatgttcctcaataggtgaatgaacaaaaagactggcacatgtactcaatggaatattattcagtgataaaaagaaatgagctatcaagccacaaaaacacatggagaaaacttaggtacgtaagccagtttgaaaggttgcattctatatgattccaatatatgacattctgaaagagacaaaattctggagacagtaaaaagatcagtgattgcctggggctctgagaaagtgcagagggatgaatgggtgaagcacatggcatgtttaggacagtgaaactattctctatgatactgtcatggtggatacatgaccttatacctttgttaaaactcagaattttacaatacagagtgaattctaatataaactatggactttagttgtaataaggtatcaatgttatttcataagttttaataatgtaccacactaatgcaaaattataataataggggaattgggggaagggtaatggagtatatgggaatgcactgtaatctcagtacaattattccacaaacctaaaacttctttcaaaaatacaagctattggtcaggtgtgatggcttataccagtaatctcagcactttgggaagtcaagaccctcagatcacttgaggccaggagttcgagaccagcctggccaacatggtgaaatcctgtctctactaaaaatacaaaaaaaaaaaaagaaagaaagaaaagaaagaaagaacagaagaaataaaagaaagaaaggaaagaaagaaagaagaaaagaaagaaagagaaagagagaaagaaagaaggaaagaaagaaacagaaagagagaaagaaagaaagaaaaagaaagaaagaaagaaagaaagaaaagaaagacagatgcggttgctcatgcttgtaatcacaactactcgggagactgaggcatgagaatcgcctgaactcagaaggtggaggttgcagtagggtgagattacgccactgcactccagcctgggtgacagagcaaggctctgtctcaaaaaaaaaaaaaaaaagctattaaaaatatgtaaagctcagtctagatacagtaccagaatagtaggaactttatttcacctgtcctacaaattatggttgtgtgccacttgggtaaaactcagaatccaaatatgtgaatgtaagatttatggggaaattatttgtatttcaaaataatccttaatgaatgcactccttctaaagtagccattaataaagcagttaatgtttcatttaattatagattaatgtacataagatatgccaggaatgcaattaggaactgggaagggggtgttattctaataacttccacatagcattgtgagacattttctgctttcttcaaatttcatttaattacattttaaacaaatatttttgtgagcctattatatagtccttcgctagcactgaggagacatgctttgtgaccttggtgatttcacattcaaatttccctttcacctacactcttccttgttttttcatgcctgtgtagattgtaaattcttcctcagattaagacattttattcacctttgtaacatccacagtatctagcacaatcagtgccttcaaaaacaattggcctcaagaattgattgactcaatgagtgactgaaagactaaattaataagtacacatctatttgtacttccctgcttacttataaggtatgacaatgaaatactgagacagttatacattacttacggactcaatctcatttctttacaatctctattcttcttttttgagtataatgttattttacaattccactaacttgtcactctttattataaattcatatctccatttcacctgagaataataaaggcaaggaagtattttaaatgatcttgttttttataactagcattcattgagcaaatcaaagtatgaaaataatataggtgtcagtgattattataaagttgtatgcacaaaacattccaatgattggggccaatacagagaaaacatctcaatatttggaattttgcttttctgtaaatactttgatatgtacttacatcatatcaattataactcctgctgaaaacaaacagtgcacacaaatttggtagttggaggagactttataaagggactaattacgaaggtttagaccgggttaggaaaaacacacggaatagtgcaatactttaggatggcaacagcgagcaccgttataaccactaggccaaaatgaactaaatgaacagggagattaccatttatcagaaaaagagggagaaaggaaggagagatgaccaagcaagtcctatgtgaagacggctgcctgacttgagctgtgtgatctttggactgataccacctgcctgcactggcctagcagggcgagaatagtcaatatctggaaaatggatcacctgaccttactttcctccctccctgtttcctctttgtggtgtttccactggccaaactcacagcgtagacaaaaggagtgcattgatgtagcagtggttctaatccagggccaattgtgctcccagggaacattagtggttatcacagctcaggggaggaagggagaggagtggagtgctactatgattcactgagggatttttttaaacatctacaatgcacaggacatccttccacaacaaagtatccagttaaaaaatgtcattactgccaaggttgaaaaaccgtggtgtagtcagtacaattcatcttctccaggcacagtgcaggagtggggtggagtgtctgaaggggaagaaggaagaaaccagcacaccccacaaaagtaaccaatgcaaataccaaataggaaaagacagcacttaaaatacaaaagtctcaggaatatatctgatagtgttttatggaatttattaaaatttagcctggagtgagtaatatttagcaagccaggtttgtctttagagaaatccttgtggggtttatacaaggatttattaacaaagggcacacacaatactcatattacagtcagtctggttatgtaaaacatgggcaagaatgtaataggacaatgtgatgtattcacaaaggattttaggactacacagataatcctctaatgctttcacttacgtactatgaaaggctatagtttgcatagtgatatagccacgtaagatagtaaacttgacattcatgcagctatacatgtttgcacacaccaggatgcatgccctttctacctggttgattttttattcttttattaatctctaatttattccccagaacactctccataaaaactttctcacaacttaaatctttaatctattgtgtggatttctgactcattctccaagcttttcctcttccctccgcaatgccttatagtcttatgactatttatccctttgcctacatttctagccagatctcttgcctgatacacactctcatatttctctttgcacgctacacatttttatttagatatcacactactactttgatttcaacaggtctcagtttaacttaatttttccttcaagcaaggagtcccttcatatcagttatcaccattggcaccagaatttttcttatgacttcccatgacctacaatataaaccatataaatcactgatgcctccatagttccctccctctcaaatttagccataagatgattttaggatccttgttttttccaatctctctttcattctctcccccatctcttccattatgaaggtttggataggacacaactcatgcctagattagtgcaatagatgctgagcctgtgcagcggtagtttagctttctctcctggttaactttaactgccacatatatcacttcacacgtcatttttcattcaaacgtatttaactggctcttcattcataagaagctggaatttgtcgtttgactgatattttaaagattttatattttttctccatcctcgttctaatgttgtatcttgtgtcatttgttcattcataaacttaagacttagctaaccactgagcatccaggaaattcagtatctatcatgtgaattctctaatactggttgatccattgtcaccagagcatagcaggcttctcctgcctttatgtatgtttgtcatatagttcatgcctaaaattctttcttaaatcttaaattcctaagatacacacttttgcccaagatcacagtaatctctgccataatctctgctggaatctgttcactgtgttgctcctgctaaacttcttacagatgactttttttctttttggtttccctggtatctagtataatttcttatataggtactcaataaatgtttcctgttgatctctacacctactctgtacaataccatagtgactagacacatgttgctatcaagcatttcaaaagtagctagcctgagttgagatataggggtaaaatacacaacagatttcaagacatattatgaaaaaaacccataaaatttctcagtaatttttttatagattacatgtagaaactataacattttgaataagttgtatcaaataaaatataaaattcacccggttctttttaatttgttaaatgtggtggctagaaaatttaaaattacataattggctcacagaataattataatggatggtattgctttagatcaagtttgtctaacccgtggcccatgggccacaagcggcccaggatggttttgaatgagatccaacacaaatgtgtgaacttccttaaaacattatgaattttttgtttgttttgtttttgtttttttctcatcagctatcatgagtgttagtgtattttatgcatggctcaagacaattaattcttcttcaaatatggcccagggaagccaaaagactggacaaccctgctttagatagtaaagcatatgagtagttaatgtgtactataagcagtgtgatctgatagactatttaatgttgtttgatggtacattattcaagtcgattattatgtctacctatgcagtttaacgacggtaatgagagagggcagcttgattacaggtcttatcttttgactaacttgctaggccacctgagaaggacccaaattatctgaatgcttaactcaactaatttgtattcacttgaagaatttcaaggatgtttatatgccatcaacttgctttaaattttttctctcagtgaaaatttttcttaaaatgagtatgtggtattcaaatttatccttgttttctatgattatcttttcatagcactgtggtttccaggaacctttttttttttgagatgcattctacatgtaactattgcacagtttgcatgtagtaaggttcattattcttctacttttccaaacacctggcatgtttacttgaggttggtacaccttgtatcccagattttgctgtttttaacttaaatattgaatattttgattaaacattatggaaagtttaaatgggtcaagaaaaatagcttttcttcccatgaagaacaatacggcataggagttaagagcatagatttaaagtcagaaaacctgtgctgcctacttgtgcaaagtcacttacatgctgtacttctgtttcttcatctgtaagttctacccctaggtatttacttaagattaatggaagcatatgttcatacaatgacttgtacagaattattcacgatagcattactcttaatagctctaactggtaacaacacaataatcaatcaacaattgtgctgtattcatacagcagaatactacttagcaacaaaaatggaatggactactgataacctcaacaacatggatgaatctcaaaactatcatgctgtgtgatgccaggcacaaatcagtacatactataattccagaaaagacaaatgtcatccatggtaacaacaagatccatgcttgctggaggtagaggcatcagttcagtcattcaggaagctgattccaagatggtgttagaattacaaccatccacaagagatttattgcaggcaatagctatgaaaggtagaaagagaacaggagaaaaaccaggcaaggaaaaaccacaatgtagttgtgatatcacttcaaagggaggcagaaggaaggagaattgggtaggaatagccacagattacagtgcagttacaagaaagtcttggcttccaacaaaggttacttgttgaggagtcatgcattaggcagacatgtctgggctgtagtttccttgctgctcccagtcattggctggaggccagtctgggttcctgtgctgtggtggatcccattgctgctgcagcaggaggccaatagcactcctggcagctaattggagagaaaagatccaagaggtgtaccttcatggctacccccatggggctggggtggaggtggaggagaaggagaaggaattaactagaaaaaggcacaaaggaaaattggggaaaataatgaagatatatgatttctcaattgtggtggtcgttacatgggtttattaatgcatcaaaactcaagaaatgtacatttaaaatgagtgcatatgattgtaagtgaattatacctcaatatagttaattttttaaaaatcatagatttctttatatttaatgcatgaacataaacctaagacactcctccactccaaaacttaattaccttgtgatcagcagagcagaaggtactttgtgatatataggtagagaagatgaagtcttgtgacatttaacaagggacaggaaaatggaccttgtcctaagttaccaaactgcaaaaatatcacctacaaaggctattcataacatacattttcaagggggttacaatatttgcctactataaaattttggatctgtaaaggggttaaattatttgtgcaggggaataaacatcaaagaaacattaagaggtccagagaagtaaaataggaagggtcttttggctagaggagatatttaactttcagaacatgtggaattaagttgtattgattatgatctgatcttcttccccctaaatttgatcctcttcctgtaatctattgtttccatcatcttcaactcttccctttccctctcccttgtccctcagttctagtcaatcacaaagtcctacagtttcactttctgtataccttatttctggaattcatctctagacttcaaaatatatatatatatatttttttttttgagatggagtctcgctctgttgcccaggctggagtgccgtggtgcaatctcagctcacagcagcctctgccacccaggttcaagcgattctcctagttcagcctcctgagtagctgggattacaggcatctgccaccacgcctggttaatttttgtattttcagtagagatggggtttcgccatgttggccaggctgatctcgaactcctgacctcaggtgatccacccgcgtcagcctcccaaagtgctggaattacaggtgtgagccactgcttccagcccaaaatatcttaagtagataattgcacgactaatctctgcttttctctcccagcagccttccaaattcatgtctcacagctgacagagttgttcctgccttcagattcatgacctggctctgtgttctagctcaggctttctctctcatatcacctcttgcctctctgttgcccccatattttcccctctggttggttggtgctcctttggaaccctctgcatatcttttcaagaatattatgacttattatgcctataaactttgtttaattatttatttctaaaatttgacagggaactttccgaaggcaggtattgtgtctttctcatttaaaagcaaattctcgcctggcatggtggctcatgcctgtaatcccacactttgggaggctaaggtggacagatcacttgagcctaggagttcatgaccagcctgggcaacacagttagaccaaaaaaaaaatatatacgaaaattagcctggcatggtggcacacccccgtagtctcagctagtctggtagctgaggtgagaggatcacttgagcctggatggttgaggttgcagtgagctgtgattgtatcactgcactccagcctgggcaaaaaagtaagatcctgtctcaaaaaaaaaaaaaaaaaaaattagtgaatcctcagtgtttaaaaagtccataaacatactaaacatagaagacctccaaatgaaattaatcaattattatttagtgggttgcttctcttttgttttaatatagttttaacaaagagtaaaagttatgatctttttatatgtaaaataaataatgccgggtttgacataaattttaggaaaactagagacgctacttcctaaaaattttctttctataatcttcctaaatatttttccataaagtacaaaataatagaaaaaaattaagagattgagtatcctttcaggaagtgatatgacaaatagggttcgagaactatttgaattctcaccacttttcataagggcagatctcaagttaaatttttctattcgaatttaaatgactttcactggaataccattacagaaaagcttctgtgtttagatggcaatatggagtttcttttcttggaatattaattgaaggagaagtcttaattttttaagtctatatctccgtatatatttgaacctattttatatgttagtccttctctttagtaaccttcatccacagtgaacaagatttacccttacctttaagcagtagcggctactttatgtgaagtgaacagctgctttttttatctgcatctagacatcaagtagtccagagtcctttctaacaccctagcaatagaagtaagaatattttgaccattccatgacttgatgatacttctagtaataatactgtattattaaaaacaaacaaacctttgtgcagtggtaattgaagcagttccttgggaacatgtattaagtactttttagcagttaagtccactctctgtaggttaaggaatatttaaataaaataatgtggcaaatgagttcaagatgataaatgcgatgagaactaaaacagctttaattttatgtgggaaataaatagaggaaaagtacattacagggctcctggacttatttctttcttcaaagtgtttctcctagcgaatattattactattttttctcttaagtaaaaaatacacaaagtatgaatctacacaggataataatattgaagttaaggatgatgtctcctccttcactctccaaaatactatttacttggcttcatggaaatctctctcactccaattccaccgtgtcaactgaggtcttctgttctttctctccctatagcatattcctgttacataaatcctaaactgtgtcgtgttagtcacacactgtaacctctagataagcgcctgtccagaggttctcaatcagagccttgcaaatatgtattaaatcaatgggtcatcttcagtgtctcagtgggcccttggatatgttttgcagactgctgtgagtatgtagggatgtccagtatcgagggaagtgtggatggctttcattggttcttatagggctgaagaacacatagagcagtaagcacttctactgtagggagagatcgagcttctcccatccccactgctggcaccaccaccaccctacaccccattttgagttctgaaagtgaatccttgagaaagaacacacaaaacaaccatcataatagtgggcacagctgtgggtggtagaataacattcccaagcttcttttcctacacatgattaatattaattcagcaaacatttattcagctcctacttttaaacaggcactattctaggtactaaagacatagaggcaaagcatacaagactctgcctttgtgaaacaattaagaaataagtaaaaagaaaagaaacagaaaaggcaatttggatagtgtcaggtgctataaagaaaacaaaatgccattttaataaataataataatacaatgttttcatactatgtgctagacactatgctagtaggtatttatagacataacctcaattaatcctcaaaatggcatgttgatatcaataccccaagtttacatatgagacttaagatgtctgagtatattcccccaggtaacaattaatatgcacaataaaactttttgctcattcatttattaacctatgttgattgagtacctattttgtgtcaggcatcattttaaggcacctggatatagttatgaacaaacaaataaaaatctctgccctcaaataattaatatctcacagaggttaggcaaaatataatcagaaaataagtataacgtataggatgccagatcatgaaagaagctatgaatggcatcaagaagctggaaaaggcaaggagacagattttctcctagagtctccaaaacagaacacagtcctgccgacaccttaactttaggctagtgagacccctattggacttcagacttacaatcccacaatgtaataaatttgtggtaattcagtaggggaacaatagaaaactaatacgatatcaaaacaaattatatcatagaacaagaaaatgtaattgtgacaaataatacctacaaaaatgttgtaaatgctaggcaaataatgtgtttaaagcacttaggccaatgttcaacgtaaagtaattcatgctataatatcatcatcatcattaccaatatttaggggctctaacaaatgatgtacgtgtaagcagatgtaagaaaatttccttgctgaagaggaggtattaatagagtatataacaatagataacaaattccaaataaaggcaaactaaatgttttattggattaaatttaattttaaaaactacaagaggccgggcgcggtggctcacgcctataatcccagcactttggaaggctgaggtgggtggatcacgaggtcaggagatcgagaccatcctggccaacatggtgaaacgctgtctctactaaaaatacaaaaattagctgggcctggtggcgcgtgcctgtaatctcagctatttgggaggctgaggcaagagaatcacttgaacaaccaaggagtcggaggttgcagtgagccaagattgtgccactgcactccagcctggcaacagagtgagatcccgtctcaacaacaacaacaacaacaacaacaacaacaacaacaacaacaacaaaactgtgagatccatggtgggcttttaagaggaaaatgcaagctaaggtttgtttagactctgagtactgcatgtgtaaaaataaaggcatgatgaaaagatcaagagattagagtgatactttttatctactagtgtcagagtcatgaccaggggattggctatgagaatacataagctgtgccaggagtaatccaaggagattgtttcaatttggaagagtgtccacagaatgattctcatactagacgttgggctattgtaaagaaagttggtaggtactccatcgctaggatcatatcagggagaaattgaacaggatggccctaatgaccctgttgtacccctagcttatggattaggcaagtcacttctactcgtataccctgtttccccatttgtaaataagaggatgtgttactctaaggatctctaagattctttgcagttgttaaattgcatagctctccactgattccatggtggaaatttgctattctattacaaatattctaaatgtatgagatatcagacatactcatttaaaaaacaaaatacaaaaaataagtattctacaaataaacacagataatgtttaaattctatatgtctttgtttctcttcagaagcatccaaaatacaaaccatctaagaggcaagaaaatgtcgtgatgttcctagtgcaagttaaaaagatttgctttcctcaagtcggaaagcccttctcatttttgaggtttttttcttcttttttttttcaagtgaaagcattttggaggagtcaatatccatctttaaaggtagccaggtcacatgtatacatatgtaactaacctgcacaatgtgcacatgtaccctaaaacttaaagtataatttaaaaaaaaagaatttaaataaaaaaagaaaatcagagagaaaaaaaaaaagatgcatgtgcaccctgatactaccatccatagtgatacggtttggctttgtgtccccacccaaatctcatcttgaattgtaacccccatgtgttgagggagggaccttatgggaggtgattggatcatgggggtagtttctccatgctgttctcatgatagtgaatgagttctcataagatctaatggtttaaaatcatggcacttccttttgctctctctttctcctgccatgtgaggtgtgccttgcttccccttccccttctgctatgattgtaagtttcctgaggcctcctcagctatgcagaacggtgagtcaattaaacttctttctttataaaaaaaaaaaaaaaaaaaaaggtagccaggtaaaaattacttgtttccaggacattttcacctgaaagaagcattgtcatataacatagaagcaagaaatccagtagtgggggttatttaaaaatagctggaaaatttcaatcagcatgagtttgaagcaacaatttatcatcaccttttatggtgggtggggttaagaacatttcagcgggcaaagtggtggtgatggggaagagacaccaggggaggtgattcccattgcattgctttgtaaacagaggcacaggttcttcatttttgtcacacaaaatcacagctatgcagaatttattaatttattcttctgagacaagaaaaaagccaccaaaggaaaccaacagcttgctcctctcacactgggggaaccatatgagagacttatctatccctgactttaattttgacctgaggagagctcctcttaaggaaaacaaattaattcaatgactatactacttaatcattgacctttatttaataagagatttttccataggatatgctgagctgtctcacttacatcagttgtgtctcctgaggtgggtgacaggagaccacaaatattgcatagcacacaaatcgttaatagcagctgtataccaaaccattacctaaatatgtagagtacaattcattctcactaatgtcagagagcatgctataaaatggtgaatccggacagctgaagatactgaataataacctctattttgaacaagtttacagtgttccaatcagtaattaaattgatacctgatgaatatatgtgtgtgtatgtattcatagcagagatggttttcctgagataaggattttgttattcggataggctgctgctggaattgtccttctacccttgtttctttgtccttagtcatcactcatacctctttccactcttctgccatcacttttgtcaccaaagtcatggtcctttccccgccgattgctgctgcaggtctagggcaccaagacttaggcagcactcaccatgtgccaagaactggaccacaggtaccatccagcattgctcatggagactctgtccctttctgtaggacaccctccttttagctagcaacccctccaccacctagagcctctggacctctcattttaatattaagaactaggaaaacttaccgctgagaataactagtacaactagaactggtagagaaatctgggtctcttgggaatggatttttaggctttattgattagaggtgtattaataatgcagtgttatagtttcatgacataacgaataaaaaagttcattttggacttgcctttcagctccctaggagctaaaagacgtatttaatgtaacttgtgtggtggaaataagttcttttttcaggcaaaagatgtgcaaacccatctggggaagaaacattaaaaactaaggagacagtgtcctagataactatgttcttttcctgttttagtctaaaataatgattagttttcttatatatcttcatttgtcttggttccttttagcccaatttaataatattattgcagatattgatgaaaacctttaccttcctcttaattcatcaaagtacttgataaaatttatacatagtacattaattgggaggtttttatgagattaattaatataatgaactgatgttgaaattatttaaaacctgaattattattgtattaagtaggacacttaatacagttaatcagttctgtctttattcatttgtgagaatttttggcaagctattgtgaatattcagggaagggaatgtatttttagcaggaatcttatacctcctacatagaaatgaagcatttactgaaacatccatgaaacaaaatgtttctgaatgtgtactatacacttgttataagccccttttcttctgtagctatattttggagaaaaatctttgctttgacaaaaaaaattatgttgacttacacatatattttataactaagcagtgtttggtttgtgataaaggatacaaaaatataaaaatgttcagcacacgtaagtaaggccttgttgacagtgtgagttatgctactggatactcaaaaggaacattcagtgttctcaggtggtctctagactgtctcaagcctaggaagatattttataagcaaaggaataagagaaggaagattcagatttaatccaagtgaagaattcagttttgtgtgccttatcctgttattttgagaggcagccaaaagatgctggtcagcaaggagaattgtaagttgggcagccaactctgatttctcaacctcttagctgttttcttaaactcagaatttttaatgaatttaaatgtccatatcaggtagactttggggatgcttttaccagtgattttcagaatgttactttctggcatttcttttcacgtagcattatattaaaaatgaattcattcatccaccttcccttgtccttactaattttccctcctactcccttcccccttgttcttgccatggggacatgcaaacactggtggttgatgtctgagcaaggctgctgacagggggaggaaggagatgtcaagcagaggtcaatggcagtgtgcccagcagcctaggaagtaggagggaaaagagagagagacagagatggtggatgaaagagaaagccaggatgattatggtggttatgatacttgtcatgctgaacacccaattgagcacccaataagcacataataatttaatcatcctctggcttggatggcagtgttctatcagtgttgacttcctggttgtgacagttttacagtgttagtgtagaagagaatccttgctttagagaggtacttactgaagtacttagggttaatgcaccattgtgctggaaaaagatacgcacacacacgcacacacacacacacacacactctcacacacacgcacaaatacatccatgtgttaggcagagggagcaaatgaggtaaaatgttaacaattaggaattctgggtgaagtggatagagggactctttgactgttcttgaaacttctctatacatttgatctgtttcaaattcttcagaaaatcaaactacaaaaacttaattcatttagtgaacatctactgaacatctgtatattaaatagtgttaaatgaatgtcaattaaaatgctcaaacacagtagaggttgattctcattcacataagtccatggtaggtgtttttggcaggtgggtgagtttctcccttagggagattgaggaacccagactcctcccaagttgcagccccaccgtcttctgaggggatgcatccatacccacttcgaagtagcatacattatttcctttctcattcctttggataccagccacaatttattcaaggtagacagaaaattgtagtatatagccatatgccctgacaaagaagggagaacagattttggtggacaactagcaaactctgatacaatctgttattaagcactgtgtgtggatagatgctaactagaaggagattatcttcccttcagcaaatataaactgaatgccgtttatttggttgaaactaagctagatcatgggagtatagaaattttataagaagacatagtcacttctgtcagtgagctcaagaagaattagtatgcggaatgtaatcatacctacagggggcttgtgccacttaagtaaaatgaaacattattttgagtacaatttagcaataaatgtactacgagatcattaaaaatcatgtttgaatgttattgtgtcaaggatgggaaaaagacttttgggttgtagacttgataattatagttaaaaacagtttttattcttgtttagtcttattttttatgtttaaacatatttatacttgctaacatttatacttgctaagtaaagactgtttttacaaccatgacaagaacaaaacatattagtaatgcaaatgccacatttcctacaatcaactaatcacactaacatatttgcatggaagaatcactgggattgatctggccacgtgtgtagtcatgcccaaaatgtgaagtccatctgttttgcaattttttttaaccactgttatccaaatgctccttggattttttttattagtggatatattttggaggtcagacaccctcttggctagatcatcacctttataacaaatatatatactattctcatggaaatatatttagacattgccctactgggaatttttttcaagtaattaatgtacagcttgtgcaacagcttgatcttggcttcatggaaataattcactcttagcagcatctaatgccacaaagcatttatggatgtcagctcagaacttacttttatttatctctgagttacttttttttttttttttttgagacagagtctcactctgtctttggcttgtccctaacctcttaacagacttaatattaagctccatttcactcagtcgttctgttgtcatataaatgagacattctacaagcatagtttttagtttctgccagagcatcatacaacattgtgagctatgatgaagataaagacctagagaagatatttaatatgaagttcattatctaatatttggtatgtgtggcaaaatagcaatctactgcttggttctgctgtaatctatttacccacccatcccatctttctttcaatttaaaaggataatgattttagtcacgattatacataaacccattaccataggcaataaacaatggggcaaaccattggtcccatagttggagtgtggtctgaagtgtgttttggtggagagagatctatgtctggagatagctaacatggatttggatcccagatctgctcctacctgttgctgtgcctgtgaccaaatcatgtgatctctctggtttcagtttacttgtgaataaagtaaataccttcatcaacacctgtttttgaatacaatgtttttctgtaatttttgcttcttataatgttataatgatcatccttacatctaaatcttggtttacattttcatcaattcttttggaaagattggagaagtaaattttggagatgtatgtcggctattaaaaatgtttaattttttaattaaaaattaaaacgttgaaaaatcctgatgcaaaataaatgcattatgcttagtgaactcttctcatttcgaagtttattcaccttcttgtttttgcaagtttcctgaaaaatgcatataaagtcactaagttagcagaactttataaaattatataactatatataatcttttgatatcagtgaagccagctgatcctatagaaataatgtaggaattataatcactagcacataatttaagagtcctgtggtcttattcatgttatttaccctctctgaatcttacatatagtaagagggttattatacataatatgtgtacatgtatacaggtaagtaagtatatatgcttatgtgtaaaagcagagttattgtgagagtcaaatggaaatgtgaaagtactttgtagttttttattactattattaatttttaataaaatggtaacattcatttaataatcattagttttaacttcagattgtactggatttcctctagtatttcttaagattagtgaataaagtatttctcctaataaatatattgactactgtctttcgatcaaacatattaggtatatttttacagtagcatcaggcagtgaaaatttgaagctctttatagaggactgatttatgatgaaaaggaataacatgaacaaatggaattatatgaagcttccccagaaatatctaagaggggccaattttaagaaatatctgacttctttttcatggacatttcaaaataaacctaactcatatggtacagtttttaagagggaaaagaaaaaaccatctgagaatctctggaattctgccgaaagtatcacttggcattttattctaccttctggatgcagttgattgacagtagtgttatgatgccaggggtatagtgactagaaaaagaaaaccagggaattcagtgttcttgctcatgaagaacagcttggttctttaaaaacaatgagattttgccaccccatctcacaaacctatgatttgtgagaacaatcccttttgtgttgcaagacttttacatttctcttcccacactatattagaagaataaacattgcttcataagtaccgattgatagtctcatttcatatttttaaaatagagttactttaaggttaaatttttcatgtagattaaaatgactaagtaaccattcacatatttcaaataaaatatatttttactacaaaaggaaaataactagattcttaagtgttatagtcaagtgtaattgagtaatatgaattctaaatgaatttctaagatctgctcagctttcactactttaggaaggaacaacttaagaaaaattttaataaagatatctcttcacacacatggcagtgttgtacttagagaacatgacccaaaattttttatgactgcatattgaattcctgatactcttgggaagctccaaaagcaccagtggagtttccagatgtaactgtggctgcagacccgccagtcccggtgttggaagggatcattataggctcttgtgtgcagactcatcttcagacccagaggaattaaataacttgcccaaagtcgcacaactttctcatggtaggttgggcactagaataaatattgctttttcttaagagttttagcctccgtattatgaaatcttctatgttctgctgatgatatctcctttcttcatctgttttctatttttaagcaatggaaatacaaacttgcaactccccatttccaacacaacttagaaaaaacaatatttaaagaaaaaattacaggcatctcatctcctttacctgacagatgcttgatagtaatggcctctagatagggatgacatctaatataaatgtgtcctttcaagtcaagctttctctgttcattagtagaaatattgtatatcaagtgtgcaaaaattttcttcaacagggagctttgtttccctccttttattataacaatctgagctttgtggtcccagggtctcctagtgcctgtctttaggtctgtttattcacatgaagaaagcatgtcatatagtattatctaagactcaggctgcttatgcatgatgacagaagggttcccaggcacaaacattcatccatgcattcatccatccacctattcatccattgatttggctgataattattgactactgttgagttgccctcagatttagtttctgtccttctgccatggggaaatatggggttaagccacaacatactcttctcttctttttctgcaccttcttagtatatttagttccattttgtctagccctgcctctgacttctttgttgtacttcaggttttttatcattgaaagttatttctggatcatagatcattctcttggtcactttgcttgttcacttataaaattaattcagaaaaaatgacccacagtaattaccgtaaatcacagaccataaactataatactgtatattgtattatagtacagaaatatttatactttaaaatgttttaaatatagatattataaaaagatatgtctcatataagtaatataaatacttttttattacctcttctctccctattctccaggccagtgttttaaaaatccatctttatatgtccatcctggaaaaaactcatgatcataaatgagtttctcaatagagtttataagcccacagttgaaacacaattgtcttagcatccatttagttgtcatacttttaagatttaatggcaaatattatgttttgtttcttcaaaagaaatattttaaaattttagtaaaggcagttagagaaggtagagataatggactgtttaatcctacttttcatcccacaagtgaacaaaaaaatgataaaacatttttcccaaaatgtagctttaactatacttaaatttggactaaaatgggagatatcttttctactattgaaaagccgtgtctgtagattaatgctaaaatcgggtgtaaaagcaaaatttgtttggcttgattgccaatggcccattcatttggctacagaaacaatagcacatagcaacagataatgatgtgagatcacctagctcaagtaagagtgtctgatccgtcaaaaatatatacatcaagattcaaaagaaatgtgtgttttctcaagtcatctctgtaaaaatacattaaatagaggaatagaagtttgactttgaaaatacattgcagacccaatccgtctttcctattttctggtgaaaagtatcaaatatgtggaacctggaactgctattctccttcttaaaaatctttcttaatattctattgataactggtgcaagcctaactttttgtcttacccgattcttctcacaccaaagtgataggaccttcaggtagcctttggatagaagataaataataatttaactattgatggaagttagtattagaattagacttggaagtctatggaataaaatgattctacaacaatttgtacttcagacattagtataacaaaacatgtttgcccgtgcatgcggaaacaaccaatttcatgtggatgcttatattcacaaaggagtaaccacctggggtttcccactgttgctccagagaaaactagcagcaggagaacttctctgaaggtatcaagacatctttaaaaaacacttgttaagtgttggttcagctaaagcagggagttttcagttagtaatggcttttaaaaattaaaacaagtttagcatgtaggtcattaaccttgaatcactgtcatgattattattaaccatctgttctcaaatcgaaagatatttttcttttctagatcacatttattctcacattgctcaatttcactatatatcaagacatgaaaactgtaaaaatcacaccttctacattattatttttattgaaaaattcctaatgaaacagtgcgctctgggatagagaaaggaactaactgacattttgcttcttaacttgtttttatgcaagttctaagtggtttctggccatgtacataaaagacaaatatctggaaaaaaaactagcagaagtcagttatttggctctatctactttgagaattatgttatataaatgttaggaaattttttgtaatattcttatttagaaatgaaatataaaaagttttaaaaatatctaaggacagtatacagtcctaaagtaaagctgttaggtaaatgctacacaatcctcttattacagagtcacttacctgagaatataagaagagggcctcttgtttaagagtaaatgtgagctgcaatcaggattctgcactcatttggacacttagttttgtttttccatgactggtgttgcctgttactgagacacctacctgtcatgtgaccacagcttatgttacaatgtgtctagtcagacttagagatgtgtgaaagagcagtacctagacgggaaactatgggtctataaaggttttgccttcttgggcggagttcaaactaggaagccacaaaacttccagttgcattttcacagattaatgaaatatattttacacttttcctgaaagatattttatttgtgcaaaccttgttacaaagtacagccagttgattaatcgatgaagtgatttgtagtggattcttatattttgtgtaagggtatatgtgaggccctatatatgaggctttctatataatgaagtataattcagttcagcatttcaattcagcaatcacttattgggcctctactcagttgccttcagggctttataatttaattgataaagggaggttaattaattaattataacaacagatcgcttaatagtgtaactactaatttaattaatgacaaataacaatacattaaaagaaatgcattaataaaaataatatattggtgttatagacaataattttctgattaactttattattattatttcaatagcttttggggagcaggtggtttttggttatatggagaagttgtttaggtatgatttctgagattttggtacactcataacctgagcagcatacactgcacccaatgtgtagtctttcattcctcaccttcctcccacccttcccctcaagtctccagagtccattatatcattcttatgcctttgcatcctttagtttaggtggcagttataaatgagaacatgtaatgtttggttttccactcctgagttacttcacttagaataatggtctccaactctatctacgtagctacaaatgccattattttgttcctttttatggctgagtagtattccatagcatccacacacacccccctatgctttatatatatatgtaaatatatcacattttctttatccactcattggttgatgggtatttaggctggttccatatttttgcaattgtgaattgtgcagctataaacatgcatgtgcaagtgtctttttcatataatgacttcttttcctctgggtagatacctaggagtgggatcgctggaacaaatgattgttctacttttagttctttaaggaatctccataacttttccatggtggttgtactagtttacattcctaccagcagtgtaaaaaaatgttccctttttaccacttccatgccaacgtttatttttttattttttaattatggcaattcttgcaggagtaaggtggtatcacattgtggttttgatttgcatttccctggtcattaaagatgttgagcattttttcatatgtttgttggctgtttgtctatcttcttttgagaattgtctattcatgtccttagcccactttttgataggattatttgttttttcttactgatttgtttgagttccttgtagattctggatattagtcctttgtcagatggatagtttgcagatatttctcccattctgtgggttgtctgtttactctgatgattatttcttttgctgtgcagaagctttatagttttaggtcccatctatttatcttttttgttgttgttgcatttgcttttggtttcttggtcatgaactctttgcttaagccagtgtctagaagagttttaccaatgttatcttctataatttttaaggttttgggtcttagatttaagtctttgatccatcttgagtggatttttgtataagttgagagatgaggatccagcttcattcttctacatgtggcttgccaattatcccaacaccatttgttgaataggatgtcctttccccaccttatgtttttgtttgctttgttgaagatcagttggctgtaagtatttagctttatttctggattttctattctgctccattgatctacatgtctatttttatagtagtaccatgctgttttcctaactatagtcttgtagtatagtttgaagttgggtaatctagtgcctccagatttgttattttttgcttagtcttgctttggctgtatgggctgttgttttgttccatgtgaattttaagattttttttcttgttctttgaagaatgatggtggcattttgatgggagtcgcattgaatttatagattgtttttggcagtgtgctcattttcacaatattgattctgccaatccatgaataagggatgtgttttcattagtttctgttgtctgtgatttctttcagcaatattttgtagttttcctgtagagatcttccacctctttggttaggtatattcctaagcattttttttttttgcagctgttgtaaaaaggctcaagttcttaatttgattctcagttttgttgctgttggtgtatagcactggtactgatttgtgtacattgattttgtatctggaaactttactgaattaacttatcagatctaggagctttttggatgagtctttaggttttctaggtatacaaacatatcatcggcaaagagcaacagtttgacttcctctttagcagtttggatgctctttatttctttctcttgtctgattgctctggctaggatttccagtactatgttgaatagaagtggtgaaagcaggcattcttgtcttattccagttctcgggggaaatgctttcaaattttcccccgttcaatataatgttggctgtgggtttgtcataagtggcttttattaccttaaggtgtgtatcttatatgccagttttgctgagggttttaatcataaagcaatactgaattttgtcaaatgctttttctgcatctattgagtttatcatatgatttttgtttttactcctgcttatatggtgtatcacatttattgacttgcatatgttaaagcaaccctgcatccccggtatgaaacccacctgatcatggtggattatctttttgatatgctgctggattcatttagctagtattttattgaggatttttacatctctgttcatcagggatattggtctgtagttttctttttttgttatgtccttttctggttttgatattagggtaatactggcttcatagaatgatttagggaggattccctctgtctctatcttttggaacagtttcaatagaatttgtaccaatttttctttgaatttctgatagcattcacctgtgaatccatctggtcctagactttttttgtttcctgacattttttctattattgtttcactctcactatgcattattggtctgttaataatttctatttcttcctgttttaatctaggaggtttgtatatatgcaggaatttgtccatctcttcttggttttctagtttgtgtacgtaaatgtgttcacagtagtcttgaataatcttttttatttctgtggtatcagttgtagtatctcccatttcatttctaattgagcttgtttagatcttttttcttgttttcttggttaatcttgccaatggtctattgattttgtttatcttttcaaagaagcaggtttttgtttcatttatcttttgtattgtattttgtgtttcaattttatttatttatttatttatttttatttttattttttgagatggagtctcactcttgttacccaggctggaatgcaacagtatgatcttggctcactgcaacatctgccttccaggttcaagtgattctcttgcctcagctgcccgagtagctgggactacaggtgcctgccaccacacctggctaatttttgtatttttagtagagacggggtttcaccatgttggccaggcaggtctcaaactcctgacttatggtgatccgcctgccttggcctcccaaagtgctgcgattacaggtgtgagccaccacactaagactcaattttatttatttctattctgatctttgttatttcttttcttctgctgggtttgggtttgctttgtcttgtttttccagttcctagaggtgtaagctcagattgtctatttgtgctctttcagactttttgatgtagatatttaatgctatgaactttgctcttaacatggcttttgctgtatcccagaggttgtgataggttttgtcattattattgttgaattcaaatatttttaaaattttcatctttcttgatttcattgttgacccaaagatcattcaggagcagattattcgatttccatgtatttgtatagttttgagggtttcttttggagttaatttttaattttattccactgtggtctgagagaatacttgatataattttgattttcttaaatttattgagacttgttcatatggtctgtcttggagaatattccatgtgttgatgaaaaggatgtagttgttgggtaggattttttgtaaatatctgttaagtccatttgttctagggtatagtttaagtccatgtttctttgttgactttctgtcttgatgacctgtctagtgctgtcagtggagtactgaagtcccccactattattgtgttgctgtctatctcatgtcttaggtctagtagtgattgctttataaatttgggagcccaagtgttagatgcatatacacttaagattgtaaatttttcctgttgaactaattattttatcattatataatgtctctctttgtcttttttaattgttgttgctttaaaatcttttttgtctgatataagaattgctattctttctcactttgagtttccatttgcatggaatatctttttccacccctttaccttaagtttatgtgagtccttacgtgttaggtgagtctcttgaagacagcagatacttggttgatggatttttatccattctgccattctgtatcttttaagtggagcatttaggccatttacattcaacattagtattgaggtatgaggtactgttctattcatcatgatagttgttgcctcaataccttcttgttgttgctgttgttaattgtgttattattttatgggtcctgttaaatttatgctttaaggaggttctattttgatgtattcaagttactgtttcaagatttagagctccttttagcatttctcagtgctggcttggtagtggcaaattcagcatttgtttgtctgaaaaagactttatctctctttcatttatgaagcttagtttcactggatacaaaattcttggctgataattattttgtttaagaggctaaatatagggcccaatctcttctggctagcagggtttatgctgagaaatctgctattaatctgctatgttttcttttataggatacctgatgcttttgcctcacagctcttaagattctttccttcatcttgactttagacaacctgatggctgtgtgcccaggtggtaatctttttgcattgaatttcccaggtgttctttgtgcttcttatatttggatatctagatctctagcaagactaggaagtttttcttgattattccctcaaataagtccttaatgaccccactatataacatgaaatatctgttattggtactgaggtgctggccacaaacaattctgtgtgtcctgaaaactcttcagaatattcgtcatctttagcacttgttatcttagtgtttgggcttggcttagagtgatacatctcataacagggcaacagaaagaaccaggaaccaagatttatataacataagtcagtaaaactagaggcaccagaggtttacatttacattaggttacattttctaacaggtagcaaagcacatgaatgaagttcagtggaaggccttcctcaggaatccagtaaaaaccaaacatacacacacacacacggacatccgtgaggcaggaagggatgtccactatagtacagacaagcatcctggaaggccatcaaggagtaggtgggtttcagttgcctcaggaatgtggcatggacccaaactaagtgagtacagatacttgtcattgaggagaagattcaaaatagcatcctaggtgtaaaaactgaggcacctggggcaggggaactaggtctctggaatgttggcttaaaagcacccctctcaggaaaggcctcatatgccatgcagggggttatatatgtgttgtgggacacagatggcaaggagataattctatgcaccaggctccactactaacaggtaaacagaccaacattaacagagacttaggtaaaaaggtaggtgcccagtggtcagttctcaggcacttccaagatgcacctaacagaaatgtaacttggtgtctattgtgtcctaggtctaacaactgaagagaagtgaattagtacctcttgtggacagagaaacaggggcagagacccattacaaagctgtctcagataggcatttgaagctgtttaagtatgtagaggcttaagtcaggctggttctgaaatgtgagagagggttaagcttcatgggaaatcagcagggtagtttgctattttttattataaccaatctcacaatagtttgggacatcaaatatcaaattgttgggaatatttatccatattagtctttttgccactaatatttaaaaatagtttacaatatacaacaaaaagttgtaaaatttccatctccacttaatcgatcttatgtaacccatacaatacatcaaatgtcctttccccactttatgtttttatttgctttgtcaaagatcacttggctgttagcatttgggtttatttctaggttctctattctgttttattggtctgtgtgcctatttttataccagtgccatgctgttttggtgactatggccttatagtatagtttgaaagcaggtaatgtgatgcctccagatttttctttttgcttaatcttgctttggctatgtgggctcttttttggttccatatgaattttaggattgttttttctagttctgtgaagaatgatggtggtattttgatgggaattgcatttaattgtagatttctcttggcagtattacccaggcttttcttattttggcaccctgtgctgctgtctccttttccttctttctgcttctcttaaccaactgttacctacacttcaatactttctgagggcaattcatcctccagtaagtctccctgaatcttctcttccttccctggcttattatatatccttcctcttggttcccatagcacctatgcacacttctgtcattgcacttgccaatttgttttataatgatctgctcatctgtctcctcacttagactatgagctcactgagagcaatggctgttgcattcaccttatatcctcaacaccattctgaaggcaagagaaagaatacccagaggtggagctgggaagctggttgtccaagtagtgaatgactctagtttgaattgaactctatagccagtgggcaatgtggatgtgttgacagttttttaacaggggactagtgaaaacacattttgggtttagaaaaaattgcaagtctgatgacatacataggagaagagattagagataggaatttcacttcagaaatttaaccacaagagcaagtgacagatcacggaagtctgaaccagactataaatgtgagaatagagaaaaaagttaacaatttgggtgtgaaagggcgagggagagaggtgtgaagaatgactaagtgtggatctgtttttaaggattgaatggaaatttgagcattttagctaatcaggcctaatattgagcaaagcaaaactcttgcaaattgttatttcaagtgtgggctgagaaaatgaaaaaatataaattctcacgttataacctcttccgtgtgtctgatttgatagaatccagccccattgcctccaaattccattgcatcttagaccagcaaacacaagtgaattctacttaaccccagaattctgtatgaaaatcttactgcctttttttttctaatcatgtgtcaaagtgtgggaagaacttttatttatgttttaataaattgtcagtataaccatttttacttgaaaatattataatttttcaagtaaacaaattgtttctctaagttgaaaattttatgatggaataaaagtatttttcctcaaaacacatagaaattttacaacaatattttagagttaactaaatgtttctttagtagtttagtcacttaaaaagtgatatgattatgaaaatacttaaactttgtcttttaactatttctaataatgctattggtataatttcatatttttatactgatcttttctccaaactttagtaaaacatacttctgtaaacccctgcccacaaaactgaagtccacatttacttctgaatgactgataagtttgtaaaagtatgcatgaatttcgttattaaattaaagtttttattatattttatgcacaatggtataaattattaaattaattttcaagcttatagaacattgataaagattgtcattagaaaaccctgagttgattgttatacattacataacctttcattggtggattagtgaatatgttatagggtgaccatgaatccaaagaatcaaagctggctacagcaaacagagggtcaaaaggatatggaactatgcatgatccagcaaaacactcaatatctgttttcctggaatgttaaaagacaaagaagaaaacttggggaacactagatgcatatagttctggttctttaagaataaaaatatgggccgggcccggtggctcatgcctgtaatcccagcactttgtgggaggccaaggcgggtggatcacaaggttaggagttcaagaccagccaggccaacatagtgaaaccctgtctctactaaaaatacaaaaaaaaattacaaaaaaaatacaaaaaaaaaaatagccaggtgtggtgacaggcacctgtattcccagctacttgggaggctgaggcaggagaatcacttgaacccgggaggcagaggttgcagtgagccaagatagtgccactgtgctccagcctgggtgacatagtgagactctgtctcaaaaaaaaaaaaaagaataaaaacaagaatggtcagagtcctagtaccttgtccagtgtagtgctgccttgagattgcattgcaatctgtctgagagatagtaaaagaaagtgataccttccttagccctgtttctctttagactatgctttcccctctccaagttaatatctctcagtctaaagcctgggaaaaggtgccaattttgtttttctttcttcctcacacctcctagaagttacactgggacactattacttttttccaggctttggccatgtgtattgttttggagagtcaacttccttttttctttcattctgcaaatagttttgagctgtcactctgtactaggtgctataaaacttacaggtgcattttacatgcctatttcctataggccacgatttaacaaaatgttcataaatgagaattaggagtgcatgtattgaatcaccacacattaactgaacagctttcattggccagagactatattgacagtggagattcaaagataaactagagaaatctcatgcttaaataactttctataataaattatataagagaagtaggttcagggatcttgggagctcagaagcaggatgagttaaacaaaagttggattttgcctttagcttggtttcattatcctgaaggaagagcctgaaatatagtgtagggtgcaagtagtatatgtgggtggcaatctcgggaaacaggagcatgtgatgaataaggagaaaaagccaatataaaggtactgcattgagggcaatgagggctctaattctctgcaccttctcaagcattgtgcagattggttttctggattatcagcctgaaggacaaaacgaagaaacagccattagctcctgtctcccattgtctgagagctgccactaggatattaacttcctgaaattctgcagaaatctcctcttactttggcactggagatgcccatacgcagaaagcaaaaaggcacagcatatttaaggaagctcataagaaacagtgcatccagaagtggcgagaattggaggaatggacatgagactctaagaaccagcgcctttgatgttccttttgatctgttatgtagctcttcttgtacacaggtgagcaaaggcatgctggacaaatggattcacatgtgctaaagcatggggcaaaaaccacatattaattcaggaaaagacaagatgcgtggccctctctgtctctgtctaagggtgaattaaagaggggatatatgtacagagtggcagggcaggacttgagataagaaggctaggtgggtgctctcatgctagtagcattatagtacaggtgatgagaagctcctgaagaatcatcttaacatttgtattttagagcaacagtattgagttctgacttagagacagcaaaactaaagacagaaagactattttgattattaatgatgtagatataagaatatcgtcaatgtgaactaaagcatgaagctacttatgatatatcattaaaaggatttaactgattggagacaaacgagagggatggggaaaagaattcatttgtttttagttgctctttttttcctacttattcctttgttccgagtgtgaataaactttgtaaacttttatactaaaacattctgctcattcatacttatttctttgatgaaacaaggaaacccttgtatagttataaacgtgtgaatcaatttaaatattaggaaatttttttaaataaagctagttttctgaaggggaaaaacttggttcaattttttgctggcaatctgctttgtgatttttgaacatgatatctacatctagactcatgttttgctagctggaattttttttcaaattaacgctaccattattatatgctttactatttagcttttgcagccttggaaatctatgattaatacaaataattctctatggcaattttaaaaatacatgtaaaagccttcaatctacattgctactgtgtcgtagcacaaaaaaagaaaatgtgatcaaattttaataaaatctacaatttattcccttctaaatacagtcctagctcaggagaaaggaagctatttgtatttttcagaatcaaatttccctaaatgaatatagagaaagaattataactgaaatattgttgaaacagtggtcatctcaaatctgaaggtcattccaaaaaagtttctgagttttcattgcctcaatctaaaagttggcctttttggtaatagatgaaagtaaaataattgaaagggtctgttgcagttttggaatatcttgaaaatatagtagagtgaagccttcttcccttaaataaaagacaagttgctgattgttttctttctagccagataagaataatgccttctttctcttgttagtcttaacacctcacttgttactatgtgtcagaaaggcgagacaccataaatggagatactactgatggaggtcatctgacatggggctggtaggcagtgggaagactggtatggacacaggtggcttaggggttggggaatgatatggaactaaggaaatgataattagcagaacccagtgtgcatgtgtgtgcattcgtgtgtccgtgtatgtgtgtactgtagcacaatgcaagaaagaaaaaacaaggcagacttttcataatttcagggataaataaatcctttatcacttcatgtagaatattggctacttggaggtatatctaaacgtaaatatataactatataactacatgctaattaaaaacatacaaagaagaagtgcctaaagaattacaacagaaagtggcatagtgattattagagttaatataatataaataaggccaggcatggtggctcatgcctataatcccagcacttttggaggtcaagttgcagggatcacttgaggacaggggatagagacaagcctagccaacatggtgaaacccatctctactaaaaatacagaaattagctgggtgtggtgatgggcgctggtaatcccagctactcaagaaactgaagcaggagaattgcttgaacccggaagctggggctgcagtgagccaagatcgcgcactgcactccagactgggtgacagagaaagacccggtctcaaaaaattaaaaaatagtataaataatatttcaaaacacaagtctgttaagataaaaggtacagaggaatggtgagatgacttttttatttgtgtgataagggactgttttctgtgattgtgagaaagaccaggagttaagaaaaagtggccatcaataaatcagccacttatggggaagaaccataaaccactctcagatgaaatacaaatgcagtcattatttaatattattggaatatttgtattagtttttggtatgtgctgctagtgctggtacattttagtagtcaattaatattttgttaatcttaatttctaactaaattccagagtgaaatggaaataataatgaaaaaattttatttacaaaacagattttgtttttttctgttaagaatgatacacagttgtccttcagtagccataggggattggtttcaggacctcccttgggtactaaaatctgcagatgcctaagcccctgttataaaatggcttagtatttgtatataacctatgcacatcctctcatatactttcaatcaggggtccccaaccccagggccatgaccagtactggtccatagcctgttaggctgttcgataccaggctgcacagcaagagctgagctcctcctcctgtcagctcagtggtggcattagattgccataggagcacgaaccctattgtgaactgcacatgtgagggatctaggttgtgcgctccttatgagaatctaatgataaatgtaatgtgcttgaatcatcccaaaaccattccccttcccctcaccatccctgtccgtggaaacatttcttccagaaaaccagtccctggtgccagaaaggttggggactgctgctttaaataatctctagattactgataatgcccaatacaatgtaaattctatgtaaatagtttttatactatattgtttagagaataatgaaaagaaaaagtctacatgttcagtttaagtgttgataagtgtgtagagaaaagggaacccttgtacattgttggtggaaatatagattggtgcagtcattatggacaatagtacggaggttcctaaagaaattaaaattagaattacctaagacccagcaatccctcctctggatgtacccaaaggaaataaaatcatcacctcataaagatatctgcactgctatattcattgcagcattatttacagtagccaagatatggaaaccacctaggtatgtgttggtgcatgaatggataaaagaaactgtggtatatgtatatacaatggaatattattcagccttaaaaaaggagaagaccctgtcatttgccacaacatgcatggacctggaggatattaagctgtgggaaataagtccaacacacatccacacacaaaattgcataatctcacttatatgtggaatctaaaaagaaaaagttcaaatataaagttagaataaaacagtggttaccggccggatgtggtagctcacgcctgtaatcctagccctttgggaagccgaggtgggtgaatcacctgaggtcaggagttcaagaccagcctgaccaacatggtgaaatcctgtttctactaaaagtacaaaaattagccgggcatagtggcaggtgcctgtaatcccagctactcaggcagttgagaaaggagaatcacttgaactcaggaggcataggttgcagtgagccgagatggcgccacttcactccagcctgggcaaaagagcaaaactctgtctcaaaataaaaaaacaaaaaacacagtccacacactggttaccatgagtgaggtggcagggaggagattgggagatgtagatctaaggatacaaagtagcagatatgtaggaggaactaaaaagctgacatgcaggatgacaactatagttagtaatagtgtattgtattcaggatttttgctaattgagtagattatagctgctcttgccacaggggaaaaagtgggtaactacgtgagatagacaatggatgtgttaatttttgtcactataataaccttttcaccatatacattcatcttataacagcatgttgtttactgtaaatatatacaataaaatttatttttaaatatctgagtatgatttgatgatttgtgaaaatagagtgaattataataattttaaatgtaagttaatgttattagaaaagaaacagaaagaacataccacacagaaagtctgtctgaaggatctttgttttctccaccaatacaagtgttcattgattcagaggtggattatgagatatgaccataaaacaaaaatttcaagggaaatatattttattcaatgaaaaattctcaacacaactgttatatgccagtaaacactatatcttttaaataacaggtcatatctattatatttaaaattcaaggagagactacattagagatgctattagatcaacttctaatttcaaagatttctaagatatggaacagttactccttatacaaattaaaaaagcaaatgctgaagaaattcagctacatggatacaccatgaggtggaaagatgctccataactcttagttaaactgcactaattacacataaaaggaaaatgtttcatttcactgtaatttggaaaccaaagaaagaaaagactgaatttttacatactgttaaagagattgcgtatctgttctaagtttaagacagaggcaaaatgtattttattcatttgtcctgcaccgtttagaaataaaattcaacttccttttaattttttttaagaataaaaaactcagtctaaggaaagtcttaaagttttcattttaagtgatccactgttctagaagtttaatattttgtttaaaatgtttatgttctgtattccaccaagtctagttttaaaacaaaacaaacaacaacaaaatacttctctaacttggagtttaaggtgaaagaaaccaattacgtggtttggaaatgtcacacttttcatctcttttttaaaaaaatttttaattcaggacagaaattgtatggatttagtgtaagtcttgggatctcacaagtgtcagtatttcactctcctccatatcttgatagcaataacttgaaataggatctcagtagctcaagcaatactgggctctgagagttggttaaaaattatttggctgagcgcctgttgctgagggaagaactaatctcgagcatatttttggagccaaataccaaattgtttgtgcttagcaacacagcaccaggcttgcccttcagaatgattctagaccaaatgccagaaatgctctggttctgactacagagttctattcacaaatgacaggaggcaagaggtcctcctcactttcagaagaaaggtcctttgctttcttagtcaatggtaggaaaaccattgtggttttcattgcattacataatttttaaggtgattacttcaataagaagtgctctgtgtatatgtgtgtttatagacgcattttttaaacactggagaatttctgaaagtagtacaaaccttgtaatgtcaagtagatgtgggaaaaagggagtttacaacattctctcctgacattgctctcctttggcatctgcatttttaaaatgttaaaaatgtttaaaaacgtgtgcttaacacttaatttggtgatagttgctgttaccaaggcaactctgtaactccacccagataaaaataaatcttgaagatgagtttctgtgtctctgagcaaatatttttgtgaatagtagaagcagagaaagttaaagatacctgagcttttgatctttactagttttatagatatgtttatagttatacatttttattcatacattttagataaataactttgtaaagcaattgattcttcttgtaaaaatcaagtatattcttaatagactgataaactttctttttttgagacagagtcttgctctattgcccaggctggaatacagtgccatgatcttggctcactgcaacctacctctgcctcctgggttcaagcaattctcctgcctcagcctcttgagtagctgagattacaggtgcatggtaccacaccccactaatttttgtattcttagtagagatggggttttgccattttggccaggctctgagaaactttttaaggtctcttttgcagccagctatttgtctaccttatttcattcttaatctcactagccaatattttttctgtttaagtgctttcagcaaatattaaatgcttgtgccttcagtcttatcctgtggaaacactggtaatgacaaaaacacatatttcaacctaatatacaatagaaacagaatgccagttattcatggaggagaagaatagacttctgtatttaaaataacattttgctctgtgttttaaaatcattcttccttcatcaattgtaagcatcttgactataatttatacacctaaagataaataattcagtagcaatgataactgaaaacaggacacatacaatgaactagctaaattaccatacattctcatccatttcaaaaatagctctgtacttttttcagattttgttagaagaatattcaatacaaatttttattcaatgaacacttcagatgtcaagattgttacccacatggacaacagtaacctaggtaaagattctgcagccaggcgtggtggctcacacctgtaatcccagcactttgggaggctgaggcgggcagatcatgaggtcaggagatcgagactatcctggctaacatggtgaaaccccatctctactaaaaatacaaaaaattagccaggtgtggtgtcatgtgcttgtagtcccagctgctcgggaggctaaggcaggagaatcgcttgaacccgggaggtggaggttgcggtgagccgagattgcaccactgcactccagcctgggtgacagagcgagactctgtctcaaaaaaaaaaaaaaaaaattttatacctgggctctgtgctcaccagcagaaggggtaacatggcttcttaggacaaccttacttgaccatttacttctttgacactaggggtattcttagatcagcaggtccttccctccacttatgcacatgaggctcacagagagtctgggaggcagggaatttatgattggaaacagtatactttttatctaagaaattattaatgtcactgcattcaagtgattaacaccatcaatatcttcaagactaaggggattacatgatgtgtaaaattagaaaactgtcatctactagtggctaggcactttaattatattaagcatgcaacaagagaactcttcaaatgaatccatctctcctctgtattatttccaacccttggatccccatctgtttctgcagacaacagctatgctgctgaatgtcttaatggtttgctgccccaactagcttcaagatactgcaggtcaagcatagcatcttactcttccctgcatctccagcacctctcagaatgttggtcacatagaagatgtttgctgaggagttgaataagaatatgtacaagggacacaattagcattgtttaaaaaagatgtaacaagatagggtaaaggaaagctttggaggataaatctttagaacaatcaataatatcttctcctctgttggttagttgcccttcaatctcagccactgaatcaaatacaacataattactattctgatatgttcttgaatcgaatatccaataataagatattcggatgcatagccatgtctaatatcaaagcccatgcttttcgctattattgtactccatacattagcttccaaatttatttgcaatccaaatattaaaagcaagtcataagcttagtatcgccaatgtgatactaagtatccacttactaaactttattttcaaaatgtggttttatctcagtttaatgaacacggcatgttttaatttacactttcatattatatagtaagggcgtggttacagatatgttaatttcctgtgctgcttcacaatgatggaacataatagcaaatgaaactgttaatttgcagatacccataggcctttggtgtctgaatagaaataaacacacctacaactgagagaggaagcatgtgaagcattccagtgaacagaggccatttattcagtcacagacacaggagaaaaacaacaattaaaaaaaaatctctgatgaaaagttcataaaaagttcactcagtttaagcatatgtcctataactacttaaaatagagttcttcttaaatatcattctttgctgtttttagatttcttctgcctgtatcaaattaatagaacacagcatacttttaatttgctctggtttcttagtggggcatttattaaacacattaaaacaatagtctcagggttttactgctgatgttaaagttctgctttcctacttaccaactgtgtcatcttaaggcacatactttgcctctctctcaaatctcccaaatggagaatgataagaatacgtacctcaattaaagaagctataacaagtagaatgtttggaaaagtgccgggtacaccataagcccactatgagtattggattgtattacctctgaaagctgcagaatggaattctcaaagttatatgtccctaaaatcctcttaagtgacagaaatggagaaattagcagtctgtctaagagagcttttctagagtctgggcatatgtttttaggacaagacagttcagcttcagcttaaaatgagagagcacgtctgtgtccttactcctgggtgccaggtttcttgtccccatcttaagacaaataattttggtggagaagaggcagtctctttgatttcgctctaaaaaccttttctggaggaggtagacactctccacccccgttttgagactcatgcagctgaggatgactggctgagtacaagcaattgttccttctaagcagtttcaattcttataacttgtggagatattcttaagtccaggggattttgtgtatggtggatttttattacaaagtcctgtacttcataggaacaaaataattcaaagtcaggaaccagatcaaagccacaactcagatatggcaccttgagaagttcatttgtatttcacttgcataaaaaccctcaccactgctatctgattttcacaaatcattcaacagctatccatgaagcacccactgtgtgtctggtctctgtgtcagtccctggcttcatgtgtctttccttctgtaccctgactccccaactcatgaacacatgaagtaaaaaaatgaaaatctttttctgacctctcttcaaaatcacttttttcaaaacaaacacctctcacctgctcatcctccagccagtaaatcacaggggcctagaaatgtcacttacaaatattttctgattctgtccctcccttcaagcttgccaacattatcacagtttagggcctgctcatctttcccccaatctccaattagatctctccacaatgcaattctgcacattccctgttacaacccttcaattatttcccagcccatccaaaataaaatctaagcctcttactaacacattcaggaactctgtggcctacggttttctacagactaattttccagcagttgacttccagtgcaagtgaaaacctagtgtcatgcctgcatgatagataaatttgaagctgaagagcccaaatgtatagaccatgccatgaaaggtttatagtcatgacacagtggccctatagtacagtgcttgaagctggctctctactgtcagacagaccacttgccagccatgagacctggggcaaaatgccttaatttttatgtgcctcaagttctcatgtgagatgagaataaaaattacccctatttcataagatttgataaagtgtttagcataatacctcataacaattgcaattcagtggtggttattattataaagaaaagatgattaactttatcttaatgtttaacttgttctgatagttattgatctatagctttgatatggaggtttgagaatgacctggaaagaattggccacaatgattgaagatagtgatacaagaataaaagatgactgcaaaatgtaaacctgcaataacagaaagaatgaagtcactggtctcatgggaactgatatgggagaaaaaaacagatcaaaaggctattcatgttttgggcctctttgtcaaaatggaaatgagaaactggggaataaaaattaaagcaattctagcatctggttttaacataattcttatccctaaaaagaatctataagaaactcccaaaatgacaggcagccgtgggtagcattgcatttcaagtaatcttttaattgttaaaatttaagtttccaacatgaacataaaattttcaacctaaaagaaatgagttccaaatctgagacaagtgaaaaaggataaagcctactagggggtaaattccatctctttagagatctagtacccaatttagcaatgtccaatcaagcctttaactactacatttgaacacctcatcatttcaaaatgttacttaatgatgccaattaactgtacaatgtctctgcatagcacatagccctaaaatgatttgtgcaatgttactgtcagtaaaactgaactacagggaatgctcatattctatgtcattatatacagaaatgcaatatcaataaagtgatatctgttggtattagaaaaaagtgaaaattttcatatctttctattttcttttttcctcaatgggatgctcttgttaaagatagctctgcatagtaaggtttgtataaacattatttagctaaagttaaaaggggtaacatactggttctagcacagatattaaaacaaattagtttgtaggtagggcagcaatcaattatattactaaccatagctttggtccttttatcctttcccatttgattttacacagtgggatgttaaaggttgaatgtctttggtatctataaacttaattgaaagctgttatttgtttgtttaagtctgttgatttttataatcataattttactcctatagatttcttgtaggagtactatatgaatttatgttgcactgaattttgttatgttatacaaattaataggcttttatttatggaaagctactattgatctgtcatttcttaaaaaattactaaaaagtgttaaaactttaaatgttggagagtttatattttaaaagttacatgctagaaaaacatgatgtctgagtatattagaagttatagataattcatctgtcaactataaaactctccaacactgcctttctttaatgaataatatgaaatttagcagtgaaaatgtgacaatgtacaatcctaaataaatcaacaaatttagagatgtacctctaaaaccattgtaaattcaacagtgtaattttccattggactttcacttattcattcattaaacaaatgtttgtgagtgcctgcaatgtatgagacattgtactgaagctaggcagtgtgagttatcatatgggattatcctttaaatacttctgagggcaaaaaaaaaaaaaaaaagaagagaaaaggtgtgaggaaagataaagggttaattcattaaaaaataacacttgaggactgttttctttgcaaggcataaagttatcaccctttcaaacagtagatatttcacatttaggatgcgagactccagttccaacaaagctcattgcacagctgctaccctgattaaactgctacatgaactctgagcaatgtagcatggtagccgcatgcttctgcttgcatgatggttaattccttccattctcattagtgattttctgagctttgaaattctgatggtacctaggatataaagcatatttatctaactgaaaaacagataattagatgtaacataaaatatgaatggctttgtcactttattgtagcagagaatgaatgtgggataaattaaagctgatgctagaacatatgcctattttttagctggaaaatttcaagatttatgtactttgggcttgagaaagaaatggagtttattttttatgcactgacatctctttttttttttttttggaagagctctcttaggaatgaatggtatgtaaatacagtaggaatgtaattatagattttcctgacccagttcctaaataatagatatcatttcagaagtgccccaatacctgaccttttgctccaagccatatcaaagcacacatctagtctacttttcactctcattcctagccactatgacaatactattcagataaaacttctagtcctctacttatgtgactcataccaacttgaccttacgatagtgactgggggtgcatatctaggttcatgctgtttgtccattattatggttttgtgagaaaaggcaaaatttctaggtaaagtgttatgaggacgaataatccaccaggcaaccaactgaccctttcatttgccatcttgtcacttcaaacagctctccagaacctgcagccagcacagaccaaagtcaggtttgtctcctcttctgttgatgaacaaaggttgattccatatcgtggctattgtgaatagtggcagtaaacatggcagtattgtatgaaaatatcacagatagcccttaaatatgtgcaactatgatgatctatcaaaattaaaaattaaaatttatttttaaaagttcagttagaaagcttgtagttcctggcaaactactacctttctcggcaaaagaatttgatatctcttaaatattttctgcctaatgctgatagattgtatttacatattccattaatgcaataaataaaattacaccaaaacatcagcattatttatttccaggggcatctctcaaaataaattcctccaaaattcacaaaaccaaaaccaatgtgaaattgtactcagggatgcaaatgtagcccagtgaagcatttgcccacttgtttggtattattgaagcacaattagaaaaatgtgcaatgtatgcccaaaaattctataataagggccaggcgcggtggctcacacctgtaatctcagcattttgggaggccaaggtgggcaaatcatgaggtcaggagatcgagaccatcctagctaacaccatgaaacccagtctttactaaaaatacaaaaaattggcccagacgtggtggcgggatcctgtagtcccagctactcgggaggctgaggcaggagaatggcatgaacccaggaggcagagtttgcactgagcctactctccagcctgaacgacagagcgagaccccatctcaaaaaaaaaaaccataataagaactttttaatatactatattataatgtaaaaagactagatgtcaaacaaattaggtgatgggaaggaattgagggagaattttagactaagcaattgagcagcacctgtttttcaccacaaatctgttacatgtattgctcaattgtgctgaatccatattgggtcctggtggctatgtaatagtctctttcttggataaatgtttgtcctctcttatggtttactaatggtgtacagaacagcattgaatagtggttatttcctatgacttcctagatatctctctcataatcctgaatgttttaaagatcattcttagatagagtacagctagacacgaaccatagtggaaatcaggtagacaaaatttaaaaggagtcttaattgaaggtcattttattgtcctcagtattaatcttacttaaaacaaacctgtcactgagcagaactcaaaacaccagagccctttgccaaatgtgattttttacaacaggagcgctggcagttgagaggagtattctgtcacacttgagagaattcgagtccctgaagatttatatgaatgcttagctattatcgaaccatctcttcacagatgacttagtaaatgtctgcctttgcatcagataatggcttacaagttaatctcctcttgctccctgttacacacatatacaccttcttcctaaacagctcataaggtgaaagaaagactcagatttctgactatgtaattgataatatcacacggactgcctgctcatcatctgctagtcacattggcagagttgacagttttggagacactgaagacagtgcatatattaggaaataagcagtttcctgatataaattttcttgtagtttataaattacatagcatttattattccctcatattttataacatttaataatagaactgacacatatattcattttaaactcaattgtgtataataactatcatagcaacccttcagtgcctaaatatcaaatcttccattcctcccatgaacatcttgaatatataggtactgtggttagctccaacaagcttttggttagaattcattgcactgatacatagacattgttttaaaggcaatttcaaatcaaagctgtcagctgtgaatcaagcacaccttaaaaagtgacacatttgtcactagattccagcctctcaaattactgacacgcatcctttttatgtaaagatgacattgttctttcctgatatattgcattcctcatgaatttcttatagtcatagaatttttataaaccatttcagaatcgctgaaataaacatcaatatttttaactttttcattctgtcaaaaatattgtatgcagagatattgctgtaagtgtgtatacctgtgcttaagagactagggctgaagagaagtaatcaaccgaaccactggtgtaaatgtgcgtcacatttttagtgactagaaattgaaataattccaacaaatttatgtgctttgggcttgagaattcagactgccttaggctaagataaaaatcttttcctggtactatataccttcttttattgaatgactacctggctctttctattatatatgcagattttgtacctctggtcatctttgtaaatggtgcctaaaagatatttgaagaataagtgaccagcaataagaacaaatgtctatacaaaagcaccctttagttggatgtaattcactactttgagttgttaataacctctaaggatgacagtagctattagttgaataaaccattatgtctattattagaacactagatagtttataagtccaaacaatgcataaaatacctatctcatgttaccattgtttaggttaccagataattgttctgtccaattattccacttaattttttgcttgcccattagctaaatggcaagataaaatttgtcaaacgggggggaatgtattgaaaatgctagacaactacacttaaaatgaaaacaggccaggcgcggtggctcaggcctgtaatcccagcactttgggaggccaaggcgggtggatcacctgaggtcgggagttcaagaccagcttgaccaacatggagaaactccatctctactaaaaatacaaaattagccgggcatggtggcacatacctgtaatcccaactactggggaggctgaggcagaagaatcgtttgaacccaggaggcggtggttgcagtgagccgagattgtgccactgtattctagcctaggcaacatgagcgaaactccatctcaaaaaaaaaaaaaaaaagaaagaaaagaaaacaaatgcataatttgcaaatattatttttatattgtatgttatctagggcttctaaatgcattcttcttataagcctaggtttgcaataacattcatttagaattgagtaattttaaatataatattttataaaataaaatataataatttctcttaattctttgaaaatattaaattaaaagggggttgcaaactctgcattccacatttccatcccaacatttaattttagcaattttgtagtctgcctaaaatgcaatccatcatttactgtttagaaaatagggaatgtacacaaaggcctttcagctttccctgaactccataaaaatctttttgcttctttactgcccccctttgtcaggagttctgaggaactgttttttatcttaagtctcacaaagcatttaggagaatatttaaacttaaattcttttaaaacttatgttcaggacaaagtaacattgtatgcattggtgtcatatgtatttaaattttgaaatttttaatactggcaaaatgaggtttcaattttaatataaattatttaacaatcttaaatcattaaatatattacttaatatatttaatatatctaaacagtcacaattttcccatactaataatcataaaaaatcttacccaatggtcatatagatatacttaatggagttttgggggggtatttttgtatattaaaaaattcatatatttgccttacttagaagaactgattaaatgaaagtataatattaacaaacatattgttattttatatttgcatttgtgataattatatttgaaacgttcaagattttccaatgaatttcttttgcatttgcgtatttgtgcctttttattataaaaataggtggctttttagttccactgcataagtttcaacataggtctacaaatagtgcatctttttgaagttaatcattataatcacaaattgaagttgcctgagctccaattggagtctaaatggatgactgaatcttattattcgaaacccactgttgctacacaatatggccacacaagagagtacacaagacccgtctgattcagcctcagtgccataaatattttaatggtttcgttggaatctggaaatggagctcaccacaggagatgcttcttcctttgactctcattattatttcctttacaaattaattaataaaaacttagatgctaaattagcacttgatgaaaacttatatagccttgacattttgattctgtgagtgaataaaaatacttggagaaataaaaatcctaatcatgttcaggaatacccacaaggtaacaagtacatttttaaactttaaaaacatttattattcatgataaaacatgttgtgtgatttaaatataaatttttattatttgctttaacttatttccggattaaaaagtaaatgtttacctagctgttctaaatggtaatcctcatgattaaaacagcaatttgtcatatttcagttacaaatgatcttttattattagttatagaacataagtttcttcattgactgaggcgatgtttcaagtagataaatctgttaaaaaaattgtggtcatattctgttaaattctcataccaggcaatttgtttgatattcaggaaaaacctagccactgaccaaaaactctacctgccttctcagttgtatcctcttggacttaaaggggactgggaaagttataagatggttcatgatagtccatcaacatcccaagaacaaaaacagatgttgtactgacagcatcatatgatcatatgcatgtaagagcacattcatattgccaaatcagttggaatttttcacggttgaaagttaaatgaaatgcttagatgtatgagtcatcggagttaaagacaattacagccagatttatggctgtgctaaaataaagctagttagaaaacagaccaaattccatgacgataccaagtctgactaatgattcaccttaaatttcggagcaacatttatcctcacttgtttgtttatttgacaatgtgcccttatccattaagtaactaggaggaagggaaaagcactacgtgggtgagtgacaagacactgacactgatttgtgactttggataattcctggatgctgttatctgttttggcatagagatggatctgtaactgctaataattgccgactgtgaccatcccagaggccatttacttaacccaggtatttcagacctgacagcccgaggataaacacgatttccctccatcactaacttcatctgcagggcctaagcctccttcacagtctctccagtgatttattggcatctccaagggtatctcacatgtgctgaagaacaaatctgctcactttcatctgcttggttttcccttttgaaatctgctgctttaaaattactaagggaggaatcatgcctgctgctacccttgccagtgaccttgcagtttgtgccctgattgttccaattaccacaatcaaaacagaagcgtttgcagttactgcagtgctctctctgtggatgtcaggtctgactcagagagccaggctggggaacagccatttccactcttgtacctctgcaaaaggacttccatgttccgtaaacagactcccacctctcattttccccccaagcaaagcatcataaattagagagcatgtaacgggaaagaaaatccattagccatttgggttcagtcagacaagccagctcatggaaagtttatacaggaaggtcacatttcaattgagatcaggagggtgaaagggtccagctgtgtgatgagagagagaatgttcgggaatgtggaacagaggtatccaaggcagaacaaactcgtatatgaaggctttaagggtgtgcaaatctagcatattttatgacataaaagagtcctgattagctagaatatgatgaatgtgagaagaggtgaaggctggagataggaaaaattattccagatcttataagctatagtaagaaatttgcatattatatatagacttgtgggaagccattggattttgtaagaaggagattaacattatcttatttatgttatttgtgatttataaccccaaatgtgccagatacaaacaaaccaaaaataataataataataataagaagaagaacaacaacagcaatggaactgtggtgatggttttggtcacaaaatgcatatatatctatttttcacaatgcaaaaatatttcattatttcaaattttaacataaatgtgggtatgcatgagcttacaaatcttgaagtttattggggaatattggtgagcatggtttttattgcatggtcacaacttactaatgggaaacatctgaatacctattgagttaatgcatgcacatttttattttcctggaatactgagaaaaaggttgctacataatgtcttgatagcttctaagtcatggctcaaaagtgaatgtggaatctgctaatcggaatggactcagattcagccaagttctcaaaaacatttgctttcatagatgtcttcaagaaacaaggagtcttgaatttaaattgtgaagtgtctatcttagaatagagagatttaaaatctgactgtattttgtttaaaaaagcctatataactgtattatataaaattatttatactacagttaaaaaaagaatcccatcctatttgtgcctaaataagtgcctgcttgtagcatgaaaactatttgttgagggtccttagatcctcagagcatgctgtgaaagtaggtacaattgttctttctatataagcctcttaagataacagataattgccagaaatacagcacacagtacaaaattaccttgttttacttttgccacaaaaaacaatttcttttggctttgagcaataaagtccaatgatttttttcctttcaaaatatcttcctccctctccataagttttatatttattcacgaaggaatattccaatatcggatgtttttgtctgtgtctcttcctggaacaaatgttaattaatctctttgggtttgtatgtcaagtggaggggtggggattggggacaggtgatagttgtctagggagttaacttcatctctataggagagtggatagacgctgtatacgaaaagctcttgaaaagggaaatacagcagccacttcctcagggcttccatggtggtcagactccttgattgctttagattaactctggcttttgtccttcggaggccaccagattgggtggatagacattgtccttgctgttcttttgacctacctacttgtactttaggggaaaaaaatgcctgtaataggttaaatgctttctcaaagatcaccaaagtatataacacatggcaaatagacagagaaatgagacagtataatcagtataatttataaaagtaccttacagcaggatcccatgggatatgggttttttttaaaaaaaatctacctaatcttttcattgaactcctattcaggattcattatattgaatatggctcagagacctggaaaattgtttccacctttttaatttattcaccatcatttatggaagttttcaaggacgtttacttacctacctcagttaacagattgtactacttgggaagtctataaatatgagcttaaagcattttctgagttttaaaataatttagattgtgtagaatgttaaaactaaaagaggaaaaaattattcagttcctcagttgaacctagcaatttatcttttcacagtgtgctcaagtatagtttttgaaaagtaaagaagatggtttttatacaaacataaacacatttcaaagattttattcaactaattaattagtagtggagccaataagctggtaagactggtttaaaggaatatctgaggaataaagatttatagaaacagtcaaagaaattctaaagagaattgactaatagatataaatctagtaaatatttgattaataatagcagtaacctatggaattatgttttctactgagcataaatgagcatgaatctctttgggtttgtatgtcaagtggaagggtggggattggggacaagtgatagttgtcaagggagttaacttcatctctataggagagtggatagatgctgtataagaaaagctcttgaaaagggaaataaagcagccactgcacatctgcacatataacctgtagatctgggggctctaataaaaaagttaatggcaatgtcaaaatctggtgttttatcttagataacttcatagtcattgattgagccccttaaaaataacatttaaaggacatgtagtcattctgtttctttattgccaagttttcagcaatttttctcatgagaatgagtgctaagaaacttttggtggagcgtggtggctcaagcctgcagtcttgcactttgggacgccaaggctggccaattacttgagatcagtagtttgagaccaccctggccaacatggtgaaaccttgtctctactaaaaatacaaaaaaaaaaaaaagtgggatgtggtggcatgcgcctgtaatcctggctactctggaggctgaggcacgagagtcacttgaacccgggaggcagaggttgcagtgagccgagatcctgccactgcactccagcctgggctacagagggagactccatctcaaacaaacaaacaaacaaaaaagaaacttttaaaatataacaatagagacattacataggcccacaaaaccacctccaaaaaagcattctatcacctgcaagaaagcatatatatatatctgcttttgtgtatatatatatatatatatatatctgcttttgtgtatatatatatacacacacacacacacatatgtgtgatatcagcatgtgtatttacacatatattttgtgcatgtatatttttaactaaaaatgtgctaggagttagatatgaactgattttggaggaggtgatatgctgtagagagagagaatgggagaatagcagtattataatctctctccattgtattcagtttttttctttgtctgaatttttaatagaagtcagccagaagatgttagtttctgggaaatgtgttgagatttacagtcaaatccagagagaactagaggcttatgagtaaataagtaaaggttatgcagagaaagtattctttttcctgtgtaaacttgaatattggccaggcgcggtggacacctgtaatccagcactttgggaggccaaggcgggtggatcgactgaggtcaggagttcatgaccagcctgtccaacatggtgaaacccattctctaccaaaaatacaaaaattagtgggtgtggtggcaggatcctgtaatcccagctactacggaggctgaggcaggagaattgctttaacctaggaggcggaggttgcagtgagctgagacagcgccattgcactatagctacggcgataagagtgagacttcatctaaaaaaaaaaaagaaaagaaaaccttgaatatttcttgtacttgtgttcaaatcatacagttatgaaagtttacccctagctgttacacttaaaatgtacttctgaaatatacagagagatgatacagactattaatgagttccactaaacttttaatggtttagaaaatacaaatattttcttatttttctggaattccagccattaatgtaaaacattggtttcaacataaataacacactggcatgcacatatgcctaagcatgggcccccacacatacagacattctgaaagaccactttttaaaaatattcagtaccgtatattgtgcattccttctttatccacatacttaagctgctgcaagcatcccattgataacaccagtaataaaagatgggaccatcagtaatgagatttgaaagccccttttgcaagaaagtaaggactagaaggtggaaatcactctgtcttagagtcatatggattggggctttgctagaagtgtgtgctctcagggaaagctgcctttttattttctccagagaaaagcctttttgtcagtaaaagaagatgtatcatccaatgcatatgtaaaattctaaacagcagataaaacaacattcactattaatctctgcaaaagaagatatattgaaaaaatcctcaagtgtccctctttgggtttctttgttatatattaaagcagttatctttagatgcatgagaatcacctgaagaccttatttttaaaattcagattcctgtcagttcactcccaaagattccgattcagtagttaagagacaaagcctaggaatgtgaatttacaatcaacacctcaggtgatagccatgcatgttcttaatgctctactactatctatgcataaaaggaagataaagttttaaaaacttgaaatgtggtataacagtttagtattgaataatatacatttttacttattgtaacaaattatgatatctacttggggcaacagtatcttttattttggatctgaatcctaattttggctaggtatcactgagggattcttagtctaaaacaattaaatggagttagtggttttttttagtaactcttgattttctgtttttttccattggcatcttacaaaatttattcattcatttttccctttttcacttggcattatttgttagacagtggacaaaagaactatagaaagtagagaagcatgtgatgttgtcctgctcttagattctcgcaactcaggagaggacattcgcttacaccaatcatctcaaaacatggcagtttatgctgaactcagtccaatgggagagcatttgactgagcacatagggagagaagttagctctgttgaaggataatcaacgaagaattcttaggaaaggtacagtcattcattgaatatttgctcggcacttactaggtgcatatgtgcactaagatctaaggatgggctgatgaagaacccaggtcccttttcttctagtggacatgcagactggcctaaaaaaaaaaaggtaactggaaaatggataaggaaactgagtcactcggtttatttattatcactcggtttatttgcttttgtttgtattttcattttgacacagcacagtgtcatcttaacgcatcctccaaagtgaaggatggggtggataacactttagttggcatttctgtagccaggagccaggatctttctcccataattgcattaacctgggaaggcaccctctaggtagatttgtatagcaccctggttaatcaattatcagtttacttcttgtctcactaagctttaacaccttacatttatgaagcagtgtaaatataactttagcatcttgatcacagcaagcacctgatttgtatttttttattagctcaagtgaaatcagatcagagaagtacattacaggtcataaaatatgtgcaaatttcataatgacctccttttaaaatgtgcaaaaataagattgttaaggcacattccagagccttggggggtgtgtgtgtgtgtgtgtgtgtgtgtgtgtgcgtgtgtgtgtgtgcttgtcttttgagaatatctgtatatcagaaaatttggctgagaagcaatcttcttcttagtggttctttttctcttttgaaaataaagtactaaaaatacttaaagatgcagaacagcaacctgttcccagtgagactctcgtttaattaatgtggtgatctatatagagaaaagggacaattgcaaaagtccctcaataattatctaaccacagtctttaggtaattacagcagaaagattttcaagacacaaaacaccctggaaaatttgacctcttattttgattcaggcctttcatttcttaaatattttctttaatgttgatgtttatgcttgacaaggtcagcctaatgccagatgaatccctggaactcaaaacattgctgaattcacagttgaaggattttaatataatataccagcttttaaaaatcctacagtgagaataacaggactgaataaaaaaattaagaaatgctcaggtagaaataaatagagaaatttagaaaaaaaataaaacgtattcaaaataagtattaagcattggcaaagaaaaaatagtagcagacaattacatgttccatttgtaaagatgattattaattagtggtcttgcaaaacattggagaaaatttgctgaaccatcacattcataaatattaaaaccacccattagtgaaaatctttttactaaacttcacaactgatagtcaaataatgttcagtttttctccattgcaataaaaaataaaggcttttgccttcagatcagtctctgggccttattaattcagtcagccagaagccacatggaaatattttgttttgttaaaagccagcttgccctcatgatcttttaaaatcttttaaaaatcttccatcagccctctccctgacttgaattatggcagtgctttctaaactggtaaactcaatctccttggtgtgcctcaagatagagtacataaaccctccttagaaattgagctctcaattctaaattgcactctccatgagagcaagcaagaatgctttgctttgtattaagtggtcacaatattaaatataaccatagacagcactgtattttctaaacaccttattttcttttaatgactgacataaattagatcataagtatacaaatgcatatctgttgtatttttcagcaccatgtgtttttttttcttttttctgagttattttcctgctttcggcagccttttctctcaggtgccttgtgatccacagtggtgtgtgttcacactaaccaaagcaatagtcttacctgccagaaatagctgtgacatttaaagagaggtccaggggaaggcacagtgcttaacatccaagtctgaagagctaatagtgaaattggggcatcagctacagagagatttaggggaagtaacaggcaggttaaatattttatggaaatgatttctgttctgtatatgattgcaattaacacatgtcaatctgtttcattaatttgttaactcatctattatgctatgccatgaagaaaataaaattggagttctttatttttttgagatggagtctcactctcttgcccaggctggagtgcagtggcaggatctcagctcactgcaatctccaccacccaggttcaagcgattcttctgcctcagccacctgagtaactgggactacaggtgcgtgcaaccatgcctggctaatttttgtatttttagtagagatggggtttcaccatgtgggccaggctggtcccaaactcctgacctcaagtgatccgcctgtcttggcctcccaaggtgctgggattacaggcgtgagccaccgcgccccgccacaaaactgaagttctaagcttcagtttagatgctcactaaatgcttgttttgcaatacctgactgtaactggcaggaatatgttttgaaagtcctcattttccaggtatgcagatgaaatataggggcattatctactatgtcaaattataatgatttatcagtggcacatgaaagtcgcctcacatttcttaatcagtgatataccattatgtcatgccaccttttaatgtaatatgtttacatctttctttagatgtaagcattcatttagttcatcacggtggctttcacacttactccaagaacgctatgagttcctttgatgtgctcaagtctcctgccccagggagaaagggagtggtgagcaggaatcgctttaatctatttacacagatattttcttttccatttattttaaaggaattttttttaacttaatgagtatgcagtgacggtggtgatgatgatgatactaaggtttaaatgattagatagtcaaatctgggctggaattgtaatactgttttgacttttaatcttagagaagctccagtctgcttattttctgggcataaacacatgagaacaataacacagttctgttatctgaatgttgttatattttgtttgaaacattcagtgactttcaaatattgtatttgcctaagaaaattcaacagagtcagacattctcttccaggttaaatttggtgagtctgctaggaaaataaattttgtgcactggtcattctgatctagtggacgttctaataaaagcacctttgtgctgcctacgtcttcactttaaagataagatacctgggtactcgacaccaaattatagtttgagatctcaaaaatgggatagggaaaccacagctcaaaaacaaaaatactagcactggaaaagatagaactagtgaagatgaatcattctctagactttaaattcagagatatcaaaattaagaaaaagtaggaggaataaaaaaagagggtaagcaaaacaatataagtttgtatagcaagagggtataaagcaaatacaatatttttcagaaaaattaaataaaaatagatttacataacattgtttttaatctcaaagatcaaatttcaattttcatctcattttaaaacccatatgcacagtctcctttatatacatcagttgggtgtcaaagtgacttttttcttgtttccaaatacagttatttttaaaatttaattgtatgatttaggaatttgaaagcaagccagtttgcacacacatatgttattatatgtgtgctttagacttggtttttagttaatgtaacatgacagggccacctgagttatttgtttacaaactagctggaaagccaccctggaggagaaacctggcaacaaaatggtctgcagctttgttattgttatctataggattggatgccattattgctgtaaaatagttcacaagaactcagtctatgggaaagactcaaaaattctttgcctgttaaagaaaaatcaggatattggactggttagtttaactaaaaagtgatgatactcagattctgcttggattcactgcttctcagcagttgttttgtttctttctaattgatattttatttttcagagaacccattataaaactcttcttcttcccttaaaatcacaaccacacaacagcaattaaaacatgctttgacgtaagactgatatggttttaaacccagcttgactatcgaattttttactttaggcaaaacacctctgacatttatgtcttatcgtcagtaaaaaggggtgattaacagttttacaagattattcaataaataaatataaattcctccttttccttcctttcctttcttcatcttcagcatctgcatgccataagctcattttagttctctggactcatgttaacatgtcccacctttcccaaattaaacatcatctctgttattggctccattcttttcctctcatttgagacaattctttatcaaccaacaccctctctgctctgtattgtgaaactctgctcctactacattaacagtctcttggtttctttaaaaagaagacaaaacaattaaagaacagaagcaaaaaatctactcaaatccccaattgttaccctcaaaattaattgtcccacccctagctttctcattgcacaactctttgtcaaaatgttttctaccatcacagccttcaatgatctttctggttcctttatctcctgaagtctgacttctacctccatctttttctggactattcaacacactttgagaaaaaacatacttttgttaaacaggtatgcatccctgaagcataaaatacatagtactgaaagtgcacatgtgtggttcttcccattttttttacagcacttgaaactgacaagtagtagtaccaattacttagtaaaagacctttttcatttcatttctgaaatattgttattttcctttttcatcttccatctctgactacacctccaattttacctctttgctgccttccttcctaagaaagttcttcatgcaatgccatcttgtttttcttcacttgcctctttttctcactttaattttatgaactctgatgacttacctctgtagtgtaactactcaaaatatgtatttctgaagtctcaactccaatctcatattttcaacttatatttatggaggcatctcagactcaacctacctaaaaaatggcttatctgccctaaaatctactttgttctttttttctctactgctaataattatcttcctagttggtcaagctcaaaacctaatcatttttactccttgtccctgtgtcagctgtccacattcaagcagcgtatcatttctgcacatttttcaagcaagtcagtaactgccttttgtttgggactgtcttttcatatagtgaacagccttggaagatagaaatcatttctccttctaaaacaaaaggcaggtgtgcttgcagccttggatagaggtagtgcctctttctaaagcaaagggacatctttactggccattataaaatatccatgtttcctgagctctgcgttcctcttttctaatgcaacccactgagcatgtaggtgtcacctgagcttttctgtgggaattgcggcttgaggaatcagtgcaagaaaatcatgatactcttgctaatgctattaatgtgagtagtaaagttaattgtctctgacccagcactattgtgtctttgcccagcactcaaaagactggcaggcttgcaagtaggacaaaatgttagatttttcacagttcttctgcttataagtacttgttaaaaccaattaaaacacaacttgtagtttgcacctataattttgtagcatttgcttcttatctatgtcactaggatgtgcttagtgacagacccatctatcatctattactcaagtttttggctgtattcctaggcaacagagagaaggggaacaaacaagaggacctgtgcacagtttgagaaaggcaaaacaccgagcttaattgcagacttgaatgtagctagcaaacgaagtaaggcaaaaggttccttttttttttttttagatggagtctcactctgtcgccagtctggagtgcagtggtgctgtctcggctcactgcaacctccgcctcctgggttccagcgattcttctgcctcagcctcccgagtagctgggactacaggcatgtgccaccatgcccagctaacttttgtatttttagtagagacggagtttcaccacgttggccaggatggtctcaatctcttgaccttgtgatccgcccattcggcctcccaaagtgctgagattataggtgtgagcctccgttcccggccaaaagtttccattttttaaatagttgggtttttagtttcgattctttccaaaaaaaggttttcttaaaaaaataaaattagcaataagatgaaatataacaacaatataatcttattaagacaatatatgatatacatttatcaaaatacttatattttcaaaagtgcttaaaataatctagcacatagtagatgctcagtaaatatttgatattatgactgtgcatgggtcattataggctactttatgtatatcatttcatttagtacaacatcactctgaaaaatgttttattgttaccgtttttcagttgaaacatttacgttgctcaagatctcactggtaccatctactattaggtcagtctgccaccaaatctcatgctcttaaatgccctttttctcctgagcttccaacaaatagtgtactgtatataattgttgaagggaggggactgtgagacaaaatatttagagtgaatgtgtagccacaatttcagttcctcaacaaagtgataaaattaggaatcatcctcaatatatattcttccaacacacacacacacatacacacacacacacacacaaataccacaagcccacttgaatgcaccccacctacacattgcaaccatagagacaattgcagcattaaatacagaatattctgtgtgttgtttgtttgttctccctttgctacaaaaatcagaatttctactcaataaacagcaaagggagatacaaatgaaccaaattaaagaaggaaaaaatgttgaaaaaattatatacagaactatgtattgatttattgagagttcagtaatgtaatccagaaataatggatgccttaaaagtaattaaaagaatgcaaataaacatttagtgccaattaaagaaaaagaaatacaacattagacaaaataaaagatattcatttgatgcaatgaggaaataatcttttattcctctttaaattctctgtggaataaggcatggttataaataaataaacatctgccccatggacttaatggatcgttatattttattgcgataatcataatgaaattgttgggagggattagtatctctagtgtaatgctaagaaagataaagcctgtgcccaggcaaaagctttcttggttggtcaaaaggtttgaagacatttcaaactattctaaaacaaacaaacaagcaaacaaacaaaaaacatacaatgtctttgccacatatttaggaaacaaaatgaacaatttatttctgacaacctcatagtctttgttctgtcagaacaataatggaaaggtctaaaccagaaaatgctatgcattgaatttataataaactattttttcctgtaacaaaaaattgataaacttgatatttgcagatttaatgattatgtgtttaaaaaaaatctggtttttgcccttgcaaaaaatcatatatatacacatagatatgtatgtgtgtgtgtgcatagtatatatatatgtatatacatatatatacacacatttatatatataaacatttcctttaacctcctattttattccaataaaaatattggtattagagatagttctgatatttcatcatgaatagttaacattgcatttggaaaggattaatttttttgaaacgtaattttaccttaataagtagcccagcgtaatattttagtaattacacagatttttttttcaagacatttgacaactaatattgcataatagttaagagtgtgggctttggagccagacttcctatctctgttcattcactgataaaatggagacagtagtaacttcctcaaagagttgttttttaagatcaaataatgcatataaaactcttgaaatggtaccaaatacagagtaagcaccaaataaacattaactgttattgttattccatgtccgaataacacagaaaagtaagaattttaatatttcatttgaatgaccttttaaggatacacctagcccattatctttcttgataatcttgtaagatgattccttttttatctccgatctgttgaggcatggatagaggttttcagagaaaacattttctaggtaactgaaagaaagtagcaacaacaaactgtgacaaaacttaacaatgagagaatttacaagatagaataattgcaactccttttgaaatcaaccactatggtcctctggctgggatagctaagcaaagatattccagcctgaaggttgagatctacttgaagagttttctatccagattgtgagggcccctcaaacttcacttagtatctgtttctattagtatggaaacttctggaaccttgtggtatcacattcacttgactactttattcctgctctagctatcttaaagcctttcttaatcttttatcttttagagaagatacttctaggttttaaatccaccgatcttgaagctattgccttcactctctgcttcagagcccatccttttgtatatgagtagtttgttttgcctaaagtactttctcccagtcagattttaagtccagtttctcatctgtttttgagagcaaactcctgggccttggctcactaacatcttgacagcatatttcttctttcctatgggcttttcagcattccctgggtttttctaaaatatgaaagcagactctttatctcttactttgtcaaagcctaccctccccactgatttctcacccagttgctagttttaagacctgcctctggccgggcgcagtggctcacgcctgtaatcccagcactttgggaggccaaggtaggtggatcacgaggtcaggagatcgagaccatcctggctaacacagtgaaaccctgtctctactaaaattacaaaaaaattagccaggcgtggtggtgagcgcctgtagtcccagctactcgggaggctgaagcaggagaatggcgtgatcccgtgaggcagagcttgcagtgagctgagatcgcgccactgcactccagcctgggcgacagagcgagactctgtctcaaaaaaaaaaaaaaaaaaaaaaaaaaaaaaagacctgcctccaaatatcattgtatttgcaaacatgaaatgacttattgattctgagctcagcacaagagcaaacctttctcagcttgacccatcttcacatcgttaatgtcttattcagtcactacccaaggggctgaccttcaagattctaatccatgaaagcttaaaatagtaaacaaatttgaatatagtttaacatacataataaattttatttctagaagaggaggatcagcccttagacatgaaaagtaaaaatagtttattcccagatttccctttgtgcattagtatattcaaccgagtctatccaagtaacaggacaaaaaaagctggcagttgttgctgcgctgtgaagtcttattaggtgagtcagctaattatatggcactaccataaatacagcaggcactgccctgcttgttaggcttgccaaggaaaataaggatttaaagcagcatactacctctttgctatataatgacattttcttcttaaaaatgattttgcaccaattcctgatttatccaccaattattttttaatttatggttgaatgtatttaaacctgaattcagagataaaactagtaaatagctccccaaaataaccccaaatatatttaatatattagctttactctctcctccactgccaaacctttaaaaactgaaataaattgtttttatttcatcttttctctttttctctctctctaaggtgattgccaagactaaagaaacagctagaagggcaaaagacaagaaaatcagtaagatagtaacagattatccaaagtagagcacggctcaggtgcagtggctcatgcctgtaatcccagcactttcggaggctgacgcaggaggatcacttgagtccaggagtttgagaccagcctgggcaacataatgaaacttcatctctataaaaaaaaaaaatttaaatagccgagcatggtggtgtaagcctatagtcccagctatttgggaggctgaggctggaggatcacttgggcccaggagttggagactacagtgagctatgattgtatcactgcattacagcctgggcaatagggcaagaccctgcctctaaacaaaagataaacaaagtagagcataaatggcttctaaatatatgttatttatgtgtaagactgggttctctaaaggtatcatttaattaaaatagatttgcattctcaatctgtaggtatggattatgtataatgtatttaagatatgacttacagcgttcaccaatgtgactattcccaagtgatccagatggctgatgacatagtaatttgtacatttgctgagacctgatctgagtaggtatgtaacataactgagggagagcaagtccatttgccgaaagaaagcctagcatatgacccaggagccacatcttcactcagccttgttgctaggtttggcttagcatatataatagcatagcatgtataatttatgacaaaaaattatactttgcactttttaattagaacattcaaaatgatctcaggaagtggcaccagagatcatcagtggtctactgtacttcgtgtgtatgtgtctgtgagtatgtatgtgtttgtgtgtgttcccacattctaaggcatgtcttttacaggttagtagaaaatgttgatagaaaattatagatttcaacatctaaaacacagtaggtcactacattgttaaaacttggaattttttatcttgttgtaaagtcaggccaaccaaacctaaaatactgctacattgaaatagtgcaaaatattcaaaatactatagttatagatttggtagtaggactgtaccagacctgtcactctatacaagacttatgccttgccctttcacttacctgttcccttttacatctatcttactagatgtaatgctataaattatatttctaatatattataatttatcatgtattataatgtatcaaatattacaaattatgttgcaactccccttacctttcgtctgcatattgcctcagaaagaacagatggatccaacagacttcaaccacaggcccttagtgacaaatagctcttaatgctgggcttgccactttgatgcatttctaaagttatagaatgttaaatgcaccaagtcctttggtcattttatttctaccttagatctaagccataactatactttcccaaaaattaaagtttgaattttaacttaaccatatataattggaaaaggaggttgggttcgttaagtgtaattttatcatgctttattatcctttgggcattggatacagcagaacatgccaatttctatggcttctcatgtgacagaatatacttactaggatgcaattaaatactcctcagagtatgtaaacaataaatgtaatcattacattatttttatattgttctttcttatgcataatagtaagactgaaaatatagtgttatttctgaaatatgcatattgttttgcttttgatgattaaataacattgtccaaagttttaggttttttgaaatcttatattttttaacaaaatatctagcctttccaaaacaagacctcaataattcgtttaagacccagagttgttcctctccacatagatctcttaaaaaggcagaggatttatgacctcaagagaaatcagagtatccaaagtttgctttaattcaatgttttaaaaataaaattccttagattttatcaaaaattgagattagtttgattttgaatcagatgccctttgctccccaccccaaaatggcattatgagcagactaggaattgataatagaaaattgaacatatgaaatatatctttaccttgctttttaacaaggtattcatgtctatcgccttcatttttaagtgcatcaataaaatacatggtaattctcttagtgaaatatactatctacactatgtacacactcccctgtctgaggtagagaagtagagaatattcacatttttgaaacgtctatgctatttttatttaaatacgagttctgggcttgatttcattttggaacacgggtgtgtgcttaagttgaacctttttttcctcttaagtcaaagttcttttttagtttcttcttttatctttttggctactatctctctccttcatcctcctggtgtgagttgttgagtgaaggtattaattccattatttgaggctaagtgacattgttcaataatgcagcaaaacaatggttctacccaaaatatcttcaagtgtaaaagcagtgggcaaaagagaaagtgcgcttctgctgctttgaatgtttaaggctgtgaaagttgatcacacaaattgggtcattcttgttatacccaactaaaacaatcaagaagcctgggaggaaaagcattcaagaaacatcacattgctccaaaagtgtaattttctacaagtccgcatgctgaggctgcctgttgtaacctgggaccaattttttctgtaactgctgaaaaaacttgctgcagctctaggactaattttgcccaccactgtcactcaccaattgaagcttactagctccccagaacctttctagtgccaatgaactttctcaaagagcagcgtgtatcatttctctttttcagaacacctccaacctcctctttgttctttgggtataccaaagaccaaccagccttgaatttcaatttttcttcccacataaaagttttaatttagaaatgtatctctacatttctaactttgacaaagcatagataccagataattgatgaaaccttgctattttaacgatcaccatggattacttcccagtgtcttcagataaccctcaacatttgccaacatttgatggacttcaaaatgagcatatcttttttaaaaaaaattattcacactgacagcaagtacattggtatactctatattaaattataccacagggtttacaaacaattggtgatgtcgggcagtggtttccaaggaacatacttaacaagacactcacaaggccctacaaacctgcatttttaacaagggccctagatgattctagaagagtgtggtttggaaagcaatttttgcctttattatgtgtcattttaaatatatttaaaattaaagttataagtcatagaattgaataaagataatttccttacagaaagtattactaggtatctaaatacaatatggttcaaaacaggaaatttaaaaagattatgtaaattctgtagttgtattcctaaagacagtagctgaaattttttcctacttctccttgtatcacttcccttttccttcactttcacttccctggaattgtacttcccaataagctattagcagtgaaggaagcttcgtctcatgatctgttttatagagcacttcagctgggacgagtacgaaatgataatcagttatatcagctattcaaccctacaggtttatttaaaaagaacttgaataagctttttagggagaaagaggtcagtctcagccatttctgtttcctaatatagcttttaagtctttccttattagcaatgagggtcattccattgtaattttttgataaccatttttctttctgtgtgtcaaatgcagatataagatactgaactgagtctatttcactgttcgtaaaacaatcccatttgaaaaaaaaaagtctacagctattccagggatagggcctagtagagagagaataaaaggtattttcttactatgtctctatatcctaccctgtaggttctcttattaagcatacaggcatataccaaaatccagacgtttttctcatttattttattgccctaacatattctgggttaatataatatcataatgaaaatttgagaaaaaattgattttttcaaaagtgtttaacatttgttatattggtagttttttttcttgtttgtggtaaaaataaatagaaggtgcacttcacaccttcaagtatgattatattttgaaaacaagtcatgaatactcataaaatgcaaattttaatgttctttttttgttacagccaaactatattaggcacagttgtaaattggagttgaaatttaatatttctttatagataacaatgtttttagaaataggtttatgaaacagtaaatatacaggtatagggataaaattgtgtctgatggtcatatgaagtgtttgttgttatattctccttggaatagctgccaaatattttagtatgcttaaaatctacgaatgtgatagagtcaacaaatttagatcacatattcagaaaaacatagttagagaactaactattgaaatgagcatacagcagtcttcctttatctacagggatacattctgaaacccccactaggacacctgaaattgcggatagtagcaaaccctacatatactgttttttccaatgcttatgtacctatgaaaaagtttaatttataaactaggcacagtaagagattaacaacaataactaataacaaaagagaacaattataataatatactgtaataaaagttatgtgggtatggtctcgctttctctttccctctctctctgtctctaaatatcttagtattttggggttgcaattggtggtgggcaactgaaaccatggaaaacaaaaccacggataaaaggagactactgtatatactttttaaaactgatgaaatattaaactcatgtttcttctatatcccacccatttcccccacccaaacctagatagatatcttatttgatctgtaaacatttaattaatttgtaaaagttaagaactttttgaagtaaaactgcaatatatcatcacacctaaagaaataaacaataattcttaaatatcaagtcagtgttcaaatttccccaactacctcatatgtgttttccatttgcttatgtagggttcccaatgagaatgaaataaagttcttaggttgcaattggctaatgctctctcacttctactttaagcggcaggttcccactaacttctttttagttgcaatttacttattgaaattagacgtattctttgtcttgtgtagtttctcacagtgcaaaatttgctgattgtagccactgttgtaagcaatgaacatgtttttcaccaccttatatttgctgtaagttgtcagtgatagttaaatgttaatcaaattcaaattcggatcacgtagggcttttctttttttgttttctttttctatttatatatttatttatttattttgagacggagtctcactccgtcaccaggctggagtgcaatggtgtgatctgggctcactgcaatctccacctcccgggttcaagtgattcccctggctcagtctcccgagtagctgggactataggagaaccaccacgcccggctaactttttgtattttagtagagatggggtttcaccatgttggccaggatgctatagatctcctgacctcaccgatcatgtaggacttcaattgtcgaacaaacgaacctttaatagcagttacaccattaggatgacctgatccaacatcgaggtcgtaaaccctattgtcgatttggactctagaataggattgtgctgtcatccctagtgtagcttgttcccacttgatgaagttattggatcagtgaacaatagcccacttaaactagtacagtcttagtttaagatggtgatgtgtatgtacttccatcagagggcacataatacagtaaatcctcacttaacttcatcaatagtttctggaaactgtgacttgaagcaaaacaacatataacaaaaccagttttaccattggctaattgatataagcaagaattaagtcctatggcaaatttctggacacaaaaacaccatcaaactcctaaataaagataaatcacttctgacattaaacattgaaattaatgtgagctatatatacgtttaagaaagattaatacaaacaagtcaaataacttacctaattatttcggtggaggccgcaggtggttggagcctatcctggcagctcagggagcaatatgggaacccaccccggacaggacgctgttccattactgcagggtgctcttgtacacacccactcacccaggctggaaccatgcagacacacacactcacctaacctacacatctgtgtacatccttcaaagttcagccaaataacatataaacaaatccagtaatatccatcagtcttagttccgtcataacaactcctttttgatcatcaaacaacaaacagggtaggtctgccatatttacttgtctggtccatatcaaaattttctaacaaattatattagaaaatcaaatctctgtcagtttcaaaatcatggaaaaaaatttgccttatttcccttatacttggatatcctaacagtaatctaaatattaatgagaaagttaatgatgtcgtttccttctccctgttgtaaagaaggttttgctgtcccgtttgatcactaagactaattgacactcagaaaaagcataggaaacttctcagcatcacaaaagctctgtcatctagagaagctaggacttgagctcaagtcctgtgacatggaaggccttgtgcctagccatcctgcagcagaggcgtatctaccaagaagtgaaacactacgaaaacagtatgtttactccacattttaaagtgaggtagtttggggtggttcatattttatttaatttatatattatttggattttttttagtttataaaaagggcattggcaagggcagaatgatctgtaagcttctctgcccacctaccataagcatgatctttagtgtgaccttttcttactgttagccattttcttatacttctgcgtccctgtcagtcacttccatgtgaagacatggggaagcttttttacatcagacatgttgttgaaaatcagccgcgttggctgagggattatttgatctctttctccaagtccctttaggctcacattgcctctctgttctttgaattttcacttacctttatcttcttataattactttgctgaaataaatgcaaagcaacaaaaggtatttagtgaagaataccaacaaagccatgaccatttcaggctgagttttgtagtattctttgtctaggaagagatacctagaaaaattttctgaccatgtatttgattattttccttcaatatgtatagtctcagtcttcaaatttcagaaaagaatttgtttcttcattgtcatttaaaattaatgtgttaaatatgtatgcttttacattataagtggttataaaagttaaacacttagaaaaaaagtcaaaataacatacatactatccaacaaaataactttcatattttattgtgttttcttccaaactttttacctttgcgtctgaattctgtgtaggttgtatctataatatagacaacactttatagcctgctaaatattataccataaataggtagttgttacataattctcaggtaatagtaatacaggtctttatcataatctactgagtagttgaatgataattttttttaagacaaggtctccctctgtcacccaggctagaatgcagtggcatgcacatggctcactgtagcctctacctcccaggctcaagtgatcctcctgcctcagcctcccaagtggctgggactgtaggcatgtgccaccatgcccagctatttatttgtatttttagtagagatggggtttcattgtaacagcccaggctggtcttgaactcctggactcaaatgatccacctgcctcagcctcccaaagtgctgaaatcacaggagtgaaccactgcacccagcaataattttttaactcttcattattcattgaacatttagttaacaattctaaaaattttgtttcctgctgtcattgatcttgtgaaaaatatctttggactatagctgtggattatttcctaaatagtaaattacttgagcaaaaagtttacatactttgagggttgataacccatgttgccgcaatgtttccccggaggcattgtggagtttagaatgccagtagtaatattaaggtgtgccattttcaagatccgtggccaacatccctatatgtaagatttttccaaaacatggttctgatttttaaaagtgaaaaatgctacttcatcatgttctttttgtgcttcttactttaaatattagaatgaagaaggagccccacaggaaggaattctggaagatatgcctgtggatcctgacaatgaggcttatgaaatgccttctgaggtaggagtccaagctgaatctttctaacaagacagtaccaaaaacctgtcattgtcacatttctctttcattagtgcttagtgagaatcatttgctctctacatgctcattacgtggacaacttgcaagttaagaatagtttttacatttttaaagggtccttaaaaaaaaagaggaggaggaagatgaagaagaggaagaaaggatgtaaaagaaatcatatgtagtccacatagcttaatatacttactacttgaccctttacaggaaaagtttactaacccctgcattagagaatatatttttagaaactttacattctaaaataaatttctaaatggaaagttagggaaatcaatggaatgccaaaggaaggttattattttttgccatacatgtccaatgggatgacgcatagtaaaataaaagttacccacacaagttatagaataaaaagataaatgcatgatttgcgacaattgatatattccagtataatgttttaaacaacacaatatgattgttaattttattttgattgaaaatgaaagtatctttaatagaaaatgtatcaaaagggaaattagaaaatactgttagatgaataaaactggcccaagaagaaacagtaaatctgaatagatttgtaacacagcgaatagattaaattagtaataaaaaaaaaaacctacctgcaaagaaaatcccaggccgagatggcatcactggtaaattctaccaaacatttaaagaggaattaatactaattagttaacaccaattaatatctcttacaaaacagaagaggagacatttcccaactaattttgtgagaccaatattaccctgataatcaaaaccaaatgaagatatcacaagaaaagaaactatataatggctccattaaaaattgagttcaagtatgttgtagtttggttatgtattattcctcacggcattattaaaaggcatgtcgaggatgggcacagcagttcacacctgtaatcccgcactttgtgagccaaagtggccaggttacttgaggccaggagttggagaccagtctggccaacatggtgaaaccccatctctactaaaaatacaaaaattagccgggcatggtggtacacgcctatggttccagctacttgggaggctgaggcatgagagtcacttgaacccaggaggcagaggttgcagtgagctgagatggcacccctgcactccaatcttggtaacagagcaagactgtctcacacagacacacgaaaggcatattgataataattcaacttatagaaattgagattaaattgtttgtttgcctaataagaatttccaatattttggggtcttttatgcaagacacagtactaaacacaatggaaaactatagagtaattgacattaccaggacataaggagtttacagtctggtaggtttgatgaaaaaaaatagaaattcattcattcatttcttcattatgattcctttaacaaacataattgattgtcttcgatgtaccaggcatcacaggagcaaaaatatataagacatactaaaaagtaaaacattttaaagatctgtttcaatcaatcaggagaagttttattgaggaggtaatgttgatctgggtgggaaaaggtaagagatatagtaggtcaaaacaaacagaggacattctggcacaagggaatatcagaagcaaaggcatgtatgtctgagcatgcaaatggatatgtctgagaacagtgaataattatgactcaagcttaggaacaaggaaaatggtgatagattgaatttgcagctatgggtcaaagacaagttatagagtattaggataatcttgtcatttcagcttgtattctattcagaaaacaacttgagttattgaagttatgcttatttgtttgtttttaagcagaatcctgatattattagagttgctctttaggaggaataatctgatccctttaattaaatccattaatatttgtgttgtggatgctatccagatactgtatggagagcttgaggtttgaaatacaagtaataattgaagccatagatgaagacgaaattttcaactgggagagtgaaagtagggaaaatgtatcttgccttcaaacatcttaatttccttctgagaattagagcatcttagtctggaaaaggctttatagacagcttgattttgttctcacattttacaggtgaagaaactgagaaccagacagtccaacttatttgtcctaccaaactaggtatatgatcattaaatggtgcatccggatcagaacctagatattttaactctgactactactgtaattcacttttatatcagacaagaaagacacaactattaaaaataagataatatttgctgcagaatatttgcaaaaacattgattgtaaattttagtgtaagtggggagccatttcctatctcattggctgtcagtgctgatgcgtaattgaaacttatactaacagtgtgtgctgtctttttgatttttctaatattaggaagggtatcaagactacgaacctgaagcctaagaaatatctttgctcccagtttcttgagatctgctgacagatgttccatcctgtacaagtgctcagttccaatgtgcccagtcatgacatttctcaaagtttttacagtgtatctcgaagtcttccatcagcagtgattgaagtatctgtacctgcccccactcagcatttcggtgcttccctttcactgaagtgaatacatggtagcagggtctttgtgtgctgtggattttgtggcttcaatctacgatgttaaaacaaattaaaaacacctaagtgactaccacttatttctaaatcctcactatttttttgttgctgttgttcagaagttgttagtgatttgctatcatatattataagatttttaggtgtcttttaatgatactgtctaagaataatgacgtattgtgaaatttgttaatatatataatacttaaaaatatgtgagcatgaaactatgcacctataaatactaaatatgaaattttaccattttgcgatgtgttttattcacttgtgtttgtatataaatggtgagaattaaaataaaacgttatctcattgcaaaaatattttatttttatcccatctcactttaataataaaaatcatgcttataagcaacatgaattaagaactgacacaaaggacaaaaatataaagttattaatagccatttgaagaaggaggaattttagaagaggtagagaaaatggaacattaaccctacactcggaattccctgaagcaacactgccagaagtgtgttttggtatgcactggttccttaagtggctgtgattaattattgaaagtggggtgttgaagaccccaactactattgtagagtggtctatttctcccttcaatcctgtcaatgtttgctttacgtattttggggaactgttgtttgatgtgtatgtgtttataattgttatacatttttaattgagccttttattaacatatattgttatttttgtctcgaaataattttttagttaaaatctattttgtctgatattggtgtgaatgctgtacctttctgacaataaataatattcgaccatgaataaaaaaaaaaaaaaagtgggttcccgggaactaagcagtgtagaagatgattttgactacaccctccttagagagccataagacacattagcacatattagcacattcaaggctctgagagaatgtggttaactttgtttaactcagcattcctcactttttttttttaatcatcagaaattctctctctctctctctctttttctctcgctctctttttttttttttttttacaggaaatgcctttaaacatcgttggaactaccagagtcaccttaaaggagatcaattctctagactgataaaaatttcatggcctcctttaaatgttgccaaatatatgaattctaggatttttccttaggaaaggtttttctctttcagggaagatctattaactccccatgggtgctgaaaataaacttgatggtgaaaaactctgtataaattaatttaaaaattatttggtttctctttttaattattctggggcatagtcatttctaaaagtcactagtagaaagtataatttcaagacagaatattctagacatgctagcagtttatatgtattcatgagtaatgtgatatatattgggcgctggtgaggaaggaaggaggaatgagtgactataaggatggttaccatagaaacttccttttttacctaattgaagagagactactacagagtgctaagctgcatgtgtcatcttacactagagagaaatggtaagtttcttgttttatttaagttatgtttaagcaaggaaaggatttgttattgaacagtatatttcaggaaggttagaaagtggcggttaggatatattttaaatctacctaaagcagcatattttaaaaatttaaaagtattggtattaaattaagaaatagaggacagaactagactgatagcagtgacctagaacaatttgagattaggaaagttgtgaccatgaatttaaggatttatgtggatacaaattctcctttaaagtgtttcttcccttaatatttatctgacggtaatttttgagcagtgaattactttatatatcttaatagtttatttgggaccaaacacttaaacaaaaagttctttaagtcatataagccttttcaggaagcttgtctcatattcactcccgagacattcacctgccaagtggcctgaggatcaatccagtcctaggtttattttgcagacttacattctcccaagttattcagcctcatatgactccacggtcggctttaccaaaacagttcagagtgcactttggcacacaattgggaacagaacaatctaatgtgtggtttggtattccaagtggggtctttttcagaatctctgcactagtgtgagatgcaaacatgtttcctcatctttctggcttatccagtatgtagctatttgtgacataataaatatatacatatatgaaaatatgtatttggtttctgcctccagttcttacaaagagctcctaaaacccttgtaatttcctgagtagtaggggtgctagggtcatcttttgttctaatatttggtctttgactctgctttctgacagagctccttagtccctgggtgagagtagcatcttctcttctaatgaagtgactcttgctgggttcctggatgggggctggtcaccagaaaggtcaagccatgataagaagcttgaagcttttggccccattcacatcttctggggacgggagagaagaggagctggagattgagttaataagcaacaatgcttccatgatgaagactccataaaaatccctaaaagacaggattcagagtgctttgaaataggtgaacatgcagaggtgctgggaattgtggtgtgtccagagaaggcatgcaagctccccacgcctcccccatacctttccctgtgcatctcttccatctggctgttcctgagttgtatccttttataacaaactggtaatctagtaagcaaactgttttcctgaagtctgtgaatcacactagcaaattatcaaacctgaggagagggccgtggagaccttggatttgtagacaagtcaaacagaagctatgagtaacatgaggactcattgcttgtgattgtcatcttcagtgggaaggggaaaaatcttgtaaaactgagtccttaacctgtgggtcaatgctaactccaggtagatagtgtccgatttgaattacgggacacccagttggtagccacaaagaatgggagaattgcttggtgtagaaaacacaccccacacacacatgtggtgtcagaaatgaaccggaaatattgtgttccggaaatattgagtgttgtgagtgagtgtatagaaagaaaaacagcgtttccttttcactactagattaaaacaaacacactcatgcattcacacatctcaaagacaactattaattctcaaagacagtgctgtctaaatccatactgaggaagaaaacacattttcttttcaaatctgtaaacctgacagactgcctctgtccacacactaatggaactctgtgtttcatctgaaatgtgttcatcccactttgttctttctgtcttgggcagggcaagagtgcaacagggctgacattttcatatgagctctgtccctgttattggctatactttagacaaattattatgtgtcaaatatagatgtaagtgatttatcaatattaagtcatttaattctcaaaacaaccttaataggttccattatgattctaattttacacataagccaaaggaggcacccacaggctagataactttcccacggccacacagctagtaagcggcagagccaagaggcccaacattacagcaccacagtctgtgctctcagccccttggccacatagtgtcagagtgaggacacacagctatttaagaaaacttccagaagtctaggaaatggggtgatagccccacttttctaggtataataattagatatttgtttttcttcaggtacctaaagaaaatttactagagtttgagcctttagtaagttttgctagtacatctgtttttcttcaggtgcctgaagacaaacatatacacacacacacacacacaaacacacacaaaatgtgtatctatatatatgtgtacacatatctctcatctctatatatatgtctctgtatatctatatatctataaacatatctatatctatagatacatatagagagatttctttttttttttttttgagatggagtcttgctcttgccacctaggctggagtgcaatggcacaatctcagttcactgcaacctccgcctcccaggttcaagcgattctcctgcctcagcctctcgagtaggtgggattacaggaacacaccaccttagcccgactaatttttgtatttttagtagagacagggttcaccacgttggccaggctggtctcaaactcctgacctcaggtaatccacctacctcggcctcccaaagtgctgggattacaggtgtgagccaccatgcctggccaagatttctaattctaagagaaattagcacctgataggtatttccttgtaaataaaccgggcatatcctgattatagaactaagttaattattttccgtggaagatacgaatgttgatgcaataagagcagcagtctacagtaaggtgggctttgtaattttctgtgttgaatcatggcatgggtacttggcttatgtcaaatagacaaaaaaatataaattaaggtataactgggattgtcaattatacatatttagtaatggaatgaatgaatttataaatagatagtaaagggcatgaattaagaatctataggtataaataatattagcaacttaatattgtataataaagtttgattttctaggtgtagttgattgatgcagtaatgttcgttttatcctttgagtaagcctagaattgaagaacccaaaatgcaatagaatagatataacattgaaactattcctaaatatgattttagttccaatgttctttgtgtaattacctaagcttttctttaatgtttttgctgctactacagtatccttaattatttgaaatcttatattggaagcagttaaaccacattccttcaaagagcccttagtttgagcctctagtaagttttgctagtataatttggttttaaaattggctagaattgcatagggaatttccataacgtatagttgatctgcaactataggttaacatactaggatggcttctcttatgaaccttatgaaaatacatcctcagattccctggaaggtcagtgaccagaaatcctcgttgtttctatggcaacacagcaagatatggtgccttggaaatgtgctgcattttaattaggttcctctagggcttcctaactgccttttgcaggtaaactaaatatcagattgccttttatcttgcaacaaaatgaaacctaacccatgtctgtaaatgtcaaagctaagctgtgttccagtaaagctgaatccaaacaaatatagtagcaagtcatgtttttatcttagaaaagaatacaatactctttacctagaatagtcaaggatgctgcttaatgaggtaggttagagtaatagagactatcctgaactccaaaactattaatagactatggaacttcgactcccatttatgtctcttactacttaatattagtgtctctgtttccttatatgtaaatatgcaaatgataaaaatagtgcctcatagcattgttgcatgcattaagtgagttaatgtaagtggaatacttaggactgcctggctgatagtaagtgatctatgagtcaatgatgctatttattagtagtagtactagtacagcacactgtatttttaaaggtaaataagaaataacaatttttttaaatgttcatatacattcacatgtcttcttttaatataaaatagcaatcaagatcaggataatggtagagatattttggagacacaaggcagaagctatttactaatagctaggggagcattttactagtttactaaccaatattactatacttatgtgtacttagcagaatatcacctagcaccaaaaagaaattaagaaagtgtaacttactgagaagtgaatatgcaccaactccataaacactatgtttatggaacacatctaactttagacttagctatactcatcgactcacatatcttctcatccaagtgggatgtgtttaatatttaccatatattcataagttcactgagtattgttctggtaactagaaaaaaaaaaggacaagcatatataagtaaaactcactgatttaaaacagagtattatcaactacaaaagaaaaaaaaaaccacttgaacctccactgatttctcaaatctcatttatttcccattatcttccctcatacctcttgcatttatttggttaaatttctttttgatccaaaaggaagcaatgtttacctgacaatttctactttatgccagaacaacaaatgtaccagcaattacaatatttccaagaaaagtattgtttgttttctcttcatgtctttggtgagtctctcggaattaggatcaaaaaagaacgcatgagctggtgagatgtttgttattgtcctctgtcagattttcctgtgcagcagtgtggaaagtaggtaagtagggcagtgcatacttgtccttttgccttctggacactgtacgactacctaggaattgagagtagcagaaaattattgttgaatactacgtttcctaacaaaatcaactcttgtaaaaaaacaaatgaagactaaatatggacagatgagcctctagaacgtactacgtgttgtgtaaggcgtcatccaaatctctatggaaatggtcaaagcaagttttgagaggctgccaaacattagtaatgtggcagcactgactcctgctgttgaagatggagtgtccatgttgaatgattagaaatctggcaagtctttttggcaaacttccttggaaatccatcttgggcatccttagctgtttgtgccatcctttagctaggttaggccacttgtcttagatcgatgggcaaaagggtaacagctgagaaaaagacctttcctacaattttcttgatctcatctaaagcaaaagaagacatatctctgaaggaactgtaaattatgtattgttaacaactgattctgagctctgattatcacagcaatgtttggaggtgaatactggtggttacttggtgccattctaagaaggagtccaacacaatccaaagttatgtttaagaacagctctgtacatcaatattatggagtttccatggctgtgttttcactgcccatggtgagaatagacattcaaatgctacactgtgttggtttttgatgatcagacctacttccaggctgttaggtataggttttagtcatgattttcatg

SEQ ID NO: 5305 - DNA, 20 bp, Artificial Sequence
  Description of Artificial Sequence: Synthetic oligonucleotide
  Target: SCNA; (-) strand; PAM type: NAAAAC; PAM sequence: AAAAAC
aacaaaatcaactcttgtaa

SEQ ID NO: 5306 - DNA, 20 bp, Artificial Sequence
  Description of Artificial Sequence: Synthetic oligonucleotide
  Target: SCNA; (-) strand; PAM type: NAAAAC; PAM sequence: AAAAAC
tatcaactacaaaagaaaaa

SEQ ID NO: 5307 - DNA, 20 bp, Artificial Sequence
  Description of Artificial Sequence: Synthetic oligonucleotide
  Target: SCNA; (-) strand; PAM type: NAAAAC; PAM sequence: TAAAAC
ataagtaaaactcactgatt

SEQ ID NO: 5308 - DNA, 20 bp, Artificial Sequence
  Description of Artificial Sequence: Synthetic oligonucleotide
  Target: SCNA; (-) strand; PAM type: NAAAAC; PAM sequence: TAAAAC
aaaggacaagcatatataag

SEQ ID NO: 5309 - DNA, 20 bp, Artificial Sequence
  Description of Artificial Sequence: Synthetic oligonucleotide
  Target: SCNA; (-) strand; PAM type: NAAAAC; PAM sequence: CAAAAC
atagagactatcctgaactc

SEQ ID NO: 5310 - DNA, 20 bp, Artificial Sequence
  Description of Artificial Sequence: Synthetic oligonucleotide
  Target: SCNA; (-) strand; PAM type: NAAAAC; PAM sequence: GAAAAC
gaggacacacagctatttaa

SEQ ID NO: 5311 - DNA, 20 bp, Artificial Sequence
  Description of Artificial Sequence: Synthetic oligonucleotide
  Target: SCNA; (-) strand; PAM type: NAAAAC; PAM sequence: CAAAAC
atattaagtcatttaattct

SEQ ID NO: 5312 - DNA, 20 bp, Artificial Sequence
  Description of Artificial Sequence: Synthetic oligonucleotide
  Target: SCNA; (-) strand; PAM type: NAAAAC; PAM sequence: GAAAAC
tctaaatccatactgaggaa

SEQ ID NO: 5313 - DNA, 20 bp, Artificial Sequence
  Description of Artificial Sequence: Synthetic oligonucleotide
  Target: SCNA; (-) strand; PAM type: NAAAAC; PAM sequence: TAAAAC
tttccttttcactactagat

SEQ ID NO: 5314 - DNA, 20 bp, Artificial Sequence
  Description of Artificial Sequence: Synthetic oligonucleotide
  Target: SCNA; (-) strand; PAM type: NAAAAC; PAM sequence: AAAAAC
gtgagtgagtgtatagaaag

SEQ ID NO: 5315 - DNA, 20 bp, Artificial Sequence
  Description of Artificial Sequence: Synthetic oligonucleotide
  Target: SCNA; (-) strand; PAM type: NAAAAC; PAM sequence: GAAAAC
tgggagaattgcttggtgta

SEQ ID NO: 5316 - DNA, 20 bp, Artificial Sequence
  Description of Artificial Sequence: Synthetic oligonucleotide
  Target: SCNA; (-) strand; PAM type: NAAAAC; PAM sequence: TAAAAC
tgggaaggggaaaaatcttg

SEQ ID NO: 5317 - DNA, 20 bp, Artificial Sequence
  Description of Artificial Sequence: Synthetic oligonucleotide
  Target: SCNA; (-) strand; PAM type: NAAAAC; PAM sequence: TAAAAC
cagttcttacaaagagctcc

SEQ ID NO: 5318 - DNA, 20 bp, Artificial Sequence
  Description of Artificial Sequence: Synthetic oligonucleotide
  Target: SCNA; (-) strand; PAM type: NAAAAC; PAM sequence: CAAAAC
gactccacggtcggctttac

SEQ ID NO: 5319 - DNA, 20 bp, Artificial Sequence
  Description of Artificial Sequence: Synthetic oligonucleotide
  Target: SCNA; (-) strand; PAM type: NAAAAC; PAM sequence: AAAAAC
tgaaaataaacttgatggtg

SEQ ID NO: 5320 - DNA, 20 bp, Artificial Sequence
  Description of Artificial Sequence: Synthetic oligonucleotide
  Target: SCNA; (-) strand; PAM type: NAAAAC; PAM sequence: TAAAAC
ataaatggtgagaattaaaa

SEQ ID NO: 5321 - DNA, 20 bp, Artificial Sequence
  Description of Artificial Sequence: Synthetic oligonucleotide
  Target: SCNA; (-) strand; PAM type: NAAAAC; PAM sequence: AAAAAC
ctacgatgttaaaacaaatt

SEQ ID NO: 5322 - DNA, 20 bp, Artificial Sequence
  Description of Artificial Sequence: Synthetic oligonucleotide
  Target: SCNA; (-) strand; PAM type: NAAAAC; PAM sequence: TAAAAC
gtggcttcaatctacgatgt

SEQ ID NO: 5323 - DNA, 20 bp, Artificial Sequence
  Description of Artificial Sequence: Synthetic oligonucleotide
  Target: SCNA; (-) strand; PAM type: NAAAAC; PAM sequence: AAAAAC
atttgctgcagaatatttgc

SEQ ID NO: 5324 - DNA, 20 bp, Artificial Sequence
  Description of Artificial Sequence: Synthetic oligonucleotide
  Target: SCNA; (-) strand; PAM type: NAAAAC; PAM sequence: GAAAAC
ttcagcttgtattctattca

SEQ ID NO: 5325 - DNA, 20 bp, Artificial Sequence
  Description of Artificial Sequence: Synthetic oligonucleotide
  Target: SCNA; (-) strand; PAM type: NAAAAC; PAM sequence: CAAAAC
aggtaagagatatagtaggt

SEQ ID NO: 5326 - DNA, 20 bp, Artificial Sequence
  Description of Artificial Sequence: Synthetic oligonucleotide
  Target: SCNA; (-) strand; PAM type: NAAAAC; PAM sequence: TAAAAC
atataagacatactaaaaag

SEQ ID NO: 5327 - DNA, 20 bp, Artificial Sequence
  Description of Artificial Sequence: Synthetic oligonucleotide
  Target: SCNA; (-) strand; PAM type: NAAAAC; PAM sequence: GAAAAC
acacagtactaaacacaatg

SEQ ID NO: 5328 - DNA, 20 bp, Artificial Sequence
  Description of Artificial Sequence: Synthetic oligonucleotide
  Target: SCNA; (-) strand; PAM type: NAAAAC; PAM sequence: CAAAAC
accaatattaccctgataat

SEQ ID NO: 5329 - DNA, 20 bp, Artificial Sequence
  Description of Artificial Sequence: Synthetic oligonucleotide
  Target: SCNA; (-) strand; PAM type: NAAAAC; PAM sequence: CAAAAC
acaccaattaatatctctta

SEQ ID NO: 5330 - DNA, 20 bp, Artificial Sequence
  Description of Artificial Sequence: Synthetic oligonucleotide
  Target: SCNA; (-) strand; PAM type: NAAAAC; PAM sequence: AAAAAC
attaaattagtaataaaaaa

SEQ ID NO: 5331 - DNA, 20 bp, Artificial Sequence
  Description of Artificial Sequence: Synthetic oligonucleotide
  Target: SCNA; (-) strand; PAM type: NAAAAC; PAM sequence: TAAAAC
agaaaatactgttagatgaa

SEQ ID NO: 5332 - DNA, 20 bp, Artificial Sequence
  Description of Artificial Sequence: Synthetic oligonucleotide
  Target: SCNA; (-) strand; PAM type: NAAAAC; PAM sequence: AAAAAC
ctttctaacaagacagtacc

SEQ ID NO: 5333 - DNA, 20 bp, Artificial Sequence
  Description of Artificial Sequence: Synthetic oligonucleotide
  Target: SCNA; (-) strand; PAM type: NAAAAC; PAM sequence: CAAAAC
ccctatatgtaagatttttc

SEQ ID NO: 5334 - DNA, 20 bp, Artificial Sequence
  Description of Artificial Sequence: Synthetic oligonucleotide
  Target: SCNA; (-) strand; PAM type: NAAAAC; PAM sequence: GAAAAC
accaagaagtgaaacactac

SEQ ID NO: 5335 - DNA, 20 bp, Artificial Sequence
  Description of Artificial Sequence: Synthetic oligonucleotide
  Target: SCNA; (-) strand; PAM type: NAAAAC; PAM sequence: AAAAAC
tatggcaaatttctggacac

SEQ ID NO: 5336 - DNA, 20 bp, Artificial Sequence
  Description of Artificial Sequence: Synthetic oligonucleotide
  Target: SCNA; (-) strand; PAM type: NAAAAC; PAM sequence: CAAAAC
tgaagcaaaacaacatataa

SEQ ID NO: 5337 - DNA, 20 bp, Artificial Sequence
  Description of Artificial Sequence: Synthetic oligonucleotide
  Target: SCNA; (-) strand; PAM type: NAAAAC; PAM sequence: CAAAAC
ctggaaactgtgacttgaag

SEQ ID NO: 5338 - DNA, 20 bp, Artificial Sequence
  Description of Artificial Sequence: Synthetic oligonucleotide
  Target: SCNA; (-) strand; PAM type: NAAAAC; PAM sequence: TAAAAC
aagttaagaactttttgaag

SEQ ID NO: 5339 - DNA, 20 bp, Artificial Sequence
  Description of Artificial Sequence: Synthetic oligonucleotide
  Target: SCNA; (-) strand; PAM type: NAAAAC; PAM sequence: TAAAAC
agactactgtatatactttt

SEQ ID NO: 5340 - DNA, 20 bp, Artificial Sequence
  Description of Artificial Sequence: Synthetic oligonucleotide
  Target: SCNA; (-) strand; PAM type: NAAAAC; PAM sequence: CAAAAC
gcaactgaaaccatggaaaa

SEQ ID NO: 5341 - DNA, 20 bp, Artificial Sequence
  Description of Artificial Sequence: Synthetic oligonucleotide
  Target: SCNA; (-) strand; PAM type: NAAAAC; PAM sequence: GAAAAC
ggtgggcaactgaaaccatg

SEQ ID NO: 5342 - DNA, 20 bp, Artificial Sequence
  Description of Artificial Sequence: Synthetic oligonucleotide
  Target: SCNA; (-) strand; PAM type: NAAAAC; PAM sequence: AAAAAC
aatttagatcacatattcag

SEQ ID NO: 5343 - DNA, 20 bp, Artificial Sequence
  Description of Artificial Sequence: Synthetic oligonucleotide
  Target: SCNA; (-) strand; PAM type: NAAAAC; PAM sequence: GAAAAC
ttcaagtatgattatatttt

SEQ ID NO: 5344 - DNA, 20 bp, Artificial Sequence
  Description of Artificial Sequence: Synthetic oligonucleotide
  Target: SCNA; (-) strand; PAM type: NAAAAC; PAM sequence: TAAAAC
tgagtctatttcactgttcg

SEQ ID NO: 5345 - DNA, 20 bp, Artificial Sequence
  Description of Artificial Sequence: Synthetic oligonucleotide
  Target: SCNA; (-) strand; PAM type: NAAAAC; PAM sequence: CAAAAC
tatctaaatacaatatggtt

SEQ ID NO: 5346 - DNA, 20 bp, Artificial Sequence
  Description of Artificial Sequence: Synthetic oligonucleotide
  Target: SCNA; (-) strand; PAM type: NAAAAC; PAM sequence: AAAAAC
attttttctgtaactgctga

SEQ ID NO: 5347 - DNA, 20 bp, Artificial Sequence
  Description of Artificial Sequence: Synthetic oligonucleotide
  Target: SCNA; (-) strand; PAM type: NAAAAC; PAM sequence: TAAAAC
tcattcttgttatacccaac

SEQ ID NO: 5348 - DNA, 20 bp, Artificial Sequence
  Description of Artificial Sequence: Synthetic oligonucleotide
  Target: SCNA; (-) strand; PAM type: NAAAAC; PAM sequence: CAAAAC
gacattgttcaataatgcag

SEQ ID NO: 5349 - DNA, 20 bp, Artificial Sequence
  Description of Artificial Sequence: Synthetic oligonucleotide
  Target: SCNA; (-) strand; PAM type: NAAAAC; PAM sequence: CAAAAC
aacaaaatatctagcctttc

SEQ ID NO: 5350 - DNA, 20 bp, Artificial Sequence
  Description of Artificial Sequence: Synthetic oligonucleotide
  Target: SCNA; (-) strand; PAM type: NAAAAC; PAM sequence: TAAAAC
acagtaggtcactacattgt

SEQ ID NO: 5351 - DNA, 20 bp, Artificial Sequence
  Description of Artificial Sequence: Synthetic oligonucleotide
  Target: SCNA; (-) strand; PAM type: NAAAAC; PAM sequence: TAAAAC
aaattatagatttcaacatc

SEQ ID NO: 5352 - DNA, 20 bp, Artificial Sequence
  Description of Artificial Sequence: Synthetic oligonucleotide
  Target: SCNA; (-) strand; PAM type: NAAAAC; PAM sequence: AAAAAC
tcctccactgccaaaccttt

SEQ ID NO: 5353 - DNA, 20 bp, Artificial Sequence
  Description of Artificial Sequence: Synthetic oligonucleotide
  Target: SCNA; (-) strand; PAM type: NAAAAC; PAM sequence: TAAAAC
tttaaacctgaattcagaga

SEQ ID NO: 5354 - DNA, 20 bp, Artificial Sequence
  Description of Artificial Sequence: Synthetic oligonucleotide
  Target: SCNA; (-) strand; PAM type: NAAAAC; PAM sequence: CAAAAC
gtagcaacaacaaactgtga

SEQ ID NO: 5355 - DNA, 20 bp, Artificial Sequence
  Description of Artificial Sequence: Synthetic oligonucleotide
  Target: SCNA; (-) strand; PAM type: NAAAAC; PAM sequence: GAAAAC
catggatagaggttttcaga

SEQ ID NO: 5356 - DNA, 20 bp, Artificial Sequence
  Description of Artificial Sequence: Synthetic oligonucleotide
  Target: SCNA; (-) strand; PAM type: NAAAAC; PAM sequence: TAAAAC
ttaagatcaaataatgcata

SEQ ID NO: 5357 - DNA, 20 bp, Artificial Sequence
  Description of Artificial Sequence: Synthetic oligonucleotide
  Target: SCNA; (-) strand; PAM type: NAAAAC; PAM sequence: AAAAAC
aacaaacaagcaaacaaaca

SEQ ID NO: 5358 - DNA, 20 bp, Artificial Sequence
  Description of Artificial Sequence: Synthetic oligonucleotide
  Target: SCNA; (-) strand; PAM type: NAAAAC; PAM sequence: TAAAAC
gaagacatttcaaactattc

SEQ ID NO: 5359 - DNA, 20 bp, Artificial Sequence
  Description of Artificial Sequence: Synthetic oligonucleotide
  Target: SCNA; (-) strand; PAM type: NAAAAC; PAM sequence: CAAAAC
tgtgcacagtttgagaaagg

SEQ ID NO: 5360 - DNA, 20 bp, Artificial Sequence
  Description of Artificial Sequence: Synthetic oligonucleotide
  Target: SCNA; (-) strand; PAM type: NAAAAC; PAM sequence: TAAAAC
aagtacttgttaaaaccaat

SEQ ID NO: 5361 - DNA, 20 bp, Artificial Sequence
  Description of Artificial Sequence: Synthetic oligonucleotide
  Target: SCNA; (-) strand; PAM type: NAAAAC; PAM sequence: TAAAAC
ttctgcttataagtacttgt

SEQ ID NO: 5362 - DNA, 20 bp, Artificial Sequence
  Description of Artificial Sequence: Synthetic oligonucleotide
  Target: SCNA; (-) strand; PAM type: NAAAAC; PAM sequence: TAAAAC
atagaaatcatttctccttc

SEQ ID NO: 5363 - DNA, 20 bp, Artificial Sequence
  Description of Artificial Sequence: Synthetic oligonucleotide
  Target: SCNA; (-) strand; PAM type: NAAAAC; PAM sequence: CAAAAC
tcttcctagttggtcaagct

SEQ ID NO: 5364 - DNA, 20 bp, Artificial Sequence
  Description of Artificial Sequence: Synthetic oligonucleotide
  Target: SCNA; (-) strand; PAM type: NAAAAC; PAM sequence: AAAAAC
ctattcaacacactttgaga

SEQ ID NO: 5365 - DNA, 20 bp, Artificial Sequence
  Description of Artificial Sequence: Synthetic oligonucleotide
  Target: SCNA; (-) strand; PAM type: NAAAAC; PAM sequence: CAAAAC
tggtttctttaaaaagaaga

SEQ ID NO: 5366 - DNA, 20 bp, Artificial Sequence
  Description of Artificial Sequence: Synthetic oligonucleotide
  Target: SCNA; (-) strand; PAM type: NAAAAC; PAM sequence: CAAAAC
atcgaattttttactttagg

SEQ ID NO: 5367 - DNA, 20 bp, Artificial Sequence
  Description of Artificial Sequence: Synthetic oligonucleotide
  Target: SCNA; (-) strand; PAM type: NAAAAC; PAM sequence: TAAAAC
cacaaccacacaacagcaat

SEQ ID NO: 5368 - DNA, 20 bp, Artificial Sequence
  Description of Artificial Sequence: Synthetic oligonucleotide
  Target: SCNA; (-) strand; PAM type: NAAAAC; PAM sequence: TAAAAC
atttttcagagaacccatta

SEQ ID NO: 5369 - DNA, 20 bp, Artificial Sequence
  Description of Artificial Sequence: Synthetic oligonucleotide
  Target: SCNA; (-) strand; PAM type: NAAAAC; PAM sequence: TAAAAC
tttcaattttcatctcattt

SEQ ID NO: 5370 - DNA, 20 bp, Artificial Sequence
  Description of Artificial Sequence: Synthetic oligonucleotide
  Target: SCNA; (-) strand; PAM type: NAAAAC; PAM sequence: CAAAAC
gaataaaaaaagagggtaag

SEQ ID NO: 5371 - DNA, 20 bp, Artificial Sequence
  Description of Artificial Sequence: Synthetic oligonucleotide
  Target: SCNA; (-) strand; PAM type: NAAAAC; PAM sequence: AAAAAC
ggatagggaaaccacagctc

SEQ ID NO: 5372 - DNA, 20 bp, Artificial Sequence
  Description of Artificial Sequence: Synthetic oligonucleotide
  Target: SCNA; (-) strand; PAM type: NAAAAC; PAM sequence: CAAAAC
tgagccaccgcgccccgcca

SEQ ID NO: 5373 - DNA, 20 bp, Artificial Sequence
  Description of Artificial Sequence: Synthetic oligonucleotide
  Target: SCNA; (-) strand; PAM type: NAAAAC; PAM sequence: TAAAAC
accatcacattcataaatat

SEQ ID NO: 5374 - DNA, 20 bp, Artificial Sequence
  Description of Artificial Sequence: Synthetic oligonucleotide
  Target: SCNA; (-) strand; PAM type: NAAAAC; PAM sequence: CAAAAC
attattaattagtggtcttg

SEQ ID NO: 5375 - DNA, 20 bp, Artificial Sequence
  Description of Artificial Sequence: Synthetic oligonucleotide
  Target: SCNA; (-) strand; PAM type: NAAAAC; PAM sequence: TAAAAC
agagaaatttagaaaaaaaa

SEQ ID NO: 5376 - DNA, 20 bp, Artificial Sequence
  Description of Artificial Sequence: Synthetic oligonucleotide
  Target: SCNA; (-) strand; PAM type: NAAAAC; PAM sequence: CAAAAC
ccagatgaatccctggaact

SEQ ID NO: 5377 - DNA, 20 bp, Artificial Sequence
  Description of Artificial Sequence: Synthetic oligonucleotide
  Target: SCNA; (-) strand; PAM type: NAAAAC; PAM sequence: CAAAAC
gcagaaagattttcaagaca

SEQ ID NO: 5378 - DNA, 20 bp, Artificial Sequence
  Description of Artificial Sequence: Synthetic oligonucleotide
  Target: SCNA; (-) strand; PAM type: NAAAAC; PAM sequence: CAAAAC
ttcgcttacaccaatcatct

SEQ ID NO: 5379 - DNA, 20 bp, Artificial Sequence
  Description of Artificial Sequence: Synthetic oligonucleotide
  Target: SCNA; (-) strand; PAM type: NAAAAC; PAM sequence: TAAAAC
tcactgagggattcttagtc

SEQ ID NO: 5380 - DNA, 20 bp, Artificial Sequence
  Description of Artificial Sequence: Synthetic oligonucleotide
  Target: SCNA; (-) strand; PAM type: NAAAAC; PAM sequence: AAAAAC
taaaaggaagataaagtttt

SEQ ID NO: 5381 - DNA, 20 bp, Artificial Sequence
  Description of Artificial Sequence: Synthetic oligonucleotide
  Target: SCNA; (-) strand; PAM type: NAAAAC; PAM sequence: TAAAAC
gtaaaattctaaacagcaga

SEQ ID NO: 5382 - DNA, 20 bp, Artificial Sequence
  Description of Artificial Sequence: Synthetic oligonucleotide
  Target: SCNA; (-) strand; PAM type: NAAAAC; PAM sequence: TAAAAC
tggaattccagccattaatg

SEQ ID NO: 5383 - DNA, 20 bp, Artificial Sequence
  Description of Artificial Sequence: Synthetic oligonucleotide
  Target: SCNA; (-) strand; PAM type: NAAAAC; PAM sequence: GAAAAC
tctaaaaaaaaaaaagaaaa

SEQ ID NO: 5384 - DNA, 20 bp, Artificial Sequence
  Description of Artificial Sequence: Synthetic oligonucleotide
  Target: SCNA; (-) strand; PAM type: NAAAAC; PAM sequence: CAAAAC
agagacattacataggccca

SEQ ID NO: 5385 - DNA, 20 bp, Artificial Sequence
  Description of Artificial Sequence: Synthetic oligonucleotide
  Target: SCNA; (-) strand; PAM type: NAAAAC; PAM sequence: TAAAAC
atttagattgtgtagaatgt

SEQ ID NO: 5386 - DNA, 20 bp, Artificial Sequence
  Description of Artificial Sequence: Synthetic oligonucleotide
  Target: SCNA; (-) strand; PAM type: NAAAAC; PAM sequence: AAAAAC
cttgttttacttttgccaca

SEQ ID NO: 5387 - DNA, 20 bp, Artificial Sequence
  Description of Artificial Sequence: Synthetic oligonucleotide
  Target: SCNA; (-) strand; PAM type: NAAAAC; PAM sequence: GAAAAC
taagtgcctgcttgtagcat

SEQ ID NO: 5388 - DNA, 20 bp, Artificial Sequence
  Description of Artificial Sequence: Synthetic oligonucleotide
  Target: SCNA; (-) strand; PAM type: NAAAAC; PAM sequence: AAAAAC
tcagattcagccaagttctc

SEQ ID NO: 5389 - DNA, 20 bp, Artificial Sequence
  Description of Artificial Sequence: Synthetic oligonucleotide
  Target: SCNA; (-) strand; PAM type: NAAAAC; PAM sequence: CAAAAC
attgttccaattaccacaat

SEQ ID NO: 5390 - DNA, 20 bp, Artificial Sequence
  Description of Artificial Sequence: Synthetic oligonucleotide
  Target: SCNA; (-) strand; PAM type: NAAAAC; PAM sequence: GAAAAC
tgctaaaataaagctagtta

SEQ ID NO: 5391 - DNA, 20 bp, Artificial Sequence
  Description of Artificial Sequence: Synthetic oligonucleotide
  Target: SCNA; (-) strand; PAM type: NAAAAC; PAM sequence: AAAAAC
tccatcaacatcccaagaac

SEQ ID NO: 5392 - DNA, 20 bp, Artificial Sequence
  Description of Artificial Sequence: Synthetic oligonucleotide
  Target: SCNA; (-) strand; PAM type: NAAAAC; PAM sequence: AAAAAC
gaaaaacctagccactgacc

SEQ ID NO: 5393 - DNA, 20 bp, Artificial Sequence
  Description of Artificial Sequence: Synthetic oligonucleotide
  Target: SCNA; (-) strand; PAM type: NAAAAC; PAM sequence: AAAAAC
caatttgtttgatattcagg

SEQ ID NO: 5394 - DNA, 20 bp, Artificial Sequence
  Description of Artificial Sequence: Synthetic oligonucleotide
  Target: SCNA; (-) strand; PAM type: NAAAAC; PAM sequence: TAAAAC
taaatggtaatcctcatgat

SEQ ID NO: 5395 - DNA, 20 bp, Artificial Sequence
  Description of Artificial Sequence: Synthetic oligonucleotide
  Target: SCNA; (-) strand; PAM type: NAAAAC; PAM sequence: TAAAAC
aaaacatttattattcatga

SEQ ID NO: 5396 - DNA, 20 bp, Artificial Sequence
  Description of Artificial Sequence: Synthetic oligonucleotide
  Target: SCNA; (-) strand; PAM type: NAAAAC; PAM sequence: AAAAAC
caagtacatttttaaacttt

SEQ ID NO: 5397 - DNA, 20 bp, Artificial Sequence
  Description of Artificial Sequence: Synthetic oligonucleotide
  Target: SCNA; (-) strand; PAM type: NAAAAC; PAM sequence: GAAAAC
atgctaaattagcacttgat

SEQ ID NO: 5398 - DNA, 20 bp, Artificial Sequence
  Description of Artificial Sequence: Synthetic oligonucleotide
  Target: SCNA; (-) strand; PAM type: NAAAAC; PAM sequence: AAAAAC
tcctttacaaattaattaat

SEQ ID NO: 5399 - DNA, 20 bp, Artificial Sequence
  Description of Artificial Sequence: Synthetic oligonucleotide
  Target: SCNA; (-) strand; PAM type: NAAAAC; PAM sequence: TAAAAC
tatttaaacttaaattcttt

SEQ ID NO: 5400 - DNA, 20 bp, Artificial Sequence
  Description of Artificial Sequence: Synthetic oligonucleotide
  Target: SCNA; (-) strand; PAM type: NAAAAC; PAM sequence: GAAAAC
aaaaaaaaaaagaaagaaaa

SEQ ID NO: 5401 - DNA, 20 bp, Artificial Sequence
  Description of Artificial Sequence: Synthetic oligonucleotide
  Target: SCNA; (-) strand; PAM type: NAAAAC; PAM sequence: GAAAAC
tagacaactacacttaaaat

SEQ ID NO: 5402 - DNA, 20 bp, Artificial Sequence
  Description of Artificial Sequence: Synthetic oligonucleotide
  Target: SCNA; (-) strand; PAM type: NAAAAC; PAM sequence: CAAAAC
acctgtcactgagcagaact

SEQ ID NO: 5403 - DNA, 20 bp, Artificial Sequence
  Description of Artificial Sequence: Synthetic oligonucleotide
  Target: SCNA; (-) strand; PAM type: NAAAAC; PAM sequence: TAAAAC
tcctcagtattaatcttact

SEQ ID NO: 5404 - DNA, 20 bp, Artificial Sequence
  Description of Artificial Sequence: Synthetic oligonucleotide
  Target: SCNA; (-) strand; PAM type: NAAAAC; PAM sequence: AAAAAC
cgagaccccatctcaaaaaa

SEQ ID NO: 5405 - DNA, 20 bp, Artificial Sequence
  Description of Artificial Sequence: Synthetic oligonucleotide
  Target: SCNA; (-) strand; PAM type: NAAAAC; PAM sequence: CAAAAC
tcctccaaaattcacaaaac

SEQ ID NO: 5406 - DNA, 20 bp, Artificial Sequence
  Description of Artificial Sequence: Synthetic oligonucleotide
  Target: SCNA; (-) strand; PAM type: NAAAAC; PAM sequence: CAAAAC
ataaattcctccaaaattca

SEQ ID NO: 5407 - DNA, 20 bp, Artificial Sequence
  Description of Artificial Sequence: Synthetic oligonucleotide
  Target: SCNA; (-) strand; PAM type: NAAAAC; PAM sequence: CAAAAC
tgcaataaataaaattacac

SEQ ID NO: 5408 - DNA, 20 bp, Artificial Sequence
  Description of Artificial Sequence: Synthetic oligonucleotide
  Target: SCNA; (-) strand; PAM type: NAAAAC; PAM sequence: TAAAAC
ctatgacaatactattcaga

SEQ ID NO: 5409 - DNA, 20 bp, Artificial Sequence
  Description of Artificial Sequence: Synthetic oligonucleotide
  Target: SCNA; (-) strand; PAM type: NAAAAC; PAM sequence: AAAAAC
aaagcatatttatctaactg

SEQ ID NO: 5410 - DNA, 20 bp, Artificial Sequence
  Description of Artificial Sequence: Synthetic oligonucleotide
  Target: SCNA; (-) strand; PAM type: NAAAAC; PAM sequence: TAAAAC
caaatttagagatgtacctc

SEQ ID NO: 5411 - DNA, 20 bp, Artificial Sequence
  Description of Artificial Sequence: Synthetic oligonucleotide
  Target: SCNA; (-) strand; PAM type: NAAAAC; PAM sequence: TAAAAC
gataattcatctgtcaacta

SEQ ID NO: 5412 - DNA, 20 bp, Artificial Sequence
  Description of Artificial Sequence: Synthetic oligonucleotide
  Target: SCNA; (-) strand; PAM type: NAAAAC; PAM sequence: AAAAAC
ttttaaaagttacatgctag

SEQ ID NO: 5413 - DNA, 20 bp, Artificial Sequence
  Description of Artificial Sequence: Synthetic oligonucleotide
  Target: SCNA; (-) strand; PAM type: NAAAAC; PAM sequence: TAAAAC
aaaaaattactaaaaagtgt

SEQ ID NO: 5414 - DNA, 20 bp, Artificial Sequence
  Description of Artificial Sequence: Synthetic oligonucleotide
  Target: SCNA; (-) strand; PAM type: NAAAAC; PAM sequence: TAAAAC
actggttctagcacagatat

SEQ ID NO: 5415 - DNA, 20 bp, Artificial Sequence
  Description of Artificial Sequence: Synthetic oligonucleotide
  Target: SCNA; (-) strand; PAM type: NAAAAC; PAM sequence: TAAAAC
ttgtgcaatgttactgtcag

SEQ ID NO: 5416 - DNA, 20 bp, Artificial Sequence
  Description of Artificial Sequence: Synthetic oligonucleotide
  Target: SCNA; (-) strand; PAM type: NAAAAC; PAM sequence: AAAAAC
tgggaactgatatgggagaa

SEQ ID NO: 5417 - DNA, 20 bp, Artificial Sequence
  Description of Artificial Sequence: Synthetic oligonucleotide
  Target: SCNA; (-) strand; PAM type: NAAAAC; PAM sequence: GAAAAC
agttgacttccagtgcaagt

SEQ ID NO: 5418 - DNA, 20 bp, Artificial Sequence
  Description of Artificial Sequence: Synthetic oligonucleotide
  Target: SCNA; (-) strand; PAM type: NAAAAC; PAM sequence: CAAAAC
ctcttcaaaatcactttttt

SEQ ID NO: 5419 - DNA, 20 bp, Artificial Sequence
  Description of Artificial Sequence: Synthetic oligonucleotide
  Target: SCNA; (-) strand; PAM type: NAAAAC; PAM sequence: AAAAAC
catttgtatttcacttgcat

SEQ ID NO: 5420 - DNA, 20 bp, Artificial Sequence
  Description of Artificial Sequence: Synthetic oligonucleotide
  Target: SCNA; (-) strand; PAM type: NAAAAC; PAM sequence: AAAAAC
agtctctttgatttcgctct

SEQ ID NO: 5421 - DNA, 20 bp, Artificial Sequence
  Description of Artificial Sequence: Synthetic oligonucleotide
  Target: SCNA; (-) strand; PAM type: NAAAAC; PAM sequence: TAAAAC
ggggcatttattaaacacat

SEQ ID NO: 5422 - DNA, 20 bp, Artificial Sequence
  Description of Artificial Sequence: Synthetic oligonucleotide
  Target: SCNA; (-) strand; PAM type: NAAAAC; PAM sequence: AAAAAC
ttcagtcacagacacaggag

SEQ ID NO: 5423 - DNA, 20 bp, Artificial Sequence
  Description of Artificial Sequence: Synthetic oligonucleotide
  Target: SCNA; (-) strand; PAM type: NAAAAC; PAM sequence: GAAAAC
ttacatgatgtgtaaaatta

SEQ ID NO: 5424 - DNA, 20 bp, Artificial Sequence
  Description of Artificial Sequence: Synthetic oligonucleotide
  Target: SCNA; (-) strand; PAM type: NAAAAC; PAM sequence: GAAAAC
attcagtagcaatgataact

SEQ ID NO: 5425 - DNA, 20 bp, Artificial Sequence
  Description of Artificial Sequence: Synthetic oligonucleotide
  Target: SCNA; (-) strand; PAM type: NAAAAC; PAM sequence: AAAAAC
gtggaaacactggtaatgac

SEQ ID NO: 5426 - DNA, 20 bp, Artificial Sequence
  Description of Artificial Sequence: Synthetic oligonucleotide
  Target: SCNA; (-) strand; PAM type: NAAAAC; PAM sequence: AAAAAC
ttaaaatgttaaaaatgttt

SEQ ID NO: 5427 - DNA, 20 bp, Artificial Sequence
  Description of Artificial Sequence: Synthetic oligonucleotide
  Target: SCNA; (-) strand; PAM type: NAAAAC; PAM sequence: GAAAAC
gctttcttagtcaatggtag

SEQ ID NO: 5428 - DNA, 20 bp, Artificial Sequence
  Description of Artificial Sequence: Synthetic oligonucleotide
  Target: SCNA; (-) strand; PAM type: NAAAAC; PAM sequence: CAAAAC
caccaagtctagttttaaaa

SEQ ID NO: 5429 - DNA, 20 bp, Artificial Sequence
  Description of Artificial Sequence: Synthetic oligonucleotide
  Target: SCNA; (-) strand; PAM type: NAAAAC; PAM sequence: TAAAAC
tattccaccaagtctagttt

SEQ ID NO: 5430 - DNA, 20 bp, Artificial Sequence
  Description of Artificial Sequence: Synthetic oligonucleotide
  Target: SCNA; (-) strand; PAM type: NAAAAC; PAM sequence: AAAAAC
tttaattttttttaagaata

SEQ ID NO: 5431 - DNA, 20 bp, Artificial Sequence
  Description of Artificial Sequence: Synthetic oligonucleotide
  Target: SCNA; (-) strand; PAM type: NAAAAC; PAM sequence: TAAAAC
tggattatgagatatgacca

SEQ ID NO: 5432 - DNA, 20 bp, Artificial Sequence
  Description of Artificial Sequence: Synthetic oligonucleotide
  Target: SCNA; (-) strand; PAM type: NAAAAC; PAM sequence: AAAAAC
tgtctcaaaataaaaaaaca

SEQ ID NO: 5433 - DNA, 20 bp, Artificial Sequence
  Description of Artificial Sequence: Synthetic oligonucleotide
  Target: SCNA; (-) strand; PAM type: NAAAAC; PAM sequence: AAAAAC
aaaactctgtctcaaaataa

SEQ ID NO: 5434 - DNA, 20 bp, Artificial Sequence
  Description of Artificial Sequence: Synthetic oligonucleotide
  Target: SCNA; (-) strand; PAM type: NAAAAC; PAM sequence: CAAAAC
ctccagcctgggcaaaagag

SEQ ID NO: 5435 - DNA, 20 bp, Artificial Sequence
  Description of Artificial Sequence: Synthetic oligonucleotide
  Target: SCNA; (-) strand; PAM type: NAAAAC; PAM sequence: TAAAAC
gttcaaatataaagttagaa

SEQ ID NO: 5436 - DNA, 20 bp, Artificial Sequence
  Description of Artificial Sequence: Synthetic oligonucleotide
  Target: SCNA; (-) strand; PAM type: NAAAAC; PAM sequence: GAAAAC
ccgtggaaacatttcttcca

SEQ ID NO: 5437 - DNA, 20 bp, Artificial Sequence
  Description of Artificial Sequence: Synthetic oligonucleotide
  Target: SCNA; (-) strand; PAM type: NAAAAC; PAM sequence: CAAAAC
gtaatgtgcttgaatcatcc

SEQ ID NO: 5438 - DNA, 20 bp, Artificial Sequence
  Description of Artificial Sequence: Synthetic oligonucleotide
  Target: SCNA; (-) strand; PAM type: NAAAAC; PAM sequence: CAAAAC
taatgaaaaaattttattta

SEQ ID NO: 5439 - DNA, 20 bp, Artificial Sequence
  Description of Artificial Sequence: Synthetic oligonucleotide
  Target: SCNA; (-) strand; PAM type: NAAAAC; PAM sequence: CAAAAC
aaatagtataaataatattt

SEQ ID NO: 5440 - DNA, 20 bp, Artificial Sequence
  Description of Artificial Sequence: Synthetic oligonucleotide
  Target: SCNA; (-) strand; PAM type: NAAAAC; PAM sequence: AAAAAC
tatataactacatgctaatt

SEQ ID NO: 5441 - DNA, 20 bp, Artificial Sequence
  Description of Artificial Sequence: Synthetic oligonucleotide
  Target: SCNA; (-) strand; PAM type: NAAAAC; PAM sequence: AAAAAC
gtagcacaatgcaagaaaga

SEQ ID NO: 5442 - DNA, 20 bp, Artificial Sequence
  Description of Artificial Sequence: Synthetic oligonucleotide
  Target: SCNA; (-) strand; PAM type: NAAAAC; PAM sequence: AAAAAC
aagctagttttctgaagggg

SEQ ID NO: 5443 - DNA, 20 bp, Artificial Sequence
  Description of Artificial Sequence: Synthetic oligonucleotide
  Target: SCNA; (-) strand; PAM type: NAAAAC; PAM sequence: TAAAAC
aactttgtaaacttttatac

SEQ ID NO: 5444 - DNA, 20 bp, Artificial Sequence
  Description of Artificial Sequence: Synthetic oligonucleotide
  Target: SCNA; (-) strand; PAM type: NAAAAC; PAM sequence: CAAAAC
gagttctgacttagagacag

SEQ ID NO: 5445 - DNA, 20 bp, Artificial Sequence
  Description of Artificial Sequence: Synthetic oligonucleotide
  Target: SCNA; (-) strand; PAM type: NAAAAC; PAM sequence: AAAAAC
catgtgctaaagcatggggc

SEQ ID NO: 5446 - DNA, 20 bp, Artificial Sequence
  Description of Artificial Sequence: Synthetic oligonucleotide
  Target: SCNA; (-) strand; PAM type: NAAAAC; PAM sequence: CAAAAC
tggattatcagcctgaagga

SEQ ID NO: 5447 - DNA, 20 bp, Artificial Sequence
  Description of Artificial Sequence: Synthetic oligonucleotide
  Target: SCNA; (-) strand; PAM type: NAAAAC; PAM sequence: TAAAAC
tcactctgtactaggtgcta

SEQ ID NO: 5448 - DNA, 20 bp, Artificial Sequence
  Description of Artificial Sequence: Synthetic oligonucleotide
  Target: SCNA; (-) strand; PAM type: NAAAAC; PAM sequence: AAAAAC
tcaaaaaaaaaaaaaagaat

SEQ ID NO: 5449 - DNA, 20 bp, Artificial Sequence
  Description of Artificial Sequence: Synthetic oligonucleotide
  Target: SCNA; (-) strand; PAM type: NAAAAC; PAM sequence: GAAAAC
gaatgttaaaagacaaagaa

SEQ ID NO: 5450 - DNA, 20 bp, Artificial Sequence
  Description of Artificial Sequence: Synthetic oligonucleotide
  Target: SCNA; (-) strand; PAM type: NAAAAC; PAM sequence: CAAAAC
tggaactatgcatgatccag

SEQ ID NO: 5451 - DNA, 20 bp, Artificial Sequence
  Description of Artificial Sequence: Synthetic oligonucleotide
  Target: SCNA; (-) strand; PAM type: NAAAAC; PAM sequence: GAAAAC
attgataaagattgtcatta

SEQ ID NO: 5452 - DNA, 20 bp, Artificial Sequence
  Description of Artificial Sequence: Synthetic oligonucleotide
  Target: SCNA; (-) strand; PAM type: NAAAAC; PAM sequence: CAAAAC
cttctgtaaacccctgccca

SEQ ID NO: 5453 - DNA, 20 bp, Artificial Sequence
  Description of Artificial Sequence: Synthetic oligonucleotide
  Target: SCNA; (-) strand; PAM type: NAAAAC; PAM sequence: TAAAAC
atcttttctccaaactttag

SEQ ID NO: 5454 - DNA, 20 bp, Artificial Sequence
  Description of Artificial Sequence: Synthetic oligonucleotide
  Target: SCNA; (-) strand; PAM type: NAAAAC; PAM sequence: CAAAAC
ggaataaaagtatttttcct

SEQ ID NO: 5455 - DNA, 20 bp, Artificial Sequence
  Description of Artificial Sequence: Synthetic oligonucleotide
  Target: SCNA; (-) strand; PAM type: NAAAAC; PAM sequence: CAAAAC
aggcctaatattgagcaaag

SEQ ID NO: 5456 - DNA, 20 bp, Artificial Sequence
  Description of Artificial Sequence: Synthetic oligonucleotide
  Target: SCNA; (-) strand; PAM type: NAAAAC; PAM sequence: GAAAAC
ttttttaacaggggactagt

SEQ ID NO: 5457 - DNA, 20 bp, Artificial Sequence
  Description of Artificial Sequence: Synthetic oligonucleotide
  Target: SCNA; (-) strand; PAM type: NAAAAC; PAM sequence: AAAAAC
caaaatagcatcctaggtgt

SEQ ID NO: 5458 - DNA, 20 bp, Artificial Sequence
  Description of Artificial Sequence: Synthetic oligonucleotide
  Target: SCNA; (-) strand; PAM type: NAAAAC; PAM sequence: AAAAAC
gccttcctcaggaatccagt

SEQ ID NO: 5459 - DNA, 20 bp, Artificial Sequence
  Description of Artificial Sequence: Synthetic oligonucleotide
  Target: SCNA; (-) strand; PAM type: NAAAAC; PAM sequence: TAAAAC
atttatataacataagtcag

SEQ ID NO: 5460 - DNA, 20 bp, Artificial Sequence
  Description of Artificial Sequence: Synthetic oligonucleotide
  Target: SCNA; (-) strand; PAM type: NAAAAC; PAM sequence: GAAAAC
caaacaattctgtgtgtcct

SEQ ID NO: 5461 - DNA, 20 bp, Artificial Sequence
  Description of Artificial Sequence: Synthetic oligonucleotide
  Target: SCNA; (-) strand; PAM type: NAAAAC; PAM sequence: CAAAAC
gagttcaaactaggaagcca

SEQ ID NO: 5462 - DNA, 20 bp, Artificial Sequence
  Description of Artificial Sequence: Synthetic oligonucleotide
  Target: SCNA; (-) strand; PAM type: NAAAAC; PAM sequence: AAAAAC
aaaagacaaatatctggaaa

SEQ ID NO: 5463 - DNA, 20 bp, Artificial Sequence
  Description of Artificial Sequence: Synthetic oligonucleotide
  Target: SCNA; (-) strand; PAM type: NAAAAC; PAM sequence: GAAAAC
ttcactatatatcaagacat

SEQ ID NO: 5464 - DNA, 20 bp, Artificial Sequence
  Description of Artificial Sequence: Synthetic oligonucleotide
  Target: SCNA; (-) strand; PAM type: NAAAAC; PAM sequence: TAAAAC
tagtaatggcttttaaaaat

SEQ ID NO: 5465 - DNA, 20 bp, Artificial Sequence
  Description of Artificial Sequence: Synthetic oligonucleotide
  Target: SCNA; (-) strand; PAM type: NAAAAC; PAM sequence: AAAAAC
aaggtatcaagacatcttta

SEQ ID NO: 5466 - DNA, 20 bp, Artificial Sequence
  Description of Artificial Sequence: Synthetic oligonucleotide
  Target: SCNA; (-) strand; PAM type: NAAAAC; PAM sequence: GAAAAC
tttcccactgttgctccaga

SEQ ID NO: 5467 - DNA, 20 bp, Artificial Sequence
  Description of Artificial Sequence: Synthetic oligonucleotide
  Target: SCNA; (-) strand; PAM type: NAAAAC; PAM sequence: CAAAAC
tacttcagacattagtataa

SEQ ID NO: 5468 - DNA, 20 bp, Artificial Sequence
  Description of Artificial Sequence: Synthetic oligonucleotide
  Target: SCNA; (-) strand; PAM type: NAAAAC; PAM sequence: TAAAAC
acaagtgaacaaaaaaatga

SEQ ID NO: 5469 - DNA, 20 bp, Artificial Sequence
  Description of Artificial Sequence: Synthetic oligonucleotide
  Target: SCNA; (-) strand; PAM type: NAAAAC; PAM sequence: AAAAAC
ctttatatgtccatcctgga

SEQ ID NO: 5470 - DNA, 20 bp, Artificial Sequence
  Description of Artificial Sequence: Synthetic oligonucleotide
  Target: SCNA; (-) strand; PAM type: NAAAAC; PAM sequence: AAAAAC
catttccaacacaacttaga

SEQ ID NO: 5471 - DNA, 20 bp, Artificial Sequence
  Description of Artificial Sequence: Synthetic oligonucleotide
  Target: SCNA; (-) strand; PAM type: NAAAAC; PAM sequence: AAAAAC
gaagaacagcttggttcttt

SEQ ID NO: 5472 - DNA, 20 bp, Artificial Sequence
  Description of Artificial Sequence: Synthetic oligonucleotide
  Target: SCNA; (-) strand; PAM type: NAAAAC; PAM sequence: GAAAAC
gggtatagtgactagaaaaa

SEQ ID NO: 5473 - DNA, 20 bp, Artificial Sequence
  Description of Artificial Sequence: Synthetic oligonucleotide
  Target: SCNA; (-) strand; PAM type: NAAAAC; PAM sequence: AAAAAC
agtttttaagagggaaaaga

SEQ ID NO: 5474 - DNA, 20 bp, Artificial Sequence
  Description of Artificial Sequence: Synthetic oligonucleotide
  Target: SCNA; (-) strand; PAM type: NAAAAC; PAM sequence: TAAAAC
ttaattttttaattaaaaat

SEQ ID NO: 5475 - DNA, 20 bp, Artificial Sequence
  Description of Artificial Sequence: Synthetic oligonucleotide
  Target: SCNA; (-) strand; PAM type: NAAAAC; PAM sequence: CAAAAC
ttttacaaccatgacaagaa

SEQ ID NO: 5476 - DNA, 20 bp, Artificial Sequence
  Description of Artificial Sequence: Synthetic oligonucleotide
  Target: SCNA; (-) strand; PAM type: NAAAAC; PAM sequence: AAAAAC
tagacttgataattatagtt

SEQ ID NO: 5477 - DNA, 20 bp, Artificial Sequence
  Description of Artificial Sequence: Synthetic oligonucleotide
  Target: SCNA; (-) strand; PAM type: NAAAAC; PAM sequence: AAAAAC
tcttcagaaaatcaaactac

SEQ ID NO: 5478 - DNA, 20 bp, Artificial Sequence
  Description of Artificial Sequence: Synthetic oligonucleotide
  Target: SCNA; (-) strand; PAM type: NAAAAC; PAM sequence: TAAAAC
gaactgatgttgaaattatt

SEQ ID NO: 5479 - DNA, 20 bp, Artificial Sequence
  Description of Artificial Sequence: Synthetic oligonucleotide
  Target: SCNA; (-) strand; PAM type: NAAAAC; PAM sequence: GAAAAC
atattattgcagatattgat

SEQ ID NO: 5480 - DNA, 20 bp, Artificial Sequence
  Description of Artificial Sequence: Synthetic oligonucleotide
  Target: SCNA; (-) strand; PAM type: NAAAAC; PAM sequence: AAAAAC
ccatctggggaagaaacatt

SEQ ID NO: 5481 - DNA, 20 bp, Artificial Sequence
  Description of Artificial Sequence: Synthetic oligonucleotide
  Target: SCNA; (-) strand; PAM type: NAAAAC; PAM sequence: GAAAAC
attttaatattaagaactag

SEQ ID NO: 5482 - DNA, 20 bp, Artificial Sequence
  Description of Artificial Sequence: Synthetic oligonucleotide
  Target: SCNA; (-) strand; PAM type: NAAAAC; PAM sequence: GAAAAC
tgaggagagctcctcttaag

SEQ ID NO: 5483 - DNA, 20 bp, Artificial Sequence
  Description of Artificial Sequence: Synthetic oligonucleotide
  Target: SCNA; (-) strand; PAM type: NAAAAC; PAM sequence: TAAAAC
cacaatgtgcacatgtaccc

SEQ ID NO: 5484 - DNA, 20 bp, Artificial Sequence
  Description of Artificial Sequence: Synthetic oligonucleotide
  Target: SCNA; (-) strand; PAM type: NAAAAC; PAM sequence: AAAAAC
atatcagacatactcattta

SEQ ID NO: 5485 - DNA, 20 bp, Artificial Sequence
  Description of Artificial Sequence: Synthetic oligonucleotide
  Target: SCNA; (-) strand; PAM type: NAAAAC; PAM sequence: CAAAAC
aacaacaacaacaacaacaa

SEQ ID NO: 5486 - DNA, 20 bp, Artificial Sequence
  Description of Artificial Sequence: Synthetic oligonucleotide
  Target: SCNA; (-) strand; PAM type: NAAAAC; PAM sequence: AAAAAC
attggattaaatttaatttt

SEQ ID NO: 5487 - DNA, 20 bp, Artificial Sequence
  Description of Artificial Sequence: Synthetic oligonucleotide
  Target: SCNA; (-) strand; PAM type: NAAAAC; PAM sequence: CAAAAC
atagaaaactaatacgatat

SEQ ID NO: 5488 - DNA, 20 bp, Artificial Sequence
  Description of Artificial Sequence: Synthetic oligonucleotide
  Target: SCNA; (-) strand; PAM type: NAAAAC; PAM sequence: GAAAAC
aattcagtaggggaacaata

SEQ ID NO: 5489 - DNA, 20 bp, Artificial Sequence
  Description of Artificial Sequence: Synthetic oligonucleotide
  Target: SCNA; (-) strand; PAM type: NAAAAC; PAM sequence: CAAAAC
agattttctcctagagtctc

SEQ ID NO: 5490 - DNA, 20 bp, Artificial Sequence
  Description of Artificial Sequence: Synthetic oligonucleotide
  Target: SCNA; (-) strand; PAM type: NAAAAC; PAM sequence: TAAAAC
gtaacaattaatatgcacaa

SEQ ID NO: 5491 - DNA, 20 bp, Artificial Sequence
  Description of Artificial Sequence: Synthetic oligonucleotide
  Target: SCNA; (-) strand; PAM type: NAAAAC; PAM sequence: GAAAAC
atagtgtcaggtgctataaa

SEQ ID NO: 5492 - DNA, 20 bp, Artificial Sequence
  Description of Artificial Sequence: Synthetic oligonucleotide
  Target: SCNA; (-) strand; PAM type: NAAAAC; PAM sequence: CAAAAC
aatccttgagaaagaacaca

SEQ ID NO: 5493 - DNA, 20 bp, Artificial Sequence
  Description of Artificial Sequence: Synthetic oligonucleotide
  Target: SCNA; (-) strand; PAM type: NAAAAC; PAM sequence: TAAAAC
atgataaatgcgatgagaac

SEQ ID NO: 5494 - DNA, 20 bp, Artificial Sequence
  Description of Artificial Sequence: Synthetic oligonucleotide
  Target: SCNA; (-) strand; PAM type: NAAAAC; PAM sequence: AAAAAC
agtaataatactgtattatt

SEQ ID NO: 5495 - DNA, 20 bp, Artificial Sequence
  Description of Artificial Sequence: Synthetic oligonucleotide
  Target: SCNA; (-) strand; PAM type: NAAAAC; PAM sequence: GAAAAC
gggtttgacataaattttag

SEQ ID NO: 5496 - DNA, 20 bp, Artificial Sequence
  Description of Artificial Sequence: Synthetic oligonucleotide
  Target: SCNA; (-) strand; PAM type: NAAAAC; PAM sequence: CAAAAC
cctaagacactcctccactc

SEQ ID NO: 5497 - DNA, 20 bp, Artificial Sequence
  Description of Artificial Sequence: Synthetic oligonucleotide
  Target: SCNA; (-) strand; PAM type: NAAAAC; PAM sequence: CAAAAC
acatgggtttattaatgcat

SEQ ID NO: 5498 - DNA, 20 bp, Artificial Sequence
  Description of Artificial Sequence: Synthetic oligonucleotide
  Target: SCNA; (-) strand; PAM type: NAAAAC; PAM sequence: AAAAAC
aggagaaaaaccaggcaagg

SEQ ID NO: 5499 - DNA, 20 bp, Artificial Sequence
  Description of Artificial Sequence: Synthetic oligonucleotide
  Target: SCNA; (-) strand; PAM type: NAAAAC; PAM sequence: AAAAAC
aggtagaaagagaacaggag

SEQ ID NO: 5500 - DNA, 20 bp, Artificial Sequence
  Description of Artificial Sequence: Synthetic oligonucleotide
  Target: SCNA; (-) strand; PAM type: NAAAAC; PAM sequence: CAAAAC
tcaacaacatggatgaatct

SEQ ID NO: 5501 - DNA, 20 bp, Artificial Sequence
  Description of Artificial Sequence: Synthetic oligonucleotide
  Target: SCNA; (-) strand; PAM type: NAAAAC; PAM sequence: GAAAAC
agagcatagatttaaagtca

SEQ ID NO: 5502 - DNA, 20 bp, Artificial Sequence
  Description of Artificial Sequence: Synthetic oligonucleotide
  Target: SCNA; (-) strand; PAM type: NAAAAC; PAM sequence: TAAAAC
cacaaatgtgtgaacttcct

SEQ ID NO: 5503 - DNA, 20 bp, Artificial Sequence
  Description of Artificial Sequence: Synthetic oligonucleotide
  Target: SCNA; (-) strand; PAM type: NAAAAC; PAM sequence: AAAAAC
atttcaagacatattatgaa

SEQ ID NO: 5504 - DNA, 20 bp, Artificial Sequence
  Description of Artificial Sequence: Synthetic oligonucleotide
  Target: SCNA; (-) strand; PAM type: NAAAAC; PAM sequence: AAAAAC
ttccccagaacactctccat

SEQ ID NO: 5505 - DNA, 20 bp, Artificial Sequence
  Description of Artificial Sequence: Synthetic oligonucleotide
  Target: SCNA; (-) strand; PAM type: NAAAAC; PAM sequence: TAAAAC
ttacagtcagtctggttatg

SEQ ID NO: 5506 - DNA, 20 bp, Artificial Sequence
  Description of Artificial Sequence: Synthetic oligonucleotide
  Target: SCNA; (-) strand; PAM type: NAAAAC; PAM sequence: AAAAAC
tgtcattactgccaaggttg

SEQ ID NO: 5507 - DNA, 20 bp, Artificial Sequence
  Description of Artificial Sequence: Synthetic oligonucleotide
  Target: SCNA; (-) strand; PAM type: NAAAAC; PAM sequence: AAAAAC
aaggtttagaccgggttagg

SEQ ID NO: 5508 - DNA, 20 bp, Artificial Sequence
  Description of Artificial Sequence: Synthetic oligonucleotide
  Target: SCNA; (-) strand; PAM type: NAAAAC; PAM sequence: GAAAAC
tatcaattataactcctgct

SEQ ID NO: 5509 - DNA, 20 bp, Artificial Sequence
  Description of Artificial Sequence: Synthetic oligonucleotide
  Target: SCNA; (-) strand; PAM type: NAAAAC; PAM sequence: GAAAAC
atgattggggccaatacaga

SEQ ID NO: 5510 - DNA, 20 bp, Artificial Sequence
  Description of Artificial Sequence: Synthetic oligonucleotide
  Target: SCNA; (-) strand; PAM type: NAAAAC; PAM sequence: CAAAAC
ttattataaagttgtatgca

SEQ ID NO: 5511 - DNA, 20 bp, Artificial Sequence
  Description of Artificial Sequence: Synthetic oligonucleotide
  Target: SCNA; (-) strand; PAM type: NAAAAC; PAM sequence: AAAAAC
ctagcacaatcagtgccttc

SEQ ID NO: 5512 - DNA, 20 bp, Artificial Sequence
  Description of Artificial Sequence: Synthetic oligonucleotide
  Target: SCNA; (-) strand; PAM type: NAAAAC; PAM sequence: TAAAAC
atggttgtgtgccacttggg

SEQ ID NO: 5513 - DNA, 20 bp, Artificial Sequence
  Description of Artificial Sequence: Synthetic oligonucleotide
  Target: SCNA; (-) strand; PAM type: NAAAAC; PAM sequence: TAAAAC
gtacaattattccacaaacc

SEQ ID NO: 5514 - DNA, 20 bp, Artificial Sequence
  Description of Artificial Sequence: Synthetic oligonucleotide
  Target: SCNA; (-) strand; PAM type: NAAAAC; PAM sequence: TAAAAC
acatgaccttatacctttgt

SEQ ID NO: 5515 - DNA, 20 bp, Artificial Sequence
  Description of Artificial Sequence: Synthetic oligonucleotide
  Target: SCNA; (-) strand; PAM type: NAAAAC; PAM sequence: GAAAAC
aagccacaaaaacacatgga

SEQ ID NO: 5516 - DNA, 20 bp, Artificial Sequence
  Description of Artificial Sequence: Synthetic oligonucleotide
  Target: SCNA; (-) strand; PAM type: NAAAAC; PAM sequence: AAAAAC
gaaatgagctatcaagccac

SEQ ID NO: 5517 - DNA, 20 bp, Artificial Sequence
  Description of Artificial Sequence: Synthetic oligonucleotide
  Target: SCNA; (-) strand; PAM type: NAAAAC; PAM sequence: CAAAAC
gcagctttattcataattgc

SEQ ID NO: 5518 - DNA, 20 bp, Artificial Sequence
  Description of Artificial Sequence: Synthetic oligonucleotide
  Target: SCNA; (-) strand; PAM type: NAAAAC; PAM sequence: CAAAAC
aatgtaaactgtgtccacac

SEQ ID NO: 5519 - DNA, 20 bp, Artificial Sequence
  Description of Artificial Sequence: Synthetic oligonucleotide
  Target: SCNA; (-) strand; PAM type: NAAAAC; PAM sequence: TAAAAC
aggaggaactaccaaacaca

SEQ ID NO: 5520 - DNA, 20 bp, Artificial Sequence
  Description of Artificial Sequence: Synthetic oligonucleotide
  Target: SCNA; (-) strand; PAM type: NAAAAC; PAM sequence: CAAAAC
ttattaaaatgactaaaatc

SEQ ID NO: 5521 - DNA, 20 bp, Artificial Sequence
  Description of Artificial Sequence: Synthetic oligonucleotide
  Target: SCNA; (-) strand; PAM type: NAAAAC; PAM sequence: CAAAAC
ctatcaaacagtaaagctca

SEQ ID NO: 5522 - DNA, 20 bp, Artificial Sequence
  Description of Artificial Sequence: Synthetic oligonucleotide
  Target: SCNA; (-) strand; PAM type: NAAAAC; PAM sequence: CAAAAC
accagtaatgattcgagcag

SEQ ID NO: 5523 - DNA, 20 bp, Artificial Sequence
  Description of Artificial Sequence: Synthetic oligonucleotide
  Target: SCNA; (-) strand; PAM type: NAAAAC; PAM sequence: AAAAAC
acctgttaattgatatatat

SEQ ID NO: 5524 - DNA, 20 bp, Artificial Sequence
  Description of Artificial Sequence: Synthetic oligonucleotide
  Target: SCNA; (-) strand; PAM type: NAAAAC; PAM sequence: AAAAAC
gaatctagtcaaatctactg

SEQ ID NO: 5525 - DNA, 20 bp, Artificial Sequence
  Description of Artificial Sequence: Synthetic oligonucleotide
  Target: SCNA; (-) strand; PAM type: NAAAAC; PAM sequence: GAAAAC
agtctatactgatttaacta

SEQ ID NO: 5526 - DNA, 20 bp, Artificial Sequence
  Description of Artificial Sequence: Synthetic oligonucleotide
  Target: SCNA; (-) strand; PAM type: NAAAAC; PAM sequence: AAAAAC
taggagcagagaaaaatgtg

SEQ ID NO: 5527 - DNA, 20 bp, Artificial Sequence
  Description of Artificial Sequence: Synthetic oligonucleotide
  Target: SCNA; (-) strand; PAM type: NAAAAC; PAM sequence: CAAAAC
ctttgaaaagtaatgccttc

SEQ ID NO: 5528 - DNA, 20 bp, Artificial Sequence
  Description of Artificial Sequence: Synthetic oligonucleotide
  Target: SCNA; (-) strand; PAM type: NAAAAC; PAM sequence: GAAAAC
gggagcttccgatcgctctt

SEQ ID NO: 5529 - DNA, 20 bp, Artificial Sequence
  Description of Artificial Sequence: Synthetic oligonucleotide
  Target: SCNA; (-) strand; PAM type: NAAAAC; PAM sequence: AAAAAC
gagataaatcttgaagattt

SEQ ID NO: 5530 - DNA, 20 bp, Artificial Sequence
  Description of Artificial Sequence: Synthetic oligonucleotide
  Target: SCNA; (-) strand; PAM type: NAAAAC; PAM sequence: AAAAAC
agataaatgacattgtcttc

SEQ ID NO: 5531 - DNA, 20 bp, Artificial Sequence
  Description of Artificial Sequence: Synthetic oligonucleotide
  Target: SCNA; (-) strand; PAM type: NAAAAC; PAM sequence: TAAAAC
ctttcattttcatatatcct

SEQ ID NO: 5532 - DNA, 20 bp, Artificial Sequence
  Description of Artificial Sequence: Synthetic oligonucleotide
  Target: SCNA; (-) strand; PAM type: NAAAAC; PAM sequence: CAAAAC
tatccagtattattaaaaag

SEQ ID NO: 5533 - DNA, 20 bp, Artificial Sequence
  Description of Artificial Sequence: Synthetic oligonucleotide
  Target: SCNA; (-) strand; PAM type: NAAAAC; PAM sequence: AAAAAC
acagagcaagactccgtctc

SEQ ID NO: 5534 - DNA, 20 bp, Artificial Sequence
  Description of Artificial Sequence: Synthetic oligonucleotide
  Target: SCNA; (-) strand; PAM type: NAAAAC; PAM sequence: AAAAAC
gaccagcctggccaacgtgg

SEQ ID NO: 5535 - DNA, 20 bp, Artificial Sequence
  Description of Artificial Sequence: Synthetic oligonucleotide
  Target: SCNA; (-) strand; PAM type: NAAAAC; PAM sequence: TAAAAC
ttacaatattccgcactggt

SEQ ID NO: 5536 - DNA, 20 bp, Artificial Sequence
  Description of Artificial Sequence: Synthetic oligonucleotide
  Target: SCNA; (-) strand; PAM type: NAAAAC; PAM sequence: AAAAAC
agcatgtactggattcataa

SEQ ID NO: 5537 - DNA, 20 bp, Artificial Sequence
  Description of Artificial Sequence: Synthetic oligonucleotide
  Target: SCNA; (-) strand; PAM type: NAAAAC; PAM sequence: AAAAAC
gcataatatttttatttttt

SEQ ID NO: 5538 - DNA, 20 bp, Artificial Sequence
  Description of Artificial Sequence: Synthetic oligonucleotide
  Target: SCNA; (-) strand; PAM type: NAAAAC; PAM sequence: TAAAAC
gtttatcacagaattgatta

SEQ ID NO: 5539 - DNA, 20 bp, Artificial Sequence
  Description of Artificial Sequence: Synthetic oligonucleotide
  Target: SCNA; (-) strand; PAM type: NAAAAC; PAM sequence: TAAAAC
gaatagttctaggtgttcag

SEQ ID NO: 5540 - DNA, 20 bp, Artificial Sequence
  Description of Artificial Sequence: Synthetic oligonucleotide
  Target: SCNA; (-) strand; PAM type: NAAAAC; PAM sequence: GAAAAC
tttgtttggtcatatacagg

SEQ ID NO: 5541 - DNA, 20 bp, Artificial Sequence
  Description of Artificial Sequence: Synthetic oligonucleotide
  Target: SCNA; (-) strand; PAM type: NAAAAC; PAM sequence: TAAAAC
atttttataagaaattttat

SEQ ID NO: 5542 - DNA, 20 bp, Artificial Sequence
  Description of Artificial Sequence: Synthetic oligonucleotide
  Target: SCNA; (-) strand; PAM type: NAAAAC; PAM sequence: CAAAAC
gctgggcaccatgagaaata

SEQ ID NO: 5543 - DNA, 20 bp, Artificial Sequence
  Description of Artificial Sequence: Synthetic oligonucleotide
  Target: SCNA; (-) strand; PAM type: NAAAAC; PAM sequence: TAAAAC
tgtctgttgccttggatact

SEQ ID NO: 5544 - DNA, 20 bp, Artificial Sequence
  Description of Artificial Sequence: Synthetic oligonucleotide
  Target: SCNA; (-) strand; PAM type: NAAAAC; PAM sequence: CAAAAC
tgaaagtgcttaatctttta

SEQ ID NO: 5545 - DNA, 20 bp, Artificial Sequence
  Description of Artificial Sequence: Synthetic oligonucleotide
  Target: SCNA; (-) strand; PAM type: NAAAAC; PAM sequence: CAAAAC
cacttccccaagcacttcct

SEQ ID NO: 5546 - DNA, 20 bp, Artificial Sequence
  Description of Artificial Sequence: Synthetic oligonucleotide
  Target: SCNA; (-) strand; PAM type: NAAAAC; PAM sequence: TAAAAC
gccttaccttgatagcccat

SEQ ID NO: 5547 - DNA, 20 bp, Artificial Sequence
  Description of Artificial Sequence: Synthetic oligonucleotide
  Target: SCNA; (-) strand; PAM type: NAAAAC; PAM sequence: GAAAAC
ttagcttacatagtctattt

SEQ ID NO: 5548 - DNA, 20 bp, Artificial Sequence
  Description of Artificial Sequence: Synthetic oligonucleotide
  Target: SCNA; (-) strand; PAM type: NAAAAC; PAM sequence: TAAAAC
tcaacatttcagaaatgttt

SEQ ID NO: 5549 - DNA, 20 bp, Artificial Sequence
  Description of Artificial Sequence: Synthetic oligonucleotide
  Target: SCNA; (-) strand; PAM type: NAAAAC; PAM sequence: CAAAAC
ggctggatctgtaaaaaatt

SEQ ID NO: 5550 - DNA, 20 bp, Artificial Sequence
  Description of Artificial Sequence: Synthetic oligonucleotide
  Target: SCNA; (-) strand; PAM type: NAAAAC; PAM sequence: TAAAAC
tactgtgcagtgtattgcat

SEQ ID NO: 5551 - DNA, 20 bp, Artificial Sequence
  Description of Artificial Sequence: Synthetic oligonucleotide
  Target: SCNA; (-) strand; PAM type: NAAAAC; PAM sequence: TAAAAC
tttatttatgattataataa

SEQ ID NO: 5552 - DNA, 20 bp, Artificial Sequence
  Description of Artificial Sequence: Synthetic oligonucleotide
  Target: SCNA; (-) strand; PAM type: NAAAAC; PAM sequence: AAAAAC
ttcaaagaactcaattgccg

SEQ ID NO: 5553 - DNA, 20 bp, Artificial Sequence
  Description of Artificial Sequence: Synthetic oligonucleotide
  Target: SCNA; (-) strand; PAM type: NAAAAC; PAM sequence: CAAAAC
tatttacttgtataacaatt

SEQ ID NO: 5554 - DNA, 20 bp, Artificial Sequence
  Description of Artificial Sequence: Synthetic oligonucleotide
  Target: SCNA; (-) strand; PAM type: NAAAAC; PAM sequence: CAAAAC
atttattacatcataatgaa

SEQ ID NO: 5555 - DNA, 20 bp, Artificial Sequence
  Description of Artificial Sequence: Synthetic oligonucleotide
  Target: SCNA; (-) strand; PAM type: NAAAAC; PAM sequence: GAAAAC
aatgaaactagtgttccaca

SEQ ID NO: 5556 - DNA, 20 bp, Artificial Sequence
  Description of Artificial Sequence: Synthetic oligonucleotide
  Target: SCNA; (-) strand; PAM type: NAAAAC; PAM sequence: GAAAAC
attcaaactttttgattatt

SEQ ID NO: 5557 - DNA, 20 bp, Artificial Sequence
  Description of Artificial Sequence: Synthetic oligonucleotide
  Target: SCNA; (-) strand; PAM type: NAAAAC; PAM sequence: TAAAAC
taaaaatcagagtgtaaaaa

SEQ ID NO: 5558 - DNA, 20 bp, Artificial Sequence
  Description of Artificial Sequence: Synthetic oligonucleotide
  Target: SCNA; (-) strand; PAM type: NAAAAC; PAM sequence: GAAAAC
taatgtacacaaaacatctg

SEQ ID NO: 5559 - DNA, 20 bp, Artificial Sequence
  Description of Artificial Sequence: Synthetic oligonucleotide
  Target: SCNA; (-) strand; PAM type: NAAAAC; PAM sequence: CAAAAC
attcagtgaattaatgtaca

SEQ ID NO: 5560 - DNA, 20 bp, Artificial Sequence
  Description of Artificial Sequence: Synthetic oligonucleotide
  Target: SCNA; (-) strand; PAM type: NAAAAC; PAM sequence: AAAAAC
acagtgttgtggatatgact

SEQ ID NO: 5561 - DNA, 20 bp, Artificial Sequence
  Description of Artificial Sequence: Synthetic oligonucleotide
  Target: SCNA; (-) strand; PAM type: NAAAAC; PAM sequence: TAAAAC
tcaagattcctatgaaattg

SEQ ID NO: 5562 - DNA, 20 bp, Artificial Sequence
  Description of Artificial Sequence: Synthetic oligonucleotide
  Target: SCNA; (-) strand; PAM type: NAAAAC; PAM sequence: CAAAAC
gaatttgtttttgtaggctc

SEQ ID NO: 5563 - DNA, 20 bp, Artificial Sequence
  Description of Artificial Sequence: Synthetic oligonucleotide
  Target: SCNA; (-) strand; PAM type: NAAAAC; PAM sequence: GAAAAC
atttttaaattagttgtatt

SEQ ID NO: 5564 - DNA, 20 bp, Artificial Sequence
  Description of Artificial Sequence: Synthetic oligonucleotide
  Target: SCNA; (-) strand; PAM type: NAAAAC; PAM sequence: TAAAAC
aaaggagtatgataattctg

SEQ ID NO: 5565 - DNA, 20 bp, Artificial Sequence
  Description of Artificial Sequence: Synthetic oligonucleotide
  Target: SCNA; (-) strand; PAM type: NAAAAC; PAM sequence: CAAAAC
aaacccattataatcagtga

SEQ ID NO: 5566 - DNA, 20 bp, Artificial Sequence
  Description of Artificial Sequence: Synthetic oligonucleotide
  Target: SCNA; (-) strand; PAM type: NAAAAC; PAM sequence: TAAAAC
ataagttttttacaaagaaa

SEQ ID NO: 5567 - DNA, 20 bp, Artificial Sequence
  Description of Artificial Sequence: Synthetic oligonucleotide
  Target: SCNA; (-) strand; PAM type: NAAAAC; PAM sequence: AAAAAC
tgacaattctgtaaaatata

SEQ ID NO: 5568 - DNA, 20 bp, Artificial Sequence
  Description of Artificial Sequence: Synthetic oligonucleotide
  Target: SCNA; (-) strand; PAM type: NAAAAC; PAM sequence: CAAAAC
aacagggataactgagttct

SEQ ID NO: 5569 - DNA, 20 bp, Artificial Sequence
  Description of Artificial Sequence: Synthetic oligonucleotide
  Target: SCNA; (-) strand; PAM type: NAAAAC; PAM sequence: GAAAAC
ttagtaaaaaatatgattta

SEQ ID NO: 5570 - DNA, 20 bp, Artificial Sequence
  Description of Artificial Sequence: Synthetic oligonucleotide
  Target: SCNA; (-) strand; PAM type: NAAAAC; PAM sequence: CAAAAC
cccaataaaacttcatttat

SEQ ID NO: 5571 - DNA, 20 bp, Artificial Sequence
  Description of Artificial Sequence: Synthetic oligonucleotide
  Target: SCNA; (-) strand; PAM type: NAAAAC; PAM sequence: TAAAAC
ctagtgtggctgtgtcccaa

SEQ ID NO: 5572 - DNA, 20 bp, Artificial Sequence
  Description of Artificial Sequence: Synthetic oligonucleotide
  Target: SCNA; (-) strand; PAM type: NAAAAC; PAM sequence: TAAAAC
aaattactttttttctacct

SEQ ID NO: 5573 - DNA, 20 bp, Artificial Sequence
  Description of Artificial Sequence: Synthetic oligonucleotide
  Target: SCNA; (-) strand; PAM type: NAAAAC; PAM sequence: AAAAAC
ctatttcagagaacagtttt

SEQ ID NO: 5574 - DNA, 20 bp, Artificial Sequence
  Description of Artificial Sequence: Synthetic oligonucleotide
  Target: SCNA; (-) strand; PAM type: NAAAAC; PAM sequence: GAAAAC
ggagttgtggctgctgctga

SEQ ID NO: 5575 - DNA, 20 bp, Artificial Sequence
  Description of Artificial Sequence: Synthetic oligonucleotide
  Target: SCNA; (-) strand; PAM type: NAAAAC; PAM sequence: GAAAAC
ttcctagattaagagcaaac

SEQ ID NO: 5576 - DNA, 20 bp, Artificial Sequence
  Description of Artificial Sequence: Synthetic oligonucleotide
  Target: SCNA; (-) strand; PAM type: NAAAAC; PAM sequence: AAAAAC
ttaaaaaaaaaacatacagc

SEQ ID NO: 5577 - DNA, 20 bp, Artificial Sequence
  Description of Artificial Sequence: Synthetic oligonucleotide
  Target: SCNA; (-) strand; PAM type: NAAAAC; PAM sequence: AAAAAC
aatataaaaacaattaaaaa

SEQ ID NO: 5578 - DNA, 20 bp, Artificial Sequence
  Description of Artificial Sequence: Synthetic oligonucleotide
  Target: SCNA; (-) strand; PAM type: NAAAAC; PAM sequence: AAAAAC
gcataactttctataaatat

SEQ ID NO: 5579 - DNA, 20 bp, Artificial Sequence
  Description of Artificial Sequence: Synthetic oligonucleotide
  Target: SCNA; (-) strand; PAM type: NAAAAC; PAM sequence: CAAAAC
aactggaaacagaaggagaa

SEQ ID NO: 5580 - DNA, 20 bp, Artificial Sequence
  Description of Artificial Sequence: Synthetic oligonucleotide
  Target: SCNA; (-) strand; PAM type: NAAAAC; PAM sequence: GAAAAC
atctcctaatttacaaaaaa

SEQ ID NO: 5581 - DNA, 20 bp, Artificial Sequence
  Description of Artificial Sequence: Synthetic oligonucleotide
  Target: SCNA; (-) strand; PAM type: NAAAAC; PAM sequence: CAAAAC
acactaatgcatggcttttt

SEQ ID NO: 5582 - DNA, 20 bp, Artificial Sequence
  Description of Artificial Sequence: Synthetic oligonucleotide
  Target: SCNA; (-) strand; PAM type: NAAAAC; PAM sequence: TAAAAC
taaaagaagtcagacaaata

SEQ ID NO: 5583 - DNA, 20 bp, Artificial Sequence
  Description of Artificial Sequence: Synthetic oligonucleotide
  Target: SCNA; (-) strand; PAM type: NAAAAC; PAM sequence: CAAAAC
caacaaaaagcaataaaaaa

SEQ ID NO: 5584 - DNA, 20 bp, Artificial Sequence
  Description of Artificial Sequence: Synthetic oligonucleotide
  Target: SCNA; (-) strand; PAM type: NAAAAC; PAM sequence: AAAAAC
agaaacaacaaaaagcaata

SEQ ID NO: 5585 - DNA, 20 bp, Artificial Sequence
  Description of Artificial Sequence: Synthetic oligonucleotide
  Target: SCNA; (-) strand; PAM type: NAAAAC; PAM sequence: GAAAAC
agttgtaaagaggcacaatg

SEQ ID NO: 5586 - DNA, 20 bp, Artificial Sequence
  Description of Artificial Sequence: Synthetic oligonucleotide
  Target: SCNA; (-) strand; PAM type: NAAAAC; PAM sequence: CAAAAC
aggtgatctcagcatatcac

SEQ ID NO: 5587 - DNA, 20 bp, Artificial Sequence
  Description of Artificial Sequence: Synthetic oligonucleotide
  Target: SCNA; (-) strand; PAM type: NAAAAC; PAM sequence: CAAAAC
gaataccaatatagaaaagg

SEQ ID NO: 5588 - DNA, 20 bp, Artificial Sequence
  Description of Artificial Sequence: Synthetic oligonucleotide
  Target: SCNA; (-) strand; PAM type: NAAAAC; PAM sequence: AAAAAC
ataatgaaaagaaaaattaa

SEQ ID NO: 5589 - DNA, 20 bp, Artificial Sequence
  Description of Artificial Sequence: Synthetic oligonucleotide
  Target: SCNA; (-) strand; PAM type: NAAAAC; PAM sequence: CAAAAC
ttcacttagcaaagagaaaa

SEQ ID NO: 5590 - DNA, 20 bp, Artificial Sequence
  Description of Artificial Sequence: Synthetic oligonucleotide
  Target: SCNA; (-) strand; PAM type: NAAAAC; PAM sequence: GAAAAC
tatatttcacttagcaaaga

SEQ ID NO: 5591 - DNA, 20 bp, Artificial Sequence
  Description of Artificial Sequence: Synthetic oligonucleotide
  Target: SCNA; (-) strand; PAM type: NAAAAC; PAM sequence: TAAAAC
ttaatgtgtttttttctttc

SEQ ID NO: 5592 - DNA, 20 bp, Artificial Sequence
  Description of Artificial Sequence: Synthetic oligonucleotide
  Target: SCNA; (-) strand; PAM type: NAAAAC; PAM sequence: GAAAAC
tcatgcccattttttaatga

SEQ ID NO: 5593 - DNA, 20 bp, Artificial Sequence
  Description of Artificial Sequence: Synthetic oligonucleotide
  Target: SCNA; (-) strand; PAM type: NAAAAC; PAM sequence: CAAAAC
aaagcatgtcctaggacacc

SEQ ID NO: 5594 - DNA, 20 bp, Artificial Sequence
  Description of Artificial Sequence: Synthetic oligonucleotide
  Target: SCNA; (-) strand; PAM type: NAAAAC; PAM sequence: CAAAAC
cttcagttcaaaacaataca

SEQ ID NO: 5595 - DNA, 20 bp, Artificial Sequence
  Description of Artificial Sequence: Synthetic oligonucleotide
  Target: SCNA; (-) strand; PAM type: NAAAAC; PAM sequence: CAAAAC
acagtattgtaacttcagtt

SEQ ID NO: 5596 - DNA, 20 bp, Artificial Sequence
  Description of Artificial Sequence: Synthetic oligonucleotide
  Target: SCNA; (-) strand; PAM type: NAAAAC; PAM sequence: GAAAAC
ctctcaaattatctagaaag

SEQ ID NO: 5597 - DNA, 20 bp, Artificial Sequence
  Description of Artificial Sequence: Synthetic oligonucleotide
  Target: SCNA; (+) strand; PAM type: NAAAAC; PAM sequence: AAAAAC
tggaagtaggtctgatcatc

SEQ ID NO: 5598 - DNA, 20 bp, Artificial Sequence
  Description of Artificial Sequence: Synthetic oligonucleotide
  Target: SCNA; (+) strand; PAM type: NAAAAC; PAM sequence: GAAAAC
ctattctcaccatgggcagt

SEQ ID NO: 5599 - DNA, 20 bp, Artificial Sequence
  Description of Artificial Sequence: Synthetic oligonucleotide
  Target: SCNA; (+) strand; PAM type: NAAAAC; PAM sequence: CAAAAC
actaatgtttggcagcctct

SEQ ID NO: 5600 - DNA, 20 bp, Artificial Sequence
  Description of Artificial Sequence: Synthetic oligonucleotide
  Target: SCNA; (+) strand; PAM type: NAAAAC; PAM sequence: GAAAAC
actcaccaaagacatgaaga

SEQ ID NO: 5601 - DNA, 20 bp, Artificial Sequence
  Description of Artificial Sequence: Synthetic oligonucleotide
  Target: SCNA; (+) strand; PAM type: NAAAAC; PAM sequence: AAAAAC
attgtattcttttctaagat

SEQ ID NO: 5602 - DNA, 20 bp, Artificial Sequence
  Description of Artificial Sequence: Synthetic oligonucleotide
  Target: SCNA; (+) strand; PAM type: NAAAAC; PAM sequence: TAAAAC
tatgcaattctagccaattt

SEQ ID NO: 5603 - DNA, 20 bp, Artificial Sequence
  Description of Artificial Sequence: Synthetic oligonucleotide
  Target: SCNA; (+) strand; PAM type: NAAAAC; PAM sequence: CAAAAC
ttaaaaccaaattatactag

SEQ ID NO: 5604 - DNA, 20 bp, Artificial Sequence
  Description of Artificial Sequence: Synthetic oligonucleotide
  Target: SCNA; (+) strand; PAM type: NAAAAC; PAM sequence: AAAAAC
aaggatactgtagtagcagc

SEQ ID NO: 5605 - DNA, 20 bp, Artificial Sequence
  Description of Artificial Sequence: Synthetic oligonucleotide
  Target: SCNA; (+) strand; PAM type: NAAAAC; PAM sequence: TAAAAC
ttctaggcttactcaaagga

SEQ ID NO: 5606 - DNA, 20 bp, Artificial Sequence
  Description of Artificial Sequence: Synthetic oligonucleotide
  Target: SCNA; (+) strand; PAM type: NAAAAC; PAM sequence: AAAAAC
ttgtcttcaggcacctgaag

SEQ ID NO: 5607 - DNA, 20 bp, Artificial Sequence
  Description of Artificial Sequence: Synthetic oligonucleotide
  Target: SCNA; (+) strand; PAM type: NAAAAC; PAM sequence: CAAAAC
aagaaaaacagatgtactag

SEQ ID NO: 5608 - DNA, 20 bp, Artificial Sequence
  Description of Artificial Sequence: Synthetic oligonucleotide
  Target: SCNA; (+) strand; PAM type: NAAAAC; PAM sequence: AAAAAC
ttttctttaggtacctgaag

SEQ ID NO: 5609 - DNA, 20 bp, Artificial Sequence
  Description of Artificial Sequence: Synthetic oligonucleotide
  Target: SCNA; (+) strand; PAM type: NAAAAC; PAM sequence: GAAAAC
gtgtgattcacagacttcag

SEQ ID NO: 5610 - DNA, 20 bp, Artificial Sequence
  Description of Artificial Sequence: Synthetic oligonucleotide
  Target: SCNA; (+) strand; PAM type: NAAAAC; PAM sequence: TAAAAC
ttgcttaaacataacttaaa

SEQ ID NO: 5611 - DNA, 20 bp, Artificial Sequence
  Description of Artificial Sequence: Synthetic oligonucleotide
  Target: SCNA; (+) strand; PAM type: NAAAAC; PAM sequence: AAAAAC
atagatcttccctgaaagag

SEQ ID NO: 5612 - DNA, 20 bp, Artificial Sequence
  Description of Artificial Sequence: Synthetic oligonucleotide
  Target: SCNA; (+) strand; PAM type: NAAAAC; PAM sequence: CAAAAC
cttaaggaaccagtgcatac

SEQ ID NO: 5613 - DNA, 20 bp, Artificial Sequence
  Description of Artificial Sequence: Synthetic oligonucleotide
  Target: SCNA; (+) strand; PAM type: NAAAAC; PAM sequence: TAAAAC
tatatacaaacacaagtgaa

SEQ ID NO: 5614 - DNA, 20 bp, Artificial Sequence
  Description of Artificial Sequence: Synthetic oligonucleotide
  Target: SCNA; (+) strand; PAM type: NAAAAC; PAM sequence: AAAAAC
aagacttcgagatacactgt

SEQ ID NO: 5615 - DNA, 20 bp, Artificial Sequence
  Description of Artificial Sequence: Synthetic oligonucleotide
  Target: SCNA; (+) strand; PAM type: NAAAAC; PAM sequence: AAAAAC
ataatatcaggattctgctt

SEQ ID NO: 5616 - DNA, 20 bp, Artificial Sequence
  Description of Artificial Sequence: Synthetic oligonucleotide
  Target: SCNA; (+) strand; PAM type: NAAAAC; PAM sequence: TAAAAC
gatcaacattacctcctcaa

SEQ ID NO: 5617 - DNA, 20 bp, Artificial Sequence
  Description of Artificial Sequence: Synthetic oligonucleotide
  Target: SCNA; (+) strand; PAM type: NAAAAC; PAM sequence: TAAAAC
aacaatcatattgtgttgtt

SEQ ID NO: 5618 - DNA, 20 bp, Artificial Sequence
  Description of Artificial Sequence: Synthetic oligonucleotide
  Target: SCNA; (+) strand; PAM type: NAAAAC; PAM sequence: AAAAAC
taaggaccctttaaaaatgt

SEQ ID NO: 5619 - DNA, 20 bp, Artificial Sequence
  Description of Artificial Sequence: Synthetic oligonucleotide
  Target: SCNA; (+) strand; PAM type: NAAAAC; PAM sequence: GAAAAC
caaaggtaaaaagtttggaa

SEQ ID NO: 5620 - DNA, 20 bp, Artificial Sequence
  Description of Artificial Sequence: Synthetic oligonucleotide
  Target: SCNA; (+) strand; PAM type: NAAAAC; PAM sequence: CAAAAC
ttcctagacaaagaatacta

SEQ ID NO: 5621 - DNA, 20 bp, Artificial Sequence
  Description of Artificial Sequence: Synthetic oligonucleotide
  Target: SCNA; (+) strand; PAM type: NAAAAC; PAM sequence: CAAAAC
ttagtgatcaaacgggacag

SEQ ID NO: 5622 - DNA, 20 bp, Artificial Sequence
  Description of Artificial Sequence: Synthetic oligonucleotide
  Target: SCNA; (+) strand; PAM type: NAAAAC; PAM sequence: TAAAAC
ttatatcaattagccaatgg

SEQ ID NO: 5623 - DNA, 20 bp, Artificial Sequence
  Description of Artificial Sequence: Synthetic oligonucleotide
  Target: SCNA; (+) strand; PAM type: NAAAAC; PAM sequence: GAAAAC
taaatatataaatagaaaaa

SEQ ID NO: 5624 - DNA, 20 bp, Artificial Sequence
  Description of Artificial Sequence: Synthetic oligonucleotide
  Target: SCNA; (+) strand; PAM type: NAAAAC; PAM sequence: AAAAAC
acagcaaatataaggtggtg

SEQ ID NO: 5625 - DNA, 20 bp, Artificial Sequence
  Description of Artificial Sequence: Synthetic oligonucleotide
  Target: SCNA; (+) strand; PAM type: NAAAAC; PAM sequence: GAAAAC
gaaccctacataagcaaatg

SEQ ID NO: 5626 - DNA, 20 bp, Artificial Sequence
  Description of Artificial Sequence: Synthetic oligonucleotide
  Target: SCNA; (+) strand; PAM type: NAAAAC; PAM sequence: AAAAAC
ataggtacataagcattgga

SEQ ID NO: 5627 - DNA, 20 bp, Artificial Sequence
  Description of Artificial Sequence: Synthetic oligonucleotide
  Target: SCNA; (+) strand; PAM type: NAAAAC; PAM sequence: AAAAAC
tgtttcataaacctatttct

SEQ ID NO: 5628 - DNA, 20 bp, Artificial Sequence
  Description of Artificial Sequence: Synthetic oligonucleotide
  Target: SCNA; (+) strand; PAM type: NAAAAC; PAM sequence: AAAAAC
tttttaccacaaacaagaaa

SEQ ID NO: 5629 - DNA, 20 bp, Artificial Sequence
  Description of Artificial Sequence: Synthetic oligonucleotide
  Target: SCNA; (+) strand; PAM type: NAAAAC; PAM sequence: AAAAAC
agggcaataaaataaatgag

SEQ ID NO: 5630 - DNA, 20 bp, Artificial Sequence
  Description of Artificial Sequence: Synthetic oligonucleotide
  Target: SCNA; (+) strand; PAM type: NAAAAC; PAM sequence: TAAAAC
gtcccagctgaagtgctcta

SEQ ID NO: 5631 - DNA, 20 bp, Artificial Sequence
  Description of Artificial Sequence: Synthetic oligonucleotide
  Target: SCNA; (+) strand; PAM type: NAAAAC; PAM sequence: TAAAAC
gtagagatacatttctaaat

SEQ ID NO: 5632 - DNA, 20 bp, Artificial Sequence
  Description of Artificial Sequence: Synthetic oligonucleotide
  Target: SCNA; (+) strand; PAM type: NAAAAC; PAM sequence: TAAAAC
aatctaaggaattttatttt

SEQ ID NO: 5633 - DNA, 20 bp, Artificial Sequence
  Description of Artificial Sequence: Synthetic oligonucleotide
  Target: SCNA; (+) strand; PAM type: NAAAAC; PAM sequence: AAAAAC
ttaaaaaatataagatttca

SEQ ID NO: 5634 - DNA, 20 bp, Artificial Sequence
  Description of Artificial Sequence: Synthetic oligonucleotide
  Target: SCNA; (+) strand; PAM type: NAAAAC; PAM sequence: TAAAAC
atataagatttcaaaaaacc

SEQ ID NO: 5635 - DNA, 20 bp, Artificial Sequence
  Description of Artificial Sequence: Synthetic oligonucleotide
  Target: SCNA; (+) strand; PAM type: NAAAAC; PAM sequence: CAAAAC
tgttatttaatcatcaaaag

SEQ ID NO: 5636 - DNA, 20 bp, Artificial Sequence
  Description of Artificial Sequence: Synthetic oligonucleotide
  Target: SCNA; (+) strand; PAM type: NAAAAC; PAM sequence: AAAAAC
aaaaagagaaaagatgaaat

SEQ ID NO: 5637 - DNA, 20 bp, Artificial Sequence
  Description of Artificial Sequence: Synthetic oligonucleotide
  Target: SCNA; (+) strand; PAM type: NAAAAC; PAM sequence: TAAAAC
gcccggccagaggcaggtct

SEQ ID NO: 5638 - DNA, 20 bp, Artificial Sequence
  Description of Artificial Sequence: Synthetic oligonucleotide
  Target: SCNA; (+) strand; PAM type: NAAAAC; PAM sequence: AAAAAC
agtctgctttcatattttag

SEQ ID NO: 5639 - DNA, 20 bp, Artificial Sequence
  Description of Artificial Sequence: Synthetic oligonucleotide
  Target: SCNA; (+) strand; PAM type: NAAAAC; PAM sequence: AAAAAC
aggcccaggagtttgctctc

SEQ ID NO: 5640 - DNA, 20 bp, Artificial Sequence
  Description of Artificial Sequence: Synthetic oligonucleotide
  Target: SCNA; (+) strand; PAM type: NAAAAC; PAM sequence: CAAAAC
ctgggagaaagtactttagg

SEQ ID NO: 5641 - DNA, 20 bp, Artificial Sequence
  Description of Artificial Sequence: Synthetic oligonucleotide
  Target: SCNA; (+) strand; PAM type: NAAAAC; PAM sequence: TAAAAC
agcttcaagatcggtggatt

SEQ ID NO: 5642 - DNA, 20 bp, Artificial Sequence
  Description of Artificial Sequence: Synthetic oligonucleotide
  Target: SCNA; (+) strand; PAM type: NAAAAC; PAM sequence: GAAAAC
gggccctcacaatctggata

SEQ ID NO: 5643 - DNA, 20 bp, Artificial Sequence
  Description of Artificial Sequence: Synthetic oligonucleotide
  Target: SCNA; (+) strand; PAM type: NAAAAC; PAM sequence: GAAAAC
acctagaaaatgttttctct

SEQ ID NO: 5644 - DNA, 20 bp, Artificial Sequence
  Description of Artificial Sequence: Synthetic oligonucleotide
  Target: SCNA; (+) strand; PAM type: NAAAAC; PAM sequence: AAAAAC
atatgcattatttgatctta

SEQ ID NO: 5645 - DNA, 20 bp, Artificial Sequence
  Description of Artificial Sequence: Synthetic oligonucleotide
  Target: SCNA; (+) strand; PAM type: NAAAAC; PAM sequence: AAAAAC
atatgattttttgcaagggc

SEQ ID NO: 5646 - DNA, 20 bp, Artificial Sequence
  Description of Artificial Sequence: Synthetic oligonucleotide
  Target: SCNA; (+) strand; PAM type: NAAAAC; PAM sequence: AAAAAC
caacgtaaatgtttcaactg

SEQ ID NO: 5647 - DNA, 20 bp, Artificial Sequence
  Description of Artificial Sequence: Synthetic oligonucleotide
  Target: SCNA; (+) strand; PAM type: NAAAAC; PAM sequence: TAAAAC
caactgaaaaacggtaacaa

SEQ ID NO: 5648 - DNA, 20 bp, Artificial Sequence
  Description of Artificial Sequence: Synthetic oligonucleotide
  Target: SCNA; (+) strand; PAM type: NAAAAC; PAM sequence: GAAAAC
tgctaattttatttttttaa

SEQ ID NO: 5649 - DNA, 20 bp, Artificial Sequence
  Description of Artificial Sequence: Synthetic oligonucleotide
  Target: SCNA; (+) strand; PAM type: NAAAAC; PAM sequence: AAAAAC
ttttggaaagaatcgaaact

SEQ ID NO: 5650 - DNA, 20 bp, Artificial Sequence
  Description of Artificial Sequence: Synthetic oligonucleotide
  Target: SCNA; (+) strand; PAM type: NAAAAC; PAM sequence: AAAAAC
tgttgcctaggaatacagcc

SEQ ID NO: 5651 - DNA, 20 bp, Artificial Sequence
  Description of Artificial Sequence: Synthetic oligonucleotide
  Target: SCNA; (+) strand; PAM type: NAAAAC; PAM sequence: AAAAAC
agaaaaagaggcaagtgaag

SEQ ID NO: 5652 - DNA, 20 bp, Artificial Sequence
  Description of Artificial Sequence: Synthetic oligonucleotide
  Target: SCNA; (+) strand; PAM type: NAAAAC; PAM sequence: GAAAAC
cattgaaggctgtgatggta

SEQ ID NO: 5653 - DNA, 20 bp, Artificial Sequence
  Description of Artificial Sequence: Synthetic oligonucleotide
  Target: SCNA; (+) strand; PAM type: NAAAAC; PAM sequence: TAAAAC
ttatttattgaataatcttg

SEQ ID NO: 5654 - DNA, 20 bp, Artificial Sequence
  Description of Artificial Sequence: Synthetic oligonucleotide
  Target: SCNA; (+) strand; PAM type: NAAAAC; PAM sequence: TAAAAC
ttcgatagtcaagctgggtt

SEQ ID NO: 5655 - DNA, 20 bp, Artificial Sequence
  Description of Artificial Sequence: Synthetic oligonucleotide
  Target: SCNA; (+) strand; PAM type: NAAAAC; PAM sequence: CAAAAC
aaatatcaattagaaagaaa

SEQ ID NO: 5656 - DNA, 20 bp, Artificial Sequence
  Description of Artificial Sequence: Synthetic oligonucleotide
  Target: SCNA; (+) strand; PAM type: NAAAAC; PAM sequence: AAAAAC
cctgtcatgttacattaact

SEQ ID NO: 5657 - DNA, 20 bp, Artificial Sequence
  Description of Artificial Sequence: Synthetic oligonucleotide
  Target: SCNA; (+) strand; PAM type: NAAAAC; PAM sequence: AAAAAC
gaaatttgatctttgagatt

SEQ ID NO: 5658 - DNA, 20 bp, Artificial Sequence
  Description of Artificial Sequence: Synthetic oligonucleotide
  Target: SCNA; (+) strand; PAM type: NAAAAC; PAM sequence: CAAAAC
gcttctctaagattaaaagt

SEQ ID NO: 5659 - DNA, 20 bp, Artificial Sequence
  Description of Artificial Sequence: Synthetic oligonucleotide
  Target: SCNA; (+) strand; PAM type: NAAAAC; PAM sequence: CAAAAC
acctggaaaatgaggacttt

SEQ ID NO: 5660 - DNA, 20 bp, Artificial Sequence
  Description of Artificial Sequence: Synthetic oligonucleotide
  Target: SCNA; (+) strand; PAM type: NAAAAC; PAM sequence: CAAAAC
ccagttacagtcaggtattg

SEQ ID NO: 5661 - DNA, 20 bp, Artificial Sequence
  Description of Artificial Sequence: Synthetic oligonucleotide
  Target: SCNA; (+) strand; PAM type: NAAAAC; PAM sequence: AAAAAC
ataactcagaaaaaagaaaa

SEQ ID NO: 5662 - DNA, 20 bp, Artificial Sequence
  Description of Artificial Sequence: Synthetic oligonucleotide
  Target: SCNA; (+) strand; PAM type: NAAAAC; PAM sequence: CAAAAC
gagggcaagctggcttttaa

SEQ ID NO: 5663 - DNA, 20 bp, Artificial Sequence
  Description of Artificial Sequence: Synthetic oligonucleotide
  Target: SCNA; (+) strand; PAM type: NAAAAC; PAM sequence: AAAAAC
tattttttattgcaatggag

SEQ ID NO: 5664 - DNA, 20 bp, Artificial Sequence
  Description of Artificial Sequence: Synthetic oligonucleotide
  Target: SCNA; (+) strand; PAM type: NAAAAC; PAM sequence: AAAAAC
tttgtaagatgccaatggaa

SEQ ID NO: 5665 - DNA, 20 bp, Artificial Sequence
  Description of Artificial Sequence: Synthetic oligonucleotide
  Target: SCNA; (+) strand; PAM type: NAAAAC; PAM sequence: AAAAAC
gaaaatcaagagttactaaa

SEQ ID NO: 5666 - DNA, 20 bp, Artificial Sequence
  Description of Artificial Sequence: Synthetic oligonucleotide
  Target: SCNA; (+) strand; PAM type: NAAAAC; PAM sequence: TAAAAC
tataccacatttcaagtttt

SEQ ID NO: 5667 - DNA, 20 bp, Artificial Sequence
  Description of Artificial Sequence: Synthetic oligonucleotide
  Target: SCNA; (+) strand; PAM type: NAAAAC; PAM sequence: AAAAAC
ttaaaaattcagacaaagaa

SEQ ID NO: 5668 - DNA, 20 bp, Artificial Sequence
  Description of Artificial Sequence: Synthetic oligonucleotide
  Target: SCNA; (+) strand; PAM type: NAAAAC; PAM sequence: GAAAAC
ttctcatgagaaaaattgct

SEQ ID NO: 5669 - DNA, 20 bp, Artificial Sequence
  Description of Artificial Sequence: Synthetic oligonucleotide
  Target: SCNA; (+) strand; PAM type: NAAAAC; PAM sequence: TAAAAC
gactatgaagttatctaaga

SEQ ID NO: 5670 - DNA, 20 bp, Artificial Sequence
  Description of Artificial Sequence: Synthetic oligonucleotide
  Target: SCNA; (+) strand; PAM type: NAAAAC; PAM sequence: GAAAAC
atgctcatttatgctcagta

SEQ ID NO: 5671 - DNA, 20 bp, Artificial Sequence
  Description of Artificial Sequence: Synthetic oligonucleotide
  Target: SCNA; (+) strand; PAM type: NAAAAC; PAM sequence: AAAAAC
aaatgtgtttatgtttgtat

SEQ ID NO: 5672 - DNA, 20 bp, Artificial Sequence
  Description of Artificial Sequence: Synthetic oligonucleotide
  Target: SCNA; (+) strand; PAM type: NAAAAC; PAM sequence: AAAAAC
aaccatcttctttacttttc

SEQ ID NO: 5673 - DNA, 20 bp, Artificial Sequence
  Description of Artificial Sequence: Synthetic oligonucleotide
  Target: SCNA; (+) strand; PAM type: NAAAAC; PAM sequence: TAAAAC
ctacacaatctaaattattt

SEQ ID NO: 5674 - DNA, 20 bp, Artificial Sequence
  Description of Artificial Sequence: Synthetic oligonucleotide
  Target: SCNA; (+) strand; PAM type: NAAAAC; PAM sequence: GAAAAC
gtaggtaagtaaacgtcctt

SEQ ID NO: 5675 - DNA, 20 bp, Artificial Sequence
  Description of Artificial Sequence: Synthetic oligonucleotide
  Target: SCNA; (+) strand; PAM type: NAAAAC; PAM sequence: AAAAAC
ttaggtagattttttttaaa

SEQ ID NO: 5676 - DNA, 20 bp, Artificial Sequence
  Description of Artificial Sequence: Synthetic oligonucleotide
  Target: SCNA; (+) strand; PAM type: NAAAAC; PAM sequence: AAAAAC
ttccaggaagagacacagac

SEQ ID NO: 5677 - DNA, 20 bp, Artificial Sequence
  Description of Artificial Sequence: Synthetic oligonucleotide
  Target: SCNA; (+) strand; PAM type: NAAAAC; PAM sequence: TAAAAC
tattccttcgtgaataaata

SEQ ID NO: 5678 - DNA, 20 bp, Artificial Sequence
  Description of Artificial Sequence: Synthetic oligonucleotide
  Target: SCNA; (+) strand; PAM type: NAAAAC; PAM sequence: TAAAAC
attgttttttgtggcaaaag

SEQ ID NO: 5679 - DNA, 20 bp, Artificial Sequence
  Description of Artificial Sequence: Synthetic oligonucleotide
  Target: SCNA; (+) strand; PAM type: NAAAAC; PAM sequence: AAAAAC
gtaagttgtgaccatgcaat

SEQ ID NO: 5680 - DNA, 20 bp, Artificial Sequence
  Description of Artificial Sequence: Synthetic oligonucleotide
  Target: SCNA; (+) strand; PAM type: NAAAAC; PAM sequence: CAAAAC
atatatatgcattttgtgac

SEQ ID NO: 5681 - DNA, 20 bp, Artificial Sequence
  Description of Artificial Sequence: Synthetic oligonucleotide
  Target: SCNA; (+) strand; PAM type: NAAAAC; PAM sequence: GAAAAC
aagcagcagatttcaaaagg

SEQ ID NO: 5682 - DNA, 20 bp, Artificial Sequence
  Description of Artificial Sequence: Synthetic oligonucleotide
  Target: SCNA; (+) strand; PAM type: NAAAAC; PAM sequence: CAAAAC
ttacagatccatctctatgc

SEQ ID NO: 5683 - DNA, 20 bp, Artificial Sequence
  Description of Artificial Sequence: Synthetic oligonucleotide
  Target: SCNA; (+) strand; PAM type: NAAAAC; PAM sequence: CAAAAC
aatatacaaaaatacccccc

SEQ ID NO: 5684 - DNA, 20 bp, Artificial Sequence
  Description of Artificial Sequence: Synthetic oligonucleotide
  Target: SCNA; (+) strand; PAM type: NAAAAC; PAM sequence: AAAAAC
gctttgtgagacttaagata

SEQ ID NO: 5685 - DNA, 20 bp, Artificial Sequence
  Description of Artificial Sequence: Synthetic oligonucleotide
  Target: SCNA; (+) strand; PAM type: NAAAAC; PAM sequence: TAAAAC
ctttgatttgaaattgcctt

SEQ ID NO: 5686 - DNA, 20 bp, Artificial Sequence
  Description of Artificial Sequence: Synthetic oligonucleotide
  Target: SCNA; (+) strand; PAM type: NAAAAC; PAM sequence: CAAAAC
tgcactgtcttcagtgtctc

SEQ ID NO: 5687 - DNA, 20 bp, Artificial Sequence
  Description of Artificial Sequence: Synthetic oligonucleotide
  Target: SCNA; (+) strand; PAM type: NAAAAC; PAM sequence: TAAAAC
ctctatctaagaatgatctt

SEQ ID NO: 5688 - DNA, 20 bp, Artificial Sequence
  Description of Artificial Sequence: Synthetic oligonucleotide
  Target: SCNA; (+) strand; PAM type: NAAAAC; PAM sequence: AAAAAC
catgtaacagatttgtggtg

SEQ ID NO: 5689 - DNA, 20 bp, Artificial Sequence
  Description of Artificial Sequence: Synthetic oligonucleotide
  Target: SCNA; (+) strand; PAM type: NAAAAC; PAM sequence: CAAAAC
agaaattttgccttttctca

SEQ ID NO: 5690 - DNA, 20 bp, Artificial Sequence
  Description of Artificial Sequence: Synthetic oligonucleotide
  Target: SCNA; (+) strand; PAM type: NAAAAC; PAM sequence: GAAAAC
ataactttatgccttgcaaa

SEQ ID NO: 5691 - DNA, 20 bp, Artificial Sequence
  Description of Artificial Sequence: Synthetic oligonucleotide
  Target: SCNA; (+) strand; PAM type: NAAAAC; PAM sequence: TAAAAC
tttagggataagaattatgt

SEQ ID NO: 5692 - DNA, 20 bp, Artificial Sequence
  Description of Artificial Sequence: Synthetic oligonucleotide
  Target: SCNA; (+) strand; PAM type: NAAAAC; PAM sequence: CAAAAC
tccattttgacaaagaggcc

SEQ ID NO: 5693 - DNA, 20 bp, Artificial Sequence
  Description of Artificial Sequence: Synthetic oligonucleotide
  Target: SCNA; (+) strand; PAM type: NAAAAC; PAM sequence: GAAAAC
tgctggaaaattagtctgta

SEQ ID NO: 5694 - DNA, 20 bp, Artificial Sequence
  Description of Artificial Sequence: Synthetic oligonucleotide
  Target: SCNA; (+) strand; PAM type: NAAAAC; PAM sequence: CAAAAC
atcctcagctgcatgagtct

SEQ ID NO: 5695 - DNA, 20 bp, Artificial Sequence
  Description of Artificial Sequence: Synthetic oligonucleotide
  Target: SCNA; (+) strand; PAM type: NAAAAC; PAM sequence: AAAAAC
aagctgaactgtcttgtcct

SEQ ID NO: 5696 - DNA, 20 bp, Artificial Sequence
  Description of Artificial Sequence: Synthetic oligonucleotide
  Target: SCNA; (+) strand; PAM type: NAAAAC; PAM sequence: TAAAAC
cagaactttaacatcagcag

SEQ ID NO: 5697 - DNA, 20 bp, Artificial Sequence
  Description of Artificial Sequence: Synthetic oligonucleotide
  Target: SCNA; (+) strand; PAM type: NAAAAC; PAM sequence: AAAAAC
gatacaggcagaagaaatct

SEQ ID NO: 5698 - DNA, 20 bp, Artificial Sequence
  Description of Artificial Sequence: Synthetic oligonucleotide
  Target: SCNA; (+) strand; PAM type: NAAAAC; PAM sequence: TAAAAC
tataatatgaaagtgtaaat

SEQ ID NO: 5699 - DNA, 20 bp, Artificial Sequence
  Description of Artificial Sequence: Synthetic oligonucleotide
  Target: SCNA; (+) strand; PAM type: NAAAAC; PAM sequence: TAAAAC
ccgtgttcattaaactgaga

SEQ ID NO: 5700 - DNA, 20 bp, Artificial Sequence
  Description of Artificial Sequence: Synthetic oligonucleotide
  Target: SCNA; (+) strand; PAM type: NAAAAC; PAM sequence: TAAAAC
tgatgaaggaagaatgattt

SEQ ID NO: 5701 - DNA, 20 bp, Artificial Sequence
  Description of Artificial Sequence: Synthetic oligonucleotide
  Target: SCNA; (+) strand; PAM type: NAAAAC; PAM sequence: CAAAAC
tcagagcctggccaaaatgg

SEQ ID NO: 5702 - DNA, 20 bp, Artificial Sequence
  Description of Artificial Sequence: Synthetic oligonucleotide
  Target: SCNA; (+) strand; PAM type: NAAAAC; PAM sequence: TAAAAC
tataactataaacatatcta

SEQ ID NO: 5703 - DNA, 20 bp, Artificial Sequence
  Description of Artificial Sequence: Synthetic oligonucleotide
  Target: SCNA; (+) strand; PAM type: NAAAAC; PAM sequence: GAAAAC
taaaaattatgtaatgcaat

SEQ ID NO: 5704 - DNA, 20 bp, Artificial Sequence
  Description of Artificial Sequence: Synthetic oligonucleotide
  Target: SCNA; (+) strand; PAM type: NAAAAC; PAM sequence: TAAAAC
tgttgttgtttgttttgttt

SEQ ID NO: 5705 - DNA, 20 bp, Artificial Sequence
  Description of Artificial Sequence: Synthetic oligonucleotide
  Target: SCNA; (+) strand; PAM type: NAAAAC; PAM sequence: GAAAAC
aacagtggatcacttaaaat

SEQ ID NO: 5706 - DNA, 20 bp, Artificial Sequence
  Description of Artificial Sequence: Synthetic oligonucleotide
  Target: SCNA; (+) strand; PAM type: NAAAAC; PAM sequence: GAAAAC
tgaacacttgtattggtgga

SEQ ID NO: 5707 - DNA, 20 bp, Artificial Sequence
  Description of Artificial Sequence: Synthetic oligonucleotide
  Target: SCNA; (+) strand; PAM type: NAAAAC; PAM sequence: AAAAAC
ttctctaaacaatatagtat

SEQ ID NO: 5708 - DNA, 20 bp, Artificial Sequence
  Description of Artificial Sequence: Synthetic oligonucleotide
  Target: SCNA; (+) strand; PAM type: NAAAAC; PAM sequence: AAAAAC
gtgtatcattcttaacagaa

SEQ ID NO: 5709 - DNA, 20 bp, Artificial Sequence
  Description of Artificial Sequence: Synthetic oligonucleotide
  Target: SCNA; (+) strand; PAM type: NAAAAC; PAM sequence: AAAAAC
cagcactagcagcacatacc

SEQ ID NO: 5710 - DNA, 20 bp, Artificial Sequence
  Description of Artificial Sequence: Synthetic oligonucleotide
  Target: SCNA; (+) strand; PAM type: NAAAAC; PAM sequence: GAAAAC
tggtctttctcacaatcaca

SEQ ID NO: 5711 - DNA, 20 bp, Artificial Sequence
  Description of Artificial Sequence: Synthetic oligonucleotide
  Target: SCNA; (+) strand; PAM type: NAAAAC; PAM sequence: GAAAAC
tattcttatctggctagaaa

SEQ ID NO: 5712 - DNA, 20 bp, Artificial Sequence
  Description of Artificial Sequence: Synthetic oligonucleotide
  Target: SCNA; (+) strand; PAM type: NAAAAC; PAM sequence: CAAAAC
actatattttcaagatattc

SEQ ID NO: 5713 - DNA, 20 bp, Artificial Sequence
  Description of Artificial Sequence: Synthetic oligonucleotide
  Target: SCNA; (+) strand; PAM type: NAAAAC; PAM sequence: GAAAAC
aacttttagattgaggcaat

SEQ ID NO: 5714 - DNA, 20 bp, Artificial Sequence
  Description of Artificial Sequence: Synthetic oligonucleotide
  Target: SCNA; (+) strand; PAM type: NAAAAC; PAM sequence: CAAAAC
tgaaaaaaaattccagctag

SEQ ID NO: 5715 - DNA, 20 bp, Artificial Sequence
  Description of Artificial Sequence: Synthetic oligonucleotide
  Target: SCNA; (+) strand; PAM type: NAAAAC; PAM sequence: GAAAAC
aaccaagtttttccccttca

SEQ ID NO: 5716 - DNA, 20 bp, Artificial Sequence
  Description of Artificial Sequence: Synthetic oligonucleotide
  Target: SCNA; (+) strand; PAM type: NAAAAC; PAM sequence: AAAAAC
gtaggaaaaaaagagcaact

SEQ ID NO: 5717 - DNA, 20 bp, Artificial Sequence
  Description of Artificial Sequence: Synthetic oligonucleotide
  Target: SCNA; (+) strand; PAM type: NAAAAC; PAM sequence: GAAAAC
tccttcaggctgataatcca

SEQ ID NO: 5718 - DNA, 20 bp, Artificial Sequence
  Description of Artificial Sequence: Synthetic oligonucleotide
  Target: SCNA; (+) strand; PAM type: NAAAAC; PAM sequence: CAAAAC
cctagtacagagtgacagct

SEQ ID NO: 5719 - DNA, 20 bp, Artificial Sequence
  Description of Artificial Sequence: Synthetic oligonucleotide
  Target: SCNA; (+) strand; PAM type: NAAAAC; PAM sequence: CAAAAC
aaaaaaggaagttgactctc

SEQ ID NO: 5720 - DNA, 20 bp, Artificial Sequence
  Description of Artificial Sequence: Synthetic oligonucleotide
  Target: SCNA; (+) strand; PAM type: NAAAAC; PAM sequence: AAAAAC
aggaggtgtgaggaagaaag

SEQ ID NO: 5721 - DNA, 20 bp, Artificial Sequence
  Description of Artificial Sequence: Synthetic oligonucleotide
  Target: SCNA; (+) strand; PAM type: NAAAAC; PAM sequence: GAAAAC
tttgtcttttaacattccag

SEQ ID NO: 5722 - DNA, 20 bp, Artificial Sequence
  Description of Artificial Sequence: Synthetic oligonucleotide
  Target: SCNA; (+) strand; PAM type: NAAAAC; PAM sequence: AAAAAC
cattgtgcataaaatataat

SEQ ID NO: 5723 - DNA, 20 bp, Artificial Sequence
  Description of Artificial Sequence: Synthetic oligonucleotide
  Target: SCNA; (+) strand; PAM type: NAAAAC; PAM sequence: TAAAAC
tggttatactgacaatttat

SEQ ID NO: 5724 - DNA, 20 bp, Artificial Sequence
  Description of Artificial Sequence: Synthetic oligonucleotide
  Target: SCNA; (+) strand; PAM type: NAAAAC; PAM sequence: AAAAAC
caaatttccattcaatcctt

SEQ ID NO: 5725 - DNA, 20 bp, Artificial Sequence
  Description of Artificial Sequence: Synthetic oligonucleotide
  Target: SCNA; (+) strand; PAM type: NAAAAC; PAM sequence: AAAAAC
ttttcactagtcccctgtta

SEQ ID NO: 5726 - DNA, 20 bp, Artificial Sequence
  Description of Artificial Sequence: Synthetic oligonucleotide
  Target: SCNA; (+) strand; PAM type: NAAAAC; PAM sequence: TAAAAC
gacagatgagcagatcatta

SEQ ID NO: 5727 - DNA, 20 bp, Artificial Sequence
  Description of Artificial Sequence: Synthetic oligonucleotide
  Target: SCNA; (+) strand; PAM type: NAAAAC; PAM sequence: AAAAAC
tcattcttcacagaactaga

SEQ ID NO: 5728 - DNA, 20 bp, Artificial Sequence
  Description of Artificial Sequence: Synthetic oligonucleotide
  Target: SCNA; (+) strand; PAM type: NAAAAC; PAM sequence: CAAAAC
tactataaggccatagtcac

SEQ ID NO: 5729 - DNA, 20 bp, Artificial Sequence
  Description of Artificial Sequence: Synthetic oligonucleotide
  Target: SCNA; (+) strand; PAM type: NAAAAC; PAM sequence: TAAAAC
aaaataggcacacagaccaa

SEQ ID NO: 5730 - DNA, 20 bp, Artificial Sequence
  Description of Artificial Sequence: Synthetic oligonucleotide
  Target: SCNA; (+) strand; PAM type: NAAAAC; PAM sequence: AAAAAC
tgatctttgacaaagcaaat

SEQ ID NO: 5731 - DNA, 20 bp, Artificial Sequence
  Description of Artificial Sequence: Synthetic oligonucleotide
  Target: SCNA; (+) strand; PAM type: NAAAAC; PAM sequence: AAAAAC
tatttgagggaataatcaag

SEQ ID NO: 5732 - DNA, 20 bp, Artificial Sequence
  Description of Artificial Sequence: Synthetic oligonucleotide
  Target: SCNA; (+) strand; PAM type: NAAAAC; PAM sequence: GAAAAC
gcatcaggtatcctataaaa

SEQ ID NO: 5733 - DNA, 20 bp, Artificial Sequence
  Description of Artificial Sequence: Synthetic oligonucleotide
  Target: SCNA; (+) strand; PAM type: NAAAAC; PAM sequence: CAAAAC
ttaactccaaaagaaaccct

SEQ ID NO: 5734 - DNA, 20 bp, Artificial Sequence
  Description of Artificial Sequence: Synthetic oligonucleotide
  Target: SCNA; (+) strand; PAM type: NAAAAC; PAM sequence: CAAAAC
gaattcaacaataataatga

SEQ ID NO: 5735 - DNA, 20 bp, Artificial Sequence
  Description of Artificial Sequence: Synthetic oligonucleotide
  Target: SCNA; (+) strand; PAM type: NAAAAC; PAM sequence: AAAAAC
cttacacctctaggaactgg

SEQ ID NO: 5736 - DNA, 20 bp, Artificial Sequence
  Description of Artificial Sequence: Synthetic oligonucleotide
  Target: SCNA; (+) strand; PAM type: NAAAAC; PAM sequence: AAAAAC
atacaaaagataaatgaaac

SEQ ID NO: 5737 - DNA, 20 bp, Artificial Sequence
  Description of Artificial Sequence: Synthetic oligonucleotide
  Target: SCNA; (+) strand; PAM type: NAAAAC; PAM sequence: GAAAAC
ccattggcaagattaaccaa

SEQ ID NO: 5738 - DNA, 20 bp, Artificial Sequence
  Description of Artificial Sequence: Synthetic oligonucleotide
  Target: SCNA; (+) strand; PAM type: NAAAAC; PAM sequence: GAAAAC
acatttacgtacacaaacta

SEQ ID NO: 5739 - DNA, 20 bp, Artificial Sequence
  Description of Artificial Sequence: Synthetic oligonucleotide
  Target: SCNA; (+) strand; PAM type: NAAAAC; PAM sequence: TAAAAC
tatatacaaacctcctagat

SEQ ID NO: 5740 - DNA, 20 bp, Artificial Sequence
  Description of Artificial Sequence: Synthetic oligonucleotide
  Target: SCNA; (+) strand; PAM type: NAAAAC; PAM sequence: CAAAAC
agccagtattaccctaatat

SEQ ID NO: 5741 - DNA, 20 bp, Artificial Sequence
  Description of Artificial Sequence: Synthetic oligonucleotide
  Target: SCNA; (+) strand; PAM type: NAAAAC; PAM sequence: GAAAAC
aaaaggacataacaaaaaaa

SEQ ID NO: 5742 - DNA, 20 bp, Artificial Sequence
  Description of Artificial Sequence: Synthetic oligonucleotide
  Target: SCNA; (+) strand; PAM type: NAAAAC; PAM sequence: AAAAAC
tacaccatataagcaggagt

SEQ ID NO: 5743 - DNA, 20 bp, Artificial Sequence
  Description of Artificial Sequence: Synthetic oligonucleotide
  Target: SCNA; (+) strand; PAM type: NAAAAC; PAM sequence: TAAAAC
attcagtattgctttatgat

SEQ ID NO: 5744 - DNA, 20 bp, Artificial Sequence
  Description of Artificial Sequence: Synthetic oligonucleotide
  Target: SCNA; (+) strand; PAM type: NAAAAC; PAM sequence: CAAAAC
tttatgattaaaaccctcag

SEQ ID NO: 5745 - DNA, 20 bp, Artificial Sequence
  Description of Artificial Sequence: Synthetic oligonucleotide
  Target: SCNA; (+) strand; PAM type: NAAAAC; PAM sequence: GAAAAC
atgatatgtttgtataccta

SEQ ID NO: 5746 - DNA, 20 bp, Artificial Sequence
  Description of Artificial Sequence: Synthetic oligonucleotide
  Target: SCNA; (+) strand; PAM type: NAAAAC; PAM sequence: CAAAAC
gtgctatacaccaacagcaa

SEQ ID NO: 5747 - DNA, 20 bp, Artificial Sequence
  Description of Artificial Sequence: Synthetic oligonucleotide
  Target: SCNA; (+) strand; PAM type: NAAAAC; PAM sequence: GAAAAC
gaggtggaagatctctacag

SEQ ID NO: 5748 - DNA, 20 bp, Artificial Sequence
  Description of Artificial Sequence: Synthetic oligonucleotide
  Target: SCNA; (+) strand; PAM type: NAAAAC; PAM sequence: GAAAAC
cacagacaacagaaactaat

SEQ ID NO: 5749 - DNA, 20 bp, Artificial Sequence
  Description of Artificial Sequence: Synthetic oligonucleotide
  Target: SCNA; (+) strand; PAM type: NAAAAC; PAM sequence: AAAAAC
gtgaaaatgagcacactgcc

SEQ ID NO: 5750 - DNA, 20 bp, Artificial Sequence
  Description of Artificial Sequence: Synthetic oligonucleotide
  Target: SCNA; (+) strand; PAM type: NAAAAC; PAM sequence: CAAAAC
atcttaaaattcacatggaa

SEQ ID NO: 5751 - DNA, 20 bp, Artificial Sequence
  Description of Artificial Sequence: Synthetic oligonucleotide
  Target: SCNA; (+) strand; PAM type: NAAAAC; PAM sequence: GAAAAC
tactacaagactatagttag

SEQ ID NO: 5752 - DNA, 20 bp, Artificial Sequence
  Description of Artificial Sequence: Synthetic oligonucleotide
  Target: SCNA; (+) strand; PAM type: NAAAAC; PAM sequence: AAAAAC
tgatcttcaacaaagcaaac

SEQ ID NO: 5753 - DNA, 20 bp, Artificial Sequence
  Description of Artificial Sequence: Synthetic oligonucleotide
  Target: SCNA; (+) strand; PAM type: NAAAAC; PAM sequence: CAAAAC
aaagacttaaatctaagacc

SEQ ID NO: 5754 - DNA, 20 bp, Artificial Sequence
  Description of Artificial Sequence: Synthetic oligonucleotide
  Target: SCNA; (+) strand; PAM type: NAAAAC; PAM sequence: TAAAAC
attatagaagataacattgg

SEQ ID NO: 5755 - DNA, 20 bp, Artificial Sequence
  Description of Artificial Sequence: Synthetic oligonucleotide
  Target: SCNA; (+) strand; PAM type: NAAAAC; PAM sequence: TAAAAC
aaagataaatagatgggacc

SEQ ID NO: 5756 - DNA, 20 bp, Artificial Sequence
  Description of Artificial Sequence: Synthetic oligonucleotide
  Target: SCNA; (+) strand; PAM type: NAAAAC; PAM sequence: AAAAAC
actcaaacaaatcagtaaga

SEQ ID NO: 5757 - DNA, 20 bp, Artificial Sequence
  Description of Artificial Sequence: Synthetic oligonucleotide
  Target: SCNA; (+) strand; PAM type: NAAAAC; PAM sequence: CAAAAC
atgaccagggaaatgcaaat

SEQ ID NO: 5758 - DNA, 20 bp, Artificial Sequence
  Description of Artificial Sequence: Synthetic oligonucleotide
  Target: SCNA; (+) strand; PAM type: NAAAAC; PAM sequence: GAAAAC
agtgaagtaactcaggagtg

SEQ ID NO: 5759 - DNA, 20 bp, Artificial Sequence
  Description of Artificial Sequence: Synthetic oligonucleotide
  Target: SCNA; (+) strand; PAM type: NAAAAC; PAM sequence: AAAAAC
aacaacttctccatataacc

SEQ ID NO: 5760 - DNA, 20 bp, Artificial Sequence
  Description of Artificial Sequence: Synthetic oligonucleotide
  Target: SCNA; (+) strand; PAM type: NAAAAC; PAM sequence: CAAAAC
ttgaactccgcccaagaagg

SEQ ID NO: 5761 - DNA, 20 bp, Artificial Sequence
  Description of Artificial Sequence: Synthetic oligonucleotide
  Target: SCNA; (+) strand; PAM type: NAAAAC; PAM sequence: AAAAAC
acaggcaacaccagtcatgg

SEQ ID NO: 5762 - DNA, 20 bp, Artificial Sequence
  Description of Artificial Sequence: Synthetic oligonucleotide
  Target: SCNA; (+) strand; PAM type: NAAAAC; PAM sequence: CAAAAC
caacaccagtcatggaaaaa

SEQ ID NO: 5763 - DNA, 20 bp, Artificial Sequence
  Description of Artificial Sequence: Synthetic oligonucleotide
  Target: SCNA; (+) strand; PAM type: NAAAAC; PAM sequence: TAAAAC
atactgtccttagatatttt

SEQ ID NO: 5764 - DNA, 20 bp, Artificial Sequence
  Description of Artificial Sequence: Synthetic oligonucleotide
  Target: SCNA; (+) strand; PAM type: NAAAAC; PAM sequence: AAAAAC
aaaccacttagaacttgcat

SEQ ID NO: 5765 - DNA, 20 bp, Artificial Sequence
  Description of Artificial Sequence: Synthetic oligonucleotide
  Target: SCNA; (+) strand; PAM type: NAAAAC; PAM sequence: GAAAAC
tttaaaagccattactaact

SEQ ID NO: 5766 - DNA, 20 bp, Artificial Sequence
  Description of Artificial Sequence: Synthetic oligonucleotide
  Target: SCNA; (+) strand; PAM type: NAAAAC; PAM sequence: GAAAAC
tttttacagagatgacttga

SEQ ID NO: 5767 - DNA, 20 bp, Artificial Sequence
  Description of Artificial Sequence: Synthetic oligonucleotide
  Target: SCNA; (+) strand; PAM type: NAAAAC; PAM sequence: CAAAAC
aaatatttcttttgaagaaa

SEQ ID NO: 5768 - DNA, 20 bp, Artificial Sequence
  Description of Artificial Sequence: Synthetic oligonucleotide
  Target: SCNA; (+) strand; PAM type: NAAAAC; PAM sequence: TAAAAC
gacatataaagatggatttt

SEQ ID NO: 5769 - DNA, 20 bp, Artificial Sequence
  Description of Artificial Sequence: Synthetic oligonucleotide
  Target: SCNA; (+) strand; PAM type: NAAAAC; PAM sequence: TAAAAC
ctttttataatatctatatt

SEQ ID NO: 5770 - DNA, 20 bp, Artificial Sequence
  Description of Artificial Sequence: Synthetic oligonucleotide
  Target: SCNA; (+) strand; PAM type: NAAAAC; PAM sequence: AAAAAC
agaaataactttcaatgata

SEQ ID NO: 5771 - DNA, 20 bp, Artificial Sequence
  Description of Artificial Sequence: Synthetic oligonucleotide
  Target: SCNA; (+) strand; PAM type: NAAAAC; PAM sequence: GAAAAC
atttccattgcttaaaaata

SEQ ID NO: 5772 - DNA, 20 bp, Artificial Sequence
  Description of Artificial Sequence: Synthetic oligonucleotide
  Target: SCNA; (+) strand; PAM type: NAAAAC; PAM sequence: TAAAAC
agatttcataatacggaggc

SEQ ID NO: 5773 - DNA, 20 bp, Artificial Sequence
  Description of Artificial Sequence: Synthetic oligonucleotide
  Target: SCNA; (+) strand; PAM type: NAAAAC; PAM sequence: AAAAAC
ggttttttcttttccctctt

SEQ ID NO: 5774 - DNA, 20 bp, Artificial Sequence
  Description of Artificial Sequence: Synthetic oligonucleotide
  Target: SCNA; (+) strand; PAM type: NAAAAC; PAM sequence: TAAAAC
aatccagtacaatctgaagt

SEQ ID NO: 5775 - DNA, 20 bp, Artificial Sequence
  Description of Artificial Sequence: Synthetic oligonucleotide
  Target: SCNA; (+) strand; PAM type: NAAAAC; PAM sequence: AAAAAC
aaaaattaataatagtaata

SEQ ID NO: 5776 - DNA, 20 bp, Artificial Sequence
  Description of Artificial Sequence: Synthetic oligonucleotide
  Target: SCNA; (+) strand; PAM type: NAAAAC; PAM sequence: AAAAAC
gcatttttcaggaaacttgc

SEQ ID NO: 5777 - DNA, 20 bp, Artificial Sequence
  Description of Artificial Sequence: Synthetic oligonucleotide
  Target: SCNA; (+) strand; PAM type: NAAAAC; PAM sequence: AAAAAC
ataagaagcaaaaattacag

SEQ ID NO: 5778 - DNA, 20 bp, Artificial Sequence
  Description of Artificial Sequence: Synthetic oligonucleotide
  Target: SCNA; (+) strand; PAM type: NAAAAC; PAM sequence: AAAAAC
tacagaaaaacattgtattc

SEQ ID NO: 5779 - DNA, 20 bp, Artificial Sequence
  Description of Artificial Sequence: Synthetic oligonucleotide
  Target: SCNA; (+) strand; PAM type: NAAAAC; PAM sequence: CAAAAC
agacatagatctctctccac

SEQ ID NO: 5780 - DNA, 20 bp, Artificial Sequence
  Description of Artificial Sequence: Synthetic oligonucleotide
  Target: SCNA; (+) strand; PAM type: NAAAAC; PAM sequence: AAAAAC
atgatgctctggcagaaact

SEQ ID NO: 5781 - DNA, 20 bp, Artificial Sequence
  Description of Artificial Sequence: Synthetic oligonucleotide
  Target: SCNA; (+) strand; PAM type: NAAAAC; PAM sequence: CAAAAC
acagtggttaaaaaaaattg

SEQ ID NO: 5782 - DNA, 20 bp, Artificial Sequence
  Description of Artificial Sequence: Synthetic oligonucleotide
  Target: SCNA; (+) strand; PAM type: NAAAAC; PAM sequence: AAAAAC
tttgttcttgtcatggttgt

SEQ ID NO: 5783 - DNA, 20 bp, Artificial Sequence
  Description of Artificial Sequence: Synthetic oligonucleotide
  Target: SCNA; (+) strand; PAM type: NAAAAC; PAM sequence: AAAAAC
aaataagactaaacaagaat

SEQ ID NO: 5784 - DNA, 20 bp, Artificial Sequence
  Description of Artificial Sequence: Synthetic oligonucleotide
  Target: SCNA; (+) strand; PAM type: NAAAAC; PAM sequence: AAAAAC
gagaaactcacccacctgcc

SEQ ID NO: 5785 - DNA, 20 bp, Artificial Sequence
  Description of Artificial Sequence: Synthetic oligonucleotide
  Target: SCNA; (+) strand; PAM type: NAAAAC; PAM sequence: TAAAAC
tctcttctacactaacactg

SEQ ID NO: 5786 - DNA, 20 bp, Artificial Sequence
  Description of Artificial Sequence: Synthetic oligonucleotide
  Target: SCNA; (+) strand; PAM type: NAAAAC; PAM sequence: GAAAAC
attaaaaattctgagtttaa

SEQ ID NO: 5787 - DNA, 20 bp, Artificial Sequence
  Description of Artificial Sequence: Synthetic oligonucleotide
  Target: SCNA; (+) strand; PAM type: NAAAAC; PAM sequence: CAAAAC
aaataacaggataaggcaca

SEQ ID NO: 5788 - DNA, 20 bp, Artificial Sequence
  Description of Artificial Sequence: Synthetic oligonucleotide
  Target: SCNA; (+) strand; PAM type: NAAAAC; PAM sequence: AAAAAC
attatattaattaatctcat

SEQ ID NO: 5789 - DNA, 20 bp, Artificial Sequence
  Description of Artificial Sequence: Synthetic oligonucleotide
  Target: SCNA; (+) strand; PAM type: NAAAAC; PAM sequence: GAAAAC
agacaaatgaagatatataa

SEQ ID NO: 5790 - DNA, 20 bp, Artificial Sequence
  Description of Artificial Sequence: Synthetic oligonucleotide
  Target: SCNA; (+) strand; PAM type: NAAAAC; PAM sequence: TAAAAC
aactaatcattattttagac

SEQ ID NO: 5791 - DNA, 20 bp, Artificial Sequence
  Description of Artificial Sequence: Synthetic oligonucleotide
  Target: SCNA; (+) strand; PAM type: NAAAAC; PAM sequence: GAAAAC
taacaaaatccttatctcag

SEQ ID NO: 5792 - DNA, 20 bp, Artificial Sequence
  Description of Artificial Sequence: Synthetic oligonucleotide
  Target: SCNA; (+) strand; PAM type: NAAAAC; PAM sequence: AAAAAC
cttgaaaaaaaaaagaagaa

SEQ ID NO: 5793 - DNA, 20 bp, Artificial Sequence
  Description of Artificial Sequence: Synthetic oligonucleotide
  Target: SCNA; (+) strand; PAM type: NAAAAC; PAM sequence: TAAAAC
taaaattaaatttaatccaa

SEQ ID NO: 5794 - DNA, 20 bp, Artificial Sequence
  Description of Artificial Sequence: Synthetic oligonucleotide
  Target: SCNA; (+) strand; PAM type: NAAAAC; PAM sequence: GAAAAC
tagtgtctagcacatagtat

SEQ ID NO: 5795 - DNA, 20 bp, Artificial Sequence
  Description of Artificial Sequence: Synthetic oligonucleotide
  Target: SCNA; (+) strand; PAM type: NAAAAC; PAM sequence: CAAAAC
tacatactcacagcagtctg

SEQ ID NO: 5796 - DNA, 20 bp, Artificial Sequence
  Description of Artificial Sequence: Synthetic oligonucleotide
  Target: SCNA; (+) strand; PAM type: NAAAAC; PAM sequence: TAAAAC
tcataacttttactctttgt

SEQ ID NO: 5797 - DNA, 20 bp, Artificial Sequence
  Description of Artificial Sequence: Synthetic oligonucleotide
  Target: SCNA; (+) strand; PAM type: NAAAAC; PAM sequence: TAAAAC
actctttgttaaaactatat

SEQ ID NO: 5798 - DNA, 20 bp, Artificial Sequence
  Description of Artificial Sequence: Synthetic oligonucleotide
  Target: SCNA; (+) strand; PAM type: NAAAAC; PAM sequence: AAAAAC
aaatattcaatatttaagtt

SEQ ID NO: 5799 - DNA, 20 bp, Artificial Sequence
  Description of Artificial Sequence: Synthetic oligonucleotide
  Target: SCNA; (+) strand; PAM type: NAAAAC; PAM sequence: GAAAAC
gctatgaaaagataatcata

SEQ ID NO: 5800 - DNA, 20 bp, Artificial Sequence
  Description of Artificial Sequence: Synthetic oligonucleotide
  Target: SCNA; (+) strand; PAM type: NAAAAC; PAM sequence: AAAAAC
ctcatgatagctgatgagaa

SEQ ID NO: 5801 - DNA, 20 bp, Artificial Sequence
  Description of Artificial Sequence: Synthetic oligonucleotide
  Target: SCNA; (+) strand; PAM type: NAAAAC; PAM sequence: AAAAAC
atagctgatgagaaaaaaac

SEQ ID NO: 5802 - DNA, 20 bp, Artificial Sequence
  Description of Artificial Sequence: Synthetic oligonucleotide
  Target: SCNA; (+) strand; PAM type: NAAAAC; PAM sequence: CAAAAC
tgatgagaaaaaaacaaaaa

SEQ ID NO: 5803 - DNA, 20 bp, Artificial Sequence
  Description of Artificial Sequence: Synthetic oligonucleotide
  Target: SCNA; (+) strand; PAM type: NAAAAC; PAM sequence: CAAAAC
catttgtgttggatctcatt

SEQ ID NO: 5804 - DNA, 20 bp, Artificial Sequence
  Description of Artificial Sequence: Synthetic oligonucleotide
  Target: SCNA; (+) strand; PAM type: NAAAAC; PAM sequence: AAAAAC
agaatgaaagagagattgga

SEQ ID NO: 5805 - DNA, 20 bp, Artificial Sequence
  Description of Artificial Sequence: Synthetic oligonucleotide
  Target: SCNA; (+) strand; PAM type: NAAAAC; PAM sequence: TAAAAC
ctaaattttaataaattcca

SEQ ID NO: 5806 - DNA, 20 bp, Artificial Sequence
  Description of Artificial Sequence: Synthetic oligonucleotide
  Target: SCNA; (+) strand; PAM type: NAAAAC; PAM sequence: AAAAAC
ctcaatgaatgctagttata

SEQ ID NO: 5807 - DNA, 20 bp, Artificial Sequence
  Description of Artificial Sequence: Synthetic oligonucleotide
  Target: SCNA; (+) strand; PAM type: NAAAAC; PAM sequence: AAAAAC
tacaatctacacaggcatga

SEQ ID NO: 5808 - DNA, 20 bp, Artificial Sequence
  Description of Artificial Sequence: Synthetic oligonucleotide
  Target: SCNA; (+) strand; PAM type: NAAAAC; PAM sequence: TAAAAC
gcattagtgtggtacattat

SEQ ID NO: 5809 - DNA, 20 bp, Artificial Sequence
  Description of Artificial Sequence: Synthetic oligonucleotide
  Target: SCNA; (+) strand; PAM type: NAAAAC; PAM sequence: GAAAAC
gtattttcctattcctcata

SEQ ID NO: 5810 - DNA, 20 bp, Artificial Sequence
  Description of Artificial Sequence: Synthetic oligonucleotide
  Target: SCNA; (+) strand; PAM type: NAAAAC; PAM sequence: AAAAAC
ttctcttctgtcaaaaaaaa

SEQ ID NO: 5811 - DNA, 20 bp, Artificial Sequence
  Description of Artificial Sequence: Synthetic oligonucleotide
  Target: SCNA; (+) strand; PAM type: NAAAAC; PAM sequence: AAAAAC
caaaaaaaaaaaaacaaaca

SEQ ID NO: 5812 - DNA, 20 bp, Artificial Sequence
  Description of Artificial Sequence: Synthetic oligonucleotide
  Target: SCNA; (+) strand; PAM type: NAAAAC; PAM sequence: AAAAAC
atacaatgttcaaaaaaaat

SEQ ID NO: 5813 - DNA, 20 bp, Artificial Sequence
  Description of Artificial Sequence: Synthetic oligonucleotide
  Target: SCNA; (+) strand; PAM type: NAAAAC; PAM sequence: AAAAAC
aaataaataaatatttttgg

SEQ ID NO: 5814 - DNA, 20 bp, Artificial Sequence
  Description of Artificial Sequence: Synthetic oligonucleotide
  Target: SCNA; (+) strand; PAM type: NAAAAC; PAM sequence: GAAAAC
ctctcccaataaaatgccta

SEQ ID NO: 5815 - DNA, 20 bp, Artificial Sequence
  Description of Artificial Sequence: Synthetic oligonucleotide
  Target: SCNA; (+) strand; PAM type: NAAAAC; PAM sequence: TAAAAC
ctattgagtaagtttagata

SEQ ID NO: 5816 - DNA, 20 bp, Artificial Sequence
  Description of Artificial Sequence: Synthetic oligonucleotide
  Target: SCNA; (+) strand; PAM type: NAAAAC; PAM sequence: TAAAAC
tccagataatgtagggcctt

SEQ ID NO: 5817 - DNA, 20 bp, Artificial Sequence
  Description of Artificial Sequence: Synthetic oligonucleotide
  Target: SCNA; (+) strand; PAM type: NAAAAC; PAM sequence: TAAAAC
ctgaaaagaaagaggccaga

SEQ ID NO: 5818 - DNA, 20 bp, Artificial Sequence
  Description of Artificial Sequence: Synthetic oligonucleotide
  Target: SCNA; (+) strand; PAM type: NAAAAC; PAM sequence: CAAAAC
ccttgattctatagagagtg

SEQ ID NO: 5819 - DNA, 20 bp, Artificial Sequence
  Description of Artificial Sequence: Synthetic oligonucleotide
  Target: SCNA; (+) strand; PAM type: NAAAAC; PAM sequence: AAAAAC
tattaaaggaagtactgcca

SEQ ID NO: 5820 - DNA, 20 bp, Artificial Sequence
  Description of Artificial Sequence: Synthetic oligonucleotide
  Target: SCNA; (+) strand; PAM type: NAAAAC; PAM sequence: AAAAAC
cattctctccatgaagaata

SEQ ID NO: 5821 - DNA, 20 bp, Artificial Sequence
  Description of Artificial Sequence: Synthetic oligonucleotide
  Target: SCNA; (+) strand; PAM type: NAAAAC; PAM sequence: AAAAAC
tacagttgaattctacttcc

SEQ ID NO: 5822 - DNA, 20 bp, Artificial Sequence
  Description of Artificial Sequence: Synthetic oligonucleotide
  Target: SCNA; (+) strand; PAM type: NAAAAC; PAM sequence: AAAAAC
gggcagctaaagagtgtatc

SEQ ID NO: 5823 - DNA, 20 bp, Artificial Sequence
  Description of Artificial Sequence: Synthetic oligonucleotide
  Target: SCNA; (+) strand; PAM type: NAAAAC; PAM sequence: CAAAAC
acaacagctttctcagagcc

SEQ ID NO: 5824 - DNA, 20 bp, Artificial Sequence
  Description of Artificial Sequence: Synthetic oligonucleotide
  Target: SCNA; (+) strand; PAM type: NAAAAC; PAM sequence: GAAAAC
gtactatgatacttcactca

SEQ ID NO: 5825 - DNA, 20 bp, Artificial Sequence
  Description of Artificial Sequence: Synthetic oligonucleotide
  Target: SCNA; (+) strand; PAM type: NAAAAC; PAM sequence: AAAAAC
gcaaaatgggcttcactgag

SEQ ID NO: 5826 - DNA, 20 bp, Artificial Sequence
  Description of Artificial Sequence: Synthetic oligonucleotide
  Target: SCNA; (+) strand; PAM type: NAAAAC; PAM sequence: AAAAAC
gtggaatacgtccgcgggtt

SEQ ID NO: 5827 - DNA, 20 bp, Artificial Sequence
  Description of Artificial Sequence: Synthetic oligonucleotide
  Target: SCNA; (+) strand; PAM type: NAAAAC; PAM sequence: AAAAAC
catagggaattggcctaagg

SEQ ID NO: 5828 - DNA, 20 bp, Artificial Sequence
  Description of Artificial Sequence: Synthetic oligonucleotide
  Target: SCNA; (+) strand; PAM type: NAAAAC; PAM sequence: GAAAAC
tgactttggggaaatcagag

SEQ ID NO: 5829 - DNA, 20 bp, Artificial Sequence
  Description of Artificial Sequence: Synthetic oligonucleotide
  Target: SCNA; (+) strand; PAM type: NAAAAC; PAM sequence: TAAAAC
ttacattttatttagctaaa

SEQ ID NO: 5830 - DNA, 20 bp, Artificial Sequence
  Description of Artificial Sequence: Synthetic oligonucleotide
  Target: SCNA; (+) strand; PAM type: NAAAAC; PAM sequence: GAAAAC
catttttatttcacagataa

SEQ ID NO: 5831 - DNA, 20 bp, Artificial Sequence
  Description of Artificial Sequence: Synthetic oligonucleotide
  Target: SCNA; (+) strand; PAM type: NAAAAC; PAM sequence: TAAAAC
tagcatcatcaatgtctccc

SEQ ID NO: 5832 - DNA, 20 bp, Artificial Sequence
  Description of Artificial Sequence: Synthetic oligonucleotide
  Target: SCNA; (+) strand; PAM type: NAAAAC; PAM sequence: AAAAAC
gctcagatggtagtagaggt

SEQ ID NO: 5833 - DNA, 20 bp, Artificial Sequence
  Description of Artificial Sequence: Synthetic oligonucleotide
  Target: SCNA; (+) strand; PAM type: NAAAAC; PAM sequence: CAAAAC
ataaataaagataagtatct

SEQ ID NO: 5834 - DNA, 20 bp, Artificial Sequence
  Description of Artificial Sequence: Synthetic oligonucleotide
  Target: SCNA; (+) strand; PAM type: NAAAAC; PAM sequence: CAAAAC
taatacatttctttgacaaa

SEQ ID NO: 5835 - DNA, 20 bp, Artificial Sequence
  Description of Artificial Sequence: Synthetic oligonucleotide
  Target: SCNA; (+) strand; PAM type: NAAAAC; PAM sequence: AAAAAC
ggtaatttcagtctactgac

SEQ ID NO: 5836 - DNA, 20 bp, Artificial Sequence
  Description of Artificial Sequence: Synthetic oligonucleotide
  Target: SCNA; (+) strand; PAM type: NAAAAC; PAM sequence: GAAAAC
ctcagttaatgatttttaat

SEQ ID NO: 5837 - DNA, 20 bp, Artificial Sequence
  Description of Artificial Sequence: Synthetic oligonucleotide
  Target: SCNA; (+) strand; PAM type: NAAAAC; PAM sequence: TAAAAC
caatgtcaaacctgacattt

SEQ ID NO: 5838 - DNA, 20 bp, Artificial Sequence
  Description of Artificial Sequence: Synthetic oligonucleotide
  Target: SCNA; (+) strand; PAM type: NAAAAC; PAM sequence: GAAAAC
ttcaagcttatttcttgcgt

SEQ ID NO: 5839 - DNA, 20 bp, Artificial Sequence
  Description of Artificial Sequence: Synthetic oligonucleotide
  Target: SCNA; (+) strand; PAM type: NAAAAC; PAM sequence: TAAAAC
tattcaggacttttgctctc

SEQ ID NO: 5840 - DNA, 20 bp, Artificial Sequence
  Description of Artificial Sequence: Synthetic oligonucleotide
  Target: SCNA; (+) strand; PAM type: NAAAAC; PAM sequence: AAAAAC
ccagaaaattacaaaaatat

SEQ ID NO: 5841 - DNA, 20 bp, Artificial Sequence
  Description of Artificial Sequence: Synthetic oligonucleotide
  Target: SCNA; (+) strand; PAM type: NAAAAC; PAM sequence: TAAAAC
caagagttaatattgttctg

SEQ ID NO: 5842 - DNA, 20 bp, Artificial Sequence
  Description of Artificial Sequence: Synthetic oligonucleotide
  Target: SCNA; (+) strand; PAM type: NAAAAC; PAM sequence: CAAAAC
cattcatatgatcaaattaa

SEQ ID NO: 5843 - DNA, 20 bp, Artificial Sequence
  Description of Artificial Sequence: Synthetic oligonucleotide
  Target: SCNA; (+) strand; PAM type: NAAAAC; PAM sequence: GAAAAC
cctcaaagggcatgaaaggt

SEQ ID NO: 5844 - DNA, 20 bp, Artificial Sequence
  Description of Artificial Sequence: Synthetic oligonucleotide
  Target: SCNA; (+) strand; PAM type: NAAAAC; PAM sequence: CAAAAC
cgtgaaaagggtcggagaca

SEQ ID NO: 5845 - DNA, 20 bp, Artificial Sequence
  Description of Artificial Sequence: Synthetic oligonucleotide
  Target: SCNA; (+) strand; PAM type: NAAAAC; PAM sequence: TAAAAC
cagaatagtttgccagcaaa

SEQ ID NO: 5846 - DNA, 20 bp, Artificial Sequence
  Description of Artificial Sequence: Synthetic oligonucleotide
  Target: SCNA; (+) strand; PAM type: NAAAAC; PAM sequence: CAAAAC
cagaattttaaaatctacct

SEQ ID NO: 5847 - DNA, 20 bp, Artificial Sequence
  Description of Artificial Sequence: Synthetic oligonucleotide
  Target: SCNA; (+) strand; PAM type: NAAAAC; PAM sequence: CAAAAC
accagcttataaatgtaaca

SEQ ID NO: 5848 - DNA, 20 bp, Artificial Sequence
  Description of Artificial Sequence: Synthetic oligonucleotide
  Target: SCNA; (+) strand; PAM type: NAAAAC; PAM sequence: TAAAAC
acccttacaatttcttttca

SEQ ID NO: 5849 - DNA, 20 bp, Artificial Sequence
  Description of Artificial Sequence: Synthetic oligonucleotide
  Target: SCNA; (+) strand; PAM type: NAAAAC; PAM sequence: AAAAAC
cagaagtttaatttcatgtc

SEQ ID NO: 5850 - DNA, 20 bp, Artificial Sequence
  Description of Artificial Sequence: Synthetic oligonucleotide
  Target: SCNA; (+) strand; PAM type: NAAAAC; PAM sequence: TAAAAC
gtactgaaaatcttatgttt

SEQ ID NO: 5851 - DNA, 20 bp, Artificial Sequence
  Description of Artificial Sequence: Synthetic oligonucleotide
  Target: SCNA; (+) strand; PAM type: NAAAAC; PAM sequence: AAAAAC
tagcaataatcgacacattt

SEQ ID NO: 5852 - DNA, 20 bp, Artificial Sequence
  Description of Artificial Sequence: Synthetic oligonucleotide
  Target: SCNA; (+) strand; PAM type: NAAAAC; PAM sequence: CAAAAC
acattccaaatgacgggtga

SEQ ID NO: 5853 - DNA, 20 bp, Artificial Sequence
  Description of Artificial Sequence: Synthetic oligonucleotide
  Target: SCNA; (+) strand; PAM type: NAAAAC; PAM sequence: CAAAAC
tgtaataaatttataagaat

SEQ ID NO: 5854 - DNA, 20 bp, Artificial Sequence
  Description of Artificial Sequence: Synthetic oligonucleotide
  Target: SCNA; (+) strand; PAM type: NAAAAC; PAM sequence: AAAAAC
tttatttttaaagtacctga

SEQ ID NO: 5855 - DNA, 20 bp, Artificial Sequence
  Description of Artificial Sequence: Synthetic oligonucleotide
  Target: SCNA; (+) strand; PAM type: NAAAAC; PAM sequence: GAAAAC
ttgtgagccactgtccttca

SEQ ID NO: 5856 - DNA, 20 bp, Artificial Sequence
  Description of Artificial Sequence: Synthetic oligonucleotide
  Target: SCNA; (+) strand; PAM type: NAAAAC; PAM sequence: TAAAAC
ttgcacaagaaagttcacta

SEQ ID NO: 5857 - DNA, 20 bp, Artificial Sequence
  Description of Artificial Sequence: Synthetic oligonucleotide
  Target: SCNA; (+) strand; PAM type: NAAAAC; PAM sequence: AAAAAC
cagaggtgaagaatcttgca

SEQ ID NO: 5858 - DNA, 20 bp, Artificial Sequence
  Description of Artificial Sequence: Synthetic oligonucleotide
  Target: SCNA; (+) strand; PAM type: NAAAAC; PAM sequence: GAAAAC
aacgtggagtacttacaaca

SEQ ID NO: 5859 - DNA, 20 bp, Artificial Sequence
  Description of Artificial Sequence: Synthetic oligonucleotide
  Target: SCNA; (+) strand; PAM type: NAAAAC; PAM sequence: AAAAAC
tccttggttttggagcctac

SEQ ID NO: 5860 - DNA, 20 bp, Artificial Sequence
  Description of Artificial Sequence: Synthetic oligonucleotide
  Target: SCNA; (+) strand; PAM type: NAAAAC; PAM sequence: TAAAAC
aaaaatatatatatatatcc

SEQ ID NO: 5861 - DNA, 20 bp, Artificial Sequence
  Description of Artificial Sequence: Synthetic oligonucleotide
  Target: SCNA; (+) strand; PAM type: NAAAAC; PAM sequence: AAAAAC
ctgaacacccattatgtaaa

SEQ ID NO: 5862 - DNA, 20 bp, Artificial Sequence
  Description of Artificial Sequence: Synthetic oligonucleotide
  Target: SCNA; (+) strand; PAM type: NAAAAC; PAM sequence: AAAAAC
agagcaagactctgtctcaa

SEQ ID NO: 5863 - DNA, 20 bp, Artificial Sequence
  Description of Artificial Sequence: Synthetic oligonucleotide
  Target: SCNA; (+) strand; PAM type: NAAAAC; PAM sequence: AAAAAC
gacaaacaaacaaacaaaca

SEQ ID NO: 5864 - DNA, 20 bp, Artificial Sequence
  Description of Artificial Sequence: Synthetic oligonucleotide
  Target: SCNA; (+) strand; PAM type: NAAAAC; PAM sequence: AAAAAC
ataactatataaggaatttt

SEQ ID NO: 5865 - DNA, 20 bp, Artificial Sequence
  Description of Artificial Sequence: Synthetic oligonucleotide
  Target: SCNA; (+) strand; PAM type: NAAAAC; PAM sequence: TAAAAC
ataaggaattttaaaaacac

SEQ ID NO: 5866 - DNA, 20 bp, Artificial Sequence
  Description of Artificial Sequence: Synthetic oligonucleotide
  Target: SCNA; (+) strand; PAM type: NAAAAC; PAM sequence: TAAAAC
ttatttagcaaaccagaatt

SEQ ID NO: 5867 - DNA, 20 bp, Artificial Sequence
  Description of Artificial Sequence: Synthetic oligonucleotide
  Target: SCNA; (+) strand; PAM type: NAAAAC; PAM sequence: AAAAAC
aagtgttttatttctttgta

SEQ ID NO: 5868 - DNA, 20 bp, Artificial Sequence
  Description of Artificial Sequence: Synthetic oligonucleotide
  Target: SCNA; (+) strand; PAM type: NAAAAC; PAM sequence: AAAAAC
tctccaaaaaagaaaaaaag

SEQ ID NO: 5869 - DNA, 20 bp, Artificial Sequence
  Description of Artificial Sequence: Synthetic oligonucleotide
  Target: SCNA; (+) strand; PAM type: NAAAAC; PAM sequence: AAAAAC
ggaatatcagtcagccctaa

SEQ ID NO: 5870 - DNA, 20 bp, Artificial Sequence
  Description of Artificial Sequence: Synthetic oligonucleotide
  Target: SCNA; (+) strand; PAM type: NAAAAC; PAM sequence: AAAAAC
aaatatacagagactacgta

SEQ ID NO: 5871 - DNA, 20 bp, Artificial Sequence
  Description of Artificial Sequence: Synthetic oligonucleotide
  Target: SCNA; (+) strand; PAM type: NAAAAC; PAM sequence: AAAAAC
attttagctgcccttgccac

SEQ ID NO: 5872 - DNA, 20 bp, Artificial Sequence
  Description of Artificial Sequence: Synthetic oligonucleotide
  Target: SCNA; (+) strand; PAM type: NAAAAC; PAM sequence: AAAAAC
gagataggtatataacttaa

SEQ ID NO: 5873 - DNA, 20 bp, Artificial Sequence
  Description of Artificial Sequence: Synthetic oligonucleotide
  Target: SCNA; (+) strand; PAM type: NAAAAC; PAM sequence: CAAAAC
gataacaaaaatggagggaa

SEQ ID NO: 5874 - DNA, 20 bp, Artificial Sequence
  Description of Artificial Sequence: Synthetic oligonucleotide
  Target: SCNA; (+) strand; PAM type: NAAAAC; PAM sequence: GAAAAC
gaaggataaaagaataaatg

SEQ ID NO: 5875 - DNA, 20 bp, Artificial Sequence
  Description of Artificial Sequence: Synthetic oligonucleotide
  Target: SCNA; (+) strand; PAM type: NAAAAC; PAM sequence: AAAAAC
tcttattatgacattcccac

SEQ ID NO: 5876 - DNA, 20 bp, Artificial Sequence
  Description of Artificial Sequence: Synthetic oligonucleotide
  Target: SCNA; (+) strand; PAM type: NAAAAC; PAM sequence: TAAAAC
ataagtgatgtagtctcaac

SEQ ID NO: 5877 - DNA, 20 bp, Artificial Sequence
  Description of Artificial Sequence: Synthetic oligonucleotide
  Target: SCNA; (+) strand; PAM type: NAAAAC; PAM sequence: AAAAAC
cagagcaaggccctgactct

SEQ ID NO: 5878 - DNA, 20 bp, Artificial Sequence
  Description of Artificial Sequence: Synthetic oligonucleotide
  Target: SCNA; (+) strand; PAM type: NAAAAC; PAM sequence: AAAAAC
gactctaaaaactgaaaata

SEQ ID NO: 5879 - DNA, 20 bp, Artificial Sequence
  Description of Artificial Sequence: Synthetic oligonucleotide
  Target: SCNA; (+) strand; PAM type: NAAAAC; PAM sequence: TAAAAC
tttaaaagactatgagtttt

SEQ ID NO: 5880 - DNA, 20 bp, Artificial Sequence
  Description of Artificial Sequence: Synthetic oligonucleotide
  Target: SCNA; (+) strand; PAM type: NAAAAC; PAM sequence: GAAAAC
aattcctttacaccacactg

SEQ ID NO: 5881 - DNA, 20 bp, Artificial Sequence
  Description of Artificial Sequence: Synthetic oligonucleotide
  Target: SCNA; (+) strand; PAM type: NAAAAC; PAM sequence: AAAAAC
ctttcggggaaaaataaaca

SEQ ID NO: 5882 - DNA, 20 bp, Artificial Sequence
  Description of Artificial Sequence: Synthetic oligonucleotide
  Target: SCNA; (+) strand; PAM type: NAAAAC; PAM sequence: AAAAAC
agcttgcttactttacagag

SEQ ID NO: 5883 - DNA, 20 bp, Artificial Sequence
  Description of Artificial Sequence: Synthetic oligonucleotide
  Target: SCNA; (+) strand; PAM type: NAAAAC; PAM sequence: TAAAAC
ataaatattccccagccgtc

SEQ ID NO: 5884 - DNA, 20 bp, Artificial Sequence
  Description of Artificial Sequence: Synthetic oligonucleotide
  Target: SCNA; (+) strand; PAM type: NAAAAC; PAM sequence: CAAAAC
taaaatcaaatttaaacata

SEQ ID NO: 5885 - DNA, 20 bp, Artificial Sequence
  Description of Artificial Sequence: Synthetic oligonucleotide
  Target: SCNA; (+) strand; PAM type: NAAAAC; PAM sequence: TAAAAC
ttaaacatacaaaacaactt

SEQ ID NO: 5886 - DNA, 20 bp, Artificial Sequence
  Description of Artificial Sequence: Synthetic oligonucleotide
  Target: SCNA; (+) strand; PAM type: NAAAAC; PAM sequence: GAAAAC
tcttactacctacaaaaaaa

SEQ ID NO: 5887 - DNA, 20 bp, Artificial Sequence
  Description of Artificial Sequence: Synthetic oligonucleotide
  Target: SCNA; (+) strand; PAM type: NAAAAC; PAM sequence: AAAAAC
gactttagttttagaaagaa

SEQ ID NO: 5888 - DNA, 20 bp, Artificial Sequence
  Description of Artificial Sequence: Synthetic oligonucleotide
  Target: SCNA; (+) strand; PAM type: NAAAAC; PAM sequence: TAAAAC
gaccagcctggccaagatgg

SEQ ID NO: 5889 - DNA, 20 bp, Artificial Sequence
  Description of Artificial Sequence: Synthetic oligonucleotide
  Target: SCNA; (+) strand; PAM type: NAAAAC; PAM sequence: GAAAAC
aagcacatcactaatggttt

SEQ ID NO: 5890 - DNA, 20 bp, Artificial Sequence
  Description of Artificial Sequence: Synthetic oligonucleotide
  Target: SCNA; (+) strand; PAM type: NAAAAC; PAM sequence: AAAAAC
tttgataaacactttagtat

SEQ ID NO: 5891 - DNA, 20 bp, Artificial Sequence
  Description of Artificial Sequence: Synthetic oligonucleotide
  Target: SCNA; (+) strand; PAM type: NAAAAC; PAM sequence: TAAAAC
ttgtaacatcatcttggcta

SEQ ID NO: 5892 - DNA, 20 bp, Artificial Sequence
  Description of Artificial Sequence: Synthetic oligonucleotide
  Target: SCNA; (+) strand; PAM type: NAAAAC; PAM sequence: TAAAAC
ttctttttgtcttccaagaa

SEQ ID NO: 5893 - DNA, 20 bp, Artificial Sequence
  Description of Artificial Sequence: Synthetic oligonucleotide
  Target: SCNA; (-) strand; PAM type: NNAGAAW; PAM sequence: TGAGAAT
tgtgttttcactgcccatgg

SEQ ID NO: 5894 - DNA, 20 bp, Artificial Sequence
  Description of Artificial Sequence: Synthetic oligonucleotide
  Target: SCNA; (-) strand; PAM type: NNAGAAW; PAM sequence: TGAGAAA
atgggcaaaagggtaacagc

SEQ ID NO: 5895 - DNA, 20 bp, Artificial Sequence
  Description of Artificial Sequence: Synthetic oligonucleotide
  Target: SCNA; (-) strand; PAM type: NNAGAAW; PAM sequence: TTAGAAA
ggagtgtccatgttgaatga

SEQ ID NO: 5896 - DNA, 20 bp, Artificial Sequence
  Description of Artificial Sequence: Synthetic oligonucleotide
  Target: SCNA; (-) strand; PAM type: NNAGAAW; PAM sequence: GCAGAAA
ctacctaggaattgagagta

SEQ ID NO: 5897 - DNA, 20 bp, Artificial Sequence
  Description of Artificial Sequence: Synthetic oligonucleotide
  Target: SCNA; (-) strand; PAM type: NNAGAAW; PAM sequence: CAAGAAA
accagcaattacaatatttc

SEQ ID NO: 5898 - DNA, 20 bp, Artificial Sequence
  Description of Artificial Sequence: Synthetic oligonucleotide
  Target: SCNA; (-) strand; PAM type: NNAGAAW; PAM sequence: AAAGAAA
acagagtattatcaactaca

SEQ ID NO: 5899 - DNA, 20 bp, Artificial Sequence
  Description of Artificial Sequence: Synthetic oligonucleotide
  Target: SCNA; (-) strand; PAM type: NNAGAAW; PAM sequence: CTAGAAA
actgagtattgttctggtaa

SEQ ID NO: 5900 - DNA, 20 bp, Artificial Sequence
  Description of Artificial Sequence: Synthetic oligonucleotide
  Target: SCNA; (-) strand; PAM type: NNAGAAW; PAM sequence: TAAGAAA
acctagcaccaaaaagaaat

SEQ ID NO: 5901 - DNA, 20 bp, Artificial Sequence
  Description of Artificial Sequence: Synthetic oligonucleotide
  Target: SCNA; (-) strand; PAM type: NNAGAAW; PAM sequence: AAAGAAA
agaatatcacctagcaccaa

SEQ ID NO: 5902 - DNA, 20 bp, Artificial Sequence
  Description of Artificial Sequence: Synthetic oligonucleotide
  Target: SCNA; (-) strand; PAM type: NNAGAAW; PAM sequence: GCAGAAT
actatacttatgtgtactta

SEQ ID NO: 5903 - DNA, 20 bp, Artificial Sequence
  Description of Artificial Sequence: Synthetic oligonucleotide
  Target: SCNA; (-) strand; PAM type: NNAGAAW; PAM sequence: TAAGAAA
actgtatttttaaaggtaaa

SEQ ID NO: 5904 - DNA, 20 bp, Artificial Sequence
  Description of Artificial Sequence: Synthetic oligonucleotide
  Target: SCNA; (-) strand; PAM type: NNAGAAW; PAM sequence: CTAGAAT
aagaatacaatactctttac

SEQ ID NO: 5905 - DNA, 20 bp, Artificial Sequence
  Description of Artificial Sequence: Synthetic oligonucleotide
  Target: SCNA; (-) strand; PAM type: NNAGAAW; PAM sequence: AAAGAAT
agtcatgtttttatcttaga

SEQ ID NO: 5906 - DNA, 20 bp, Artificial Sequence
  Description of Artificial Sequence: Synthetic oligonucleotide
  Target: SCNA; (-) strand; PAM type: NNAGAAW; PAM sequence: TTAGAAA
tagcaagtcatgtttttatc

SEQ ID NO: 5907 - DNA, 20 bp, Artificial Sequence
  Description of Artificial Sequence: Synthetic oligonucleotide
  Target: SCNA; (-) strand; PAM type: NNAGAAW; PAM sequence: CCAGAAA
attccctggaaggtcagtga

SEQ ID NO: 5908 - DNA, 20 bp, Artificial Sequence
  Description of Artificial Sequence: Synthetic oligonucleotide
  Target: SCNA; (-) strand; PAM type: NNAGAAW; PAM sequence: CTAGAAT
taatttggttttaaaattgg

SEQ ID NO: 5909 - DNA, 20 bp, Artificial Sequence
  Description of Artificial Sequence: Synthetic oligonucleotide
  Target: SCNA; (-) strand; PAM type: NNAGAAW; PAM sequence: ATAGAAT
attgaagaacccaaaatgca

SEQ ID NO: 5910 - DNA, 20 bp, Artificial Sequence
  Description of Artificial Sequence: Synthetic oligonucleotide
  Target: SCNA; (-) strand; PAM type: NNAGAAW; PAM sequence: CTAGAAT
gttttatcctttgagtaagc

SEQ ID NO: 5911 - DNA, 20 bp, Artificial Sequence
  Description of Artificial Sequence: Synthetic oligonucleotide
  Target: SCNA; (-) strand; PAM type: NNAGAAW; PAM sequence: TAAGAAT
agatagtaaagggcatgaat

SEQ ID NO: 5912 - DNA, 20 bp, Artificial Sequence
  Description of Artificial Sequence: Synthetic oligonucleotide
  Target: SCNA; (-) strand; PAM type: NNAGAAW; PAM sequence: AGAGAAA
ggccaagatttctaattcta

SEQ ID NO: 5913 - DNA, 20 bp, Artificial Sequence
  Description of Artificial Sequence: Synthetic oligonucleotide
  Target: SCNA; (-) strand; PAM type: NNAGAAW; PAM sequence: AAAGAAA
ttgtttttcttcaggtacct

SEQ ID NO: 5914 - DNA, 20 bp, Artificial Sequence
  Description of Artificial Sequence: Synthetic oligonucleotide
  Target: SCNA; (-) strand; PAM type: NNAGAAW; PAM sequence: TAAGAAA
agtgaggacacacagctatt

SEQ ID NO: 5915 - DNA, 20 bp, Artificial Sequence
  Description of Artificial Sequence: Synthetic oligonucleotide
  Target: SCNA; (-) strand; PAM type: NNAGAAW; PAM sequence: GAAGAAA
ctgtctaaatccatactgag

SEQ ID NO: 5916 - DNA, 20 bp, Artificial Sequence
  Description of Artificial Sequence: Synthetic oligonucleotide
  Target: SCNA; (-) strand; PAM type: NNAGAAW; PAM sequence: AAAGAAA
tgttgtgagtgagtgtatag

SEQ ID NO: 5917 - DNA, 20 bp, Artificial Sequence
  Description of Artificial Sequence: Synthetic oligonucleotide
  Target: SCNA; (-) strand; PAM type: NNAGAAW; PAM sequence: ATAGAAA
tgagtgttgtgagtgagtgt

SEQ ID NO: 5918 - DNA, 20 bp, Artificial Sequence
  Description of Artificial Sequence: Synthetic oligonucleotide
  Target: SCNA; (-) strand; PAM type: NNAGAAW; PAM sequence: TCAGAAA
ccccacacacacatgtggtg

SEQ ID NO: 5919 - DNA, 20 bp, Artificial Sequence
  Description of Artificial Sequence: Synthetic oligonucleotide
  Target: SCNA; (-) strand; PAM type: NNAGAAW; PAM sequence: GTAGAAA
gaatgggagaattgcttggt

SEQ ID NO: 5920 - DNA, 20 bp, Artificial Sequence
  Description of Artificial Sequence: Synthetic oligonucleotide
  Target: SCNA; (-) strand; PAM type: NNAGAAW; PAM sequence: GGAGAAT
gttggtagccacaaagaatg

SEQ ID NO: 5921 - DNA, 20 bp, Artificial Sequence
  Description of Artificial Sequence: Synthetic oligonucleotide
  Target: SCNA; (-) strand; PAM type: NNAGAAW; PAM sequence: AAAGAAT
gacacccagttggtagccac

SEQ ID NO: 5922 - DNA, 20 bp, Artificial Sequence
  Description of Artificial Sequence: Synthetic oligonucleotide
  Target: SCNA; (-) strand; PAM type: NNAGAAW; PAM sequence: CCAGAAA
tcctggatgggggctggtca

SEQ ID NO: 5923 - DNA, 20 bp, Artificial Sequence
  Description of Artificial Sequence: Synthetic oligonucleotide
  Target: SCNA; (-) strand; PAM type: NNAGAAW; PAM sequence: TCAGAAT
tattccaagtggggtctttt

SEQ ID NO: 5924 - DNA, 20 bp, Artificial Sequence
  Description of Artificial Sequence: Synthetic oligonucleotide
  Target: SCNA; (-) strand; PAM type: NNAGAAW; PAM sequence: TAAGAAA
taaaagtattggtattaaat

SEQ ID NO: 5925 - DNA, 20 bp, Artificial Sequence
  Description of Artificial Sequence: Synthetic oligonucleotide
  Target: SCNA; (-) strand; PAM type: NNAGAAW; PAM sequence: TTAGAAA
aacagtatatttcaggaagg

SEQ ID NO: 5926 - DNA, 20 bp, Artificial Sequence
  Description of Artificial Sequence: Synthetic oligonucleotide
  Target: SCNA; (-) strand; PAM type: NNAGAAW; PAM sequence: AGAGAAA
catgtgtcatcttacactag

SEQ ID NO: 5927 - DNA, 20 bp, Artificial Sequence
  Description of Artificial Sequence: Synthetic oligonucleotide
  Target: SCNA; (-) strand; PAM type: NNAGAAW; PAM sequence: ATAGAAA
tgactataaggatggttacc

SEQ ID NO: 5928 - DNA, 20 bp, Artificial Sequence
  Description of Artificial Sequence: Synthetic oligonucleotide
  Target: SCNA; (-) strand; PAM type: NNAGAAW; PAM sequence: ACAGAAT
gtagaaagtataatttcaag

SEQ ID NO: 5929 - DNA, 20 bp, Artificial Sequence
  Description of Artificial Sequence: Synthetic oligonucleotide
  Target: SCNA; (-) strand; PAM type: NNAGAAW; PAM sequence: GTAGAAA
gtcatttctaaaagtcacta

SEQ ID NO: 5930 - DNA, 20 bp, Artificial Sequence
  Description of Artificial Sequence: Synthetic oligonucleotide
  Target: SCNA; (-) strand; PAM type: NNAGAAW; PAM sequence: TCAGAAA
tcactttttttttttaatca

SEQ ID NO: 5931 - DNA, 20 bp, Artificial Sequence
  Description of Artificial Sequence: Synthetic oligonucleotide
  Target: SCNA; (-) strand; PAM type: NNAGAAW; PAM sequence: AGAGAAT
ttagcacattcaaggctctg

SEQ ID NO: 5932 - DNA, 20 bp, Artificial Sequence
  Description of Artificial Sequence: Synthetic oligonucleotide
  Target: SCNA; (-) strand; PAM type: NNAGAAW; PAM sequence: AGAGAAA
ggaggaattttagaagaggt

SEQ ID NO: 5933 - DNA, 20 bp, Artificial Sequence
  Description of Artificial Sequence: Synthetic oligonucleotide
  Target: SCNA; (-) strand; PAM type: NNAGAAW; PAM sequence: TGAGAAT
ttgtgtttgtatataaatgg

SEQ ID NO: 5934 - DNA, 20 bp, Artificial Sequence
  Description of Artificial Sequence: Synthetic oligonucleotide
  Target: SCNA; (-) strand; PAM type: NNAGAAW; PAM sequence: TAAGAAT
tgtcttttaatgatactgtc

SEQ ID NO: 5935 - DNA, 20 bp, Artificial Sequence
  Description of Artificial Sequence: Synthetic oligonucleotide
  Target: SCNA; (-) strand; PAM type: NNAGAAW; PAM sequence: TAAGAAA
aagactacgaacctgaagcc

SEQ ID NO: 5936 - DNA, 20 bp, Artificial Sequence
  Description of Artificial Sequence: Synthetic oligonucleotide
  Target: SCNA; (-) strand; PAM type: NNAGAAW; PAM sequence: GCAGAAT
aaaataagataatatttgct

SEQ ID NO: 5937 - DNA, 20 bp, Artificial Sequence
  Description of Artificial Sequence: Synthetic oligonucleotide
  Target: SCNA; (-) strand; PAM type: NNAGAAW; PAM sequence: CAAGAAA
taattcacttttatatcaga

SEQ ID NO: 5938 - DNA, 20 bp, Artificial Sequence
  Description of Artificial Sequence: Synthetic oligonucleotide
  Target: SCNA; (-) strand; PAM type: NNAGAAW; PAM sequence: GAAGAAA
tgttctcacattttacaggt

SEQ ID NO: 5939 - DNA, 20 bp, Artificial Sequence
  Description of Artificial Sequence: Synthetic oligonucleotide
  Target: SCNA; (-) strand; PAM type: NNAGAAW; PAM sequence: TGAGAAT
caaacatcttaatttccttc

SEQ ID NO: 5940 - DNA, 20 bp, Artificial Sequence
  Description of Artificial Sequence: Synthetic oligonucleotide
  Target: SCNA; (-) strand; PAM type: NNAGAAW; PAM sequence: GCAGAAT
gcttatttgtttgtttttaa

SEQ ID NO: 5941 - DNA, 20 bp, Artificial Sequence
  Description of Artificial Sequence: Synthetic oligonucleotide
  Target: SCNA; (-) strand; PAM type: NNAGAAW; PAM sequence: TCAGAAA
catttcagcttgtattctat

SEQ ID NO: 5942 - DNA, 20 bp, Artificial Sequence
  Description of Artificial Sequence: Synthetic oligonucleotide
  Target: SCNA; (-) strand; PAM type: NNAGAAW; PAM sequence: ATAGAAA
ggtaggtttgatgaaaaaaa

SEQ ID NO: 5943 - DNA, 20 bp, Artificial Sequence
  Description of Artificial Sequence: Synthetic oligonucleotide
  Target: SCNA; (-) strand; PAM type: NNAGAAW; PAM sequence: TAAGAAT
taaattgtttgtttgcctaa

SEQ ID NO: 5944 - DNA, 20 bp, Artificial Sequence
  Description of Artificial Sequence: Synthetic oligonucleotide
  Target: SCNA; (-) strand; PAM type: NNAGAAW; PAM sequence: ATAGAAA
tattgataataattcaactt

SEQ ID NO: 5945 - DNA, 20 bp, Artificial Sequence
  Description of Artificial Sequence: Synthetic oligonucleotide
  Target: SCNA; (-) strand; PAM type: NNAGAAW; PAM sequence: AAAGAAA
caaatgaagatatcacaaga

SEQ ID NO: 5946 - DNA, 20 bp, Artificial Sequence
  Description of Artificial Sequence: Synthetic oligonucleotide
  Target: SCNA; (-) strand; PAM type: NNAGAAW; PAM sequence: CAAGAAA
aaaaccaaatgaagatatca

SEQ ID NO: 5947 - DNA, 20 bp, Artificial Sequence
  Description of Artificial Sequence: Synthetic oligonucleotide
  Target: SCNA; (-) strand; PAM type: NNAGAAW; PAM sequence: AAAGAAA
aaaaaaaaaaacctacctgc

SEQ ID NO: 5948 - DNA, 20 bp, Artificial Sequence
  Description of Artificial Sequence: Synthetic oligonucleotide
  Target: SCNA; (-) strand; PAM type: NNAGAAW; PAM sequence: GAAGAAA
gatgaataaaactggcccaa

SEQ ID NO: 5949 - DNA, 20 bp, Artificial Sequence
  Description of Artificial Sequence: Synthetic oligonucleotide
  Target: SCNA; (-) strand; PAM type: NNAGAAW; PAM sequence: TTAGAAA
aaaatgtatcaaaagggaaa

SEQ ID NO: 5950 - DNA, 20 bp, Artificial Sequence
  Description of Artificial Sequence: Synthetic oligonucleotide
  Target: SCNA; (-) strand; PAM type: NNAGAAW; PAM sequence: ATAGAAA
tgaaaatgaaagtatcttta

SEQ ID NO: 5951 - DNA, 20 bp, Artificial Sequence
  Description of Artificial Sequence: Synthetic oligonucleotide
  Target: SCNA; (-) strand; PAM type: NNAGAAW; PAM sequence: ATAGAAT
aaaagttacccacacaagtt

SEQ ID NO: 5952 - DNA, 20 bp, Artificial Sequence
  Description of Artificial Sequence: Synthetic oligonucleotide
  Target: SCNA; (-) strand; PAM type: NNAGAAW; PAM sequence: TTAGAAA
ctgcattagagaatatattt

SEQ ID NO: 5953 - DNA, 20 bp, Artificial Sequence
  Description of Artificial Sequence: Synthetic oligonucleotide
  Target: SCNA; (-) strand; PAM type: NNAGAAW; PAM sequence: AGAGAAT
agtttactaacccctgcatt

SEQ ID NO: 5954 - DNA, 20 bp, Artificial Sequence
  Description of Artificial Sequence: Synthetic oligonucleotide
  Target: SCNA; (-) strand; PAM type: NNAGAAW; PAM sequence: AAAGAAA
gaagaggaagaaaggatgta

SEQ ID NO: 5955 - DNA, 20 bp, Artificial Sequence
  Description of Artificial Sequence: Synthetic oligonucleotide
  Target: SCNA; (-) strand; PAM type: NNAGAAW; PAM sequence: GAAGAAA
aggaggaagatgaagaagag

SEQ ID NO: 5956 - DNA, 20 bp, Artificial Sequence
  Description of Artificial Sequence: Synthetic oligonucleotide
  Target: SCNA; (-) strand; PAM type: NNAGAAW; PAM sequence: TAAGAAT
tacgtggacaacttgcaagt

SEQ ID NO: 5957 - DNA, 20 bp, Artificial Sequence
  Description of Artificial Sequence: Synthetic oligonucleotide
  Target: SCNA; (-) strand; PAM type: NNAGAAW; PAM sequence: TGAGAAT
tctctttcattagtgcttag

SEQ ID NO: 5958 - DNA, 20 bp, Artificial Sequence
  Description of Artificial Sequence: Synthetic oligonucleotide
  Target: SCNA; (-) strand; PAM type: NNAGAAW; PAM sequence: TTAGAAT
tgtgcttcttactttaaata

SEQ ID NO: 5959 - DNA, 20 bp, Artificial Sequence
  Description of Artificial Sequence: Synthetic oligonucleotide
  Target: SCNA; (-) strand; PAM type: NNAGAAW; PAM sequence: TTAGAAT
ccccggaggcattgtggagt

SEQ ID NO: 5960 - DNA, 20 bp, Artificial Sequence
  Description of Artificial Sequence: Synthetic oligonucleotide
  Target: SCNA; (-) strand; PAM type: NNAGAAW; PAM sequence: CTAGAAT
gtctccctctgtcacccagg

SEQ ID NO: 5961 - DNA, 20 bp, Artificial Sequence
  Description of Artificial Sequence: Synthetic oligonucleotide
  Target: SCNA; (-) strand; PAM type: NNAGAAW; PAM sequence: TTAGAAA
tggttataaaagttaaacac

SEQ ID NO: 5962 - DNA, 20 bp, Artificial Sequence
  Description of Artificial Sequence: Synthetic oligonucleotide
  Target: SCNA; (-) strand; PAM type: NNAGAAW; PAM sequence: AAAGAAT
ctcagtcttcaaatttcaga

SEQ ID NO: 5963 - DNA, 20 bp, Artificial Sequence
  Description of Artificial Sequence: Synthetic oligonucleotide
  Target: SCNA; (-) strand; PAM type: NNAGAAW; PAM sequence: TCAGAAA
atagtctcagtcttcaaatt

SEQ ID NO: 5964 - DNA, 20 bp, Artificial Sequence
  Description of Artificial Sequence: Synthetic oligonucleotide
  Target: SCNA; (-) strand; PAM type: NNAGAAW; PAM sequence: CTAGAAA
ctttgtctaggaagagatac

SEQ ID NO: 5965 - DNA, 20 bp, Artificial Sequence
  Description of Artificial Sequence: Synthetic oligonucleotide
  Target: SCNA; (-) strand; PAM type: NNAGAAW; PAM sequence: GAAGAAT
agcaacaaaaggtatttagt

SEQ ID NO: 5966 - DNA, 20 bp, Artificial Sequence
  Description of Artificial Sequence: Synthetic oligonucleotide
  Target: SCNA; (-) strand; PAM type: NNAGAAW; PAM sequence: GCAGAAT
taaaaagggcattggcaagg

SEQ ID NO: 5967 - DNA, 20 bp, Artificial Sequence
  Description of Artificial Sequence: Synthetic oligonucleotide
  Target: SCNA; (-) strand; PAM type: NNAGAAW; PAM sequence: TCAGAAA
tcactaagactaattgacac

SEQ ID NO: 5968 - DNA, 20 bp, Artificial Sequence
  Description of Artificial Sequence: Synthetic oligonucleotide
  Target: SCNA; (-) strand; PAM type: NNAGAAW; PAM sequence: TGAGAAA
aacagtaatctaaatattaa

SEQ ID NO: 5969 - DNA, 20 bp, Artificial Sequence
  Description of Artificial Sequence: Synthetic oligonucleotide
  Target: SCNA; (-) strand; PAM type: NNAGAAW; PAM sequence: TTAGAAA
aaattttctaacaaattata

SEQ ID NO: 5970 - DNA, 20 bp, Artificial Sequence
  Description of Artificial Sequence: Synthetic oligonucleotide
  Target: SCNA; (-) strand; PAM type: NNAGAAW; PAM sequence: TAAGAAA
atgtgagctatatatacgtt

SEQ ID NO: 5971 - DNA, 20 bp, Artificial Sequence
  Description of Artificial Sequence: Synthetic oligonucleotide
  Target: SCNA; (-) strand; PAM type: NNAGAAW; PAM sequence: CAAGAAT
cattggctaattgatataag

SEQ ID NO: 5972 - DNA, 20 bp, Artificial Sequence
  Description of Artificial Sequence: Synthetic oligonucleotide
  Target: SCNA; (-) strand; PAM type: NNAGAAW; PAM sequence: CTAGAAT
ccctattgtcgatttggact

SEQ ID NO: 5973 - DNA, 20 bp, Artificial Sequence
  Description of Artificial Sequence: Synthetic oligonucleotide
  Target: SCNA; (-) strand; PAM type: NNAGAAW; PAM sequence: TGAGAAT
tgcttatgtagggttcccaa

SEQ ID NO: 5974 - DNA, 20 bp, Artificial Sequence
  Description of Artificial Sequence: Synthetic oligonucleotide
  Target: SCNA; (-) strand; PAM type: NNAGAAW; PAM sequence: AAAGAAA
tgcaatatatcatcacacct

SEQ ID NO: 5975 - DNA, 20 bp, Artificial Sequence
  Description of Artificial Sequence: Synthetic oligonucleotide
  Target: SCNA; (-) strand; PAM type: NNAGAAW; PAM sequence: TCAGAAA
aacaaatttagatcacatat

SEQ ID NO: 5976 - DNA, 20 bp, Artificial Sequence
  Description of Artificial Sequence: Synthetic oligonucleotide
  Target: SCNA; (-) strand; PAM type: NNAGAAW; PAM sequence: TTAGAAA
ctttatagataacaatgttt

SEQ ID NO: 5977 - DNA, 20 bp, Artificial Sequence
  Description of Artificial Sequence: Synthetic oligonucleotide
  Target: SCNA; (-) strand; PAM type: NNAGAAW; PAM sequence: TGAGAAA
ataatatcataatgaaaatt

SEQ ID NO: 5978 - DNA, 20 bp, Artificial Sequence
  Description of Artificial Sequence: Synthetic oligonucleotide
  Target: SCNA; (-) strand; PAM type: NNAGAAW; PAM sequence: AGAGAAT
agggatagggcctagtagag

SEQ ID NO: 5979 - DNA, 20 bp, Artificial Sequence
  Description of Artificial Sequence: Synthetic oligonucleotide
  Target: SCNA; (-) strand; PAM type: NNAGAAW; PAM sequence: GGAGAAA
aacttgaataagctttttag

SEQ ID NO: 5980 - DNA, 20 bp, Artificial Sequence
  Description of Artificial Sequence: Synthetic oligonucleotide
  Target: SCNA; (-) strand; PAM type: NNAGAAW; PAM sequence: ACAGAAA
tgaataaagataatttcctt

SEQ ID NO: 5981 - DNA, 20 bp, Artificial Sequence
  Description of Artificial Sequence: Synthetic oligonucleotide
  Target: SCNA; (-) strand; PAM type: NNAGAAW; PAM sequence: ATAGAAT
taaaattaaagttataagtc

SEQ ID NO: 5982 - DNA, 20 bp, Artificial Sequence
  Description of Artificial Sequence: Synthetic oligonucleotide
  Target: SCNA; (-) strand; PAM type: NNAGAAW; PAM sequence: TTAGAAA
tcccacataaaagttttaat

SEQ ID NO: 5983 - DNA, 20 bp, Artificial Sequence
  Description of Artificial Sequence: Synthetic oligonucleotide
  Target: SCNA; (-) strand; PAM type: NNAGAAW; PAM sequence: CAAGAAA
agcctgggaggaaaagcatt

SEQ ID NO: 5984 - DNA, 20 bp, Artificial Sequence
  Description of Artificial Sequence: Synthetic oligonucleotide
  Target: SCNA; (-) strand; PAM type: NNAGAAW; PAM sequence: AGAGAAA
gtgtaaaagcagtgggcaaa

SEQ ID NO: 5985 - DNA, 20 bp, Artificial Sequence
  Description of Artificial Sequence: Synthetic oligonucleotide
  Target: SCNA; (-) strand; PAM type: NNAGAAW; PAM sequence: AGAGAAT
cctgtctgaggtagagaagt

SEQ ID NO: 5986 - DNA, 20 bp, Artificial Sequence
  Description of Artificial Sequence: Synthetic oligonucleotide
  Target: SCNA; (-) strand; PAM type: NNAGAAW; PAM sequence: ATAGAAA
gagcagactaggaattgata

SEQ ID NO: 5987 - DNA, 20 bp, Artificial Sequence
  Description of Artificial Sequence: Synthetic oligonucleotide
  Target: SCNA; (-) strand; PAM type: NNAGAAW; PAM sequence: AGAGAAA
gcagaggatttatgacctca

SEQ ID NO: 5988 - DNA, 20 bp, Artificial Sequence
  Description of Artificial Sequence: Synthetic oligonucleotide
  Target: SCNA; (-) strand; PAM type: NNAGAAW; PAM sequence: ACAGAAT
tttctatggcttctcatgtg

SEQ ID NO: 5989 - DNA, 20 bp, Artificial Sequence
  Description of Artificial Sequence: Synthetic oligonucleotide
  Target: SCNA; (-) strand; PAM type: NNAGAAW; PAM sequence: ATAGAAT
tttgatgcatttctaaagtt

SEQ ID NO: 5990 - DNA, 20 bp, Artificial Sequence
  Description of Artificial Sequence: Synthetic oligonucleotide
  Target: SCNA; (-) strand; PAM type: NNAGAAW; PAM sequence: TCAGAAA
cctttcgtctgcatattgcc

SEQ ID NO: 5991 - DNA, 20 bp, Artificial Sequence
  Description of Artificial Sequence: Synthetic oligonucleotide
  Target: SCNA; (-) strand; PAM type: NNAGAAW; PAM sequence: ATAGAAA
caggttagtagaaaatgttg

SEQ ID NO: 5992 - DNA, 20 bp, Artificial Sequence
  Description of Artificial Sequence: Synthetic oligonucleotide
  Target: SCNA; (-) strand; PAM type: NNAGAAW; PAM sequence: GTAGAAA
ggcatgtcttttacaggtta

SEQ ID NO: 5993 - DNA, 20 bp, Artificial Sequence
  Description of Artificial Sequence: Synthetic oligonucleotide
  Target: SCNA; (-) strand; PAM type: NNAGAAW; PAM sequence: AAAGAAA
gagagcaagtccatttgccg

SEQ ID NO: 5994 - DNA, 20 bp, Artificial Sequence
  Description of Artificial Sequence: Synthetic oligonucleotide
  Target: SCNA; (-) strand; PAM type: NNAGAAW; PAM sequence: CAAGAAA
acagctagaagggcaaaaga

SEQ ID NO: 5995 - DNA, 20 bp, Artificial Sequence
  Description of Artificial Sequence: Synthetic oligonucleotide
  Target: SCNA; (-) strand; PAM type: NNAGAAW; PAM sequence: AAAGAAA
ctaaggtgattgccaagact

SEQ ID NO: 5996 - DNA, 20 bp, Artificial Sequence
  Description of Artificial Sequence: Synthetic oligonucleotide
  Target: SCNA; (-) strand; PAM type: NNAGAAW; PAM sequence: GGAGAAT
ctactcgggaggctgaagca

SEQ ID NO: 5997 - DNA, 20 bp, Artificial Sequence
  Description of Artificial Sequence: Synthetic oligonucleotide
  Target: SCNA; (-) strand; PAM type: NNAGAAW; PAM sequence: ATAGAAT
acaatgagagaatttacaag

SEQ ID NO: 5998 - DNA, 20 bp, Artificial Sequence
  Description of Artificial Sequence: Synthetic oligonucleotide
  Target: SCNA; (-) strand; PAM type: NNAGAAW; PAM sequence: AGAGAAT
tgtgacaaaacttaacaatg

SEQ ID NO: 5999 - DNA, 20 bp, Artificial Sequence
  Description of Artificial Sequence: Synthetic oligonucleotide
  Target: SCNA; (-) strand; PAM type: NNAGAAW; PAM sequence: AAAGAAA
aaacattttctaggtaactg

SEQ ID NO: 6000 - DNA, 20 bp, Artificial Sequence
  Description of Artificial Sequence: Synthetic oligonucleotide
  Target: SCNA; (-) strand; PAM type: NNAGAAW; PAM sequence: AGAGAAA
aggcatggatagaggttttc

SEQ ID NO: 6001 - DNA, 20 bp, Artificial Sequence
  Description of Artificial Sequence: Synthetic oligonucleotide
  Target: SCNA; (-) strand; PAM type: NNAGAAW; PAM sequence: TAAGAAT
gtccgaataacacagaaaag

SEQ ID NO: 6002 - DNA, 20 bp, Artificial Sequence
  Description of Artificial Sequence: Synthetic oligonucleotide
  Target: SCNA; (-) strand; PAM type: NNAGAAW; PAM sequence: ACAGAAA
ttattccatgtccgaataac

SEQ ID NO: 6003 - DNA, 20 bp, Artificial Sequence
  Description of Artificial Sequence: Synthetic oligonucleotide
  Target: SCNA; (-) strand; PAM type: NNAGAAW; PAM sequence: CCAGAAA
caataatggaaaggtctaaa

SEQ ID NO: 6004 - DNA, 20 bp, Artificial Sequence
  Description of Artificial Sequence: Synthetic oligonucleotide
  Target: SCNA; (-) strand; PAM type: NNAGAAW; PAM sequence: TAAGAAA
tagtatctctagtgtaatgc

SEQ ID NO: 6005 - DNA, 20 bp, Artificial Sequence
  Description of Artificial Sequence: Synthetic oligonucleotide
  Target: SCNA; (-) strand; PAM type: NNAGAAW; PAM sequence: AAAGAAA
atttagtgccaattaaagaa

SEQ ID NO: 6006 - DNA, 20 bp, Artificial Sequence
  Description of Artificial Sequence: Synthetic oligonucleotide
  Target: SCNA; (-) strand; PAM type: NNAGAAW; PAM sequence: AAAGAAA
ataaacatttagtgccaatt

SEQ ID NO: 6007 - DNA, 20 bp, Artificial Sequence
  Description of Artificial Sequence: Synthetic oligonucleotide
  Target: SCNA; (-) strand; PAM type: NNAGAAW; PAM sequence: AAAGAAT
ggatgccttaaaagtaatta

SEQ ID NO: 6008 - DNA, 20 bp, Artificial Sequence
  Description of Artificial Sequence: Synthetic oligonucleotide
  Target: SCNA; (-) strand; PAM type: NNAGAAW; PAM sequence: CCAGAAA
tgagagttcagtaatgtaat

SEQ ID NO: 6009 - DNA, 20 bp, Artificial Sequence
  Description of Artificial Sequence: Synthetic oligonucleotide
  Target: SCNA; (-) strand; PAM type: NNAGAAW; PAM sequence: TCAGAAT
ttctccctttgctacaaaaa

SEQ ID NO: 6010 - DNA, 20 bp, Artificial Sequence
  Description of Artificial Sequence: Synthetic oligonucleotide
  Target: SCNA; (-) strand; PAM type: NNAGAAW; PAM sequence: ACAGAAT
agacaattgcagcattaaat

SEQ ID NO: 6011 - DNA, 20 bp, Artificial Sequence
  Description of Artificial Sequence: Synthetic oligonucleotide
  Target: SCNA; (-) strand; PAM type: NNAGAAW; PAM sequence: TGAGAAA
aagaggacctgtgcacagtt

SEQ ID NO: 6012 - DNA, 20 bp, Artificial Sequence
  Description of Artificial Sequence: Synthetic oligonucleotide
  Target: SCNA; (-) strand; PAM type: NNAGAAW; PAM sequence: CAAGAAA
tgcggcttgaggaatcagtg

SEQ ID NO: 6013 - DNA, 20 bp, Artificial Sequence
  Description of Artificial Sequence: Synthetic oligonucleotide
  Target: SCNA; (-) strand; PAM type: NNAGAAW; PAM sequence: ATAGAAA
atagtgaacagccttggaag

SEQ ID NO: 6014 - DNA, 20 bp, Artificial Sequence
  Description of Artificial Sequence: Synthetic oligonucleotide
  Target: SCNA; (-) strand; PAM type: NNAGAAW; PAM sequence: TAAGAAA
ctctttgctgccttccttcc

SEQ ID NO: 6015 - DNA, 20 bp, Artificial Sequence
  Description of Artificial Sequence: Synthetic oligonucleotide
  Target: SCNA; (-) strand; PAM type: NNAGAAW; PAM sequence: TGAGAAA
ctggactattcaacacactt

SEQ ID NO: 6016 - DNA, 20 bp, Artificial Sequence
  Description of Artificial Sequence: Synthetic oligonucleotide
  Target: SCNA; (-) strand; PAM type: NNAGAAW; PAM sequence: AAAGAAA
tcaaaaattctttgcctgtt

SEQ ID NO: 6017 - DNA, 20 bp, Artificial Sequence
  Description of Artificial Sequence: Synthetic oligonucleotide
  Target: SCNA; (-) strand; PAM type: NNAGAAW; PAM sequence: GGAGAAA
agctggaaagccaccctgga

SEQ ID NO: 6018 - DNA, 20 bp, Artificial Sequence
  Description of Artificial Sequence: Synthetic oligonucleotide
  Target: SCNA; (-) strand; PAM type: NNAGAAW; PAM sequence: TCAGAAA
taaagcaaatacaatatttt

SEQ ID NO: 6019 - DNA, 20 bp, Artificial Sequence
  Description of Artificial Sequence: Synthetic oligonucleotide
  Target: SCNA; (-) strand; PAM type: NNAGAAW; PAM sequence: TAAGAAA
aaattcagagatatcaaaat

SEQ ID NO: 6020 - DNA, 20 bp, Artificial Sequence
  Description of Artificial Sequence: Synthetic oligonucleotide
  Target: SCNA; (-) strand; PAM type: NNAGAAW; PAM sequence: TAAGAAA
tttcaaatattgtatttgcc

SEQ ID NO: 6021 - DNA, 20 bp, Artificial Sequence
  Description of Artificial Sequence: Synthetic oligonucleotide
  Target: SCNA; (-) strand; PAM type: NNAGAAW; PAM sequence: GGAGAAA
gctcaagtctcctgccccag

SEQ ID NO: 6022 - DNA, 20 bp, Artificial Sequence
  Description of Artificial Sequence: Synthetic oligonucleotide
  Target: SCNA; (-) strand; PAM type: NNAGAAW; PAM sequence: GAAGAAA
catctattatgctatgccat

SEQ ID NO: 6023 - DNA, 20 bp, Artificial Sequence
  Description of Artificial Sequence: Synthetic oligonucleotide
  Target: SCNA; (-) strand; PAM type: NNAGAAW; PAM sequence: CCAGAAA
caaagcaatagtcttacctg

SEQ ID NO: 6024 - DNA, 20 bp, Artificial Sequence
  Description of Artificial Sequence: Synthetic oligonucleotide
  Target: SCNA; (-) strand; PAM type: NNAGAAW; PAM sequence: CAAGAAT
gcactctccatgagagcaag

SEQ ID NO: 6025 - DNA, 20 bp, Artificial Sequence
  Description of Artificial Sequence: Synthetic oligonucleotide
  Target: SCNA; (-) strand; PAM type: NNAGAAW; PAM sequence: TTAGAAA
atagagtacataaaccctcc

SEQ ID NO: 6026 - DNA, 20 bp, Artificial Sequence
  Description of Artificial Sequence: Synthetic oligonucleotide
  Target: SCNA; (-) strand; PAM type: NNAGAAW; PAM sequence: GGAGAAA
tagtggtcttgcaaaacatt

SEQ ID NO: 6027 - DNA, 20 bp, Artificial Sequence
  Description of Artificial Sequence: Synthetic oligonucleotide
  Target: SCNA; (-) strand; PAM type: NNAGAAW; PAM sequence: AAAGAAA
aataagtattaagcattggc

SEQ ID NO: 6028 - DNA, 20 bp, Artificial Sequence
  Description of Artificial Sequence: Synthetic oligonucleotide
  Target: SCNA; (-) strand; PAM type: NNAGAAW; PAM sequence: TTAGAAA
gtagaaataaatagagaaat

SEQ ID NO: 6029 - DNA, 20 bp, Artificial Sequence
  Description of Artificial Sequence: Synthetic oligonucleotide
  Target: SCNA; (-) strand; PAM type: NNAGAAW; PAM sequence: AGAGAAA
atgctcaggtagaaataaat

SEQ ID NO: 6030 - DNA, 20 bp, Artificial Sequence
  Description of Artificial Sequence: Synthetic oligonucleotide
  Target: SCNA; (-) strand; PAM type: NNAGAAW; PAM sequence: GTAGAAA
aaaaattaagaaatgctcag

SEQ ID NO: 6031 - DNA, 20 bp, Artificial Sequence
  Description of Artificial Sequence: Synthetic oligonucleotide
  Target: SCNA; (-) strand; PAM type: NNAGAAW; PAM sequence: TAAGAAA
acaggactgaataaaaaaat

SEQ ID NO: 6032 - DNA, 20 bp, Artificial Sequence
  Description of Artificial Sequence: Synthetic oligonucleotide
  Target: SCNA; (-) strand; PAM type: NNAGAAW; PAM sequence: TGAGAAT
agcttttaaaaatcctacag

SEQ ID NO: 6033 - DNA, 20 bp, Artificial Sequence
  Description of Artificial Sequence: Synthetic oligonucleotide
  Target: SCNA; (-) strand; PAM type: NNAGAAW; PAM sequence: GCAGAAA
acagtctttaggtaattaca

SEQ ID NO: 6034 - DNA, 20 bp, Artificial Sequence
  Description of Artificial Sequence: Synthetic oligonucleotide
  Target: SCNA; (-) strand; PAM type: NNAGAAW; PAM sequence: AGAGAAA
attaatgtggtgatctatat

SEQ ID NO: 6035 - DNA, 20 bp, Artificial Sequence
  Description of Artificial Sequence: Synthetic oligonucleotide
  Target: SCNA; (-) strand; PAM type: NNAGAAW; PAM sequence: TCAGAAA
cttttgagaatatctgtata

SEQ ID NO: 6036 - DNA, 20 bp, Artificial Sequence
  Description of Artificial Sequence: Synthetic oligonucleotide
  Target: SCNA; (-) strand; PAM type: NNAGAAW; PAM sequence: TGAGAAT
gtgtgtgtgtgcttgtcttt

SEQ ID NO: 6037 - DNA, 20 bp, Artificial Sequence
  Description of Artificial Sequence: Synthetic oligonucleotide
  Target: SCNA; (-) strand; PAM type: NNAGAAW; PAM sequence: GAAGAAT
tctgttgaaggataatcaac

SEQ ID NO: 6038 - DNA, 20 bp, Artificial Sequence
  Description of Artificial Sequence: Synthetic oligonucleotide
  Target: SCNA; (-) strand; PAM type: NNAGAAW; PAM sequence: ATAGAAA
agacagtggacaaaagaact

SEQ ID NO: 6039 - DNA, 20 bp, Artificial Sequence
  Description of Artificial Sequence: Synthetic oligonucleotide
  Target: SCNA; (-) strand; PAM type: NNAGAAW; PAM sequence: TGAGAAT
agcagttatctttagatgca

SEQ ID NO: 6040 - DNA, 20 bp, Artificial Sequence
  Description of Artificial Sequence: Synthetic oligonucleotide
  Target: SCNA; (-) strand; PAM type: NNAGAAW; PAM sequence: AGAGAAA
gctgcctttttattttctcc

SEQ ID NO: 6041 - DNA, 20 bp, Artificial Sequence
  Description of Artificial Sequence: Synthetic oligonucleotide
  Target: SCNA; (-) strand; PAM type: NNAGAAW; PAM sequence: CAAGAAA
agatttgaaagccccttttg

SEQ ID NO: 6042 - DNA, 20 bp, Artificial Sequence
  Description of Artificial Sequence: Synthetic oligonucleotide
  Target: SCNA; (-) strand; PAM type: NNAGAAW; PAM sequence: TTAGAAA
tccactaaacttttaatggt

SEQ ID NO: 6043 - DNA, 20 bp, Artificial Sequence
  Description of Artificial Sequence: Synthetic oligonucleotide
  Target: SCNA; (-) strand; PAM type: NNAGAAW; PAM sequence: AAAGAAA
tcatctaaaaaaaaaaaaga

SEQ ID NO: 6044 - DNA, 20 bp, Artificial Sequence
  Description of Artificial Sequence: Synthetic oligonucleotide
  Target: SCNA; (-) strand; PAM type: NNAGAAW; PAM sequence: AAAGAAA
agacttcatctaaaaaaaaa

SEQ ID NO: 6045 - DNA, 20 bp, Artificial Sequence
  Description of Artificial Sequence: Synthetic oligonucleotide
  Target: SCNA; (-) strand; PAM type: NNAGAAW; PAM sequence: GGAGAAT
ctactacggaggctgaggca

SEQ ID NO: 6046 - DNA, 20 bp, Artificial Sequence
  Description of Artificial Sequence: Synthetic oligonucleotide
  Target: SCNA; (-) strand; PAM type: NNAGAAW; PAM sequence: AGAGAAA
taaataagtaaaggttatgc

SEQ ID NO: 6047 - DNA, 20 bp, Artificial Sequence
  Description of Artificial Sequence: Synthetic oligonucleotide
  Target: SCNA; (-) strand; PAM type: NNAGAAW; PAM sequence: GGAGAAT
tgctgtagagagagagaatg

SEQ ID NO: 6048 - DNA, 20 bp, Artificial Sequence
  Description of Artificial Sequence: Synthetic oligonucleotide
  Target: SCNA; (-) strand; PAM type: NNAGAAW; PAM sequence: AGAGAAT
aggtgatatgctgtagagag

SEQ ID NO: 6049 - DNA, 20 bp, Artificial Sequence
  Description of Artificial Sequence: Synthetic oligonucleotide
  Target: SCNA; (-) strand; PAM type: NNAGAAW; PAM sequence: CAAGAAA
aaaaagcattctatcacctg

SEQ ID NO: 6050 - DNA, 20 bp, Artificial Sequence
  Description of Artificial Sequence: Synthetic oligonucleotide
  Target: SCNA; (-) strand; PAM type: NNAGAAW; PAM sequence: AAAGAAA
caaacaaacaaacaaacaaa

SEQ ID NO: 6051 - DNA, 20 bp, Artificial Sequence
  Description of Artificial Sequence: Synthetic oligonucleotide
  Target: SCNA; (-) strand; PAM type: NNAGAAW; PAM sequence: TAAGAAA
tttctcatgagaatgagtgc

SEQ ID NO: 6052 - DNA, 20 bp, Artificial Sequence
  Description of Artificial Sequence: Synthetic oligonucleotide
  Target: SCNA; (-) strand; PAM type: NNAGAAW; PAM sequence: TGAGAAT
gttttcagcaatttttctca

SEQ ID NO: 6053 - DNA, 20 bp, Artificial Sequence
  Description of Artificial Sequence: Synthetic oligonucleotide
  Target: SCNA; (-) strand; PAM type: NNAGAAW; PAM sequence: TAAGAAA
gagagtggatagatgctgta

SEQ ID NO: 6054 - DNA, 20 bp, Artificial Sequence
  Description of Artificial Sequence: Synthetic oligonucleotide
  Target: SCNA; (-) strand; PAM type: NNAGAAW; PAM sequence: AGAGAAT
aacagtcaaagaaattctaa

SEQ ID NO: 6055 - DNA, 20 bp, Artificial Sequence
  Description of Artificial Sequence: Synthetic oligonucleotide
  Target: SCNA; (-) strand; PAM type: NNAGAAW; PAM sequence: AAAGAAA
aaagatttatagaaacagtc

SEQ ID NO: 6056 - DNA, 20 bp, Artificial Sequence
  Description of Artificial Sequence: Synthetic oligonucleotide
  Target: SCNA; (-) strand; PAM type: NNAGAAW; PAM sequence: ATAGAAA
tatctgaggaataaagattt

SEQ ID NO: 6057 - DNA, 20 bp, Artificial Sequence
  Description of Artificial Sequence: Synthetic oligonucleotide
  Target: SCNA; (-) strand; PAM type: NNAGAAW; PAM sequence: GTAGAAT
tttaaaataatttagattgt

SEQ ID NO: 6058 - DNA, 20 bp, Artificial Sequence
  Description of Artificial Sequence: Synthetic oligonucleotide
  Target: SCNA; (-) strand; PAM type: NNAGAAW; PAM sequence: AGAGAAA
ataacacatggcaaatagac

SEQ ID NO: 6059 - DNA, 20 bp, Artificial Sequence
  Description of Artificial Sequence: Synthetic oligonucleotide
  Target: SCNA; (-) strand; PAM type: NNAGAAW; PAM sequence: CCAGAAA
cttaagataacagataattg

SEQ ID NO: 6060 - DNA, 20 bp, Artificial Sequence
  Description of Artificial Sequence: Synthetic oligonucleotide
  Target: SCNA; (-) strand; PAM type: NNAGAAW; PAM sequence: AAAGAAT
tatttatactacagttaaaa

SEQ ID NO: 6061 - DNA, 20 bp, Artificial Sequence
  Description of Artificial Sequence: Synthetic oligonucleotide
  Target: SCNA; (-) strand; PAM type: NNAGAAW; PAM sequence: TTAGAAT
taaattgtgaagtgtctatc

SEQ ID NO: 6062 - DNA, 20 bp, Artificial Sequence
  Description of Artificial Sequence: Synthetic oligonucleotide
  Target: SCNA; (-) strand; PAM type: NNAGAAW; PAM sequence: CAAGAAA
tttgctttcatagatgtctt

SEQ ID NO: 6063 - DNA, 20 bp, Artificial Sequence
  Description of Artificial Sequence: Synthetic oligonucleotide
  Target: SCNA; (-) strand; PAM type: NNAGAAW; PAM sequence: TGAGAAA
tttttattttcctggaatac

SEQ ID NO: 6064 - DNA, 20 bp, Artificial Sequence
  Description of Artificial Sequence: Synthetic oligonucleotide
  Target: SCNA; (-) strand; PAM type: NNAGAAW; PAM sequence: TAAGAAA
ccagatcttataagctatag

SEQ ID NO: 6065 - DNA, 20 bp, Artificial Sequence
  Description of Artificial Sequence: Synthetic oligonucleotide
  Target: SCNA; (-) strand; PAM type: NNAGAAW; PAM sequence: CTAGAAT
cataaaagagtcctgattag

SEQ ID NO: 6066 - DNA, 20 bp, Artificial Sequence
  Description of Artificial Sequence: Synthetic oligonucleotide
  Target: SCNA; (-) strand; PAM type: NNAGAAW; PAM sequence: AGAGAAT
gtccagctgtgtgatgagag

SEQ ID NO: 6067 - DNA, 20 bp, Artificial Sequence
  Description of Artificial Sequence: Synthetic oligonucleotide
  Target: SCNA; (-) strand; PAM type: NNAGAAW; PAM sequence: AAAGAAA
attagagagcatgtaacggg

SEQ ID NO: 6068 - DNA, 20 bp, Artificial Sequence
  Description of Artificial Sequence: Synthetic oligonucleotide
  Target: SCNA; (-) strand; PAM type: NNAGAAW; PAM sequence: TTAGAAA
ctgtgctaaaataaagctag

SEQ ID NO: 6069 - DNA, 20 bp, Artificial Sequence
  Description of Artificial Sequence: Synthetic oligonucleotide
  Target: SCNA; (-) strand; PAM type: NNAGAAW; PAM sequence: GGAGAAA
gtgagtgaataaaaatactt

SEQ ID NO: 6070 - DNA, 20 bp, Artificial Sequence
  Description of Artificial Sequence: Synthetic oligonucleotide
  Target: SCNA; (-) strand; PAM type: NNAGAAW; PAM sequence: GGAGAAT
taagtctcacaaagcattta

SEQ ID NO: 6071 - DNA, 20 bp, Artificial Sequence
  Description of Artificial Sequence: Synthetic oligonucleotide
  Target: SCNA; (-) strand; PAM type: NNAGAAW; PAM sequence: TTAGAAA
tgcaatccatcatttactgt

SEQ ID NO: 6072 - DNA, 20 bp, Artificial Sequence
  Description of Artificial Sequence: Synthetic oligonucleotide
  Target: SCNA; (-) strand; PAM type: NNAGAAW; PAM sequence: TTAGAAT
aggtttgcaataacattcat

SEQ ID NO: 6073 - DNA, 20 bp, Artificial Sequence
  Description of Artificial Sequence: Synthetic oligonucleotide
  Target: SCNA; (-) strand; PAM type: NNAGAAW; PAM sequence: AAAGAAA
aaaaaaaaaaaaaagaaaga

SEQ ID NO: 6074 - DNA, 20 bp, Artificial Sequence
  Description of Artificial Sequence: Synthetic oligonucleotide
  Target: SCNA; (-) strand; PAM type: NNAGAAW; PAM sequence: AAAGAAA
tcaaaaaaaaaaaaaaaaag

SEQ ID NO: 6075 - DNA, 20 bp, Artificial Sequence
  Description of Artificial Sequence: Synthetic oligonucleotide
  Target: SCNA; (-) strand; PAM type: NNAGAAW; PAM sequence: AAAGAAA
catctcaaaaaaaaaaaaaa

SEQ ID NO: 6076 - DNA, 20 bp, Artificial Sequence
  Description of Artificial Sequence: Synthetic oligonucleotide
  Target: SCNA; (-) strand; PAM type: NNAGAAW; PAM sequence: GAAGAAT
ctactggggaggctgaggca

SEQ ID NO: 6077 - DNA, 20 bp, Artificial Sequence
  Description of Artificial Sequence: Synthetic oligonucleotide
  Target: SCNA; (-) strand; PAM type: NNAGAAW; PAM sequence: GGAGAAA
aagaccagcttgaccaacat

SEQ ID NO: 6078 - DNA, 20 bp, Artificial Sequence
  Description of Artificial Sequence: Synthetic oligonucleotide
  Target: SCNA; (-) strand; PAM type: NNAGAAW; PAM sequence: GAAGAAT
atggtgcctaaaagatattt

SEQ ID NO: 6079 - DNA, 20 bp, Artificial Sequence
  Description of Artificial Sequence: Synthetic oligonucleotide
  Target: SCNA; (-) strand; PAM type: NNAGAAW; PAM sequence: TGAGAAT
aaatttatgtgctttgggct

SEQ ID NO: 6080 - DNA, 20 bp, Artificial Sequence
  Description of Artificial Sequence: Synthetic oligonucleotide
  Target: SCNA; (-) strand; PAM type: NNAGAAW; PAM sequence: CTAGAAA
gtgcgtcacatttttagtga

SEQ ID NO: 6081 - DNA, 20 bp, Artificial Sequence
  Description of Artificial Sequence: Synthetic oligonucleotide
  Target: SCNA; (-) strand; PAM type: NNAGAAW; PAM sequence: TCAGAAT
tagaatttttataaaccatt

SEQ ID NO: 6082 - DNA, 20 bp, Artificial Sequence
  Description of Artificial Sequence: Synthetic oligonucleotide
  Target: SCNA; (-) strand; PAM type: NNAGAAW; PAM sequence: ATAGAAT
ctcatgaatttcttatagtc

SEQ ID NO: 6083 - DNA, 20 bp, Artificial Sequence
  Description of Artificial Sequence: Synthetic oligonucleotide
  Target: SCNA; (-) strand; PAM type: NNAGAAW; PAM sequence: TTAGAAT
tagctccaacaagcttttgg

SEQ ID NO: 6084 - DNA, 20 bp, Artificial Sequence
  Description of Artificial Sequence: Synthetic oligonucleotide
  Target: SCNA; (-) strand; PAM type: NNAGAAW; PAM sequence: AAAGAAA
cctaaacagctcataaggtg

SEQ ID NO: 6085 - DNA, 20 bp, Artificial Sequence
  Description of Artificial Sequence: Synthetic oligonucleotide
  Target: SCNA; (-) strand; PAM type: NNAGAAW; PAM sequence: AGAGAAT
ggagtattctgtcacacttg

SEQ ID NO: 6086 - DNA, 20 bp, Artificial Sequence
  Description of Artificial Sequence: Synthetic oligonucleotide
  Target: SCNA; (-) strand; PAM type: NNAGAAW; PAM sequence: GGAGAAT
ggtgatgggaaggaattgag

SEQ ID NO: 6087 - DNA, 20 bp, Artificial Sequence
  Description of Artificial Sequence: Synthetic oligonucleotide
  Target: SCNA; (-) strand; PAM type: NNAGAAW; PAM sequence: GGAGAAT
ctactcgggaggctgaggca

SEQ ID NO: 6088 - DNA, 20 bp, Artificial Sequence
  Description of Artificial Sequence: Synthetic oligonucleotide
  Target: SCNA; (-) strand; PAM type: NNAGAAW; PAM sequence: TTAGAAA
ttggtattattgaagcacaa

SEQ ID NO: 6089 - DNA, 20 bp, Artificial Sequence
  Description of Artificial Sequence: Synthetic oligonucleotide
  Target: SCNA; (-) strand; PAM type: NNAGAAW; PAM sequence: AAAGAAT
aactactacctttctcggca

SEQ ID NO: 6090 - DNA, 20 bp, Artificial Sequence
  Description of Artificial Sequence: Synthetic oligonucleotide
  Target: SCNA; (-) strand; PAM type: NNAGAAW; PAM sequence: TTAGAAA
atttatttttaaaagttcag

SEQ ID NO: 6091 - DNA, 20 bp, Artificial Sequence
  Description of Artificial Sequence: Synthetic oligonucleotide
  Target: SCNA; (-) strand; PAM type: NNAGAAW; PAM sequence: TGAGAAA
tgtccattattatggttttg

SEQ ID NO: 6092 - DNA, 20 bp, Artificial Sequence
  Description of Artificial Sequence: Synthetic oligonucleotide
  Target: SCNA; (-) strand; PAM type: NNAGAAW; PAM sequence: AAAGAAA
ttatgtactttgggcttgag

SEQ ID NO: 6093 - DNA, 20 bp, Artificial Sequence
  Description of Artificial Sequence: Synthetic oligonucleotide
  Target: SCNA; (-) strand; PAM type: NNAGAAW; PAM sequence: TGAGAAA
agatttatgtactttgggct

SEQ ID NO: 6094 - DNA, 20 bp, Artificial Sequence
  Description of Artificial Sequence: Synthetic oligonucleotide
  Target: SCNA; (-) strand; PAM type: NNAGAAW; PAM sequence: AGAGAAT
ctttgtcactttattgtagc

SEQ ID NO: 6095 - DNA, 20 bp, Artificial Sequence
  Description of Artificial Sequence: Synthetic oligonucleotide
  Target: SCNA; (-) strand; PAM type: NNAGAAW; PAM sequence: AGAGAAA
caaaaaaaaaaaaaaaaaga

SEQ ID NO: 6096 - DNA, 20 bp, Artificial Sequence
  Description of Artificial Sequence: Synthetic oligonucleotide
  Target: SCNA; (-) strand; PAM type: NNAGAAW; PAM sequence: CTAGAAA
tatattttaaaagttacatg

SEQ ID NO: 6097 - DNA, 20 bp, Artificial Sequence
  Description of Artificial Sequence: Synthetic oligonucleotide
  Target: SCNA; (-) strand; PAM type: NNAGAAW; PAM sequence: TTAGAAA
taaagtgatatctgttggta

SEQ ID NO: 6098 - DNA, 20 bp, Artificial Sequence
  Description of Artificial Sequence: Synthetic oligonucleotide
  Target: SCNA; (-) strand; PAM type: NNAGAAW; PAM sequence: ACAGAAA
catattctatgtcattatat

SEQ ID NO: 6099 - DNA, 20 bp, Artificial Sequence
  Description of Artificial Sequence: Synthetic oligonucleotide
  Target: SCNA; (-) strand; PAM type: NNAGAAW; PAM sequence: AAAGAAA
aacataaaattttcaaccta

SEQ ID NO: 6100 - DNA, 20 bp, Artificial Sequence
  Description of Artificial Sequence: Synthetic oligonucleotide
  Target: SCNA; (-) strand; PAM type: NNAGAAW; PAM sequence: TAAGAAA
ttatccctaaaaagaatcta

SEQ ID NO: 6101 - DNA, 20 bp, Artificial Sequence
  Description of Artificial Sequence: Synthetic oligonucleotide
  Target: SCNA; (-) strand; PAM type: NNAGAAW; PAM sequence: AAAGAAT
aacataattcttatccctaa

SEQ ID NO: 6102 - DNA, 20 bp, Artificial Sequence
  Description of Artificial Sequence: Synthetic oligonucleotide
  Target: SCNA; (-) strand; PAM type: NNAGAAW; PAM sequence: TGAGAAA
cctctttgtcaaaatggaaa

SEQ ID NO: 6103 - DNA, 20 bp, Artificial Sequence
  Description of Artificial Sequence: Synthetic oligonucleotide
  Target: SCNA; (-) strand; PAM type: NNAGAAW; PAM sequence: GGAGAAA
gtctcatgggaactgatatg

SEQ ID NO: 6104 - DNA, 20 bp, Artificial Sequence
  Description of Artificial Sequence: Synthetic oligonucleotide
  Target: SCNA; (-) strand; PAM type: NNAGAAW; PAM sequence: AAAGAAT
atgtaaacctgcaataacag

SEQ ID NO: 6105 - DNA, 20 bp, Artificial Sequence
  Description of Artificial Sequence: Synthetic oligonucleotide
  Target: SCNA; (-) strand; PAM type: NNAGAAW; PAM sequence: ACAGAAA
caaaatgtaaacctgcaata

SEQ ID NO: 6106 - DNA, 20 bp, Artificial Sequence
  Description of Artificial Sequence: Synthetic oligonucleotide
  Target: SCNA; (-) strand; PAM type: NNAGAAW; PAM sequence: CAAGAAT
aatgattgaagatagtgata

SEQ ID NO: 6107 - DNA, 20 bp, Artificial Sequence
  Description of Artificial Sequence: Synthetic oligonucleotide
  Target: SCNA; (-) strand; PAM type: NNAGAAW; PAM sequence: AAAGAAT
gaggtttgagaatgacctgg

SEQ ID NO: 6108 - DNA, 20 bp, Artificial Sequence
  Description of Artificial Sequence: Synthetic oligonucleotide
  Target: SCNA; (-) strand; PAM type: NNAGAAW; PAM sequence: TGAGAAT
atagctttgatatggaggtt

SEQ ID NO: 6109 - DNA, 20 bp, Artificial Sequence
  Description of Artificial Sequence: Synthetic oligonucleotide
  Target: SCNA; (-) strand; PAM type: NNAGAAW; PAM sequence: AAAGAAA
tcagtggtggttattattat

SEQ ID NO: 6110 - DNA, 20 bp, Artificial Sequence
  Description of Artificial Sequence: Synthetic oligonucleotide
  Target: SCNA; (-) strand; PAM type: NNAGAAW; PAM sequence: TGAGAAT
cctcaagttctcatgtgaga

SEQ ID NO: 6111 - DNA, 20 bp, Artificial Sequence
  Description of Artificial Sequence: Synthetic oligonucleotide
  Target: SCNA; (-) strand; PAM type: NNAGAAW; PAM sequence: CTAGAAA
agccagtaaatcacaggggc

SEQ ID NO: 6112 - DNA, 20 bp, Artificial Sequence
  Description of Artificial Sequence: Synthetic oligonucleotide
  Target: SCNA; (-) strand; PAM type: NNAGAAW; PAM sequence: GGAGAAA
tcctcttaagtgacagaaat

SEQ ID NO: 6113 - DNA, 20 bp, Artificial Sequence
  Description of Artificial Sequence: Synthetic oligonucleotide
  Target: SCNA; (-) strand; PAM type: NNAGAAW; PAM sequence: ACAGAAA
ccctaaaatcctcttaagtg

SEQ ID NO: 6114 - DNA, 20 bp, Artificial Sequence
  Description of Artificial Sequence: Synthetic oligonucleotide
  Target: SCNA; (-) strand; PAM type: NNAGAAW; PAM sequence: GCAGAAT
ttgtattacctctgaaagct

SEQ ID NO: 6115 - DNA, 20 bp, Artificial Sequence
  Description of Artificial Sequence: Synthetic oligonucleotide
  Target: SCNA; (-) strand; PAM type: NNAGAAW; PAM sequence: GTAGAAT
aattaaagaagctataacaa

SEQ ID NO: 6116 - DNA, 20 bp, Artificial Sequence
  Description of Artificial Sequence: Synthetic oligonucleotide
  Target: SCNA; (-) strand; PAM type: NNAGAAW; PAM sequence: TAAGAAT
atctcccaaatggagaatga

SEQ ID NO: 6117 - DNA, 20 bp, Artificial Sequence
  Description of Artificial Sequence: Synthetic oligonucleotide
  Target: SCNA; (-) strand; PAM type: NNAGAAW; PAM sequence: GGAGAAT
ctctctcaaatctcccaaat

SEQ ID NO: 6118 - DNA, 20 bp, Artificial Sequence
  Description of Artificial Sequence: Synthetic oligonucleotide
  Target: SCNA; (-) strand; PAM type: NNAGAAW; PAM sequence: GGAGAAA
tttattcagtcacagacaca

SEQ ID NO: 6119 - DNA, 20 bp, Artificial Sequence
  Description of Artificial Sequence: Synthetic oligonucleotide
  Target: SCNA; (-) strand; PAM type: NNAGAAW; PAM sequence: ATAGAAA
cataggcctttggtgtctga

SEQ ID NO: 6120 - DNA, 20 bp, Artificial Sequence
  Description of Artificial Sequence: Synthetic oligonucleotide
  Target: SCNA; (-) strand; PAM type: NNAGAAW; PAM sequence: TAAGAAT
atgtttgctgaggagttgaa

SEQ ID NO: 6121 - DNA, 20 bp, Artificial Sequence
  Description of Artificial Sequence: Synthetic oligonucleotide
  Target: SCNA; (-) strand; PAM type: NNAGAAW; PAM sequence: TCAGAAT
ccctgcatctccagcacctc

SEQ ID NO: 6122 - DNA, 20 bp, Artificial Sequence
  Description of Artificial Sequence: Synthetic oligonucleotide
  Target: SCNA; (-) strand; PAM type: NNAGAAW; PAM sequence: TTAGAAA
ggattacatgatgtgtaaaa

SEQ ID NO: 6123 - DNA, 20 bp, Artificial Sequence
  Description of Artificial Sequence: Synthetic oligonucleotide
  Target: SCNA; (-) strand; PAM type: NNAGAAW; PAM sequence: TAAGAAA
gaaacagtatactttttatc

SEQ ID NO: 6124 - DNA, 20 bp, Artificial Sequence
  Description of Artificial Sequence: Synthetic oligonucleotide
  Target: SCNA; (-) strand; PAM type: NNAGAAW; PAM sequence: GGAGAAT
ctgctcgggaggctaaggca

SEQ ID NO: 6125 - DNA, 20 bp, Artificial Sequence
  Description of Artificial Sequence: Synthetic oligonucleotide
  Target: SCNA; (-) strand; PAM type: NNAGAAW; PAM sequence: GAAGAAT
acttttttcagattttgtta

SEQ ID NO: 6126 - DNA, 20 bp, Artificial Sequence
  Description of Artificial Sequence: Synthetic oligonucleotide
  Target: SCNA; (-) strand; PAM type: NNAGAAW; PAM sequence: GAAGAAT
tgccagttattcatggagga

SEQ ID NO: 6127 - DNA, 20 bp, Artificial Sequence
  Description of Artificial Sequence: Synthetic oligonucleotide
  Target: SCNA; (-) strand; PAM type: NNAGAAW; PAM sequence: ACAGAAT
caacctaatatacaatagaa

SEQ ID NO: 6128 - DNA, 20 bp, Artificial Sequence
  Description of Artificial Sequence: Synthetic oligonucleotide
  Target: SCNA; (-) strand; PAM type: NNAGAAW; PAM sequence: ATAGAAA
atatttcaacctaatataca

SEQ ID NO: 6129 - DNA, 20 bp, Artificial Sequence
  Description of Artificial Sequence: Synthetic oligonucleotide
  Target: SCNA; (-) strand; PAM type: NNAGAAW; PAM sequence: TGAGAAA
ttgccattttggccaggctc

SEQ ID NO: 6130 - DNA, 20 bp, Artificial Sequence
  Description of Artificial Sequence: Synthetic oligonucleotide
  Target: SCNA; (-) strand; PAM type: NNAGAAW; PAM sequence: AGAGAAA
tttttgtgaatagtagaagc

SEQ ID NO: 6131 - DNA, 20 bp, Artificial Sequence
  Description of Artificial Sequence: Synthetic oligonucleotide
  Target: SCNA; (-) strand; PAM type: NNAGAAW; PAM sequence: GGAGAAT
agacgcattttttaaacact

SEQ ID NO: 6132 - DNA, 20 bp, Artificial Sequence
  Description of Artificial Sequence: Synthetic oligonucleotide
  Target: SCNA; (-) strand; PAM type: NNAGAAW; PAM sequence: GAAGAAA
agaggtcctcctcactttca

SEQ ID NO: 6133 - DNA, 20 bp, Artificial Sequence
  Description of Artificial Sequence: Synthetic oligonucleotide
  Target: SCNA; (-) strand; PAM type: NNAGAAW; PAM sequence: CCAGAAA
gaatgattctagaccaaatg

SEQ ID NO: 6134 - DNA, 20 bp, Artificial Sequence
  Description of Artificial Sequence: Synthetic oligonucleotide
  Target: SCNA; (-) strand; PAM type: NNAGAAW; PAM sequence: TCAGAAT
cacagcaccaggcttgccct

SEQ ID NO: 6135 - DNA, 20 bp, Artificial Sequence
  Description of Artificial Sequence: Synthetic oligonucleotide
  Target: SCNA; (-) strand; PAM type: NNAGAAW; PAM sequence: ACAGAAA
aaaaaaatttttaattcagg

SEQ ID NO: 6136 - DNA, 20 bp, Artificial Sequence
  Description of Artificial Sequence: Synthetic oligonucleotide
  Target: SCNA; (-) strand; PAM type: NNAGAAW; PAM sequence: AAAGAAA
ctaacttggagtttaaggtg

SEQ ID NO: 6137 - DNA, 20 bp, Artificial Sequence
  Description of Artificial Sequence: Synthetic oligonucleotide
  Target: SCNA; (-) strand; PAM type: NNAGAAW; PAM sequence: TAAGAAT
aacttccttttaattttttt

SEQ ID NO: 6138 - DNA, 20 bp, Artificial Sequence
  Description of Artificial Sequence: Synthetic oligonucleotide
  Target: SCNA; (-) strand; PAM type: NNAGAAW; PAM sequence: TTAGAAA
attcatttgtcctgcaccgt

SEQ ID NO: 6139 - DNA, 20 bp, Artificial Sequence
  Description of Artificial Sequence: Synthetic oligonucleotide
  Target: SCNA; (-) strand; PAM type: NNAGAAW; PAM sequence: AAAGAAA
ctgtaatttggaaaccaaag

SEQ ID NO: 6140 - DNA, 20 bp, Artificial Sequence
  Description of Artificial Sequence: Synthetic oligonucleotide
  Target: SCNA; (-) strand; PAM type: NNAGAAW; PAM sequence: AAAGAAA
ttcactgtaatttggaaacc

SEQ ID NO: 6141 - DNA, 20 bp, Artificial Sequence
  Description of Artificial Sequence: Synthetic oligonucleotide
  Target: SCNA; (-) strand; PAM type: NNAGAAW; PAM sequence: GAAGAAA
aaattaaaaaagcaaatgct

SEQ ID NO: 6142 - DNA, 20 bp, Artificial Sequence
  Description of Artificial Sequence: Synthetic oligonucleotide
  Target: SCNA; (-) strand; PAM type: NNAGAAW; PAM sequence: ACAGAAA
aaacagaaagaacataccac

SEQ ID NO: 6143 - DNA, 20 bp, Artificial Sequence
  Description of Artificial Sequence: Synthetic oligonucleotide
  Target: SCNA; (-) strand; PAM type: NNAGAAW; PAM sequence: ACAGAAA
ttaatgttattagaaaagaa

SEQ ID NO: 6144 - DNA, 20 bp, Artificial Sequence
  Description of Artificial Sequence: Synthetic oligonucleotide
  Target: SCNA; (-) strand; PAM type: NNAGAAW; PAM sequence: AAAGAAA
tgtaagttaatgttattaga

SEQ ID NO: 6145 - DNA, 20 bp, Artificial Sequence
  Description of Artificial Sequence: Synthetic oligonucleotide
  Target: SCNA; (-) strand; PAM type: NNAGAAW; PAM sequence: TTAGAAA
ttaaatgtaagttaatgtta

SEQ ID NO: 6146 - DNA, 20 bp, Artificial Sequence
  Description of Artificial Sequence: Synthetic oligonucleotide
  Target: SCNA; (-) strand; PAM type: NNAGAAW; PAM sequence: GGAGAAT
ctactcaggcagttgagaaa

SEQ ID NO: 6147 - DNA, 20 bp, Artificial Sequence
  Description of Artificial Sequence: Synthetic oligonucleotide
  Target: SCNA; (-) strand; PAM type: NNAGAAW; PAM sequence: TGAGAAA
atcccagctactcaggcagt

SEQ ID NO: 6148 - DNA, 20 bp, Artificial Sequence
  Description of Artificial Sequence: Synthetic oligonucleotide
  Target: SCNA; (-) strand; PAM type: NNAGAAW; PAM sequence: TTAGAAT
gaaaaagttcaaatataaag

SEQ ID NO: 6149 - DNA, 20 bp, Artificial Sequence
  Description of Artificial Sequence: Synthetic oligonucleotide
  Target: SCNA; (-) strand; PAM type: NNAGAAW; PAM sequence: AAAGAAA
cacttatatgtggaatctaa

SEQ ID NO: 6150 - DNA, 20 bp, Artificial Sequence
  Description of Artificial Sequence: Synthetic oligonucleotide
  Target: SCNA; (-) strand; PAM type: NNAGAAW; PAM sequence: AAAGAAA
tgttggtgcatgaatggata

SEQ ID NO: 6151 - DNA, 20 bp, Artificial Sequence
  Description of Artificial Sequence: Synthetic oligonucleotide
  Target: SCNA; (-) strand; PAM type: NNAGAAW; PAM sequence: TTAGAAT
ggttcctaaagaaattaaaa

SEQ ID NO: 6152 - DNA, 20 bp, Artificial Sequence
  Description of Artificial Sequence: Synthetic oligonucleotide
  Target: SCNA; (-) strand; PAM type: NNAGAAW; PAM sequence: AAAGAAA
acaatagtacggaggttcct

SEQ ID NO: 6153 - DNA, 20 bp, Artificial Sequence
  Description of Artificial Sequence: Synthetic oligonucleotide
  Target: SCNA; (-) strand; PAM type: NNAGAAW; PAM sequence: AGAGAAA
ttaagtgttgataagtgtgt

SEQ ID NO: 6154 - DNA, 20 bp, Artificial Sequence
  Description of Artificial Sequence: Synthetic oligonucleotide
  Target: SCNA; (-) strand; PAM type: NNAGAAW; PAM sequence: AAAGAAA
tattgtttagagaataatga

SEQ ID NO: 6155 - DNA, 20 bp, Artificial Sequence
  Description of Artificial Sequence: Synthetic oligonucleotide
  Target: SCNA; (-) strand; PAM type: NNAGAAW; PAM sequence: AGAGAAT
gtttttatactatattgttt

SEQ ID NO: 6156 - DNA, 20 bp, Artificial Sequence
  Description of Artificial Sequence: Synthetic oligonucleotide
  Target: SCNA; (-) strand; PAM type: NNAGAAW; PAM sequence: CCAGAAA
cagaaaaccagtccctggtg

SEQ ID NO: 6157 - DNA, 20 bp, Artificial Sequence
  Description of Artificial Sequence: Synthetic oligonucleotide
  Target: SCNA; (-) strand; PAM type: NNAGAAW; PAM sequence: CCAGAAA
tgtccgtggaaacatttctt

SEQ ID NO: 6158 - DNA, 20 bp, Artificial Sequence
  Description of Artificial Sequence: Synthetic oligonucleotide
  Target: SCNA; (-) strand; PAM type: NNAGAAW; PAM sequence: TGAGAAT
tctaggttgtgcgctcctta

SEQ ID NO: 6159 - DNA, 20 bp, Artificial Sequence
  Description of Artificial Sequence: Synthetic oligonucleotide
  Target: SCNA; (-) strand; PAM type: NNAGAAW; PAM sequence: TAAGAAT
cagattttgtttttttctgt

SEQ ID NO: 6160 - DNA, 20 bp, Artificial Sequence
  Description of Artificial Sequence: Synthetic oligonucleotide
  Target: SCNA; (-) strand; PAM type: NNAGAAW; PAM sequence: TAAGAAA
ttgtgagaaagaccaggagt

SEQ ID NO: 6161 - DNA, 20 bp, Artificial Sequence
  Description of Artificial Sequence: Synthetic oligonucleotide
  Target: SCNA; (-) strand; PAM type: NNAGAAW; PAM sequence: TGAGAAA
gggactgttttctgtgattg

SEQ ID NO: 6162 - DNA, 20 bp, Artificial Sequence
  Description of Artificial Sequence: Synthetic oligonucleotide
  Target: SCNA; (-) strand; PAM type: NNAGAAW; PAM sequence: AGAGAAA
tgcactccagactgggtgac

SEQ ID NO: 6163 - DNA, 20 bp, Artificial Sequence
  Description of Artificial Sequence: Synthetic oligonucleotide
  Target: SCNA; (-) strand; PAM type: NNAGAAW; PAM sequence: GGAGAAT
ctactcaagaaactgaagca

SEQ ID NO: 6164 - DNA, 20 bp, Artificial Sequence
  Description of Artificial Sequence: Synthetic oligonucleotide
  Target: SCNA; (-) strand; PAM type: NNAGAAW; PAM sequence: CAAGAAA
cgctggtaatcccagctact

SEQ ID NO: 6165 - DNA, 20 bp, Artificial Sequence
  Description of Artificial Sequence: Synthetic oligonucleotide
  Target: SCNA; (-) strand; PAM type: NNAGAAW; PAM sequence: ACAGAAA
aacccatctctactaaaaat

SEQ ID NO: 6166 - DNA, 20 bp, Artificial Sequence
  Description of Artificial Sequence: Synthetic oligonucleotide
  Target: SCNA; (-) strand; PAM type: NNAGAAW; PAM sequence: ACAGAAA
gaagtgcctaaagaattaca

SEQ ID NO: 6167 - DNA, 20 bp, Artificial Sequence
  Description of Artificial Sequence: Synthetic oligonucleotide
  Target: SCNA; (-) strand; PAM type: NNAGAAW; PAM sequence: AAAGAAT
catacaaagaagaagtgcct

SEQ ID NO: 6168 - DNA, 20 bp, Artificial Sequence
  Description of Artificial Sequence: Synthetic oligonucleotide
  Target: SCNA; (-) strand; PAM type: NNAGAAW; PAM sequence: GTAGAAT
taaatcctttatcacttcat

SEQ ID NO: 6169 - DNA, 20 bp, Artificial Sequence
  Description of Artificial Sequence: Synthetic oligonucleotide
  Target: SCNA; (-) strand; PAM type: NNAGAAW; PAM sequence: AAAGAAA
gtactgtagcacaatgcaag

SEQ ID NO: 6170 - DNA, 20 bp, Artificial Sequence
  Description of Artificial Sequence: Synthetic oligonucleotide
  Target: SCNA; (-) strand; PAM type: NNAGAAW; PAM sequence: CAAGAAA
gtgtgtactgtagcacaatg

SEQ ID NO: 6171 - DNA, 20 bp, Artificial Sequence
  Description of Artificial Sequence: Synthetic oligonucleotide
  Target: SCNA; (-) strand; PAM type: NNAGAAW; PAM sequence: TCAGAAA
acctcacttgttactatgtg

SEQ ID NO: 6172 - DNA, 20 bp, Artificial Sequence
  Description of Artificial Sequence: Synthetic oligonucleotide
  Target: SCNA; (-) strand; PAM type: NNAGAAW; PAM sequence: TAAGAAT
ttgttttctttctagccaga

SEQ ID NO: 6173 - DNA, 20 bp, Artificial Sequence
  Description of Artificial Sequence: Synthetic oligonucleotide
  Target: SCNA; (-) strand; PAM type: NNAGAAW; PAM sequence: AAAGAAT
ttccctaaatgaatatagag

SEQ ID NO: 6174 - DNA, 20 bp, Artificial Sequence
  Description of Artificial Sequence: Synthetic oligonucleotide
  Target: SCNA; (-) strand; PAM type: NNAGAAW; PAM sequence: AGAGAAA
aaatttccctaaatgaatat

SEQ ID NO: 6175 - DNA, 20 bp, Artificial Sequence
  Description of Artificial Sequence: Synthetic oligonucleotide
  Target: SCNA; (-) strand; PAM type: NNAGAAW; PAM sequence: TCAGAAT
aaggaagctatttgtatttt

SEQ ID NO: 6176 - DNA, 20 bp, Artificial Sequence
  Description of Artificial Sequence: Synthetic oligonucleotide
  Target: SCNA; (-) strand; PAM type: NNAGAAW; PAM sequence: GGAGAAA
ctaaatacagtcctagctca

SEQ ID NO: 6177 - DNA, 20 bp, Artificial Sequence
  Description of Artificial Sequence: Synthetic oligonucleotide
  Target: SCNA; (-) strand; PAM type: NNAGAAW; PAM sequence: AAAGAAA
tactgtgtcgtagcacaaaa

SEQ ID NO: 6178 - DNA, 20 bp, Artificial Sequence
  Description of Artificial Sequence: Synthetic oligonucleotide
  Target: SCNA; (-) strand; PAM type: NNAGAAW; PAM sequence: AAAGAAT
acaaacgagagggatgggga

SEQ ID NO: 6179 - DNA, 20 bp, Artificial Sequence
  Description of Artificial Sequence: Synthetic oligonucleotide
  Target: SCNA; (-) strand; PAM type: NNAGAAW; PAM sequence: TAAGAAT
gattattaatgatgtagata

SEQ ID NO: 6180 - DNA, 20 bp, Artificial Sequence
  Description of Artificial Sequence: Synthetic oligonucleotide
  Target: SCNA; (-) strand; PAM type: NNAGAAW; PAM sequence: ACAGAAA
tagagacagcaaaactaaag

SEQ ID NO: 6181 - DNA, 20 bp, Artificial Sequence
  Description of Artificial Sequence: Synthetic oligonucleotide
  Target: SCNA; (-) strand; PAM type: NNAGAAW; PAM sequence: GAAGAAT
acaggtgatgagaagctcct

SEQ ID NO: 6182 - DNA, 20 bp, Artificial Sequence
  Description of Artificial Sequence: Synthetic oligonucleotide
  Target: SCNA; (-) strand; PAM type: NNAGAAW; PAM sequence: CGAGAAT
aacagtgcatccagaagtgg

SEQ ID NO: 6183 - DNA, 20 bp, Artificial Sequence
  Description of Artificial Sequence: Synthetic oligonucleotide
  Target: SCNA; (-) strand; PAM type: NNAGAAW; PAM sequence: TAAGAAA
agcatatttaaggaagctca

SEQ ID NO: 6184 - DNA, 20 bp, Artificial Sequence
  Description of Artificial Sequence: Synthetic oligonucleotide
  Target: SCNA; (-) strand; PAM type: NNAGAAW; PAM sequence: GCAGAAA
ggcactggagatgcccatac

SEQ ID NO: 6185 - DNA, 20 bp, Artificial Sequence
  Description of Artificial Sequence: Synthetic oligonucleotide
  Target: SCNA; (-) strand; PAM type: NNAGAAW; PAM sequence: GCAGAAA
tattaacttcctgaaattct

SEQ ID NO: 6186 - DNA, 20 bp, Artificial Sequence
  Description of Artificial Sequence: Synthetic oligonucleotide
  Target: SCNA; (-) strand; PAM type: NNAGAAW; PAM sequence: GAAGAAA
atcagcctgaaggacaaaac

SEQ ID NO: 6187 - DNA, 20 bp, Artificial Sequence
  Description of Artificial Sequence: Synthetic oligonucleotide
  Target: SCNA; (-) strand; PAM type: NNAGAAW; PAM sequence: GGAGAAA
caggagcatgtgatgaataa

SEQ ID NO: 6188 - DNA, 20 bp, Artificial Sequence
  Description of Artificial Sequence: Synthetic oligonucleotide
  Target: SCNA; (-) strand; PAM type: NNAGAAW; PAM sequence: AGAGAAA
tggagattcaaagataaact

SEQ ID NO: 6189 - DNA, 20 bp, Artificial Sequence
  Description of Artificial Sequence: Synthetic oligonucleotide
  Target: SCNA; (-) strand; PAM type: NNAGAAW; PAM sequence: TGAGAAT
tttaacaaaatgttcataaa

SEQ ID NO: 6190 - DNA, 20 bp, Artificial Sequence
  Description of Artificial Sequence: Synthetic oligonucleotide
  Target: SCNA; (-) strand; PAM type: NNAGAAW; PAM sequence: AAAGAAA
aatctgtctgagagatagta

SEQ ID NO: 6191 - DNA, 20 bp, Artificial Sequence
  Description of Artificial Sequence: Synthetic oligonucleotide
  Target: SCNA; (-) strand; PAM type: NNAGAAW; PAM sequence: CAAGAAT
aaaaaaaaaaagaataaaaa

SEQ ID NO: 6192 - DNA, 20 bp, Artificial Sequence
  Description of Artificial Sequence: Synthetic oligonucleotide
  Target: SCNA; (-) strand; PAM type: NNAGAAW; PAM sequence: AAAGAAT
ctctgtctcaaaaaaaaaaa

SEQ ID NO: 6193 - DNA, 20 bp, Artificial Sequence
  Description of Artificial Sequence: Synthetic oligonucleotide
  Target: SCNA; (-) strand; PAM type: NNAGAAW; PAM sequence: GGAGAAT
ctacttgggaggctgaggca

SEQ ID NO: 6194 - DNA, 20 bp, Artificial Sequence
  Description of Artificial Sequence: Synthetic oligonucleotide
  Target: SCNA; (-) strand; PAM type: NNAGAAW; PAM sequence: TAAGAAT
tgcatatagttctggttctt

SEQ ID NO: 6195 - DNA, 20 bp, Artificial Sequence
  Description of Artificial Sequence: Synthetic oligonucleotide
  Target: SCNA; (-) strand; PAM type: NNAGAAW; PAM sequence: GAAGAAA
ctggaatgttaaaagacaaa

SEQ ID NO: 6196 - DNA, 20 bp, Artificial Sequence
  Description of Artificial Sequence: Synthetic oligonucleotide
  Target: SCNA; (-) strand; PAM type: NNAGAAW; PAM sequence: AAAGAAT
tatagggtgaccatgaatcc

SEQ ID NO: 6197 - DNA, 20 bp, Artificial Sequence
  Description of Artificial Sequence: Synthetic oligonucleotide
  Target: SCNA; (-) strand; PAM type: NNAGAAW; PAM sequence: TTAGAAA
aacattgataaagattgtca

SEQ ID NO: 6198 - DNA, 20 bp, Artificial Sequence
  Description of Artificial Sequence: Synthetic oligonucleotide
  Target: SCNA; (-) strand; PAM type: NNAGAAW; PAM sequence: ATAGAAA
agtatttttcctcaaaacac

SEQ ID NO: 6199 - DNA, 20 bp, Artificial Sequence
  Description of Artificial Sequence: Synthetic oligonucleotide
  Target: SCNA; (-) strand; PAM type: NNAGAAW; PAM sequence: CCAGAAT
caagtgaattctacttaacc

SEQ ID NO: 6200 - DNA, 20 bp, Artificial Sequence
  Description of Artificial Sequence: Synthetic oligonucleotide
  Target: SCNA; (-) strand; PAM type: NNAGAAW; PAM sequence: ATAGAAT
tcttccgtgtgtctgatttg

SEQ ID NO: 6201 - DNA, 20 bp, Artificial Sequence
  Description of Artificial Sequence: Synthetic oligonucleotide
  Target: SCNA; (-) strand; PAM type: NNAGAAW; PAM sequence: TGAGAAA
ttgttatttcaagtgtgggc

SEQ ID NO: 6202 - DNA, 20 bp, Artificial Sequence
  Description of Artificial Sequence: Synthetic oligonucleotide
  Target: SCNA; (-) strand; PAM type: NNAGAAW; PAM sequence: GAAGAAT
agggcgagggagagaggtgt

SEQ ID NO: 6203 - DNA, 20 bp, Artificial Sequence
  Description of Artificial Sequence: Synthetic oligonucleotide
  Target: SCNA; (-) strand; PAM type: NNAGAAW; PAM sequence: AGAGAAA
cagactataaatgtgagaat

SEQ ID NO: 6204 - DNA, 20 bp, Artificial Sequence
  Description of Artificial Sequence: Synthetic oligonucleotide
  Target: SCNA; (-) strand; PAM type: NNAGAAW; PAM sequence: TGAGAAT
tctgaaccagactataaatg

SEQ ID NO: 6205 - DNA, 20 bp, Artificial Sequence
  Description of Artificial Sequence: Synthetic oligonucleotide
  Target: SCNA; (-) strand; PAM type: NNAGAAW; PAM sequence: TCAGAAA
ttagagataggaatttcact

SEQ ID NO: 6206 - DNA, 20 bp, Artificial Sequence
  Description of Artificial Sequence: Synthetic oligonucleotide
  Target: SCNA; (-) strand; PAM type: NNAGAAW; PAM sequence: TTAGAAA
agtgaaaacacattttgggt

SEQ ID NO: 6207 - DNA, 20 bp, Artificial Sequence
  Description of Artificial Sequence: Synthetic oligonucleotide
  Target: SCNA; (-) strand; PAM type: NNAGAAW; PAM sequence: AAAGAAT
caccattctgaaggcaagag

SEQ ID NO: 6208 - DNA, 20 bp, Artificial Sequence
  Description of Artificial Sequence: Synthetic oligonucleotide
  Target: SCNA; (-) strand; PAM type: NNAGAAW; PAM sequence: AGAGAAA
tcaacaccattctgaaggca

SEQ ID NO: 6209 - DNA, 20 bp, Artificial Sequence
  Description of Artificial Sequence: Synthetic oligonucleotide
  Target: SCNA; (-) strand; PAM type: NNAGAAW; PAM sequence: GAAGAAT
attgttttttctagttctgt

SEQ ID NO: 6210 - DNA, 20 bp, Artificial Sequence
  Description of Artificial Sequence: Synthetic oligonucleotide
  Target: SCNA; (-) strand; PAM type: NNAGAAW; PAM sequence: AGAGAAA
aattagtacctcttgtggac

SEQ ID NO: 6211 - DNA, 20 bp, Artificial Sequence
  Description of Artificial Sequence: Synthetic oligonucleotide
  Target: SCNA; (-) strand; PAM type: NNAGAAW; PAM sequence: ACAGAAA
gcacttccaagatgcaccta

SEQ ID NO: 6212 - DNA, 20 bp, Artificial Sequence
  Description of Artificial Sequence: Synthetic oligonucleotide
  Target: SCNA; (-) strand; PAM type: NNAGAAW; PAM sequence: ACAGAAA
atacatctcataacagggca

SEQ ID NO: 6213 - DNA, 20 bp, Artificial Sequence
  Description of Artificial Sequence: Synthetic oligonucleotide
  Target: SCNA; (-) strand; PAM type: NNAGAAW; PAM sequence: TCAGAAT
ctgtgtgtcctgaaaactct

SEQ ID NO: 6214 - DNA, 20 bp, Artificial Sequence
  Description of Artificial Sequence: Synthetic oligonucleotide
  Target: SCNA; (-) strand; PAM type: NNAGAAW; PAM sequence: TGAGAAA
ctggctagcagggtttatgc

SEQ ID NO: 6215 - DNA, 20 bp, Artificial Sequence
  Description of Artificial Sequence: Synthetic oligonucleotide
  Target: SCNA; (-) strand; PAM type: NNAGAAW; PAM sequence: TAAGAAT
aaaatcttttttgtctgata

SEQ ID NO: 6216 - DNA, 20 bp, Artificial Sequence
  Description of Artificial Sequence: Synthetic oligonucleotide
  Target: SCNA; (-) strand; PAM type: NNAGAAW; PAM sequence: GGAGAAT
ttgttcatatggtctgtctt

SEQ ID NO: 6217 - DNA, 20 bp, Artificial Sequence
  Description of Artificial Sequence: Synthetic oligonucleotide
  Target: SCNA; (-) strand; PAM type: NNAGAAW; PAM sequence: AGAGAAT
ttttattccactgtggtctg

SEQ ID NO: 6218 - DNA, 20 bp, Artificial Sequence
  Description of Artificial Sequence: Synthetic oligonucleotide
  Target: SCNA; (-) strand; PAM type: NNAGAAW; PAM sequence: ATAGAAT
tatcttttggaacagtttca

SEQ ID NO: 6219 - DNA, 20 bp, Artificial Sequence
  Description of Artificial Sequence: Synthetic oligonucleotide
  Target: SCNA; (-) strand; PAM type: NNAGAAW; PAM sequence: ATAGAAT
attagggtaatactggcttc

SEQ ID NO: 6220 - DNA, 20 bp, Artificial Sequence
  Description of Artificial Sequence: Synthetic oligonucleotide
  Target: SCNA; (-) strand; PAM type: NNAGAAW; PAM sequence: GAAGAAT
gattttttttcttgttcttt

SEQ ID NO: 6221 - DNA, 20 bp, Artificial Sequence
  Description of Artificial Sequence: Synthetic oligonucleotide
  Target: SCNA; (-) strand; PAM type: NNAGAAW; PAM sequence: TGAGAAT
gctgtttgtctatcttcttt

SEQ ID NO: 6222 - DNA, 20 bp, Artificial Sequence
  Description of Artificial Sequence: Synthetic oligonucleotide
  Target: SCNA; (-) strand; PAM type: NNAGAAW; PAM sequence: TTAGAAT
ccactcctgagttacttcac

SEQ ID NO: 6223 - DNA, 20 bp, Artificial Sequence
  Description of Artificial Sequence: Synthetic oligonucleotide
  Target: SCNA; (-) strand; PAM type: NNAGAAW; PAM sequence: AAAGAAA
tgacaaataacaatacatta

SEQ ID NO: 6224 - DNA, 20 bp, Artificial Sequence
  Description of Artificial Sequence: Synthetic oligonucleotide
  Target: SCNA; (-) strand; PAM type: NNAGAAW; PAM sequence: TGAGAAT
ttattacagagtcacttacc

SEQ ID NO: 6225 - DNA, 20 bp, Artificial Sequence
  Description of Artificial Sequence: Synthetic oligonucleotide
  Target: SCNA; (-) strand; PAM type: NNAGAAW; PAM sequence: TTAGAAA
attttttgtaatattcttat

SEQ ID NO: 6226 - DNA, 20 bp, Artificial Sequence
  Description of Artificial Sequence: Synthetic oligonucleotide
  Target: SCNA; (-) strand; PAM type: NNAGAAW; PAM sequence: TGAGAAT
ttatttggctctatctactt

SEQ ID NO: 6227 - DNA, 20 bp, Artificial Sequence
  Description of Artificial Sequence: Synthetic oligonucleotide
  Target: SCNA; (-) strand; PAM type: NNAGAAW; PAM sequence: AGAGAAA
gaaacagtgcgctctgggat

SEQ ID NO: 6228 - DNA, 20 bp, Artificial Sequence
  Description of Artificial Sequence: Synthetic oligonucleotide
  Target: SCNA; (-) strand; PAM type: NNAGAAW; PAM sequence: AGAGAAA
gggtttcccactgttgctcc

SEQ ID NO: 6229 - DNA, 20 bp, Artificial Sequence
  Description of Artificial Sequence: Synthetic oligonucleotide
  Target: SCNA; (-) strand; PAM type: NNAGAAW; PAM sequence: TTAGAAT
actattgatggaagttagta

SEQ ID NO: 6230 - DNA, 20 bp, Artificial Sequence
  Description of Artificial Sequence: Synthetic oligonucleotide
  Target: SCNA; (-) strand; PAM type: NNAGAAW; PAM sequence: AAAGAAA
aatatatacatcaagattca

SEQ ID NO: 6231 - DNA, 20 bp, Artificial Sequence
  Description of Artificial Sequence: Synthetic oligonucleotide
  Target: SCNA; (-) strand; PAM type: NNAGAAW; PAM sequence: ACAGAAA
aatggcccattcatttggct

SEQ ID NO: 6232 - DNA, 20 bp, Artificial Sequence
  Description of Artificial Sequence: Synthetic oligonucleotide
  Target: SCNA; (-) strand; PAM type: NNAGAAW; PAM sequence: AAAGAAA
tattatgttttgtttcttca

SEQ ID NO: 6233 - DNA, 20 bp, Artificial Sequence
  Description of Artificial Sequence: Synthetic oligonucleotide
  Target: SCNA; (-) strand; PAM type: NNAGAAW; PAM sequence: ACAGAAA
actgtatattgtattatagt

SEQ ID NO: 6234 - DNA, 20 bp, Artificial Sequence
  Description of Artificial Sequence: Synthetic oligonucleotide
  Target: SCNA; (-) strand; PAM type: NNAGAAW; PAM sequence: TCAGAAA
tgttcacttataaaattaat

SEQ ID NO: 6235 - DNA, 20 bp, Artificial Sequence
  Description of Artificial Sequence: Synthetic oligonucleotide
  Target: SCNA; (-) strand; PAM type: NNAGAAW; PAM sequence: GAAGAAA
ttaggtctgtttattcacat

SEQ ID NO: 6236 - DNA, 20 bp, Artificial Sequence
  Description of Artificial Sequence: Synthetic oligonucleotide
  Target: SCNA; (-) strand; PAM type: NNAGAAW; PAM sequence: GTAGAAA
caagctttctctgttcatta

SEQ ID NO: 6237 - DNA, 20 bp, Artificial Sequence
  Description of Artificial Sequence: Synthetic oligonucleotide
  Target: SCNA; (-) strand; PAM type: NNAGAAW; PAM sequence: AAAGAAA
acttagaaaaaacaatattt

SEQ ID NO: 6238 - DNA, 20 bp, Artificial Sequence
  Description of Artificial Sequence: Synthetic oligonucleotide
  Target: SCNA; (-) strand; PAM type: NNAGAAW; PAM sequence: TTAGAAA
ctccccatttccaacacaac

SEQ ID NO: 6239 - DNA, 20 bp, Artificial Sequence
  Description of Artificial Sequence: Synthetic oligonucleotide
  Target: SCNA; (-) strand; PAM type: NNAGAAW; PAM sequence: CTAGAAT
ttctcatggtaggttgggca

SEQ ID NO: 6240 - DNA, 20 bp, Artificial Sequence
  Description of Artificial Sequence: Synthetic oligonucleotide
  Target: SCNA; (-) strand; PAM type: NNAGAAW; PAM sequence: TAAGAAA
tactttaggaaggaacaact

SEQ ID NO: 6241 - DNA, 20 bp, Artificial Sequence
  Description of Artificial Sequence: Synthetic oligonucleotide
  Target: SCNA; (-) strand; PAM type: NNAGAAW; PAM sequence: GAAGAAT
tctcttcccacactatatta

SEQ ID NO: 6242 - DNA, 20 bp, Artificial Sequence
  Description of Artificial Sequence: Synthetic oligonucleotide
  Target: SCNA; (-) strand; PAM type: NNAGAAW; PAM sequence: AAAGAAA
caggggtatagtgactagaa

SEQ ID NO: 6243 - DNA, 20 bp, Artificial Sequence
  Description of Artificial Sequence: Synthetic oligonucleotide
  Target: SCNA; (-) strand; PAM type: NNAGAAW; PAM sequence: CTAGAAA
tgatgccaggggtatagtga

SEQ ID NO: 6244 - DNA, 20 bp, Artificial Sequence
  Description of Artificial Sequence: Synthetic oligonucleotide
  Target: SCNA; (-) strand; PAM type: NNAGAAW; PAM sequence: TGAGAAT
agggaaaagaaaaaaccatc

SEQ ID NO: 6245 - DNA, 20 bp, Artificial Sequence
  Description of Artificial Sequence: Synthetic oligonucleotide
  Target: SCNA; (-) strand; PAM type: NNAGAAW; PAM sequence: AAAGAAA
ggtacagtttttaagaggga

SEQ ID NO: 6246 - DNA, 20 bp, Artificial Sequence
  Description of Artificial Sequence: Synthetic oligonucleotide
  Target: SCNA; (-) strand; PAM type: NNAGAAW; PAM sequence: TAAGAAA
tatctaagaggggccaattt

SEQ ID NO: 6247 - DNA, 20 bp, Artificial Sequence
  Description of Artificial Sequence: Synthetic oligonucleotide
  Target: SCNA; (-) strand; PAM type: NNAGAAW; PAM sequence: CCAGAAA
tggaattatatgaagcttcc

SEQ ID NO: 6248 - DNA, 20 bp, Artificial Sequence
  Description of Artificial Sequence: Synthetic oligonucleotide
  Target: SCNA; (-) strand; PAM type: NNAGAAW; PAM sequence: ATAGAAA
cagtgaagccagctgatcct

SEQ ID NO: 6249 - DNA, 20 bp, Artificial Sequence
  Description of Artificial Sequence: Synthetic oligonucleotide
  Target: SCNA; (-) strand; PAM type: NNAGAAW; PAM sequence: GAAGAAT
cacactaacatatttgcatg

SEQ ID NO: 6250 - DNA, 20 bp, Artificial Sequence
  Description of Artificial Sequence: Synthetic oligonucleotide
  Target: SCNA; (-) strand; PAM type: NNAGAAW; PAM sequence: GAAGAAT
acttctgtcagtgagctcaa

SEQ ID NO: 6251 - DNA, 20 bp, Artificial Sequence
  Description of Artificial Sequence: Synthetic oligonucleotide
  Target: SCNA; (-) strand; PAM type: NNAGAAW; PAM sequence: ATAGAAA
ctaagctagatcatgggagt

SEQ ID NO: 6252 - DNA, 20 bp, Artificial Sequence
  Description of Artificial Sequence: Synthetic oligonucleotide
  Target: SCNA; (-) strand; PAM type: NNAGAAW; PAM sequence: ACAGAAA
ccacaatttattcaaggtag

SEQ ID NO: 6253 - DNA, 20 bp, Artificial Sequence
  Description of Artificial Sequence: Synthetic oligonucleotide
  Target: SCNA; (-) strand; PAM type: NNAGAAW; PAM sequence: TCAGAAA
tttgatctgtttcaaattct

SEQ ID NO: 6254 - DNA, 20 bp, Artificial Sequence
  Description of Artificial Sequence: Synthetic oligonucleotide
  Target: SCNA; (-) strand; PAM type: NNAGAAW; PAM sequence: AGAGAAT
ttttacagtgttagtgtaga

SEQ ID NO: 6255 - DNA, 20 bp, Artificial Sequence
  Description of Artificial Sequence: Synthetic oligonucleotide
  Target: SCNA; (-) strand; PAM type: NNAGAAW; PAM sequence: AGAGAAA
agacagagatggtggatgaa

SEQ ID NO: 6256 - DNA, 20 bp, Artificial Sequence
  Description of Artificial Sequence: Synthetic oligonucleotide
  Target: SCNA; (-) strand; PAM type: NNAGAAW; PAM sequence: TCAGAAT
gatgcttttaccagtgattt

SEQ ID NO: 6257 - DNA, 20 bp, Artificial Sequence
  Description of Artificial Sequence: Synthetic oligonucleotide
  Target: SCNA; (-) strand; PAM type: NNAGAAW; PAM sequence: TCAGAAT
tcttagctgttttcttaaac

SEQ ID NO: 6258 - DNA, 20 bp, Artificial Sequence
  Description of Artificial Sequence: Synthetic oligonucleotide
  Target: SCNA; (-) strand; PAM type: NNAGAAW; PAM sequence: GGAGAAT
caaaagatgctggtcagcaa

SEQ ID NO: 6259 - DNA, 20 bp, Artificial Sequence
  Description of Artificial Sequence: Synthetic oligonucleotide
  Target: SCNA; (-) strand; PAM type: NNAGAAW; PAM sequence: GAAGAAT
gattcagatttaatccaagt

SEQ ID NO: 6260 - DNA, 20 bp, Artificial Sequence
  Description of Artificial Sequence: Synthetic oligonucleotide
  Target: SCNA; (-) strand; PAM type: NNAGAAW; PAM sequence: GGAGAAA
ttcttctgtagctatatttt

SEQ ID NO: 6261 - DNA, 20 bp, Artificial Sequence
  Description of Artificial Sequence: Synthetic oligonucleotide
  Target: SCNA; (-) strand; PAM type: NNAGAAW; PAM sequence: ATAGAAA
aggaatcttatacctcctac

SEQ ID NO: 6262 - DNA, 20 bp, Artificial Sequence
  Description of Artificial Sequence: Synthetic oligonucleotide
  Target: SCNA; (-) strand; PAM type: NNAGAAW; PAM sequence: TGAGAAT
gttctgtctttattcatttg

SEQ ID NO: 6263 - DNA, 20 bp, Artificial Sequence
  Description of Artificial Sequence: Synthetic oligonucleotide
  Target: SCNA; (-) strand; PAM type: NNAGAAW; PAM sequence: GAAGAAA
gatgtgcaaacccatctggg

SEQ ID NO: 6264 - DNA, 20 bp, Artificial Sequence
  Description of Artificial Sequence: Synthetic oligonucleotide
  Target: SCNA; (-) strand; PAM type: NNAGAAW; PAM sequence: AGAGAAA
ctagtacaactagaactggt

SEQ ID NO: 6265 - DNA, 20 bp, Artificial Sequence
  Description of Artificial Sequence: Synthetic oligonucleotide
  Target: SCNA; (-) strand; PAM type: NNAGAAW; PAM sequence: TGAGAAT
gaactaggaaaacttaccgc

SEQ ID NO: 6266 - DNA, 20 bp, Artificial Sequence
  Description of Artificial Sequence: Synthetic oligonucleotide
  Target: SCNA; (-) strand; PAM type: NNAGAAW; PAM sequence: CAAGAAA
attaatttattcttctgaga

SEQ ID NO: 6267 - DNA, 20 bp, Artificial Sequence
  Description of Artificial Sequence: Synthetic oligonucleotide
  Target: SCNA; (-) strand; PAM type: NNAGAAW; PAM sequence: GCAGAAT
tcacacaaaatcacagctat

SEQ ID NO: 6268 - DNA, 20 bp, Artificial Sequence
  Description of Artificial Sequence: Synthetic oligonucleotide
  Target: SCNA; (-) strand; PAM type: NNAGAAW; PAM sequence: CAAGAAA
attgtcatataacatagaag

SEQ ID NO: 6269 - DNA, 20 bp, Artificial Sequence
  Description of Artificial Sequence: Synthetic oligonucleotide
  Target: SCNA; (-) strand; PAM type: NNAGAAW; PAM sequence: AGAGAAA
aaataaaaaaagaaaatcag

SEQ ID NO: 6270 - DNA, 20 bp, Artificial Sequence
  Description of Artificial Sequence: Synthetic oligonucleotide
  Target: SCNA; (-) strand; PAM type: NNAGAAW; PAM sequence: AAAGAAA
aaaaaagaatttaaataaaa

SEQ ID NO: 6271 - DNA, 20 bp, Artificial Sequence
  Description of Artificial Sequence: Synthetic oligonucleotide
  Target: SCNA; (-) strand; PAM type: NNAGAAW; PAM sequence: AAAGAAT
ttaaagtataatttaaaaaa

SEQ ID NO: 6272 - DNA, 20 bp, Artificial Sequence
  Description of Artificial Sequence: Synthetic oligonucleotide
  Target: SCNA; (-) strand; PAM type: NNAGAAW; PAM sequence: CAAGAAA
aatacaaaccatctaagagg

SEQ ID NO: 6273 - DNA, 20 bp, Artificial Sequence
  Description of Artificial Sequence: Synthetic oligonucleotide
  Target: SCNA; (-) strand; PAM type: NNAGAAW; PAM sequence: GGAGAAA
catcgctaggatcatatcag

SEQ ID NO: 6274 - DNA, 20 bp, Artificial Sequence
  Description of Artificial Sequence: Synthetic oligonucleotide
  Target: SCNA; (-) strand; PAM type: NNAGAAW; PAM sequence: AAAGAAA
actagacgttgggctattgt

SEQ ID NO: 6275 - DNA, 20 bp, Artificial Sequence
  Description of Artificial Sequence: Synthetic oligonucleotide
  Target: SCNA; (-) strand; PAM type: NNAGAAW; PAM sequence: ACAGAAT
ttcaatttggaagagtgtcc

SEQ ID NO: 6276 - DNA, 20 bp, Artificial Sequence
  Description of Artificial Sequence: Synthetic oligonucleotide
  Target: SCNA; (-) strand; PAM type: NNAGAAW; PAM sequence: TGAGAAT
catgaccaggggattggcta

SEQ ID NO: 6277 - DNA, 20 bp, Artificial Sequence
  Description of Artificial Sequence: Synthetic oligonucleotide
  Target: SCNA; (-) strand; PAM type: NNAGAAW; PAM sequence: AGAGAAT
ctatttgggaggctgaggca

SEQ ID NO: 6278 - DNA, 20 bp, Artificial Sequence
  Description of Artificial Sequence: Synthetic oligonucleotide
  Target: SCNA; (-) strand; PAM type: NNAGAAW; PAM sequence: TAAGAAA
gatgtacgtgtaagcagatg

SEQ ID NO: 6279 - DNA, 20 bp, Artificial Sequence
  Description of Artificial Sequence: Synthetic oligonucleotide
  Target: SCNA; (-) strand; PAM type: NNAGAAW; PAM sequence: CAAGAAA
aaacaaattatatcatagaa

SEQ ID NO: 6280 - DNA, 20 bp, Artificial Sequence
  Description of Artificial Sequence: Synthetic oligonucleotide
  Target: SCNA; (-) strand; PAM type: NNAGAAW; PAM sequence: ATAGAAA
ggtaattcagtaggggaaca

SEQ ID NO: 6281 - DNA, 20 bp, Artificial Sequence
  Description of Artificial Sequence: Synthetic oligonucleotide
  Target: SCNA; (-) strand; PAM type: NNAGAAW; PAM sequence: TCAGAAA
agaggttaggcaaaatataa

SEQ ID NO: 6282 - DNA, 20 bp, Artificial Sequence
  Description of Artificial Sequence: Synthetic oligonucleotide
  Target: SCNA; (-) strand; PAM type: NNAGAAW; PAM sequence: AAAGAAA
tggatagtgtcaggtgctat

SEQ ID NO: 6283 - DNA, 20 bp, Artificial Sequence
  Description of Artificial Sequence: Synthetic oligonucleotide
  Target: SCNA; (-) strand; PAM type: NNAGAAW; PAM sequence: ACAGAAA
aataagtaaaaagaaaagaa

SEQ ID NO: 6284 - DNA, 20 bp, Artificial Sequence
  Description of Artificial Sequence: Synthetic oligonucleotide
  Target: SCNA; (-) strand; PAM type: NNAGAAW; PAM sequence: AAAGAAA
ttaagaaataagtaaaaaga

SEQ ID NO: 6285 - DNA, 20 bp, Artificial Sequence
  Description of Artificial Sequence: Synthetic oligonucleotide
  Target: SCNA; (-) strand; PAM type: NNAGAAW; PAM sequence: AAAGAAA
aacaattaagaaataagtaa

SEQ ID NO: 6286 - DNA, 20 bp, Artificial Sequence
  Description of Artificial Sequence: Synthetic oligonucleotide
  Target: SCNA; (-) strand; PAM type: NNAGAAW; PAM sequence: TAAGAAA
ctctgcctttgtgaaacaat

SEQ ID NO: 6287 - DNA, 20 bp, Artificial Sequence
  Description of Artificial Sequence: Synthetic oligonucleotide
  Target: SCNA; (-) strand; PAM type: NNAGAAW; PAM sequence: GTAGAAT
agtgggcacagctgtgggtg

SEQ ID NO: 6288 - DNA, 20 bp, Artificial Sequence
  Description of Artificial Sequence: Synthetic oligonucleotide
  Target: SCNA; (-) strand; PAM type: NNAGAAW; PAM sequence: TGAGAAA
gagttctgaaagtgaatcct

SEQ ID NO: 6289 - DNA, 20 bp, Artificial Sequence
  Description of Artificial Sequence: Synthetic oligonucleotide
  Target: SCNA; (-) strand; PAM type: NNAGAAW; PAM sequence: TAAGAAT
taacaccctagcaatagaag

SEQ ID NO: 6290 - DNA, 20 bp, Artificial Sequence
  Description of Artificial Sequence: Synthetic oligonucleotide
  Target: SCNA; (-) strand; PAM type: NNAGAAW; PAM sequence: ACAGAAA
actttcactggaataccatt

SEQ ID NO: 6291 - DNA, 20 bp, Artificial Sequence
  Description of Artificial Sequence: Synthetic oligonucleotide
  Target: SCNA; (-) strand; PAM type: NNAGAAW; PAM sequence: ATAGAAA
tttccataaagtacaaaata

SEQ ID NO: 6292 - DNA, 20 bp, Artificial Sequence
  Description of Artificial Sequence: Synthetic oligonucleotide
  Target: SCNA; (-) strand; PAM type: NNAGAAW; PAM sequence: CAAGAAT
gaaccctctgcatatctttt

SEQ ID NO: 6293 - DNA, 20 bp, Artificial Sequence
  Description of Artificial Sequence: Synthetic oligonucleotide
  Target: SCNA; (-) strand; PAM type: NNAGAAW; PAM sequence: AAAGAAA
tgtgcaggggaataaacatc

SEQ ID NO: 6294 - DNA, 20 bp, Artificial Sequence
  Description of Artificial Sequence: Synthetic oligonucleotide
  Target: SCNA; (-) strand; PAM type: NNAGAAW; PAM sequence: CAAGAAA
tttattaatgcatcaaaact

SEQ ID NO: 6295 - DNA, 20 bp, Artificial Sequence
  Description of Artificial Sequence: Synthetic oligonucleotide
  Target: SCNA; (-) strand; PAM type: NNAGAAW; PAM sequence: CTAGAAA
ggagaaggagaaggaattaa

SEQ ID NO: 6296 - DNA, 20 bp, Artificial Sequence
  Description of Artificial Sequence: Synthetic oligonucleotide
  Target: SCNA; (-) strand; PAM type: NNAGAAW; PAM sequence: AGAGAAA
cactcctggcagctaattgg

SEQ ID NO: 6297 - DNA, 20 bp, Artificial Sequence
  Description of Artificial Sequence: Synthetic oligonucleotide
  Target: SCNA; (-) strand; PAM type: NNAGAAW; PAM sequence: CAAGAAA
cacagattacagtgcagtta

SEQ ID NO: 6298 - DNA, 20 bp, Artificial Sequence
  Description of Artificial Sequence: Synthetic oligonucleotide
  Target: SCNA; (-) strand; PAM type: NNAGAAW; PAM sequence: GGAGAAT
tcaaagggaggcagaaggaa

SEQ ID NO: 6299 - DNA, 20 bp, Artificial Sequence
  Description of Artificial Sequence: Synthetic oligonucleotide
  Target: SCNA; (-) strand; PAM type: NNAGAAW; PAM sequence: GGAGAAA
tgaaaggtagaaagagaaca

SEQ ID NO: 6300 - DNA, 20 bp, Artificial Sequence
  Description of Artificial Sequence: Synthetic oligonucleotide
  Target: SCNA; (-) strand; PAM type: NNAGAAW; PAM sequence: GTAGAAA
gcaggcaatagctatgaaag

SEQ ID NO: 6301 - DNA, 20 bp, Artificial Sequence
  Description of Artificial Sequence: Synthetic oligonucleotide
  Target: SCNA; (-) strand; PAM type: NNAGAAW; PAM sequence: TTAGAAT
aagctgattccaagatggtg

SEQ ID NO: 6302 - DNA, 20 bp, Artificial Sequence
  Description of Artificial Sequence: Synthetic oligonucleotide
  Target: SCNA; (-) strand; PAM type: NNAGAAW; PAM sequence: CCAGAAA
aatcagtacatactataatt

SEQ ID NO: 6303 - DNA, 20 bp, Artificial Sequence
  Description of Artificial Sequence: Synthetic oligonucleotide
  Target: SCNA; (-) strand; PAM type: NNAGAAW; PAM sequence: GCAGAAT
aattgtgctgtattcataca

SEQ ID NO: 6304 - DNA, 20 bp, Artificial Sequence
  Description of Artificial Sequence: Synthetic oligonucleotide
  Target: SCNA; (-) strand; PAM type: NNAGAAW; PAM sequence: ACAGAAT
atgttcatacaatgacttgt

SEQ ID NO: 6305 - DNA, 20 bp, Artificial Sequence
  Description of Artificial Sequence: Synthetic oligonucleotide
  Target: SCNA; (-) strand; PAM type: NNAGAAW; PAM sequence: TCAGAAA
ttaagagcatagatttaaag

SEQ ID NO: 6306 - DNA, 20 bp, Artificial Sequence
  Description of Artificial Sequence: Synthetic oligonucleotide
  Target: SCNA; (-) strand; PAM type: NNAGAAW; PAM sequence: CAAGAAA
tatggaaagtttaaatgggt

SEQ ID NO: 6307 - DNA, 20 bp, Artificial Sequence
  Description of Artificial Sequence: Synthetic oligonucleotide
  Target: SCNA; (-) strand; PAM type: NNAGAAW; PAM sequence: GAAGAAT
caactaatttgtattcactt

SEQ ID NO: 6308 - DNA, 20 bp, Artificial Sequence
  Description of Artificial Sequence: Synthetic oligonucleotide
  Target: SCNA; (-) strand; PAM type: NNAGAAW; PAM sequence: ACAGAAT
taaaattacataattggctc

SEQ ID NO: 6309 - DNA, 20 bp, Artificial Sequence
  Description of Artificial Sequence: Synthetic oligonucleotide
  Target: SCNA; (-) strand; PAM type: NNAGAAW; PAM sequence: CTAGAAA
taatttgttaaatgtggtgg

SEQ ID NO: 6310 - DNA, 20 bp, Artificial Sequence
  Description of Artificial Sequence: Synthetic oligonucleotide
  Target: SCNA; (-) strand; PAM type: NNAGAAW; PAM sequence: GTAGAAA
aatttttttatagattacat

SEQ ID NO: 6311 - DNA, 20 bp, Artificial Sequence
  Description of Artificial Sequence: Synthetic oligonucleotide
  Target: SCNA; (-) strand; PAM type: NNAGAAW; PAM sequence: CCAGAAT
atcagttatcaccattggca

SEQ ID NO: 6312 - DNA, 20 bp, Artificial Sequence
  Description of Artificial Sequence: Synthetic oligonucleotide
  Target: SCNA; (-) strand; PAM type: NNAGAAW; PAM sequence: CAAGAAT
ctggttatgtaaaacatggg

SEQ ID NO: 6313 - DNA, 20 bp, Artificial Sequence
  Description of Artificial Sequence: Synthetic oligonucleotide
  Target: SCNA; (-) strand; PAM type: NNAGAAW; PAM sequence: AGAGAAA
agcaagccaggtttgtcttt

SEQ ID NO: 6314 - DNA, 20 bp, Artificial Sequence
  Description of Artificial Sequence: Synthetic oligonucleotide
  Target: SCNA; (-) strand; PAM type: NNAGAAW; PAM sequence: GAAGAAA
agtgtctgaaggggaagaag

SEQ ID NO: 6315 - DNA, 20 bp, Artificial Sequence
  Description of Artificial Sequence: Synthetic oligonucleotide
  Target: SCNA; (-) strand; PAM type: NNAGAAW; PAM sequence: CGAGAAT
cctgcactggcctagcaggg

SEQ ID NO: 6316 - DNA, 20 bp, Artificial Sequence
  Description of Artificial Sequence: Synthetic oligonucleotide
  Target: SCNA; (-) strand; PAM type: NNAGAAW; PAM sequence: GGAGAAA
accatttatcagaaaaagag

SEQ ID NO: 6317 - DNA, 20 bp, Artificial Sequence
  Description of Artificial Sequence: Synthetic oligonucleotide
  Target: SCNA; (-) strand; PAM type: NNAGAAW; PAM sequence: TCAGAAA
aacagggagattaccattta

SEQ ID NO: 6318 - DNA, 20 bp, Artificial Sequence
  Description of Artificial Sequence: Synthetic oligonucleotide
  Target: SCNA; (-) strand; PAM type: NNAGAAW; PAM sequence: AGAGAAA
ccaatgattggggccaatac

SEQ ID NO: 6319 - DNA, 20 bp, Artificial Sequence
  Description of Artificial Sequence: Synthetic oligonucleotide
  Target: SCNA; (-) strand; PAM type: NNAGAAW; PAM sequence: TGAGAAT
attcatatctccatttcacc

SEQ ID NO: 6320 - DNA, 20 bp, Artificial Sequence
  Description of Artificial Sequence: Synthetic oligonucleotide
  Target: SCNA; (-) strand; PAM type: NNAGAAW; PAM sequence: CAAGAAT
ccttcaaaaacaattggcct

SEQ ID NO: 6321 - DNA, 20 bp, Artificial Sequence
  Description of Artificial Sequence: Synthetic oligonucleotide
  Target: SCNA; (-) strand; PAM type: NNAGAAW; PAM sequence: TCAGAAT
gtgtgccacttgggtaaaac

SEQ ID NO: 6322 - DNA, 20 bp, Artificial Sequence
  Description of Artificial Sequence: Synthetic oligonucleotide
  Target: SCNA; (-) strand; PAM type: NNAGAAW; PAM sequence: CCAGAAT
agctcagtctagatacagta

SEQ ID NO: 6323 - DNA, 20 bp, Artificial Sequence
  Description of Artificial Sequence: Synthetic oligonucleotide
  Target: SCNA; (-) strand; PAM type: NNAGAAW; PAM sequence: TGAGAAT
ctactcgggagactgaggca

SEQ ID NO: 6324 - DNA, 20 bp, Artificial Sequence
  Description of Artificial Sequence: Synthetic oligonucleotide
  Target: SCNA; (-) strand; PAM type: NNAGAAW; PAM sequence: AAAGAAA
aagaaagaaagaaagaaaga

SEQ ID NO: 6325 - DNA, 20 bp, Artificial Sequence
  Description of Artificial Sequence: Synthetic oligonucleotide
  Target: SCNA; (-) strand; PAM type: NNAGAAW; PAM sequence: AAAGAAA
aaagaaagaaagaaagaaag

SEQ ID NO: 6326 - DNA, 20 bp, Artificial Sequence
  Description of Artificial Sequence: Synthetic oligonucleotide
  Target: SCNA; (-) strand; PAM type: NNAGAAW; PAM sequence: AAAGAAA
agaaaaagaaagaaagaaag

SEQ ID NO: 6327 - DNA, 20 bp, Artificial Sequence
  Description of Artificial Sequence: Synthetic oligonucleotide
  Target: SCNA; (-) strand; PAM type: NNAGAAW; PAM sequence: AAAGAAA
agaaagaaaaagaaagaaag

SEQ ID NO: 6328 - DNA, 20 bp, Artificial Sequence
  Description of Artificial Sequence: Synthetic oligonucleotide
  Target: SCNA; (-) strand; PAM type: NNAGAAW; PAM sequence: AAAGAAA
agaaagaaagaaaaagaaag

SEQ ID NO: 6329 - DNA, 20 bp, Artificial Sequence
  Description of Artificial Sequence: Synthetic oligonucleotide
  Target: SCNA; (-) strand; PAM type: NNAGAAW; PAM sequence: AAAGAAA
agaaagaaagaaagaaaaag

SEQ ID NO: 6330 - DNA, 20 bp, Artificial Sequence
  Description of Artificial Sequence: Synthetic oligonucleotide
  Target: SCNA; (-) strand; PAM type: NNAGAAW; PAM sequence: AAAGAAA
agagagaaagaaagaaagaa

SEQ ID NO: 6331 - DNA, 20 bp, Artificial Sequence
  Description of Artificial Sequence: Synthetic oligonucleotide
  Target: SCNA; (-) strand; PAM type: NNAGAAW; PAM sequence: AAAGAAA
acagaaagagagaaagaaag

SEQ ID NO: 6332 - DNA, 20 bp, Artificial Sequence
  Description of Artificial Sequence: Synthetic oligonucleotide
  Target: SCNA; (-) strand; PAM type: NNAGAAW; PAM sequence: AAAGAAA
agaaacagaaagagagaaag

SEQ ID NO: 6333 - DNA, 20 bp, Artificial Sequence
  Description of Artificial Sequence: Synthetic oligonucleotide
  Target: SCNA; (-) strand; PAM type: NNAGAAW; PAM sequence: AAAGAAA
agaaagaaacagaaagagag

SEQ ID NO: 6334 - DNA, 20 bp, Artificial Sequence
  Description of Artificial Sequence: Synthetic oligonucleotide
  Target: SCNA; (-) strand; PAM type: NNAGAAW; PAM sequence: AGAGAAA
ggaaagaaagaaacagaaag

SEQ ID NO: 6335 - DNA, 20 bp, Artificial Sequence
  Description of Artificial Sequence: Synthetic oligonucleotide
  Target: SCNA; (-) strand; PAM type: NNAGAAW; PAM sequence: ACAGAAA
agaaagaaggaaagaaagaa

SEQ ID NO: 6336 - DNA, 20 bp, Artificial Sequence
  Description of Artificial Sequence: Synthetic oligonucleotide
  Target: SCNA; (-) strand; PAM type: NNAGAAW; PAM sequence: AAAGAAA
agagaaagaaagaaggaaag

SEQ ID NO: 6337 - DNA, 20 bp, Artificial Sequence
  Description of Artificial Sequence: Synthetic oligonucleotide
  Target: SCNA; (-) strand; PAM type: NNAGAAW; PAM sequence: AAAGAAA
aaagagagaaagaaagaagg

SEQ ID NO: 6338 - DNA, 20 bp, Artificial Sequence
  Description of Artificial Sequence: Synthetic oligonucleotide
  Target: SCNA; (-) strand; PAM type: NNAGAAW; PAM sequence: AAAGAAA
agaaagaaagagaaagagag

SEQ ID NO: 6339 - DNA, 20 bp, Artificial Sequence
  Description of Artificial Sequence: Synthetic oligonucleotide
  Target: SCNA; (-) strand; PAM type: NNAGAAW; PAM sequence: AGAGAAA
gaaaagaaagaaagagaaag

SEQ ID NO: 6340 - DNA, 20 bp, Artificial Sequence
  Description of Artificial Sequence: Synthetic oligonucleotide
  Target: SCNA; (-) strand; PAM type: NNAGAAW; PAM sequence: AGAGAAA
agaaagaagaaaagaaagaa

SEQ ID NO: 6341 - DNA, 20 bp, Artificial Sequence
  Description of Artificial Sequence: Synthetic oligonucleotide
  Target: SCNA; (-) strand; PAM type: NNAGAAW; PAM sequence: AAAGAAA
aaagaaagaaagaagaaaag

SEQ ID NO: 6342 - DNA, 20 bp, Artificial Sequence
  Description of Artificial Sequence: Synthetic oligonucleotide
  Target: SCNA; (-) strand; PAM type: NNAGAAW; PAM sequence: AAAGAAA
aaggaaagaaagaaagaaga

SEQ ID NO: 6343 - DNA, 20 bp, Artificial Sequence
  Description of Artificial Sequence: Synthetic oligonucleotide
  Target: SCNA; (-) strand; PAM type: NNAGAAW; PAM sequence: GAAGAAA
aaagaaaggaaagaaagaaa

SEQ ID NO: 6344 - DNA, 20 bp, Artificial Sequence
  Description of Artificial Sequence: Synthetic oligonucleotide
  Target: SCNA; (-) strand; PAM type: NNAGAAW; PAM sequence: AAAGAAA
ataaaagaaagaaaggaaag

SEQ ID NO: 6345 - DNA, 20 bp, Artificial Sequence
  Description of Artificial Sequence: Synthetic oligonucleotide
  Target: SCNA; (-) strand; PAM type: NNAGAAW; PAM sequence: AAAGAAA
agaaataaaagaaagaaagg

SEQ ID NO: 6346 - DNA, 20 bp, Artificial Sequence
  Description of Artificial Sequence: Synthetic oligonucleotide
  Target: SCNA; (-) strand; PAM type: NNAGAAW; PAM sequence: AAAGAAA
aagaacagaagaaataaaag

SEQ ID NO: 6347 - DNA, 20 bp, Artificial Sequence
  Description of Artificial Sequence: Synthetic oligonucleotide
  Target: SCNA; (-) strand; PAM type: NNAGAAW; PAM sequence: AAAGAAA
aagaaagaacagaagaaata

SEQ ID NO: 6348 - DNA, 20 bp, Artificial Sequence
  Description of Artificial Sequence: Synthetic oligonucleotide
  Target: SCNA; (-) strand; PAM type: NNAGAAW; PAM sequence: GAAGAAA
aagaaaagaaagaaagaaca

SEQ ID NO: 6349 - DNA, 20 bp, Artificial Sequence
  Description of Artificial Sequence: Synthetic oligonucleotide
  Target: SCNA; (-) strand; PAM type: NNAGAAW; PAM sequence: AAAGAAA
aaaaaagaaagaaagaaaag

SEQ ID NO: 6350 - DNA, 20 bp, Artificial Sequence
  Description of Artificial Sequence: Synthetic oligonucleotide
  Target: SCNA; (-) strand; PAM type: NNAGAAW; PAM sequence: AAAGAAA
aaaaaaaaaagaaagaaaga

SEQ ID NO: 6351 - DNA, 20 bp, Artificial Sequence
  Description of Artificial Sequence: Synthetic oligonucleotide
  Target: SCNA; (-) strand; PAM type: NNAGAAW; PAM sequence: AAAGAAA
acaaaaaaaaaaaaagaaag

SEQ ID NO: 6352 - DNA, 20 bp, Artificial Sequence
  Description of Artificial Sequence: Synthetic oligonucleotide
  Target: SCNA; (-) strand; PAM type: NNAGAAW; PAM sequence: AAAGAAA
aaatacaaaaaaaaaaaaag

SEQ ID NO: 6353 - DNA, 20 bp, Artificial Sequence
  Description of Artificial Sequence: Synthetic oligonucleotide
  Target: SCNA; (-) strand; PAM type: NNAGAAW; PAM sequence: AAAGAAA
ctaaaaatacaaaaaaaaaa

SEQ ID NO: 6354 - DNA, 20 bp, Artificial Sequence
  Description of Artificial Sequence: Synthetic oligonucleotide
  Target: SCNA; (-) strand; PAM type: NNAGAAW; PAM sequence: TCAGAAT
ccttatacctttgttaaaac

SEQ ID NO: 6355 - DNA, 20 bp, Artificial Sequence
  Description of Artificial Sequence: Synthetic oligonucleotide
  Target: SCNA; (-) strand; PAM type: NNAGAAW; PAM sequence: TGAGAAA
tcagtgattgcctggggctc

SEQ ID NO: 6356 - DNA, 20 bp, Artificial Sequence
  Description of Artificial Sequence: Synthetic oligonucleotide
  Target: SCNA; (-) strand; PAM type: NNAGAAW; PAM sequence: GGAGAAA
atcaagccacaaaaacacat

SEQ ID NO: 6357 - DNA, 20 bp, Artificial Sequence
  Description of Artificial Sequence: Synthetic oligonucleotide
  Target: SCNA; (-) strand; PAM type: NNAGAAW; PAM sequence: AAAGAAA
ggaatattattcagtgataa

SEQ ID NO: 6358 - DNA, 20 bp, Artificial Sequence
  Description of Artificial Sequence: Synthetic oligonucleotide
  Target: SCNA; (-) strand; PAM type: NNAGAAW; PAM sequence: GGAGAAT
acttcacaaggtgacaggaa

SEQ ID NO: 6359 - DNA, 20 bp, Artificial Sequence
  Description of Artificial Sequence: Synthetic oligonucleotide
  Target: SCNA; (-) strand; PAM type: NNAGAAW; PAM sequence: TCAGAAA
tcagcatggctgaggaggcc

SEQ ID NO: 6360 - DNA, 20 bp, Artificial Sequence
  Description of Artificial Sequence: Synthetic oligonucleotide
  Target: SCNA; (-) strand; PAM type: NNAGAAW; PAM sequence: GTAGAAA
ttctcaacatatttccttcg

SEQ ID NO: 6361 - DNA, 20 bp, Artificial Sequence
  Description of Artificial Sequence: Synthetic oligonucleotide
  Target: SCNA; (-) strand; PAM type: NNAGAAW; PAM sequence: TCAGAAA
tgtctatatattcatacata

SEQ ID NO: 6362 - DNA, 20 bp, Artificial Sequence
  Description of Artificial Sequence: Synthetic oligonucleotide
  Target: SCNA; (-) strand; PAM type: NNAGAAW; PAM sequence: GAAGAAA
cagggctagtgagggaccca

SEQ ID NO: 6363 - DNA, 20 bp, Artificial Sequence
  Description of Artificial Sequence: Synthetic oligonucleotide
  Target: SCNA; (-) strand; PAM type: NNAGAAW; PAM sequence: GCAGAAA
acagcttcacagtaagatgg

SEQ ID NO: 6364 - DNA, 20 bp, Artificial Sequence
  Description of Artificial Sequence: Synthetic oligonucleotide
  Target: SCNA; (-) strand; PAM type: NNAGAAW; PAM sequence: TAAGAAA
tcatctgtataaaataagaa

SEQ ID NO: 6365 - DNA, 20 bp, Artificial Sequence
  Description of Artificial Sequence: Synthetic oligonucleotide
  Target: SCNA; (-) strand; PAM type: NNAGAAW; PAM sequence: TAAGAAT
gttgcatcatctgtataaaa

SEQ ID NO: 6366 - DNA, 20 bp, Artificial Sequence
  Description of Artificial Sequence: Synthetic oligonucleotide
  Target: SCNA; (-) strand; PAM type: NNAGAAW; PAM sequence: CTAGAAA
gaattctagaaatttgattt

SEQ ID NO: 6367 - DNA, 20 bp, Artificial Sequence
  Description of Artificial Sequence: Synthetic oligonucleotide
  Target: SCNA; (-) strand; PAM type: NNAGAAW; PAM sequence: CTAGAAA
tatgtggtgtggcttgaatt

SEQ ID NO: 6368 - DNA, 20 bp, Artificial Sequence
  Description of Artificial Sequence: Synthetic oligonucleotide
  Target: SCNA; (-) strand; PAM type: NNAGAAW; PAM sequence: AGAGAAA
gtttttttttttttgacaga

SEQ ID NO: 6369 - DNA, 20 bp, Artificial Sequence
  Description of Artificial Sequence: Synthetic oligonucleotide
  Target: SCNA; (-) strand; PAM type: NNAGAAW; PAM sequence: ACAGAAA
tgggcaaccatgataatgcg

SEQ ID NO: 6370 - DNA, 20 bp, Artificial Sequence
  Description of Artificial Sequence: Synthetic oligonucleotide
  Target: SCNA; (-) strand; PAM type: NNAGAAW; PAM sequence: TCAGAAA
cctcattcccatattaaatc

SEQ ID NO: 6371 - DNA, 20 bp, Artificial Sequence
  Description of Artificial Sequence: Synthetic oligonucleotide
  Target: SCNA; (-) strand; PAM type: NNAGAAW; PAM sequence: TGAGAAA
ttctaggatagaagaatgag

SEQ ID NO: 6372 - DNA, 20 bp, Artificial Sequence
  Description of Artificial Sequence: Synthetic oligonucleotide
  Target: SCNA; (-) strand; PAM type: NNAGAAW; PAM sequence: GAAGAAT
ccattatgaattctaggata

SEQ ID NO: 6373 - DNA, 20 bp, Artificial Sequence
  Description of Artificial Sequence: Synthetic oligonucleotide
  Target: SCNA; (-) strand; PAM type: NNAGAAW; PAM sequence: TAAGAAA
caatctaaaaagtaatttta

SEQ ID NO: 6374 - DNA, 20 bp, Artificial Sequence
  Description of Artificial Sequence: Synthetic oligonucleotide
  Target: SCNA; (-) strand; PAM type: NNAGAAW; PAM sequence: CTAGAAA
gatcctttatgtgacctaag

SEQ ID NO: 6375 - DNA, 20 bp, Artificial Sequence
  Description of Artificial Sequence: Synthetic oligonucleotide
  Target: SCNA; (-) strand; PAM type: NNAGAAW; PAM sequence: GTAGAAA
tatatgtctatatttttctt

SEQ ID NO: 6376 - DNA, 20 bp, Artificial Sequence
  Description of Artificial Sequence: Synthetic oligonucleotide
  Target: SCNA; (-) strand; PAM type: NNAGAAW; PAM sequence: ATAGAAT
tctcagacctcttataattg

SEQ ID NO: 6377 - DNA, 20 bp, Artificial Sequence
  Description of Artificial Sequence: Synthetic oligonucleotide
  Target: SCNA; (-) strand; PAM type: NNAGAAW; PAM sequence: GAAGAAT
ggcagatctttatagtaaat

SEQ ID NO: 6378 - DNA, 20 bp, Artificial Sequence
  Description of Artificial Sequence: Synthetic oligonucleotide
  Target: SCNA; (-) strand; PAM type: NNAGAAW; PAM sequence: CTAGAAA
catagtctatactgatttaa

SEQ ID NO: 6379 - DNA, 20 bp, Artificial Sequence
  Description of Artificial Sequence: Synthetic oligonucleotide
  Target: SCNA; (-) strand; PAM type: NNAGAAW; PAM sequence: AGAGAAA
aaaaagatttcattaggagc

SEQ ID NO: 6380 - DNA, 20 bp, Artificial Sequence
  Description of Artificial Sequence: Synthetic oligonucleotide
  Target: SCNA; (-) strand; PAM type: NNAGAAW; PAM sequence: TCAGAAA
aggcttctttatttatttct

SEQ ID NO: 6381 - DNA, 20 bp, Artificial Sequence
  Description of Artificial Sequence: Synthetic oligonucleotide
  Target: SCNA; (-) strand; PAM type: NNAGAAW; PAM sequence: AGAGAAA
attgcaagaagatgagaggg

SEQ ID NO: 6382 - DNA, 20 bp, Artificial Sequence
  Description of Artificial Sequence: Synthetic oligonucleotide
  Target: SCNA; (-) strand; PAM type: NNAGAAW; PAM sequence: GAAGAAT
aatgtttaggcagaccaaaa

SEQ ID NO: 6383 - DNA, 20 bp, Artificial Sequence
  Description of Artificial Sequence: Synthetic oligonucleotide
  Target: SCNA; (-) strand; PAM type: NNAGAAW; PAM sequence: CCAGAAA
cagttggtgagcataagatg

SEQ ID NO: 6384 - DNA, 20 bp, Artificial Sequence
  Description of Artificial Sequence: Synthetic oligonucleotide
  Target: SCNA; (-) strand; PAM type: NNAGAAW; PAM sequence: TTAGAAT
ttcttagtaaaccacataat

SEQ ID NO: 6385 - DNA, 20 bp, Artificial Sequence
  Description of Artificial Sequence: Synthetic oligonucleotide
  Target: SCNA; (-) strand; PAM type: NNAGAAW; PAM sequence: ATAGAAT
cgttagtaattttgtatatt

SEQ ID NO: 6386 - DNA, 20 bp, Artificial Sequence
  Description of Artificial Sequence: Synthetic oligonucleotide
  Target: SCNA; (-) strand; PAM type: NNAGAAW; PAM sequence: TCAGAAT
taaggaaacaattcactact

SEQ ID NO: 6387 - DNA, 20 bp, Artificial Sequence
  Description of Artificial Sequence: Synthetic oligonucleotide
  Target: SCNA; (-) strand; PAM type: NNAGAAW; PAM sequence: CAAGAAT
aattttaaaaagacaaactg

SEQ ID NO: 6388 - DNA, 20 bp, Artificial Sequence
  Description of Artificial Sequence: Synthetic oligonucleotide
  Target: SCNA; (-) strand; PAM type: NNAGAAW; PAM sequence: CCAGAAT
cttcaaaaacaactaactgc

SEQ ID NO: 6389 - DNA, 20 bp, Artificial Sequence
  Description of Artificial Sequence: Synthetic oligonucleotide
  Target: SCNA; (-) strand; PAM type: NNAGAAW; PAM sequence: GTAGAAA
tttcactgctcaattaatat

SEQ ID NO: 6390 - DNA, 20 bp, Artificial Sequence
  Description of Artificial Sequence: Synthetic oligonucleotide
  Target: SCNA; (-) strand; PAM type: NNAGAAW; PAM sequence: ATAGAAT
ccagtgacctcttatcatac

SEQ ID NO: 6391 - DNA, 20 bp, Artificial Sequence
  Description of Artificial Sequence: Synthetic oligonucleotide
  Target: SCNA; (-) strand; PAM type: NNAGAAW; PAM sequence: AAAGAAA
gtcggaataattcttttaag

SEQ ID NO: 6392 - DNA, 20 bp, Artificial Sequence
  Description of Artificial Sequence: Synthetic oligonucleotide
  Target: SCNA; (-) strand; PAM type: NNAGAAW; PAM sequence: TAAGAAA
agcagtcggaataattcttt

SEQ ID NO: 6393 - DNA, 20 bp, Artificial Sequence
  Description of Artificial Sequence: Synthetic oligonucleotide
  Target: SCNA; (-) strand; PAM type: NNAGAAW; PAM sequence: ATAGAAT
ccagtggttttgcactctct

SEQ ID NO: 6394 - DNA, 20 bp, Artificial Sequence
  Description of Artificial Sequence: Synthetic oligonucleotide
  Target: SCNA; (-) strand; PAM type: NNAGAAW; PAM sequence: TCAGAAA
aaatatatggtagtgttgtt

SEQ ID NO: 6395 - DNA, 20 bp, Artificial Sequence
  Description of Artificial Sequence: Synthetic oligonucleotide
  Target: SCNA; (-) strand; PAM type: NNAGAAW; PAM sequence: TTAGAAA
ttacacatttctttttctta

SEQ ID NO: 6396 - DNA, 20 bp, Artificial Sequence
  Description of Artificial Sequence: Synthetic oligonucleotide
  Target: SCNA; (-) strand; PAM type: NNAGAAW; PAM sequence: AGAGAAT
gtgttttttattcttcatgg

SEQ ID NO: 6397 - DNA, 20 bp, Artificial Sequence
  Description of Artificial Sequence: Synthetic oligonucleotide
  Target: SCNA; (-) strand; PAM type: NNAGAAW; PAM sequence: TGAGAAA
ataaatatcatgaaatgatt

SEQ ID NO: 6398 - DNA, 20 bp, Artificial Sequence
  Description of Artificial Sequence: Synthetic oligonucleotide
  Target: SCNA; (-) strand; PAM type: NNAGAAW; PAM sequence: GGAGAAA
atgaaaaaatgaaggcttta

SEQ ID NO: 6399 - DNA, 20 bp, Artificial Sequence
  Description of Artificial Sequence: Synthetic oligonucleotide
  Target: SCNA; (-) strand; PAM type: NNAGAAW; PAM sequence: ATAGAAA
gaagtagaattcaactgtaa

SEQ ID NO: 6400 - DNA, 20 bp, Artificial Sequence
  Description of Artificial Sequence: Synthetic oligonucleotide
  Target: SCNA; (-) strand; PAM type: NNAGAAW; PAM sequence: GTAGAAT
atagttgtatgtttttggaa

SEQ ID NO: 6401 - DNA, 20 bp, Artificial Sequence
  Description of Artificial Sequence: Synthetic oligonucleotide
  Target: SCNA; (-) strand; PAM type: NNAGAAW; PAM sequence: ATAGAAA
tgttctcacatggtagagag

SEQ ID NO: 6402 - DNA, 20 bp, Artificial Sequence
  Description of Artificial Sequence: Synthetic oligonucleotide
  Target: SCNA; (-) strand; PAM type: NNAGAAW; PAM sequence: ACAGAAA
gactgggtaatttacaaaca

SEQ ID NO: 6403 - DNA, 20 bp, Artificial Sequence
  Description of Artificial Sequence: Synthetic oligonucleotide
  Target: SCNA; (-) strand; PAM type: NNAGAAW; PAM sequence: TGAGAAA
attataaatgttttgggctc

SEQ ID NO: 6404 - DNA, 20 bp, Artificial Sequence
  Description of Artificial Sequence: Synthetic oligonucleotide
  Target: SCNA; (-) strand; PAM type: NNAGAAW; PAM sequence: TCAGAAA
cagtactattagatagtaaa

SEQ ID NO: 6405 - DNA, 20 bp, Artificial Sequence
  Description of Artificial Sequence: Synthetic oligonucleotide
  Target: SCNA; (-) strand; PAM type: NNAGAAW; PAM sequence: GGAGAAT
ctacttaggaggctgaacca

SEQ ID NO: 6406 - DNA, 20 bp, Artificial Sequence
  Description of Artificial Sequence: Synthetic oligonucleotide
  Target: SCNA; (-) strand; PAM type: NNAGAAW; PAM sequence: GTAGAAT
tgaacagccattaaaatgtt

SEQ ID NO: 6407 - DNA, 20 bp, Artificial Sequence
  Description of Artificial Sequence: Synthetic oligonucleotide
  Target: SCNA; (-) strand; PAM type: NNAGAAW; PAM sequence: ACAGAAT
taaatatgaagatgtttatc

SEQ ID NO: 6408 - DNA, 20 bp, Artificial Sequence
  Description of Artificial Sequence: Synthetic oligonucleotide
  Target: SCNA; (-) strand; PAM type: NNAGAAW; PAM sequence: TAAGAAT
gctctgaccagtcgcatgtc

SEQ ID NO: 6409 - DNA, 20 bp, Artificial Sequence
  Description of Artificial Sequence: Synthetic oligonucleotide
  Target: SCNA; (-) strand; PAM type: NNAGAAW; PAM sequence: AGAGAAT
tcaatcagaacaatatggtt

SEQ ID NO: 6410 - DNA, 20 bp, Artificial Sequence
  Description of Artificial Sequence: Synthetic oligonucleotide
  Target: SCNA; (-) strand; PAM type: NNAGAAW; PAM sequence: TTAGAAT
aagggtctggcacttggaat

SEQ ID NO: 6411 - DNA, 20 bp, Artificial Sequence
  Description of Artificial Sequence: Synthetic oligonucleotide
  Target: SCNA; (-) strand; PAM type: NNAGAAW; PAM sequence: GGAGAAA
agaatggaagcatttccaga

SEQ ID NO: 6412 - DNA, 20 bp, Artificial Sequence
  Description of Artificial Sequence: Synthetic oligonucleotide
  Target: SCNA; (-) strand; PAM type: NNAGAAW; PAM sequence: TTAGAAT
attccctatgccagaacttt

SEQ ID NO: 6413 - DNA, 20 bp, Artificial Sequence
  Description of Artificial Sequence: Synthetic oligonucleotide
  Target: SCNA; (-) strand; PAM type: NNAGAAW; PAM sequence: AAAGAAA
acatttcttgggacaacacc

SEQ ID NO: 6414 - DNA, 20 bp, Artificial Sequence
  Description of Artificial Sequence: Synthetic oligonucleotide
  Target: SCNA; (-) strand; PAM type: NNAGAAW; PAM sequence: TCAGAAT
tcaggactcagcatcccata

SEQ ID NO: 6415 - DNA, 20 bp, Artificial Sequence
  Description of Artificial Sequence: Synthetic oligonucleotide
  Target: SCNA; (-) strand; PAM type: NNAGAAW; PAM sequence: GGAGAAT
ctctttgacgccaaacccat

SEQ ID NO: 6416 - DNA, 20 bp, Artificial Sequence
  Description of Artificial Sequence: Synthetic oligonucleotide
  Target: SCNA; (-) strand; PAM type: NNAGAAW; PAM sequence: TTAGAAT
gtattatgcacatggtataa

SEQ ID NO: 6417 - DNA, 20 bp, Artificial Sequence
  Description of Artificial Sequence: Synthetic oligonucleotide
  Target: SCNA; (-) strand; PAM type: NNAGAAW; PAM sequence: ACAGAAA
aagtgtgtcgatacatgatc

SEQ ID NO: 6418 - DNA, 20 bp, Artificial Sequence
  Description of Artificial Sequence: Synthetic oligonucleotide
  Target: SCNA; (-) strand; PAM type: NNAGAAW; PAM sequence: ATAGAAA
gtcctacaaagcatagatag

SEQ ID NO: 6419 - DNA, 20 bp, Artificial Sequence
  Description of Artificial Sequence: Synthetic oligonucleotide
  Target: SCNA; (-) strand; PAM type: NNAGAAW; PAM sequence: CCAGAAA
ctaatgcaaagaatactgag

SEQ ID NO: 6420 - DNA, 20 bp, Artificial Sequence
  Description of Artificial Sequence: Synthetic oligonucleotide
  Target: SCNA; (-) strand; PAM type: NNAGAAW; PAM sequence: AAAGAAT
gtcatagtgaatactaatgc

SEQ ID NO: 6421 - DNA, 20 bp, Artificial Sequence
  Description of Artificial Sequence: Synthetic oligonucleotide
  Target: SCNA; (-) strand; PAM type: NNAGAAW; PAM sequence: TAAGAAA
cgtatatgaagtaattttta

SEQ ID NO: 6422 - DNA, 20 bp, Artificial Sequence
  Description of Artificial Sequence: Synthetic oligonucleotide
  Target: SCNA; (-) strand; PAM type: NNAGAAW; PAM sequence: GGAGAAA
atttaattgttcttctacaa

SEQ ID NO: 6423 - DNA, 20 bp, Artificial Sequence
  Description of Artificial Sequence: Synthetic oligonucleotide
  Target: SCNA; (-) strand; PAM type: NNAGAAW; PAM sequence: ACAGAAA
tttacgtgatattcaagggt

SEQ ID NO: 6424 - DNA, 20 bp, Artificial Sequence
  Description of Artificial Sequence: Synthetic oligonucleotide
  Target: SCNA; (-) strand; PAM type: NNAGAAW; PAM sequence: TAAGAAA
acctgtttgtccctaaaaag

SEQ ID NO: 6425 - DNA, 20 bp, Artificial Sequence
  Description of Artificial Sequence: Synthetic oligonucleotide
  Target: SCNA; (-) strand; PAM type: NNAGAAW; PAM sequence: AAAGAAA
cgatgatagttttgtttgtc

SEQ ID NO: 6426 - DNA, 20 bp, Artificial Sequence
  Description of Artificial Sequence: Synthetic oligonucleotide
  Target: SCNA; (-) strand; PAM type: NNAGAAW; PAM sequence: TTAGAAA
tggaaaaaaagagatttatc

SEQ ID NO: 6427 - DNA, 20 bp, Artificial Sequence
  Description of Artificial Sequence: Synthetic oligonucleotide
  Target: SCNA; (-) strand; PAM type: NNAGAAW; PAM sequence: CAAGAAA
atatgggtggctcctgcctt

SEQ ID NO: 6428 - DNA, 20 bp, Artificial Sequence
  Description of Artificial Sequence: Synthetic oligonucleotide
  Target: SCNA; (-) strand; PAM type: NNAGAAW; PAM sequence: TGAGAAA
agacactcagctgggcacca

SEQ ID NO: 6429 - DNA, 20 bp, Artificial Sequence
  Description of Artificial Sequence: Synthetic oligonucleotide
  Target: SCNA; (-) strand; PAM type: NNAGAAW; PAM sequence: TTAGAAA
ggtacataaactgtccccac

SEQ ID NO: 6430 - DNA, 20 bp, Artificial Sequence
  Description of Artificial Sequence: Synthetic oligonucleotide
  Target: SCNA; (-) strand; PAM type: NNAGAAW; PAM sequence: AAAGAAA
taaagcatactgtgattatt

SEQ ID NO: 6431 - DNA, 20 bp, Artificial Sequence
  Description of Artificial Sequence: Synthetic oligonucleotide
  Target: SCNA; (-) strand; PAM type: NNAGAAW; PAM sequence: GGAGAAA
taataagagatgtcaggact

SEQ ID NO: 6432 - DNA, 20 bp, Artificial Sequence
  Description of Artificial Sequence: Synthetic oligonucleotide
  Target: SCNA; (-) strand; PAM type: NNAGAAW; PAM sequence: TCAGAAT
ttatttattgttgttcaaaa

SEQ ID NO: 6433 - DNA, 20 bp, Artificial Sequence
  Description of Artificial Sequence: Synthetic oligonucleotide
  Target: SCNA; (-) strand; PAM type: NNAGAAW; PAM sequence: CAAGAAA
gatgattaatagttttcacg

SEQ ID NO: 6434 - DNA, 20 bp, Artificial Sequence
  Description of Artificial Sequence: Synthetic oligonucleotide
  Target: SCNA; (-) strand; PAM type: NNAGAAW; PAM sequence: AAAGAAA
ttgttctaagaatattgtac

SEQ ID NO: 6435 - DNA, 20 bp, Artificial Sequence
  Description of Artificial Sequence: Synthetic oligonucleotide
  Target: SCNA; (-) strand; PAM type: NNAGAAW; PAM sequence: TAAGAAT
gaagaaagatctgcttgttc

SEQ ID NO: 6436 - DNA, 20 bp, Artificial Sequence
  Description of Artificial Sequence: Synthetic oligonucleotide
  Target: SCNA; (-) strand; PAM type: NNAGAAW; PAM sequence: GAAGAAA
tatttcctacttctattgaa

SEQ ID NO: 6437 - DNA, 20 bp, Artificial Sequence
  Description of Artificial Sequence: Synthetic oligonucleotide
  Target: SCNA; (-) strand; PAM type: NNAGAAW; PAM sequence: AGAGAAA
aagcaacagtgatgttatat

SEQ ID NO: 6438 - DNA, 20 bp, Artificial Sequence
  Description of Artificial Sequence: Synthetic oligonucleotide
  Target: SCNA; (-) strand; PAM type: NNAGAAW; PAM sequence: GCAGAAA
aacaggttaaaagtgcacag

SEQ ID NO: 6439 - DNA, 20 bp, Artificial Sequence
  Description of Artificial Sequence: Synthetic oligonucleotide
  Target: SCNA; (-) strand; PAM type: NNAGAAW; PAM sequence: GTAGAAA
tcatacctttcattggcaga

SEQ ID NO: 6440 - DNA, 20 bp, Artificial Sequence
  Description of Artificial Sequence: Synthetic oligonucleotide
  Target: SCNA; (-) strand; PAM type: NNAGAAW; PAM sequence: TTAGAAT
taactcttgtgtttagtaca

SEQ ID NO: 6441 - DNA, 20 bp, Artificial Sequence
  Description of Artificial Sequence: Synthetic oligonucleotide
  Target: SCNA; (-) strand; PAM type: NNAGAAW; PAM sequence: CCAGAAA
gaatgtttgctcacactgtg

SEQ ID NO: 6442 - DNA, 20 bp, Artificial Sequence
  Description of Artificial Sequence: Synthetic oligonucleotide
  Target: SCNA; (-) strand; PAM type: NNAGAAW; PAM sequence: AAAGAAT
acactcattcatcattcaag

SEQ ID NO: 6443 - DNA, 20 bp, Artificial Sequence
  Description of Artificial Sequence: Synthetic oligonucleotide
  Target: SCNA; (-) strand; PAM type: NNAGAAW; PAM sequence: CAAGAAA
tgagacactcattcatcatt

SEQ ID NO: 6444 - DNA, 20 bp, Artificial Sequence
  Description of Artificial Sequence: Synthetic oligonucleotide
  Target: SCNA; (-) strand; PAM type: NNAGAAW; PAM sequence: ATAGAAA
gatcaaaatgaccctggtaa

SEQ ID NO: 6445 - DNA, 20 bp, Artificial Sequence
  Description of Artificial Sequence: Synthetic oligonucleotide
  Target: SCNA; (-) strand; PAM type: NNAGAAW; PAM sequence: AAAGAAT
ctgagtttctataataattc

SEQ ID NO: 6446 - DNA, 20 bp, Artificial Sequence
  Description of Artificial Sequence: Synthetic oligonucleotide
  Target: SCNA; (-) strand; PAM type: NNAGAAW; PAM sequence: CTAGAAA
cataaaatgaggaagctcta

SEQ ID NO: 6447 - DNA, 20 bp, Artificial Sequence
  Description of Artificial Sequence: Synthetic oligonucleotide
  Target: SCNA; (-) strand; PAM type: NNAGAAW; PAM sequence: CTAGAAA
tgaaaatgaagccatagaac

SEQ ID NO: 6448 - DNA, 20 bp, Artificial Sequence
  Description of Artificial Sequence: Synthetic oligonucleotide
  Target: SCNA; (-) strand; PAM type: NNAGAAW; PAM sequence: GCAGAAA
tatttattttaatatttaaa

SEQ ID NO: 6449 - DNA, 20 bp, Artificial Sequence
  Description of Artificial Sequence: Synthetic oligonucleotide
  Target: SCNA; (-) strand; PAM type: NNAGAAW; PAM sequence: TCAGAAT
aactagaggattttattgct

SEQ ID NO: 6450 - DNA, 20 bp, Artificial Sequence
  Description of Artificial Sequence: Synthetic oligonucleotide
  Target: SCNA; (-) strand; PAM type: NNAGAAW; PAM sequence: ACAGAAA
ctgattgtagagatgaggaa

SEQ ID NO: 6451 - DNA, 20 bp, Artificial Sequence
  Description of Artificial Sequence: Synthetic oligonucleotide
  Target: SCNA; (-) strand; PAM type: NNAGAAW; PAM sequence: TCAGAAA
agctatagaccctcttagct

SEQ ID NO: 6452 - DNA, 20 bp, Artificial Sequence
  Description of Artificial Sequence: Synthetic oligonucleotide
  Target: SCNA; (-) strand; PAM type: NNAGAAW; PAM sequence: TGAGAAA
gatgaatatcttgaaaattg

SEQ ID NO: 6453 - DNA, 20 bp, Artificial Sequence
  Description of Artificial Sequence: Synthetic oligonucleotide
  Target: SCNA; (-) strand; PAM type: NNAGAAW; PAM sequence: CTAGAAT
ttttattttatttctccctt

SEQ ID NO: 6454 - DNA, 20 bp, Artificial Sequence
  Description of Artificial Sequence: Synthetic oligonucleotide
  Target: SCNA; (-) strand; PAM type: NNAGAAW; PAM sequence: GAAGAAT
ggtagattttaaaattctga

SEQ ID NO: 6455 - DNA, 20 bp, Artificial Sequence
  Description of Artificial Sequence: Synthetic oligonucleotide
  Target: SCNA; (-) strand; PAM type: NNAGAAW; PAM sequence: AAAGAAT
aaggaacagtgacatttcag

SEQ ID NO: 6456 - DNA, 20 bp, Artificial Sequence
  Description of Artificial Sequence: Synthetic oligonucleotide
  Target: SCNA; (-) strand; PAM type: NNAGAAW; PAM sequence: TCAGAAA
gccaaaggaacagtgacatt

SEQ ID NO: 6457 - DNA, 20 bp, Artificial Sequence
  Description of Artificial Sequence: Synthetic oligonucleotide
  Target: SCNA; (-) strand; PAM type: NNAGAAW; PAM sequence: GAAGAAA
tatgattgtttcaatttctg

SEQ ID NO: 6458 - DNA, 20 bp, Artificial Sequence
  Description of Artificial Sequence: Synthetic oligonucleotide
  Target: SCNA; (-) strand; PAM type: NNAGAAW; PAM sequence: TAAGAAT
ttcaaatataactgcacctg

SEQ ID NO: 6459 - DNA, 20 bp, Artificial Sequence
  Description of Artificial Sequence: Synthetic oligonucleotide
  Target: SCNA; (-) strand; PAM type: NNAGAAW; PAM sequence: AAAGAAA
gattggcactgaattgaaat

SEQ ID NO: 6460 - DNA, 20 bp, Artificial Sequence
  Description of Artificial Sequence: Synthetic oligonucleotide
  Target: SCNA; (-) strand; PAM type: NNAGAAW; PAM sequence: CAAGAAT
ttgcattccagcctgaacaa

SEQ ID NO: 6461 - DNA, 20 bp, Artificial Sequence
  Description of Artificial Sequence: Synthetic oligonucleotide
  Target: SCNA; (-) strand; PAM type: NNAGAAW; PAM sequence: GGAGAAT
ctactcgggagactgaggca

SEQ ID NO: 6462 - DNA, 20 bp, Artificial Sequence
  Description of Artificial Sequence: Synthetic oligonucleotide
  Target: SCNA; (-) strand; PAM type: NNAGAAW; PAM sequence: AAAGAAA
tatctcattttgttttatga

SEQ ID NO: 6463 - DNA, 20 bp, Artificial Sequence
  Description of Artificial Sequence: Synthetic oligonucleotide
  Target: SCNA; (-) strand; PAM type: NNAGAAW; PAM sequence: CAAGAAA
ttctggcttatttaactgaa

SEQ ID NO: 6464 - DNA, 20 bp, Artificial Sequence
  Description of Artificial Sequence: Synthetic oligonucleotide
  Target: SCNA; (-) strand; PAM type: NNAGAAW; PAM sequence: CAAGAAA
ctggggagtacaaagcatgt

SEQ ID NO: 6465 - DNA, 20 bp, Artificial Sequence
  Description of Artificial Sequence: Synthetic oligonucleotide
  Target: SCNA; (-) strand; PAM type: NNAGAAW; PAM sequence: GGAGAAT
ctgctggggaggctgaggca

SEQ ID NO: 6466 - DNA, 20 bp, Artificial Sequence
  Description of Artificial Sequence: Synthetic oligonucleotide
  Target: SCNA; (-) strand; PAM type: NNAGAAW; PAM sequence: GGAGAAA
gcccacattgcctgtactaa

SEQ ID NO: 6467 - DNA, 20 bp, Artificial Sequence
  Description of Artificial Sequence: Synthetic oligonucleotide
  Target: SCNA; (-) strand; PAM type: NNAGAAW; PAM sequence: TCAGAAA
atttttaaaggatcaacatt

SEQ ID NO: 6468 - DNA, 20 bp, Artificial Sequence
  Description of Artificial Sequence: Synthetic oligonucleotide
  Target: SCNA; (-) strand; PAM type: NNAGAAW; PAM sequence: CAAGAAA
ctcgctttgagattttataa

SEQ ID NO: 6469 - DNA, 20 bp, Artificial Sequence
  Description of Artificial Sequence: Synthetic oligonucleotide
  Target: SCNA; (-) strand; PAM type: NNAGAAW; PAM sequence: ACAGAAA
ctactagagaaatcagttct

SEQ ID NO: 6470 - DNA, 20 bp, Artificial Sequence
  Description of Artificial Sequence: Synthetic oligonucleotide
  Target: SCNA; (-) strand; PAM type: NNAGAAW; PAM sequence: AGAGAAA
aggtcagcagagaccctact

SEQ ID NO: 6471 - DNA, 20 bp, Artificial Sequence
  Description of Artificial Sequence: Synthetic oligonucleotide
  Target: SCNA; (-) strand; PAM type: NNAGAAW; PAM sequence: GCAGAAT
ataatataaagaaaaataaa

SEQ ID NO: 6472 - DNA, 20 bp, Artificial Sequence
  Description of Artificial Sequence: Synthetic oligonucleotide
  Target: SCNA; (-) strand; PAM type: NNAGAAW; PAM sequence: AAAGAAA
tatctactatgaaataatat

SEQ ID NO: 6473 - DNA, 20 bp, Artificial Sequence
  Description of Artificial Sequence: Synthetic oligonucleotide
  Target: SCNA; (-) strand; PAM type: NNAGAAW; PAM sequence: AAAGAAA
ttttcatgcaagtatagtat

SEQ ID NO: 6474 - DNA, 20 bp, Artificial Sequence
  Description of Artificial Sequence: Synthetic oligonucleotide
  Target: SCNA; (-) strand; PAM type: NNAGAAW; PAM sequence: ATAGAAA
tcaacttaatgcatcatatt

SEQ ID NO: 6475 - DNA, 20 bp, Artificial Sequence
  Description of Artificial Sequence: Synthetic oligonucleotide
  Target: SCNA; (-) strand; PAM type: NNAGAAW; PAM sequence: GGAGAAA
ttttttttcggtggggcagg

SEQ ID NO: 6476 - DNA, 20 bp, Artificial Sequence
  Description of Artificial Sequence: Synthetic oligonucleotide
  Target: SCNA; (-) strand; PAM type: NNAGAAW; PAM sequence: AAAGAAA
taatattatcttctaatatt

SEQ ID NO: 6477 - DNA, 20 bp, Artificial Sequence
  Description of Artificial Sequence: Synthetic oligonucleotide
  Target: SCNA; (-) strand; PAM type: NNAGAAW; PAM sequence: CAAGAAA
caagtcttaatgcagggaaa

SEQ ID NO: 6478 - DNA, 20 bp, Artificial Sequence
  Description of Artificial Sequence: Synthetic oligonucleotide
  Target: SCNA; (-) strand; PAM type: NNAGAAW; PAM sequence: GGAGAAT
acttcaatggttaaagagag

SEQ ID NO: 6479 - DNA, 20 bp, Artificial Sequence
  Description of Artificial Sequence: Synthetic oligonucleotide
  Target: SCNA; (-) strand; PAM type: NNAGAAW; PAM sequence: GAAGAAA
gtgcttaagtctaattatga

SEQ ID NO: 6480 - DNA, 20 bp, Artificial Sequence
  Description of Artificial Sequence: Synthetic oligonucleotide
  Target: SCNA; (-) strand; PAM type: NNAGAAW; PAM sequence: TGAGAAA
tgtcataactagtatggcta

SEQ ID NO: 6481 - DNA, 20 bp, Artificial Sequence
  Description of Artificial Sequence: Synthetic oligonucleotide
  Target: SCNA; (-) strand; PAM type: NNAGAAW; PAM sequence: ACAGAAA
ttgaatgaaactagtgttcc

SEQ ID NO: 6482 - DNA, 20 bp, Artificial Sequence
  Description of Artificial Sequence: Synthetic oligonucleotide
  Target: SCNA; (-) strand; PAM type: NNAGAAW; PAM sequence: AAAGAAA
aatctgagatgtcctacagt

SEQ ID NO: 6483 - DNA, 20 bp, Artificial Sequence
  Description of Artificial Sequence: Synthetic oligonucleotide
  Target: SCNA; (-) strand; PAM type: NNAGAAW; PAM sequence: CCAGAAT
ctgcatttttttagtctttt

SEQ ID NO: 6484 - DNA, 20 bp, Artificial Sequence
  Description of Artificial Sequence: Synthetic oligonucleotide
  Target: SCNA; (-) strand; PAM type: NNAGAAW; PAM sequence: TTAGAAA
tgaggaagaacccatgaggt

SEQ ID NO: 6485 - DNA, 20 bp, Artificial Sequence
  Description of Artificial Sequence: Synthetic oligonucleotide
  Target: SCNA; (-) strand; PAM type: NNAGAAW; PAM sequence: GGAGAAA
gcaacatttttacaactagt

SEQ ID NO: 6486 - DNA, 20 bp, Artificial Sequence
  Description of Artificial Sequence: Synthetic oligonucleotide
  Target: SCNA; (-) strand; PAM type: NNAGAAW; PAM sequence: TCAGAAA
tggtgaagcaaaagatataa

SEQ ID NO: 6487 - DNA, 20 bp, Artificial Sequence
  Description of Artificial Sequence: Synthetic oligonucleotide
  Target: SCNA; (-) strand; PAM type: NNAGAAW; PAM sequence: AGAGAAA
aggatgagagtgccagaaat

SEQ ID NO: 6488 - DNA, 20 bp, Artificial Sequence
  Description of Artificial Sequence: Synthetic oligonucleotide
  Target: SCNA; (-) strand; PAM type: NNAGAAW; PAM sequence: CCAGAAA
ggaagatgaggatgagagtg

SEQ ID NO: 6489 - DNA, 20 bp, Artificial Sequence
  Description of Artificial Sequence: Synthetic oligonucleotide
  Target: SCNA; (-) strand; PAM type: NNAGAAW; PAM sequence: CAAGAAA
aagtcaattaggtttacaat

SEQ ID NO: 6490 - DNA, 20 bp, Artificial Sequence
  Description of Artificial Sequence: Synthetic oligonucleotide
  Target: SCNA; (-) strand; PAM type: NNAGAAW; PAM sequence: CGAGAAT
ttcatttggcctaaatttac

SEQ ID NO: 6491 - DNA, 20 bp, Artificial Sequence
  Description of Artificial Sequence: Synthetic oligonucleotide
  Target: SCNA; (-) strand; PAM type: NNAGAAW; PAM sequence: CAAGAAT
taaataaaaaatatacttgc

SEQ ID NO: 6492 - DNA, 20 bp, Artificial Sequence
  Description of Artificial Sequence: Synthetic oligonucleotide
  Target: SCNA; (-) strand; PAM type: NNAGAAW; PAM sequence: GAAGAAA
ttagtaatgttcaaggtttg

SEQ ID NO: 6493 - DNA, 20 bp, Artificial Sequence
  Description of Artificial Sequence: Synthetic oligonucleotide
  Target: SCNA; (-) strand; PAM type: NNAGAAW; PAM sequence: ACAGAAA
ttcaaatcattacataaata

SEQ ID NO: 6494 - DNA, 20 bp, Artificial Sequence
  Description of Artificial Sequence: Synthetic oligonucleotide
  Target: SCNA; (-) strand; PAM type: NNAGAAW; PAM sequence: TTAGAAT
tctatctcattgtctttgat

SEQ ID NO: 6495 - DNA, 20 bp, Artificial Sequence
  Description of Artificial Sequence: Synthetic oligonucleotide
  Target: SCNA; (-) strand; PAM type: NNAGAAW; PAM sequence: ACAGAAT
gtatatcaccctacagtact

SEQ ID NO: 6496 - DNA, 20 bp, Artificial Sequence
  Description of Artificial Sequence: Synthetic oligonucleotide
  Target: SCNA; (-) strand; PAM type: NNAGAAW; PAM sequence: CCAGAAT
attgtatataattgtgggat

SEQ ID NO: 6497 - DNA, 20 bp, Artificial Sequence
  Description of Artificial Sequence: Synthetic oligonucleotide
  Target: SCNA; (-) strand; PAM type: NNAGAAW; PAM sequence: AAAGAAA
actcttgataagttttttac

SEQ ID NO: 6498 - DNA, 20 bp, Artificial Sequence
  Description of Artificial Sequence: Synthetic oligonucleotide
  Target: SCNA; (-) strand; PAM type: NNAGAAW; PAM sequence: TTAGAAT
ctcaaactcctaattcaaat

SEQ ID NO: 6499 - DNA, 20 bp, Artificial Sequence
  Description of Artificial Sequence: Synthetic oligonucleotide
  Target: SCNA; (-) strand; PAM type: NNAGAAW; PAM sequence: CAAGAAA
taatataaatgcaataaata

SEQ ID NO: 6500 - DNA, 20 bp, Artificial Sequence
  Description of Artificial Sequence: Synthetic oligonucleotide
  Target: SCNA; (-) strand; PAM type: NNAGAAW; PAM sequence: GCAGAAA
aattagatctaaatccaaaa

SEQ ID NO: 6501 - DNA, 20 bp, Artificial Sequence
  Description of Artificial Sequence: Synthetic oligonucleotide
  Target: SCNA; (-) strand; PAM type: NNAGAAW; PAM sequence: TCAGAAA
caaaaatttcttcaaatgac

SEQ ID NO: 6502 - DNA, 20 bp, Artificial Sequence
  Description of Artificial Sequence: Synthetic oligonucleotide
  Target: SCNA; (-) strand; PAM type: NNAGAAW; PAM sequence: TAAGAAT
aaagtaatctcattccttta

SEQ ID NO: 6503 - DNA, 20 bp, Artificial Sequence
  Description of Artificial Sequence: Synthetic oligonucleotide
  Target: SCNA; (-) strand; PAM type: NNAGAAW; PAM sequence: TAAGAAA
gatgtttggtagaagcctca

SEQ ID NO: 6504 - DNA, 20 bp, Artificial Sequence
  Description of Artificial Sequence: Synthetic oligonucleotide
  Target: SCNA; (-) strand; PAM type: NNAGAAW; PAM sequence: TTAGAAA
tgattagtaaaaaatatgat

SEQ ID NO: 6505 - DNA, 20 bp, Artificial Sequence
  Description of Artificial Sequence: Synthetic oligonucleotide
  Target: SCNA; (-) strand; PAM type: NNAGAAW; PAM sequence: AAAGAAA
agtgataccctgtctaaaaa

SEQ ID NO: 6506 - DNA, 20 bp, Artificial Sequence
  Description of Artificial Sequence: Synthetic oligonucleotide
  Target: SCNA; (-) strand; PAM type: NNAGAAW; PAM sequence: ACAGAAT
attgagagttgaacttacac

SEQ ID NO: 6507 - DNA, 20 bp, Artificial Sequence
  Description of Artificial Sequence: Synthetic oligonucleotide
  Target: SCNA; (-) strand; PAM type: NNAGAAW; PAM sequence: TCAGAAA
ttctaccttaaaacatattt

SEQ ID NO: 6508 - DNA, 20 bp, Artificial Sequence
  Description of Artificial Sequence: Synthetic oligonucleotide
  Target: SCNA; (-) strand; PAM type: NNAGAAW; PAM sequence: AAAGAAA
ccgtctatgtctgcaaagtg

SEQ ID NO: 6509 - DNA, 20 bp, Artificial Sequence
  Description of Artificial Sequence: Synthetic oligonucleotide
  Target: SCNA; (-) strand; PAM type: NNAGAAW; PAM sequence: AAAGAAT
accactttgaattccttgga

SEQ ID NO: 6510 - DNA, 20 bp, Artificial Sequence
  Description of Artificial Sequence: Synthetic oligonucleotide
  Target: SCNA; (-) strand; PAM type: NNAGAAW; PAM sequence: AAAGAAA
gacacacatactaaaagaat

SEQ ID NO: 6511 - DNA, 20 bp, Artificial Sequence
  Description of Artificial Sequence: Synthetic oligonucleotide
  Target: SCNA; (-) strand; PAM type: NNAGAAW; PAM sequence: AAAGAAT
atcaaatgacacacatacta

SEQ ID NO: 6512 - DNA, 20 bp, Artificial Sequence
  Description of Artificial Sequence: Synthetic oligonucleotide
  Target: SCNA; (-) strand; PAM type: NNAGAAW; PAM sequence: TCAGAAA
tgagggctgctactaatctc

SEQ ID NO: 6513 - DNA, 20 bp, Artificial Sequence
  Description of Artificial Sequence: Synthetic oligonucleotide
  Target: SCNA; (-) strand; PAM type: NNAGAAW; PAM sequence: AGAGAAA
tctctgtgaacactgaggac

SEQ ID NO: 6514 - DNA, 20 bp, Artificial Sequence
  Description of Artificial Sequence: Synthetic oligonucleotide
  Target: SCNA; (-) strand; PAM type: NNAGAAW; PAM sequence: TAAGAAT
aaaataatcaagaatattct

SEQ ID NO: 6515 - DNA, 20 bp, Artificial Sequence
  Description of Artificial Sequence: Synthetic oligonucleotide
  Target: SCNA; (-) strand; PAM type: NNAGAAW; PAM sequence: CAAGAAT
atagtcttttaaaaaataat

SEQ ID NO: 6516 - DNA, 20 bp, Artificial Sequence
  Description of Artificial Sequence: Synthetic oligonucleotide
  Target: SCNA; (-) strand; PAM type: NNAGAAW; PAM sequence: TGAGAAA
gagggagttgtggctgctgc

SEQ ID NO: 6517 - DNA, 20 bp, Artificial Sequence
  Description of Artificial Sequence: Synthetic oligonucleotide
  Target: SCNA; (-) strand; PAM type: NNAGAAW; PAM sequence: GAAGAAA
ccctttcagaaggggctgaa

SEQ ID NO: 6518 - DNA, 20 bp, Artificial Sequence
  Description of Artificial Sequence: Synthetic oligonucleotide
  Target: SCNA; (-) strand; PAM type: NNAGAAW; PAM sequence: TCAGAAA
agggcaacgagaatcagaag

SEQ ID NO: 6519 - DNA, 20 bp, Artificial Sequence
  Description of Artificial Sequence: Synthetic oligonucleotide
  Target: SCNA; (-) strand; PAM type: NNAGAAW; PAM sequence: CGAGAAT
ggtgtcaattctgagggcaa

SEQ ID NO: 6520 - DNA, 20 bp, Artificial Sequence
  Description of Artificial Sequence: Synthetic oligonucleotide
  Target: SCNA; (-) strand; PAM type: NNAGAAW; PAM sequence: AGAGAAA
tgcgtgtggtgggtgggggg

SEQ ID NO: 6521 - DNA, 20 bp, Artificial Sequence
  Description of Artificial Sequence: Synthetic oligonucleotide
  Target: SCNA; (-) strand; PAM type: NNAGAAW; PAM sequence: ACAGAAA
ctaatcttccgaatccaggc

SEQ ID NO: 6522 - DNA, 20 bp, Artificial Sequence
  Description of Artificial Sequence: Synthetic oligonucleotide
  Target: SCNA; (-) strand; PAM type: NNAGAAW; PAM sequence: CAAGAAT
tttcagaacccaaattagcg

SEQ ID NO: 6523 - DNA, 20 bp, Artificial Sequence
  Description of Artificial Sequence: Synthetic oligonucleotide
  Target: SCNA; (-) strand; PAM type: NNAGAAW; PAM sequence: AAAGAAA
ttaatctcctaatttacaaa

SEQ ID NO: 6524 - DNA, 20 bp, Artificial Sequence
  Description of Artificial Sequence: Synthetic oligonucleotide
  Target: SCNA; (-) strand; PAM type: NNAGAAW; PAM sequence: AAAGAAT
gtaaattacactgcaatttt

SEQ ID NO: 6525 - DNA, 20 bp, Artificial Sequence
  Description of Artificial Sequence: Synthetic oligonucleotide
  Target: SCNA; (-) strand; PAM type: NNAGAAW; PAM sequence: CTAGAAT
gattagatctttatgacatt

SEQ ID NO: 6526 - DNA, 20 bp, Artificial Sequence
  Description of Artificial Sequence: Synthetic oligonucleotide
  Target: SCNA; (-) strand; PAM type: NNAGAAW; PAM sequence: AAAGAAA
tatactattaacagtagtaa

SEQ ID NO: 6527 - DNA, 20 bp, Artificial Sequence
  Description of Artificial Sequence: Synthetic oligonucleotide
  Target: SCNA; (-) strand; PAM type: NNAGAAW; PAM sequence: CCAGAAA
tttataagaagtgcaactgt

SEQ ID NO: 6528 - DNA, 20 bp, Artificial Sequence
  Description of Artificial Sequence: Synthetic oligonucleotide
  Target: SCNA; (-) strand; PAM type: NNAGAAW; PAM sequence: ATAGAAA
ccctattgaggaataccaat

SEQ ID NO: 6529 - DNA, 20 bp, Artificial Sequence
  Description of Artificial Sequence: Synthetic oligonucleotide
  Target: SCNA; (-) strand; PAM type: NNAGAAW; PAM sequence: TAAGAAA
ttttctttttttgtaggtag

SEQ ID NO: 6530 - DNA, 20 bp, Artificial Sequence
  Description of Artificial Sequence: Synthetic oligonucleotide
  Target: SCNA; (-) strand; PAM type: NNAGAAW; PAM sequence: TAAGAAT
cttgagcagctttccctcct

SEQ ID NO: 6531 - DNA, 20 bp, Artificial Sequence
  Description of Artificial Sequence: Synthetic oligonucleotide
  Target: SCNA; (-) strand; PAM type: NNAGAAW; PAM sequence: AAAGAAA
atgctgtccatcaataatga

SEQ ID NO: 6532 - DNA, 20 bp, Artificial Sequence
  Description of Artificial Sequence: Synthetic oligonucleotide
  Target: SCNA; (-) strand; PAM type: NNAGAAW; PAM sequence: ACAGAAT
catgaatattgtagttatga

SEQ ID NO: 6533 - DNA, 20 bp, Artificial Sequence
  Description of Artificial Sequence: Synthetic oligonucleotide
  Target: SCNA; (-) strand; PAM type: NNAGAAW; PAM sequence: AGAGAAA
atttatatttcacttagcaa

SEQ ID NO: 6534 - DNA, 20 bp, Artificial Sequence
  Description of Artificial Sequence: Synthetic oligonucleotide
  Target: SCNA; (-) strand; PAM type: NNAGAAW; PAM sequence: AAAGAAT
taatgaattaaatccagata

SEQ ID NO: 6535 - DNA, 20 bp, Artificial Sequence
  Description of Artificial Sequence: Synthetic oligonucleotide
  Target: SCNA; (-) strand; PAM type: NNAGAAW; PAM sequence: ATAGAAT
ctaggttaagcatatatttc

SEQ ID NO: 6536 - DNA, 20 bp, Artificial Sequence
  Description of Artificial Sequence: Synthetic oligonucleotide
  Target: SCNA; (-) strand; PAM type: NNAGAAW; PAM sequence: AGAGAAT
ggtgagaggaaggtgcagat

SEQ ID NO: 6537 - DNA, 20 bp, Artificial Sequence
  Description of Artificial Sequence: Synthetic oligonucleotide
  Target: SCNA; (-) strand; PAM type: NNAGAAW; PAM sequence: AGAGAAT
gttggccatggggtcaaatt

SEQ ID NO: 6538 - DNA, 20 bp, Artificial Sequence
  Description of Artificial Sequence: Synthetic oligonucleotide
  Target: SCNA; (-) strand; PAM type: NNAGAAW; PAM sequence: TGAGAAA
atatcatgcccattttttaa

SEQ ID NO: 6539 - DNA, 20 bp, Artificial Sequence
  Description of Artificial Sequence: Synthetic oligonucleotide
  Target: SCNA; (-) strand; PAM type: NNAGAAW; PAM sequence: AGAGAAA
ttgtaactcgcacattaggg

SEQ ID NO: 6540 - DNA, 20 bp, Artificial Sequence
  Description of Artificial Sequence: Synthetic oligonucleotide
  Target: SCNA; (-) strand; PAM type: NNAGAAW; PAM sequence: TAAGAAA
cttttgaaagaaacaaggtt

(The sequence listing continues in the following parts.)
